United States Patent Application Publication US 2026/0062450 A1 - sequence listing, part 3

SEQ ID NO: 72783 - protein, 10 aa, synthetic construct
AFLRGDRGVV

SEQ ID NO: 72784 - protein, 10 aa, synthetic construct
EAYRGDYTSV

SEQ ID NO: 72785 - protein, 10 aa, synthetic construct
EAYRGDLTVT

SEQ ID NO: 72786 - protein, 10 aa, synthetic construct
EAYRGDLIGR

SEQ ID NO: 72787 - protein, 10 aa, synthetic construct
EANRGDRDYL

SEQ ID NO: 72788 - protein, 10 aa, synthetic construct
EANRGDYTSV

SEQ ID NO: 72789 - protein, 10 aa, synthetic construct
EANRGDLTVT

SEQ ID NO: 72790 - protein, 10 aa, synthetic construct
EANRGDLIGR

SEQ ID NO: 72791 - protein, 10 aa, synthetic construct
EAQRGDYNSL

SEQ ID NO: 72792 - protein, 10 aa, synthetic construct
EAQRGDYTSV

SEQ ID NO: 72793 - protein, 10 aa, synthetic construct
EAQRGDYTSM

SEQ ID NO: 72794 - protein, 10 aa, synthetic construct
AFRRGDRGVV

SEQ ID NO: 72795 - protein, 10 aa, synthetic construct
EAQRGDFQNT

SEQ ID NO: 72796 - protein, 10 aa, synthetic construct
EADRGDYNSL

SEQ ID NO: 72797 - protein, 10 aa, synthetic construct
EADRGDYTSV

SEQ ID NO: 72798 - protein, 10 aa, synthetic construct
EADRGDYTSM

SEQ ID NO: 72799 - protein, 10 aa, synthetic construct
EADRGDFQNT

SEQ ID NO: 72800 - protein, 10 aa, synthetic construct
EAERGDYNSL

SEQ ID NO: 72801 - protein, 10 aa, synthetic construct
EAERGDYTSV

SEQ ID NO: 72802 - protein, 10 aa, synthetic construct
EAERGDYTSM

SEQ ID NO: 72803 - protein, 10 aa, synthetic construct
EAERGDFQNT

SEQ ID NO: 72804 - protein, 10 aa, synthetic construct
EVGRGDFNNT

SEQ ID NO: 72805 - protein, 10 aa, synthetic construct
AFSRGDRGVV

SEQ ID NO: 72806 - protein, 10 aa, synthetic construct
EVGRGDFNNL

SEQ ID NO: 72807 - protein, 10 aa, synthetic construct
EVARGDFNNT

SEQ ID NO: 72808 - protein, 10 aa, synthetic construct
EVARGDFNNL

SEQ ID NO: 72809 - protein, 10 aa, synthetic construct
EVVRGDYNSL

SEQ ID NO: 72810 - protein, 10 aa, synthetic construct
EVVRGDYTSM

SEQ ID NO: 72811 - protein, 10 aa, synthetic construct
EVVRGDFQNT

SEQ ID NO: 72812 - protein, 10 aa, synthetic construct
EVPRGDFNNT

SEQ ID NO: 72813 - protein, 10 aa, synthetic construct
EVPRGDFNNL

SEQ ID NO: 72814 - protein, 10 aa, synthetic construct
EVLRGDYNSL

SEQ ID NO: 72815 - protein, 10 aa, synthetic construct
EVLRGDYTSM

SEQ ID NO: 72816 - protein, 10 aa, synthetic construct
AKGRGDRGVV

SEQ ID NO: 72817 - protein, 10 aa, synthetic construct
EVLRGDFQNT

SEQ ID NO: 72818 - protein, 10 aa, synthetic construct
EVIRGDYTSV

SEQ ID NO: 72819 - protein, 10 aa, synthetic construct
EVIRGDLIGR

SEQ ID NO: 72820 - protein, 10 aa, synthetic construct
EVMRGDYTSV

SEQ ID NO: 72821 - protein, 10 aa, synthetic construct
EVMRGDLIGR

SEQ ID NO: 72822 - protein, 10 aa, synthetic construct
EVWRGDYNSL

SEQ ID NO: 72823 - protein, 10 aa, synthetic construct
EVWRGDYTSM

SEQ ID NO: 72824 - protein, 10 aa, synthetic construct
EVWRGDFQNT

SEQ ID NO: 72825 - protein, 10 aa, synthetic construct
EVFRGDYTSV

SEQ ID NO: 72826 - protein, 10 aa, synthetic construct
EVFRGDLIGR

SEQ ID NO: 72827 - protein, 10 aa, synthetic construct
AKARGDRGVV

SEQ ID NO: 72828 - protein, 10 aa, synthetic construct
EVKRGDYTSV

SEQ ID NO: 72829 - protein, 10 aa, synthetic construct
EVKRGDLIGR

SEQ ID NO: 72830 - protein, 10 aa, synthetic construct
EVRRGDFNNT

SEQ ID NO: 72831 - protein, 10 aa, synthetic construct
EVRRGDFNNL

SEQ ID NO: 72832 - protein, 10 aa, synthetic construct
EVHRGDYNSL

SEQ ID NO: 72833 - protein, 10 aa, synthetic construct
EVHRGDYTSM

SEQ ID NO: 72834 - protein, 10 aa, synthetic construct
EVHRGDFQNT

SEQ ID NO: 72835 - protein, 10 aa, synthetic construct
EVSRGDYNSL

SEQ ID NO: 72836 - protein, 10 aa, synthetic construct
EVSRGDYTSM

SEQ ID NO: 72837 - protein, 10 aa, synthetic construct
EVSRGDFQNT

SEQ ID NO: 72838 - protein, 10 aa, synthetic construct
AKVRGDRGVV

SEQ ID NO: 72839 - protein, 10 aa, synthetic construct
EVTRGDYNSL

SEQ ID NO: 72840 - protein, 10 aa, synthetic construct
EVTRGDYTSM

SEQ ID NO: 72841 - protein, 10 aa, synthetic construct
EVTRGDFQNT

SEQ ID NO: 72842 - protein, 10 aa, synthetic construct
EVYRGDYTSV

SEQ ID NO: 72843 - protein, 10 aa, synthetic construct
EVYRGDLIGR

SEQ ID NO: 72844 - protein, 10 aa, synthetic construct
EVNRGDYTSV

SEQ ID NO: 72845 - protein, 10 aa, synthetic construct
EVNRGDLIGR

SEQ ID NO: 72846 - protein, 10 aa, synthetic construct
EVQRGDYNSL

SEQ ID NO: 72847 - protein, 10 aa, synthetic construct
EVQRGDYTSM

SEQ ID NO: 72848 - protein, 10 aa, synthetic construct
EVQRGDFQNT

SEQ ID NO: 72849 - protein, 10 aa, synthetic construct
SKNRGDRGVV

SEQ ID NO: 72850 - protein, 10 aa, synthetic construct
TSPRGDLIGR

SEQ ID NO: 72851 - protein, 10 aa, synthetic construct
AKPRGDRGVV

SEQ ID NO: 72852 - protein, 10 aa, synthetic construct
EVDRGDYNSL

SEQ ID NO: 72853 - protein, 10 aa, synthetic construct
EVDRGDYTSM

SEQ ID NO: 72854 - protein, 10 aa, synthetic construct
EVDRGDFQNT

SEQ ID NO: 72855 - protein, 10 aa, synthetic construct
EVERGDYNSL

SEQ ID NO: 72856 - protein, 10 aa, synthetic construct
EVERGDYTSM

SEQ ID NO: 72857 - protein, 10 aa, synthetic construct
EVERGDFQNT

SEQ ID NO: 72858 - protein, 10 aa, synthetic construct
EPGRGDYNSL

SEQ ID NO: 72859 - protein, 10 aa, synthetic construct
EPGRGDFNNT

SEQ ID NO: 72860 - protein, 10 aa, synthetic construct
EPGRGDFNNL

SEQ ID NO: 72861 - protein, 10 aa, synthetic construct
EPGRGDFQNT

SEQ ID NO: 72862 - protein, 10 aa, synthetic construct
AKLRGDRGVV

SEQ ID NO: 72863 - protein, 10 aa, synthetic construct
EPARGDYNSL

SEQ ID NO: 72864 - protein, 10 aa, synthetic construct
EPARGDFNNT

SEQ ID NO: 72865 - protein, 10 aa, synthetic construct
EPARGDFNNL

SEQ ID NO: 72866 - protein, 10 aa, synthetic construct
EPARGDFQNT

SEQ ID NO: 72867 - protein, 10 aa, synthetic construct
EPVRGDYNSL

SEQ ID NO: 72868 - protein, 10 aa, synthetic construct
EPVRGDYTSV

SEQ ID NO: 72869 - protein, 10 aa, synthetic construct
EPVRGDYTSM

SEQ ID NO: 72870 - protein, 10 aa, synthetic construct
EPVRGDFQNT

SEQ ID NO: 72871 - protein, 10 aa, synthetic construct
EPPRGDYNSL

SEQ ID NO: 72872 - protein, 10 aa, synthetic construct
EPPRGDFNNT

SEQ ID NO: 72873 - protein, 10 aa, synthetic construct
AKRRGDRGVV

SEQ ID NO: 72874 - protein, 10 aa, synthetic construct
EPPRGDFNNL

SEQ ID NO: 72875 - protein, 10 aa, synthetic construct
EPPRGDFQNT

SEQ ID NO: 72876 - protein, 10 aa, synthetic construct
EPLRGDYNSL

SEQ ID NO: 72877 - protein, 10 aa, synthetic construct
EPLRGDYTSV

SEQ ID NO: 72878 - protein, 10 aa, synthetic construct
EPLRGDYTSM

SEQ ID NO: 72879 - protein, 10 aa, synthetic construct
EPLRGDFQNT

SEQ ID NO: 72880 - protein, 10 aa, synthetic construct
EPIRGDRDYL

SEQ ID NO: 72881 - protein, 10 aa, synthetic construct
EPIRGDYTSV

SEQ ID NO: 72882 - protein, 10 aa, synthetic construct
EPIRGDLTVT

SEQ ID NO: 72883 - protein, 10 aa, synthetic construct
EPIRGDLIGR

SEQ ID NO: 72884 - protein, 10 aa, synthetic construct
AKSRGDRGVV

SEQ ID NO: 72885 - protein, 10 aa, synthetic construct
EPMRGDRDYL

SEQ ID NO: 72886 - protein, 10 aa, synthetic construct
EPMRGDYTSV

SEQ ID NO: 72887 - protein, 10 aa, synthetic construct
EPMRGDLTVT

SEQ ID NO: 72888 - protein, 10 aa, synthetic construct
EPMRGDLIGR

SEQ ID NO: 72889 - protein, 10 aa, synthetic construct
EPWRGDYNSL

SEQ ID NO: 72890 - protein, 10 aa, synthetic construct
EPWRGDYTSV

SEQ ID NO: 72891 - protein, 10 aa, synthetic construct
EPWRGDYTSM

SEQ ID NO: 72892 - protein, 10 aa, synthetic construct
EPWRGDFQNT

SEQ ID NO: 72893 - protein, 10 aa, synthetic construct
EPFRGDRDYL

SEQ ID NO: 72894 - protein, 10 aa, synthetic construct
EPFRGDYTSV

SEQ ID NO: 72895 - protein, 10 aa, synthetic construct
ARGRGDRDYL

SEQ ID NO: 72896 - protein, 10 aa, synthetic construct
EPFRGDLTVT

SEQ ID NO: 72897 - protein, 10 aa, synthetic construct
EPFRGDLIGR

SEQ ID NO: 72898 - protein, 10 aa, synthetic construct
EPKRGDRDYL

SEQ ID NO: 72899 - protein, 10 aa, synthetic construct
EPKRGDYTSV

SEQ ID NO: 72900 - protein, 10 aa, synthetic construct
EPKRGDLTVT

SEQ ID NO: 72901 - protein, 10 aa, synthetic construct
EPKRGDLIGR

SEQ ID NO: 72902 - protein, 10 aa, synthetic construct
EPRRGDYNSL

SEQ ID NO: 72903 - protein, 10 aa, synthetic construct
EPRRGDFNNT

SEQ ID NO: 72904 - protein, 10 aa, synthetic construct
EPRRGDFNNL

SEQ ID NO: 72905 - protein, 10 aa, synthetic construct
EPRRGDFQNT

SEQ ID NO: 72906 - protein, 10 aa, synthetic construct
ARGRGDYVGL

SEQ ID NO: 72907 - protein, 10 aa, synthetic construct
EPHRGDYNSL

SEQ ID NO: 72908 - protein, 10 aa, synthetic construct
EPHRGDYTSV

SEQ ID NO: 72909 - protein, 10 aa, synthetic construct
EPHRGDYTSM

SEQ ID NO: 72910 - protein, 10 aa, synthetic construct
EPHRGDFQNT

SEQ ID NO: 72911 - protein, 10 aa, synthetic construct
EPSRGDYNSL

SEQ ID NO: 72912 - protein, 10 aa, synthetic construct
EPSRGDYTSV

SEQ ID NO: 72913 - protein, 10 aa, synthetic construct
EPSRGDYTSM

SEQ ID NO: 72914 - protein, 10 aa, synthetic construct
EPSRGDFQNT

SEQ ID NO: 72915 - protein, 10 aa, synthetic construct
EPTRGDYNSL

SEQ ID NO: 72916 - protein, 10 aa, synthetic construct
EPTRGDYTSV

SEQ ID NO: 72917 - protein, 10 aa, synthetic construct
ARGRGDQSTL

SEQ ID NO: 72918 - protein, 10 aa, synthetic construct
EPTRGDYTSM

SEQ ID NO: 72919 - protein, 10 aa, synthetic construct
EPTRGDFQNT

SEQ ID NO: 72920 - protein, 10 aa, synthetic construct
EPYRGDRDYL

SEQ ID NO: 72921 - protein, 10 aa, synthetic construct
EPYRGDYTSV

SEQ ID NO: 72922 - protein, 10 aa, synthetic construct
EPYRGDLTVT

SEQ ID NO: 72923 - protein, 10 aa, synthetic construct
EPYRGDLIGR

SEQ ID NO: 72924 - protein, 10 aa, synthetic construct
EPNRGDRDYL

SEQ ID NO: 72925 - protein, 10 aa, synthetic construct
EPNRGDYTSV

SEQ ID NO: 72926 - protein, 10 aa, synthetic construct
EPNRGDLTVT

SEQ ID NO: 72927 - protein, 10 aa, synthetic construct
EPNRGDLIGR

SEQ ID NO: 72928 - protein, 10 aa, synthetic construct
ARARGDRDYL

SEQ ID NO: 72929 - protein, 10 aa, synthetic construct
EPQRGDYNSL

SEQ ID NO: 72930 - protein, 10 aa, synthetic construct
EPQRGDYTSV

SEQ ID NO: 72931 - protein, 10 aa, synthetic construct
EPQRGDYTSM

SEQ ID NO: 72932 - protein, 10 aa, synthetic construct
EPQRGDFQNT

SEQ ID NO: 72933 - protein, 10 aa, synthetic construct
EPDRGDYNSL

SEQ ID NO: 72934 - protein, 10 aa, synthetic construct
EPDRGDYTSV

SEQ ID NO: 72935 - protein, 10 aa, synthetic construct
EPDRGDYTSM

SEQ ID NO: 72936 - protein, 10 aa, synthetic construct
EPDRGDFQNT

SEQ ID NO: 72937 - protein, 10 aa, synthetic construct
EPERGDYNSL

SEQ ID NO: 72938 - protein, 10 aa, synthetic construct
EPERGDYTSV

SEQ ID NO: 72939 - protein, 10 aa, synthetic construct
ARARGDYVGL

SEQ ID NO: 72940 - protein, 10 aa, synthetic construct
EPERGDYTSM

SEQ ID NO: 72941 - protein, 10 aa, synthetic construct
EPERGDFQNT

SEQ ID NO: 72942 - protein, 10 aa, synthetic construct
ELGRGDFNNT

SEQ ID NO: 72943 - protein, 10 aa, synthetic construct
ELGRGDFNNL

SEQ ID NO: 72944 - protein, 10 aa, synthetic construct
ELARGDFNNT

SEQ ID NO: 72945 - protein, 10 aa, synthetic construct
ELARGDFNNL

SEQ ID NO: 72946 - protein, 10 aa, synthetic construct
ELVRGDYNSL

SEQ ID NO: 72947 - protein, 10 aa, synthetic construct
ELVRGDYTSM

SEQ ID NO: 72948 - protein, 10 aa, synthetic construct
ELVRGDFQNT

SEQ ID NO: 72949 - protein, 10 aa, synthetic construct
ELPRGDFNNT

SEQ ID NO: 72950 - protein, 10 aa, synthetic construct
ARARGDQSTL

SEQ ID NO: 72951 - protein, 10 aa, synthetic construct
ELPRGDFNNL

SEQ ID NO: 72952 - protein, 10 aa, synthetic construct
ELLRGDYNSL

SEQ ID NO: 72953 - protein, 10 aa, synthetic construct
ELLRGDYTSM

SEQ ID NO: 72954 - protein, 10 aa, synthetic construct
ELLRGDFQNT

SEQ ID NO: 72955 - protein, 10 aa, synthetic construct
ELIRGDYTSV

SEQ ID NO: 72956 - protein, 10 aa, synthetic construct
ELIRGDLIGR

SEQ ID NO: 72957 - protein, 10 aa, synthetic construct
ELMRGDYTSV

SEQ ID NO: 72958 - protein, 10 aa, synthetic construct
ELMRGDLIGR

SEQ ID NO: 72959 - protein, 10 aa, synthetic construct
ELWRGDYNSL

SEQ ID NO: 72960 - protein, 10 aa, synthetic construct
ELWRGDYTSM

SEQ ID NO: 72961 - protein, 10 aa, synthetic construct
ESPRGDHVNL

SEQ ID NO: 72962 - protein, 10 aa, synthetic construct
ARVRGDRDYL

SEQ ID NO: 72963 - protein, 10 aa, synthetic construct
ELWRGDFQNT

SEQ ID NO: 72964 - protein, 10 aa, synthetic construct
ELFRGDYTSV

SEQ ID NO: 72965 - protein, 10 aa, synthetic construct
ELFRGDLIGR

SEQ ID NO: 72966 - protein, 10 aa, synthetic construct
ELKRGDYTSV

SEQ ID NO: 72967 - protein, 10 aa, synthetic construct
ELKRGDLIGR

SEQ ID NO: 72968 - protein, 10 aa, synthetic construct
ELRRGDFNNT

SEQ ID NO: 72969 - protein, 10 aa, synthetic construct
ELRRGDFNNL

SEQ ID NO: 72970 - protein, 10 aa, synthetic construct
ELHRGDYNSL

SEQ ID NO: 72971 - protein, 10 aa, synthetic construct
ELHRGDYTSM

SEQ ID NO: 72972 - protein, 10 aa, synthetic construct
ELHRGDFQNT

SEQ ID NO: 72973 - protein, 10 aa, synthetic construct
ARVRGDYVGL

SEQ ID NO: 72974 - protein, 10 aa, synthetic construct
ELSRGDYNSL

SEQ ID NO: 72975 - protein, 10 aa, synthetic construct
ELSRGDYTSM

SEQ ID NO: 72976 - protein, 10 aa, synthetic construct
ELSRGDFQNT

SEQ ID NO: 72977 - protein, 10 aa, synthetic construct
ELTRGDYNSL

SEQ ID NO: 72978 - protein, 10 aa, synthetic construct
ELTRGDYTSM

SEQ ID NO: 72979 - protein, 10 aa, synthetic construct
ELTRGDFQNT

SEQ ID NO: 72980 - protein, 10 aa, synthetic construct
ELYRGDYTSV

SEQ ID NO: 72981 - protein, 10 aa, synthetic construct
ELYRGDLIGR

SEQ ID NO: 72982 - protein, 10 aa, synthetic construct
ELNRGDYTSV

SEQ ID NO: 72983 - protein, 10 aa, synthetic construct
ELNRGDLIGR

SEQ ID NO: 72984 - protein, 10 aa, synthetic construct
ARVRGDQSTL

SEQ ID NO: 72985 - protein, 10 aa, synthetic construct
ELQRGDYNSL

SEQ ID NO: 72986 - protein, 10 aa, synthetic construct
ELQRGDYTSM

SEQ ID NO: 72987 - protein, 10 aa, synthetic construct
ELQRGDFQNT

SEQ ID NO: 72988 - protein, 10 aa, synthetic construct
ELDRGDYNSL

SEQ ID NO: 72989 - protein, 10 aa, synthetic construct
ELDRGDYTSM

SEQ ID NO: 72990 - protein, 10 aa, synthetic construct
ELDRGDFQNT

SEQ ID NO: 72991 - protein, 10 aa, synthetic construct
ELERGDYNSL

SEQ ID NO: 72992 - protein, 10 aa, synthetic construct
ELERGDYTSM

SEQ ID NO: 72993 - protein, 10 aa, synthetic construct
ELERGDFQNT

SEQ ID NO: 72994 - protein, 10 aa, synthetic construct
EIGRGDRDYL

SEQ ID NO: 72995 - protein, 10 aa, synthetic construct
ARPRGDRDYL

SEQ ID NO: 72996 - protein, 10 aa, synthetic construct
EIGRGDYTSV

SEQ ID NO: 72997 - protein, 10 aa, synthetic construct
EIGRGDLTVT

SEQ ID NO: 72998 - protein, 10 aa, synthetic construct
EIGRGDLIGR

SEQ ID NO: 72999 - protein, 10 aa, synthetic construct
EIARGDRDYL

SEQ ID NO: 73000 - protein, 10 aa, synthetic construct
EIARGDYTSV

SEQ ID NO: 73001 - protein, 10 aa, synthetic construct
EIARGDLTVT

SEQ ID NO: 73002 - protein, 10 aa, synthetic construct
EIARGDLIGR

SEQ ID NO: 73003 - protein, 10 aa, synthetic construct
EIVRGDHGVL

SEQ ID NO: 73004 - protein, 10 aa, synthetic construct
EIVRGDHVNL

SEQ ID NO: 73005 - protein, 10 aa, synthetic construct
EIVRGDRDYL

SEQ ID NO: 73006 - protein, 10 aa, synthetic construct
ARPRGDYVGL

SEQ ID NO: 73007 - protein, 10 aa, synthetic construct
EIVRGDYSSV

SEQ ID NO: 73008 - protein, 10 aa, synthetic construct
EIVRGDLTVT

SEQ ID NO: 73009 - protein, 10 aa, synthetic construct
EIPRGDRDYL

SEQ ID NO: 73010 - protein, 10 aa, synthetic construct
EIPRGDYTSV

SEQ ID NO: 73011 - protein, 10 aa, synthetic construct
EIPRGDLTVT

SEQ ID NO: 73012 - protein, 10 aa, synthetic construct
EIPRGDLIGR

SEQ ID NO: 73013 - protein, 10 aa, synthetic construct
EILRGDHGVL

SEQ ID NO: 73014 - protein, 10 aa, synthetic construct
EILRGDHVNL

SEQ ID NO: 73015 - protein, 10 aa, synthetic construct
EILRGDRDYL

SEQ ID NO: 73016 - protein, 10 aa, synthetic construct
EILRGDYSSV

SEQ ID NO: 73017 - protein, 10 aa, synthetic construct
ARPRGDQSTL

SEQ ID NO: 73018 - protein, 10 aa, synthetic construct
EILRGDLTVT

SEQ ID NO: 73019 - protein, 10 aa, synthetic construct
EIIRGDHGVL

SEQ ID NO: 73020 - protein, 10 aa, synthetic construct
EIIRGDRGQI

SEQ ID NO: 73021 - protein, 10 aa, synthetic construct
EIIRGDRQGI

SEQ ID NO: 73022 - protein, 10 aa, synthetic construct
EIIRGDRGVV

SEQ ID NO: 73023 - protein, 10 aa, synthetic construct
EIIRGDYVGL

SEQ ID NO: 73024 - protein, 10 aa, synthetic construct
EIIRGDLIGR

SEQ ID NO: 73025 - protein, 10 aa, synthetic construct
EIIRGDQSTL

SEQ ID NO: 73026 - protein, 10 aa, synthetic construct
EIIRGDLLLS

SEQ ID NO: 73027 - protein, 10 aa, synthetic construct
EIMRGDHGVL

SEQ ID NO: 73028 - protein, 10 aa, synthetic construct
ARLRGDRDYL

SEQ ID NO: 73029 - protein, 10 aa, synthetic construct
EIMRGDRGQI

SEQ ID NO: 73030 - protein, 10 aa, synthetic construct
EIMRGDRQGI

SEQ ID NO: 73031 - protein, 10 aa, synthetic construct
EIMRGDRGVV

SEQ ID NO: 73032 - protein, 10 aa, synthetic construct
EIMRGDYVGL

SEQ ID NO: 73033 - protein, 10 aa, synthetic construct
EIMRGDLIGR

SEQ ID NO: 73034 - protein, 10 aa, synthetic construct
EIMRGDQSTL

SEQ ID NO: 73035 - protein, 10 aa, synthetic construct
EIMRGDLLLS

SEQ ID NO: 73036 - protein, 10 aa, synthetic construct
EIWRGDHGVL

SEQ ID NO: 73037 - protein, 10 aa, synthetic construct
EIWRGDHVNL

SEQ ID NO: 73038 - protein, 10 aa, synthetic construct
EIWRGDRDYL

SEQ ID NO: 73039 - protein, 10 aa, synthetic construct
ARLRGDYVGL

SEQ ID NO: 73040 - protein, 10 aa, synthetic construct
EIWRGDYSSV

SEQ ID NO: 73041 - protein, 10 aa, synthetic construct
EIWRGDLTVT

SEQ ID NO: 73042 - protein, 10 aa, synthetic construct
EIFRGDHGVL

SEQ ID NO: 73043 - protein, 10 aa, synthetic construct
EIFRGDRGQI

SEQ ID NO: 73044 - protein, 10 aa, synthetic construct
EIFRGDRQGI

SEQ ID NO: 73045 - protein, 10 aa, synthetic construct
EIFRGDRGVV

SEQ ID NO: 73046 - protein, 10 aa, synthetic construct
EIFRGDYVGL

SEQ ID NO: 73047 - protein, 10 aa, synthetic construct
EIFRGDLIGR

SEQ ID NO: 73048 - protein, 10 aa, synthetic construct
EIFRGDQSTL

SEQ ID NO: 73049 - protein, 10 aa, synthetic construct
EIFRGDLLLS

SEQ ID NO: 73050 - protein, 10 aa, synthetic construct
ARLRGDQSTL

SEQ ID NO: 73051 - protein, 10 aa, synthetic construct
EIKRGDHGVL

SEQ ID NO: 73052 - protein, 10 aa, synthetic construct
EIKRGDRGQI

SEQ ID NO: 73053 - protein, 10 aa, synthetic construct
EIKRGDRQGI

SEQ ID NO: 73054 - protein, 10 aa, synthetic construct
EIKRGDRGVV

SEQ ID NO: 73055 - protein, 10 aa, synthetic construct
EIKRGDYVGL

SEQ ID NO: 73056 - protein, 10 aa, synthetic construct
EIKRGDLIGR

SEQ ID NO: 73057 - protein, 10 aa, synthetic construct
EIKRGDQSTL

SEQ ID NO: 73058 - protein, 10 aa, synthetic construct
EIKRGDLLLS

SEQ ID NO: 73059 - protein, 10 aa, synthetic construct
EIRRGDRDYL

SEQ ID NO: 73060 - protein, 10 aa, synthetic construct
EIRRGDYTSV

SEQ ID NO: 73061 - protein, 10 aa, synthetic construct
ARIRGDRGVV

SEQ ID NO: 73062 - protein, 10 aa, synthetic construct
EIRRGDLTVT

SEQ ID NO: 73063 - protein, 10 aa, synthetic construct
EIRRGDLIGR

SEQ ID NO: 73064 - protein, 10 aa, synthetic construct
EIHRGDHGVL

SEQ ID NO: 73065 - protein, 10 aa, synthetic construct
EIHRGDHVNL

SEQ ID NO: 73066 - protein, 10 aa, synthetic construct
EIHRGDRDYL

SEQ ID NO: 73067 - protein, 10 aa, synthetic construct
EIHRGDYSSV

SEQ ID NO: 73068 - protein, 10 aa, synthetic construct
EIHRGDLTVT

SEQ ID NO: 73069 - protein, 10 aa, synthetic construct
EISRGDHGVL

SEQ ID NO: 73070 - protein, 10 aa, synthetic construct
EISRGDHVNL

SEQ ID NO: 73071 - protein, 10 aa, synthetic construct
EISRGDRDYL

SEQ ID NO: 73072 - protein, 10 aa, synthetic construct
ESPRGDRDYL

SEQ ID NO: 73073 - protein, 10 aa, synthetic construct
ARMRGDRGQI

SEQ ID NO: 73074 - protein, 10 aa, synthetic construct
EISRGDYSSV

SEQ ID NO: 73075 - protein, 10 aa, synthetic construct
EISRGDLTVT

SEQ ID NO: 73076 - protein, 10 aa, synthetic construct
EITRGDHGVL

SEQ ID NO: 73077 - protein, 10 aa, synthetic construct
EITRGDHVNL

SEQ ID NO: 73078 - protein, 10 aa, synthetic construct
EITRGDRDYL

SEQ ID NO: 73079 - protein, 10 aa, synthetic construct
EITRGDYSSV

SEQ ID NO: 73080 - protein, 10 aa, synthetic construct
EITRGDLTVT

SEQ ID NO: 73081 - protein, 10 aa, synthetic construct
EIYRGDHGVL

SEQ ID NO: 73082 - protein, 10 aa, synthetic construct
EIYRGDRGQI

SEQ ID NO: 73083 - protein, 10 aa, synthetic construct
EIYRGDRQGI

SEQ ID NO: 73084 - protein, 10 aa, synthetic construct
ARMRGDRQGI

SEQ ID NO: 73085 - protein, 10 aa, synthetic construct
EIYRGDRGVV

SEQ ID NO: 73086 - protein, 10 aa, synthetic construct
EIYRGDYVGL

SEQ ID NO: 73087 - protein, 10 aa, synthetic construct
EIYRGDLIGR

SEQ ID NO: 73088 - protein, 10 aa, synthetic construct
EIYRGDQSTL

SEQ ID NO: 73089 - protein, 10 aa, synthetic construct
EIYRGDLLLS

SEQ ID NO: 73090 - protein, 10 aa, synthetic construct
EINRGDHGVL

SEQ ID NO: 73091 - protein, 10 aa, synthetic construct
EINRGDRGQI

SEQ ID NO: 73092 - protein, 10 aa, synthetic construct
EINRGDRQGI

SEQ ID NO: 73093 - protein, 10 aa, synthetic construct
EINRGDRGVV

SEQ ID NO: 73094 - protein, 10 aa, synthetic construct
EINRGDYVGL

SEQ ID NO: 73095 - protein, 10 aa, synthetic construct
ARMRGDRSVV

SEQ ID NO: 73096 - protein, 10 aa, synthetic construct
EINRGDLIGR

SEQ ID NO: 73097 - protein, 10 aa, synthetic construct
EINRGDQSTL

SEQ ID NO: 73098 - protein, 10 aa, synthetic construct
EINRGDLLLS

SEQ ID NO: 73099 - protein, 10 aa, synthetic construct
EIQRGDHGVL

SEQ ID NO: 73100 - protein, 10 aa, synthetic construct
EIQRGDHVNL

SEQ ID NO: 73101 - protein, 10 aa, synthetic construct
EIQRGDRDYL

SEQ ID NO: 73102 - protein, 10 aa, synthetic construct
EIQRGDYSSV

SEQ ID NO: 73103 - protein, 10 aa, synthetic construct
EIQRGDLTVT

SEQ ID NO: 73104 - protein, 10 aa, synthetic construct
EIDRGDHGVL

SEQ ID NO: 73105 - protein, 10 aa, synthetic construct
EIDRGDHVNL

SEQ ID NO: 73106 - protein, 10 aa, synthetic construct
ARMRGDRGVV

SEQ ID NO: 73107 - protein, 10 aa, synthetic construct
EIDRGDRDYL

SEQ ID NO: 73108 - protein, 10 aa, synthetic construct
EIDRGDYSSV

SEQ ID NO: 73109 - protein, 10 aa, synthetic construct
EIDRGDLTVT

SEQ ID NO: 73110 - protein, 10 aa, synthetic construct
EIERGDHGVL

SEQ ID NO: 73111 - protein, 10 aa, synthetic construct
EIERGDHVNL

SEQ ID NO: 73112 - protein, 10 aa, synthetic construct
EIERGDRDYL

SEQ ID NO: 73113 - protein, 10 aa, synthetic construct
EIERGDYSSV

SEQ ID NO: 73114 - protein, 10 aa, synthetic construct
EIERGDLTVT

SEQ ID NO: 73115 - protein, 10 aa, synthetic construct
EMGRGDHVNL

SEQ ID NO: 73116 - protein, 10 aa, synthetic construct
EMGRGDYNSL

SEQ ID NO: 73117 - protein, 10 aa, synthetic construct
ARMRGDRSQT

SEQ ID NO: 73118 - protein, 10 aa, synthetic construct
EMGRGDYTSM

SEQ ID NO: 73119 - protein, 10 aa, synthetic construct
EMARGDHVNL

SEQ ID NO: 73120 - protein, 10 aa, synthetic construct
EMARGDYNSL

SEQ ID NO: 73121 - protein, 10 aa, synthetic construct
EMARGDYTSM

SEQ ID NO: 73122 - protein, 10 aa, synthetic construct
EMVRGDHVNL

SEQ ID NO: 73123 - protein, 10 aa, synthetic construct
EMVRGDYNSL

SEQ ID NO: 73124 - protein, 10 aa, synthetic construct
EMVRGDYTSM

SEQ ID NO: 73125 - protein, 10 aa, synthetic construct
EMPRGDHVNL

SEQ ID NO: 73126 - protein, 10 aa, synthetic construct
EMPRGDYNSL

SEQ ID NO: 73127 - protein, 10 aa, synthetic construct
EMPRGDYTSM

SEQ ID NO: 73128 - protein, 10 aa, synthetic construct
ARWRGDHGVL

SEQ ID NO: 73129 - protein, 10 aa, synthetic construct
EMLRGDHVNL

SEQ ID NO: 73130 - protein, 10 aa, synthetic construct
EMLRGDYNSL

SEQ ID NO: 73131 - protein, 10 aa, synthetic construct
EMLRGDYTSM

SEQ ID NO: 73132 - protein, 10 aa, synthetic construct
EMIRGDRGQI

SEQ ID NO: 73133 - protein, 10 aa, synthetic construct
EMIRGDRQGI

SEQ ID NO: 73134 - protein, 10 aa, synthetic construct
EMIRGDRSQT

SEQ ID NO: 73135 - protein, 10 aa, synthetic construct
EMMRGDHVNL

SEQ ID NO: 73136 - protein, 10 aa, synthetic construct
EMMRGDRDYL

SEQ ID NO: 73137 - protein, 10 aa, synthetic construct
EMMRGDYSSV

SEQ ID NO: 73138 - protein, 10 aa, synthetic construct
EMMRGDLTVT

SEQ ID NO: 73139 - protein, 10 aa, synthetic construct
ARWRGDYVGL

SEQ ID NO: 73140 - protein, 10 aa, synthetic construct
EMWRGDYTSV

SEQ ID NO: 73141 - protein, 10 aa, synthetic construct
EMWRGDLIGR

SEQ ID NO: 73142 - protein, 10 aa, synthetic construct
EMFRGDRGQI

SEQ ID NO: 73143 - protein, 10 aa, synthetic construct
EMFRGDRQGI

SEQ ID NO: 73144 - protein, 10 aa, synthetic construct
EMFRGDRSQT

SEQ ID NO: 73145 - protein, 10 aa, synthetic construct
EMKRGDRGQI

SEQ ID NO: 73146 - protein, 10 aa, synthetic construct
EMKRGDRQGI

SEQ ID NO: 73147 - protein, 10 aa, synthetic construct
EMKRGDRSQT

SEQ ID NO: 73148 - protein, 10 aa, synthetic construct
EMRRGDHVNL

SEQ ID NO: 73149 - protein, 10 aa, synthetic construct
EMRRGDYNSL

SEQ ID NO: 73150 - protein, 10 aa, synthetic construct
ARWRGDQSTL

SEQ ID NO: 73151 - protein, 10 aa, synthetic construct
EMRRGDYTSM

SEQ ID NO: 73152 - protein, 10 aa, synthetic construct
EMHRGDRDYL

SEQ ID NO: 73153 - protein, 10 aa, synthetic construct
EMHRGDYVGL

SEQ ID NO: 73154 - protein, 10 aa, synthetic construct
EMHRGDYSSV

SEQ ID NO: 73155 - protein, 10 aa, synthetic construct
EMHRGDYTSV

SEQ ID NO: 73156 - protein, 10 aa, synthetic construct
EMHRGDQSTL

SEQ ID NO: 73157 - protein, 10 aa, synthetic construct
EMSRGDHVNL

SEQ ID NO: 73158 - protein, 10 aa, synthetic construct
EMSRGDYNSL

SEQ ID NO: 73159 - protein, 10 aa, synthetic construct
EMSRGDYTSM

SEQ ID NO: 73160 - protein, 10 aa, synthetic construct
EMTRGDRDYL

SEQ ID NO: 73161 - protein, 10 aa, synthetic construct
ARWRGDLLLS

SEQ ID NO: 73162 - protein, 10 aa, synthetic construct
EMTRGDYVGL

SEQ ID NO: 73163 - protein, 10 aa, synthetic construct
EMTRGDYSSV

SEQ ID NO: 73164 - protein, 10 aa, synthetic construct
EMTRGDYTSV

SEQ ID NO: 73165 - protein, 10 aa, synthetic construct
EMTRGDQSTL

SEQ ID NO: 73166 - protein, 10 aa, synthetic construct
EMYRGDRGQI

SEQ ID NO: 73167 - protein, 10 aa, synthetic construct
EMYRGDRQGI

SEQ ID NO: 73168 - protein, 10 aa, synthetic construct
EMYRGDRSQT

SEQ ID NO: 73169 - protein, 10 aa, synthetic construct
EMNRGDRGQI

SEQ ID NO: 73170 - protein, 10 aa, synthetic construct
EMNRGDRQGI

SEQ ID NO: 73171 - protein, 10 aa, synthetic construct
EMNRGDRSQT

SEQ ID NO: 73172 - protein, 10 aa, synthetic construct
ARFRGDRGVV

SEQ ID NO: 73173 - protein, 10 aa, synthetic construct
EMQRGDRDYL

SEQ ID NO: 73174 - protein, 10 aa, synthetic construct
EMQRGDYVGL

SEQ ID NO: 73175 - protein, 10 aa, synthetic construct
EMQRGDYSSV

SEQ ID NO: 73176 - protein, 10 aa, synthetic construct
EMQRGDYTSV

SEQ ID NO: 73177 - protein, 10 aa, synthetic construct
EMQRGDQSTL

SEQ ID NO: 73178 - protein, 10 aa, synthetic construct
EMDRGDRDYL

SEQ ID NO: 73179 - protein, 10 aa, synthetic construct
EMDRGDYVGL

SEQ ID NO: 73180 - protein, 10 aa, synthetic construct
EMDRGDYSSV

SEQ ID NO: 73181 - protein, 10 aa, synthetic construct
EMDRGDYTSV

SEQ ID NO: 73182 - protein, 10 aa, synthetic construct
EMDRGDQSTL

SEQ ID NO: 73183 - protein, 10 aa, synthetic construct
ESPRGDYSSV

SEQ ID NO: 73184 - protein, 10 aa, synthetic construct
ARKRGDRGVV

SEQ ID NO: 73185 - protein, 10 aa, synthetic construct
EMERGDRDYL

SEQ ID NO: 73186 - protein, 10 aa, synthetic construct
EMERGDYVGL

SEQ ID NO: 73187 - protein, 10 aa, synthetic construct
EMERGDYSSV

SEQ ID NO: 73188 - protein, 10 aa, synthetic construct
EMERGDYTSV

SEQ ID NO: 73189 - protein, 10 aa, synthetic construct
EMERGDQSTL

SEQ ID NO: 73190 - protein, 10 aa, synthetic construct
EWGRGDFQNT

SEQ ID NO: 73191 - protein, 10 aa, synthetic construct
EWARGDFQNT

SEQ ID NO: 73192 - protein, 10 aa, synthetic construct
EWVRGDFQNT

SEQ ID NO: 73193 - protein, 10 aa, synthetic construct
EWPRGDFQNT

SEQ ID NO: 73194 - protein, 10 aa, synthetic construct
EWLRGDFQNT

SEQ ID NO: 73195 - protein, 10 aa, synthetic construct
ARRRGDRDYL

SEQ ID NO: 73196 - protein, 10 aa, synthetic construct
EWIRGDRDYL

SEQ ID NO: 73197 - protein, 10 aa, synthetic construct
EWIRGDYVGL

SEQ ID NO: 73198 - protein, 10 aa, synthetic construct
EWIRGDYSSV

SEQ ID NO: 73199 - protein, 10 aa, synthetic construct
EWIRGDYTSV

SEQ ID NO: 73200 - protein, 10 aa, synthetic construct
EWIRGDQSTL

SEQ ID NO: 73201 - protein, 10 aa, synthetic construct
EWMRGDYTSV

SEQ ID NO: 73202 - protein, 10 aa, synthetic construct
EWMRGDLIGR

SEQ ID NO: 73203 - protein, 10 aa, synthetic construct
EWWRGDYNSL

SEQ ID NO: 73204 - protein, 10 aa, synthetic construct
EWWRGDYTSM

SEQ ID NO: 73205 - protein, 10 aa, synthetic construct
EWWRGDFQNT

SEQ ID NO: 73206 - protein, 10 aa, synthetic construct
ARRRGDYVGL

SEQ ID NO: 73207 - protein, 10 aa, synthetic construct
EWFRGDRDYL

SEQ ID NO: 73208 - protein, 10 aa, synthetic construct
EWFRGDYVGL

SEQ ID NO: 73209 - protein, 10 aa, synthetic construct
EWFRGDYSSV

SEQ ID NO: 73210 - protein, 10 aa, synthetic construct
EWFRGDYTSV

SEQ ID NO: 73211 - protein, 10 aa, synthetic construct
EWFRGDQSTL

SEQ ID NO: 73212 - protein, 10 aa, synthetic construct
EWKRGDRDYL

SEQ ID NO: 73213 - protein, 10 aa, synthetic construct
EWKRGDYVGL

SEQ ID NO: 73214 - protein, 10 aa, synthetic construct
EWKRGDYSSV

SEQ ID NO: 73215 - protein, 10 aa, synthetic construct
EWKRGDYTSV

SEQ ID NO: 73216 - protein, 10 aa, synthetic construct
EWKRGDQSTL

SEQ ID NO: 73217 - protein, 10 aa, synthetic construct
ARRRGDQSTL

SEQ ID NO: 73218 - protein, 10 aa, synthetic construct
EWRRGDFQNT

SEQ ID NO: 73219 - protein, 10 aa, synthetic construct
EWHRGDHVNL

SEQ ID NO: 73220 - protein, 10 aa, synthetic construct
EWHRGDYNSL

SEQ ID NO: 73221 - protein, 10 aa, synthetic construct
EWHRGDYTSM

SEQ ID NO: 73222 - protein, 10 aa, synthetic construct
EWSRGDFQNT

SEQ ID NO: 73223 - protein, 10 aa, synthetic construct
EWTRGDHVNL

SEQ ID NO: 73224 - protein, 10 aa, synthetic construct
EWTRGDYNSL

SEQ ID NO: 73225 - protein, 10 aa, synthetic construct
EWTRGDYTSM

SEQ ID NO: 73226 - protein, 10 aa, synthetic construct
EWYRGDRDYL

SEQ ID NO: 73227 - protein, 10 aa, synthetic construct
EWYRGDYVGL

SEQ ID NO: 73228 - protein, 10 aa, synthetic construct
ARHRGDHGVL

SEQ ID NO: 73229 - protein, 10 aa, synthetic construct
EWYRGDYSSV

SEQ ID NO: 73230 - protein, 10 aa, synthetic construct
EWYRGDYTSV

SEQ ID NO: 73231 - protein, 10 aa, synthetic construct
EWYRGDQSTL

SEQ ID NO: 73232 - protein, 10 aa, synthetic construct
EWNRGDRDYL

SEQ ID NO: 73233 - protein, 10 aa, synthetic construct
EWNRGDYVGL

SEQ ID NO: 73234 - protein, 10 aa, synthetic construct
EWNRGDYSSV

SEQ ID NO: 73235 - protein, 10 aa, synthetic construct
EWNRGDYTSV

SEQ ID NO: 73236 - protein, 10 aa, synthetic construct
EWNRGDQSTL

SEQ ID NO: 73237 - protein, 10 aa, synthetic construct
EWQRGDHVNL

SEQ ID NO: 73238 - protein, 10 aa, synthetic construct
EWQRGDYNSL

SEQ ID NO: 73239 - protein, 10 aa, synthetic construct
ARHRGDRGQI

SEQ ID NO: 73240 - protein, 10 aa, synthetic construct
EWQRGDYTSM

SEQ ID NO: 73241 - protein, 10 aa, synthetic construct
EWDRGDHVNL

SEQ ID NO: 73242 - protein, 10 aa, synthetic construct
EWDRGDYNSL

SEQ ID NO: 73243 - protein, 10 aa, synthetic construct
EWDRGDYTSM

SEQ ID NO: 73244 - protein, 10 aa, synthetic construct
EWERGDHVNL

SEQ ID NO: 73245 - protein, 10 aa, synthetic construct
EWERGDYNSL

SEQ ID NO: 73246 - protein, 10 aa, synthetic construct
EWERGDYTSM

SEQ ID NO: 73247 - protein, 10 aa, synthetic construct
EFGRGDRDYL

SEQ ID NO: 73248 - protein, 10 aa, synthetic construct
EFGRGDYTSV

SEQ ID NO: 73249 - protein, 10 aa, synthetic construct
EFGRGDLTVT

SEQ ID NO: 73250 - protein, 10 aa, synthetic construct
ARHRGDRQGI

SEQ ID NO: 73251 - protein, 10 aa, synthetic construct
EFGRGDLIGR

SEQ ID NO: 73252 - protein, 10 aa, synthetic construct
EFARGDRDYL

SEQ ID NO: 73253 - protein, 10 aa, synthetic construct
EFARGDYTSV

SEQ ID NO: 73254 - protein, 10 aa, synthetic construct
EFARGDLTVT

SEQ ID NO: 73255 - protein, 10 aa, synthetic construct
EFARGDLIGR

SEQ ID NO: 73256 - protein, 10 aa, synthetic construct
EFVRGDHGVL

SEQ ID NO: 73257 - protein, 10 aa, synthetic construct
EFVRGDHVNL

SEQ ID NO: 73258 - protein, 10 aa, synthetic construct
EFVRGDRDYL

SEQ ID NO: 73259 - protein, 10 aa, synthetic construct
EFVRGDYSSV

SEQ ID NO: 73260 - protein, 10 aa, synthetic construct
EFVRGDLTVT

SEQ ID NO: 73261 - protein, 10 aa, synthetic construct
ARHRGDRSVV

SEQ ID NO: 73262 - protein, 10 aa, synthetic construct
EFPRGDRDYL

SEQ ID NO: 73263 - protein, 10 aa, synthetic construct
EFPRGDYTSV

SEQ ID NO: 73264 - protein, 10 aa, synthetic construct
EFPRGDLTVT

SEQ ID NO: 73265 - protein, 10 aa, synthetic construct
EFPRGDLIGR

SEQ ID NO: 73266 - protein, 10 aa, synthetic construct
EFLRGDHGVL

SEQ ID NO: 73267 - protein, 10 aa, synthetic construct
EFLRGDHVNL

SEQ ID NO: 73268 - protein, 10 aa, synthetic construct
EFLRGDRDYL

SEQ ID NO: 73269 - protein, 10 aa, synthetic construct
EFLRGDYSSV

SEQ ID NO: 73270 - protein, 10 aa, synthetic construct
EFLRGDLTVT

SEQ ID NO: 73271 - protein, 10 aa, synthetic construct
EFIRGDHGVL

SEQ ID NO: 73272 - protein, 10 aa, synthetic construct
ARHRGDLTVT

SEQ ID NO: 73273 - protein, 10 aa, synthetic construct
EFIRGDRGQI

SEQ ID NO: 73274 - protein, 10 aa, synthetic construct
EFIRGDRQGI

SEQ ID NO: 73275 - protein, 10 aa, synthetic construct
EFIRGDRGVV

SEQ ID NO: 73276 - protein, 10 aa, synthetic construct
EFIRGDYVGL

SEQ ID NO: 73277 - protein, 10 aa, synthetic construct
EFIRGDLIGR

SEQ ID NO: 73278 - protein, 10 aa, synthetic construct
EFIRGDQSTL

SEQ ID NO: 73279 - protein, 10 aa, synthetic construct
EFIRGDLLLS

SEQ ID NO: 73280 - protein, 10 aa, synthetic construct
EFMRGDHGVL

SEQ ID NO: 73281 - protein, 10 aa, synthetic construct
EFMRGDRGQI

SEQ ID NO: 73282 - protein, 10 aa, synthetic construct
EFMRGDRQGI

SEQ ID NO: 73283 - protein, 10 aa, synthetic construct
ARHRGDLIGR

SEQ ID NO: 73284 - protein, 10 aa, synthetic construct
EFMRGDRGVV

SEQ ID NO: 73285 - protein, 10 aa, synthetic construct
EFMRGDYVGL

SEQ ID NO: 73286 - protein, 10 aa, synthetic construct
EFMRGDLIGR

SEQ ID NO: 73287 - protein, 10 aa, synthetic construct
EFMRGDQSTL

SEQ ID NO: 73288 - protein, 10 aa, synthetic construct
EFMRGDLLLS

SEQ ID NO: 73289 - protein, 10 aa, synthetic construct
EFWRGDHGVL

SEQ ID NO: 73290 - protein, 10 aa, synthetic construct
EFWRGDHVNL

SEQ ID NO: 73291 - protein, 10 aa, synthetic construct
EFWRGDRDYL

SEQ ID NO: 73292 - protein, 10 aa, synthetic construct
EFWRGDYSSV

SEQ ID NO: 73293 - protein, 10 aa, synthetic construct
EFWRGDLTVT

SEQ ID NO: 73294 - protein, 10 aa, synthetic construct
ESPRGDLTVT

SEQ ID NO: 73295 - protein, 10 aa, synthetic construct
ARHRGDRSQT

SEQ ID NO: 73296 - protein, 10 aa, synthetic construct
EFKRGDHGVL

SEQ ID NO: 73297 - protein, 10 aa, synthetic construct
EFKRGDRGQI

SEQ ID NO: 73298 - protein, 10 aa, synthetic construct
EFKRGDRQGI

SEQ ID NO: 73299 - protein, 10 aa, synthetic construct
EFKRGDRGVV

SEQ ID NO: 73300 - protein, 10 aa, synthetic construct
EFKRGDYVGL

SEQ ID NO: 73301 - protein, 10 aa, synthetic construct
EFKRGDLIGR

SEQ ID NO: 73302 - protein, 10 aa, synthetic construct
EFKRGDQSTL

SEQ ID NO: 73303 - protein, 10 aa, synthetic construct
EFKRGDLLLS

SEQ ID NO: 73304 - protein, 10 aa, synthetic construct
EFRRGDRDYL

SEQ ID NO: 73305 - protein, 10 aa, synthetic construct
EFRRGDYTSV

SEQ ID NO: 73306 - protein, 10 aa, synthetic construct
ARHRGDLLLS

SEQ ID NO: 73307 - protein, 10 aa, synthetic construct
EFRRGDLTVT

SEQ ID NO: 73308 - protein, 10 aa, synthetic construct
EFRRGDLIGR

SEQ ID NO: 73309 - protein, 10 aa, synthetic construct
EFHRGDHGVL

SEQ ID NO: 73310 - protein, 10 aa, synthetic construct
EFHRGDHVNL

SEQ ID NO: 73311 - protein, 10 aa, synthetic construct
EFHRGDRDYL

SEQ ID NO: 73312 - protein, 10 aa, synthetic construct
EFHRGDYSSV

SEQ ID NO: 73313 - protein, 10 aa, synthetic construct
EFHRGDLTVT

SEQ ID NO: 73314 - protein, 10 aa, synthetic construct
EFSRGDHGVL

SEQ ID NO: 73315 - protein, 10 aa, synthetic construct
EFSRGDHVNL

SEQ ID NO: 73316 - protein, 10 aa, synthetic construct
EFSRGDRDYL

SEQ ID NO: 73317 - protein, 10 aa, synthetic construct
ARSRGDRDYL

SEQ ID NO: 73318 - protein, 10 aa, synthetic construct
EFSRGDYSSV

SEQ ID NO: 73319 - protein, 10 aa, synthetic construct
EFSRGDLTVT

SEQ ID NO: 73320 - protein, 10 aa, synthetic construct
EFTRGDHGVL

SEQ ID NO: 73321 - protein, 10 aa, synthetic construct
EFTRGDHVNL

SEQ ID NO: 73322 - protein, 10 aa, synthetic construct
EFTRGDRDYL

SEQ ID NO: 73323 - protein, 10 aa, synthetic construct
EFTRGDYSSV

SEQ ID NO: 73324 - protein, 10 aa, synthetic construct
EFTRGDLTVT

SEQ ID NO: 73325 - protein, 10 aa, synthetic construct
EFYRGDHGVL

SEQ ID NO: 73326 - protein, 10 aa, synthetic construct
EFYRGDRGQI

SEQ ID NO: 73327 - protein, 10 aa, synthetic construct
EFYRGDRQGI

SEQ ID NO: 73328 - protein, 10 aa, synthetic construct
ARSRGDYVGL

SEQ ID NO: 73329 - protein, 10 aa, synthetic construct
EFYRGDRGVV

SEQ ID NO: 73330 - protein, 10 aa, synthetic construct
EFYRGDYVGL

SEQ ID NO: 73331 - protein, 10 aa, synthetic construct
EFYRGDLIGR

SEQ ID NO: 73332 - protein, 10 aa, synthetic construct
EFYRGDQSTL

SEQ ID NO: 73333 - protein, 10 aa, synthetic construct
EFYRGDLLLS

SEQ ID NO: 73334 - protein, 10 aa, synthetic construct
EFNRGDHGVL

SEQ ID NO: 73335 - protein, 10 aa, synthetic construct
EFNRGDRGQI

SEQ ID NO: 73336 - protein, 10 aa, synthetic construct
EFNRGDRQGI

SEQ ID NO: 73337 - protein, 10 aa, synthetic construct
EFNRGDRGVV

SEQ ID NO: 73338 - protein, 10 aa, synthetic construct
EFNRGDYVGL

SEQ ID NO: 73339 - protein, 10 aa, synthetic construct
ARSRGDQSTL

SEQ ID NO: 73340 - protein, 10 aa, synthetic construct
EFNRGDLIGR

SEQ ID NO: 73341 - protein, 10 aa, synthetic construct
EFNRGDQSTL

SEQ ID NO: 73342 - protein, 10 aa, synthetic construct
EFNRGDLLLS

SEQ ID NO: 73343 - protein, 10 aa, synthetic construct
EFQRGDHGVL

SEQ ID NO: 73344 - protein, 10 aa, synthetic construct
EFQRGDHVNL

SEQ ID NO: 73345 - protein, 10 aa, synthetic construct
EFQRGDRDYL

SEQ ID NO: 73346 - protein, 10 aa, synthetic construct
EFQRGDYSSV

SEQ ID NO: 73347 - protein, 10 aa, synthetic construct
EFQRGDLTVT

SEQ ID NO: 73348 - protein, 10 aa, synthetic construct
EFDRGDHGVL

SEQ ID NO: 73349 - protein, 10 aa, synthetic construct
EFDRGDHVNL

SEQ ID NO: 73350 - protein, 10 aa, synthetic construct
ARTRGDHGVL

SEQ ID NO: 73351 - protein, 10 aa, synthetic construct
EFDRGDRDYL

SEQ ID NO: 73352 - protein, 10 aa, synthetic construct
EFDRGDYSSV

SEQ ID NO: 73353 - protein, 10 aa, synthetic construct
EFDRGDLTVT

SEQ ID NO: 73354 - protein, 10 aa, synthetic construct
EFERGDHGVL

SEQ ID NO: 73355 - protein, 10 aa, synthetic construct
EFERGDHVNL

SEQ ID NO: 73356 - protein, 10 aa, synthetic construct
EFERGDRDYL

SEQ ID NO: 73357 - protein, 10 aa, synthetic construct
EFERGDYSSV

SEQ ID NO: 73358 - protein, 10 aa, synthetic construct
EFERGDLTVT

SEQ ID NO: 73359 - protein, 10 aa, synthetic construct
EKGRGDRDYL

SEQ ID NO: 73360 - protein, 10 aa, synthetic construct
EKGRGDYTSV

SEQ ID NO: 73361 - protein, 10 aa, synthetic construct
ARTRGDRGQI

SEQ ID NO: 73362 - protein, 10 aa, synthetic construct
EKGRGDLTVT

SEQ ID NO: 73363 - protein, 10 aa, synthetic construct
EKGRGDLIGR

SEQ ID NO: 73364 - protein, 10 aa, synthetic construct
EKARGDRDYL

SEQ ID NO: 73365 - protein, 10 aa, synthetic construct
EKARGDYTSV

SEQ ID NO: 73366 - protein, 10 aa, synthetic construct
EKARGDLTVT

SEQ ID NO: 73367 - protein, 10 aa, synthetic construct
EKARGDLIGR

SEQ ID NO: 73368 - protein, 10 aa, synthetic construct
EKVRGDHGVL

SEQ ID NO: 73369 - protein, 10 aa, synthetic construct
EKVRGDHVNL

SEQ ID NO: 73370 - protein, 10 aa, synthetic construct
EKVRGDRDYL

SEQ ID NO: 73371 - protein, 10 aa, synthetic construct
EKVRGDYSSV

SEQ ID NO: 73372 - protein, 10 aa, synthetic construct
ARTRGDRQGI

SEQ ID NO: 73373 - protein, 10 aa, synthetic construct
EKVRGDLTVT

SEQ ID NO: 73374 - protein, 10 aa, synthetic construct
EKPRGDRDYL

SEQ ID NO: 73375 - protein, 10 aa, synthetic construct
EKPRGDYTSV

SEQ ID NO: 73376 - protein, 10 aa, synthetic construct
EKPRGDLTVT

SEQ ID NO: 73377 - protein, 10 aa, synthetic construct
EKPRGDLIGR

SEQ ID NO: 73378 - protein, 10 aa, synthetic construct
EKLRGDHGVL

SEQ ID NO: 73379 - protein, 10 aa, synthetic construct
EKLRGDHVNL

SEQ ID NO: 73380 - protein, 10 aa, synthetic construct
EKLRGDRDYL

SEQ ID NO: 73381 - protein, 10 aa, synthetic construct
EKLRGDYSSV

SEQ ID NO: 73382 - protein, 10 aa, synthetic construct
EKLRGDLTVT

SEQ ID NO: 73383 - protein, 10 aa, synthetic construct
ARTRGDRSVV

SEQ ID NO: 73384 - protein, 10 aa, synthetic construct
EKIRGDHGVL

SEQ ID NO: 73385 - protein, 10 aa, synthetic construct
EKIRGDRGQI

SEQ ID NO: 73386 - protein, 10 aa, synthetic construct
EKIRGDRQGI

SEQ ID NO: 73387 - protein, 10 aa, synthetic construct
EKIRGDRGVV

SEQ ID NO: 73388 - protein, 10 aa, synthetic construct
EKIRGDYVGL

SEQ ID NO: 73389 - protein, 10 aa, synthetic construct
EKIRGDLIGR

SEQ ID NO: 73390 - protein, 10 aa, synthetic construct
EKIRGDQSTL

SEQ ID NO: 73391 - protein, 10 aa, synthetic construct
EKIRGDLLLS

SEQ ID NO: 73392 - protein, 10 aa, synthetic construct
EKMRGDHGVL

SEQ ID NO: 73393 - protein, 10 aa, synthetic construct
EKMRGDRGQI

SEQ ID NO: 73394 - protein, 10 aa, synthetic construct
ARTRGDLTVT

SEQ ID NO: 73395 - protein, 10 aa, synthetic construct
EKMRGDRQGI

SEQ ID NO: 73396 - protein, 10 aa, synthetic construct
EKMRGDRGVV

SEQ ID NO: 73397 - protein, 10 aa, synthetic construct
EKMRGDYVGL

SEQ ID NO: 73398 - protein, 10 aa, synthetic construct
EKMRGDLIGR

SEQ ID NO: 73399 - protein, 10 aa, synthetic construct
EKMRGDQSTL

SEQ ID NO: 73400 - protein, 10 aa, synthetic construct
EKMRGDLLLS

SEQ ID NO: 73401 - protein, 10 aa, synthetic construct
EKWRGDHGVL

SEQ ID NO: 73402 - protein, 10 aa, synthetic construct
EKWRGDHVNL

SEQ ID NO: 73403 - protein, 10 aa, synthetic construct
EKWRGDRDYL

SEQ ID NO: 73404 - protein, 10 aa, synthetic construct
EKWRGDYSSV

SEQ ID NO: 73405 - protein, 10 aa, synthetic construct
ESPRGDLIGR

SEQ ID NO: 73406 - protein, 10 aa, synthetic construct
ARTRGDLIGR

SEQ ID NO: 73407 - protein, 10 aa, synthetic construct
EKWRGDLTVT

SEQ ID NO: 73408 - protein, 10 aa, synthetic construct
EKFRGDHGVL

SEQ ID NO: 73409 - protein, 10 aa, synthetic construct
EKFRGDRGQI

SEQ ID NO: 73410 - protein, 10 aa, synthetic construct
EKFRGDRQGI

SEQ ID NO: 73411 - protein, 10 aa, synthetic construct
EKFRGDRGVV

SEQ ID NO: 73412 - protein, 10 aa, synthetic construct
EKFRGDYVGL

SEQ ID NO: 73413 - protein, 10 aa, synthetic construct
EKFRGDLIGR

SEQ ID NO: 73414 - protein, 10 aa, synthetic construct
EKFRGDQSTL

SEQ ID NO: 73415 - protein, 10 aa, synthetic construct
EKFRGDLLLS

SEQ ID NO: 73416 - protein, 10 aa, synthetic construct
EKRRGDRDYL

SEQ ID NO: 73417 - protein, 10 aa, synthetic construct
ARTRGDRSQT

SEQ ID NO: 73418 - protein, 10 aa, synthetic construct
EKRRGDYTSV

SEQ ID NO: 73419 - protein, 10 aa, synthetic construct
EKRRGDLTVT

SEQ ID NO: 73420 - protein, 10 aa, synthetic construct
EKRRGDLIGR

SEQ ID NO: 73421 - protein, 10 aa, synthetic construct
EKHRGDHGVL

SEQ ID NO: 73422 - protein, 10 aa, synthetic construct
EKHRGDHVNL

SEQ ID NO: 73423 - protein, 10 aa, synthetic construct
EKHRGDRDYL

SEQ ID NO: 73424 - protein, 10 aa, synthetic construct
EKHRGDYSSV

SEQ ID NO: 73425 - protein, 10 aa, synthetic construct
EKHRGDLTVT

SEQ ID NO: 73426 - protein, 10 aa, synthetic construct
EKSRGDHGVL

SEQ ID NO: 73427 - protein, 10 aa, synthetic construct
EKSRGDHVNL

SEQ ID NO: 73428 - protein, 10 aa, synthetic construct
ARTRGDLLLS

SEQ ID NO: 73429 - protein, 10 aa, synthetic construct
EKSRGDRDYL

SEQ ID NO: 73430 - protein, 10 aa, synthetic construct
EKSRGDYSSV

SEQ ID NO: 73431 - protein, 10 aa, synthetic construct
EKSRGDLTVT

SEQ ID NO: 73432 - protein, 10 aa, synthetic construct
EKTRGDHGVL

SEQ ID NO: 73433 - protein, 10 aa, synthetic construct
EKTRGDHVNL

SEQ ID NO: 73434 - protein, 10 aa, synthetic construct
EKTRGDRDYL

SEQ ID NO: 73435 - protein, 10 aa, synthetic construct
EKTRGDYSSV

SEQ ID NO: 73436 - protein, 10 aa, synthetic construct
EKTRGDLTVT

SEQ ID NO: 73437 - protein, 10 aa, synthetic construct
EKYRGDHGVL

SEQ ID NO: 73438 - protein, 10 aa, synthetic construct
EKYRGDRGQI

SEQ ID NO: 73439 - protein, 10 aa, synthetic construct
ARYRGDRGVV

SEQ ID NO: 73440 - protein, 10 aa, synthetic construct
EKYRGDRQGI

SEQ ID NO: 73441 - protein, 10 aa, synthetic construct
EKYRGDRGVV

SEQ ID NO: 73442 - protein, 10 aa, synthetic construct
EKYRGDYVGL

SEQ ID NO: 73443 - protein, 10 aa, synthetic construct
EKYRGDLIGR

SEQ ID NO: 73444 - protein, 10 aa, synthetic construct
EKYRGDQSTL

SEQ ID NO: 73445 - protein, 10 aa, synthetic construct
EKYRGDLLLS

SEQ ID NO: 73446 - protein, 10 aa, synthetic construct
EKQRGDHGVL

SEQ ID NO: 73447 - protein, 10 aa, synthetic construct
EKQRGDHVNL

SEQ ID NO: 73448 - protein, 10 aa, synthetic construct
EKQRGDRDYL

SEQ ID NO: 73449 - protein, 10 aa, synthetic construct
EKQRGDYSSV

SEQ ID NO: 73450 - protein, 10 aa, synthetic construct
ARNRGDRGVV

SEQ ID NO: 73451 - protein, 10 aa, synthetic construct
EKQRGDLTVT

SEQ ID NO: 73452 - protein, 10 aa, synthetic construct
EKDRGDHGVL

SEQ ID NO: 73453 - protein, 10 aa, synthetic construct
EKDRGDHVNL

SEQ ID NO: 73454 - protein, 10 aa, synthetic construct
EKDRGDRDYL

SEQ ID NO: 73455 - protein, 10 aa, synthetic construct
EKDRGDYSSV

SEQ ID NO: 73456 - protein, 10 aa, synthetic construct
EKDRGDLTVT

SEQ ID NO: 73457 - protein, 10 aa, synthetic construct
EKERGDHGVL

SEQ ID NO: 73458 - protein, 10 aa, synthetic construct
EKERGDHVNL

SEQ ID NO: 73459 - protein, 10 aa, synthetic construct
EKERGDRDYL

SEQ ID NO: 73460 - protein, 10 aa, synthetic construct
EKERGDYSSV

SEQ ID NO: 73461 - protein, 10 aa, synthetic construct
ARQRGDHGVL

SEQ ID NO: 73462 - protein, 10 aa, synthetic construct
EKERGDLTVT

SEQ ID NO: 73463 - protein, 10 aa, synthetic construct
ERGRGDYNSL

SEQ ID NO: 73464 - protein, 10 aa, synthetic construct
ERGRGDFNNT

SEQ ID NO: 73465 - protein, 10 aa, synthetic construct
ERGRGDFNNL

SEQ ID NO: 73466 - protein, 10 aa, synthetic construct
ERGRGDFQNT

SEQ ID NO: 73467 - protein, 10 aa, synthetic construct
ERARGDYNSL

SEQ ID NO: 73468 - protein, 10 aa, synthetic construct
ERARGDFNNT

SEQ ID NO: 73469 - protein, 10 aa, synthetic construct
ERARGDFNNL

SEQ ID NO: 73470 - protein, 10 aa, synthetic construct
ERARGDFQNT

SEQ ID NO: 73471 - protein, 10 aa, synthetic construct
ERVRGDYNSL

SEQ ID NO: 73472 - protein, 10 aa, synthetic construct
ARQRGDRGQI

SEQ ID NO: 73473 - protein, 10 aa, synthetic construct
ERVRGDYTSV

SEQ ID NO: 73474 - protein, 10 aa, synthetic construct
ERVRGDYTSM

SEQ ID NO: 73475 - protein, 10 aa, synthetic construct
ERVRGDFQNT

SEQ ID NO: 73476 - protein, 10 aa, synthetic construct
ERPRGDYNSL

SEQ ID NO: 73477 - protein, 10 aa, synthetic construct
ERPRGDFNNT

SEQ ID NO: 73478 - protein, 10 aa, synthetic construct
ERPRGDFNNL

SEQ ID NO: 73479 - protein, 10 aa, synthetic construct
ERPRGDFQNT

SEQ ID NO: 73480 - protein, 10 aa, synthetic construct
ERLRGDYNSL

SEQ ID NO: 73481 - protein, 10 aa, synthetic construct
ERLRGDYTSV

SEQ ID NO: 73482 - protein, 10 aa, synthetic construct
ERLRGDYTSM

SEQ ID NO: 73483 - protein, 10 aa, synthetic construct
ARQRGDRQGI

SEQ ID NO: 73484 - protein, 10 aa, synthetic construct
ERLRGDFQNT

SEQ ID NO: 73485 - protein, 10 aa, synthetic construct
ERIRGDRDYL

SEQ ID NO: 73486 - protein, 10 aa, synthetic construct
ERIRGDYTSV

SEQ ID NO: 73487 - protein, 10 aa, synthetic construct
ERIRGDLTVT

SEQ ID NO: 73488 - protein, 10 aa, synthetic construct
ERIRGDLIGR

SEQ ID NO: 73489 - protein, 10 aa, synthetic construct
ERMRGDRDYL

SEQ ID NO: 73490 - protein, 10 aa, synthetic construct
ERMRGDYTSV

SEQ ID NO: 73491 - protein, 10 aa, synthetic construct
ERMRGDLTVT

SEQ ID NO: 73492 - protein, 10 aa, synthetic construct
ERMRGDLIGR

SEQ ID NO: 73493 - protein, 10 aa, synthetic construct
ERWRGDYNSL

SEQ ID NO: 73494 - protein, 10 aa, synthetic construct
ARQRGDRSVV

SEQ ID NO: 73495 - protein, 10 aa, synthetic construct
ERWRGDYTSV

SEQ ID NO: 73496 - protein, 10 aa, synthetic construct
ERWRGDYTSM

SEQ ID NO: 73497 - protein, 10 aa, synthetic construct
ERWRGDFQNT

SEQ ID NO: 73498 - protein, 10 aa, synthetic construct
ERFRGDRDYL

SEQ ID NO: 73499 - protein, 10 aa, synthetic construct
ERFRGDYTSV

SEQ ID NO: 73500 - protein, 10 aa, synthetic construct
ERFRGDLTVT

SEQ ID NO: 73501 - protein, 10 aa, synthetic construct
ERFRGDLIGR

SEQ ID NO: 73502 - protein, 10 aa, synthetic construct
ERKRGDRDYL

SEQ ID NO: 73503 - protein, 10 aa, synthetic construct
ERKRGDYTSV

SEQ ID NO: 73504 - protein, 10 aa, synthetic construct
ERKRGDLTVT

SEQ ID NO: 73505 - protein, 10 aa, synthetic construct
ARQRGDLTVT

SEQ ID NO: 73506 - protein, 10 aa, synthetic construct
ERKRGDLIGR

SEQ ID NO: 73507 - protein, 10 aa, synthetic construct
ERRRGDYNSL

SEQ ID NO: 73508 - protein, 10 aa, synthetic construct
ERRRGDFNNT

SEQ ID NO: 73509 - protein, 10 aa, synthetic construct
ERRRGDFNNL

SEQ ID NO: 73510 - protein, 10 aa, synthetic construct
ERRRGDFQNT

SEQ ID NO: 73511 - protein, 10 aa, synthetic construct
ERHRGDYNSL

SEQ ID NO: 73512 - protein, 10 aa, synthetic construct
ERHRGDYTSV

SEQ ID NO: 73513 - protein, 10 aa, synthetic construct
ERHRGDYTSM

SEQ ID NO: 73514 - protein, 10 aa, synthetic construct
ERHRGDFQNT

SEQ ID NO: 73515 - protein, 10 aa, synthetic construct
ERSRGDYNSL

SEQ ID NO: 73516 - protein, 10 aa, synthetic construct
NSPRGDHGVL

SEQ ID NO: 73517 - protein, 10 aa, synthetic construct
ARQRGDLIGR

SEQ ID NO: 73518 - protein, 10 aa, synthetic construct
ERSRGDYTSV

SEQ ID NO: 73519 - protein, 10 aa, synthetic construct
ERSRGDYTSM

SEQ ID NO: 73520 - protein, 10 aa, synthetic construct
ERSRGDFQNT

SEQ ID NO: 73521 - protein, 10 aa, synthetic construct
ERTRGDYNSL

SEQ ID NO: 73522 - protein, 10 aa, synthetic construct
ERTRGDYTSV

SEQ ID NO: 73523 - protein, 10 aa, synthetic construct
ERTRGDYTSM

SEQ ID NO: 73524 - protein, 10 aa, synthetic construct
ERTRGDFQNT

SEQ ID NO: 73525 - protein, 10 aa, synthetic construct
ERYRGDRDYL

SEQ ID NO: 73526 - protein, 10 aa, synthetic construct
ERYRGDYTSV

SEQ ID NO: 73527 - protein, 10 aa, synthetic construct
ERYRGDLTVT

SEQ ID NO: 73528 - protein, 10 aa, synthetic construct
ARQRGDRSQT

SEQ ID NO: 73529 - protein, 10 aa, synthetic construct
ERYRGDLIGR

SEQ ID NO: 73530 - protein, 10 aa, synthetic construct
ERNRGDRDYL

SEQ ID NO: 73531 - protein, 10 aa, synthetic construct
ERNRGDYTSV

SEQ ID NO: 73532 - protein, 10 aa, synthetic construct
ERNRGDLTVT

SEQ ID NO: 73533 - protein, 10 aa, synthetic construct
ERNRGDLIGR

SEQ ID NO: 73534 - protein, 10 aa, synthetic construct
ERQRGDYNSL

SEQ ID NO: 73535 - protein, 10 aa, synthetic construct
ERQRGDYTSV

SEQ ID NO: 73536 - protein, 10 aa, synthetic construct
ERQRGDYTSM

SEQ ID NO: 73537 - protein, 10 aa, synthetic construct
ERQRGDFQNT

SEQ ID NO: 73538 - protein, 10 aa, synthetic construct
ERDRGDYNSL

SEQ ID NO: 73539 - protein, 10 aa, synthetic construct
ARQRGDLLLS

SEQ ID NO: 73540 - protein, 10 aa, synthetic construct
ERDRGDYTSV

SEQ ID NO: 73541 - protein, 10 aa, synthetic construct
ERDRGDYTSM

SEQ ID NO: 73542 - protein, 10 aa, synthetic construct
ERDRGDFQNT

SEQ ID NO: 73543 - protein, 10 aa, synthetic construct
ERERGDYNSL

SEQ ID NO: 73544 - protein, 10 aa, synthetic construct
ERERGDYTSV

SEQ ID NO: 73545 - protein, 10 aa, synthetic construct
ERERGDYTSM

SEQ ID NO: 73546 - protein, 10 aa, synthetic construct
ERERGDFQNT

SEQ ID NO: 73547 - protein, 10 aa, synthetic construct
EHGRGDYNSL

SEQ ID NO: 73548 - protein, 10 aa, synthetic construct
EHGRGDYTSV

SEQ ID NO: 73549 - protein, 10 aa, synthetic construct
EHGRGDYTSM

SEQ ID NO: 73550 - protein, 10 aa, synthetic construct
ARDRGDHGVL

SEQ ID NO: 73551 - protein, 10 aa, synthetic construct
EHGRGDFQNT

SEQ ID NO: 73552 - protein, 10 aa, synthetic construct
EHARGDYNSL

SEQ ID NO: 73553 - protein, 10 aa, synthetic construct
EHARGDYTSV

SEQ ID NO: 73554 - protein, 10 aa, synthetic construct
EHARGDYTSM

SEQ ID NO: 73555 - protein, 10 aa, synthetic construct
EHARGDFQNT

SEQ ID NO: 73556 - protein, 10 aa, synthetic construct
EHVRGDRDYL

SEQ ID NO: 73557 - protein, 10 aa, synthetic construct
EHVRGDYTSV

SEQ ID NO: 73558 - protein, 10 aa, synthetic construct
EHVRGDLTVT

SEQ ID NO: 73559 - protein, 10 aa, synthetic construct
EHVRGDLIGR

SEQ ID NO: 73560 - protein, 10 aa, synthetic construct
EHPRGDYNSL

SEQ ID NO: 73561 - protein, 10 aa, synthetic construct
ARDRGDRGQI

SEQ ID NO: 73562 - protein, 10 aa, synthetic construct
EHPRGDYTSV

SEQ ID NO: 73563 - protein, 10 aa, synthetic construct
EHPRGDYTSM

SEQ ID NO: 73564 - protein, 10 aa, synthetic construct
EHPRGDFQNT

SEQ ID NO: 73565 - protein, 10 aa, synthetic construct
EHLRGDRDYL

SEQ ID NO: 73566 - protein, 10 aa, synthetic construct
EHLRGDYTSV

SEQ ID NO: 73567 - protein, 10 aa, synthetic construct
EHLRGDLTVT

SEQ ID NO: 73568 - protein, 10 aa, synthetic construct
EHLRGDLIGR

SEQ ID NO: 73569 - protein, 10 aa, synthetic construct
EHIRGDHGVL

SEQ ID NO: 73570 - protein, 10 aa, synthetic construct
EHIRGDHVNL

SEQ ID NO: 73571 - protein, 10 aa, synthetic construct
EHIRGDRDYL

SEQ ID NO: 73572 - protein, 10 aa, synthetic construct
ARDRGDRQGI

SEQ ID NO: 73573 - protein, 10 aa, synthetic construct
EHIRGDYSSV

SEQ ID NO: 73574 - protein, 10 aa, synthetic construct
EHIRGDLTVT

SEQ ID NO: 73575 - protein, 10 aa, synthetic construct
EHMRGDHGVL

SEQ ID NO: 73576 - protein, 10 aa, synthetic construct
EHMRGDHVNL

SEQ ID NO: 73577 - protein, 10 aa, synthetic construct
EHMRGDRDYL

SEQ ID NO: 73578 - protein, 10 aa, synthetic construct
EHMRGDYSSV

SEQ ID NO: 73579 - protein, 10 aa, synthetic construct
EHMRGDLTVT

SEQ ID NO: 73580 - protein, 10 aa, synthetic construct
EHWRGDRDYL

SEQ ID NO: 73581 - protein, 10 aa, synthetic construct
EHWRGDYTSV

SEQ ID NO: 73582 - protein, 10 aa, synthetic construct
EHWRGDLTVT

SEQ ID NO: 73583 - protein, 10 aa, synthetic construct
ARDRGDRSVV

SEQ ID NO: 73584 - protein, 10 aa, synthetic construct
EHWRGDLIGR

SEQ ID NO: 73585 - protein, 10 aa, synthetic construct
EHFRGDHGVL

SEQ ID NO: 73586 - protein, 10 aa, synthetic construct
EHFRGDHVNL

SEQ ID NO: 73587 - protein, 10 aa, synthetic construct
EHFRGDRDYL

SEQ ID NO: 73588 - protein, 10 aa, synthetic construct
EHFRGDYSSV

SEQ ID NO: 73589 - protein, 10 aa, synthetic construct
EHFRGDLTVT

SEQ ID NO: 73590 - protein, 10 aa, synthetic construct
EHKRGDHGVL

SEQ ID NO: 73591 - protein, 10 aa, synthetic construct
EHKRGDHVNL

SEQ ID NO: 73592 - protein, 10 aa, synthetic construct
EHKRGDRDYL

SEQ ID NO: 73593 - protein, 10 aa, synthetic construct
EHKRGDYSSV

SEQ ID NO: 73594 - protein, 10 aa, synthetic construct
ARDRGDLTVT

SEQ ID NO: 73595 - protein, 10 aa, synthetic construct
EHKRGDLTVT

SEQ ID NO: 73596 - protein, 10 aa, synthetic construct
EHRRGDYNSL

SEQ ID NO: 73597 - protein, 10 aa, synthetic construct
EHRRGDYTSV

SEQ ID NO: 73598 - protein, 10 aa, synthetic construct
EHRRGDYTSM

SEQ ID NO: 73599 - protein, 10 aa, synthetic construct
EHRRGDFQNT

SEQ ID NO: 73600 - protein, 10 aa, synthetic construct
EHHRGDRDYL

SEQ ID NO: 73601 - protein, 10 aa, synthetic construct
EHHRGDYTSV

SEQ ID NO: 73602 - protein, 10 aa, synthetic construct
EHHRGDLTVT

SEQ ID NO: 73603 - protein, 10 aa, synthetic construct
EHHRGDLIGR

SEQ ID NO: 73604 - protein, 10 aa, synthetic construct
EHSRGDRDYL

SEQ ID NO: 73605 - protein, 10 aa, synthetic construct
ARDRGDLIGR

SEQ ID NO: 73606 - protein, 10 aa, synthetic construct
EHSRGDYTSV

SEQ ID NO: 73607 - protein, 10 aa, synthetic construct
EHSRGDLTVT

SEQ ID NO: 73608 - protein, 10 aa, synthetic construct
EHSRGDLIGR

SEQ ID NO: 73609 - protein, 10 aa, synthetic construct
EHTRGDRDYL

SEQ ID NO: 73610 - protein, 10 aa, synthetic construct
EHTRGDYTSV

SEQ ID NO: 73611 - protein, 10 aa, synthetic construct
EHTRGDLTVT

SEQ ID NO: 73612 - protein, 10 aa, synthetic construct
EHTRGDLIGR

SEQ ID NO: 73613 - protein, 10 aa, synthetic construct
EHYRGDHGVL

SEQ ID NO: 73614 - protein, 10 aa, synthetic construct
EHYRGDHVNL

SEQ ID NO: 73615 - protein, 10 aa, synthetic construct
EHYRGDRDYL

SEQ ID NO: 73616 - protein, 10 aa, synthetic construct
ARDRGDRSQT

SEQ ID NO: 73617 - protein, 10 aa, synthetic construct
EHYRGDYSSV

SEQ ID NO: 73618 - protein, 10 aa, synthetic construct
EHYRGDLTVT

SEQ ID NO: 73619 - protein, 10 aa, synthetic construct
EHNRGDHGVL

SEQ ID NO: 73620 - protein, 10 aa, synthetic construct
EHNRGDHVNL

SEQ ID NO: 73621 - protein, 10 aa, synthetic construct
EHNRGDRDYL

SEQ ID NO: 73622 - protein, 10 aa, synthetic construct
EHNRGDYSSV

SEQ ID NO: 73623 - protein, 10 aa, synthetic construct
EHNRGDLTVT

SEQ ID NO: 73624 - protein, 10 aa, synthetic construct
EHQRGDRDYL

SEQ ID NO: 73625 - protein, 10 aa, synthetic construct
EHQRGDYTSV

SEQ ID NO: 73626 - protein, 10 aa, synthetic construct
EHQRGDLTVT

SEQ ID NO: 73627 - protein, 10 aa, synthetic construct
NSPRGDHVNL

SEQ ID NO: 73628 - protein, 10 aa, synthetic construct
ARDRGDLLLS

SEQ ID NO: 73629 - protein, 10 aa, synthetic construct
EHQRGDLIGR

SEQ ID NO: 73630 - protein, 10 aa, synthetic construct
EHDRGDRDYL

SEQ ID NO: 73631 - protein, 10 aa, synthetic construct
EHDRGDYTSV

SEQ ID NO: 73632 - protein, 10 aa, synthetic construct
EHDRGDLTVT

SEQ ID NO: 73633 - protein, 10 aa, synthetic construct
EHDRGDLIGR

SEQ ID NO: 73634 - protein, 10 aa, synthetic construct
EHERGDRDYL

SEQ ID NO: 73635 - protein, 10 aa, synthetic construct
EHERGDYTSV

SEQ ID NO: 73636 - protein, 10 aa, synthetic construct
EHERGDLTVT

SEQ ID NO: 73637 - protein, 10 aa, synthetic construct
EHERGDLIGR

SEQ ID NO: 73638 - protein, 10 aa, synthetic construct
ESGRGDFNNT

SEQ ID NO: 73639 - protein, 10 aa, synthetic construct
ARERGDHGVL

SEQ ID NO: 73640 - protein, 10 aa, synthetic construct
ESGRGDFNNL

SEQ ID NO: 73641 - protein, 10 aa, synthetic construct
ESARGDFNNT

SEQ ID NO: 73642 - protein, 10 aa, synthetic construct
ESARGDFNNL

SEQ ID NO: 73643 - protein, 10 aa, synthetic construct
ESVRGDYNSL

SEQ ID NO: 73644 - protein, 10 aa, synthetic construct
ESVRGDYTSM

SEQ ID NO: 73645 - protein, 10 aa, synthetic construct
ESVRGDFQNT

SEQ ID NO: 73646 - protein, 10 aa, synthetic construct
ESLRGDYNSL

SEQ ID NO: 73647 - protein, 10 aa, synthetic construct
ESLRGDYTSM

SEQ ID NO: 73648 - protein, 10 aa, synthetic construct
ESLRGDFQNT

SEQ ID NO: 73649 - protein, 10 aa, synthetic construct
ESIRGDYTSV

SEQ ID NO: 73650 - protein, 10 aa, synthetic construct
ARERGDRGQI

SEQ ID NO: 73651 - protein, 10 aa, synthetic construct
ESIRGDLIGR

SEQ ID NO: 73652 - protein, 10 aa, synthetic construct
ESMRGDYTSV

SEQ ID NO: 73653 - protein, 10 aa, synthetic construct
ESMRGDLIGR

SEQ ID NO: 73654 - protein, 10 aa, synthetic construct
ESWRGDYNSL

SEQ ID NO: 73655 - protein, 10 aa, synthetic construct
ESWRGDYTSM

SEQ ID NO: 73656 - protein, 10 aa, synthetic construct
ESWRGDFQNT

SEQ ID NO: 73657 - protein, 10 aa, synthetic construct
ESFRGDYTSV

SEQ ID NO: 73658 - protein, 10 aa, synthetic construct
ESFRGDLIGR

SEQ ID NO: 73659 - protein, 10 aa, synthetic construct
ESKRGDYTSV

SEQ ID NO: 73660 - protein, 10 aa, synthetic construct
ESKRGDLIGR

SEQ ID NO: 73661 - protein, 10 aa, synthetic construct
ARERGDRQGI

SEQ ID NO: 73662 - protein, 10 aa, synthetic construct
ESRRGDFNNT

SEQ ID NO: 73663 - protein, 10 aa, synthetic construct
ESRRGDFNNL

SEQ ID NO: 73664 - protein, 10 aa, synthetic construct
ESHRGDYNSL

SEQ ID NO: 73665 - protein, 10 aa, synthetic construct
ESHRGDYTSM

SEQ ID NO: 73666 - protein, 10 aa, synthetic construct
ESHRGDFQNT

SEQ ID NO: 73667 - protein, 10 aa, synthetic construct
ESSRGDYNSL

SEQ ID NO: 73668 - protein, 10 aa, synthetic construct
ESSRGDYTSM

SEQ ID NO: 73669 - protein, 10 aa, synthetic construct
ESSRGDFQNT

SEQ ID NO: 73670 - protein, 10 aa, synthetic construct
ESTRGDYNSL

SEQ ID NO: 73671 - protein, 10 aa, synthetic construct
ESTRGDYTSM

SEQ ID NO: 73672 - protein, 10 aa, synthetic construct
ARERGDRSVV

SEQ ID NO: 73673 - protein, 10 aa, synthetic construct
ESTRGDFQNT

SEQ ID NO: 73674 - protein, 10 aa, synthetic construct
ESYRGDYTSV

SEQ ID NO: 73675 - protein, 10 aa, synthetic construct
ESYRGDLIGR

SEQ ID NO: 73676 - protein, 10 aa, synthetic construct
ESNRGDYTSV

SEQ ID NO: 73677 - protein, 10 aa, synthetic construct
ESNRGDLIGR

SEQ ID NO: 73678 - protein, 10 aa, synthetic construct
ESQRGDYNSL

SEQ ID NO: 73679 - protein, 10 aa, synthetic construct
ESQRGDYTSM

SEQ ID NO: 73680 - protein, 10 aa, synthetic construct
ESQRGDFQNT

SEQ ID NO: 73681 - protein, 10 aa, synthetic construct
ESDRGDYNSL

SEQ ID NO: 73682 - protein, 10 aa, synthetic construct
ESDRGDYTSM

SEQ ID NO: 73683 - protein, 10 aa, synthetic construct
ARERGDLTVT

SEQ ID NO: 73684 - protein, 10 aa, synthetic construct
ESDRGDFQNT

SEQ ID NO: 73685 - protein, 10 aa, synthetic construct
ESERGDYNSL

SEQ ID NO: 73686 - protein, 10 aa, synthetic construct
ESERGDYTSM

SEQ ID NO: 73687 - protein, 10 aa, synthetic construct
ESERGDFQNT

SEQ ID NO: 73688 - protein, 10 aa, synthetic construct
ETGRGDYNSL

SEQ ID NO: 73689 - protein, 10 aa, synthetic construct
ETGRGDYTSV

SEQ ID NO: 73690 - protein, 10 aa, synthetic construct
ETGRGDYTSM

SEQ ID NO: 73691 - protein, 10 aa, synthetic construct
ETGRGDFQNT

SEQ ID NO: 73692 - protein, 10 aa, synthetic construct
ETARGDYNSL

SEQ ID NO: 73693 - protein, 10 aa, synthetic construct
ETARGDYTSV

SEQ ID NO: 73694 - protein, 10 aa, synthetic construct
ARERGDLIGR

SEQ ID NO: 73695 - protein, 10 aa, synthetic construct
ETARGDYTSM

SEQ ID NO: 73696 - protein, 10 aa, synthetic construct
ETARGDFQNT

SEQ ID NO: 73697 - protein, 10 aa, synthetic construct
ETVRGDRDYL

SEQ ID NO: 73698 - protein, 10 aa, synthetic construct
ETVRGDYTSV

SEQ ID NO: 73699 - protein, 10 aa, synthetic construct
ETVRGDLTVT

SEQ ID NO: 73700 - protein, 10 aa, synthetic construct
ETVRGDLIGR

SEQ ID NO: 73701 - protein, 10 aa, synthetic construct
ETPRGDYNSL

SEQ ID NO: 73702 - protein, 10 aa, synthetic construct
ETPRGDYTSV

SEQ ID NO: 73703 - protein, 10 aa, synthetic construct
ETPRGDYTSM

SEQ ID NO: 73704 - protein, 10 aa, synthetic construct
ETPRGDFQNT

SEQ ID NO: 73705 - protein, 10 aa, synthetic construct
ARERGDRSQT

SEQ ID NO: 73706 - protein, 10 aa, synthetic construct
ETLRGDRDYL

SEQ ID NO: 73707 - protein, 10 aa, synthetic construct
ETLRGDYTSV

SEQ ID NO: 73708 - protein, 10 aa, synthetic construct
ETLRGDLTVT

SEQ ID NO: 73709 - protein, 10 aa, synthetic construct
ETLRGDLIGR

SEQ ID NO: 73710 - protein, 10 aa, synthetic construct
ETIRGDHGVL

SEQ ID NO: 73711 - protein, 10 aa, synthetic construct
ETIRGDHVNL

SEQ ID NO: 73712 - protein, 10 aa, synthetic construct
ETIRGDRDYL

SEQ ID NO: 73713 - protein, 10 aa, synthetic construct
ETIRGDYSSV

SEQ ID NO: 73714 - protein, 10 aa, synthetic construct
ETIRGDLTVT

SEQ ID NO: 73715 - protein, 10 aa, synthetic construct
ETMRGDHGVL

SEQ ID NO: 73716 - protein, 10 aa, synthetic construct
ARERGDLLLS

SEQ ID NO: 73717 - protein, 10 aa, synthetic construct
ETMRGDHVNL

SEQ ID NO: 73718 - protein, 10 aa, synthetic construct
ETMRGDRDYL

SEQ ID NO: 73719 - protein, 10 aa, synthetic construct
ETMRGDYSSV

SEQ ID NO: 73720 - protein, 10 aa, synthetic construct
ETMRGDLTVT

SEQ ID NO: 73721 - protein, 10 aa, synthetic construct
ETWRGDRDYL

SEQ ID NO: 73722 - protein, 10 aa, synthetic construct
ETWRGDYTSV

SEQ ID NO: 73723 - protein, 10 aa, synthetic construct
ETWRGDLTVT

SEQ ID NO: 73724 - protein, 10 aa, synthetic construct
ETWRGDLIGR

SEQ ID NO: 73725 - protein, 10 aa, synthetic construct
ETFRGDHGVL

SEQ ID NO: 73726 - protein, 10 aa, synthetic construct
ETFRGDHVNL

SEQ ID NO: 73727 - protein, 10 aa, synthetic construct
AHGRGDHGVL

SEQ ID NO: 73728 - protein, 10 aa, synthetic construct
ETFRGDRDYL

SEQ ID NO: 73729 - protein, 10 aa, synthetic construct
ETFRGDYSSV

SEQ ID NO: 73730 - protein, 10 aa, synthetic construct
ETFRGDLTVT

SEQ ID NO: 73731 - protein, 10 aa, synthetic construct
ETKRGDHGVL

SEQ ID NO: 73732 - protein, 10 aa, synthetic construct
ETKRGDHVNL

SEQ ID NO: 73733 - protein, 10 aa, synthetic construct
ETKRGDRDYL

SEQ ID NO: 73734 - protein, 10 aa, synthetic construct
ETKRGDYSSV

SEQ ID NO: 73735 - protein, 10 aa, synthetic construct
ETKRGDLTVT

SEQ ID NO: 73736 - protein, 10 aa, synthetic construct
ETRRGDYNSL

SEQ ID NO: 73737 - protein, 10 aa, synthetic construct
ETRRGDYTSV

SEQ ID NO: 73738 - protein, 10 aa, synthetic construct
NSPRGDYVGL

SEQ ID NO: 73739 - protein, 10 aa, synthetic construct
AHGRGDRGQI

SEQ ID NO: 73740 - protein, 10 aa, synthetic construct
ETRRGDYTSM

SEQ ID NO: 73741 - protein, 10 aa, synthetic construct
ETRRGDFQNT

SEQ ID NO: 73742 - protein, 10 aa, synthetic construct
ETHRGDRDYL

SEQ ID NO: 73743 - protein, 10 aa, synthetic construct
ETHRGDYTSV

SEQ ID NO: 73744 - protein, 10 aa, synthetic construct
ETHRGDLTVT

SEQ ID NO: 73745 - protein, 10 aa, synthetic construct
ETHRGDLIGR

SEQ ID NO: 73746 - protein, 10 aa, synthetic construct
ETSRGDRDYL

SEQ ID NO: 73747 - protein, 10 aa, synthetic construct
ETSRGDYTSV

SEQ ID NO: 73748 - protein, 10 aa, synthetic construct
ETSRGDLTVT

SEQ ID NO: 73749 - protein, 10 aa, synthetic construct
ETSRGDLIGR

SEQ ID NO: 73750 - protein, 10 aa, synthetic construct
AHGRGDRQGI

SEQ ID NO: 73751 - protein, 10 aa, synthetic construct
ETTRGDRDYL

SEQ ID NO: 73752 - protein, 10 aa, synthetic construct
ETTRGDYTSV

SEQ ID NO: 73753 - protein, 10 aa, synthetic construct
ETTRGDLTVT

SEQ ID NO: 73754 - protein, 10 aa, synthetic construct
ETTRGDLIGR

SEQ ID NO: 73755 - protein, 10 aa, synthetic construct
ETYRGDHGVL

SEQ ID NO: 73756 - protein, 10 aa, synthetic construct
ETYRGDHVNL

SEQ ID NO: 73757 - protein, 10 aa, synthetic construct
ETYRGDRDYL

SEQ ID NO: 73758 - protein, 10 aa, synthetic construct
ETYRGDYSSV

SEQ ID NO: 73759 - protein, 10 aa, synthetic construct
ETYRGDLTVT

SEQ ID NO: 73760 - protein, 10 aa, synthetic construct
ETNRGDHGVL

SEQ ID NO: 73761 - protein, 10 aa, synthetic construct
AHGRGDRSVV

SEQ ID NO: 73762 - protein, 10 aa, synthetic construct
ETNRGDHVNL

SEQ ID NO: 73763 - protein, 10 aa, synthetic construct
ETNRGDRDYL

SEQ ID NO: 73764 - protein, 10 aa, synthetic construct
ETNRGDYSSV

SEQ ID NO: 73765 - protein, 10 aa, synthetic construct
ETNRGDLTVT

SEQ ID NO: 73766 - protein, 10 aa, synthetic construct
ETQRGDRDYL

SEQ ID NO: 73767 - protein, 10 aa, synthetic construct
ETQRGDYTSV

SEQ ID NO: 73768 - protein, 10 aa, synthetic construct
ETQRGDLTVT

SEQ ID NO: 73769 - protein, 10 aa, synthetic construct
ETQRGDLIGR

SEQ ID NO: 73770 - protein, 10 aa, synthetic construct
ETDRGDRDYL

SEQ ID NO: 73771 - protein, 10 aa, synthetic construct
ETDRGDYTSV

SEQ ID NO: 73772 - protein, 10 aa, synthetic construct
AHGRGDLTVT

SEQ ID NO: 73773 - protein, 10 aa, synthetic construct
ETDRGDLTVT

SEQ ID NO: 73774 - protein, 10 aa, synthetic construct
ETDRGDLIGR

SEQ ID NO: 73775 - protein, 10 aa, synthetic construct
ETERGDRDYL

SEQ ID NO: 73776 - protein, 10 aa, synthetic construct
ETERGDYTSV

SEQ ID NO: 73777 - protein, 10 aa, synthetic construct
ETERGDLTVT

SEQ ID NO: 73778 - protein, 10 aa, synthetic construct
ETERGDLIGR

SEQ ID NO: 73779 - protein, 10 aa, synthetic construct
EYGRGDRDYL

SEQ ID NO: 73780 - protein, 10 aa, synthetic construct
EYGRGDYTSV

SEQ ID NO: 73781 - protein, 10 aa, synthetic construct
EYGRGDLTVT

SEQ ID NO: 73782 - protein, 10 aa, synthetic construct
EYGRGDLIGR

SEQ ID NO: 73783 - protein, 10 aa, synthetic construct
AHGRGDLIGR

SEQ ID NO: 73784 - protein, 10 aa, synthetic construct
EYARGDRDYL

SEQ ID NO: 73785 - protein, 10 aa, synthetic construct
EYARGDYTSV

SEQ ID NO: 73786 - protein, 10 aa, synthetic construct
EYARGDLTVT

SEQ ID NO: 73787 - protein, 10 aa, synthetic construct
EYARGDLIGR

SEQ ID NO: 73788 - protein, 10 aa, synthetic construct
EYVRGDHGVL

SEQ ID NO: 73789 - protein, 10 aa, synthetic construct
EYVRGDHVNL

SEQ ID NO: 73790 - protein, 10 aa, synthetic construct
EYVRGDRDYL

SEQ ID NO: 73791 - protein, 10 aa, synthetic construct
EYVRGDYSSV

SEQ ID NO: 73792 - protein, 10 aa, synthetic construct
EYVRGDLTVT

SEQ ID NO: 73793 - protein, 10 aa, synthetic construct
EYPRGDRDYL

SEQ ID NO: 73794 - protein, 10 aa, synthetic construct
AHGRGDRSQT

SEQ ID NO: 73795 - protein, 10 aa, synthetic construct
EYPRGDYTSV

SEQ ID NO: 73796 - protein, 10 aa, synthetic construct
EYPRGDLTVT

SEQ ID NO: 73797 - protein, 10 aa, synthetic construct
EYPRGDLIGR

SEQ ID NO: 73798 - protein, 10 aa, synthetic construct
EYLRGDHGVL

SEQ ID NO: 73799 - protein, 10 aa, synthetic construct
EYLRGDHVNL

SEQ ID NO: 73800 - protein, 10 aa, synthetic construct
EYLRGDRDYL

SEQ ID NO: 73801 - protein, 10 aa, synthetic construct
EYLRGDYSSV

SEQ ID NO: 73802 - protein, 10 aa, synthetic construct
EYLRGDLTVT

SEQ ID NO: 73803 - protein, 10 aa, synthetic construct
EYIRGDHGVL

SEQ ID NO: 73804 - protein, 10 aa, synthetic construct
EYIRGDRGQI

SEQ ID NO: 73805 - protein, 10 aa, synthetic construct
AHGRGDLLLS

SEQ ID NO: 73806 - protein, 10 aa, synthetic construct
EYIRGDRQGI

SEQ ID NO: 73807 - protein, 10 aa, synthetic construct
EYIRGDRGVV

SEQ ID NO: 73808 - protein, 10 aa, synthetic construct
EYIRGDYVGL

SEQ ID NO: 73809 - protein, 10 aa, synthetic construct
EYIRGDLIGR

SEQ ID NO: 73810 - protein, 10 aa, synthetic construct
EYIRGDQSTL

SEQ ID NO: 73811 - protein, 10 aa, synthetic construct
EYIRGDLLLS

SEQ ID NO: 73812 - protein, 10 aa, synthetic construct
EYMRGDHGVL

SEQ ID NO: 73813 - protein, 10 aa, synthetic construct
EYMRGDRGQI

SEQ ID NO: 73814 - protein, 10 aa, synthetic construct
EYMRGDRQGI

SEQ ID NO: 73815 - protein, 10 aa, synthetic construct
EYMRGDRGVV

SEQ ID NO: 73816 - protein, 10 aa, synthetic construct
AHARGDHGVL

SEQ ID NO: 73817 - protein, 10 aa, synthetic construct
EYMRGDYVGL

SEQ ID NO: 73818 - protein, 10 aa, synthetic construct
EYMRGDLIGR

SEQ ID NO: 73819 - protein, 10 aa, synthetic construct
EYMRGDQSTL

SEQ ID NO: 73820 - protein, 10 aa, synthetic construct
EYMRGDLLLS

SEQ ID NO: 73821 - protein, 10 aa, synthetic construct
EYWRGDHGVL

SEQ ID NO: 73822 - protein, 10 aa, synthetic construct
EYWRGDHVNL

SEQ ID NO: 73823 - protein, 10 aa, synthetic construct
EYWRGDRDYL

SEQ ID NO: 73824 - protein, 10 aa, synthetic construct
EYWRGDYSSV

SEQ ID NO: 73825 - protein, 10 aa, synthetic construct
EYWRGDLTVT

SEQ ID NO: 73826 - protein, 10 aa, synthetic construct
EYFRGDHGVL

SEQ ID NO: 73827 - protein, 10 aa, synthetic construct
AHARGDRGQI

SEQ ID NO: 73828 - protein, 10 aa, synthetic construct
EYFRGDRGQI

SEQ ID NO: 73829 - protein, 10 aa, synthetic construct
EYFRGDRQGI

SEQ ID NO: 73830 - protein, 10 aa, synthetic construct
EYFRGDRGVV

SEQ ID NO: 73831 - protein, 10 aa, synthetic construct
EYFRGDYVGL

SEQ ID NO: 73832 - protein, 10 aa, synthetic construct
EYFRGDLIGR

SEQ ID NO: 73833 - protein, 10 aa, synthetic construct
EYFRGDQSTL

SEQ ID NO: 73834 - protein, 10 aa, synthetic construct
EYFRGDLLLS

SEQ ID NO: 73835 - protein, 10 aa, synthetic construct
EYKRGDHGVL

SEQ ID NO: 73836 - protein, 10 aa, synthetic construct
EYKRGDRGQI

SEQ ID NO: 73837 - protein, 10 aa, synthetic construct
EYKRGDRQGI

SEQ ID NO: 73838 - protein, 10 aa, synthetic construct
AHARGDRQGI

SEQ ID NO: 73839 - protein, 10 aa, synthetic construct
EYKRGDRGVV

SEQ ID NO: 73840 - protein, 10 aa, synthetic construct
EYKRGDYVGL

SEQ ID NO: 73841 - protein, 10 aa, synthetic construct
EYKRGDLIGR

SEQ ID NO: 73842 - protein, 10 aa, synthetic construct
EYKRGDQSTL

SEQ ID NO: 73843 - protein, 10 aa, synthetic construct
EYKRGDLLLS

SEQ ID NO: 73844 - protein, 10 aa, synthetic construct
EYRRGDRDYL

SEQ ID NO: 73845 - protein, 10 aa, synthetic construct
EYRRGDYTSV

SEQ ID NO: 73846 - protein, 10 aa, synthetic construct
EYRRGDLTVT

SEQ ID NO: 73847 - protein, 10 aa, synthetic construct
EYRRGDLIGR

SEQ ID NO: 73848 - protein, 10 aa, synthetic construct
EYHRGDHGVL

SEQ ID NO: 73849 - protein, 10 aa, synthetic construct
NSPRGDYSSV

SEQ ID NO: 73850 - protein, 10 aa, synthetic construct
AHARGDRSVV

SEQ ID NO: 73851 - protein, 10 aa, synthetic construct
EYHRGDHVNL

SEQ ID NO: 73852 - protein, 10 aa, synthetic construct
EYHRGDRDYL

SEQ ID NO: 73853 - protein, 10 aa, synthetic construct
EYHRGDYSSV

SEQ ID NO: 73854 - protein, 10 aa, synthetic construct
EYHRGDLTVT

SEQ ID NO: 73855 - protein, 10 aa, synthetic construct
EYSRGDHGVL

SEQ ID NO: 73856 - protein, 10 aa, synthetic construct
EYSRGDHVNL

SEQ ID NO: 73857 - protein, 10 aa, synthetic construct
EYSRGDRDYL

SEQ ID NO: 73858 - protein, 10 aa, synthetic construct
EYSRGDYSSV

SEQ ID NO: 73859 - protein, 10 aa, synthetic construct
EYSRGDLTVT

SEQ ID NO: 73860 - protein, 10 aa, synthetic construct
EYTRGDHGVL

SEQ ID NO: 73861 - protein, 10 aa, synthetic construct
AHARGDLTVT

SEQ ID NO: 73862 - protein, 10 aa, synthetic construct
EYTRGDHVNL

SEQ ID NO: 73863 - protein, 10 aa, synthetic construct
EYTRGDRDYL

SEQ ID NO: 73864 - protein, 10 aa, synthetic construct
EYTRGDYSSV

SEQ ID NO: 73865 - protein, 10 aa, synthetic construct
EYTRGDLTVT

SEQ ID NO: 73866 - protein, 10 aa, synthetic construct
EYYRGDHGVL

SEQ ID NO: 73867 - protein, 10 aa, synthetic construct
EYYRGDRGQI

SEQ ID NO: 73868 - protein, 10 aa, synthetic construct
EYYRGDRQGI

SEQ ID NO: 73869 - protein, 10 aa, synthetic construct
EYYRGDRGVV

SEQ ID NO: 73870 - protein, 10 aa, synthetic construct
EYYRGDYVGL

SEQ ID NO: 73871 - protein, 10 aa, synthetic construct
EYYRGDLIGR

SEQ ID NO: 73872 - protein, 10 aa, synthetic construct
AHARGDLIGR

SEQ ID NO: 73873 - protein, 10 aa, synthetic construct
EYYRGDQSTL

SEQ ID NO: 73874 - protein, 10 aa, synthetic construct
EYYRGDLLLS

SEQ ID NO: 73875 - protein, 10 aa, synthetic construct
EYNRGDHGVL

SEQ ID NO: 73876 - protein, 10 aa, synthetic construct
EYNRGDRGQI

SEQ ID NO: 73877 - protein, 10 aa, synthetic construct
EYNRGDRQGI

SEQ ID NO: 73878 - protein, 10 aa, synthetic construct
EYNRGDRGVV

SEQ ID NO: 73879 - protein, 10 aa, synthetic construct
EYNRGDYVGL

SEQ ID NO: 73880 - protein, 10 aa, synthetic construct
EYNRGDLIGR

SEQ ID NO: 73881 - protein, 10 aa, synthetic construct
EYNRGDQSTL

SEQ ID NO: 73882 - protein, 10 aa, synthetic construct
EYNRGDLLLS

SEQ ID NO: 73883 - protein, 10 aa, synthetic construct
AHARGDRSQT

SEQ ID NO: 73884 - protein, 10 aa, synthetic construct
EYQRGDHGVL

SEQ ID NO: 73885 - protein, 10 aa, synthetic construct
EYQRGDHVNL

SEQ ID NO: 73886 - protein, 10 aa, synthetic construct
EYQRGDRDYL

SEQ ID NO: 73887 - protein, 10 aa, synthetic construct
EYQRGDYSSV

SEQ ID NO: 73888 - protein, 10 aa, synthetic construct
EYQRGDLTVT

SEQ ID NO: 73889 - protein, 10 aa, synthetic construct
EYDRGDHGVL

SEQ ID NO: 73890 - protein, 10 aa, synthetic construct
EYDRGDHVNL

SEQ ID NO: 73891 - protein, 10 aa, synthetic construct
EYDRGDRDYL

SEQ ID NO: 73892 - protein, 10 aa, synthetic construct
EYDRGDYSSV

SEQ ID NO: 73893 - protein, 10 aa, synthetic construct
EYDRGDLTVT

SEQ ID NO: 73894 - protein, 10 aa, synthetic construct
AHARGDLLLS

SEQ ID NO: 73895 - protein, 10 aa, synthetic construct
EYERGDHGVL

SEQ ID NO: 73896 - protein, 10 aa, synthetic construct
EYERGDHVNL

SEQ ID NO: 73897 - protein, 10 aa, synthetic construct
EYERGDRDYL

SEQ ID NO: 73898 - protein, 10 aa, synthetic construct
EYERGDYSSV

SEQ ID NO: 73899 - protein, 10 aa, synthetic construct
EYERGDLTVT

SEQ ID NO: 73900 - protein, 10 aa, synthetic construct
ENGRGDRDYL

SEQ ID NO: 73901 - protein, 10 aa, synthetic construct
ENGRGDYTSV

SEQ ID NO: 73902 - protein, 10 aa, synthetic construct
ENGRGDLTVT

SEQ ID NO: 73903 - protein, 10 aa, synthetic construct
ENGRGDLIGR

SEQ ID NO: 73904 - protein, 10 aa, synthetic construct
ENARGDRDYL

SEQ ID NO: 73905 - protein, 10 aa, synthetic construct
AHVRGDHGVL

SEQ ID NO: 73906 - protein, 10 aa, synthetic construct
ENARGDYTSV

SEQ ID NO: 73907 - protein, 10 aa, synthetic construct
ENARGDLTVT

SEQ ID NO: 73908 - protein, 10 aa, synthetic construct
ENARGDLIGR

SEQ ID NO: 73909 - protein, 10 aa, synthetic construct
ENVRGDHGVL

SEQ ID NO: 73910 - protein, 10 aa, synthetic construct
ENVRGDHVNL

SEQ ID NO: 73911 - protein, 10 aa, synthetic construct
ENVRGDRDYL

SEQ ID NO: 73912 - protein, 10 aa, synthetic construct
ENVRGDYSSV

SEQ ID NO: 73913 - protein, 10 aa, synthetic construct
ENVRGDLTVT

SEQ ID NO: 73914 - protein, 10 aa, synthetic construct
ENPRGDRDYL

SEQ ID NO: 73915 - protein, 10 aa, synthetic construct
ENPRGDYTSV

SEQ ID NO: 73916 - protein, 10 aa, synthetic construct
AHVRGDRGQI

SEQ ID NO: 73917 - protein, 10 aa, synthetic construct
ENPRGDLTVT

SEQ ID NO: 73918 - protein, 10 aa, synthetic construct
ENPRGDLIGR

SEQ ID NO: 73919 - protein, 10 aa, synthetic construct
ENLRGDHGVL

SEQ ID NO: 73920 - protein, 10 aa, synthetic construct
ENLRGDHVNL

SEQ ID NO: 73921 - protein, 10 aa, synthetic construct
ENLRGDRDYL

SEQ ID NO: 73922 - protein, 10 aa, synthetic construct
ENLRGDYSSV

SEQ ID NO: 73923 - protein, 10 aa, synthetic construct
ENLRGDLTVT

SEQ ID NO: 73924 - protein, 10 aa, synthetic construct
ENIRGDHGVL

SEQ ID NO: 73925 - protein, 10 aa, synthetic construct
ENIRGDRGQI

SEQ ID NO: 73926 - protein, 10 aa, synthetic construct
ENIRGDRQGI

SEQ ID NO: 73927 - protein, 10 aa, synthetic construct
AHVRGDRQGI

SEQ ID NO: 73928 - protein, 10 aa, synthetic construct
ENIRGDRGVV

SEQ ID NO: 73929 - protein, 10 aa, synthetic construct
ENIRGDYVGL

SEQ ID NO: 73930 - protein, 10 aa, synthetic construct
ENIRGDLIGR

SEQ ID NO: 73931 - protein, 10 aa, synthetic construct
ENIRGDQSTL

SEQ ID NO: 73932 - protein, 10 aa, synthetic construct
ENIRGDLLLS

SEQ ID NO: 73933 - protein, 10 aa, synthetic construct
ENMRGDHGVL

SEQ ID NO: 73934 - protein, 10 aa, synthetic construct
ENMRGDRGQI

SEQ ID NO: 73935 - protein, 10 aa, synthetic construct
ENMRGDRQGI

SEQ ID NO: 73936 - protein, 10 aa, synthetic construct
ENMRGDRGVV

SEQ ID NO: 73937 - protein, 10 aa, synthetic construct
ENMRGDYVGL

SEQ ID NO: 73938 - protein, 10 aa, synthetic construct
AHVRGDRSVV

SEQ ID NO: 73939 - protein, 10 aa, synthetic construct
ENMRGDLIGR

SEQ ID NO: 73940 - protein, 10 aa, synthetic construct
ENMRGDQSTL

SEQ ID NO: 73941 - protein, 10 aa, synthetic construct
ENMRGDLLLS

SEQ ID NO: 73942 - protein, 10 aa, synthetic construct
ENWRGDHGVL

SEQ ID NO: 73943 - protein, 10 aa, synthetic construct
ENWRGDHVNL

SEQ ID NO: 73944 - protein, 10 aa, synthetic construct
ENWRGDRDYL

SEQ ID NO: 73945 - protein, 10 aa, synthetic construct
ENWRGDYSSV

SEQ ID NO: 73946 - protein, 10 aa, synthetic construct
ENWRGDLTVT

SEQ ID NO: 73947 - protein, 10 aa, synthetic construct
ENFRGDHGVL

SEQ ID NO: 73948 - protein, 10 aa, synthetic construct
ENFRGDRGQI

SEQ ID NO: 73949 - protein, 10 aa, synthetic construct
AHVRGDLTVT

SEQ ID NO: 73950 - protein, 10 aa, synthetic construct
ENFRGDRQGI

SEQ ID NO: 73951 - protein, 10 aa, synthetic construct
ENFRGDRGVV

SEQ ID NO: 73952 - protein, 10 aa, synthetic construct
ENFRGDYVGL

SEQ ID NO: 73953 - protein, 10 aa, synthetic construct
ENFRGDLIGR

SEQ ID NO: 73954 - protein, 10 aa, synthetic construct
ENFRGDQSTL

SEQ ID NO: 73955 - protein, 10 aa, synthetic construct
ENFRGDLLLS

SEQ ID NO: 73956 - protein, 10 aa, synthetic construct
ENKRGDHGVL

SEQ ID NO: 73957 - protein, 10 aa, synthetic construct
ENKRGDRGQI

SEQ ID NO: 73958 - protein, 10 aa, synthetic construct
ENKRGDRQGI

SEQ ID NO: 73959 - protein, 10 aa, synthetic construct
ENKRGDRGVV

SEQ ID NO: 73960 - protein, 10 aa, synthetic construct
SKNRGDYVGL

SEQ ID NO: 73961 - protein, 10 aa, synthetic construct
NSPRGDQSTL

SEQ ID NO: 73962 - protein, 10 aa, synthetic construct
AHVRGDLIGR

SEQ ID NO: 73963 - protein, 10 aa, synthetic construct
ENKRGDYVGL

SEQ ID NO: 73964 - protein, 10 aa, synthetic construct
ENKRGDLIGR

SEQ ID NO: 73965 - protein, 10 aa, synthetic construct
ENKRGDQSTL

SEQ ID NO: 73966 - protein, 10 aa, synthetic construct
ENKRGDLLLS

SEQ ID NO: 73967 - protein, 10 aa, synthetic construct
ENRRGDRDYL

SEQ ID NO: 73968 - protein, 10 aa, synthetic construct
ENRRGDYTSV

SEQ ID NO: 73969 - protein, 10 aa, synthetic construct
ENRRGDLTVT

SEQ ID NO: 73970 - protein, 10 aa, synthetic construct
ENRRGDLIGR

SEQ ID NO: 73971 - protein, 10 aa, synthetic construct
ENHRGDHGVL

SEQ ID NO: 73972 - protein, 10 aa, synthetic construct
ENHRGDHVNL

SEQ ID NO: 73973 - protein, 10 aa, synthetic construct
AHVRGDRSQT

SEQ ID NO: 73974 - protein, 10 aa, synthetic construct
ENHRGDRDYL

SEQ ID NO: 73975 - protein, 10 aa, synthetic construct
ENHRGDYSSV

SEQ ID NO: 73976 - protein, 10 aa, synthetic construct
ENHRGDLTVT

SEQ ID NO: 73977 - protein, 10 aa, synthetic construct
ENSRGDHGVL

SEQ ID NO: 73978 - protein, 10 aa, synthetic construct
ENSRGDHVNL

SEQ ID NO: 73979 - protein, 10 aa, synthetic construct
ENSRGDRDYL

SEQ ID NO: 73980 - protein, 10 aa, synthetic construct
ENSRGDYSSV

SEQ ID NO: 73981 - protein, 10 aa, synthetic construct
ENSRGDLTVT

SEQ ID NO: 73982 - protein, 10 aa, synthetic construct
ENTRGDHGVL

SEQ ID NO: 73983 - protein, 10 aa, synthetic construct
ENTRGDHVNL

SEQ ID NO: 73984 - protein, 10 aa, synthetic construct
AHVRGDLLLS

SEQ ID NO: 73985 - protein, 10 aa, synthetic construct
ENTRGDRDYL

SEQ ID NO: 73986 - protein, 10 aa, synthetic construct
ENTRGDYSSV

SEQ ID NO: 73987 - protein, 10 aa, synthetic construct
ENTRGDLTVT

SEQ ID NO: 73988 - protein, 10 aa, synthetic construct
ENYRGDHGVL

SEQ ID NO: 73989 - protein, 10 aa, synthetic construct
ENYRGDRGQI

SEQ ID NO: 73990 - protein, 10 aa, synthetic construct
ENYRGDRQGI

SEQ ID NO: 73991 - protein, 10 aa, synthetic construct
ENYRGDRGVV

SEQ ID NO: 73992 - protein, 10 aa, synthetic construct
ENYRGDYVGL

SEQ ID NO: 73993 - protein, 10 aa, synthetic construct
ENYRGDLIGR

SEQ ID NO: 73994 - protein, 10 aa, synthetic construct
ENYRGDQSTL

SEQ ID NO: 73995 - protein, 10 aa, synthetic construct
AHPRGDHGVL

SEQ ID NO: 73996 - protein, 10 aa, synthetic construct
ENYRGDLLLS

SEQ ID NO: 73997 - protein, 10 aa, synthetic construct
ENNRGDHGVL

SEQ ID NO: 73998 - protein, 10 aa, synthetic construct
ENNRGDRGQI

SEQ ID NO: 73999 - protein, 10 aa, synthetic construct
ENNRGDRQGI

SEQ ID NO: 74000 - protein, 10 aa, synthetic construct
ENNRGDRGVV

SEQ ID NO: 74001 - protein, 10 aa, synthetic construct
ENNRGDYVGL

SEQ ID NO: 74002 - protein, 10 aa, synthetic construct
ENNRGDLIGR

SEQ ID NO: 74003 - protein, 10 aa, synthetic construct
ENNRGDQSTL

SEQ ID NO: 74004 - protein, 10 aa, synthetic construct
ENNRGDLLLS

SEQ ID NO: 74005 - protein, 10 aa, synthetic construct
ENQRGDHGVL

SEQ ID NO: 74006 - protein, 10 aa, synthetic construct
AHPRGDRGQI

SEQ ID NO: 74007 - protein, 10 aa, synthetic construct
ENQRGDHVNL

SEQ ID NO: 74008 - protein, 10 aa, synthetic construct
ENQRGDRDYL

SEQ ID NO: 74009 - protein, 10 aa, synthetic construct
ENQRGDYSSV

SEQ ID NO: 74010 - protein, 10 aa, synthetic construct
ENQRGDLTVT

SEQ ID NO: 74011 - protein, 10 aa, synthetic construct
ENDRGDHGVL

SEQ ID NO: 74012 - protein, 10 aa, synthetic construct
ENDRGDHVNL

SEQ ID NO: 74013 - protein, 10 aa, synthetic construct
ENDRGDRDYL

SEQ ID NO: 74014 - protein, 10 aa, synthetic construct
ENDRGDYSSV

SEQ ID NO: 74015 - protein, 10 aa, synthetic construct
ENDRGDLTVT

SEQ ID NO: 74016 - protein, 10 aa, synthetic construct
ENERGDHGVL

SEQ ID NO: 74017 - protein, 10 aa, synthetic construct
AHPRGDRQGI

SEQ ID NO: 74018 - protein, 10 aa, synthetic construct
ENERGDHVNL

SEQ ID NO: 74019 - protein, 10 aa, synthetic construct
ENERGDRDYL

SEQ ID NO: 74020 - protein, 10 aa, synthetic construct
ENERGDYSSV

SEQ ID NO: 74021 - protein, 10 aa, synthetic construct
ENERGDLTVT

SEQ ID NO: 74022 - protein, 10 aa, synthetic construct
EQGRGDYNSL

SEQ ID NO: 74023 - protein, 10 aa, synthetic construct
EQGRGDYTSV

SEQ ID NO: 74024 - protein, 10 aa, synthetic construct
EQGRGDYTSM

SEQ ID NO: 74025 - protein, 10 aa, synthetic construct
EQGRGDFQNT

SEQ ID NO: 74026 - protein, 10 aa, synthetic construct
EQARGDYNSL

SEQ ID NO: 74027 - protein, 10 aa, synthetic construct
EQARGDYTSV

SEQ ID NO: 74028 - protein, 10 aa, synthetic construct
AHPRGDRSVV

SEQ ID NO: 74029 - protein, 10 aa, synthetic construct
EQARGDYTSM

SEQ ID NO: 74030 - protein, 10 aa, synthetic construct
EQARGDFQNT

SEQ ID NO: 74031 - protein, 10 aa, synthetic construct
EQVRGDRDYL

SEQ ID NO: 74032 - protein, 10 aa, synthetic construct
EQVRGDYTSV

SEQ ID NO: 74033 - protein, 10 aa, synthetic construct
EQVRGDLTVT

SEQ ID NO: 74034 - protein, 10 aa, synthetic construct
EQVRGDLIGR

SEQ ID NO: 74035 - protein, 10 aa, synthetic construct
EQPRGDYNSL

SEQ ID NO: 74036 - protein, 10 aa, synthetic construct
EQPRGDYTSV

SEQ ID NO: 74037 - protein, 10 aa, synthetic construct
EQPRGDYTSM

SEQ ID NO: 74038 - protein, 10 aa, synthetic construct
EQPRGDFQNT

SEQ ID NO: 74039 - protein, 10 aa, synthetic construct
AHPRGDLTVT

SEQ ID NO: 74040 - protein, 10 aa, synthetic construct
EQLRGDRDYL

SEQ ID NO: 74041 - protein, 10 aa, synthetic construct
EQLRGDYTSV

SEQ ID NO: 74042 - protein, 10 aa, synthetic construct
EQLRGDLTVT

SEQ ID NO: 74043 - protein, 10 aa, synthetic construct
EQLRGDLIGR

SEQ ID NO: 74044 - protein, 10 aa, synthetic construct
EQIRGDHGVL

SEQ ID NO: 74045 - protein, 10 aa, synthetic construct
EQIRGDHVNL

SEQ ID NO: 74046 - protein, 10 aa, synthetic construct
EQIRGDRDYL

SEQ ID NO: 74047 - protein, 10 aa, synthetic construct
EQIRGDYSSV

SEQ ID NO: 74048 - protein, 10 aa, synthetic construct
EQIRGDLTVT

SEQ ID NO: 74049 - protein, 10 aa, synthetic construct
EQMRGDHGVL

SEQ ID NO: 74050 - protein, 10 aa, synthetic construct
AHPRGDLIGR

SEQ ID NO: 74051 - protein, 10 aa, synthetic construct
EQMRGDHVNL

SEQ ID NO: 74052 - protein, 10 aa, synthetic construct
EQMRGDRDYL

SEQ ID NO: 74053 - protein, 10 aa, synthetic construct
EQMRGDYSSV

SEQ ID NO: 74054 - protein, 10 aa, synthetic construct
EQMRGDLTVT

SEQ ID NO: 74055 - protein, 10 aa, synthetic construct
EQWRGDRDYL

SEQ ID NO: 74056 - protein, 10 aa, synthetic construct
EQWRGDYTSV

SEQ ID NO: 74057 - protein, 10 aa, synthetic construct
EQWRGDLTVT

SEQ ID NO: 74058 - protein, 10 aa, synthetic construct
EQWRGDLIGR

SEQ ID NO: 74059 - protein, 10 aa, synthetic construct
EQFRGDHGVL

SEQ ID NO: 74060 - protein, 10 aa, synthetic construct
EQFRGDHVNL

SEQ ID NO: 74061 - protein, 10 aa, synthetic construct
AHPRGDRSQT

SEQ ID NO: 74062 - protein, 10 aa, synthetic construct
EQFRGDRDYL

SEQ ID NO: 74063 - protein, 10 aa, synthetic construct
EQFRGDYSSV

SEQ ID NO: 74064 - protein, 10 aa, synthetic construct
EQFRGDLTVT

SEQ ID NO: 74065 - protein, 10 aa, synthetic construct
EQKRGDHGVL

SEQ ID NO: 74066 - protein, 10 aa, synthetic construct
EQKRGDHVNL

SEQ ID NO: 74067 - protein, 10 aa, synthetic construct
EQKRGDRDYL

SEQ ID NO: 74068 - protein, 10 aa, synthetic construct
EQKRGDYSSV

SEQ ID NO: 74069 - protein, 10 aa, synthetic construct
EQKRGDLTVT

SEQ ID NO: 74070 - protein, 10 aa, synthetic construct
EQRRGDYNSL

SEQ ID NO: 74071 - protein, 10 aa, synthetic construct
EQRRGDYTSV

SEQ ID NO: 74072 - protein, 10 aa, synthetic construct
NSPRGDLLLS

SEQ ID NO: 74073 - protein, 10 aa, synthetic construct
AHPRGDLLLS

SEQ ID NO: 74074 - protein, 10 aa, synthetic construct
EQRRGDYTSM

SEQ ID NO: 74075 - protein, 10 aa, synthetic construct
EQRRGDFQNT

SEQ ID NO: 74076 - protein, 10 aa, synthetic construct
EQHRGDRDYL

SEQ ID NO: 74077 - protein, 10 aa, synthetic construct
EQHRGDYTSV

SEQ ID NO: 74078 - protein, 10 aa, synthetic construct
EQHRGDLTVT

SEQ ID NO: 74079 - protein, 10 aa, synthetic construct
EQHRGDLIGR

SEQ ID NO: 74080 - protein, 10 aa, synthetic construct
EQSRGDRDYL

SEQ ID NO: 74081 - protein, 10 aa, synthetic construct
EQSRGDYTSV

SEQ ID NO: 74082 - protein, 10 aa, synthetic construct
EQSRGDLTVT

SEQ ID NO: 74083 - protein, 10 aa, synthetic construct
EQSRGDLIGR

SEQ ID NO: 74084 - protein, 10 aa, synthetic construct
AHLRGDHGVL

SEQ ID NO: 74085 - protein, 10 aa, synthetic construct
EQTRGDRDYL

SEQ ID NO: 74086 - protein, 10 aa, synthetic construct
EQTRGDYTSV

SEQ ID NO: 74087 - protein, 10 aa, synthetic construct
EQTRGDLTVT

SEQ ID NO: 74088 - protein, 10 aa, synthetic construct
EQTRGDLIGR

SEQ ID NO: 74089 - protein, 10 aa, synthetic construct
EQYRGDHGVL

SEQ ID NO: 74090 - protein, 10 aa, synthetic construct
EQYRGDHVNL

SEQ ID NO: 74091 - protein, 10 aa, synthetic construct
EQYRGDRDYL

SEQ ID NO: 74092 - protein, 10 aa, synthetic construct
EQYRGDYSSV

SEQ ID NO: 74093 - protein, 10 aa, synthetic construct
EQYRGDLTVT

SEQ ID NO: 74094 - protein, 10 aa, synthetic construct
EQNRGDHGVL

SEQ ID NO: 74095 - protein, 10 aa, synthetic construct
AHLRGDRGQI

SEQ ID NO: 74096 - protein, 10 aa, synthetic construct
EQNRGDHVNL

SEQ ID NO: 74097 - protein, 10 aa, synthetic construct
EQNRGDRDYL

SEQ ID NO: 74098 - protein, 10 aa, synthetic construct
EQNRGDYSSV

SEQ ID NO: 74099 - protein, 10 aa, synthetic construct
EQNRGDLTVT

SEQ ID NO: 74100 - protein, 10 aa, synthetic construct
EQQRGDRDYL

SEQ ID NO: 74101 - protein, 10 aa, synthetic construct
EQQRGDYTSV

SEQ ID NO: 74102 - protein, 10 aa, synthetic construct
EQQRGDLTVT

SEQ ID NO: 74103 - protein, 10 aa, synthetic construct
EQQRGDLIGR

SEQ ID NO: 74104 - protein, 10 aa, synthetic construct
EQDRGDRDYL

SEQ ID NO: 74105 - protein, 10 aa, synthetic construct
EQDRGDYTSV

SEQ ID NO: 74106 - protein, 10 aa, synthetic construct
AHLRGDRQGI

SEQ ID NO: 74107 - protein, 10 aa, synthetic construct
EQDRGDLTVT

SEQ ID NO: 74108 - protein, 10 aa, synthetic construct
EQDRGDLIGR

SEQ ID NO: 74109 - protein, 10 aa, synthetic construct
EQERGDRDYL

SEQ ID NO: 74110 - protein, 10 aa, synthetic construct
EQERGDYTSV

SEQ ID NO: 74111 - protein, 10 aa, synthetic construct
EQERGDLTVT

SEQ ID NO: 74112 - protein, 10 aa, synthetic construct
EQERGDLIGR

SEQ ID NO: 74113 - protein, 10 aa, synthetic construct
EDGRGDYNSL

SEQ ID NO: 74114 - protein, 10 aa, synthetic construct
EDGRGDYTSV

SEQ ID NO: 74115 - protein, 10 aa, synthetic construct
EDGRGDYTSM

SEQ ID NO: 74116 - protein, 10 aa, synthetic construct
EDGRGDFQNT

SEQ ID NO: 74117 - protein, 10 aa, synthetic construct
AHLRGDRSVV

SEQ ID NO: 74118 - protein, 10 aa, synthetic construct
EDARGDYNSL

SEQ ID NO: 74119 - protein, 10 aa, synthetic construct
EDARGDYTSV

SEQ ID NO: 74120 - protein, 10 aa, synthetic construct
EDARGDYTSM

SEQ ID NO: 74121 - protein, 10 aa, synthetic construct
EDARGDFQNT

SEQ ID NO: 74122 - protein, 10 aa, synthetic construct
EDVRGDRDYL

SEQ ID NO: 74123 - protein, 10 aa, synthetic construct
EDVRGDYTSV

SEQ ID NO: 74124 - protein, 10 aa, synthetic construct
EDVRGDLTVT

SEQ ID NO: 74125 - protein, 10 aa, synthetic construct
EDVRGDLIGR

SEQ ID NO: 74126 - protein, 10 aa, synthetic construct
EDPRGDYNSL

SEQ ID NO: 74127 - protein, 10 aa, synthetic construct
EDPRGDYTSV

SEQ ID NO: 74128 - protein, 10 aa, synthetic construct
AHLRGDLTVT

SEQ ID NO: 74129 - protein, 10 aa, synthetic construct
EDPRGDYTSM

SEQ ID NO: 74130 - protein, 10 aa, synthetic construct
EDPRGDFQNT

SEQ ID NO: 74131 - protein, 10 aa, synthetic construct
EDLRGDRDYL

SEQ ID NO: 74132 - protein, 10 aa, synthetic construct
EDLRGDYTSV

SEQ ID NO: 74133 - protein, 10 aa, synthetic construct
EDLRGDLTVT

SEQ ID NO: 74134 - protein, 10 aa, synthetic construct
EDLRGDLIGR

SEQ ID NO: 74135 - protein, 10 aa, synthetic construct
EDIRGDHGVL

SEQ ID NO: 74136 - protein, 10 aa, synthetic construct
EDIRGDHVNL

SEQ ID NO: 74137 - protein, 10 aa, synthetic construct
EDIRGDRDYL

SEQ ID NO: 74138 - protein, 10 aa, synthetic construct
EDIRGDYSSV

SEQ ID NO: 74139 - protein, 10 aa, synthetic construct
AHLRGDLIGR

SEQ ID NO: 74140 - protein, 10 aa, synthetic construct
EDIRGDLTVT

SEQ ID NO: 74141 - protein, 10 aa, synthetic construct
EDMRGDHGVL

SEQ ID NO: 74142 - protein, 10 aa, synthetic construct
EDMRGDHVNL

SEQ ID NO: 74143 - protein, 10 aa, synthetic construct
EDMRGDRDYL

SEQ ID NO: 74144 - protein, 10 aa, synthetic construct
EDMRGDYSSV

SEQ ID NO: 74145 - protein, 10 aa, synthetic construct
EDMRGDLTVT

SEQ ID NO: 74146 - protein, 10 aa, synthetic construct
EDWRGDRDYL

SEQ ID NO: 74147 - protein, 10 aa, synthetic construct
EDWRGDYTSV

SEQ ID NO: 74148 - protein, 10 aa, synthetic construct
EDWRGDLTVT

SEQ ID NO: 74149 - protein, 10 aa, synthetic construct
EDWRGDLIGR

SEQ ID NO: 74150 - protein, 10 aa, synthetic construct
AHLRGDRSQT

SEQ ID NO: 74151 - protein, 10 aa, synthetic construct
EDFRGDHGVL

SEQ ID NO: 74152 - protein, 10 aa, synthetic construct
EDFRGDHVNL

SEQ ID NO: 74153 - protein, 10 aa, synthetic construct
EDFRGDRDYL

SEQ ID NO: 74154 - protein, 10 aa, synthetic construct
EDFRGDYSSV

SEQ ID NO: 74155 - protein, 10 aa, synthetic construct
EDFRGDLTVT

SEQ ID NO: 74156 - protein, 10 aa, synthetic construct
EDKRGDHGVL

SEQ ID NO: 74157 - protein, 10 aa, synthetic construct
EDKRGDHVNL

SEQ ID NO: 74158 - protein, 10 aa, synthetic construct
EDKRGDRDYL

SEQ ID NO: 74159 - protein, 10 aa, synthetic construct
EDKRGDYSSV

SEQ ID NO: 74160 - protein, 10 aa, synthetic construct
EDKRGDLTVT

SEQ ID NO: 74161 - protein, 10 aa, synthetic construct
AHLRGDLLLS

SEQ ID NO: 74162 - protein, 10 aa, synthetic construct
EDRRGDYNSL

SEQ ID NO: 74163 - protein, 10 aa, synthetic construct
EDRRGDYTSV

SEQ ID NO: 74164 - protein, 10 aa, synthetic construct
EDRRGDYTSM

SEQ ID NO: 74165 - protein, 10 aa, synthetic construct
EDRRGDFQNT

SEQ ID NO: 74166 - protein, 10 aa, synthetic construct
EDHRGDRDYL

SEQ ID NO: 74167 - protein, 10 aa, synthetic construct
EDHRGDYTSV

SEQ ID NO: 74168 - protein, 10 aa, synthetic construct
EDHRGDLTVT

SEQ ID NO: 74169 - protein, 10 aa, synthetic construct
EDHRGDLIGR

SEQ ID NO: 74170 - protein, 10 aa, synthetic construct
EDSRGDRDYL

SEQ ID NO: 74171 - protein, 10 aa, synthetic construct
EDSRGDYTSV

SEQ ID NO: 74172 - protein, 10 aa, synthetic construct
AHWRGDRGQI

SEQ ID NO: 74173 - protein, 10 aa, synthetic construct
EDSRGDLTVT

SEQ ID NO: 74174 - protein, 10 aa, synthetic construct
EDSRGDLIGR

SEQ ID NO: 74175 - protein, 10 aa, synthetic construct
EDTRGDRDYL

SEQ ID NO: 74176 - protein, 10 aa, synthetic construct
EDTRGDYTSV

SEQ ID NO: 74177 - protein, 10 aa, synthetic construct
EDTRGDLTVT

SEQ ID NO: 74178 - protein, 10 aa, synthetic construct
EDTRGDLIGR

SEQ ID NO: 74179 - protein, 10 aa, synthetic construct
EDYRGDHGVL

SEQ ID NO: 74180 - protein, 10 aa, synthetic construct
EDYRGDHVNL

SEQ ID NO: 74181 - protein, 10 aa, synthetic construct
EDYRGDRDYL

SEQ ID NO: 74182 - protein, 10 aa, synthetic construct
EDYRGDYSSV

SEQ ID NO: 74183 - protein, 10 aa, synthetic construct
DSPRGDHVNL

SEQ ID NO: 74184 - protein, 10 aa, synthetic construct
AHWRGDRQGI

SEQ ID NO: 74185 - protein, 10 aa, synthetic construct
EDYRGDLTVT

SEQ ID NO: 74186 - protein, 10 aa, synthetic construct
EDNRGDHGVL

SEQ ID NO: 74187 - protein, 10 aa, synthetic construct
EDNRGDHVNL

SEQ ID NO: 74188 - protein, 10 aa, synthetic construct
EDNRGDRDYL

SEQ ID NO: 74189 - protein, 10 aa, synthetic construct
EDNRGDYSSV

SEQ ID NO: 74190 - protein, 10 aa, synthetic construct
EDNRGDLTVT

SEQ ID NO: 74191 - protein, 10 aa, synthetic construct
EDQRGDRDYL

SEQ ID NO: 74192 - protein, 10 aa, synthetic construct
EDQRGDYTSV

SEQ ID NO: 74193 - protein, 10 aa, synthetic construct
EDQRGDLTVT

SEQ ID NO: 74194 - protein, 10 aa, synthetic construct
EDQRGDLIGR

SEQ ID NO: 74195 - protein, 10 aa, synthetic construct
AHWRGDRSVV

SEQ ID NO: 74196 - protein, 10 aa, synthetic construct
EDDRGDRDYL

SEQ ID NO: 74197 - protein, 10 aa, synthetic construct
EDDRGDYTSV

SEQ ID NO: 74198 - protein, 10 aa, synthetic construct
EDDRGDLTVT

SEQ ID NO: 74199 - protein, 10 aa, synthetic construct
EDDRGDLIGR

SEQ ID NO: 74200 - protein, 10 aa, synthetic construct
EDERGDRDYL

SEQ ID NO: 74201 - protein, 10 aa, synthetic construct
EDERGDYTSV

SEQ ID NO: 74202 - protein, 10 aa, synthetic construct
EDERGDLTVT

SEQ ID NO: 74203 - protein, 10 aa, synthetic construct
EDERGDLIGR

SEQ ID NO: 74204 - protein, 10 aa, synthetic construct
EEGRGDYNSL

SEQ ID NO: 74205 - protein, 10 aa, synthetic construct
EEGRGDYTSV

SEQ ID NO: 74206 - protein, 10 aa, synthetic construct
AHWRGDRGVV

SEQ ID NO: 74207 - protein, 10 aa, synthetic construct
EEGRGDYTSM

SEQ ID NO: 74208 - protein, 10 aa, synthetic construct
EEGRGDFQNT

SEQ ID NO: 74209 - protein, 10 aa, synthetic construct
EEARGDYNSL

SEQ ID NO: 74210 - protein, 10 aa, synthetic construct
EEARGDYTSV

SEQ ID NO: 74211 - protein, 10 aa, synthetic construct
EEARGDYTSM

SEQ ID NO: 74212 - protein, 10 aa, synthetic construct
EEARGDFQNT

SEQ ID NO: 74213 - protein, 10 aa, synthetic construct
EEVRGDRDYL

SEQ ID NO: 74214 - protein, 10 aa, synthetic construct
EEVRGDYTSV

SEQ ID NO: 74215 - protein, 10 aa, synthetic construct
EEVRGDLTVT

SEQ ID NO: 74216 - protein, 10 aa, synthetic construct
EEVRGDLIGR

SEQ ID NO: 74217 - protein, 10 aa, synthetic construct
AHWRGDRSQT

SEQ ID NO: 74218 - protein, 10 aa, synthetic construct
EEPRGDYNSL

SEQ ID NO: 74219 - protein, 10 aa, synthetic construct
EEPRGDYTSV

SEQ ID NO: 74220 - protein, 10 aa, synthetic construct
EEPRGDYTSM

SEQ ID NO: 74221 - protein, 10 aa, synthetic construct
EEPRGDFQNT

SEQ ID NO: 74222 - protein, 10 aa, synthetic construct
EELRGDRDYL

SEQ ID NO: 74223 - protein, 10 aa, synthetic construct
EELRGDYTSV

SEQ ID NO: 74224 - protein, 10 aa, synthetic construct
EELRGDLTVT

SEQ ID NO: 74225 - protein, 10 aa, synthetic construct
EELRGDLIGR

SEQ ID NO: 74226 - protein, 10 aa, synthetic construct
EEIRGDHGVL

SEQ ID NO: 74227 - protein, 10 aa, synthetic construct
EEIRGDHVNL

SEQ ID NO: 74228 - protein, 10 aa, synthetic construct
AHRRGDHGVL

SEQ ID NO: 74229 - protein, 10 aa, synthetic construct
EEIRGDRDYL

SEQ ID NO: 74230 - protein, 10 aa, synthetic construct
EEIRGDYSSV

SEQ ID NO: 74231 - protein, 10 aa, synthetic construct
EEIRGDLTVT

SEQ ID NO: 74232 - protein, 10 aa, synthetic construct
EEMRGDHGVL

SEQ ID NO: 74233 - protein, 10 aa, synthetic construct
EEMRGDHVNL

SEQ ID NO: 74234 - protein, 10 aa, synthetic construct
EEMRGDRDYL

SEQ ID NO: 74235 - protein, 10 aa, synthetic construct
EEMRGDYSSV

SEQ ID NO: 74236 - protein, 10 aa, synthetic construct
EEMRGDLTVT

SEQ ID NO: 74237 - protein, 10 aa, synthetic construct
EEWRGDRDYL

SEQ ID NO: 74238 - protein, 10 aa, synthetic construct
EEWRGDYTSV

SEQ ID NO: 74239 - protein, 10 aa, synthetic construct
AHRRGDRGQI

SEQ ID NO: 74240 - protein, 10 aa, synthetic construct
EEWRGDLTVT

SEQ ID NO: 74241 - protein, 10 aa, synthetic construct
EEWRGDLIGR

SEQ ID NO: 74242 - protein, 10 aa, synthetic construct
EEFRGDHGVL

SEQ ID NO: 74243 - protein, 10 aa, synthetic construct
EEFRGDHVNL

SEQ ID NO: 74244 - protein, 10 aa, synthetic construct
EEFRGDRDYL

SEQ ID NO: 74245 - protein, 10 aa, synthetic construct
EEFRGDYSSV

SEQ ID NO: 74246 - protein, 10 aa, synthetic construct
EEFRGDLTVT

SEQ ID NO: 74247 - protein, 10 aa, synthetic construct
EEKRGDHGVL

SEQ ID NO: 74248 - protein, 10 aa, synthetic construct
EEKRGDHVNL

SEQ ID NO: 74249 - protein, 10 aa, synthetic construct
EEKRGDRDYL

SEQ ID NO: 74250 - protein, 10 aa, synthetic construct
AHRRGDRQGI

SEQ ID NO: 74251 - protein, 10 aa, synthetic construct
EEKRGDYSSV

SEQ ID NO: 74252 - protein, 10 aa, synthetic construct
EEKRGDLTVT

SEQ ID NO: 74253 - protein, 10 aa, synthetic construct
EERRGDYNSL

SEQ ID NO: 74254 - protein, 10 aa, synthetic construct
EERRGDYTSV

SEQ ID NO: 74255 - protein, 10 aa, synthetic construct
EERRGDYTSM

SEQ ID NO: 74256 - protein, 10 aa, synthetic construct
EERRGDFQNT

SEQ ID NO: 74257 - protein, 10 aa, synthetic construct
EEHRGDRDYL

SEQ ID NO: 74258 - protein, 10 aa, synthetic construct
EEHRGDYTSV

SEQ ID NO: 74259 - protein, 10 aa, synthetic construct
EEHRGDLTVT

SEQ ID NO: 74260 - protein, 10 aa, synthetic construct
EEHRGDLIGR

SEQ ID NO: 74261 - protein, 10 aa, synthetic construct
AHRRGDRSVV

SEQ ID NO: 74262 - protein, 10 aa, synthetic construct
EESRGDRDYL

SEQ ID NO: 74263 - protein, 10 aa, synthetic construct
EESRGDYTSV

SEQ ID NO: 74264 - protein, 10 aa, synthetic construct
EESRGDLTVT

SEQ ID NO: 74265 - protein, 10 aa, synthetic construct
EESRGDLIGR

SEQ ID NO: 74266 - protein, 10 aa, synthetic construct
EETRGDRDYL

SEQ ID NO: 74267 - protein, 10 aa, synthetic construct
EETRGDYTSV

SEQ ID NO: 74268 - protein, 10 aa, synthetic construct
EETRGDLTVT

SEQ ID NO: 74269 - protein, 10 aa, synthetic construct
EETRGDLIGR

SEQ ID NO: 74270 - protein, 10 aa, synthetic construct
EEYRGDHGVL

SEQ ID NO: 74271 - protein, 10 aa, synthetic construct
EEYRGDHVNL

SEQ ID NO: 74272 - protein, 10 aa, synthetic construct
AHRRGDLTVT

SEQ ID NO: 74273 - protein, 10 aa, synthetic construct
EEYRGDRDYL

SEQ ID NO: 74274 - protein, 10 aa, synthetic construct
EEYRGDYSSV

SEQ ID NO: 74275 - protein, 10 aa, synthetic construct
EEYRGDLTVT

SEQ ID NO: 74276 - protein, 10 aa, synthetic construct
EENRGDHGVL

SEQ ID NO: 74277 - protein, 10 aa, synthetic construct
EENRGDHVNL

SEQ ID NO: 74278 - protein, 10 aa, synthetic construct
EENRGDRDYL

SEQ ID NO: 74279 - protein, 10 aa, synthetic construct
EENRGDYSSV

SEQ ID NO: 74280 - protein, 10 aa, synthetic construct
EENRGDLTVT

SEQ ID NO: 74281 - protein, 10 aa, synthetic construct
EEQRGDRDYL

SEQ ID NO: 74282 - protein, 10 aa, synthetic construct
EEQRGDYTSV

SEQ ID NO: 74283 - protein, 10 aa, synthetic construct
AHRRGDLIGR

SEQ ID NO: 74284 - protein, 10 aa, synthetic construct
EEQRGDLTVT

SEQ ID NO: 74285 - protein, 10 aa, synthetic construct
EEQRGDLIGR

SEQ ID NO: 74286 - protein, 10 aa, synthetic construct
EEDRGDRDYL

SEQ ID NO: 74287 - protein, 10 aa, synthetic construct
EEDRGDYTSV

SEQ ID NO: 74288 - protein, 10 aa, synthetic construct
EEDRGDLTVT

SEQ ID NO: 74289 - protein, 10 aa, synthetic construct
EEDRGDLIGR

SEQ ID NO: 74290 - protein, 10 aa, synthetic construct
EEERGDRDYL

SEQ ID NO: 74291 - protein, 10 aa, synthetic construct
EEERGDYTSV

SEQ ID NO: 74292 - protein, 10 aa, synthetic construct
EEERGDLTVT

SEQ ID NO: 74293 - protein, 10 aa, synthetic construct
EEERGDLIGR

SEQ ID NO: 74294 - protein, 10 aa, synthetic construct
DSPRGDRDYL

SEQ ID NO: 74295 - protein, 10 aa, synthetic construct
AHRRGDRSQT

SEQ ID NO: 74296 - protein, 10 aa, synthetic construct
NGGRGDYNSL

SEQ ID NO: 74297 - protein, 10 aa, synthetic construct
NGGRGDYTSV

SEQ ID NO: 74298 - protein, 10 aa, synthetic construct
NGGRGDYTSM

SEQ ID NO: 74299 - protein, 10 aa, synthetic construct
NGGRGDFQNT

SEQ ID NO: 74300 - protein, 10 aa, synthetic construct
NGARGDYNSL

SEQ ID NO: 74301 - protein, 10 aa, synthetic construct
NGARGDYTSV

SEQ ID NO: 74302 - protein, 10 aa, synthetic construct
NGARGDYTSM

SEQ ID NO: 74303 - protein, 10 aa, synthetic construct
NGARGDFQNT

SEQ ID NO: 74304 - protein, 10 aa, synthetic construct
NGVRGDRDYL

SEQ ID NO: 74305 - protein, 10 aa, synthetic construct
NGVRGDYTSV

SEQ ID NO: 74306 - protein, 10 aa, synthetic construct
AHRRGDLLLS

SEQ ID NO: 74307 - protein, 10 aa, synthetic construct
NGVRGDLTVT

SEQ ID NO: 74308 - protein, 10 aa, synthetic construct
NGVRGDLIGR

SEQ ID NO: 74309 - protein, 10 aa, synthetic construct
NGPRGDYNSL

SEQ ID NO: 74310 - protein, 10 aa, synthetic construct
NGPRGDYTSV

SEQ ID NO: 74311 - protein, 10 aa, synthetic construct
NGPRGDYTSM

SEQ ID NO: 74312 - protein, 10 aa, synthetic construct
NGPRGDFQNT

SEQ ID NO: 74313 - protein, 10 aa, synthetic construct
NGLRGDRDYL

SEQ ID NO: 74314 - protein, 10 aa, synthetic construct
NGLRGDYTSV

SEQ ID NO: 74315 - protein, 10 aa, synthetic construct
NGLRGDLTVT

SEQ ID NO: 74316 - protein, 10 aa, synthetic construct
NGLRGDLIGR

SEQ ID NO: 74317 - protein, 10 aa, synthetic construct
AHHRGDRGVV

SEQ ID NO: 74318 - protein, 10 aa, synthetic construct
NGIRGDHGVL

SEQ ID NO: 74319 - protein, 10 aa, synthetic construct
NGIRGDHVNL

SEQ ID NO: 74320 - protein, 10 aa, synthetic construct
NGIRGDRDYL

SEQ ID NO: 74321 - protein, 10 aa, synthetic construct
NGIRGDYSSV

SEQ ID NO: 74322 - protein, 10 aa, synthetic construct
NGIRGDLTVT

SEQ ID NO: 74323 - protein, 10 aa, synthetic construct
NGMRGDHGVL

SEQ ID NO: 74324 - protein, 10 aa, synthetic construct
NGMRGDHVNL

SEQ ID NO: 74325 - protein, 10 aa, synthetic construct
NGMRGDRDYL

SEQ ID NO: 74326 - protein, 10 aa, synthetic construct
NGMRGDYSSV

SEQ ID NO: 74327 - protein, 10 aa, synthetic construct
NGMRGDLTVT

SEQ ID NO: 74328 - protein, 10 aa, synthetic construct
AHSRGDHGVL

SEQ ID NO: 74329 - protein, 10 aa, synthetic construct
NGWRGDRDYL

SEQ ID NO: 74330 - protein, 10 aa, synthetic construct
NGWRGDYTSV

SEQ ID NO: 74331 - protein, 10 aa, synthetic construct
NGWRGDLTVT

SEQ ID NO: 74332 - protein, 10 aa, synthetic construct
NGWRGDLIGR

SEQ ID NO: 74333 - protein, 10 aa, synthetic construct
NGFRGDHGVL

SEQ ID NO: 74334 - protein, 10 aa, synthetic construct
NGFRGDHVNL

SEQ ID NO: 74335 - protein, 10 aa, synthetic construct
NGFRGDRDYL

SEQ ID NO: 74336 - protein, 10 aa, synthetic construct
NGFRGDYSSV

SEQ ID NO: 74337 - protein, 10 aa, synthetic construct
NGFRGDLTVT

SEQ ID NO: 74338 - protein, 10 aa, synthetic construct
NGKRGDHGVL

SEQ ID NO: 74339 - protein, 10 aa, synthetic construct
AHSRGDRGQI

SEQ ID NO: 74340 - protein, 10 aa, synthetic construct
NGKRGDHVNL

SEQ ID NO: 74341 - protein, 10 aa, synthetic construct
NGKRGDRDYL

SEQ ID NO: 74342 - protein, 10 aa, synthetic construct
NGKRGDYSSV

SEQ ID NO: 74343 - protein, 10 aa, synthetic construct
NGKRGDLTVT

SEQ ID NO: 74344 - protein, 10 aa, synthetic construct
NGRRGDYNSL

SEQ ID NO: 74345 - protein, 10 aa, synthetic construct
NGRRGDYTSV

SEQ ID NO: 74346 - protein, 10 aa, synthetic construct
NGRRGDYTSM

SEQ ID NO: 74347 - protein, 10 aa, synthetic construct
NGRRGDFQNT

SEQ ID NO: 74348 - protein, 10 aa, synthetic construct
NGHRGDRDYL

SEQ ID NO: 74349 - protein, 10 aa, synthetic construct
NGHRGDYTSV

SEQ ID NO: 74350 - protein, 10 aa, synthetic construct
AHSRGDRQGI

SEQ ID NO: 74351 - protein, 10 aa, synthetic construct
NGHRGDLTVT

SEQ ID NO: 74352 - protein, 10 aa, synthetic construct
NGHRGDLIGR

SEQ ID NO: 74353 - protein, 10 aa, synthetic construct
NGSRGDRDYL

SEQ ID NO: 74354 - protein, 10 aa, synthetic construct
NGSRGDYTSV

SEQ ID NO: 74355 - protein, 10 aa, synthetic construct
NGSRGDLTVT

SEQ ID NO: 74356 - protein, 10 aa, synthetic construct
NGSRGDLIGR

SEQ ID NO: 74357 - protein, 10 aa, synthetic construct
NGTRGDRDYL

SEQ ID NO: 74358 - protein, 10 aa, synthetic construct
NGTRGDYTSV

SEQ ID NO: 74359 - protein, 10 aa, synthetic construct
NGTRGDLTVT

SEQ ID NO: 74360 - protein, 10 aa, synthetic construct
NGTRGDLIGR

SEQ ID NO: 74361 - protein, 10 aa, synthetic construct
AHSRGDRSVV

SEQ ID NO: 74362 - protein, 10 aa, synthetic construct
NGYRGDHGVL

SEQ ID NO: 74363 - protein, 10 aa, synthetic construct
NGYRGDHVNL

SEQ ID NO: 74364 - protein, 10 aa, synthetic construct
NGYRGDRDYL

SEQ ID NO: 74365 - protein, 10 aa, synthetic construct
NGYRGDYSSV

SEQ ID NO: 74366 - protein, 10 aa, synthetic construct
NGYRGDLTVT

SEQ ID NO: 74367 - protein, 10 aa, synthetic construct
NGNRGDHGVL

SEQ ID NO: 74368 - protein, 10 aa, synthetic construct
NGNRGDHVNL

SEQ ID NO: 74369 - protein, 10 aa, synthetic construct
NGNRGDRDYL

SEQ ID NO: 74370 - protein, 10 aa, synthetic construct
NGNRGDYSSV

SEQ ID NO: 74371 - protein, 10 aa, synthetic construct
NGNRGDLTVT

SEQ ID NO: 74372 - protein, 10 aa, synthetic construct
AHSRGDLTVT

SEQ ID NO: 74373 - protein, 10 aa, synthetic construct
NGQRGDRDYL

SEQ ID NO: 74374 - protein, 10 aa, synthetic construct
NGQRGDYTSV

SEQ ID NO: 74375 - protein, 10 aa, synthetic construct
NGQRGDLTVT

SEQ ID NO: 74376 - protein, 10 aa, synthetic construct
NGQRGDLIGR

SEQ ID NO: 74377 - protein, 10 aa, synthetic construct
NGDRGDRDYL

SEQ ID NO: 74378 - protein, 10 aa, synthetic construct
NGDRGDYTSV

SEQ ID NO: 74379 - protein, 10 aa, synthetic construct
NGDRGDLTVT

SEQ ID NO: 74380 - protein, 10 aa, synthetic construct
NGDRGDLIGR

SEQ ID NO: 74381 - protein, 10 aa, synthetic construct
NGERGDRDYL

SEQ ID NO: 74382 - protein, 10 aa, synthetic construct
NGERGDYTSV

SEQ ID NO: 74383 - protein, 10 aa, synthetic construct
AHSRGDLIGR

SEQ ID NO: 74384 - protein, 10 aa, synthetic construct
NGERGDLTVT

SEQ ID NO: 74385 - protein, 10 aa, synthetic construct
NGERGDLIGR

SEQ ID NO: 74386 - protein, 10 aa, synthetic construct
NAGRGDYNSL

SEQ ID NO: 74387 - protein, 10 aa, synthetic construct
NAGRGDYTSV

SEQ ID NO: 74388 - protein, 10 aa, synthetic construct
NAGRGDYTSM

SEQ ID NO: 74389 - protein, 10 aa, synthetic construct
NAGRGDFQNT

SEQ ID NO: 74390 - protein, 10 aa, synthetic construct
NAARGDYNSL

SEQ ID NO: 74391 - protein, 10 aa, synthetic construct
NAARGDYTSV

SEQ ID NO: 74392 - protein, 10 aa, synthetic construct
NAARGDYTSM

SEQ ID NO: 74393 - protein, 10 aa, synthetic construct
NAARGDFQNT

SEQ ID NO: 74394 - protein, 10 aa, synthetic construct
AHSRGDRSQT

SEQ ID NO: 74395 - protein, 10 aa, synthetic construct
NAVRGDRDYL

SEQ ID NO: 74396 - protein, 10 aa, synthetic construct
NAVRGDYTSV

SEQ ID NO: 74397 - protein, 10 aa, synthetic construct
NAVRGDLTVT

SEQ ID NO: 74398 - protein, 10 aa, synthetic construct
NAVRGDLIGR

SEQ ID NO: 74399 - protein, 10 aa, synthetic construct
NAPRGDYNSL

SEQ ID NO: 74400 - protein, 10 aa, synthetic construct
NAPRGDYTSV

SEQ ID NO: 74401 - protein, 10 aa, synthetic construct
NAPRGDYTSM

SEQ ID NO: 74402 - protein, 10 aa, synthetic construct
NAPRGDFQNT

SEQ ID NO: 74403 - protein, 10 aa, synthetic construct
NALRGDRDYL

SEQ ID NO: 74404 - protein, 10 aa, synthetic construct
NALRGDYTSV

SEQ ID NO: 74405 - protein, 10 aa, synthetic construct
DSPRGDYSSV

SEQ ID NO: 74406 - protein, 10 aa, synthetic construct
AHSRGDLLLS

SEQ ID NO: 74407 - protein, 10 aa, synthetic construct
NALRGDLTVT

SEQ ID NO: 74408 - protein, 10 aa, synthetic construct
NALRGDLIGR

SEQ ID NO: 74409 - protein, 10 aa, synthetic construct
NAIRGDHGVL

SEQ ID NO: 74410 - protein, 10 aa, synthetic construct
NAIRGDHVNL

SEQ ID NO: 74411 - protein, 10 aa, synthetic construct
NAIRGDRDYL

SEQ ID NO: 74412 - protein, 10 aa, synthetic construct
NAIRGDYSSV

SEQ ID NO: 74413 - protein, 10 aa, synthetic construct
NAIRGDLTVT

SEQ ID NO: 74414 - protein, 10 aa, synthetic construct
NAMRGDHGVL

SEQ ID NO: 74415 - protein, 10 aa, synthetic construct
NAMRGDHVNL

SEQ ID NO: 74416 - protein, 10 aa, synthetic construct
NAMRGDRDYL

SEQ ID NO: 74417 - protein, 10 aa, synthetic construct
AHTRGDRGVV

SEQ ID NO: 74418 - protein, 10 aa, synthetic construct
NAMRGDYSSV

SEQ ID NO: 74419 - protein, 10 aa, synthetic construct
NAMRGDLTVT

SEQ ID NO: 74420 - protein, 10 aa, synthetic construct
NAWRGDRDYL

SEQ ID NO: 74421 - protein, 10 aa, synthetic construct
NAWRGDYTSV

SEQ ID NO: 74422 - protein, 10 aa, synthetic construct
NAWRGDLTVT

SEQ ID NO: 74423 - protein, 10 aa, synthetic construct
NAWRGDLIGR

SEQ ID NO: 74424 - protein, 10 aa, synthetic construct
NAFRGDHGVL

SEQ ID NO: 74425 - protein, 10 aa, synthetic construct
NAFRGDHVNL

SEQ ID NO: 74426 - protein, 10 aa, synthetic construct
NAFRGDRDYL

SEQ ID NO: 74427 - protein, 10 aa, synthetic construct
NAFRGDYSSV

SEQ ID NO: 74428 - protein, 10 aa, synthetic construct
AHQRGDRGVV

SEQ ID NO: 74429 - protein, 10 aa, synthetic construct
NAFRGDLTVT

SEQ ID NO: 74430 - protein, 10 aa, synthetic construct
NAKRGDHGVL

SEQ ID NO: 74431 - protein, 10 aa, synthetic construct
NAKRGDHVNL

SEQ ID NO: 74432 - protein, 10 aa, synthetic construct
NAKRGDRDYL

SEQ ID NO: 74433 - protein, 10 aa, synthetic construct
NAKRGDYSSV

SEQ ID NO: 74434 - protein, 10 aa, synthetic construct
NAKRGDLTVT

SEQ ID NO: 74435 - protein, 10 aa, synthetic construct
NARRGDYNSL

SEQ ID NO: 74436 - protein, 10 aa, synthetic construct
NARRGDYTSV

SEQ ID NO: 74437 - protein, 10 aa, synthetic construct
NARRGDYTSM

SEQ ID NO: 74438 - protein, 10 aa, synthetic construct
NARRGDFQNT

SEQ ID NO: 74439 - protein, 10 aa, synthetic construct
AHDRGDRGVV

SEQ ID NO: 74440 - protein, 10 aa, synthetic construct
NAHRGDRDYL

SEQ ID NO: 74441 - protein, 10 aa, synthetic construct
NAHRGDYTSV

SEQ ID NO: 74442 - protein, 10 aa, synthetic construct
NAHRGDLTVT

SEQ ID NO: 74443 - protein, 10 aa, synthetic construct
NAHRGDLIGR

SEQ ID NO: 74444 - protein, 10 aa, synthetic construct
NASRGDRDYL

SEQ ID NO: 74445 - protein, 10 aa, synthetic construct
NASRGDYTSV

SEQ ID NO: 74446 - protein, 10 aa, synthetic construct
NASRGDLTVT

SEQ ID NO: 74447 - protein, 10 aa, synthetic construct
NASRGDLIGR

SEQ ID NO: 74448 - protein, 10 aa, synthetic construct
NATRGDRDYL

SEQ ID NO: 74449 - protein, 10 aa, synthetic construct
NATRGDYTSV

SEQ ID NO: 74450 - protein, 10 aa, synthetic construct
AHERGDRGVV

SEQ ID NO: 74451 - protein, 10 aa, synthetic construct
NATRGDLTVT

SEQ ID NO: 74452 - protein, 10 aa, synthetic construct
NATRGDLIGR

SEQ ID NO: 74453 - protein, 10 aa, synthetic construct
NAYRGDHGVL

SEQ ID NO: 74454 - protein, 10 aa, synthetic construct
NAYRGDHVNL

SEQ ID NO: 74455 - protein, 10 aa, synthetic construct
NAYRGDRDYL

SEQ ID NO: 74456 - protein, 10 aa, synthetic construct
NAYRGDYSSV

SEQ ID NO: 74457 - protein, 10 aa, synthetic construct
NAYRGDLTVT

SEQ ID NO: 74458 - protein, 10 aa, synthetic construct
NANRGDHGVL

SEQ ID NO: 74459 - protein, 10 aa, synthetic construct
NANRGDHVNL

SEQ ID NO: 74460 - protein, 10 aa, synthetic construct
NANRGDRDYL

SEQ ID NO: 74461 - protein, 10 aa, synthetic construct
ASGRGDHGVL

SEQ ID NO: 74462 - protein, 10 aa, synthetic construct
NANRGDYSSV

SEQ ID NO: 74463 - protein, 10 aa, synthetic construct
NANRGDLTVT

SEQ ID NO: 74464 - protein, 10 aa, synthetic construct
NAQRGDRDYL

SEQ ID NO: 74465 - protein, 10 aa, synthetic construct
NAQRGDYTSV

SEQ ID NO: 74466 - protein, 10 aa, synthetic construct
NAQRGDLTVT

SEQ ID NO: 74467 - protein, 10 aa, synthetic construct
NAQRGDLIGR

SEQ ID NO: 74468 - protein, 10 aa, synthetic construct
NADRGDRDYL

SEQ ID NO: 74469 - protein, 10 aa, synthetic construct
NADRGDYTSV

SEQ ID NO: 74470 - protein, 10 aa, synthetic construct
NADRGDLTVT

SEQ ID NO: 74471 - protein, 10 aa, synthetic construct
NADRGDLIGR

SEQ ID NO: 74472 - protein, 10 aa, synthetic construct
ASGRGDRGQI

SEQ ID NO: 74473 - protein, 10 aa, synthetic construct
NAERGDRDYL

SEQ ID NO: 74474 - protein, 10 aa, synthetic construct
NAERGDYTSV

SEQ ID NO: 74475 - protein, 10 aa, synthetic construct
NAERGDLTVT

SEQ ID NO: 74476 - protein, 10 aa, synthetic construct
NAERGDLIGR

SEQ ID NO: 74477 - protein, 10 aa, synthetic construct
NVGRGDYNSL

SEQ ID NO: 74478 - protein, 10 aa, synthetic construct
NVGRGDYTSM

SEQ ID NO: 74479 - protein, 10 aa, synthetic construct
NVGRGDFQNT

SEQ ID NO: 74480 - protein, 10 aa, synthetic construct
NVARGDYNSL

SEQ ID NO: 74481 - protein, 10 aa, synthetic construct
NVARGDYTSM

SEQ ID NO: 74482 - protein, 10 aa, synthetic construct
NVARGDFQNT

SEQ ID NO: 74483 - protein, 10 aa, synthetic construct
ASGRGDRQGI

SEQ ID NO: 74484 - protein, 10 aa, synthetic construct
NVVRGDYTSV

SEQ ID NO: 74485 - protein, 10 aa, synthetic construct
NVVRGDLIGR

SEQ ID NO: 74486 - protein, 10 aa, synthetic construct
NVPRGDYNSL

SEQ ID NO: 74487 - protein, 10 aa, synthetic construct
NVPRGDYTSM

SEQ ID NO: 74488 - protein, 10 aa, synthetic construct
NVPRGDFQNT

SEQ ID NO: 74489 - protein, 10 aa, synthetic construct
NVLRGDYTSV

SEQ ID NO: 74490 - protein, 10 aa, synthetic construct
NVLRGDLIGR

SEQ ID NO: 74491 - protein, 10 aa, synthetic construct
NVIRGDHVNL

SEQ ID NO: 74492 - protein, 10 aa, synthetic construct
NVIRGDRDYL

SEQ ID NO: 74493 - protein, 10 aa, synthetic construct
NVIRGDYSSV

SEQ ID NO: 74494 - protein, 10 aa, synthetic construct
ASGRGDRSVV

SEQ ID NO: 74495 - protein, 10 aa, synthetic construct
NVIRGDLTVT

SEQ ID NO: 74496 - protein, 10 aa, synthetic construct
NVMRGDHVNL

SEQ ID NO: 74497 - protein, 10 aa, synthetic construct
NVMRGDRDYL

SEQ ID NO: 74498 - protein, 10 aa, synthetic construct
NVMRGDYSSV

SEQ ID NO: 74499 - protein, 10 aa, synthetic construct
NVMRGDLTVT

SEQ ID NO: 74500 - protein, 10 aa, synthetic construct
NVWRGDYTSV

SEQ ID NO: 74501 - protein, 10 aa, synthetic construct
NVWRGDLIGR

SEQ ID NO: 74502 - protein, 10 aa, synthetic construct
NVFRGDHVNL

SEQ ID NO: 74503 - protein, 10 aa, synthetic construct
NVFRGDRDYL

SEQ ID NO: 74504 - protein, 10 aa, synthetic construct
NVFRGDYSSV

SEQ ID NO: 74505 - protein, 10 aa, synthetic construct
ASGRGDLTVT

SEQ ID NO: 74506 - protein, 10 aa, synthetic construct
NVFRGDLTVT

SEQ ID NO: 74507 - protein, 10 aa, synthetic construct
NVKRGDHVNL

SEQ ID NO: 74508 - protein, 10 aa, synthetic construct
NVKRGDRDYL

SEQ ID NO: 74509 - protein, 10 aa, synthetic construct
NVKRGDYSSV

SEQ ID NO: 74510 - protein, 10 aa, synthetic construct
NVKRGDLTVT

SEQ ID NO: 74511 - protein, 10 aa, synthetic construct
NVRRGDYNSL

SEQ ID NO: 74512 - protein, 10 aa, synthetic construct
NVRRGDYTSM

SEQ ID NO: 74513 - protein, 10 aa, synthetic construct
NVRRGDFQNT

SEQ ID NO: 74514 - protein, 10 aa, synthetic construct
NVHRGDYTSV

SEQ ID NO: 74515 - protein, 10 aa, synthetic construct
NVHRGDLIGR

SEQ ID NO: 74516 - protein, 10 aa, synthetic construct
DSPRGDLTVT

SEQ ID NO: 74517 - protein, 10 aa, synthetic construct
ASGRGDLIGR

SEQ ID NO: 74518 - protein, 10 aa, synthetic construct
NVSRGDYTSV

SEQ ID NO: 74519 - protein, 10 aa, synthetic construct
NVSRGDLIGR

SEQ ID NO: 74520 - protein, 10 aa, synthetic construct
NVTRGDYTSV

SEQ ID NO: 74521 - protein, 10 aa, synthetic construct
NVTRGDLIGR

SEQ ID NO: 74522 - protein, 10 aa, synthetic construct
NVYRGDHVNL

SEQ ID NO: 74523 - protein, 10 aa, synthetic construct
NVYRGDRDYL

SEQ ID NO: 74524 - protein, 10 aa, synthetic construct
NVYRGDYSSV

SEQ ID NO: 74525 - protein, 10 aa, synthetic construct
NVYRGDLTVT

SEQ ID NO: 74526 - protein, 10 aa, synthetic construct
NVNRGDHVNL

SEQ ID NO: 74527 - protein, 10 aa, synthetic construct
NVNRGDRDYL

SEQ ID NO: 74528 - protein, 10 aa, synthetic construct
ASGRGDRSQT

SEQ ID NO: 74529 - protein, 10 aa, synthetic construct
NVNRGDYSSV

SEQ ID NO: 74530 - protein, 10 aa, synthetic construct
NVNRGDLTVT

SEQ ID NO: 74531 - protein, 10 aa, synthetic construct
NVQRGDYTSV

SEQ ID NO: 74532 - protein, 10 aa, synthetic construct
NVQRGDLIGR

SEQ ID NO: 74533 - protein, 10 aa, synthetic construct
NVDRGDYTSV

SEQ ID NO: 74534 - protein, 10 aa, synthetic construct
NVDRGDLIGR

SEQ ID NO: 74535 - protein, 10 aa, synthetic construct
NVERGDYTSV

SEQ ID NO: 74536 - protein, 10 aa, synthetic construct
NVERGDLIGR

SEQ ID NO: 74537 - protein, 10 aa, synthetic construct
NPGRGDYNSL

SEQ ID NO: 74538 - protein, 10 aa, synthetic construct
NPGRGDYTSV

SEQ ID NO: 74539 - protein, 10 aa, synthetic construct
ASGRGDLLLS

SEQ ID NO: 74540 - protein, 10 aa, synthetic construct
NPGRGDYTSM

SEQ ID NO: 74541 - protein, 10 aa, synthetic construct
NPGRGDFQNT

SEQ ID NO: 74542 - protein, 10 aa, synthetic construct
NPARGDYNSL

SEQ ID NO: 74543 - protein, 10 aa, synthetic construct
NPARGDYTSV

SEQ ID NO: 74544 - protein, 10 aa, synthetic construct
NPARGDYTSM

SEQ ID NO: 74545 - protein, 10 aa, synthetic construct
NPARGDFQNT

SEQ ID NO: 74546 - protein, 10 aa, synthetic construct
NPVRGDRDYL

SEQ ID NO: 74547 - protein, 10 aa, synthetic construct
NPVRGDYTSV

SEQ ID NO: 74548 - protein, 10 aa, synthetic construct
NPVRGDLTVT

SEQ ID NO: 74549 - protein, 10 aa, synthetic construct
NPVRGDLIGR

SEQ ID NO: 74550 - protein, 10 aa, synthetic construct
ASARGDHGVL

SEQ ID NO: 74551 - protein, 10 aa, synthetic construct
NPPRGDYNSL

SEQ ID NO: 74552 - protein, 10 aa, synthetic construct
NPPRGDYTSV

SEQ ID NO: 74553 - protein, 10 aa, synthetic construct
NPPRGDYTSM

SEQ ID NO: 74554 - protein, 10 aa, synthetic construct
NPPRGDFQNT

SEQ ID NO: 74555 - protein, 10 aa, synthetic construct
NPLRGDRDYL

SEQ ID NO: 74556 - protein, 10 aa, synthetic construct
NPLRGDYTSV

SEQ ID NO: 74557 - protein, 10 aa, synthetic construct
NPLRGDLTVT

SEQ ID NO: 74558 - protein, 10 aa, synthetic construct
NPLRGDLIGR

SEQ ID NO: 74559 - protein, 10 aa, synthetic construct
NPIRGDHGVL

SEQ ID NO: 74560 - protein, 10 aa, synthetic construct
NPIRGDHVNL

SEQ ID NO: 74561 - protein, 10 aa, synthetic construct
ASARGDRGQI

SEQ ID NO: 74562 - protein, 10 aa, synthetic construct
NPIRGDRDYL

SEQ ID NO: 74563 - protein, 10 aa, synthetic construct
NPIRGDYSSV

SEQ ID NO: 74564 - protein, 10 aa, synthetic construct
NPIRGDLTVT

SEQ ID NO: 74565 - protein, 10 aa, synthetic construct
NPMRGDHGVL

SEQ ID NO: 74566 - protein, 10 aa, synthetic construct
NPMRGDHVNL

SEQ ID NO: 74567 - protein, 10 aa, synthetic construct
NPMRGDRDYL

SEQ ID NO: 74568 - protein, 10 aa, synthetic construct
NPMRGDYSSV

SEQ ID NO: 74569 - protein, 10 aa, synthetic construct
NPMRGDLTVT

SEQ ID NO: 74570 - protein, 10 aa, synthetic construct
NPWRGDRDYL

SEQ ID NO: 74571 - protein, 10 aa, synthetic construct
NPWRGDYTSV

SEQ ID NO: 74572 - protein, 10 aa, synthetic construct
ASARGDRQGI

SEQ ID NO: 74573 - protein, 10 aa, synthetic construct
NPWRGDLTVT

SEQ ID NO: 74574 - protein, 10 aa, synthetic construct
NPWRGDLIGR

SEQ ID NO: 74575 - protein, 10 aa, synthetic construct
NPFRGDHGVL

SEQ ID NO: 74576 - protein, 10 aa, synthetic construct
NPFRGDHVNL

SEQ ID NO: 74577 - protein, 10 aa, synthetic construct
NPFRGDRDYL

SEQ ID NO: 74578 - protein, 10 aa, synthetic construct
NPFRGDYSSV

SEQ ID NO: 74579 - protein, 10 aa, synthetic construct
NPFRGDLTVT

SEQ ID NO: 74580 - protein, 10 aa, synthetic construct
NPKRGDHGVL

SEQ ID NO: 74581 - protein, 10 aa, synthetic construct
NPKRGDHVNL

SEQ ID NO: 74582 - protein, 10 aa, synthetic construct
NPKRGDRDYL

SEQ ID NO: 74583 - protein, 10 aa, synthetic construct
ASARGDRSVV

SEQ ID NO: 74584 - protein, 10 aa, synthetic construct
NPKRGDYSSV

SEQ ID NO: 74585 - protein, 10 aa, synthetic construct
NPKRGDLTVT

SEQ ID NO: 74586 - protein, 10 aa, synthetic construct
NPRRGDYNSL

SEQ ID NO: 74587 - protein, 10 aa, synthetic construct
NPRRGDYTSV

SEQ ID NO: 74588 - protein, 10 aa, synthetic construct
NPRRGDYTSM

SEQ ID NO: 74589 - protein, 10 aa, synthetic construct
NPRRGDFQNT

SEQ ID NO: 74590 - protein, 10 aa, synthetic construct
NPHRGDRDYL

SEQ ID NO: 74591 - protein, 10 aa, synthetic construct
NPHRGDYTSV

SEQ ID NO: 74592 - protein, 10 aa, synthetic construct
NPHRGDLTVT

SEQ ID NO: 74593 - protein, 10 aa, synthetic construct
NPHRGDLIGR

SEQ ID NO: 74594 - protein, 10 aa, synthetic construct
ASARGDLTVT

SEQ ID NO: 74595 - protein, 10 aa, synthetic construct
NPSRGDRDYL

SEQ ID NO: 74596 - protein, 10 aa, synthetic construct
NPSRGDYTSV

SEQ ID NO: 74597 - protein, 10 aa, synthetic construct
NPSRGDLTVT

SEQ ID NO: 74598 - protein, 10 aa, synthetic construct
NPSRGDLIGR

SEQ ID NO: 74599 - protein, 10 aa, synthetic construct
NPTRGDRDYL

SEQ ID NO: 74600 - protein, 10 aa, synthetic construct
NPTRGDYTSV

SEQ ID NO: 74601 - protein, 10 aa, synthetic construct
NPTRGDLTVT

SEQ ID NO: 74602 - protein, 10 aa, synthetic construct
NPTRGDLIGR

SEQ ID NO: 74603 - protein, 10 aa, synthetic construct
NPYRGDHGVL

SEQ ID NO: 74604 - protein, 10 aa, synthetic construct
NPYRGDHVNL

SEQ ID NO: 74605 - protein, 10 aa, synthetic construct
ASARGDLIGR

SEQ ID NO: 74606 - protein, 10 aa, synthetic construct
NPYRGDRDYL

SEQ ID NO: 74607 - protein, 10 aa, synthetic construct
NPYRGDYSSV

SEQ ID NO: 74608 - protein, 10 aa, synthetic construct
NPYRGDLTVT

SEQ ID NO: 74609 - protein, 10 aa, synthetic construct
NPNRGDHGVL

SEQ ID NO: 74610 - protein, 10 aa, synthetic construct
NPNRGDHVNL

SEQ ID NO: 74611 - protein, 10 aa, synthetic construct
NPNRGDRDYL

SEQ ID NO: 74612 - protein, 10 aa, synthetic construct
NPNRGDYSSV

SEQ ID NO: 74613 - protein, 10 aa, synthetic construct
NPNRGDLTVT

SEQ ID NO: 74614 - protein, 10 aa, synthetic construct
NPQRGDRDYL

SEQ ID NO: 74615 - protein, 10 aa, synthetic construct
NPQRGDYTSV

SEQ ID NO: 74616 - protein, 10 aa, synthetic construct
ASARGDRSQT

SEQ ID NO: 74617 - protein, 10 aa, synthetic construct
NPQRGDLTVT

SEQ ID NO: 74618 - protein, 10 aa, synthetic construct
NPQRGDLIGR

SEQ ID NO: 74619 - protein, 10 aa, synthetic construct
NPDRGDRDYL

SEQ ID NO: 74620 - protein, 10 aa, synthetic construct
NPDRGDYTSV

SEQ ID NO: 74621 - protein, 10 aa, synthetic construct
NPDRGDLTVT

SEQ ID NO: 74622 - protein, 10 aa, synthetic construct
NPDRGDLIGR

SEQ ID NO: 74623 - protein, 10 aa, synthetic construct
NPERGDRDYL

SEQ ID NO: 74624 - protein, 10 aa, synthetic construct
NPERGDYTSV

SEQ ID NO: 74625 - protein, 10 aa, synthetic construct
NPERGDLTVT

SEQ ID NO: 74626 - protein, 10 aa, synthetic construct
NPERGDLIGR

SEQ ID NO: 74627 - protein, 10 aa, synthetic construct
DSPRGDLIGR

SEQ ID NO: 74628 - protein, 10 aa, synthetic construct
ASARGDLLLS

SEQ ID NO: 74629 - protein, 10 aa, synthetic construct
NLGRGDYNSL

SEQ ID NO: 74630 - protein, 10 aa, synthetic construct
NLGRGDYTSM

SEQ ID NO: 74631 - protein, 10 aa, synthetic construct
NLGRGDFQNT

SEQ ID NO: 74632 - protein, 10 aa, synthetic construct
NLARGDYNSL

SEQ ID NO: 74633 - protein, 10 aa, synthetic construct
NLARGDYTSM

SEQ ID NO: 74634 - protein, 10 aa, synthetic construct
NLARGDFQNT

SEQ ID NO: 74635 - protein, 10 aa, synthetic construct
NLVRGDYTSV

SEQ ID NO: 74636 - protein, 10 aa, synthetic construct
NLVRGDLIGR

SEQ ID NO: 74637 - protein, 10 aa, synthetic construct
NLPRGDYNSL

SEQ ID NO: 74638 - protein, 10 aa, synthetic construct
NLPRGDYTSM

SEQ ID NO: 74639 - protein, 10 aa, synthetic construct
ASVRGDHGVL

SEQ ID NO: 74640 - protein, 10 aa, synthetic construct
NLPRGDFQNT

SEQ ID NO: 74641 - protein, 10 aa, synthetic construct
NLLRGDYTSV

SEQ ID NO: 74642 - protein, 10 aa, synthetic construct
NLLRGDLIGR

SEQ ID NO: 74643 - protein, 10 aa, synthetic construct
NLIRGDHVNL

SEQ ID NO: 74644 - protein, 10 aa, synthetic construct
NLIRGDRDYL

SEQ ID NO: 74645 - protein, 10 aa, synthetic construct
NLIRGDYSSV

SEQ ID NO: 74646 - protein, 10 aa, synthetic construct
NLIRGDLTVT

SEQ ID NO: 74647 - protein, 10 aa, synthetic construct
NLMRGDHVNL

SEQ ID NO: 74648 - protein, 10 aa, synthetic construct
NLMRGDRDYL

SEQ ID NO: 74649 - protein, 10 aa, synthetic construct
NLMRGDYSSV

SEQ ID NO: 74650 - protein, 10 aa, synthetic construct
ASVRGDRGQI

SEQ ID NO: 74651 - protein, 10 aa, synthetic construct
NLMRGDLTVT

SEQ ID NO: 74652 - protein, 10 aa, synthetic construct
NLWRGDYTSV

SEQ ID NO: 74653 - protein, 10 aa, synthetic construct
NLWRGDLIGR

SEQ ID NO: 74654 - protein, 10 aa, synthetic construct
NLFRGDHVNL

SEQ ID NO: 74655 - protein, 10 aa, synthetic construct
NLFRGDRDYL

SEQ ID NO: 74656 - protein, 10 aa, synthetic construct
NLFRGDYSSV

SEQ ID NO: 74657 - protein, 10 aa, synthetic construct
NLFRGDLTVT

SEQ ID NO: 74658 - protein, 10 aa, synthetic construct
NLKRGDHVNL

SEQ ID NO: 74659 - protein, 10 aa, synthetic construct
NLKRGDRDYL

SEQ ID NO: 74660 - protein, 10 aa, synthetic construct
NLKRGDYSSV

SEQ ID NO: 74661 - protein, 10 aa, synthetic construct
ASVRGDRQGI

SEQ ID NO: 74662 - protein, 10 aa, synthetic construct
NLKRGDLTVT

SEQ ID NO: 74663 - protein, 10 aa, synthetic construct
NLRRGDYNSL

SEQ ID NO: 74664 - protein, 10 aa, synthetic construct
NLRRGDYTSM

SEQ ID NO: 74665 - protein, 10 aa, synthetic construct
NLRRGDFQNT

SEQ ID NO: 74666 - protein, 10 aa, synthetic construct
NLHRGDYTSV

SEQ ID NO: 74667 - protein, 10 aa, synthetic construct
NLHRGDLIGR

SEQ ID NO: 74668 - protein, 10 aa, synthetic construct
NLSRGDYTSV

SEQ ID NO: 74669 - protein, 10 aa, synthetic construct
NLSRGDLIGR

SEQ ID NO: 74670 - protein, 10 aa, synthetic construct
NLTRGDYTSV

SEQ ID NO: 74671 - protein, 10 aa, synthetic construct
NLTRGDLIGR

SEQ ID NO: 74672 - protein, 10 aa, synthetic construct
ASVRGDRSVV

SEQ ID NO: 74673 - protein, 10 aa, synthetic construct
NLYRGDHVNL

SEQ ID NO: 74674 - protein, 10 aa, synthetic construct
NLYRGDRDYL

SEQ ID NO: 74675 - protein, 10 aa, synthetic construct
NLYRGDYSSV

SEQ ID NO: 74676 - protein, 10 aa, synthetic construct
NLYRGDLTVT

SEQ ID NO: 74677 - protein, 10 aa, synthetic construct
NLNRGDHVNL

SEQ ID NO: 74678 - protein, 10 aa, synthetic construct
NLNRGDRDYL

SEQ ID NO: 74679 - protein, 10 aa, synthetic construct
NLNRGDYSSV

SEQ ID NO: 74680 - protein, 10 aa, synthetic construct
NLNRGDLTVT

SEQ ID NO: 74681 - protein, 10 aa, synthetic construct
NLQRGDYTSV

SEQ ID NO: 74682 - protein, 10 aa, synthetic construct
NLQRGDLIGR

SEQ ID NO: 74683 - protein, 10 aa, synthetic construct
ASVRGDLTVT

SEQ ID NO: 74684 - protein, 10 aa, synthetic construct
NLDRGDYTSV

SEQ ID NO: 74685 - protein, 10 aa, synthetic construct
NLDRGDLIGR

SEQ ID NO: 74686 - protein, 10 aa, synthetic construct
NLERGDYTSV

SEQ ID NO: 74687 - protein, 10 aa, synthetic construct
NLERGDLIGR

SEQ ID NO: 74688 - protein, 10 aa, synthetic construct
NIGRGDHGVL

SEQ ID NO: 74689 - protein, 10 aa, synthetic construct
NIGRGDHVNL

SEQ ID NO: 74690 - protein, 10 aa, synthetic construct
NIGRGDRDYL

SEQ ID NO: 74691 - protein, 10 aa, synthetic construct
NIGRGDYSSV

SEQ ID NO: 74692 - protein, 10 aa, synthetic construct
NIGRGDLTVT

SEQ ID NO: 74693 - protein, 10 aa, synthetic construct
NIARGDHGVL

SEQ ID NO: 74694 - protein, 10 aa, synthetic construct
ASVRGDLIGR

SEQ ID NO: 74695 - protein, 10 aa, synthetic construct
NIARGDHVNL

SEQ ID NO: 74696 - protein, 10 aa, synthetic construct
NIARGDRDYL

SEQ ID NO: 74697 - protein, 10 aa, synthetic construct
NIARGDYSSV

SEQ ID NO: 74698 - protein, 10 aa, synthetic construct
NIARGDLTVT

SEQ ID NO: 74699 - protein, 10 aa, synthetic construct
NIVRGDHGVL

SEQ ID NO: 74700 - protein, 10 aa, synthetic construct
NIVRGDRGQI

SEQ ID NO: 74701 - protein, 10 aa, synthetic construct
NIVRGDRQGI

SEQ ID NO: 74702 - protein, 10 aa, synthetic construct
NIVRGDRGVV

SEQ ID NO: 74703 - protein, 10 aa, synthetic construct
NIVRGDYVGL

SEQ ID NO: 74704 - protein, 10 aa, synthetic construct
NIVRGDLIGR

SEQ ID NO: 74705 - protein, 10 aa, synthetic construct
ASVRGDRSQT

SEQ ID NO: 74706 - protein, 10 aa, synthetic construct
NIVRGDQSTL

SEQ ID NO: 74707 - protein, 10 aa, synthetic construct
NIVRGDLLLS

SEQ ID NO: 74708 - protein, 10 aa, synthetic construct
NIPRGDHGVL

SEQ ID NO: 74709 - protein, 10 aa, synthetic construct
NIPRGDHVNL

SEQ ID NO: 74710 - protein, 10 aa, synthetic construct
NIPRGDRDYL

SEQ ID NO: 74711 - protein, 10 aa, synthetic construct
NIPRGDYSSV

SEQ ID NO: 74712 - protein, 10 aa, synthetic construct
NIPRGDLTVT

SEQ ID NO: 74713 - protein, 10 aa, synthetic construct
NILRGDHGVL

SEQ ID NO: 74714 - protein, 10 aa, synthetic construct
NILRGDRGQI

SEQ ID NO: 74715 - protein, 10 aa, synthetic construct
NILRGDRQGI

SEQ ID NO: 74716 - protein, 10 aa, synthetic construct
ASVRGDLLLS

SEQ ID NO: 74717 - protein, 10 aa, synthetic construct
NILRGDRGVV

SEQ ID NO: 74718 - protein, 10 aa, synthetic construct
NILRGDYVGL

SEQ ID NO: 74719 - protein, 10 aa, synthetic construct
NILRGDLIGR

SEQ ID NO: 74720 - protein, 10 aa, synthetic construct
NILRGDQSTL

SEQ ID NO: 74721 - protein, 10 aa, synthetic construct
NILRGDLLLS

SEQ ID NO: 74722 - protein, 10 aa, synthetic construct
NIIRGDRSVV

SEQ ID NO: 74723 - protein, 10 aa, synthetic construct
NIIRGDRGVV

SEQ ID NO: 74724 - protein, 10 aa, synthetic construct
NIIRGDRSQT

SEQ ID NO: 74725 - protein, 10 aa, synthetic construct
NIMRGDRSVV

SEQ ID NO: 74726 - protein, 10 aa, synthetic construct
NIMRGDRGVV

SEQ ID NO: 74727 - protein, 10 aa, synthetic construct
ASPRGDHGVL

SEQ ID NO: 74728 - protein, 10 aa, synthetic construct
NIMRGDRSQT

SEQ ID NO: 74729 - protein, 10 aa, synthetic construct
NIWRGDHGVL

SEQ ID NO: 74730 - protein, 10 aa, synthetic construct
NIWRGDRGQI

SEQ ID NO: 74731 - protein, 10 aa, synthetic construct
NIWRGDRQGI

SEQ ID NO: 74732 - protein, 10 aa, synthetic construct
NIWRGDRGVV

SEQ ID NO: 74733 - protein, 10 aa, synthetic construct
NIWRGDYVGL

SEQ ID NO: 74734 - protein, 10 aa, synthetic construct
NIWRGDLIGR

SEQ ID NO: 74735 - protein, 10 aa, synthetic construct
NIWRGDQSTL

SEQ ID NO: 74736 - protein, 10 aa, synthetic construct
NIWRGDLLLS

SEQ ID NO: 74737 - protein, 10 aa, synthetic construct
NIFRGDRSVV

SEQ ID NO: 74738 - protein, 10 aa, synthetic construct
QSPRGDHVNL

SEQ ID NO: 74739 - protein, 10 aa, synthetic construct
ASPRGDRGQI

SEQ ID NO: 74740 - protein, 10 aa, synthetic construct
NIFRGDRGVV

SEQ ID NO: 74741 - protein, 10 aa, synthetic construct
NIFRGDRSQT

SEQ ID NO: 74742 - protein, 10 aa, synthetic construct
NIKRGDRSVV

SEQ ID NO: 74743 - protein, 10 aa, synthetic construct
NIKRGDRGVV

SEQ ID NO: 74744 - protein, 10 aa, synthetic construct
NIKRGDRSQT

SEQ ID NO: 74745 - protein, 10 aa, synthetic construct
NIRRGDHGVL

SEQ ID NO: 74746 - protein, 10 aa, synthetic construct
NIRRGDHVNL

SEQ ID NO: 74747 - protein, 10 aa, synthetic construct
NIRRGDRDYL

SEQ ID NO: 74748 - protein, 10 aa, synthetic construct
NIRRGDYSSV

SEQ ID NO: 74749 - protein, 10 aa, synthetic construct
NIRRGDLTVT

SEQ ID NO: 74750 - protein, 10 aa, synthetic construct
ASPRGDRQGI

SEQ ID NO: 74751 - protein, 10 aa, synthetic construct
NIHRGDHGVL

SEQ ID NO: 74752 - protein, 10 aa, synthetic construct
NIHRGDRGQI

SEQ ID NO: 74753 - protein, 10 aa, synthetic construct
NIHRGDRQGI

SEQ ID NO: 74754 - protein, 10 aa, synthetic construct
NIHRGDRGVV

SEQ ID NO: 74755 - protein, 10 aa, synthetic construct
NIHRGDYVGL

SEQ ID NO: 74756 - protein, 10 aa, synthetic construct
NIHRGDLIGR

SEQ ID NO: 74757 - protein, 10 aa, synthetic construct
NIHRGDQSTL

SEQ ID NO: 74758 - protein, 10 aa, synthetic construct
NIHRGDLLLS

SEQ ID NO: 74759 - protein, 10 aa, synthetic construct
NISRGDHGVL

SEQ ID NO: 74760 - protein, 10 aa, synthetic construct
NISRGDRGQI

SEQ ID NO: 74761 - protein, 10 aa, synthetic construct
ASPRGDRSVV

SEQ ID NO: 74762 - protein, 10 aa, synthetic construct
NISRGDRQGI

SEQ ID NO: 74763 - protein, 10 aa, synthetic construct
NISRGDRGVV

SEQ ID NO: 74764 - protein, 10 aa, synthetic construct
NISRGDYVGL

SEQ ID NO: 74765 - protein, 10 aa, synthetic construct
NISRGDLIGR

SEQ ID NO: 74766 - protein, 10 aa, synthetic construct
NISRGDQSTL

SEQ ID NO: 74767 - protein, 10 aa, synthetic construct
NISRGDLLLS

SEQ ID NO: 74768 - protein, 10 aa, synthetic construct
NITRGDHGVL

SEQ ID NO: 74769 - protein, 10 aa, synthetic construct
NITRGDRGQI

SEQ ID NO: 74770 - protein, 10 aa, synthetic construct
NITRGDRQGI

SEQ ID NO: 74771 - protein, 10 aa, synthetic construct
NITRGDRGVV

SEQ ID NO: 74772 - protein, 10 aa, synthetic construct
ASPRGDLTVT

SEQ ID NO: 74773 - protein, 10 aa, synthetic construct
NITRGDYVGL

SEQ ID NO: 74774 - protein, 10 aa, synthetic construct
NITRGDLIGR

SEQ ID NO: 74775 - protein, 10 aa, synthetic construct
NITRGDQSTL

SEQ ID NO: 74776 - protein, 10 aa, synthetic construct
NITRGDLLLS

SEQ ID NO: 74777 - protein, 10 aa, synthetic construct
NIYRGDRSVV

SEQ ID NO: 74778 - protein, 10 aa, synthetic construct
NIYRGDRGVV

SEQ ID NO: 74779 - protein, 10 aa, synthetic construct
NIYRGDRSQT

SEQ ID NO: 74780 - protein, 10 aa, synthetic construct
NINRGDRSVV

SEQ ID NO: 74781 - protein, 10 aa, synthetic construct
NINRGDRGVV

SEQ ID NO: 74782 - protein, 10 aa, synthetic construct
NINRGDRSQT

SEQ ID NO: 74783 - protein, 10 aa, synthetic construct
ASPRGDLIGR

SEQ ID NO: 74784 - protein, 10 aa, synthetic construct
NIQRGDHGVL

SEQ ID NO: 74785 - protein, 10 aa, synthetic construct
NIQRGDRGQI

SEQ ID NO: 74786 - protein, 10 aa, synthetic construct
NIQRGDRQGI

SEQ ID NO: 74787 - protein, 10 aa, synthetic construct
NIQRGDRGVV

SEQ ID NO: 74788 - protein, 10 aa, synthetic construct
NIQRGDYVGL

SEQ ID NO: 74789 - protein, 10 aa, synthetic construct
NIQRGDLIGR

SEQ ID NO: 74790 - protein, 10 aa, synthetic construct
NIQRGDQSTL

SEQ ID NO: 74791 - protein, 10 aa, synthetic construct
NIQRGDLLLS

SEQ ID NO: 74792 - protein, 10 aa, synthetic construct
NIDRGDHGVL

SEQ ID NO: 74793 - protein, 10 aa, synthetic construct
NIDRGDRGQI

SEQ ID NO: 74794 - protein, 10 aa, synthetic construct
ASPRGDRSQT

SEQ ID NO: 74795 - protein, 10 aa, synthetic construct
NIDRGDRQGI

SEQ ID NO: 74796 - protein, 10 aa, synthetic construct
NIDRGDRGVV

SEQ ID NO: 74797 - protein, 10 aa, synthetic construct
NIDRGDYVGL

SEQ ID NO: 74798 - protein, 10 aa, synthetic construct
NIDRGDLIGR

SEQ ID NO: 74799 - protein, 10 aa, synthetic construct
NIDRGDQSTL

SEQ ID NO: 74800 - protein, 10 aa, synthetic construct
NIDRGDLLLS

SEQ ID NO: 74801 - protein, 10 aa, synthetic construct
NIERGDHGVL

SEQ ID NO: 74802 - protein, 10 aa, synthetic construct
NIERGDRGQI

SEQ ID NO: 74803 - protein, 10 aa, synthetic construct
NIERGDRQGI

SEQ ID NO: 74804 - protein, 10 aa, synthetic construct
NIERGDRGVV

SEQ ID NO: 74805 - protein, 10 aa, synthetic construct
ASPRGDLLLS

SEQ ID NO: 74806 - protein, 10 aa, synthetic construct
NIERGDYVGL

SEQ ID NO: 74807 - protein, 10 aa, synthetic construct
NIERGDLIGR

SEQ ID NO: 74808 - protein, 10 aa, synthetic construct
NIERGDQSTL

SEQ ID NO: 74809 - protein, 10 aa, synthetic construct
NIERGDLLLS

SEQ ID NO: 74810 - protein, 10 aa, synthetic construct
NMGRGDRDYL

SEQ ID NO: 74811 - protein, 10 aa, synthetic construct
NMGRGDYVGL

SEQ ID NO: 74812 - protein, 10 aa, synthetic construct
NMGRGDYSSV

SEQ ID NO: 74813 - protein, 10 aa, synthetic construct
NMGRGDYTSV

SEQ ID NO: 74814 - protein, 10 aa, synthetic construct
NMGRGDQSTL

SEQ ID NO: 74815 - protein, 10 aa, synthetic construct
NMARGDRDYL

SEQ ID NO: 74816 - protein, 10 aa, synthetic construct
ASLRGDHGVL

SEQ ID NO: 74817 - protein, 10 aa, synthetic construct
NMARGDYVGL

SEQ ID NO: 74818 - protein, 10 aa, synthetic construct
NMARGDYSSV

SEQ ID NO: 74819 - protein, 10 aa, synthetic construct
NMARGDYTSV

SEQ ID NO: 74820 - protein, 10 aa, synthetic construct
NMARGDQSTL

SEQ ID NO: 74821 - protein, 10 aa, synthetic construct
NMVRGDRDYL

SEQ ID NO: 74822 - protein, 10 aa, synthetic construct
NMVRGDYVGL

SEQ ID NO: 74823 - protein, 10 aa, synthetic construct
NMVRGDYSSV

SEQ ID NO: 74824 - protein, 10 aa, synthetic construct
NMVRGDYTSV

SEQ ID NO: 74825 - protein, 10 aa, synthetic construct
NMVRGDQSTL

SEQ ID NO: 74826 - protein, 10 aa, synthetic construct
NMPRGDRDYL

SEQ ID NO: 74827 - protein, 10 aa, synthetic construct
ASLRGDRGQI

SEQ ID NO: 74828 - protein, 10 aa, synthetic construct
NMPRGDYVGL

SEQ ID NO: 74829 - protein, 10 aa, synthetic construct
NMPRGDYSSV

SEQ ID NO: 74830 - protein, 10 aa, synthetic construct
NMPRGDYTSV

SEQ ID NO: 74831 - protein, 10 aa, synthetic construct
NMPRGDQSTL

SEQ ID NO: 74832 - protein, 10 aa, synthetic construct
NMLRGDRDYL

SEQ ID NO: 74833 - protein, 10 aa, synthetic construct
NMLRGDYVGL

SEQ ID NO: 74834 - protein, 10 aa, synthetic construct
NMLRGDYSSV

SEQ ID NO: 74835 - protein, 10 aa, synthetic construct
NMLRGDYTSV

SEQ ID NO: 74836 - protein, 10 aa, synthetic construct
NMLRGDQSTL

SEQ ID NO: 74837 - protein, 10 aa, synthetic construct
NMIRGDHGVL

SEQ ID NO: 74838 - protein, 10 aa, synthetic construct
ASLRGDRQGI

SEQ ID NO: 74839 - protein, 10 aa, synthetic construct
NMIRGDRSVV

SEQ ID NO: 74840 - protein, 10 aa, synthetic construct
NMIRGDLTVT

SEQ ID NO: 74841 - protein, 10 aa, synthetic construct
NMIRGDLIGR

SEQ ID NO: 74842 - protein, 10 aa, synthetic construct
NMIRGDLLLS

SEQ ID NO: 74843 - protein, 10 aa, synthetic construct
NMMRGDHGVL

SEQ ID NO: 74844 - protein, 10 aa, synthetic construct
NMMRGDRGQI

SEQ ID NO: 74845 - protein, 10 aa, synthetic construct
NMMRGDRQGI

SEQ ID NO: 74846 - protein, 10 aa, synthetic construct
NMMRGDYVGL

SEQ ID NO: 74847 - protein, 10 aa, synthetic construct
NMMRGDLIGR

SEQ ID NO: 74848 - protein, 10 aa, synthetic construct
NMMRGDQSTL

SEQ ID NO: 74849 - protein, 10 aa, synthetic construct
QSPRGDRDYL

SEQ ID NO: 74850 - protein, 10 aa, synthetic construct
ASLRGDRSVV

SEQ ID NO: 74851 - protein, 10 aa, synthetic construct
NMMRGDLLLS

SEQ ID NO: 74852 - protein, 10 aa, synthetic construct
NMWRGDHVNL

SEQ ID NO: 74853 - protein, 10 aa, synthetic construct
NMWRGDRDYL

SEQ ID NO: 74854 - protein, 10 aa, synthetic construct
NMWRGDYSSV

SEQ ID NO: 74855 - protein, 10 aa, synthetic construct
NMWRGDLTVT

SEQ ID NO: 74856 - protein, 10 aa, synthetic construct
NMFRGDHGVL

SEQ ID NO: 74857 - protein, 10 aa, synthetic construct
NMFRGDRSVV

SEQ ID NO: 74858 - protein, 10 aa, synthetic construct
NMFRGDLTVT

SEQ ID NO: 74859 - protein, 10 aa, synthetic construct
NMFRGDLIGR

SEQ ID NO: 74860 - protein, 10 aa, synthetic construct
NMFRGDLLLS

SEQ ID NO: 74861 - protein, 10 aa, synthetic construct
ASLRGDLTVT

SEQ ID NO: 74862 - protein, 10 aa, synthetic construct
NMKRGDHGVL

SEQ ID NO: 74863 - protein, 10 aa, synthetic construct
NMKRGDRSVV

SEQ ID NO: 74864 - protein, 10 aa, synthetic construct
NMKRGDLTVT

SEQ ID NO: 74865 - protein, 10 aa, synthetic construct
NMKRGDLIGR

SEQ ID NO: 74866 - protein, 10 aa, synthetic construct
NMKRGDLLLS

SEQ ID NO: 74867 - protein, 10 aa, synthetic construct
NMRRGDRDYL

SEQ ID NO: 74868 - protein, 10 aa, synthetic construct
NMRRGDYVGL

SEQ ID NO: 74869 - protein, 10 aa, synthetic construct
NMRRGDYSSV

SEQ ID NO: 74870 - protein, 10 aa, synthetic construct
NMRRGDYTSV

SEQ ID NO: 74871 - protein, 10 aa, synthetic construct
NMRRGDQSTL

SEQ ID NO: 74872 - protein, 10 aa, synthetic construct
ASLRGDLIGR

SEQ ID NO: 74873 - protein, 10 aa, synthetic construct
NMHRGDRGQI

SEQ ID NO: 74874 - protein, 10 aa, synthetic construct
NMHRGDRQGI

SEQ ID NO: 74875 - protein, 10 aa, synthetic construct
NMHRGDRSQT

SEQ ID NO: 74876 - protein, 10 aa, synthetic construct
NMSRGDRDYL

SEQ ID NO: 74877 - protein, 10 aa, synthetic construct
NMSRGDYVGL

SEQ ID NO: 74878 - protein, 10 aa, synthetic construct
NMSRGDYSSV

SEQ ID NO: 74879 - protein, 10 aa, synthetic construct
NMSRGDYTSV

SEQ ID NO: 74880 - protein, 10 aa, synthetic construct
NMSRGDQSTL

SEQ ID NO: 74881 - protein, 10 aa, synthetic construct
NMTRGDRGQI

SEQ ID NO: 74882 - protein, 10 aa, synthetic construct
NMTRGDRQGI

SEQ ID NO: 74883 - protein, 10 aa, synthetic construct
ASLRGDRSQT

SEQ ID NO: 74884 - protein, 10 aa, synthetic construct
NMTRGDRSQT

SEQ ID NO: 74885 - protein, 10 aa, synthetic construct
NMYRGDHGVL

SEQ ID NO: 74886 - protein, 10 aa, synthetic construct
NMYRGDRSVV

SEQ ID NO: 74887 - protein, 10 aa, synthetic construct
NMYRGDLTVT

SEQ ID NO: 74888 - protein, 10 aa, synthetic construct
NMYRGDLIGR

SEQ ID NO: 74889 - protein, 10 aa, synthetic construct
NMYRGDLLLS

SEQ ID NO: 74890 - protein, 10 aa, synthetic construct
NMNRGDHGVL

SEQ ID NO: 74891 - protein, 10 aa, synthetic construct
NMNRGDRSVV

SEQ ID NO: 74892 - protein, 10 aa, synthetic construct
NMNRGDLTVT

SEQ ID NO: 74893 - protein, 10 aa, synthetic construct
NMNRGDLIGR

SEQ ID NO: 74894 - protein, 10 aa, synthetic construct
ASLRGDLLLS

SEQ ID NO: 74895 - protein, 10 aa, synthetic construct
NMNRGDLLLS

SEQ ID NO: 74896 - protein, 10 aa, synthetic construct
NMQRGDRGQI

SEQ ID NO: 74897 - protein, 10 aa, synthetic construct
NMQRGDRQGI

SEQ ID NO: 74898 - protein, 10 aa, synthetic construct
NMQRGDRSQT

SEQ ID NO: 74899 - protein, 10 aa, synthetic construct
NMDRGDRGQI

SEQ ID NO: 74900 - protein, 10 aa, synthetic construct
NMDRGDRQGI

SEQ ID NO: 74901 - protein, 10 aa, synthetic construct
NMDRGDRSQT

SEQ ID NO: 74902 - protein, 10 aa, synthetic construct
NMERGDRGQI

SEQ ID NO: 74903 - protein, 10 aa, synthetic construct
NMERGDRQGI

SEQ ID NO: 74904 - protein, 10 aa, synthetic construct
NMERGDRSQT

SEQ ID NO: 74905 - protein, 10 aa, synthetic construct
ASWRGDRGQI

SEQ ID NO: 74906 - protein, 10 aa, synthetic construct
NWGRGDHVNL

SEQ ID NO: 74907 - protein, 10 aa, synthetic construct
NWGRGDYNSL

SEQ ID NO: 74908 - protein, 10 aa, synthetic construct
NWGRGDYTSM

SEQ ID NO: 74909 - protein, 10 aa, synthetic construct
NWARGDHVNL

SEQ ID NO: 74910 - protein, 10 aa, synthetic construct
NWARGDYNSL

SEQ ID NO: 74911 - protein, 10 aa, synthetic construct
NWARGDYTSM

SEQ ID NO: 74912 - protein, 10 aa, synthetic construct
NWVRGDHVNL

SEQ ID NO: 74913 - protein, 10 aa, synthetic construct
NWVRGDYNSL

SEQ ID NO: 74914 - protein, 10 aa, synthetic construct
NWVRGDYTSM

SEQ ID NO: 74915 - protein, 10 aa, synthetic construct
NWPRGDHVNL

SEQ ID NO: 74916 - protein, 10 aa, synthetic construct
ASWRGDRQGI

SEQ ID NO: 74917 - protein, 10 aa, synthetic construct
NWPRGDYNSL

SEQ ID NO: 74918 - protein, 10 aa, synthetic construct
NWPRGDYTSM

SEQ ID NO: 74919 - protein, 10 aa, synthetic construct
NWLRGDHVNL

SEQ ID NO: 74920 - protein, 10 aa, synthetic construct
NWLRGDYNSL

SEQ ID NO: 74921 - protein, 10 aa, synthetic construct
NWLRGDYTSM

SEQ ID NO: 74922 - protein, 10 aa, synthetic construct
NWIRGDRGQI

SEQ ID NO: 74923 - protein, 10 aa, synthetic construct
NWIRGDRQGI

SEQ ID NO: 74924 - protein, 10 aa, synthetic construct
NWIRGDRSQT

SEQ ID NO: 74925 - protein, 10 aa, synthetic construct
NWMRGDHVNL

SEQ ID NO: 74926 - protein, 10 aa, synthetic construct
NWMRGDRDYL

SEQ ID NO: 74927 - protein, 10 aa, synthetic construct
ASWRGDRSVV

SEQ ID NO: 74928 - protein, 10 aa, synthetic construct
NWMRGDYSSV

SEQ ID NO: 74929 - protein, 10 aa, synthetic construct
NWMRGDLTVT

SEQ ID NO: 74930 - protein, 10 aa, synthetic construct
NWWRGDYTSV

SEQ ID NO: 74931 - protein, 10 aa, synthetic construct
NWWRGDLIGR

SEQ ID NO: 74932 - protein, 10 aa, synthetic construct
NWFRGDRGQI

SEQ ID NO: 74933 - protein, 10 aa, synthetic construct
NWFRGDRQGI

SEQ ID NO: 74934 - protein, 10 aa, synthetic construct
NWFRGDRSQT

SEQ ID NO: 74935 - protein, 10 aa, synthetic construct
NWKRGDRGQI

SEQ ID NO: 74936 - protein, 10 aa, synthetic construct
NWKRGDRQGI

SEQ ID NO: 74937 - protein, 10 aa, synthetic construct
NWKRGDRSQT

SEQ ID NO: 74938 - protein, 10 aa, synthetic construct
ASWRGDRGVV

SEQ ID NO: 74939 - protein, 10 aa, synthetic construct
NWRRGDHVNL

SEQ ID NO: 74940 - protein, 10 aa, synthetic construct
NWRRGDYNSL

SEQ ID NO: 74941 - protein, 10 aa, synthetic construct
NWRRGDYTSM

SEQ ID NO: 74942 - protein, 10 aa, synthetic construct
NWHRGDRDYL

SEQ ID NO: 74943 - protein, 10 aa, synthetic construct
NWHRGDYVGL

SEQ ID NO: 74944 - protein, 10 aa, synthetic construct
NWHRGDYSSV

SEQ ID NO: 74945 - protein, 10 aa, synthetic construct
NWHRGDYTSV

SEQ ID NO: 74946 - protein, 10 aa, synthetic construct
NWHRGDQSTL

SEQ ID NO: 74947 - protein, 10 aa, synthetic construct
NWSRGDHVNL

SEQ ID NO: 74948 - protein, 10 aa, synthetic construct
NWSRGDYNSL

SEQ ID NO: 74949 - protein, 10 aa, synthetic construct
ASWRGDRSQT

SEQ ID NO: 74950 - protein, 10 aa, synthetic construct
NWSRGDYTSM

SEQ ID NO: 74951 - protein, 10 aa, synthetic construct
NWTRGDRDYL

SEQ ID NO: 74952 - protein, 10 aa, synthetic construct
NWTRGDYVGL

SEQ ID NO: 74953 - protein, 10 aa, synthetic construct
NWTRGDYSSV

SEQ ID NO: 74954 - protein, 10 aa, synthetic construct
NWTRGDYTSV

SEQ ID NO: 74955 - protein, 10 aa, synthetic construct
NWTRGDQSTL

SEQ ID NO: 74956 - protein, 10 aa, synthetic construct
NWYRGDRGQI

SEQ ID NO: 74957 - protein, 10 aa, synthetic construct
NWYRGDRQGI

SEQ ID NO: 74958 - protein, 10 aa, synthetic construct
NWYRGDRSQT

SEQ ID NO: 74959 - protein, 10 aa, synthetic construct
NWNRGDRGQI

SEQ ID NO: 74960 - protein, 10 aa, synthetic construct
QSPRGDYSSV

SEQ ID NO: 74961 - protein, 10 aa, synthetic construct
ASRRGDHGVL

SEQ ID NO: 74962 - protein, 10 aa, synthetic construct
NWNRGDRQGI

SEQ ID NO: 74963 - protein, 10 aa, synthetic construct
NWNRGDRSQT

SEQ ID NO: 74964 - protein, 10 aa, synthetic construct
NWQRGDRDYL

SEQ ID NO: 74965 - protein, 10 aa, synthetic construct
NWQRGDYVGL

SEQ ID NO: 74966 - protein, 10 aa, synthetic construct
NWQRGDYSSV

SEQ ID NO: 74967 - protein, 10 aa, synthetic construct
NWQRGDYTSV

SEQ ID NO: 74968 - protein, 10 aa, synthetic construct
NWQRGDQSTL

SEQ ID NO: 74969 - protein, 10 aa, synthetic construct
NWDRGDRDYL

SEQ ID NO: 74970 - protein, 10 aa, synthetic construct
NWDRGDYVGL

SEQ ID NO: 74971 - protein, 10 aa, synthetic construct
NWDRGDYSSV

SEQ ID NO: 74972 - protein, 10 aa, synthetic construct
ASRRGDRGQI

SEQ ID NO: 74973 - protein, 10 aa, synthetic construct
NWDRGDYTSV

SEQ ID NO: 74974 - protein, 10 aa, synthetic construct
NWDRGDQSTL

SEQ ID NO: 74975 - protein, 10 aa, synthetic construct
NWERGDRDYL

SEQ ID NO: 74976 - protein, 10 aa, synthetic construct
NWERGDYVGL

SEQ ID NO: 74977 - protein, 10 aa, synthetic construct
NWERGDYSSV

SEQ ID NO: 74978 - protein, 10 aa, synthetic construct
NWERGDYTSV

SEQ ID NO: 74979 - protein, 10 aa, synthetic construct
NWERGDQSTL

SEQ ID NO: 74980 - protein, 10 aa, synthetic construct
NFGRGDHGVL

SEQ ID NO: 74981 - protein, 10 aa, synthetic construct
NFGRGDHVNL

SEQ ID NO: 74982 - protein, 10 aa, synthetic construct
NFGRGDRDYL

SEQ ID NO: 74983 - protein, 10 aa, synthetic construct
ASRRGDRQGI

SEQ ID NO: 74984 - protein, 10 aa, synthetic construct
NFGRGDYSSV

SEQ ID NO: 74985 - protein, 10 aa, synthetic construct
NFGRGDLTVT

SEQ ID NO: 74986 - protein, 10 aa, synthetic construct
NFARGDHGVL

SEQ ID NO: 74987 - protein, 10 aa, synthetic construct
NFARGDHVNL

SEQ ID NO: 74988 - protein, 10 aa, synthetic construct
NFARGDRDYL

SEQ ID NO: 74989 - protein, 10 aa, synthetic construct
NFARGDYSSV

SEQ ID NO: 74990 - protein, 10 aa, synthetic construct
NFARGDLTVT

SEQ ID NO: 74991 - protein, 10 aa, synthetic construct
NFVRGDHGVL

SEQ ID NO: 74992 - protein, 10 aa, synthetic construct
NFVRGDRGQI

SEQ ID NO: 74993 - protein, 10 aa, synthetic construct
NFVRGDRQGI

SEQ ID NO: 74994 - protein, 10 aa, synthetic construct
ASRRGDRSVV

SEQ ID NO: 74995 - protein, 10 aa, synthetic construct
NFVRGDRGVV

SEQ ID NO: 74996 - protein, 10 aa, synthetic construct
NFVRGDYVGL

SEQ ID NO: 74997 - protein, 10 aa, synthetic construct
NFVRGDLIGR

SEQ ID NO: 74998 - protein, 10 aa, synthetic construct
NFVRGDQSTL

SEQ ID NO: 74999 - protein, 10 aa, synthetic construct
NFVRGDLLLS

SEQ ID NO: 75000 - protein, 10 aa, synthetic construct
NFPRGDHGVL

SEQ ID NO: 75001 - protein, 10 aa, synthetic construct
NFPRGDHVNL

SEQ ID NO: 75002 - protein, 10 aa, synthetic construct
NFPRGDRDYL

SEQ ID NO: 75003 - protein, 10 aa, synthetic construct
NFPRGDYSSV

SEQ ID NO: 75004 - protein, 10 aa, synthetic construct
NFPRGDLTVT

SEQ ID NO: 75005 - protein, 10 aa, synthetic construct
ASRRGDLTVT

SEQ ID NO: 75006 - protein, 10 aa, synthetic construct
NFLRGDHGVL

SEQ ID NO: 75007 - protein, 10 aa, synthetic construct
NFLRGDRGQI

SEQ ID NO: 75008 - protein, 10 aa, synthetic construct
NFLRGDRQGI

SEQ ID NO: 75009 - protein, 10 aa, synthetic construct
NFLRGDRGVV

SEQ ID NO: 75010 - protein, 10 aa, synthetic construct
NFLRGDYVGL

SEQ ID NO: 75011 - protein, 10 aa, synthetic construct
NFLRGDLIGR

SEQ ID NO: 75012 - protein, 10 aa, synthetic construct
NFLRGDQSTL

SEQ ID NO: 75013 - protein, 10 aa, synthetic construct
NFLRGDLLLS

SEQ ID NO: 75014 - protein, 10 aa, synthetic construct
NFIRGDRSVV

SEQ ID NO: 75015 - protein, 10 aa, synthetic construct
NFIRGDRGVV

SEQ ID NO: 75016 - protein, 10 aa, synthetic construct
ASRRGDLIGR

SEQ ID NO: 75017 - protein, 10 aa, synthetic construct
NFIRGDRSQT

SEQ ID NO: 75018 - protein, 10 aa, synthetic construct
NFMRGDRSVV

SEQ ID NO: 75019 - protein, 10 aa, synthetic construct
NFMRGDRGVV

SEQ ID NO: 75020 - protein, 10 aa, synthetic construct
NFMRGDRSQT

SEQ ID NO: 75021 - protein, 10 aa, synthetic construct
NFWRGDHGVL

SEQ ID NO: 75022 - protein, 10 aa, synthetic construct
NFWRGDRGQI

SEQ ID NO: 75023 - protein, 10 aa, synthetic construct
NFWRGDRQGI

SEQ ID NO: 75024 - protein, 10 aa, synthetic construct
NFWRGDRGVV

SEQ ID NO: 75025 - protein, 10 aa, synthetic construct
NFWRGDYVGL

SEQ ID NO: 75026 - protein, 10 aa, synthetic construct
NFWRGDLIGR

SEQ ID NO: 75027 - protein, 10 aa, synthetic construct
ASRRGDRSQT

SEQ ID NO: 75028 - protein, 10 aa, synthetic construct
NFWRGDQSTL

SEQ ID NO: 75029 - protein, 10 aa, synthetic construct
NFWRGDLLLS

SEQ ID NO: 75030 - protein, 10 aa, synthetic construct
NFKRGDRSVV

SEQ ID NO: 75031 - protein, 10 aa, synthetic construct
NFKRGDRGVV

SEQ ID NO: 75032 - protein, 10 aa, synthetic construct
NFKRGDRSQT

SEQ ID NO: 75033 - protein, 10 aa, synthetic construct
NFRRGDHGVL

SEQ ID NO: 75034 - protein, 10 aa, synthetic construct
NFRRGDHVNL

SEQ ID NO: 75035 - protein, 10 aa, synthetic construct
NFRRGDRDYL

SEQ ID NO: 75036 - protein, 10 aa, synthetic construct
NFRRGDYSSV

SEQ ID NO: 75037 - protein, 10 aa, synthetic construct
NFRRGDLTVT

SEQ ID NO: 75038 - protein, 10 aa, synthetic construct
ASRRGDLLLS

SEQ ID NO: 75039 - protein, 10 aa, synthetic construct
NFHRGDHGVL

SEQ ID NO: 75040 - protein, 10 aa, synthetic construct
NFHRGDRGQI

SEQ ID NO: 75041 - protein, 10 aa, synthetic construct
NFHRGDRQGI

SEQ ID NO: 75042 - protein, 10 aa, synthetic construct
NFHRGDRGVV

SEQ ID NO: 75043 - protein, 10 aa, synthetic construct
NFHRGDYVGL

SEQ ID NO: 75044 - protein, 10 aa, synthetic construct
NFHRGDLIGR

SEQ ID NO: 75045 - protein, 10 aa, synthetic construct
NFHRGDQSTL

SEQ ID NO: 75046 - protein, 10 aa, synthetic construct
NFHRGDLLLS

SEQ ID NO: 75047 - protein, 10 aa, synthetic construct
NFSRGDHGVL

SEQ ID NO: 75048 - protein, 10 aa, synthetic construct
NFSRGDRGQI

SEQ ID NO: 75049 - protein, 10 aa, synthetic construct
ASHRGDRGVV

SEQ ID NO: 75050 - protein, 10 aa, synthetic construct
NFSRGDRQGI

SEQ ID NO: 75051 - protein, 10 aa, synthetic construct
NFSRGDRGVV

SEQ ID NO: 75052 - protein, 10 aa, synthetic construct
NFSRGDYVGL

SEQ ID NO: 75053 - protein, 10 aa, synthetic construct
NFSRGDLIGR

SEQ ID NO: 75054 - protein, 10 aa, synthetic construct
NFSRGDQSTL

SEQ ID NO: 75055 - protein, 10 aa, synthetic construct
NFSRGDLLLS

SEQ ID NO: 75056 - protein, 10 aa, synthetic construct
NFTRGDHGVL

SEQ ID NO: 75057 - protein, 10 aa, synthetic construct
NFTRGDRGQI

SEQ ID NO: 75058 - protein, 10 aa, synthetic construct
NFTRGDRQGI

SEQ ID NO: 75059 - protein, 10 aa, synthetic construct
NFTRGDRGVV

SEQ ID NO: 75060 - protein, 10 aa, synthetic construct
ASSRGDHGVL

SEQ ID NO: 75061 - protein, 10 aa, synthetic construct
NFTRGDYVGL

SEQ ID NO: 75062 - protein, 10 aa, synthetic construct
NFTRGDLIGR

SEQ ID NO: 75063 - protein, 10 aa, synthetic construct
NFTRGDQSTL

SEQ ID NO: 75064 - protein, 10 aa, synthetic construct
NFTRGDLLLS

SEQ ID NO: 75065 - protein, 10 aa, synthetic construct
NFYRGDRSVV

SEQ ID NO: 75066 - protein, 10 aa, synthetic construct
NFYRGDRGVV

SEQ ID NO: 75067 - protein, 10 aa, synthetic construct
NFYRGDRSQT

SEQ ID NO: 75068 - protein, 10 aa, synthetic construct
NFNRGDRSVV

SEQ ID NO: 75069 - protein, 10 aa, synthetic construct
NFNRGDRGVV

SEQ ID NO: 75070 - protein, 10 aa, synthetic construct
NFNRGDRSQT

SEQ ID NO: 75071 - protein, 10 aa, synthetic construct
SKNRGDLIGR

SEQ ID NO: 75072 - protein, 10 aa, synthetic construct
QSPRGDLTVT

SEQ ID NO: 75073 - protein, 10 aa, synthetic construct
ASSRGDRGQI

SEQ ID NO: 75074 - protein, 10 aa, synthetic construct
NFQRGDHGVL

SEQ ID NO: 75075 - protein, 10 aa, synthetic construct
NFQRGDRGQI

SEQ ID NO: 75076 - protein, 10 aa, synthetic construct
NFQRGDRQGI

SEQ ID NO: 75077 - protein, 10 aa, synthetic construct
NFQRGDRGVV

SEQ ID NO: 75078 - protein, 10 aa, synthetic construct
NFQRGDYVGL

SEQ ID NO: 75079 - protein, 10 aa, synthetic construct
NFQRGDLIGR

SEQ ID NO: 75080 - protein, 10 aa, synthetic construct
NFQRGDQSTL

SEQ ID NO: 75081 - protein, 10 aa, synthetic construct
NFQRGDLLLS

SEQ ID NO: 75082 - protein, 10 aa, synthetic construct
NFDRGDHGVL

SEQ ID NO: 75083 - protein, 10 aa, synthetic construct
NFDRGDRGQI

SEQ ID NO: 75084 - protein, 10 aa, synthetic construct
ASSRGDRQGI

SEQ ID NO: 75085 - protein, 10 aa, synthetic construct
NFDRGDRQGI

SEQ ID NO: 75086 - protein, 10 aa, synthetic construct
NFDRGDRGVV

SEQ ID NO: 75087 - protein, 10 aa, synthetic construct
NFDRGDYVGL

SEQ ID NO: 75088 - protein, 10 aa, synthetic construct
NFDRGDLIGR

SEQ ID NO: 75089 - protein, 10 aa, synthetic construct
NFDRGDQSTL

SEQ ID NO: 75090 - protein, 10 aa, synthetic construct
NFDRGDLLLS

SEQ ID NO: 75091 - protein, 10 aa, synthetic construct
NFERGDHGVL

SEQ ID NO: 75092 - protein, 10 aa, synthetic construct
NFERGDRGQI

SEQ ID NO: 75093 - protein, 10 aa, synthetic construct
NFERGDRQGI

SEQ ID NO: 75094 - protein, 10 aa, synthetic construct
NFERGDRGVV

SEQ ID NO: 75095 - protein, 10 aa, synthetic construct
ASSRGDRSVV

SEQ ID NO: 75096 - protein, 10 aa, synthetic construct
NFERGDYVGL

SEQ ID NO: 75097 - protein, 10 aa, synthetic construct
NFERGDLIGR

SEQ ID NO: 75098 - protein, 10 aa, synthetic construct
NFERGDQSTL

SEQ ID NO: 75099 - protein, 10 aa, synthetic construct
NFERGDLLLS

SEQ ID NO: 75100 - protein, 10 aa, synthetic construct
NKGRGDHGVL

SEQ ID NO: 75101 - protein, 10 aa, synthetic construct
NKGRGDHVNL

SEQ ID NO: 75102 - protein, 10 aa, synthetic construct
NKGRGDRDYL

SEQ ID NO: 75103 - protein, 10 aa, synthetic construct
NKGRGDYSSV

SEQ ID NO: 75104 - protein, 10 aa, synthetic construct
NKGRGDLTVT

SEQ ID NO: 75105 - protein, 10 aa, synthetic construct
NKARGDHGVL

SEQ ID NO: 75106 - protein, 10 aa, synthetic construct
ASSRGDLTVT

SEQ ID NO: 75107 - protein, 10 aa, synthetic construct
NKARGDHVNL

SEQ ID NO: 75108 - protein, 10 aa, synthetic construct
NKARGDRDYL

SEQ ID NO: 75109 - protein, 10 aa, synthetic construct
NKARGDYSSV

SEQ ID NO: 75110 - protein, 10 aa, synthetic construct
NKARGDLTVT

SEQ ID NO: 75111 - protein, 10 aa, synthetic construct
NKVRGDHGVL

SEQ ID NO: 75112 - protein, 10 aa, synthetic construct
NKVRGDRGQI

SEQ ID NO: 75113 - protein, 10 aa, synthetic construct
NKVRGDRQGI

SEQ ID NO: 75114 - protein, 10 aa, synthetic construct
NKVRGDRGVV

SEQ ID NO: 75115 - protein, 10 aa, synthetic construct
NKVRGDYVGL

SEQ ID NO: 75116 - protein, 10 aa, synthetic construct
NKVRGDLIGR

SEQ ID NO: 75117 - protein, 10 aa, synthetic construct
ASSRGDLIGR

SEQ ID NO: 75118 - protein, 10 aa, synthetic construct
NKVRGDQSTL

SEQ ID NO: 75119 - protein, 10 aa, synthetic construct
NKVRGDLLLS

SEQ ID NO: 75120 - protein, 10 aa, synthetic construct
NKPRGDHGVL

SEQ ID NO: 75121 - protein, 10 aa, synthetic construct
NKPRGDHVNL

SEQ ID NO: 75122 - protein, 10 aa, synthetic construct
NKPRGDRDYL

SEQ ID NO: 75123 - protein, 10 aa, synthetic construct
NKPRGDYSSV

SEQ ID NO: 75124 - protein, 10 aa, synthetic construct
NKPRGDLTVT

SEQ ID NO: 75125 - protein, 10 aa, synthetic construct
NKLRGDHGVL

SEQ ID NO: 75126 - protein, 10 aa, synthetic construct
NKLRGDRGQI

SEQ ID NO: 75127 - protein, 10 aa, synthetic construct
NKLRGDRQGI

SEQ ID NO: 75128 - protein, 10 aa, synthetic construct
ASSRGDRSQT

SEQ ID NO: 75129 - protein, 10 aa, synthetic construct
NKLRGDRGVV

SEQ ID NO: 75130 - protein, 10 aa, synthetic construct
NKLRGDYVGL

SEQ ID NO: 75131 - protein, 10 aa, synthetic construct
NKLRGDLIGR

SEQ ID NO: 75132 - protein, 10 aa, synthetic construct
NKLRGDQSTL

SEQ ID NO: 75133 - protein, 10 aa, synthetic construct
NKLRGDLLLS

SEQ ID NO: 75134 - protein, 10 aa, synthetic construct
NKIRGDRSVV

SEQ ID NO: 75135 - protein, 10 aa, synthetic construct
NKIRGDRGVV

SEQ ID NO: 75136 - protein, 10 aa, synthetic construct
NKIRGDRSQT

SEQ ID NO: 75137 - protein, 10 aa, synthetic construct
NKMRGDRSVV

SEQ ID NO: 75138 - protein, 10 aa, synthetic construct
NKMRGDRGVV

SEQ ID NO: 75139 - protein, 10 aa, synthetic construct
ASSRGDLLLS

SEQ ID NO: 75140 - protein, 10 aa, synthetic construct
NKMRGDRSQT

SEQ ID NO: 75141 - protein, 10 aa, synthetic construct
NKWRGDHGVL

SEQ ID NO: 75142 - protein, 10 aa, synthetic construct
NKWRGDRGQI

SEQ ID NO: 75143 - protein, 10 aa, synthetic construct
NKWRGDRQGI

SEQ ID NO: 75144 - protein, 10 aa, synthetic construct
NKWRGDRGVV

SEQ ID NO: 75145 - protein, 10 aa, synthetic construct
NKWRGDYVGL

SEQ ID NO: 75146 - protein, 10 aa, synthetic construct
NKWRGDLIGR

SEQ ID NO: 75147 - protein, 10 aa, synthetic construct
NKWRGDQSTL

SEQ ID NO: 75148 - protein, 10 aa, synthetic construct
NKWRGDLLLS

SEQ ID NO: 75149 - protein, 10 aa, synthetic construct
NKFRGDRSVV

SEQ ID NO: 75150 - protein, 10 aa, synthetic construct
ASTRGDRGVV

SEQ ID NO: 75151 - protein, 10 aa, synthetic construct
NKFRGDRGVV

SEQ ID NO: 75152 - protein, 10 aa, synthetic construct
NKFRGDRSQT

SEQ ID NO: 75153 - protein, 10 aa, synthetic construct
NKRRGDHGVL

SEQ ID NO: 75154 - protein, 10 aa, synthetic construct
NKRRGDHVNL

SEQ ID NO: 75155 - protein, 10 aa, synthetic construct
NKRRGDRDYL

SEQ ID NO: 75156 - protein, 10 aa, synthetic construct
NKRRGDYSSV

SEQ ID NO: 75157 - protein, 10 aa, synthetic construct
NKRRGDLTVT

SEQ ID NO: 75158 - protein, 10 aa, synthetic construct
NKHRGDHGVL

SEQ ID NO: 75159 - protein, 10 aa, synthetic construct
NKHRGDRGQI

SEQ ID NO: 75160 - protein, 10 aa, synthetic construct
NKHRGDRQGI

SEQ ID NO: 75161 - protein, 10 aa, synthetic construct
ASQRGDRGVV

SEQ ID NO: 75162 - protein, 10 aa, synthetic construct
NKHRGDRGVV

SEQ ID NO: 75163 - protein, 10 aa, synthetic construct
NKHRGDYVGL

SEQ ID NO: 75164 - protein, 10 aa, synthetic construct
NKHRGDLIGR

SEQ ID NO: 75165 - protein, 10 aa, synthetic construct
NKHRGDQSTL

SEQ ID NO: 75166 - protein, 10 aa, synthetic construct
NKHRGDLLLS

SEQ ID NO: 75167 - protein, 10 aa, synthetic construct
NKSRGDHGVL

SEQ ID NO: 75168 - protein, 10 aa, synthetic construct
NKSRGDRGQI

SEQ ID NO: 75169 - protein, 10 aa, synthetic construct
NKSRGDRQGI

SEQ ID NO: 75170 - protein, 10 aa, synthetic construct
NKSRGDRGVV

SEQ ID NO: 75171 - protein, 10 aa, synthetic construct
NKSRGDYVGL

SEQ ID NO: 75172 - protein, 10 aa, synthetic construct
ASDRGDRGVV

SEQ ID NO: 75173 - protein, 10 aa, synthetic construct
NKSRGDLIGR

SEQ ID NO: 75174 - protein, 10 aa, synthetic construct
NKSRGDQSTL

SEQ ID NO: 75175 - protein, 10 aa, synthetic construct
NKSRGDLLLS

SEQ ID NO: 75176 - protein, 10 aa, synthetic construct
NKTRGDHGVL

SEQ ID NO: 75177 - protein, 10 aa, synthetic construct
NKTRGDRGQI

SEQ ID NO: 75178 - protein, 10 aa, synthetic construct
NKTRGDRQGI

SEQ ID NO: 75179 - protein, 10 aa, synthetic construct
NKTRGDRGVV

SEQ ID NO: 75180 - protein, 10 aa, synthetic construct
NKTRGDYVGL

SEQ ID NO: 75181 - protein, 10 aa, synthetic construct
NKTRGDLIGR

SEQ ID NO: 75182 - protein, 10 aa, synthetic construct
NKTRGDQSTL

SEQ ID NO: 75183 - protein, 10 aa, synthetic construct
QSPRGDLIGR

SEQ ID NO: 75184 - protein, 10 aa, synthetic construct
ASERGDRGVV

SEQ ID NO: 75185 - protein, 10 aa, synthetic construct
NKTRGDLLLS

SEQ ID NO: 75186 - protein, 10 aa, synthetic construct
NKYRGDRSVV

SEQ ID NO: 75187 - protein, 10 aa, synthetic construct
NKYRGDRGVV

SEQ ID NO: 75188 - protein, 10 aa, synthetic construct
NKYRGDRSQT

SEQ ID NO: 75189 - protein, 10 aa, synthetic construct
NKQRGDHGVL

SEQ ID NO: 75190 - protein, 10 aa, synthetic construct
NKQRGDRGQI

SEQ ID NO: 75191 - protein, 10 aa, synthetic construct
NKQRGDRQGI

SEQ ID NO: 75192 - protein, 10 aa, synthetic construct
NKQRGDRGVV

SEQ ID NO: 75193 - protein, 10 aa, synthetic construct
NKQRGDYVGL

SEQ ID NO: 75194 - protein, 10 aa, synthetic construct
NKQRGDLIGR

SEQ ID NO: 75195 - protein, 10 aa, synthetic construct
ATGRGDHGVL

SEQ ID NO: 75196 - protein, 10 aa, synthetic construct
NKQRGDQSTL

SEQ ID NO: 75197 - protein, 10 aa, synthetic construct
NKQRGDLLLS

SEQ ID NO: 75198 - protein, 10 aa, synthetic construct
NKDRGDHGVL

SEQ ID NO: 75199 - protein, 10 aa, synthetic construct
NKDRGDRGQI

SEQ ID NO: 75200 - protein, 10 aa, synthetic construct
NKDRGDRQGI

SEQ ID NO: 75201 - protein, 10 aa, synthetic construct
NKDRGDRGVV

SEQ ID NO: 75202 - protein, 10 aa, synthetic construct
NKDRGDYVGL

SEQ ID NO: 75203 - protein, 10 aa, synthetic construct
NKDRGDLIGR

SEQ ID NO: 75204 - protein, 10 aa, synthetic construct
NKDRGDQSTL

SEQ ID NO: 75205 - protein, 10 aa, synthetic construct
NKDRGDLLLS

SEQ ID NO: 75206 - protein, 10 aa, synthetic construct
ATGRGDRGQI

SEQ ID NO: 75207 - protein, 10 aa, synthetic construct
NKERGDHGVL

SEQ ID NO: 75208 - protein, 10 aa, synthetic construct
NKERGDRGQI

SEQ ID NO: 75209 - protein, 10 aa, synthetic construct
NKERGDRQGI

SEQ ID NO: 75210 - protein, 10 aa, synthetic construct
NKERGDRGVV

SEQ ID NO: 75211 - protein, 10 aa, synthetic construct
NKERGDYVGL

SEQ ID NO: 75212 - protein, 10 aa, synthetic construct
NKERGDLIGR

SEQ ID NO: 75213 - protein, 10 aa, synthetic construct
NKERGDQSTL

SEQ ID NO: 75214 - protein, 10 aa, synthetic construct
NKERGDLLLS

SEQ ID NO: 75215 - protein, 10 aa, synthetic construct
NRGRGDYNSL

SEQ ID NO: 75216 - protein, 10 aa, synthetic construct
NRGRGDYTSV

SEQ ID NO: 75217 - protein, 10 aa, synthetic construct
ATGRGDRQGI

SEQ ID NO: 75218 - protein, 10 aa, synthetic construct
NRGRGDYTSM

SEQ ID NO: 75219 - protein, 10 aa, synthetic construct
NRGRGDFQNT

SEQ ID NO: 75220 - protein, 10 aa, synthetic construct
NRARGDYNSL

SEQ ID NO: 75221 - protein, 10 aa, synthetic construct
NRARGDYTSV

SEQ ID NO: 75222 - protein, 10 aa, synthetic construct
NRARGDYTSM

SEQ ID NO: 75223 - protein, 10 aa, synthetic construct
NRARGDFQNT

SEQ ID NO: 75224 - protein, 10 aa, synthetic construct
NRVRGDRDYL

SEQ ID NO: 75225 - protein, 10 aa, synthetic construct
NRVRGDYTSV

SEQ ID NO: 75226 - protein, 10 aa, synthetic construct
NRVRGDLTVT

SEQ ID NO: 75227 - protein, 10 aa, synthetic construct
NRVRGDLIGR

SEQ ID NO: 75228 - protein, 10 aa, synthetic construct
ATGRGDRSVV

SEQ ID NO: 75229 - protein, 10 aa, synthetic construct
NRPRGDYNSL

SEQ ID NO: 75230 - protein, 10 aa, synthetic construct
NRPRGDYTSV

SEQ ID NO: 75231 - protein, 10 aa, synthetic construct
NRPRGDYTSM

SEQ ID NO: 75232 - protein, 10 aa, synthetic construct
NRPRGDFQNT

SEQ ID NO: 75233 - protein, 10 aa, synthetic construct
NRLRGDRDYL

SEQ ID NO: 75234 - protein, 10 aa, synthetic construct
NRLRGDYTSV

SEQ ID NO: 75235 - protein, 10 aa, synthetic construct
NRLRGDLTVT

SEQ ID NO: 75236 - protein, 10 aa, synthetic construct
NRLRGDLIGR

SEQ ID NO: 75237 - protein, 10 aa, synthetic construct
NRIRGDHGVL

SEQ ID NO: 75238 - protein, 10 aa, synthetic construct
NRIRGDHVNL

SEQ ID NO: 75239 - protein, 10 aa, synthetic construct
ATGRGDLTVT

SEQ ID NO: 75240 - protein, 10 aa, synthetic construct
NRIRGDRDYL

SEQ ID NO: 75241 - protein, 10 aa, synthetic construct
NRIRGDYSSV

SEQ ID NO: 75242 - protein, 10 aa, synthetic construct
NRIRGDLTVT

SEQ ID NO: 75243 - protein, 10 aa, synthetic construct
NRMRGDHGVL

SEQ ID NO: 75244 - protein, 10 aa, synthetic construct
NRMRGDHVNL

SEQ ID NO: 75245 - protein, 10 aa, synthetic construct
NRMRGDRDYL

SEQ ID NO: 75246 - protein, 10 aa, synthetic construct
NRMRGDYSSV

SEQ ID NO: 75247 - protein, 10 aa, synthetic construct
NRMRGDLTVT

SEQ ID NO: 75248 - protein, 10 aa, synthetic construct
NRWRGDRDYL

SEQ ID NO: 75249 - protein, 10 aa, synthetic construct
NRWRGDYTSV

SEQ ID NO: 75250 - protein, 10 aa, synthetic construct
ATGRGDLIGR

SEQ ID NO: 75251 - protein, 10 aa, synthetic construct
NRWRGDLTVT

SEQ ID NO: 75252 - protein, 10 aa, synthetic construct
NRWRGDLIGR

SEQ ID NO: 75253 - protein, 10 aa, synthetic construct
NRFRGDHGVL

SEQ ID NO: 75254 - protein, 10 aa, synthetic construct
NRFRGDHVNL

SEQ ID NO: 75255 - protein, 10 aa, synthetic construct
NRFRGDRDYL

SEQ ID NO: 75256 - protein, 10 aa, synthetic construct
NRFRGDYSSV

SEQ ID NO: 75257 - protein, 10 aa, synthetic construct
NRFRGDLTVT

SEQ ID NO: 75258 - protein, 10 aa, synthetic construct
NRKRGDHGVL

SEQ ID NO: 75259 - protein, 10 aa, synthetic construct
NRKRGDHVNL

SEQ ID NO: 75260 - protein, 10 aa, synthetic construct
NRKRGDRDYL

SEQ ID NO: 75261 - protein, 10 aa, synthetic construct
ATGRGDRSQT

SEQ ID NO: 75262 - protein, 10 aa, synthetic construct
NRKRGDYSSV

SEQ ID NO: 75263 - protein, 10 aa, synthetic construct
NRKRGDLTVT

SEQ ID NO: 75264 - protein, 10 aa, synthetic construct
NRRRGDYNSL

SEQ ID NO: 75265 - protein, 10 aa, synthetic construct
NRRRGDYTSV

SEQ ID NO: 75266 - protein, 10 aa, synthetic construct
NRRRGDYTSM

SEQ ID NO: 75267 - protein, 10 aa, synthetic construct
NRRRGDFQNT

SEQ ID NO: 75268 - protein, 10 aa, synthetic construct
NRHRGDRDYL

SEQ ID NO: 75269 - protein, 10 aa, synthetic construct
NRHRGDYTSV

SEQ ID NO: 75270 - protein, 10 aa, synthetic construct
NRHRGDLTVT

SEQ ID NO: 75271 - protein, 10 aa, synthetic construct
NRHRGDLIGR

SEQ ID NO: 75272 - protein, 10 aa, synthetic construct
ATGRGDLLLS

SEQ ID NO: 75273 - protein, 10 aa, synthetic construct
NRSRGDRDYL

SEQ ID NO: 75274 - protein, 10 aa, synthetic construct
NRSRGDYTSV

SEQ ID NO: 75275 - protein, 10 aa, synthetic construct
NRSRGDLTVT

SEQ ID NO: 75276 - protein, 10 aa, synthetic construct
NRSRGDLIGR

SEQ ID NO: 75277 - protein, 10 aa, synthetic construct
NRTRGDRDYL

SEQ ID NO: 75278 - protein, 10 aa, synthetic construct
NRTRGDYTSV

SEQ ID NO: 75279 - protein, 10 aa, synthetic construct
NRTRGDLTVT

SEQ ID NO: 75280 - protein, 10 aa, synthetic construct
NRTRGDLIGR

SEQ ID NO: 75281 - protein, 10 aa, synthetic construct
NRYRGDHGVL

SEQ ID NO: 75282 - protein, 10 aa, synthetic construct
NRYRGDHVNL

SEQ ID NO: 75283 - protein, 10 aa, synthetic construct
ATARGDHGVL

SEQ ID NO: 75284 - protein, 10 aa, synthetic construct
NRYRGDRDYL

SEQ ID NO: 75285 - protein, 10 aa, synthetic construct
NRYRGDYSSV

SEQ ID NO: 75286 - protein, 10 aa, synthetic construct
NRYRGDLTVT

SEQ ID NO: 75287 - protein, 10 aa, synthetic construct
NRNRGDHGVL

SEQ ID NO: 75288 - protein, 10 aa, synthetic construct
NRNRGDHVNL

SEQ ID NO: 75289 - protein, 10 aa, synthetic construct
NRNRGDRDYL

SEQ ID NO: 75290 - protein, 10 aa, synthetic construct
NRNRGDYSSV

SEQ ID NO: 75291 - protein, 10 aa, synthetic construct
NRNRGDLTVT

SEQ ID NO: 75292 - protein, 10 aa, synthetic construct
NRQRGDRDYL

SEQ ID NO: 75293 - protein, 10 aa, synthetic construct
NRQRGDYTSV

SEQ ID NO: 75294 - protein, 10 aa, synthetic construct
SSPRGDYNSL

SEQ ID NO: 75295 - protein, 10 aa, synthetic construct
ATARGDRGQI

SEQ ID NO: 75296 - protein, 10 aa, synthetic construct
NRQRGDLTVT

SEQ ID NO: 75297 - protein, 10 aa, synthetic construct
NRQRGDLIGR

SEQ ID NO: 75298 - protein, 10 aa, synthetic construct
NRDRGDRDYL

SEQ ID NO: 75299 - protein, 10 aa, synthetic construct
NRDRGDYTSV

SEQ ID NO: 75300 - protein, 10 aa, synthetic construct
NRDRGDLTVT

SEQ ID NO: 75301 - protein, 10 aa, synthetic construct
NRDRGDLIGR

SEQ ID NO: 75302 - protein, 10 aa, synthetic construct
NRERGDRDYL

SEQ ID NO: 75303 - protein, 10 aa, synthetic construct
NRERGDYTSV

SEQ ID NO: 75304 - protein, 10 aa, synthetic construct
NRERGDLTVT

SEQ ID NO: 75305 - protein, 10 aa, synthetic construct
NRERGDLIGR

SEQ ID NO: 75306 - protein, 10 aa, synthetic construct
ATARGDRQGI

SEQ ID NO: 75307 - protein, 10 aa, synthetic construct
NHGRGDRDYL

SEQ ID NO: 75308 - protein, 10 aa, synthetic construct
NHGRGDYTSV

SEQ ID NO: 75309 - protein, 10 aa, synthetic construct
NHGRGDLTVT

SEQ ID NO: 75310 - protein, 10 aa, synthetic construct
NHGRGDLIGR

SEQ ID NO: 75311 - protein, 10 aa, synthetic construct
NHARGDRDYL

SEQ ID NO: 75312 - protein, 10 aa, synthetic construct
NHARGDYTSV

SEQ ID NO: 75313 - protein, 10 aa, synthetic construct
NHARGDLTVT

SEQ ID NO: 75314 - protein, 10 aa, synthetic construct
NHARGDLIGR

SEQ ID NO: 75315 - protein, 10 aa, synthetic construct
NHVRGDHGVL

SEQ ID NO: 75316 - protein, 10 aa, synthetic construct
NHVRGDHVNL

SEQ ID NO: 75317 - protein, 10 aa, synthetic construct
ATARGDRSVV

SEQ ID NO: 75318 - protein, 10 aa, synthetic construct
NHVRGDRDYL

SEQ ID NO: 75319 - protein, 10 aa, synthetic construct
NHVRGDYSSV

SEQ ID NO: 75320 - protein, 10 aa, synthetic construct
NHVRGDLTVT

SEQ ID NO: 75321 - protein, 10 aa, synthetic construct
NHPRGDRDYL

SEQ ID NO: 75322 - protein, 10 aa, synthetic construct
NHPRGDYTSV

SEQ ID NO: 75323 - protein, 10 aa, synthetic construct
NHPRGDLTVT

SEQ ID NO: 75324 - protein, 10 aa, synthetic construct
NHPRGDLIGR

SEQ ID NO: 75325 - protein, 10 aa, synthetic construct
NHLRGDHGVL

SEQ ID NO: 75326 - protein, 10 aa, synthetic construct
NHLRGDHVNL

SEQ ID NO: 75327 - protein, 10 aa, synthetic construct
NHLRGDRDYL

SEQ ID NO: 75328 - protein, 10 aa, synthetic construct
ATARGDLTVT

SEQ ID NO: 75329 - protein, 10 aa, synthetic construct
NHLRGDYSSV

SEQ ID NO: 75330 - protein, 10 aa, synthetic construct
NHLRGDLTVT

SEQ ID NO: 75331 - protein, 10 aa, synthetic construct
NHIRGDHGVL

SEQ ID NO: 75332 - protein, 10 aa, synthetic construct
NHIRGDRGQI

SEQ ID NO: 75333 - protein, 10 aa, synthetic construct
NHIRGDRQGI

SEQ ID NO: 75334 - protein, 10 aa, synthetic construct
NHIRGDRGVV

SEQ ID NO: 75335 - protein, 10 aa, synthetic construct
NHIRGDYVGL

SEQ ID NO: 75336 - protein, 10 aa, synthetic construct
NHIRGDLIGR

SEQ ID NO: 75337 - protein, 10 aa, synthetic construct
NHIRGDQSTL

SEQ ID NO: 75338 - protein, 10 aa, synthetic construct
NHIRGDLLLS

SEQ ID NO: 75339 - protein, 10 aa, synthetic construct
ATARGDLIGR

SEQ ID NO: 75340 - protein, 10 aa, synthetic construct
NHMRGDHGVL

SEQ ID NO: 75341 - protein, 10 aa, synthetic construct
NHMRGDRGQI

SEQ ID NO: 75342 - protein, 10 aa, synthetic construct
NHMRGDRQGI

SEQ ID NO: 75343 - protein, 10 aa, synthetic construct
NHMRGDRGVV

SEQ ID NO: 75344 - protein, 10 aa, synthetic construct
NHMRGDYVGL

SEQ ID NO: 75345 - protein, 10 aa, synthetic construct
NHMRGDLIGR

SEQ ID NO: 75346 - protein, 10 aa, synthetic construct
NHMRGDQSTL

SEQ ID NO: 75347 - protein, 10 aa, synthetic construct
NHMRGDLLLS

SEQ ID NO: 75348 - protein, 10 aa, synthetic construct
NHWRGDHGVL

SEQ ID NO: 75349 - protein, 10 aa, synthetic construct
NHWRGDHVNL

SEQ ID NO: 75350 - protein, 10 aa, synthetic construct
ATARGDRSQT

SEQ ID NO: 75351 - protein, 10 aa, synthetic construct
NHWRGDRDYL

SEQ ID NO: 75352 - protein, 10 aa, synthetic construct
NHWRGDYSSV

SEQ ID NO: 75353 - protein, 10 aa, synthetic construct
NHWRGDLTVT

SEQ ID NO: 75354 - protein, 10 aa, synthetic construct
NHFRGDHGVL

SEQ ID NO: 75355 - protein, 10 aa, synthetic construct
NHFRGDRGQI

SEQ ID NO: 75356 - protein, 10 aa, synthetic construct
NHFRGDRQGI

SEQ ID NO: 75357 - protein, 10 aa, synthetic construct
NHFRGDRGVV

SEQ ID NO: 75358 - protein, 10 aa, synthetic construct
NHFRGDYVGL

SEQ ID NO: 75359 - protein, 10 aa, synthetic construct
NHFRGDLIGR

SEQ ID NO: 75360 - protein, 10 aa, synthetic construct
NHFRGDQSTL

SEQ ID NO: 75361 - protein, 10 aa, synthetic construct
ATARGDLLLS

SEQ ID NO: 75362 - protein, 10 aa, synthetic construct
NHFRGDLLLS

SEQ ID NO: 75363 - protein, 10 aa, synthetic construct
NHKRGDHGVL

SEQ ID NO: 75364 - protein, 10 aa, synthetic construct
NHKRGDRGQI

SEQ ID NO: 75365 - protein, 10 aa, synthetic construct
NHKRGDRQGI

SEQ ID NO: 75366 - protein, 10 aa, synthetic construct
NHKRGDRGVV

SEQ ID NO: 75367 - protein, 10 aa, synthetic construct
NHKRGDYVGL

SEQ ID NO: 75368 - protein, 10 aa, synthetic construct
NHKRGDLIGR

SEQ ID NO: 75369 - protein, 10 aa, synthetic construct
NHKRGDQSTL

SEQ ID NO: 75370 - protein, 10 aa, synthetic construct
NHKRGDLLLS

SEQ ID NO: 75371 - protein, 10 aa, synthetic construct
NHRRGDRDYL

SEQ ID NO: 75372 - protein, 10 aa, synthetic construct
ATVRGDHGVL

SEQ ID NO: 75373 - protein, 10 aa, synthetic construct
NHRRGDYTSV

SEQ ID NO: 75374 - protein, 10 aa, synthetic construct
NHRRGDLTVT

SEQ ID NO: 75375 - protein, 10 aa, synthetic construct
NHRRGDLIGR

SEQ ID NO: 75376 - protein, 10 aa, synthetic construct
NHHRGDHGVL

SEQ ID NO: 75377 - protein, 10 aa, synthetic construct
NHHRGDHVNL

SEQ ID NO: 75378 - protein, 10 aa, synthetic construct
NHHRGDRDYL

SEQ ID NO: 75379 - protein, 10 aa, synthetic construct
NHHRGDYSSV

SEQ ID NO: 75380 - protein, 10 aa, synthetic construct
NHHRGDLTVT

SEQ ID NO: 75381 - protein, 10 aa, synthetic construct
NHSRGDHGVL

SEQ ID NO: 75382 - protein, 10 aa, synthetic construct
NHSRGDHVNL

SEQ ID NO: 75383 - protein, 10 aa, synthetic construct
ATVRGDRGQI

SEQ ID NO: 75384 - protein, 10 aa, synthetic construct
NHSRGDRDYL

SEQ ID NO: 75385 - protein, 10 aa, synthetic construct
NHSRGDYSSV

SEQ ID NO: 75386 - protein, 10 aa, synthetic construct
NHSRGDLTVT

SEQ ID NO: 75387 - protein, 10 aa, synthetic construct
NHTRGDHGVL

SEQ ID NO: 75388 - protein, 10 aa, synthetic construct
NHTRGDHVNL

SEQ ID NO: 75389 - protein, 10 aa, synthetic construct
NHTRGDRDYL

SEQ ID NO: 75390 - protein, 10 aa, synthetic construct
NHTRGDYSSV

SEQ ID NO: 75391 - protein, 10 aa, synthetic construct
NHTRGDLTVT

SEQ ID NO: 75392 - protein, 10 aa, synthetic construct
NHYRGDHGVL

SEQ ID NO: 75393 - protein, 10 aa, synthetic construct
NHYRGDRGQI

SEQ ID NO: 75394 - protein, 10 aa, synthetic construct
ATVRGDRQGI

SEQ ID NO: 75395 - protein, 10 aa, synthetic construct
NHYRGDRQGI

SEQ ID NO: 75396 - protein, 10 aa, synthetic construct
NHYRGDRGVV

SEQ ID NO: 75397 - protein, 10 aa, synthetic construct
NHYRGDYVGL

SEQ ID NO: 75398 - protein, 10 aa, synthetic construct
NHYRGDLIGR

SEQ ID NO: 75399 - protein, 10 aa, synthetic construct
NHYRGDQSTL

SEQ ID NO: 75400 - protein, 10 aa, synthetic construct
NHYRGDLLLS

SEQ ID NO: 75401 - protein, 10 aa, synthetic construct
NHNRGDHGVL

SEQ ID NO: 75402 - protein, 10 aa, synthetic construct
NHNRGDRGQI

SEQ ID NO: 75403 - protein, 10 aa, synthetic construct
NHNRGDRQGI

SEQ ID NO: 75404 - protein, 10 aa, synthetic construct
NHNRGDRGVV

SEQ ID NO: 75405 - protein, 10 aa, synthetic construct
SSPRGDYTSV

SEQ ID NO: 75406 - protein, 10 aa, synthetic construct
ATVRGDRSVV

SEQ ID NO: 75407 - protein, 10 aa, synthetic construct
NHNRGDYVGL

SEQ ID NO: 75408 - protein, 10 aa, synthetic construct
NHNRGDLIGR

SEQ ID NO: 75409 - protein, 10 aa, synthetic construct
NHNRGDQSTL

SEQ ID NO: 75410 - protein, 10 aa, synthetic construct
NHNRGDLLLS

SEQ ID NO: 75411 - protein, 10 aa, synthetic construct
NHQRGDHGVL

SEQ ID NO: 75412 - protein, 10 aa, synthetic construct
NHQRGDHVNL

SEQ ID NO: 75413 - protein, 10 aa, synthetic construct
NHQRGDRDYL

SEQ ID NO: 75414 - protein, 10 aa, synthetic construct
NHQRGDYSSV

SEQ ID NO: 75415 - protein, 10 aa, synthetic construct
NHQRGDLTVT

SEQ ID NO: 75416 - protein, 10 aa, synthetic construct
NHDRGDHGVL

SEQ ID NO: 75417 - protein, 10 aa, synthetic construct
ATVRGDLTVT

SEQ ID NO: 75418 - protein, 10 aa, synthetic construct
NHDRGDHVNL

SEQ ID NO: 75419 - protein, 10 aa, synthetic construct
NHDRGDRDYL

SEQ ID NO: 75420 - protein, 10 aa, synthetic construct
NHDRGDYSSV

SEQ ID NO: 75421 - protein, 10 aa, synthetic construct
NHDRGDLTVT

SEQ ID NO: 75422 - protein, 10 aa, synthetic construct
NHERGDHGVL

SEQ ID NO: 75423 - protein, 10 aa, synthetic construct
NHERGDHVNL

SEQ ID NO: 75424 - protein, 10 aa, synthetic construct
NHERGDRDYL

SEQ ID NO: 75425 - protein, 10 aa, synthetic construct
NHERGDYSSV

SEQ ID NO: 75426 - protein, 10 aa, synthetic construct
NHERGDLTVT

SEQ ID NO: 75427 - protein, 10 aa, synthetic construct
NSGRGDYNSL

SEQ ID NO: 75428 - protein, 10 aa, synthetic construct
ATVRGDLIGR

SEQ ID NO: 75429 - protein, 10 aa, synthetic construct
NSGRGDYTSM

SEQ ID NO: 75430 - protein, 10 aa, synthetic construct
NSGRGDFQNT

SEQ ID NO: 75431 - protein, 10 aa, synthetic construct
NSARGDYNSL

SEQ ID NO: 75432 - protein, 10 aa, synthetic construct
NSARGDYTSM

SEQ ID NO: 75433 - protein, 10 aa, synthetic construct
NSARGDFQNT

SEQ ID NO: 75434 - protein, 10 aa, synthetic construct
NSVRGDYTSV

SEQ ID NO: 75435 - protein, 10 aa, synthetic construct
NSVRGDLIGR

SEQ ID NO: 75436 - protein, 10 aa, synthetic construct
NSLRGDYTSV

SEQ ID NO: 75437 - protein, 10 aa, synthetic construct
NSLRGDLIGR

SEQ ID NO: 75438 - protein, 10 aa, synthetic construct
NSIRGDHVNL

SEQ ID NO: 75439 - protein, 10 aa, synthetic construct
ATVRGDRSQT

SEQ ID NO: 75440 - protein, 10 aa, synthetic construct
NSIRGDRDYL

SEQ ID NO: 75441 - protein, 10 aa, synthetic construct
NSIRGDYSSV

SEQ ID NO: 75442 - protein, 10 aa, synthetic construct
NSIRGDLTVT

SEQ ID NO: 75443 - protein, 10 aa, synthetic construct
NSMRGDHVNL

SEQ ID NO: 75444 - protein, 10 aa, synthetic construct
NSMRGDRDYL

SEQ ID NO: 75445 - protein, 10 aa, synthetic construct
NSMRGDYSSV

SEQ ID NO: 75446 - protein, 10 aa, synthetic construct
NSMRGDLTVT

SEQ ID NO: 75447 - protein, 10 aa, synthetic construct
NSWRGDYTSV

SEQ ID NO: 75448 - protein, 10 aa, synthetic construct
NSWRGDLIGR

SEQ ID NO: 75449 - protein, 10 aa, synthetic construct
NSFRGDHVNL

SEQ ID NO: 75450 - protein, 10 aa, synthetic construct
ATVRGDLLLS

SEQ ID NO: 75451 - protein, 10 aa, synthetic construct
NSFRGDRDYL

SEQ ID NO: 75452 - protein, 10 aa, synthetic construct
NSFRGDYSSV

SEQ ID NO: 75453 - protein, 10 aa, synthetic construct
NSFRGDLTVT

SEQ ID NO: 75454 - protein, 10 aa, synthetic construct
NSKRGDHVNL

SEQ ID NO: 75455 - protein, 10 aa, synthetic construct
NSKRGDRDYL

SEQ ID NO: 75456 - protein, 10 aa, synthetic construct
NSKRGDYSSV

SEQ ID NO: 75457 - protein, 10 aa, synthetic construct
NSKRGDLTVT

SEQ ID NO: 75458 - protein, 10 aa, synthetic construct
NSRRGDYNSL

SEQ ID NO: 75459 - protein, 10 aa, synthetic construct
NSRRGDYTSM

SEQ ID NO: 75460 - protein, 10 aa, synthetic construct
NSRRGDFQNT

SEQ ID NO: 75461 - protein, 10 aa, synthetic construct
ATPRGDHGVL

SEQ ID NO: 75462 - protein, 10 aa, synthetic construct
NSHRGDYTSV

SEQ ID NO: 75463 - protein, 10 aa, synthetic construct
NSHRGDLIGR

SEQ ID NO: 75464 - protein, 10 aa, synthetic construct
NSSRGDYTSV

SEQ ID NO: 75465 - protein, 10 aa, synthetic construct
NSSRGDLIGR

SEQ ID NO: 75466 - protein, 10 aa, synthetic construct
NSTRGDYTSV

SEQ ID NO: 75467 - protein, 10 aa, synthetic construct
NSTRGDLIGR

SEQ ID NO: 75468 - protein, 10 aa, synthetic construct
NSYRGDHVNL

SEQ ID NO: 75469 - protein, 10 aa, synthetic construct
NSYRGDRDYL

SEQ ID NO: 75470 - protein, 10 aa, synthetic construct
NSYRGDYSSV

SEQ ID NO: 75471 - protein, 10 aa, synthetic construct
NSYRGDLTVT

SEQ ID NO: 75472 - protein, 10 aa, synthetic construct
ATPRGDRGQI

SEQ ID NO: 75473 - protein, 10 aa, synthetic construct
NSNRGDHVNL

SEQ ID NO: 75474 - protein, 10 aa, synthetic construct
NSNRGDRDYL

SEQ ID NO: 75475 - protein, 10 aa, synthetic construct
NSNRGDYSSV

SEQ ID NO: 75476 - protein, 10 aa, synthetic construct
NSNRGDLTVT

SEQ ID NO: 75477 - protein, 10 aa, synthetic construct
NSQRGDYTSV

SEQ ID NO: 75478 - protein, 10 aa, synthetic construct
NSQRGDLIGR

SEQ ID NO: 75479 - protein, 10 aa, synthetic construct
NSDRGDYTSV

SEQ ID NO: 75480 - protein, 10 aa, synthetic construct
NSDRGDLIGR

SEQ ID NO: 75481 - protein, 10 aa, synthetic construct
NSERGDYTSV

SEQ ID NO: 75482 - protein, 10 aa, synthetic construct
NSERGDLIGR

SEQ ID NO: 75483 - protein, 10 aa, synthetic construct
ATPRGDRQGI

SEQ ID NO: 75484 - protein, 10 aa, synthetic construct
NTGRGDRDYL

SEQ ID NO: 75485 - protein, 10 aa, synthetic construct
NTGRGDYTSV

SEQ ID NO: 75486 - protein, 10 aa, synthetic construct
NTGRGDLTVT

SEQ ID NO: 75487 - protein, 10 aa, synthetic construct
NTGRGDLIGR

SEQ ID NO: 75488 - protein, 10 aa, synthetic construct
NTARGDRDYL

SEQ ID NO: 75489 - protein, 10 aa, synthetic construct
NTARGDYTSV

SEQ ID NO: 75490 - protein, 10 aa, synthetic construct
NTARGDLTVT

SEQ ID NO: 75491 - protein, 10 aa, synthetic construct
NTARGDLIGR

SEQ ID NO: 75492 - protein, 10 aa, synthetic construct
NTVRGDHGVL

SEQ ID NO: 75493 - protein, 10 aa, synthetic construct
NTVRGDHVNL

SEQ ID NO: 75494 - protein, 10 aa, synthetic construct
ATPRGDRSVV

SEQ ID NO: 75495 - protein, 10 aa, synthetic construct
NTVRGDRDYL

SEQ ID NO: 75496 - protein, 10 aa, synthetic construct
NTVRGDYSSV

SEQ ID NO: 75497 - protein, 10 aa, synthetic construct
NTVRGDLTVT

SEQ ID NO: 75498 - protein, 10 aa, synthetic construct
NTPRGDRDYL

SEQ ID NO: 75499 - protein, 10 aa, synthetic construct
NTPRGDYTSV

SEQ ID NO: 75500 - protein, 10 aa, synthetic construct
NTPRGDLTVT

SEQ ID NO: 75501 - protein, 10 aa, synthetic construct
NTPRGDLIGR

SEQ ID NO: 75502 - protein, 10 aa, synthetic construct
NTLRGDHGVL

SEQ ID NO: 75503 - protein, 10 aa, synthetic construct
NTLRGDHVNL

SEQ ID NO: 75504 - protein, 10 aa, synthetic construct
NTLRGDRDYL

SEQ ID NO: 75505 - protein, 10 aa, synthetic construct
ATPRGDLTVT

SEQ ID NO: 75506 - protein, 10 aa, synthetic construct
NTLRGDYSSV

SEQ ID NO: 75507 - protein, 10 aa, synthetic construct
NTLRGDLTVT

SEQ ID NO: 75508 - protein, 10 aa, synthetic construct
NTIRGDHGVL

SEQ ID NO: 75509 - protein, 10 aa, synthetic construct
NTIRGDRGQI

SEQ ID NO: 75510 - protein, 10 aa, synthetic construct
NTIRGDRQGI

SEQ ID NO: 75511 - protein, 10 aa, synthetic construct
NTIRGDRGVV

SEQ ID NO: 75512 - protein, 10 aa, synthetic construct
NTIRGDYVGL

SEQ ID NO: 75513 - protein, 10 aa, synthetic construct
NTIRGDLIGR

SEQ ID NO: 75514 - protein, 10 aa, synthetic construct
NTIRGDQSTL

SEQ ID NO: 75515 - protein, 10 aa, synthetic construct
NTIRGDLLLS

SEQ ID NO: 75516 - protein, 10 aa, synthetic construct
SSPRGDYTSM

SEQ ID NO: 75517 - protein, 10 aa, synthetic construct
ATPRGDLIGR

SEQ ID NO: 75518 - protein, 10 aa, synthetic construct
NTMRGDHGVL

SEQ ID NO: 75519 - protein, 10 aa, synthetic construct
NTMRGDRGQI

SEQ ID NO: 75520 - protein, 10 aa, synthetic construct
NTMRGDRQGI

SEQ ID NO: 75521 - protein, 10 aa, synthetic construct
NTMRGDRGVV

SEQ ID NO: 75522 - protein, 10 aa, synthetic construct
NTMRGDYVGL

SEQ ID NO: 75523 - protein, 10 aa, synthetic construct
NTMRGDLIGR

SEQ ID NO: 75524 - protein, 10 aa, synthetic construct
NTMRGDQSTL

SEQ ID NO: 75525 - protein, 10 aa, synthetic construct
NTMRGDLLLS

SEQ ID NO: 75526 - protein, 10 aa, synthetic construct
NTWRGDHGVL

SEQ ID NO: 75527 - protein, 10 aa, synthetic construct
NTWRGDHVNL

SEQ ID NO: 75528 - protein, 10 aa, synthetic construct
ATPRGDRSQT

SEQ ID NO: 75529 - protein, 10 aa, synthetic construct
NTWRGDRDYL

SEQ ID NO: 75530 - protein, 10 aa, synthetic construct
NTWRGDYSSV

SEQ ID NO: 75531 - protein, 10 aa, synthetic construct
NTWRGDLTVT

SEQ ID NO: 75532 - protein, 10 aa, synthetic construct
NTFRGDHGVL

SEQ ID NO: 75533 - protein, 10 aa, synthetic construct
NTFRGDRGQI

SEQ ID NO: 75534 - protein, 10 aa, synthetic construct
NTFRGDRQGI

SEQ ID NO: 75535 - protein, 10 aa, synthetic construct
NTFRGDRGVV

SEQ ID NO: 75536 - protein, 10 aa, synthetic construct
NTFRGDYVGL

SEQ ID NO: 75537 - protein, 10 aa, synthetic construct
NTFRGDLIGR

SEQ ID NO: 75538 - protein, 10 aa, synthetic construct
NTFRGDQSTL

SEQ ID NO: 75539 - protein, 10 aa, synthetic construct
ATPRGDLLLS

SEQ ID NO: 75540 - protein, 10 aa, synthetic construct
NTFRGDLLLS

SEQ ID NO: 75541 - protein, 10 aa, synthetic construct
NTKRGDHGVL

SEQ ID NO: 75542 - protein, 10 aa, synthetic construct
NTKRGDRGQI

SEQ ID NO: 75543 - protein, 10 aa, synthetic construct
NTKRGDRQGI

SEQ ID NO: 75544 - protein, 10 aa, synthetic construct
NTKRGDRGVV

SEQ ID NO: 75545 - protein, 10 aa, synthetic construct
NTKRGDYVGL

SEQ ID NO: 75546 - protein, 10 aa, synthetic construct
NTKRGDLIGR

SEQ ID NO: 75547 - protein, 10 aa, synthetic construct
NTKRGDQSTL

SEQ ID NO: 75548 - protein, 10 aa, synthetic construct
NTKRGDLLLS

SEQ ID NO: 75549 - protein, 10 aa, synthetic construct
NTRRGDRDYL

SEQ ID NO: 75550 - protein, 10 aa, synthetic construct
ATLRGDHGVL

SEQ ID NO: 75551 - protein, 10 aa, synthetic construct
NTRRGDYTSV

SEQ ID NO: 75552 - protein, 10 aa, synthetic construct
NTRRGDLTVT

SEQ ID NO: 75553 - protein, 10 aa, synthetic construct
NTRRGDLIGR

SEQ ID NO: 75554 - protein, 10 aa, synthetic construct
NTHRGDHGVL

SEQ ID NO: 75555 - protein, 10 aa, synthetic construct
NTHRGDHVNL

SEQ ID NO: 75556 - protein, 10 aa, synthetic construct
NTHRGDRDYL

SEQ ID NO: 75557 - protein, 10 aa, synthetic construct
NTHRGDYSSV

SEQ ID NO: 75558 - protein, 10 aa, synthetic construct
NTHRGDLTVT

SEQ ID NO: 75559 - protein, 10 aa, synthetic construct
NTSRGDHGVL

SEQ ID NO: 75560 - protein, 10 aa, synthetic construct
NTSRGDHVNL

SEQ ID NO: 75561 - protein, 10 aa, synthetic construct
ATLRGDRGQI

SEQ ID NO: 75562 - protein, 10 aa, synthetic construct
NTSRGDRDYL

SEQ ID NO: 75563 - protein, 10 aa, synthetic construct
NTSRGDYSSV

SEQ ID NO: 75564 - protein, 10 aa, synthetic construct
NTSRGDLTVT

SEQ ID NO: 75565 - protein, 10 aa, synthetic construct
NTTRGDHGVL

SEQ ID NO: 75566 - protein, 10 aa, synthetic construct
NTTRGDHVNL

SEQ ID NO: 75567 - protein, 10 aa, synthetic construct
NTTRGDRDYL

SEQ ID NO: 75568 - protein, 10 aa, synthetic construct
NTTRGDYSSV

SEQ ID NO: 75569 - protein, 10 aa, synthetic construct
NTTRGDLTVT

SEQ ID NO: 75570 - protein, 10 aa, synthetic construct
NTYRGDHGVL

SEQ ID NO: 75571 - protein, 10 aa, synthetic construct
NTYRGDRGQI

SEQ ID NO: 75572 - protein, 10 aa, synthetic construct
ATLRGDRQGI

SEQ ID NO: 75573 - protein, 10 aa, synthetic construct
NTYRGDRQGI

SEQ ID NO: 75574 - protein, 10 aa, synthetic construct
NTYRGDRGVV

SEQ ID NO: 75575 - protein, 10 aa, synthetic construct
NTYRGDYVGL

SEQ ID NO: 75576 - protein, 10 aa, synthetic construct
NTYRGDLIGR

SEQ ID NO: 75577 - protein, 10 aa, synthetic construct
NTYRGDQSTL

SEQ ID NO: 75578 - protein, 10 aa, synthetic construct
NTYRGDLLLS

SEQ ID NO: 75579 - protein, 10 aa, synthetic construct
NTNRGDHGVL

SEQ ID NO: 75580 - protein, 10 aa, synthetic construct
NTNRGDRGQI

SEQ ID NO: 75581 - protein, 10 aa, synthetic construct
NTNRGDRQGI

SEQ ID NO: 75582 - protein, 10 aa, synthetic construct
NTNRGDRGVV

SEQ ID NO: 75583 - protein, 10 aa, synthetic construct
ATLRGDRSVV

SEQ ID NO: 75584 - protein, 10 aa, synthetic construct
NTNRGDYVGL

SEQ ID NO: 75585 - protein, 10 aa, synthetic construct
NTNRGDLIGR

SEQ ID NO: 75586 - protein, 10 aa, synthetic construct
NTNRGDQSTL

SEQ ID NO: 75587 - protein, 10 aa, synthetic construct
NTNRGDLLLS

SEQ ID NO: 75588 - protein, 10 aa, synthetic construct
NTQRGDHGVL

SEQ ID NO: 75589 - protein, 10 aa, synthetic construct
NTQRGDHVNL

SEQ ID NO: 75590 - protein, 10 aa, synthetic construct
NTQRGDRDYL

SEQ ID NO: 75591 - protein, 10 aa, synthetic construct
NTQRGDYSSV

SEQ ID NO: 75592 - protein, 10 aa, synthetic construct
NTQRGDLTVT

SEQ ID NO: 75593 - protein, 10 aa, synthetic construct
NTDRGDHGVL

SEQ ID NO: 75594 - protein, 10 aa, synthetic construct
ATLRGDLTVT

SEQ ID NO: 75595 - protein, 10 aa, synthetic construct
NTDRGDHVNL

SEQ ID NO: 75596 - protein, 10 aa, synthetic construct
NTDRGDRDYL

SEQ ID NO: 75597 - protein, 10 aa, synthetic construct
NTDRGDYSSV

SEQ ID NO: 75598 - protein, 10 aa, synthetic construct
NTDRGDLTVT

SEQ ID NO: 75599 - protein, 10 aa, synthetic construct
NTERGDHGVL

SEQ ID NO: 75600 - protein, 10 aa, synthetic construct
NTERGDHVNL

SEQ ID NO: 75601 - protein, 10 aa, synthetic construct
NTERGDRDYL

SEQ ID NO: 75602 - protein, 10 aa, synthetic construct
NTERGDYSSV

SEQ ID NO: 75603 - protein, 10 aa, synthetic construct
NTERGDLTVT

SEQ ID NO: 75604 - protein, 10 aa, synthetic construct
NYGRGDHGVL

SEQ ID NO: 75605 - protein, 10 aa, synthetic construct
ATLRGDLIGR

SEQ ID NO: 75606 - protein, 10 aa, synthetic construct
NYGRGDHVNL

SEQ ID NO: 75607 - protein, 10 aa, synthetic construct
NYGRGDRDYL

SEQ ID NO: 75608 - protein, 10 aa, synthetic construct
NYGRGDYSSV

SEQ ID NO: 75609 - protein, 10 aa, synthetic construct
NYGRGDLTVT

SEQ ID NO: 75610 - protein, 10 aa, synthetic construct
NYARGDHGVL

SEQ ID NO: 75611 - protein, 10 aa, synthetic construct
NYARGDHVNL

SEQ ID NO: 75612 - protein, 10 aa, synthetic construct
NYARGDRDYL

SEQ ID NO: 75613 - protein, 10 aa, synthetic construct
NYARGDYSSV

SEQ ID NO: 75614 - protein, 10 aa, synthetic construct
NYARGDLTVT

SEQ ID NO: 75615 - protein, 10 aa, synthetic construct
NYVRGDHGVL

SEQ ID NO: 75616 - protein, 10 aa, synthetic construct
ATLRGDRSQT

SEQ ID NO: 75617 - protein, 10 aa, synthetic construct
NYVRGDRGQI

SEQ ID NO: 75618 - protein, 10 aa, synthetic construct
NYVRGDRQGI

SEQ ID NO: 75619 - protein, 10 aa, synthetic construct
NYVRGDRGVV

SEQ ID NO: 75620 - protein, 10 aa, synthetic construct
NYVRGDYVGL

SEQ ID NO: 75621 - protein, 10 aa, synthetic construct
NYVRGDLIGR

SEQ ID NO: 75622 - protein, 10 aa, synthetic construct
NYVRGDQSTL

SEQ ID NO: 75623 - protein, 10 aa, synthetic construct
NYVRGDLLLS

SEQ ID NO: 75624 - protein, 10 aa, synthetic construct
NYPRGDHGVL

SEQ ID NO: 75625 - protein, 10 aa, synthetic construct
NYPRGDHVNL

SEQ ID NO: 75626 - protein, 10 aa, synthetic construct
NYPRGDRDYL

SEQ ID NO: 75627 - protein, 10 aa, synthetic construct
SSPRGDFQNT

SEQ ID NO: 75628 - protein, 10 aa, synthetic construct
ATLRGDLLLS

SEQ ID NO: 75629 - protein, 10 aa, synthetic construct
NYPRGDYSSV

SEQ ID NO: 75630 - protein, 10 aa, synthetic construct
NYPRGDLTVT

SEQ ID NO: 75631 - protein, 10 aa, synthetic construct
NYLRGDHGVL

SEQ ID NO: 75632 - protein, 10 aa, synthetic construct
NYLRGDRGQI

SEQ ID NO: 75633 - protein, 10 aa, synthetic construct
NYLRGDRQGI

SEQ ID NO: 75634 - protein, 10 aa, synthetic construct
NYLRGDRGVV

SEQ ID NO: 75635 - protein, 10 aa, synthetic construct
NYLRGDYVGL

SEQ ID NO: 75636 - protein, 10 aa, synthetic construct
NYLRGDLIGR

SEQ ID NO: 75637 - protein, 10 aa, synthetic construct
NYLRGDQSTL

SEQ ID NO: 75638 - protein, 10 aa, synthetic construct
NYLRGDLLLS

SEQ ID NO: 75639 - protein, 10 aa, synthetic construct
ATWRGDRGQI

SEQ ID NO: 75640 - protein, 10 aa, synthetic construct
NYIRGDRSVV

SEQ ID NO: 75641 - protein, 10 aa, synthetic construct
NYIRGDRGVV

SEQ ID NO: 75642 - protein, 10 aa, synthetic construct
NYIRGDRSQT

SEQ ID NO: 75643 - protein, 10 aa, synthetic construct
NYMRGDRSVV

SEQ ID NO: 75644 - protein, 10 aa, synthetic construct
NYMRGDRGVV

SEQ ID NO: 75645 - protein, 10 aa, synthetic construct
NYMRGDRSQT

SEQ ID NO: 75646 - protein, 10 aa, synthetic construct
NYWRGDHGVL

SEQ ID NO: 75647 - protein, 10 aa, synthetic construct
NYWRGDRGQI

SEQ ID NO: 75648 - protein, 10 aa, synthetic construct
NYWRGDRQGI

SEQ ID NO: 75649 - protein, 10 aa, synthetic construct
NYWRGDRGVV

SEQ ID NO: 75650 - protein, 10 aa, synthetic construct
ATWRGDRQGI

SEQ ID NO: 75651 - protein, 10 aa, synthetic construct
NYWRGDYVGL

SEQ ID NO: 75652 - protein, 10 aa, synthetic construct
NYWRGDLIGR

SEQ ID NO: 75653 - protein, 10 aa, synthetic construct
NYWRGDQSTL

SEQ ID NO: 75654 - protein, 10 aa, synthetic construct
NYWRGDLLLS

SEQ ID NO: 75655 - protein, 10 aa, synthetic construct
NYFRGDRSVV

SEQ ID NO: 75656 - protein, 10 aa, synthetic construct
NYFRGDRGVV

SEQ ID NO: 75657 - protein, 10 aa, synthetic construct
NYFRGDRSQT

SEQ ID NO: 75658 - protein, 10 aa, synthetic construct
NYKRGDRSVV

SEQ ID NO: 75659 - protein, 10 aa, synthetic construct
NYKRGDRGVV

SEQ ID NO: 75660 - protein, 10 aa, synthetic construct
NYKRGDRSQT

SEQ ID NO: 75661 - protein, 10 aa, synthetic construct
ATWRGDRSVV

SEQ ID NO: 75662 - protein, 10 aa, synthetic construct
NYRRGDHGVL

SEQ ID NO: 75663 - protein, 10 aa, synthetic construct
NYRRGDHVNL

SEQ ID NO: 75664 - protein, 10 aa, synthetic construct
NYRRGDRDYL

SEQ ID NO: 75665 - protein, 10 aa, synthetic construct
NYRRGDYSSV

SEQ ID NO: 75666 - protein, 10 aa, synthetic construct
NYRRGDLTVT

SEQ ID NO: 75667 - protein, 10 aa, synthetic construct
NYHRGDHGVL

SEQ ID NO: 75668 - protein, 10 aa, synthetic construct
NYHRGDRGQI

SEQ ID NO: 75669 - protein, 10 aa, synthetic construct
NYHRGDRQGI

SEQ ID NO: 75670 - protein, 10 aa, synthetic construct
NYHRGDRGVV

SEQ ID NO: 75671 - protein, 10 aa, synthetic construct
NYHRGDYVGL

SEQ ID NO: 75672 - protein, 10 aa, synthetic construct
ATWRGDRGVV

SEQ ID NO: 75673 - protein, 10 aa, synthetic construct
NYHRGDLIGR

SEQ ID NO: 75674 - protein, 10 aa, synthetic construct
NYHRGDQSTL

SEQ ID NO: 75675 - protein, 10 aa, synthetic construct
NYHRGDLLLS

SEQ ID NO: 75676 - protein, 10 aa, synthetic construct
NYSRGDHGVL

SEQ ID NO: 75677 - protein, 10 aa, synthetic construct
NYSRGDRGQI

SEQ ID NO: 75678 - protein, 10 aa, synthetic construct
NYSRGDRQGI

SEQ ID NO: 75679 - protein, 10 aa, synthetic construct
NYSRGDRGVV

SEQ ID NO: 75680 - protein, 10 aa, synthetic construct
NYSRGDYVGL

SEQ ID NO: 75681 - protein, 10 aa, synthetic construct
NYSRGDLIGR

SEQ ID NO: 75682 - protein, 10 aa, synthetic construct
NYSRGDQSTL

SEQ ID NO: 75683 - protein, 10 aa, synthetic construct
ATWRGDRSQT

SEQ ID NO: 75684 - protein, 10 aa, synthetic construct
NYSRGDLLLS

SEQ ID NO: 75685 - protein, 10 aa, synthetic construct
NYTRGDHGVL

SEQ ID NO: 75686 - protein, 10 aa, synthetic construct
NYTRGDRGQI

SEQ ID NO: 75687 - protein, 10 aa, synthetic construct
NYTRGDRQGI

SEQ ID NO: 75688 - protein, 10 aa, synthetic construct
NYTRGDRGVV

SEQ ID NO: 75689 - protein, 10 aa, synthetic construct
NYTRGDYVGL

SEQ ID NO: 75690 - protein, 10 aa, synthetic construct
NYTRGDLIGR

SEQ ID NO: 75691 - protein, 10 aa, synthetic construct
NYTRGDQSTL

SEQ ID NO: 75692 - protein, 10 aa, synthetic construct
NYTRGDLLLS

SEQ ID NO: 75693 - protein, 10 aa, synthetic construct
NYYRGDRSVV

SEQ ID NO: 75694 - protein, 10 aa, synthetic construct
ATRRGDHGVL

SEQ ID NO: 75695 - protein, 10 aa, synthetic construct
NYYRGDRGVV

SEQ ID NO: 75696 - protein, 10 aa, synthetic construct
NYYRGDRSQT

SEQ ID NO: 75697 - protein, 10 aa, synthetic construct
NYNRGDRSVV

SEQ ID NO: 75698 - protein, 10 aa, synthetic construct
NYNRGDRGVV

SEQ ID NO: 75699 - protein, 10 aa, synthetic construct
NYNRGDRSQT

SEQ ID NO: 75700 - protein, 10 aa, synthetic construct
NYQRGDHGVL

SEQ ID NO: 75701 - protein, 10 aa, synthetic construct
NYQRGDRGQI

SEQ ID NO: 75702 - protein, 10 aa, synthetic construct
NYQRGDRQGI

SEQ ID NO: 75703 - protein, 10 aa, synthetic construct
NYQRGDRGVV

SEQ ID NO: 75704 - protein, 10 aa, synthetic construct
NYQRGDYVGL

SEQ ID NO: 75705 - protein, 10 aa, synthetic construct
ATRRGDRGQI

SEQ ID NO: 75706 - protein, 10 aa, synthetic construct
NYQRGDLIGR

SEQ ID NO: 75707 - protein, 10 aa, synthetic construct
NYQRGDQSTL

SEQ ID NO: 75708 - protein, 10 aa, synthetic construct
NYQRGDLLLS

SEQ ID NO: 75709 - protein, 10 aa, synthetic construct
NYDRGDHGVL

SEQ ID NO: 75710 - protein, 10 aa, synthetic construct
NYDRGDRGQI

SEQ ID NO: 75711 - protein, 10 aa, synthetic construct
NYDRGDRQGI

SEQ ID NO: 75712 - protein, 10 aa, synthetic construct
NYDRGDRGVV

SEQ ID NO: 75713 - protein, 10 aa, synthetic construct
NYDRGDYVGL

SEQ ID NO: 75714 - protein, 10 aa, synthetic construct
NYDRGDLIGR

SEQ ID NO: 75715 - protein, 10 aa, synthetic construct
NYDRGDQSTL

SEQ ID NO: 75716 - protein, 10 aa, synthetic construct
ATRRGDRQGI

SEQ ID NO: 75717 - protein, 10 aa, synthetic construct
NYDRGDLLLS

SEQ ID NO: 75718 - protein, 10 aa, synthetic construct
NYERGDHGVL

SEQ ID NO: 75719 - protein, 10 aa, synthetic construct
NYERGDRGQI

SEQ ID NO: 75720 - protein, 10 aa, synthetic construct
NYERGDRQGI

SEQ ID NO: 75721 - protein, 10 aa, synthetic construct
NYERGDRGVV

SEQ ID NO: 75722 - protein, 10 aa, synthetic construct
NYERGDYVGL

SEQ ID NO: 75723 - protein, 10 aa, synthetic construct
NYERGDLIGR

SEQ ID NO: 75724 - protein, 10 aa, synthetic construct
NYERGDQSTL

SEQ ID NO: 75725 - protein, 10 aa, synthetic construct
NYERGDLLLS

SEQ ID NO: 75726 - protein, 10 aa, synthetic construct
NNGRGDHGVL

SEQ ID NO: 75727 - protein, 10 aa, synthetic construct
ATRRGDRSVV

SEQ ID NO: 75728 - protein, 10 aa, synthetic construct
NNGRGDHVNL

SEQ ID NO: 75729 - protein, 10 aa, synthetic construct
NNGRGDRDYL

SEQ ID NO: 75730 - protein, 10 aa, synthetic construct
NNGRGDYSSV

SEQ ID NO: 75731 - protein, 10 aa, synthetic construct
NNGRGDLTVT

SEQ ID NO: 75732 - protein, 10 aa, synthetic construct
NNARGDHGVL

SEQ ID NO: 75733 - protein, 10 aa, synthetic construct
NNARGDHVNL

SEQ ID NO: 75734 - protein, 10 aa, synthetic construct
NNARGDRDYL

SEQ ID NO: 75735 - protein, 10 aa, synthetic construct
NNARGDYSSV

SEQ ID NO: 75736 - protein, 10 aa, synthetic construct
NNARGDLTVT

SEQ ID NO: 75737 - protein, 10 aa, synthetic construct
NNVRGDHGVL

SEQ ID NO: 75738 - protein, 10 aa, synthetic construct
TSPRGDYNSL

SEQ ID NO: 75739 - protein, 10 aa, synthetic construct
ATRRGDLTVT

SEQ ID NO: 75740 - protein, 10 aa, synthetic construct
NNVRGDRGQI

SEQ ID NO: 75741 - protein, 10 aa, synthetic construct
NNVRGDRQGI

SEQ ID NO: 75742 - protein, 10 aa, synthetic construct
NNVRGDRGVV

SEQ ID NO: 75743 - protein, 10 aa, synthetic construct
NNVRGDYVGL

SEQ ID NO: 75744 - protein, 10 aa, synthetic construct
NNVRGDLIGR

SEQ ID NO: 75745 - protein, 10 aa, synthetic construct
NNVRGDQSTL

SEQ ID NO: 75746 - protein, 10 aa, synthetic construct
NNVRGDLLLS

SEQ ID NO: 75747 - protein, 10 aa, synthetic construct
NNPRGDHGVL

SEQ ID NO: 75748 - protein, 10 aa, synthetic construct
NNPRGDHVNL

SEQ ID NO: 75749 - protein, 10 aa, synthetic construct
NNPRGDRDYL

SEQ ID NO: 75750 - protein, 10 aa, synthetic construct
ATRRGDLIGR

SEQ ID NO: 75751 - protein, 10 aa, synthetic construct
NNPRGDYSSV

SEQ ID NO: 75752 - protein, 10 aa, synthetic construct
NNPRGDLTVT

SEQ ID NO: 75753 - protein, 10 aa, synthetic construct
NNLRGDHGVL

SEQ ID NO: 75754 - protein, 10 aa, synthetic construct
NNLRGDRGQI

SEQ ID NO: 75755 - protein, 10 aa, synthetic construct
NNLRGDRQGI

SEQ ID NO: 75756 - protein, 10 aa, synthetic construct
NNLRGDRGVV

SEQ ID NO: 75757 - protein, 10 aa, synthetic construct
NNLRGDYVGL

SEQ ID NO: 75758 - protein, 10 aa, synthetic construct
NNLRGDLIGR

SEQ ID NO: 75759 - protein, 10 aa, synthetic construct
NNLRGDQSTL

SEQ ID NO: 75760 - protein, 10 aa, synthetic construct
NNLRGDLLLS

SEQ ID NO: 75761 - protein, 10 aa, synthetic construct
ATRRGDRSQT

SEQ ID NO: 75762 - protein, 10 aa, synthetic construct
NNIRGDRSVV

SEQ ID NO: 75763 - protein, 10 aa, synthetic construct
NNIRGDRGVV

SEQ ID NO: 75764 - protein, 10 aa, synthetic construct
NNIRGDRSQT

SEQ ID NO: 75765 - protein, 10 aa, synthetic construct
NNMRGDRSVV

SEQ ID NO: 75766 - protein, 10 aa, synthetic construct
NNMRGDRGVV

SEQ ID NO: 75767 - protein, 10 aa, synthetic construct
NNMRGDRSQT

SEQ ID NO: 75768 - protein, 10 aa, synthetic construct
NNWRGDHGVL

SEQ ID NO: 75769 - protein, 10 aa, synthetic construct
NNWRGDRGQI

SEQ ID NO: 75770 - protein, 10 aa, synthetic construct
NNWRGDRQGI

SEQ ID NO: 75771 - protein, 10 aa, synthetic construct
NNWRGDRGVV

SEQ ID NO: 75772 - protein, 10 aa, synthetic construct
ATRRGDLLLS

SEQ ID NO: 75773 - protein, 10 aa, synthetic construct
NNWRGDYVGL

SEQ ID NO: 75774 - protein, 10 aa, synthetic construct
NNWRGDLIGR

SEQ ID NO: 75775 - protein, 10 aa, synthetic construct
NNWRGDQSTL

SEQ ID NO: 75776 - protein, 10 aa, synthetic construct
NNWRGDLLLS

SEQ ID NO: 75777 - protein, 10 aa, synthetic construct
NNFRGDRSVV

SEQ ID NO: 75778 - protein, 10 aa, synthetic construct
NNFRGDRGVV

SEQ ID NO: 75779 - protein, 10 aa, synthetic construct
NNFRGDRSQT

SEQ ID NO: 75780 - protein, 10 aa, synthetic construct
NNKRGDRSVV

SEQ ID NO: 75781 - protein, 10 aa, synthetic construct
NNKRGDRGVV

SEQ ID NO: 75782 - protein, 10 aa, synthetic construct
NNKRGDRSQT

SEQ ID NO: 75783 - protein, 10 aa, synthetic construct
ATHRGDRGVV

SEQ ID NO: 75784 - protein, 10 aa, synthetic construct
NNRRGDHGVL

SEQ ID NO: 75785 - protein, 10 aa, synthetic construct
NNRRGDHVNL

SEQ ID NO: 75786 - protein, 10 aa, synthetic construct
NNRRGDRDYL

SEQ ID NO: 75787 - protein, 10 aa, synthetic construct
NNRRGDYSSV

SEQ ID NO: 75788 - protein, 10 aa, synthetic construct
NNRRGDLTVT

SEQ ID NO: 75789 - protein, 10 aa, synthetic construct
NNHRGDHGVL

SEQ ID NO: 75790 - protein, 10 aa, synthetic construct
NNHRGDRGQI

SEQ ID NO: 75791 - protein, 10 aa, synthetic construct
NNHRGDRQGI

SEQ ID NO: 75792 - protein, 10 aa, synthetic construct
NNHRGDRGVV

SEQ ID NO: 75793 - protein, 10 aa, synthetic construct
NNHRGDYVGL

SEQ ID NO: 75794 - protein, 10 aa, synthetic construct
ATSRGDHGVL

SEQ ID NO: 75795 - protein, 10 aa, synthetic construct
NNHRGDLIGR

SEQ ID NO: 75796 - protein, 10 aa, synthetic construct
NNHRGDQSTL

SEQ ID NO: 75797 - protein, 10 aa, synthetic construct
NNHRGDLLLS

SEQ ID NO: 75798 - protein, 10 aa, synthetic construct
NNSRGDHGVL

SEQ ID NO: 75799 - protein, 10 aa, synthetic construct
NNSRGDRGQI

SEQ ID NO: 75800 - protein, 10 aa, synthetic construct
NNSRGDRQGI

SEQ ID NO: 75801 - protein, 10 aa, synthetic construct
NNSRGDRGVV

SEQ ID NO: 75802 - protein, 10 aa, synthetic construct
NNSRGDYVGL

SEQ ID NO: 75803 - protein, 10 aa, synthetic construct
NNSRGDLIGR

SEQ ID NO: 75804 - protein, 10 aa, synthetic construct
NNSRGDQSTL

SEQ ID NO: 75805 - protein, 10 aa, synthetic construct
ATSRGDRGQI

SEQ ID NO: 75806 - protein, 10 aa, synthetic construct
NNSRGDLLLS

SEQ ID NO: 75807 - protein, 10 aa, synthetic construct
NNTRGDHGVL

SEQ ID NO: 75808 - protein, 10 aa, synthetic construct
NNTRGDRGQI

SEQ ID NO: 75809 - protein, 10 aa, synthetic construct
NNTRGDRQGI

SEQ ID NO: 75810 - protein, 10 aa, synthetic construct
NNTRGDRGVV

SEQ ID NO: 75811 - protein, 10 aa, synthetic construct
NNTRGDYVGL

SEQ ID NO: 75812 - protein, 10 aa, synthetic construct
NNTRGDLIGR

SEQ ID NO: 75813 - protein, 10 aa, synthetic construct
NNTRGDQSTL

SEQ ID NO: 75814 - protein, 10 aa, synthetic construct
NNTRGDLLLS

SEQ ID NO: 75815 - protein, 10 aa, synthetic construct
NNYRGDRSVV

SEQ ID NO: 75816 - protein, 10 aa, synthetic construct
ATSRGDRQGI

SEQ ID NO: 75817 - protein, 10 aa, synthetic construct
NNYRGDRGVV

SEQ ID NO: 75818 - protein, 10 aa, synthetic construct
NNYRGDRSQT

SEQ ID NO: 75819 - protein, 10 aa, synthetic construct
NNNRGDRSVV

SEQ ID NO: 75820 - protein, 10 aa, synthetic construct
NNNRGDRGVV

SEQ ID NO: 75821 - protein, 10 aa, synthetic construct
NNNRGDRSQT

SEQ ID NO: 75822 - protein, 10 aa, synthetic construct
NNQRGDHGVL

SEQ ID NO: 75823 - protein, 10 aa, synthetic construct
NNQRGDRGQI

SEQ ID NO: 75824 - protein, 10 aa, synthetic construct
NNQRGDRQGI

SEQ ID NO: 75825 - protein, 10 aa, synthetic construct
NNQRGDRGVV

SEQ ID NO: 75826 - protein, 10 aa, synthetic construct
NNQRGDYVGL

SEQ ID NO: 75827 - protein, 10 aa, synthetic construct
ATSRGDRSVV

SEQ ID NO: 75828 - protein, 10 aa, synthetic construct
NNQRGDLIGR

SEQ ID NO: 75829 - protein, 10 aa, synthetic construct
NNQRGDQSTL

SEQ ID NO: 75830 - protein, 10 aa, synthetic construct
NNQRGDLLLS

SEQ ID NO: 75831 - protein, 10 aa, synthetic construct
NNDRGDHGVL

SEQ ID NO: 75832 - protein, 10 aa, synthetic construct
NNDRGDRGQI

SEQ ID NO: 75833 - protein, 10 aa, synthetic construct
NNDRGDRQGI

SEQ ID NO: 75834 - protein, 10 aa, synthetic construct
NNDRGDRGVV

SEQ ID NO: 75835 - protein, 10 aa, synthetic construct
NNDRGDYVGL

SEQ ID NO: 75836 - protein, 10 aa, synthetic construct
NNDRGDLIGR

SEQ ID NO: 75837 - protein, 10 aa, synthetic construct
NNDRGDQSTL

SEQ ID NO: 75838 - protein, 10 aa, synthetic construct
ATSRGDLTVT

SEQ ID NO: 75839 - protein, 10 aa, synthetic construct
NNDRGDLLLS

SEQ ID NO: 75840 - protein, 10 aa, synthetic construct
NNERGDHGVL

SEQ ID NO: 75841 - protein, 10 aa, synthetic construct
NNERGDRGQI

SEQ ID NO: 75842 - protein, 10 aa, synthetic construct
NNERGDRQGI

SEQ ID NO: 75843 - protein, 10 aa, synthetic construct
NNERGDRGVV

SEQ ID NO: 75844 - protein, 10 aa, synthetic construct
NNERGDYVGL

SEQ ID NO: 75845 - protein, 10 aa, synthetic construct
NNERGDLIGR

SEQ ID NO: 75846 - protein, 10 aa, synthetic construct
NNERGDQSTL

SEQ ID NO: 75847 - protein, 10 aa, synthetic construct
NNERGDLLLS

SEQ ID NO: 75848 - protein, 10 aa, synthetic construct
NQGRGDRDYL

SEQ ID NO: 75849 - protein, 10 aa, synthetic construct
TSPRGDYTSV

SEQ ID NO: 75850 - protein, 10 aa, synthetic construct
ATSRGDLIGR

SEQ ID NO: 75851 - protein, 10 aa, synthetic construct
NQGRGDYTSV

SEQ ID NO: 75852 - protein, 10 aa, synthetic construct
NQGRGDLTVT

SEQ ID NO: 75853 - protein, 10 aa, synthetic construct
NQGRGDLIGR

SEQ ID NO: 75854 - protein, 10 aa, synthetic construct
NQARGDRDYL

SEQ ID NO: 75855 - protein, 10 aa, synthetic construct
NQARGDYTSV

SEQ ID NO: 75856 - protein, 10 aa, synthetic construct
NQARGDLTVT

SEQ ID NO: 75857 - protein, 10 aa, synthetic construct
NQARGDLIGR

SEQ ID NO: 75858 - protein, 10 aa, synthetic construct
NQVRGDHGVL

SEQ ID NO: 75859 - protein, 10 aa, synthetic construct
NQVRGDHVNL

SEQ ID NO: 75860 - protein, 10 aa, synthetic construct
NQVRGDRDYL

SEQ ID NO: 75861 - protein, 10 aa, synthetic construct
ATSRGDRSQT

SEQ ID NO: 75862 - protein, 10 aa, synthetic construct
NQVRGDYSSV

SEQ ID NO: 75863 - protein, 10 aa, synthetic construct
NQVRGDLTVT

SEQ ID NO: 75864 - protein, 10 aa, synthetic construct
NQPRGDRDYL

SEQ ID NO: 75865 - protein, 10 aa, synthetic construct
NQPRGDYTSV

SEQ ID NO: 75866 - protein, 10 aa, synthetic construct
NQPRGDLTVT

SEQ ID NO: 75867 - protein, 10 aa, synthetic construct
NQPRGDLIGR

SEQ ID NO: 75868 - protein, 10 aa, synthetic construct
NQLRGDHGVL

SEQ ID NO: 75869 - protein, 10 aa, synthetic construct
NQLRGDHVNL

SEQ ID NO: 75870 - protein, 10 aa, synthetic construct
NQLRGDRDYL

SEQ ID NO: 75871 - protein, 10 aa, synthetic construct
NQLRGDYSSV

SEQ ID NO: 75872 - protein, 10 aa, synthetic construct
ATSRGDLLLS

SEQ ID NO: 75873 - protein, 10 aa, synthetic construct
NQLRGDLTVT

SEQ ID NO: 75874 - protein, 10 aa, synthetic construct
NQIRGDHGVL

SEQ ID NO: 75875 - protein, 10 aa, synthetic construct
NQIRGDRGQI

SEQ ID NO: 75876 - protein, 10 aa, synthetic construct
NQIRGDRQGI

SEQ ID NO: 75877 - protein, 10 aa, synthetic construct
NQIRGDRGVV

SEQ ID NO: 75878 - protein, 10 aa, synthetic construct
NQIRGDYVGL

SEQ ID NO: 75879 - protein, 10 aa, synthetic construct
NQIRGDLIGR

SEQ ID NO: 75880 - protein, 10 aa, synthetic construct
NQIRGDQSTL

SEQ ID NO: 75881 - protein, 10 aa, synthetic construct
NQIRGDLLLS

SEQ ID NO: 75882 - protein, 10 aa, synthetic construct
NQMRGDHGVL

SEQ ID NO: 75883 - protein, 10 aa, synthetic construct
ATTRGDRGVV

SEQ ID NO: 75884 - protein, 10 aa, synthetic construct
NQMRGDRGQI

SEQ ID NO: 75885 - protein, 10 aa, synthetic construct
NQMRGDRQGI

SEQ ID NO: 75886 - protein, 10 aa, synthetic construct
NQMRGDRGVV

SEQ ID NO: 75887 - protein, 10 aa, synthetic construct
NQMRGDYVGL

SEQ ID NO: 75888 - protein, 10 aa, synthetic construct
NQMRGDLIGR

SEQ ID NO: 75889 - protein, 10 aa, synthetic construct
NQMRGDQSTL

SEQ ID NO: 75890 - protein, 10 aa, synthetic construct
NQMRGDLLLS

SEQ ID NO: 75891 - protein, 10 aa, synthetic construct
NQWRGDHGVL

SEQ ID NO: 75892 - protein, 10 aa, synthetic construct
NQWRGDHVNL

SEQ ID NO: 75893 - protein, 10 aa, synthetic construct
NQWRGDRDYL

SEQ ID NO: 75894 - protein, 10 aa, synthetic construct
ATQRGDRGVV

SEQ ID NO: 75895 - protein, 10 aa, synthetic construct
NQWRGDYSSV

SEQ ID NO: 75896 - protein, 10 aa, synthetic construct
NQWRGDLTVT

SEQ ID NO: 75897 - protein, 10 aa, synthetic construct
NQFRGDHGVL

SEQ ID NO: 75898 - protein, 10 aa, synthetic construct
NQFRGDRGQI

SEQ ID NO: 75899 - protein, 10 aa, synthetic construct
NQFRGDRQGI

SEQ ID NO: 75900 - protein, 10 aa, synthetic construct
NQFRGDRGVV

SEQ ID NO: 75901 - protein, 10 aa, synthetic construct
NQFRGDYVGL

SEQ ID NO: 75902 - protein, 10 aa, synthetic construct
NQFRGDLIGR

SEQ ID NO: 75903 - protein, 10 aa, synthetic construct
NQFRGDQSTL

SEQ ID NO: 75904 - protein, 10 aa, synthetic construct
NQFRGDLLLS

SEQ ID NO: 75905 - protein, 10 aa, synthetic construct
ATDRGDRGVV

SEQ ID NO: 75906 - protein, 10 aa, synthetic construct
NQKRGDHGVL

SEQ ID NO: 75907 - protein, 10 aa, synthetic construct
NQKRGDRGQI

SEQ ID NO: 75908 - protein, 10 aa, synthetic construct
NQKRGDRQGI

SEQ ID NO: 75909 - protein, 10 aa, synthetic construct
NQKRGDRGVV

SEQ ID NO: 75910 - protein, 10 aa, synthetic construct
NQKRGDYVGL

SEQ ID NO: 75911 - protein, 10 aa, synthetic construct
NQKRGDLIGR

SEQ ID NO: 75912 - protein, 10 aa, synthetic construct
NQKRGDQSTL

SEQ ID NO: 75913 - protein, 10 aa, synthetic construct
NQKRGDLLLS

SEQ ID NO: 75914 - protein, 10 aa, synthetic construct
NQRRGDRDYL

SEQ ID NO: 75915 - protein, 10 aa, synthetic construct
NQRRGDYTSV

SEQ ID NO: 75916 - protein, 10 aa, synthetic construct
ATERGDRGVV

SEQ ID NO: 75917 - protein, 10 aa, synthetic construct
NQRRGDLTVT

SEQ ID NO: 75918 - protein, 10 aa, synthetic construct
NQRRGDLIGR

SEQ ID NO: 75919 - protein, 10 aa, synthetic construct
NQHRGDHGVL

SEQ ID NO: 75920 - protein, 10 aa, synthetic construct
NQHRGDHVNL

SEQ ID NO: 75921 - protein, 10 aa, synthetic construct
NQHRGDRDYL

SEQ ID NO: 75922 - protein, 10 aa, synthetic construct
NQHRGDYSSV

SEQ ID NO: 75923 - protein, 10 aa, synthetic construct
NQHRGDLTVT

SEQ ID NO: 75924 - protein, 10 aa, synthetic construct
NQSRGDHGVL

SEQ ID NO: 75925 - protein, 10 aa, synthetic construct
NQSRGDHVNL

SEQ ID NO: 75926 - protein, 10 aa, synthetic construct
NQSRGDRDYL

SEQ ID NO: 75927 - protein, 10 aa, synthetic construct
AYGRGDRGVV

SEQ ID NO: 75928 - protein, 10 aa, synthetic construct
NQSRGDYSSV

SEQ ID NO: 75929 - protein, 10 aa, synthetic construct
NQSRGDLTVT

SEQ ID NO: 75930 - protein, 10 aa, synthetic construct
NQTRGDHGVL

SEQ ID NO: 75931 - protein, 10 aa, synthetic construct
NQTRGDHVNL

SEQ ID NO: 75932 - protein, 10 aa, synthetic construct
NQTRGDRDYL

SEQ ID NO: 75933 - protein, 10 aa, synthetic construct
NQTRGDYSSV

SEQ ID NO: 75934 - protein, 10 aa, synthetic construct
NQTRGDLTVT

SEQ ID NO: 75935 - protein, 10 aa, synthetic construct
NQYRGDHGVL

SEQ ID NO: 75936 - protein, 10 aa, synthetic construct
NQYRGDRGQI

SEQ ID NO: 75937 - protein, 10 aa, synthetic construct
NQYRGDRQGI

SEQ ID NO: 75938 - protein, 10 aa, synthetic construct
AYARGDRGVV

SEQ ID NO: 75939 - protein, 10 aa, synthetic construct
NQYRGDRGVV

SEQ ID NO: 75940 - protein, 10 aa, synthetic construct
NQYRGDYVGL

SEQ ID NO: 75941 - protein, 10 aa, synthetic construct
NQYRGDLIGR

SEQ ID NO: 75942 - protein, 10 aa, synthetic construct
NQYRGDQSTL

SEQ ID NO: 75943 - protein, 10 aa, synthetic construct
NQYRGDLLLS

SEQ ID NO: 75944 - protein, 10 aa, synthetic construct
NQNRGDHGVL

SEQ ID NO: 75945 - protein, 10 aa, synthetic construct
NQNRGDRGQI

SEQ ID NO: 75946 - protein, 10 aa, synthetic construct
NQNRGDRQGI

SEQ ID NO: 75947 - protein, 10 aa, synthetic construct
NQNRGDRGVV

SEQ ID NO: 75948 - protein, 10 aa, synthetic construct
NQNRGDYVGL

SEQ ID NO: 75949 - protein, 10 aa, synthetic construct
AYVRGDRGVV

SEQ ID NO: 75950 - protein, 10 aa, synthetic construct
NQNRGDLIGR

SEQ ID NO: 75951 - protein, 10 aa, synthetic construct
NQNRGDQSTL

SEQ ID NO: 75952 - protein, 10 aa, synthetic construct
NQNRGDLLLS

SEQ ID NO: 75953 - protein, 10 aa, synthetic construct
NQQRGDHGVL

SEQ ID NO: 75954 - protein, 10 aa, synthetic construct
NQQRGDHVNL

SEQ ID NO: 75955 - protein, 10 aa, synthetic construct
NQQRGDRDYL

SEQ ID NO: 75956 - protein, 10 aa, synthetic construct
NQQRGDYSSV

SEQ ID NO: 75957 - protein, 10 aa, synthetic construct
NQQRGDLTVT

SEQ ID NO: 75958 - protein, 10 aa, synthetic construct
NQDRGDHGVL

SEQ ID NO: 75959 - protein, 10 aa, synthetic construct
NQDRGDHVNL

SEQ ID NO: 75960 - protein, 10 aa, synthetic construct
TSPRGDYTSM

SEQ ID NO: 75961 - protein, 10 aa, synthetic construct
AYPRGDRGVV

SEQ ID NO: 75962 - protein, 10 aa, synthetic construct
NQDRGDRDYL

SEQ ID NO: 75963 - protein, 10 aa, synthetic construct
NQDRGDYSSV

SEQ ID NO: 75964 - protein, 10 aa, synthetic construct
NQDRGDLTVT

SEQ ID NO: 75965 - protein, 10 aa, synthetic construct
NQERGDHGVL

SEQ ID NO: 75966 - protein, 10 aa, synthetic construct
NQERGDHVNL

SEQ ID NO: 75967 - protein, 10 aa, synthetic construct
NQERGDRDYL

SEQ ID NO: 75968 - protein, 10 aa, synthetic construct
NQERGDYSSV

SEQ ID NO: 75969 - protein, 10 aa, synthetic construct
NQERGDLTVT

SEQ ID NO: 75970 - protein, 10 aa, synthetic construct
NDGRGDRDYL

SEQ ID NO: 75971 - protein, 10 aa, synthetic construct
NDGRGDYTSV

SEQ ID NO: 75972 - protein, 10 aa, synthetic construct
AYLRGDRGVV

SEQ ID NO: 75973 - protein, 10 aa, synthetic construct
NDGRGDLTVT

SEQ ID NO: 75974 - protein, 10 aa, synthetic construct
NDGRGDLIGR

SEQ ID NO: 75975 - protein, 10 aa, synthetic construct
NDARGDRDYL

SEQ ID NO: 75976 - protein, 10 aa, synthetic construct
NDARGDYTSV

SEQ ID NO: 75977 - protein, 10 aa, synthetic construct
NDARGDLTVT

SEQ ID NO: 75978 - protein, 10 aa, synthetic construct
NDARGDLIGR

SEQ ID NO: 75979 - protein, 10 aa, synthetic construct
NDVRGDHGVL

SEQ ID NO: 75980 - protein, 10 aa, synthetic construct
NDVRGDHVNL

SEQ ID NO: 75981 - protein, 10 aa, synthetic construct
NDVRGDRDYL

SEQ ID NO: 75982 - protein, 10 aa, synthetic construct
NDVRGDYSSV

SEQ ID NO: 75983 - protein, 10 aa, synthetic construct
AYRRGDRGVV

SEQ ID NO: 75984 - protein, 10 aa, synthetic construct
NDVRGDLTVT

SEQ ID NO: 75985 - protein, 10 aa, synthetic construct
NDPRGDRDYL

SEQ ID NO: 75986 - protein, 10 aa, synthetic construct
NDPRGDYTSV

SEQ ID NO: 75987 - protein, 10 aa, synthetic construct
NDPRGDLTVT

SEQ ID NO: 75988 - protein, 10 aa, synthetic construct
NDPRGDLIGR

SEQ ID NO: 75989 - protein, 10 aa, synthetic construct
NDLRGDHGVL

SEQ ID NO: 75990 - protein, 10 aa, synthetic construct
NDLRGDHVNL

SEQ ID NO: 75991 - protein, 10 aa, synthetic construct
NDLRGDRDYL

SEQ ID NO: 75992 - protein, 10 aa, synthetic construct
NDLRGDYSSV

SEQ ID NO: 75993 - protein, 10 aa, synthetic construct
NDLRGDLTVT

SEQ ID NO: 75994 - protein, 10 aa, synthetic construct
AYSRGDRGVV

SEQ ID NO: 75995 - protein, 10 aa, synthetic construct
NDIRGDHGVL

SEQ ID NO: 75996 - protein, 10 aa, synthetic construct
NDIRGDRGQI

SEQ ID NO: 75997 - protein, 10 aa, synthetic construct
NDIRGDRQGI

SEQ ID NO: 75998 - protein, 10 aa, synthetic construct
NDIRGDRGVV

SEQ ID NO: 75999 - protein, 10 aa, synthetic construct
NDIRGDYVGL

SEQ ID NO: 76000 - protein, 10 aa, synthetic construct
NDIRGDLIGR

SEQ ID NO: 76001 - protein, 10 aa, synthetic construct
NDIRGDQSTL

SEQ ID NO: 76002 - protein, 10 aa, synthetic construct
NDIRGDLLLS

SEQ ID NO: 76003 - protein, 10 aa, synthetic construct
NDMRGDHGVL

SEQ ID NO: 76004 - protein, 10 aa, synthetic construct
NDMRGDRGQI

SEQ ID NO: 76005 - protein, 10 aa, synthetic construct
ANGRGDRGVV

SEQ ID NO: 76006 - protein, 10 aa, synthetic construct
NDMRGDRQGI

SEQ ID NO: 76007 - protein, 10 aa, synthetic construct
NDMRGDRGVV

SEQ ID NO: 76008 - protein, 10 aa, synthetic construct
NDMRGDYVGL

SEQ ID NO: 76009 - protein, 10 aa, synthetic construct
NDMRGDLIGR

SEQ ID NO: 76010 - protein, 10 aa, synthetic construct
NDMRGDQSTL

SEQ ID NO: 76011 - protein, 10 aa, synthetic construct
NDMRGDLLLS

SEQ ID NO: 76012 - protein, 10 aa, synthetic construct
NDWRGDHGVL

SEQ ID NO: 76013 - protein, 10 aa, synthetic construct
NDWRGDHVNL

SEQ ID NO: 76014 - protein, 10 aa, synthetic construct
NDWRGDRDYL

SEQ ID NO: 76015 - protein, 10 aa, synthetic construct
NDWRGDYSSV

SEQ ID NO: 76016 - protein, 10 aa, synthetic construct
ANARGDRGVV

SEQ ID NO: 76017 - protein, 10 aa, synthetic construct
NDWRGDLTVT

SEQ ID NO: 76018 - protein, 10 aa, synthetic construct
NDFRGDHGVL

SEQ ID NO: 76019 - protein, 10 aa, synthetic construct
NDFRGDRGQI

SEQ ID NO: 76020 - protein, 10 aa, synthetic construct
NDFRGDRQGI

SEQ ID NO: 76021 - protein, 10 aa, synthetic construct
NDFRGDRGVV

SEQ ID NO: 76022 - protein, 10 aa, synthetic construct
NDFRGDYVGL

SEQ ID NO: 76023 - protein, 10 aa, synthetic construct
NDFRGDLIGR

SEQ ID NO: 76024 - protein, 10 aa, synthetic construct
NDFRGDQSTL

SEQ ID NO: 76025 - protein, 10 aa, synthetic construct
NDFRGDLLLS

SEQ ID NO: 76026 - protein, 10 aa, synthetic construct
NDKRGDHGVL

SEQ ID NO: 76027 - protein, 10 aa, synthetic construct
ANVRGDRGVV

SEQ ID NO: 76028 - protein, 10 aa, synthetic construct
NDKRGDRGQI

SEQ ID NO: 76029 - protein, 10 aa, synthetic construct
NDKRGDRQGI

SEQ ID NO: 76030 - protein, 10 aa, synthetic construct
NDKRGDRGVV

SEQ ID NO: 76031 - protein, 10 aa, synthetic construct
NDKRGDYVGL

SEQ ID NO: 76032 - protein, 10 aa, synthetic construct
NDKRGDLIGR

SEQ ID NO: 76033 - protein, 10 aa, synthetic construct
NDKRGDQSTL

SEQ ID NO: 76034 - protein, 10 aa, synthetic construct
NDKRGDLLLS

SEQ ID NO: 76035 - protein, 10 aa, synthetic construct
NDRRGDRDYL

SEQ ID NO: 76036 - protein, 10 aa, synthetic construct
NDRRGDYTSV

SEQ ID NO: 76037 - protein, 10 aa, synthetic construct
NDRRGDLTVT

SEQ ID NO: 76038 - protein, 10 aa, synthetic construct
ANPRGDRGVV

SEQ ID NO: 76039 - protein, 10 aa, synthetic construct
NDRRGDLIGR

SEQ ID NO: 76040 - protein, 10 aa, synthetic construct
NDHRGDHGVL

SEQ ID NO: 76041 - protein, 10 aa, synthetic construct
NDHRGDHVNL

SEQ ID NO: 76042 - protein, 10 aa, synthetic construct
NDHRGDRDYL

SEQ ID NO: 76043 - protein, 10 aa, synthetic construct
NDHRGDYSSV

SEQ ID NO: 76044 - protein, 10 aa, synthetic construct
NDHRGDLTVT

SEQ ID NO: 76045 - protein, 10 aa, synthetic construct
NDSRGDHGVL

SEQ ID NO: 76046 - protein, 10 aa, synthetic construct
NDSRGDHVNL

SEQ ID NO: 76047 - protein, 10 aa, synthetic construct
NDSRGDRDYL

SEQ ID NO: 76048 - protein, 10 aa, synthetic construct
NDSRGDYSSV

SEQ ID NO: 76049 - protein, 10 aa, synthetic construct
ANLRGDRGVV

SEQ ID NO: 76050 - protein, 10 aa, synthetic construct
NDSRGDLTVT

SEQ ID NO: 76051 - protein, 10 aa, synthetic construct
NDTRGDHGVL

SEQ ID NO: 76052 - protein, 10 aa, synthetic construct
NDTRGDHVNL

SEQ ID NO: 76053 - protein, 10 aa, synthetic construct
NDTRGDRDYL

SEQ ID NO: 76054 - protein, 10 aa, synthetic construct
NDTRGDYSSV

SEQ ID NO: 76055 - protein, 10 aa, synthetic construct
NDTRGDLTVT

SEQ ID NO: 76056 - protein, 10 aa, synthetic construct
NDYRGDHGVL

SEQ ID NO: 76057 - protein, 10 aa, synthetic construct
NDYRGDRGQI

SEQ ID NO: 76058 - protein, 10 aa, synthetic construct
NDYRGDRQGI

SEQ ID NO: 76059 - protein, 10 aa, synthetic construct
NDYRGDRGVV

SEQ ID NO: 76060 - protein, 10 aa, synthetic construct
ANRRGDRGVV

SEQ ID NO: 76061 - protein, 10 aa, synthetic construct
NDYRGDYVGL

SEQ ID NO: 76062 - protein, 10 aa, synthetic construct
NDYRGDLIGR

SEQ ID NO: 76063 - protein, 10 aa, synthetic construct
NDYRGDQSTL

SEQ ID NO: 76064 - protein, 10 aa, synthetic construct
NDYRGDLLLS

SEQ ID NO: 76065 - protein, 10 aa, synthetic construct
NDNRGDHGVL

SEQ ID NO: 76066 - protein, 10 aa, synthetic construct
NDNRGDRGQI

SEQ ID NO: 76067 - protein, 10 aa, synthetic construct
NDNRGDRQGI

SEQ ID NO: 76068 - protein, 10 aa, synthetic construct
NDNRGDRGVV

SEQ ID NO: 76069 - protein, 10 aa, synthetic construct
NDNRGDYVGL

SEQ ID NO: 76070 - protein, 10 aa, synthetic construct
NDNRGDLIGR

SEQ ID NO: 76071 - protein, 10 aa, synthetic construct
TSPRGDFQNT

SEQ ID NO: 76072 - protein, 10 aa, synthetic construct
ANSRGDRGVV

SEQ ID NO: 76073 - protein, 10 aa, synthetic construct
NDNRGDQSTL

SEQ ID NO: 76074 - protein, 10 aa, synthetic construct
NDNRGDLLLS

SEQ ID NO: 76075 - protein, 10 aa, synthetic construct
NDQRGDHGVL

SEQ ID NO: 76076 - protein, 10 aa, synthetic construct
NDQRGDHVNL

SEQ ID NO: 76077 - protein, 10 aa, synthetic construct
NDQRGDRDYL

SEQ ID NO: 76078 - protein, 10 aa, synthetic construct
NDQRGDYSSV

SEQ ID NO: 76079 - protein, 10 aa, synthetic construct
NDQRGDLTVT

SEQ ID NO: 76080 - protein, 10 aa, synthetic construct
NDDRGDHGVL

SEQ ID NO: 76081 - protein, 10 aa, synthetic construct
NDDRGDHVNL

SEQ ID NO: 76082 - protein, 10 aa, synthetic construct
NDDRGDRDYL

SEQ ID NO: 76083 - protein, 10 aa, synthetic construct
AQGRGDHGVL

SEQ ID NO: 76084 - protein, 10 aa, synthetic construct
NDDRGDYSSV

SEQ ID NO: 76085 - protein, 10 aa, synthetic construct
NDDRGDLTVT

SEQ ID NO: 76086 - protein, 10 aa, synthetic construct
NDERGDHGVL

SEQ ID NO: 76087 - protein, 10 aa, synthetic construct
NDERGDHVNL

SEQ ID NO: 76088 - protein, 10 aa, synthetic construct
NDERGDRDYL

SEQ ID NO: 76089 - protein, 10 aa, synthetic construct
NDERGDYSSV

SEQ ID NO: 76090 - protein, 10 aa, synthetic construct
NDERGDLTVT

SEQ ID NO: 76091 - protein, 10 aa, synthetic construct
NEGRGDRDYL

SEQ ID NO: 76092 - protein, 10 aa, synthetic construct
NEGRGDYTSV

SEQ ID NO: 76093 - protein, 10 aa, synthetic construct
NEGRGDLTVT

SEQ ID NO: 76094 - protein, 10 aa, synthetic construct
AQGRGDRGQI

SEQ ID NO: 76095 - protein, 10 aa, synthetic construct
NEGRGDLIGR

SEQ ID NO: 76096 - protein, 10 aa, synthetic construct
NEARGDRDYL

SEQ ID NO: 76097 - protein, 10 aa, synthetic construct
NEARGDYTSV

SEQ ID NO: 76098 - protein, 10 aa, synthetic construct
NEARGDLTVT

SEQ ID NO: 76099 - protein, 10 aa, synthetic construct
NEARGDLIGR

SEQ ID NO: 76100 - protein, 10 aa, synthetic construct
NEVRGDHGVL

SEQ ID NO: 76101 - protein, 10 aa, synthetic construct
NEVRGDHVNL

SEQ ID NO: 76102 - protein, 10 aa, synthetic construct
NEVRGDRDYL

SEQ ID NO: 76103 - protein, 10 aa, synthetic construct
NEVRGDYSSV

SEQ ID NO: 76104 - protein, 10 aa, synthetic construct
NEVRGDLTVT

SEQ ID NO: 76105 - protein, 10 aa, synthetic construct
AQGRGDRQGI

SEQ ID NO: 76106 - protein, 10 aa, synthetic construct
NEPRGDRDYL

SEQ ID NO: 76107 - protein, 10 aa, synthetic construct
NEPRGDYTSV

SEQ ID NO: 76108 - protein, 10 aa, synthetic construct
NEPRGDLTVT

SEQ ID NO: 76109 - protein, 10 aa, synthetic construct
NEPRGDLIGR

SEQ ID NO: 76110 - protein, 10 aa, synthetic construct
NELRGDHGVL

SEQ ID NO: 76111 - protein, 10 aa, synthetic construct
NELRGDHVNL

SEQ ID NO: 76112 - protein, 10 aa, synthetic construct
NELRGDRDYL

SEQ ID NO: 76113 - protein, 10 aa, synthetic construct
NELRGDYSSV

SEQ ID NO: 76114 - protein, 10 aa, synthetic construct
NELRGDLTVT

SEQ ID NO: 76115 - protein, 10 aa, synthetic construct
NEIRGDHGVL

SEQ ID NO: 76116 - protein, 10 aa, synthetic construct
AQGRGDRSVV

SEQ ID NO: 76117 - protein, 10 aa, synthetic construct
NEIRGDRGQI

SEQ ID NO: 76118 - protein, 10 aa, synthetic construct
NEIRGDRQGI

SEQ ID NO: 76119 - protein, 10 aa, synthetic construct
NEIRGDRGVV

SEQ ID NO: 76120 - protein, 10 aa, synthetic construct
NEIRGDYVGL

SEQ ID NO: 76121 - protein, 10 aa, synthetic construct
NEIRGDLIGR

SEQ ID NO: 76122 - protein, 10 aa, synthetic construct
NEIRGDQSTL

SEQ ID NO: 76123 - protein, 10 aa, synthetic construct
NEIRGDLLLS

SEQ ID NO: 76124 - protein, 10 aa, synthetic construct
NEMRGDHGVL

SEQ ID NO: 76125 - protein, 10 aa, synthetic construct
NEMRGDRGQI

SEQ ID NO: 76126 - protein, 10 aa, synthetic construct
NEMRGDRQGI

SEQ ID NO: 76127 - protein, 10 aa, synthetic construct
AQGRGDLTVT

SEQ ID NO: 76128 - protein, 10 aa, synthetic construct
NEMRGDRGVV

SEQ ID NO: 76129 - protein, 10 aa, synthetic construct
NEMRGDYVGL

SEQ ID NO: 76130 - protein, 10 aa, synthetic construct
NEMRGDLIGR

SEQ ID NO: 76131 - protein, 10 aa, synthetic construct
NEMRGDQSTL

SEQ ID NO: 76132 - protein, 10 aa, synthetic construct
NEMRGDLLLS

SEQ ID NO: 76133 - protein, 10 aa, synthetic construct
NEWRGDHGVL

SEQ ID NO: 76134 - protein, 10 aa, synthetic construct
NEWRGDHVNL

SEQ ID NO: 76135 - protein, 10 aa, synthetic construct
NEWRGDRDYL

SEQ ID NO: 76136 - protein, 10 aa, synthetic construct
NEWRGDYSSV

SEQ ID NO: 76137 - protein, 10 aa, synthetic construct
NEWRGDLTVT

SEQ ID NO: 76138 - protein, 10 aa, synthetic construct
AQGRGDLIGR

SEQ ID NO: 76139 - protein, 10 aa, synthetic construct
NEFRGDHGVL

SEQ ID NO: 76140 - protein, 10 aa, synthetic construct
NEFRGDRGQI

SEQ ID NO: 76141 - protein, 10 aa, synthetic construct
NEFRGDRQGI

SEQ ID NO: 76142 - protein, 10 aa, synthetic construct
NEFRGDRGVV

SEQ ID NO: 76143 - protein, 10 aa, synthetic construct
NEFRGDYVGL

SEQ ID NO: 76144 - protein, 10 aa, synthetic construct
NEFRGDLIGR

SEQ ID NO: 76145 - protein, 10 aa, synthetic construct
NEFRGDQSTL

SEQ ID NO: 76146 - protein, 10 aa, synthetic construct
NEFRGDLLLS

SEQ ID NO: 76147 - protein, 10 aa, synthetic construct
NEKRGDHGVL

SEQ ID NO: 76148 - protein, 10 aa, synthetic construct
NEKRGDRGQI

SEQ ID NO: 76149 - protein, 10 aa, synthetic construct
AQGRGDRSQT

SEQ ID NO: 76150 - protein, 10 aa, synthetic construct
NEKRGDRQGI

SEQ ID NO: 76151 - protein, 10 aa, synthetic construct
NEKRGDRGVV

SEQ ID NO: 76152 - protein, 10 aa, synthetic construct
NEKRGDYVGL

SEQ ID NO: 76153 - protein, 10 aa, synthetic construct
NEKRGDLIGR

SEQ ID NO: 76154 - protein, 10 aa, synthetic construct
NEKRGDQSTL

SEQ ID NO: 76155 - protein, 10 aa, synthetic construct
NEKRGDLLLS

SEQ ID NO: 76156 - protein, 10 aa, synthetic construct
NERRGDRDYL

SEQ ID NO: 76157 - protein, 10 aa, synthetic construct
NERRGDYTSV

SEQ ID NO: 76158 - protein, 10 aa, synthetic construct
NERRGDLTVT

SEQ ID NO: 76159 - protein, 10 aa, synthetic construct
NERRGDLIGR

SEQ ID NO: 76160 - protein, 10 aa, synthetic construct
AQGRGDLLLS

SEQ ID NO: 76161 - protein, 10 aa, synthetic construct
NEHRGDHGVL

SEQ ID NO: 76162 - protein, 10 aa, synthetic construct
NEHRGDHVNL

SEQ ID NO: 76163 - protein, 10 aa, synthetic construct
NEHRGDRDYL

SEQ ID NO: 76164 - protein, 10 aa, synthetic construct
NEHRGDYSSV

SEQ ID NO: 76165 - protein, 10 aa, synthetic construct
NEHRGDLTVT

SEQ ID NO: 76166 - protein, 10 aa, synthetic construct
NESRGDHGVL

SEQ ID NO: 76167 - protein, 10 aa, synthetic construct
NESRGDHVNL

SEQ ID NO: 76168 - protein, 10 aa, synthetic construct
NESRGDRDYL

SEQ ID NO: 76169 - protein, 10 aa, synthetic construct
NESRGDYSSV

SEQ ID NO: 76170 - protein, 10 aa, synthetic construct
NESRGDLTVT

SEQ ID NO: 76171 - protein, 10 aa, synthetic construct
AQARGDHGVL

SEQ ID NO: 76172 - protein, 10 aa, synthetic construct
NETRGDHGVL

SEQ ID NO: 76173 - protein, 10 aa, synthetic construct
NETRGDHVNL

SEQ ID NO: 76174 - protein, 10 aa, synthetic construct
NETRGDRDYL

SEQ ID NO: 76175 - protein, 10 aa, synthetic construct
NETRGDYSSV

SEQ ID NO: 76176 - protein, 10 aa, synthetic construct
NETRGDLTVT

SEQ ID NO: 76177 - protein, 10 aa, synthetic construct
NEYRGDHGVL

SEQ ID NO: 76178 - protein, 10 aa, synthetic construct
NEYRGDRGQI

SEQ ID NO: 76179 - protein, 10 aa, synthetic construct
NEYRGDRQGI

SEQ ID NO: 76180 - protein, 10 aa, synthetic construct
NEYRGDRGVV

SEQ ID NO: 76181 - protein, 10 aa, synthetic construct
NEYRGDYVGL

SEQ ID NO: 76182 - protein, 10 aa, synthetic construct
SKNRGDQSTL

SEQ ID NO: 76183 - protein, 10 aa, synthetic construct
ESPRGDYNSL

SEQ ID NO: 76184 - protein, 10 aa, synthetic construct
AQARGDRGQI

SEQ ID NO: 76185 - protein, 10 aa, synthetic construct
NEYRGDLIGR

SEQ ID NO: 76186 - protein, 10 aa, synthetic construct
NEYRGDQSTL

SEQ ID NO: 76187 - protein, 10 aa, synthetic construct
NEYRGDLLLS

SEQ ID NO: 76188 - protein, 10 aa, synthetic construct
NENRGDHGVL

SEQ ID NO: 76189 - protein, 10 aa, synthetic construct
NENRGDRGQI

SEQ ID NO: 76190 - protein, 10 aa, synthetic construct
NENRGDRQGI

SEQ ID NO: 76191 - protein, 10 aa, synthetic construct
NENRGDRGVV

SEQ ID NO: 76192 - protein, 10 aa, synthetic construct
NENRGDYVGL

SEQ ID NO: 76193 - protein, 10 aa, synthetic construct
NENRGDLIGR

SEQ ID NO: 76194 - protein, 10 aa, synthetic construct
NENRGDQSTL

SEQ ID NO: 76195 - protein, 10 aa, synthetic construct
AQARGDRQGI

SEQ ID NO: 76196 - protein, 10 aa, synthetic construct
NENRGDLLLS

SEQ ID NO: 76197 - protein, 10 aa, synthetic construct
NEQRGDHGVL

SEQ ID NO: 76198 - protein, 10 aa, synthetic construct
NEQRGDHVNL

SEQ ID NO: 76199 - protein, 10 aa, synthetic construct
NEQRGDRDYL

SEQ ID NO: 76200 - protein, 10 aa, synthetic construct
NEQRGDYSSV

SEQ ID NO: 76201 - protein, 10 aa, synthetic construct
NEQRGDLTVT

SEQ ID NO: 76202 - protein, 10 aa, synthetic construct
NEDRGDHGVL

SEQ ID NO: 76203 - protein, 10 aa, synthetic construct
NEDRGDHVNL

SEQ ID NO: 76204 - protein, 10 aa, synthetic construct
NEDRGDRDYL

SEQ ID NO: 76205 - protein, 10 aa, synthetic construct
NEDRGDYSSV

SEQ ID NO: 76206 - protein, 10 aa, synthetic construct
AQARGDRSVV

SEQ ID NO: 76207 - protein, 10 aa, synthetic construct
NEDRGDLTVT

SEQ ID NO: 76208 - protein, 10 aa, synthetic construct
NEERGDHGVL

SEQ ID NO: 76209 - protein, 10 aa, synthetic construct
NEERGDHVNL

SEQ ID NO: 76210 - protein, 10 aa, synthetic construct
NEERGDRDYL

SEQ ID NO: 76211 - protein, 10 aa, synthetic construct
NEERGDYSSV

SEQ ID NO: 76212 - protein, 10 aa, synthetic construct
NEERGDLTVT

SEQ ID NO: 76213 - protein, 10 aa, synthetic construct
DGGRGDYNSL

SEQ ID NO: 76214 - protein, 10 aa, synthetic construct
DGGRGDFNNT

SEQ ID NO: 76215 - protein, 10 aa, synthetic construct
DGGRGDFNNL

SEQ ID NO: 76216 - protein, 10 aa, synthetic construct
DGGRGDFQNT

SEQ ID NO: 76217 - protein, 10 aa, synthetic construct
AQARGDLTVT

SEQ ID NO: 76218 - protein, 10 aa, synthetic construct
DGARGDYNSL

SEQ ID NO: 76219 - protein, 10 aa, synthetic construct
DGARGDFNNT

SEQ ID NO: 76220 - protein, 10 aa, synthetic construct
DGARGDFNNL

SEQ ID NO: 76221 - protein, 10 aa, synthetic construct
DGARGDFQNT

SEQ ID NO: 76222 - protein, 10 aa, synthetic construct
DGVRGDYNSL

SEQ ID NO: 76223 - protein, 10 aa, synthetic construct
DGVRGDYTSV

SEQ ID NO: 76224 - protein, 10 aa, synthetic construct
DGVRGDYTSM

SEQ ID NO: 76225 - protein, 10 aa, synthetic construct
DGVRGDFQNT

SEQ ID NO: 76226 - protein, 10 aa, synthetic construct
DGPRGDYNSL

SEQ ID NO: 76227 - protein, 10 aa, synthetic construct
DGPRGDFNNT

SEQ ID NO: 76228 - protein, 10 aa, synthetic construct
AQARGDLIGR

SEQ ID NO: 76229 - protein, 10 aa, synthetic construct
DGPRGDFNNL

SEQ ID NO: 76230 - protein, 10 aa, synthetic construct
DGPRGDFQNT

SEQ ID NO: 76231 - protein, 10 aa, synthetic construct
DGLRGDYNSL

SEQ ID NO: 76232 - protein, 10 aa, synthetic construct
DGLRGDYTSV

SEQ ID NO: 76233 - protein, 10 aa, synthetic construct
DGLRGDYTSM

SEQ ID NO: 76234 - protein, 10 aa, synthetic construct
DGLRGDFQNT

SEQ ID NO: 76235 - protein, 10 aa, synthetic construct
DGIRGDRDYL

SEQ ID NO: 76236 - protein, 10 aa, synthetic construct
DGIRGDYTSV

SEQ ID NO: 76237 - protein, 10 aa, synthetic construct
DGIRGDLTVT

SEQ ID NO: 76238 - protein, 10 aa, synthetic construct
DGIRGDLIGR

SEQ ID NO: 76239 - protein, 10 aa, synthetic construct
AQARGDRSQT

SEQ ID NO: 76240 - protein, 10 aa, synthetic construct
DGMRGDRDYL

SEQ ID NO: 76241 - protein, 10 aa, synthetic construct
DGMRGDYTSV

SEQ ID NO: 76242 - protein, 10 aa, synthetic construct
DGMRGDLTVT

SEQ ID NO: 76243 - protein, 10 aa, synthetic construct
DGMRGDLIGR

SEQ ID NO: 76244 - protein, 10 aa, synthetic construct
DGWRGDYNSL

SEQ ID NO: 76245 - protein, 10 aa, synthetic construct
DGWRGDYTSV

SEQ ID NO: 76246 - protein, 10 aa, synthetic construct
DGWRGDYTSM

SEQ ID NO: 76247 - protein, 10 aa, synthetic construct
DGWRGDFQNT

SEQ ID NO: 76248 - protein, 10 aa, synthetic construct
DGFRGDRDYL

SEQ ID NO: 76249 - protein, 10 aa, synthetic construct
DGFRGDYTSV

SEQ ID NO: 76250 - protein, 10 aa, synthetic construct
AQARGDLLLS

SEQ ID NO: 76251 - protein, 10 aa, synthetic construct
DGFRGDLTVT

SEQ ID NO: 76252 - protein, 10 aa, synthetic construct
DGFRGDLIGR

SEQ ID NO: 76253 - protein, 10 aa, synthetic construct
DGKRGDRDYL

SEQ ID NO: 76254 - protein, 10 aa, synthetic construct
DGKRGDYTSV

SEQ ID NO: 76255 - protein, 10 aa, synthetic construct
DGKRGDLTVT

SEQ ID NO: 76256 - protein, 10 aa, synthetic construct
DGKRGDLIGR

SEQ ID NO: 76257 - protein, 10 aa, synthetic construct
DGRRGDYNSL

SEQ ID NO: 76258 - protein, 10 aa, synthetic construct
DGRRGDFNNT

SEQ ID NO: 76259 - protein, 10 aa, synthetic construct
DGRRGDFNNL

SEQ ID NO: 76260 - protein, 10 aa, synthetic construct
DGRRGDFQNT

SEQ ID NO: 76261 - protein, 10 aa, synthetic construct
AQVRGDHGVL

SEQ ID NO: 76262 - protein, 10 aa, synthetic construct
DGHRGDYNSL

SEQ ID NO: 76263 - protein, 10 aa, synthetic construct
DGHRGDYTSV

SEQ ID NO: 76264 - protein, 10 aa, synthetic construct
DGHRGDYTSM

SEQ ID NO: 76265 - protein, 10 aa, synthetic construct
DGHRGDFQNT

SEQ ID NO: 76266 - protein, 10 aa, synthetic construct
DGSRGDYNSL

SEQ ID NO: 76267 - protein, 10 aa, synthetic construct
DGSRGDYTSV

SEQ ID NO: 76268 - protein, 10 aa, synthetic construct
DGSRGDYTSM

SEQ ID NO: 76269 - protein, 10 aa, synthetic construct
DGSRGDFQNT

SEQ ID NO: 76270 - protein, 10 aa, synthetic construct
DGTRGDYNSL

SEQ ID NO: 76271 - protein, 10 aa, synthetic construct
DGTRGDYTSV

SEQ ID NO: 76272 - protein, 10 aa, synthetic construct
AQVRGDRGQI

SEQ ID NO: 76273 - protein, 10 aa, synthetic construct
DGTRGDYTSM

SEQ ID NO: 76274 - protein, 10 aa, synthetic construct
DGTRGDFQNT

SEQ ID NO: 76275 - protein, 10 aa, synthetic construct
DGYRGDRDYL

SEQ ID NO: 76276 - protein, 10 aa, synthetic construct
DGYRGDYTSV

SEQ ID NO: 76277 - protein, 10 aa, synthetic construct
DGYRGDLTVT

SEQ ID NO: 76278 - protein, 10 aa, synthetic construct
DGYRGDLIGR

SEQ ID NO: 76279 - protein, 10 aa, synthetic construct
DGNRGDRDYL

SEQ ID NO: 76280 - protein, 10 aa, synthetic construct
DGNRGDYTSV

SEQ ID NO: 76281 - protein, 10 aa, synthetic construct
DGNRGDLTVT

SEQ ID NO: 76282 - protein, 10 aa, synthetic construct
DGNRGDLIGR

SEQ ID NO: 76283 - protein, 10 aa, synthetic construct
AQVRGDRQGI

SEQ ID NO: 76284 - protein, 10 aa, synthetic construct
DGQRGDYNSL

SEQ ID NO: 76285 - protein, 10 aa, synthetic construct
DGQRGDYTSV

SEQ ID NO: 76286 - protein, 10 aa, synthetic construct
DGQRGDYTSM

SEQ ID NO: 76287 - protein, 10 aa, synthetic construct
DGQRGDFQNT

SEQ ID NO: 76288 - protein, 10 aa, synthetic construct
DGDRGDYNSL

SEQ ID NO: 76289 - protein, 10 aa, synthetic construct
DGDRGDYTSV

SEQ ID NO: 76290 - protein, 10 aa, synthetic construct
DGDRGDYTSM

SEQ ID NO: 76291 - protein, 10 aa, synthetic construct
DGDRGDFQNT

SEQ ID NO: 76292 - protein, 10 aa, synthetic construct
DGERGDYNSL

SEQ ID NO: 76293 - protein, 10 aa, synthetic construct
DGERGDYTSV

SEQ ID NO: 76294 - protein, 10 aa, synthetic construct
ESPRGDYTSV

SEQ ID NO: 76295 - protein, 10 aa, synthetic construct
AQVRGDRSVV

SEQ ID NO: 76296 - protein, 10 aa, synthetic construct
DGERGDYTSM

SEQ ID NO: 76297 - protein, 10 aa, synthetic construct
DGERGDFQNT

SEQ ID NO: 76298 - protein, 10 aa, synthetic construct
DAGRGDYNSL

SEQ ID NO: 76299 - protein, 10 aa, synthetic construct
DAGRGDFNNT

SEQ ID NO: 76300 - protein, 10 aa, synthetic construct
DAGRGDFNNL

SEQ ID NO: 76301 - protein, 10 aa, synthetic construct
DAGRGDFQNT

SEQ ID NO: 76302 - protein, 10 aa, synthetic construct
DAARGDYNSL

SEQ ID NO: 76303 - protein, 10 aa, synthetic construct
DAARGDFNNT

SEQ ID NO: 76304 - protein, 10 aa, synthetic construct
DAARGDFNNL

SEQ ID NO: 76305 - protein, 10 aa, synthetic construct
DAARGDFQNT

SEQ ID NO: 76306 - protein, 10 aa, synthetic construct
AQVRGDLTVT

SEQ ID NO: 76307 - protein, 10 aa, synthetic construct
DAVRGDYNSL

SEQ ID NO: 76308 - protein, 10 aa, synthetic construct
DAVRGDYTSV

SEQ ID NO: 76309 - protein, 10 aa, synthetic construct
DAVRGDYTSM

SEQ ID NO: 76310 - protein, 10 aa, synthetic construct
DAVRGDFQNT

SEQ ID NO: 76311 - protein, 10 aa, synthetic construct
DAPRGDYNSL

SEQ ID NO: 76312 - protein, 10 aa, synthetic construct
DAPRGDFNNT

SEQ ID NO: 76313 - protein, 10 aa, synthetic construct
DAPRGDFNNL

SEQ ID NO: 76314 - protein, 10 aa, synthetic construct
DAPRGDFQNT

SEQ ID NO: 76315 - protein, 10 aa, synthetic construct
DALRGDYNSL

SEQ ID NO: 76316 - protein, 10 aa, synthetic construct
DALRGDYTSV

SEQ ID NO: 76317 - protein, 10 aa, synthetic construct
AQVRGDLIGR

SEQ ID NO: 76318 - protein, 10 aa, synthetic construct
DALRGDYTSM

SEQ ID NO: 76319 - protein, 10 aa, synthetic construct
DALRGDFQNT

SEQ ID NO: 76320 - protein, 10 aa, synthetic construct
DAIRGDRDYL

SEQ ID NO: 76321 - protein, 10 aa, synthetic construct
DAIRGDYTSV

SEQ ID NO: 76322 - protein, 10 aa, synthetic construct
DAIRGDLTVT

SEQ ID NO: 76323 - protein, 10 aa, synthetic construct
DAIRGDLIGR

SEQ ID NO: 76324 - protein, 10 aa, synthetic construct
DAMRGDRDYL

SEQ ID NO: 76325 - protein, 10 aa, synthetic construct
DAMRGDYTSV

SEQ ID NO: 76326 - protein, 10 aa, synthetic construct
DAMRGDLTVT

SEQ ID NO: 76327 - protein, 10 aa, synthetic construct
DAMRGDLIGR

SEQ ID NO: 76328 - protein, 10 aa, synthetic construct
AQVRGDRSQT

SEQ ID NO: 76329 - protein, 10 aa, synthetic construct
DAWRGDYNSL

SEQ ID NO: 76330 - protein, 10 aa, synthetic construct
DAWRGDYTSV

SEQ ID NO: 76331 - protein, 10 aa, synthetic construct
DAWRGDYTSM

SEQ ID NO: 76332 - protein, 10 aa, synthetic construct
DAWRGDFQNT

SEQ ID NO: 76333 - protein, 10 aa, synthetic construct
DAFRGDRDYL

SEQ ID NO: 76334 - protein, 10 aa, synthetic construct
DAFRGDYTSV

SEQ ID NO: 76335 - protein, 10 aa, synthetic construct
DAFRGDLTVT

SEQ ID NO: 76336 - protein, 10 aa, synthetic construct
DAFRGDLIGR

SEQ ID NO: 76337 - protein, 10 aa, synthetic construct
DAKRGDRDYL

SEQ ID NO: 76338 - protein, 10 aa, synthetic construct
DAKRGDYTSV

SEQ ID NO: 76339 - protein, 10 aa, synthetic construct
AQVRGDLLLS

SEQ ID NO: 76340 - protein, 10 aa, synthetic construct
DAKRGDLTVT

SEQ ID NO: 76341 - protein, 10 aa, synthetic construct
DAKRGDLIGR

SEQ ID NO: 76342 - protein, 10 aa, synthetic construct
DARRGDYNSL

SEQ ID NO: 76343 - protein, 10 aa, synthetic construct
DARRGDFNNT

SEQ ID NO: 76344 - protein, 10 aa, synthetic construct
DARRGDFNNL

SEQ ID NO: 76345 - protein, 10 aa, synthetic construct
DARRGDFQNT

SEQ ID NO: 76346 - protein, 10 aa, synthetic construct
DAHRGDYNSL

SEQ ID NO: 76347 - protein, 10 aa, synthetic construct
DAHRGDYTSV

SEQ ID NO: 76348 - protein, 10 aa, synthetic construct
DAHRGDYTSM

SEQ ID NO: 76349 - protein, 10 aa, synthetic construct
DAHRGDFQNT

SEQ ID NO: 76350 - protein, 10 aa, synthetic construct
AQPRGDHGVL

SEQ ID NO: 76351 - protein, 10 aa, synthetic construct
DASRGDYNSL

SEQ ID NO: 76352 - protein, 10 aa, synthetic construct
DASRGDYTSV

SEQ ID NO: 76353 - protein, 10 aa, synthetic construct
DASRGDYTSM

SEQ ID NO: 76354 - protein, 10 aa, synthetic construct
DASRGDFQNT

SEQ ID NO: 76355 - protein, 10 aa, synthetic construct
DATRGDYNSL

SEQ ID NO: 76356 - protein, 10 aa, synthetic construct
DATRGDYTSV

SEQ ID NO: 76357 - protein, 10 aa, synthetic construct
DATRGDYTSM

SEQ ID NO: 76358 - protein, 10 aa, synthetic construct
DATRGDFQNT

SEQ ID NO: 76359 - protein, 10 aa, synthetic construct
DAYRGDRDYL

SEQ ID NO: 76360 - protein, 10 aa, synthetic construct
DAYRGDYTSV

SEQ ID NO: 76361 - protein, 10 aa, synthetic construct
AQPRGDRGQI

SEQ ID NO: 76362 - protein, 10 aa, synthetic construct
DAYRGDLTVT

SEQ ID NO: 76363 - protein, 10 aa, synthetic construct
DAYRGDLIGR

SEQ ID NO: 76364 - protein, 10 aa, synthetic construct
DANRGDRDYL

SEQ ID NO: 76365 - protein, 10 aa, synthetic construct
DANRGDYTSV

SEQ ID NO: 76366 - protein, 10 aa, synthetic construct
DANRGDLTVT

SEQ ID NO: 76367 - protein, 10 aa, synthetic construct
DANRGDLIGR

SEQ ID NO: 76368 - protein, 10 aa, synthetic construct
DAQRGDYNSL

SEQ ID NO: 76369 - protein, 10 aa, synthetic construct
DAQRGDYTSV

SEQ ID NO: 76370 - protein, 10 aa, synthetic construct
DAQRGDYTSM

SEQ ID NO: 76371 - protein, 10 aa, synthetic construct
DAQRGDFQNT

SEQ ID NO: 76372 - protein, 10 aa, synthetic construct
AQPRGDRQGI

SEQ ID NO: 76373 - protein, 10 aa, synthetic construct
DADRGDYNSL

SEQ ID NO: 76374 - protein, 10 aa, synthetic construct
DADRGDYTSV

SEQ ID NO: 76375 - protein, 10 aa, synthetic construct
DADRGDYTSM

SEQ ID NO: 76376 - protein, 10 aa, synthetic construct
DADRGDFQNT

SEQ ID NO: 76377 - protein, 10 aa, synthetic construct
DAERGDYNSL

SEQ ID NO: 76378 - protein, 10 aa, synthetic construct
DAERGDYTSV

SEQ ID NO: 76379 - protein, 10 aa, synthetic construct
DAERGDYTSM

SEQ ID NO: 76380 - protein, 10 aa, synthetic construct
DAERGDFQNT

SEQ ID NO: 76381 - protein, 10 aa, synthetic construct
DVGRGDFNNT

SEQ ID NO: 76382 - protein, 10 aa, synthetic construct
DVGRGDFNNL

SEQ ID NO: 76383 - protein, 10 aa, synthetic construct
AQPRGDRSVV

SEQ ID NO: 76384 - protein, 10 aa, synthetic construct
DVARGDFNNT

SEQ ID NO: 76385 - protein, 10 aa, synthetic construct
DVARGDFNNL

SEQ ID NO: 76386 - protein, 10 aa, synthetic construct
DVVRGDYNSL

SEQ ID NO: 76387 - protein, 10 aa, synthetic construct
DVVRGDYTSM

SEQ ID NO: 76388 - protein, 10 aa, synthetic construct
DVVRGDFQNT

SEQ ID NO: 76389 - protein, 10 aa, synthetic construct
DVPRGDFNNT

SEQ ID NO: 76390 - protein, 10 aa, synthetic construct
DVPRGDFNNL

SEQ ID NO: 76391 - protein, 10 aa, synthetic construct
DVLRGDYNSL

SEQ ID NO: 76392 - protein, 10 aa, synthetic construct
DVLRGDYTSM

SEQ ID NO: 76393 - protein, 10 aa, synthetic construct
DVLRGDFQNT

SEQ ID NO: 76394 - protein, 10 aa, synthetic construct
AQPRGDLTVT

SEQ ID NO: 76395 - protein, 10 aa, synthetic construct
DVIRGDYTSV

SEQ ID NO: 76396 - protein, 10 aa, synthetic construct
DVIRGDLIGR

SEQ ID NO: 76397 - protein, 10 aa, synthetic construct
DVMRGDYTSV

SEQ ID NO: 76398 - protein, 10 aa, synthetic construct
DVMRGDLIGR

SEQ ID NO: 76399 - protein, 10 aa, synthetic construct
DVWRGDYNSL

SEQ ID NO: 76400 - protein, 10 aa, synthetic construct
DVWRGDYTSM

SEQ ID NO: 76401 - protein, 10 aa, synthetic construct
DVWRGDFQNT

SEQ ID NO: 76402 - protein, 10 aa, synthetic construct
DVFRGDYTSV

SEQ ID NO: 76403 - protein, 10 aa, synthetic construct
DVFRGDLIGR

SEQ ID NO: 76404 - protein, 10 aa, synthetic construct
DVKRGDYTSV

SEQ ID NO: 76405 - protein, 10 aa, synthetic construct
ESPRGDYTSM

SEQ ID NO: 76406 - protein, 10 aa, synthetic construct
AQPRGDLIGR

SEQ ID NO: 76407 - protein, 10 aa, synthetic construct
DVKRGDLIGR

SEQ ID NO: 76408 - protein, 10 aa, synthetic construct
DVRRGDFNNT

SEQ ID NO: 76409 - protein, 10 aa, synthetic construct
DVRRGDFNNL

SEQ ID NO: 76410 - protein, 10 aa, synthetic construct
DVHRGDYNSL

SEQ ID NO: 76411 - protein, 10 aa, synthetic construct
DVHRGDYTSM

SEQ ID NO: 76412 - protein, 10 aa, synthetic construct
DVHRGDFQNT

SEQ ID NO: 76413 - protein, 10 aa, synthetic construct
DVSRGDYNSL

SEQ ID NO: 76414 - protein, 10 aa, synthetic construct
DVSRGDYTSM

SEQ ID NO: 76415 - protein, 10 aa, synthetic construct
DVSRGDFQNT

SEQ ID NO: 76416 - protein, 10 aa, synthetic construct
DVTRGDYNSL

SEQ ID NO: 76417 - protein, 10 aa, synthetic construct
AQPRGDRSQT

SEQ ID NO: 76418 - protein, 10 aa, synthetic construct
DVTRGDYTSM

SEQ ID NO: 76419 - protein, 10 aa, synthetic construct
DVTRGDFQNT

SEQ ID NO: 76420 - protein, 10 aa, synthetic construct
DVYRGDYTSV

SEQ ID NO: 76421 - protein, 10 aa, synthetic construct
DVYRGDLIGR

SEQ ID NO: 76422 - protein, 10 aa, synthetic construct
DVNRGDYTSV

SEQ ID NO: 76423 - protein, 10 aa, synthetic construct
DVNRGDLIGR

SEQ ID NO: 76424 - protein, 10 aa, synthetic construct
DVQRGDYNSL

SEQ ID NO: 76425 - protein, 10 aa, synthetic construct
DVQRGDYTSM

SEQ ID NO: 76426 - protein, 10 aa, synthetic construct
DVQRGDFQNT

SEQ ID NO: 76427 - protein, 10 aa, synthetic construct
DVDRGDYNSL

SEQ ID NO: 76428 - protein, 10 aa, synthetic construct
AQPRGDLLLS

SEQ ID NO: 76429 - protein, 10 aa, synthetic construct
DVDRGDYTSM

SEQ ID NO: 76430 - protein, 10 aa, synthetic construct
DVDRGDFQNT

SEQ ID NO: 76431 - protein, 10 aa, synthetic construct
DVERGDYNSL

SEQ ID NO: 76432 - protein, 10 aa, synthetic construct
DVERGDYTSM

SEQ ID NO: 76433 - protein, 10 aa, synthetic construct
DVERGDFQNT

SEQ ID NO: 76434 - protein, 10 aa, synthetic construct
DPGRGDYNSL

SEQ ID NO: 76435 - protein, 10 aa, synthetic construct
DPGRGDFNNT

SEQ ID NO: 76436 - protein, 10 aa, synthetic construct
DPGRGDFNNL

SEQ ID NO: 76437 - protein, 10 aa, synthetic construct
DPGRGDFQNT

SEQ ID NO: 76438 - protein, 10 aa, synthetic construct
DPARGDYNSL

SEQ ID NO: 76439 - protein, 10 aa, synthetic construct
AQLRGDHGVL

SEQ ID NO: 76440 - protein, 10 aa, synthetic construct
DPARGDFNNT

SEQ ID NO: 76441 - protein, 10 aa, synthetic construct
DPARGDFNNL

SEQ ID NO: 76442 - protein, 10 aa, synthetic construct
DPARGDFQNT

SEQ ID NO: 76443 - protein, 10 aa, synthetic construct
DPVRGDYNSL

SEQ ID NO: 76444 - protein, 10 aa, synthetic construct
DPVRGDYTSV

SEQ ID NO: 76445 - protein, 10 aa, synthetic construct
DPVRGDYTSM

SEQ ID NO: 76446 - protein, 10 aa, synthetic construct
DPVRGDFQNT

SEQ ID NO: 76447 - protein, 10 aa, synthetic construct
DPPRGDYNSL

SEQ ID NO: 76448 - protein, 10 aa, synthetic construct
DPPRGDFNNT

SEQ ID NO: 76449 - protein, 10 aa, synthetic construct
DPPRGDFNNL

SEQ ID NO: 76450 - protein, 10 aa, synthetic construct
AQLRGDRGQI

SEQ ID NO: 76451 - protein, 10 aa, synthetic construct
DPPRGDFQNT

SEQ ID NO: 76452 - protein, 10 aa, synthetic construct
DPLRGDYNSL

SEQ ID NO: 76453 - protein, 10 aa, synthetic construct
DPLRGDYTSV

SEQ ID NO: 76454 - protein, 10 aa, synthetic construct
DPLRGDYTSM

SEQ ID NO: 76455 - protein, 10 aa, synthetic construct
DPLRGDFQNT

SEQ ID NO: 76456 - protein, 10 aa, synthetic construct
DPIRGDRDYL

SEQ ID NO: 76457 - protein, 10 aa, synthetic construct
DPIRGDYTSV

SEQ ID NO: 76458 - protein, 10 aa, synthetic construct
DPIRGDLTVT

SEQ ID NO: 76459 - protein, 10 aa, synthetic construct
DPIRGDLIGR

SEQ ID NO: 76460 - protein, 10 aa, synthetic construct
DPMRGDRDYL

SEQ ID NO: 76461 - protein, 10 aa, synthetic construct
AQLRGDRQGI

SEQ ID NO: 76462 - protein, 10 aa, synthetic construct
DPMRGDYTSV

SEQ ID NO: 76463 - protein, 10 aa, synthetic construct
DPMRGDLTVT

SEQ ID NO: 76464 - protein, 10 aa, synthetic construct
DPMRGDLIGR

SEQ ID NO: 76465 - protein, 10 aa, synthetic construct
DPWRGDYNSL

SEQ ID NO: 76466 - protein, 10 aa, synthetic construct
DPWRGDYTSV

SEQ ID NO: 76467 - protein, 10 aa, synthetic construct
DPWRGDYTSM

SEQ ID NO: 76468 - protein, 10 aa, synthetic construct
DPWRGDFQNT

SEQ ID NO: 76469 - protein, 10 aa, synthetic construct
DPFRGDRDYL

SEQ ID NO: 76470 - protein, 10 aa, synthetic construct
DPFRGDYTSV

SEQ ID NO: 76471 - protein, 10 aa, synthetic construct
DPFRGDLTVT

SEQ ID NO: 76472 - protein, 10 aa, synthetic construct
AQLRGDRSVV

SEQ ID NO: 76473 - protein, 10 aa, synthetic construct
DPFRGDLIGR

SEQ ID NO: 76474 - protein, 10 aa, synthetic construct
DPKRGDRDYL

SEQ ID NO: 76475 - protein, 10 aa, synthetic construct
DPKRGDYTSV

SEQ ID NO: 76476 - protein, 10 aa, synthetic construct
DPKRGDLTVT

SEQ ID NO: 76477 - protein, 10 aa, synthetic construct
DPKRGDLIGR

SEQ ID NO: 76478 - protein, 10 aa, synthetic construct
DPRRGDYNSL

SEQ ID NO: 76479 - protein, 10 aa, synthetic construct
DPRRGDFNNT

SEQ ID NO: 76480 - protein, 10 aa, synthetic construct
DPRRGDFNNL

SEQ ID NO: 76481 - protein, 10 aa, synthetic construct
DPRRGDFQNT

SEQ ID NO: 76482 - protein, 10 aa, synthetic construct
DPHRGDYNSL

SEQ ID NO: 76483 - protein, 10 aa, synthetic construct
AQLRGDLTVT

SEQ ID NO: 76484 - protein, 10 aa, synthetic construct
DPHRGDYTSV

SEQ ID NO: 76485 - protein, 10 aa, synthetic construct
DPHRGDYTSM

SEQ ID NO: 76486 - protein, 10 aa, synthetic construct
DPHRGDFQNT

SEQ ID NO: 76487 - protein, 10 aa, synthetic construct
DPSRGDYNSL

SEQ ID NO: 76488 - protein, 10 aa, synthetic construct
DPSRGDYTSV

SEQ ID NO: 76489 - protein, 10 aa, synthetic construct
DPSRGDYTSM

SEQ ID NO: 76490 - protein, 10 aa, synthetic construct
DPSRGDFQNT

SEQ ID NO: 76491 - protein, 10 aa, synthetic construct
DPTRGDYNSL

SEQ ID NO: 76492 - protein, 10 aa, synthetic construct
DPTRGDYTSV

SEQ ID NO: 76493 - protein, 10 aa, synthetic construct
DPTRGDYTSM

SEQ ID NO: 76494 - protein, 10 aa, synthetic construct
AQLRGDLIGR

SEQ ID NO: 76495 - protein, 10 aa, synthetic construct
DPTRGDFQNT

SEQ ID NO: 76496 - protein, 10 aa, synthetic construct
DPYRGDRDYL

SEQ ID NO: 76497 - protein, 10 aa, synthetic construct
DPYRGDYTSV

SEQ ID NO: 76498 - protein, 10 aa, synthetic construct
DPYRGDLTVT

SEQ ID NO: 76499 - protein, 10 aa, synthetic construct
DPYRGDLIGR

SEQ ID NO: 76500 - protein, 10 aa, synthetic construct
DPNRGDRDYL

SEQ ID NO: 76501 - protein, 10 aa, synthetic construct
DPNRGDYTSV

SEQ ID NO: 76502 - protein, 10 aa, synthetic construct
DPNRGDLTVT

SEQ ID NO: 76503 - protein, 10 aa, synthetic construct
DPNRGDLIGR

SEQ ID NO: 76504 - protein, 10 aa, synthetic construct
DPQRGDYNSL

SEQ ID NO: 76505 - protein, 10 aa, synthetic construct
AQLRGDRSQT

SEQ ID NO: 76506 - protein, 10 aa, synthetic construct
DPQRGDYTSV

SEQ ID NO: 76507 - protein, 10 aa, synthetic construct
DPQRGDYTSM

SEQ ID NO: 76508 - protein, 10 aa, synthetic construct
DPQRGDFQNT

SEQ ID NO: 76509 - protein, 10 aa, synthetic construct
DPDRGDYNSL

SEQ ID NO: 76510 - protein, 10 aa, synthetic construct
DPDRGDYTSV

SEQ ID NO: 76511 - protein, 10 aa, synthetic construct
DPDRGDYTSM

SEQ ID NO: 76512 - protein, 10 aa, synthetic construct
DPDRGDFQNT

SEQ ID NO: 76513 - protein, 10 aa, synthetic construct
DPERGDYNSL

SEQ ID NO: 76514 - protein, 10 aa, synthetic construct
DPERGDYTSV

SEQ ID NO: 76515 - protein, 10 aa, synthetic construct
DPERGDYTSM

SEQ ID NO: 76516 - protein, 10 aa, synthetic construct
ESPRGDFQNT

SEQ ID NO: 76517 - protein, 10 aa, synthetic construct
AQLRGDLLLS

SEQ ID NO: 76518 - protein, 10 aa, synthetic construct
DPERGDFQNT

SEQ ID NO: 76519 - protein, 10 aa, synthetic construct
DLGRGDFNNT

SEQ ID NO: 76520 - protein, 10 aa, synthetic construct
DLGRGDFNNL

SEQ ID NO: 76521 - protein, 10 aa, synthetic construct
DLARGDFNNT

SEQ ID NO: 76522 - protein, 10 aa, synthetic construct
DLARGDFNNL

SEQ ID NO: 76523 - protein, 10 aa, synthetic construct
DLVRGDYNSL

SEQ ID NO: 76524 - protein, 10 aa, synthetic construct
DLVRGDYTSM

SEQ ID NO: 76525 - protein, 10 aa, synthetic construct
DLVRGDFQNT

SEQ ID NO: 76526 - protein, 10 aa, synthetic construct
DLPRGDFNNT

SEQ ID NO: 76527 - protein, 10 aa, synthetic construct
DLPRGDFNNL

SEQ ID NO: 76528 - protein, 10 aa, synthetic construct
AQWRGDRGQI

SEQ ID NO: 76529 - protein, 10 aa, synthetic construct
DLLRGDYNSL

SEQ ID NO: 76530 - protein, 10 aa, synthetic construct
DLLRGDYTSM

SEQ ID NO: 76531 - protein, 10 aa, synthetic construct
DLLRGDFQNT

SEQ ID NO: 76532 - protein, 10 aa, synthetic construct
DLIRGDYTSV

SEQ ID NO: 76533 - protein, 10 aa, synthetic construct
DLIRGDLIGR

SEQ ID NO: 76534 - protein, 10 aa, synthetic construct
DLMRGDYTSV

SEQ ID NO: 76535 - protein, 10 aa, synthetic construct
DLMRGDLIGR

SEQ ID NO: 76536 - protein, 10 aa, synthetic construct
DLWRGDYNSL

SEQ ID NO: 76537 - protein, 10 aa, synthetic construct
DLWRGDYTSM

SEQ ID NO: 76538 - protein, 10 aa, synthetic construct
DLWRGDFQNT

SEQ ID NO: 76539 - protein, 10 aa, synthetic construct
AQWRGDRQGI

SEQ ID NO: 76540 - protein, 10 aa, synthetic construct
DLFRGDYTSV

SEQ ID NO: 76541 - protein, 10 aa, synthetic construct
DLFRGDLIGR

SEQ ID NO: 76542 - protein, 10 aa, synthetic construct
DLKRGDYTSV

SEQ ID NO: 76543 - protein, 10 aa, synthetic construct
DLKRGDLIGR

SEQ ID NO: 76544 - protein, 10 aa, synthetic construct
DLRRGDFNNT

SEQ ID NO: 76545 - protein, 10 aa, synthetic construct
DLRRGDFNNL

SEQ ID NO: 76546 - protein, 10 aa, synthetic construct
DLHRGDYNSL

SEQ ID NO: 76547 - protein, 10 aa, synthetic construct
DLHRGDYTSM

SEQ ID NO: 76548 - protein, 10 aa, synthetic construct
DLHRGDFQNT

SEQ ID NO: 76549 - protein, 10 aa, synthetic construct
DLSRGDYNSL

SEQ ID NO: 76550 - protein, 10 aa, synthetic construct
AQWRGDRSVV

SEQ ID NO: 76551 - protein, 10 aa, synthetic construct
DLSRGDYTSM

SEQ ID NO: 76552 - protein, 10 aa, synthetic construct
DLSRGDFQNT

SEQ ID NO: 76553 - protein, 10 aa, synthetic construct
DLTRGDYNSL

SEQ ID NO: 76554 - protein, 10 aa, synthetic construct
DLTRGDYTSM

SEQ ID NO: 76555 - protein, 10 aa, synthetic construct
DLTRGDFQNT

SEQ ID NO: 76556 - protein, 10 aa, synthetic construct
DLYRGDYTSV

SEQ ID NO: 76557 - protein, 10 aa, synthetic construct
DLYRGDLIGR

SEQ ID NO: 76558 - protein, 10 aa, synthetic construct
DLNRGDYTSV

SEQ ID NO: 76559 - protein, 10 aa, synthetic construct
DLNRGDLIGR

SEQ ID NO: 76560 - protein, 10 aa, synthetic construct
DLQRGDYNSL

SEQ ID NO: 76561 - protein, 10 aa, synthetic construct
AQWRGDRGVV

SEQ ID NO: 76562 - protein, 10 aa, synthetic construct
DLQRGDYTSM

SEQ ID NO: 76563 - protein, 10 aa, synthetic construct
DLQRGDFQNT

SEQ ID NO: 76564 - protein, 10 aa, synthetic construct
DLDRGDYNSL

SEQ ID NO: 76565 - protein, 10 aa, synthetic construct
DLDRGDYTSM

SEQ ID NO: 76566 - protein, 10 aa, synthetic construct
DLDRGDFQNT

SEQ ID NO: 76567 - protein, 10 aa, synthetic construct
DLERGDYNSL

SEQ ID NO: 76568 - protein, 10 aa, synthetic construct
DLERGDYTSM

SEQ ID NO: 76569 - protein, 10 aa, synthetic construct
DLERGDFQNT

SEQ ID NO: 76570 - protein, 10 aa, synthetic construct
DIGRGDRDYL

SEQ ID NO: 76571 - protein, 10 aa, synthetic construct
DIGRGDYTSV

SEQ ID NO: 76572 - protein, 10 aa, synthetic construct
AQWRGDRSQT

SEQ ID NO: 76573 - protein, 10 aa, synthetic construct
DIGRGDLTVT

SEQ ID NO: 76574 - protein, 10 aa, synthetic construct
DIGRGDLIGR

SEQ ID NO: 76575 - protein, 10 aa, synthetic construct
DIARGDRDYL

SEQ ID NO: 76576 - protein, 10 aa, synthetic construct
DIARGDYTSV

SEQ ID NO: 76577 - protein, 10 aa, synthetic construct
DIARGDLTVT

SEQ ID NO: 76578 - protein, 10 aa, synthetic construct
DIARGDLIGR

SEQ ID NO: 76579 - protein, 10 aa, synthetic construct
DIVRGDHGVL

SEQ ID NO: 76580 - protein, 10 aa, synthetic construct
DIVRGDHVNL

SEQ ID NO: 76581 - protein, 10 aa, synthetic construct
DIVRGDRDYL

SEQ ID NO: 76582 - protein, 10 aa, synthetic construct
DIVRGDYSSV

SEQ ID NO: 76583 - protein, 10 aa, synthetic construct
AQRRGDHGVL

SEQ ID NO: 76584 - protein, 10 aa, synthetic construct
DIVRGDLTVT

SEQ ID NO: 76585 - protein, 10 aa, synthetic construct
DIPRGDRDYL

SEQ ID NO: 76586 - protein, 10 aa, synthetic construct
DIPRGDYTSV

SEQ ID NO: 76587 - protein, 10 aa, synthetic construct
DIPRGDLTVT

SEQ ID NO: 76588 - protein, 10 aa, synthetic construct
DIPRGDLIGR

SEQ ID NO: 76589 - protein, 10 aa, synthetic construct
DILRGDHGVL

SEQ ID NO: 76590 - protein, 10 aa, synthetic construct
DILRGDHVNL

SEQ ID NO: 76591 - protein, 10 aa, synthetic construct
DILRGDRDYL

SEQ ID NO: 76592 - protein, 10 aa, synthetic construct
DILRGDYSSV

SEQ ID NO: 76593 - protein, 10 aa, synthetic construct
DILRGDLTVT

SEQ ID NO: 76594 - protein, 10 aa, synthetic construct
AQRRGDRGQI

SEQ ID NO: 76595 - protein, 10 aa, synthetic construct
DIIRGDHGVL

SEQ ID NO: 76596 - protein, 10 aa, synthetic construct
DIIRGDRGQI

SEQ ID NO: 76597 - protein, 10 aa, synthetic construct
DIIRGDRQGI

SEQ ID NO: 76598 - protein, 10 aa, synthetic construct
DIIRGDRGVV

SEQ ID NO: 76599 - protein, 10 aa, synthetic construct
DIIRGDYVGL

SEQ ID NO: 76600 - protein, 10 aa, synthetic construct
DIIRGDLIGR

SEQ ID NO: 76601 - protein, 10 aa, synthetic construct
DIIRGDQSTL

SEQ ID NO: 76602 - protein, 10 aa, synthetic construct
DIIRGDLLLS

SEQ ID NO: 76603 - protein, 10 aa, synthetic construct
DIMRGDHGVL

SEQ ID NO: 76604 - protein, 10 aa, synthetic construct
DIMRGDRGQI

SEQ ID NO: 76605 - protein, 10 aa, synthetic construct
AQRRGDRQGI

SEQ ID NO: 76606 - protein, 10 aa, synthetic construct
DIMRGDRQGI

SEQ ID NO: 76607 - protein, 10 aa, synthetic construct
DIMRGDRGVV

SEQ ID NO: 76608 - protein, 10 aa, synthetic construct
DIMRGDYVGL

SEQ ID NO: 76609 - protein, 10 aa, synthetic construct
DIMRGDLIGR

SEQ ID NO: 76610 - protein, 10 aa, synthetic construct
DIMRGDQSTL

SEQ ID NO: 76611 - protein, 10 aa, synthetic construct
DIMRGDLLLS

SEQ ID NO: 76612 - protein, 10 aa, synthetic construct
DIWRGDHGVL

SEQ ID NO: 76613 - protein, 10 aa, synthetic construct
DIWRGDHVNL

SEQ ID NO: 76614 - protein, 10 aa, synthetic construct
DIWRGDRDYL

SEQ ID NO: 76615 - protein, 10 aa, synthetic construct
DIWRGDYSSV

SEQ ID NO: 76616 - protein, 10 aa, synthetic construct
AQRRGDRSVV

SEQ ID NO: 76617 - protein, 10 aa, synthetic construct
DIWRGDLTVT

SEQ ID NO: 76618 - protein, 10 aa, synthetic construct
DIFRGDHGVL

SEQ ID NO: 76619 - protein, 10 aa, synthetic construct
DIFRGDRGQI

SEQ ID NO: 76620 - protein, 10 aa, synthetic construct
DIFRGDRQGI

SEQ ID NO: 76621 - protein, 10 aa, synthetic construct
DIFRGDRGVV

SEQ ID NO: 76622 - protein, 10 aa, synthetic construct
DIFRGDYVGL

SEQ ID NO: 76623 - protein, 10 aa, synthetic construct
DIFRGDLIGR

SEQ ID NO: 76624 - protein, 10 aa, synthetic construct
DIFRGDQSTL

SEQ ID NO: 76625 - protein, 10 aa, synthetic construct
DIFRGDLLLS

SEQ ID NO: 76626 - protein, 10 aa, synthetic construct
DIKRGDHGVL

SEQ ID NO: 76627 - protein, 10 aa, synthetic construct
NSPRGDRDYL

SEQ ID NO: 76628 - protein, 10 aa, synthetic construct
AQRRGDLTVT

SEQ ID NO: 76629 - protein, 10 aa, synthetic construct
DIKRGDRGQI

SEQ ID NO: 76630 - protein, 10 aa, synthetic construct
DIKRGDRQGI

SEQ ID NO: 76631 - protein, 10 aa, synthetic construct
DIKRGDRGVV

SEQ ID NO: 76632 - protein, 10 aa, synthetic construct
DIKRGDYVGL

SEQ ID NO: 76633 - protein, 10 aa, synthetic construct
DIKRGDLIGR

SEQ ID NO: 76634 - protein, 10 aa, synthetic construct
DIKRGDQSTL

SEQ ID NO: 76635 - protein, 10 aa, synthetic construct
DIKRGDLLLS

SEQ ID NO: 76636 - protein, 10 aa, synthetic construct
DIRRGDRDYL

SEQ ID NO: 76637 - protein, 10 aa, synthetic construct
DIRRGDYTSV

SEQ ID NO: 76638 - protein, 10 aa, synthetic construct
DIRRGDLTVT

SEQ ID NO: 76639 - protein, 10 aa, synthetic construct
AQRRGDLIGR

SEQ ID NO: 76640 - protein, 10 aa, synthetic construct
DIRRGDLIGR

SEQ ID NO: 76641 - protein, 10 aa, synthetic construct
DIHRGDHGVL

SEQ ID NO: 76642 - protein, 10 aa, synthetic construct
DIHRGDHVNL

SEQ ID NO: 76643 - protein, 10 aa, synthetic construct
DIHRGDRDYL

SEQ ID NO: 76644 - protein, 10 aa, synthetic construct
DIHRGDYSSV

SEQ ID NO: 76645 - protein, 10 aa, synthetic construct
DIHRGDLTVT

SEQ ID NO: 76646 - protein, 10 aa, synthetic construct
DISRGDHGVL

SEQ ID NO: 76647 - protein, 10 aa, synthetic construct
DISRGDHVNL

SEQ ID NO: 76648 - protein, 10 aa, synthetic construct
DISRGDRDYL

SEQ ID NO: 76649 - protein, 10 aa, synthetic construct
DISRGDYSSV

SEQ ID NO: 76650 - protein, 10 aa, synthetic construct
AQRRGDRSQT

SEQ ID NO: 76651 - protein, 10 aa, synthetic construct
DISRGDLTVT

SEQ ID NO: 76652 - protein, 10 aa, synthetic construct
DITRGDHGVL

SEQ ID NO: 76653 - protein, 10 aa, synthetic construct
DITRGDHVNL

SEQ ID NO: 76654 - protein, 10 aa, synthetic construct
DITRGDRDYL

SEQ ID NO: 76655 - protein, 10 aa, synthetic construct
DITRGDYSSV

SEQ ID NO: 76656 - protein, 10 aa, synthetic construct
DITRGDLTVT

SEQ ID NO: 76657 - protein, 10 aa, synthetic construct
DIYRGDHGVL

SEQ ID NO: 76658 - protein, 10 aa, synthetic construct
DIYRGDRGQI

SEQ ID NO: 76659 - protein, 10 aa, synthetic construct
DIYRGDRQGI

SEQ ID NO: 76660 - protein, 10 aa, synthetic construct
DIYRGDRGVV

SEQ ID NO: 76661 - protein, 10 aa, synthetic construct
AQRRGDLLLS

SEQ ID NO: 76662 - protein, 10 aa, synthetic construct
DIYRGDYVGL

SEQ ID NO: 76663 - protein, 10 aa, synthetic construct
DIYRGDLIGR

SEQ ID NO: 76664 - protein, 10 aa, synthetic construct
DIYRGDQSTL

SEQ ID NO: 76665 - protein, 10 aa, synthetic construct
DIYRGDLLLS

SEQ ID NO: 76666 - protein, 10 aa, synthetic construct
DINRGDHGVL

SEQ ID NO: 76667 - protein, 10 aa, synthetic construct
DINRGDRGQI

SEQ ID NO: 76668 - protein, 10 aa, synthetic construct
DINRGDRQGI

SEQ ID NO: 76669 - protein, 10 aa, synthetic construct
DINRGDRGVV

SEQ ID NO: 76670 - protein, 10 aa, synthetic construct
DINRGDYVGL

SEQ ID NO: 76671 - protein, 10 aa, synthetic construct
DINRGDLIGR

SEQ ID NO: 76672 - protein, 10 aa, synthetic construct
AQHRGDRGVV

SEQ ID NO: 76673 - protein, 10 aa, synthetic construct
DINRGDQSTL

SEQ ID NO: 76674 - protein, 10 aa, synthetic construct
DINRGDLLLS

SEQ ID NO: 76675 - protein, 10 aa, synthetic construct
DIQRGDHGVL

SEQ ID NO: 76676 - protein, 10 aa, synthetic construct
DIQRGDHVNL

SEQ ID NO: 76677 - protein, 10 aa, synthetic construct
DIQRGDRDYL

SEQ ID NO: 76678 - protein, 10 aa, synthetic construct
DIQRGDYSSV

SEQ ID NO: 76679 - protein, 10 aa, synthetic construct
DIQRGDLTVT

SEQ ID NO: 76680 - protein, 10 aa, synthetic construct
DIDRGDHGVL

SEQ ID NO: 76681 - protein, 10 aa, synthetic construct
DIDRGDHVNL

SEQ ID NO: 76682 - protein, 10 aa, synthetic construct
DIDRGDRDYL

SEQ ID NO: 76683 - protein, 10 aa, synthetic construct
AQSRGDHGVL

SEQ ID NO: 76684 - protein, 10 aa, synthetic construct
DIDRGDYSSV

SEQ ID NO: 76685 - protein, 10 aa, synthetic construct
DIDRGDLTVT

SEQ ID NO: 76686 - protein, 10 aa, synthetic construct
DIERGDHGVL

SEQ ID NO: 76687 - protein, 10 aa, synthetic construct
DIERGDHVNL

SEQ ID NO: 76688 - protein, 10 aa, synthetic construct
DIERGDRDYL

SEQ ID NO: 76689 - protein, 10 aa, synthetic construct
DIERGDYSSV

SEQ ID NO: 76690 - protein, 10 aa, synthetic construct
DIERGDLTVT

SEQ ID NO: 76691 - protein, 10 aa, synthetic construct
DMGRGDHVNL

SEQ ID NO: 76692 - protein, 10 aa, synthetic construct
DMGRGDYNSL

SEQ ID NO: 76693 - protein, 10 aa, synthetic construct
DMGRGDYTSM

SEQ ID NO: 76694 - protein, 10 aa, synthetic construct
AQSRGDRGQI

SEQ ID NO: 76695 - protein, 10 aa, synthetic construct
DMARGDHVNL

SEQ ID NO: 76696 - protein, 10 aa, synthetic construct
DMARGDYNSL

SEQ ID NO: 76697 - protein, 10 aa, synthetic construct
DMARGDYTSM

SEQ ID NO: 76698 - protein, 10 aa, synthetic construct
DMVRGDHVNL

SEQ ID NO: 76699 - protein, 10 aa, synthetic construct
DMVRGDYNSL

SEQ ID NO: 76700 - protein, 10 aa, synthetic construct
DMVRGDYTSM

SEQ ID NO: 76701 - protein, 10 aa, synthetic construct
DMPRGDHVNL

SEQ ID NO: 76702 - protein, 10 aa, synthetic construct
DMPRGDYNSL

SEQ ID NO: 76703 - protein, 10 aa, synthetic construct
DMPRGDYTSM

SEQ ID NO: 76704 - protein, 10 aa, synthetic construct
DMLRGDHVNL

SEQ ID NO: 76705 - protein, 10 aa, synthetic construct
AQSRGDRQGI

SEQ ID NO: 76706 - protein, 10 aa, synthetic construct
DMLRGDYNSL

SEQ ID NO: 76707 - protein, 10 aa, synthetic construct
DMLRGDYTSM

SEQ ID NO: 76708 - protein, 10 aa, synthetic construct
DMIRGDRGQI

SEQ ID NO: 76709 - protein, 10 aa, synthetic construct
DMIRGDRQGI

SEQ ID NO: 76710 - protein, 10 aa, synthetic construct
DMIRGDRSQT

SEQ ID NO: 76711 - protein, 10 aa, synthetic construct
DMMRGDHVNL

SEQ ID NO: 76712 - protein, 10 aa, synthetic construct
DMMRGDRDYL

SEQ ID NO: 76713 - protein, 10 aa, synthetic construct
DMMRGDYSSV

SEQ ID NO: 76714 - protein, 10 aa, synthetic construct
DMMRGDLTVT

SEQ ID NO: 76715 - protein, 10 aa, synthetic construct
DMWRGDYTSV

SEQ ID NO: 76716 - protein, 10 aa, synthetic construct
AQSRGDRSVV

SEQ ID NO: 76717 - protein, 10 aa, synthetic construct
DMWRGDLIGR

SEQ ID NO: 76718 - protein, 10 aa, synthetic construct
DMFRGDRGQI

SEQ ID NO: 76719 - protein, 10 aa, synthetic construct
DMFRGDRQGI

SEQ ID NO: 76720 - protein, 10 aa, synthetic construct
DMFRGDRSQT

SEQ ID NO: 76721 - protein, 10 aa, synthetic construct
DMKRGDRGQI

SEQ ID NO: 76722 - protein, 10 aa, synthetic construct
DMKRGDRQGI

SEQ ID NO: 76723 - protein, 10 aa, synthetic construct
DMKRGDRSQT

SEQ ID NO: 76724 - protein, 10 aa, synthetic construct
DMRRGDHVNL

SEQ ID NO: 76725 - protein, 10 aa, synthetic construct
DMRRGDYNSL

SEQ ID NO: 76726 - protein, 10 aa, synthetic construct
DMRRGDYTSM

SEQ ID NO: 76727 - protein, 10 aa, synthetic construct
AQSRGDLTVT

SEQ ID NO: 76728 - protein, 10 aa, synthetic construct
DMHRGDRDYL

SEQ ID NO: 76729 - protein, 10 aa, synthetic construct
DMHRGDYVGL

SEQ ID NO: 76730 - protein, 10 aa, synthetic construct
DMHRGDYSSV

SEQ ID NO: 76731 - protein, 10 aa, synthetic construct
DMHRGDYTSV

SEQ ID NO: 76732 - protein, 10 aa, synthetic construct
DMHRGDQSTL

SEQ ID NO: 76733 - protein, 10 aa, synthetic construct
DMSRGDHVNL

SEQ ID NO: 76734 - protein, 10 aa, synthetic construct
DMSRGDYNSL

SEQ ID NO: 76735 - protein, 10 aa, synthetic construct
DMSRGDYTSM

SEQ ID NO: 76736 - protein, 10 aa, synthetic construct
DMTRGDRDYL

SEQ ID NO: 76737 - protein, 10 aa, synthetic construct
DMTRGDYVGL

SEQ ID NO: 76738 - protein, 10 aa, synthetic construct
NSPRGDYTSV

SEQ ID NO: 76739 - protein, 10 aa, synthetic construct
AQSRGDLIGR

SEQ ID NO: 76740 - protein, 10 aa, synthetic construct
DMTRGDYSSV

SEQ ID NO: 76741 - protein, 10 aa, synthetic construct
DMTRGDYTSV

SEQ ID NO: 76742 - protein, 10 aa, synthetic construct
DMTRGDQSTL

SEQ ID NO: 76743 - protein, 10 aa, synthetic construct
DMYRGDRGQI

SEQ ID NO: 76744 - protein, 10 aa, synthetic construct
DMYRGDRQGI

SEQ ID NO: 76745 - protein, 10 aa, synthetic construct
DMYRGDRSQT

SEQ ID NO: 76746 - protein, 10 aa, synthetic construct
DMNRGDRGQI

SEQ ID NO: 76747 - protein, 10 aa, synthetic construct
DMNRGDRQGI

SEQ ID NO: 76748 - protein, 10 aa, synthetic construct
DMNRGDRSQT

SEQ ID NO: 76749 - protein, 10 aa, synthetic construct
DMQRGDRDYL

SEQ ID NO: 76750 - protein, 10 aa, synthetic construct
AQSRGDRSQT

SEQ ID NO: 76751 - protein, 10 aa, synthetic construct
DMQRGDYVGL

SEQ ID NO: 76752 - protein, 10 aa, synthetic construct
DMQRGDYSSV

SEQ ID NO: 76753 - protein, 10 aa, synthetic construct
DMQRGDYTSV

SEQ ID NO: 76754 - protein, 10 aa, synthetic construct
DMQRGDQSTL

SEQ ID NO: 76755 - protein, 10 aa, synthetic construct
DMDRGDRDYL

SEQ ID NO: 76756 - protein, 10 aa, synthetic construct
DMDRGDYVGL

SEQ ID NO: 76757 - protein, 10 aa, synthetic construct
DMDRGDYSSV

SEQ ID NO: 76758 - protein, 10 aa, synthetic construct
DMDRGDYTSV

SEQ ID NO: 76759 - protein, 10 aa, synthetic construct
DMDRGDQSTL

SEQ ID NO: 76760 - protein, 10 aa, synthetic construct
DMERGDRDYL

SEQ ID NO: 76761 - protein, 10 aa, synthetic construct
AQSRGDLLLS

SEQ ID NO: 76762 - protein, 10 aa, synthetic construct
DMERGDYVGL

SEQ ID NO: 76763 - protein, 10 aa, synthetic construct
DMERGDYSSV

SEQ ID NO: 76764 - protein, 10 aa, synthetic construct
DMERGDYTSV

SEQ ID NO: 76765 - protein, 10 aa, synthetic construct
DMERGDQSTL

SEQ ID NO: 76766 - protein, 10 aa, synthetic construct
DWGRGDFQNT

SEQ ID NO: 76767 - protein, 10 aa, synthetic construct
DWARGDFQNT

SEQ ID NO: 76768 - protein, 10 aa, synthetic construct
DWVRGDFQNT

SEQ ID NO: 76769 - protein, 10 aa, synthetic construct
DWPRGDFQNT

SEQ ID NO: 76770 - protein, 10 aa, synthetic construct
DWLRGDFQNT

SEQ ID NO: 76771 - protein, 10 aa, synthetic construct
DWIRGDRDYL

SEQ ID NO: 76772 - protein, 10 aa, synthetic construct
AQTRGDRGVV

SEQ ID NO: 76773 - protein, 10 aa, synthetic construct
DWIRGDYVGL

SEQ ID NO: 76774 - protein, 10 aa, synthetic construct
DWIRGDYSSV

SEQ ID NO: 76775 - protein, 10 aa, synthetic construct
DWIRGDYTSV

SEQ ID NO: 76776 - protein, 10 aa, synthetic construct
DWIRGDQSTL

SEQ ID NO: 76777 - protein, 10 aa, synthetic construct
DWMRGDYTSV

SEQ ID NO: 76778 - protein, 10 aa, synthetic construct
DWMRGDLIGR

SEQ ID NO: 76779 - protein, 10 aa, synthetic construct
DWWRGDYNSL

SEQ ID NO: 76780 - protein, 10 aa, synthetic construct
DWWRGDYTSM

SEQ ID NO: 76781 - protein, 10 aa, synthetic construct
DWWRGDFQNT

SEQ ID NO: 76782 - protein, 10 aa, synthetic construct
DWFRGDRDYL

SEQ ID NO: 76783 - protein, 10 aa, synthetic construct
AQQRGDRGVV

SEQ ID NO: 76784 - protein, 10 aa, synthetic construct
DWFRGDYVGL

SEQ ID NO: 76785 - protein, 10 aa, synthetic construct
DWFRGDYSSV

SEQ ID NO: 76786 - protein, 10 aa, synthetic construct
DWFRGDYTSV

SEQ ID NO: 76787 - protein, 10 aa, synthetic construct
DWFRGDQSTL

SEQ ID NO: 76788 - protein, 10 aa, synthetic construct
DWKRGDRDYL

SEQ ID NO: 76789 - protein, 10 aa, synthetic construct
DWKRGDYVGL

SEQ ID NO: 76790 - protein, 10 aa, synthetic construct
DWKRGDYSSV

SEQ ID NO: 76791 - protein, 10 aa, synthetic construct
DWKRGDYTSV

SEQ ID NO: 76792 - protein, 10 aa, synthetic construct
DWKRGDQSTL

SEQ ID NO: 76793 - protein, 10 aa, synthetic construct
DWRRGDFQNT

SEQ ID NO: 76794 - protein, 10 aa, synthetic construct
AQDRGDRGVV

SEQ ID NO: 76795 - protein, 10 aa, synthetic construct
DWHRGDHVNL

SEQ ID NO: 76796 - protein, 10 aa, synthetic construct
DWHRGDYNSL

SEQ ID NO: 76797 - protein, 10 aa, synthetic construct
DWHRGDYTSM

SEQ ID NO: 76798 - protein, 10 aa, synthetic construct
DWSRGDFQNT

SEQ ID NO: 76799 - protein, 10 aa, synthetic construct
DWTRGDHVNL

SEQ ID NO: 76800 - protein, 10 aa, synthetic construct
DWTRGDYNSL

SEQ ID NO: 76801 - protein, 10 aa, synthetic construct
DWTRGDYTSM

SEQ ID NO: 76802 - protein, 10 aa, synthetic construct
DWYRGDRDYL

SEQ ID NO: 76803 - protein, 10 aa, synthetic construct
DWYRGDYVGL

SEQ ID NO: 76804 - protein, 10 aa, synthetic construct
DWYRGDYSSV

SEQ ID NO: 76805 - protein, 10 aa, synthetic construct
AQERGDRGVV

SEQ ID NO: 76806 - protein, 10 aa, synthetic construct
DWYRGDYTSV

SEQ ID NO: 76807 - protein, 10 aa, synthetic construct
DWYRGDQSTL

SEQ ID NO: 76808 - protein, 10 aa, synthetic construct
DWNRGDRDYL

SEQ ID NO: 76809 - protein, 10 aa, synthetic construct
DWNRGDYVGL

SEQ ID NO: 76810 - protein, 10 aa, synthetic construct
DWNRGDYSSV

SEQ ID NO: 76811 - protein, 10 aa, synthetic construct
DWNRGDYTSV

SEQ ID NO: 76812 - protein, 10 aa, synthetic construct
DWNRGDQSTL

SEQ ID NO: 76813 - protein, 10 aa, synthetic construct
DWQRGDHVNL

SEQ ID NO: 76814 - protein, 10 aa, synthetic construct
DWQRGDYNSL

SEQ ID NO: 76815 - protein, 10 aa, synthetic construct
DWQRGDYTSM

SEQ ID NO: 76816 - protein, 10 aa, synthetic construct
ADGRGDHGVL

SEQ ID NO: 76817 - protein, 10 aa, synthetic construct
DWDRGDHVNL

SEQ ID NO: 76818 - protein, 10 aa, synthetic construct
DWDRGDYNSL

SEQ ID NO: 76819 - protein, 10 aa, synthetic construct
DWDRGDYTSM

SEQ ID NO: 76820 - protein, 10 aa, synthetic construct
DWERGDHVNL

SEQ ID NO: 76821 - protein, 10 aa, synthetic construct
DWERGDYNSL

SEQ ID NO: 76822 - protein, 10 aa, synthetic construct
DWERGDYTSM

SEQ ID NO: 76823 - protein, 10 aa, synthetic construct
DFGRGDRDYL

SEQ ID NO: 76824 - protein, 10 aa, synthetic construct
DFGRGDYTSV

SEQ ID NO: 76825 - protein, 10 aa, synthetic construct
DFGRGDLTVT

SEQ ID NO: 76826 - protein, 10 aa, synthetic construct
DFGRGDLIGR

SEQ ID NO: 76827 - protein, 10 aa, synthetic construct
ADGRGDRGQI

SEQ ID NO: 76828 - protein, 10 aa, synthetic construct
DFARGDRDYL

SEQ ID NO: 76829 - protein, 10 aa, synthetic construct
DFARGDYTSV

SEQ ID NO: 76830 - protein, 10 aa, synthetic construct
DFARGDLTVT

SEQ ID NO: 76831 - protein, 10 aa, synthetic construct
DFARGDLIGR

SEQ ID NO: 76832 - protein, 10 aa, synthetic construct
DFVRGDHGVL

SEQ ID NO: 76833 - protein, 10 aa, synthetic construct
DFVRGDHVNL

SEQ ID NO: 76834 - protein, 10 aa, synthetic construct
DFVRGDRDYL

SEQ ID NO: 76835 - protein, 10 aa, synthetic construct
DFVRGDYSSV

SEQ ID NO: 76836 - protein, 10 aa, synthetic construct
DFVRGDLTVT

SEQ ID NO: 76837 - protein, 10 aa, synthetic construct
DFPRGDRDYL

SEQ ID NO: 76838 - protein, 10 aa, synthetic construct
ADGRGDRQGI

SEQ ID NO: 76839 - protein, 10 aa, synthetic construct
DFPRGDYTSV

SEQ ID NO: 76840 - protein, 10 aa, synthetic construct
DFPRGDLTVT

SEQ ID NO: 76841 - protein, 10 aa, synthetic construct
DFPRGDLIGR

SEQ ID NO: 76842 - protein, 10 aa, synthetic construct
DFLRGDHGVL

SEQ ID NO: 76843 - protein, 10 aa, synthetic construct
DFLRGDHVNL

SEQ ID NO: 76844 - protein, 10 aa, synthetic construct
DFLRGDRDYL

SEQ ID NO: 76845 - protein, 10 aa, synthetic construct
DFLRGDYSSV

SEQ ID NO: 76846 - protein, 10 aa, synthetic construct
DFLRGDLTVT

SEQ ID NO: 76847 - protein, 10 aa, synthetic construct
DFIRGDHGVL

SEQ ID NO: 76848 - protein, 10 aa, synthetic construct
DFIRGDRGQI

SEQ ID NO: 76849 - protein, 10 aa, synthetic construct
NSPRGDLTVT

SEQ ID NO: 76850 - protein, 10 aa, synthetic construct
ADGRGDRSVV

SEQ ID NO: 76851 - protein, 10 aa, synthetic construct
DFIRGDRQGI

SEQ ID NO: 76852 - protein, 10 aa, synthetic construct
DFIRGDRGVV

SEQ ID NO: 76853 - protein, 10 aa, synthetic construct
DFIRGDYVGL

SEQ ID NO: 76854 - protein, 10 aa, synthetic construct
DFIRGDLIGR

SEQ ID NO: 76855 - protein, 10 aa, synthetic construct
DFIRGDQSTL

SEQ ID NO: 76856 - protein, 10 aa, synthetic construct
DFIRGDLLLS

SEQ ID NO: 76857 - protein, 10 aa, synthetic construct
DFMRGDHGVL

SEQ ID NO: 76858 - protein, 10 aa, synthetic construct
DFMRGDRGQI

SEQ ID NO: 76859 - protein, 10 aa, synthetic construct
DFMRGDRQGI

SEQ ID NO: 76860 - protein, 10 aa, synthetic construct
DFMRGDRGVV

SEQ ID NO: 76861 - protein, 10 aa, synthetic construct
ADGRGDLTVT

SEQ ID NO: 76862 - protein, 10 aa, synthetic construct
DFMRGDYVGL

SEQ ID NO: 76863 - protein, 10 aa, synthetic construct
DFMRGDLIGR

SEQ ID NO: 76864 - protein, 10 aa, synthetic construct
DFMRGDQSTL

SEQ ID NO: 76865 - protein, 10 aa, synthetic construct
DFMRGDLLLS

SEQ ID NO: 76866 - protein, 10 aa, synthetic construct
DFWRGDHGVL

SEQ ID NO: 76867 - protein, 10 aa, synthetic construct
DFWRGDHVNL

SEQ ID NO: 76868 - protein, 10 aa, synthetic construct
DFWRGDRDYL

SEQ ID NO: 76869 - protein, 10 aa, synthetic construct
DFWRGDYSSV

SEQ ID NO: 76870 - protein, 10 aa, synthetic construct
DFWRGDLTVT

SEQ ID NO: 76871 - protein, 10 aa, synthetic construct
DFKRGDHGVL

SEQ ID NO: 76872 - protein, 10 aa, synthetic construct
ADGRGDLIGR

SEQ ID NO: 76873 - protein, 10 aa, synthetic construct
DFKRGDRGQI

SEQ ID NO: 76874 - protein, 10 aa, synthetic construct
DFKRGDRQGI

SEQ ID NO: 76875 - protein, 10 aa, synthetic construct
DFKRGDRGVV

SEQ ID NO: 76876 - protein, 10 aa, synthetic construct
DFKRGDYVGL

SEQ ID NO: 76877 - protein, 10 aa, synthetic construct
DFKRGDLIGR

SEQ ID NO: 76878 - protein, 10 aa, synthetic construct
DFKRGDQSTL

SEQ ID NO: 76879 - protein, 10 aa, synthetic construct
DFKRGDLLLS

SEQ ID NO: 76880 - protein, 10 aa, synthetic construct
DFRRGDRDYL

SEQ ID NO: 76881 - protein, 10 aa, synthetic construct
DFRRGDYTSV

SEQ ID NO: 76882 - protein, 10 aa, synthetic construct
DFRRGDLTVT

SEQ ID NO: 76883 - protein, 10 aa, synthetic construct
ADGRGDRSQT

SEQ ID NO: 76884 - protein, 10 aa, synthetic construct
DFRRGDLIGR

SEQ ID NO: 76885 - protein, 10 aa, synthetic construct
DFHRGDHGVL

SEQ ID NO: 76886 - protein, 10 aa, synthetic construct
DFHRGDHVNL

SEQ ID NO: 76887 - protein, 10 aa, synthetic construct
DFHRGDRDYL

SEQ ID NO: 76888 - protein, 10 aa, synthetic construct
DFHRGDYSSV

SEQ ID NO: 76889 - protein, 10 aa, synthetic construct
DFHRGDLTVT

SEQ ID NO: 76890 - protein, 10 aa, synthetic construct
DFSRGDHGVL

SEQ ID NO: 76891 - protein, 10 aa, synthetic construct
DFSRGDHVNL

SEQ ID NO: 76892 - protein, 10 aa, synthetic construct
DFSRGDRDYL

SEQ ID NO: 76893 - protein, 10 aa, synthetic construct
DFSRGDYSSV

SEQ ID NO: 76894 - protein, 10 aa, synthetic construct
ADGRGDLLLS

SEQ ID NO: 76895 - protein, 10 aa, synthetic construct
DFSRGDLTVT

SEQ ID NO: 76896 - protein, 10 aa, synthetic construct
DFTRGDHGVL

SEQ ID NO: 76897 - protein, 10 aa, synthetic construct
DFTRGDHVNL

SEQ ID NO: 76898 - protein, 10 aa, synthetic construct
DFTRGDRDYL

SEQ ID NO: 76899 - protein, 10 aa, synthetic construct
DFTRGDYSSV

SEQ ID NO: 76900 - protein, 10 aa, synthetic construct
DFTRGDLTVT

SEQ ID NO: 76901 - protein, 10 aa, synthetic construct
DFYRGDHGVL

SEQ ID NO: 76902 - protein, 10 aa, synthetic construct
DFYRGDRGQI

SEQ ID NO: 76903 - protein, 10 aa, synthetic construct
DFYRGDRQGI

SEQ ID NO: 76904 - protein, 10 aa, synthetic construct
DFYRGDRGVV

SEQ ID NO: 76905 - protein, 10 aa, synthetic construct
ADARGDHGVL

SEQ ID NO: 76906 - protein, 10 aa, synthetic construct
DFYRGDYVGL

SEQ ID NO: 76907 - protein, 10 aa, synthetic construct
DFYRGDLIGR

SEQ ID NO: 76908 - protein, 10 aa, synthetic construct
DFYRGDQSTL

SEQ ID NO: 76909 - protein, 10 aa, synthetic construct
DFYRGDLLLS

SEQ ID NO: 76910 - protein, 10 aa, synthetic construct
DFNRGDHGVL

SEQ ID NO: 76911 - protein, 10 aa, synthetic construct
DFNRGDRGQI

SEQ ID NO: 76912 - protein, 10 aa, synthetic construct
DFNRGDRQGI

SEQ ID NO: 76913 - protein, 10 aa, synthetic construct
DFNRGDRGVV

SEQ ID NO: 76914 - protein, 10 aa, synthetic construct
DFNRGDYVGL

SEQ ID NO: 76915 - protein, 10 aa, synthetic construct
DFNRGDLIGR

SEQ ID NO: 76916 - protein, 10 aa, synthetic construct
ADARGDRGQI

SEQ ID NO: 76917 - protein, 10 aa, synthetic construct
DFNRGDQSTL

SEQ ID NO: 76918 - protein, 10 aa, synthetic construct
DFNRGDLLLS

SEQ ID NO: 76919 - protein, 10 aa, synthetic construct
DFQRGDHGVL

SEQ ID NO: 76920 - protein, 10 aa, synthetic construct
DFQRGDHVNL

SEQ ID NO: 76921 - protein, 10 aa, synthetic construct
DFQRGDRDYL

SEQ ID NO: 76922 - protein, 10 aa, synthetic construct
DFQRGDYSSV

SEQ ID NO: 76923 - protein, 10 aa, synthetic construct
DFQRGDLTVT

SEQ ID NO: 76924 - protein, 10 aa, synthetic construct
DFDRGDHGVL

SEQ ID NO: 76925 - protein, 10 aa, synthetic construct
DFDRGDHVNL

SEQ ID NO: 76926 - protein, 10 aa, synthetic construct
DFDRGDRDYL

SEQ ID NO: 76927 - protein, 10 aa, synthetic construct
ADARGDRQGI

SEQ ID NO: 76928 - protein, 10 aa, synthetic construct
DFDRGDYSSV

SEQ ID NO: 76929 - protein, 10 aa, synthetic construct
DFDRGDLTVT

SEQ ID NO: 76930 - protein, 10 aa, synthetic construct
DFERGDHGVL

SEQ ID NO: 76931 - protein, 10 aa, synthetic construct
DFERGDHVNL

SEQ ID NO: 76932 - protein, 10 aa, synthetic construct
DFERGDRDYL

SEQ ID NO: 76933 - protein, 10 aa, synthetic construct
DFERGDYSSV

SEQ ID NO: 76934 - protein, 10 aa, synthetic construct
DFERGDLTVT

SEQ ID NO: 76935 - protein, 10 aa, synthetic construct
DKGRGDRDYL

SEQ ID NO: 76936 - protein, 10 aa, synthetic construct
DKGRGDYTSV

SEQ ID NO: 76937 - protein, 10 aa, synthetic construct
DKGRGDLTVT

SEQ ID NO: 76938 - protein, 10 aa, synthetic construct
ADARGDRSVV

SEQ ID NO: 76939 - protein, 10 aa, synthetic construct
DKGRGDLIGR

SEQ ID NO: 76940 - protein, 10 aa, synthetic construct
DKARGDRDYL

SEQ ID NO: 76941 - protein, 10 aa, synthetic construct
DKARGDYTSV

SEQ ID NO: 76942 - protein, 10 aa, synthetic construct
DKARGDLTVT

SEQ ID NO: 76943 - protein, 10 aa, synthetic construct
DKARGDLIGR

SEQ ID NO: 76944 - protein, 10 aa, synthetic construct
DKVRGDHGVL

SEQ ID NO: 76945 - protein, 10 aa, synthetic construct
DKVRGDHVNL

SEQ ID NO: 76946 - protein, 10 aa, synthetic construct
DKVRGDRDYL

SEQ ID NO: 76947 - protein, 10 aa, synthetic construct
DKVRGDYSSV

SEQ ID NO: 76948 - protein, 10 aa, synthetic construct
DKVRGDLTVT

SEQ ID NO: 76949 - protein, 10 aa, synthetic construct
ADARGDLTVT

SEQ ID NO: 76950 - protein, 10 aa, synthetic construct
DKPRGDRDYL

SEQ ID NO: 76951 - protein, 10 aa, synthetic construct
DKPRGDYTSV

SEQ ID NO: 76952 - protein, 10 aa, synthetic construct
DKPRGDLTVT

SEQ ID NO: 76953 - protein, 10 aa, synthetic construct
DKPRGDLIGR

SEQ ID NO: 76954 - protein, 10 aa, synthetic construct
DKLRGDHGVL

SEQ ID NO: 76955 - protein, 10 aa, synthetic construct
DKLRGDHVNL

SEQ ID NO: 76956 - protein, 10 aa, synthetic construct
DKLRGDRDYL

SEQ ID NO: 76957 - protein, 10 aa, synthetic construct
DKLRGDYSSV

SEQ ID NO: 76958 - protein, 10 aa, synthetic construct
DKLRGDLTVT

SEQ ID NO: 76959 - protein, 10 aa, synthetic construct
DKIRGDHGVL

SEQ ID NO: 76960 - protein, 10 aa, synthetic construct
NSPRGDLIGR

SEQ ID NO: 76961 - protein, 10 aa, synthetic construct
ADARGDLIGR

SEQ ID NO: 76962 - protein, 10 aa, synthetic construct
DKIRGDRGQI

SEQ ID NO: 76963 - protein, 10 aa, synthetic construct
DKIRGDRQGI

SEQ ID NO: 76964 - protein, 10 aa, synthetic construct
DKIRGDRGVV

SEQ ID NO: 76965 - protein, 10 aa, synthetic construct
DKIRGDYVGL

SEQ ID NO: 76966 - protein, 10 aa, synthetic construct
DKIRGDLIGR

SEQ ID NO: 76967 - protein, 10 aa, synthetic construct
DKIRGDQSTL

SEQ ID NO: 76968 - protein, 10 aa, synthetic construct
DKIRGDLLLS

SEQ ID NO: 76969 - protein, 10 aa, synthetic construct
DKMRGDHGVL

SEQ ID NO: 76970 - protein, 10 aa, synthetic construct
DKMRGDRGQI

SEQ ID NO: 76971 - protein, 10 aa, synthetic construct
DKMRGDRQGI

SEQ ID NO: 76972 - protein, 10 aa, synthetic construct
ADARGDRSQT

SEQ ID NO: 76973 - protein, 10 aa, synthetic construct
DKMRGDRGVV

SEQ ID NO: 76974 - protein, 10 aa, synthetic construct
DKMRGDYVGL

SEQ ID NO: 76975 - protein, 10 aa, synthetic construct
DKMRGDLIGR

SEQ ID NO: 76976 - protein, 10 aa, synthetic construct
DKMRGDQSTL

SEQ ID NO: 76977 - protein, 10 aa, synthetic construct
DKMRGDLLLS

SEQ ID NO: 76978 - protein, 10 aa, synthetic construct
DKWRGDHGVL

SEQ ID NO: 76979 - protein, 10 aa, synthetic construct
DKWRGDHVNL

SEQ ID NO: 76980 - protein, 10 aa, synthetic construct
DKWRGDRDYL

SEQ ID NO: 76981 - protein, 10 aa, synthetic construct
DKWRGDYSSV

SEQ ID NO: 76982 - protein, 10 aa, synthetic construct
DKWRGDLTVT

SEQ ID NO: 76983 - protein, 10 aa, synthetic construct
ADARGDLLLS

SEQ ID NO: 76984 - protein, 10 aa, synthetic construct
DKFRGDHGVL

SEQ ID NO: 76985 - protein, 10 aa, synthetic construct
DKFRGDRGQI

SEQ ID NO: 76986 - protein, 10 aa, synthetic construct
DKFRGDRQGI

SEQ ID NO: 76987 - protein, 10 aa, synthetic construct
DKFRGDRGVV

SEQ ID NO: 76988 - protein, 10 aa, synthetic construct
DKFRGDYVGL

SEQ ID NO: 76989 - protein, 10 aa, synthetic construct
DKFRGDLIGR

SEQ ID NO: 76990 - protein, 10 aa, synthetic construct
DKFRGDQSTL

SEQ ID NO: 76991 - protein, 10 aa, synthetic construct
DKFRGDLLLS

SEQ ID NO: 76992 - protein, 10 aa, synthetic construct
DKRRGDRDYL

SEQ ID NO: 76993 - protein, 10 aa, synthetic construct
DKRRGDYTSV

SEQ ID NO: 76994 - protein, 10 aa, synthetic construct
ADVRGDHGVL

SEQ ID NO: 76995 - protein, 10 aa, synthetic construct
DKRRGDLTVT

SEQ ID NO: 76996 - protein, 10 aa, synthetic construct
DKRRGDLIGR

SEQ ID NO: 76997 - protein, 10 aa, synthetic construct
DKHRGDHGVL

SEQ ID NO: 76998 - protein, 10 aa, synthetic construct
DKHRGDHVNL

SEQ ID NO: 76999 - protein, 10 aa, synthetic construct
DKHRGDRDYL

SEQ ID NO: 77000 - protein, 10 aa, synthetic construct
DKHRGDYSSV

SEQ ID NO: 77001 - protein, 10 aa, synthetic construct
DKHRGDLTVT

SEQ ID NO: 77002 - protein, 10 aa, synthetic construct
DKSRGDHGVL

SEQ ID NO: 77003 - protein, 10 aa, synthetic construct
DKSRGDHVNL

SEQ ID NO: 77004 - protein, 10 aa, synthetic construct
DKSRGDRDYL

SEQ ID NO: 77005 - protein, 10 aa, synthetic construct
ADVRGDRGQI

SEQ ID NO: 77006 - protein, 10 aa, synthetic construct
DKSRGDYSSV

SEQ ID NO: 77007 - protein, 10 aa, synthetic construct
DKSRGDLTVT

SEQ ID NO: 77008 - protein, 10 aa, synthetic construct
DKTRGDHGVL

SEQ ID NO: 77009 - protein, 10 aa, synthetic construct
DKTRGDHVNL

SEQ ID NO: 77010 - protein, 10 aa, synthetic construct
DKTRGDRDYL

SEQ ID NO: 77011 - protein, 10 aa, synthetic construct
DKTRGDYSSV

SEQ ID NO: 77012 - protein, 10 aa, synthetic construct
DKTRGDLTVT

SEQ ID NO: 77013 - protein, 10 aa, synthetic construct
DKYRGDHGVL

SEQ ID NO: 77014 - protein, 10 aa, synthetic construct
DKYRGDRGQI

SEQ ID NO: 77015 - protein, 10 aa, synthetic construct
DKYRGDRQGI

SEQ ID NO: 77016 - protein, 10 aa, synthetic construct
ADVRGDRQGI

SEQ ID NO: 77017 - protein, 10 aa, synthetic construct
DKYRGDRGVV

SEQ ID NO: 77018 - protein, 10 aa, synthetic construct
DKYRGDYVGL

SEQ ID NO: 77019 - protein, 10 aa, synthetic construct
DKYRGDLIGR

SEQ ID NO: 77020 - protein, 10 aa, synthetic construct
DKYRGDQSTL

SEQ ID NO: 77021 - protein, 10 aa, synthetic construct
DKYRGDLLLS

SEQ ID NO: 77022 - protein, 10 aa, synthetic construct
DKQRGDHGVL

SEQ ID NO: 77023 - protein, 10 aa, synthetic construct
DKQRGDHVNL

SEQ ID NO: 77024 - protein, 10 aa, synthetic construct
DKQRGDRDYL

SEQ ID NO: 77025 - protein, 10 aa, synthetic construct
DKQRGDYSSV

SEQ ID NO: 77026 - protein, 10 aa, synthetic construct
DKQRGDLTVT

SEQ ID NO: 77027 - protein, 10 aa, synthetic construct
ADVRGDRSVV

SEQ ID NO: 77028 - protein, 10 aa, synthetic construct
DKDRGDHGVL

SEQ ID NO: 77029 - protein, 10 aa, synthetic construct
DKDRGDHVNL

SEQ ID NO: 77030 - protein, 10 aa, synthetic construct
DKDRGDRDYL

SEQ ID NO: 77031 - protein, 10 aa, synthetic construct
DKDRGDYSSV

SEQ ID NO: 77032 - protein, 10 aa, synthetic construct
DKDRGDLTVT

SEQ ID NO: 77033 - protein, 10 aa, synthetic construct
DKERGDHGVL

SEQ ID NO: 77034 - protein, 10 aa, synthetic construct
DKERGDHVNL

SEQ ID NO: 77035 - protein, 10 aa, synthetic construct
DKERGDRDYL

SEQ ID NO: 77036 - protein, 10 aa, synthetic construct
DKERGDYSSV

SEQ ID NO: 77037 - protein, 10 aa, synthetic construct
DKERGDLTVT

SEQ ID NO: 77038 - protein, 10 aa, synthetic construct
ADVRGDLTVT

SEQ ID NO: 77039 - protein, 10 aa, synthetic construct
DRGRGDYNSL

SEQ ID NO: 77040 - protein, 10 aa, synthetic construct
DRGRGDFNNT

SEQ ID NO: 77041 - protein, 10 aa, synthetic construct
DRGRGDFNNL

SEQ ID NO: 77042 - protein, 10 aa, synthetic construct
DRGRGDFQNT

SEQ ID NO: 77043 - protein, 10 aa, synthetic construct
DRARGDYNSL

SEQ ID NO: 77044 - protein, 10 aa, synthetic construct
DRARGDFNNT

SEQ ID NO: 77045 - protein, 10 aa, synthetic construct
DRARGDFNNL

SEQ ID NO: 77046 - protein, 10 aa, synthetic construct
DRARGDFQNT

SEQ ID NO: 77047 - protein, 10 aa, synthetic construct
DRVRGDYNSL

SEQ ID NO: 77048 - protein, 10 aa, synthetic construct
DRVRGDYTSV

SEQ ID NO: 77049 - protein, 10 aa, synthetic construct
ADVRGDLIGR

SEQ ID NO: 77050 - protein, 10 aa, synthetic construct
DRVRGDYTSM

SEQ ID NO: 77051 - protein, 10 aa, synthetic construct
DRVRGDFQNT

SEQ ID NO: 77052 - protein, 10 aa, synthetic construct
DRPRGDYNSL

SEQ ID NO: 77053 - protein, 10 aa, synthetic construct
DRPRGDFNNT

SEQ ID NO: 77054 - protein, 10 aa, synthetic construct
DRPRGDFNNL

SEQ ID NO: 77055 - protein, 10 aa, synthetic construct
DRPRGDFQNT

SEQ ID NO: 77056 - protein, 10 aa, synthetic construct
DRLRGDYNSL

SEQ ID NO: 77057 - protein, 10 aa, synthetic construct
DRLRGDYTSV

SEQ ID NO: 77058 - protein, 10 aa, synthetic construct
DRLRGDYTSM

SEQ ID NO: 77059 - protein, 10 aa, synthetic construct
DRLRGDFQNT

SEQ ID NO: 77060 - protein, 10 aa, synthetic construct
ADVRGDRSQT

SEQ ID NO: 77061 - protein, 10 aa, synthetic construct
DRIRGDRDYL

SEQ ID NO: 77062 - protein, 10 aa, synthetic construct
DRIRGDYTSV

SEQ ID NO: 77063 - protein, 10 aa, synthetic construct
DRIRGDLTVT

SEQ ID NO: 77064 - protein, 10 aa, synthetic construct
DRIRGDLIGR

SEQ ID NO: 77065 - protein, 10 aa, synthetic construct
DRMRGDRDYL

SEQ ID NO: 77066 - protein, 10 aa, synthetic construct
DRMRGDYTSV

SEQ ID NO: 77067 - protein, 10 aa, synthetic construct
DRMRGDLTVT

SEQ ID NO: 77068 - protein, 10 aa, synthetic construct
DRMRGDLIGR

SEQ ID NO: 77069 - protein, 10 aa, synthetic construct
DRWRGDYNSL

SEQ ID NO: 77070 - protein, 10 aa, synthetic construct
DRWRGDYTSV

SEQ ID NO: 77071 - protein, 10 aa, synthetic construct
DSPRGDYNSL

SEQ ID NO: 77072 - protein, 10 aa, synthetic construct
ADVRGDLLLS

SEQ ID NO: 77073 - protein, 10 aa, synthetic construct
DRWRGDYTSM

SEQ ID NO: 77074 - protein, 10 aa, synthetic construct
DRWRGDFQNT

SEQ ID NO: 77075 - protein, 10 aa, synthetic construct
DRFRGDRDYL

SEQ ID NO: 77076 - protein, 10 aa, synthetic construct
DRFRGDYTSV

SEQ ID NO: 77077 - protein, 10 aa, synthetic construct
DRFRGDLTVT

SEQ ID NO: 77078 - protein, 10 aa, synthetic construct
DRFRGDLIGR

SEQ ID NO: 77079 - protein, 10 aa, synthetic construct
DRKRGDRDYL

SEQ ID NO: 77080 - protein, 10 aa, synthetic construct
DRKRGDYTSV

SEQ ID NO: 77081 - protein, 10 aa, synthetic construct
DRKRGDLTVT

SEQ ID NO: 77082 - protein, 10 aa, synthetic construct
DRKRGDLIGR

SEQ ID NO: 77083 - protein, 10 aa, synthetic construct
ADPRGDHGVL

SEQ ID NO: 77084 - protein, 10 aa, synthetic construct
DRRRGDYNSL

SEQ ID NO: 77085 - protein, 10 aa, synthetic construct
DRRRGDFNNT

SEQ ID NO: 77086 - protein, 10 aa, synthetic construct
DRRRGDFNNL

SEQ ID NO: 77087 - protein, 10 aa, synthetic construct
DRRRGDFQNT

SEQ ID NO: 77088 - protein, 10 aa, synthetic construct
DRHRGDYNSL

SEQ ID NO: 77089 - protein, 10 aa, synthetic construct
DRHRGDYTSV

SEQ ID NO: 77090 - protein, 10 aa, synthetic construct
DRHRGDYTSM

SEQ ID NO: 77091 - protein, 10 aa, synthetic construct
DRHRGDFQNT

SEQ ID NO: 77092 - protein, 10 aa, synthetic construct
DRSRGDYNSL

SEQ ID NO: 77093 - protein, 10 aa, synthetic construct
DRSRGDYTSV

SEQ ID NO: 77094 - protein, 10 aa, synthetic construct
ADPRGDRGQI

SEQ ID NO: 77095 - protein, 10 aa, synthetic construct
DRSRGDYTSM

SEQ ID NO: 77096 - protein, 10 aa, synthetic construct
DRSRGDFQNT

SEQ ID NO: 77097 - protein, 10 aa, synthetic construct
DRTRGDYNSL

SEQ ID NO: 77098 - protein, 10 aa, synthetic construct
DRTRGDYTSV

SEQ ID NO: 77099 - protein, 10 aa, synthetic construct
DRTRGDYTSM

SEQ ID NO: 77100 - protein, 10 aa, synthetic construct
DRTRGDFQNT

SEQ ID NO: 77101 - protein, 10 aa, synthetic construct
DRYRGDRDYL

SEQ ID NO: 77102 - protein, 10 aa, synthetic construct
DRYRGDYTSV

SEQ ID NO: 77103 - protein, 10 aa, synthetic construct
DRYRGDLTVT

SEQ ID NO: 77104 - protein, 10 aa, synthetic construct
DRYRGDLIGR

SEQ ID NO: 77105 - protein, 10 aa, synthetic construct
ADPRGDRQGI

SEQ ID NO: 77106 - protein, 10 aa, synthetic construct
DRNRGDRDYL

SEQ ID NO: 77107 - protein, 10 aa, synthetic construct
DRNRGDYTSV

SEQ ID NO: 77108 - protein, 10 aa, synthetic construct
DRNRGDLTVT

SEQ ID NO: 77109 - protein, 10 aa, synthetic construct
DRNRGDLIGR

SEQ ID NO: 77110 - protein, 10 aa, synthetic construct
DRQRGDYNSL

SEQ ID NO: 77111 - protein, 10 aa, synthetic construct
DRQRGDYTSV

SEQ ID NO: 77112 - protein, 10 aa, synthetic construct
DRQRGDYTSM

SEQ ID NO: 77113 - protein, 10 aa, synthetic construct
DRQRGDFQNT

SEQ ID NO: 77114 - protein, 10 aa, synthetic construct
DRDRGDYNSL

SEQ ID NO: 77115 - protein, 10 aa, synthetic construct
DRDRGDYTSV

SEQ ID NO: 77116 - protein, 10 aa, synthetic construct
ADPRGDRSVV

SEQ ID NO: 77117 - protein, 10 aa, synthetic construct
DRDRGDYTSM

SEQ ID NO: 77118 - protein, 10 aa, synthetic construct
DRDRGDFQNT

SEQ ID NO: 77119 - protein, 10 aa, synthetic construct
DRERGDYNSL

SEQ ID NO: 77120 - protein, 10 aa, synthetic construct
DRERGDYTSV

SEQ ID NO: 77121 - protein, 10 aa, synthetic construct
DRERGDYTSM

SEQ ID NO: 77122 - protein, 10 aa, synthetic construct
DRERGDFQNT

SEQ ID NO: 77123 - protein, 10 aa, synthetic construct
DHGRGDYNSL

SEQ ID NO: 77124 - protein, 10 aa, synthetic construct
DHGRGDYTSV

SEQ ID NO: 77125 - protein, 10 aa, synthetic construct
DHGRGDYTSM

SEQ ID NO: 77126 - protein, 10 aa, synthetic construct
DHGRGDFQNT

SEQ ID NO: 77127 - protein, 10 aa, synthetic construct
ADPRGDLTVT

SEQ ID NO: 77128 - protein, 10 aa, synthetic construct
DHARGDYNSL

SEQ ID NO: 77129 - protein, 10 aa, synthetic construct
DHARGDYTSV

SEQ ID NO: 77130 - protein, 10 aa, synthetic construct
DHARGDYTSM

SEQ ID NO: 77131 - protein, 10 aa, synthetic construct
DHARGDFQNT

SEQ ID NO: 77132 - protein, 10 aa, synthetic construct
DHVRGDRDYL

SEQ ID NO: 77133 - protein, 10 aa, synthetic construct
DHVRGDYTSV

SEQ ID NO: 77134 - protein, 10 aa, synthetic construct
DHVRGDLTVT

SEQ ID NO: 77135 - protein, 10 aa, synthetic construct
DHVRGDLIGR

SEQ ID NO: 77136 - protein, 10 aa, synthetic construct
DHPRGDYNSL

SEQ ID NO: 77137 - protein, 10 aa, synthetic construct
DHPRGDYTSV

SEQ ID NO: 77138 - protein, 10 aa, synthetic construct
ADPRGDLIGR

SEQ ID NO: 77139 - protein, 10 aa, synthetic construct
DHPRGDYTSM

SEQ ID NO: 77140 - protein, 10 aa, synthetic construct
DHPRGDFQNT

SEQ ID NO: 77141 - protein, 10 aa, synthetic construct
DHLRGDRDYL

SEQ ID NO: 77142 - protein, 10 aa, synthetic construct
DHLRGDYTSV

SEQ ID NO: 77143 - protein, 10 aa, synthetic construct
DHLRGDLTVT

SEQ ID NO: 77144 - protein, 10 aa, synthetic construct
DHLRGDLIGR

SEQ ID NO: 77145 - protein, 10 aa, synthetic construct
DHIRGDHGVL

SEQ ID NO: 77146 - protein, 10 aa, synthetic construct
DHIRGDHVNL

SEQ ID NO: 77147 - protein, 10 aa, synthetic construct
DHIRGDRDYL

SEQ ID NO: 77148 - protein, 10 aa, synthetic construct
DHIRGDYSSV

SEQ ID NO: 77149 - protein, 10 aa, synthetic construct
ADPRGDRSQT

SEQ ID NO: 77150 - protein, 10 aa, synthetic construct
DHIRGDLTVT

SEQ ID NO: 77151 - protein, 10 aa, synthetic construct
DHMRGDHGVL

SEQ ID NO: 77152 - protein, 10 aa, synthetic construct
DHMRGDHVNL

SEQ ID NO: 77153 - protein, 10 aa, synthetic construct
DHMRGDRDYL

SEQ ID NO: 77154 - protein, 10 aa, synthetic construct
DHMRGDYSSV

SEQ ID NO: 77155 - protein, 10 aa, synthetic construct
DHMRGDLTVT

SEQ ID NO: 77156 - protein, 10 aa, synthetic construct
DHWRGDRDYL

SEQ ID NO: 77157 - protein, 10 aa, synthetic construct
DHWRGDYTSV

SEQ ID NO: 77158 - protein, 10 aa, synthetic construct
DHWRGDLTVT

SEQ ID NO: 77159 - protein, 10 aa, synthetic construct
DHWRGDLIGR

SEQ ID NO: 77160 - protein, 10 aa, synthetic construct
ADPRGDLLLS

SEQ ID NO: 77161 - protein, 10 aa, synthetic construct
DHFRGDHGVL

SEQ ID NO: 77162 - protein, 10 aa, synthetic construct
DHFRGDHVNL

SEQ ID NO: 77163 - protein, 10 aa, synthetic construct
DHFRGDRDYL

SEQ ID NO: 77164 - protein, 10 aa, synthetic construct
DHFRGDYSSV

SEQ ID NO: 77165 - protein, 10 aa, synthetic construct
DHFRGDLTVT

SEQ ID NO: 77166 - protein, 10 aa, synthetic construct
DHKRGDHGVL

SEQ ID NO: 77167 - protein, 10 aa, synthetic construct
DHKRGDHVNL

SEQ ID NO: 77168 - protein, 10 aa, synthetic construct
DHKRGDRDYL

SEQ ID NO: 77169 - protein, 10 aa, synthetic construct
DHKRGDYSSV

SEQ ID NO: 77170 - protein, 10 aa, synthetic construct
DHKRGDLTVT

SEQ ID NO: 77171 - protein, 10 aa, synthetic construct
ADLRGDHGVL

SEQ ID NO: 77172 - protein, 10 aa, synthetic construct
DHRRGDYNSL

SEQ ID NO: 77173 - protein, 10 aa, synthetic construct
DHRRGDYTSV

SEQ ID NO: 77174 - protein, 10 aa, synthetic construct
DHRRGDYTSM

SEQ ID NO: 77175 - protein, 10 aa, synthetic construct
DHRRGDFQNT

SEQ ID NO: 77176 - protein, 10 aa, synthetic construct
DHHRGDRDYL

SEQ ID NO: 77177 - protein, 10 aa, synthetic construct
DHHRGDYTSV

SEQ ID NO: 77178 - protein, 10 aa, synthetic construct
DHHRGDLTVT

SEQ ID NO: 77179 - protein, 10 aa, synthetic construct
DHHRGDLIGR

SEQ ID NO: 77180 - protein, 10 aa, synthetic construct
DHSRGDRDYL

SEQ ID NO: 77181 - protein, 10 aa, synthetic construct
DHSRGDYTSV

SEQ ID NO: 77182 - protein, 10 aa, synthetic construct
DSPRGDYTSV

SEQ ID NO: 77183 - protein, 10 aa, synthetic construct
ADLRGDRGQI

SEQ ID NO: 77184 - protein, 10 aa, synthetic construct
DHSRGDLTVT

SEQ ID NO: 77185 - protein, 10 aa, synthetic construct
DHSRGDLIGR

SEQ ID NO: 77186 - protein, 10 aa, synthetic construct
DHTRGDRDYL

SEQ ID NO: 77187 - protein, 10 aa, synthetic construct
DHTRGDYTSV

SEQ ID NO: 77188 - protein, 10 aa, synthetic construct
DHTRGDLTVT

SEQ ID NO: 77189 - protein, 10 aa, synthetic construct
DHTRGDLIGR

SEQ ID NO: 77190 - protein, 10 aa, synthetic construct
DHYRGDHGVL

SEQ ID NO: 77191 - protein, 10 aa, synthetic construct
DHYRGDHVNL

SEQ ID NO: 77192 - protein, 10 aa, synthetic construct
DHYRGDRDYL

SEQ ID NO: 77193 - protein, 10 aa, synthetic construct
DHYRGDYSSV

SEQ ID NO: 77194 - protein, 10 aa, synthetic construct
ADLRGDRQGI

SEQ ID NO: 77195 - protein, 10 aa, synthetic construct
DHYRGDLTVT

SEQ ID NO: 77196 - protein, 10 aa, synthetic construct
DHNRGDHGVL

SEQ ID NO: 77197 - protein, 10 aa, synthetic construct
DHNRGDHVNL

SEQ ID NO: 77198 - protein, 10 aa, synthetic construct
DHNRGDRDYL

SEQ ID NO: 77199 - protein, 10 aa, synthetic construct
DHNRGDYSSV

SEQ ID NO: 77200 - protein, 10 aa, synthetic construct
DHNRGDLTVT

SEQ ID NO: 77201 - protein, 10 aa, synthetic construct
DHQRGDRDYL

SEQ ID NO: 77202 - protein, 10 aa, synthetic construct
DHQRGDYTSV

SEQ ID NO: 77203 - protein, 10 aa, synthetic construct
DHQRGDLTVT

SEQ ID NO: 77204 - protein, 10 aa, synthetic construct
DHQRGDLIGR

SEQ ID NO: 77205 - protein, 10 aa, synthetic construct
ADLRGDRSVV

SEQ ID NO: 77206 - protein, 10 aa, synthetic construct
DHDRGDRDYL

SEQ ID NO: 77207 - protein, 10 aa, synthetic construct
DHDRGDYTSV

SEQ ID NO: 77208 - protein, 10 aa, synthetic construct
DHDRGDLTVT

SEQ ID NO: 77209 - protein, 10 aa, synthetic construct
DHDRGDLIGR

SEQ ID NO: 77210 - protein, 10 aa, synthetic construct
DHERGDRDYL

SEQ ID NO: 77211 - protein, 10 aa, synthetic construct
DHERGDYTSV

SEQ ID NO: 77212 - protein, 10 aa, synthetic construct
DHERGDLTVT

SEQ ID NO: 77213 - protein, 10 aa, synthetic construct
DHERGDLIGR

SEQ ID NO: 77214 - protein, 10 aa, synthetic construct
DSGRGDFNNT

SEQ ID NO: 77215 - protein, 10 aa, synthetic construct
DSGRGDFNNL

SEQ ID NO: 77216 - protein, 10 aa, synthetic construct
ADLRGDLTVT

SEQ ID NO: 77217 - protein, 10 aa, synthetic construct
DSARGDFNNT

SEQ ID NO: 77218 - protein, 10 aa, synthetic construct
DSARGDFNNL

SEQ ID NO: 77219 - protein, 10 aa, synthetic construct
DSVRGDYNSL

SEQ ID NO: 77220 - protein, 10 aa, synthetic construct
DSVRGDYTSM

SEQ ID NO: 77221 - protein, 10 aa, synthetic construct
DSVRGDFQNT

SEQ ID NO: 77222 - protein, 10 aa, synthetic construct
DSLRGDYNSL

SEQ ID NO: 77223 - protein, 10 aa, synthetic construct
DSLRGDYTSM

SEQ ID NO: 77224 - protein, 10 aa, synthetic construct
DSLRGDFQNT

SEQ ID NO: 77225 - protein, 10 aa, synthetic construct
DSIRGDYTSV

SEQ ID NO: 77226 - protein, 10 aa, synthetic construct
DSIRGDLIGR

SEQ ID NO: 77227 - protein, 10 aa, synthetic construct
ADLRGDLIGR

SEQ ID NO: 77228 - protein, 10 aa, synthetic construct
DSMRGDYTSV

SEQ ID NO: 77229 - protein, 10 aa, synthetic construct
DSMRGDLIGR

SEQ ID NO: 77230 - protein, 10 aa, synthetic construct
DSWRGDYNSL

SEQ ID NO: 77231 - protein, 10 aa, synthetic construct
DSWRGDYTSM

SEQ ID NO: 77232 - protein, 10 aa, synthetic construct
DSWRGDFQNT

SEQ ID NO: 77233 - protein, 10 aa, synthetic construct
DSFRGDYTSV

SEQ ID NO: 77234 - protein, 10 aa, synthetic construct
DSFRGDLIGR

SEQ ID NO: 77235 - protein, 10 aa, synthetic construct
DSKRGDYTSV

SEQ ID NO: 77236 - protein, 10 aa, synthetic construct
DSKRGDLIGR

SEQ ID NO: 77237 - protein, 10 aa, synthetic construct
DSRRGDFNNT

SEQ ID NO: 77238 - protein, 10 aa, synthetic construct
ADLRGDRSQT

SEQ ID NO: 77239 - protein, 10 aa, synthetic construct
DSRRGDFNNL

SEQ ID NO: 77240 - protein, 10 aa, synthetic construct
DSHRGDYNSL

SEQ ID NO: 77241 - protein, 10 aa, synthetic construct
DSHRGDYTSM

SEQ ID NO: 77242 - protein, 10 aa, synthetic construct
DSHRGDFQNT

SEQ ID NO: 77243 - protein, 10 aa, synthetic construct
DSSRGDYNSL

SEQ ID NO: 77244 - protein, 10 aa, synthetic construct
DSSRGDYTSM

SEQ ID NO: 77245 - protein, 10 aa, synthetic construct
DSSRGDFQNT

SEQ ID NO: 77246 - protein, 10 aa, synthetic construct
DSTRGDYNSL

SEQ ID NO: 77247 - protein, 10 aa, synthetic construct
DSTRGDYTSM

SEQ ID NO: 77248 - protein, 10 aa, synthetic construct
DSTRGDFQNT

SEQ ID NO: 77249 - protein, 10 aa, synthetic construct
ADLRGDLLLS

SEQ ID NO: 77250 - protein, 10 aa, synthetic construct
DSYRGDYTSV

SEQ ID NO: 77251 - protein, 10 aa, synthetic construct
DSYRGDLIGR

SEQ ID NO: 77252 - protein, 10 aa, synthetic construct
DSNRGDYTSV

SEQ ID NO: 77253 - protein, 10 aa, synthetic construct
DSNRGDLIGR

SEQ ID NO: 77254 - protein, 10 aa, synthetic construct
DSQRGDYNSL

SEQ ID NO: 77255 - protein, 10 aa, synthetic construct
DSQRGDYTSM

SEQ ID NO: 77256 - protein, 10 aa, synthetic construct
DSQRGDFQNT

SEQ ID NO: 77257 - protein, 10 aa, synthetic construct
DSDRGDYNSL

SEQ ID NO: 77258 - protein, 10 aa, synthetic construct
DSDRGDYTSM

SEQ ID NO: 77259 - protein, 10 aa, synthetic construct
DSDRGDFQNT

SEQ ID NO: 77260 - protein, 10 aa, synthetic construct
ADWRGDRGQI

SEQ ID NO: 77261 - protein, 10 aa, synthetic construct
DSERGDYNSL

SEQ ID NO: 77262 - protein, 10 aa, synthetic construct
DSERGDYTSM

SEQ ID NO: 77263 - protein, 10 aa, synthetic construct
DSERGDFQNT

SEQ ID NO: 77264 - protein, 10 aa, synthetic construct
DTGRGDYNSL

SEQ ID NO: 77265 - protein, 10 aa, synthetic construct
DTGRGDYTSV

SEQ ID NO: 77266 - protein, 10 aa, synthetic construct
DTGRGDYTSM

SEQ ID NO: 77267 - protein, 10 aa, synthetic construct
DTGRGDFQNT

SEQ ID NO: 77268 - protein, 10 aa, synthetic construct
DTARGDYNSL

SEQ ID NO: 77269 - protein, 10 aa, synthetic construct
DTARGDYTSV

SEQ ID NO: 77270 - protein, 10 aa, synthetic construct
DTARGDYTSM

SEQ ID NO: 77271 - protein, 10 aa, synthetic construct
ADWRGDRQGI

SEQ ID NO: 77272 - protein, 10 aa, synthetic construct
DTARGDFQNT

SEQ ID NO: 77273 - protein, 10 aa, synthetic construct
DTVRGDRDYL

SEQ ID NO: 77274 - protein, 10 aa, synthetic construct
DTVRGDYTSV

SEQ ID NO: 77275 - protein, 10 aa, synthetic construct
DTVRGDLTVT

SEQ ID NO: 77276 - protein, 10 aa, synthetic construct
DTVRGDLIGR

SEQ ID NO: 77277 - protein, 10 aa, synthetic construct
DTPRGDYNSL

SEQ ID NO: 77278 - protein, 10 aa, synthetic construct
DTPRGDYTSV

SEQ ID NO: 77279 - protein, 10 aa, synthetic construct
DTPRGDYTSM

SEQ ID NO: 77280 - protein, 10 aa, synthetic construct
DTPRGDFQNT

SEQ ID NO: 77281 - protein, 10 aa, synthetic construct
DTLRGDRDYL

SEQ ID NO: 77282 - protein, 10 aa, synthetic construct
ADWRGDRSVV

SEQ ID NO: 77283 - protein, 10 aa, synthetic construct
DTLRGDYTSV

SEQ ID NO: 77284 - protein, 10 aa, synthetic construct
DTLRGDLTVT

SEQ ID NO: 77285 - protein, 10 aa, synthetic construct
DTLRGDLIGR

SEQ ID NO: 77286 - protein, 10 aa, synthetic construct
DTIRGDHGVL

SEQ ID NO: 77287 - protein, 10 aa, synthetic construct
DTIRGDHVNL

SEQ ID NO: 77288 - protein, 10 aa, synthetic construct
DTIRGDRDYL

SEQ ID NO: 77289 - protein, 10 aa, synthetic construct
DTIRGDYSSV

SEQ ID NO: 77290 - protein, 10 aa, synthetic construct
DTIRGDLTVT

SEQ ID NO: 77291 - protein, 10 aa, synthetic construct
DTMRGDHGVL

SEQ ID NO: 77292 - protein, 10 aa, synthetic construct
DTMRGDHVNL

SEQ ID NO: 77293 - protein, 10 aa, synthetic construct
SKNRGDLLLS

SEQ ID NO: 77294 - protein, 10 aa, synthetic construct
DSPRGDYTSM

SEQ ID NO: 77295 - protein, 10 aa, synthetic construct
ADWRGDRGVV

SEQ ID NO: 77296 - protein, 10 aa, synthetic construct
DTMRGDRDYL

SEQ ID NO: 77297 - protein, 10 aa, synthetic construct
DTMRGDYSSV

SEQ ID NO: 77298 - protein, 10 aa, synthetic construct
DTMRGDLTVT

SEQ ID NO: 77299 - protein, 10 aa, synthetic construct
DTWRGDRDYL

SEQ ID NO: 77300 - protein, 10 aa, synthetic construct
DTWRGDYTSV

SEQ ID NO: 77301 - protein, 10 aa, synthetic construct
DTWRGDLTVT

SEQ ID NO: 77302 - protein, 10 aa, synthetic construct
DTWRGDLIGR

SEQ ID NO: 77303 - protein, 10 aa, synthetic construct
DTFRGDHGVL

SEQ ID NO: 77304 - protein, 10 aa, synthetic construct
DTFRGDHVNL

SEQ ID NO: 77305 - protein, 10 aa, synthetic construct
DTFRGDRDYL

SEQ ID NO: 77306 - protein, 10 aa, synthetic construct
ADWRGDRSQT

SEQ ID NO: 77307 - protein, 10 aa, synthetic construct
DTFRGDYSSV

SEQ ID NO: 77308 - protein, 10 aa, synthetic construct
DTFRGDLTVT

SEQ ID NO: 77309 - protein, 10 aa, synthetic construct
DTKRGDHGVL

SEQ ID NO: 77310 - protein, 10 aa, synthetic construct
DTKRGDHVNL

SEQ ID NO: 77311 - protein, 10 aa, synthetic construct
DTKRGDRDYL

SEQ ID NO: 77312 - protein, 10 aa, synthetic construct
DTKRGDYSSV

SEQ ID NO: 77313 - protein, 10 aa, synthetic construct
DTKRGDLTVT

SEQ ID NO: 77314 - protein, 10 aa, synthetic construct
DTRRGDYNSL

SEQ ID NO: 77315 - protein, 10 aa, synthetic construct
DTRRGDYTSV

SEQ ID NO: 77316 - protein, 10 aa, synthetic construct
DTRRGDYTSM

SEQ ID NO: 77317 - protein, 10 aa, synthetic construct
ADRRGDHGVL

SEQ ID NO: 77318 - protein, 10 aa, synthetic construct
DTRRGDFQNT

SEQ ID NO: 77319 - protein, 10 aa, synthetic construct
DTHRGDRDYL

SEQ ID NO: 77320 - protein, 10 aa, synthetic construct
DTHRGDYTSV

SEQ ID NO: 77321 - protein, 10 aa, synthetic construct
DTHRGDLTVT

SEQ ID NO: 77322 - protein, 10 aa, synthetic construct
DTHRGDLIGR

SEQ ID NO: 77323 - protein, 10 aa, synthetic construct
DTSRGDRDYL

SEQ ID NO: 77324 - protein, 10 aa, synthetic construct
DTSRGDYTSV

SEQ ID NO: 77325 - protein, 10 aa, synthetic construct
DTSRGDLTVT

SEQ ID NO: 77326 - protein, 10 aa, synthetic construct
DTSRGDLIGR

SEQ ID NO: 77327 - protein, 10 aa, synthetic construct
DTTRGDRDYL

SEQ ID NO: 77328 - protein, 10 aa, synthetic construct
ADRRGDRGQI

SEQ ID NO: 77329 - protein, 10 aa, synthetic construct
DTTRGDYTSV

SEQ ID NO: 77330 - protein, 10 aa, synthetic construct
DTTRGDLTVT

SEQ ID NO: 77331 - protein, 10 aa, synthetic construct
DTTRGDLIGR

SEQ ID NO: 77332 - protein, 10 aa, synthetic construct
DTYRGDHGVL

SEQ ID NO: 77333 - protein, 10 aa, synthetic construct
DTYRGDHVNL

SEQ ID NO: 77334 - protein, 10 aa, synthetic construct
DTYRGDRDYL

SEQ ID NO: 77335 - protein, 10 aa, synthetic construct
DTYRGDYSSV

SEQ ID NO: 77336 - protein, 10 aa, synthetic construct
DTYRGDLTVT

SEQ ID NO: 77337 - protein, 10 aa, synthetic construct
DTNRGDHGVL

SEQ ID NO: 77338 - protein, 10 aa, synthetic construct
DTNRGDHVNL

SEQ ID NO: 77339 - protein, 10 aa, synthetic construct
ADRRGDRQGI

SEQ ID NO: 77340 - protein, 10 aa, synthetic construct
DTNRGDRDYL

SEQ ID NO: 77341 - protein, 10 aa, synthetic construct
DTNRGDYSSV

SEQ ID NO: 77342 - protein, 10 aa, synthetic construct
DTNRGDLTVT

SEQ ID NO: 77343 - protein, 10 aa, synthetic construct
DTQRGDRDYL

SEQ ID NO: 77344 - protein, 10 aa, synthetic construct
DTQRGDYTSV

SEQ ID NO: 77345 - protein, 10 aa, synthetic construct
DTQRGDLTVT

SEQ ID NO: 77346 - protein, 10 aa, synthetic construct
DTQRGDLIGR

SEQ ID NO: 77347 - protein, 10 aa, synthetic construct
DTDRGDRDYL

SEQ ID NO: 77348 - protein, 10 aa, synthetic construct
DTDRGDYTSV

SEQ ID NO: 77349 - protein, 10 aa, synthetic construct
DTDRGDLTVT

SEQ ID NO: 77350 - protein, 10 aa, synthetic construct
ADRRGDRSVV

SEQ ID NO: 77351 - protein, 10 aa, synthetic construct
DTDRGDLIGR

SEQ ID NO: 77352 - protein, 10 aa, synthetic construct
DTERGDRDYL

SEQ ID NO: 77353 - protein, 10 aa, synthetic construct
DTERGDYTSV

SEQ ID NO: 77354 - protein, 10 aa, synthetic construct
DTERGDLTVT

SEQ ID NO: 77355 - protein, 10 aa, synthetic construct
DTERGDLIGR

SEQ ID NO: 77356 - protein, 10 aa, synthetic construct
DYGRGDRDYL

SEQ ID NO: 77357 - protein, 10 aa, synthetic construct
DYGRGDYTSV

SEQ ID NO: 77358 - protein, 10 aa, synthetic construct
DYGRGDLTVT

SEQ ID NO: 77359 - protein, 10 aa, synthetic construct
DYGRGDLIGR

SEQ ID NO: 77360 - protein, 10 aa, synthetic construct
DYARGDRDYL

SEQ ID NO: 77361 - protein, 10 aa, synthetic construct
ADRRGDLTVT

SEQ ID NO: 77362 - protein, 10 aa, synthetic construct
DYARGDYTSV

SEQ ID NO: 77363 - protein, 10 aa, synthetic construct
DYARGDLTVT

SEQ ID NO: 77364 - protein, 10 aa, synthetic construct
DYARGDLIGR

SEQ ID NO: 77365 - protein, 10 aa, synthetic construct
DYVRGDHGVL

SEQ ID NO: 77366 - protein, 10 aa, synthetic construct
DYVRGDHVNL

SEQ ID NO: 77367 - protein, 10 aa, synthetic construct
DYVRGDRDYL

SEQ ID NO: 77368 - protein, 10 aa, synthetic construct
DYVRGDYSSV

SEQ ID NO: 77369 - protein, 10 aa, synthetic construct
DYVRGDLTVT

SEQ ID NO: 77370 - protein, 10 aa, synthetic construct
DYPRGDRDYL

SEQ ID NO: 77371 - protein, 10 aa, synthetic construct
DYPRGDYTSV

SEQ ID NO: 77372 - protein, 10 aa, synthetic construct
ADRRGDLIGR

SEQ ID NO: 77373 - protein, 10 aa, synthetic construct
DYPRGDLTVT

SEQ ID NO: 77374 - protein, 10 aa, synthetic construct
DYPRGDLIGR

SEQ ID NO: 77375 - protein, 10 aa, synthetic construct
DYLRGDHGVL

SEQ ID NO: 77376 - protein, 10 aa, synthetic construct
DYLRGDHVNL

SEQ ID NO: 77377 - protein, 10 aa, synthetic construct
DYLRGDRDYL

SEQ ID NO: 77378 - protein, 10 aa, synthetic construct
DYLRGDYSSV

SEQ ID NO: 77379 - protein, 10 aa, synthetic construct
DYLRGDLTVT

SEQ ID NO: 77380 - protein, 10 aa, synthetic construct
DYIRGDHGVL

SEQ ID NO: 77381 - protein, 10 aa, synthetic construct
DYIRGDRGQI

SEQ ID NO: 77382 - protein, 10 aa, synthetic construct
DYIRGDRQGI

SEQ ID NO: 77383 - protein, 10 aa, synthetic construct
ADRRGDRSQT

SEQ ID NO: 77384 - protein, 10 aa, synthetic construct
DYIRGDRGVV

SEQ ID NO: 77385 - protein, 10 aa, synthetic construct
DYIRGDYVGL

SEQ ID NO: 77386 - protein, 10 aa, synthetic construct
DYIRGDLIGR

SEQ ID NO: 77387 - protein, 10 aa, synthetic construct
DYIRGDQSTL

SEQ ID NO: 77388 - protein, 10 aa, synthetic construct
DYIRGDLLLS

SEQ ID NO: 77389 - protein, 10 aa, synthetic construct
DYMRGDHGVL

SEQ ID NO: 77390 - protein, 10 aa, synthetic construct
DYMRGDRGQI

SEQ ID NO: 77391 - protein, 10 aa, synthetic construct
DYMRGDRQGI

SEQ ID NO: 77392 - protein, 10 aa, synthetic construct
DYMRGDRGVV

SEQ ID NO: 77393 - protein, 10 aa, synthetic construct
DYMRGDYVGL

SEQ ID NO: 77394 - protein, 10 aa, synthetic construct
ADRRGDLLLS

SEQ ID NO: 77395 - protein, 10 aa, synthetic construct
DYMRGDLIGR

SEQ ID NO: 77396 - protein, 10 aa, synthetic construct
DYMRGDQSTL

SEQ ID NO: 77397 - protein, 10 aa, synthetic construct
DYMRGDLLLS

SEQ ID NO: 77398 - protein, 10 aa, synthetic construct
DYWRGDHGVL

SEQ ID NO: 77399 - protein, 10 aa, synthetic construct
DYWRGDHVNL

SEQ ID NO: 77400 - protein, 10 aa, synthetic construct
DYWRGDRDYL

SEQ ID NO: 77401 - protein, 10 aa, synthetic construct
DYWRGDYSSV

SEQ ID NO: 77402 - protein, 10 aa, synthetic construct
DYWRGDLTVT

SEQ ID NO: 77403 - protein, 10 aa, synthetic construct
DYFRGDHGVL

SEQ ID NO: 77404 - protein, 10 aa, synthetic construct
DYFRGDRGQI

SEQ ID NO: 77405 - protein, 10 aa, synthetic construct
DSPRGDFQNT

SEQ ID NO: 77406 - protein, 10 aa, synthetic construct
ADHRGDRGVV

SEQ ID NO: 77407 - protein, 10 aa, synthetic construct
DYFRGDRQGI

SEQ ID NO: 77408 - protein, 10 aa, synthetic construct
DYFRGDRGVV

SEQ ID NO: 77409 - protein, 10 aa, synthetic construct
DYFRGDYVGL

SEQ ID NO: 77410 - protein, 10 aa, synthetic construct
DYFRGDLIGR

SEQ ID NO: 77411 - protein, 10 aa, synthetic construct
DYFRGDQSTL

SEQ ID NO: 77412 - protein, 10 aa, synthetic construct
DYFRGDLLLS

SEQ ID NO: 77413 - protein, 10 aa, synthetic construct
DYKRGDHGVL

SEQ ID NO: 77414 - protein, 10 aa, synthetic construct
DYKRGDRGQI

SEQ ID NO: 77415 - protein, 10 aa, synthetic construct
DYKRGDRQGI

SEQ ID NO: 77416 - protein, 10 aa, synthetic construct
DYKRGDRGVV

SEQ ID NO: 77417 - protein, 10 aa, synthetic construct
ADSRGDHGVL

SEQ ID NO: 77418 - protein, 10 aa, synthetic construct
DYKRGDYVGL

SEQ ID NO: 77419 - protein, 10 aa, synthetic construct
DYKRGDLIGR

SEQ ID NO: 77420 - protein, 10 aa, synthetic construct
DYKRGDQSTL

SEQ ID NO: 77421 - protein, 10 aa, synthetic construct
DYKRGDLLLS

SEQ ID NO: 77422 - protein, 10 aa, synthetic construct
DYRRGDRDYL

SEQ ID NO: 77423 - protein, 10 aa, synthetic construct
DYRRGDYTSV

SEQ ID NO: 77424 - protein, 10 aa, synthetic construct
DYRRGDLTVT

SEQ ID NO: 77425 - protein, 10 aa, synthetic construct
DYRRGDLIGR

SEQ ID NO: 77426 - protein, 10 aa, synthetic construct
DYHRGDHGVL

SEQ ID NO: 77427 - protein, 10 aa, synthetic construct
DYHRGDHVNL

SEQ ID NO: 77428 - protein, 10 aa, synthetic construct
ADSRGDRGQI

SEQ ID NO: 77429 - protein, 10 aa, synthetic construct
DYHRGDRDYL

SEQ ID NO: 77430 - protein, 10 aa, synthetic construct
DYHRGDYSSV

SEQ ID NO: 77431 - protein, 10 aa, synthetic construct
DYHRGDLTVT

SEQ ID NO: 77432 - protein, 10 aa, synthetic construct
DYSRGDHGVL

SEQ ID NO: 77433 - protein, 10 aa, synthetic construct
DYSRGDHVNL

SEQ ID NO: 77434 - protein, 10 aa, synthetic construct
DYSRGDRDYL

SEQ ID NO: 77435 - protein, 10 aa, synthetic construct
DYSRGDYSSV

SEQ ID NO: 77436 - protein, 10 aa, synthetic construct
DYSRGDLTVT

SEQ ID NO: 77437 - protein, 10 aa, synthetic construct
DYTRGDHGVL

SEQ ID NO: 77438 - protein, 10 aa, synthetic construct
DYTRGDHVNL

SEQ ID NO: 77439 - protein, 10 aa, synthetic construct
ADSRGDRQGI

SEQ ID NO: 77440 - protein, 10 aa, synthetic construct
DYTRGDRDYL

SEQ ID NO: 77441 - protein, 10 aa, synthetic construct
DYTRGDYSSV

SEQ ID NO: 77442 - protein, 10 aa, synthetic construct
DYTRGDLTVT

SEQ ID NO: 77443 - protein, 10 aa, synthetic construct
DYYRGDHGVL

SEQ ID NO: 77444 - protein, 10 aa, synthetic construct
DYYRGDRGQI

SEQ ID NO: 77445 - protein, 10 aa, synthetic construct
DYYRGDRQGI

SEQ ID NO: 77446 - protein, 10 aa, synthetic construct
DYYRGDRGVV

SEQ ID NO: 77447 - protein, 10 aa, synthetic construct
DYYRGDYVGL

SEQ ID NO: 77448 - protein, 10 aa, synthetic construct
DYYRGDLIGR

SEQ ID NO: 77449 - protein, 10 aa, synthetic construct
DYYRGDQSTL

SEQ ID NO: 77450 - protein, 10 aa, synthetic construct
ADSRGDRSVV

SEQ ID NO: 77451 - protein, 10 aa, synthetic construct
DYYRGDLLLS

SEQ ID NO: 77452 - protein, 10 aa, synthetic construct
DYNRGDHGVL

SEQ ID NO: 77453 - protein, 10 aa, synthetic construct
DYNRGDRGQI

SEQ ID NO: 77454 - protein, 10 aa, synthetic construct
DYNRGDRQGI

SEQ ID NO: 77455 - protein, 10 aa, synthetic construct
DYNRGDRGVV

SEQ ID NO: 77456 - protein, 10 aa, synthetic construct
DYNRGDYVGL

SEQ ID NO: 77457 - protein, 10 aa, synthetic construct
DYNRGDLIGR

SEQ ID NO: 77458 - protein, 10 aa, synthetic construct
DYNRGDQSTL

SEQ ID NO: 77459 - protein, 10 aa, synthetic construct
DYNRGDLLLS

SEQ ID NO: 77460 - protein, 10 aa, synthetic construct
DYQRGDHGVL

SEQ ID NO: 77461 - protein, 10 aa, synthetic construct
ADSRGDLTVT

SEQ ID NO: 77462 - protein, 10 aa, synthetic construct
DYQRGDHVNL

SEQ ID NO: 77463 - protein, 10 aa, synthetic construct
DYQRGDRDYL

SEQ ID NO: 77464 - protein, 10 aa, synthetic construct
DYQRGDYSSV

SEQ ID NO: 77465 - protein, 10 aa, synthetic construct
DYQRGDLTVT

SEQ ID NO: 77466 - protein, 10 aa, synthetic construct
DYDRGDHGVL

SEQ ID NO: 77467 - protein, 10 aa, synthetic construct
DYDRGDHVNL

SEQ ID NO: 77468 - protein, 10 aa, synthetic construct
DYDRGDRDYL

SEQ ID NO: 77469 - protein, 10 aa, synthetic construct
DYDRGDYSSV

SEQ ID NO: 77470 - protein, 10 aa, synthetic construct
DYDRGDLTVT

SEQ ID NO: 77471 - protein, 10 aa, synthetic construct
DYERGDHGVL

SEQ ID NO: 77472 - protein, 10 aa, synthetic construct
ADSRGDLIGR

SEQ ID NO: 77473 - protein, 10 aa, synthetic construct
DYERGDHVNL

SEQ ID NO: 77474 - protein, 10 aa, synthetic construct
DYERGDRDYL

SEQ ID NO: 77475 - protein, 10 aa, synthetic construct
DYERGDYSSV

SEQ ID NO: 77476 - protein, 10 aa, synthetic construct
DYERGDLTVT

SEQ ID NO: 77477 - protein, 10 aa, synthetic construct
DNGRGDRDYL

SEQ ID NO: 77478 - protein, 10 aa, synthetic construct
DNGRGDYTSV

SEQ ID NO: 77479 - protein, 10 aa, synthetic construct
DNGRGDLTVT

SEQ ID NO: 77480 - protein, 10 aa, synthetic construct
DNGRGDLIGR

SEQ ID NO: 77481 - protein, 10 aa, synthetic construct
DNARGDRDYL

SEQ ID NO: 77482 - protein, 10 aa, synthetic construct
DNARGDYTSV

SEQ ID NO: 77483 - protein, 10 aa, synthetic construct
ADSRGDRSQT

SEQ ID NO: 77484 - protein, 10 aa, synthetic construct
DNARGDLTVT

SEQ ID NO: 77485 - protein, 10 aa, synthetic construct
DNARGDLIGR

SEQ ID NO: 77486 - protein, 10 aa, synthetic construct
DNVRGDHGVL

SEQ ID NO: 77487 - protein, 10 aa, synthetic construct
DNVRGDHVNL

SEQ ID NO: 77488 - protein, 10 aa, synthetic construct
DNVRGDRDYL

SEQ ID NO: 77489 - protein, 10 aa, synthetic construct
DNVRGDYSSV

SEQ ID NO: 77490 - protein, 10 aa, synthetic construct
DNVRGDLTVT

SEQ ID NO: 77491 - protein, 10 aa, synthetic construct
DNPRGDRDYL

SEQ ID NO: 77492 - protein, 10 aa, synthetic construct
DNPRGDYTSV

SEQ ID NO: 77493 - protein, 10 aa, synthetic construct
DNPRGDLTVT

SEQ ID NO: 77494 - protein, 10 aa, synthetic construct
ADSRGDLLLS

SEQ ID NO: 77495 - protein, 10 aa, synthetic construct
DNPRGDLIGR

SEQ ID NO: 77496 - protein, 10 aa, synthetic construct
DNLRGDHGVL

SEQ ID NO: 77497 - protein, 10 aa, synthetic construct
DNLRGDHVNL

SEQ ID NO: 77498 - protein, 10 aa, synthetic construct
DNLRGDRDYL

SEQ ID NO: 77499 - protein, 10 aa, synthetic construct
DNLRGDYSSV

SEQ ID NO: 77500 - protein, 10 aa, synthetic construct
DNLRGDLTVT

SEQ ID NO: 77501 - protein, 10 aa, synthetic construct
DNIRGDHGVL

SEQ ID NO: 77502 - protein, 10 aa, synthetic construct
DNIRGDRGQI

SEQ ID NO: 77503 - protein, 10 aa, synthetic construct
DNIRGDRQGI

SEQ ID NO: 77504 - protein, 10 aa, synthetic construct
DNIRGDRGVV

SEQ ID NO: 77505 - protein, 10 aa, synthetic construct
ADTRGDRGVV

SEQ ID NO: 77506 - protein, 10 aa, synthetic construct
DNIRGDYVGL

SEQ ID NO: 77507 - protein, 10 aa, synthetic construct
DNIRGDLIGR

SEQ ID NO: 77508 - protein, 10 aa, synthetic construct
DNIRGDQSTL

SEQ ID NO: 77509 - protein, 10 aa, synthetic construct
DNIRGDLLLS

SEQ ID NO: 77510 - protein, 10 aa, synthetic construct
DNMRGDHGVL

SEQ ID NO: 77511 - protein, 10 aa, synthetic construct
DNMRGDRGQI

SEQ ID NO: 77512 - protein, 10 aa, synthetic construct
DNMRGDRQGI

SEQ ID NO: 77513 - protein, 10 aa, synthetic construct
DNMRGDRGVV

SEQ ID NO: 77514 - protein, 10 aa, synthetic construct
DNMRGDYVGL

SEQ ID NO: 77515 - protein, 10 aa, synthetic construct
DNMRGDLIGR

SEQ ID NO: 77516 - protein, 10 aa, synthetic construct
QSPRGDYNSL

SEQ ID NO: 77517 - protein, 10 aa, synthetic construct
ADQRGDRGVV

SEQ ID NO: 77518 - protein, 10 aa, synthetic construct
DNMRGDQSTL

SEQ ID NO: 77519 - protein, 10 aa, synthetic construct
DNMRGDLLLS

SEQ ID NO: 77520 - protein, 10 aa, synthetic construct
DNWRGDHGVL

SEQ ID NO: 77521 - protein, 10 aa, synthetic construct
DNWRGDHVNL

SEQ ID NO: 77522 - protein, 10 aa, synthetic construct
DNWRGDRDYL

SEQ ID NO: 77523 - protein, 10 aa, synthetic construct
DNWRGDYSSV

SEQ ID NO: 77524 - protein, 10 aa, synthetic construct
DNWRGDLTVT

SEQ ID NO: 77525 - protein, 10 aa, synthetic construct
DNFRGDHGVL

SEQ ID NO: 77526 - protein, 10 aa, synthetic construct
DNFRGDRGQI

SEQ ID NO: 77527 - protein, 10 aa, synthetic construct
DNFRGDRQGI

SEQ ID NO: 77528 - protein, 10 aa, synthetic construct
ADDRGDRGVV

SEQ ID NO: 77529 - protein, 10 aa, synthetic construct
DNFRGDRGVV

SEQ ID NO: 77530 - protein, 10 aa, synthetic construct
DNFRGDYVGL

SEQ ID NO: 77531 - protein, 10 aa, synthetic construct
DNFRGDLIGR

SEQ ID NO: 77532 - protein, 10 aa, synthetic construct
DNFRGDQSTL

SEQ ID NO: 77533 - protein, 10 aa, synthetic construct
DNFRGDLLLS

SEQ ID NO: 77534 - protein, 10 aa, synthetic construct
DNKRGDHGVL

SEQ ID NO: 77535 - protein, 10 aa, synthetic construct
DNKRGDRGQI

SEQ ID NO: 77536 - protein, 10 aa, synthetic construct
DNKRGDRQGI

SEQ ID NO: 77537 - protein, 10 aa, synthetic construct
DNKRGDRGVV

SEQ ID NO: 77538 - protein, 10 aa, synthetic construct
DNKRGDYVGL

SEQ ID NO: 77539 - protein, 10 aa, synthetic construct
ADERGDRGVV

SEQ ID NO: 77540 - protein, 10 aa, synthetic construct
DNKRGDLIGR

SEQ ID NO: 77541 - protein, 10 aa, synthetic construct
DNKRGDQSTL

SEQ ID NO: 77542 - protein, 10 aa, synthetic construct
DNKRGDLLLS

SEQ ID NO: 77543 - protein, 10 aa, synthetic construct
DNRRGDRDYL

SEQ ID NO: 77544 - protein, 10 aa, synthetic construct
DNRRGDYTSV

SEQ ID NO: 77545 - protein, 10 aa, synthetic construct
DNRRGDLTVT

SEQ ID NO: 77546 - protein, 10 aa, synthetic construct
DNRRGDLIGR

SEQ ID NO: 77547 - protein, 10 aa, synthetic construct
DNHRGDHGVL

SEQ ID NO: 77548 - protein, 10 aa, synthetic construct
DNHRGDHVNL

SEQ ID NO: 77549 - protein, 10 aa, synthetic construct
DNHRGDRDYL

SEQ ID NO: 77550 - protein, 10 aa, synthetic construct
AEGRGDHGVL

SEQ ID NO: 77551 - protein, 10 aa, synthetic construct
DNHRGDYSSV

SEQ ID NO: 77552 - protein, 10 aa, synthetic construct
DNHRGDLTVT

SEQ ID NO: 77553 - protein, 10 aa, synthetic construct
DNSRGDHGVL

SEQ ID NO: 77554 - protein, 10 aa, synthetic construct
DNSRGDHVNL

SEQ ID NO: 77555 - protein, 10 aa, synthetic construct
DNSRGDRDYL

SEQ ID NO: 77556 - protein, 10 aa, synthetic construct
DNSRGDYSSV

SEQ ID NO: 77557 - protein, 10 aa, synthetic construct
DNSRGDLTVT

SEQ ID NO: 77558 - protein, 10 aa, synthetic construct
DNTRGDHGVL

SEQ ID NO: 77559 - protein, 10 aa, synthetic construct
DNTRGDHVNL

SEQ ID NO: 77560 - protein, 10 aa, synthetic construct
DNTRGDRDYL

SEQ ID NO: 77561 - protein, 10 aa, synthetic construct
AEGRGDRGQI

SEQ ID NO: 77562 - protein, 10 aa, synthetic construct
DNTRGDYSSV

SEQ ID NO: 77563 - protein, 10 aa, synthetic construct
DNTRGDLTVT

SEQ ID NO: 77564 - protein, 10 aa, synthetic construct
DNYRGDHGVL

SEQ ID NO: 77565 - protein, 10 aa, synthetic construct
DNYRGDRGQI

SEQ ID NO: 77566 - protein, 10 aa, synthetic construct
DNYRGDRQGI

SEQ ID NO: 77567 - protein, 10 aa, synthetic construct
DNYRGDRGVV

SEQ ID NO: 77568 - protein, 10 aa, synthetic construct
DNYRGDYVGL

SEQ ID NO: 77569 - protein, 10 aa, synthetic construct
DNYRGDLIGR

SEQ ID NO: 77570 - protein, 10 aa, synthetic construct
DNYRGDQSTL

SEQ ID NO: 77571 - protein, 10 aa, synthetic construct
DNYRGDLLLS

SEQ ID NO: 77572 - protein, 10 aa, synthetic construct
AEGRGDRQGI

SEQ ID NO: 77573 - protein, 10 aa, synthetic construct
DNNRGDHGVL

SEQ ID NO: 77574 - protein, 10 aa, synthetic construct
DNNRGDRGQI

SEQ ID NO: 77575 - protein, 10 aa, synthetic construct
DNNRGDRQGI

SEQ ID NO: 77576 - protein, 10 aa, synthetic construct
DNNRGDRGVV

SEQ ID NO: 77577 - protein, 10 aa, synthetic construct
DNNRGDYVGL

SEQ ID NO: 77578 - protein, 10 aa, synthetic construct
DNNRGDLIGR

SEQ ID NO: 77579 - protein, 10 aa, synthetic construct
DNNRGDQSTL

SEQ ID NO: 77580 - protein, 10 aa, synthetic construct
DNNRGDLLLS

SEQ ID NO: 77581 - protein, 10 aa, synthetic construct
DNQRGDHGVL

SEQ ID NO: 77582 - protein, 10 aa, synthetic construct
DNQRGDHVNL

SEQ ID NO: 77583 - protein, 10 aa, synthetic construct
AEGRGDRSVV

SEQ ID NO: 77584 - protein, 10 aa, synthetic construct
DNQRGDRDYL

SEQ ID NO: 77585 - protein, 10 aa, synthetic construct
DNQRGDYSSV

SEQ ID NO: 77586 - protein, 10 aa, synthetic construct
DNQRGDLTVT

SEQ ID NO: 77587 - protein, 10 aa, synthetic construct
DNDRGDHGVL

SEQ ID NO: 77588 - protein, 10 aa, synthetic construct
DNDRGDHVNL

SEQ ID NO: 77589 - protein, 10 aa, synthetic construct
DNDRGDRDYL

SEQ ID NO: 77590 - protein, 10 aa, synthetic construct
DNDRGDYSSV

SEQ ID NO: 77591 - protein, 10 aa, synthetic construct
DNDRGDLTVT

SEQ ID NO: 77592 - protein, 10 aa, synthetic construct
DNERGDHGVL

SEQ ID NO: 77593 - protein, 10 aa, synthetic construct
DNERGDHVNL

SEQ ID NO: 77594 - protein, 10 aa, synthetic construct
AEGRGDLTVT

SEQ ID NO: 77595 - protein, 10 aa, synthetic construct
DNERGDRDYL

SEQ ID NO: 77596 - protein, 10 aa, synthetic construct
DNERGDYSSV

SEQ ID NO: 77597 - protein, 10 aa, synthetic construct
DNERGDLTVT

SEQ ID NO: 77598 - protein, 10 aa, synthetic construct
DQGRGDYNSL

SEQ ID NO: 77599 - protein, 10 aa, synthetic construct
DQGRGDYTSV

SEQ ID NO: 77600 - protein, 10 aa, synthetic construct
DQGRGDYTSM

SEQ ID NO: 77601 - protein, 10 aa, synthetic construct
DQGRGDFQNT

SEQ ID NO: 77602 - protein, 10 aa, synthetic construct
DQARGDYNSL

SEQ ID NO: 77603 - protein, 10 aa, synthetic construct
DQARGDYTSV

SEQ ID NO: 77604 - protein, 10 aa, synthetic construct
DQARGDYTSM

SEQ ID NO: 77605 - protein, 10 aa, synthetic construct
AEGRGDLIGR

SEQ ID NO: 77606 - protein, 10 aa, synthetic construct
DQARGDFQNT

SEQ ID NO: 77607 - protein, 10 aa, synthetic construct
DQVRGDRDYL

SEQ ID NO: 77608 - protein, 10 aa, synthetic construct
DQVRGDYTSV

SEQ ID NO: 77609 - protein, 10 aa, synthetic construct
DQVRGDLTVT

SEQ ID NO: 77610 - protein, 10 aa, synthetic construct
DQVRGDLIGR

SEQ ID NO: 77611 - protein, 10 aa, synthetic construct
DQPRGDYNSL

SEQ ID NO: 77612 - protein, 10 aa, synthetic construct
DQPRGDYTSV

SEQ ID NO: 77613 - protein, 10 aa, synthetic construct
DQPRGDYTSM

SEQ ID NO: 77614 - protein, 10 aa, synthetic construct
DQPRGDFQNT

SEQ ID NO: 77615 - protein, 10 aa, synthetic construct
DQLRGDRDYL

SEQ ID NO: 77616 - protein, 10 aa, synthetic construct
AEGRGDRSQT

SEQ ID NO: 77617 - protein, 10 aa, synthetic construct
DQLRGDYTSV

SEQ ID NO: 77618 - protein, 10 aa, synthetic construct
DQLRGDLTVT

SEQ ID NO: 77619 - protein, 10 aa, synthetic construct
DQLRGDLIGR

SEQ ID NO: 77620 - protein, 10 aa, synthetic construct
DQIRGDHGVL

SEQ ID NO: 77621 - protein, 10 aa, synthetic construct
DQIRGDHVNL

SEQ ID NO: 77622 - protein, 10 aa, synthetic construct
DQIRGDRDYL

SEQ ID NO: 77623 - protein, 10 aa, synthetic construct
DQIRGDYSSV

SEQ ID NO: 77624 - protein, 10 aa, synthetic construct
DQIRGDLTVT

SEQ ID NO: 77625 - protein, 10 aa, synthetic construct
DQMRGDHGVL

SEQ ID NO: 77626 - protein, 10 aa, synthetic construct
DQMRGDHVNL

SEQ ID NO: 77627 - protein, 10 aa, synthetic construct
QSPRGDYTSV

SEQ ID NO: 77628 - protein, 10 aa, synthetic construct
AEGRGDLLLS

SEQ ID NO: 77629 - protein, 10 aa, synthetic construct
DQMRGDRDYL

SEQ ID NO: 77630 - protein, 10 aa, synthetic construct
DQMRGDYSSV

SEQ ID NO: 77631 - protein, 10 aa, synthetic construct
DQMRGDLTVT

SEQ ID NO: 77632 - protein, 10 aa, synthetic construct
DQWRGDRDYL

SEQ ID NO: 77633 - protein, 10 aa, synthetic construct
DQWRGDYTSV

SEQ ID NO: 77634 - protein, 10 aa, synthetic construct
DQWRGDLTVT

SEQ ID NO: 77635 - protein, 10 aa, synthetic construct
DQWRGDLIGR

SEQ ID NO: 77636 - protein, 10 aa, synthetic construct
DQFRGDHGVL

SEQ ID NO: 77637 - protein, 10 aa, synthetic construct
DQFRGDHVNL

SEQ ID NO: 77638 - protein, 10 aa, synthetic construct
DQFRGDRDYL

SEQ ID NO: 77639 - protein, 10 aa, synthetic construct
AEARGDHGVL

SEQ ID NO: 77640 - protein, 10 aa, synthetic construct
DQFRGDYSSV

SEQ ID NO: 77641 - protein, 10 aa, synthetic construct
DQFRGDLTVT

SEQ ID NO: 77642 - protein, 10 aa, synthetic construct
DQKRGDHGVL

SEQ ID NO: 77643 - protein, 10 aa, synthetic construct
DQKRGDHVNL

SEQ ID NO: 77644 - protein, 10 aa, synthetic construct
DQKRGDRDYL

SEQ ID NO: 77645 - protein, 10 aa, synthetic construct
DQKRGDYSSV

SEQ ID NO: 77646 - protein, 10 aa, synthetic construct
DQKRGDLTVT

SEQ ID NO: 77647 - protein, 10 aa, synthetic construct
DQRRGDYNSL

SEQ ID NO: 77648 - protein, 10 aa, synthetic construct
DQRRGDYTSV

SEQ ID NO: 77649 - protein, 10 aa, synthetic construct
DQRRGDYTSM

SEQ ID NO: 77650 - protein, 10 aa, synthetic construct
AEARGDRGQI

SEQ ID NO: 77651 - protein, 10 aa, synthetic construct
DQRRGDFQNT

SEQ ID NO: 77652 - protein, 10 aa, synthetic construct
DQHRGDRDYL

SEQ ID NO: 77653 - protein, 10 aa, synthetic construct
DQHRGDYTSV

SEQ ID NO: 77654 - protein, 10 aa, synthetic construct
DQHRGDLTVT

SEQ ID NO: 77655 - protein, 10 aa, synthetic construct
DQHRGDLIGR

SEQ ID NO: 77656 - protein, 10 aa, synthetic construct
DQSRGDRDYL

SEQ ID NO: 77657 - protein, 10 aa, synthetic construct
DQSRGDYTSV

SEQ ID NO: 77658 - protein, 10 aa, synthetic construct
DQSRGDLTVT

SEQ ID NO: 77659 - protein, 10 aa, synthetic construct
DQSRGDLIGR

SEQ ID NO: 77660 - protein, 10 aa, synthetic construct
DQTRGDRDYL

SEQ ID NO: 77661 - protein, 10 aa, synthetic construct
AEARGDRQGI

SEQ ID NO: 77662 - protein, 10 aa, synthetic construct
DQTRGDYTSV

SEQ ID NO: 77663 - protein, 10 aa, synthetic construct
DQTRGDLTVT

SEQ ID NO: 77664 - protein, 10 aa, synthetic construct
DQTRGDLIGR

SEQ ID NO: 77665 - protein, 10 aa, synthetic construct
DQYRGDHGVL

SEQ ID NO: 77666 - protein, 10 aa, synthetic construct
DQYRGDHVNL

SEQ ID NO: 77667 - protein, 10 aa, synthetic construct
DQYRGDRDYL

SEQ ID NO: 77668 - protein, 10 aa, synthetic construct
DQYRGDYSSV

SEQ ID NO: 77669 - protein, 10 aa, synthetic construct
DQYRGDLTVT

SEQ ID NO: 77670 - protein, 10 aa, synthetic construct
DQNRGDHGVL

SEQ ID NO: 77671 - protein, 10 aa, synthetic construct
DQNRGDHVNL

SEQ ID NO: 77672 - protein, 10 aa, synthetic construct
AEARGDRSVV

SEQ ID NO: 77673 - protein, 10 aa, synthetic construct
DQNRGDRDYL

SEQ ID NO: 77674 - protein, 10 aa, synthetic construct
DQNRGDYSSV

SEQ ID NO: 77675 - protein, 10 aa, synthetic construct
DQNRGDLTVT

SEQ ID NO: 77676 - protein, 10 aa, synthetic construct
DQQRGDRDYL

SEQ ID NO: 77677 - protein, 10 aa, synthetic construct
DQQRGDYTSV

SEQ ID NO: 77678 - protein, 10 aa, synthetic construct
DQQRGDLTVT

SEQ ID NO: 77679 - protein, 10 aa, synthetic construct
DQQRGDLIGR

SEQ ID NO: 77680 - protein, 10 aa, synthetic construct
DQDRGDRDYL

SEQ ID NO: 77681 - protein, 10 aa, synthetic construct
DQDRGDYTSV

SEQ ID NO: 77682 - protein, 10 aa, synthetic construct
DQDRGDLTVT

SEQ ID NO: 77683 - protein, 10 aa, synthetic construct
AEARGDLTVT

SEQ ID NO: 77684 - protein, 10 aa, synthetic construct
DQDRGDLIGR

SEQ ID NO: 77685 - protein, 10 aa, synthetic construct
DQERGDRDYL

SEQ ID NO: 77686 - protein, 10 aa, synthetic construct
DQERGDYTSV

SEQ ID NO: 77687 - protein, 10 aa, synthetic construct
DQERGDLTVT

SEQ ID NO: 77688 - protein, 10 aa, synthetic construct
DQERGDLIGR

SEQ ID NO: 77689 - protein, 10 aa, synthetic construct
DDGRGDYNSL

SEQ ID NO: 77690 - protein, 10 aa, synthetic construct
DDGRGDYTSV

SEQ ID NO: 77691 - protein, 10 aa, synthetic construct
DDGRGDYTSM

SEQ ID NO: 77692 - protein, 10 aa, synthetic construct
DDGRGDFQNT

SEQ ID NO: 77693 - protein, 10 aa, synthetic construct
DDARGDYNSL

SEQ ID NO: 77694 - protein, 10 aa, synthetic construct
AEARGDLIGR

SEQ ID NO: 77695 - protein, 10 aa, synthetic construct
DDARGDYTSV

SEQ ID NO: 77696 - protein, 10 aa, synthetic construct
DDARGDYTSM

SEQ ID NO: 77697 - protein, 10 aa, synthetic construct
DDARGDFQNT

SEQ ID NO: 77698 - protein, 10 aa, synthetic construct
DDVRGDRDYL

SEQ ID NO: 77699 - protein, 10 aa, synthetic construct
DDVRGDYTSV

SEQ ID NO: 77700 - protein, 10 aa, synthetic construct
DDVRGDLTVT

SEQ ID NO: 77701 - protein, 10 aa, synthetic construct
DDVRGDLIGR

SEQ ID NO: 77702 - protein, 10 aa, synthetic construct
DDPRGDYNSL

SEQ ID NO: 77703 - protein, 10 aa, synthetic construct
DDPRGDYTSV

SEQ ID NO: 77704 - protein, 10 aa, synthetic construct
DDPRGDYTSM

SEQ ID NO: 77705 - protein, 10 aa, synthetic construct
AEARGDRSQT

SEQ ID NO: 77706 - protein, 10 aa, synthetic construct
DDPRGDFQNT

SEQ ID NO: 77707 - protein, 10 aa, synthetic construct
DDLRGDRDYL

SEQ ID NO: 77708 - protein, 10 aa, synthetic construct
DDLRGDYTSV

SEQ ID NO: 77709 - protein, 10 aa, synthetic construct
DDLRGDLTVT

SEQ ID NO: 77710 - protein, 10 aa, synthetic construct
DDLRGDLIGR

SEQ ID NO: 77711 - protein, 10 aa, synthetic construct
DDIRGDHGVL

SEQ ID NO: 77712 - protein, 10 aa, synthetic construct
DDIRGDHVNL

SEQ ID NO: 77713 - protein, 10 aa, synthetic construct
DDIRGDRDYL

SEQ ID NO: 77714 - protein, 10 aa, synthetic construct
DDIRGDYSSV

SEQ ID NO: 77715 - protein, 10 aa, synthetic construct
DDIRGDLTVT

SEQ ID NO: 77716 - protein, 10 aa, synthetic construct
AEARGDLLLS

SEQ ID NO: 77717 - protein, 10 aa, synthetic construct
DDMRGDHGVL

SEQ ID NO: 77718 - protein, 10 aa, synthetic construct
DDMRGDHVNL

SEQ ID NO: 77719 - protein, 10 aa, synthetic construct
DDMRGDRDYL

SEQ ID NO: 77720 - protein, 10 aa, synthetic construct
DDMRGDYSSV

SEQ ID NO: 77721 - protein, 10 aa, synthetic construct
DDMRGDLTVT

SEQ ID NO: 77722 - protein, 10 aa, synthetic construct
DDWRGDRDYL

SEQ ID NO: 77723 - protein, 10 aa, synthetic construct
DDWRGDYTSV

SEQ ID NO: 77724 - protein, 10 aa, synthetic construct
DDWRGDLTVT

SEQ ID NO: 77725 - protein, 10 aa, synthetic construct
DDWRGDLIGR

SEQ ID NO: 77726 - protein, 10 aa, synthetic construct
DDFRGDHGVL

SEQ ID NO: 77727 - protein, 10 aa, synthetic construct
AEVRGDHGVL

SEQ ID NO: 77728 - protein, 10 aa, synthetic construct
DDFRGDHVNL

SEQ ID NO: 77729 - protein, 10 aa, synthetic construct
DDFRGDRDYL

SEQ ID NO: 77730 - protein, 10 aa, synthetic construct
DDFRGDYSSV

SEQ ID NO: 77731 - protein, 10 aa, synthetic construct
DDFRGDLTVT

SEQ ID NO: 77732 - protein, 10 aa, synthetic construct
DDKRGDHGVL

SEQ ID NO: 77733 - protein, 10 aa, synthetic construct
DDKRGDHVNL

SEQ ID NO: 77734 - protein, 10 aa, synthetic construct
DDKRGDRDYL

SEQ ID NO: 77735 - protein, 10 aa, synthetic construct
DDKRGDYSSV

SEQ ID NO: 77736 - protein, 10 aa, synthetic construct
DDKRGDLTVT

SEQ ID NO: 77737 - protein, 10 aa, synthetic construct
DDRRGDYNSL

SEQ ID NO: 77738 - protein, 10 aa, synthetic construct
QSPRGDYTSM

SEQ ID NO: 77739 - protein, 10 aa, synthetic construct
AEVRGDRGQI

SEQ ID NO: 77740 - protein, 10 aa, synthetic construct
DDRRGDYTSV

SEQ ID NO: 77741 - protein, 10 aa, synthetic construct
DDRRGDYTSM

SEQ ID NO: 77742 - protein, 10 aa, synthetic construct
DDRRGDFQNT

SEQ ID NO: 77743 - protein, 10 aa, synthetic construct
DDHRGDRDYL

SEQ ID NO: 77744 - protein, 10 aa, synthetic construct
DDHRGDYTSV

SEQ ID NO: 77745 - protein, 10 aa, synthetic construct
DDHRGDLTVT

SEQ ID NO: 77746 - protein, 10 aa, synthetic construct
DDHRGDLIGR

SEQ ID NO: 77747 - protein, 10 aa, synthetic construct
DDSRGDRDYL

SEQ ID NO: 77748 - protein, 10 aa, synthetic construct
DDSRGDYTSV

SEQ ID NO: 77749 - protein, 10 aa, synthetic construct
DDSRGDLTVT

SEQ ID NO: 77750 - protein, 10 aa, synthetic construct
AEVRGDRQGI

SEQ ID NO: 77751 - protein, 10 aa, synthetic construct
DDSRGDLIGR

SEQ ID NO: 77752 - protein, 10 aa, synthetic construct
DDTRGDRDYL

SEQ ID NO: 77753 - protein, 10 aa, synthetic construct
DDTRGDYTSV

SEQ ID NO: 77754 - protein, 10 aa, synthetic construct
DDTRGDLTVT

SEQ ID NO: 77755 - protein, 10 aa, synthetic construct
DDTRGDLIGR

SEQ ID NO: 77756 - protein, 10 aa, synthetic construct
DDYRGDHGVL

SEQ ID NO: 77757 - protein, 10 aa, synthetic construct
DDYRGDHVNL

SEQ ID NO: 77758 - protein, 10 aa, synthetic construct
DDYRGDRDYL

SEQ ID NO: 77759 - protein, 10 aa, synthetic construct
DDYRGDYSSV

SEQ ID NO: 77760 - protein, 10 aa, synthetic construct
DDYRGDLTVT

SEQ ID NO: 77761 - protein, 10 aa, synthetic construct
AEVRGDRSVV

SEQ ID NO: 77762 - protein, 10 aa, synthetic construct
DDNRGDHGVL

SEQ ID NO: 77763 - protein, 10 aa, synthetic construct
DDNRGDHVNL

SEQ ID NO: 77764 - protein, 10 aa, synthetic construct
DDNRGDRDYL

SEQ ID NO: 77765 - protein, 10 aa, synthetic construct
DDNRGDYSSV

SEQ ID NO: 77766 - protein, 10 aa, synthetic construct
DDNRGDLTVT

SEQ ID NO: 77767 - protein, 10 aa, synthetic construct
DDQRGDRDYL

SEQ ID NO: 77768 - protein, 10 aa, synthetic construct
DDQRGDYTSV

SEQ ID NO: 77769 - protein, 10 aa, synthetic construct
DDQRGDLTVT

SEQ ID NO: 77770 - protein, 10 aa, synthetic construct
DDQRGDLIGR

SEQ ID NO: 77771 - protein, 10 aa, synthetic construct
DDDRGDRDYL

SEQ ID NO: 77772 - protein, 10 aa, synthetic construct
AEVRGDLTVT

SEQ ID NO: 77773 - protein, 10 aa, synthetic construct
DDDRGDYTSV

SEQ ID NO: 77774 - protein, 10 aa, synthetic construct
DDDRGDLTVT

SEQ ID NO: 77775 - protein, 10 aa, synthetic construct
DDDRGDLIGR

SEQ ID NO: 77776 - protein, 10 aa, synthetic construct
DDERGDRDYL

SEQ ID NO: 77777 - protein, 10 aa, synthetic construct
DDERGDYTSV

SEQ ID NO: 77778 - protein, 10 aa, synthetic construct
DDERGDLTVT

SEQ ID NO: 77779 - protein, 10 aa, synthetic construct
DDERGDLIGR

SEQ ID NO: 77780 - protein, 10 aa, synthetic construct
DEGRGDYNSL

SEQ ID NO: 77781 - protein, 10 aa, synthetic construct
DEGRGDYTSV

SEQ ID NO: 77782 - protein, 10 aa, synthetic construct
DEGRGDYTSM

SEQ ID NO: 77783 - protein, 10 aa, synthetic construct
AEVRGDLIGR

SEQ ID NO: 77784 - protein, 10 aa, synthetic construct
DEGRGDFQNT

SEQ ID NO: 77785 - protein, 10 aa, synthetic construct
DEARGDYNSL

SEQ ID NO: 77786 - protein, 10 aa, synthetic construct
DEARGDYTSV

SEQ ID NO: 77787 - protein, 10 aa, synthetic construct
DEARGDYTSM

SEQ ID NO: 77788 - protein, 10 aa, synthetic construct
DEARGDFQNT

SEQ ID NO: 77789 - protein, 10 aa, synthetic construct
DEVRGDRDYL

SEQ ID NO: 77790 - protein, 10 aa, synthetic construct
DEVRGDYTSV

SEQ ID NO: 77791 - protein, 10 aa, synthetic construct
DEVRGDLTVT

SEQ ID NO: 77792 - protein, 10 aa, synthetic construct
DEVRGDLIGR

SEQ ID NO: 77793 - protein, 10 aa, synthetic construct
DEPRGDYNSL

SEQ ID NO: 77794 - protein, 10 aa, synthetic construct
AEVRGDRSQT

SEQ ID NO: 77795 - protein, 10 aa, synthetic construct
DEPRGDYTSV

SEQ ID NO: 77796 - protein, 10 aa, synthetic construct
DEPRGDYTSM

SEQ ID NO: 77797 - protein, 10 aa, synthetic construct
DEPRGDFQNT

SEQ ID NO: 77798 - protein, 10 aa, synthetic construct
DELRGDRDYL

SEQ ID NO: 77799 - protein, 10 aa, synthetic construct
DELRGDYTSV

SEQ ID NO: 77800 - protein, 10 aa, synthetic construct
DELRGDLTVT

SEQ ID NO: 77801 - protein, 10 aa, synthetic construct
DELRGDLIGR

SEQ ID NO: 77802 - protein, 10 aa, synthetic construct
DEIRGDHGVL

SEQ ID NO: 77803 - protein, 10 aa, synthetic construct
DEIRGDHVNL

SEQ ID NO: 77804 - protein, 10 aa, synthetic construct
DEIRGDRDYL

SEQ ID NO: 77805 - protein, 10 aa, synthetic construct
AEVRGDLLLS

SEQ ID NO: 77806 - protein, 10 aa, synthetic construct
DEIRGDYSSV

SEQ ID NO: 77807 - protein, 10 aa, synthetic construct
DEIRGDLTVT

SEQ ID NO: 77808 - protein, 10 aa, synthetic construct
DEMRGDHGVL

SEQ ID NO: 77809 - protein, 10 aa, synthetic construct
DEMRGDHVNL

SEQ ID NO: 77810 - protein, 10 aa, synthetic construct
DEMRGDRDYL

SEQ ID NO: 77811 - protein, 10 aa, synthetic construct
DEMRGDYSSV

SEQ ID NO: 77812 - protein, 10 aa, synthetic construct
DEMRGDLTVT

SEQ ID NO: 77813 - protein, 10 aa, synthetic construct
DEWRGDRDYL

SEQ ID NO: 77814 - protein, 10 aa, synthetic construct
DEWRGDYTSV

SEQ ID NO: 77815 - protein, 10 aa, synthetic construct
DEWRGDLTVT

SEQ ID NO: 77816 - protein, 10 aa, synthetic construct
AEPRGDHGVL

SEQ ID NO: 77817 - protein, 10 aa, synthetic construct
DEWRGDLIGR

SEQ ID NO: 77818 - protein, 10 aa, synthetic construct
DEFRGDHGVL

SEQ ID NO: 77819 - protein, 10 aa, synthetic construct
DEFRGDHVNL

SEQ ID NO: 77820 - protein, 10 aa, synthetic construct
DEFRGDRDYL

SEQ ID NO: 77821 - protein, 10 aa, synthetic construct
DEFRGDYSSV

SEQ ID NO: 77822 - protein, 10 aa, synthetic construct
DEFRGDLTVT

SEQ ID NO: 77823 - protein, 10 aa, synthetic construct
DEKRGDHGVL

SEQ ID NO: 77824 - protein, 10 aa, synthetic construct
DEKRGDHVNL

SEQ ID NO: 77825 - protein, 10 aa, synthetic construct
DEKRGDRDYL

SEQ ID NO: 77826 - protein, 10 aa, synthetic construct
DEKRGDYSSV

SEQ ID NO: 77827 - protein, 10 aa, synthetic construct
AEPRGDRGQI

SEQ ID NO: 77828 - protein, 10 aa, synthetic construct
DEKRGDLTVT

SEQ ID NO: 77829 - protein, 10 aa, synthetic construct
DERRGDYNSL

SEQ ID NO: 77830 - protein, 10 aa, synthetic construct
DERRGDYTSV

SEQ ID NO: 77831 - protein, 10 aa, synthetic construct
DERRGDYTSM

SEQ ID NO: 77832 - protein, 10 aa, synthetic construct
DERRGDFQNT

SEQ ID NO: 77833 - protein, 10 aa, synthetic construct
DEHRGDRDYL

SEQ ID NO: 77834 - protein, 10 aa, synthetic construct
DEHRGDYTSV

SEQ ID NO: 77835 - protein, 10 aa, synthetic construct
DEHRGDLTVT

SEQ ID NO: 77836 - protein, 10 aa, synthetic construct
DEHRGDLIGR

SEQ ID NO: 77837 - protein, 10 aa, synthetic construct
DESRGDRDYL

SEQ ID NO: 77838 - protein, 10 aa, synthetic construct
AEPRGDRQGI

SEQ ID NO: 77839 - protein, 10 aa, synthetic construct
DESRGDYTSV

SEQ ID NO: 77840 - protein, 10 aa, synthetic construct
DESRGDLTVT

SEQ ID NO: 77841 - protein, 10 aa, synthetic construct
DESRGDLIGR

SEQ ID NO: 77842 - protein, 10 aa, synthetic construct
DETRGDRDYL

SEQ ID NO: 77843 - protein, 10 aa, synthetic construct
DETRGDYTSV

SEQ ID NO: 77844 - protein, 10 aa, synthetic construct
DETRGDLTVT

SEQ ID NO: 77845 - protein, 10 aa, synthetic construct
DETRGDLIGR

SEQ ID NO: 77846 - protein, 10 aa, synthetic construct
DEYRGDHGVL

SEQ ID NO: 77847 - protein, 10 aa, synthetic construct
DEYRGDHVNL

SEQ ID NO: 77848 - protein, 10 aa, synthetic construct
DEYRGDRDYL

SEQ ID NO: 77849 - protein, 10 aa, synthetic construct
QSPRGDFQNT

SEQ ID NO: 77850 - protein, 10 aa, synthetic construct
AEPRGDRSVV

SEQ ID NO: 77851 - protein, 10 aa, synthetic construct
DEYRGDYSSV

SEQ ID NO: 77852 - protein, 10 aa, synthetic construct
DEYRGDLTVT

SEQ ID NO: 77853 - protein, 10 aa, synthetic construct
DENRGDHGVL

SEQ ID NO: 77854 - protein, 10 aa, synthetic construct
DENRGDHVNL

SEQ ID NO: 77855 - protein, 10 aa, synthetic construct
DENRGDRDYL

SEQ ID NO: 77856 - protein, 10 aa, synthetic construct
DENRGDYSSV

SEQ ID NO: 77857 - protein, 10 aa, synthetic construct
DENRGDLTVT

SEQ ID NO: 77858 - protein, 10 aa, synthetic construct
DEQRGDRDYL

SEQ ID NO: 77859 - protein, 10 aa, synthetic construct
DEQRGDYTSV

SEQ ID NO: 77860 - protein, 10 aa, synthetic construct
DEQRGDLTVT

SEQ ID NO: 77861 - protein, 10 aa, synthetic construct
AEPRGDLTVT

SEQ ID NO: 77862 - protein, 10 aa, synthetic construct
DEQRGDLIGR

SEQ ID NO: 77863 - protein, 10 aa, synthetic construct
DEDRGDRDYL

SEQ ID NO: 77864 - protein, 10 aa, synthetic construct
DEDRGDYTSV

SEQ ID NO: 77865 - protein, 10 aa, synthetic construct
DEDRGDLTVT

SEQ ID NO: 77866 - protein, 10 aa, synthetic construct
DEDRGDLIGR

SEQ ID NO: 77867 - protein, 10 aa, synthetic construct
DEERGDRDYL

SEQ ID NO: 77868 - protein, 10 aa, synthetic construct
DEERGDYTSV

SEQ ID NO: 77869 - protein, 10 aa, synthetic construct
DEERGDLTVT

SEQ ID NO: 77870 - protein, 10 aa, synthetic construct
DEERGDLIGR

SEQ ID NO: 77871 - protein, 10 aa, synthetic construct
QGGRGDYNSL

SEQ ID NO: 77872 - protein, 10 aa, synthetic construct
AEPRGDLIGR

SEQ ID NO: 77873 - protein, 10 aa, synthetic construct
QGGRGDFNNT

SEQ ID NO: 77874 - protein, 10 aa, synthetic construct
QGGRGDFNNL

SEQ ID NO: 77875 - protein, 10 aa, synthetic construct
QGGRGDFQNT

SEQ ID NO: 77876 - protein, 10 aa, synthetic construct
QGARGDYNSL

SEQ ID NO: 77877 - protein, 10 aa, synthetic construct
QGARGDFNNT

SEQ ID NO: 77878 - protein, 10 aa, synthetic construct
QGARGDFNNL

SEQ ID NO: 77879 - protein, 10 aa, synthetic construct
QGARGDFQNT

SEQ ID NO: 77880 - protein, 10 aa, synthetic construct
QGVRGDYNSL

SEQ ID NO: 77881 - protein, 10 aa, synthetic construct
QGVRGDYTSV

SEQ ID NO: 77882 - protein, 10 aa, synthetic construct
QGVRGDYTSM

SEQ ID NO: 77883 - protein, 10 aa, synthetic construct
AEPRGDRSQT

SEQ ID NO: 77884 - protein, 10 aa, synthetic construct
QGVRGDFQNT

SEQ ID NO: 77885 - protein, 10 aa, synthetic construct
QGPRGDYNSL

SEQ ID NO: 77886 - protein, 10 aa, synthetic construct
QGPRGDFNNT

SEQ ID NO: 77887 - protein, 10 aa, synthetic construct
QGPRGDFNNL

SEQ ID NO: 77888 - protein, 10 aa, synthetic construct
QGPRGDFQNT

SEQ ID NO: 77889 - protein, 10 aa, synthetic construct
QGLRGDYNSL

SEQ ID NO: 77890 - protein, 10 aa, synthetic construct
QGLRGDYTSV

SEQ ID NO: 77891 - protein, 10 aa, synthetic construct
QGLRGDYTSM

SEQ ID NO: 77892 - protein, 10 aa, synthetic construct
QGLRGDFQNT

SEQ ID NO: 77893 - protein, 10 aa, synthetic construct
QGIRGDRDYL

SEQ ID NO: 77894 - protein, 10 aa, synthetic construct
AEPRGDLLLS

SEQ ID NO: 77895 - protein, 10 aa, synthetic construct
QGIRGDYTSV

SEQ ID NO: 77896 - protein, 10 aa, synthetic construct
QGIRGDLTVT

SEQ ID NO: 77897 - protein, 10 aa, synthetic construct
QGIRGDLIGR

SEQ ID NO: 77898 - protein, 10 aa, synthetic construct
QGMRGDRDYL

SEQ ID NO: 77899 - protein, 10 aa, synthetic construct
QGMRGDYTSV

SEQ ID NO: 77900 - protein, 10 aa, synthetic construct
QGMRGDLTVT

SEQ ID NO: 77901 - protein, 10 aa, synthetic construct
QGMRGDLIGR

SEQ ID NO: 77902 - protein, 10 aa, synthetic construct
QGWRGDYNSL

SEQ ID NO: 77903 - protein, 10 aa, synthetic construct
QGWRGDYTSV

SEQ ID NO: 77904 - protein, 10 aa, synthetic construct
QGWRGDYTSM

SEQ ID NO: 77905 - protein, 10 aa, synthetic construct
AELRGDHGVL

SEQ ID NO: 77906 - protein, 10 aa, synthetic construct
QGWRGDFQNT

SEQ ID NO: 77907 - protein, 10 aa, synthetic construct
QGFRGDRDYL

SEQ ID NO: 77908 - protein, 10 aa, synthetic construct
QGFRGDYTSV

SEQ ID NO: 77909 - protein, 10 aa, synthetic construct
QGFRGDLTVT

SEQ ID NO: 77910 - protein, 10 aa, synthetic construct
QGFRGDLIGR

SEQ ID NO: 77911 - protein, 10 aa, synthetic construct
QGKRGDRDYL

SEQ ID NO: 77912 - protein, 10 aa, synthetic construct
QGKRGDYTSV

SEQ ID NO: 77913 - protein, 10 aa, synthetic construct
QGKRGDLTVT

SEQ ID NO: 77914 - protein, 10 aa, synthetic construct
QGKRGDLIGR

SEQ ID NO: 77915 - protein, 10 aa, synthetic construct
QGRRGDYNSL

SEQ ID NO: 77916 - protein, 10 aa, synthetic construct
AELRGDRGQI

SEQ ID NO: 77917 - protein, 10 aa, synthetic construct
QGRRGDFNNT

SEQ ID NO: 77918 - protein, 10 aa, synthetic construct
QGRRGDFNNL

SEQ ID NO: 77919 - protein, 10 aa, synthetic construct
QGRRGDFQNT

SEQ ID NO: 77920 - protein, 10 aa, synthetic construct
QGHRGDYNSL

SEQ ID NO: 77921 - protein, 10 aa, synthetic construct
QGHRGDYTSV

SEQ ID NO: 77922 - protein, 10 aa, synthetic construct
QGHRGDYTSM

SEQ ID NO: 77923 - protein, 10 aa, synthetic construct
QGHRGDFQNT

SEQ ID NO: 77924 - protein, 10 aa, synthetic construct
QGSRGDYNSL

SEQ ID NO: 77925 - protein, 10 aa, synthetic construct
QGSRGDYTSV

SEQ ID NO: 77926 - protein, 10 aa, synthetic construct
QGSRGDYTSM

SEQ ID NO: 77927 - protein, 10 aa, synthetic construct
AELRGDRQGI

SEQ ID NO: 77928 - protein, 10 aa, synthetic construct
QGSRGDFQNT

SEQ ID NO: 77929 - protein, 10 aa, synthetic construct
QGTRGDYNSL

SEQ ID NO: 77930 - protein, 10 aa, synthetic construct
QGTRGDYTSV

SEQ ID NO: 77931 - protein, 10 aa, synthetic construct
QGTRGDYTSM

SEQ ID NO: 77932 - protein, 10 aa, synthetic construct
QGTRGDFQNT

SEQ ID NO: 77933 - protein, 10 aa, synthetic construct
QGYRGDRDYL

SEQ ID NO: 77934 - protein, 10 aa, synthetic construct
QGYRGDYTSV

SEQ ID NO: 77935 - protein, 10 aa, synthetic construct
QGYRGDLTVT

SEQ ID NO: 77936 - protein, 10 aa, synthetic construct
QGYRGDLIGR

SEQ ID NO: 77937 - protein, 10 aa, synthetic construct
QGNRGDRDYL

SEQ ID NO: 77938 - protein, 10 aa, synthetic construct
AELRGDRSVV

SEQ ID NO: 77939 - protein, 10 aa, synthetic construct
QGNRGDYTSV

SEQ ID NO: 77940 - protein, 10 aa, synthetic construct
QGNRGDLTVT

SEQ ID NO: 77941 - protein, 10 aa, synthetic construct
QGNRGDLIGR

SEQ ID NO: 77942 - protein, 10 aa, synthetic construct
QGQRGDYNSL

SEQ ID NO: 77943 - protein, 10 aa, synthetic construct
QGQRGDYTSV

SEQ ID NO: 77944 - protein, 10 aa, synthetic construct
QGQRGDYTSM

SEQ ID NO: 77945 - protein, 10 aa, synthetic construct
QGQRGDFQNT

SEQ ID NO: 77946 - protein, 10 aa, synthetic construct
QGDRGDYNSL

SEQ ID NO: 77947 - protein, 10 aa, synthetic construct
QGDRGDYTSV

SEQ ID NO: 77948 - protein, 10 aa, synthetic construct
QGDRGDYTSM

SEQ ID NO: 77949 - protein, 10 aa, synthetic construct
AELRGDLTVT

SEQ ID NO: 77950 - protein, 10 aa, synthetic construct
QGDRGDFQNT

SEQ ID NO: 77951 - protein, 10 aa, synthetic construct
QGERGDYNSL

SEQ ID NO: 77952 - protein, 10 aa, synthetic construct
QGERGDYTSV

SEQ ID NO: 77953 - protein, 10 aa, synthetic construct
QGERGDYTSM

SEQ ID NO: 77954 - protein, 10 aa, synthetic construct
QGERGDFQNT

SEQ ID NO: 77955 - protein, 10 aa, synthetic construct
QAGRGDYNSL

SEQ ID NO: 77956 - protein, 10 aa, synthetic construct
QAGRGDFNNT

SEQ ID NO: 77957 - protein, 10 aa, synthetic construct
QAGRGDFNNL

SEQ ID NO: 77958 - protein, 10 aa, synthetic construct
QAGRGDFQNT

SEQ ID NO: 77959 - protein, 10 aa, synthetic construct
QAARGDYNSL

SEQ ID NO: 77960 - protein, 10 aa, synthetic construct
SSPRGDFNNT

SEQ ID NO: 77961 - protein, 10 aa, synthetic construct
AELRGDLIGR

SEQ ID NO: 77962 - protein, 10 aa, synthetic construct
QAARGDFNNT

SEQ ID NO: 77963 - protein, 10 aa, synthetic construct
QAARGDFNNL

SEQ ID NO: 77964 - protein, 10 aa, synthetic construct
QAARGDFQNT

SEQ ID NO: 77965 - protein, 10 aa, synthetic construct
QAVRGDYNSL

SEQ ID NO: 77966 - protein, 10 aa, synthetic construct
QAVRGDYTSV

SEQ ID NO: 77967 - protein, 10 aa, synthetic construct
QAVRGDYTSM

SEQ ID NO: 77968 - protein, 10 aa, synthetic construct
QAVRGDFQNT

SEQ ID NO: 77969 - protein, 10 aa, synthetic construct
QAPRGDYNSL

SEQ ID NO: 77970 - protein, 10 aa, synthetic construct
QAPRGDFNNT

SEQ ID NO: 77971 - protein, 10 aa, synthetic construct
QAPRGDFNNL

SEQ ID NO: 77972 - protein, 10 aa, synthetic construct
AELRGDRSQT

SEQ ID NO: 77973 - protein, 10 aa, synthetic construct
QAPRGDFQNT

SEQ ID NO: 77974 - protein, 10 aa, synthetic construct
QALRGDYNSL

SEQ ID NO: 77975 - protein, 10 aa, synthetic construct
QALRGDYTSV

SEQ ID NO: 77976 - protein, 10 aa, synthetic construct
QALRGDYTSM

SEQ ID NO: 77977 - protein, 10 aa, synthetic construct
QALRGDFQNT

SEQ ID NO: 77978 - protein, 10 aa, synthetic construct
QAIRGDRDYL

SEQ ID NO: 77979 - protein, 10 aa, synthetic construct
QAIRGDYTSV

SEQ ID NO: 77980 - protein, 10 aa, synthetic construct
QAIRGDLTVT

SEQ ID NO: 77981 - protein, 10 aa, synthetic construct
QAIRGDLIGR

SEQ ID NO: 77982 - protein, 10 aa, synthetic construct
QAMRGDRDYL

SEQ ID NO: 77983 - protein, 10 aa, synthetic construct
AELRGDLLLS

SEQ ID NO: 77984 - protein, 10 aa, synthetic construct
QAMRGDYTSV

SEQ ID NO: 77985 - protein, 10 aa, synthetic construct
QAMRGDLTVT

SEQ ID NO: 77986 - protein, 10 aa, synthetic construct
QAMRGDLIGR

SEQ ID NO: 77987 - protein, 10 aa, synthetic construct
QAWRGDYNSL

SEQ ID NO: 77988 - protein, 10 aa, synthetic construct
QAWRGDYTSV

SEQ ID NO: 77989 - protein, 10 aa, synthetic construct
QAWRGDYTSM

SEQ ID NO: 77990 - protein, 10 aa, synthetic construct
QAWRGDFQNT

SEQ ID NO: 77991 - protein, 10 aa, synthetic construct
QAFRGDRDYL

SEQ ID NO: 77992 - protein, 10 aa, synthetic construct
QAFRGDYTSV

SEQ ID NO: 77993 - protein, 10 aa, synthetic construct
QAFRGDLTVT

SEQ ID NO: 77994 - protein, 10 aa, synthetic construct
AEWRGDRGQI

SEQ ID NO: 77995 - protein, 10 aa, synthetic construct
QAFRGDLIGR

SEQ ID NO: 77996 - protein, 10 aa, synthetic construct
QAKRGDRDYL

SEQ ID NO: 77997 - protein, 10 aa, synthetic construct
QAKRGDYTSV

SEQ ID NO: 77998 - protein, 10 aa, synthetic construct
QAKRGDLTVT

SEQ ID NO: 77999 - protein, 10 aa, synthetic construct
QAKRGDLIGR

SEQ ID NO: 78000 - protein, 10 aa, synthetic construct
QARRGDYNSL

SEQ ID NO: 78001 - protein, 10 aa, synthetic construct
QARRGDFNNT

SEQ ID NO: 78002 - protein, 10 aa, synthetic construct
QARRGDFNNL

SEQ ID NO: 78003 - protein, 10 aa, synthetic construct
QARRGDFQNT

SEQ ID NO: 78004 - protein, 10 aa, synthetic construct
QAHRGDYNSL

SEQ ID NO: 78005 - protein, 10 aa, synthetic construct
AEWRGDRQGI

SEQ ID NO: 78006 - protein, 10 aa, synthetic construct
QAHRGDYTSV

SEQ ID NO: 78007 - protein, 10 aa, synthetic construct
QAHRGDYTSM

SEQ ID NO: 78008 - protein, 10 aa, synthetic construct
QAHRGDFQNT

SEQ ID NO: 78009 - protein, 10 aa, synthetic construct
QASRGDYNSL

SEQ ID NO: 78010 - protein, 10 aa, synthetic construct
QASRGDYTSV

SEQ ID NO: 78011 - protein, 10 aa, synthetic construct
QASRGDYTSM

SEQ ID NO: 78012 - protein, 10 aa, synthetic construct
QASRGDFQNT

SEQ ID NO: 78013 - protein, 10 aa, synthetic construct
QATRGDYNSL

SEQ ID NO: 78014 - protein, 10 aa, synthetic construct
QATRGDYTSV

SEQ ID NO: 78015 - protein, 10 aa, synthetic construct
QATRGDYTSM

SEQ ID NO: 78016 - protein, 10 aa, synthetic construct
AEWRGDRSVV

SEQ ID NO: 78017 - protein, 10 aa, synthetic construct
QATRGDFQNT

SEQ ID NO: 78018 - protein, 10 aa, synthetic construct
QAYRGDRDYL

SEQ ID NO: 78019 - protein, 10 aa, synthetic construct
QAYRGDYTSV

SEQ ID NO: 78020 - protein, 10 aa, synthetic construct
QAYRGDLTVT

SEQ ID NO: 78021 - protein, 10 aa, synthetic construct
QAYRGDLIGR

SEQ ID NO: 78022 - protein, 10 aa, synthetic construct
QANRGDRDYL

SEQ ID NO: 78023 - protein, 10 aa, synthetic construct
QANRGDYTSV

SEQ ID NO: 78024 - protein, 10 aa, synthetic construct
QANRGDLTVT

SEQ ID NO: 78025 - protein, 10 aa, synthetic construct
QANRGDLIGR

SEQ ID NO: 78026 - protein, 10 aa, synthetic construct
QAQRGDYNSL

SEQ ID NO: 78027 - protein, 10 aa, synthetic construct
AEWRGDRGVV

SEQ ID NO: 78028 - protein, 10 aa, synthetic construct
QAQRGDYTSV

SEQ ID NO: 78029 - protein, 10 aa, synthetic construct
QAQRGDYTSM

SEQ ID NO: 78030 - protein, 10 aa, synthetic construct
QAQRGDFQNT

SEQ ID NO: 78031 - protein, 10 aa, synthetic construct
QADRGDYNSL

SEQ ID NO: 78032 - protein, 10 aa, synthetic construct
QADRGDYTSV

SEQ ID NO: 78033 - protein, 10 aa, synthetic construct
QADRGDYTSM

SEQ ID NO: 78034 - protein, 10 aa, synthetic construct
QADRGDFQNT

SEQ ID NO: 78035 - protein, 10 aa, synthetic construct
QAERGDYNSL

SEQ ID NO: 78036 - protein, 10 aa, synthetic construct
QAERGDYTSV

SEQ ID NO: 78037 - protein, 10 aa, synthetic construct
QAERGDYTSM

SEQ ID NO: 78038 - protein, 10 aa, synthetic construct
AEWRGDRSQT

SEQ ID NO: 78039 - protein, 10 aa, synthetic construct
QAERGDFQNT

SEQ ID NO: 78040 - protein, 10 aa, synthetic construct
QVGRGDFNNT

SEQ ID NO: 78041 - protein, 10 aa, synthetic construct
QVGRGDFNNL

SEQ ID NO: 78042 - protein, 10 aa, synthetic construct
QVARGDFNNT

SEQ ID NO: 78043 - protein, 10 aa, synthetic construct
QVARGDFNNL

SEQ ID NO: 78044 - protein, 10 aa, synthetic construct
QVVRGDYNSL

SEQ ID NO: 78045 - protein, 10 aa, synthetic construct
QVVRGDYTSM

SEQ ID NO: 78046 - protein, 10 aa, synthetic construct
QVVRGDFQNT

SEQ ID NO: 78047 - protein, 10 aa, synthetic construct
QVPRGDFNNT

SEQ ID NO: 78048 - protein, 10 aa, synthetic construct
QVPRGDFNNL

SEQ ID NO: 78049 - protein, 10 aa, synthetic construct
AERRGDHGVL

SEQ ID NO: 78050 - protein, 10 aa, synthetic construct
QVLRGDYNSL

SEQ ID NO: 78051 - protein, 10 aa, synthetic construct
QVLRGDYTSM

SEQ ID NO: 78052 - protein, 10 aa, synthetic construct
QVLRGDFQNT

SEQ ID NO: 78053 - protein, 10 aa, synthetic construct
QVIRGDYTSV

SEQ ID NO: 78054 - protein, 10 aa, synthetic construct
QVIRGDLIGR

SEQ ID NO: 78055 - protein, 10 aa, synthetic construct
QVMRGDYTSV

SEQ ID NO: 78056 - protein, 10 aa, synthetic construct
QVMRGDLIGR

SEQ ID NO: 78057 - protein, 10 aa, synthetic construct
QVWRGDYNSL

SEQ ID NO: 78058 - protein, 10 aa, synthetic construct
QVWRGDYTSM

SEQ ID NO: 78059 - protein, 10 aa, synthetic construct
QVWRGDFQNT

SEQ ID NO: 78060 - protein, 10 aa, synthetic construct
AERRGDRGQI

SEQ ID NO: 78061 - protein, 10 aa, synthetic construct
QVFRGDYTSV

SEQ ID NO: 78062 - protein, 10 aa, synthetic construct
QVFRGDLIGR

SEQ ID NO: 78063 - protein, 10 aa, synthetic construct
QVKRGDYTSV

SEQ ID NO: 78064 - protein, 10 aa, synthetic construct
QVKRGDLIGR

SEQ ID NO: 78065 - protein, 10 aa, synthetic construct
QVRRGDFNNT

SEQ ID NO: 78066 - protein, 10 aa, synthetic construct
QVRRGDFNNL

SEQ ID NO: 78067 - protein, 10 aa, synthetic construct
QVHRGDYNSL

SEQ ID NO: 78068 - protein, 10 aa, synthetic construct
QVHRGDYTSM

SEQ ID NO: 78069 - protein, 10 aa, synthetic construct
QVHRGDFQNT

SEQ ID NO: 78070 - protein, 10 aa, synthetic construct
QVSRGDYNSL

SEQ ID NO: 78071 - protein, 10 aa, synthetic construct
SSPRGDFNNL

SEQ ID NO: 78072 - protein, 10 aa, synthetic construct
AERRGDRQGI

SEQ ID NO: 78073 - protein, 10 aa, synthetic construct
QVSRGDYTSM

SEQ ID NO: 78074 - protein, 10 aa, synthetic construct
QVSRGDFQNT

SEQ ID NO: 78075 - protein, 10 aa, synthetic construct
QVTRGDYNSL

SEQ ID NO: 78076 - protein, 10 aa, synthetic construct
QVTRGDYTSM

SEQ ID NO: 78077 - protein, 10 aa, synthetic construct
QVTRGDFQNT

SEQ ID NO: 78078 - protein, 10 aa, synthetic construct
QVYRGDYTSV

SEQ ID NO: 78079 - protein, 10 aa, synthetic construct
QVYRGDLIGR

SEQ ID NO: 78080 - protein, 10 aa, synthetic construct
QVNRGDYTSV

SEQ ID NO: 78081 - protein, 10 aa, synthetic construct
QVNRGDLIGR

SEQ ID NO: 78082 - protein, 10 aa, synthetic construct
QVQRGDYNSL

SEQ ID NO: 78083 - protein, 10 aa, synthetic construct
AERRGDRSVV

SEQ ID NO: 78084 - protein, 10 aa, synthetic construct
QVQRGDYTSM

SEQ ID NO: 78085 - protein, 10 aa, synthetic construct
QVQRGDFQNT

SEQ ID NO: 78086 - protein, 10 aa, synthetic construct
QVDRGDYNSL

SEQ ID NO: 78087 - protein, 10 aa, synthetic construct
QVDRGDYTSM

SEQ ID NO: 78088 - protein, 10 aa, synthetic construct
QVDRGDFQNT

SEQ ID NO: 78089 - protein, 10 aa, synthetic construct
QVERGDYNSL

SEQ ID NO: 78090 - protein, 10 aa, synthetic construct
QVERGDYTSM

SEQ ID NO: 78091 - protein, 10 aa, synthetic construct
QVERGDFQNT

SEQ ID NO: 78092 - protein, 10 aa, synthetic construct
QPGRGDYNSL

SEQ ID NO: 78093 - protein, 10 aa, synthetic construct
QPGRGDFNNT

SEQ ID NO: 78094 - protein, 10 aa, synthetic construct
AERRGDLTVT

SEQ ID NO: 78095 - protein, 10 aa, synthetic construct
QPGRGDFNNL

SEQ ID NO: 78096 - protein, 10 aa, synthetic construct
QPGRGDFQNT

SEQ ID NO: 78097 - protein, 10 aa, synthetic construct
QPARGDYNSL

SEQ ID NO: 78098 - protein, 10 aa, synthetic construct
QPARGDFNNT

SEQ ID NO: 78099 - protein, 10 aa, synthetic construct
QPARGDFNNL

SEQ ID NO: 78100 - protein, 10 aa, synthetic construct
QPARGDFQNT

SEQ ID NO: 78101 - protein, 10 aa, synthetic construct
QPVRGDYNSL

SEQ ID NO: 78102 - protein, 10 aa, synthetic construct
QPVRGDYTSV

SEQ ID NO: 78103 - protein, 10 aa, synthetic construct
QPVRGDYTSM

SEQ ID NO: 78104 - protein, 10 aa, synthetic construct
QPVRGDFQNT

SEQ ID NO: 78105 - protein, 10 aa, synthetic construct
AERRGDLIGR

SEQ ID NO: 78106 - protein, 10 aa, synthetic construct
QPPRGDYNSL

SEQ ID NO: 78107 - protein, 10 aa, synthetic construct
QPPRGDFNNT

SEQ ID NO: 78108 - protein, 10 aa, synthetic construct
QPPRGDFNNL

SEQ ID NO: 78109 - protein, 10 aa, synthetic construct
QPPRGDFQNT

SEQ ID NO: 78110 - protein, 10 aa, synthetic construct
QPLRGDYNSL

SEQ ID NO: 78111 - protein, 10 aa, synthetic construct
QPLRGDYTSV

SEQ ID NO: 78112 - protein, 10 aa, synthetic construct
QPLRGDYTSM

SEQ ID NO: 78113 - protein, 10 aa, synthetic construct
QPLRGDFQNT

SEQ ID NO: 78114 - protein, 10 aa, synthetic construct
QPIRGDRDYL

SEQ ID NO: 78115 - protein, 10 aa, synthetic construct
QPIRGDYTSV

SEQ ID NO: 78116 - protein, 10 aa, synthetic construct
AERRGDRSQT

SEQ ID NO: 78117 - protein, 10 aa, synthetic construct
QPIRGDLTVT

SEQ ID NO: 78118 - protein, 10 aa, synthetic construct
QPIRGDLIGR

SEQ ID NO: 78119 - protein, 10 aa, synthetic construct
QPMRGDRDYL

SEQ ID NO: 78120 - protein, 10 aa, synthetic construct
QPMRGDYTSV

SEQ ID NO: 78121 - protein, 10 aa, synthetic construct
QPMRGDLTVT

SEQ ID NO: 78122 - protein, 10 aa, synthetic construct
QPMRGDLIGR

SEQ ID NO: 78123 - protein, 10 aa, synthetic construct
QPWRGDYNSL

SEQ ID NO: 78124 - protein, 10 aa, synthetic construct
QPWRGDYTSV

SEQ ID NO: 78125 - protein, 10 aa, synthetic construct
QPWRGDYTSM

SEQ ID NO: 78126 - protein, 10 aa, synthetic construct
QPWRGDFQNT

SEQ ID NO: 78127 - protein, 10 aa, synthetic construct
AERRGDLLLS

SEQ ID NO: 78128 - protein, 10 aa, synthetic construct
QPFRGDRDYL

SEQ ID NO: 78129 - protein, 10 aa, synthetic construct
QPFRGDYTSV

SEQ ID NO: 78130 - protein, 10 aa, synthetic construct
QPFRGDLTVT

SEQ ID NO: 78131 - protein, 10 aa, synthetic construct
QPFRGDLIGR

SEQ ID NO: 78132 - protein, 10 aa, synthetic construct
QPKRGDRDYL

SEQ ID NO: 78133 - protein, 10 aa, synthetic construct
QPKRGDYTSV

SEQ ID NO: 78134 - protein, 10 aa, synthetic construct
QPKRGDLTVT

SEQ ID NO: 78135 - protein, 10 aa, synthetic construct
QPKRGDLIGR

SEQ ID NO: 78136 - protein, 10 aa, synthetic construct
QPRRGDYNSL

SEQ ID NO: 78137 - protein, 10 aa, synthetic construct
QPRRGDFNNT

SEQ ID NO: 78138 - protein, 10 aa, synthetic construct
AEHRGDRGVV

SEQ ID NO: 78139 - protein, 10 aa, synthetic construct
QPRRGDFNNL

SEQ ID NO: 78140 - protein, 10 aa, synthetic construct
QPRRGDFQNT

SEQ ID NO: 78141 - protein, 10 aa, synthetic construct
QPHRGDYNSL

SEQ ID NO: 78142 - protein, 10 aa, synthetic construct
QPHRGDYTSV

SEQ ID NO: 78143 - protein, 10 aa, synthetic construct
QPHRGDYTSM

SEQ ID NO: 78144 - protein, 10 aa, synthetic construct
QPHRGDFQNT

SEQ ID NO: 78145 - protein, 10 aa, synthetic construct
QPSRGDYNSL

SEQ ID NO: 78146 - protein, 10 aa, synthetic construct
QPSRGDYTSV

SEQ ID NO: 78147 - protein, 10 aa, synthetic construct
QPSRGDYTSM

SEQ ID NO: 78148 - protein, 10 aa, synthetic construct
QPSRGDFQNT

SEQ ID NO: 78149 - protein, 10 aa, synthetic construct
AESRGDHGVL

SEQ ID NO: 78150 - protein, 10 aa, synthetic construct
QPTRGDYNSL

SEQ ID NO: 78151 - protein, 10 aa, synthetic construct
QPTRGDYTSV

SEQ ID NO: 78152 - protein, 10 aa, synthetic construct
QPTRGDYTSM

SEQ ID NO: 78153 - protein, 10 aa, synthetic construct
QPTRGDFQNT

SEQ ID NO: 78154 - protein, 10 aa, synthetic construct
QPYRGDRDYL

SEQ ID NO: 78155 - protein, 10 aa, synthetic construct
QPYRGDYTSV

SEQ ID NO: 78156 - protein, 10 aa, synthetic construct
QPYRGDLTVT

SEQ ID NO: 78157 - protein, 10 aa, synthetic construct
QPYRGDLIGR

SEQ ID NO: 78158 - protein, 10 aa, synthetic construct
QPNRGDRDYL

SEQ ID NO: 78159 - protein, 10 aa, synthetic construct
QPNRGDYTSV

SEQ ID NO: 78160 - protein, 10 aa, synthetic construct
AESRGDRGQI

SEQ ID NO: 78161 - protein, 10 aa, synthetic construct
QPNRGDLTVT

SEQ ID NO: 78162 - protein, 10 aa, synthetic construct
QPNRGDLIGR

SEQ ID NO: 78163 - protein, 10 aa, synthetic construct
QPQRGDYNSL

SEQ ID NO: 78164 - protein, 10 aa, synthetic construct
QPQRGDYTSV

SEQ ID NO: 78165 - protein, 10 aa, synthetic construct
QPQRGDYTSM

SEQ ID NO: 78166 - protein, 10 aa, synthetic construct
QPQRGDFQNT

SEQ ID NO: 78167 - protein, 10 aa, synthetic construct
QPDRGDYNSL

SEQ ID NO: 78168 - protein, 10 aa, synthetic construct
QPDRGDYTSV

SEQ ID NO: 78169 - protein, 10 aa, synthetic construct
QPDRGDYTSM

SEQ ID NO: 78170 - protein, 10 aa, synthetic construct
QPDRGDFQNT

SEQ ID NO: 78171 - protein, 10 aa, synthetic construct
AESRGDRQGI

SEQ ID NO: 78172 - protein, 10 aa, synthetic construct
QPERGDYNSL

SEQ ID NO: 78173 - protein, 10 aa, synthetic construct
QPERGDYTSV

SEQ ID NO: 78174 - protein, 10 aa, synthetic construct
QPERGDYTSM

SEQ ID NO: 78175 - protein, 10 aa, synthetic construct
QPERGDFQNT

SEQ ID NO: 78176 - protein, 10 aa, synthetic construct
QLGRGDFNNT

SEQ ID NO: 78177 - protein, 10 aa, synthetic construct
QLGRGDFNNL

SEQ ID NO: 78178 - protein, 10 aa, synthetic construct
QLARGDFNNT

SEQ ID NO: 78179 - protein, 10 aa, synthetic construct
QLARGDFNNL

SEQ ID NO: 78180 - protein, 10 aa, synthetic construct
QLVRGDYNSL

SEQ ID NO: 78181 - protein, 10 aa, synthetic construct
QLVRGDYTSM

SEQ ID NO: 78182 - protein, 10 aa, synthetic construct
TSPRGDFNNT

SEQ ID NO: 78183 - protein, 10 aa, synthetic construct
AESRGDRSVV

SEQ ID NO: 78184 - protein, 10 aa, synthetic construct
QLVRGDFQNT

SEQ ID NO: 78185 - protein, 10 aa, synthetic construct
QLPRGDFNNT

SEQ ID NO: 78186 - protein, 10 aa, synthetic construct
QLPRGDFNNL

SEQ ID NO: 78187 - protein, 10 aa, synthetic construct
QLLRGDYNSL

SEQ ID NO: 78188 - protein, 10 aa, synthetic construct
QLLRGDYTSM

SEQ ID NO: 78189 - protein, 10 aa, synthetic construct
QLLRGDFQNT

SEQ ID NO: 78190 - protein, 10 aa, synthetic construct
QLIRGDYTSV

SEQ ID NO: 78191 - protein, 10 aa, synthetic construct
QLIRGDLIGR

SEQ ID NO: 78192 - protein, 10 aa, synthetic construct
QLMRGDYTSV

SEQ ID NO: 78193 - protein, 10 aa, synthetic construct
QLMRGDLIGR

SEQ ID NO: 78194 - protein, 10 aa, synthetic construct
AESRGDLTVT

SEQ ID NO: 78195 - protein, 10 aa, synthetic construct
QLWRGDYNSL

SEQ ID NO: 78196 - protein, 10 aa, synthetic construct
QLWRGDYTSM

SEQ ID NO: 78197 - protein, 10 aa, synthetic construct
QLWRGDFQNT

SEQ ID NO: 78198 - protein, 10 aa, synthetic construct
QLFRGDYTSV

SEQ ID NO: 78199 - protein, 10 aa, synthetic construct
QLFRGDLIGR

SEQ ID NO: 78200 - protein, 10 aa, synthetic construct
QLKRGDYTSV

SEQ ID NO: 78201 - protein, 10 aa, synthetic construct
QLKRGDLIGR

SEQ ID NO: 78202 - protein, 10 aa, synthetic construct
QLRRGDFNNT

SEQ ID NO: 78203 - protein, 10 aa, synthetic construct
QLRRGDFNNL

SEQ ID NO: 78204 - protein, 10 aa, synthetic construct
QLHRGDYNSL

SEQ ID NO: 78205 - protein, 10 aa, synthetic construct
AESRGDLIGR

SEQ ID NO: 78206 - protein, 10 aa, synthetic construct
QLHRGDYTSM

SEQ ID NO: 78207 - protein, 10 aa, synthetic construct
QLHRGDFQNT

SEQ ID NO: 78208 - protein, 10 aa, synthetic construct
QLSRGDYNSL

SEQ ID NO: 78209 - protein, 10 aa, synthetic construct
QLSRGDYTSM

SEQ ID NO: 78210 - protein, 10 aa, synthetic construct
QLSRGDFQNT

SEQ ID NO: 78211 - protein, 10 aa, synthetic construct
QLTRGDYNSL

SEQ ID NO: 78212 - protein, 10 aa, synthetic construct
QLTRGDYTSM

SEQ ID NO: 78213 - protein, 10 aa, synthetic construct
QLTRGDFQNT

SEQ ID NO: 78214 - protein, 10 aa, synthetic construct
QLYRGDYTSV

SEQ ID NO: 78215 - protein, 10 aa, synthetic construct
QLYRGDLIGR

SEQ ID NO: 78216 - protein, 10 aa, synthetic construct
AESRGDRSQT

SEQ ID NO: 78217 - protein, 10 aa, synthetic construct
QLNRGDYTSV

SEQ ID NO: 78218 - protein, 10 aa, synthetic construct
QLNRGDLIGR

SEQ ID NO: 78219 - protein, 10 aa, synthetic construct
QLQRGDYNSL

SEQ ID NO: 78220 - protein, 10 aa, synthetic construct
QLQRGDYTSM

SEQ ID NO: 78221 - protein, 10 aa, synthetic construct
QLQRGDFQNT

SEQ ID NO: 78222 - protein, 10 aa, synthetic construct
QLDRGDYNSL

SEQ ID NO: 78223 - protein, 10 aa, synthetic construct
QLDRGDYTSM

SEQ ID NO: 78224 - protein, 10 aa, synthetic construct
QLDRGDFQNT

SEQ ID NO: 78225 - protein, 10 aa, synthetic construct
QLERGDYNSL

SEQ ID NO: 78226 - protein, 10 aa, synthetic construct
QLERGDYTSM

SEQ ID NO: 78227 - protein, 10 aa, synthetic construct
AESRGDLLLS

SEQ ID NO: 78228 - protein, 10 aa, synthetic construct
QLERGDFQNT

SEQ ID NO: 78229 - protein, 10 aa, synthetic construct
QIGRGDRDYL

SEQ ID NO: 78230 - protein, 10 aa, synthetic construct
QIGRGDYTSV

SEQ ID NO: 78231 - protein, 10 aa, synthetic construct
QIGRGDLTVT

SEQ ID NO: 78232 - protein, 10 aa, synthetic construct
QIGRGDLIGR

SEQ ID NO: 78233 - protein, 10 aa, synthetic construct
QIARGDRDYL

SEQ ID NO: 78234 - protein, 10 aa, synthetic construct
QIARGDYTSV

SEQ ID NO: 78235 - protein, 10 aa, synthetic construct
QIARGDLTVT

SEQ ID NO: 78236 - protein, 10 aa, synthetic construct
QIARGDLIGR

SEQ ID NO: 78237 - protein, 10 aa, synthetic construct
QIVRGDHGVL

SEQ ID NO: 78238 - protein, 10 aa, synthetic construct
AETRGDRGVV

SEQ ID NO: 78239 - protein, 10 aa, synthetic construct
QIVRGDHVNL

SEQ ID NO: 78240 - protein, 10 aa, synthetic construct
QIVRGDRDYL

SEQ ID NO: 78241 - protein, 10 aa, synthetic construct
QIVRGDYSSV

SEQ ID NO: 78242 - protein, 10 aa, synthetic construct
QIVRGDLTVT

SEQ ID NO: 78243 - protein, 10 aa, synthetic construct
QIPRGDRDYL

SEQ ID NO: 78244 - protein, 10 aa, synthetic construct
QIPRGDYTSV

SEQ ID NO: 78245 - protein, 10 aa, synthetic construct
QIPRGDLTVT

SEQ ID NO: 78246 - protein, 10 aa, synthetic construct
QIPRGDLIGR

SEQ ID NO: 78247 - protein, 10 aa, synthetic construct
QILRGDHGVL

SEQ ID NO: 78248 - protein, 10 aa, synthetic construct
QILRGDHVNL

SEQ ID NO: 78249 - protein, 10 aa, synthetic construct
AEQRGDRGVV

SEQ ID NO: 78250 - protein, 10 aa, synthetic construct
QILRGDRDYL

SEQ ID NO: 78251 - protein, 10 aa, synthetic construct
QILRGDYSSV

SEQ ID NO: 78252 - protein, 10 aa, synthetic construct
QILRGDLTVT

SEQ ID NO: 78253 - protein, 10 aa, synthetic construct
QIIRGDHGVL

SEQ ID NO: 78254 - protein, 10 aa, synthetic construct
QIIRGDRGQI

SEQ ID NO: 78255 - protein, 10 aa, synthetic construct
QIIRGDRQGI

SEQ ID NO: 78256 - protein, 10 aa, synthetic construct
QIIRGDRGVV

SEQ ID NO: 78257 - protein, 10 aa, synthetic construct
QIIRGDYVGL

SEQ ID NO: 78258 - protein, 10 aa, synthetic construct
QIIRGDLIGR

SEQ ID NO: 78259 - protein, 10 aa, synthetic construct
QIIRGDQSTL

SEQ ID NO: 78260 - protein, 10 aa, synthetic construct
AEDRGDRGVV

SEQ ID NO: 78261 - protein, 10 aa, synthetic construct
QIIRGDLLLS

SEQ ID NO: 78262 - protein, 10 aa, synthetic construct
QIMRGDHGVL

SEQ ID NO: 78263 - protein, 10 aa, synthetic construct
QIMRGDRGQI

SEQ ID NO: 78264 - protein, 10 aa, synthetic construct
QIMRGDRQGI

SEQ ID NO: 78265 - protein, 10 aa, synthetic construct
QIMRGDRGVV

SEQ ID NO: 78266 - protein, 10 aa, synthetic construct
QIMRGDYVGL

SEQ ID NO: 78267 - protein, 10 aa, synthetic construct
QIMRGDLIGR

SEQ ID NO: 78268 - protein, 10 aa, synthetic construct
QIMRGDQSTL

SEQ ID NO: 78269 - protein, 10 aa, synthetic construct
QIMRGDLLLS

SEQ ID NO: 78270 - protein, 10 aa, synthetic construct
QIWRGDHGVL

SEQ ID NO: 78271 - protein, 10 aa, synthetic construct
AEERGDRGVV

SEQ ID NO: 78272 - protein, 10 aa, synthetic construct
QIWRGDHVNL

SEQ ID NO: 78273 - protein, 10 aa, synthetic construct
QIWRGDRDYL

SEQ ID NO: 78274 - protein, 10 aa, synthetic construct
QIWRGDYSSV

SEQ ID NO: 78275 - protein, 10 aa, synthetic construct
QIWRGDLTVT

SEQ ID NO: 78276 - protein, 10 aa, synthetic construct
QIFRGDHGVL

SEQ ID NO: 78277 - protein, 10 aa, synthetic construct
QIFRGDRGQI

SEQ ID NO: 78278 - protein, 10 aa, synthetic construct
QIFRGDRQGI

SEQ ID NO: 78279 - protein, 10 aa, synthetic construct
QIFRGDRGVV

SEQ ID NO: 78280 - protein, 10 aa, synthetic construct
QIFRGDYVGL

SEQ ID NO: 78281 - protein, 10 aa, synthetic construct
QIFRGDLIGR

SEQ ID NO: 78282 - protein, 10 aa, synthetic construct
EGGRGDHGVL

SEQ ID NO: 78283 - protein, 10 aa, synthetic construct
QIFRGDQSTL

SEQ ID NO: 78284 - protein, 10 aa, synthetic construct
QIFRGDLLLS

SEQ ID NO: 78285 - protein, 10 aa, synthetic construct
QIKRGDHGVL

SEQ ID NO: 78286 - protein, 10 aa, synthetic construct
QIKRGDRGQI

SEQ ID NO: 78287 - protein, 10 aa, synthetic construct
QIKRGDRQGI

SEQ ID NO: 78288 - protein, 10 aa, synthetic construct
QIKRGDRGVV

SEQ ID NO: 78289 - protein, 10 aa, synthetic construct
QIKRGDYVGL

SEQ ID NO: 78290 - protein, 10 aa, synthetic construct
QIKRGDLIGR

SEQ ID NO: 78291 - protein, 10 aa, synthetic construct
QIKRGDQSTL

SEQ ID NO: 78292 - protein, 10 aa, synthetic construct
QIKRGDLLLS

SEQ ID NO: 78293 - protein, 10 aa, synthetic construct
TSPRGDFNNL

SEQ ID NO: 78294 - protein, 10 aa, synthetic construct
EGGRGDYVGL

SEQ ID NO: 78295 - protein, 10 aa, synthetic construct
QIRRGDRDYL

SEQ ID NO: 78296 - protein, 10 aa, synthetic construct
QIRRGDYTSV

SEQ ID NO: 78297 - protein, 10 aa, synthetic construct
QIRRGDLTVT

SEQ ID NO: 78298 - protein, 10 aa, synthetic construct
QIRRGDLIGR

SEQ ID NO: 78299 - protein, 10 aa, synthetic construct
QIHRGDHGVL

SEQ ID NO: 78300 - protein, 10 aa, synthetic construct
QIHRGDHVNL

SEQ ID NO: 78301 - protein, 10 aa, synthetic construct
QIHRGDRDYL

SEQ ID NO: 78302 - protein, 10 aa, synthetic construct
QIHRGDYSSV

SEQ ID NO: 78303 - protein, 10 aa, synthetic construct
QIHRGDLTVT

SEQ ID NO: 78304 - protein, 10 aa, synthetic construct
QISRGDHGVL

SEQ ID NO: 78305 - protein, 10 aa, synthetic construct
EGGRGDQSTL

SEQ ID NO: 78306 - protein, 10 aa, synthetic construct
QISRGDHVNL

SEQ ID NO: 78307 - protein, 10 aa, synthetic construct
QISRGDRDYL

SEQ ID NO: 78308 - protein, 10 aa, synthetic construct
QISRGDYSSV

SEQ ID NO: 78309 - protein, 10 aa, synthetic construct
QISRGDLTVT

SEQ ID NO: 78310 - protein, 10 aa, synthetic construct
QITRGDHGVL

SEQ ID NO: 78311 - protein, 10 aa, synthetic construct
QITRGDHVNL

SEQ ID NO: 78312 - protein, 10 aa, synthetic construct
QITRGDRDYL

SEQ ID NO: 78313 - protein, 10 aa, synthetic construct
QITRGDYSSV

SEQ ID NO: 78314 - protein, 10 aa, synthetic construct
QITRGDLTVT

SEQ ID NO: 78315 - protein, 10 aa, synthetic construct
QIYRGDHGVL

SEQ ID NO: 78316 - protein, 10 aa, synthetic construct
EGGRGDLLLS

SEQ ID NO: 78317 - protein, 10 aa, synthetic construct
QIYRGDRGQI

SEQ ID NO: 78318 - protein, 10 aa, synthetic construct
QIYRGDRQGI

SEQ ID NO: 78319 - protein, 10 aa, synthetic construct
QIYRGDRGVV

SEQ ID NO: 78320 - protein, 10 aa, synthetic construct
QIYRGDYVGL

SEQ ID NO: 78321 - protein, 10 aa, synthetic construct
QIYRGDLIGR

SEQ ID NO: 78322 - protein, 10 aa, synthetic construct
QIYRGDQSTL

SEQ ID NO: 78323 - protein, 10 aa, synthetic construct
QIYRGDLLLS

SEQ ID NO: 78324 - protein, 10 aa, synthetic construct
QINRGDHGVL

SEQ ID NO: 78325 - protein, 10 aa, synthetic construct
QINRGDRGQI

SEQ ID NO: 78326 - protein, 10 aa, synthetic construct
QINRGDRQGI

SEQ ID NO: 78327 - protein, 10 aa, synthetic construct
EGARGDHGVL

SEQ ID NO: 78328 - protein, 10 aa, synthetic construct
QINRGDRGVV

SEQ ID NO: 78329 - protein, 10 aa, synthetic construct
QINRGDYVGL

SEQ ID NO: 78330 - protein, 10 aa, synthetic construct
QINRGDLIGR

SEQ ID NO: 78331 - protein, 10 aa, synthetic construct
QINRGDQSTL

SEQ ID NO: 78332 - protein, 10 aa, synthetic construct
QINRGDLLLS

SEQ ID NO: 78333 - protein, 10 aa, synthetic construct
QIQRGDHGVL

SEQ ID NO: 78334 - protein, 10 aa, synthetic construct
QIQRGDHVNL

SEQ ID NO: 78335 - protein, 10 aa, synthetic construct
QIQRGDRDYL

SEQ ID NO: 78336 - protein, 10 aa, synthetic construct
QIQRGDYSSV

SEQ ID NO: 78337 - protein, 10 aa, synthetic construct
QIQRGDLTVT

SEQ ID NO: 78338 - protein, 10 aa, synthetic construct
EGARGDYVGL

SEQ ID NO: 78339 - protein, 10 aa, synthetic construct
QIDRGDHGVL

SEQ ID NO: 78340 - protein, 10 aa, synthetic construct
QIDRGDHVNL

SEQ ID NO: 78341 - protein, 10 aa, synthetic construct
QIDRGDRDYL

SEQ ID NO: 78342 - protein, 10 aa, synthetic construct
QIDRGDYSSV

SEQ ID NO: 78343 - protein, 10 aa, synthetic construct
QIDRGDLTVT

SEQ ID NO: 78344 - protein, 10 aa, synthetic construct
QIERGDHGVL

SEQ ID NO: 78345 - protein, 10 aa, synthetic construct
QIERGDHVNL

SEQ ID NO: 78346 - protein, 10 aa, synthetic construct
QIERGDRDYL

SEQ ID NO: 78347 - protein, 10 aa, synthetic construct
QIERGDYSSV

SEQ ID NO: 78348 - protein, 10 aa, synthetic construct
QIERGDLTVT

SEQ ID NO: 78349 - protein, 10 aa, synthetic construct
EGARGDQSTL

SEQ ID NO: 78350 - protein, 10 aa, synthetic construct
QMGRGDHVNL

SEQ ID NO: 78351 - protein, 10 aa, synthetic construct
QMGRGDYNSL

SEQ ID NO: 78352 - protein, 10 aa, synthetic construct
QMGRGDYTSM

SEQ ID NO: 78353 - protein, 10 aa, synthetic construct
QMARGDHVNL

SEQ ID NO: 78354 - protein, 10 aa, synthetic construct
QMARGDYNSL

SEQ ID NO: 78355 - protein, 10 aa, synthetic construct
QMARGDYTSM

SEQ ID NO: 78356 - protein, 10 aa, synthetic construct
QMVRGDHVNL

SEQ ID NO: 78357 - protein, 10 aa, synthetic construct
QMVRGDYNSL

SEQ ID NO: 78358 - protein, 10 aa, synthetic construct
QMVRGDYTSM

SEQ ID NO: 78359 - protein, 10 aa, synthetic construct
QMPRGDHVNL

SEQ ID NO: 78360 - protein, 10 aa, synthetic construct
EGARGDLLLS

SEQ ID NO: 78361 - protein, 10 aa, synthetic construct
QMPRGDYNSL

SEQ ID NO: 78362 - protein, 10 aa, synthetic construct
QMPRGDYTSM

SEQ ID NO: 78363 - protein, 10 aa, synthetic construct
QMLRGDHVNL

SEQ ID NO: 78364 - protein, 10 aa, synthetic construct
QMLRGDYNSL

SEQ ID NO: 78365 - protein, 10 aa, synthetic construct
QMLRGDYTSM

SEQ ID NO: 78366 - protein, 10 aa, synthetic construct
QMIRGDRGQI

SEQ ID NO: 78367 - protein, 10 aa, synthetic construct
QMIRGDRQGI

SEQ ID NO: 78368 - protein, 10 aa, synthetic construct
QMIRGDRSQT

SEQ ID NO: 78369 - protein, 10 aa, synthetic construct
QMMRGDHVNL

SEQ ID NO: 78370 - protein, 10 aa, synthetic construct
QMMRGDRDYL

SEQ ID NO: 78371 - protein, 10 aa, synthetic construct
EGVRGDRGQI

SEQ ID NO: 78372 - protein, 10 aa, synthetic construct
QMMRGDYSSV

SEQ ID NO: 78373 - protein, 10 aa, synthetic construct
QMMRGDLTVT

SEQ ID NO: 78374 - protein, 10 aa, synthetic construct
QMWRGDYTSV

SEQ ID NO: 78375 - protein, 10 aa, synthetic construct
QMWRGDLIGR

SEQ ID NO: 78376 - protein, 10 aa, synthetic construct
QMFRGDRGQI

SEQ ID NO: 78377 - protein, 10 aa, synthetic construct
QMFRGDRQGI

SEQ ID NO: 78378 - protein, 10 aa, synthetic construct
QMFRGDRSQT

SEQ ID NO: 78379 - protein, 10 aa, synthetic construct
QMKRGDRGQI

SEQ ID NO: 78380 - protein, 10 aa, synthetic construct
QMKRGDRQGI

SEQ ID NO: 78381 - protein, 10 aa, synthetic construct
QMKRGDRSQT

SEQ ID NO: 78382 - protein, 10 aa, synthetic construct
EGVRGDRQGI

SEQ ID NO: 78383 - protein, 10 aa, synthetic construct
QMRRGDHVNL

SEQ ID NO: 78384 - protein, 10 aa, synthetic construct
QMRRGDYNSL

SEQ ID NO: 78385 - protein, 10 aa, synthetic construct
QMRRGDYTSM

SEQ ID NO: 78386 - protein, 10 aa, synthetic construct
QMHRGDRDYL

SEQ ID NO: 78387 - protein, 10 aa, synthetic construct
QMHRGDYVGL

SEQ ID NO: 78388 - protein, 10 aa, synthetic construct
QMHRGDYSSV

SEQ ID NO: 78389 - protein, 10 aa, synthetic construct
QMHRGDYTSV

SEQ ID NO: 78390 - protein, 10 aa, synthetic construct
QMHRGDQSTL

SEQ ID NO: 78391 - protein, 10 aa, synthetic construct
QMSRGDHVNL

SEQ ID NO: 78392 - protein, 10 aa, synthetic construct
QMSRGDYNSL

SEQ ID NO: 78393 - protein, 10 aa, synthetic construct
EGVRGDRSVV

SEQ ID NO: 78394 - protein, 10 aa, synthetic construct
QMSRGDYTSM

SEQ ID NO: 78395 - protein, 10 aa, synthetic construct
QMTRGDRDYL

SEQ ID NO: 78396 - protein, 10 aa, synthetic construct
QMTRGDYVGL

SEQ ID NO: 78397 - protein, 10 aa, synthetic construct
QMTRGDYSSV

SEQ ID NO: 78398 - protein, 10 aa, synthetic construct
QMTRGDYTSV

SEQ ID NO: 78399 - protein, 10 aa, synthetic construct
QMTRGDQSTL

SEQ ID NO: 78400 - protein, 10 aa, synthetic construct
QMYRGDRGQI

SEQ ID NO: 78401 - protein, 10 aa, synthetic construct
QMYRGDRQGI

SEQ ID NO: 78402 - protein, 10 aa, synthetic construct
QMYRGDRSQT

SEQ ID NO: 78403 - protein, 10 aa, synthetic construct
QMNRGDRGQI

SEQ ID NO: 78404 - protein, 10 aa, synthetic construct
TKKRGDHGVL

SEQ ID NO: 78405 - protein, 10 aa, synthetic construct
ESPRGDFNNT

SEQ ID NO: 78406 - protein, 10 aa, synthetic construct
EGVRGDRGVV

SEQ ID NO: 78407 - protein, 10 aa, synthetic construct
QMNRGDRQGI

SEQ ID NO: 78408 - protein, 10 aa, synthetic construct
QMNRGDRSQT

SEQ ID NO: 78409 - protein, 10 aa, synthetic construct
QMQRGDRDYL

SEQ ID NO: 78410 - protein, 10 aa, synthetic construct
QMQRGDYVGL

SEQ ID NO: 78411 - protein, 10 aa, synthetic construct
QMQRGDYSSV

SEQ ID NO: 78412 - protein, 10 aa, synthetic construct
QMQRGDYTSV

SEQ ID NO: 78413 - protein, 10 aa, synthetic construct
QMQRGDQSTL

SEQ ID NO: 78414 - protein, 10 aa, synthetic construct
QMDRGDRDYL

SEQ ID NO: 78415 - protein, 10 aa, synthetic construct
QMDRGDYVGL

SEQ ID NO: 78416 - protein, 10 aa, synthetic construct
QMDRGDYSSV

SEQ ID NO: 78417 - protein, 10 aa, synthetic construct
EGVRGDRSQT

SEQ ID NO: 78418 - protein, 10 aa, synthetic construct
QMDRGDYTSV

SEQ ID NO: 78419 - protein, 10 aa, synthetic construct
QMDRGDQSTL

SEQ ID NO: 78420 - protein, 10 aa, synthetic construct
QMERGDRDYL

SEQ ID NO: 78421 - protein, 10 aa, synthetic construct
QMERGDYVGL

SEQ ID NO: 78422 - protein, 10 aa, synthetic construct
QMERGDYSSV

SEQ ID NO: 78423 - protein, 10 aa, synthetic construct
QMERGDYTSV

SEQ ID NO: 78424 - protein, 10 aa, synthetic construct
QMERGDQSTL

SEQ ID NO: 78425 - protein, 10 aa, synthetic construct
QWGRGDFQNT

SEQ ID NO: 78426 - protein, 10 aa, synthetic construct
QWARGDFQNT

SEQ ID NO: 78427 - protein, 10 aa, synthetic construct
QWVRGDFQNT

SEQ ID NO: 78428 - protein, 10 aa, synthetic construct
EGPRGDHGVL

SEQ ID NO: 78429 - protein, 10 aa, synthetic construct
QWPRGDFQNT

SEQ ID NO: 78430 - protein, 10 aa, synthetic construct
QWLRGDFQNT

SEQ ID NO: 78431 - protein, 10 aa, synthetic construct
QWIRGDRDYL

SEQ ID NO: 78432 - protein, 10 aa, synthetic construct
QWIRGDYVGL

SEQ ID NO: 78433 - protein, 10 aa, synthetic construct
QWIRGDYSSV

SEQ ID NO: 78434 - protein, 10 aa, synthetic construct
QWIRGDYTSV

SEQ ID NO: 78435 - protein, 10 aa, synthetic construct
QWIRGDQSTL

SEQ ID NO: 78436 - protein, 10 aa, synthetic construct
QWMRGDYTSV

SEQ ID NO: 78437 - protein, 10 aa, synthetic construct
QWMRGDLIGR

SEQ ID NO: 78438 - protein, 10 aa, synthetic construct
QWWRGDYNSL

SEQ ID NO: 78439 - protein, 10 aa, synthetic construct
EGPRGDYVGL

SEQ ID NO: 78440 - protein, 10 aa, synthetic construct
QWWRGDYTSM

SEQ ID NO: 78441 - protein, 10 aa, synthetic construct
QWWRGDFQNT

SEQ ID NO: 78442 - protein, 10 aa, synthetic construct
QWFRGDRDYL

SEQ ID NO: 78443 - protein, 10 aa, synthetic construct
QWFRGDYVGL

SEQ ID NO: 78444 - protein, 10 aa, synthetic construct
QWFRGDYSSV

SEQ ID NO: 78445 - protein, 10 aa, synthetic construct
QWFRGDYTSV

SEQ ID NO: 78446 - protein, 10 aa, synthetic construct
QWFRGDQSTL

SEQ ID NO: 78447 - protein, 10 aa, synthetic construct
QWKRGDRDYL

SEQ ID NO: 78448 - protein, 10 aa, synthetic construct
QWKRGDYVGL

SEQ ID NO: 78449 - protein, 10 aa, synthetic construct
QWKRGDYSSV

SEQ ID NO: 78450 - protein, 10 aa, synthetic construct
EGPRGDQSTL

SEQ ID NO: 78451 - protein, 10 aa, synthetic construct
QWKRGDYTSV

SEQ ID NO: 78452 - protein, 10 aa, synthetic construct
QWKRGDQSTL

SEQ ID NO: 78453 - protein, 10 aa, synthetic construct
QWRRGDFQNT

SEQ ID NO: 78454 - protein, 10 aa, synthetic construct
QWHRGDHVNL

SEQ ID NO: 78455 - protein, 10 aa, synthetic construct
QWHRGDYNSL

SEQ ID NO: 78456 - protein, 10 aa, synthetic construct
QWHRGDYTSM

SEQ ID NO: 78457 - protein, 10 aa, synthetic construct
QWSRGDFQNT

SEQ ID NO: 78458 - protein, 10 aa, synthetic construct
QWTRGDHVNL

SEQ ID NO: 78459 - protein, 10 aa, synthetic construct
QWTRGDYNSL

SEQ ID NO: 78460 - protein, 10 aa, synthetic construct
QWTRGDYTSM

SEQ ID NO: 78461 - protein, 10 aa, synthetic construct
EGPRGDLLLS

SEQ ID NO: 78462 - protein, 10 aa, synthetic construct
QWYRGDRDYL

SEQ ID NO: 78463 - protein, 10 aa, synthetic construct
QWYRGDYVGL

SEQ ID NO: 78464 - protein, 10 aa, synthetic construct
QWYRGDYSSV

SEQ ID NO: 78465 - protein, 10 aa, synthetic construct
QWYRGDYTSV

SEQ ID NO: 78466 - protein, 10 aa, synthetic construct
QWYRGDQSTL

SEQ ID NO: 78467 - protein, 10 aa, synthetic construct
QWNRGDRDYL

SEQ ID NO: 78468 - protein, 10 aa, synthetic construct
QWNRGDYVGL

SEQ ID NO: 78469 - protein, 10 aa, synthetic construct
QWNRGDYSSV

SEQ ID NO: 78470 - protein, 10 aa, synthetic construct
QWNRGDYTSV

SEQ ID NO: 78471 - protein, 10 aa, synthetic construct
QWNRGDQSTL

SEQ ID NO: 78472 - protein, 10 aa, synthetic construct
EGLRGDRGQI

SEQ ID NO: 78473 - protein, 10 aa, synthetic construct
QWQRGDHVNL

SEQ ID NO: 78474 - protein, 10 aa, synthetic construct
QWQRGDYNSL

SEQ ID NO: 78475 - protein, 10 aa, synthetic construct
QWQRGDYTSM

SEQ ID NO: 78476 - protein, 10 aa, synthetic construct
QWDRGDHVNL

SEQ ID NO: 78477 - protein, 10 aa, synthetic construct
QWDRGDYNSL

SEQ ID NO: 78478 - protein, 10 aa, synthetic construct
QWDRGDYTSM

SEQ ID NO: 78479 - protein, 10 aa, synthetic construct
QWERGDHVNL

SEQ ID NO: 78480 - protein, 10 aa, synthetic construct
QWERGDYNSL

SEQ ID NO: 78481 - protein, 10 aa, synthetic construct
QWERGDYTSM

SEQ ID NO: 78482 - protein, 10 aa, synthetic construct
QFGRGDRDYL

SEQ ID NO: 78483 - protein, 10 aa, synthetic construct
EGLRGDRQGI

SEQ ID NO: 78484 - protein, 10 aa, synthetic construct
QFGRGDYTSV

SEQ ID NO: 78485 - protein, 10 aa, synthetic construct
QFGRGDLTVT

SEQ ID NO: 78486 - protein, 10 aa, synthetic construct
QFGRGDLIGR

SEQ ID NO: 78487 - protein, 10 aa, synthetic construct
QFARGDRDYL

SEQ ID NO: 78488 - protein, 10 aa, synthetic construct
QFARGDYTSV

SEQ ID NO: 78489 - protein, 10 aa, synthetic construct
QFARGDLTVT

SEQ ID NO: 78490 - protein, 10 aa, synthetic construct
QFARGDLIGR

SEQ ID NO: 78491 - protein, 10 aa, synthetic construct
QFVRGDHGVL

SEQ ID NO: 78492 - protein, 10 aa, synthetic construct
QFVRGDHVNL

SEQ ID NO: 78493 - protein, 10 aa, synthetic construct
QFVRGDRDYL

SEQ ID NO: 78494 - protein, 10 aa, synthetic construct
EGLRGDRSVV

SEQ ID NO: 78495 - protein, 10 aa, synthetic construct
QFVRGDYSSV

SEQ ID NO: 78496 - protein, 10 aa, synthetic construct
QFVRGDLTVT

SEQ ID NO: 78497 - protein, 10 aa, synthetic construct
QFPRGDRDYL

SEQ ID NO: 78498 - protein, 10 aa, synthetic construct
QFPRGDYTSV

SEQ ID NO: 78499 - protein, 10 aa, synthetic construct
QFPRGDLTVT

SEQ ID NO: 78500 - protein, 10 aa, synthetic construct
QFPRGDLIGR

SEQ ID NO: 78501 - protein, 10 aa, synthetic construct
QFLRGDHGVL

SEQ ID NO: 78502 - protein, 10 aa, synthetic construct
QFLRGDHVNL

SEQ ID NO: 78503 - protein, 10 aa, synthetic construct
QFLRGDRDYL

SEQ ID NO: 78504 - protein, 10 aa, synthetic construct
QFLRGDYSSV

SEQ ID NO: 78505 - protein, 10 aa, synthetic construct
EGLRGDRGVV

SEQ ID NO: 78506 - protein, 10 aa, synthetic construct
QFLRGDLTVT

SEQ ID NO: 78507 - protein, 10 aa, synthetic construct
QFIRGDHGVL

SEQ ID NO: 78508 - protein, 10 aa, synthetic construct
QFIRGDRGQI

SEQ ID NO: 78509 - protein, 10 aa, synthetic construct
QFIRGDRQGI

SEQ ID NO: 78510 - protein, 10 aa, synthetic construct
QFIRGDRGVV

SEQ ID NO: 78511 - protein, 10 aa, synthetic construct
QFIRGDYVGL

SEQ ID NO: 78512 - protein, 10 aa, synthetic construct
QFIRGDLIGR

SEQ ID NO: 78513 - protein, 10 aa, synthetic construct
QFIRGDQSTL

SEQ ID NO: 78514 - protein, 10 aa, synthetic construct
QFIRGDLLLS

SEQ ID NO: 78515 - protein, 10 aa, synthetic construct
QFMRGDHGVL

SEQ ID NO: 78516 - protein, 10 aa, synthetic construct
ESPRGDFNNL

SEQ ID NO: 78517 - protein, 10 aa, synthetic construct
EGLRGDRSQT

SEQ ID NO: 78518 - protein, 10 aa, synthetic construct
QFMRGDRGQI

SEQ ID NO: 78519 - protein, 10 aa, synthetic construct
QFMRGDRQGI

SEQ ID NO: 78520 - protein, 10 aa, synthetic construct
QFMRGDRGVV

SEQ ID NO: 78521 - protein, 10 aa, synthetic construct
QFMRGDYVGL

SEQ ID NO: 78522 - protein, 10 aa, synthetic construct
QFMRGDLIGR

SEQ ID NO: 78523 - protein, 10 aa, synthetic construct
QFMRGDQSTL

SEQ ID NO: 78524 - protein, 10 aa, synthetic construct
QFMRGDLLLS

SEQ ID NO: 78525 - protein, 10 aa, synthetic construct
QFWRGDHGVL

SEQ ID NO: 78526 - protein, 10 aa, synthetic construct
QFWRGDHVNL

SEQ ID NO: 78527 - protein, 10 aa, synthetic construct
QFWRGDRDYL

SEQ ID NO: 78528 - protein, 10 aa, synthetic construct
EGWRGDRGQI

SEQ ID NO: 78529 - protein, 10 aa, synthetic construct
QFWRGDYSSV

SEQ ID NO: 78530 - protein, 10 aa, synthetic construct
QFWRGDLTVT

SEQ ID NO: 78531 - protein, 10 aa, synthetic construct
QFKRGDHGVL

SEQ ID NO: 78532 - protein, 10 aa, synthetic construct
QFKRGDRGQI

SEQ ID NO: 78533 - protein, 10 aa, synthetic construct
QFKRGDRQGI

SEQ ID NO: 78534 - protein, 10 aa, synthetic construct
QFKRGDRGVV

SEQ ID NO: 78535 - protein, 10 aa, synthetic construct
QFKRGDYVGL

SEQ ID NO: 78536 - protein, 10 aa, synthetic construct
QFKRGDLIGR

SEQ ID NO: 78537 - protein, 10 aa, synthetic construct
QFKRGDQSTL

SEQ ID NO: 78538 - protein, 10 aa, synthetic construct
QFKRGDLLLS

SEQ ID NO: 78539 - protein, 10 aa, synthetic construct
EGWRGDRQGI

SEQ ID NO: 78540 - protein, 10 aa, synthetic construct
QFRRGDRDYL

SEQ ID NO: 78541 - protein, 10 aa, synthetic construct
QFRRGDYTSV

SEQ ID NO: 78542 - protein, 10 aa, synthetic construct
QFRRGDLTVT

SEQ ID NO: 78543 - protein, 10 aa, synthetic construct
QFRRGDLIGR

SEQ ID NO: 78544 - protein, 10 aa, synthetic construct
QFHRGDHGVL

SEQ ID NO: 78545 - protein, 10 aa, synthetic construct
QFHRGDHVNL

SEQ ID NO: 78546 - protein, 10 aa, synthetic construct
QFHRGDRDYL

SEQ ID NO: 78547 - protein, 10 aa, synthetic construct
QFHRGDYSSV

SEQ ID NO: 78548 - protein, 10 aa, synthetic construct
QFHRGDLTVT

SEQ ID NO: 78549 - protein, 10 aa, synthetic construct
QFSRGDHGVL

SEQ ID NO: 78550 - protein, 10 aa, synthetic construct
EGWRGDRSVV

SEQ ID NO: 78551 - protein, 10 aa, synthetic construct
QFSRGDHVNL

SEQ ID NO: 78552 - protein, 10 aa, synthetic construct
QFSRGDRDYL

SEQ ID NO: 78553 - protein, 10 aa, synthetic construct
QFSRGDYSSV

SEQ ID NO: 78554 - protein, 10 aa, synthetic construct
QFSRGDLTVT

SEQ ID NO: 78555 - protein, 10 aa, synthetic construct
QFTRGDHGVL

SEQ ID NO: 78556 - protein, 10 aa, synthetic construct
QFTRGDHVNL

SEQ ID NO: 78557 - protein, 10 aa, synthetic construct
QFTRGDRDYL

SEQ ID NO: 78558 - protein, 10 aa, synthetic construct
QFTRGDYSSV

SEQ ID NO: 78559 - protein, 10 aa, synthetic construct
QFTRGDLTVT

SEQ ID NO: 78560 - protein, 10 aa, synthetic construct
QFYRGDHGVL

SEQ ID NO: 78561 - protein, 10 aa, synthetic construct
EGWRGDRGVV

SEQ ID NO: 78562 - protein, 10 aa, synthetic construct
QFYRGDRGQI

SEQ ID NO: 78563 - protein, 10 aa, synthetic construct
QFYRGDRQGI

SEQ ID NO: 78564 - protein, 10 aa, synthetic construct
QFYRGDRGVV

SEQ ID NO: 78565 - protein, 10 aa, synthetic construct
QFYRGDYVGL

SEQ ID NO: 78566 - protein, 10 aa, synthetic construct
QFYRGDLIGR

SEQ ID NO: 78567 - protein, 10 aa, synthetic construct
QFYRGDQSTL

SEQ ID NO: 78568 - protein, 10 aa, synthetic construct
QFYRGDLLLS

SEQ ID NO: 78569 - protein, 10 aa, synthetic construct
QFNRGDHGVL

SEQ ID NO: 78570 - protein, 10 aa, synthetic construct
QFNRGDRGQI

SEQ ID NO: 78571 - protein, 10 aa, synthetic construct
QFNRGDRQGI

SEQ ID NO: 78572 - protein, 10 aa, synthetic construct
EGWRGDRSQT

SEQ ID NO: 78573 - protein, 10 aa, synthetic construct
QFNRGDRGVV

SEQ ID NO: 78574 - protein, 10 aa, synthetic construct
QFNRGDYVGL

SEQ ID NO: 78575 - protein, 10 aa, synthetic construct
QFNRGDLIGR

SEQ ID NO: 78576 - protein, 10 aa, synthetic construct
QFNRGDQSTL

SEQ ID NO: 78577 - protein, 10 aa, synthetic construct
QFNRGDLLLS

SEQ ID NO: 78578 - protein, 10 aa, synthetic construct
QFQRGDHGVL

SEQ ID NO: 78579 - protein, 10 aa, synthetic construct
QFQRGDHVNL

SEQ ID NO: 78580 - protein, 10 aa, synthetic construct
QFQRGDRDYL

SEQ ID NO: 78581 - protein, 10 aa, synthetic construct
QFQRGDYSSV

SEQ ID NO: 78582 - protein, 10 aa, synthetic construct
QFQRGDLTVT

SEQ ID NO: 78583 - protein, 10 aa, synthetic construct
EGRRGDHGVL

SEQ ID NO: 78584 - protein, 10 aa, synthetic construct
QFDRGDHGVL

SEQ ID NO: 78585 - protein, 10 aa, synthetic construct
QFDRGDHVNL

SEQ ID NO: 78586 - protein, 10 aa, synthetic construct
QFDRGDRDYL

SEQ ID NO: 78587 - protein, 10 aa, synthetic construct
QFDRGDYSSV

SEQ ID NO: 78588 - protein, 10 aa, synthetic construct
QFDRGDLTVT

SEQ ID NO: 78589 - protein, 10 aa, synthetic construct
QFERGDHGVL

SEQ ID NO: 78590 - protein, 10 aa, synthetic construct
QFERGDHVNL

SEQ ID NO: 78591 - protein, 10 aa, synthetic construct
QFERGDRDYL

SEQ ID NO: 78592 - protein, 10 aa, synthetic construct
QFERGDYSSV

SEQ ID NO: 78593 - protein, 10 aa, synthetic construct
QFERGDLTVT

SEQ ID NO: 78594 - protein, 10 aa, synthetic construct
EGRRGDYVGL

SEQ ID NO: 78595 - protein, 10 aa, synthetic construct
QKGRGDRDYL

SEQ ID NO: 78596 - protein, 10 aa, synthetic construct
QKGRGDYTSV

SEQ ID NO: 78597 - protein, 10 aa, synthetic construct
QKGRGDLTVT

SEQ ID NO: 78598 - protein, 10 aa, synthetic construct
QKGRGDLIGR

SEQ ID NO: 78599 - protein, 10 aa, synthetic construct
QKARGDRDYL

SEQ ID NO: 78600 - protein, 10 aa, synthetic construct
QKARGDYTSV

SEQ ID NO: 78601 - protein, 10 aa, synthetic construct
QKARGDLTVT

SEQ ID NO: 78602 - protein, 10 aa, synthetic construct
QKARGDLIGR

SEQ ID NO: 78603 - protein, 10 aa, synthetic construct
QKVRGDHGVL

SEQ ID NO: 78604 - protein, 10 aa, synthetic construct
QKVRGDHVNL

SEQ ID NO: 78605 - protein, 10 aa, synthetic construct
EGRRGDQSTL

SEQ ID NO: 78606 - protein, 10 aa, synthetic construct
QKVRGDRDYL

SEQ ID NO: 78607 - protein, 10 aa, synthetic construct
QKVRGDYSSV

SEQ ID NO: 78608 - protein, 10 aa, synthetic construct
QKVRGDLTVT

SEQ ID NO: 78609 - protein, 10 aa, synthetic construct
QKPRGDRDYL

SEQ ID NO: 78610 - protein, 10 aa, synthetic construct
QKPRGDYTSV

SEQ ID NO: 78611 - protein, 10 aa, synthetic construct
QKPRGDLTVT

SEQ ID NO: 78612 - protein, 10 aa, synthetic construct
QKPRGDLIGR

SEQ ID NO: 78613 - protein, 10 aa, synthetic construct
QKLRGDHGVL

SEQ ID NO: 78614 - protein, 10 aa, synthetic construct
QKLRGDHVNL

SEQ ID NO: 78615 - protein, 10 aa, synthetic construct
QKLRGDRDYL

SEQ ID NO: 78616 - protein, 10 aa, synthetic construct
EGRRGDLLLS

SEQ ID NO: 78617 - protein, 10 aa, synthetic construct
QKLRGDYSSV

SEQ ID NO: 78618 - protein, 10 aa, synthetic construct
QKLRGDLTVT

SEQ ID NO: 78619 - protein, 10 aa, synthetic construct
QKIRGDHGVL

SEQ ID NO: 78620 - protein, 10 aa, synthetic construct
QKIRGDRGQI

SEQ ID NO: 78621 - protein, 10 aa, synthetic construct
QKIRGDRQGI

SEQ ID NO: 78622 - protein, 10 aa, synthetic construct
QKIRGDRGVV

SEQ ID NO: 78623 - protein, 10 aa, synthetic construct
QKIRGDYVGL

SEQ ID NO: 78624 - protein, 10 aa, synthetic construct
QKIRGDLIGR

SEQ ID NO: 78625 - protein, 10 aa, synthetic construct
QKIRGDQSTL

SEQ ID NO: 78626 - protein, 10 aa, synthetic construct
QKIRGDLLLS

SEQ ID NO: 78627 - protein, 10 aa, synthetic construct
NSPRGDYNSL

SEQ ID NO: 78628 - protein, 10 aa, synthetic construct
EGHRGDRGQI

SEQ ID NO: 78629 - protein, 10 aa, synthetic construct
QKMRGDHGVL

SEQ ID NO: 78630 - protein, 10 aa, synthetic construct
QKMRGDRGQI

SEQ ID NO: 78631 - protein, 10 aa, synthetic construct
QKMRGDRQGI

SEQ ID NO: 78632 - protein, 10 aa, synthetic construct
QKMRGDRGVV

SEQ ID NO: 78633 - protein, 10 aa, synthetic construct
QKMRGDYVGL

SEQ ID NO: 78634 - protein, 10 aa, synthetic construct
QKMRGDLIGR

SEQ ID NO: 78635 - protein, 10 aa, synthetic construct
QKMRGDQSTL

SEQ ID NO: 78636 - protein, 10 aa, synthetic construct
QKMRGDLLLS

SEQ ID NO: 78637 - protein, 10 aa, synthetic construct
QKWRGDHGVL

SEQ ID NO: 78638 - protein, 10 aa, synthetic construct
QKWRGDHVNL

SEQ ID NO: 78639 - protein, 10 aa, synthetic construct
EGHRGDRQGI

SEQ ID NO: 78640 - protein, 10 aa, synthetic construct
QKWRGDRDYL

SEQ ID NO: 78641 - protein, 10 aa, synthetic construct
QKWRGDYSSV

SEQ ID NO: 78642 - protein, 10 aa, synthetic construct
QKWRGDLTVT

SEQ ID NO: 78643 - protein, 10 aa, synthetic construct
QKFRGDHGVL

SEQ ID NO: 78644 - protein, 10 aa, synthetic construct
QKFRGDRGQI

SEQ ID NO: 78645 - protein, 10 aa, synthetic construct
QKFRGDRQGI

SEQ ID NO: 78646 - protein, 10 aa, synthetic construct
QKFRGDRGVV

SEQ ID NO: 78647 - protein, 10 aa, synthetic construct
QKFRGDYVGL

SEQ ID NO: 78648 - protein, 10 aa, synthetic construct
QKFRGDLIGR

SEQ ID NO: 78649 - protein, 10 aa, synthetic construct
QKFRGDQSTL

SEQ ID NO: 78650 - protein, 10 aa, synthetic construct
EGHRGDRSVV

SEQ ID NO: 78651 - protein, 10 aa, synthetic construct
QKFRGDLLLS

SEQ ID NO: 78652 - protein, 10 aa, synthetic construct
QKRRGDRDYL

SEQ ID NO: 78653 - protein, 10 aa, synthetic construct
QKRRGDYTSV

SEQ ID NO: 78654 - protein, 10 aa, synthetic construct
QKRRGDLTVT

SEQ ID NO: 78655 - protein, 10 aa, synthetic construct
QKRRGDLIGR

SEQ ID NO: 78656 - protein, 10 aa, synthetic construct
QKHRGDHGVL

SEQ ID NO: 78657 - protein, 10 aa, synthetic construct
QKHRGDHVNL

SEQ ID NO: 78658 - protein, 10 aa, synthetic construct
QKHRGDRDYL

SEQ ID NO: 78659 - protein, 10 aa, synthetic construct
QKHRGDYSSV

SEQ ID NO: 78660 - protein, 10 aa, synthetic construct
QKHRGDLTVT

SEQ ID NO: 78661 - protein, 10 aa, synthetic construct
EGHRGDRGVV

SEQ ID NO: 78662 - protein, 10 aa, synthetic construct
QKSRGDHGVL

SEQ ID NO: 78663 - protein, 10 aa, synthetic construct
QKSRGDHVNL

SEQ ID NO: 78664 - protein, 10 aa, synthetic construct
QKSRGDRDYL

SEQ ID NO: 78665 - protein, 10 aa, synthetic construct
QKSRGDYSSV

SEQ ID NO: 78666 - protein, 10 aa, synthetic construct
QKSRGDLTVT

SEQ ID NO: 78667 - protein, 10 aa, synthetic construct
QKTRGDHGVL

SEQ ID NO: 78668 - protein, 10 aa, synthetic construct
QKTRGDHVNL

SEQ ID NO: 78669 - protein, 10 aa, synthetic construct
QKTRGDRDYL

SEQ ID NO: 78670 - protein, 10 aa, synthetic construct
QKTRGDYSSV

SEQ ID NO: 78671 - protein, 10 aa, synthetic construct
QKTRGDLTVT

SEQ ID NO: 78672 - protein, 10 aa, synthetic construct
EGHRGDRSQT

SEQ ID NO: 78673 - protein, 10 aa, synthetic construct
QKYRGDHGVL

SEQ ID NO: 78674 - protein, 10 aa, synthetic construct
QKYRGDRGQI

SEQ ID NO: 78675 - protein, 10 aa, synthetic construct
QKYRGDRQGI

SEQ ID NO: 78676 - protein, 10 aa, synthetic construct
QKYRGDRGVV

SEQ ID NO: 78677 - protein, 10 aa, synthetic construct
QKYRGDYVGL

SEQ ID NO: 78678 - protein, 10 aa, synthetic construct
QKYRGDLIGR

SEQ ID NO: 78679 - protein, 10 aa, synthetic construct
QKYRGDQSTL

SEQ ID NO: 78680 - protein, 10 aa, synthetic construct
QKYRGDLLLS

SEQ ID NO: 78681 - protein, 10 aa, synthetic construct
QKQRGDHGVL

SEQ ID NO: 78682 - protein, 10 aa, synthetic construct
QKQRGDHVNL

SEQ ID NO: 78683 - protein, 10 aa, synthetic construct
EGSRGDRGQI

SEQ ID NO: 78684 - protein, 10 aa, synthetic construct
QKQRGDRDYL

SEQ ID NO: 78685 - protein, 10 aa, synthetic construct
QKQRGDYSSV

SEQ ID NO: 78686 - protein, 10 aa, synthetic construct
QKQRGDLTVT

SEQ ID NO: 78687 - protein, 10 aa, synthetic construct
QKDRGDHGVL

SEQ ID NO: 78688 - protein, 10 aa, synthetic construct
QKDRGDHVNL

SEQ ID NO: 78689 - protein, 10 aa, synthetic construct
QKDRGDRDYL

SEQ ID NO: 78690 - protein, 10 aa, synthetic construct
QKDRGDYSSV

SEQ ID NO: 78691 - protein, 10 aa, synthetic construct
QKDRGDLTVT

SEQ ID NO: 78692 - protein, 10 aa, synthetic construct
QKERGDHGVL

SEQ ID NO: 78693 - protein, 10 aa, synthetic construct
QKERGDHVNL

SEQ ID NO: 78694 - protein, 10 aa, synthetic construct
EGSRGDRQGI

SEQ ID NO: 78695 - protein, 10 aa, synthetic construct
QKERGDRDYL

SEQ ID NO: 78696 - protein, 10 aa, synthetic construct
QKERGDYSSV

SEQ ID NO: 78697 - protein, 10 aa, synthetic construct
QKERGDLTVT

SEQ ID NO: 78698 - protein, 10 aa, synthetic construct
QRGRGDYNSL

SEQ ID NO: 78699 - protein, 10 aa, synthetic construct
QRGRGDFNNT

SEQ ID NO: 78700 - protein, 10 aa, synthetic construct
QRGRGDFNNL

SEQ ID NO: 78701 - protein, 10 aa, synthetic construct
QRGRGDFQNT

SEQ ID NO: 78702 - protein, 10 aa, synthetic construct
QRARGDYNSL

SEQ ID NO: 78703 - protein, 10 aa, synthetic construct
QRARGDFNNT

SEQ ID NO: 78704 - protein, 10 aa, synthetic construct
QRARGDFNNL

SEQ ID NO: 78705 - protein, 10 aa, synthetic construct
EGSRGDRSVV

SEQ ID NO: 78706 - protein, 10 aa, synthetic construct
QRARGDFQNT

SEQ ID NO: 78707 - protein, 10 aa, synthetic construct
QRVRGDYNSL

SEQ ID NO: 78708 - protein, 10 aa, synthetic construct
QRVRGDYTSV

SEQ ID NO: 78709 - protein, 10 aa, synthetic construct
QRVRGDYTSM

SEQ ID NO: 78710 - protein, 10 aa, synthetic construct
QRVRGDFQNT

SEQ ID NO: 78711 - protein, 10 aa, synthetic construct
QRPRGDYNSL

SEQ ID NO: 78712 - protein, 10 aa, synthetic construct
QRPRGDFNNT

SEQ ID NO: 78713 - protein, 10 aa, synthetic construct
QRPRGDFNNL

SEQ ID NO: 78714 - protein, 10 aa, synthetic construct
QRPRGDFQNT

SEQ ID NO: 78715 - protein, 10 aa, synthetic construct
QRLRGDYNSL

SEQ ID NO: 78716 - protein, 10 aa, synthetic construct
EGSRGDRGVV

SEQ ID NO: 78717 - protein, 10 aa, synthetic construct
QRLRGDYTSV

SEQ ID NO: 78718 - protein, 10 aa, synthetic construct
QRLRGDYTSM

SEQ ID NO: 78719 - protein, 10 aa, synthetic construct
QRLRGDFQNT

SEQ ID NO: 78720 - protein, 10 aa, synthetic construct
QRIRGDRDYL

SEQ ID NO: 78721 - protein, 10 aa, synthetic construct
QRIRGDYTSV

SEQ ID NO: 78722 - protein, 10 aa, synthetic construct
QRIRGDLTVT

SEQ ID NO: 78723 - protein, 10 aa, synthetic construct
QRIRGDLIGR

SEQ ID NO: 78724 - protein, 10 aa, synthetic construct
QRMRGDRDYL

SEQ ID NO: 78725 - protein, 10 aa, synthetic construct
QRMRGDYTSV

SEQ ID NO: 78726 - protein, 10 aa, synthetic construct
QRMRGDLTVT

SEQ ID NO: 78727 - protein, 10 aa, synthetic construct
EGSRGDRSQT

SEQ ID NO: 78728 - protein, 10 aa, synthetic construct
QRMRGDLIGR

SEQ ID NO: 78729 - protein, 10 aa, synthetic construct
QRWRGDYNSL

SEQ ID NO: 78730 - protein, 10 aa, synthetic construct
QRWRGDYTSV

SEQ ID NO: 78731 - protein, 10 aa, synthetic construct
QRWRGDYTSM

SEQ ID NO: 78732 - protein, 10 aa, synthetic construct
QRWRGDFQNT

SEQ ID NO: 78733 - protein, 10 aa, synthetic construct
QRFRGDRDYL

SEQ ID NO: 78734 - protein, 10 aa, synthetic construct
QRFRGDYTSV

SEQ ID NO: 78735 - protein, 10 aa, synthetic construct
QRFRGDLTVT

SEQ ID NO: 78736 - protein, 10 aa, synthetic construct
QRFRGDLIGR

SEQ ID NO: 78737 - protein, 10 aa, synthetic construct
QRKRGDRDYL

SEQ ID NO: 78738 - protein, 10 aa, synthetic construct
NSPRGDYTSM

SEQ ID NO: 78739 - protein, 10 aa, synthetic construct
EGTRGDRGQI

SEQ ID NO: 78740 - protein, 10 aa, synthetic construct
QRKRGDYTSV

SEQ ID NO: 78741 - protein, 10 aa, synthetic construct
QRKRGDLTVT

SEQ ID NO: 78742 - protein, 10 aa, synthetic construct
QRKRGDLIGR

SEQ ID NO: 78743 - protein, 10 aa, synthetic construct
QRRRGDYNSL

SEQ ID NO: 78744 - protein, 10 aa, synthetic construct
QRRRGDFNNT

SEQ ID NO: 78745 - protein, 10 aa, synthetic construct
QRRRGDFNNL

SEQ ID NO: 78746 - protein, 10 aa, synthetic construct
QRRRGDFQNT

SEQ ID NO: 78747 - protein, 10 aa, synthetic construct
QRHRGDYNSL

SEQ ID NO: 78748 - protein, 10 aa, synthetic construct
QRHRGDYTSV

SEQ ID NO: 78749 - protein, 10 aa, synthetic construct
QRHRGDYTSM

SEQ ID NO: 78750 - protein, 10 aa, synthetic construct
EGTRGDRQGI

SEQ ID NO: 78751 - protein, 10 aa, synthetic construct
QRHRGDFQNT

SEQ ID NO: 78752 - protein, 10 aa, synthetic construct
QRSRGDYNSL

SEQ ID NO: 78753 - protein, 10 aa, synthetic construct
QRSRGDYTSV

SEQ ID NO: 78754 - protein, 10 aa, synthetic construct
QRSRGDYTSM

SEQ ID NO: 78755 - protein, 10 aa, synthetic construct
QRSRGDFQNT

SEQ ID NO: 78756 - protein, 10 aa, synthetic construct
QRTRGDYNSL

SEQ ID NO: 78757 - protein, 10 aa, synthetic construct
QRTRGDYTSV

SEQ ID NO: 78758 - protein, 10 aa, synthetic construct
QRTRGDYTSM

SEQ ID NO: 78759 - protein, 10 aa, synthetic construct
QRTRGDFQNT

SEQ ID NO: 78760 - protein, 10 aa, synthetic construct
QRYRGDRDYL

SEQ ID NO: 78761 - protein, 10 aa, synthetic construct
EGTRGDRSVV

SEQ ID NO: 78762 - protein, 10 aa, synthetic construct
QRYRGDYTSV

SEQ ID NO: 78763 - protein, 10 aa, synthetic construct
QRYRGDLTVT

SEQ ID NO: 78764 - protein, 10 aa, synthetic construct
QRYRGDLIGR

SEQ ID NO: 78765 - protein, 10 aa, synthetic construct
QRNRGDRDYL

SEQ ID NO: 78766 - protein, 10 aa, synthetic construct
QRNRGDYTSV

SEQ ID NO: 78767 - protein, 10 aa, synthetic construct
QRNRGDLTVT

SEQ ID NO: 78768 - protein, 10 aa, synthetic construct
QRNRGDLIGR

SEQ ID NO: 78769 - protein, 10 aa, synthetic construct
QRQRGDYNSL

SEQ ID NO: 78770 - protein, 10 aa, synthetic construct
QRQRGDYTSV

SEQ ID NO: 78771 - protein, 10 aa, synthetic construct
QRQRGDYTSM

SEQ ID NO: 78772 - protein, 10 aa, synthetic construct
EGTRGDRGVV

SEQ ID NO: 78773 - protein, 10 aa, synthetic construct
QRQRGDFQNT

SEQ ID NO: 78774 - protein, 10 aa, synthetic construct
QRDRGDYNSL

SEQ ID NO: 78775 - protein, 10 aa, synthetic construct
QRDRGDYTSV

SEQ ID NO: 78776 - protein, 10 aa, synthetic construct
QRDRGDYTSM

SEQ ID NO: 78777 - protein, 10 aa, synthetic construct
QRDRGDFQNT

SEQ ID NO: 78778 - protein, 10 aa, synthetic construct
QRERGDYNSL

SEQ ID NO: 78779 - protein, 10 aa, synthetic construct
QRERGDYTSV

SEQ ID NO: 78780 - protein, 10 aa, synthetic construct
QRERGDYTSM

SEQ ID NO: 78781 - protein, 10 aa, synthetic construct
QRERGDFQNT

SEQ ID NO: 78782 - protein, 10 aa, synthetic construct
QHGRGDYNSL

SEQ ID NO: 78783 - protein, 10 aa, synthetic construct
EGTRGDRSQT

SEQ ID NO: 78784 - protein, 10 aa, synthetic construct
QHGRGDYTSV

SEQ ID NO: 78785 - protein, 10 aa, synthetic construct
QHGRGDYTSM

SEQ ID NO: 78786 - protein, 10 aa, synthetic construct
QHGRGDFQNT

SEQ ID NO: 78787 - protein, 10 aa, synthetic construct
QHARGDYNSL

SEQ ID NO: 78788 - protein, 10 aa, synthetic construct
QHARGDYTSV

SEQ ID NO: 78789 - protein, 10 aa, synthetic construct
QHARGDYTSM

SEQ ID NO: 78790 - protein, 10 aa, synthetic construct
QHARGDFQNT

SEQ ID NO: 78791 - protein, 10 aa, synthetic construct
QHVRGDRDYL

SEQ ID NO: 78792 - protein, 10 aa, synthetic construct
QHVRGDYTSV

SEQ ID NO: 78793 - protein, 10 aa, synthetic construct
QHVRGDLTVT

SEQ ID NO: 78794 - protein, 10 aa, synthetic construct
EGQRGDRGQI

SEQ ID NO: 78795 - protein, 10 aa, synthetic construct
QHVRGDLIGR

SEQ ID NO: 78796 - protein, 10 aa, synthetic construct
QHPRGDYNSL

SEQ ID NO: 78797 - protein, 10 aa, synthetic construct
QHPRGDYTSV

SEQ ID NO: 78798 - protein, 10 aa, synthetic construct
QHPRGDYTSM

SEQ ID NO: 78799 - protein, 10 aa, synthetic construct
QHPRGDFQNT

SEQ ID NO: 78800 - protein, 10 aa, synthetic construct
QHLRGDRDYL

SEQ ID NO: 78801 - protein, 10 aa, synthetic construct
QHLRGDYTSV

SEQ ID NO: 78802 - protein, 10 aa, synthetic construct
QHLRGDLTVT

SEQ ID NO: 78803 - protein, 10 aa, synthetic construct
QHLRGDLIGR

SEQ ID NO: 78804 - protein, 10 aa, synthetic construct
QHIRGDHGVL

SEQ ID NO: 78805 - protein, 10 aa, synthetic construct
EGQRGDRQGI

SEQ ID NO: 78806 - protein, 10 aa, synthetic construct
QHIRGDHVNL

SEQ ID NO: 78807 - protein, 10 aa, synthetic construct
QHIRGDRDYL

SEQ ID NO: 78808 - protein, 10 aa, synthetic construct
QHIRGDYSSV

SEQ ID NO: 78809 - protein, 10 aa, synthetic construct
QHIRGDLTVT

SEQ ID NO: 78810 - protein, 10 aa, synthetic construct
QHMRGDHGVL

SEQ ID NO: 78811 - protein, 10 aa, synthetic construct
QHMRGDHVNL

SEQ ID NO: 78812 - protein, 10 aa, synthetic construct
QHMRGDRDYL

SEQ ID NO: 78813 - protein, 10 aa, synthetic construct
QHMRGDYSSV

SEQ ID NO: 78814 - protein, 10 aa, synthetic construct
QHMRGDLTVT

SEQ ID NO: 78815 - protein, 10 aa, synthetic construct
QHWRGDRDYL

SEQ ID NO: 78816 - protein, 10 aa, synthetic construct
EGQRGDRSVV

SEQ ID NO: 78817 - protein, 10 aa, synthetic construct
QHWRGDYTSV

SEQ ID NO: 78818 - protein, 10 aa, synthetic construct
QHWRGDLTVT

SEQ ID NO: 78819 - protein, 10 aa, synthetic construct
QHWRGDLIGR

SEQ ID NO: 78820 - protein, 10 aa, synthetic construct
QHFRGDHGVL

SEQ ID NO: 78821 - protein, 10 aa, synthetic construct
QHFRGDHVNL

SEQ ID NO: 78822 - protein, 10 aa, synthetic construct
QHFRGDRDYL

SEQ ID NO: 78823 - protein, 10 aa, synthetic construct
QHFRGDYSSV

SEQ ID NO: 78824 - protein, 10 aa, synthetic construct
QHFRGDLTVT

SEQ ID NO: 78825 - protein, 10 aa, synthetic construct
QHKRGDHGVL

SEQ ID NO: 78826 - protein, 10 aa, synthetic construct
QHKRGDHVNL

SEQ ID NO: 78827 - protein, 10 aa, synthetic construct
EGQRGDRGVV

SEQ ID NO: 78828 - protein, 10 aa, synthetic construct
QHKRGDRDYL

SEQ ID NO: 78829 - protein, 10 aa, synthetic construct
QHKRGDYSSV

SEQ ID NO: 78830 - protein, 10 aa, synthetic construct
QHKRGDLTVT

SEQ ID NO: 78831 - protein, 10 aa, synthetic construct
QHRRGDYNSL

SEQ ID NO: 78832 - protein, 10 aa, synthetic construct
QHRRGDYTSV

SEQ ID NO: 78833 - protein, 10 aa, synthetic construct
QHRRGDYTSM

SEQ ID NO: 78834 - protein, 10 aa, synthetic construct
QHRRGDFQNT

SEQ ID NO: 78835 - protein, 10 aa, synthetic construct
QHHRGDRDYL

SEQ ID NO: 78836 - protein, 10 aa, synthetic construct
QHHRGDYTSV

SEQ ID NO: 78837 - protein, 10 aa, synthetic construct
QHHRGDLTVT

SEQ ID NO: 78838 - protein, 10 aa, synthetic construct
EGQRGDRSQT

SEQ ID NO: 78839 - protein, 10 aa, synthetic construct
QHHRGDLIGR

SEQ ID NO: 78840 - protein, 10 aa, synthetic construct
QHSRGDRDYL

SEQ ID NO: 78841 - protein, 10 aa, synthetic construct
QHSRGDYTSV

SEQ ID NO: 78842 - protein, 10 aa, synthetic construct
QHSRGDLTVT

SEQ ID NO: 78843 - protein, 10 aa, synthetic construct
QHSRGDLIGR

SEQ ID NO: 78844 - protein, 10 aa, synthetic construct
QHTRGDRDYL

SEQ ID NO: 78845 - protein, 10 aa, synthetic construct
QHTRGDYTSV

SEQ ID NO: 78846 - protein, 10 aa, synthetic construct
QHTRGDLTVT

SEQ ID NO: 78847 - protein, 10 aa, synthetic construct
QHTRGDLIGR

SEQ ID NO: 78848 - protein, 10 aa, synthetic construct
QHYRGDHGVL

SEQ ID NO: 78849 - protein, 10 aa, synthetic construct
NSPRGDFQNT

SEQ ID NO: 78850 - protein, 10 aa, synthetic construct
EGDRGDRGQI

SEQ ID NO: 78851 - protein, 10 aa, synthetic construct
QHYRGDHVNL

SEQ ID NO: 78852 - protein, 10 aa, synthetic construct
QHYRGDRDYL

SEQ ID NO: 78853 - protein, 10 aa, synthetic construct
QHYRGDYSSV

SEQ ID NO: 78854 - protein, 10 aa, synthetic construct
QHYRGDLTVT

SEQ ID NO: 78855 - protein, 10 aa, synthetic construct
QHNRGDHGVL

SEQ ID NO: 78856 - protein, 10 aa, synthetic construct
QHNRGDHVNL

SEQ ID NO: 78857 - protein, 10 aa, synthetic construct
QHNRGDRDYL

SEQ ID NO: 78858 - protein, 10 aa, synthetic construct
QHNRGDYSSV

SEQ ID NO: 78859 - protein, 10 aa, synthetic construct
QHNRGDLTVT

SEQ ID NO: 78860 - protein, 10 aa, synthetic construct
QHQRGDRDYL

SEQ ID NO: 78861 - protein, 10 aa, synthetic construct
EGDRGDRQGI

SEQ ID NO: 78862 - protein, 10 aa, synthetic construct
QHQRGDYTSV

SEQ ID NO: 78863 - protein, 10 aa, synthetic construct
QHQRGDLTVT

SEQ ID NO: 78864 - protein, 10 aa, synthetic construct
QHQRGDLIGR

SEQ ID NO: 78865 - protein, 10 aa, synthetic construct
QHDRGDRDYL

SEQ ID NO: 78866 - protein, 10 aa, synthetic construct
QHDRGDYTSV

SEQ ID NO: 78867 - protein, 10 aa, synthetic construct
QHDRGDLTVT

SEQ ID NO: 78868 - protein, 10 aa, synthetic construct
QHDRGDLIGR

SEQ ID NO: 78869 - protein, 10 aa, synthetic construct
QHERGDRDYL

SEQ ID NO: 78870 - protein, 10 aa, synthetic construct
QHERGDYTSV

SEQ ID NO: 78871 - protein, 10 aa, synthetic construct
QHERGDLTVT

SEQ ID NO: 78872 - protein, 10 aa, synthetic construct
EGDRGDRSVV

SEQ ID NO: 78873 - protein, 10 aa, synthetic construct
QHERGDLIGR

SEQ ID NO: 78874 - protein, 10 aa, synthetic construct
QSGRGDFNNT

SEQ ID NO: 78875 - protein, 10 aa, synthetic construct
QSGRGDFNNL

SEQ ID NO: 78876 - protein, 10 aa, synthetic construct
QSARGDFNNT

SEQ ID NO: 78877 - protein, 10 aa, synthetic construct
QSARGDFNNL

SEQ ID NO: 78878 - protein, 10 aa, synthetic construct
QSVRGDYNSL

SEQ ID NO: 78879 - protein, 10 aa, synthetic construct
QSVRGDYTSM

SEQ ID NO: 78880 - protein, 10 aa, synthetic construct
QSVRGDFQNT

SEQ ID NO: 78881 - protein, 10 aa, synthetic construct
QSLRGDYNSL

SEQ ID NO: 78882 - protein, 10 aa, synthetic construct
QSLRGDYTSM

SEQ ID NO: 78883 - protein, 10 aa, synthetic construct
EGDRGDRGVV

SEQ ID NO: 78884 - protein, 10 aa, synthetic construct
QSLRGDFQNT

SEQ ID NO: 78885 - protein, 10 aa, synthetic construct
QSIRGDYTSV

SEQ ID NO: 78886 - protein, 10 aa, synthetic construct
QSIRGDLIGR

SEQ ID NO: 78887 - protein, 10 aa, synthetic construct
QSMRGDYTSV

SEQ ID NO: 78888 - protein, 10 aa, synthetic construct
QSMRGDLIGR

SEQ ID NO: 78889 - protein, 10 aa, synthetic construct
QSWRGDYNSL

SEQ ID NO: 78890 - protein, 10 aa, synthetic construct
QSWRGDYTSM

SEQ ID NO: 78891 - protein, 10 aa, synthetic construct
QSWRGDFQNT

SEQ ID NO: 78892 - protein, 10 aa, synthetic construct
QSFRGDYTSV

SEQ ID NO: 78893 - protein, 10 aa, synthetic construct
QSFRGDLIGR

SEQ ID NO: 78894 - protein, 10 aa, synthetic construct
EGDRGDRSQT

SEQ ID NO: 78895 - protein, 10 aa, synthetic construct
QSKRGDYTSV

SEQ ID NO: 78896 - protein, 10 aa, synthetic construct
QSKRGDLIGR

SEQ ID NO: 78897 - protein, 10 aa, synthetic construct
QSRRGDFNNT

SEQ ID NO: 78898 - protein, 10 aa, synthetic construct
QSRRGDFNNL

SEQ ID NO: 78899 - protein, 10 aa, synthetic construct
QSHRGDYNSL

SEQ ID NO: 78900 - protein, 10 aa, synthetic construct
QSHRGDYTSM

SEQ ID NO: 78901 - protein, 10 aa, synthetic construct
QSHRGDFQNT

SEQ ID NO: 78902 - protein, 10 aa, synthetic construct
QSSRGDYNSL

SEQ ID NO: 78903 - protein, 10 aa, synthetic construct
QSSRGDYTSM

SEQ ID NO: 78904 - protein, 10 aa, synthetic construct
QSSRGDFQNT

SEQ ID NO: 78905 - protein, 10 aa, synthetic construct
EGERGDRGQI

SEQ ID NO: 78906 - protein, 10 aa, synthetic construct
QSTRGDYNSL

SEQ ID NO: 78907 - protein, 10 aa, synthetic construct
QSTRGDYTSM

SEQ ID NO: 78908 - protein, 10 aa, synthetic construct
QSTRGDFQNT

SEQ ID NO: 78909 - protein, 10 aa, synthetic construct
QSYRGDYTSV

SEQ ID NO: 78910 - protein, 10 aa, synthetic construct
QSYRGDLIGR

SEQ ID NO: 78911 - protein, 10 aa, synthetic construct
QSNRGDYTSV

SEQ ID NO: 78912 - protein, 10 aa, synthetic construct
QSNRGDLIGR

SEQ ID NO: 78913 - protein, 10 aa, synthetic construct
QSQRGDYNSL

SEQ ID NO: 78914 - protein, 10 aa, synthetic construct
QSQRGDYTSM

SEQ ID NO: 78915 - protein, 10 aa, synthetic construct
QSQRGDFQNT

SEQ ID NO: 78916 - protein, 10 aa, synthetic construct
EGERGDRQGI

SEQ ID NO: 78917 - protein, 10 aa, synthetic construct
QSDRGDYNSL

SEQ ID NO: 78918 - protein, 10 aa, synthetic construct
QSDRGDYTSM

SEQ ID NO: 78919 - protein, 10 aa, synthetic construct
QSDRGDFQNT

SEQ ID NO: 78920 - protein, 10 aa, synthetic construct
QSERGDYNSL

SEQ ID NO: 78921 - protein, 10 aa, synthetic construct
QSERGDYTSM

SEQ ID NO: 78922 - protein, 10 aa, synthetic construct
QSERGDFQNT

SEQ ID NO: 78923 - protein, 10 aa, synthetic construct
QTGRGDYNSL

SEQ ID NO: 78924 - protein, 10 aa, synthetic construct
QTGRGDYTSV

SEQ ID NO: 78925 - protein, 10 aa, synthetic construct
QTGRGDYTSM

SEQ ID NO: 78926 - protein, 10 aa, synthetic construct
QTGRGDFQNT

SEQ ID NO: 78927 - protein, 10 aa, synthetic construct
EGERGDRSVV

SEQ ID NO: 78928 - protein, 10 aa, synthetic construct
QTARGDYNSL

SEQ ID NO: 78929 - protein, 10 aa, synthetic construct
QTARGDYTSV

SEQ ID NO: 78930 - protein, 10 aa, synthetic construct
QTARGDYTSM

SEQ ID NO: 78931 - protein, 10 aa, synthetic construct
QTARGDFQNT

SEQ ID NO: 78932 - protein, 10 aa, synthetic construct
QTVRGDRDYL

SEQ ID NO: 78933 - protein, 10 aa, synthetic construct
QTVRGDYTSV

SEQ ID NO: 78934 - protein, 10 aa, synthetic construct
QTVRGDLTVT

SEQ ID NO: 78935 - protein, 10 aa, synthetic construct
QTVRGDLIGR

SEQ ID NO: 78936 - protein, 10 aa, synthetic construct
QTPRGDYNSL

SEQ ID NO: 78937 - protein, 10 aa, synthetic construct
QTPRGDYTSV

SEQ ID NO: 78938 - protein, 10 aa, synthetic construct
EGERGDRGVV

SEQ ID NO: 78939 - protein, 10 aa, synthetic construct
QTPRGDYTSM

SEQ ID NO: 78940 - protein, 10 aa, synthetic construct
QTPRGDFQNT

SEQ ID NO: 78941 - protein, 10 aa, synthetic construct
QTLRGDRDYL

SEQ ID NO: 78942 - protein, 10 aa, synthetic construct
QTLRGDYTSV

SEQ ID NO: 78943 - protein, 10 aa, synthetic construct
QTLRGDLTVT

SEQ ID NO: 78944 - protein, 10 aa, synthetic construct
QTLRGDLIGR

SEQ ID NO: 78945 - protein, 10 aa, synthetic construct
QTIRGDHGVL

SEQ ID NO: 78946 - protein, 10 aa, synthetic construct
QTIRGDHVNL

SEQ ID NO: 78947 - protein, 10 aa, synthetic construct
QTIRGDRDYL

SEQ ID NO: 78948 - protein, 10 aa, synthetic construct
QTIRGDYSSV

SEQ ID NO: 78949 - protein, 10 aa, synthetic construct
EGERGDRSQT

SEQ ID NO: 78950 - protein, 10 aa, synthetic construct
QTIRGDLTVT

SEQ ID NO: 78951 - protein, 10 aa, synthetic construct
QTMRGDHGVL

SEQ ID NO: 78952 - protein, 10 aa, synthetic construct
QTMRGDHVNL

SEQ ID NO: 78953 - protein, 10 aa, synthetic construct
QTMRGDRDYL

SEQ ID NO: 78954 - protein, 10 aa, synthetic construct
QTMRGDYSSV

SEQ ID NO: 78955 - protein, 10 aa, synthetic construct
QTMRGDLTVT

SEQ ID NO: 78956 - protein, 10 aa, synthetic construct
QTWRGDRDYL

SEQ ID NO: 78957 - protein, 10 aa, synthetic construct
QTWRGDYTSV

SEQ ID NO: 78958 - protein, 10 aa, synthetic construct
QTWRGDLTVT

SEQ ID NO: 78959 - protein, 10 aa, synthetic construct
QTWRGDLIGR

SEQ ID NO: 78960 - protein, 10 aa, synthetic construct
DSPRGDFNNT

SEQ ID NO: 78961 - protein, 10 aa, synthetic construct
EAGRGDHGVL

SEQ ID NO: 78962 - protein, 10 aa, synthetic construct
QTFRGDHGVL

SEQ ID NO: 78963 - protein, 10 aa, synthetic construct
QTFRGDHVNL

SEQ ID NO: 78964 - protein, 10 aa, synthetic construct
QTFRGDRDYL

SEQ ID NO: 78965 - protein, 10 aa, synthetic construct
QTFRGDYSSV

SEQ ID NO: 78966 - protein, 10 aa, synthetic construct
QTFRGDLTVT

SEQ ID NO: 78967 - protein, 10 aa, synthetic construct
QTKRGDHGVL

SEQ ID NO: 78968 - protein, 10 aa, synthetic construct
QTKRGDHVNL

SEQ ID NO: 78969 - protein, 10 aa, synthetic construct
QTKRGDRDYL

SEQ ID NO: 78970 - protein, 10 aa, synthetic construct
QTKRGDYSSV

SEQ ID NO: 78971 - protein, 10 aa, synthetic construct
QTKRGDLTVT

SEQ ID NO: 78972 - protein, 10 aa, synthetic construct
EAGRGDYVGL

SEQ ID NO: 78973 - protein, 10 aa, synthetic construct
QTRRGDYNSL

SEQ ID NO: 78974 - protein, 10 aa, synthetic construct
QTRRGDYTSV

SEQ ID NO: 78975 - protein, 10 aa, synthetic construct
QTRRGDYTSM

SEQ ID NO: 78976 - protein, 10 aa, synthetic construct
QTRRGDFQNT

SEQ ID NO: 78977 - protein, 10 aa, synthetic construct
QTHRGDRDYL

SEQ ID NO: 78978 - protein, 10 aa, synthetic construct
QTHRGDYTSV

SEQ ID NO: 78979 - protein, 10 aa, synthetic construct
QTHRGDLTVT

SEQ ID NO: 78980 - protein, 10 aa, synthetic construct
QTHRGDLIGR

SEQ ID NO: 78981 - protein, 10 aa, synthetic construct
QTSRGDRDYL

SEQ ID NO: 78982 - protein, 10 aa, synthetic construct
QTSRGDYTSV

SEQ ID NO: 78983 - protein, 10 aa, synthetic construct
EAGRGDQSTL

SEQ ID NO: 78984 - protein, 10 aa, synthetic construct
QTSRGDLTVT

SEQ ID NO: 78985 - protein, 10 aa, synthetic construct
QTSRGDLIGR

SEQ ID NO: 78986 - protein, 10 aa, synthetic construct
QTTRGDRDYL

SEQ ID NO: 78987 - protein, 10 aa, synthetic construct
QTTRGDYTSV

SEQ ID NO: 78988 - protein, 10 aa, synthetic construct
QTTRGDLTVT

SEQ ID NO: 78989 - protein, 10 aa, synthetic construct
QTTRGDLIGR

SEQ ID NO: 78990 - protein, 10 aa, synthetic construct
QTYRGDHGVL

SEQ ID NO: 78991 - protein, 10 aa, synthetic construct
QTYRGDHVNL

SEQ ID NO: 78992 - protein, 10 aa, synthetic construct
QTYRGDRDYL

SEQ ID NO: 78993 - protein, 10 aa, synthetic construct
QTYRGDYSSV

SEQ ID NO: 78994 - protein, 10 aa, synthetic construct
EAGRGDLLLS

SEQ ID NO: 78995 - protein, 10 aa, synthetic construct
QTYRGDLTVT

SEQ ID NO: 78996 - protein, 10 aa, synthetic construct
QTNRGDHGVL

SEQ ID NO: 78997 - protein, 10 aa, synthetic construct
QTNRGDHVNL

SEQ ID NO: 78998 - protein, 10 aa, synthetic construct
QTNRGDRDYL

SEQ ID NO: 78999 - protein, 10 aa, synthetic construct
QTNRGDYSSV

SEQ ID NO: 79000 - protein, 10 aa, synthetic construct
QTNRGDLTVT

SEQ ID NO: 79001 - protein, 10 aa, synthetic construct
QTQRGDRDYL

SEQ ID NO: 79002 - protein, 10 aa, synthetic construct
QTQRGDYTSV

SEQ ID NO: 79003 - protein, 10 aa, synthetic construct
QTQRGDLTVT

SEQ ID NO: 79004 - protein, 10 aa, synthetic construct
QTQRGDLIGR

SEQ ID NO: 79005 - protein, 10 aa, synthetic construct
EAARGDHGVL

SEQ ID NO: 79006 - protein, 10 aa, synthetic construct
QTDRGDRDYL

SEQ ID NO: 79007 - protein, 10 aa, synthetic construct
QTDRGDYTSV

SEQ ID NO: 79008 - protein, 10 aa, synthetic construct
QTDRGDLTVT

SEQ ID NO: 79009 - protein, 10 aa, synthetic construct
QTDRGDLIGR

SEQ ID NO: 79010 - protein, 10 aa, synthetic construct
QTERGDRDYL

SEQ ID NO: 79011 - protein, 10 aa, synthetic construct
QTERGDYTSV

SEQ ID NO: 79012 - protein, 10 aa, synthetic construct
QTERGDLTVT

SEQ ID NO: 79013 - protein, 10 aa, synthetic construct
QTERGDLIGR

SEQ ID NO: 79014 - protein, 10 aa, synthetic construct
QYGRGDRDYL

SEQ ID NO: 79015 - protein, 10 aa, synthetic construct
QYGRGDYTSV

SEQ ID NO: 79016 - protein, 10 aa, synthetic construct
EAARGDYVGL

SEQ ID NO: 79017 - protein, 10 aa, synthetic construct
QYGRGDLTVT

SEQ ID NO: 79018 - protein, 10 aa, synthetic construct
QYGRGDLIGR

SEQ ID NO: 79019 - protein, 10 aa, synthetic construct
QYARGDRDYL

SEQ ID NO: 79020 - protein, 10 aa, synthetic construct
QYARGDYTSV

SEQ ID NO: 79021 - protein, 10 aa, synthetic construct
QYARGDLTVT

SEQ ID NO: 79022 - protein, 10 aa, synthetic construct
QYARGDLIGR

SEQ ID NO: 79023 - protein, 10 aa, synthetic construct
QYVRGDHGVL

SEQ ID NO: 79024 - protein, 10 aa, synthetic construct
QYVRGDHVNL

SEQ ID NO: 79025 - protein, 10 aa, synthetic construct
QYVRGDRDYL

SEQ ID NO: 79026 - protein, 10 aa, synthetic construct
QYVRGDYSSV

SEQ ID NO: 79027 - protein, 10 aa, synthetic construct
EAARGDQSTL

SEQ ID NO: 79028 - protein, 10 aa, synthetic construct
QYVRGDLTVT

SEQ ID NO: 79029 - protein, 10 aa, synthetic construct
QYPRGDRDYL

SEQ ID NO: 79030 - protein, 10 aa, synthetic construct
QYPRGDYTSV

SEQ ID NO: 79031 - protein, 10 aa, synthetic construct
QYPRGDLTVT

SEQ ID NO: 79032 - protein, 10 aa, synthetic construct
QYPRGDLIGR

SEQ ID NO: 79033 - protein, 10 aa, synthetic construct
QYLRGDHGVL

SEQ ID NO: 79034 - protein, 10 aa, synthetic construct
QYLRGDHVNL

SEQ ID NO: 79035 - protein, 10 aa, synthetic construct
QYLRGDRDYL

SEQ ID NO: 79036 - protein, 10 aa, synthetic construct
QYLRGDYSSV

SEQ ID NO: 79037 - protein, 10 aa, synthetic construct
QYLRGDLTVT

SEQ ID NO: 79038 - protein, 10 aa, synthetic construct
EAARGDLLLS

SEQ ID NO: 79039 - protein, 10 aa, synthetic construct
QYIRGDHGVL

SEQ ID NO: 79040 - protein, 10 aa, synthetic construct
QYIRGDRGQI

SEQ ID NO: 79041 - protein, 10 aa, synthetic construct
QYIRGDRQGI

SEQ ID NO: 79042 - protein, 10 aa, synthetic construct
QYIRGDRGVV

SEQ ID NO: 79043 - protein, 10 aa, synthetic construct
QYIRGDYVGL

SEQ ID NO: 79044 - protein, 10 aa, synthetic construct
QYIRGDLIGR

SEQ ID NO: 79045 - protein, 10 aa, synthetic construct
QYIRGDQSTL

SEQ ID NO: 79046 - protein, 10 aa, synthetic construct
QYIRGDLLLS

SEQ ID NO: 79047 - protein, 10 aa, synthetic construct
QYMRGDHGVL

SEQ ID NO: 79048 - protein, 10 aa, synthetic construct
QYMRGDRGQI

SEQ ID NO: 79049 - protein, 10 aa, synthetic construct
EAVRGDRGQI

SEQ ID NO: 79050 - protein, 10 aa, synthetic construct
QYMRGDRQGI

SEQ ID NO: 79051 - protein, 10 aa, synthetic construct
QYMRGDRGVV

SEQ ID NO: 79052 - protein, 10 aa, synthetic construct
QYMRGDYVGL

SEQ ID NO: 79053 - protein, 10 aa, synthetic construct
QYMRGDLIGR

SEQ ID NO: 79054 - protein, 10 aa, synthetic construct
QYMRGDQSTL

SEQ ID NO: 79055 - protein, 10 aa, synthetic construct
QYMRGDLLLS

SEQ ID NO: 79056 - protein, 10 aa, synthetic construct
QYWRGDHGVL

SEQ ID NO: 79057 - protein, 10 aa, synthetic construct
QYWRGDHVNL

SEQ ID NO: 79058 - protein, 10 aa, synthetic construct
QYWRGDRDYL

SEQ ID NO: 79059 - protein, 10 aa, synthetic construct
QYWRGDYSSV

SEQ ID NO: 79060 - protein, 10 aa, synthetic construct
EAVRGDRQGI

SEQ ID NO: 79061 - protein, 10 aa, synthetic construct
QYWRGDLTVT

SEQ ID NO: 79062 - protein, 10 aa, synthetic construct
QYFRGDHGVL

SEQ ID NO: 79063 - protein, 10 aa, synthetic construct
QYFRGDRGQI

SEQ ID NO: 79064 - protein, 10 aa, synthetic construct
QYFRGDRQGI

SEQ ID NO: 79065 - protein, 10 aa, synthetic construct
QYFRGDRGVV

SEQ ID NO: 79066 - protein, 10 aa, synthetic construct
QYFRGDYVGL

SEQ ID NO: 79067 - protein, 10 aa, synthetic construct
QYFRGDLIGR

SEQ ID NO: 79068 - protein, 10 aa, synthetic construct
QYFRGDQSTL

SEQ ID NO: 79069 - protein, 10 aa, synthetic construct
QYFRGDLLLS

SEQ ID NO: 79070 - protein, 10 aa, synthetic construct
QYKRGDHGVL

SEQ ID NO: 79071 - protein, 10 aa, synthetic construct
DSPRGDFNNL

SEQ ID NO: 79072 - protein, 10 aa, synthetic construct
EAVRGDRSVV

SEQ ID NO: 79073 - protein, 10 aa, synthetic construct
QYKRGDRGQI

SEQ ID NO: 79074 - protein, 10 aa, synthetic construct
QYKRGDRQGI

SEQ ID NO: 79075 - protein, 10 aa, synthetic construct
QYKRGDRGVV

SEQ ID NO: 79076 - protein, 10 aa, synthetic construct
QYKRGDYVGL

SEQ ID NO: 79077 - protein, 10 aa, synthetic construct
QYKRGDLIGR

SEQ ID NO: 79078 - protein, 10 aa, synthetic construct
QYKRGDQSTL

SEQ ID NO: 79079 - protein, 10 aa, synthetic construct
QYKRGDLLLS

SEQ ID NO: 79080 - protein, 10 aa, synthetic construct
QYRRGDRDYL

SEQ ID NO: 79081 - protein, 10 aa, synthetic construct
QYRRGDYTSV

SEQ ID NO: 79082 - protein, 10 aa, synthetic construct
QYRRGDLTVT

SEQ ID NO: 79083 - protein, 10 aa, synthetic construct
EAVRGDRGVV

SEQ ID NO: 79084 - protein, 10 aa, synthetic construct
QYRRGDLIGR

SEQ ID NO: 79085 - protein, 10 aa, synthetic construct
QYHRGDHGVL

SEQ ID NO: 79086 - protein, 10 aa, synthetic construct
QYHRGDHVNL

SEQ ID NO: 79087 - protein, 10 aa, synthetic construct
QYHRGDRDYL

SEQ ID NO: 79088 - protein, 10 aa, synthetic construct
QYHRGDYSSV

SEQ ID NO: 79089 - protein, 10 aa, synthetic construct
QYHRGDLTVT

SEQ ID NO: 79090 - protein, 10 aa, synthetic construct
QYSRGDHGVL

SEQ ID NO: 79091 - protein, 10 aa, synthetic construct
QYSRGDHVNL

SEQ ID NO: 79092 - protein, 10 aa, synthetic construct
QYSRGDRDYL

SEQ ID NO: 79093 - protein, 10 aa, synthetic construct
QYSRGDYSSV

SEQ ID NO: 79094 - protein, 10 aa, synthetic construct
EAVRGDRSQT

SEQ ID NO: 79095 - protein, 10 aa, synthetic construct
QYSRGDLTVT

SEQ ID NO: 79096 - protein, 10 aa, synthetic construct
QYTRGDHGVL

SEQ ID NO: 79097 - protein, 10 aa, synthetic construct
QYTRGDHVNL

SEQ ID NO: 79098 - protein, 10 aa, synthetic construct
QYTRGDRDYL

SEQ ID NO: 79099 - protein, 10 aa, synthetic construct
QYTRGDYSSV

SEQ ID NO: 79100 - protein, 10 aa, synthetic construct
QYTRGDLTVT

SEQ ID NO: 79101 - protein, 10 aa, synthetic construct
QYYRGDHGVL

SEQ ID NO: 79102 - protein, 10 aa, synthetic construct
QYYRGDRGQI

SEQ ID NO: 79103 - protein, 10 aa, synthetic construct
QYYRGDRQGI

SEQ ID NO: 79104 - protein, 10 aa, synthetic construct
QYYRGDRGVV

SEQ ID NO: 79105 - protein, 10 aa, synthetic construct
EAPRGDHGVL

SEQ ID NO: 79106 - protein, 10 aa, synthetic construct
QYYRGDYVGL

SEQ ID NO: 79107 - protein, 10 aa, synthetic construct
QYYRGDLIGR

SEQ ID NO: 79108 - protein, 10 aa, synthetic construct
QYYRGDQSTL

SEQ ID NO: 79109 - protein, 10 aa, synthetic construct
QYYRGDLLLS

SEQ ID NO: 79110 - protein, 10 aa, synthetic construct
QYNRGDHGVL

SEQ ID NO: 79111 - protein, 10 aa, synthetic construct
QYNRGDRGQI

SEQ ID NO: 79112 - protein, 10 aa, synthetic construct
QYNRGDRQGI

SEQ ID NO: 79113 - protein, 10 aa, synthetic construct
QYNRGDRGVV

SEQ ID NO: 79114 - protein, 10 aa, synthetic construct
QYNRGDYVGL

SEQ ID NO: 79115 - protein, 10 aa, synthetic construct
QYNRGDLIGR

SEQ ID NO: 79116 - protein, 10 aa, synthetic construct
EAPRGDYVGL

SEQ ID NO: 79117 - protein, 10 aa, synthetic construct
QYNRGDQSTL

SEQ ID NO: 79118 - protein, 10 aa, synthetic construct
QYNRGDLLLS

SEQ ID NO: 79119 - protein, 10 aa, synthetic construct
QYQRGDHGVL

SEQ ID NO: 79120 - protein, 10 aa, synthetic construct
QYQRGDHVNL

SEQ ID NO: 79121 - protein, 10 aa, synthetic construct
QYQRGDRDYL

SEQ ID NO: 79122 - protein, 10 aa, synthetic construct
QYQRGDYSSV

SEQ ID NO: 79123 - protein, 10 aa, synthetic construct
QYQRGDLTVT

SEQ ID NO: 79124 - protein, 10 aa, synthetic construct
QYDRGDHGVL

SEQ ID NO: 79125 - protein, 10 aa, synthetic construct
QYDRGDHVNL

SEQ ID NO: 79126 - protein, 10 aa, synthetic construct
QYDRGDRDYL

SEQ ID NO: 79127 - protein, 10 aa, synthetic construct
EAPRGDQSTL

SEQ ID NO: 79128 - protein, 10 aa, synthetic construct
QYDRGDYSSV

SEQ ID NO: 79129 - protein, 10 aa, synthetic construct
QYDRGDLTVT

SEQ ID NO: 79130 - protein, 10 aa, synthetic construct
QYERGDHGVL

SEQ ID NO: 79131 - protein, 10 aa, synthetic construct
QYERGDHVNL

SEQ ID NO: 79132 - protein, 10 aa, synthetic construct
QYERGDRDYL

SEQ ID NO: 79133 - protein, 10 aa, synthetic construct
QYERGDYSSV

SEQ ID NO: 79134 - protein, 10 aa, synthetic construct
QYERGDLTVT

SEQ ID NO: 79135 - protein, 10 aa, synthetic construct
QNGRGDRDYL

SEQ ID NO: 79136 - protein, 10 aa, synthetic construct
QNGRGDYTSV

SEQ ID NO: 79137 - protein, 10 aa, synthetic construct
QNGRGDLTVT

SEQ ID NO: 79138 - protein, 10 aa, synthetic construct
EAPRGDLLLS

SEQ ID NO: 79139 - protein, 10 aa, synthetic construct
QNGRGDLIGR

SEQ ID NO: 79140 - protein, 10 aa, synthetic construct
QNARGDRDYL

SEQ ID NO: 79141 - protein, 10 aa, synthetic construct
QNARGDYTSV

SEQ ID NO: 79142 - protein, 10 aa, synthetic construct
QNARGDLTVT

SEQ ID NO: 79143 - protein, 10 aa, synthetic construct
QNARGDLIGR

SEQ ID NO: 79144 - protein, 10 aa, synthetic construct
QNVRGDHGVL

SEQ ID NO: 79145 - protein, 10 aa, synthetic construct
QNVRGDHVNL

SEQ ID NO: 79146 - protein, 10 aa, synthetic construct
QNVRGDRDYL

SEQ ID NO: 79147 - protein, 10 aa, synthetic construct
QNVRGDYSSV

SEQ ID NO: 79148 - protein, 10 aa, synthetic construct
QNVRGDLTVT

SEQ ID NO: 79149 - protein, 10 aa, synthetic construct
EALRGDRGQI

SEQ ID NO: 79150 - protein, 10 aa, synthetic construct
QNPRGDRDYL

SEQ ID NO: 79151 - protein, 10 aa, synthetic construct
QNPRGDYTSV

SEQ ID NO: 79152 - protein, 10 aa, synthetic construct
QNPRGDLTVT

SEQ ID NO: 79153 - protein, 10 aa, synthetic construct
QNPRGDLIGR

SEQ ID NO: 79154 - protein, 10 aa, synthetic construct
QNLRGDHGVL

SEQ ID NO: 79155 - protein, 10 aa, synthetic construct
QNLRGDHVNL

SEQ ID NO: 79156 - protein, 10 aa, synthetic construct
QNLRGDRDYL

SEQ ID NO: 79157 - protein, 10 aa, synthetic construct
QNLRGDYSSV

SEQ ID NO: 79158 - protein, 10 aa, synthetic construct
QNLRGDLTVT

SEQ ID NO: 79159 - protein, 10 aa, synthetic construct
QNIRGDHGVL

SEQ ID NO: 79160 - protein, 10 aa, synthetic construct
EALRGDRQGI

SEQ ID NO: 79161 - protein, 10 aa, synthetic construct
QNIRGDRGQI

SEQ ID NO: 79162 - protein, 10 aa, synthetic construct
QNIRGDRQGI

SEQ ID NO: 79163 - protein, 10 aa, synthetic construct
QNIRGDRGVV

SEQ ID NO: 79164 - protein, 10 aa, synthetic construct
QNIRGDYVGL

SEQ ID NO: 79165 - protein, 10 aa, synthetic construct
QNIRGDLIGR

SEQ ID NO: 79166 - protein, 10 aa, synthetic construct
QNIRGDQSTL

SEQ ID NO: 79167 - protein, 10 aa, synthetic construct
QNIRGDLLLS

SEQ ID NO: 79168 - protein, 10 aa, synthetic construct
QNMRGDHGVL

SEQ ID NO: 79169 - protein, 10 aa, synthetic construct
QNMRGDRGQI

SEQ ID NO: 79170 - protein, 10 aa, synthetic construct
QNMRGDRQGI

SEQ ID NO: 79171 - protein, 10 aa, synthetic construct
EALRGDRSVV

SEQ ID NO: 79172 - protein, 10 aa, synthetic construct
QNMRGDRGVV

SEQ ID NO: 79173 - protein, 10 aa, synthetic construct
QNMRGDYVGL

SEQ ID NO: 79174 - protein, 10 aa, synthetic construct
QNMRGDLIGR

SEQ ID NO: 79175 - protein, 10 aa, synthetic construct
QNMRGDQSTL

SEQ ID NO: 79176 - protein, 10 aa, synthetic construct
QNMRGDLLLS

SEQ ID NO: 79177 - protein, 10 aa, synthetic construct
QNWRGDHGVL

SEQ ID NO: 79178 - protein, 10 aa, synthetic construct
QNWRGDHVNL

SEQ ID NO: 79179 - protein, 10 aa, synthetic construct
QNWRGDRDYL

SEQ ID NO: 79180 - protein, 10 aa, synthetic construct
QNWRGDYSSV

SEQ ID NO: 79181 - protein, 10 aa, synthetic construct
QNWRGDLTVT

SEQ ID NO: 79182 - protein, 10 aa, synthetic construct
QSPRGDFNNT

SEQ ID NO: 79183 - protein, 10 aa, synthetic construct
EALRGDRGVV

SEQ ID NO: 79184 - protein, 10 aa, synthetic construct
QNFRGDHGVL

SEQ ID NO: 79185 - protein, 10 aa, synthetic construct
QNFRGDRGQI

SEQ ID NO: 79186 - protein, 10 aa, synthetic construct
QNFRGDRQGI

SEQ ID NO: 79187 - protein, 10 aa, synthetic construct
QNFRGDRGVV

SEQ ID NO: 79188 - protein, 10 aa, synthetic construct
QNFRGDYVGL

SEQ ID NO: 79189 - protein, 10 aa, synthetic construct
QNFRGDLIGR

SEQ ID NO: 79190 - protein, 10 aa, synthetic construct
QNFRGDQSTL

SEQ ID NO: 79191 - protein, 10 aa, synthetic construct
QNFRGDLLLS

SEQ ID NO: 79192 - protein, 10 aa, synthetic construct
QNKRGDHGVL

SEQ ID NO: 79193 - protein, 10 aa, synthetic construct
QNKRGDRGQI

SEQ ID NO: 79194 - protein, 10 aa, synthetic construct
EALRGDRSQT

SEQ ID NO: 79195 - protein, 10 aa, synthetic construct
QNKRGDRQGI

SEQ ID NO: 79196 - protein, 10 aa, synthetic construct
QNKRGDRGVV

SEQ ID NO: 79197 - protein, 10 aa, synthetic construct
QNKRGDYVGL

SEQ ID NO: 79198 - protein, 10 aa, synthetic construct
QNKRGDLIGR

SEQ ID NO: 79199 - protein, 10 aa, synthetic construct
QNKRGDQSTL

SEQ ID NO: 79200 - protein, 10 aa, synthetic construct
QNKRGDLLLS

SEQ ID NO: 79201 - protein, 10 aa, synthetic construct
QNRRGDRDYL

SEQ ID NO: 79202 - protein, 10 aa, synthetic construct
QNRRGDYTSV

SEQ ID NO: 79203 - protein, 10 aa, synthetic construct
QNRRGDLTVT

SEQ ID NO: 79204 - protein, 10 aa, synthetic construct
QNRRGDLIGR

SEQ ID NO: 79205 - protein, 10 aa, synthetic construct
EAWRGDRGQI

SEQ ID NO: 79206 - protein, 10 aa, synthetic construct
QNHRGDHGVL

SEQ ID NO: 79207 - protein, 10 aa, synthetic construct
QNHRGDHVNL

SEQ ID NO: 79208 - protein, 10 aa, synthetic construct
QNHRGDRDYL

SEQ ID NO: 79209 - protein, 10 aa, synthetic construct
QNHRGDYSSV

SEQ ID NO: 79210 - protein, 10 aa, synthetic construct
QNHRGDLTVT

SEQ ID NO: 79211 - protein, 10 aa, synthetic construct
QNSRGDHGVL

SEQ ID NO: 79212 - protein, 10 aa, synthetic construct
QNSRGDHVNL

SEQ ID NO: 79213 - protein, 10 aa, synthetic construct
QNSRGDRDYL

SEQ ID NO: 79214 - protein, 10 aa, synthetic construct
QNSRGDYSSV

SEQ ID NO: 79215 - protein, 10 aa, synthetic construct
QNSRGDLTVT

SEQ ID NO: 79216 - protein, 10 aa, synthetic construct
EAWRGDRQGI

SEQ ID NO: 79217 - protein, 10 aa, synthetic construct
QNTRGDHGVL

SEQ ID NO: 79218 - protein, 10 aa, synthetic construct
QNTRGDHVNL

SEQ ID NO: 79219 - protein, 10 aa, synthetic construct
QNTRGDRDYL

SEQ ID NO: 79220 - protein, 10 aa, synthetic construct
QNTRGDYSSV

SEQ ID NO: 79221 - protein, 10 aa, synthetic construct
QNTRGDLTVT

SEQ ID NO: 79222 - protein, 10 aa, synthetic construct
QNYRGDHGVL

SEQ ID NO: 79223 - protein, 10 aa, synthetic construct
QNYRGDRGQI

SEQ ID NO: 79224 - protein, 10 aa, synthetic construct
QNYRGDRQGI

SEQ ID NO: 79225 - protein, 10 aa, synthetic construct
QNYRGDRGVV

SEQ ID NO: 79226 - protein, 10 aa, synthetic construct
QNYRGDYVGL

SEQ ID NO: 79227 - protein, 10 aa, synthetic construct
EAWRGDRSVV

SEQ ID NO: 79228 - protein, 10 aa, synthetic construct
QNYRGDLIGR

SEQ ID NO: 79229 - protein, 10 aa, synthetic construct
QNYRGDQSTL

SEQ ID NO: 79230 - protein, 10 aa, synthetic construct
QNYRGDLLLS

SEQ ID NO: 79231 - protein, 10 aa, synthetic construct
QNNRGDHGVL

SEQ ID NO: 79232 - protein, 10 aa, synthetic construct
QNNRGDRGQI

SEQ ID NO: 79233 - protein, 10 aa, synthetic construct
QNNRGDRQGI

SEQ ID NO: 79234 - protein, 10 aa, synthetic construct
QNNRGDRGVV

SEQ ID NO: 79235 - protein, 10 aa, synthetic construct
QNNRGDYVGL

SEQ ID NO: 79236 - protein, 10 aa, synthetic construct
QNNRGDLIGR

SEQ ID NO: 79237 - protein, 10 aa, synthetic construct
QNNRGDQSTL

SEQ ID NO: 79238 - protein, 10 aa, synthetic construct
EAWRGDRGVV

SEQ ID NO: 79239 - protein, 10 aa, synthetic construct
QNNRGDLLLS

SEQ ID NO: 79240 - protein, 10 aa, synthetic construct
QNQRGDHGVL

SEQ ID NO: 79241 - protein, 10 aa, synthetic construct
QNQRGDHVNL

SEQ ID NO: 79242 - protein, 10 aa, synthetic construct
QNQRGDRDYL

SEQ ID NO: 79243 - protein, 10 aa, synthetic construct
QNQRGDYSSV

SEQ ID NO: 79244 - protein, 10 aa, synthetic construct
QNQRGDLTVT

SEQ ID NO: 79245 - protein, 10 aa, synthetic construct
QNDRGDHGVL

SEQ ID NO: 79246 - protein, 10 aa, synthetic construct
QNDRGDHVNL

SEQ ID NO: 79247 - protein, 10 aa, synthetic construct
QNDRGDRDYL

SEQ ID NO: 79248 - protein, 10 aa, synthetic construct
QNDRGDYSSV

SEQ ID NO: 79249 - protein, 10 aa, synthetic construct
EAWRGDRSQT

SEQ ID NO: 79250 - protein, 10 aa, synthetic construct
QNDRGDLTVT

SEQ ID NO: 79251 - protein, 10 aa, synthetic construct
QNERGDHGVL

SEQ ID NO: 79252 - protein, 10 aa, synthetic construct
QNERGDHVNL

SEQ ID NO: 79253 - protein, 10 aa, synthetic construct
QNERGDRDYL

SEQ ID NO: 79254 - protein, 10 aa, synthetic construct
QNERGDYSSV

SEQ ID NO: 79255 - protein, 10 aa, synthetic construct
QNERGDLTVT

SEQ ID NO: 79256 - protein, 10 aa, synthetic construct
QQGRGDYNSL

SEQ ID NO: 79257 - protein, 10 aa, synthetic construct
QQGRGDYTSV

SEQ ID NO: 79258 - protein, 10 aa, synthetic construct
QQGRGDYTSM

SEQ ID NO: 79259 - protein, 10 aa, synthetic construct
QQGRGDFQNT

SEQ ID NO: 79260 - protein, 10 aa, synthetic construct
EARRGDHGVL

SEQ ID NO: 79261 - protein, 10 aa, synthetic construct
QQARGDYNSL

SEQ ID NO: 79262 - protein, 10 aa, synthetic construct
QQARGDYTSV

SEQ ID NO: 79263 - protein, 10 aa, synthetic construct
QQARGDYTSM

SEQ ID NO: 79264 - protein, 10 aa, synthetic construct
QQARGDFQNT

SEQ ID NO: 79265 - protein, 10 aa, synthetic construct
QQVRGDRDYL

SEQ ID NO: 79266 - protein, 10 aa, synthetic construct
QQVRGDYTSV

SEQ ID NO: 79267 - protein, 10 aa, synthetic construct
QQVRGDLTVT

SEQ ID NO: 79268 - protein, 10 aa, synthetic construct
QQVRGDLIGR

SEQ ID NO: 79269 - protein, 10 aa, synthetic construct
QQPRGDYNSL

SEQ ID NO: 79270 - protein, 10 aa, synthetic construct
QQPRGDYTSV

SEQ ID NO: 79271 - protein, 10 aa, synthetic construct
EARRGDYVGL

SEQ ID NO: 79272 - protein, 10 aa, synthetic construct
QQPRGDYTSM

SEQ ID NO: 79273 - protein, 10 aa, synthetic construct
QQPRGDFQNT

SEQ ID NO: 79274 - protein, 10 aa, synthetic construct
QQLRGDRDYL

SEQ ID NO: 79275 - protein, 10 aa, synthetic construct
QQLRGDYTSV

SEQ ID NO: 79276 - protein, 10 aa, synthetic construct
QQLRGDLTVT

SEQ ID NO: 79277 - protein, 10 aa, synthetic construct
QQLRGDLIGR

SEQ ID NO: 79278 - protein, 10 aa, synthetic construct
QQIRGDHGVL

SEQ ID NO: 79279 - protein, 10 aa, synthetic construct
QQIRGDHVNL

SEQ ID NO: 79280 - protein, 10 aa, synthetic construct
QQIRGDRDYL

SEQ ID NO: 79281 - protein, 10 aa, synthetic construct
QQIRGDYSSV

SEQ ID NO: 79282 - protein, 10 aa, synthetic construct
EARRGDQSTL

SEQ ID NO: 79283 - protein, 10 aa, synthetic construct
QQIRGDLTVT

SEQ ID NO: 79284 - protein, 10 aa, synthetic construct
QQMRGDHGVL

SEQ ID NO: 79285 - protein, 10 aa, synthetic construct
QQMRGDHVNL

SEQ ID NO: 79286 - protein, 10 aa, synthetic construct
QQMRGDRDYL

SEQ ID NO: 79287 - protein, 10 aa, synthetic construct
QQMRGDYSSV

SEQ ID NO: 79288 - protein, 10 aa, synthetic construct
QQMRGDLTVT

SEQ ID NO: 79289 - protein, 10 aa, synthetic construct
QQWRGDRDYL

SEQ ID NO: 79290 - protein, 10 aa, synthetic construct
QQWRGDYTSV

SEQ ID NO: 79291 - protein, 10 aa, synthetic construct
QQWRGDLTVT

SEQ ID NO: 79292 - protein, 10 aa, synthetic construct
QQWRGDLIGR

SEQ ID NO: 79293 - protein, 10 aa, synthetic construct
QSPRGDFNNL

SEQ ID NO: 79294 - protein, 10 aa, synthetic construct
EARRGDLLLS

SEQ ID NO: 79295 - protein, 10 aa, synthetic construct
QQFRGDHGVL

SEQ ID NO: 79296 - protein, 10 aa, synthetic construct
QQFRGDHVNL

SEQ ID NO: 79297 - protein, 10 aa, synthetic construct
QQFRGDRDYL

SEQ ID NO: 79298 - protein, 10 aa, synthetic construct
QQFRGDYSSV

SEQ ID NO: 79299 - protein, 10 aa, synthetic construct
QQFRGDLTVT

SEQ ID NO: 79300 - protein, 10 aa, synthetic construct
QQKRGDHGVL

SEQ ID NO: 79301 - protein, 10 aa, synthetic construct
QQKRGDHVNL

SEQ ID NO: 79302 - protein, 10 aa, synthetic construct
QQKRGDRDYL

SEQ ID NO: 79303 - protein, 10 aa, synthetic construct
QQKRGDYSSV

SEQ ID NO: 79304 - protein, 10 aa, synthetic construct
QQKRGDLTVT

SEQ ID NO: 79305 - protein, 10 aa, synthetic construct
EAHRGDRGQI

SEQ ID NO: 79306 - protein, 10 aa, synthetic construct
QQRRGDYNSL

SEQ ID NO: 79307 - protein, 10 aa, synthetic construct
QQRRGDYTSV

SEQ ID NO: 79308 - protein, 10 aa, synthetic construct
QQRRGDYTSM

SEQ ID NO: 79309 - protein, 10 aa, synthetic construct
QQRRGDFQNT

SEQ ID NO: 79310 - protein, 10 aa, synthetic construct
QQHRGDRDYL

SEQ ID NO: 79311 - protein, 10 aa, synthetic construct
QQHRGDYTSV

SEQ ID NO: 79312 - protein, 10 aa, synthetic construct
QQHRGDLTVT

SEQ ID NO: 79313 - protein, 10 aa, synthetic construct
QQHRGDLIGR

SEQ ID NO: 79314 - protein, 10 aa, synthetic construct
QQSRGDRDYL

SEQ ID NO: 79315 - protein, 10 aa, synthetic construct
QQSRGDYTSV

SEQ ID NO: 79316 - protein, 10 aa, synthetic construct
EAHRGDRQGI

SEQ ID NO: 79317 - protein, 10 aa, synthetic construct
QQSRGDLTVT

SEQ ID NO: 79318 - protein, 10 aa, synthetic construct
QQSRGDLIGR

SEQ ID NO: 79319 - protein, 10 aa, synthetic construct
QQTRGDRDYL

SEQ ID NO: 79320 - protein, 10 aa, synthetic construct
QQTRGDYTSV

SEQ ID NO: 79321 - protein, 10 aa, synthetic construct
QQTRGDLTVT

SEQ ID NO: 79322 - protein, 10 aa, synthetic construct
QQTRGDLIGR

SEQ ID NO: 79323 - protein, 10 aa, synthetic construct
QQYRGDHGVL

SEQ ID NO: 79324 - protein, 10 aa, synthetic construct
QQYRGDHVNL

SEQ ID NO: 79325 - protein, 10 aa, synthetic construct
QQYRGDRDYL

SEQ ID NO: 79326 - protein, 10 aa, synthetic construct
QQYRGDYSSV

SEQ ID NO: 79327 - protein, 10 aa, synthetic construct
EAHRGDRSVV

SEQ ID NO: 79328 - protein, 10 aa, synthetic construct
QQYRGDLTVT

SEQ ID NO: 79329 - protein, 10 aa, synthetic construct
QQNRGDHGVL

SEQ ID NO: 79330 - protein, 10 aa, synthetic construct
QQNRGDHVNL

SEQ ID NO: 79331 - protein, 10 aa, synthetic construct
QQNRGDRDYL

SEQ ID NO: 79332 - protein, 10 aa, synthetic construct
QQNRGDYSSV

SEQ ID NO: 79333 - protein, 10 aa, synthetic construct
QQNRGDLTVT

SEQ ID NO: 79334 - protein, 10 aa, synthetic construct
QQQRGDRDYL

SEQ ID NO: 79335 - protein, 10 aa, synthetic construct
QQQRGDYTSV

SEQ ID NO: 79336 - protein, 10 aa, synthetic construct
QQQRGDLTVT

SEQ ID NO: 79337 - protein, 10 aa, synthetic construct
QQQRGDLIGR

SEQ ID NO: 79338 - protein, 10 aa, synthetic construct
EAHRGDRGVV

SEQ ID NO: 79339 - protein, 10 aa, synthetic construct
QQDRGDRDYL

SEQ ID NO: 79340 - protein, 10 aa, synthetic construct
QQDRGDYTSV

SEQ ID NO: 79341 - protein, 10 aa, synthetic construct
QQDRGDLTVT

SEQ ID NO: 79342 - protein, 10 aa, synthetic construct
QQDRGDLIGR

SEQ ID NO: 79343 - protein, 10 aa, synthetic construct
QQERGDRDYL

SEQ ID NO: 79344 - protein, 10 aa, synthetic construct
QQERGDYTSV

SEQ ID NO: 79345 - protein, 10 aa, synthetic construct
QQERGDLTVT

SEQ ID NO: 79346 - protein, 10 aa, synthetic construct
QQERGDLIGR

SEQ ID NO: 79347 - protein, 10 aa, synthetic construct
QDGRGDYNSL

SEQ ID NO: 79348 - protein, 10 aa, synthetic construct
QDGRGDYTSV

SEQ ID NO: 79349 - protein, 10 aa, synthetic construct
EAHRGDRSQT

SEQ ID NO: 79350 - protein, 10 aa, synthetic construct
QDGRGDYTSM

SEQ ID NO: 79351 - protein, 10 aa, synthetic construct
QDGRGDFQNT

SEQ ID NO: 79352 - protein, 10 aa, synthetic construct
QDARGDYNSL

SEQ ID NO: 79353 - protein, 10 aa, synthetic construct
QDARGDYTSV

SEQ ID NO: 79354 - protein, 10 aa, synthetic construct
QDARGDYTSM

SEQ ID NO: 79355 - protein, 10 aa, synthetic construct
QDARGDFQNT

SEQ ID NO: 79356 - protein, 10 aa, synthetic construct
QDVRGDRDYL

SEQ ID NO: 79357 - protein, 10 aa, synthetic construct
QDVRGDYTSV

SEQ ID NO: 79358 - protein, 10 aa, synthetic construct
QDVRGDLTVT

SEQ ID NO: 79359 - protein, 10 aa, synthetic construct
QDVRGDLIGR

SEQ ID NO: 79360 - protein, 10 aa, synthetic construct
EASRGDRGQI

SEQ ID NO: 79361 - protein, 10 aa, synthetic construct
QDPRGDYNSL

SEQ ID NO: 79362 - protein, 10 aa, synthetic construct
QDPRGDYTSV

SEQ ID NO: 79363 - protein, 10 aa, synthetic construct
QDPRGDYTSM

SEQ ID NO: 79364 - protein, 10 aa, synthetic construct
QDPRGDFQNT

SEQ ID NO: 79365 - protein, 10 aa, synthetic construct
QDLRGDRDYL

SEQ ID NO: 79366 - protein, 10 aa, synthetic construct
QDLRGDYTSV

SEQ ID NO: 79367 - protein, 10 aa, synthetic construct
QDLRGDLTVT

SEQ ID NO: 79368 - protein, 10 aa, synthetic construct
QDLRGDLIGR

SEQ ID NO: 79369 - protein, 10 aa, synthetic construct
QDIRGDHGVL

SEQ ID NO: 79370 - protein, 10 aa, synthetic construct
QDIRGDHVNL

SEQ ID NO: 79371 - protein, 10 aa, synthetic construct
EASRGDRQGI

SEQ ID NO: 79372 - protein, 10 aa, synthetic construct
QDIRGDRDYL

SEQ ID NO: 79373 - protein, 10 aa, synthetic construct
QDIRGDYSSV

SEQ ID NO: 79374 - protein, 10 aa, synthetic construct
QDIRGDLTVT

SEQ ID NO: 79375 - protein, 10 aa, synthetic construct
QDMRGDHGVL

SEQ ID NO: 79376 - protein, 10 aa, synthetic construct
QDMRGDHVNL

SEQ ID NO: 79377 - protein, 10 aa, synthetic construct
QDMRGDRDYL

SEQ ID NO: 79378 - protein, 10 aa, synthetic construct
QDMRGDYSSV

SEQ ID NO: 79379 - protein, 10 aa, synthetic construct
QDMRGDLTVT

SEQ ID NO: 79380 - protein, 10 aa, synthetic construct
QDWRGDRDYL

SEQ ID NO: 79381 - protein, 10 aa, synthetic construct
QDWRGDYTSV

SEQ ID NO: 79382 - protein, 10 aa, synthetic construct
EASRGDRSVV

SEQ ID NO: 79383 - protein, 10 aa, synthetic construct
QDWRGDLTVT

SEQ ID NO: 79384 - protein, 10 aa, synthetic construct
QDWRGDLIGR

SEQ ID NO: 79385 - protein, 10 aa, synthetic construct
QDFRGDHGVL

SEQ ID NO: 79386 - protein, 10 aa, synthetic construct
QDFRGDHVNL

SEQ ID NO: 79387 - protein, 10 aa, synthetic construct
QDFRGDRDYL

SEQ ID NO: 79388 - protein, 10 aa, synthetic construct
QDFRGDYSSV

SEQ ID NO: 79389 - protein, 10 aa, synthetic construct
QDFRGDLTVT

SEQ ID NO: 79390 - protein, 10 aa, synthetic construct
QDKRGDHGVL

SEQ ID NO: 79391 - protein, 10 aa, synthetic construct
QDKRGDHVNL

SEQ ID NO: 79392 - protein, 10 aa, synthetic construct
QDKRGDRDYL

SEQ ID NO: 79393 - protein, 10 aa, synthetic construct
EASRGDRGVV

SEQ ID NO: 79394 - protein, 10 aa, synthetic construct
QDKRGDYSSV

SEQ ID NO: 79395 - protein, 10 aa, synthetic construct
QDKRGDLTVT

SEQ ID NO: 79396 - protein, 10 aa, synthetic construct
QDRRGDYNSL

SEQ ID NO: 79397 - protein, 10 aa, synthetic construct
QDRRGDYTSV

SEQ ID NO: 79398 - protein, 10 aa, synthetic construct
QDRRGDYTSM

SEQ ID NO: 79399 - protein, 10 aa, synthetic construct
QDRRGDFQNT

SEQ ID NO: 79400 - protein, 10 aa, synthetic construct
QDHRGDRDYL

SEQ ID NO: 79401 - protein, 10 aa, synthetic construct
QDHRGDYTSV

SEQ ID NO: 79402 - protein, 10 aa, synthetic construct
QDHRGDLTVT

SEQ ID NO: 79403 - protein, 10 aa, synthetic construct
QDHRGDLIGR

SEQ ID NO: 79404 - protein, 10 aa, synthetic construct
NSPRGDFNNT

SEQ ID NO: 79405 - protein, 10 aa, synthetic construct
EASRGDRSQT

SEQ ID NO: 79406 - protein, 10 aa, synthetic construct
QDSRGDRDYL

SEQ ID NO: 79407 - protein, 10 aa, synthetic construct
QDSRGDYTSV

SEQ ID NO: 79408 - protein, 10 aa, synthetic construct
QDSRGDLTVT

SEQ ID NO: 79409 - protein, 10 aa, synthetic construct
QDSRGDLIGR

SEQ ID NO: 79410 - protein, 10 aa, synthetic construct
QDTRGDRDYL

SEQ ID NO: 79411 - protein, 10 aa, synthetic construct
QDTRGDYTSV

SEQ ID NO: 79412 - protein, 10 aa, synthetic construct
QDTRGDLTVT

SEQ ID NO: 79413 - protein, 10 aa, synthetic construct
QDTRGDLIGR

SEQ ID NO: 79414 - protein, 10 aa, synthetic construct
QDYRGDHGVL

SEQ ID NO: 79415 - protein, 10 aa, synthetic construct
QDYRGDHVNL

SEQ ID NO: 79416 - protein, 10 aa, synthetic construct
EATRGDRGQI

SEQ ID NO: 79417 - protein, 10 aa, synthetic construct
QDYRGDRDYL

SEQ ID NO: 79418 - protein, 10 aa, synthetic construct
QDYRGDYSSV

SEQ ID NO: 79419 - protein, 10 aa, synthetic construct
QDYRGDLTVT

SEQ ID NO: 79420 - protein, 10 aa, synthetic construct
QDNRGDHGVL

SEQ ID NO: 79421 - protein, 10 aa, synthetic construct
QDNRGDHVNL

SEQ ID NO: 79422 - protein, 10 aa, synthetic construct
QDNRGDRDYL

SEQ ID NO: 79423 - protein, 10 aa, synthetic construct
QDNRGDYSSV

SEQ ID NO: 79424 - protein, 10 aa, synthetic construct
QDNRGDLTVT

SEQ ID NO: 79425 - protein, 10 aa, synthetic construct
QDQRGDRDYL

SEQ ID NO: 79426 - protein, 10 aa, synthetic construct
QDQRGDYTSV

SEQ ID NO: 79427 - protein, 10 aa, synthetic construct
EATRGDRQGI

SEQ ID NO: 79428 - protein, 10 aa, synthetic construct
QDQRGDLTVT

SEQ ID NO: 79429 - protein, 10 aa, synthetic construct
QDQRGDLIGR

SEQ ID NO: 79430 - protein, 10 aa, synthetic construct
QDDRGDRDYL

SEQ ID NO: 79431 - protein, 10 aa, synthetic construct
QDDRGDYTSV

SEQ ID NO: 79432 - protein, 10 aa, synthetic construct
QDDRGDLTVT

SEQ ID NO: 79433 - protein, 10 aa, synthetic construct
QDDRGDLIGR

SEQ ID NO: 79434 - protein, 10 aa, synthetic construct
QDERGDRDYL

SEQ ID NO: 79435 - protein, 10 aa, synthetic construct
QDERGDYTSV

SEQ ID NO: 79436 - protein, 10 aa, synthetic construct
QDERGDLTVT

SEQ ID NO: 79437 - protein, 10 aa, synthetic construct
QDERGDLIGR

SEQ ID NO: 79438 - protein, 10 aa, synthetic construct
EATRGDRSVV

SEQ ID NO: 79439 - protein, 10 aa, synthetic construct
QEGRGDYNSL

SEQ ID NO: 79440 - protein, 10 aa, synthetic construct
QEGRGDYTSV

SEQ ID NO: 79441 - protein, 10 aa, synthetic construct
QEGRGDYTSM

SEQ ID NO: 79442 - protein, 10 aa, synthetic construct
QEGRGDFQNT

SEQ ID NO: 79443 - protein, 10 aa, synthetic construct
QEARGDYNSL

SEQ ID NO: 79444 - protein, 10 aa, synthetic construct
QEARGDYTSV

SEQ ID NO: 79445 - protein, 10 aa, synthetic construct
QEARGDYTSM

SEQ ID NO: 79446 - protein, 10 aa, synthetic construct
QEARGDFQNT

SEQ ID NO: 79447 - protein, 10 aa, synthetic construct
QEVRGDRDYL

SEQ ID NO: 79448 - protein, 10 aa, synthetic construct
QEVRGDYTSV

SEQ ID NO: 79449 - protein, 10 aa, synthetic construct
EATRGDRGVV

SEQ ID NO: 79450 - protein, 10 aa, synthetic construct
QEVRGDLTVT

SEQ ID NO: 79451 - protein, 10 aa, synthetic construct
QEVRGDLIGR

SEQ ID NO: 79452 - protein, 10 aa, synthetic construct
QEPRGDYNSL

SEQ ID NO: 79453 - protein, 10 aa, synthetic construct
QEPRGDYTSV

SEQ ID NO: 79454 - protein, 10 aa, synthetic construct
QEPRGDYTSM

SEQ ID NO: 79455 - protein, 10 aa, synthetic construct
QEPRGDFQNT

SEQ ID NO: 79456 - protein, 10 aa, synthetic construct
QELRGDRDYL

SEQ ID NO: 79457 - protein, 10 aa, synthetic construct
QELRGDYTSV

SEQ ID NO: 79458 - protein, 10 aa, synthetic construct
QELRGDLTVT

SEQ ID NO: 79459 - protein, 10 aa, synthetic construct
QELRGDLIGR

SEQ ID NO: 79460 - protein, 10 aa, synthetic construct
EATRGDRSQT

SEQ ID NO: 79461 - protein, 10 aa, synthetic construct
QEIRGDHGVL

SEQ ID NO: 79462 - protein, 10 aa, synthetic construct
QEIRGDHVNL

SEQ ID NO: 79463 - protein, 10 aa, synthetic construct
QEIRGDRDYL

SEQ ID NO: 79464 - protein, 10 aa, synthetic construct
QEIRGDYSSV

SEQ ID NO: 79465 - protein, 10 aa, synthetic construct
QEIRGDLTVT

SEQ ID NO: 79466 - protein, 10 aa, synthetic construct
QEMRGDHGVL

SEQ ID NO: 79467 - protein, 10 aa, synthetic construct
QEMRGDHVNL

SEQ ID NO: 79468 - protein, 10 aa, synthetic construct
QEMRGDRDYL

SEQ ID NO: 79469 - protein, 10 aa, synthetic construct
QEMRGDYSSV

SEQ ID NO: 79470 - protein, 10 aa, synthetic construct
QEMRGDLTVT

SEQ ID NO: 79471 - protein, 10 aa, synthetic construct
EAQRGDRGQI

SEQ ID NO: 79472 - protein, 10 aa, synthetic construct
QEWRGDRDYL

SEQ ID NO: 79473 - protein, 10 aa, synthetic construct
QEWRGDYTSV

SEQ ID NO: 79474 - protein, 10 aa, synthetic construct
QEWRGDLTVT

SEQ ID NO: 79475 - protein, 10 aa, synthetic construct
QEWRGDLIGR

SEQ ID NO: 79476 - protein, 10 aa, synthetic construct
QEFRGDHGVL

SEQ ID NO: 79477 - protein, 10 aa, synthetic construct
QEFRGDHVNL

SEQ ID NO: 79478 - protein, 10 aa, synthetic construct
QEFRGDRDYL

SEQ ID NO: 79479 - protein, 10 aa, synthetic construct
QEFRGDYSSV

SEQ ID NO: 79480 - protein, 10 aa, synthetic construct
QEFRGDLTVT

SEQ ID NO: 79481 - protein, 10 aa, synthetic construct
QEKRGDHGVL

SEQ ID NO: 79482 - protein, 10 aa, synthetic construct
EAQRGDRQGI

SEQ ID NO: 79483 - protein, 10 aa, synthetic construct
QEKRGDHVNL

SEQ ID NO: 79484 - protein, 10 aa, synthetic construct
QEKRGDRDYL

SEQ ID NO: 79485 - protein, 10 aa, synthetic construct
QEKRGDYSSV

SEQ ID NO: 79486 - protein, 10 aa, synthetic construct
QEKRGDLTVT

SEQ ID NO: 79487 - protein, 10 aa, synthetic construct
QERRGDYNSL

SEQ ID NO: 79488 - protein, 10 aa, synthetic construct
QERRGDYTSV

SEQ ID NO: 79489 - protein, 10 aa, synthetic construct
QERRGDFQNT

SEQ ID NO: 79490 - protein, 10 aa, synthetic construct
QEHRGDRDYL

SEQ ID NO: 79491 - protein, 10 aa, synthetic construct
QEHRGDYTSV

SEQ ID NO: 79492 - protein, 10 aa, synthetic construct
QEHRGDLTVT

SEQ ID NO: 79493 - protein, 10 aa, synthetic construct
EAQRGDRSVV

SEQ ID NO: 79494 - protein, 10 aa, synthetic construct
QEHRGDLIGR

SEQ ID NO: 79495 - protein, 10 aa, synthetic construct
QESRGDRDYL

SEQ ID NO: 79496 - protein, 10 aa, synthetic construct
QESRGDYTSV

SEQ ID NO: 79497 - protein, 10 aa, synthetic construct
QESRGDLTVT

SEQ ID NO: 79498 - protein, 10 aa, synthetic construct
QESRGDLIGR

SEQ ID NO: 79499 - protein, 10 aa, synthetic construct
QETRGDRDYL

SEQ ID NO: 79500 - protein, 10 aa, synthetic construct
QETRGDYTSV

SEQ ID NO: 79501 - protein, 10 aa, synthetic construct
QETRGDLTVT

SEQ ID NO: 79502 - protein, 10 aa, synthetic construct
QETRGDLIGR

SEQ ID NO: 79503 - protein, 10 aa, synthetic construct
QEYRGDHGVL

SEQ ID NO: 79504 - protein, 10 aa, synthetic construct
EAQRGDRGVV

SEQ ID NO: 79505 - protein, 10 aa, synthetic construct
QEYRGDHVNL

SEQ ID NO: 79506 - protein, 10 aa, synthetic construct
QEYRGDRDYL

SEQ ID NO: 79507 - protein, 10 aa, synthetic construct
QEYRGDYSSV

SEQ ID NO: 79508 - protein, 10 aa, synthetic construct
QEYRGDLTVT

SEQ ID NO: 79509 - protein, 10 aa, synthetic construct
QENRGDHGVL

SEQ ID NO: 79510 - protein, 10 aa, synthetic construct
QENRGDHVNL

SEQ ID NO: 79511 - protein, 10 aa, synthetic construct
QENRGDRDYL

SEQ ID NO: 79512 - protein, 10 aa, synthetic construct
QENRGDYSSV

SEQ ID NO: 79513 - protein, 10 aa, synthetic construct
QENRGDLTVT

SEQ ID NO: 79514 - protein, 10 aa, synthetic construct
QEQRGDRDYL

SEQ ID NO: 79515 - protein, 10 aa, synthetic construct
TKKRGDRGQI

SEQ ID NO: 79516 - protein, 10 aa, synthetic construct
NSPRGDFNNL

SEQ ID NO: 79517 - protein, 10 aa, synthetic construct
EAQRGDRSQT

SEQ ID NO: 79518 - protein, 10 aa, synthetic construct
QEQRGDYTSV

SEQ ID NO: 79519 - protein, 10 aa, synthetic construct
QEQRGDLTVT

SEQ ID NO: 79520 - protein, 10 aa, synthetic construct
QEQRGDLIGR

SEQ ID NO: 79521 - protein, 10 aa, synthetic construct
QEDRGDRDYL

SEQ ID NO: 79522 - protein, 10 aa, synthetic construct
QEDRGDYTSV

SEQ ID NO: 79523 - protein, 10 aa, synthetic construct
QEDRGDLTVT

SEQ ID NO: 79524 - protein, 10 aa, synthetic construct
QEDRGDLIGR

SEQ ID NO: 79525 - protein, 10 aa, synthetic construct
QEERGDRDYL

SEQ ID NO: 79526 - protein, 10 aa, synthetic construct
QEERGDYTSV

SEQ ID NO: 79527 - protein, 10 aa, synthetic construct
QEERGDLTVT

SEQ ID NO: 79528 - protein, 10 aa, synthetic construct
EADRGDRGQI

SEQ ID NO: 79529 - protein, 10 aa, synthetic construct
QEERGDLIGR

SEQ ID NO: 79530 - protein, 10 aa, synthetic construct
SGVRGDFNNT

SEQ ID NO: 79531 - protein, 10 aa, synthetic construct
SGVRGDFNNL

SEQ ID NO: 79532 - protein, 10 aa, synthetic construct
SGLRGDFNNT

SEQ ID NO: 79533 - protein, 10 aa, synthetic construct
SGLRGDFNNL

SEQ ID NO: 79534 - protein, 10 aa, synthetic construct
SGIRGDYNSL

SEQ ID NO: 79535 - protein, 10 aa, synthetic construct
SGIRGDYTSM

SEQ ID NO: 79536 - protein, 10 aa, synthetic construct
SGIRGDFQNT

SEQ ID NO: 79537 - protein, 10 aa, synthetic construct
SGMRGDYNSL

SEQ ID NO: 79538 - protein, 10 aa, synthetic construct
SGMRGDYTSM

SEQ ID NO: 79539 - protein, 10 aa, synthetic construct
EADRGDRQGI

SEQ ID NO: 79540 - protein, 10 aa, synthetic construct
SGMRGDFQNT

SEQ ID NO: 79541 - protein, 10 aa, synthetic construct
SGWRGDFNNT

SEQ ID NO: 79542 - protein, 10 aa, synthetic construct
SGWRGDFNNL

SEQ ID NO: 79543 - protein, 10 aa, synthetic construct
SGFRGDYNSL

SEQ ID NO: 79544 - protein, 10 aa, synthetic construct
SGFRGDYTSM

SEQ ID NO: 79545 - protein, 10 aa, synthetic construct
SGFRGDFQNT

SEQ ID NO: 79546 - protein, 10 aa, synthetic construct
SGKRGDYNSL

SEQ ID NO: 79547 - protein, 10 aa, synthetic construct
SGKRGDYTSM

SEQ ID NO: 79548 - protein, 10 aa, synthetic construct
SGKRGDFQNT

SEQ ID NO: 79549 - protein, 10 aa, synthetic construct
SGHRGDFNNT

SEQ ID NO: 79550 - protein, 10 aa, synthetic construct
EADRGDRSVV

SEQ ID NO: 79551 - protein, 10 aa, synthetic construct
SGHRGDFNNL

SEQ ID NO: 79552 - protein, 10 aa, synthetic construct
SGSRGDFNNT

SEQ ID NO: 79553 - protein, 10 aa, synthetic construct
SGSRGDFNNL

SEQ ID NO: 79554 - protein, 10 aa, synthetic construct
SGTRGDFNNT

SEQ ID NO: 79555 - protein, 10 aa, synthetic construct
SGTRGDFNNL

SEQ ID NO: 79556 - protein, 10 aa, synthetic construct
SGYRGDYNSL

SEQ ID NO: 79557 - protein, 10 aa, synthetic construct
SGYRGDYTSM

SEQ ID NO: 79558 - protein, 10 aa, synthetic construct
SGYRGDFQNT

SEQ ID NO: 79559 - protein, 10 aa, synthetic construct
SGNRGDYNSL

SEQ ID NO: 79560 - protein, 10 aa, synthetic construct
SGNRGDYTSM

SEQ ID NO: 79561 - protein, 10 aa, synthetic construct
EADRGDRGVV

SEQ ID NO: 79562 - protein, 10 aa, synthetic construct
SGNRGDFQNT

SEQ ID NO: 79563 - protein, 10 aa, synthetic construct
SGQRGDFNNT

SEQ ID NO: 79564 - protein, 10 aa, synthetic construct
SGQRGDFNNL

SEQ ID NO: 79565 - protein, 10 aa, synthetic construct
SGDRGDFNNT

SEQ ID NO: 79566 - protein, 10 aa, synthetic construct
SGDRGDFNNL

SEQ ID NO: 79567 - protein, 10 aa, synthetic construct
SGERGDFNNT

SEQ ID NO: 79568 - protein, 10 aa, synthetic construct
SGERGDFNNL

SEQ ID NO: 79569 - protein, 10 aa, synthetic construct
SAVRGDFNNT

SEQ ID NO: 79570 - protein, 10 aa, synthetic construct
SAVRGDFNNL

SEQ ID NO: 79571 - protein, 10 aa, synthetic construct
SALRGDFNNT

SEQ ID NO: 79572 - protein, 10 aa, synthetic construct
EADRGDRSQT

SEQ ID NO: 79573 - protein, 10 aa, synthetic construct
SALRGDFNNL

SEQ ID NO: 79574 - protein, 10 aa, synthetic construct
SAIRGDYNSL

SEQ ID NO: 79575 - protein, 10 aa, synthetic construct
SAIRGDYTSM

SEQ ID NO: 79576 - protein, 10 aa, synthetic construct
SAIRGDFQNT

SEQ ID NO: 79577 - protein, 10 aa, synthetic construct
SAMRGDYNSL

SEQ ID NO: 79578 - protein, 10 aa, synthetic construct
SAMRGDYTSM

SEQ ID NO: 79579 - protein, 10 aa, synthetic construct
SAMRGDFQNT

SEQ ID NO: 79580 - protein, 10 aa, synthetic construct
SAWRGDFNNT

SEQ ID NO: 79581 - protein, 10 aa, synthetic construct
SAWRGDFNNL

SEQ ID NO: 79582 - protein, 10 aa, synthetic construct
SAFRGDYNSL

SEQ ID NO: 79583 - protein, 10 aa, synthetic construct
EAERGDRGQI

SEQ ID NO: 79584 - protein, 10 aa, synthetic construct
SAFRGDYTSM

SEQ ID NO: 79585 - protein, 10 aa, synthetic construct
SAFRGDFQNT

SEQ ID NO: 79586 - protein, 10 aa, synthetic construct
SAKRGDYNSL

SEQ ID NO: 79587 - protein, 10 aa, synthetic construct
SAKRGDYTSM

SEQ ID NO: 79588 - protein, 10 aa, synthetic construct
SAKRGDFQNT

SEQ ID NO: 79589 - protein, 10 aa, synthetic construct
SAHRGDFNNT

SEQ ID NO: 79590 - protein, 10 aa, synthetic construct
SAHRGDFNNL

SEQ ID NO: 79591 - protein, 10 aa, synthetic construct
SASRGDFNNT

SEQ ID NO: 79592 - protein, 10 aa, synthetic construct
SASRGDFNNL

SEQ ID NO: 79593 - protein, 10 aa, synthetic construct
SATRGDFNNT

SEQ ID NO: 79594 - protein, 10 aa, synthetic construct
EAERGDRQGI

SEQ ID NO: 79595 - protein, 10 aa, synthetic construct
SATRGDFNNL

SEQ ID NO: 79596 - protein, 10 aa, synthetic construct
SAYRGDYNSL

SEQ ID NO: 79597 - protein, 10 aa, synthetic construct
SAYRGDYTSM

SEQ ID NO: 79598 - protein, 10 aa, synthetic construct
SAYRGDFQNT

SEQ ID NO: 79599 - protein, 10 aa, synthetic construct
SANRGDYNSL

SEQ ID NO: 79600 - protein, 10 aa, synthetic construct
SANRGDYTSM

SEQ ID NO: 79601 - protein, 10 aa, synthetic construct
SANRGDFQNT

SEQ ID NO: 79602 - protein, 10 aa, synthetic construct
SAQRGDFNNT

SEQ ID NO: 79603 - protein, 10 aa, synthetic construct
SAQRGDFNNL

SEQ ID NO: 79604 - protein, 10 aa, synthetic construct
SADRGDFNNT

SEQ ID NO: 79605 - protein, 10 aa, synthetic construct
EAERGDRSVV

SEQ ID NO: 79606 - protein, 10 aa, synthetic construct
SADRGDFNNL

SEQ ID NO: 79607 - protein, 10 aa, synthetic construct
SAERGDFNNT

SEQ ID NO: 79608 - protein, 10 aa, synthetic construct
SAERGDFNNL

SEQ ID NO: 79609 - protein, 10 aa, synthetic construct
SVVRGDFNNT

SEQ ID NO: 79610 - protein, 10 aa, synthetic construct
SVVRGDFNNL

SEQ ID NO: 79611 - protein, 10 aa, synthetic construct
SVLRGDFNNT

SEQ ID NO: 79612 - protein, 10 aa, synthetic construct
SVLRGDFNNL

SEQ ID NO: 79613 - protein, 10 aa, synthetic construct
SVIRGDYNSL

SEQ ID NO: 79614 - protein, 10 aa, synthetic construct
SVIRGDYTSM

SEQ ID NO: 79615 - protein, 10 aa, synthetic construct
SVIRGDFQNT

SEQ ID NO: 79616 - protein, 10 aa, synthetic construct
EAERGDRGVV

SEQ ID NO: 79617 - protein, 10 aa, synthetic construct
SVMRGDYNSL

SEQ ID NO: 79618 - protein, 10 aa, synthetic construct
SVMRGDYTSM

SEQ ID NO: 79619 - protein, 10 aa, synthetic construct
SVMRGDFQNT

SEQ ID NO: 79620 - protein, 10 aa, synthetic construct
SVWRGDFNNT

SEQ ID NO: 79621 - protein, 10 aa, synthetic construct
SVWRGDFNNL

SEQ ID NO: 79622 - protein, 10 aa, synthetic construct
SVFRGDYNSL

SEQ ID NO: 79623 - protein, 10 aa, synthetic construct
SVFRGDYTSM

SEQ ID NO: 79624 - protein, 10 aa, synthetic construct
SVFRGDFQNT

SEQ ID NO: 79625 - protein, 10 aa, synthetic construct
SVKRGDYNSL

SEQ ID NO: 79626 - protein, 10 aa, synthetic construct
SVKRGDYTSM

SEQ ID NO: 79627 - protein, 10 aa, synthetic construct
SFFRGDRSVV

SEQ ID NO: 79628 - protein, 10 aa, synthetic construct
EAERGDRSQT

SEQ ID NO: 79629 - protein, 10 aa, synthetic construct
SVKRGDFQNT

SEQ ID NO: 79630 - protein, 10 aa, synthetic construct
SVHRGDFNNT

SEQ ID NO: 79631 - protein, 10 aa, synthetic construct
SVHRGDFNNL

SEQ ID NO: 79632 - protein, 10 aa, synthetic construct
SVSRGDFNNT

SEQ ID NO: 79633 - protein, 10 aa, synthetic construct
SVSRGDFNNL

SEQ ID NO: 79634 - protein, 10 aa, synthetic construct
SVTRGDFNNT

SEQ ID NO: 79635 - protein, 10 aa, synthetic construct
SVTRGDFNNL

SEQ ID NO: 79636 - protein, 10 aa, synthetic construct
SVYRGDYNSL

SEQ ID NO: 79637 - protein, 10 aa, synthetic construct
SVYRGDYTSM

SEQ ID NO: 79638 - protein, 10 aa, synthetic construct
SVYRGDFQNT

SEQ ID NO: 79639 - protein, 10 aa, synthetic construct
EVGRGDHGVL

SEQ ID NO: 79640 - protein, 10 aa, synthetic construct
SVNRGDYNSL

SEQ ID NO: 79641 - protein, 10 aa, synthetic construct
SVNRGDYTSM

SEQ ID NO: 79642 - protein, 10 aa, synthetic construct
SVNRGDFQNT

SEQ ID NO: 79643 - protein, 10 aa, synthetic construct
SVQRGDFNNT

SEQ ID NO: 79644 - protein, 10 aa, synthetic construct
SVQRGDFNNL

SEQ ID NO: 79645 - protein, 10 aa, synthetic construct
SVDRGDFNNT

SEQ ID NO: 79646 - protein, 10 aa, synthetic construct
SVDRGDFNNL

SEQ ID NO: 79647 - protein, 10 aa, synthetic construct
SVERGDFNNT

SEQ ID NO: 79648 - protein, 10 aa, synthetic construct
SVERGDFNNL

SEQ ID NO: 79649 - protein, 10 aa, synthetic construct
SPVRGDFNNT

SEQ ID NO: 79650 - protein, 10 aa, synthetic construct
EVGRGDYVGL

SEQ ID NO: 79651 - protein, 10 aa, synthetic construct
SPVRGDFNNL

SEQ ID NO: 79652 - protein, 10 aa, synthetic construct
SPLRGDFNNT

SEQ ID NO: 79653 - protein, 10 aa, synthetic construct
SPLRGDFNNL

SEQ ID NO: 79654 - protein, 10 aa, synthetic construct
SPIRGDYNSL

SEQ ID NO: 79655 - protein, 10 aa, synthetic construct
SPIRGDYTSM

SEQ ID NO: 79656 - protein, 10 aa, synthetic construct
SPIRGDFQNT

SEQ ID NO: 79657 - protein, 10 aa, synthetic construct
SPMRGDYNSL

SEQ ID NO: 79658 - protein, 10 aa, synthetic construct
SPMRGDYTSM

SEQ ID NO: 79659 - protein, 10 aa, synthetic construct
SPMRGDFQNT

SEQ ID NO: 79660 - protein, 10 aa, synthetic construct
SPWRGDFNNT

SEQ ID NO: 79661 - protein, 10 aa, synthetic construct
EVGRGDQSTL

SEQ ID NO: 79662 - protein, 10 aa, synthetic construct
SPWRGDFNNL

SEQ ID NO: 79663 - protein, 10 aa, synthetic construct
SPFRGDYNSL

SEQ ID NO: 79664 - protein, 10 aa, synthetic construct
SPFRGDYTSM

SEQ ID NO: 79665 - protein, 10 aa, synthetic construct
SPFRGDFQNT

SEQ ID NO: 79666 - protein, 10 aa, synthetic construct
SPKRGDYNSL

SEQ ID NO: 79667 - protein, 10 aa, synthetic construct
SPKRGDYTSM

SEQ ID NO: 79668 - protein, 10 aa, synthetic construct
SPKRGDFQNT

SEQ ID NO: 79669 - protein, 10 aa, synthetic construct
SPHRGDFNNT

SEQ ID NO: 79670 - protein, 10 aa, synthetic construct
SPHRGDFNNL

SEQ ID NO: 79671 - protein, 10 aa, synthetic construct
SPSRGDFNNT

SEQ ID NO: 79672 - protein, 10 aa, synthetic construct
EVGRGDLLLS

SEQ ID NO: 79673 - protein, 10 aa, synthetic construct
SPSRGDFNNL

SEQ ID NO: 79674 - protein, 10 aa, synthetic construct
SPTRGDFNNT

SEQ ID NO: 79675 - protein, 10 aa, synthetic construct
SPTRGDFNNL

SEQ ID NO: 79676 - protein, 10 aa, synthetic construct
SPYRGDYNSL

SEQ ID NO: 79677 - protein, 10 aa, synthetic construct
SPYRGDYTSM

SEQ ID NO: 79678 - protein, 10 aa, synthetic construct
SPYRGDFQNT

SEQ ID NO: 79679 - protein, 10 aa, synthetic construct
SPNRGDYNSL

SEQ ID NO: 79680 - protein, 10 aa, synthetic construct
SPNRGDYTSM

SEQ ID NO: 79681 - protein, 10 aa, synthetic construct
SPNRGDFQNT

SEQ ID NO: 79682 - protein, 10 aa, synthetic construct
SPQRGDFNNT

SEQ ID NO: 79683 - protein, 10 aa, synthetic construct
EVARGDHGVL

SEQ ID NO: 79684 - protein, 10 aa, synthetic construct
SPQRGDFNNL

SEQ ID NO: 79685 - protein, 10 aa, synthetic construct
SPDRGDFNNT

SEQ ID NO: 79686 - protein, 10 aa, synthetic construct
SPDRGDFNNL

SEQ ID NO: 79687 - protein, 10 aa, synthetic construct
SPERGDFNNT

SEQ ID NO: 79688 - protein, 10 aa, synthetic construct
SPERGDFNNL

SEQ ID NO: 79689 - protein, 10 aa, synthetic construct
SLVRGDFNNT

SEQ ID NO: 79690 - protein, 10 aa, synthetic construct
SLVRGDFNNL

SEQ ID NO: 79691 - protein, 10 aa, synthetic construct
SLLRGDFNNT

SEQ ID NO: 79692 - protein, 10 aa, synthetic construct
SLLRGDFNNL

SEQ ID NO: 79693 - protein, 10 aa, synthetic construct
SLIRGDYNSL

SEQ ID NO: 79694 - protein, 10 aa, synthetic construct
EVARGDYVGL

SEQ ID NO: 79695 - protein, 10 aa, synthetic construct
SLIRGDYTSM

SEQ ID NO: 79696 - protein, 10 aa, synthetic construct
SLIRGDFQNT

SEQ ID NO: 79697 - protein, 10 aa, synthetic construct
SLMRGDYNSL

SEQ ID NO: 79698 - protein, 10 aa, synthetic construct
SLMRGDYTSM

SEQ ID NO: 79699 - protein, 10 aa, synthetic construct
SLMRGDFQNT

SEQ ID NO: 79700 - protein, 10 aa, synthetic construct
SLWRGDFNNT

SEQ ID NO: 79701 - protein, 10 aa, synthetic construct
SLWRGDFNNL

SEQ ID NO: 79702 - protein, 10 aa, synthetic construct
SLFRGDYNSL

SEQ ID NO: 79703 - protein, 10 aa, synthetic construct
SLFRGDYTSM

SEQ ID NO: 79704 - protein, 10 aa, synthetic construct
SLFRGDFQNT

SEQ ID NO: 79705 - protein, 10 aa, synthetic construct
EVARGDQSTL

SEQ ID NO: 79706 - protein, 10 aa, synthetic construct
SLKRGDYNSL

SEQ ID NO: 79707 - protein, 10 aa, synthetic construct
SLKRGDYTSM

SEQ ID NO: 79708 - protein, 10 aa, synthetic construct
SLKRGDFQNT

SEQ ID NO: 79709 - protein, 10 aa, synthetic construct
SLHRGDFNNT

SEQ ID NO: 79710 - protein, 10 aa, synthetic construct
SLHRGDFNNL

SEQ ID NO: 79711 - protein, 10 aa, synthetic construct
SLSRGDFNNT

SEQ ID NO: 79712 - protein, 10 aa, synthetic construct
SLSRGDFNNL

SEQ ID NO: 79713 - protein, 10 aa, synthetic construct
SLTRGDFNNT

SEQ ID NO: 79714 - protein, 10 aa, synthetic construct
SLTRGDFNNL

SEQ ID NO: 79715 - protein, 10 aa, synthetic construct
SLYRGDYNSL

SEQ ID NO: 79716 - protein, 10 aa, synthetic construct
EVARGDLLLS

SEQ ID NO: 79717 - protein, 10 aa, synthetic construct
SLYRGDYTSM

SEQ ID NO: 79718 - protein, 10 aa, synthetic construct
SLYRGDFQNT

SEQ ID NO: 79719 - protein, 10 aa, synthetic construct
SLNRGDYNSL

SEQ ID NO: 79720 - protein, 10 aa, synthetic construct
SLNRGDYTSM

SEQ ID NO: 79721 - protein, 10 aa, synthetic construct
SLNRGDFQNT

SEQ ID NO: 79722 - protein, 10 aa, synthetic construct
SLQRGDFNNT

SEQ ID NO: 79723 - protein, 10 aa, synthetic construct
SLQRGDFNNL

SEQ ID NO: 79724 - protein, 10 aa, synthetic construct
SLDRGDFNNT

SEQ ID NO: 79725 - protein, 10 aa, synthetic construct
SLDRGDFNNL

SEQ ID NO: 79726 - protein, 10 aa, synthetic construct
SLERGDFNNT

SEQ ID NO: 79727 - protein, 10 aa, synthetic construct
EVVRGDRGQI

SEQ ID NO: 79728 - protein, 10 aa, synthetic construct
SLERGDFNNL

SEQ ID NO: 79729 - protein, 10 aa, synthetic construct
SIGRGDYNSL

SEQ ID NO: 79730 - protein, 10 aa, synthetic construct
SIGRGDYTSM

SEQ ID NO: 79731 - protein, 10 aa, synthetic construct
SIGRGDFQNT

SEQ ID NO: 79732 - protein, 10 aa, synthetic construct
SIARGDYNSL

SEQ ID NO: 79733 - protein, 10 aa, synthetic construct
SIARGDYTSM

SEQ ID NO: 79734 - protein, 10 aa, synthetic construct
SIARGDFQNT

SEQ ID NO: 79735 - protein, 10 aa, synthetic construct
SIVRGDYTSV

SEQ ID NO: 79736 - protein, 10 aa, synthetic construct
SIVRGDLIGR

SEQ ID NO: 79737 - protein, 10 aa, synthetic construct
SIPRGDYNSL

SEQ ID NO: 79738 - protein, 10 aa, synthetic construct
SFFRGDRSQT

SEQ ID NO: 79739 - protein, 10 aa, synthetic construct
EVVRGDRQGI

SEQ ID NO: 79740 - protein, 10 aa, synthetic construct
SIPRGDYTSM

SEQ ID NO: 79741 - protein, 10 aa, synthetic construct
SIPRGDFQNT

SEQ ID NO: 79742 - protein, 10 aa, synthetic construct
SILRGDYTSV

SEQ ID NO: 79743 - protein, 10 aa, synthetic construct
SILRGDLIGR

SEQ ID NO: 79744 - protein, 10 aa, synthetic construct
SIIRGDHVNL

SEQ ID NO: 79745 - protein, 10 aa, synthetic construct
SIIRGDRDYL

SEQ ID NO: 79746 - protein, 10 aa, synthetic construct
SIIRGDYSSV

SEQ ID NO: 79747 - protein, 10 aa, synthetic construct
SIIRGDLTVT

SEQ ID NO: 79748 - protein, 10 aa, synthetic construct
SIMRGDHVNL

SEQ ID NO: 79749 - protein, 10 aa, synthetic construct
SIMRGDRDYL

SEQ ID NO: 79750 - protein, 10 aa, synthetic construct
EVVRGDRSVV

SEQ ID NO: 79751 - protein, 10 aa, synthetic construct
SIMRGDYSSV

SEQ ID NO: 79752 - protein, 10 aa, synthetic construct
SIMRGDLTVT

SEQ ID NO: 79753 - protein, 10 aa, synthetic construct
SIWRGDYTSV

SEQ ID NO: 79754 - protein, 10 aa, synthetic construct
SIWRGDLIGR

SEQ ID NO: 79755 - protein, 10 aa, synthetic construct
SIFRGDHVNL

SEQ ID NO: 79756 - protein, 10 aa, synthetic construct
SIFRGDRDYL

SEQ ID NO: 79757 - protein, 10 aa, synthetic construct
SIFRGDYSSV

SEQ ID NO: 79758 - protein, 10 aa, synthetic construct
SIFRGDLTVT

SEQ ID NO: 79759 - protein, 10 aa, synthetic construct
SIKRGDHVNL

SEQ ID NO: 79760 - protein, 10 aa, synthetic construct
SIKRGDRDYL

SEQ ID NO: 79761 - protein, 10 aa, synthetic construct
EVVRGDRGVV

SEQ ID NO: 79762 - protein, 10 aa, synthetic construct
SIKRGDYSSV

SEQ ID NO: 79763 - protein, 10 aa, synthetic construct
SIKRGDLTVT

SEQ ID NO: 79764 - protein, 10 aa, synthetic construct
SIRRGDYNSL

SEQ ID NO: 79765 - protein, 10 aa, synthetic construct
SIRRGDYTSM

SEQ ID NO: 79766 - protein, 10 aa, synthetic construct
SIRRGDFQNT

SEQ ID NO: 79767 - protein, 10 aa, synthetic construct
SIHRGDYTSV

SEQ ID NO: 79768 - protein, 10 aa, synthetic construct
SIHRGDLIGR

SEQ ID NO: 79769 - protein, 10 aa, synthetic construct
SISRGDYTSV

SEQ ID NO: 79770 - protein, 10 aa, synthetic construct
SISRGDLIGR

SEQ ID NO: 79771 - protein, 10 aa, synthetic construct
SITRGDYTSV

SEQ ID NO: 79772 - protein, 10 aa, synthetic construct
EVVRGDRSQT

SEQ ID NO: 79773 - protein, 10 aa, synthetic construct
SITRGDLIGR

SEQ ID NO: 79774 - protein, 10 aa, synthetic construct
SIYRGDHVNL

SEQ ID NO: 79775 - protein, 10 aa, synthetic construct
SIYRGDRDYL

SEQ ID NO: 79776 - protein, 10 aa, synthetic construct
SIYRGDYSSV

SEQ ID NO: 79777 - protein, 10 aa, synthetic construct
SIYRGDLTVT

SEQ ID NO: 79778 - protein, 10 aa, synthetic construct
SINRGDHVNL

SEQ ID NO: 79779 - protein, 10 aa, synthetic construct
SINRGDRDYL

SEQ ID NO: 79780 - protein, 10 aa, synthetic construct
SINRGDYSSV

SEQ ID NO: 79781 - protein, 10 aa, synthetic construct
SINRGDLTVT

SEQ ID NO: 79782 - protein, 10 aa, synthetic construct
SIQRGDYTSV

SEQ ID NO: 79783 - protein, 10 aa, synthetic construct
EVPRGDHGVL

SEQ ID NO: 79784 - protein, 10 aa, synthetic construct
SIQRGDLIGR

SEQ ID NO: 79785 - protein, 10 aa, synthetic construct
SIDRGDYTSV

SEQ ID NO: 79786 - protein, 10 aa, synthetic construct
SIDRGDLIGR

SEQ ID NO: 79787 - protein, 10 aa, synthetic construct
SIERGDYTSV

SEQ ID NO: 79788 - protein, 10 aa, synthetic construct
SIERGDLIGR

SEQ ID NO: 79789 - protein, 10 aa, synthetic construct
SMGRGDFQNT

SEQ ID NO: 79790 - protein, 10 aa, synthetic construct
SMARGDFQNT

SEQ ID NO: 79791 - protein, 10 aa, synthetic construct
SMVRGDFQNT

SEQ ID NO: 79792 - protein, 10 aa, synthetic construct
SMPRGDFQNT

SEQ ID NO: 79793 - protein, 10 aa, synthetic construct
SMLRGDFQNT

SEQ ID NO: 79794 - protein, 10 aa, synthetic construct
EVPRGDYVGL

SEQ ID NO: 79795 - protein, 10 aa, synthetic construct
SMIRGDRDYL

SEQ ID NO: 79796 - protein, 10 aa, synthetic construct
SMIRGDYVGL

SEQ ID NO: 79797 - protein, 10 aa, synthetic construct
SMIRGDYSSV

SEQ ID NO: 79798 - protein, 10 aa, synthetic construct
SMIRGDYTSV

SEQ ID NO: 79799 - protein, 10 aa, synthetic construct
SMIRGDQSTL

SEQ ID NO: 79800 - protein, 10 aa, synthetic construct
SMMRGDYTSV

SEQ ID NO: 79801 - protein, 10 aa, synthetic construct
SMWRGDYNSL

SEQ ID NO: 79802 - protein, 10 aa, synthetic construct
SMWRGDYTSM

SEQ ID NO: 79803 - protein, 10 aa, synthetic construct
SMWRGDFQNT

SEQ ID NO: 79804 - protein, 10 aa, synthetic construct
SMFRGDRDYL

SEQ ID NO: 79805 - protein, 10 aa, synthetic construct
EVPRGDQSTL

SEQ ID NO: 79806 - protein, 10 aa, synthetic construct
SMFRGDYVGL

SEQ ID NO: 79807 - protein, 10 aa, synthetic construct
SMFRGDYSSV

SEQ ID NO: 79808 - protein, 10 aa, synthetic construct
SMFRGDYTSV

SEQ ID NO: 79809 - protein, 10 aa, synthetic construct
SMFRGDQSTL

SEQ ID NO: 79810 - protein, 10 aa, synthetic construct
SMKRGDRDYL

SEQ ID NO: 79811 - protein, 10 aa, synthetic construct
SMKRGDYVGL

SEQ ID NO: 79812 - protein, 10 aa, synthetic construct
SMKRGDYSSV

SEQ ID NO: 79813 - protein, 10 aa, synthetic construct
SMKRGDYTSV

SEQ ID NO: 79814 - protein, 10 aa, synthetic construct
SMKRGDQSTL

SEQ ID NO: 79815 - protein, 10 aa, synthetic construct
SMRRGDFQNT

SEQ ID NO: 79816 - protein, 10 aa, synthetic construct
EVPRGDLLLS

SEQ ID NO: 79817 - protein, 10 aa, synthetic construct
SMHRGDHVNL

SEQ ID NO: 79818 - protein, 10 aa, synthetic construct
SMHRGDYNSL

SEQ ID NO: 79819 - protein, 10 aa, synthetic construct
SMHRGDYTSM

SEQ ID NO: 79820 - protein, 10 aa, synthetic construct
SMSRGDFQNT

SEQ ID NO: 79821 - protein, 10 aa, synthetic construct
SMTRGDHVNL

SEQ ID NO: 79822 - protein, 10 aa, synthetic construct
SMTRGDYNSL

SEQ ID NO: 79823 - protein, 10 aa, synthetic construct
SMTRGDYTSM

SEQ ID NO: 79824 - protein, 10 aa, synthetic construct
SMYRGDRDYL

SEQ ID NO: 79825 - protein, 10 aa, synthetic construct
SMYRGDYVGL

SEQ ID NO: 79826 - protein, 10 aa, synthetic construct
SMYRGDYSSV

SEQ ID NO: 79827 - protein, 10 aa, synthetic construct
EVLRGDRGQI

SEQ ID NO: 79828 - protein, 10 aa, synthetic construct
SMYRGDYTSV

SEQ ID NO: 79829 - protein, 10 aa, synthetic construct
SMYRGDQSTL

SEQ ID NO: 79830 - protein, 10 aa, synthetic construct
SMNRGDRDYL

SEQ ID NO: 79831 - protein, 10 aa, synthetic construct
SMNRGDYVGL

SEQ ID NO: 79832 - protein, 10 aa, synthetic construct
SMNRGDYSSV

SEQ ID NO: 79833 - protein, 10 aa, synthetic construct
SMNRGDYTSV

SEQ ID NO: 79834 - protein, 10 aa, synthetic construct
SMNRGDQSTL

SEQ ID NO: 79835 - protein, 10 aa, synthetic construct
SMQRGDHVNL

SEQ ID NO: 79836 - protein, 10 aa, synthetic construct
SMQRGDYNSL

SEQ ID NO: 79837 - protein, 10 aa, synthetic construct
SMQRGDYTSM

SEQ ID NO: 79838 - protein, 10 aa, synthetic construct
EVLRGDRQGI

SEQ ID NO: 79839 - protein, 10 aa, synthetic construct
SMDRGDHVNL

SEQ ID NO: 79840 - protein, 10 aa, synthetic construct
SMDRGDYNSL

SEQ ID NO: 79841 - protein, 10 aa, synthetic construct
SMDRGDYTSM

SEQ ID NO: 79842 - protein, 10 aa, synthetic construct
SMERGDHVNL

SEQ ID NO: 79843 - protein, 10 aa, synthetic construct
SMERGDYNSL

SEQ ID NO: 79844 - protein, 10 aa, synthetic construct
SMERGDYTSM

SEQ ID NO: 79845 - protein, 10 aa, synthetic construct
SWGRGDFNNT

SEQ ID NO: 79846 - protein, 10 aa, synthetic construct
SWGRGDFNNL

SEQ ID NO: 79847 - protein, 10 aa, synthetic construct
SWARGDFNNT

SEQ ID NO: 79848 - protein, 10 aa, synthetic construct
SWARGDFNNL

SEQ ID NO: 79849 - protein, 10 aa, synthetic construct
TFFRGDRSVV

SEQ ID NO: 79850 - protein, 10 aa, synthetic construct
EVLRGDRSVV

SEQ ID NO: 79851 - protein, 10 aa, synthetic construct
SWVRGDFNNT

SEQ ID NO: 79852 - protein, 10 aa, synthetic construct
SWVRGDFNNL

SEQ ID NO: 79853 - protein, 10 aa, synthetic construct
SWPRGDFNNT

SEQ ID NO: 79854 - protein, 10 aa, synthetic construct
SWPRGDFNNL

SEQ ID NO: 79855 - protein, 10 aa, synthetic construct
SWLRGDFNNT

SEQ ID NO: 79856 - protein, 10 aa, synthetic construct
SWLRGDFNNL

SEQ ID NO: 79857 - protein, 10 aa, synthetic construct
SWIRGDHVNL

SEQ ID NO: 79858 - protein, 10 aa, synthetic construct
SWIRGDYNSL

SEQ ID NO: 79859 - protein, 10 aa, synthetic construct
SWIRGDYTSM

SEQ ID NO: 79860 - protein, 10 aa, synthetic construct
SWMRGDYNSL

SEQ ID NO: 79861 - protein, 10 aa, synthetic construct
EVLRGDRGVV

SEQ ID NO: 79862 - protein, 10 aa, synthetic construct
SWMRGDYTSM

SEQ ID NO: 79863 - protein, 10 aa, synthetic construct
SWMRGDFQNT

SEQ ID NO: 79864 - protein, 10 aa, synthetic construct
SWWRGDFNNT

SEQ ID NO: 79865 - protein, 10 aa, synthetic construct
SWWRGDFNNL

SEQ ID NO: 79866 - protein, 10 aa, synthetic construct
SWFRGDHVNL

SEQ ID NO: 79867 - protein, 10 aa, synthetic construct
SWFRGDYNSL

SEQ ID NO: 79868 - protein, 10 aa, synthetic construct
SWFRGDYTSM

SEQ ID NO: 79869 - protein, 10 aa, synthetic construct
SWKRGDHVNL

SEQ ID NO: 79870 - protein, 10 aa, synthetic construct
SWKRGDYNSL

SEQ ID NO: 79871 - protein, 10 aa, synthetic construct
SWKRGDYTSM

SEQ ID NO: 79872 - protein, 10 aa, synthetic construct
EVLRGDRSQT

SEQ ID NO: 79873 - protein, 10 aa, synthetic construct
SWRRGDFNNT

SEQ ID NO: 79874 - protein, 10 aa, synthetic construct
SWRRGDFNNL

SEQ ID NO: 79875 - protein, 10 aa, synthetic construct
SWHRGDFQNT

SEQ ID NO: 79876 - protein, 10 aa, synthetic construct
SWSRGDFNNT

SEQ ID NO: 79877 - protein, 10 aa, synthetic construct
SWSRGDFNNL

SEQ ID NO: 79878 - protein, 10 aa, synthetic construct
SWTRGDFQNT

SEQ ID NO: 79879 - protein, 10 aa, synthetic construct
SWYRGDHVNL

SEQ ID NO: 79880 - protein, 10 aa, synthetic construct
SWYRGDYNSL

SEQ ID NO: 79881 - protein, 10 aa, synthetic construct
SWYRGDYTSM

SEQ ID NO: 79882 - protein, 10 aa, synthetic construct
SWNRGDHVNL

SEQ ID NO: 79883 - protein, 10 aa, synthetic construct
EVWRGDRGQI

SEQ ID NO: 79884 - protein, 10 aa, synthetic construct
SWNRGDYNSL

SEQ ID NO: 79885 - protein, 10 aa, synthetic construct
SWNRGDYTSM

SEQ ID NO: 79886 - protein, 10 aa, synthetic construct
SWQRGDFQNT

SEQ ID NO: 79887 - protein, 10 aa, synthetic construct
SWDRGDFQNT

SEQ ID NO: 79888 - protein, 10 aa, synthetic construct
SWERGDFQNT

SEQ ID NO: 79889 - protein, 10 aa, synthetic construct
SFGRGDYNSL

SEQ ID NO: 79890 - protein, 10 aa, synthetic construct
SFGRGDYTSM

SEQ ID NO: 79891 - protein, 10 aa, synthetic construct
SFGRGDFQNT

SEQ ID NO: 79892 - protein, 10 aa, synthetic construct
SFARGDYNSL

SEQ ID NO: 79893 - protein, 10 aa, synthetic construct
SFARGDYTSM

SEQ ID NO: 79894 - protein, 10 aa, synthetic construct
EVWRGDRQGI

SEQ ID NO: 79895 - protein, 10 aa, synthetic construct
SFARGDFQNT

SEQ ID NO: 79896 - protein, 10 aa, synthetic construct
SFVRGDYTSV

SEQ ID NO: 79897 - protein, 10 aa, synthetic construct
SFVRGDLIGR

SEQ ID NO: 79898 - protein, 10 aa, synthetic construct
SFPRGDYNSL

SEQ ID NO: 79899 - protein, 10 aa, synthetic construct
SFPRGDYTSM

SEQ ID NO: 79900 - protein, 10 aa, synthetic construct
SFPRGDFQNT

SEQ ID NO: 79901 - protein, 10 aa, synthetic construct
SFLRGDYTSV

SEQ ID NO: 79902 - protein, 10 aa, synthetic construct
SFLRGDLIGR

SEQ ID NO: 79903 - protein, 10 aa, synthetic construct
SFIRGDHVNL

SEQ ID NO: 79904 - protein, 10 aa, synthetic construct
SFIRGDRDYL

SEQ ID NO: 79905 - protein, 10 aa, synthetic construct
EVWRGDRSVV

SEQ ID NO: 79906 - protein, 10 aa, synthetic construct
SFIRGDYSSV

SEQ ID NO: 79907 - protein, 10 aa, synthetic construct
SFIRGDLTVT

SEQ ID NO: 79908 - protein, 10 aa, synthetic construct
SFMRGDHVNL

SEQ ID NO: 79909 - protein, 10 aa, synthetic construct
SFMRGDRDYL

SEQ ID NO: 79910 - protein, 10 aa, synthetic construct
SFMRGDYSSV

SEQ ID NO: 79911 - protein, 10 aa, synthetic construct
SFMRGDLTVT

SEQ ID NO: 79912 - protein, 10 aa, synthetic construct
SFWRGDYTSV

SEQ ID NO: 79913 - protein, 10 aa, synthetic construct
SFWRGDLIGR

SEQ ID NO: 79914 - protein, 10 aa, synthetic construct
SFKRGDHVNL

SEQ ID NO: 79915 - protein, 10 aa, synthetic construct
SFKRGDRDYL

SEQ ID NO: 79916 - protein, 10 aa, synthetic construct
EVWRGDRGVV

SEQ ID NO: 79917 - protein, 10 aa, synthetic construct
SFKRGDYSSV

SEQ ID NO: 79918 - protein, 10 aa, synthetic construct
SFKRGDLTVT

SEQ ID NO: 79919 - protein, 10 aa, synthetic construct
SFRRGDYNSL

SEQ ID NO: 79920 - protein, 10 aa, synthetic construct
SFRRGDYTSM

SEQ ID NO: 79921 - protein, 10 aa, synthetic construct
SFRRGDFQNT

SEQ ID NO: 79922 - protein, 10 aa, synthetic construct
SFHRGDYTSV

SEQ ID NO: 79923 - protein, 10 aa, synthetic construct
SFHRGDLIGR

SEQ ID NO: 79924 - protein, 10 aa, synthetic construct
SFSRGDYTSV

SEQ ID NO: 79925 - protein, 10 aa, synthetic construct
SFSRGDLIGR

SEQ ID NO: 79926 - protein, 10 aa, synthetic construct
SFTRGDYTSV

SEQ ID NO: 79927 - protein, 10 aa, synthetic construct
EVWRGDRSQT

SEQ ID NO: 79928 - protein, 10 aa, synthetic construct
SFTRGDLIGR

SEQ ID NO: 79929 - protein, 10 aa, synthetic construct
SFYRGDHVNL

SEQ ID NO: 79930 - protein, 10 aa, synthetic construct
SFYRGDRDYL

SEQ ID NO: 79931 - protein, 10 aa, synthetic construct
SFYRGDYSSV

SEQ ID NO: 79932 - protein, 10 aa, synthetic construct
SFYRGDLTVT

SEQ ID NO: 79933 - protein, 10 aa, synthetic construct
SFNRGDHVNL

SEQ ID NO: 79934 - protein, 10 aa, synthetic construct
SFNRGDRDYL

SEQ ID NO: 79935 - protein, 10 aa, synthetic construct
SFNRGDYSSV

SEQ ID NO: 79936 - protein, 10 aa, synthetic construct
SFNRGDLTVT

SEQ ID NO: 79937 - protein, 10 aa, synthetic construct
SFQRGDYTSV

SEQ ID NO: 79938 - protein, 10 aa, synthetic construct
EVRRGDHGVL

SEQ ID NO: 79939 - protein, 10 aa, synthetic construct
SFQRGDLIGR

SEQ ID NO: 79940 - protein, 10 aa, synthetic construct
SFDRGDYTSV

SEQ ID NO: 79941 - protein, 10 aa, synthetic construct
SFDRGDLIGR

SEQ ID NO: 79942 - protein, 10 aa, synthetic construct
SFERGDYTSV

SEQ ID NO: 79943 - protein, 10 aa, synthetic construct
SFERGDLIGR

SEQ ID NO: 79944 - protein, 10 aa, synthetic construct
SKGRGDYNSL

SEQ ID NO: 79945 - protein, 10 aa, synthetic construct
SKGRGDYTSM

SEQ ID NO: 79946 - protein, 10 aa, synthetic construct
SKGRGDFQNT

SEQ ID NO: 79947 - protein, 10 aa, synthetic construct
SKARGDYNSL

SEQ ID NO: 79948 - protein, 10 aa, synthetic construct
SKARGDYTSM

SEQ ID NO: 79949 - protein, 10 aa, synthetic construct
EVRRGDYVGL

SEQ ID NO: 79950 - protein, 10 aa, synthetic construct
SKARGDFQNT

SEQ ID NO: 79951 - protein, 10 aa, synthetic construct
SKVRGDYTSV

SEQ ID NO: 79952 - protein, 10 aa, synthetic construct
SKVRGDLIGR

SEQ ID NO: 79953 - protein, 10 aa, synthetic construct
SKPRGDYNSL

SEQ ID NO: 79954 - protein, 10 aa, synthetic construct
SKPRGDYTSM

SEQ ID NO: 79955 - protein, 10 aa, synthetic construct
SKPRGDFQNT

SEQ ID NO: 79956 - protein, 10 aa, synthetic construct
SKLRGDYTSV

SEQ ID NO: 79957 - protein, 10 aa, synthetic construct
SKLRGDLIGR

SEQ ID NO: 79958 - protein, 10 aa, synthetic construct
SKIRGDHVNL

SEQ ID NO: 79959 - protein, 10 aa, synthetic construct
SKIRGDRDYL

SEQ ID NO: 79960 - protein, 10 aa, synthetic construct
TFFRGDRSQT

SEQ ID NO: 79961 - protein, 10 aa, synthetic construct
EVRRGDQSTL

SEQ ID NO: 79962 - protein, 10 aa, synthetic construct
SKIRGDYSSV

SEQ ID NO: 79963 - protein, 10 aa, synthetic construct
SKIRGDLTVT

SEQ ID NO: 79964 - protein, 10 aa, synthetic construct
SKMRGDHVNL

SEQ ID NO: 79965 - protein, 10 aa, synthetic construct
SKMRGDRDYL

SEQ ID NO: 79966 - protein, 10 aa, synthetic construct
SKMRGDYSSV

SEQ ID NO: 79967 - protein, 10 aa, synthetic construct
SKMRGDLTVT

SEQ ID NO: 79968 - protein, 10 aa, synthetic construct
SKWRGDYTSV

SEQ ID NO: 79969 - protein, 10 aa, synthetic construct
SKWRGDLIGR

SEQ ID NO: 79970 - protein, 10 aa, synthetic construct
SKFRGDHVNL

SEQ ID NO: 79971 - protein, 10 aa, synthetic construct
SKFRGDRDYL

SEQ ID NO: 79972 - protein, 10 aa, synthetic construct
EVRRGDLLLS

SEQ ID NO: 79973 - protein, 10 aa, synthetic construct
SKFRGDYSSV

SEQ ID NO: 79974 - protein, 10 aa, synthetic construct
SKFRGDLTVT

SEQ ID NO: 79975 - protein, 10 aa, synthetic construct
SKRRGDYNSL

SEQ ID NO: 79976 - protein, 10 aa, synthetic construct
SKRRGDYTSM

SEQ ID NO: 79977 - protein, 10 aa, synthetic construct
SKRRGDFQNT

SEQ ID NO: 79978 - protein, 10 aa, synthetic construct
SKHRGDYTSV

SEQ ID NO: 79979 - protein, 10 aa, synthetic construct
SKHRGDLIGR

SEQ ID NO: 79980 - protein, 10 aa, synthetic construct
SKSRGDYTSV

SEQ ID NO: 79981 - protein, 10 aa, synthetic construct
SKSRGDLIGR

SEQ ID NO: 79982 - protein, 10 aa, synthetic construct
SKTRGDYTSV

SEQ ID NO: 79983 - protein, 10 aa, synthetic construct
EVHRGDRGQI

SEQ ID NO: 79984 - protein, 10 aa, synthetic construct
SKTRGDLIGR

SEQ ID NO: 79985 - protein, 10 aa, synthetic construct
SKYRGDHVNL

SEQ ID NO: 79986 - protein, 10 aa, synthetic construct
SKYRGDRDYL

SEQ ID NO: 79987 - protein, 10 aa, synthetic construct
SKYRGDYSSV

SEQ ID NO: 79988 - protein, 10 aa, synthetic construct
SKYRGDLTVT

SEQ ID NO: 79989 - protein, 10 aa, synthetic construct
SKQRGDYTSV

SEQ ID NO: 79990 - protein, 10 aa, synthetic construct
SKQRGDLIGR

SEQ ID NO: 79991 - protein, 10 aa, synthetic construct
SKDRGDYTSV

SEQ ID NO: 79992 - protein, 10 aa, synthetic construct
SKDRGDLIGR

SEQ ID NO: 79993 - protein, 10 aa, synthetic construct
SKERGDYTSV

SEQ ID NO: 79994 - protein, 10 aa, synthetic construct
EVHRGDRQGI

SEQ ID NO: 79995 - protein, 10 aa, synthetic construct
SKERGDLIGR

SEQ ID NO: 79996 - protein, 10 aa, synthetic construct
SRVRGDFNNT

SEQ ID NO: 79997 - protein, 10 aa, synthetic construct
SRVRGDFNNL

SEQ ID NO: 79998 - protein, 10 aa, synthetic construct
SRLRGDFNNT

SEQ ID NO: 79999 - protein, 10 aa, synthetic construct
SRLRGDFNNL

SEQ ID NO: 80000 - protein, 10 aa, synthetic construct
SRIRGDYNSL

SEQ ID NO: 80001 - protein, 10 aa, synthetic construct
SRIRGDYTSM

SEQ ID NO: 80002 - protein, 10 aa, synthetic construct
SRIRGDFQNT

SEQ ID NO: 80003 - protein, 10 aa, synthetic construct
SRMRGDYNSL

SEQ ID NO: 80004 - protein, 10 aa, synthetic construct
SRMRGDYTSM

SEQ ID NO: 80005 - protein, 10 aa, synthetic construct
EVHRGDRSVV

SEQ ID NO: 80006 - protein, 10 aa, synthetic construct
SRMRGDFQNT

SEQ ID NO: 80007 - protein, 10 aa, synthetic construct
SRWRGDFNNT

SEQ ID NO: 80008 - protein, 10 aa, synthetic construct
SRWRGDFNNL

SEQ ID NO: 80009 - protein, 10 aa, synthetic construct
SRFRGDYNSL

SEQ ID NO: 80010 - protein, 10 aa, synthetic construct
SRFRGDYTSM

SEQ ID NO: 80011 - protein, 10 aa, synthetic construct
SRFRGDFQNT

SEQ ID NO: 80012 - protein, 10 aa, synthetic construct
SRKRGDYNSL

SEQ ID NO: 80013 - protein, 10 aa, synthetic construct
SRKRGDYTSM

SEQ ID NO: 80014 - protein, 10 aa, synthetic construct
SRKRGDFQNT

SEQ ID NO: 80015 - protein, 10 aa, synthetic construct
SRHRGDFNNT

SEQ ID NO: 80016 - protein, 10 aa, synthetic construct
EVHRGDRGVV

SEQ ID NO: 80017 - protein, 10 aa, synthetic construct
SRHRGDFNNL

SEQ ID NO: 80018 - protein, 10 aa, synthetic construct
SRSRGDFNNT

SEQ ID NO: 80019 - protein, 10 aa, synthetic construct
SRSRGDFNNL

SEQ ID NO: 80020 - protein, 10 aa, synthetic construct
SRTRGDFNNT

SEQ ID NO: 80021 - protein, 10 aa, synthetic construct
SRTRGDFNNL

SEQ ID NO: 80022 - protein, 10 aa, synthetic construct
SRYRGDYNSL

SEQ ID NO: 80023 - protein, 10 aa, synthetic construct
SRYRGDYTSM

SEQ ID NO: 80024 - protein, 10 aa, synthetic construct
SRYRGDFQNT

SEQ ID NO: 80025 - protein, 10 aa, synthetic construct
SRNRGDYNSL

SEQ ID NO: 80026 - protein, 10 aa, synthetic construct
SRNRGDYTSM

SEQ ID NO: 80027 - protein, 10 aa, synthetic construct
EVHRGDRSQT

SEQ ID NO: 80028 - protein, 10 aa, synthetic construct
SRNRGDFQNT

SEQ ID NO: 80029 - protein, 10 aa, synthetic construct
SRQRGDFNNT

SEQ ID NO: 80030 - protein, 10 aa, synthetic construct
SRQRGDFNNL

SEQ ID NO: 80031 - protein, 10 aa, synthetic construct
SRDRGDFNNT

SEQ ID NO: 80032 - protein, 10 aa, synthetic construct
SRDRGDFNNL

SEQ ID NO: 80033 - protein, 10 aa, synthetic construct
SRERGDFNNT

SEQ ID NO: 80034 - protein, 10 aa, synthetic construct
SRERGDFNNL

SEQ ID NO: 80035 - protein, 10 aa, synthetic construct
SHGRGDFNNT

SEQ ID NO: 80036 - protein, 10 aa, synthetic construct
SHGRGDFNNL

SEQ ID NO: 80037 - protein, 10 aa, synthetic construct
SHARGDFNNT

SEQ ID NO: 80038 - protein, 10 aa, synthetic construct
EVSRGDRGQI

SEQ ID NO: 80039 - protein, 10 aa, synthetic construct
SHARGDFNNL

SEQ ID NO: 80040 - protein, 10 aa, synthetic construct
SHVRGDYNSL

SEQ ID NO: 80041 - protein, 10 aa, synthetic construct
SHVRGDYTSM

SEQ ID NO: 80042 - protein, 10 aa, synthetic construct
SHVRGDFQNT

SEQ ID NO: 80043 - protein, 10 aa, synthetic construct
SHPRGDFNNT

SEQ ID NO: 80044 - protein, 10 aa, synthetic construct
SHPRGDFNNL

SEQ ID NO: 80045 - protein, 10 aa, synthetic construct
SHLRGDYNSL

SEQ ID NO: 80046 - protein, 10 aa, synthetic construct
SHLRGDYTSM

SEQ ID NO: 80047 - protein, 10 aa, synthetic construct
SHLRGDFQNT

SEQ ID NO: 80048 - protein, 10 aa, synthetic construct
SHIRGDYTSV

SEQ ID NO: 80049 - protein, 10 aa, synthetic construct
EVSRGDRQGI

SEQ ID NO: 80050 - protein, 10 aa, synthetic construct
SHIRGDLIGR

SEQ ID NO: 80051 - protein, 10 aa, synthetic construct
SHMRGDYTSV

SEQ ID NO: 80052 - protein, 10 aa, synthetic construct
SHMRGDLIGR

SEQ ID NO: 80053 - protein, 10 aa, synthetic construct
SHWRGDYNSL

SEQ ID NO: 80054 - protein, 10 aa, synthetic construct
SHWRGDYTSM

SEQ ID NO: 80055 - protein, 10 aa, synthetic construct
SHWRGDFQNT

SEQ ID NO: 80056 - protein, 10 aa, synthetic construct
SHFRGDYTSV

SEQ ID NO: 80057 - protein, 10 aa, synthetic construct
SHFRGDLIGR

SEQ ID NO: 80058 - protein, 10 aa, synthetic construct
SHKRGDYTSV

SEQ ID NO: 80059 - protein, 10 aa, synthetic construct
SHKRGDLIGR

SEQ ID NO: 80060 - protein, 10 aa, synthetic construct
EVSRGDRSVV

SEQ ID NO: 80061 - protein, 10 aa, synthetic construct
SHRRGDFNNT

SEQ ID NO: 80062 - protein, 10 aa, synthetic construct
SHRRGDFNNL

SEQ ID NO: 80063 - protein, 10 aa, synthetic construct
SHHRGDYNSL

SEQ ID NO: 80064 - protein, 10 aa, synthetic construct
SHHRGDYTSM

SEQ ID NO: 80065 - protein, 10 aa, synthetic construct
SHHRGDFQNT

SEQ ID NO: 80066 - protein, 10 aa, synthetic construct
SHSRGDYNSL

SEQ ID NO: 80067 - protein, 10 aa, synthetic construct
SHSRGDYTSM

SEQ ID NO: 80068 - protein, 10 aa, synthetic construct
SHSRGDFQNT

SEQ ID NO: 80069 - protein, 10 aa, synthetic construct
SHTRGDYNSL

SEQ ID NO: 80070 - protein, 10 aa, synthetic construct
SHTRGDYTSM

SEQ ID NO: 80071 - protein, 10 aa, synthetic construct
EFFRGDRSVV

SEQ ID NO: 80072 - protein, 10 aa, synthetic construct
EVSRGDRGVV

SEQ ID NO: 80073 - protein, 10 aa, synthetic construct
SHTRGDFQNT

SEQ ID NO: 80074 - protein, 10 aa, synthetic construct
SHYRGDYTSV

SEQ ID NO: 80075 - protein, 10 aa, synthetic construct
SHYRGDLIGR

SEQ ID NO: 80076 - protein, 10 aa, synthetic construct
SHNRGDYTSV

SEQ ID NO: 80077 - protein, 10 aa, synthetic construct
SHNRGDLIGR

SEQ ID NO: 80078 - protein, 10 aa, synthetic construct
SHQRGDYNSL

SEQ ID NO: 80079 - protein, 10 aa, synthetic construct
SHQRGDYTSM

SEQ ID NO: 80080 - protein, 10 aa, synthetic construct
SHQRGDFQNT

SEQ ID NO: 80081 - protein, 10 aa, synthetic construct
SHDRGDYNSL

SEQ ID NO: 80082 - protein, 10 aa, synthetic construct
SHDRGDYTSM

SEQ ID NO: 80083 - protein, 10 aa, synthetic construct
EVSRGDRSQT

SEQ ID NO: 80084 - protein, 10 aa, synthetic construct
SHDRGDFQNT

SEQ ID NO: 80085 - protein, 10 aa, synthetic construct
SHERGDYNSL

SEQ ID NO: 80086 - protein, 10 aa, synthetic construct
SHERGDYTSM

SEQ ID NO: 80087 - protein, 10 aa, synthetic construct
SHERGDFQNT

SEQ ID NO: 80088 - protein, 10 aa, synthetic construct
SSVRGDFNNT

SEQ ID NO: 80089 - protein, 10 aa, synthetic construct
SSVRGDFNNL

SEQ ID NO: 80090 - protein, 10 aa, synthetic construct
SSLRGDFNNT

SEQ ID NO: 80091 - protein, 10 aa, synthetic construct
SSLRGDFNNL

SEQ ID NO: 80092 - protein, 10 aa, synthetic construct
SSIRGDYNSL

SEQ ID NO: 80093 - protein, 10 aa, synthetic construct
SSIRGDYTSM

SEQ ID NO: 80094 - protein, 10 aa, synthetic construct
EVTRGDRGQI

SEQ ID NO: 80095 - protein, 10 aa, synthetic construct
SSIRGDFQNT

SEQ ID NO: 80096 - protein, 10 aa, synthetic construct
SSMRGDYNSL

SEQ ID NO: 80097 - protein, 10 aa, synthetic construct
SSMRGDYTSM

SEQ ID NO: 80098 - protein, 10 aa, synthetic construct
SSMRGDFQNT

SEQ ID NO: 80099 - protein, 10 aa, synthetic construct
SSWRGDFNNT

SEQ ID NO: 80100 - protein, 10 aa, synthetic construct
SSWRGDFNNL

SEQ ID NO: 80101 - protein, 10 aa, synthetic construct
SSFRGDYNSL

SEQ ID NO: 80102 - protein, 10 aa, synthetic construct
SSFRGDYTSM

SEQ ID NO: 80103 - protein, 10 aa, synthetic construct
SSFRGDFQNT

SEQ ID NO: 80104 - protein, 10 aa, synthetic construct
SSKRGDYNSL

SEQ ID NO: 80105 - protein, 10 aa, synthetic construct
EVTRGDRQGI

SEQ ID NO: 80106 - protein, 10 aa, synthetic construct
SSKRGDYTSM

SEQ ID NO: 80107 - protein, 10 aa, synthetic construct
SSKRGDFQNT

SEQ ID NO: 80108 - protein, 10 aa, synthetic construct
SSHRGDFNNT

SEQ ID NO: 80109 - protein, 10 aa, synthetic construct
SSHRGDFNNL

SEQ ID NO: 80110 - protein, 10 aa, synthetic construct
SSSRGDFNNT

SEQ ID NO: 80111 - protein, 10 aa, synthetic construct
SSSRGDFNNL

SEQ ID NO: 80112 - protein, 10 aa, synthetic construct
SSTRGDFNNT

SEQ ID NO: 80113 - protein, 10 aa, synthetic construct
SSTRGDFNNL

SEQ ID NO: 80114 - protein, 10 aa, synthetic construct
SSYRGDYNSL

SEQ ID NO: 80115 - protein, 10 aa, synthetic construct
SSYRGDYTSM

SEQ ID NO: 80116 - protein, 10 aa, synthetic construct
EVTRGDRSVV

SEQ ID NO: 80117 - protein, 10 aa, synthetic construct
SSYRGDFQNT

SEQ ID NO: 80118 - protein, 10 aa, synthetic construct
SSNRGDYNSL

SEQ ID NO: 80119 - protein, 10 aa, synthetic construct
SSNRGDYTSM

SEQ ID NO: 80120 - protein, 10 aa, synthetic construct
SSNRGDFQNT

SEQ ID NO: 80121 - protein, 10 aa, synthetic construct
SSQRGDFNNT

SEQ ID NO: 80122 - protein, 10 aa, synthetic construct
SSQRGDFNNL

SEQ ID NO: 80123 - protein, 10 aa, synthetic construct
SSDRGDFNNT

SEQ ID NO: 80124 - protein, 10 aa, synthetic construct
SSDRGDFNNL

SEQ ID NO: 80125 - protein, 10 aa, synthetic construct
SSERGDFNNT

SEQ ID NO: 80126 - protein, 10 aa, synthetic construct
SSERGDFNNL

SEQ ID NO: 80127 - protein, 10 aa, synthetic construct
EVTRGDRGVV

SEQ ID NO: 80128 - protein, 10 aa, synthetic construct
STGRGDFNNT

SEQ ID NO: 80129 - protein, 10 aa, synthetic construct
STGRGDFNNL

SEQ ID NO: 80130 - protein, 10 aa, synthetic construct
STARGDFNNT

SEQ ID NO: 80131 - protein, 10 aa, synthetic construct
STARGDFNNL

SEQ ID NO: 80132 - protein, 10 aa, synthetic construct
STVRGDYNSL

SEQ ID NO: 80133 - protein, 10 aa, synthetic construct
STVRGDYTSM

SEQ ID NO: 80134 - protein, 10 aa, synthetic construct
STVRGDFQNT

SEQ ID NO: 80135 - protein, 10 aa, synthetic construct
STPRGDFNNT

SEQ ID NO: 80136 - protein, 10 aa, synthetic construct
STPRGDFNNL

SEQ ID NO: 80137 - protein, 10 aa, synthetic construct
STLRGDYNSL

SEQ ID NO: 80138 - protein, 10 aa, synthetic construct
EVTRGDRSQT

SEQ ID NO: 80139 - protein, 10 aa, synthetic construct
STLRGDYTSM

SEQ ID NO: 80140 - protein, 10 aa, synthetic construct
STLRGDFQNT

SEQ ID NO: 80141 - protein, 10 aa, synthetic construct
STIRGDYTSV

SEQ ID NO: 80142 - protein, 10 aa, synthetic construct
STIRGDLIGR

SEQ ID NO: 80143 - protein, 10 aa, synthetic construct
STMRGDYTSV

SEQ ID NO: 80144 - protein, 10 aa, synthetic construct
STMRGDLIGR

SEQ ID NO: 80145 - protein, 10 aa, synthetic construct
STWRGDYNSL

SEQ ID NO: 80146 - protein, 10 aa, synthetic construct
STWRGDYTSM

SEQ ID NO: 80147 - protein, 10 aa, synthetic construct
STWRGDFQNT

SEQ ID NO: 80148 - protein, 10 aa, synthetic construct
STFRGDYTSV

SEQ ID NO: 80149 - protein, 10 aa, synthetic construct
EVQRGDRGQI

SEQ ID NO: 80150 - protein, 10 aa, synthetic construct
STFRGDLIGR

SEQ ID NO: 80151 - protein, 10 aa, synthetic construct
STKRGDYTSV

SEQ ID NO: 80152 - protein, 10 aa, synthetic construct
STKRGDLIGR

SEQ ID NO: 80153 - protein, 10 aa, synthetic construct
STRRGDFNNT

SEQ ID NO: 80154 - protein, 10 aa, synthetic construct
STRRGDFNNL

SEQ ID NO: 80155 - protein, 10 aa, synthetic construct
STHRGDYNSL

SEQ ID NO: 80156 - protein, 10 aa, synthetic construct
STHRGDYTSM

SEQ ID NO: 80157 - protein, 10 aa, synthetic construct
STHRGDFQNT

SEQ ID NO: 80158 - protein, 10 aa, synthetic construct
STSRGDYNSL

SEQ ID NO: 80159 - protein, 10 aa, synthetic construct
STSRGDYTSM

SEQ ID NO: 80160 - protein, 10 aa, synthetic construct
EVQRGDRQGI

SEQ ID NO: 80161 - protein, 10 aa, synthetic construct
STSRGDFQNT

SEQ ID NO: 80162 - protein, 10 aa, synthetic construct
STTRGDYNSL

SEQ ID NO: 80163 - protein, 10 aa, synthetic construct
STTRGDYTSM

SEQ ID NO: 80164 - protein, 10 aa, synthetic construct
STTRGDFQNT

SEQ ID NO: 80165 - protein, 10 aa, synthetic construct
STYRGDYTSV

SEQ ID NO: 80166 - protein, 10 aa, synthetic construct
STYRGDLIGR

SEQ ID NO: 80167 - protein, 10 aa, synthetic construct
STNRGDYTSV

SEQ ID NO: 80168 - protein, 10 aa, synthetic construct
STNRGDLIGR

SEQ ID NO: 80169 - protein, 10 aa, synthetic construct
STQRGDYNSL

SEQ ID NO: 80170 - protein, 10 aa, synthetic construct
STQRGDYTSM

SEQ ID NO: 80171 - protein, 10 aa, synthetic construct
EVQRGDRSVV

SEQ ID NO: 80172 - protein, 10 aa, synthetic construct
STQRGDFQNT

SEQ ID NO: 80173 - protein, 10 aa, synthetic construct
STDRGDYNSL

SEQ ID NO: 80174 - protein, 10 aa, synthetic construct
STDRGDYTSM

SEQ ID NO: 80175 - protein, 10 aa, synthetic construct
STDRGDFQNT

SEQ ID NO: 80176 - protein, 10 aa, synthetic construct
STERGDYNSL

SEQ ID NO: 80177 - protein, 10 aa, synthetic construct
STERGDYTSM

SEQ ID NO: 80178 - protein, 10 aa, synthetic construct
STERGDFQNT

SEQ ID NO: 80179 - protein, 10 aa, synthetic construct
SYGRGDYNSL

SEQ ID NO: 80180 - protein, 10 aa, synthetic construct
SYGRGDYTSM

SEQ ID NO: 80181 - protein, 10 aa, synthetic construct
SYGRGDFQNT

SEQ ID NO: 80182 - protein, 10 aa, synthetic construct
EFFRGDRSQT

SEQ ID NO: 80183 - protein, 10 aa, synthetic construct
EVQRGDRGVV

SEQ ID NO: 80184 - protein, 10 aa, synthetic construct
SYARGDYNSL

SEQ ID NO: 80185 - protein, 10 aa, synthetic construct
SYARGDYTSM

SEQ ID NO: 80186 - protein, 10 aa, synthetic construct
SYARGDFQNT

SEQ ID NO: 80187 - protein, 10 aa, synthetic construct
SYVRGDYTSV

SEQ ID NO: 80188 - protein, 10 aa, synthetic construct
SYVRGDLIGR

SEQ ID NO: 80189 - protein, 10 aa, synthetic construct
SYPRGDYNSL

SEQ ID NO: 80190 - protein, 10 aa, synthetic construct
SYPRGDYTSM

SEQ ID NO: 80191 - protein, 10 aa, synthetic construct
SYPRGDFQNT

SEQ ID NO: 80192 - protein, 10 aa, synthetic construct
SYLRGDYTSV

SEQ ID NO: 80193 - protein, 10 aa, synthetic construct
SYLRGDLIGR

SEQ ID NO: 80194 - protein, 10 aa, synthetic construct
EVQRGDRSQT

SEQ ID NO: 80195 - protein, 10 aa, synthetic construct
SYIRGDHVNL

SEQ ID NO: 80196 - protein, 10 aa, synthetic construct
SYIRGDRDYL

SEQ ID NO: 80197 - protein, 10 aa, synthetic construct
SYIRGDYSSV

SEQ ID NO: 80198 - protein, 10 aa, synthetic construct
SYIRGDLTVT

SEQ ID NO: 80199 - protein, 10 aa, synthetic construct
SYMRGDHVNL

SEQ ID NO: 80200 - protein, 10 aa, synthetic construct
SYMRGDRDYL

SEQ ID NO: 80201 - protein, 10 aa, synthetic construct
SYMRGDYSSV

SEQ ID NO: 80202 - protein, 10 aa, synthetic construct
SYMRGDLTVT

SEQ ID NO: 80203 - protein, 10 aa, synthetic construct
SYWRGDYTSV

SEQ ID NO: 80204 - protein, 10 aa, synthetic construct
SYWRGDLIGR

SEQ ID NO: 80205 - protein, 10 aa, synthetic construct
EVDRGDRGQI

SEQ ID NO: 80206 - protein, 10 aa, synthetic construct
SYFRGDHVNL

SEQ ID NO: 80207 - protein, 10 aa, synthetic construct
SYFRGDRDYL

SEQ ID NO: 80208 - protein, 10 aa, synthetic construct
SYFRGDYSSV

SEQ ID NO: 80209 - protein, 10 aa, synthetic construct
SYFRGDLTVT

SEQ ID NO: 80210 - protein, 10 aa, synthetic construct
SYKRGDHVNL

SEQ ID NO: 80211 - protein, 10 aa, synthetic construct
SYKRGDRDYL

SEQ ID NO: 80212 - protein, 10 aa, synthetic construct
SYKRGDYSSV

SEQ ID NO: 80213 - protein, 10 aa, synthetic construct
SYKRGDLTVT

SEQ ID NO: 80214 - protein, 10 aa, synthetic construct
SYRRGDYNSL

SEQ ID NO: 80215 - protein, 10 aa, synthetic construct
SYRRGDYTSM

SEQ ID NO: 80216 - protein, 10 aa, synthetic construct
EVDRGDRQGI

SEQ ID NO: 80217 - protein, 10 aa, synthetic construct
SYRRGDFQNT

SEQ ID NO: 80218 - protein, 10 aa, synthetic construct
SYHRGDYTSV

SEQ ID NO: 80219 - protein, 10 aa, synthetic construct
SYHRGDLIGR

SEQ ID NO: 80220 - protein, 10 aa, synthetic construct
SYSRGDYTSV

SEQ ID NO: 80221 - protein, 10 aa, synthetic construct
SYSRGDLIGR

SEQ ID NO: 80222 - protein, 10 aa, synthetic construct
SYTRGDYTSV

SEQ ID NO: 80223 - protein, 10 aa, synthetic construct
SYTRGDLIGR

SEQ ID NO: 80224 - protein, 10 aa, synthetic construct
SYYRGDHVNL

SEQ ID NO: 80225 - protein, 10 aa, synthetic construct
SYYRGDRDYL

SEQ ID NO: 80226 - protein, 10 aa, synthetic construct
SYYRGDYSSV

SEQ ID NO: 80227 - protein, 10 aa, synthetic construct
EVDRGDRSVV

SEQ ID NO: 80228 - protein, 10 aa, synthetic construct
SYYRGDLTVT

SEQ ID NO: 80229 - protein, 10 aa, synthetic construct
SYNRGDHVNL

SEQ ID NO: 80230 - protein, 10 aa, synthetic construct
SYNRGDRDYL

SEQ ID NO: 80231 - protein, 10 aa, synthetic construct
SYNRGDYSSV

SEQ ID NO: 80232 - protein, 10 aa, synthetic construct
SYNRGDLTVT

SEQ ID NO: 80233 - protein, 10 aa, synthetic construct
SYQRGDYTSV

SEQ ID NO: 80234 - protein, 10 aa, synthetic construct
SYQRGDLIGR

SEQ ID NO: 80235 - protein, 10 aa, synthetic construct
SYDRGDYTSV

SEQ ID NO: 80236 - protein, 10 aa, synthetic construct
SYDRGDLIGR

SEQ ID NO: 80237 - protein, 10 aa, synthetic construct
SYERGDYTSV

SEQ ID NO: 80238 - protein, 10 aa, synthetic construct
EVDRGDRGVV

SEQ ID NO: 80239 - protein, 10 aa, synthetic construct
SYERGDLIGR

SEQ ID NO: 80240 - protein, 10 aa, synthetic construct
SNGRGDYNSL

SEQ ID NO: 80241 - protein, 10 aa, synthetic construct
SNGRGDYTSM

SEQ ID NO: 80242 - protein, 10 aa, synthetic construct
SNGRGDFQNT

SEQ ID NO: 80243 - protein, 10 aa, synthetic construct
SNARGDYNSL

SEQ ID NO: 80244 - protein, 10 aa, synthetic construct
SNARGDYTSM

SEQ ID NO: 80245 - protein, 10 aa, synthetic construct
SNARGDFQNT

SEQ ID NO: 80246 - protein, 10 aa, synthetic construct
SNVRGDYTSV

SEQ ID NO: 80247 - protein, 10 aa, synthetic construct
SNVRGDLIGR

SEQ ID NO: 80248 - protein, 10 aa, synthetic construct
SNPRGDYNSL

SEQ ID NO: 80249 - protein, 10 aa, synthetic construct
EVDRGDRSQT

SEQ ID NO: 80250 - protein, 10 aa, synthetic construct
SNPRGDYTSM

SEQ ID NO: 80251 - protein, 10 aa, synthetic construct
SNPRGDFQNT

SEQ ID NO: 80252 - protein, 10 aa, synthetic construct
SNLRGDYTSV

SEQ ID NO: 80253 - protein, 10 aa, synthetic construct
SNLRGDLIGR

SEQ ID NO: 80254 - protein, 10 aa, synthetic construct
SNIRGDHVNL

SEQ ID NO: 80255 - protein, 10 aa, synthetic construct
SNIRGDRDYL

SEQ ID NO: 80256 - protein, 10 aa, synthetic construct
SNIRGDYSSV

SEQ ID NO: 80257 - protein, 10 aa, synthetic construct
SNIRGDLTVT

SEQ ID NO: 80258 - protein, 10 aa, synthetic construct
SNMRGDHVNL

SEQ ID NO: 80259 - protein, 10 aa, synthetic construct
SNMRGDRDYL

SEQ ID NO: 80260 - protein, 10 aa, synthetic construct
EVERGDRGQI

SEQ ID NO: 80261 - protein, 10 aa, synthetic construct
SNMRGDYSSV

SEQ ID NO: 80262 - protein, 10 aa, synthetic construct
SNMRGDLTVT

SEQ ID NO: 80263 - protein, 10 aa, synthetic construct
SNWRGDYTSV

SEQ ID NO: 80264 - protein, 10 aa, synthetic construct
SNWRGDLIGR

SEQ ID NO: 80265 - protein, 10 aa, synthetic construct
SNFRGDHVNL

SEQ ID NO: 80266 - protein, 10 aa, synthetic construct
SNFRGDRDYL

SEQ ID NO: 80267 - protein, 10 aa, synthetic construct
SNFRGDYSSV

SEQ ID NO: 80268 - protein, 10 aa, synthetic construct
SNFRGDLTVT

SEQ ID NO: 80269 - protein, 10 aa, synthetic construct
SNKRGDHVNL

SEQ ID NO: 80270 - protein, 10 aa, synthetic construct
SNKRGDRDYL

SEQ ID NO: 80271 - protein, 10 aa, synthetic construct
EVERGDRQGI

SEQ ID NO: 80272 - protein, 10 aa, synthetic construct
SNKRGDYSSV

SEQ ID NO: 80273 - protein, 10 aa, synthetic construct
SNKRGDLTVT

SEQ ID NO: 80274 - protein, 10 aa, synthetic construct
SNRRGDYNSL

SEQ ID NO: 80275 - protein, 10 aa, synthetic construct
SNRRGDYTSM

SEQ ID NO: 80276 - protein, 10 aa, synthetic construct
SNRRGDFQNT

SEQ ID NO: 80277 - protein, 10 aa, synthetic construct
SNHRGDYTSV

SEQ ID NO: 80278 - protein, 10 aa, synthetic construct
SNHRGDLIGR

SEQ ID NO: 80279 - protein, 10 aa, synthetic construct
SNSRGDYTSV

SEQ ID NO: 80280 - protein, 10 aa, synthetic construct
SNSRGDLIGR

SEQ ID NO: 80281 - protein, 10 aa, synthetic construct
SNTRGDYTSV

SEQ ID NO: 80282 - protein, 10 aa, synthetic construct
EVERGDRSVV

SEQ ID NO: 80283 - protein, 10 aa, synthetic construct
SNTRGDLIGR

SEQ ID NO: 80284 - protein, 10 aa, synthetic construct
SNYRGDHVNL

SEQ ID NO: 80285 - protein, 10 aa, synthetic construct
SNYRGDRDYL

SEQ ID NO: 80286 - protein, 10 aa, synthetic construct
SNYRGDYSSV

SEQ ID NO: 80287 - protein, 10 aa, synthetic construct
SNYRGDLTVT

SEQ ID NO: 80288 - protein, 10 aa, synthetic construct
SNNRGDHVNL

SEQ ID NO: 80289 - protein, 10 aa, synthetic construct
SNNRGDRDYL

SEQ ID NO: 80290 - protein, 10 aa, synthetic construct
SNNRGDYSSV

SEQ ID NO: 80291 - protein, 10 aa, synthetic construct
SNNRGDLTVT

SEQ ID NO: 80292 - protein, 10 aa, synthetic construct
SNQRGDYTSV

SEQ ID NO: 80293 - protein, 10 aa, synthetic construct
DFFRGDRSVV

SEQ ID NO: 80294 - protein, 10 aa, synthetic construct
EVERGDRGVV

SEQ ID NO: 80295 - protein, 10 aa, synthetic construct
SNQRGDLIGR

SEQ ID NO: 80296 - protein, 10 aa, synthetic construct
SNDRGDYTSV

SEQ ID NO: 80297 - protein, 10 aa, synthetic construct
SNDRGDLIGR

SEQ ID NO: 80298 - protein, 10 aa, synthetic construct
SNERGDYTSV

SEQ ID NO: 80299 - protein, 10 aa, synthetic construct
SNERGDLIGR

SEQ ID NO: 80300 - protein, 10 aa, synthetic construct
SQGRGDFNNT

SEQ ID NO: 80301 - protein, 10 aa, synthetic construct
SQGRGDFNNL

SEQ ID NO: 80302 - protein, 10 aa, synthetic construct
SQARGDFNNT

SEQ ID NO: 80303 - protein, 10 aa, synthetic construct
SQARGDFNNL

SEQ ID NO: 80304 - protein, 10 aa, synthetic construct
SQVRGDYNSL

SEQ ID NO: 80305 - protein, 10 aa, synthetic construct
EVERGDRSQT

SEQ ID NO: 80306 - protein, 10 aa, synthetic construct
SQVRGDYTSM

SEQ ID NO: 80307 - protein, 10 aa, synthetic construct
SQVRGDFQNT

SEQ ID NO: 80308 - protein, 10 aa, synthetic construct
SQPRGDFNNT

SEQ ID NO: 80309 - protein, 10 aa, synthetic construct
SQPRGDFNNL

SEQ ID NO: 80310 - protein, 10 aa, synthetic construct
SQLRGDYNSL

SEQ ID NO: 80311 - protein, 10 aa, synthetic construct
SQLRGDYTSM

SEQ ID NO: 80312 - protein, 10 aa, synthetic construct
SQLRGDFQNT

SEQ ID NO: 80313 - protein, 10 aa, synthetic construct
SQIRGDYTSV

SEQ ID NO: 80314 - protein, 10 aa, synthetic construct
SQIRGDLIGR

SEQ ID NO: 80315 - protein, 10 aa, synthetic construct
SQMRGDYTSV

SEQ ID NO: 80316 - protein, 10 aa, synthetic construct
EPGRGDHGVL

SEQ ID NO: 80317 - protein, 10 aa, synthetic construct
SQMRGDLIGR

SEQ ID NO: 80318 - protein, 10 aa, synthetic construct
SQWRGDYNSL

SEQ ID NO: 80319 - protein, 10 aa, synthetic construct
SQWRGDYTSM

SEQ ID NO: 80320 - protein, 10 aa, synthetic construct
SQWRGDFQNT

SEQ ID NO: 80321 - protein, 10 aa, synthetic construct
SQFRGDYTSV

SEQ ID NO: 80322 - protein, 10 aa, synthetic construct
SQFRGDLIGR

SEQ ID NO: 80323 - protein, 10 aa, synthetic construct
SQKRGDYTSV

SEQ ID NO: 80324 - protein, 10 aa, synthetic construct
SQKRGDLIGR

SEQ ID NO: 80325 - protein, 10 aa, synthetic construct
SQRRGDFNNT

SEQ ID NO: 80326 - protein, 10 aa, synthetic construct
SQRRGDFNNL

SEQ ID NO: 80327 - protein, 10 aa, synthetic construct
EPGRGDYVGL

SEQ ID NO: 80328 - protein, 10 aa, synthetic construct
SQHRGDYNSL

SEQ ID NO: 80329 - protein, 10 aa, synthetic construct
SQHRGDYTSM

SEQ ID NO: 80330 - protein, 10 aa, synthetic construct
SQHRGDFQNT

SEQ ID NO: 80331 - protein, 10 aa, synthetic construct
SQSRGDYNSL

SEQ ID NO: 80332 - protein, 10 aa, synthetic construct
SQSRGDYTSM

SEQ ID NO: 80333 - protein, 10 aa, synthetic construct
SQSRGDFQNT

SEQ ID NO: 80334 - protein, 10 aa, synthetic construct
SQTRGDYNSL

SEQ ID NO: 80335 - protein, 10 aa, synthetic construct
SQTRGDYTSM

SEQ ID NO: 80336 - protein, 10 aa, synthetic construct
SQTRGDFQNT

SEQ ID NO: 80337 - protein, 10 aa, synthetic construct
SQYRGDYTSV

SEQ ID NO: 80338 - protein, 10 aa, synthetic construct
EPGRGDQSTL

SEQ ID NO: 80339 - protein, 10 aa, synthetic construct
SQYRGDLIGR

SEQ ID NO: 80340 - protein, 10 aa, synthetic construct
SQNRGDYTSV

SEQ ID NO: 80341 - protein, 10 aa, synthetic construct
SQNRGDLIGR

SEQ ID NO: 80342 - protein, 10 aa, synthetic construct
SQQRGDYNSL

SEQ ID NO: 80343 - protein, 10 aa, synthetic construct
SQQRGDYTSM

SEQ ID NO: 80344 - protein, 10 aa, synthetic construct
SQQRGDFQNT

SEQ ID NO: 80345 - protein, 10 aa, synthetic construct
SQDRGDYNSL

SEQ ID NO: 80346 - protein, 10 aa, synthetic construct
SQDRGDYTSM

SEQ ID NO: 80347 - protein, 10 aa, synthetic construct
SQDRGDFQNT

SEQ ID NO: 80348 - protein, 10 aa, synthetic construct
SQERGDYNSL

SEQ ID NO: 80349 - protein, 10 aa, synthetic construct
EPGRGDLLLS

SEQ ID NO: 80350 - protein, 10 aa, synthetic construct
SQERGDYTSM

SEQ ID NO: 80351 - protein, 10 aa, synthetic construct
SQERGDFQNT

SEQ ID NO: 80352 - protein, 10 aa, synthetic construct
SDGRGDFNNT

SEQ ID NO: 80353 - protein, 10 aa, synthetic construct
SDGRGDFNNL

SEQ ID NO: 80354 - protein, 10 aa, synthetic construct
SDARGDFNNT

SEQ ID NO: 80355 - protein, 10 aa, synthetic construct
SDARGDFNNL

SEQ ID NO: 80356 - protein, 10 aa, synthetic construct
SDVRGDYNSL

SEQ ID NO: 80357 - protein, 10 aa, synthetic construct
SDVRGDYTSM

SEQ ID NO: 80358 - protein, 10 aa, synthetic construct
SDVRGDFQNT

SEQ ID NO: 80359 - protein, 10 aa, synthetic construct
SDPRGDFNNT

SEQ ID NO: 80360 - protein, 10 aa, synthetic construct
EPARGDHGVL

SEQ ID NO: 80361 - protein, 10 aa, synthetic construct
SDPRGDFNNL

SEQ ID NO: 80362 - protein, 10 aa, synthetic construct
SDLRGDYNSL

SEQ ID NO: 80363 - protein, 10 aa, synthetic construct
SDLRGDYTSM

SEQ ID NO: 80364 - protein, 10 aa, synthetic construct
SDLRGDFQNT

SEQ ID NO: 80365 - protein, 10 aa, synthetic construct
SDIRGDYTSV

SEQ ID NO: 80366 - protein, 10 aa, synthetic construct
SDIRGDLIGR

SEQ ID NO: 80367 - protein, 10 aa, synthetic construct
SDMRGDYTSV

SEQ ID NO: 80368 - protein, 10 aa, synthetic construct
SDMRGDLIGR

SEQ ID NO: 80369 - protein, 10 aa, synthetic construct
SDWRGDYNSL

SEQ ID NO: 80370 - protein, 10 aa, synthetic construct
SDWRGDYTSM

SEQ ID NO: 80371 - protein, 10 aa, synthetic construct
EPARGDYVGL

SEQ ID NO: 80372 - protein, 10 aa, synthetic construct
SDWRGDFQNT

SEQ ID NO: 80373 - protein, 10 aa, synthetic construct
SDFRGDYTSV

SEQ ID NO: 80374 - protein, 10 aa, synthetic construct
SDFRGDLIGR

SEQ ID NO: 80375 - protein, 10 aa, synthetic construct
SDKRGDYTSV

SEQ ID NO: 80376 - protein, 10 aa, synthetic construct
SDKRGDLIGR

SEQ ID NO: 80377 - protein, 10 aa, synthetic construct
SDRRGDFNNT

SEQ ID NO: 80378 - protein, 10 aa, synthetic construct
SDRRGDFNNL

SEQ ID NO: 80379 - protein, 10 aa, synthetic construct
SDHRGDYNSL

SEQ ID NO: 80380 - protein, 10 aa, synthetic construct
SDHRGDYTSM

SEQ ID NO: 80381 - protein, 10 aa, synthetic construct
SDHRGDFQNT

SEQ ID NO: 80382 - protein, 10 aa, synthetic construct
EPARGDQSTL

SEQ ID NO: 80383 - protein, 10 aa, synthetic construct
SDSRGDYNSL

SEQ ID NO: 80384 - protein, 10 aa, synthetic construct
SDSRGDYTSM

SEQ ID NO: 80385 - protein, 10 aa, synthetic construct
SDSRGDFQNT

SEQ ID NO: 80386 - protein, 10 aa, synthetic construct
SDTRGDYNSL

SEQ ID NO: 80387 - protein, 10 aa, synthetic construct
SDTRGDYTSM

SEQ ID NO: 80388 - protein, 10 aa, synthetic construct
SDTRGDFQNT

SEQ ID NO: 80389 - protein, 10 aa, synthetic construct
SDYRGDYTSV

SEQ ID NO: 80390 - protein, 10 aa, synthetic construct
SDYRGDLIGR

SEQ ID NO: 80391 - protein, 10 aa, synthetic construct
SDNRGDYTSV

SEQ ID NO: 80392 - protein, 10 aa, synthetic construct
SDNRGDLIGR

SEQ ID NO: 80393 - protein, 10 aa, synthetic construct
EPARGDLLLS

SEQ ID NO: 80394 - protein, 10 aa, synthetic construct
SDQRGDYNSL

SEQ ID NO: 80395 - protein, 10 aa, synthetic construct
SDQRGDYTSM

SEQ ID NO: 80396 - protein, 10 aa, synthetic construct
SDQRGDFQNT

SEQ ID NO: 80397 - protein, 10 aa, synthetic construct
SDDRGDYNSL

SEQ ID NO: 80398 - protein, 10 aa, synthetic construct
SDDRGDYTSM

SEQ ID NO: 80399 - protein, 10 aa, synthetic construct
SDDRGDFQNT

SEQ ID NO: 80400 - protein, 10 aa, synthetic construct
SDERGDYNSL

SEQ ID NO: 80401 - protein, 10 aa, synthetic construct
SDERGDYTSM

SEQ ID NO: 80402 - protein, 10 aa, synthetic construct
SDERGDFQNT

SEQ ID NO: 80403 - protein, 10 aa, synthetic construct
SEGRGDFNNT

SEQ ID NO: 80404 - protein, 10 aa, synthetic construct
DFFRGDRSQT

SEQ ID NO: 80405 - protein, 10 aa, synthetic construct
EPVRGDRGQI

SEQ ID NO: 80406 - protein, 10 aa, synthetic construct
SEGRGDFNNL

SEQ ID NO: 80407 - protein, 10 aa, synthetic construct
SEARGDFNNT

SEQ ID NO: 80408 - protein, 10 aa, synthetic construct
SEARGDFNNL

SEQ ID NO: 80409 - protein, 10 aa, synthetic construct
SEVRGDYNSL

SEQ ID NO: 80410 - protein, 10 aa, synthetic construct
SEVRGDYTSM

SEQ ID NO: 80411 - protein, 10 aa, synthetic construct
SEVRGDFQNT

SEQ ID NO: 80412 - protein, 10 aa, synthetic construct
SEPRGDFNNT

SEQ ID NO: 80413 - protein, 10 aa, synthetic construct
SEPRGDFNNL

SEQ ID NO: 80414 - protein, 10 aa, synthetic construct
SELRGDYNSL

SEQ ID NO: 80415 - protein, 10 aa, synthetic construct
SELRGDYTSM

SEQ ID NO: 80416 - protein, 10 aa, synthetic construct
EPVRGDRQGI

SEQ ID NO: 80417 - protein, 10 aa, synthetic construct
SELRGDFQNT

SEQ ID NO: 80418 - protein, 10 aa, synthetic construct
SEIRGDYTSV

SEQ ID NO: 80419 - protein, 10 aa, synthetic construct
SEIRGDLIGR

SEQ ID NO: 80420 - protein, 10 aa, synthetic construct
SEMRGDYTSV

SEQ ID NO: 80421 - protein, 10 aa, synthetic construct
SEMRGDLIGR

SEQ ID NO: 80422 - protein, 10 aa, synthetic construct
SEWRGDYNSL

SEQ ID NO: 80423 - protein, 10 aa, synthetic construct
SEWRGDYTSM

SEQ ID NO: 80424 - protein, 10 aa, synthetic construct
SEWRGDFQNT

SEQ ID NO: 80425 - protein, 10 aa, synthetic construct
SEFRGDYTSV

SEQ ID NO: 80426 - protein, 10 aa, synthetic construct
SEFRGDLIGR

SEQ ID NO: 80427 - protein, 10 aa, synthetic construct
EPVRGDRSVV

SEQ ID NO: 80428 - protein, 10 aa, synthetic construct
SEKRGDYTSV

SEQ ID NO: 80429 - protein, 10 aa, synthetic construct
SEKRGDLIGR

SEQ ID NO: 80430 - protein, 10 aa, synthetic construct
SERRGDFNNT

SEQ ID NO: 80431 - protein, 10 aa, synthetic construct
SERRGDFNNL

SEQ ID NO: 80432 - protein, 10 aa, synthetic construct
SEHRGDYNSL

SEQ ID NO: 80433 - protein, 10 aa, synthetic construct
SEHRGDYTSM

SEQ ID NO: 80434 - protein, 10 aa, synthetic construct
SEHRGDFQNT

SEQ ID NO: 80435 - protein, 10 aa, synthetic construct
SESRGDYNSL

SEQ ID NO: 80436 - protein, 10 aa, synthetic construct
SESRGDYTSM

SEQ ID NO: 80437 - protein, 10 aa, synthetic construct
SESRGDFQNT

SEQ ID NO: 80438 - protein, 10 aa, synthetic construct
EPVRGDRGVV

SEQ ID NO: 80439 - protein, 10 aa, synthetic construct
SETRGDYNSL

SEQ ID NO: 80440 - protein, 10 aa, synthetic construct
SETRGDYTSM

SEQ ID NO: 80441 - protein, 10 aa, synthetic construct
SETRGDFQNT

SEQ ID NO: 80442 - protein, 10 aa, synthetic construct
SEYRGDYTSV

SEQ ID NO: 80443 - protein, 10 aa, synthetic construct
SEYRGDLIGR

SEQ ID NO: 80444 - protein, 10 aa, synthetic construct
SENRGDYTSV

SEQ ID NO: 80445 - protein, 10 aa, synthetic construct
SENRGDLIGR

SEQ ID NO: 80446 - protein, 10 aa, synthetic construct
SEQRGDYNSL

SEQ ID NO: 80447 - protein, 10 aa, synthetic construct
SEQRGDYTSM

SEQ ID NO: 80448 - protein, 10 aa, synthetic construct
SEQRGDFQNT

SEQ ID NO: 80449 - protein, 10 aa, synthetic construct
EPVRGDRSQT

SEQ ID NO: 80450 - protein, 10 aa, synthetic construct
SEDRGDYNSL

SEQ ID NO: 80451 - protein, 10 aa, synthetic construct
SEDRGDYTSM

SEQ ID NO: 80452 - protein, 10 aa, synthetic construct
SEDRGDFQNT

SEQ ID NO: 80453 - protein, 10 aa, synthetic construct
SEERGDYNSL

SEQ ID NO: 80454 - protein, 10 aa, synthetic construct
SEERGDYTSM

SEQ ID NO: 80455 - protein, 10 aa, synthetic construct
SEERGDFQNT

SEQ ID NO: 80456 - protein, 10 aa, synthetic construct
TGVRGDFNNT

SEQ ID NO: 80457 - protein, 10 aa, synthetic construct
TGVRGDFNNL

SEQ ID NO: 80458 - protein, 10 aa, synthetic construct
TGLRGDFNNT

SEQ ID NO: 80459 - protein, 10 aa, synthetic construct
TGLRGDFNNL

SEQ ID NO: 80460 - protein, 10 aa, synthetic construct
EPPRGDHGVL

SEQ ID NO: 80461 - protein, 10 aa, synthetic construct
TGIRGDYNSL

SEQ ID NO: 80462 - protein, 10 aa, synthetic construct
TGIRGDYTSM

SEQ ID NO: 80463 - protein, 10 aa, synthetic construct
TGIRGDFQNT

SEQ ID NO: 80464 - protein, 10 aa, synthetic construct
TGMRGDYNSL

SEQ ID NO: 80465 - protein, 10 aa, synthetic construct
TGMRGDYTSM

SEQ ID NO: 80466 - protein, 10 aa, synthetic construct
TGMRGDFQNT

SEQ ID NO: 80467 - protein, 10 aa, synthetic construct
TGWRGDFNNT

SEQ ID NO: 80468 - protein, 10 aa, synthetic construct
TGWRGDFNNL

SEQ ID NO: 80469 - protein, 10 aa, synthetic construct
TGFRGDYNSL

SEQ ID NO: 80470 - protein, 10 aa, synthetic construct
TGFRGDYTSM

SEQ ID NO: 80471 - protein, 10 aa, synthetic construct
EPPRGDYVGL

SEQ ID NO: 80472 - protein, 10 aa, synthetic construct
TGFRGDFQNT

SEQ ID NO: 80473 - protein, 10 aa, synthetic construct
TGKRGDYNSL

SEQ ID NO: 80474 - protein, 10 aa, synthetic construct
TGKRGDYTSM

SEQ ID NO: 80475 - protein, 10 aa, synthetic construct
TGKRGDFQNT

SEQ ID NO: 80476 - protein, 10 aa, synthetic construct
TGHRGDFNNT

SEQ ID NO: 80477 - protein, 10 aa, synthetic construct
TGHRGDFNNL

SEQ ID NO: 80478 - protein, 10 aa, synthetic construct
TGSRGDFNNT

SEQ ID NO: 80479 - protein, 10 aa, synthetic construct
TGSRGDFNNL

SEQ ID NO: 80480 - protein, 10 aa, synthetic construct
TGTRGDFNNT

SEQ ID NO: 80481 - protein, 10 aa, synthetic construct
TGTRGDFNNL

SEQ ID NO: 80482 - protein, 10 aa, synthetic construct
EPPRGDQSTL

SEQ ID NO: 80483 - protein, 10 aa, synthetic construct
TGYRGDYNSL

SEQ ID NO: 80484 - protein, 10 aa, synthetic construct
TGYRGDYTSM

SEQ ID NO: 80485 - protein, 10 aa, synthetic construct
TGYRGDFQNT

SEQ ID NO: 80486 - protein, 10 aa, synthetic construct
TGNRGDYNSL

SEQ ID NO: 80487 - protein, 10 aa, synthetic construct
TGNRGDYTSM

SEQ ID NO: 80488 - protein, 10 aa, synthetic construct
TGNRGDFQNT

SEQ ID NO: 80489 - protein, 10 aa, synthetic construct
TGQRGDFNNT

SEQ ID NO: 80490 - protein, 10 aa, synthetic construct
TGQRGDFNNL

SEQ ID NO: 80491 - protein, 10 aa, synthetic construct
TGDRGDFNNT

SEQ ID NO: 80492 - protein, 10 aa, synthetic construct
TGDRGDFNNL

SEQ ID NO: 80493 - protein, 10 aa, synthetic construct
EPPRGDLLLS

SEQ ID NO: 80494 - protein, 10 aa, synthetic construct
TGERGDFNNT

SEQ ID NO: 80495 - protein, 10 aa, synthetic construct
TGERGDFNNL

SEQ ID NO: 80496 - protein, 10 aa, synthetic construct
TAVRGDFNNT

SEQ ID NO: 80497 - protein, 10 aa, synthetic construct
TAVRGDFNNL

SEQ ID NO: 80498 - protein, 10 aa, synthetic construct
TALRGDFNNT

SEQ ID NO: 80499 - protein, 10 aa, synthetic construct
TALRGDFNNL

SEQ ID NO: 80500 - protein, 10 aa, synthetic construct
TAIRGDYNSL

SEQ ID NO: 80501 - protein, 10 aa, synthetic construct
TAIRGDYTSM

SEQ ID NO: 80502 - protein, 10 aa, synthetic construct
TAIRGDFQNT

SEQ ID NO: 80503 - protein, 10 aa, synthetic construct
TAMRGDYNSL

SEQ ID NO: 80504 - protein, 10 aa, synthetic construct
EPLRGDRGQI

SEQ ID NO: 80505 - protein, 10 aa, synthetic construct
TAMRGDYTSM

SEQ ID NO: 80506 - protein, 10 aa, synthetic construct
TAMRGDFQNT

SEQ ID NO: 80507 - protein, 10 aa, synthetic construct
TAWRGDFNNT

SEQ ID NO: 80508 - protein, 10 aa, synthetic construct
TAWRGDFNNL

SEQ ID NO: 80509 - protein, 10 aa, synthetic construct
TAFRGDYNSL

SEQ ID NO: 80510 - protein, 10 aa, synthetic construct
TAFRGDYTSM

SEQ ID NO: 80511 - protein, 10 aa, synthetic construct
TAFRGDFQNT

SEQ ID NO: 80512 - protein, 10 aa, synthetic construct
TAKRGDYNSL

SEQ ID NO: 80513 - protein, 10 aa, synthetic construct
TAKRGDYTSM

SEQ ID NO: 80514 - protein, 10 aa, synthetic construct
TAKRGDFQNT

SEQ ID NO: 80515 - protein, 10 aa, synthetic construct
QFFRGDRSVV

SEQ ID NO: 80516 - protein, 10 aa, synthetic construct
EPLRGDRQGI

SEQ ID NO: 80517 - protein, 10 aa, synthetic construct
TAHRGDFNNT

SEQ ID NO: 80518 - protein, 10 aa, synthetic construct
TAHRGDFNNL

SEQ ID NO: 80519 - protein, 10 aa, synthetic construct
TASRGDFNNT

SEQ ID NO: 80520 - protein, 10 aa, synthetic construct
TASRGDFNNL

SEQ ID NO: 80521 - protein, 10 aa, synthetic construct
TATRGDFNNT

SEQ ID NO: 80522 - protein, 10 aa, synthetic construct
TATRGDFNNL

SEQ ID NO: 80523 - protein, 10 aa, synthetic construct
TAYRGDYNSL

SEQ ID NO: 80524 - protein, 10 aa, synthetic construct
TAYRGDYTSM

SEQ ID NO: 80525 - protein, 10 aa, synthetic construct
TAYRGDFQNT

SEQ ID NO: 80526 - protein, 10 aa, synthetic construct
TANRGDYNSL

SEQ ID NO: 80527 - protein, 10 aa, synthetic construct
EPLRGDRSVV

SEQ ID NO: 80528 - protein, 10 aa, synthetic construct
TANRGDYTSM

SEQ ID NO: 80529 - protein, 10 aa, synthetic construct
TANRGDFQNT

SEQ ID NO: 80530 - protein, 10 aa, synthetic construct
TAQRGDFNNT

SEQ ID NO: 80531 - protein, 10 aa, synthetic construct
TAQRGDFNNL

SEQ ID NO: 80532 - protein, 10 aa, synthetic construct
TADRGDFNNT

SEQ ID NO: 80533 - protein, 10 aa, synthetic construct
TADRGDFNNL

SEQ ID NO: 80534 - protein, 10 aa, synthetic construct
TAERGDFNNT

SEQ ID NO: 80535 - protein, 10 aa, synthetic construct
TAERGDFNNL

SEQ ID NO: 80536 - protein, 10 aa, synthetic construct
TVVRGDFNNT

SEQ ID NO: 80537 - protein, 10 aa, synthetic construct
TVVRGDFNNL

SEQ ID NO: 80538 - protein, 10 aa, synthetic construct
EPLRGDRGVV

SEQ ID NO: 80539 - protein, 10 aa, synthetic construct
TVLRGDFNNT

SEQ ID NO: 80540 - protein, 10 aa, synthetic construct
TVLRGDFNNL

SEQ ID NO: 80541 - protein, 10 aa, synthetic construct
TVIRGDYNSL

SEQ ID NO: 80542 - protein, 10 aa, synthetic construct
TVIRGDYTSM

SEQ ID NO: 80543 - protein, 10 aa, synthetic construct
TVIRGDFQNT

SEQ ID NO: 80544 - protein, 10 aa, synthetic construct
TVMRGDYNSL

SEQ ID NO: 80545 - protein, 10 aa, synthetic construct
TVMRGDYTSM

SEQ ID NO: 80546 - protein, 10 aa, synthetic construct
TVMRGDFQNT

SEQ ID NO: 80547 - protein, 10 aa, synthetic construct
TVWRGDFNNT

SEQ ID NO: 80548 - protein, 10 aa, synthetic construct
TVWRGDFNNL

SEQ ID NO: 80549 - protein, 10 aa, synthetic construct
EPLRGDRSQT

SEQ ID NO: 80550 - protein, 10 aa, synthetic construct
TVFRGDYNSL

SEQ ID NO: 80551 - protein, 10 aa, synthetic construct
TVFRGDYTSM

SEQ ID NO: 80552 - protein, 10 aa, synthetic construct
TVFRGDFQNT

SEQ ID NO: 80553 - protein, 10 aa, synthetic construct
TVKRGDYNSL

SEQ ID NO: 80554 - protein, 10 aa, synthetic construct
TVKRGDYTSM

SEQ ID NO: 80555 - protein, 10 aa, synthetic construct
TVKRGDFQNT

SEQ ID NO: 80556 - protein, 10 aa, synthetic construct
TVHRGDFNNT

SEQ ID NO: 80557 - protein, 10 aa, synthetic construct
TVHRGDFNNL

SEQ ID NO: 80558 - protein, 10 aa, synthetic construct
TVSRGDFNNT

SEQ ID NO: 80559 - protein, 10 aa, synthetic construct
TVSRGDFNNL

SEQ ID NO: 80560 - protein, 10 aa, synthetic construct
EPWRGDRGQI

SEQ ID NO: 80561 - protein, 10 aa, synthetic construct
TVTRGDFNNT

SEQ ID NO: 80562 - protein, 10 aa, synthetic construct
TVTRGDFNNL

SEQ ID NO: 80563 - protein, 10 aa, synthetic construct
TVYRGDYNSL

SEQ ID NO: 80564 - protein, 10 aa, synthetic construct
TVYRGDYTSM

SEQ ID NO: 80565 - protein, 10 aa, synthetic construct
TVYRGDFQNT

SEQ ID NO: 80566 - protein, 10 aa, synthetic construct
TVNRGDYNSL

SEQ ID NO: 80567 - protein, 10 aa, synthetic construct
TVNRGDYTSM

SEQ ID NO: 80568 - protein, 10 aa, synthetic construct
TVNRGDFQNT

SEQ ID NO: 80569 - protein, 10 aa, synthetic construct
TVQRGDFNNT

SEQ ID NO: 80570 - protein, 10 aa, synthetic construct
TVQRGDFNNL

SEQ ID NO: 80571 - protein, 10 aa, synthetic construct
EPWRGDRQGI

SEQ ID NO: 80572 - protein, 10 aa, synthetic construct
TVDRGDFNNT

SEQ ID NO: 80573 - protein, 10 aa, synthetic construct
TVDRGDFNNL

SEQ ID NO: 80574 - protein, 10 aa, synthetic construct
TVERGDFNNT

SEQ ID NO: 80575 - protein, 10 aa, synthetic construct
TVERGDFNNL

SEQ ID NO: 80576 - protein, 10 aa, synthetic construct
TPVRGDFNNT

SEQ ID NO: 80577 - protein, 10 aa, synthetic construct
TPVRGDFNNL

SEQ ID NO: 80578 - protein, 10 aa, synthetic construct
TPLRGDFNNT

SEQ ID NO: 80579 - protein, 10 aa, synthetic construct
TPLRGDFNNL

SEQ ID NO: 80580 - protein, 10 aa, synthetic construct
TPIRGDYNSL

SEQ ID NO: 80581 - protein, 10 aa, synthetic construct
TPIRGDYTSM

SEQ ID NO: 80582 - protein, 10 aa, synthetic construct
EPWRGDRSVV

SEQ ID NO: 80583 - protein, 10 aa, synthetic construct
TPIRGDFQNT

SEQ ID NO: 80584 - protein, 10 aa, synthetic construct
TPMRGDYNSL

SEQ ID NO: 80585 - protein, 10 aa, synthetic construct
TPMRGDYTSM

SEQ ID NO: 80586 - protein, 10 aa, synthetic construct
TPMRGDFQNT

SEQ ID NO: 80587 - protein, 10 aa, synthetic construct
TPWRGDFNNT

SEQ ID NO: 80588 - protein, 10 aa, synthetic construct
TPWRGDFNNL

SEQ ID NO: 80589 - protein, 10 aa, synthetic construct
TPFRGDYNSL

SEQ ID NO: 80590 - protein, 10 aa, synthetic construct
TPFRGDYTSM

SEQ ID NO: 80591 - protein, 10 aa, synthetic construct
TPFRGDFQNT

SEQ ID NO: 80592 - protein, 10 aa, synthetic construct
TPKRGDYNSL

SEQ ID NO: 80593 - protein, 10 aa, synthetic construct
EPWRGDRGVV

SEQ ID NO: 80594 - protein, 10 aa, synthetic construct
TPKRGDYTSM

SEQ ID NO: 80595 - protein, 10 aa, synthetic construct
TPKRGDFQNT

SEQ ID NO: 80596 - protein, 10 aa, synthetic construct
TPHRGDFNNT

SEQ ID NO: 80597 - protein, 10 aa, synthetic construct
TPHRGDFNNL

SEQ ID NO: 80598 - protein, 10 aa, synthetic construct
TPSRGDFNNT

SEQ ID NO: 80599 - protein, 10 aa, synthetic construct
TPSRGDFNNL

SEQ ID NO: 80600 - protein, 10 aa, synthetic construct
TPTRGDFNNT

SEQ ID NO: 80601 - protein, 10 aa, synthetic construct
TPTRGDFNNL

SEQ ID NO: 80602 - protein, 10 aa, synthetic construct
TPYRGDYNSL

SEQ ID NO: 80603 - protein, 10 aa, synthetic construct
TPYRGDYTSM

SEQ ID NO: 80604 - protein, 10 aa, synthetic construct
EPWRGDRSQT

SEQ ID NO: 80605 - protein, 10 aa, synthetic construct
TPYRGDFQNT

SEQ ID NO: 80606 - protein, 10 aa, synthetic construct
TPNRGDYNSL

SEQ ID NO: 80607 - protein, 10 aa, synthetic construct
TPNRGDYTSM

SEQ ID NO: 80608 - protein, 10 aa, synthetic construct
TPNRGDFQNT

SEQ ID NO: 80609 - protein, 10 aa, synthetic construct
TPQRGDFNNT

SEQ ID NO: 80610 - protein, 10 aa, synthetic construct
TPQRGDFNNL

SEQ ID NO: 80611 - protein, 10 aa, synthetic construct
TPDRGDFNNT

SEQ ID NO: 80612 - protein, 10 aa, synthetic construct
TPDRGDFNNL

SEQ ID NO: 80613 - protein, 10 aa, synthetic construct
TPERGDFNNT

SEQ ID NO: 80614 - protein, 10 aa, synthetic construct
TPERGDFNNL

SEQ ID NO: 80615 - protein, 10 aa, synthetic construct
EPRRGDHGVL

SEQ ID NO: 80616 - protein, 10 aa, synthetic construct
TLVRGDFNNT

SEQ ID NO: 80617 - protein, 10 aa, synthetic construct
TLVRGDFNNL

SEQ ID NO: 80618 - protein, 10 aa, synthetic construct
TLLRGDFNNT

SEQ ID NO: 80619 - protein, 10 aa, synthetic construct
TLLRGDFNNL

SEQ ID NO: 80620 - protein, 10 aa, synthetic construct
TLIRGDYNSL

SEQ ID NO: 80621 - protein, 10 aa, synthetic construct
TLIRGDYTSM

SEQ ID NO: 80622 - protein, 10 aa, synthetic construct
TLIRGDFQNT

SEQ ID NO: 80623 - protein, 10 aa, synthetic construct
TLMRGDYNSL

SEQ ID NO: 80624 - protein, 10 aa, synthetic construct
TLMRGDYTSM

SEQ ID NO: 80625 - protein, 10 aa, synthetic construct
TLMRGDFQNT

SEQ ID NO: 80626 - protein, 10 aa, synthetic construct
TKKRGDRQGI

SEQ ID NO: 80627 - protein, 10 aa, synthetic construct
QFFRGDRSQT

SEQ ID NO: 80628 - protein, 10 aa, synthetic construct
EPRRGDYVGL

SEQ ID NO: 80629 - protein, 10 aa, synthetic construct
TLWRGDFNNT

SEQ ID NO: 80630 - protein, 10 aa, synthetic construct
TLWRGDFNNL

SEQ ID NO: 80631 - protein, 10 aa, synthetic construct
TLFRGDYNSL

SEQ ID NO: 80632 - protein, 10 aa, synthetic construct
TLFRGDYTSM

SEQ ID NO: 80633 - protein, 10 aa, synthetic construct
TLFRGDFQNT

SEQ ID NO: 80634 - protein, 10 aa, synthetic construct
TLKRGDYNSL

SEQ ID NO: 80635 - protein, 10 aa, synthetic construct
TLKRGDYTSM

SEQ ID NO: 80636 - protein, 10 aa, synthetic construct
TLKRGDFQNT

SEQ ID NO: 80637 - protein, 10 aa, synthetic construct
TLHRGDFNNT

SEQ ID NO: 80638 - protein, 10 aa, synthetic construct
TLHRGDFNNL

SEQ ID NO: 80639 - protein, 10 aa, synthetic construct
EPRRGDQSTL

SEQ ID NO: 80640 - protein, 10 aa, synthetic construct
TLSRGDFNNT

SEQ ID NO: 80641 - protein, 10 aa, synthetic construct
TLSRGDFNNL

SEQ ID NO: 80642 - protein, 10 aa, synthetic construct
TLTRGDFNNT

SEQ ID NO: 80643 - protein, 10 aa, synthetic construct
TLTRGDFNNL

SEQ ID NO: 80644 - protein, 10 aa, synthetic construct
TLYRGDYNSL

SEQ ID NO: 80645 - protein, 10 aa, synthetic construct
TLYRGDYTSM

SEQ ID NO: 80646 - protein, 10 aa, synthetic construct
TLYRGDFQNT

SEQ ID NO: 80647 - protein, 10 aa, synthetic construct
TLNRGDYNSL

SEQ ID NO: 80648 - protein, 10 aa, synthetic construct
TLNRGDYTSM

SEQ ID NO: 80649 - protein, 10 aa, synthetic construct
TLNRGDFQNT

SEQ ID NO: 80650 - protein, 10 aa, synthetic construct
EPRRGDLLLS

SEQ ID NO: 80651 - protein, 10 aa, synthetic construct
TLQRGDFNNT

SEQ ID NO: 80652 - protein, 10 aa, synthetic construct
TLQRGDFNNL

SEQ ID NO: 80653 - protein, 10 aa, synthetic construct
TLDRGDFNNT

SEQ ID NO: 80654 - protein, 10 aa, synthetic construct
TLDRGDFNNL

SEQ ID NO: 80655 - protein, 10 aa, synthetic construct
TLERGDFNNT

SEQ ID NO: 80656 - protein, 10 aa, synthetic construct
TLERGDFNNL

SEQ ID NO: 80657 - protein, 10 aa, synthetic construct
TIGRGDYNSL

SEQ ID NO: 80658 - protein, 10 aa, synthetic construct
TIGRGDYTSM

SEQ ID NO: 80659 - protein, 10 aa, synthetic construct
TIGRGDFQNT

SEQ ID NO: 80660 - protein, 10 aa, synthetic construct
TIARGDYNSL

SEQ ID NO: 80661 - protein, 10 aa, synthetic construct
EPHRGDRGQI

SEQ ID NO: 80662 - protein, 10 aa, synthetic construct
TIARGDYTSM

SEQ ID NO: 80663 - protein, 10 aa, synthetic construct
TIARGDFQNT

SEQ ID NO: 80664 - protein, 10 aa, synthetic construct
TIVRGDYTSV

SEQ ID NO: 80665 - protein, 10 aa, synthetic construct
TIVRGDLIGR

SEQ ID NO: 80666 - protein, 10 aa, synthetic construct
TIPRGDYNSL

SEQ ID NO: 80667 - protein, 10 aa, synthetic construct
TIPRGDYTSM

SEQ ID NO: 80668 - protein, 10 aa, synthetic construct
TIPRGDFQNT

SEQ ID NO: 80669 - protein, 10 aa, synthetic construct
TILRGDYTSV

SEQ ID NO: 80670 - protein, 10 aa, synthetic construct
TILRGDLIGR

SEQ ID NO: 80671 - protein, 10 aa, synthetic construct
TIIRGDHVNL

SEQ ID NO: 80672 - protein, 10 aa, synthetic construct
EPHRGDRQGI

SEQ ID NO: 80673 - protein, 10 aa, synthetic construct
TIIRGDRDYL

SEQ ID NO: 80674 - protein, 10 aa, synthetic construct
TIIRGDYSSV

SEQ ID NO: 80675 - protein, 10 aa, synthetic construct
TIIRGDLTVT

SEQ ID NO: 80676 - protein, 10 aa, synthetic construct
TIMRGDHVNL

SEQ ID NO: 80677 - protein, 10 aa, synthetic construct
TIMRGDRDYL

SEQ ID NO: 80678 - protein, 10 aa, synthetic construct
TIMRGDYSSV

SEQ ID NO: 80679 - protein, 10 aa, synthetic construct
TIMRGDLTVT

SEQ ID NO: 80680 - protein, 10 aa, synthetic construct
TIWRGDYTSV

SEQ ID NO: 80681 - protein, 10 aa, synthetic construct
TIWRGDLIGR

SEQ ID NO: 80682 - protein, 10 aa, synthetic construct
TIFRGDHVNL

SEQ ID NO: 80683 - protein, 10 aa, synthetic construct
EPHRGDRSVV

SEQ ID NO: 80684 - protein, 10 aa, synthetic construct
TIFRGDRDYL

SEQ ID NO: 80685 - protein, 10 aa, synthetic construct
TIFRGDYSSV

SEQ ID NO: 80686 - protein, 10 aa, synthetic construct
TIFRGDLTVT

SEQ ID NO: 80687 - protein, 10 aa, synthetic construct
TIKRGDHVNL

SEQ ID NO: 80688 - protein, 10 aa, synthetic construct
TIKRGDRDYL

SEQ ID NO: 80689 - protein, 10 aa, synthetic construct
TIKRGDYSSV

SEQ ID NO: 80690 - protein, 10 aa, synthetic construct
TIKRGDLTVT

SEQ ID NO: 80691 - protein, 10 aa, synthetic construct
TIRRGDYNSL

SEQ ID NO: 80692 - protein, 10 aa, synthetic construct
TIRRGDYTSM

SEQ ID NO: 80693 - protein, 10 aa, synthetic construct
TIRRGDFQNT

SEQ ID NO: 80694 - protein, 10 aa, synthetic construct
EPHRGDRGVV

SEQ ID NO: 80695 - protein, 10 aa, synthetic construct
TIHRGDYTSV

SEQ ID NO: 80696 - protein, 10 aa, synthetic construct
TIHRGDLIGR

SEQ ID NO: 80697 - protein, 10 aa, synthetic construct
TISRGDYTSV

SEQ ID NO: 80698 - protein, 10 aa, synthetic construct
TISRGDLIGR

SEQ ID NO: 80699 - protein, 10 aa, synthetic construct
TITRGDYTSV

SEQ ID NO: 80700 - protein, 10 aa, synthetic construct
TITRGDLIGR

SEQ ID NO: 80701 - protein, 10 aa, synthetic construct
TIYRGDHVNL

SEQ ID NO: 80702 - protein, 10 aa, synthetic construct
TIYRGDRDYL

SEQ ID NO: 80703 - protein, 10 aa, synthetic construct
TIYRGDYSSV

SEQ ID NO: 80704 - protein, 10 aa, synthetic construct
TIYRGDLTVT

SEQ ID NO: 80705 - protein, 10 aa, synthetic construct
EPHRGDRSQT

SEQ ID NO: 80706 - protein, 10 aa, synthetic construct
TINRGDHVNL

SEQ ID NO: 80707 - protein, 10 aa, synthetic construct
TINRGDRDYL

SEQ ID NO: 80708 - protein, 10 aa, synthetic construct
TINRGDYSSV

SEQ ID NO: 80709 - protein, 10 aa, synthetic construct
TINRGDLTVT

SEQ ID NO: 80710 - protein, 10 aa, synthetic construct
TIQRGDYTSV

SEQ ID NO: 80711 - protein, 10 aa, synthetic construct
TIQRGDLIGR

SEQ ID NO: 80712 - protein, 10 aa, synthetic construct
TIDRGDYTSV

SEQ ID NO: 80713 - protein, 10 aa, synthetic construct
TIDRGDLIGR

SEQ ID NO: 80714 - protein, 10 aa, synthetic construct
TIERGDYTSV

SEQ ID NO: 80715 - protein, 10 aa, synthetic construct
TIERGDLIGR

SEQ ID NO: 80716 - protein, 10 aa, synthetic construct
EPSRGDRGQI

SEQ ID NO: 80717 - protein, 10 aa, synthetic construct
TMGRGDFQNT

SEQ ID NO: 80718 - protein, 10 aa, synthetic construct
TMARGDFQNT

SEQ ID NO: 80719 - protein, 10 aa, synthetic construct
TMVRGDFQNT

SEQ ID NO: 80720 - protein, 10 aa, synthetic construct
TMPRGDFQNT

SEQ ID NO: 80721 - protein, 10 aa, synthetic construct
TMLRGDFQNT

SEQ ID NO: 80722 - protein, 10 aa, synthetic construct
TMIRGDRDYL

SEQ ID NO: 80723 - protein, 10 aa, synthetic construct
TMIRGDYVGL

SEQ ID NO: 80724 - protein, 10 aa, synthetic construct
TMIRGDYSSV

SEQ ID NO: 80725 - protein, 10 aa, synthetic construct
TMIRGDYTSV

SEQ ID NO: 80726 - protein, 10 aa, synthetic construct
TMIRGDQSTL

SEQ ID NO: 80727 - protein, 10 aa, synthetic construct
EPSRGDRQGI

SEQ ID NO: 80728 - protein, 10 aa, synthetic construct
TMMRGDYTSV

SEQ ID NO: 80729 - protein, 10 aa, synthetic construct
TMWRGDYNSL

SEQ ID NO: 80730 - protein, 10 aa, synthetic construct
TMWRGDYTSM

SEQ ID NO: 80731 - protein, 10 aa, synthetic construct
TMWRGDFQNT

SEQ ID NO: 80732 - protein, 10 aa, synthetic construct
TMFRGDRDYL

SEQ ID NO: 80733 - protein, 10 aa, synthetic construct
TMFRGDYVGL

SEQ ID NO: 80734 - protein, 10 aa, synthetic construct
TMFRGDYSSV

SEQ ID NO: 80735 - protein, 10 aa, synthetic construct
TMFRGDYTSV

SEQ ID NO: 80736 - protein, 10 aa, synthetic construct
TMFRGDQSTL

SEQ ID NO: 80737 - protein, 10 aa, synthetic construct
TMKRGDRDYL

SEQ ID NO: 80738 - protein, 10 aa, synthetic construct
SFFRGDHGVL

SEQ ID NO: 80739 - protein, 10 aa, synthetic construct
EPSRGDRSVV

SEQ ID NO: 80740 - protein, 10 aa, synthetic construct
TMKRGDYVGL

SEQ ID NO: 80741 - protein, 10 aa, synthetic construct
TMKRGDYSSV

SEQ ID NO: 80742 - protein, 10 aa, synthetic construct
TMKRGDYTSV

SEQ ID NO: 80743 - protein, 10 aa, synthetic construct
TMKRGDQSTL

SEQ ID NO: 80744 - protein, 10 aa, synthetic construct
TMRRGDFQNT

SEQ ID NO: 80745 - protein, 10 aa, synthetic construct
TMHRGDHVNL

SEQ ID NO: 80746 - protein, 10 aa, synthetic construct
TMHRGDYNSL

SEQ ID NO: 80747 - protein, 10 aa, synthetic construct
TMHRGDYTSM

SEQ ID NO: 80748 - protein, 10 aa, synthetic construct
TMSRGDFQNT

SEQ ID NO: 80749 - protein, 10 aa, synthetic construct
TMTRGDHVNL

SEQ ID NO: 80750 - protein, 10 aa, synthetic construct
EPSRGDRGVV

SEQ ID NO: 80751 - protein, 10 aa, synthetic construct
TMTRGDYNSL

SEQ ID NO: 80752 - protein, 10 aa, synthetic construct
TMTRGDYTSM

SEQ ID NO: 80753 - protein, 10 aa, synthetic construct
TMYRGDRDYL

SEQ ID NO: 80754 - protein, 10 aa, synthetic construct
TMYRGDYVGL

SEQ ID NO: 80755 - protein, 10 aa, synthetic construct
TMYRGDYSSV

SEQ ID NO: 80756 - protein, 10 aa, synthetic construct
TMYRGDYTSV

SEQ ID NO: 80757 - protein, 10 aa, synthetic construct
TMYRGDQSTL

SEQ ID NO: 80758 - protein, 10 aa, synthetic construct
TMNRGDRDYL

SEQ ID NO: 80759 - protein, 10 aa, synthetic construct
TMNRGDYVGL

SEQ ID NO: 80760 - protein, 10 aa, synthetic construct
TMNRGDYSSV

SEQ ID NO: 80761 - protein, 10 aa, synthetic construct
EPSRGDRSQT

SEQ ID NO: 80762 - protein, 10 aa, synthetic construct
TMNRGDYTSV

SEQ ID NO: 80763 - protein, 10 aa, synthetic construct
TMNRGDQSTL

SEQ ID NO: 80764 - protein, 10 aa, synthetic construct
TMQRGDHVNL

SEQ ID NO: 80765 - protein, 10 aa, synthetic construct
TMQRGDYNSL

SEQ ID NO: 80766 - protein, 10 aa, synthetic construct
TMQRGDYTSM

SEQ ID NO: 80767 - protein, 10 aa, synthetic construct
TMDRGDHVNL

SEQ ID NO: 80768 - protein, 10 aa, synthetic construct
TMDRGDYNSL

SEQ ID NO: 80769 - protein, 10 aa, synthetic construct
TMDRGDYTSM

SEQ ID NO: 80770 - protein, 10 aa, synthetic construct
TMERGDHVNL

SEQ ID NO: 80771 - protein, 10 aa, synthetic construct
TMERGDYNSL

SEQ ID NO: 80772 - protein, 10 aa, synthetic construct
EPTRGDRGQI

SEQ ID NO: 80773 - protein, 10 aa, synthetic construct
TMERGDYTSM

SEQ ID NO: 80774 - protein, 10 aa, synthetic construct
TWGRGDFNNT

SEQ ID NO: 80775 - protein, 10 aa, synthetic construct
TWGRGDFNNL

SEQ ID NO: 80776 - protein, 10 aa, synthetic construct
TWARGDFNNT

SEQ ID NO: 80777 - protein, 10 aa, synthetic construct
TWARGDFNNL

SEQ ID NO: 80778 - protein, 10 aa, synthetic construct
TWVRGDFNNT

SEQ ID NO: 80779 - protein, 10 aa, synthetic construct
TWVRGDFNNL

SEQ ID NO: 80780 - protein, 10 aa, synthetic construct
TWPRGDFNNT

SEQ ID NO: 80781 - protein, 10 aa, synthetic construct
TWPRGDFNNL

SEQ ID NO: 80782 - protein, 10 aa, synthetic construct
TWLRGDFNNT

SEQ ID NO: 80783 - protein, 10 aa, synthetic construct
EPTRGDRQGI

SEQ ID NO: 80784 - protein, 10 aa, synthetic construct
TWLRGDFNNL

SEQ ID NO: 80785 - protein, 10 aa, synthetic construct
TWIRGDHVNL

SEQ ID NO: 80786 - protein, 10 aa, synthetic construct
TWIRGDYNSL

SEQ ID NO: 80787 - protein, 10 aa, synthetic construct
TWIRGDYTSM

SEQ ID NO: 80788 - protein, 10 aa, synthetic construct
TWMRGDYNSL

SEQ ID NO: 80789 - protein, 10 aa, synthetic construct
TWMRGDYTSM

SEQ ID NO: 80790 - protein, 10 aa, synthetic construct
TWMRGDFQNT

SEQ ID NO: 80791 - protein, 10 aa, synthetic construct
TWWRGDFNNT

SEQ ID NO: 80792 - protein, 10 aa, synthetic construct
TWWRGDFNNL

SEQ ID NO: 80793 - protein, 10 aa, synthetic construct
TWFRGDHVNL

SEQ ID NO: 80794 - protein, 10 aa, synthetic construct
EPTRGDRSVV

SEQ ID NO: 80795 - protein, 10 aa, synthetic construct
TWFRGDYNSL

SEQ ID NO: 80796 - protein, 10 aa, synthetic construct
TWFRGDYTSM

SEQ ID NO: 80797 - protein, 10 aa, synthetic construct
TWKRGDHVNL

SEQ ID NO: 80798 - protein, 10 aa, synthetic construct
TWKRGDYNSL

SEQ ID NO: 80799 - protein, 10 aa, synthetic construct
TWKRGDYTSM

SEQ ID NO: 80800 - protein, 10 aa, synthetic construct
TWRRGDFNNT

SEQ ID NO: 80801 - protein, 10 aa, synthetic construct
TWRRGDFNNL

SEQ ID NO: 80802 - protein, 10 aa, synthetic construct
TWHRGDFQNT

SEQ ID NO: 80803 - protein, 10 aa, synthetic construct
TWSRGDFNNT

SEQ ID NO: 80804 - protein, 10 aa, synthetic construct
TWSRGDFNNL

SEQ ID NO: 80805 - protein, 10 aa, synthetic construct
EPTRGDRGVV

SEQ ID NO: 80806 - protein, 10 aa, synthetic construct
TWTRGDFQNT

SEQ ID NO: 80807 - protein, 10 aa, synthetic construct
TWYRGDHVNL

SEQ ID NO: 80808 - protein, 10 aa, synthetic construct
TWYRGDYNSL

SEQ ID NO: 80809 - protein, 10 aa, synthetic construct
TWYRGDYTSM

SEQ ID NO: 80810 - protein, 10 aa, synthetic construct
TWNRGDHVNL

SEQ ID NO: 80811 - protein, 10 aa, synthetic construct
TWNRGDYNSL

SEQ ID NO: 80812 - protein, 10 aa, synthetic construct
TWNRGDYTSM

SEQ ID NO: 80813 - protein, 10 aa, synthetic construct
TWQRGDFQNT

SEQ ID NO: 80814 - protein, 10 aa, synthetic construct
TWDRGDFQNT

SEQ ID NO: 80815 - protein, 10 aa, synthetic construct
TWERGDFQNT

SEQ ID NO: 80816 - protein, 10 aa, synthetic construct
EPTRGDRSQT

SEQ ID NO: 80817 - protein, 10 aa, synthetic construct
TFGRGDYNSL

SEQ ID NO: 80818 - protein, 10 aa, synthetic construct
TFGRGDYTSM

SEQ ID NO: 80819 - protein, 10 aa, synthetic construct
TFGRGDFQNT

SEQ ID NO: 80820 - protein, 10 aa, synthetic construct
TFARGDYNSL

SEQ ID NO: 80821 - protein, 10 aa, synthetic construct
TFARGDYTSM

SEQ ID NO: 80822 - protein, 10 aa, synthetic construct
TFARGDFQNT

SEQ ID NO: 80823 - protein, 10 aa, synthetic construct
TFVRGDYTSV

SEQ ID NO: 80824 - protein, 10 aa, synthetic construct
TFVRGDLIGR

SEQ ID NO: 80825 - protein, 10 aa, synthetic construct
TFPRGDYNSL

SEQ ID NO: 80826 - protein, 10 aa, synthetic construct
TFPRGDYTSM

SEQ ID NO: 80827 - protein, 10 aa, synthetic construct
EPQRGDRGQI

SEQ ID NO: 80828 - protein, 10 aa, synthetic construct
TFPRGDFQNT

SEQ ID NO: 80829 - protein, 10 aa, synthetic construct
TFLRGDYTSV

SEQ ID NO: 80830 - protein, 10 aa, synthetic construct
TFLRGDLIGR

SEQ ID NO: 80831 - protein, 10 aa, synthetic construct
TFIRGDHVNL

SEQ ID NO: 80832 - protein, 10 aa, synthetic construct
TFIRGDRDYL

SEQ ID NO: 80833 - protein, 10 aa, synthetic construct
TFIRGDYSSV

SEQ ID NO: 80834 - protein, 10 aa, synthetic construct
TFIRGDLTVT

SEQ ID NO: 80835 - protein, 10 aa, synthetic construct
TFMRGDHVNL

SEQ ID NO: 80836 - protein, 10 aa, synthetic construct
TFMRGDRDYL

SEQ ID NO: 80837 - protein, 10 aa, synthetic construct
TFMRGDYSSV

SEQ ID NO: 80838 - protein, 10 aa, synthetic construct
EPQRGDRQGI

SEQ ID NO: 80839 - protein, 10 aa, synthetic construct
TFMRGDLTVT

SEQ ID NO: 80840 - protein, 10 aa, synthetic construct
TFWRGDYTSV

SEQ ID NO: 80841 - protein, 10 aa, synthetic construct
TFWRGDLIGR

SEQ ID NO: 80842 - protein, 10 aa, synthetic construct
TFKRGDHVNL

SEQ ID NO: 80843 - protein, 10 aa, synthetic construct
TFKRGDRDYL

SEQ ID NO: 80844 - protein, 10 aa, synthetic construct
TFKRGDYSSV

SEQ ID NO: 80845 - protein, 10 aa, synthetic construct
TFKRGDLTVT

SEQ ID NO: 80846 - protein, 10 aa, synthetic construct
TFRRGDYNSL

SEQ ID NO: 80847 - protein, 10 aa, synthetic construct
TFRRGDYTSM

SEQ ID NO: 80848 - protein, 10 aa, synthetic construct
TFRRGDFQNT

SEQ ID NO: 80849 - protein, 10 aa, synthetic construct
SFFRGDRGQI

SEQ ID NO: 80850 - protein, 10 aa, synthetic construct
EPQRGDRSVV

SEQ ID NO: 80851 - protein, 10 aa, synthetic construct
TFHRGDYTSV

SEQ ID NO: 80852 - protein, 10 aa, synthetic construct
TFHRGDLIGR

SEQ ID NO: 80853 - protein, 10 aa, synthetic construct
TFSRGDYTSV

SEQ ID NO: 80854 - protein, 10 aa, synthetic construct
TFSRGDLIGR

SEQ ID NO: 80855 - protein, 10 aa, synthetic construct
TFTRGDYTSV

SEQ ID NO: 80856 - protein, 10 aa, synthetic construct
TFTRGDLIGR

SEQ ID NO: 80857 - protein, 10 aa, synthetic construct
TFYRGDHVNL

SEQ ID NO: 80858 - protein, 10 aa, synthetic construct
TFYRGDRDYL

SEQ ID NO: 80859 - protein, 10 aa, synthetic construct
TFYRGDYSSV

SEQ ID NO: 80860 - protein, 10 aa, synthetic construct
TFYRGDLTVT

SEQ ID NO: 80861 - protein, 10 aa, synthetic construct
EPQRGDRGVV

SEQ ID NO: 80862 - protein, 10 aa, synthetic construct
TFNRGDHVNL

SEQ ID NO: 80863 - protein, 10 aa, synthetic construct
TFNRGDRDYL

SEQ ID NO: 80864 - protein, 10 aa, synthetic construct
TFNRGDYSSV

SEQ ID NO: 80865 - protein, 10 aa, synthetic construct
TFNRGDLTVT

SEQ ID NO: 80866 - protein, 10 aa, synthetic construct
TFQRGDYTSV

SEQ ID NO: 80867 - protein, 10 aa, synthetic construct
TFQRGDLIGR

SEQ ID NO: 80868 - protein, 10 aa, synthetic construct
TFDRGDYTSV

SEQ ID NO: 80869 - protein, 10 aa, synthetic construct
TFDRGDLIGR

SEQ ID NO: 80870 - protein, 10 aa, synthetic construct
TFERGDYTSV

SEQ ID NO: 80871 - protein, 10 aa, synthetic construct
TFERGDLIGR

SEQ ID NO: 80872 - protein, 10 aa, synthetic construct
EPQRGDRSQT

SEQ ID NO: 80873 - protein, 10 aa, synthetic construct
TKGRGDYNSL

SEQ ID NO: 80874 - protein, 10 aa, synthetic construct
TKGRGDYTSM

SEQ ID NO: 80875 - protein, 10 aa, synthetic construct
TKGRGDFQNT

SEQ ID NO: 80876 - protein, 10 aa, synthetic construct
TKARGDYNSL

SEQ ID NO: 80877 - protein, 10 aa, synthetic construct
TKARGDYTSM

SEQ ID NO: 80878 - protein, 10 aa, synthetic construct
TKARGDFQNT

SEQ ID NO: 80879 - protein, 10 aa, synthetic construct
TKVRGDYTSV

SEQ ID NO: 80880 - protein, 10 aa, synthetic construct
TKVRGDLIGR

SEQ ID NO: 80881 - protein, 10 aa, synthetic construct
TKPRGDYNSL

SEQ ID NO: 80882 - protein, 10 aa, synthetic construct
TKPRGDYTSM

SEQ ID NO: 80883 - protein, 10 aa, synthetic construct
EPDRGDRGQI

SEQ ID NO: 80884 - protein, 10 aa, synthetic construct
TKPRGDFQNT

SEQ ID NO: 80885 - protein, 10 aa, synthetic construct
TKLRGDYTSV

SEQ ID NO: 80886 - protein, 10 aa, synthetic construct
TKLRGDLIGR

SEQ ID NO: 80887 - protein, 10 aa, synthetic construct
TKIRGDHVNL

SEQ ID NO: 80888 - protein, 10 aa, synthetic construct
TKIRGDRDYL

SEQ ID NO: 80889 - protein, 10 aa, synthetic construct
TKIRGDYSSV

SEQ ID NO: 80890 - protein, 10 aa, synthetic construct
TKIRGDLTVT

SEQ ID NO: 80891 - protein, 10 aa, synthetic construct
TKMRGDHVNL

SEQ ID NO: 80892 - protein, 10 aa, synthetic construct
TKMRGDRDYL

SEQ ID NO: 80893 - protein, 10 aa, synthetic construct
TKMRGDYSSV

SEQ ID NO: 80894 - protein, 10 aa, synthetic construct
EPDRGDRQGI

SEQ ID NO: 80895 - protein, 10 aa, synthetic construct
TKMRGDLTVT

SEQ ID NO: 80896 - protein, 10 aa, synthetic construct
TKWRGDYTSV

SEQ ID NO: 80897 - protein, 10 aa, synthetic construct
TKWRGDLIGR

SEQ ID NO: 80898 - protein, 10 aa, synthetic construct
TKFRGDHVNL

SEQ ID NO: 80899 - protein, 10 aa, synthetic construct
TKFRGDRDYL

SEQ ID NO: 80900 - protein, 10 aa, synthetic construct
TKFRGDYSSV

SEQ ID NO: 80901 - protein, 10 aa, synthetic construct
TKFRGDLTVT

SEQ ID NO: 80902 - protein, 10 aa, synthetic construct
TKRRGDYNSL

SEQ ID NO: 80903 - protein, 10 aa, synthetic construct
TKRRGDYTSM

SEQ ID NO: 80904 - protein, 10 aa, synthetic construct
TKRRGDFQNT

SEQ ID NO: 80905 - protein, 10 aa, synthetic construct
EPDRGDRSVV

SEQ ID NO: 80906 - protein, 10 aa, synthetic construct
TKHRGDYTSV

SEQ ID NO: 80907 - protein, 10 aa, synthetic construct
TKHRGDLIGR

SEQ ID NO: 80908 - protein, 10 aa, synthetic construct
TKSRGDYTSV

SEQ ID NO: 80909 - protein, 10 aa, synthetic construct
TKSRGDLIGR

SEQ ID NO: 80910 - protein, 10 aa, synthetic construct
TKTRGDYTSV

SEQ ID NO: 80911 - protein, 10 aa, synthetic construct
TKTRGDLIGR

SEQ ID NO: 80912 - protein, 10 aa, synthetic construct
TKYRGDHVNL

SEQ ID NO: 80913 - protein, 10 aa, synthetic construct
TKYRGDRDYL

SEQ ID NO: 80914 - protein, 10 aa, synthetic construct
TKYRGDYSSV

SEQ ID NO: 80915 - protein, 10 aa, synthetic construct
TKYRGDLTVT

SEQ ID NO: 80916 - protein, 10 aa, synthetic construct
EPDRGDRGVV

SEQ ID NO: 80917 - protein, 10 aa, synthetic construct
TKQRGDYTSV

SEQ ID NO: 80918 - protein, 10 aa, synthetic construct
TKQRGDLIGR

SEQ ID NO: 80919 - protein, 10 aa, synthetic construct
TKDRGDYTSV

SEQ ID NO: 80920 - protein, 10 aa, synthetic construct
TKDRGDLIGR

SEQ ID NO: 80921 - protein, 10 aa, synthetic construct
TKERGDYTSV

SEQ ID NO: 80922 - protein, 10 aa, synthetic construct
TKERGDLIGR

SEQ ID NO: 80923 - protein, 10 aa, synthetic construct
TRVRGDFNNT

SEQ ID NO: 80924 - protein, 10 aa, synthetic construct
TRVRGDFNNL

SEQ ID NO: 80925 - protein, 10 aa, synthetic construct
TRLRGDFNNT

SEQ ID NO: 80926 - protein, 10 aa, synthetic construct
TRLRGDFNNL

SEQ ID NO: 80927 - protein, 10 aa, synthetic construct
EPDRGDRSQT

SEQ ID NO: 80928 - protein, 10 aa, synthetic construct
TRIRGDYNSL

SEQ ID NO: 80929 - protein, 10 aa, synthetic construct
TRIRGDYTSM

SEQ ID NO: 80930 - protein, 10 aa, synthetic construct
TRIRGDFQNT

SEQ ID NO: 80931 - protein, 10 aa, synthetic construct
TRMRGDYNSL

SEQ ID NO: 80932 - protein, 10 aa, synthetic construct
TRMRGDYTSM

SEQ ID NO: 80933 - protein, 10 aa, synthetic construct
TRMRGDFQNT

SEQ ID NO: 80934 - protein, 10 aa, synthetic construct
TRWRGDFNNT

SEQ ID NO: 80935 - protein, 10 aa, synthetic construct
TRWRGDFNNL

SEQ ID NO: 80936 - protein, 10 aa, synthetic construct
TRFRGDYNSL

SEQ ID NO: 80937 - protein, 10 aa, synthetic construct
TRFRGDYTSM

SEQ ID NO: 80938 - protein, 10 aa, synthetic construct
EPERGDRGQI

SEQ ID NO: 80939 - protein, 10 aa, synthetic construct
TRFRGDFQNT

SEQ ID NO: 80940 - protein, 10 aa, synthetic construct
TRKRGDYNSL

SEQ ID NO: 80941 - protein, 10 aa, synthetic construct
TRKRGDYTSM

SEQ ID NO: 80942 - protein, 10 aa, synthetic construct
TRKRGDFQNT

SEQ ID NO: 80943 - protein, 10 aa, synthetic construct
TRHRGDFNNT

SEQ ID NO: 80944 - protein, 10 aa, synthetic construct
TRHRGDFNNL

SEQ ID NO: 80945 - protein, 10 aa, synthetic construct
TRSRGDFNNT

SEQ ID NO: 80946 - protein, 10 aa, synthetic construct
TRSRGDFNNL

SEQ ID NO: 80947 - protein, 10 aa, synthetic construct
TRTRGDFNNT

SEQ ID NO: 80948 - protein, 10 aa, synthetic construct
TRTRGDFNNL

SEQ ID NO: 80949 - protein, 10 aa, synthetic construct
EPERGDRQGI

SEQ ID NO: 80950 - protein, 10 aa, synthetic construct
TRYRGDYNSL

SEQ ID NO: 80951 - protein, 10 aa, synthetic construct
TRYRGDYTSM

SEQ ID NO: 80952 - protein, 10 aa, synthetic construct
TRYRGDFQNT

SEQ ID NO: 80953 - protein, 10 aa, synthetic construct
TRNRGDYNSL

SEQ ID NO: 80954 - protein, 10 aa, synthetic construct
TRNRGDYTSM

SEQ ID NO: 80955 - protein, 10 aa, synthetic construct
TRNRGDFQNT

SEQ ID NO: 80956 - protein, 10 aa, synthetic construct
TRQRGDFNNT

SEQ ID NO: 80957 - protein, 10 aa, synthetic construct
TRQRGDFNNL

SEQ ID NO: 80958 - protein, 10 aa, synthetic construct
TRDRGDFNNT

SEQ ID NO: 80959 - protein, 10 aa, synthetic construct
TRDRGDFNNL

SEQ ID NO: 80960 - protein, 10 aa, synthetic construct
SFFRGDRQGI

SEQ ID NO: 80961 - protein, 10 aa, synthetic construct
EPERGDRSVV

SEQ ID NO: 80962 - protein, 10 aa, synthetic construct
TRERGDFNNT

SEQ ID NO: 80963 - protein, 10 aa, synthetic construct
TRERGDFNNL

SEQ ID NO: 80964 - protein, 10 aa, synthetic construct
THGRGDFNNT

SEQ ID NO: 80965 - protein, 10 aa, synthetic construct
THGRGDFNNL

SEQ ID NO: 80966 - protein, 10 aa, synthetic construct
THARGDFNNT

SEQ ID NO: 80967 - protein, 10 aa, synthetic construct
THARGDFNNL

SEQ ID NO: 80968 - protein, 10 aa, synthetic construct
THVRGDYNSL

SEQ ID NO: 80969 - protein, 10 aa, synthetic construct
THVRGDYTSM

SEQ ID NO: 80970 - protein, 10 aa, synthetic construct
THVRGDFQNT

SEQ ID NO: 80971 - protein, 10 aa, synthetic construct
THPRGDFNNT

SEQ ID NO: 80972 - protein, 10 aa, synthetic construct
EPERGDRGVV

SEQ ID NO: 80973 - protein, 10 aa, synthetic construct
THPRGDFNNL

SEQ ID NO: 80974 - protein, 10 aa, synthetic construct
THLRGDYNSL

SEQ ID NO: 80975 - protein, 10 aa, synthetic construct
THLRGDYTSM

SEQ ID NO: 80976 - protein, 10 aa, synthetic construct
THLRGDFQNT

SEQ ID NO: 80977 - protein, 10 aa, synthetic construct
THIRGDYTSV

SEQ ID NO: 80978 - protein, 10 aa, synthetic construct
THIRGDLIGR

SEQ ID NO: 80979 - protein, 10 aa, synthetic construct
THMRGDYTSV

SEQ ID NO: 80980 - protein, 10 aa, synthetic construct
THMRGDLIGR

SEQ ID NO: 80981 - protein, 10 aa, synthetic construct
THWRGDYNSL

SEQ ID NO: 80982 - protein, 10 aa, synthetic construct
THWRGDYTSM

SEQ ID NO: 80983 - protein, 10 aa, synthetic construct
EPERGDRSQT

SEQ ID NO: 80984 - protein, 10 aa, synthetic construct
THWRGDFQNT

SEQ ID NO: 80985 - protein, 10 aa, synthetic construct
THFRGDYTSV

SEQ ID NO: 80986 - protein, 10 aa, synthetic construct
THFRGDLIGR

SEQ ID NO: 80987 - protein, 10 aa, synthetic construct
THKRGDYTSV

SEQ ID NO: 80988 - protein, 10 aa, synthetic construct
THKRGDLIGR

SEQ ID NO: 80989 - protein, 10 aa, synthetic construct
THRRGDFNNT

SEQ ID NO: 80990 - protein, 10 aa, synthetic construct
THRRGDFNNL

SEQ ID NO: 80991 - protein, 10 aa, synthetic construct
THHRGDYNSL

SEQ ID NO: 80992 - protein, 10 aa, synthetic construct
THHRGDYTSM

SEQ ID NO: 80993 - protein, 10 aa, synthetic construct
THHRGDFQNT

SEQ ID NO: 80994 - protein, 10 aa, synthetic construct
ELGRGDHGVL

SEQ ID NO: 80995 - protein, 10 aa, synthetic construct
THSRGDYNSL

SEQ ID NO: 80996 - protein, 10 aa, synthetic construct
THSRGDYTSM

SEQ ID NO: 80997 - protein, 10 aa, synthetic construct
THSRGDFQNT

SEQ ID NO: 80998 - protein, 10 aa, synthetic construct
THTRGDYNSL

SEQ ID NO: 80999 - protein, 10 aa, synthetic construct
THTRGDYTSM

SEQ ID NO: 81000 - protein, 10 aa, synthetic construct
THTRGDFQNT

SEQ ID NO: 81001 - protein, 10 aa, synthetic construct
THYRGDYTSV

SEQ ID NO: 81002 - protein, 10 aa, synthetic construct
THYRGDLIGR

SEQ ID NO: 81003 - protein, 10 aa, synthetic construct
THNRGDYTSV

SEQ ID NO: 81004 - protein, 10 aa, synthetic construct
THNRGDLIGR

SEQ ID NO: 81005 - protein, 10 aa, synthetic construct
ELGRGDYVGL

SEQ ID NO: 81006 - protein, 10 aa, synthetic construct
THQRGDYNSL

SEQ ID NO: 81007 - protein, 10 aa, synthetic construct
THQRGDYTSM

SEQ ID NO: 81008 - protein, 10 aa, synthetic construct
THQRGDFQNT

SEQ ID NO: 81009 - protein, 10 aa, synthetic construct
THDRGDYNSL

SEQ ID NO: 81010 - protein, 10 aa, synthetic construct
THDRGDYTSM

SEQ ID NO: 81011 - protein, 10 aa, synthetic construct
THDRGDFQNT

SEQ ID NO: 81012 - protein, 10 aa, synthetic construct
THERGDYNSL

SEQ ID NO: 81013 - protein, 10 aa, synthetic construct
THERGDYTSM

SEQ ID NO: 81014 - protein, 10 aa, synthetic construct
THERGDFQNT

SEQ ID NO: 81015 - protein, 10 aa, synthetic construct
TSVRGDFNNT

SEQ ID NO: 81016 - protein, 10 aa, synthetic construct
ELGRGDQSTL

SEQ ID NO: 81017 - protein, 10 aa, synthetic construct
TSVRGDFNNL

SEQ ID NO: 81018 - protein, 10 aa, synthetic construct
TSLRGDFNNT

SEQ ID NO: 81019 - protein, 10 aa, synthetic construct
TSLRGDFNNL

SEQ ID NO: 81020 - protein, 10 aa, synthetic construct
TSIRGDYNSL

SEQ ID NO: 81021 - protein, 10 aa, synthetic construct
TSIRGDYTSM

SEQ ID NO: 81022 - protein, 10 aa, synthetic construct
TSIRGDFQNT

SEQ ID NO: 81023 - protein, 10 aa, synthetic construct
TSMRGDYNSL

SEQ ID NO: 81024 - protein, 10 aa, synthetic construct
TSMRGDYTSM

SEQ ID NO: 81025 - protein, 10 aa, synthetic construct
TSMRGDFQNT

SEQ ID NO: 81026 - protein, 10 aa, synthetic construct
TSWRGDFNNT

SEQ ID NO: 81027 - protein, 10 aa, synthetic construct
ELGRGDLLLS

SEQ ID NO: 81028 - protein, 10 aa, synthetic construct
TSWRGDFNNL

SEQ ID NO: 81029 - protein, 10 aa, synthetic construct
TSFRGDYNSL

SEQ ID NO: 81030 - protein, 10 aa, synthetic construct
TSFRGDYTSM

SEQ ID NO: 81031 - protein, 10 aa, synthetic construct
TSFRGDFQNT

SEQ ID NO: 81032 - protein, 10 aa, synthetic construct
TSKRGDYNSL

SEQ ID NO: 81033 - protein, 10 aa, synthetic construct
TSKRGDYTSM

SEQ ID NO: 81034 - protein, 10 aa, synthetic construct
TSKRGDFQNT

SEQ ID NO: 81035 - protein, 10 aa, synthetic construct
TSHRGDFNNT

SEQ ID NO: 81036 - protein, 10 aa, synthetic construct
TSHRGDFNNL

SEQ ID NO: 81037 - protein, 10 aa, synthetic construct
TSSRGDFNNT

SEQ ID NO: 81038 - protein, 10 aa, synthetic construct
ELARGDHGVL

SEQ ID NO: 81039 - protein, 10 aa, synthetic construct
TSSRGDFNNL

SEQ ID NO: 81040 - protein, 10 aa, synthetic construct
TSTRGDFNNT

SEQ ID NO: 81041 - protein, 10 aa, synthetic construct
TSTRGDFNNL

SEQ ID NO: 81042 - protein, 10 aa, synthetic construct
TSYRGDYNSL

SEQ ID NO: 81043 - protein, 10 aa, synthetic construct
TSYRGDYTSM

SEQ ID NO: 81044 - protein, 10 aa, synthetic construct
TSYRGDFQNT

SEQ ID NO: 81045 - protein, 10 aa, synthetic construct
TSNRGDYNSL

SEQ ID NO: 81046 - protein, 10 aa, synthetic construct
TSNRGDYTSM

SEQ ID NO: 81047 - protein, 10 aa, synthetic construct
TSNRGDFQNT

SEQ ID NO: 81048 - protein, 10 aa, synthetic construct
TSQRGDFNNT

SEQ ID NO: 81049 - protein, 10 aa, synthetic construct
ELARGDYVGL

SEQ ID NO: 81050 - protein, 10 aa, synthetic construct
TSQRGDFNNL

SEQ ID NO: 81051 - protein, 10 aa, synthetic construct
TSDRGDFNNT

SEQ ID NO: 81052 - protein, 10 aa, synthetic construct
TSDRGDFNNL

SEQ ID NO: 81053 - protein, 10 aa, synthetic construct
TSERGDFNNT

SEQ ID NO: 81054 - protein, 10 aa, synthetic construct
TSERGDFNNL

SEQ ID NO: 81055 - protein, 10 aa, synthetic construct
TTGRGDFNNT

SEQ ID NO: 81056 - protein, 10 aa, synthetic construct
TTGRGDFNNL

SEQ ID NO: 81057 - protein, 10 aa, synthetic construct
TTARGDFNNT

SEQ ID NO: 81058 - protein, 10 aa, synthetic construct
TTARGDFNNL

SEQ ID NO: 81059 - protein, 10 aa, synthetic construct
TTVRGDYNSL

SEQ ID NO: 81060 - protein, 10 aa, synthetic construct
ELARGDQSTL

SEQ ID NO: 81061 - protein, 10 aa, synthetic construct
TTVRGDYTSM

SEQ ID NO: 81062 - protein, 10 aa, synthetic construct
TTVRGDFQNT

SEQ ID NO: 81063 - protein, 10 aa, synthetic construct
TTPRGDFNNT

SEQ ID NO: 81064 - protein, 10 aa, synthetic construct
TTPRGDFNNL

SEQ ID NO: 81065 - protein, 10 aa, synthetic construct
TTLRGDYNSL

SEQ ID NO: 81066 - protein, 10 aa, synthetic construct
TTLRGDYTSM

SEQ ID NO: 81067 - protein, 10 aa, synthetic construct
TTLRGDFQNT

SEQ ID NO: 81068 - protein, 10 aa, synthetic construct
TTIRGDYTSV

SEQ ID NO: 81069 - protein, 10 aa, synthetic construct
TTIRGDLIGR

SEQ ID NO: 81070 - protein, 10 aa, synthetic construct
TTMRGDYTSV

SEQ ID NO: 81071 - protein, 10 aa, synthetic construct
SFFRGDRGVV

SEQ ID NO: 81072 - protein, 10 aa, synthetic construct
ELARGDLLLS

SEQ ID NO: 81073 - protein, 10 aa, synthetic construct
TTMRGDLIGR

SEQ ID NO: 81074 - protein, 10 aa, synthetic construct
TTWRGDYNSL

SEQ ID NO: 81075 - protein, 10 aa, synthetic construct
TTWRGDYTSM

SEQ ID NO: 81076 - protein, 10 aa, synthetic construct
TTWRGDFQNT

SEQ ID NO: 81077 - protein, 10 aa, synthetic construct
TTFRGDYTSV

SEQ ID NO: 81078 - protein, 10 aa, synthetic construct
TTFRGDLIGR

SEQ ID NO: 81079 - protein, 10 aa, synthetic construct
TTKRGDYTSV

SEQ ID NO: 81080 - protein, 10 aa, synthetic construct
TTKRGDLIGR

SEQ ID NO: 81081 - protein, 10 aa, synthetic construct
TTRRGDFNNT

SEQ ID NO: 81082 - protein, 10 aa, synthetic construct
TTRRGDFNNL

SEQ ID NO: 81083 - protein, 10 aa, synthetic construct
ELVRGDRGQI

SEQ ID NO: 81084 - protein, 10 aa, synthetic construct
TTHRGDYNSL

SEQ ID NO: 81085 - protein, 10 aa, synthetic construct
TTHRGDYTSM

SEQ ID NO: 81086 - protein, 10 aa, synthetic construct
TTHRGDFQNT

SEQ ID NO: 81087 - protein, 10 aa, synthetic construct
TTSRGDYNSL

SEQ ID NO: 81088 - protein, 10 aa, synthetic construct
TTSRGDYTSM

SEQ ID NO: 81089 - protein, 10 aa, synthetic construct
TTSRGDFQNT

SEQ ID NO: 81090 - protein, 10 aa, synthetic construct
TTTRGDYNSL

SEQ ID NO: 81091 - protein, 10 aa, synthetic construct
TTTRGDYTSM

SEQ ID NO: 81092 - protein, 10 aa, synthetic construct
TTTRGDFQNT

SEQ ID NO: 81093 - protein, 10 aa, synthetic construct
TTYRGDYTSV

SEQ ID NO: 81094 - protein, 10 aa, synthetic construct
ELVRGDRQGI

SEQ ID NO: 81095 - protein, 10 aa, synthetic construct
TTYRGDLIGR

SEQ ID NO: 81096 - protein, 10 aa, synthetic construct
TTNRGDYTSV

SEQ ID NO: 81097 - protein, 10 aa, synthetic construct
TTNRGDLIGR

SEQ ID NO: 81098 - protein, 10 aa, synthetic construct
TTQRGDYNSL

SEQ ID NO: 81099 - protein, 10 aa, synthetic construct
TTQRGDYTSM

SEQ ID NO: 81100 - protein, 10 aa, synthetic construct
TTQRGDFQNT

SEQ ID NO: 81101 - protein, 10 aa, synthetic construct
TTDRGDYNSL

SEQ ID NO: 81102 - protein, 10 aa, synthetic construct
TTDRGDYTSM

SEQ ID NO: 81103 - protein, 10 aa, synthetic construct
TTDRGDFQNT

SEQ ID NO: 81104 - protein, 10 aa, synthetic construct
TTERGDYNSL

SEQ ID NO: 81105 - protein, 10 aa, synthetic construct
ELVRGDRSVV

SEQ ID NO: 81106 - protein, 10 aa, synthetic construct
TTERGDYTSM

SEQ ID NO: 81107 - protein, 10 aa, synthetic construct
TTERGDFQNT

SEQ ID NO: 81108 - protein, 10 aa, synthetic construct
TYGRGDYNSL

SEQ ID NO: 81109 - protein, 10 aa, synthetic construct
TYGRGDYTSM

SEQ ID NO: 81110 - protein, 10 aa, synthetic construct
TYGRGDFQNT

SEQ ID NO: 81111 - protein, 10 aa, synthetic construct
TYARGDYNSL

SEQ ID NO: 81112 - protein, 10 aa, synthetic construct
TYARGDYTSM

SEQ ID NO: 81113 - protein, 10 aa, synthetic construct
TYARGDFQNT

SEQ ID NO: 81114 - protein, 10 aa, synthetic construct
TYVRGDYTSV

SEQ ID NO: 81115 - protein, 10 aa, synthetic construct
TYVRGDLIGR

SEQ ID NO: 81116 - protein, 10 aa, synthetic construct
ELVRGDRGVV

SEQ ID NO: 81117 - protein, 10 aa, synthetic construct
TYPRGDYNSL

SEQ ID NO: 81118 - protein, 10 aa, synthetic construct
TYPRGDYTSM

SEQ ID NO: 81119 - protein, 10 aa, synthetic construct
TYPRGDFQNT

SEQ ID NO: 81120 - protein, 10 aa, synthetic construct
TYLRGDYTSV

SEQ ID NO: 81121 - protein, 10 aa, synthetic construct
TYLRGDLIGR

SEQ ID NO: 81122 - protein, 10 aa, synthetic construct
TYIRGDHVNL

SEQ ID NO: 81123 - protein, 10 aa, synthetic construct
TYIRGDRDYL

SEQ ID NO: 81124 - protein, 10 aa, synthetic construct
TYIRGDYSSV

SEQ ID NO: 81125 - protein, 10 aa, synthetic construct
TYIRGDLTVT

SEQ ID NO: 81126 - protein, 10 aa, synthetic construct
TYMRGDHVNL

SEQ ID NO: 81127 - protein, 10 aa, synthetic construct
ELVRGDRSQT

SEQ ID NO: 81128 - protein, 10 aa, synthetic construct
TYMRGDRDYL

SEQ ID NO: 81129 - protein, 10 aa, synthetic construct
TYMRGDYSSV

SEQ ID NO: 81130 - protein, 10 aa, synthetic construct
TYMRGDLTVT

SEQ ID NO: 81131 - protein, 10 aa, synthetic construct
TYWRGDYTSV

SEQ ID NO: 81132 - protein, 10 aa, synthetic construct
TYWRGDLIGR

SEQ ID NO: 81133 - protein, 10 aa, synthetic construct
TYFRGDHVNL

SEQ ID NO: 81134 - protein, 10 aa, synthetic construct
TYFRGDRDYL

SEQ ID NO: 81135 - protein, 10 aa, synthetic construct
TYFRGDYSSV

SEQ ID NO: 81136 - protein, 10 aa, synthetic construct
TYFRGDLTVT

SEQ ID NO: 81137 - protein, 10 aa, synthetic construct
TYKRGDHVNL

SEQ ID NO: 81138 - protein, 10 aa, synthetic construct
ELPRGDHGVL

SEQ ID NO: 81139 - protein, 10 aa, synthetic construct
TYKRGDRDYL

SEQ ID NO: 81140 - protein, 10 aa, synthetic construct
TYKRGDYSSV

SEQ ID NO: 81141 - protein, 10 aa, synthetic construct
TYKRGDLTVT

SEQ ID NO: 81142 - protein, 10 aa, synthetic construct
TYRRGDYNSL

SEQ ID NO: 81143 - protein, 10 aa, synthetic construct
TYRRGDYTSM

SEQ ID NO: 81144 - protein, 10 aa, synthetic construct
TYRRGDFQNT

SEQ ID NO: 81145 - protein, 10 aa, synthetic construct
TYHRGDYTSV

SEQ ID NO: 81146 - protein, 10 aa, synthetic construct
TYHRGDLIGR

SEQ ID NO: 81147 - protein, 10 aa, synthetic construct
TYSRGDYTSV

SEQ ID NO: 81148 - protein, 10 aa, synthetic construct
TYSRGDLIGR

SEQ ID NO: 81149 - protein, 10 aa, synthetic construct
ELPRGDYVGL

SEQ ID NO: 81150 - protein, 10 aa, synthetic construct
TYTRGDYTSV

SEQ ID NO: 81151 - protein, 10 aa, synthetic construct
TYTRGDLIGR

SEQ ID NO: 81152 - protein, 10 aa, synthetic construct
TYYRGDHVNL

SEQ ID NO: 81153 - protein, 10 aa, synthetic construct
TYYRGDRDYL

SEQ ID NO: 81154 - protein, 10 aa, synthetic construct
TYYRGDYSSV

SEQ ID NO: 81155 - protein, 10 aa, synthetic construct
TYYRGDLTVT

SEQ ID NO: 81156 - protein, 10 aa, synthetic construct
TYNRGDHVNL

SEQ ID NO: 81157 - protein, 10 aa, synthetic construct
TYNRGDRDYL

SEQ ID NO: 81158 - protein, 10 aa, synthetic construct
TYNRGDYSSV

SEQ ID NO: 81159 - protein, 10 aa, synthetic construct
TYNRGDLTVT

SEQ ID NO: 81160 - protein, 10 aa, synthetic construct
ELPRGDQSTL

SEQ ID NO: 81161 - protein, 10 aa, synthetic construct
TYQRGDYTSV

SEQ ID NO: 81162 - protein, 10 aa, synthetic construct
TYQRGDLIGR

SEQ ID NO: 81163 - protein, 10 aa, synthetic construct
TYDRGDYTSV

SEQ ID NO: 81164 - protein, 10 aa, synthetic construct
TYDRGDLIGR

SEQ ID NO: 81165 - protein, 10 aa, synthetic construct
TYERGDYTSV

SEQ ID NO: 81166 - protein, 10 aa, synthetic construct
TYERGDLIGR

SEQ ID NO: 81167 - protein, 10 aa, synthetic construct
TNGRGDYNSL

SEQ ID NO: 81168 - protein, 10 aa, synthetic construct
TNGRGDYTSM

SEQ ID NO: 81169 - protein, 10 aa, synthetic construct
TNGRGDFQNT

SEQ ID NO: 81170 - protein, 10 aa, synthetic construct
TNARGDYNSL

SEQ ID NO: 81171 - protein, 10 aa, synthetic construct
ELPRGDLLLS

SEQ ID NO: 81172 - protein, 10 aa, synthetic construct
TNARGDYTSM

SEQ ID NO: 81173 - protein, 10 aa, synthetic construct
TNARGDFQNT

SEQ ID NO: 81174 - protein, 10 aa, synthetic construct
TNVRGDYTSV

SEQ ID NO: 81175 - protein, 10 aa, synthetic construct
TNVRGDLIGR

SEQ ID NO: 81176 - protein, 10 aa, synthetic construct
TNPRGDYNSL

SEQ ID NO: 81177 - protein, 10 aa, synthetic construct
TNPRGDYTSM

SEQ ID NO: 81178 - protein, 10 aa, synthetic construct
TNPRGDFQNT

SEQ ID NO: 81179 - protein, 10 aa, synthetic construct
TNLRGDYTSV

SEQ ID NO: 81180 - protein, 10 aa, synthetic construct
TNLRGDLIGR

SEQ ID NO: 81181 - protein, 10 aa, synthetic construct
TNIRGDHVNL

SEQ ID NO: 81182 - protein, 10 aa, synthetic construct
SFFRGDYVGL

SEQ ID NO: 81183 - protein, 10 aa, synthetic construct
ELLRGDRGQI

SEQ ID NO: 81184 - protein, 10 aa, synthetic construct
TNIRGDRDYL

SEQ ID NO: 81185 - protein, 10 aa, synthetic construct
TNIRGDYSSV

SEQ ID NO: 81186 - protein, 10 aa, synthetic construct
TNIRGDLTVT

SEQ ID NO: 81187 - protein, 10 aa, synthetic construct
TNMRGDHVNL

SEQ ID NO: 81188 - protein, 10 aa, synthetic construct
TNMRGDRDYL

SEQ ID NO: 81189 - protein, 10 aa, synthetic construct
TNMRGDYSSV

SEQ ID NO: 81190 - protein, 10 aa, synthetic construct
TNMRGDLTVT

SEQ ID NO: 81191 - protein, 10 aa, synthetic construct
TNWRGDYTSV

SEQ ID NO: 81192 - protein, 10 aa, synthetic construct
TNWRGDLIGR

SEQ ID NO: 81193 - protein, 10 aa, synthetic construct
TNFRGDHVNL

SEQ ID NO: 81194 - protein, 10 aa, synthetic construct
ELLRGDRQGI

SEQ ID NO: 81195 - protein, 10 aa, synthetic construct
TNFRGDRDYL

SEQ ID NO: 81196 - protein, 10 aa, synthetic construct
TNFRGDYSSV

SEQ ID NO: 81197 - protein, 10 aa, synthetic construct
TNFRGDLTVT

SEQ ID NO: 81198 - protein, 10 aa, synthetic construct
TNKRGDHVNL

SEQ ID NO: 81199 - protein, 10 aa, synthetic construct
TNKRGDRDYL

SEQ ID NO: 81200 - protein, 10 aa, synthetic construct
TNKRGDYSSV

SEQ ID NO: 81201 - protein, 10 aa, synthetic construct
TNKRGDLTVT

SEQ ID NO: 81202 - protein, 10 aa, synthetic construct
TNRRGDYNSL

SEQ ID NO: 81203 - protein, 10 aa, synthetic construct
TNRRGDYTSM

SEQ ID NO: 81204 - protein, 10 aa, synthetic construct
TNRRGDFQNT

SEQ ID NO: 81205 - protein, 10 aa, synthetic construct
ELLRGDRSVV

SEQ ID NO: 81206 - protein, 10 aa, synthetic construct
TNHRGDYTSV

SEQ ID NO: 81207 - protein, 10 aa, synthetic construct
TNHRGDLIGR

SEQ ID NO: 81208 - protein, 10 aa, synthetic construct
TNSRGDYTSV

SEQ ID NO: 81209 - protein, 10 aa, synthetic construct
TNSRGDLIGR

SEQ ID NO: 81210 - protein, 10 aa, synthetic construct
TNTRGDYTSV

SEQ ID NO: 81211 - protein, 10 aa, synthetic construct
TNTRGDLIGR

SEQ ID NO: 81212 - protein, 10 aa, synthetic construct
TNYRGDHVNL

SEQ ID NO: 81213 - protein, 10 aa, synthetic construct
TNYRGDRDYL

SEQ ID NO: 81214 - protein, 10 aa, synthetic construct
TNYRGDYSSV

SEQ ID NO: 81215 - protein, 10 aa, synthetic construct
TNYRGDLTVT

SEQ ID NO: 81216 - protein, 10 aa, synthetic construct
ELLRGDRGVV

SEQ ID NO: 81217 - protein, 10 aa, synthetic construct
TNNRGDHVNL

SEQ ID NO: 81218 - protein, 10 aa, synthetic construct
TNNRGDRDYL

SEQ ID NO: 81219 - protein, 10 aa, synthetic construct
TNNRGDYSSV

SEQ ID NO: 81220 - protein, 10 aa, synthetic construct
TNNRGDLTVT

SEQ ID NO: 81221 - protein, 10 aa, synthetic construct
TNQRGDYTSV

SEQ ID NO: 81222 - protein, 10 aa, synthetic construct
TNQRGDLIGR

SEQ ID NO: 81223 - protein, 10 aa, synthetic construct
TNDRGDYTSV

SEQ ID NO: 81224 - protein, 10 aa, synthetic construct
TNDRGDLIGR

SEQ ID NO: 81225 - protein, 10 aa, synthetic construct
TNERGDYTSV

SEQ ID NO: 81226 - protein, 10 aa, synthetic construct
TNERGDLIGR

SEQ ID NO: 81227 - protein, 10 aa, synthetic construct
ELLRGDRSQT

SEQ ID NO: 81228 - protein, 10 aa, synthetic construct
TQGRGDFNNT

SEQ ID NO: 81229 - protein, 10 aa, synthetic construct
TQGRGDFNNL

SEQ ID NO: 81230 - protein, 10 aa, synthetic construct
TQARGDFNNT

SEQ ID NO: 81231 - protein, 10 aa, synthetic construct
TQARGDFNNL

SEQ ID NO: 81232 - protein, 10 aa, synthetic construct
TQVRGDYNSL

SEQ ID NO: 81233 - protein, 10 aa, synthetic construct
TQVRGDYTSM

SEQ ID NO: 81234 - protein, 10 aa, synthetic construct
TQVRGDFQNT

SEQ ID NO: 81235 - protein, 10 aa, synthetic construct
TQPRGDFNNT

SEQ ID NO: 81236 - protein, 10 aa, synthetic construct
TQPRGDFNNL

SEQ ID NO: 81237 - protein, 10 aa, synthetic construct
TQLRGDYNSL

SEQ ID NO: 81238 - protein, 10 aa, synthetic construct
ELWRGDRGQI

SEQ ID NO: 81239 - protein, 10 aa, synthetic construct
TQLRGDYTSM

SEQ ID NO: 81240 - protein, 10 aa, synthetic construct
TQLRGDFQNT

SEQ ID NO: 81241 - protein, 10 aa, synthetic construct
TQIRGDYTSV

SEQ ID NO: 81242 - protein, 10 aa, synthetic construct
TQIRGDLIGR

SEQ ID NO: 81243 - protein, 10 aa, synthetic construct
TQMRGDYTSV

SEQ ID NO: 81244 - protein, 10 aa, synthetic construct
TQMRGDLIGR

SEQ ID NO: 81245 - protein, 10 aa, synthetic construct
TQWRGDYNSL

SEQ ID NO: 81246 - protein, 10 aa, synthetic construct
TQWRGDYTSM

SEQ ID NO: 81247 - protein, 10 aa, synthetic construct
TQWRGDFQNT

SEQ ID NO: 81248 - protein, 10 aa, synthetic construct
TQFRGDYTSV

SEQ ID NO: 81249 - protein, 10 aa, synthetic construct
ELWRGDRQGI

SEQ ID NO: 81250 - protein, 10 aa, synthetic construct
TQFRGDLIGR

SEQ ID NO: 81251 - protein, 10 aa, synthetic construct
TQKRGDYTSV

SEQ ID NO: 81252 - protein, 10 aa, synthetic construct
TQKRGDLIGR

SEQ ID NO: 81253 - protein, 10 aa, synthetic construct
TQRRGDFNNT

SEQ ID NO: 81254 - protein, 10 aa, synthetic construct
TQRRGDFNNL

SEQ ID NO: 81255 - protein, 10 aa, synthetic construct
TQHRGDYNSL

SEQ ID NO: 81256 - protein, 10 aa, synthetic construct
TQHRGDYTSM

SEQ ID NO: 81257 - protein, 10 aa, synthetic construct
TQHRGDFQNT

SEQ ID NO: 81258 - protein, 10 aa, synthetic construct
TQSRGDYNSL

SEQ ID NO: 81259 - protein, 10 aa, synthetic construct
TQSRGDYTSM

SEQ ID NO: 81260 - protein, 10 aa, synthetic construct
ELWRGDRSVV

SEQ ID NO: 81261 - protein, 10 aa, synthetic construct
TQSRGDFQNT

SEQ ID NO: 81262 - protein, 10 aa, synthetic construct
TQTRGDYNSL

SEQ ID NO: 81263 - protein, 10 aa, synthetic construct
TQTRGDYTSM

SEQ ID NO: 81264 - protein, 10 aa, synthetic construct
TQTRGDFQNT

SEQ ID NO: 81265 - protein, 10 aa, synthetic construct
TQYRGDYTSV

SEQ ID NO: 81266 - protein, 10 aa, synthetic construct
TQYRGDLIGR

SEQ ID NO: 81267 - protein, 10 aa, synthetic construct
TQNRGDYTSV

SEQ ID NO: 81268 - protein, 10 aa, synthetic construct
TQNRGDLIGR

SEQ ID NO: 81269 - protein, 10 aa, synthetic construct
TQQRGDYNSL

SEQ ID NO: 81270 - protein, 10 aa, synthetic construct
TQQRGDYTSM

SEQ ID NO: 81271 - protein, 10 aa, synthetic construct
ELWRGDRGVV

SEQ ID NO: 81272 - protein, 10 aa, synthetic construct
TQQRGDFQNT

SEQ ID NO: 81273 - protein, 10 aa, synthetic construct
TQDRGDYNSL

SEQ ID NO: 81274 - protein, 10 aa, synthetic construct
TQDRGDYTSM

SEQ ID NO: 81275 - protein, 10 aa, synthetic construct
TQDRGDFQNT

SEQ ID NO: 81276 - protein, 10 aa, synthetic construct
TQERGDYNSL

SEQ ID NO: 81277 - protein, 10 aa, synthetic construct
TQERGDYTSM

SEQ ID NO: 81278 - protein, 10 aa, synthetic construct
TQERGDFQNT

SEQ ID NO: 81279 - protein, 10 aa, synthetic construct
TDGRGDFNNT

SEQ ID NO: 81280 - protein, 10 aa, synthetic construct
TDGRGDFNNL

SEQ ID NO: 81281 - protein, 10 aa, synthetic construct
TDARGDFNNT

SEQ ID NO: 81282 - protein, 10 aa, synthetic construct
ELWRGDRSQT

SEQ ID NO: 81283 - protein, 10 aa, synthetic construct
TDARGDFNNL

SEQ ID NO: 81284 - protein, 10 aa, synthetic construct
TDVRGDYNSL

SEQ ID NO: 81285 - protein, 10 aa, synthetic construct
TDVRGDYTSM

SEQ ID NO: 81286 - protein, 10 aa, synthetic construct
TDVRGDFQNT

SEQ ID NO: 81287 - protein, 10 aa, synthetic construct
TDPRGDFNNT

SEQ ID NO: 81288 - protein, 10 aa, synthetic construct
TDPRGDFNNL

SEQ ID NO: 81289 - protein, 10 aa, synthetic construct
TDLRGDYNSL

SEQ ID NO: 81290 - protein, 10 aa, synthetic construct
TDLRGDYTSM

SEQ ID NO: 81291 - protein, 10 aa, synthetic construct
TDLRGDFQNT

SEQ ID NO: 81292 - protein, 10 aa, synthetic construct
TDIRGDYTSV

SEQ ID NO: 81293 - protein, 10 aa, synthetic construct
SFFRGDLIGR

SEQ ID NO: 81294 - protein, 10 aa, synthetic construct
ELRRGDHGVL

SEQ ID NO: 81295 - protein, 10 aa, synthetic construct
TDIRGDLIGR

SEQ ID NO: 81296 - protein, 10 aa, synthetic construct
TDMRGDYTSV

SEQ ID NO: 81297 - protein, 10 aa, synthetic construct
TDMRGDLIGR

SEQ ID NO: 81298 - protein, 10 aa, synthetic construct
TDWRGDYNSL

SEQ ID NO: 81299 - protein, 10 aa, synthetic construct
TDWRGDYTSM

SEQ ID NO: 81300 - protein, 10 aa, synthetic construct
TDWRGDFQNT

SEQ ID NO: 81301 - protein, 10 aa, synthetic construct
TDFRGDYTSV

SEQ ID NO: 81302 - protein, 10 aa, synthetic construct
TDFRGDLIGR

SEQ ID NO: 81303 - protein, 10 aa, synthetic construct
TDKRGDYTSV

SEQ ID NO: 81304 - protein, 10 aa, synthetic construct
TDKRGDLIGR

SEQ ID NO: 81305 - protein, 10 aa, synthetic construct
ELRRGDYVGL

SEQ ID NO: 81306 - protein, 10 aa, synthetic construct
TDRRGDFNNT

SEQ ID NO: 81307 - protein, 10 aa, synthetic construct
TDRRGDFNNL

SEQ ID NO: 81308 - protein, 10 aa, synthetic construct
TDHRGDYNSL

SEQ ID NO: 81309 - protein, 10 aa, synthetic construct
TDHRGDYTSM

SEQ ID NO: 81310 - protein, 10 aa, synthetic construct
TDHRGDFQNT

SEQ ID NO: 81311 - protein, 10 aa, synthetic construct
TDSRGDYNSL

SEQ ID NO: 81312 - protein, 10 aa, synthetic construct
TDSRGDYTSM

SEQ ID NO: 81313 - protein, 10 aa, synthetic construct
TDSRGDFQNT

SEQ ID NO: 81314 - protein, 10 aa, synthetic construct
TDTRGDYNSL

SEQ ID NO: 81315 - protein, 10 aa, synthetic construct
TDTRGDYTSM

SEQ ID NO: 81316 - protein, 10 aa, synthetic construct
ELRRGDQSTL

SEQ ID NO: 81317 - protein, 10 aa, synthetic construct
TDTRGDFQNT

SEQ ID NO: 81318 - protein, 10 aa, synthetic construct
TDYRGDYTSV

SEQ ID NO: 81319 - protein, 10 aa, synthetic construct
TDYRGDLIGR

SEQ ID NO: 81320 - protein, 10 aa, synthetic construct
TDNRGDYTSV

SEQ ID NO: 81321 - protein, 10 aa, synthetic construct
TDNRGDLIGR

SEQ ID NO: 81322 - protein, 10 aa, synthetic construct
TDQRGDYNSL

SEQ ID NO: 81323 - protein, 10 aa, synthetic construct
TDQRGDYTSM

SEQ ID NO: 81324 - protein, 10 aa, synthetic construct
TDQRGDFQNT

SEQ ID NO: 81325 - protein, 10 aa, synthetic construct
TDDRGDYNSL

SEQ ID NO: 81326 - protein, 10 aa, synthetic construct
TDDRGDYTSM

SEQ ID NO: 81327 - protein, 10 aa, synthetic construct
ELRRGDLLLS

SEQ ID NO: 81328 - protein, 10 aa, synthetic construct
TDDRGDFQNT

SEQ ID NO: 81329 - protein, 10 aa, synthetic construct
TDERGDYNSL

SEQ ID NO: 81330 - protein, 10 aa, synthetic construct
TDERGDYTSM

SEQ ID NO: 81331 - protein, 10 aa, synthetic construct
TDERGDFQNT

SEQ ID NO: 81332 - protein, 10 aa, synthetic construct
TEGRGDFNNT

SEQ ID NO: 81333 - protein, 10 aa, synthetic construct
TEGRGDFNNL

SEQ ID NO: 81334 - protein, 10 aa, synthetic construct
TEARGDFNNT

SEQ ID NO: 81335 - protein, 10 aa, synthetic construct
TEARGDFNNL

SEQ ID NO: 81336 - protein, 10 aa, synthetic construct
TEVRGDYNSL

SEQ ID NO: 81337 - protein, 10 aa, synthetic construct
TEVRGDYTSM

SEQ ID NO: 81338 - protein, 10 aa, synthetic construct
ELHRGDRGQI

SEQ ID NO: 81339 - protein, 10 aa, synthetic construct
TEVRGDFQNT

SEQ ID NO: 81340 - protein, 10 aa, synthetic construct
TEPRGDFNNT

SEQ ID NO: 81341 - protein, 10 aa, synthetic construct
TEPRGDFNNL

SEQ ID NO: 81342 - protein, 10 aa, synthetic construct
TELRGDYNSL

SEQ ID NO: 81343 - protein, 10 aa, synthetic construct
TELRGDYTSM

SEQ ID NO: 81344 - protein, 10 aa, synthetic construct
TELRGDFQNT

SEQ ID NO: 81345 - protein, 10 aa, synthetic construct
TEIRGDYTSV

SEQ ID NO: 81346 - protein, 10 aa, synthetic construct
TEIRGDLIGR

SEQ ID NO: 81347 - protein, 10 aa, synthetic construct
TEMRGDYTSV

SEQ ID NO: 81348 - protein, 10 aa, synthetic construct
TEMRGDLIGR

SEQ ID NO: 81349 - protein, 10 aa, synthetic construct
ELHRGDRQGI

SEQ ID NO: 81350 - protein, 10 aa, synthetic construct
TEWRGDYNSL

SEQ ID NO: 81351 - protein, 10 aa, synthetic construct
TEWRGDYTSM

SEQ ID NO: 81352 - protein, 10 aa, synthetic construct
TEWRGDFQNT

SEQ ID NO: 81353 - protein, 10 aa, synthetic construct
TEFRGDYTSV

SEQ ID NO: 81354 - protein, 10 aa, synthetic construct
TEFRGDLIGR

SEQ ID NO: 81355 - protein, 10 aa, synthetic construct
TEKRGDYTSV

SEQ ID NO: 81356 - protein, 10 aa, synthetic construct
TEKRGDLIGR

SEQ ID NO: 81357 - protein, 10 aa, synthetic construct
TERRGDFNNT

SEQ ID NO: 81358 - protein, 10 aa, synthetic construct
TERRGDFNNL

SEQ ID NO: 81359 - protein, 10 aa, synthetic construct
TEHRGDYNSL

SEQ ID NO: 81360 - protein, 10 aa, synthetic construct
ELHRGDRSVV

SEQ ID NO: 81361 - protein, 10 aa, synthetic construct
TEHRGDYTSM

SEQ ID NO: 81362 - protein, 10 aa, synthetic construct
TEHRGDFQNT

SEQ ID NO: 81363 - protein, 10 aa, synthetic construct
TESRGDYNSL

SEQ ID NO: 81364 - protein, 10 aa, synthetic construct
TESRGDYTSM

SEQ ID NO: 81365 - protein, 10 aa, synthetic construct
TESRGDFQNT

SEQ ID NO: 81366 - protein, 10 aa, synthetic construct
TETRGDYNSL

SEQ ID NO: 81367 - protein, 10 aa, synthetic construct
TETRGDYTSM

SEQ ID NO: 81368 - protein, 10 aa, synthetic construct
TETRGDFQNT

SEQ ID NO: 81369 - protein, 10 aa, synthetic construct
TEYRGDYTSV

SEQ ID NO: 81370 - protein, 10 aa, synthetic construct
TEYRGDLIGR

SEQ ID NO: 81371 - protein, 10 aa, synthetic construct
ELHRGDRGVV

SEQ ID NO: 81372 - protein, 10 aa, synthetic construct
TENRGDYTSV

SEQ ID NO: 81373 - protein, 10 aa, synthetic construct
TENRGDLIGR

SEQ ID NO: 81374 - protein, 10 aa, synthetic construct
TEQRGDYNSL

SEQ ID NO: 81375 - protein, 10 aa, synthetic construct
TEQRGDYTSM

SEQ ID NO: 81376 - protein, 10 aa, synthetic construct
TEQRGDFQNT

SEQ ID NO: 81377 - protein, 10 aa, synthetic construct
TEDRGDYNSL

SEQ ID NO: 81378 - protein, 10 aa, synthetic construct
TEDRGDYTSM

SEQ ID NO: 81379 - protein, 10 aa, synthetic construct
TEDRGDFQNT

SEQ ID NO: 81380 - protein, 10 aa, synthetic construct
TEERGDYNSL

SEQ ID NO: 81381 - protein, 10 aa, synthetic construct
TEERGDYTSM

SEQ ID NO: 81382 - protein, 10 aa, synthetic construct
ELHRGDRSQT

SEQ ID NO: 81383 - protein, 10 aa, synthetic construct
TEERGDFQNT

SEQ ID NO: 81384 - protein, 10 aa, synthetic construct
AGIRGDFQNT

SEQ ID NO: 81385 - protein, 10 aa, synthetic construct
AGMRGDFNNT

SEQ ID NO: 81386 - protein, 10 aa, synthetic construct
AGMRGDFNNL

SEQ ID NO: 81387 - protein, 10 aa, synthetic construct
AGFRGDFQNT

SEQ ID NO: 81388 - protein, 10 aa, synthetic construct
AGKRGDFQNT

SEQ ID NO: 81389 - protein, 10 aa, synthetic construct
AGHRGDFNNT

SEQ ID NO: 81390 - protein, 10 aa, synthetic construct
AGHRGDFNNL

SEQ ID NO: 81391 - protein, 10 aa, synthetic construct
AGTRGDFNNT

SEQ ID NO: 81392 - protein, 10 aa, synthetic construct
AGTRGDFNNL

SEQ ID NO: 81393 - protein, 10 aa, synthetic construct
ELSRGDRGQI

SEQ ID NO: 81394 - protein, 10 aa, synthetic construct
AGYRGDFQNT

SEQ ID NO: 81395 - protein, 10 aa, synthetic construct
AGNRGDFQNT

SEQ ID NO: 81396 - protein, 10 aa, synthetic construct
AGQRGDFNNT

SEQ ID NO: 81397 - protein, 10 aa, synthetic construct
AGQRGDFNNL

SEQ ID NO: 81398 - protein, 10 aa, synthetic construct
AGDRGDFNNT

SEQ ID NO: 81399 - protein, 10 aa, synthetic construct
AGDRGDFNNL

SEQ ID NO: 81400 - protein, 10 aa, synthetic construct
AGERGDFNNT

SEQ ID NO: 81401 - protein, 10 aa, synthetic construct
AGERGDFNNL

SEQ ID NO: 81402 - protein, 10 aa, synthetic construct
AAIRGDFQNT

SEQ ID NO: 81403 - protein, 10 aa, synthetic construct
AAMRGDFNNT

SEQ ID NO: 81404 - protein, 10 aa, synthetic construct
SFFRGDQSTL

SEQ ID NO: 81405 - protein, 10 aa, synthetic construct
ELSRGDRQGI

SEQ ID NO: 81406 - protein, 10 aa, synthetic construct
AAMRGDFNNL

SEQ ID NO: 81407 - protein, 10 aa, synthetic construct
AAFRGDFQNT

SEQ ID NO: 81408 - protein, 10 aa, synthetic construct
AAKRGDFQNT

SEQ ID NO: 81409 - protein, 10 aa, synthetic construct
AAHRGDFNNT

SEQ ID NO: 81410 - protein, 10 aa, synthetic construct
AAHRGDFNNL

SEQ ID NO: 81411 - protein, 10 aa, synthetic construct
AATRGDFNNT

SEQ ID NO: 81412 - protein, 10 aa, synthetic construct
AATRGDFNNL

SEQ ID NO: 81413 - protein, 10 aa, synthetic construct
AAYRGDFQNT

SEQ ID NO: 81414 - protein, 10 aa, synthetic construct
AANRGDFQNT

SEQ ID NO: 81415 - protein, 10 aa, synthetic construct
AAQRGDFNNT

SEQ ID NO: 81416 - protein, 10 aa, synthetic construct
ELSRGDRSVV

SEQ ID NO: 81417 - protein, 10 aa, synthetic construct
AAQRGDFNNL

SEQ ID NO: 81418 - protein, 10 aa, synthetic construct
AADRGDFNNT

SEQ ID NO: 81419 - protein, 10 aa, synthetic construct
AADRGDFNNL

SEQ ID NO: 81420 - protein, 10 aa, synthetic construct
AAERGDFNNT

SEQ ID NO: 81421 - protein, 10 aa, synthetic construct
AAERGDFNNL

SEQ ID NO: 81422 - protein, 10 aa, synthetic construct
AVGRGDFNNT

SEQ ID NO: 81423 - protein, 10 aa, synthetic construct
AVGRGDFNNL

SEQ ID NO: 81424 - protein, 10 aa, synthetic construct
AVARGDFNNT

SEQ ID NO: 81425 - protein, 10 aa, synthetic construct
AVARGDFNNL

SEQ ID NO: 81426 - protein, 10 aa, synthetic construct
AVVRGDFNNT

SEQ ID NO: 81427 - protein, 10 aa, synthetic construct
ELSRGDRGVV

SEQ ID NO: 81428 - protein, 10 aa, synthetic construct
AVVRGDFNNL

SEQ ID NO: 81429 - protein, 10 aa, synthetic construct
AVPRGDFNNT

SEQ ID NO: 81430 - protein, 10 aa, synthetic construct
AVPRGDFNNL

SEQ ID NO: 81431 - protein, 10 aa, synthetic construct
AVLRGDFNNT

SEQ ID NO: 81432 - protein, 10 aa, synthetic construct
AVLRGDFNNL

SEQ ID NO: 81433 - protein, 10 aa, synthetic construct
AVIRGDHVNL

SEQ ID NO: 81434 - protein, 10 aa, synthetic construct
AVIRGDYNSL

SEQ ID NO: 81435 - protein, 10 aa, synthetic construct
AVIRGDYTSM

SEQ ID NO: 81436 - protein, 10 aa, synthetic construct
AVMRGDYNSL

SEQ ID NO: 81437 - protein, 10 aa, synthetic construct
AVMRGDYTSM

SEQ ID NO: 81438 - protein, 10 aa, synthetic construct
ELSRGDRSQT

SEQ ID NO: 81439 - protein, 10 aa, synthetic construct
AVMRGDFQNT

SEQ ID NO: 81440 - protein, 10 aa, synthetic construct
AVWRGDFNNT

SEQ ID NO: 81441 - protein, 10 aa, synthetic construct
AVWRGDFNNL

SEQ ID NO: 81442 - protein, 10 aa, synthetic construct
AVFRGDHVNL

SEQ ID NO: 81443 - protein, 10 aa, synthetic construct
AVFRGDYNSL

SEQ ID NO: 81444 - protein, 10 aa, synthetic construct
AVFRGDYTSM

SEQ ID NO: 81445 - protein, 10 aa, synthetic construct
AVKRGDHVNL

SEQ ID NO: 81446 - protein, 10 aa, synthetic construct
AVKRGDYNSL

SEQ ID NO: 81447 - protein, 10 aa, synthetic construct
AVKRGDYTSM

SEQ ID NO: 81448 - protein, 10 aa, synthetic construct
AVRRGDFNNT

SEQ ID NO: 81449 - protein, 10 aa, synthetic construct
ELTRGDRGQI

SEQ ID NO: 81450 - protein, 10 aa, synthetic construct
AVRRGDFNNL

SEQ ID NO: 81451 - protein, 10 aa, synthetic construct
AVHRGDFQNT

SEQ ID NO: 81452 - protein, 10 aa, synthetic construct
AVSRGDFNNT

SEQ ID NO: 81453 - protein, 10 aa, synthetic construct
AVSRGDFNNL

SEQ ID NO: 81454 - protein, 10 aa, synthetic construct
AVTRGDFQNT

SEQ ID NO: 81455 - protein, 10 aa, synthetic construct
AVYRGDHVNL

SEQ ID NO: 81456 - protein, 10 aa, synthetic construct
AVYRGDYNSL

SEQ ID NO: 81457 - protein, 10 aa, synthetic construct
AVYRGDYTSM

SEQ ID NO: 81458 - protein, 10 aa, synthetic construct
AVNRGDHVNL

SEQ ID NO: 81459 - protein, 10 aa, synthetic construct
AVNRGDYNSL

SEQ ID NO: 81460 - protein, 10 aa, synthetic construct
ELTRGDRQGI

SEQ ID NO: 81461 - protein, 10 aa, synthetic construct
AVNRGDYTSM

SEQ ID NO: 81462 - protein, 10 aa, synthetic construct
AVQRGDFQNT

SEQ ID NO: 81463 - protein, 10 aa, synthetic construct
AVDRGDFQNT

SEQ ID NO: 81464 - protein, 10 aa, synthetic construct
AVERGDFQNT

SEQ ID NO: 81465 - protein, 10 aa, synthetic construct
APIRGDFQNT

SEQ ID NO: 81466 - protein, 10 aa, synthetic construct
APMRGDFNNT

SEQ ID NO: 81467 - protein, 10 aa, synthetic construct
APMRGDFNNL

SEQ ID NO: 81468 - protein, 10 aa, synthetic construct
APFRGDFQNT

SEQ ID NO: 81469 - protein, 10 aa, synthetic construct
APKRGDFQNT

SEQ ID NO: 81470 - protein, 10 aa, synthetic construct
APHRGDFNNT

SEQ ID NO: 81471 - protein, 10 aa, synthetic construct
ELTRGDRSVV

SEQ ID NO: 81472 - protein, 10 aa, synthetic construct
APHRGDFNNL

SEQ ID NO: 81473 - protein, 10 aa, synthetic construct
APTRGDFNNT

SEQ ID NO: 81474 - protein, 10 aa, synthetic construct
APTRGDFNNL

SEQ ID NO: 81475 - protein, 10 aa, synthetic construct
APYRGDFQNT

SEQ ID NO: 81476 - protein, 10 aa, synthetic construct
APNRGDFQNT

SEQ ID NO: 81477 - protein, 10 aa, synthetic construct
APQRGDFNNT

SEQ ID NO: 81478 - protein, 10 aa, synthetic construct
APQRGDFNNL

SEQ ID NO: 81479 - protein, 10 aa, synthetic construct
APDRGDFNNT

SEQ ID NO: 81480 - protein, 10 aa, synthetic construct
APDRGDFNNL

SEQ ID NO: 81481 - protein, 10 aa, synthetic construct
APERGDFNNT

SEQ ID NO: 81482 - protein, 10 aa, synthetic construct
ELTRGDRGVV

SEQ ID NO: 81483 - protein, 10 aa, synthetic construct
APERGDFNNL

SEQ ID NO: 81484 - protein, 10 aa, synthetic construct
ALGRGDFNNT

SEQ ID NO: 81485 - protein, 10 aa, synthetic construct
ALGRGDFNNL

SEQ ID NO: 81486 - protein, 10 aa, synthetic construct
ALARGDFNNT

SEQ ID NO: 81487 - protein, 10 aa, synthetic construct
ALARGDFNNL

SEQ ID NO: 81488 - protein, 10 aa, synthetic construct
ALVRGDFNNT

SEQ ID NO: 81489 - protein, 10 aa, synthetic construct
ALVRGDFNNL

SEQ ID NO: 81490 - protein, 10 aa, synthetic construct
ALPRGDFNNT

SEQ ID NO: 81491 - protein, 10 aa, synthetic construct
ALPRGDFNNL

SEQ ID NO: 81492 - protein, 10 aa, synthetic construct
ALLRGDFNNT

SEQ ID NO: 81493 - protein, 10 aa, synthetic construct
ELTRGDRSQT

SEQ ID NO: 81494 - protein, 10 aa, synthetic construct
ALLRGDFNNL

SEQ ID NO: 81495 - protein, 10 aa, synthetic construct
ALIRGDHVNL

SEQ ID NO: 81496 - protein, 10 aa, synthetic construct
ALIRGDYNSL

SEQ ID NO: 81497 - protein, 10 aa, synthetic construct
ALIRGDYTSM

SEQ ID NO: 81498 - protein, 10 aa, synthetic construct
ALMRGDYNSL

SEQ ID NO: 81499 - protein, 10 aa, synthetic construct
ALMRGDYTSM

SEQ ID NO: 81500 - protein, 10 aa, synthetic construct
ALMRGDFQNT

SEQ ID NO: 81501 - protein, 10 aa, synthetic construct
ALWRGDFNNT

SEQ ID NO: 81502 - protein, 10 aa, synthetic construct
ALWRGDFNNL

SEQ ID NO: 81503 - protein, 10 aa, synthetic construct
ALFRGDHVNL

SEQ ID NO: 81504 - protein, 10 aa, synthetic construct
ELQRGDRGQI

SEQ ID NO: 81505 - protein, 10 aa, synthetic construct
ALFRGDYNSL

SEQ ID NO: 81506 - protein, 10 aa, synthetic construct
ALFRGDYTSM

SEQ ID NO: 81507 - protein, 10 aa, synthetic construct
ALKRGDHVNL

SEQ ID NO: 81508 - protein, 10 aa, synthetic construct
ALKRGDYNSL

SEQ ID NO: 81509 - protein, 10 aa, synthetic construct
ALKRGDYTSM

SEQ ID NO: 81510 - protein, 10 aa, synthetic construct
ALRRGDFNNT

SEQ ID NO: 81511 - protein, 10 aa, synthetic construct
ALRRGDFNNL

SEQ ID NO: 81512 - protein, 10 aa, synthetic construct
ALHRGDFQNT

SEQ ID NO: 81513 - protein, 10 aa, synthetic construct
ALSRGDFNNT

SEQ ID NO: 81514 - protein, 10 aa, synthetic construct
ALSRGDFNNL

SEQ ID NO: 81515 - protein, 10 aa, synthetic construct
SFFRGDLLLS

SEQ ID NO: 81516 - protein, 10 aa, synthetic construct
ELQRGDRQGI

SEQ ID NO: 81517 - protein, 10 aa, synthetic construct
ALTRGDFQNT

SEQ ID NO: 81518 - protein, 10 aa, synthetic construct
ALYRGDHVNL

SEQ ID NO: 81519 - protein, 10 aa, synthetic construct
ALYRGDYNSL

SEQ ID NO: 81520 - protein, 10 aa, synthetic construct
ALYRGDYTSM

SEQ ID NO: 81521 - protein, 10 aa, synthetic construct
ALNRGDHVNL

SEQ ID NO: 81522 - protein, 10 aa, synthetic construct
ALNRGDYNSL

SEQ ID NO: 81523 - protein, 10 aa, synthetic construct
ALNRGDYTSM

SEQ ID NO: 81524 - protein, 10 aa, synthetic construct
ALQRGDFQNT

SEQ ID NO: 81525 - protein, 10 aa, synthetic construct
ALDRGDFQNT

SEQ ID NO: 81526 - protein, 10 aa, synthetic construct
ALERGDFQNT

SEQ ID NO: 81527 - protein, 10 aa, synthetic construct
ELQRGDRSVV

SEQ ID NO: 81528 - protein, 10 aa, synthetic construct
AIGRGDFQNT

SEQ ID NO: 81529 - protein, 10 aa, synthetic construct
AIARGDFQNT

SEQ ID NO: 81530 - protein, 10 aa, synthetic construct
AIVRGDFQNT

SEQ ID NO: 81531 - protein, 10 aa, synthetic construct
AIPRGDFQNT

SEQ ID NO: 81532 - protein, 10 aa, synthetic construct
AILRGDFQNT

SEQ ID NO: 81533 - protein, 10 aa, synthetic construct
AIIRGDRDYL

SEQ ID NO: 81534 - protein, 10 aa, synthetic construct
AIIRGDYVGL

SEQ ID NO: 81535 - protein, 10 aa, synthetic construct
AIIRGDYSSV

SEQ ID NO: 81536 - protein, 10 aa, synthetic construct
AIIRGDYTSV

SEQ ID NO: 81537 - protein, 10 aa, synthetic construct
AIIRGDQSTL

SEQ ID NO: 81538 - protein, 10 aa, synthetic construct
ELQRGDRGVV

SEQ ID NO: 81539 - protein, 10 aa, synthetic construct
AIMRGDYTSV

SEQ ID NO: 81540 - protein, 10 aa, synthetic construct
AIMRGDLIGR

SEQ ID NO: 81541 - protein, 10 aa, synthetic construct
AIWRGDYNSL

SEQ ID NO: 81542 - protein, 10 aa, synthetic construct
AIWRGDYTSM

SEQ ID NO: 81543 - protein, 10 aa, synthetic construct
AIWRGDFQNT

SEQ ID NO: 81544 - protein, 10 aa, synthetic construct
AIFRGDRDYL

SEQ ID NO: 81545 - protein, 10 aa, synthetic construct
AIFRGDYVGL

SEQ ID NO: 81546 - protein, 10 aa, synthetic construct
AIFRGDYSSV

SEQ ID NO: 81547 - protein, 10 aa, synthetic construct
AIFRGDYTSV

SEQ ID NO: 81548 - protein, 10 aa, synthetic construct
AIFRGDQSTL

SEQ ID NO: 81549 - protein, 10 aa, synthetic construct
ELQRGDRSQT

SEQ ID NO: 81550 - protein, 10 aa, synthetic construct
AIKRGDRDYL

SEQ ID NO: 81551 - protein, 10 aa, synthetic construct
AIKRGDYVGL

SEQ ID NO: 81552 - protein, 10 aa, synthetic construct
AIKRGDYSSV

SEQ ID NO: 81553 - protein, 10 aa, synthetic construct
AIKRGDYTSV

SEQ ID NO: 81554 - protein, 10 aa, synthetic construct
AIKRGDQSTL

SEQ ID NO: 81555 - protein, 10 aa, synthetic construct
AIRRGDFQNT

SEQ ID NO: 81556 - protein, 10 aa, synthetic construct
AIHRGDHVNL

SEQ ID NO: 81557 - protein, 10 aa, synthetic construct
AIHRGDYNSL

SEQ ID NO: 81558 - protein, 10 aa, synthetic construct
AIHRGDYTSM

SEQ ID NO: 81559 - protein, 10 aa, synthetic construct
AISRGDFQNT

SEQ ID NO: 81560 - protein, 10 aa, synthetic construct
ELDRGDRGQI

SEQ ID NO: 81561 - protein, 10 aa, synthetic construct
AITRGDHVNL

SEQ ID NO: 81562 - protein, 10 aa, synthetic construct
AITRGDYNSL

SEQ ID NO: 81563 - protein, 10 aa, synthetic construct
AITRGDYTSM

SEQ ID NO: 81564 - protein, 10 aa, synthetic construct
AIYRGDRDYL

SEQ ID NO: 81565 - protein, 10 aa, synthetic construct
AIYRGDYVGL

SEQ ID NO: 81566 - protein, 10 aa, synthetic construct
AIYRGDYSSV

SEQ ID NO: 81567 - protein, 10 aa, synthetic construct
AIYRGDYTSV

SEQ ID NO: 81568 - protein, 10 aa, synthetic construct
AIYRGDQSTL

SEQ ID NO: 81569 - protein, 10 aa, synthetic construct
AINRGDRDYL

SEQ ID NO: 81570 - protein, 10 aa, synthetic construct
AINRGDYVGL

SEQ ID NO: 81571 - protein, 10 aa, synthetic construct
ELDRGDRQGI

SEQ ID NO: 81572 - protein, 10 aa, synthetic construct
AINRGDYSSV

SEQ ID NO: 81573 - protein, 10 aa, synthetic construct
AINRGDYTSV

SEQ ID NO: 81574 - protein, 10 aa, synthetic construct
AINRGDQSTL

SEQ ID NO: 81575 - protein, 10 aa, synthetic construct
AIQRGDHVNL

SEQ ID NO: 81576 - protein, 10 aa, synthetic construct
AIQRGDYNSL

SEQ ID NO: 81577 - protein, 10 aa, synthetic construct
AIQRGDYTSM

SEQ ID NO: 81578 - protein, 10 aa, synthetic construct
AIDRGDHVNL

SEQ ID NO: 81579 - protein, 10 aa, synthetic construct
AIDRGDYNSL

SEQ ID NO: 81580 - protein, 10 aa, synthetic construct
AIDRGDYTSM

SEQ ID NO: 81581 - protein, 10 aa, synthetic construct
AIERGDHVNL

SEQ ID NO: 81582 - protein, 10 aa, synthetic construct
ELDRGDRSVV

SEQ ID NO: 81583 - protein, 10 aa, synthetic construct
AIERGDYNSL

SEQ ID NO: 81584 - protein, 10 aa, synthetic construct
AIERGDYTSM

SEQ ID NO: 81585 - protein, 10 aa, synthetic construct
AMGRGDFQNT

SEQ ID NO: 81586 - protein, 10 aa, synthetic construct
AMARGDFQNT

SEQ ID NO: 81587 - protein, 10 aa, synthetic construct
AMVRGDFQNT

SEQ ID NO: 81588 - protein, 10 aa, synthetic construct
AMPRGDFQNT

SEQ ID NO: 81589 - protein, 10 aa, synthetic construct
AMLRGDFQNT

SEQ ID NO: 81590 - protein, 10 aa, synthetic construct
AMIRGDRDYL

SEQ ID NO: 81591 - protein, 10 aa, synthetic construct
AMIRGDYVGL

SEQ ID NO: 81592 - protein, 10 aa, synthetic construct
AMIRGDYSSV

SEQ ID NO: 81593 - protein, 10 aa, synthetic construct
ELDRGDRGVV

SEQ ID NO: 81594 - protein, 10 aa, synthetic construct
AMIRGDYTSV

SEQ ID NO: 81595 - protein, 10 aa, synthetic construct
AMIRGDQSTL

SEQ ID NO: 81596 - protein, 10 aa, synthetic construct
AMMRGDYTSV

SEQ ID NO: 81597 - protein, 10 aa, synthetic construct
AMMRGDLIGR

SEQ ID NO: 81598 - protein, 10 aa, synthetic construct
AMWRGDYNSL

SEQ ID NO: 81599 - protein, 10 aa, synthetic construct
AMWRGDYTSM

SEQ ID NO: 81600 - protein, 10 aa, synthetic construct
AMWRGDFQNT

SEQ ID NO: 81601 - protein, 10 aa, synthetic construct
AMFRGDRDYL

SEQ ID NO: 81602 - protein, 10 aa, synthetic construct
AMFRGDYVGL

SEQ ID NO: 81603 - protein, 10 aa, synthetic construct
AMFRGDYSSV

SEQ ID NO: 81604 - protein, 10 aa, synthetic construct
ELDRGDRSQT

SEQ ID NO: 81605 - protein, 10 aa, synthetic construct
AMFRGDYTSV

SEQ ID NO: 81606 - protein, 10 aa, synthetic construct
AMFRGDQSTL

SEQ ID NO: 81607 - protein, 10 aa, synthetic construct
AMKRGDRDYL

SEQ ID NO: 81608 - protein, 10 aa, synthetic construct
AMKRGDYVGL

SEQ ID NO: 81609 - protein, 10 aa, synthetic construct
AMKRGDYSSV

SEQ ID NO: 81610 - protein, 10 aa, synthetic construct
AMKRGDYTSV

SEQ ID NO: 81611 - protein, 10 aa, synthetic construct
AMKRGDQSTL

SEQ ID NO: 81612 - protein, 10 aa, synthetic construct
AMRRGDFQNT

SEQ ID NO: 81613 - protein, 10 aa, synthetic construct
AMHRGDHVNL

SEQ ID NO: 81614 - protein, 10 aa, synthetic construct
AMHRGDYNSL

SEQ ID NO: 81615 - protein, 10 aa, synthetic construct
ELERGDRGQI

SEQ ID NO: 81616 - protein, 10 aa, synthetic construct
AMHRGDYTSM

SEQ ID NO: 81617 - protein, 10 aa, synthetic construct
AMSRGDFQNT

SEQ ID NO: 81618 - protein, 10 aa, synthetic construct
AMTRGDHVNL

SEQ ID NO: 81619 - protein, 10 aa, synthetic construct
AMTRGDYNSL

SEQ ID NO: 81620 - protein, 10 aa, synthetic construct
AMTRGDYTSM

SEQ ID NO: 81621 - protein, 10 aa, synthetic construct
AMYRGDRDYL

SEQ ID NO: 81622 - protein, 10 aa, synthetic construct
AMYRGDYVGL

SEQ ID NO: 81623 - protein, 10 aa, synthetic construct
AMYRGDYSSV

SEQ ID NO: 81624 - protein, 10 aa, synthetic construct
AMYRGDYTSV

SEQ ID NO: 81625 - protein, 10 aa, synthetic construct
AMYRGDQSTL

SEQ ID NO: 81626 - protein, 10 aa, synthetic construct
TFFRGDHGVL

SEQ ID NO: 81627 - protein, 10 aa, synthetic construct
ELERGDRQGI

SEQ ID NO: 81628 - protein, 10 aa, synthetic construct
AMNRGDRDYL

SEQ ID NO: 81629 - protein, 10 aa, synthetic construct
AMNRGDYVGL

SEQ ID NO: 81630 - protein, 10 aa, synthetic construct
AMNRGDYSSV

SEQ ID NO: 81631 - protein, 10 aa, synthetic construct
AMNRGDYTSV

SEQ ID NO: 81632 - protein, 10 aa, synthetic construct
AMNRGDQSTL

SEQ ID NO: 81633 - protein, 10 aa, synthetic construct
AMQRGDHVNL

SEQ ID NO: 81634 - protein, 10 aa, synthetic construct
AMQRGDYNSL

SEQ ID NO: 81635 - protein, 10 aa, synthetic construct
AMQRGDYTSM

SEQ ID NO: 81636 - protein, 10 aa, synthetic construct
AMDRGDHVNL

SEQ ID NO: 81637 - protein, 10 aa, synthetic construct
AMDRGDYNSL

SEQ ID NO: 81638 - protein, 10 aa, synthetic construct
ELERGDRSVV

SEQ ID NO: 81639 - protein, 10 aa, synthetic construct
AMDRGDYTSM

SEQ ID NO: 81640 - protein, 10 aa, synthetic construct
AMERGDHVNL

SEQ ID NO: 81641 - protein, 10 aa, synthetic construct
AMERGDYNSL

SEQ ID NO: 81642 - protein, 10 aa, synthetic construct
AMERGDYTSM

SEQ ID NO: 81643 - protein, 10 aa, synthetic construct
AWGRGDFNNT

SEQ ID NO: 81644 - protein, 10 aa, synthetic construct
AWGRGDFNNL

SEQ ID NO: 81645 - protein, 10 aa, synthetic construct
AWARGDFNNT

SEQ ID NO: 81646 - protein, 10 aa, synthetic construct
AWARGDFNNL

SEQ ID NO: 81647 - protein, 10 aa, synthetic construct
AWVRGDFNNT

SEQ ID NO: 81648 - protein, 10 aa, synthetic construct
AWVRGDFNNL

SEQ ID NO: 81649 - protein, 10 aa, synthetic construct
ELERGDRGVV

SEQ ID NO: 81650 - protein, 10 aa, synthetic construct
AWPRGDFNNT

SEQ ID NO: 81651 - protein, 10 aa, synthetic construct
AWPRGDFNNL

SEQ ID NO: 81652 - protein, 10 aa, synthetic construct
AWLRGDFNNT

SEQ ID NO: 81653 - protein, 10 aa, synthetic construct
AWLRGDFNNL

SEQ ID NO: 81654 - protein, 10 aa, synthetic construct
AWIRGDHVNL

SEQ ID NO: 81655 - protein, 10 aa, synthetic construct
AWIRGDYNSL

SEQ ID NO: 81656 - protein, 10 aa, synthetic construct
AWIRGDYTSM

SEQ ID NO: 81657 - protein, 10 aa, synthetic construct
AWMRGDYNSL

SEQ ID NO: 81658 - protein, 10 aa, synthetic construct
AWMRGDYTSM

SEQ ID NO: 81659 - protein, 10 aa, synthetic construct
AWMRGDFQNT

SEQ ID NO: 81660 - protein, 10 aa, synthetic construct
ELERGDRSQT

SEQ ID NO: 81661 - protein, 10 aa, synthetic construct
AWWRGDFNNT

SEQ ID NO: 81662 - protein, 10 aa, synthetic construct
AWWRGDFNNL

SEQ ID NO: 81663 - protein, 10 aa, synthetic construct
AWFRGDHVNL

SEQ ID NO: 81664 - protein, 10 aa, synthetic construct
AWFRGDYNSL

SEQ ID NO: 81665 - protein, 10 aa, synthetic construct
AWFRGDYTSM

SEQ ID NO: 81666 - protein, 10 aa, synthetic construct
AWKRGDHVNL

SEQ ID NO: 81667 - protein, 10 aa, synthetic construct
AWKRGDYNSL

SEQ ID NO: 81668 - protein, 10 aa, synthetic construct
AWKRGDYTSM

SEQ ID NO: 81669 - protein, 10 aa, synthetic construct
AWRRGDFNNT

SEQ ID NO: 81670 - protein, 10 aa, synthetic construct
AWRRGDFNNL

SEQ ID NO: 81671 - protein, 10 aa, synthetic construct
EMGRGDRGVV

SEQ ID NO: 81672 - protein, 10 aa, synthetic construct
AWHRGDFQNT

SEQ ID NO: 81673 - protein, 10 aa, synthetic construct
AWSRGDFNNT

SEQ ID NO: 81674 - protein, 10 aa, synthetic construct
AWSRGDFNNL

SEQ ID NO: 81675 - protein, 10 aa, synthetic construct
AWTRGDFQNT

SEQ ID NO: 81676 - protein, 10 aa, synthetic construct
AWYRGDHVNL

SEQ ID NO: 81677 - protein, 10 aa, synthetic construct
AWYRGDYNSL

SEQ ID NO: 81678 - protein, 10 aa, synthetic construct
AWYRGDYTSM

SEQ ID NO: 81679 - protein, 10 aa, synthetic construct
AWNRGDHVNL

SEQ ID NO: 81680 - protein, 10 aa, synthetic construct
AWNRGDYNSL

SEQ ID NO: 81681 - protein, 10 aa, synthetic construct
AWNRGDYTSM

SEQ ID NO: 81682 - protein, 10 aa, synthetic construct
EMARGDRGVV

SEQ ID NO: 81683 - protein, 10 aa, synthetic construct
AWQRGDFQNT

SEQ ID NO: 81684 - protein, 10 aa, synthetic construct
AWDRGDFQNT

SEQ ID NO: 81685 - protein, 10 aa, synthetic construct
AWERGDFQNT

SEQ ID NO: 81686 - protein, 10 aa, synthetic construct
AFGRGDFQNT

SEQ ID NO: 81687 - protein, 10 aa, synthetic construct
AFARGDFQNT

SEQ ID NO: 81688 - protein, 10 aa, synthetic construct
AFVRGDFQNT

SEQ ID NO: 81689 - protein, 10 aa, synthetic construct
AFPRGDFQNT

SEQ ID NO: 81690 - protein, 10 aa, synthetic construct
AFLRGDFQNT

SEQ ID NO: 81691 - protein, 10 aa, synthetic construct
AFIRGDRDYL

SEQ ID NO: 81692 - protein, 10 aa, synthetic construct
AFIRGDYVGL

SEQ ID NO: 81693 - protein, 10 aa, synthetic construct
EMVRGDRGVV

SEQ ID NO: 81694 - protein, 10 aa, synthetic construct
AFIRGDYSSV

SEQ ID NO: 81695 - protein, 10 aa, synthetic construct
AFIRGDYTSV

SEQ ID NO: 81696 - protein, 10 aa, synthetic construct
AFIRGDQSTL

SEQ ID NO: 81697 - protein, 10 aa, synthetic construct
AFMRGDYTSV

SEQ ID NO: 81698 - protein, 10 aa, synthetic construct
AFMRGDLIGR

SEQ ID NO: 81699 - protein, 10 aa, synthetic construct
AFWRGDYNSL

SEQ ID NO: 81700 - protein, 10 aa, synthetic construct
AFWRGDYTSM

SEQ ID NO: 81701 - protein, 10 aa, synthetic construct
AFWRGDFQNT

SEQ ID NO: 81702 - protein, 10 aa, synthetic construct
AFFRGDRDYL

SEQ ID NO: 81703 - protein, 10 aa, synthetic construct
AFFRGDYVGL

SEQ ID NO: 81704 - protein, 10 aa, synthetic construct
EMVRGDLTVT

SEQ ID NO: 81705 - protein, 10 aa, synthetic construct
AFFRGDYSSV

SEQ ID NO: 81706 - protein, 10 aa, synthetic construct
AFFRGDYTSV

SEQ ID NO: 81707 - protein, 10 aa, synthetic construct
AFFRGDQSTL

SEQ ID NO: 81708 - protein, 10 aa, synthetic construct
AFKRGDRDYL

SEQ ID NO: 81709 - protein, 10 aa, synthetic construct
AFKRGDYVGL

SEQ ID NO: 81710 - protein, 10 aa, synthetic construct
AFKRGDYSSV

SEQ ID NO: 81711 - protein, 10 aa, synthetic construct
AFKRGDYTSV

SEQ ID NO: 81712 - protein, 10 aa, synthetic construct
AFKRGDQSTL

SEQ ID NO: 81713 - protein, 10 aa, synthetic construct
AFRRGDFQNT

SEQ ID NO: 81714 - protein, 10 aa, synthetic construct
AFHRGDHVNL

SEQ ID NO: 81715 - protein, 10 aa, synthetic construct
EMVRGDLLLS

SEQ ID NO: 81716 - protein, 10 aa, synthetic construct
AFHRGDYNSL

SEQ ID NO: 81717 - protein, 10 aa, synthetic construct
AFHRGDYTSM

SEQ ID NO: 81718 - protein, 10 aa, synthetic construct
AFSRGDFQNT

SEQ ID NO: 81719 - protein, 10 aa, synthetic construct
AFTRGDHVNL

SEQ ID NO: 81720 - protein, 10 aa, synthetic construct
AFTRGDYNSL

SEQ ID NO: 81721 - protein, 10 aa, synthetic construct
AFTRGDYTSM

SEQ ID NO: 81722 - protein, 10 aa, synthetic construct
AFYRGDRDYL

SEQ ID NO: 81723 - protein, 10 aa, synthetic construct
AFYRGDYVGL

SEQ ID NO: 81724 - protein, 10 aa, synthetic construct
AFYRGDYSSV

SEQ ID NO: 81725 - protein, 10 aa, synthetic construct
AFYRGDYTSV

SEQ ID NO: 81726 - protein, 10 aa, synthetic construct
EMPRGDRGVV

SEQ ID NO: 81727 - protein, 10 aa, synthetic construct
AFYRGDQSTL

SEQ ID NO: 81728 - protein, 10 aa, synthetic construct
AFNRGDRDYL

SEQ ID NO: 81729 - protein, 10 aa, synthetic construct
AFNRGDYVGL

SEQ ID NO: 81730 - protein, 10 aa, synthetic construct
AFNRGDYSSV

SEQ ID NO: 81731 - protein, 10 aa, synthetic construct
AFNRGDYTSV

SEQ ID NO: 81732 - protein, 10 aa, synthetic construct
AFNRGDQSTL

SEQ ID NO: 81733 - protein, 10 aa, synthetic construct
AFQRGDHVNL

SEQ ID NO: 81734 - protein, 10 aa, synthetic construct
AFQRGDYNSL

SEQ ID NO: 81735 - protein, 10 aa, synthetic construct
AFQRGDYTSM

SEQ ID NO: 81736 - protein, 10 aa, synthetic construct
AFDRGDHVNL

SEQ ID NO: 81737 - protein, 10 aa, synthetic construct
SKNRGDRSQT

SEQ ID NO: 81738 - protein, 10 aa, synthetic construct
TKKRGDRGVV

SEQ ID NO: 81739 - protein, 10 aa, synthetic construct
TFFRGDRGQI

SEQ ID NO: 81740 - protein, 10 aa, synthetic construct
EMLRGDRGVV

SEQ ID NO: 81741 - protein, 10 aa, synthetic construct
AFDRGDYNSL

SEQ ID NO: 81742 - protein, 10 aa, synthetic construct
AFDRGDYTSM

SEQ ID NO: 81743 - protein, 10 aa, synthetic construct
AFERGDHVNL

SEQ ID NO: 81744 - protein, 10 aa, synthetic construct
AFERGDYNSL

SEQ ID NO: 81745 - protein, 10 aa, synthetic construct
AFERGDYTSM

SEQ ID NO: 81746 - protein, 10 aa, synthetic construct
AKGRGDFQNT

SEQ ID NO: 81747 - protein, 10 aa, synthetic construct
AKARGDFQNT

SEQ ID NO: 81748 - protein, 10 aa, synthetic construct
AKVRGDFQNT

SEQ ID NO: 81749 - protein, 10 aa, synthetic construct
AKPRGDFQNT

SEQ ID NO: 81750 - protein, 10 aa, synthetic construct
AKLRGDFQNT

SEQ ID NO: 81751 - protein, 10 aa, synthetic construct
EMLRGDLTVT

SEQ ID NO: 81752 - protein, 10 aa, synthetic construct
AKIRGDRDYL

SEQ ID NO: 81753 - protein, 10 aa, synthetic construct
AKIRGDYVGL

SEQ ID NO: 81754 - protein, 10 aa, synthetic construct
AKIRGDYSSV

SEQ ID NO: 81755 - protein, 10 aa, synthetic construct
AKIRGDYTSV

SEQ ID NO: 81756 - protein, 10 aa, synthetic construct
AKIRGDQSTL

SEQ ID NO: 81757 - protein, 10 aa, synthetic construct
AKMRGDYTSV

SEQ ID NO: 81758 - protein, 10 aa, synthetic construct
AKMRGDLIGR

SEQ ID NO: 81759 - protein, 10 aa, synthetic construct
AKWRGDYNSL

SEQ ID NO: 81760 - protein, 10 aa, synthetic construct
AKWRGDYTSM

SEQ ID NO: 81761 - protein, 10 aa, synthetic construct
AKWRGDFQNT

SEQ ID NO: 81762 - protein, 10 aa, synthetic construct
EMLRGDLLLS

SEQ ID NO: 81763 - protein, 10 aa, synthetic construct
AKFRGDRDYL

SEQ ID NO: 81764 - protein, 10 aa, synthetic construct
AKFRGDYVGL

SEQ ID NO: 81765 - protein, 10 aa, synthetic construct
AKFRGDYSSV

SEQ ID NO: 81766 - protein, 10 aa, synthetic construct
AKFRGDYTSV

SEQ ID NO: 81767 - protein, 10 aa, synthetic construct
AKFRGDQSTL

SEQ ID NO: 81768 - protein, 10 aa, synthetic construct
AKKRGDRDYL

SEQ ID NO: 81769 - protein, 10 aa, synthetic construct
AKKRGDYVGL

SEQ ID NO: 81770 - protein, 10 aa, synthetic construct
AKKRGDYSSV

SEQ ID NO: 81771 - protein, 10 aa, synthetic construct
AKKRGDYTSV

SEQ ID NO: 81772 - protein, 10 aa, synthetic construct
AKKRGDQSTL

SEQ ID NO: 81773 - protein, 10 aa, synthetic construct
EMRRGDRGVV

SEQ ID NO: 81774 - protein, 10 aa, synthetic construct
AKRRGDFQNT

SEQ ID NO: 81775 - protein, 10 aa, synthetic construct
AKHRGDHVNL

SEQ ID NO: 81776 - protein, 10 aa, synthetic construct
AKHRGDYNSL

SEQ ID NO: 81777 - protein, 10 aa, synthetic construct
AKHRGDYTSM

SEQ ID NO: 81778 - protein, 10 aa, synthetic construct
AKSRGDFQNT

SEQ ID NO: 81779 - protein, 10 aa, synthetic construct
AKTRGDHVNL

SEQ ID NO: 81780 - protein, 10 aa, synthetic construct
AKTRGDYNSL

SEQ ID NO: 81781 - protein, 10 aa, synthetic construct
AKTRGDYTSM

SEQ ID NO: 81782 - protein, 10 aa, synthetic construct
AKYRGDRDYL

SEQ ID NO: 81783 - protein, 10 aa, synthetic construct
AKYRGDYVGL

SEQ ID NO: 81784 - protein, 10 aa, synthetic construct
EMSRGDRGVV

SEQ ID NO: 81785 - protein, 10 aa, synthetic construct
AKYRGDYSSV

SEQ ID NO: 81786 - protein, 10 aa, synthetic construct
AKYRGDYTSV

SEQ ID NO: 81787 - protein, 10 aa, synthetic construct
AKYRGDQSTL

SEQ ID NO: 81788 - protein, 10 aa, synthetic construct
AKNRGDRDYL

SEQ ID NO: 81789 - protein, 10 aa, synthetic construct
AKNRGDYVGL

SEQ ID NO: 81790 - protein, 10 aa, synthetic construct
AKNRGDYSSV

SEQ ID NO: 81791 - protein, 10 aa, synthetic construct
AKNRGDYTSV

SEQ ID NO: 81792 - protein, 10 aa, synthetic construct
AKNRGDQSTL

SEQ ID NO: 81793 - protein, 10 aa, synthetic construct
AKQRGDHVNL

SEQ ID NO: 81794 - protein, 10 aa, synthetic construct
AKQRGDYNSL

SEQ ID NO: 81795 - protein, 10 aa, synthetic construct
EMSRGDLTVT

SEQ ID NO: 81796 - protein, 10 aa, synthetic construct
AKQRGDYTSM

SEQ ID NO: 81797 - protein, 10 aa, synthetic construct
AKDRGDHVNL

SEQ ID NO: 81798 - protein, 10 aa, synthetic construct
AKDRGDYNSL

SEQ ID NO: 81799 - protein, 10 aa, synthetic construct
AKDRGDYTSM

SEQ ID NO: 81800 - protein, 10 aa, synthetic construct
AKERGDHVNL

SEQ ID NO: 81801 - protein, 10 aa, synthetic construct
AKERGDYNSL

SEQ ID NO: 81802 - protein, 10 aa, synthetic construct
AKERGDYTSM

SEQ ID NO: 81803 - protein, 10 aa, synthetic construct
ARIRGDFQNT

SEQ ID NO: 81804 - protein, 10 aa, synthetic construct
ARMRGDFNNT

SEQ ID NO: 81805 - protein, 10 aa, synthetic construct
ARMRGDFNNL

SEQ ID NO: 81806 - protein, 10 aa, synthetic construct
EMSRGDLLLS

SEQ ID NO: 81807 - protein, 10 aa, synthetic construct
ARFRGDFQNT

SEQ ID NO: 81808 - protein, 10 aa, synthetic construct
ARKRGDFQNT

SEQ ID NO: 81809 - protein, 10 aa, synthetic construct
ARHRGDFNNT

SEQ ID NO: 81810 - protein, 10 aa, synthetic construct
ARHRGDFNNL

SEQ ID NO: 81811 - protein, 10 aa, synthetic construct
ARTRGDFNNT

SEQ ID NO: 81812 - protein, 10 aa, synthetic construct
ARTRGDFNNL

SEQ ID NO: 81813 - protein, 10 aa, synthetic construct
ARYRGDFQNT

SEQ ID NO: 81814 - protein, 10 aa, synthetic construct
ARNRGDFQNT

SEQ ID NO: 81815 - protein, 10 aa, synthetic construct
ARQRGDFNNT

SEQ ID NO: 81816 - protein, 10 aa, synthetic construct
ARQRGDFNNL

SEQ ID NO: 81817 - protein, 10 aa, synthetic construct
EWGRGDHGVL

SEQ ID NO: 81818 - protein, 10 aa, synthetic construct
ARDRGDFNNT

SEQ ID NO: 81819 - protein, 10 aa, synthetic construct
ARDRGDFNNL

SEQ ID NO: 81820 - protein, 10 aa, synthetic construct
ARERGDFNNT

SEQ ID NO: 81821 - protein, 10 aa, synthetic construct
ARERGDFNNL

SEQ ID NO: 81822 - protein, 10 aa, synthetic construct
AHGRGDFNNT

SEQ ID NO: 81823 - protein, 10 aa, synthetic construct
AHGRGDFNNL

SEQ ID NO: 81824 - protein, 10 aa, synthetic construct
AHARGDFNNT

SEQ ID NO: 81825 - protein, 10 aa, synthetic construct
AHARGDFNNL

SEQ ID NO: 81826 - protein, 10 aa, synthetic construct
AHVRGDFNNT

SEQ ID NO: 81827 - protein, 10 aa, synthetic construct
AHVRGDFNNL

SEQ ID NO: 81828 - protein, 10 aa, synthetic construct
EWGRGDRGQI

SEQ ID NO: 81829 - protein, 10 aa, synthetic construct
AHPRGDFNNT

SEQ ID NO: 81830 - protein, 10 aa, synthetic construct
AHPRGDFNNL

SEQ ID NO: 81831 - protein, 10 aa, synthetic construct
AHLRGDFNNT

SEQ ID NO: 81832 - protein, 10 aa, synthetic construct
AHLRGDFNNL

SEQ ID NO: 81833 - protein, 10 aa, synthetic construct
AHIRGDHVNL

SEQ ID NO: 81834 - protein, 10 aa, synthetic construct
AHIRGDYNSL

SEQ ID NO: 81835 - protein, 10 aa, synthetic construct
AHIRGDYTSM

SEQ ID NO: 81836 - protein, 10 aa, synthetic construct
AHMRGDYNSL

SEQ ID NO: 81837 - protein, 10 aa, synthetic construct
AHMRGDYTSM

SEQ ID NO: 81838 - protein, 10 aa, synthetic construct
AHMRGDFQNT

SEQ ID NO: 81839 - protein, 10 aa, synthetic construct
EWGRGDRQGI

SEQ ID NO: 81840 - protein, 10 aa, synthetic construct
AHWRGDFNNT

SEQ ID NO: 81841 - protein, 10 aa, synthetic construct
AHWRGDFNNL

SEQ ID NO: 81842 - protein, 10 aa, synthetic construct
AHFRGDHVNL

SEQ ID NO: 81843 - protein, 10 aa, synthetic construct
AHFRGDYNSL

SEQ ID NO: 81844 - protein, 10 aa, synthetic construct
AHFRGDYTSM

SEQ ID NO: 81845 - protein, 10 aa, synthetic construct
AHKRGDHVNL

SEQ ID NO: 81846 - protein, 10 aa, synthetic construct
AHKRGDYNSL

SEQ ID NO: 81847 - protein, 10 aa, synthetic construct
AHKRGDYTSM

SEQ ID NO: 81848 - protein, 10 aa, synthetic construct
AHRRGDFNNT

SEQ ID NO: 81849 - protein, 10 aa, synthetic construct
AHRRGDFNNL

SEQ ID NO: 81850 - protein, 10 aa, synthetic construct
TFFRGDRQGI

SEQ ID NO: 81851 - protein, 10 aa, synthetic construct
EWGRGDRSVV

SEQ ID NO: 81852 - protein, 10 aa, synthetic construct
AHHRGDFQNT

SEQ ID NO: 81853 - protein, 10 aa, synthetic construct
AHSRGDFNNT

SEQ ID NO: 81854 - protein, 10 aa, synthetic construct
AHSRGDFNNL

SEQ ID NO: 81855 - protein, 10 aa, synthetic construct
AHTRGDFQNT

SEQ ID NO: 81856 - protein, 10 aa, synthetic construct
AHYRGDHVNL

SEQ ID NO: 81857 - protein, 10 aa, synthetic construct
AHYRGDYNSL

SEQ ID NO: 81858 - protein, 10 aa, synthetic construct
AHYRGDYTSM

SEQ ID NO: 81859 - protein, 10 aa, synthetic construct
AHNRGDHVNL

SEQ ID NO: 81860 - protein, 10 aa, synthetic construct
AHNRGDYNSL

SEQ ID NO: 81861 - protein, 10 aa, synthetic construct
AHNRGDYTSM

SEQ ID NO: 81862 - protein, 10 aa, synthetic construct
EWGRGDLTVT

SEQ ID NO: 81863 - protein, 10 aa, synthetic construct
AHQRGDFQNT

SEQ ID NO: 81864 - protein, 10 aa, synthetic construct
AHDRGDFQNT

SEQ ID NO: 81865 - protein, 10 aa, synthetic construct
AHERGDFQNT

SEQ ID NO: 81866 - protein, 10 aa, synthetic construct
ASGRGDFNNT

SEQ ID NO: 81867 - protein, 10 aa, synthetic construct
ASGRGDFNNL

SEQ ID NO: 81868 - protein, 10 aa, synthetic construct
ASARGDFNNT

SEQ ID NO: 81869 - protein, 10 aa, synthetic construct
ASARGDFNNL

SEQ ID NO: 81870 - protein, 10 aa, synthetic construct
ASVRGDFNNT

SEQ ID NO: 81871 - protein, 10 aa, synthetic construct
ASVRGDFNNL

SEQ ID NO: 81872 - protein, 10 aa, synthetic construct
ASPRGDFNNT

SEQ ID NO: 81873 - protein, 10 aa, synthetic construct
EWGRGDLIGR

SEQ ID NO: 81874 - protein, 10 aa, synthetic construct
ASPRGDFNNL

SEQ ID NO: 81875 - protein, 10 aa, synthetic construct
ASLRGDFNNT

SEQ ID NO: 81876 - protein, 10 aa, synthetic construct
ASLRGDFNNL

SEQ ID NO: 81877 - protein, 10 aa, synthetic construct
ASIRGDHVNL

SEQ ID NO: 81878 - protein, 10 aa, synthetic construct
ASIRGDYNSL

SEQ ID NO: 81879 - protein, 10 aa, synthetic construct
ASIRGDYTSM

SEQ ID NO: 81880 - protein, 10 aa, synthetic construct
ASMRGDYNSL

SEQ ID NO: 81881 - protein, 10 aa, synthetic construct
ASMRGDYTSM

SEQ ID NO: 81882 - protein, 10 aa, synthetic construct
ASMRGDFQNT

SEQ ID NO: 81883 - protein, 10 aa, synthetic construct
ASWRGDFNNT

SEQ ID NO: 81884 - protein, 10 aa, synthetic construct
EWGRGDRSQT

SEQ ID NO: 81885 - protein, 10 aa, synthetic construct
ASWRGDFNNL

SEQ ID NO: 81886 - protein, 10 aa, synthetic construct
ASFRGDHVNL

SEQ ID NO: 81887 - protein, 10 aa, synthetic construct
ASFRGDYNSL

SEQ ID NO: 81888 - protein, 10 aa, synthetic construct
ASFRGDYTSM

SEQ ID NO: 81889 - protein, 10 aa, synthetic construct
ASKRGDHVNL

SEQ ID NO: 81890 - protein, 10 aa, synthetic construct
ASKRGDYNSL

SEQ ID NO: 81891 - protein, 10 aa, synthetic construct
ASKRGDYTSM

SEQ ID NO: 81892 - protein, 10 aa, synthetic construct
ASRRGDFNNT

SEQ ID NO: 81893 - protein, 10 aa, synthetic construct
ASRRGDFNNL

SEQ ID NO: 81894 - protein, 10 aa, synthetic construct
ASHRGDFQNT

SEQ ID NO: 81895 - protein, 10 aa, synthetic construct
EWGRGDLLLS

SEQ ID NO: 81896 - protein, 10 aa, synthetic construct
ASSRGDFNNT

SEQ ID NO: 81897 - protein, 10 aa, synthetic construct
ASSRGDFNNL

SEQ ID NO: 81898 - protein, 10 aa, synthetic construct
ASTRGDFQNT

SEQ ID NO: 81899 - protein, 10 aa, synthetic construct
ASYRGDHVNL

SEQ ID NO: 81900 - protein, 10 aa, synthetic construct
ASYRGDYNSL

SEQ ID NO: 81901 - protein, 10 aa, synthetic construct
ASYRGDYTSM

SEQ ID NO: 81902 - protein, 10 aa, synthetic construct
ASNRGDHVNL

SEQ ID NO: 81903 - protein, 10 aa, synthetic construct
ASNRGDYNSL

SEQ ID NO: 81904 - protein, 10 aa, synthetic construct
ASNRGDYTSM

SEQ ID NO: 81905 - protein, 10 aa, synthetic construct
ASQRGDFQNT

SEQ ID NO: 81906 - protein, 10 aa, synthetic construct
EWARGDHGVL

SEQ ID NO: 81907 - protein, 10 aa, synthetic construct
ASDRGDFQNT

SEQ ID NO: 81908 - protein, 10 aa, synthetic construct
ASERGDFQNT

SEQ ID NO: 81909 - protein, 10 aa, synthetic construct
ATGRGDFNNT

SEQ ID NO: 81910 - protein, 10 aa, synthetic construct
ATGRGDFNNL

SEQ ID NO: 81911 - protein, 10 aa, synthetic construct
ATARGDFNNT

SEQ ID NO: 81912 - protein, 10 aa, synthetic construct
ATARGDFNNL

SEQ ID NO: 81913 - protein, 10 aa, synthetic construct
ATVRGDFNNT

SEQ ID NO: 81914 - protein, 10 aa, synthetic construct
ATVRGDFNNL

SEQ ID NO: 81915 - protein, 10 aa, synthetic construct
ATPRGDFNNT

SEQ ID NO: 81916 - protein, 10 aa, synthetic construct
ATPRGDFNNL

SEQ ID NO: 81917 - protein, 10 aa, synthetic construct
EWARGDRGQI

SEQ ID NO: 81918 - protein, 10 aa, synthetic construct
ATLRGDFNNT

SEQ ID NO: 81919 - protein, 10 aa, synthetic construct
ATLRGDFNNL

SEQ ID NO: 81920 - protein, 10 aa, synthetic construct
ATIRGDHVNL

SEQ ID NO: 81921 - protein, 10 aa, synthetic construct
ATIRGDYNSL

SEQ ID NO: 81922 - protein, 10 aa, synthetic construct
ATIRGDYTSM

SEQ ID NO: 81923 - protein, 10 aa, synthetic construct
ATMRGDYNSL

SEQ ID NO: 81924 - protein, 10 aa, synthetic construct
ATMRGDYTSM

SEQ ID NO: 81925 - protein, 10 aa, synthetic construct
ATMRGDFQNT

SEQ ID NO: 81926 - protein, 10 aa, synthetic construct
ATWRGDFNNT

SEQ ID NO: 81927 - protein, 10 aa, synthetic construct
ATWRGDFNNL

SEQ ID NO: 81928 - protein, 10 aa, synthetic construct
EWARGDRQGI

SEQ ID NO: 81929 - protein, 10 aa, synthetic construct
ATFRGDHVNL

SEQ ID NO: 81930 - protein, 10 aa, synthetic construct
ATFRGDYNSL

SEQ ID NO: 81931 - protein, 10 aa, synthetic construct
ATFRGDYTSM

SEQ ID NO: 81932 - protein, 10 aa, synthetic construct
ATKRGDHVNL

SEQ ID NO: 81933 - protein, 10 aa, synthetic construct
ATKRGDYNSL

SEQ ID NO: 81934 - protein, 10 aa, synthetic construct
ATKRGDYTSM

SEQ ID NO: 81935 - protein, 10 aa, synthetic construct
ATRRGDFNNT

SEQ ID NO: 81936 - protein, 10 aa, synthetic construct
ATRRGDFNNL

SEQ ID NO: 81937 - protein, 10 aa, synthetic construct
ATHRGDFQNT

SEQ ID NO: 81938 - protein, 10 aa, synthetic construct
ATSRGDFNNT

SEQ ID NO: 81939 - protein, 10 aa, synthetic construct
EWARGDRSVV

SEQ ID NO: 81940 - protein, 10 aa, synthetic construct
ATSRGDFNNL

SEQ ID NO: 81941 - protein, 10 aa, synthetic construct
ATTRGDFQNT

SEQ ID NO: 81942 - protein, 10 aa, synthetic construct
ATYRGDHVNL

SEQ ID NO: 81943 - protein, 10 aa, synthetic construct
ATYRGDYNSL

SEQ ID NO: 81944 - protein, 10 aa, synthetic construct
ATYRGDYTSM

SEQ ID NO: 81945 - protein, 10 aa, synthetic construct
ATNRGDHVNL

SEQ ID NO: 81946 - protein, 10 aa, synthetic construct
ATNRGDYNSL

SEQ ID NO: 81947 - protein, 10 aa, synthetic construct
ATNRGDYTSM

SEQ ID NO: 81948 - protein, 10 aa, synthetic construct
ATQRGDFQNT

SEQ ID NO: 81949 - protein, 10 aa, synthetic construct
ATDRGDFQNT

SEQ ID NO: 81950 - protein, 10 aa, synthetic construct
EWARGDLTVT

SEQ ID NO: 81951 - protein, 10 aa, synthetic construct
ATERGDFQNT

SEQ ID NO: 81952 - protein, 10 aa, synthetic construct
AYGRGDFQNT

SEQ ID NO: 81953 - protein, 10 aa, synthetic construct
AYARGDFQNT

SEQ ID NO: 81954 - protein, 10 aa, synthetic construct
AYVRGDFQNT

SEQ ID NO: 81955 - protein, 10 aa, synthetic construct
AYPRGDFQNT

SEQ ID NO: 81956 - protein, 10 aa, synthetic construct
AYLRGDFQNT

SEQ ID NO: 81957 - protein, 10 aa, synthetic construct
AYIRGDRDYL

SEQ ID NO: 81958 - protein, 10 aa, synthetic construct
AYIRGDYVGL

SEQ ID NO: 81959 - protein, 10 aa, synthetic construct
AYIRGDYSSV

SEQ ID NO: 81960 - protein, 10 aa, synthetic construct
AYIRGDYTSV

SEQ ID NO: 81961 - protein, 10 aa, synthetic construct
TFFRGDRGVV

SEQ ID NO: 81962 - protein, 10 aa, synthetic construct
EWARGDLIGR

SEQ ID NO: 81963 - protein, 10 aa, synthetic construct
AYIRGDQSTL

SEQ ID NO: 81964 - protein, 10 aa, synthetic construct
AYMRGDYTSV

SEQ ID NO: 81965 - protein, 10 aa, synthetic construct
AYMRGDLIGR

SEQ ID NO: 81966 - protein, 10 aa, synthetic construct
AYWRGDYNSL

SEQ ID NO: 81967 - protein, 10 aa, synthetic construct
AYWRGDYTSM

SEQ ID NO: 81968 - protein, 10 aa, synthetic construct
AYWRGDFQNT

SEQ ID NO: 81969 - protein, 10 aa, synthetic construct
AYFRGDRDYL

SEQ ID NO: 81970 - protein, 10 aa, synthetic construct
AYFRGDYVGL

SEQ ID NO: 81971 - protein, 10 aa, synthetic construct
AYFRGDYSSV

SEQ ID NO: 81972 - protein, 10 aa, synthetic construct
AYFRGDYTSV

SEQ ID NO: 81973 - protein, 10 aa, synthetic construct
EWARGDRSQT

SEQ ID NO: 81974 - protein, 10 aa, synthetic construct
AYFRGDQSTL

SEQ ID NO: 81975 - protein, 10 aa, synthetic construct
AYKRGDRDYL

SEQ ID NO: 81976 - protein, 10 aa, synthetic construct
AYKRGDYVGL

SEQ ID NO: 81977 - protein, 10 aa, synthetic construct
AYKRGDYSSV

SEQ ID NO: 81978 - protein, 10 aa, synthetic construct
AYKRGDYTSV

SEQ ID NO: 81979 - protein, 10 aa, synthetic construct
AYKRGDQSTL

SEQ ID NO: 81980 - protein, 10 aa, synthetic construct
AYRRGDFQNT

SEQ ID NO: 81981 - protein, 10 aa, synthetic construct
AYHRGDHVNL

SEQ ID NO: 81982 - protein, 10 aa, synthetic construct
AYHRGDYNSL

SEQ ID NO: 81983 - protein, 10 aa, synthetic construct
AYHRGDYTSM

SEQ ID NO: 81984 - protein, 10 aa, synthetic construct
EWARGDLLLS

SEQ ID NO: 81985 - protein, 10 aa, synthetic construct
AYSRGDFQNT

SEQ ID NO: 81986 - protein, 10 aa, synthetic construct
AYTRGDHVNL

SEQ ID NO: 81987 - protein, 10 aa, synthetic construct
AYTRGDYNSL

SEQ ID NO: 81988 - protein, 10 aa, synthetic construct
AYTRGDYTSM

SEQ ID NO: 81989 - protein, 10 aa, synthetic construct
AYYRGDRDYL

SEQ ID NO: 81990 - protein, 10 aa, synthetic construct
AYYRGDYVGL

SEQ ID NO: 81991 - protein, 10 aa, synthetic construct
AYYRGDYSSV

SEQ ID NO: 81992 - protein, 10 aa, synthetic construct
AYYRGDYTSV

SEQ ID NO: 81993 - protein, 10 aa, synthetic construct
AYYRGDQSTL

SEQ ID NO: 81994 - protein, 10 aa, synthetic construct
AYNRGDRDYL

SEQ ID NO: 81995 - protein, 10 aa, synthetic construct
EWVRGDHGVL

SEQ ID NO: 81996 - protein, 10 aa, synthetic construct
AYNRGDYVGL

SEQ ID NO: 81997 - protein, 10 aa, synthetic construct
AYNRGDYSSV

SEQ ID NO: 81998 - protein, 10 aa, synthetic construct
AYNRGDYTSV

SEQ ID NO: 81999 - protein, 10 aa, synthetic construct
AYNRGDQSTL

SEQ ID NO: 82000 - protein, 10 aa, synthetic construct
AYQRGDHVNL

SEQ ID NO: 82001 - protein, 10 aa, synthetic construct
AYQRGDYNSL

SEQ ID NO: 82002 - protein, 10 aa, synthetic construct
AYQRGDYTSM

SEQ ID NO: 82003 - protein, 10 aa, synthetic construct
AYDRGDHVNL

SEQ ID NO: 82004 - protein, 10 aa, synthetic construct
AYDRGDYNSL

SEQ ID NO: 82005 - protein, 10 aa, synthetic construct
AYDRGDYTSM

SEQ ID NO: 82006 - protein, 10 aa, synthetic construct
EWVRGDRGQI

SEQ ID NO: 82007 - protein, 10 aa, synthetic construct
AYERGDHVNL

SEQ ID NO: 82008 - protein, 10 aa, synthetic construct
AYERGDYNSL

SEQ ID NO: 82009 - protein, 10 aa, synthetic construct
AYERGDYTSM

SEQ ID NO: 82010 - protein, 10 aa, synthetic construct
ANGRGDFQNT

SEQ ID NO: 82011 - protein, 10 aa, synthetic construct
ANARGDFQNT

SEQ ID NO: 82012 - protein, 10 aa, synthetic construct
ANVRGDFQNT

SEQ ID NO: 82013 - protein, 10 aa, synthetic construct
ANPRGDFQNT

SEQ ID NO: 82014 - protein, 10 aa, synthetic construct
ANLRGDFQNT

SEQ ID NO: 82015 - protein, 10 aa, synthetic construct
ANIRGDRDYL

SEQ ID NO: 82016 - protein, 10 aa, synthetic construct
ANIRGDYVGL

SEQ ID NO: 82017 - protein, 10 aa, synthetic construct
EWVRGDRQGI

SEQ ID NO: 82018 - protein, 10 aa, synthetic construct
ANIRGDYSSV

SEQ ID NO: 82019 - protein, 10 aa, synthetic construct
ANIRGDYTSV

SEQ ID NO: 82020 - protein, 10 aa, synthetic construct
ANIRGDQSTL

SEQ ID NO: 82021 - protein, 10 aa, synthetic construct
ANMRGDYTSV

SEQ ID NO: 82022 - protein, 10 aa, synthetic construct
ANMRGDLIGR

SEQ ID NO: 82023 - protein, 10 aa, synthetic construct
ANWRGDYNSL

SEQ ID NO: 82024 - protein, 10 aa, synthetic construct
ANWRGDYTSM

SEQ ID NO: 82025 - protein, 10 aa, synthetic construct
ANWRGDFQNT

SEQ ID NO: 82026 - protein, 10 aa, synthetic construct
ANFRGDRDYL

SEQ ID NO: 82027 - protein, 10 aa, synthetic construct
ANFRGDYVGL

SEQ ID NO: 82028 - protein, 10 aa, synthetic construct
EWVRGDRSVV

SEQ ID NO: 82029 - protein, 10 aa, synthetic construct
ANFRGDYSSV

SEQ ID NO: 82030 - protein, 10 aa, synthetic construct
ANFRGDYTSV

SEQ ID NO: 82031 - protein, 10 aa, synthetic construct
ANFRGDQSTL

SEQ ID NO: 82032 - protein, 10 aa, synthetic construct
ANKRGDRDYL

SEQ ID NO: 82033 - protein, 10 aa, synthetic construct
ANKRGDYVGL

SEQ ID NO: 82034 - protein, 10 aa, synthetic construct
ANKRGDYSSV

SEQ ID NO: 82035 - protein, 10 aa, synthetic construct
ANKRGDYTSV

SEQ ID NO: 82036 - protein, 10 aa, synthetic construct
ANKRGDQSTL

SEQ ID NO: 82037 - protein, 10 aa, synthetic construct
ANRRGDFQNT

SEQ ID NO: 82038 - protein, 10 aa, synthetic construct
ANHRGDHVNL

SEQ ID NO: 82039 - protein, 10 aa, synthetic construct
EWVRGDLTVT

SEQ ID NO: 82040 - protein, 10 aa, synthetic construct
ANHRGDYNSL

SEQ ID NO: 82041 - protein, 10 aa, synthetic construct
ANHRGDYTSM

SEQ ID NO: 82042 - protein, 10 aa, synthetic construct
ANSRGDFQNT

SEQ ID NO: 82043 - protein, 10 aa, synthetic construct
ANTRGDHVNL

SEQ ID NO: 82044 - protein, 10 aa, synthetic construct
ANTRGDYNSL

SEQ ID NO: 82045 - protein, 10 aa, synthetic construct
ANTRGDYTSM

SEQ ID NO: 82046 - protein, 10 aa, synthetic construct
ANYRGDRDYL

SEQ ID NO: 82047 - protein, 10 aa, synthetic construct
ANYRGDYVGL

SEQ ID NO: 82048 - protein, 10 aa, synthetic construct
ANYRGDYSSV

SEQ ID NO: 82049 - protein, 10 aa, synthetic construct
ANYRGDYTSV

SEQ ID NO: 82050 - protein, 10 aa, synthetic construct
EWVRGDLIGR

SEQ ID NO: 82051 - protein, 10 aa, synthetic construct
ANYRGDQSTL

SEQ ID NO: 82052 - protein, 10 aa, synthetic construct
ANNRGDRDYL

SEQ ID NO: 82053 - protein, 10 aa, synthetic construct
ANNRGDYVGL

SEQ ID NO: 82054 - protein, 10 aa, synthetic construct
ANNRGDYSSV

SEQ ID NO: 82055 - protein, 10 aa, synthetic construct
ANNRGDYTSV

SEQ ID NO: 82056 - protein, 10 aa, synthetic construct
ANNRGDQSTL

SEQ ID NO: 82057 - protein, 10 aa, synthetic construct
ANQRGDHVNL

SEQ ID NO: 82058 - protein, 10 aa, synthetic construct
ANQRGDYNSL

SEQ ID NO: 82059 - protein, 10 aa, synthetic construct
ANQRGDYTSM

SEQ ID NO: 82060 - protein, 10 aa, synthetic construct
ANDRGDHVNL

SEQ ID NO: 82061 - protein, 10 aa, synthetic construct
EWVRGDRSQT

SEQ ID NO: 82062 - protein, 10 aa, synthetic construct
ANDRGDYNSL

SEQ ID NO: 82063 - protein, 10 aa, synthetic construct
ANDRGDYTSM

SEQ ID NO: 82064 - protein, 10 aa, synthetic construct
ANERGDHVNL

SEQ ID NO: 82065 - protein, 10 aa, synthetic construct
ANERGDYNSL

SEQ ID NO: 82066 - protein, 10 aa, synthetic construct
ANERGDYTSM

SEQ ID NO: 82067 - protein, 10 aa, synthetic construct
AQGRGDFNNT

SEQ ID NO: 82068 - protein, 10 aa, synthetic construct
AQGRGDFNNL

SEQ ID NO: 82069 - protein, 10 aa, synthetic construct
AQARGDFNNT

SEQ ID NO: 82070 - protein, 10 aa, synthetic construct
AQARGDFNNL

SEQ ID NO: 82071 - protein, 10 aa, synthetic construct
AQVRGDFNNT

SEQ ID NO: 82072 - protein, 10 aa, synthetic construct
TFFRGDYVGL

SEQ ID NO: 82073 - protein, 10 aa, synthetic construct
EWVRGDLLLS

SEQ ID NO: 82074 - protein, 10 aa, synthetic construct
AQVRGDFNNL

SEQ ID NO: 82075 - protein, 10 aa, synthetic construct
AQPRGDFNNT

SEQ ID NO: 82076 - protein, 10 aa, synthetic construct
AQPRGDFNNL

SEQ ID NO: 82077 - protein, 10 aa, synthetic construct
AQLRGDFNNT

SEQ ID NO: 82078 - protein, 10 aa, synthetic construct
AQLRGDFNNL

SEQ ID NO: 82079 - protein, 10 aa, synthetic construct
AQIRGDHVNL

SEQ ID NO: 82080 - protein, 10 aa, synthetic construct
AQIRGDYNSL

SEQ ID NO: 82081 - protein, 10 aa, synthetic construct
AQIRGDYTSM

SEQ ID NO: 82082 - protein, 10 aa, synthetic construct
AQMRGDYNSL

SEQ ID NO: 82083 - protein, 10 aa, synthetic construct
AQMRGDYTSM

SEQ ID NO: 82084 - protein, 10 aa, synthetic construct
EWPRGDHGVL

SEQ ID NO: 82085 - protein, 10 aa, synthetic construct
AQMRGDFQNT

SEQ ID NO: 82086 - protein, 10 aa, synthetic construct
AQWRGDFNNT

SEQ ID NO: 82087 - protein, 10 aa, synthetic construct
AQWRGDFNNL

SEQ ID NO: 82088 - protein, 10 aa, synthetic construct
AQFRGDHVNL

SEQ ID NO: 82089 - protein, 10 aa, synthetic construct
AQFRGDYNSL

SEQ ID NO: 82090 - protein, 10 aa, synthetic construct
AQFRGDYTSM

SEQ ID NO: 82091 - protein, 10 aa, synthetic construct
AQKRGDHVNL

SEQ ID NO: 82092 - protein, 10 aa, synthetic construct
AQKRGDYNSL

SEQ ID NO: 82093 - protein, 10 aa, synthetic construct
AQKRGDYTSM

SEQ ID NO: 82094 - protein, 10 aa, synthetic construct
AQRRGDFNNT

SEQ ID NO: 82095 - protein, 10 aa, synthetic construct
EWPRGDRGQI

SEQ ID NO: 82096 - protein, 10 aa, synthetic construct
AQRRGDFNNL

SEQ ID NO: 82097 - protein, 10 aa, synthetic construct
AQHRGDFQNT

SEQ ID NO: 82098 - protein, 10 aa, synthetic construct
AQSRGDFNNT

SEQ ID NO: 82099 - protein, 10 aa, synthetic construct
AQSRGDFNNL

SEQ ID NO: 82100 - protein, 10 aa, synthetic construct
AQTRGDFQNT

SEQ ID NO: 82101 - protein, 10 aa, synthetic construct
AQYRGDHVNL

SEQ ID NO: 82102 - protein, 10 aa, synthetic construct
AQYRGDYNSL

SEQ ID NO: 82103 - protein, 10 aa, synthetic construct
AQYRGDYTSM

SEQ ID NO: 82104 - protein, 10 aa, synthetic construct
AQNRGDHVNL

SEQ ID NO: 82105 - protein, 10 aa, synthetic construct
AQNRGDYNSL

SEQ ID NO: 82106 - protein, 10 aa, synthetic construct
EWPRGDRQGI

SEQ ID NO: 82107 - protein, 10 aa, synthetic construct
AQNRGDYTSM

SEQ ID NO: 82108 - protein, 10 aa, synthetic construct
AQQRGDFQNT

SEQ ID NO: 82109 - protein, 10 aa, synthetic construct
AQDRGDFQNT

SEQ ID NO: 82110 - protein, 10 aa, synthetic construct
AQERGDFQNT

SEQ ID NO: 82111 - protein, 10 aa, synthetic construct
ADGRGDFNNT

SEQ ID NO: 82112 - protein, 10 aa, synthetic construct
ADGRGDFNNL

SEQ ID NO: 82113 - protein, 10 aa, synthetic construct
ADARGDFNNT

SEQ ID NO: 82114 - protein, 10 aa, synthetic construct
ADARGDFNNL

SEQ ID NO: 82115 - protein, 10 aa, synthetic construct
ADVRGDFNNT

SEQ ID NO: 82116 - protein, 10 aa, synthetic construct
ADVRGDFNNL

SEQ ID NO: 82117 - protein, 10 aa, synthetic construct
EWPRGDRSVV

SEQ ID NO: 82118 - protein, 10 aa, synthetic construct
ADPRGDFNNT

SEQ ID NO: 82119 - protein, 10 aa, synthetic construct
ADPRGDFNNL

SEQ ID NO: 82120 - protein, 10 aa, synthetic construct
ADLRGDFNNT

SEQ ID NO: 82121 - protein, 10 aa, synthetic construct
ADLRGDFNNL

SEQ ID NO: 82122 - protein, 10 aa, synthetic construct
ADIRGDHVNL

SEQ ID NO: 82123 - protein, 10 aa, synthetic construct
ADIRGDYNSL

SEQ ID NO: 82124 - protein, 10 aa, synthetic construct
ADIRGDYTSM

SEQ ID NO: 82125 - protein, 10 aa, synthetic construct
ADMRGDYNSL

SEQ ID NO: 82126 - protein, 10 aa, synthetic construct
ADMRGDYTSM

SEQ ID NO: 82127 - protein, 10 aa, synthetic construct
ADMRGDFQNT

SEQ ID NO: 82128 - protein, 10 aa, synthetic construct
EWPRGDLTVT

SEQ ID NO: 82129 - protein, 10 aa, synthetic construct
ADWRGDFNNT

SEQ ID NO: 82130 - protein, 10 aa, synthetic construct
ADWRGDFNNL

SEQ ID NO: 82131 - protein, 10 aa, synthetic construct
ADFRGDHVNL

SEQ ID NO: 82132 - protein, 10 aa, synthetic construct
ADFRGDYNSL

SEQ ID NO: 82133 - protein, 10 aa, synthetic construct
ADFRGDYTSM

SEQ ID NO: 82134 - protein, 10 aa, synthetic construct
ADKRGDHVNL

SEQ ID NO: 82135 - protein, 10 aa, synthetic construct
ADKRGDYNSL

SEQ ID NO: 82136 - protein, 10 aa, synthetic construct
ADKRGDYTSM

SEQ ID NO: 82137 - protein, 10 aa, synthetic construct
ADRRGDFNNT

SEQ ID NO: 82138 - protein, 10 aa, synthetic construct
ADRRGDFNNL

SEQ ID NO: 82139 - protein, 10 aa, synthetic construct
EWPRGDLIGR

SEQ ID NO: 82140 - protein, 10 aa, synthetic construct
ADHRGDFQNT

SEQ ID NO: 82141 - protein, 10 aa, synthetic construct
ADSRGDFNNT

SEQ ID NO: 82142 - protein, 10 aa, synthetic construct
ADSRGDFNNL

SEQ ID NO: 82143 - protein, 10 aa, synthetic construct
ADTRGDFQNT

SEQ ID NO: 82144 - protein, 10 aa, synthetic construct
ADYRGDHVNL

SEQ ID NO: 82145 - protein, 10 aa, synthetic construct
ADYRGDYNSL

SEQ ID NO: 82146 - protein, 10 aa, synthetic construct
ADYRGDYTSM

SEQ ID NO: 82147 - protein, 10 aa, synthetic construct
ADNRGDHVNL

SEQ ID NO: 82148 - protein, 10 aa, synthetic construct
ADNRGDYNSL

SEQ ID NO: 82149 - protein, 10 aa, synthetic construct
ADNRGDYTSM

SEQ ID NO: 82150 - protein, 10 aa, synthetic construct
EWPRGDRSQT

SEQ ID NO: 82151 - protein, 10 aa, synthetic construct
ADQRGDFQNT

SEQ ID NO: 82152 - protein, 10 aa, synthetic construct
ADDRGDFQNT

SEQ ID NO: 82153 - protein, 10 aa, synthetic construct
ADERGDFQNT

SEQ ID NO: 82154 - protein, 10 aa, synthetic construct
AEGRGDFNNT

SEQ ID NO: 82155 - protein, 10 aa, synthetic construct
AEGRGDFNNL

SEQ ID NO: 82156 - protein, 10 aa, synthetic construct
AEARGDFNNT

SEQ ID NO: 82157 - protein, 10 aa, synthetic construct
AEARGDFNNL

SEQ ID NO: 82158 - protein, 10 aa, synthetic construct
AEVRGDFNNT

SEQ ID NO: 82159 - protein, 10 aa, synthetic construct
AEVRGDFNNL

SEQ ID NO: 82160 - protein, 10 aa, synthetic construct
AEPRGDFNNT

SEQ ID NO: 82161 - protein, 10 aa, synthetic construct
EWPRGDLLLS

SEQ ID NO: 82162 - protein, 10 aa, synthetic construct
AEPRGDFNNL

SEQ ID NO: 82163 - protein, 10 aa, synthetic construct
AELRGDFNNT

SEQ ID NO: 82164 - protein, 10 aa, synthetic construct
AELRGDFNNL

SEQ ID NO: 82165 - protein, 10 aa, synthetic construct
AEIRGDHVNL

SEQ ID NO: 82166 - protein, 10 aa, synthetic construct
AEIRGDYNSL

SEQ ID NO: 82167 - protein, 10 aa, synthetic construct
AEIRGDYTSM

SEQ ID NO: 82168 - protein, 10 aa, synthetic construct
AEMRGDYNSL

SEQ ID NO: 82169 - protein, 10 aa, synthetic construct
AEMRGDYTSM

SEQ ID NO: 82170 - protein, 10 aa, synthetic construct
AEMRGDFQNT

SEQ ID NO: 82171 - protein, 10 aa, synthetic construct
AEWRGDFNNT

SEQ ID NO: 82172 - protein, 10 aa, synthetic construct
EWLRGDHGVL

SEQ ID NO: 82173 - protein, 10 aa, synthetic construct
AEWRGDFNNL

SEQ ID NO: 82174 - protein, 10 aa, synthetic construct
AEFRGDHVNL

SEQ ID NO: 82175 - protein, 10 aa, synthetic construct
AEFRGDYNSL

SEQ ID NO: 82176 - protein, 10 aa, synthetic construct
AEFRGDYTSM

SEQ ID NO: 82177 - protein, 10 aa, synthetic construct
AEKRGDHVNL

SEQ ID NO: 82178 - protein, 10 aa, synthetic construct
AEKRGDYNSL

SEQ ID NO: 82179 - protein, 10 aa, synthetic construct
AEKRGDYTSM

SEQ ID NO: 82180 - protein, 10 aa, synthetic construct
AERRGDFNNT

SEQ ID NO: 82181 - protein, 10 aa, synthetic construct
AERRGDFNNL

SEQ ID NO: 82182 - protein, 10 aa, synthetic construct
AEHRGDFQNT

SEQ ID NO: 82183 - protein, 10 aa, synthetic construct
TFFRGDLIGR

SEQ ID NO: 82184 - protein, 10 aa, synthetic construct
EWLRGDRGQI

SEQ ID NO: 82185 - protein, 10 aa, synthetic construct
AESRGDFNNT

SEQ ID NO: 82186 - protein, 10 aa, synthetic construct
AESRGDFNNL

SEQ ID NO: 82187 - protein, 10 aa, synthetic construct
AETRGDFQNT

SEQ ID NO: 82188 - protein, 10 aa, synthetic construct
AEYRGDHVNL

SEQ ID NO: 82189 - protein, 10 aa, synthetic construct
AEYRGDYNSL

SEQ ID NO: 82190 - protein, 10 aa, synthetic construct
AEYRGDYTSM

SEQ ID NO: 82191 - protein, 10 aa, synthetic construct
AENRGDHVNL

SEQ ID NO: 82192 - protein, 10 aa, synthetic construct
AENRGDYNSL

SEQ ID NO: 82193 - protein, 10 aa, synthetic construct
AENRGDYTSM

SEQ ID NO: 82194 - protein, 10 aa, synthetic construct
AEQRGDFQNT

SEQ ID NO: 82195 - protein, 10 aa, synthetic construct
EWLRGDRQGI

SEQ ID NO: 82196 - protein, 10 aa, synthetic construct
AEDRGDFQNT

SEQ ID NO: 82197 - protein, 10 aa, synthetic construct
AEERGDFQNT

SEQ ID NO: 82198 - protein, 10 aa, synthetic construct
EGVRGDFNNT

SEQ ID NO: 82199 - protein, 10 aa, synthetic construct
EGVRGDFNNL

SEQ ID NO: 82200 - protein, 10 aa, synthetic construct
EGLRGDFNNT

SEQ ID NO: 82201 - protein, 10 aa, synthetic construct
EGLRGDFNNL

SEQ ID NO: 82202 - protein, 10 aa, synthetic construct
EGIRGDYNSL

SEQ ID NO: 82203 - protein, 10 aa, synthetic construct
EGIRGDYTSM

SEQ ID NO: 82204 - protein, 10 aa, synthetic construct
EGIRGDFQNT

SEQ ID NO: 82205 - protein, 10 aa, synthetic construct
EGMRGDYNSL

SEQ ID NO: 82206 - protein, 10 aa, synthetic construct
EWLRGDRSVV

SEQ ID NO: 82207 - protein, 10 aa, synthetic construct
EGMRGDYTSM

SEQ ID NO: 82208 - protein, 10 aa, synthetic construct
EGMRGDFQNT

SEQ ID NO: 82209 - protein, 10 aa, synthetic construct
EGWRGDFNNT

SEQ ID NO: 82210 - protein, 10 aa, synthetic construct
EGWRGDFNNL

SEQ ID NO: 82211 - protein, 10 aa, synthetic construct
EGFRGDYNSL

SEQ ID NO: 82212 - protein, 10 aa, synthetic construct
EGFRGDYTSM

SEQ ID NO: 82213 - protein, 10 aa, synthetic construct
EGFRGDFQNT

SEQ ID NO: 82214 - protein, 10 aa, synthetic construct
EGKRGDYNSL

SEQ ID NO: 82215 - protein, 10 aa, synthetic construct
EGKRGDYTSM

SEQ ID NO: 82216 - protein, 10 aa, synthetic construct
EGKRGDFQNT

SEQ ID NO: 82217 - protein, 10 aa, synthetic construct
EWLRGDLTVT

SEQ ID NO: 82218 - protein, 10 aa, synthetic construct
EGHRGDFNNT

SEQ ID NO: 82219 - protein, 10 aa, synthetic construct
EGHRGDFNNL

SEQ ID NO: 82220 - protein, 10 aa, synthetic construct
EGSRGDFNNT

SEQ ID NO: 82221 - protein, 10 aa, synthetic construct
EGSRGDFNNL

SEQ ID NO: 82222 - protein, 10 aa, synthetic construct
EGTRGDFNNT

SEQ ID NO: 82223 - protein, 10 aa, synthetic construct
EGTRGDFNNL

SEQ ID NO: 82224 - protein, 10 aa, synthetic construct
EGYRGDYNSL

SEQ ID NO: 82225 - protein, 10 aa, synthetic construct
EGYRGDYTSM

SEQ ID NO: 82226 - protein, 10 aa, synthetic construct
EGYRGDFQNT

SEQ ID NO: 82227 - protein, 10 aa, synthetic construct
EGNRGDYNSL

SEQ ID NO: 82228 - protein, 10 aa, synthetic construct
EWLRGDLIGR

SEQ ID NO: 82229 - protein, 10 aa, synthetic construct
EGNRGDYTSM

SEQ ID NO: 82230 - protein, 10 aa, synthetic construct
EGNRGDFQNT

SEQ ID NO: 82231 - protein, 10 aa, synthetic construct
EGQRGDFNNT

SEQ ID NO: 82232 - protein, 10 aa, synthetic construct
EGQRGDFNNL

SEQ ID NO: 82233 - protein, 10 aa, synthetic construct
EGDRGDFNNT

SEQ ID NO: 82234 - protein, 10 aa, synthetic construct
EGDRGDFNNL

SEQ ID NO: 82235 - protein, 10 aa, synthetic construct
EGERGDFNNT

SEQ ID NO: 82236 - protein, 10 aa, synthetic construct
EGERGDFNNL

SEQ ID NO: 82237 - protein, 10 aa, synthetic construct
EAVRGDFNNT

SEQ ID NO: 82238 - protein, 10 aa, synthetic construct
EAVRGDFNNL

SEQ ID NO: 82239 - protein, 10 aa, synthetic construct
EWLRGDRSQT

SEQ ID NO: 82240 - protein, 10 aa, synthetic construct
EALRGDFNNT

SEQ ID NO: 82241 - protein, 10 aa, synthetic construct
EALRGDFNNL

SEQ ID NO: 82242 - protein, 10 aa, synthetic construct
EAIRGDYNSL

SEQ ID NO: 82243 - protein, 10 aa, synthetic construct
EAIRGDYTSM

SEQ ID NO: 82244 - protein, 10 aa, synthetic construct
EAIRGDFQNT

SEQ ID NO: 82245 - protein, 10 aa, synthetic construct
EAMRGDYNSL

SEQ ID NO: 82246 - protein, 10 aa, synthetic construct
EAMRGDYTSM

SEQ ID NO: 82247 - protein, 10 aa, synthetic construct
EAMRGDFQNT

SEQ ID NO: 82248 - protein, 10 aa, synthetic construct
EAWRGDFNNT

SEQ ID NO: 82249 - protein, 10 aa, synthetic construct
EAWRGDFNNL

SEQ ID NO: 82250 - protein, 10 aa, synthetic construct
EWLRGDLLLS

SEQ ID NO: 82251 - protein, 10 aa, synthetic construct
EAFRGDYNSL

SEQ ID NO: 82252 - protein, 10 aa, synthetic construct
EAFRGDYTSM

SEQ ID NO: 82253 - protein, 10 aa, synthetic construct
EAFRGDFQNT

SEQ ID NO: 82254 - protein, 10 aa, synthetic construct
EAKRGDYNSL

SEQ ID NO: 82255 - protein, 10 aa, synthetic construct
EAKRGDYTSM

SEQ ID NO: 82256 - protein, 10 aa, synthetic construct
EAKRGDFQNT

SEQ ID NO: 82257 - protein, 10 aa, synthetic construct
EAHRGDFNNT

SEQ ID NO: 82258 - protein, 10 aa, synthetic construct
EAHRGDFNNL

SEQ ID NO: 82259 - protein, 10 aa, synthetic construct
EASRGDFNNT

SEQ ID NO: 82260 - protein, 10 aa, synthetic construct
EASRGDFNNL

SEQ ID NO: 82261 - protein, 10 aa, synthetic construct
EWWRGDRGQI

SEQ ID NO: 82262 - protein, 10 aa, synthetic construct
EATRGDFNNT

SEQ ID NO: 82263 - protein, 10 aa, synthetic construct
EATRGDFNNL

SEQ ID NO: 82264 - protein, 10 aa, synthetic construct
EAYRGDYNSL

SEQ ID NO: 82265 - protein, 10 aa, synthetic construct
EAYRGDYTSM

SEQ ID NO: 82266 - protein, 10 aa, synthetic construct
EAYRGDFQNT

SEQ ID NO: 82267 - protein, 10 aa, synthetic construct
EANRGDYNSL

SEQ ID NO: 82268 - protein, 10 aa, synthetic construct
EANRGDYTSM

SEQ ID NO: 82269 - protein, 10 aa, synthetic construct
EANRGDFQNT

SEQ ID NO: 82270 - protein, 10 aa, synthetic construct
EAQRGDFNNT

SEQ ID NO: 82271 - protein, 10 aa, synthetic construct
EAQRGDFNNL

SEQ ID NO: 82272 - protein, 10 aa, synthetic construct
EWWRGDRQGI

SEQ ID NO: 82273 - protein, 10 aa, synthetic construct
EADRGDFNNT

SEQ ID NO: 82274 - protein, 10 aa, synthetic construct
EADRGDFNNL

SEQ ID NO: 82275 - protein, 10 aa, synthetic construct
EAERGDFNNT

SEQ ID NO: 82276 - protein, 10 aa, synthetic construct
EAERGDFNNL

SEQ ID NO: 82277 - protein, 10 aa, synthetic construct
EVVRGDFNNT

SEQ ID NO: 82278 - protein, 10 aa, synthetic construct
EVVRGDFNNL

SEQ ID NO: 82279 - protein, 10 aa, synthetic construct
EVLRGDFNNT

SEQ ID NO: 82280 - protein, 10 aa, synthetic construct
EVLRGDFNNL

SEQ ID NO: 82281 - protein, 10 aa, synthetic construct
EVIRGDYNSL

SEQ ID NO: 82282 - protein, 10 aa, synthetic construct
EVIRGDYTSM

SEQ ID NO: 82283 - protein, 10 aa, synthetic construct
EWWRGDRSVV

SEQ ID NO: 82284 - protein, 10 aa, synthetic construct
EVIRGDFQNT

SEQ ID NO: 82285 - protein, 10 aa, synthetic construct
EVMRGDYNSL

SEQ ID NO: 82286 - protein, 10 aa, synthetic construct
EVMRGDYTSM

SEQ ID NO: 82287 - protein, 10 aa, synthetic construct
EVMRGDFQNT

SEQ ID NO: 82288 - protein, 10 aa, synthetic construct
EVWRGDFNNT

SEQ ID NO: 82289 - protein, 10 aa, synthetic construct
EVWRGDFNNL

SEQ ID NO: 82290 - protein, 10 aa, synthetic construct
EVFRGDYNSL

SEQ ID NO: 82291 - protein, 10 aa, synthetic construct
EVFRGDYTSM

SEQ ID NO: 82292 - protein, 10 aa, synthetic construct
EVFRGDFQNT

SEQ ID NO: 82293 - protein, 10 aa, synthetic construct
EVKRGDYNSL

SEQ ID NO: 82294 - protein, 10 aa, synthetic construct
TFFRGDQSTL

SEQ ID NO: 82295 - protein, 10 aa, synthetic construct
EWWRGDRGVV

SEQ ID NO: 82296 - protein, 10 aa, synthetic construct
EVKRGDYTSM

SEQ ID NO: 82297 - protein, 10 aa, synthetic construct
EVKRGDFQNT

SEQ ID NO: 82298 - protein, 10 aa, synthetic construct
EVHRGDFNNT

SEQ ID NO: 82299 - protein, 10 aa, synthetic construct
EVHRGDFNNL

SEQ ID NO: 82300 - protein, 10 aa, synthetic construct
EVSRGDFNNT

SEQ ID NO: 82301 - protein, 10 aa, synthetic construct
EVSRGDFNNL

SEQ ID NO: 82302 - protein, 10 aa, synthetic construct
EVTRGDFNNT

SEQ ID NO: 82303 - protein, 10 aa, synthetic construct
EVTRGDFNNL

SEQ ID NO: 82304 - protein, 10 aa, synthetic construct
EVYRGDYNSL

SEQ ID NO: 82305 - protein, 10 aa, synthetic construct
EVYRGDYTSM

SEQ ID NO: 82306 - protein, 10 aa, synthetic construct
EWWRGDRSQT

SEQ ID NO: 82307 - protein, 10 aa, synthetic construct
EVYRGDFQNT

SEQ ID NO: 82308 - protein, 10 aa, synthetic construct
EVNRGDYNSL

SEQ ID NO: 82309 - protein, 10 aa, synthetic construct
EVNRGDYTSM

SEQ ID NO: 82310 - protein, 10 aa, synthetic construct
EVNRGDFQNT

SEQ ID NO: 82311 - protein, 10 aa, synthetic construct
EVQRGDFNNT

SEQ ID NO: 82312 - protein, 10 aa, synthetic construct
EVQRGDFNNL

SEQ ID NO: 82313 - protein, 10 aa, synthetic construct
EVDRGDFNNT

SEQ ID NO: 82314 - protein, 10 aa, synthetic construct
EVDRGDFNNL

SEQ ID NO: 82315 - protein, 10 aa, synthetic construct
EVERGDFNNT

SEQ ID NO: 82316 - protein, 10 aa, synthetic construct
EVERGDFNNL

SEQ ID NO: 82317 - protein, 10 aa, synthetic construct
EWRRGDHGVL

SEQ ID NO: 82318 - protein, 10 aa, synthetic construct
EPVRGDFNNT

SEQ ID NO: 82319 - protein, 10 aa, synthetic construct
EPVRGDFNNL

SEQ ID NO: 82320 - protein, 10 aa, synthetic construct
EPLRGDFNNT

SEQ ID NO: 82321 - protein, 10 aa, synthetic construct
EPLRGDFNNL

SEQ ID NO: 82322 - protein, 10 aa, synthetic construct
EPIRGDYNSL

SEQ ID NO: 82323 - protein, 10 aa, synthetic construct
EPIRGDYTSM

SEQ ID NO: 82324 - protein, 10 aa, synthetic construct
EPIRGDFQNT

SEQ ID NO: 82325 - protein, 10 aa, synthetic construct
EPMRGDYNSL

SEQ ID NO: 82326 - protein, 10 aa, synthetic construct
EPMRGDYTSM

SEQ ID NO: 82327 - protein, 10 aa, synthetic construct
EPMRGDFQNT

SEQ ID NO: 82328 - protein, 10 aa, synthetic construct
EWRRGDRGQI

SEQ ID NO: 82329 - protein, 10 aa, synthetic construct
EPWRGDFNNT

SEQ ID NO: 82330 - protein, 10 aa, synthetic construct
EPWRGDFNNL

SEQ ID NO: 82331 - protein, 10 aa, synthetic construct
EPFRGDYNSL

SEQ ID NO: 82332 - protein, 10 aa, synthetic construct
EPFRGDYTSM

SEQ ID NO: 82333 - protein, 10 aa, synthetic construct
EPFRGDFQNT

SEQ ID NO: 82334 - protein, 10 aa, synthetic construct
EPKRGDYNSL

SEQ ID NO: 82335 - protein, 10 aa, synthetic construct
EPKRGDYTSM

SEQ ID NO: 82336 - protein, 10 aa, synthetic construct
EPKRGDFQNT

SEQ ID NO: 82337 - protein, 10 aa, synthetic construct
EPHRGDFNNT

SEQ ID NO: 82338 - protein, 10 aa, synthetic construct
EPHRGDFNNL

SEQ ID NO: 82339 - protein, 10 aa, synthetic construct
EWRRGDRQGI

SEQ ID NO: 82340 - protein, 10 aa, synthetic construct
EPSRGDFNNT

SEQ ID NO: 82341 - protein, 10 aa, synthetic construct
EPSRGDFNNL

SEQ ID NO: 82342 - protein, 10 aa, synthetic construct
EPTRGDFNNT

SEQ ID NO: 82343 - protein, 10 aa, synthetic construct
EPTRGDFNNL

SEQ ID NO: 82344 - protein, 10 aa, synthetic construct
EPYRGDYNSL

SEQ ID NO: 82345 - protein, 10 aa, synthetic construct
EPYRGDYTSM

SEQ ID NO: 82346 - protein, 10 aa, synthetic construct
EPYRGDFQNT

SEQ ID NO: 82347 - protein, 10 aa, synthetic construct
EPNRGDYNSL

SEQ ID NO: 82348 - protein, 10 aa, synthetic construct
EPNRGDYTSM

SEQ ID NO: 82349 - protein, 10 aa, synthetic construct
EPNRGDFQNT

SEQ ID NO: 82350 - protein, 10 aa, synthetic construct
EWRRGDRSVV

SEQ ID NO: 82351 - protein, 10 aa, synthetic construct
EPQRGDFNNT

SEQ ID NO: 82352 - protein, 10 aa, synthetic construct
EPQRGDFNNL

SEQ ID NO: 82353 - protein, 10 aa, synthetic construct
EPDRGDFNNT

SEQ ID NO: 82354 - protein, 10 aa, synthetic construct
EPDRGDFNNL

SEQ ID NO: 82355 - protein, 10 aa, synthetic construct
EPERGDFNNT

SEQ ID NO: 82356 - protein, 10 aa, synthetic construct
EPERGDFNNL

SEQ ID NO: 82357 - protein, 10 aa, synthetic construct
ELVRGDFNNT

SEQ ID NO: 82358 - protein, 10 aa, synthetic construct
ELVRGDFNNL

SEQ ID NO: 82359 - protein, 10 aa, synthetic construct
ELLRGDFNNT

SEQ ID NO: 82360 - protein, 10 aa, synthetic construct
ELLRGDFNNL

SEQ ID NO: 82361 - protein, 10 aa, synthetic construct
EWRRGDLTVT

SEQ ID NO: 82362 - protein, 10 aa, synthetic construct
ELIRGDYNSL

SEQ ID NO: 82363 - protein, 10 aa, synthetic construct
ELIRGDYTSM

SEQ ID NO: 82364 - protein, 10 aa, synthetic construct
ELIRGDFQNT

SEQ ID NO: 82365 - protein, 10 aa, synthetic construct
ELMRGDYNSL

SEQ ID NO: 82366 - protein, 10 aa, synthetic construct
ELMRGDYTSM

SEQ ID NO: 82367 - protein, 10 aa, synthetic construct
ELMRGDFQNT

SEQ ID NO: 82368 - protein, 10 aa, synthetic construct
ELWRGDFNNT

SEQ ID NO: 82369 - protein, 10 aa, synthetic construct
ELWRGDFNNL

SEQ ID NO: 82370 - protein, 10 aa, synthetic construct
ELFRGDYNSL

SEQ ID NO: 82371 - protein, 10 aa, synthetic construct
ELFRGDYTSM

SEQ ID NO: 82372 - protein, 10 aa, synthetic construct
EWRRGDLIGR

SEQ ID NO: 82373 - protein, 10 aa, synthetic construct
ELFRGDFQNT

SEQ ID NO: 82374 - protein, 10 aa, synthetic construct
ELKRGDYNSL

SEQ ID NO: 82375 - protein, 10 aa, synthetic construct
ELKRGDYTSM

SEQ ID NO: 82376 - protein, 10 aa, synthetic construct
ELKRGDFQNT

SEQ ID NO: 82377 - protein, 10 aa, synthetic construct
ELHRGDFNNT

SEQ ID NO: 82378 - protein, 10 aa, synthetic construct
ELHRGDFNNL

SEQ ID NO: 82379 - protein, 10 aa, synthetic construct
ELSRGDFNNT

SEQ ID NO: 82380 - protein, 10 aa, synthetic construct
ELSRGDFNNL

SEQ ID NO: 82381 - protein, 10 aa, synthetic construct
ELTRGDFNNT

SEQ ID NO: 82382 - protein, 10 aa, synthetic construct
ELTRGDFNNL

SEQ ID NO: 82383 - protein, 10 aa, synthetic construct
EWRRGDRSQT

SEQ ID NO: 82384 - protein, 10 aa, synthetic construct
ELYRGDYNSL

SEQ ID NO: 82385 - protein, 10 aa, synthetic construct
ELYRGDYTSM

SEQ ID NO: 82386 - protein, 10 aa, synthetic construct
ELYRGDFQNT

SEQ ID NO: 82387 - protein, 10 aa, synthetic construct
ELNRGDYNSL

SEQ ID NO: 82388 - protein, 10 aa, synthetic construct
ELNRGDYTSM

SEQ ID NO: 82389 - protein, 10 aa, synthetic construct
ELNRGDFQNT

SEQ ID NO: 82390 - protein, 10 aa, synthetic construct
ELQRGDFNNT

SEQ ID NO: 82391 - protein, 10 aa, synthetic construct
ELQRGDFNNL

SEQ ID NO: 82392 - protein, 10 aa, synthetic construct
ELDRGDFNNT

SEQ ID NO: 82393 - protein, 10 aa, synthetic construct
ELDRGDFNNL

SEQ ID NO: 82394 - protein, 10 aa, synthetic construct
EWRRGDLLLS

SEQ ID NO: 82395 - protein, 10 aa, synthetic construct
ELERGDFNNT

SEQ ID NO: 82396 - protein, 10 aa, synthetic construct
ELERGDFNNL

SEQ ID NO: 82397 - protein, 10 aa, synthetic construct
EIGRGDYNSL

SEQ ID NO: 82398 - protein, 10 aa, synthetic construct
EIGRGDYTSM

SEQ ID NO: 82399 - protein, 10 aa, synthetic construct
EIGRGDFQNT

SEQ ID NO: 82400 - protein, 10 aa, synthetic construct
EIARGDYNSL

SEQ ID NO: 82401 - protein, 10 aa, synthetic construct
EIARGDYTSM

SEQ ID NO: 82402 - protein, 10 aa, synthetic construct
EIARGDFQNT

SEQ ID NO: 82403 - protein, 10 aa, synthetic construct
EIVRGDYTSV

SEQ ID NO: 82404 - protein, 10 aa, synthetic construct
EIVRGDLIGR

SEQ ID NO: 82405 - protein, 10 aa, synthetic construct
TFFRGDLLLS

SEQ ID NO: 82406 - protein, 10 aa, synthetic construct
EWHRGDRGVV

SEQ ID NO: 82407 - protein, 10 aa, synthetic construct
EIPRGDYNSL

SEQ ID NO: 82408 - protein, 10 aa, synthetic construct
EIPRGDYTSM

SEQ ID NO: 82409 - protein, 10 aa, synthetic construct
EIPRGDFQNT

SEQ ID NO: 82410 - protein, 10 aa, synthetic construct
EILRGDYTSV

SEQ ID NO: 82411 - protein, 10 aa, synthetic construct
EILRGDLIGR

SEQ ID NO: 82412 - protein, 10 aa, synthetic construct
EIIRGDHVNL

SEQ ID NO: 82413 - protein, 10 aa, synthetic construct
EIIRGDRDYL

SEQ ID NO: 82414 - protein, 10 aa, synthetic construct
EIIRGDYSSV

SEQ ID NO: 82415 - protein, 10 aa, synthetic construct
EIIRGDLTVT

SEQ ID NO: 82416 - protein, 10 aa, synthetic construct
EIMRGDHVNL

SEQ ID NO: 82417 - protein, 10 aa, synthetic construct
EWSRGDHGVL

SEQ ID NO: 82418 - protein, 10 aa, synthetic construct
EIMRGDRDYL

SEQ ID NO: 82419 - protein, 10 aa, synthetic construct
EIMRGDYSSV

SEQ ID NO: 82420 - protein, 10 aa, synthetic construct
EIMRGDLTVT

SEQ ID NO: 82421 - protein, 10 aa, synthetic construct
EIWRGDYTSV

SEQ ID NO: 82422 - protein, 10 aa, synthetic construct
EIWRGDLIGR

SEQ ID NO: 82423 - protein, 10 aa, synthetic construct
EIFRGDHVNL

SEQ ID NO: 82424 - protein, 10 aa, synthetic construct
EIFRGDRDYL

SEQ ID NO: 82425 - protein, 10 aa, synthetic construct
EIFRGDYSSV

SEQ ID NO: 82426 - protein, 10 aa, synthetic construct
EIFRGDLTVT

SEQ ID NO: 82427 - protein, 10 aa, synthetic construct
EIKRGDHVNL

SEQ ID NO: 82428 - protein, 10 aa, synthetic construct
EWSRGDRGQI

SEQ ID NO: 82429 - protein, 10 aa, synthetic construct
EIKRGDRDYL

SEQ ID NO: 82430 - protein, 10 aa, synthetic construct
EIKRGDYSSV

SEQ ID NO: 82431 - protein, 10 aa, synthetic construct
EIKRGDLTVT

SEQ ID NO: 82432 - protein, 10 aa, synthetic construct
EIRRGDYNSL

SEQ ID NO: 82433 - protein, 10 aa, synthetic construct
EIRRGDYTSM

SEQ ID NO: 82434 - protein, 10 aa, synthetic construct
EIRRGDFQNT

SEQ ID NO: 82435 - protein, 10 aa, synthetic construct
EIHRGDYTSV

SEQ ID NO: 82436 - protein, 10 aa, synthetic construct
EIHRGDLIGR

SEQ ID NO: 82437 - protein, 10 aa, synthetic construct
EISRGDYTSV

SEQ ID NO: 82438 - protein, 10 aa, synthetic construct
EISRGDLIGR

SEQ ID NO: 82439 - protein, 10 aa, synthetic construct
EWSRGDRQGI

SEQ ID NO: 82440 - protein, 10 aa, synthetic construct
EITRGDYTSV

SEQ ID NO: 82441 - protein, 10 aa, synthetic construct
EITRGDLIGR

SEQ ID NO: 82442 - protein, 10 aa, synthetic construct
EIYRGDHVNL

SEQ ID NO: 82443 - protein, 10 aa, synthetic construct
EIYRGDRDYL

SEQ ID NO: 82444 - protein, 10 aa, synthetic construct
EIYRGDYSSV

SEQ ID NO: 82445 - protein, 10 aa, synthetic construct
EIYRGDLTVT

SEQ ID NO: 82446 - protein, 10 aa, synthetic construct
EINRGDHVNL

SEQ ID NO: 82447 - protein, 10 aa, synthetic construct
EINRGDRDYL

SEQ ID NO: 82448 - protein, 10 aa, synthetic construct
EINRGDYSSV

SEQ ID NO: 82449 - protein, 10 aa, synthetic construct
EINRGDLTVT

SEQ ID NO: 82450 - protein, 10 aa, synthetic construct
EWSRGDRSVV

SEQ ID NO: 82451 - protein, 10 aa, synthetic construct
EIQRGDYTSV

SEQ ID NO: 82452 - protein, 10 aa, synthetic construct
EIQRGDLIGR

SEQ ID NO: 82453 - protein, 10 aa, synthetic construct
EIDRGDYTSV

SEQ ID NO: 82454 - protein, 10 aa, synthetic construct
EIDRGDLIGR

SEQ ID NO: 82455 - protein, 10 aa, synthetic construct
EIERGDYTSV

SEQ ID NO: 82456 - protein, 10 aa, synthetic construct
EIERGDLIGR

SEQ ID NO: 82457 - protein, 10 aa, synthetic construct
EMGRGDFQNT

SEQ ID NO: 82458 - protein, 10 aa, synthetic construct
EMARGDFQNT

SEQ ID NO: 82459 - protein, 10 aa, synthetic construct
EMVRGDFQNT

SEQ ID NO: 82460 - protein, 10 aa, synthetic construct
EMPRGDFQNT

SEQ ID NO: 82461 - protein, 10 aa, synthetic construct
EWSRGDLTVT

SEQ ID NO: 82462 - protein, 10 aa, synthetic construct
EMLRGDFQNT

SEQ ID NO: 82463 - protein, 10 aa, synthetic construct
EMIRGDRDYL

SEQ ID NO: 82464 - protein, 10 aa, synthetic construct
EMIRGDYVGL

SEQ ID NO: 82465 - protein, 10 aa, synthetic construct
EMIRGDYSSV

SEQ ID NO: 82466 - protein, 10 aa, synthetic construct
EMIRGDYTSV

SEQ ID NO: 82467 - protein, 10 aa, synthetic construct
EMIRGDQSTL

SEQ ID NO: 82468 - protein, 10 aa, synthetic construct
EMMRGDYTSV

SEQ ID NO: 82469 - protein, 10 aa, synthetic construct
EMWRGDYNSL

SEQ ID NO: 82470 - protein, 10 aa, synthetic construct
EMWRGDYTSM

SEQ ID NO: 82471 - protein, 10 aa, synthetic construct
EMWRGDFQNT

SEQ ID NO: 82472 - protein, 10 aa, synthetic construct
EWSRGDLIGR

SEQ ID NO: 82473 - protein, 10 aa, synthetic construct
EMFRGDRDYL

SEQ ID NO: 82474 - protein, 10 aa, synthetic construct
EMFRGDYVGL

SEQ ID NO: 82475 - protein, 10 aa, synthetic construct
EMFRGDYSSV

SEQ ID NO: 82476 - protein, 10 aa, synthetic construct
EMFRGDYTSV

SEQ ID NO: 82477 - protein, 10 aa, synthetic construct
EMFRGDQSTL

SEQ ID NO: 82478 - protein, 10 aa, synthetic construct
EMKRGDRDYL

SEQ ID NO: 82479 - protein, 10 aa, synthetic construct
EMKRGDYVGL

SEQ ID NO: 82480 - protein, 10 aa, synthetic construct
EMKRGDYSSV

SEQ ID NO: 82481 - protein, 10 aa, synthetic construct
EMKRGDYTSV

SEQ ID NO: 82482 - protein, 10 aa, synthetic construct
EMKRGDQSTL

SEQ ID NO: 82483 - protein, 10 aa, synthetic construct
EWSRGDRSQT

SEQ ID NO: 82484 - protein, 10 aa, synthetic construct
EMRRGDFQNT

SEQ ID NO: 82485 - protein, 10 aa, synthetic construct
EMHRGDHVNL

SEQ ID NO: 82486 - protein, 10 aa, synthetic construct
EMHRGDYNSL

SEQ ID NO: 82487 - protein, 10 aa, synthetic construct
EMHRGDYTSM

SEQ ID NO: 82488 - protein, 10 aa, synthetic construct
EMSRGDFQNT

SEQ ID NO: 82489 - protein, 10 aa, synthetic construct
EMTRGDHVNL

SEQ ID NO: 82490 - protein, 10 aa, synthetic construct
EMTRGDYNSL

SEQ ID NO: 82491 - protein, 10 aa, synthetic construct
EMTRGDYTSM

SEQ ID NO: 82492 - protein, 10 aa, synthetic construct
EMYRGDRDYL

SEQ ID NO: 82493 - protein, 10 aa, synthetic construct
EMYRGDYVGL

SEQ ID NO: 82494 - protein, 10 aa, synthetic construct
EWSRGDLLLS

SEQ ID NO: 82495 - protein, 10 aa, synthetic construct
EMYRGDYSSV

SEQ ID NO: 82496 - protein, 10 aa, synthetic construct
EMYRGDYTSV

SEQ ID NO: 82497 - protein, 10 aa, synthetic construct
EMYRGDQSTL

SEQ ID NO: 82498 - protein, 10 aa, synthetic construct
EMNRGDRDYL

SEQ ID NO: 82499 - protein, 10 aa, synthetic construct
EMNRGDYVGL

SEQ ID NO: 82500 - protein, 10 aa, synthetic construct
EMNRGDYSSV

SEQ ID NO: 82501 - protein, 10 aa, synthetic construct
EMNRGDYTSV

SEQ ID NO: 82502 - protein, 10 aa, synthetic construct
EMNRGDQSTL

SEQ ID NO: 82503 - protein, 10 aa, synthetic construct
EMQRGDHVNL

SEQ ID NO: 82504 - protein, 10 aa, synthetic construct
EMQRGDYNSL

SEQ ID NO: 82505 - protein, 10 aa, synthetic construct
EWTRGDRGVV

SEQ ID NO: 82506 - protein, 10 aa, synthetic construct
EMQRGDYTSM

SEQ ID NO: 82507 - protein, 10 aa, synthetic construct
EMDRGDHVNL

SEQ ID NO: 82508 - protein, 10 aa, synthetic construct
EMDRGDYNSL

SEQ ID NO: 82509 - protein, 10 aa, synthetic construct
EMDRGDYTSM

SEQ ID NO: 82510 - protein, 10 aa, synthetic construct
EMERGDHVNL

SEQ ID NO: 82511 - protein, 10 aa, synthetic construct
EMERGDYNSL

SEQ ID NO: 82512 - protein, 10 aa, synthetic construct
EMERGDYTSM

SEQ ID NO: 82513 - protein, 10 aa, synthetic construct
EWGRGDFNNT

SEQ ID NO: 82514 - protein, 10 aa, synthetic construct
EWGRGDFNNL

SEQ ID NO: 82515 - protein, 10 aa, synthetic construct
EWARGDFNNT

SEQ ID NO: 82516 - protein, 10 aa, synthetic construct
EFFRGDHGVL

SEQ ID NO: 82517 - protein, 10 aa, synthetic construct
EWQRGDRGVV

SEQ ID NO: 82518 - protein, 10 aa, synthetic construct
EWARGDFNNL

SEQ ID NO: 82519 - protein, 10 aa, synthetic construct
EWVRGDFNNT

SEQ ID NO: 82520 - protein, 10 aa, synthetic construct
EWVRGDFNNL

SEQ ID NO: 82521 - protein, 10 aa, synthetic construct
EWPRGDFNNT

SEQ ID NO: 82522 - protein, 10 aa, synthetic construct
EWPRGDFNNL

SEQ ID NO: 82523 - protein, 10 aa, synthetic construct
EWLRGDFNNT

SEQ ID NO: 82524 - protein, 10 aa, synthetic construct
EWLRGDFNNL

SEQ ID NO: 82525 - protein, 10 aa, synthetic construct
EWIRGDHVNL

SEQ ID NO: 82526 - protein, 10 aa, synthetic construct
EWIRGDYNSL

SEQ ID NO: 82527 - protein, 10 aa, synthetic construct
EWIRGDYTSM

SEQ ID NO: 82528 - protein, 10 aa, synthetic construct
EWDRGDRGVV

SEQ ID NO: 82529 - protein, 10 aa, synthetic construct
EWMRGDYNSL

SEQ ID NO: 82530 - protein, 10 aa, synthetic construct
EWMRGDYTSM

SEQ ID NO: 82531 - protein, 10 aa, synthetic construct
EWMRGDFQNT

SEQ ID NO: 82532 - protein, 10 aa, synthetic construct
EWWRGDFNNT

SEQ ID NO: 82533 - protein, 10 aa, synthetic construct
EWWRGDFNNL

SEQ ID NO: 82534 - protein, 10 aa, synthetic construct
EWFRGDHVNL

SEQ ID NO: 82535 - protein, 10 aa, synthetic construct
EWFRGDYNSL

SEQ ID NO: 82536 - protein, 10 aa, synthetic construct
EWFRGDYTSM

SEQ ID NO: 82537 - protein, 10 aa, synthetic construct
EWKRGDHVNL

SEQ ID NO: 82538 - protein, 10 aa, synthetic construct
EWKRGDYNSL

SEQ ID NO: 82539 - protein, 10 aa, synthetic construct
EWERGDRGVV

SEQ ID NO: 82540 - protein, 10 aa, synthetic construct
EWKRGDYTSM

SEQ ID NO: 82541 - protein, 10 aa, synthetic construct
EWRRGDFNNT

SEQ ID NO: 82542 - protein, 10 aa, synthetic construct
EWRRGDFNNL

SEQ ID NO: 82543 - protein, 10 aa, synthetic construct
EWHRGDFQNT

SEQ ID NO: 82544 - protein, 10 aa, synthetic construct
EWSRGDFNNT

SEQ ID NO: 82545 - protein, 10 aa, synthetic construct
EWSRGDFNNL

SEQ ID NO: 82546 - protein, 10 aa, synthetic construct
EWTRGDFQNT

SEQ ID NO: 82547 - protein, 10 aa, synthetic construct
EWYRGDHVNL

SEQ ID NO: 82548 - protein, 10 aa, synthetic construct
EWYRGDYNSL

SEQ ID NO: 82549 - protein, 10 aa, synthetic construct
EWYRGDYTSM

SEQ ID NO: 82550 - protein, 10 aa, synthetic construct
ERGRGDHGVL

SEQ ID NO: 82551 - protein, 10 aa, synthetic construct
EWNRGDHVNL

SEQ ID NO: 82552 - protein, 10 aa, synthetic construct
EWNRGDYNSL

SEQ ID NO: 82553 - protein, 10 aa, synthetic construct
EWNRGDYTSM

SEQ ID NO: 82554 - protein, 10 aa, synthetic construct
EWQRGDFQNT

SEQ ID NO: 82555 - protein, 10 aa, synthetic construct
EWDRGDFQNT

SEQ ID NO: 82556 - protein, 10 aa, synthetic construct
EWERGDFQNT

SEQ ID NO: 82557 - protein, 10 aa, synthetic construct
EFGRGDYNSL

SEQ ID NO: 82558 - protein, 10 aa, synthetic construct
EFGRGDYTSM

SEQ ID NO: 82559 - protein, 10 aa, synthetic construct
EFGRGDFQNT

SEQ ID NO: 82560 - protein, 10 aa, synthetic construct
EFARGDYNSL

SEQ ID NO: 82561 - protein, 10 aa, synthetic construct
ERGRGDYVGL

SEQ ID NO: 82562 - protein, 10 aa, synthetic construct
EFARGDYTSM

SEQ ID NO: 82563 - protein, 10 aa, synthetic construct
EFARGDFQNT

SEQ ID NO: 82564 - protein, 10 aa, synthetic construct
EFVRGDYTSV

SEQ ID NO: 82565 - protein, 10 aa, synthetic construct
EFVRGDLIGR

SEQ ID NO: 82566 - protein, 10 aa, synthetic construct
EFPRGDYNSL

SEQ ID NO: 82567 - protein, 10 aa, synthetic construct
EFPRGDYTSM

SEQ ID NO: 82568 - protein, 10 aa, synthetic construct
EFPRGDFQNT

SEQ ID NO: 82569 - protein, 10 aa, synthetic construct
EFLRGDYTSV

SEQ ID NO: 82570 - protein, 10 aa, synthetic construct
EFLRGDLIGR

SEQ ID NO: 82571 - protein, 10 aa, synthetic construct
EFIRGDHVNL

SEQ ID NO: 82572 - protein, 10 aa, synthetic construct
ERGRGDQSTL

SEQ ID NO: 82573 - protein, 10 aa, synthetic construct
EFIRGDRDYL

SEQ ID NO: 82574 - protein, 10 aa, synthetic construct
EFIRGDYSSV

SEQ ID NO: 82575 - protein, 10 aa, synthetic construct
EFIRGDLTVT

SEQ ID NO: 82576 - protein, 10 aa, synthetic construct
EFMRGDHVNL

SEQ ID NO: 82577 - protein, 10 aa, synthetic construct
EFMRGDRDYL

SEQ ID NO: 82578 - protein, 10 aa, synthetic construct
EFMRGDYSSV

SEQ ID NO: 82579 - protein, 10 aa, synthetic construct
EFMRGDLTVT

SEQ ID NO: 82580 - protein, 10 aa, synthetic construct
EFWRGDYTSV

SEQ ID NO: 82581 - protein, 10 aa, synthetic construct
EFWRGDLIGR

SEQ ID NO: 82582 - protein, 10 aa, synthetic construct
EFKRGDHVNL

SEQ ID NO: 82583 - protein, 10 aa, synthetic construct
ERGRGDLLLS

SEQ ID NO: 82584 - protein, 10 aa, synthetic construct
EFKRGDRDYL

SEQ ID NO: 82585 - protein, 10 aa, synthetic construct
EFKRGDYSSV

SEQ ID NO: 82586 - protein, 10 aa, synthetic construct
EFKRGDLTVT

SEQ ID NO: 82587 - protein, 10 aa, synthetic construct
EFRRGDYNSL

SEQ ID NO: 82588 - protein, 10 aa, synthetic construct
EFRRGDYTSM

SEQ ID NO: 82589 - protein, 10 aa, synthetic construct
EFRRGDFQNT

SEQ ID NO: 82590 - protein, 10 aa, synthetic construct
EFHRGDYTSV

SEQ ID NO: 82591 - protein, 10 aa, synthetic construct
EFHRGDLIGR

SEQ ID NO: 82592 - protein, 10 aa, synthetic construct
EFSRGDYTSV

SEQ ID NO: 82593 - protein, 10 aa, synthetic construct
EFSRGDLIGR

SEQ ID NO: 82594 - protein, 10 aa, synthetic construct
ERARGDHGVL

SEQ ID NO: 82595 - protein, 10 aa, synthetic construct
EFTRGDYTSV

SEQ ID NO: 82596 - protein, 10 aa, synthetic construct
EFTRGDLIGR

SEQ ID NO: 82597 - protein, 10 aa, synthetic construct
EFYRGDHVNL

SEQ ID NO: 82598 - protein, 10 aa, synthetic construct
EFYRGDRDYL

SEQ ID NO: 82599 - protein, 10 aa, synthetic construct
EFYRGDYSSV

SEQ ID NO: 82600 - protein, 10 aa, synthetic construct
EFYRGDLTVT

SEQ ID NO: 82601 - protein, 10 aa, synthetic construct
EFNRGDHVNL

SEQ ID NO: 82602 - protein, 10 aa, synthetic construct
EFNRGDRDYL

SEQ ID NO: 82603 - protein, 10 aa, synthetic construct
EFNRGDYSSV

SEQ ID NO: 82604 - protein, 10 aa, synthetic construct
EFNRGDLTVT

SEQ ID NO: 82605 - protein, 10 aa, synthetic construct
ERARGDYVGL

SEQ ID NO: 82606 - protein, 10 aa, synthetic construct
EFQRGDYTSV

SEQ ID NO: 82607 - protein, 10 aa, synthetic construct
EFQRGDLIGR

SEQ ID NO: 82608 - protein, 10 aa, synthetic construct
EFDRGDYTSV

SEQ ID NO: 82609 - protein, 10 aa, synthetic construct
EFDRGDLIGR

SEQ ID NO: 82610 - protein, 10 aa, synthetic construct
EFERGDYTSV

SEQ ID NO: 82611 - protein, 10 aa, synthetic construct
EFERGDLIGR

SEQ ID NO: 82612 - protein, 10 aa, synthetic construct
EKGRGDYNSL

SEQ ID NO: 82613 - protein, 10 aa, synthetic construct
EKGRGDYTSM

SEQ ID NO: 82614 - protein, 10 aa, synthetic construct
EKGRGDFQNT

SEQ ID NO: 82615 - protein, 10 aa, synthetic construct
EKARGDYNSL

SEQ ID NO: 82616 - protein, 10 aa, synthetic construct
ERARGDQSTL

SEQ ID NO: 82617 - protein, 10 aa, synthetic construct
EKARGDYTSM

SEQ ID NO: 82618 - protein, 10 aa, synthetic construct
EKARGDFQNT

SEQ ID NO: 82619 - protein, 10 aa, synthetic construct
EKVRGDYTSV

SEQ ID NO: 82620 - protein, 10 aa, synthetic construct
EKVRGDLIGR

SEQ ID NO: 82621 - protein, 10 aa, synthetic construct
EKPRGDYNSL

SEQ ID NO: 82622 - protein, 10 aa, synthetic construct
EKPRGDYTSM

SEQ ID NO: 82623 - protein, 10 aa, synthetic construct
EKPRGDFQNT

SEQ ID NO: 82624 - protein, 10 aa, synthetic construct
EKLRGDYTSV

SEQ ID NO: 82625 - protein, 10 aa, synthetic construct
EKLRGDLIGR

SEQ ID NO: 82626 - protein, 10 aa, synthetic construct
EKIRGDHVNL

SEQ ID NO: 82627 - protein, 10 aa, synthetic construct
EFFRGDRGQI

SEQ ID NO: 82628 - protein, 10 aa, synthetic construct
ERARGDLLLS

SEQ ID NO: 82629 - protein, 10 aa, synthetic construct
EKIRGDRDYL

SEQ ID NO: 82630 - protein, 10 aa, synthetic construct
EKIRGDYSSV

SEQ ID NO: 82631 - protein, 10 aa, synthetic construct
EKIRGDLTVT

SEQ ID NO: 82632 - protein, 10 aa, synthetic construct
EKMRGDHVNL

SEQ ID NO: 82633 - protein, 10 aa, synthetic construct
EKMRGDRDYL

SEQ ID NO: 82634 - protein, 10 aa, synthetic construct
EKMRGDYSSV

SEQ ID NO: 82635 - protein, 10 aa, synthetic construct
EKMRGDLTVT

SEQ ID NO: 82636 - protein, 10 aa, synthetic construct
EKWRGDYTSV

SEQ ID NO: 82637 - protein, 10 aa, synthetic construct
EKWRGDLIGR

SEQ ID NO: 82638 - protein, 10 aa, synthetic construct
EKFRGDHVNL

SEQ ID NO: 82639 - protein, 10 aa, synthetic construct
ERVRGDRGQI

SEQ ID NO: 82640 - protein, 10 aa, synthetic construct
EKFRGDRDYL

SEQ ID NO: 82641 - protein, 10 aa, synthetic construct
EKFRGDYSSV

SEQ ID NO: 82642 - protein, 10 aa, synthetic construct
EKFRGDLTVT

SEQ ID NO: 82643 - protein, 10 aa, synthetic construct
EKRRGDYNSL

SEQ ID NO: 82644 - protein, 10 aa, synthetic construct
EKRRGDYTSM

SEQ ID NO: 82645 - protein, 10 aa, synthetic construct
EKRRGDFQNT

SEQ ID NO: 82646 - protein, 10 aa, synthetic construct
EKHRGDYTSV

SEQ ID NO: 82647 - protein, 10 aa, synthetic construct
EKHRGDLIGR

SEQ ID NO: 82648 - protein, 10 aa, synthetic construct
EKSRGDYTSV

SEQ ID NO: 82649 - protein, 10 aa, synthetic construct
EKSRGDLIGR

SEQ ID NO: 82650 - protein, 10 aa, synthetic construct
ERVRGDRQGI

SEQ ID NO: 82651 - protein, 10 aa, synthetic construct
EKTRGDYTSV

SEQ ID NO: 82652 - protein, 10 aa, synthetic construct
EKTRGDLIGR

SEQ ID NO: 82653 - protein, 10 aa, synthetic construct
EKYRGDHVNL

SEQ ID NO: 82654 - protein, 10 aa, synthetic construct
EKYRGDRDYL

SEQ ID NO: 82655 - protein, 10 aa, synthetic construct
EKYRGDYSSV

SEQ ID NO: 82656 - protein, 10 aa, synthetic construct
EKYRGDLTVT

SEQ ID NO: 82657 - protein, 10 aa, synthetic construct
EKQRGDYTSV

SEQ ID NO: 82658 - protein, 10 aa, synthetic construct
EKQRGDLIGR

SEQ ID NO: 82659 - protein, 10 aa, synthetic construct
EKDRGDYTSV

SEQ ID NO: 82660 - protein, 10 aa, synthetic construct
EKDRGDLIGR

SEQ ID NO: 82661 - protein, 10 aa, synthetic construct
ERVRGDRSVV

SEQ ID NO: 82662 - protein, 10 aa, synthetic construct
EKERGDYTSV

SEQ ID NO: 82663 - protein, 10 aa, synthetic construct
EKERGDLIGR

SEQ ID NO: 82664 - protein, 10 aa, synthetic construct
ERVRGDFNNT

SEQ ID NO: 82665 - protein, 10 aa, synthetic construct
ERVRGDFNNL

SEQ ID NO: 82666 - protein, 10 aa, synthetic construct
ERLRGDFNNT

SEQ ID NO: 82667 - protein, 10 aa, synthetic construct
ERLRGDFNNL

SEQ ID NO: 82668 - protein, 10 aa, synthetic construct
ERIRGDYNSL

SEQ ID NO: 82669 - protein, 10 aa, synthetic construct
ERIRGDYTSM

SEQ ID NO: 82670 - protein, 10 aa, synthetic construct
ERIRGDFQNT

SEQ ID NO: 82671 - protein, 10 aa, synthetic construct
ERMRGDYNSL

SEQ ID NO: 82672 - protein, 10 aa, synthetic construct
ERVRGDRGVV

SEQ ID NO: 82673 - protein, 10 aa, synthetic construct
ERMRGDYTSM

SEQ ID NO: 82674 - protein, 10 aa, synthetic construct
ERMRGDFQNT

SEQ ID NO: 82675 - protein, 10 aa, synthetic construct
ERWRGDFNNT

SEQ ID NO: 82676 - protein, 10 aa, synthetic construct
ERWRGDFNNL

SEQ ID NO: 82677 - protein, 10 aa, synthetic construct
ERFRGDYNSL

SEQ ID NO: 82678 - protein, 10 aa, synthetic construct
ERFRGDYTSM

SEQ ID NO: 82679 - protein, 10 aa, synthetic construct
ERFRGDFQNT

SEQ ID NO: 82680 - protein, 10 aa, synthetic construct
ERKRGDYNSL

SEQ ID NO: 82681 - protein, 10 aa, synthetic construct
ERKRGDYTSM

SEQ ID NO: 82682 - protein, 10 aa, synthetic construct
ERKRGDFQNT

SEQ ID NO: 82683 - protein, 10 aa, synthetic construct
ERVRGDRSQT

SEQ ID NO: 82684 - protein, 10 aa, synthetic construct
ERHRGDFNNT

SEQ ID NO: 82685 - protein, 10 aa, synthetic construct
ERHRGDFNNL

SEQ ID NO: 82686 - protein, 10 aa, synthetic construct
ERSRGDFNNT

SEQ ID NO: 82687 - protein, 10 aa, synthetic construct
ERSRGDFNNL

SEQ ID NO: 82688 - protein, 10 aa, synthetic construct
ERTRGDFNNT

SEQ ID NO: 82689 - protein, 10 aa, synthetic construct
ERTRGDFNNL

SEQ ID NO: 82690 - protein, 10 aa, synthetic construct
ERYRGDYNSL

SEQ ID NO: 82691 - protein, 10 aa, synthetic construct
ERYRGDYTSM

SEQ ID NO: 82692 - protein, 10 aa, synthetic construct
ERYRGDFQNT

SEQ ID NO: 82693 - protein, 10 aa, synthetic construct
ERNRGDYNSL

SEQ ID NO: 82694 - protein, 10 aa, synthetic construct
ERPRGDHGVL

SEQ ID NO: 82695 - protein, 10 aa, synthetic construct
ERNRGDYTSM

SEQ ID NO: 82696 - protein, 10 aa, synthetic construct
ERNRGDFQNT

SEQ ID NO: 82697 - protein, 10 aa, synthetic construct
ERQRGDFNNT

SEQ ID NO: 82698 - protein, 10 aa, synthetic construct
ERQRGDFNNL

SEQ ID NO: 82699 - protein, 10 aa, synthetic construct
ERDRGDFNNT

SEQ ID NO: 82700 - protein, 10 aa, synthetic construct
ERDRGDFNNL

SEQ ID NO: 82701 - protein, 10 aa, synthetic construct
ERERGDFNNT

SEQ ID NO: 82702 - protein, 10 aa, synthetic construct
ERERGDFNNL

SEQ ID NO: 82703 - protein, 10 aa, synthetic construct
EHGRGDFNNT

SEQ ID NO: 82704 - protein, 10 aa, synthetic construct
EHGRGDFNNL

SEQ ID NO: 82705 - protein, 10 aa, synthetic construct
ERPRGDYVGL

SEQ ID NO: 82706 - protein, 10 aa, synthetic construct
EHARGDFNNT

SEQ ID NO: 82707 - protein, 10 aa, synthetic construct
EHARGDFNNL

SEQ ID NO: 82708 - protein, 10 aa, synthetic construct
EHVRGDYNSL

SEQ ID NO: 82709 - protein, 10 aa, synthetic construct
EHVRGDYTSM

SEQ ID NO: 82710 - protein, 10 aa, synthetic construct
EHVRGDFQNT

SEQ ID NO: 82711 - protein, 10 aa, synthetic construct
EHPRGDFNNT

SEQ ID NO: 82712 - protein, 10 aa, synthetic construct
EHPRGDFNNL

SEQ ID NO: 82713 - protein, 10 aa, synthetic construct
EHLRGDYNSL

SEQ ID NO: 82714 - protein, 10 aa, synthetic construct
EHLRGDYTSM

SEQ ID NO: 82715 - protein, 10 aa, synthetic construct
EHLRGDFQNT

SEQ ID NO: 82716 - protein, 10 aa, synthetic construct
ERPRGDQSTL

SEQ ID NO: 82717 - protein, 10 aa, synthetic construct
EHIRGDYTSV

SEQ ID NO: 82718 - protein, 10 aa, synthetic construct
EHIRGDLIGR

SEQ ID NO: 82719 - protein, 10 aa, synthetic construct
EHMRGDYTSV

SEQ ID NO: 82720 - protein, 10 aa, synthetic construct
EHMRGDLIGR

SEQ ID NO: 82721 - protein, 10 aa, synthetic construct
EHWRGDYNSL

SEQ ID NO: 82722 - protein, 10 aa, synthetic construct
EHWRGDYTSM

SEQ ID NO: 82723 - protein, 10 aa, synthetic construct
EHWRGDFQNT

SEQ ID NO: 82724 - protein, 10 aa, synthetic construct
EHFRGDYTSV

SEQ ID NO: 82725 - protein, 10 aa, synthetic construct
EHFRGDLIGR

SEQ ID NO: 82726 - protein, 10 aa, synthetic construct
EHKRGDYTSV

SEQ ID NO: 82727 - protein, 10 aa, synthetic construct
ERPRGDLLLS

SEQ ID NO: 82728 - protein, 10 aa, synthetic construct
EHKRGDLIGR

SEQ ID NO: 82729 - protein, 10 aa, synthetic construct
EHRRGDFNNT

SEQ ID NO: 82730 - protein, 10 aa, synthetic construct
EHRRGDFNNL

SEQ ID NO: 82731 - protein, 10 aa, synthetic construct
EHHRGDYNSL

SEQ ID NO: 82732 - protein, 10 aa, synthetic construct
EHHRGDYTSM

SEQ ID NO: 82733 - protein, 10 aa, synthetic construct
EHHRGDFQNT

SEQ ID NO: 82734 - protein, 10 aa, synthetic construct
EHSRGDYNSL

SEQ ID NO: 82735 - protein, 10 aa, synthetic construct
EHSRGDYTSM

SEQ ID NO: 82736 - protein, 10 aa, synthetic construct
EHSRGDFQNT

SEQ ID NO: 82737 - protein, 10 aa, synthetic construct
EHTRGDYNSL

SEQ ID NO: 82738 - protein, 10 aa, synthetic construct
EFFRGDRQGI

SEQ ID NO: 82739 - protein, 10 aa, synthetic construct
ERLRGDRGQI

SEQ ID NO: 82740 - protein, 10 aa, synthetic construct
EHTRGDYTSM

SEQ ID NO: 82741 - protein, 10 aa, synthetic construct
EHTRGDFQNT

SEQ ID NO: 82742 - protein, 10 aa, synthetic construct
EHYRGDYTSV

SEQ ID NO: 82743 - protein, 10 aa, synthetic construct
EHYRGDLIGR

SEQ ID NO: 82744 - protein, 10 aa, synthetic construct
EHNRGDYTSV

SEQ ID NO: 82745 - protein, 10 aa, synthetic construct
EHNRGDLIGR

SEQ ID NO: 82746 - protein, 10 aa, synthetic construct
EHQRGDYNSL

SEQ ID NO: 82747 - protein, 10 aa, synthetic construct
EHQRGDYTSM

SEQ ID NO: 82748 - protein, 10 aa, synthetic construct
EHQRGDFQNT

SEQ ID NO: 82749 - protein, 10 aa, synthetic construct
EHDRGDYNSL

SEQ ID NO: 82750 - protein, 10 aa, synthetic construct
ERLRGDRQGI

SEQ ID NO: 82751 - protein, 10 aa, synthetic construct
EHDRGDYTSM

SEQ ID NO: 82752 - protein, 10 aa, synthetic construct
EHDRGDFQNT

SEQ ID NO: 82753 - protein, 10 aa, synthetic construct
EHERGDYNSL

SEQ ID NO: 82754 - protein, 10 aa, synthetic construct
EHERGDYTSM

SEQ ID NO: 82755 - protein, 10 aa, synthetic construct
EHERGDFQNT

SEQ ID NO: 82756 - protein, 10 aa, synthetic construct
ESVRGDFNNT

SEQ ID NO: 82757 - protein, 10 aa, synthetic construct
ESVRGDFNNL

SEQ ID NO: 82758 - protein, 10 aa, synthetic construct
ESLRGDFNNT

SEQ ID NO: 82759 - protein, 10 aa, synthetic construct
ESLRGDFNNL

SEQ ID NO: 82760 - protein, 10 aa, synthetic construct
ESIRGDYNSL

SEQ ID NO: 82761 - protein, 10 aa, synthetic construct
ERLRGDRSVV

SEQ ID NO: 82762 - protein, 10 aa, synthetic construct
ESIRGDYTSM

SEQ ID NO: 82763 - protein, 10 aa, synthetic construct
ESIRGDFQNT

SEQ ID NO: 82764 - protein, 10 aa, synthetic construct
ESMRGDYNSL

SEQ ID NO: 82765 - protein, 10 aa, synthetic construct
ESMRGDYTSM

SEQ ID NO: 82766 - protein, 10 aa, synthetic construct
ESMRGDFQNT

SEQ ID NO: 82767 - protein, 10 aa, synthetic construct
ESWRGDFNNT

SEQ ID NO: 82768 - protein, 10 aa, synthetic construct
ESWRGDFNNL

SEQ ID NO: 82769 - protein, 10 aa, synthetic construct
ESFRGDYNSL

SEQ ID NO: 82770 - protein, 10 aa, synthetic construct
ESFRGDYTSM

SEQ ID NO: 82771 - protein, 10 aa, synthetic construct
ESFRGDFQNT

SEQ ID NO: 82772 - protein, 10 aa, synthetic construct
ERLRGDRGVV

SEQ ID NO: 82773 - protein, 10 aa, synthetic construct
ESKRGDYNSL

SEQ ID NO: 82774 - protein, 10 aa, synthetic construct
ESKRGDYTSM

SEQ ID NO: 82775 - protein, 10 aa, synthetic construct
ESKRGDFQNT

SEQ ID NO: 82776 - protein, 10 aa, synthetic construct
ESHRGDFNNT

SEQ ID NO: 82777 - protein, 10 aa, synthetic construct
ESHRGDFNNL

SEQ ID NO: 82778 - protein, 10 aa, synthetic construct
ESSRGDFNNT

SEQ ID NO: 82779 - protein, 10 aa, synthetic construct
ESSRGDFNNL

SEQ ID NO: 82780 - protein, 10 aa, synthetic construct
ESTRGDFNNT

SEQ ID NO: 82781 - protein, 10 aa, synthetic construct
ESTRGDFNNL

SEQ ID NO: 82782 - protein, 10 aa, synthetic construct
ESYRGDYNSL

SEQ ID NO: 82783 - protein, 10 aa, synthetic construct
ERLRGDRSQT

SEQ ID NO: 82784 - protein, 10 aa, synthetic construct
ESYRGDYTSM

SEQ ID NO: 82785 - protein, 10 aa, synthetic construct
ESYRGDFQNT

SEQ ID NO: 82786 - protein, 10 aa, synthetic construct
ESNRGDYNSL

SEQ ID NO: 82787 - protein, 10 aa, synthetic construct
ESNRGDYTSM

SEQ ID NO: 82788 - protein, 10 aa, synthetic construct
ESNRGDFQNT

SEQ ID NO: 82789 - protein, 10 aa, synthetic construct
ESQRGDFNNT

SEQ ID NO: 82790 - protein, 10 aa, synthetic construct
ESQRGDFNNL

SEQ ID NO: 82791 - protein, 10 aa, synthetic construct
ESDRGDFNNT

SEQ ID NO: 82792 - protein, 10 aa, synthetic construct
ESDRGDFNNL

SEQ ID NO: 82793 - protein, 10 aa, synthetic construct
ESERGDFNNT

SEQ ID NO: 82794 - protein, 10 aa, synthetic construct
ERWRGDRGQI

SEQ ID NO: 82795 - protein, 10 aa, synthetic construct
ESERGDFNNL

SEQ ID NO: 82796 - protein, 10 aa, synthetic construct
ETGRGDFNNT

SEQ ID NO: 82797 - protein, 10 aa, synthetic construct
ETGRGDFNNL

SEQ ID NO: 82798 - protein, 10 aa, synthetic construct
ETARGDFNNT

SEQ ID NO: 82799 - protein, 10 aa, synthetic construct
ETARGDFNNL

SEQ ID NO: 82800 - protein, 10 aa, synthetic construct
ETVRGDYNSL

SEQ ID NO: 82801 - protein, 10 aa, synthetic construct
ETVRGDYTSM

SEQ ID NO: 82802 - protein, 10 aa, synthetic construct
ETVRGDFQNT

SEQ ID NO: 82803 - protein, 10 aa, synthetic construct
ETPRGDFNNT

SEQ ID NO: 82804 - protein, 10 aa, synthetic construct
ETPRGDFNNL

SEQ ID NO: 82805 - protein, 10 aa, synthetic construct
ERWRGDRQGI

SEQ ID NO: 82806 - protein, 10 aa, synthetic construct
ETLRGDYNSL

SEQ ID NO: 82807 - protein, 10 aa, synthetic construct
ETLRGDYTSM

SEQ ID NO: 82808 - protein, 10 aa, synthetic construct
ETLRGDFQNT

SEQ ID NO: 82809 - protein, 10 aa, synthetic construct
ETIRGDYTSV

SEQ ID NO: 82810 - protein, 10 aa, synthetic construct
ETIRGDLIGR

SEQ ID NO: 82811 - protein, 10 aa, synthetic construct
ETMRGDYTSV

SEQ ID NO: 82812 - protein, 10 aa, synthetic construct
ETMRGDLIGR

SEQ ID NO: 82813 - protein, 10 aa, synthetic construct
ETWRGDYNSL

SEQ ID NO: 82814 - protein, 10 aa, synthetic construct
ETWRGDYTSM

SEQ ID NO: 82815 - protein, 10 aa, synthetic construct
ETWRGDFQNT

SEQ ID NO: 82816 - protein, 10 aa, synthetic construct
ERWRGDRSVV

SEQ ID NO: 82817 - protein, 10 aa, synthetic construct
ETFRGDYTSV

SEQ ID NO: 82818 - protein, 10 aa, synthetic construct
ETFRGDLIGR

SEQ ID NO: 82819 - protein, 10 aa, synthetic construct
ETKRGDYTSV

SEQ ID NO: 82820 - protein, 10 aa, synthetic construct
ETKRGDLIGR

SEQ ID NO: 82821 - protein, 10 aa, synthetic construct
ETRRGDFNNT

SEQ ID NO: 82822 - protein, 10 aa, synthetic construct
ETRRGDFNNL

SEQ ID NO: 82823 - protein, 10 aa, synthetic construct
ETHRGDYNSL

SEQ ID NO: 82824 - protein, 10 aa, synthetic construct
ETHRGDYTSM

SEQ ID NO: 82825 - protein, 10 aa, synthetic construct
ETHRGDFQNT

SEQ ID NO: 82826 - protein, 10 aa, synthetic construct
ETSRGDYNSL

SEQ ID NO: 82827 - protein, 10 aa, synthetic construct
ERWRGDRGVV

SEQ ID NO: 82828 - protein, 10 aa, synthetic construct
ETSRGDYTSM

SEQ ID NO: 82829 - protein, 10 aa, synthetic construct
ETSRGDFQNT

SEQ ID NO: 82830 - protein, 10 aa, synthetic construct
ETTRGDYNSL

SEQ ID NO: 82831 - protein, 10 aa, synthetic construct
ETTRGDYTSM

SEQ ID NO: 82832 - protein, 10 aa, synthetic construct
ETTRGDFQNT

SEQ ID NO: 82833 - protein, 10 aa, synthetic construct
ETYRGDYTSV

SEQ ID NO: 82834 - protein, 10 aa, synthetic construct
ETYRGDLIGR

SEQ ID NO: 82835 - protein, 10 aa, synthetic construct
ETNRGDYTSV

SEQ ID NO: 82836 - protein, 10 aa, synthetic construct
ETNRGDLIGR

SEQ ID NO: 82837 - protein, 10 aa, synthetic construct
ETQRGDYNSL

SEQ ID NO: 82838 - protein, 10 aa, synthetic construct
ERWRGDRSQT

SEQ ID NO: 82839 - protein, 10 aa, synthetic construct
ETQRGDYTSM

SEQ ID NO: 82840 - protein, 10 aa, synthetic construct
ETQRGDFQNT

SEQ ID NO: 82841 - protein, 10 aa, synthetic construct
ETDRGDYNSL

SEQ ID NO: 82842 - protein, 10 aa, synthetic construct
ETDRGDYTSM

SEQ ID NO: 82843 - protein, 10 aa, synthetic construct
ETDRGDFQNT

SEQ ID NO: 82844 - protein, 10 aa, synthetic construct
ETERGDYNSL

SEQ ID NO: 82845 - protein, 10 aa, synthetic construct
ETERGDYTSM

SEQ ID NO: 82846 - protein, 10 aa, synthetic construct
ETERGDFQNT

SEQ ID NO: 82847 - protein, 10 aa, synthetic construct
EYGRGDYNSL

SEQ ID NO: 82848 - protein, 10 aa, synthetic construct
EYGRGDYTSM

SEQ ID NO: 82849 - protein, 10 aa, synthetic construct
TKKRGDYVGL

SEQ ID NO: 82850 - protein, 10 aa, synthetic construct
EFFRGDRGVV

SEQ ID NO: 82851 - protein, 10 aa, synthetic construct
ERRRGDHGVL

SEQ ID NO: 82852 - protein, 10 aa, synthetic construct
EYGRGDFQNT

SEQ ID NO: 82853 - protein, 10 aa, synthetic construct
EYARGDYNSL

SEQ ID NO: 82854 - protein, 10 aa, synthetic construct
EYARGDYTSM

SEQ ID NO: 82855 - protein, 10 aa, synthetic construct
EYARGDFQNT

SEQ ID NO: 82856 - protein, 10 aa, synthetic construct
EYVRGDYTSV

SEQ ID NO: 82857 - protein, 10 aa, synthetic construct
EYVRGDLIGR

SEQ ID NO: 82858 - protein, 10 aa, synthetic construct
EYPRGDYNSL

SEQ ID NO: 82859 - protein, 10 aa, synthetic construct
EYPRGDYTSM

SEQ ID NO: 82860 - protein, 10 aa, synthetic construct
EYPRGDFQNT

SEQ ID NO: 82861 - protein, 10 aa, synthetic construct
EYLRGDYTSV

SEQ ID NO: 82862 - protein, 10 aa, synthetic construct
ERRRGDYVGL

SEQ ID NO: 82863 - protein, 10 aa, synthetic construct
EYLRGDLIGR

SEQ ID NO: 82864 - protein, 10 aa, synthetic construct
EYIRGDHVNL

SEQ ID NO: 82865 - protein, 10 aa, synthetic construct
EYIRGDRDYL

SEQ ID NO: 82866 - protein, 10 aa, synthetic construct
EYIRGDYSSV

SEQ ID NO: 82867 - protein, 10 aa, synthetic construct
EYIRGDLTVT

SEQ ID NO: 82868 - protein, 10 aa, synthetic construct
EYMRGDHVNL

SEQ ID NO: 82869 - protein, 10 aa, synthetic construct
EYMRGDRDYL

SEQ ID NO: 82870 - protein, 10 aa, synthetic construct
EYMRGDYSSV

SEQ ID NO: 82871 - protein, 10 aa, synthetic construct
EYMRGDLTVT

SEQ ID NO: 82872 - protein, 10 aa, synthetic construct
EYWRGDYTSV

SEQ ID NO: 82873 - protein, 10 aa, synthetic construct
ERRRGDQSTL

SEQ ID NO: 82874 - protein, 10 aa, synthetic construct
EYWRGDLIGR

SEQ ID NO: 82875 - protein, 10 aa, synthetic construct
EYFRGDHVNL

SEQ ID NO: 82876 - protein, 10 aa, synthetic construct
EYFRGDRDYL

SEQ ID NO: 82877 - protein, 10 aa, synthetic construct
EYFRGDYSSV

SEQ ID NO: 82878 - protein, 10 aa, synthetic construct
EYFRGDLTVT

SEQ ID NO: 82879 - protein, 10 aa, synthetic construct
EYKRGDHVNL

SEQ ID NO: 82880 - protein, 10 aa, synthetic construct
EYKRGDRDYL

SEQ ID NO: 82881 - protein, 10 aa, synthetic construct
EYKRGDYSSV

SEQ ID NO: 82882 - protein, 10 aa, synthetic construct
EYKRGDLTVT

SEQ ID NO: 82883 - protein, 10 aa, synthetic construct
EYRRGDYNSL

SEQ ID NO: 82884 - protein, 10 aa, synthetic construct
ERRRGDLLLS

SEQ ID NO: 82885 - protein, 10 aa, synthetic construct
EYRRGDYTSM

SEQ ID NO: 82886 - protein, 10 aa, synthetic construct
EYRRGDFQNT

SEQ ID NO: 82887 - protein, 10 aa, synthetic construct
EYHRGDYTSV

SEQ ID NO: 82888 - protein, 10 aa, synthetic construct
EYHRGDLIGR

SEQ ID NO: 82889 - protein, 10 aa, synthetic construct
EYSRGDYTSV

SEQ ID NO: 82890 - protein, 10 aa, synthetic construct
EYSRGDLIGR

SEQ ID NO: 82891 - protein, 10 aa, synthetic construct
EYTRGDYTSV

SEQ ID NO: 82892 - protein, 10 aa, synthetic construct
EYTRGDLIGR

SEQ ID NO: 82893 - protein, 10 aa, synthetic construct
EYYRGDHVNL

SEQ ID NO: 82894 - protein, 10 aa, synthetic construct
EYYRGDRDYL

SEQ ID NO: 82895 - protein, 10 aa, synthetic construct
ERHRGDRGQI

SEQ ID NO: 82896 - protein, 10 aa, synthetic construct
EYYRGDYSSV

SEQ ID NO: 82897 - protein, 10 aa, synthetic construct
EYYRGDLTVT

SEQ ID NO: 82898 - protein, 10 aa, synthetic construct
EYNRGDHVNL

SEQ ID NO: 82899 - protein, 10 aa, synthetic construct
EYNRGDRDYL

SEQ ID NO: 82900 - protein, 10 aa, synthetic construct
EYNRGDYSSV

SEQ ID NO: 82901 - protein, 10 aa, synthetic construct
EYNRGDLTVT

SEQ ID NO: 82902 - protein, 10 aa, synthetic construct
EYQRGDYTSV

SEQ ID NO: 82903 - protein, 10 aa, synthetic construct
EYQRGDLIGR

SEQ ID NO: 82904 - protein, 10 aa, synthetic construct
EYDRGDYTSV

SEQ ID NO: 82905 - protein, 10 aa, synthetic construct
EYDRGDLIGR

SEQ ID NO: 82906 - protein, 10 aa, synthetic construct
ERHRGDRQGI

SEQ ID NO: 82907 - protein, 10 aa, synthetic construct
EYERGDYTSV

SEQ ID NO: 82908 - protein, 10 aa, synthetic construct
EYERGDLIGR

SEQ ID NO: 82909 - protein, 10 aa, synthetic construct
ENGRGDYNSL

SEQ ID NO: 82910 - protein, 10 aa, synthetic construct
ENGRGDYTSM

SEQ ID NO: 82911 - protein, 10 aa, synthetic construct
ENGRGDFQNT

SEQ ID NO: 82912 - protein, 10 aa, synthetic construct
ENARGDYNSL

SEQ ID NO: 82913 - protein, 10 aa, synthetic construct
ENARGDYTSM

SEQ ID NO: 82914 - protein, 10 aa, synthetic construct
ENARGDFQNT

SEQ ID NO: 82915 - protein, 10 aa, synthetic construct
ENVRGDYTSV

SEQ ID NO: 82916 - protein, 10 aa, synthetic construct
ENVRGDLIGR

SEQ ID NO: 82917 - protein, 10 aa, synthetic construct
ERHRGDRSVV

SEQ ID NO: 82918 - protein, 10 aa, synthetic construct
ENPRGDYNSL

SEQ ID NO: 82919 - protein, 10 aa, synthetic construct
ENPRGDYTSM

SEQ ID NO: 82920 - protein, 10 aa, synthetic construct
ENPRGDFQNT

SEQ ID NO: 82921 - protein, 10 aa, synthetic construct
ENLRGDYTSV

SEQ ID NO: 82922 - protein, 10 aa, synthetic construct
ENLRGDLIGR

SEQ ID NO: 82923 - protein, 10 aa, synthetic construct
ENIRGDHVNL

SEQ ID NO: 82924 - protein, 10 aa, synthetic construct
ENIRGDRDYL

SEQ ID NO: 82925 - protein, 10 aa, synthetic construct
ENIRGDYSSV

SEQ ID NO: 82926 - protein, 10 aa, synthetic construct
ENIRGDLTVT

SEQ ID NO: 82927 - protein, 10 aa, synthetic construct
ENMRGDHVNL

SEQ ID NO: 82928 - protein, 10 aa, synthetic construct
ERHRGDRGVV

SEQ ID NO: 82929 - protein, 10 aa, synthetic construct
ENMRGDRDYL

SEQ ID NO: 82930 - protein, 10 aa, synthetic construct
ENMRGDYSSV

SEQ ID NO: 82931 - protein, 10 aa, synthetic construct
ENMRGDLTVT

SEQ ID NO: 82932 - protein, 10 aa, synthetic construct
ENWRGDYTSV

SEQ ID NO: 82933 - protein, 10 aa, synthetic construct
ENWRGDLIGR

SEQ ID NO: 82934 - protein, 10 aa, synthetic construct
ENFRGDHVNL

SEQ ID NO: 82935 - protein, 10 aa, synthetic construct
ENFRGDRDYL

SEQ ID NO: 82936 - protein, 10 aa, synthetic construct
ENFRGDYSSV

SEQ ID NO: 82937 - protein, 10 aa, synthetic construct
ENFRGDLTVT

SEQ ID NO: 82938 - protein, 10 aa, synthetic construct
ENKRGDHVNL

SEQ ID NO: 82939 - protein, 10 aa, synthetic construct
ERHRGDRSQT

SEQ ID NO: 82940 - protein, 10 aa, synthetic construct
ENKRGDRDYL

SEQ ID NO: 82941 - protein, 10 aa, synthetic construct
ENKRGDYSSV

SEQ ID NO: 82942 - protein, 10 aa, synthetic construct
ENKRGDLTVT

SEQ ID NO: 82943 - protein, 10 aa, synthetic construct
ENRRGDYNSL

SEQ ID NO: 82944 - protein, 10 aa, synthetic construct
ENRRGDYTSM

SEQ ID NO: 82945 - protein, 10 aa, synthetic construct
ENHRGDYTSV

SEQ ID NO: 82946 - protein, 10 aa, synthetic construct
ENHRGDLIGR

SEQ ID NO: 82947 - protein, 10 aa, synthetic construct
ENSRGDYTSV

SEQ ID NO: 82948 - protein, 10 aa, synthetic construct
ENSRGDLIGR

SEQ ID NO: 82949 - protein, 10 aa, synthetic construct
ENTRGDYTSV

SEQ ID NO: 82950 - protein, 10 aa, synthetic construct
ERSRGDRGQI

SEQ ID NO: 82951 - protein, 10 aa, synthetic construct
ENTRGDLIGR

SEQ ID NO: 82952 - protein, 10 aa, synthetic construct
ENYRGDHVNL

SEQ ID NO: 82953 - protein, 10 aa, synthetic construct
ENYRGDRDYL

SEQ ID NO: 82954 - protein, 10 aa, synthetic construct
ENYRGDYSSV

SEQ ID NO: 82955 - protein, 10 aa, synthetic construct
ENYRGDLTVT

SEQ ID NO: 82956 - protein, 10 aa, synthetic construct
ENNRGDHVNL

SEQ ID NO: 82957 - protein, 10 aa, synthetic construct
ENNRGDRDYL

SEQ ID NO: 82958 - protein, 10 aa, synthetic construct
ENNRGDYSSV

SEQ ID NO: 82959 - protein, 10 aa, synthetic construct
ENNRGDLTVT

SEQ ID NO: 82960 - protein, 10 aa, synthetic construct
ENQRGDYTSV

SEQ ID NO: 82961 - protein, 10 aa, synthetic construct
EFFRGDYVGL

SEQ ID NO: 82962 - protein, 10 aa, synthetic construct
ERSRGDRQGI

SEQ ID NO: 82963 - protein, 10 aa, synthetic construct
ENQRGDLIGR

SEQ ID NO: 82964 - protein, 10 aa, synthetic construct
ENDRGDYTSV

SEQ ID NO: 82965 - protein, 10 aa, synthetic construct
ENDRGDLIGR

SEQ ID NO: 82966 - protein, 10 aa, synthetic construct
ENERGDYTSV

SEQ ID NO: 82967 - protein, 10 aa, synthetic construct
ENERGDLIGR

SEQ ID NO: 82968 - protein, 10 aa, synthetic construct
EQGRGDFNNT

SEQ ID NO: 82969 - protein, 10 aa, synthetic construct
EQGRGDFNNL

SEQ ID NO: 82970 - protein, 10 aa, synthetic construct
EQARGDFNNT

SEQ ID NO: 82971 - protein, 10 aa, synthetic construct
EQARGDFNNL

SEQ ID NO: 82972 - protein, 10 aa, synthetic construct
EQVRGDYNSL

SEQ ID NO: 82973 - protein, 10 aa, synthetic construct
ERSRGDRSVV

SEQ ID NO: 82974 - protein, 10 aa, synthetic construct
EQVRGDYTSM

SEQ ID NO: 82975 - protein, 10 aa, synthetic construct
EQVRGDFQNT

SEQ ID NO: 82976 - protein, 10 aa, synthetic construct
EQPRGDFNNT

SEQ ID NO: 82977 - protein, 10 aa, synthetic construct
EQPRGDFNNL

SEQ ID NO: 82978 - protein, 10 aa, synthetic construct
EQLRGDYNSL

SEQ ID NO: 82979 - protein, 10 aa, synthetic construct
EQLRGDYTSM

SEQ ID NO: 82980 - protein, 10 aa, synthetic construct
EQLRGDFQNT

SEQ ID NO: 82981 - protein, 10 aa, synthetic construct
EQIRGDYTSV

SEQ ID NO: 82982 - protein, 10 aa, synthetic construct
EQIRGDLIGR

SEQ ID NO: 82983 - protein, 10 aa, synthetic construct
EQMRGDYTSV

SEQ ID NO: 82984 - protein, 10 aa, synthetic construct
ERSRGDRGVV

SEQ ID NO: 82985 - protein, 10 aa, synthetic construct
EQMRGDLIGR

SEQ ID NO: 82986 - protein, 10 aa, synthetic construct
EQWRGDYNSL

SEQ ID NO: 82987 - protein, 10 aa, synthetic construct
EQWRGDYTSM

SEQ ID NO: 82988 - protein, 10 aa, synthetic construct
EQWRGDFQNT

SEQ ID NO: 82989 - protein, 10 aa, synthetic construct
EQFRGDYTSV

SEQ ID NO: 82990 - protein, 10 aa, synthetic construct
EQFRGDLIGR

SEQ ID NO: 82991 - protein, 10 aa, synthetic construct
EQKRGDYTSV

SEQ ID NO: 82992 - protein, 10 aa, synthetic construct
EQKRGDLIGR

SEQ ID NO: 82993 - protein, 10 aa, synthetic construct
EQRRGDFNNT

SEQ ID NO: 82994 - protein, 10 aa, synthetic construct
EQRRGDFNNL

SEQ ID NO: 82995 - protein, 10 aa, synthetic construct
ERSRGDRSQT

SEQ ID NO: 82996 - protein, 10 aa, synthetic construct
EQHRGDYNSL

SEQ ID NO: 82997 - protein, 10 aa, synthetic construct
EQHRGDYTSM

SEQ ID NO: 82998 - protein, 10 aa, synthetic construct
EQHRGDFQNT

SEQ ID NO: 82999 - protein, 10 aa, synthetic construct
EQSRGDYNSL

SEQ ID NO: 83000 - protein, 10 aa, synthetic construct
EQSRGDYTSM

SEQ ID NO: 83001 - protein, 10 aa, synthetic construct
EQSRGDFQNT

SEQ ID NO: 83002 - protein, 10 aa, synthetic construct
EQTRGDYNSL

SEQ ID NO: 83003 - protein, 10 aa, synthetic construct
EQTRGDYTSM

SEQ ID NO: 83004 - protein, 10 aa, synthetic construct
EQTRGDFQNT

SEQ ID NO: 83005 - protein, 10 aa, synthetic construct
EQYRGDYTSV

SEQ ID NO: 83006 - protein, 10 aa, synthetic construct
ERTRGDRGQI

SEQ ID NO: 83007 - protein, 10 aa, synthetic construct
EQYRGDLIGR

SEQ ID NO: 83008 - protein, 10 aa, synthetic construct
EQNRGDYTSV

SEQ ID NO: 83009 - protein, 10 aa, synthetic construct
EQNRGDLIGR

SEQ ID NO: 83010 - protein, 10 aa, synthetic construct
EQQRGDYNSL

SEQ ID NO: 83011 - protein, 10 aa, synthetic construct
EQQRGDYTSM

SEQ ID NO: 83012 - protein, 10 aa, synthetic construct
EQQRGDFQNT

SEQ ID NO: 83013 - protein, 10 aa, synthetic construct
EQDRGDYNSL

SEQ ID NO: 83014 - protein, 10 aa, synthetic construct
EQDRGDYTSM

SEQ ID NO: 83015 - protein, 10 aa, synthetic construct
EQDRGDFQNT

SEQ ID NO: 83016 - protein, 10 aa, synthetic construct
EQERGDYNSL

SEQ ID NO: 83017 - protein, 10 aa, synthetic construct
ERTRGDRQGI

SEQ ID NO: 83018 - protein, 10 aa, synthetic construct
EQERGDYTSM

SEQ ID NO: 83019 - protein, 10 aa, synthetic construct
EQERGDFQNT

SEQ ID NO: 83020 - protein, 10 aa, synthetic construct
EDGRGDFNNT

SEQ ID NO: 83021 - protein, 10 aa, synthetic construct
EDGRGDFNNL

SEQ ID NO: 83022 - protein, 10 aa, synthetic construct
EDARGDFNNT

SEQ ID NO: 83023 - protein, 10 aa, synthetic construct
EDARGDFNNL

SEQ ID NO: 83024 - protein, 10 aa, synthetic construct
EDVRGDYNSL

SEQ ID NO: 83025 - protein, 10 aa, synthetic construct
EDVRGDYTSM

SEQ ID NO: 83026 - protein, 10 aa, synthetic construct
EDVRGDFQNT

SEQ ID NO: 83027 - protein, 10 aa, synthetic construct
EDPRGDFNNT

SEQ ID NO: 83028 - protein, 10 aa, synthetic construct
ERTRGDRSVV

SEQ ID NO: 83029 - protein, 10 aa, synthetic construct
EDPRGDFNNL

SEQ ID NO: 83030 - protein, 10 aa, synthetic construct
EDLRGDYNSL

SEQ ID NO: 83031 - protein, 10 aa, synthetic construct
EDLRGDYTSM

SEQ ID NO: 83032 - protein, 10 aa, synthetic construct
EDLRGDFQNT

SEQ ID NO: 83033 - protein, 10 aa, synthetic construct
EDIRGDYTSV

SEQ ID NO: 83034 - protein, 10 aa, synthetic construct
EDIRGDLIGR

SEQ ID NO: 83035 - protein, 10 aa, synthetic construct
EDMRGDYTSV

SEQ ID NO: 83036 - protein, 10 aa, synthetic construct
EDMRGDLIGR

SEQ ID NO: 83037 - protein, 10 aa, synthetic construct
EDWRGDYNSL

SEQ ID NO: 83038 - protein, 10 aa, synthetic construct
EDWRGDYTSM

SEQ ID NO: 83039 - protein, 10 aa, synthetic construct
ERTRGDRGVV

SEQ ID NO: 83040 - protein, 10 aa, synthetic construct
EDWRGDFQNT

SEQ ID NO: 83041 - protein, 10 aa, synthetic construct
EDFRGDYTSV

SEQ ID NO: 83042 - protein, 10 aa, synthetic construct
EDFRGDLIGR

SEQ ID NO: 83043 - protein, 10 aa, synthetic construct
EDKRGDYTSV

SEQ ID NO: 83044 - protein, 10 aa, synthetic construct
EDKRGDLIGR

SEQ ID NO: 83045 - protein, 10 aa, synthetic construct
EDRRGDFNNT

SEQ ID NO: 83046 - protein, 10 aa, synthetic construct
EDRRGDFNNL

SEQ ID NO: 83047 - protein, 10 aa, synthetic construct
EDHRGDYNSL

SEQ ID NO: 83048 - protein, 10 aa, synthetic construct
EDHRGDYTSM

SEQ ID NO: 83049 - protein, 10 aa, synthetic construct
EDHRGDFQNT

SEQ ID NO: 83050 - protein, 10 aa, synthetic construct
ERTRGDRSQT

SEQ ID NO: 83051 - protein, 10 aa, synthetic construct
EDSRGDYNSL

SEQ ID NO: 83052 - protein, 10 aa, synthetic construct
EDSRGDYTSM

SEQ ID NO: 83053 - protein, 10 aa, synthetic construct
EDSRGDFQNT

SEQ ID NO: 83054 - protein, 10 aa, synthetic construct
EDTRGDYNSL

SEQ ID NO: 83055 - protein, 10 aa, synthetic construct
EDTRGDYTSM

SEQ ID NO: 83056 - protein, 10 aa, synthetic construct
EDTRGDFQNT

SEQ ID NO: 83057 - protein, 10 aa, synthetic construct
EDYRGDYTSV

SEQ ID NO: 83058 - protein, 10 aa, synthetic construct
EDYRGDLIGR

SEQ ID NO: 83059 - protein, 10 aa, synthetic construct
EDNRGDYTSV

SEQ ID NO: 83060 - protein, 10 aa, synthetic construct
EDNRGDLIGR

SEQ ID NO: 83061 - protein, 10 aa, synthetic construct
ERQRGDRGQI

SEQ ID NO: 83062 - protein, 10 aa, synthetic construct
EDQRGDYNSL

SEQ ID NO: 83063 - protein, 10 aa, synthetic construct
EDQRGDYTSM

SEQ ID NO: 83064 - protein, 10 aa, synthetic construct
EDQRGDFQNT

SEQ ID NO: 83065 - protein, 10 aa, synthetic construct
EDDRGDYNSL

SEQ ID NO: 83066 - protein, 10 aa, synthetic construct
EDDRGDYTSM

SEQ ID NO: 83067 - protein, 10 aa, synthetic construct
EDDRGDFQNT

SEQ ID NO: 83068 - protein, 10 aa, synthetic construct
EDERGDYNSL

SEQ ID NO: 83069 - protein, 10 aa, synthetic construct
EDERGDYTSM

SEQ ID NO: 83070 - protein, 10 aa, synthetic construct
EDERGDFQNT

SEQ ID NO: 83071 - protein, 10 aa, synthetic construct
EEGRGDFNNT

SEQ ID NO: 83072 - protein, 10 aa, synthetic construct
EFFRGDLIGR

SEQ ID NO: 83073 - protein, 10 aa, synthetic construct
ERQRGDRQGI

SEQ ID NO: 83074 - protein, 10 aa, synthetic construct
EEGRGDFNNL

SEQ ID NO: 83075 - protein, 10 aa, synthetic construct
EEARGDFNNT

SEQ ID NO: 83076 - protein, 10 aa, synthetic construct
EEARGDFNNL

SEQ ID NO: 83077 - protein, 10 aa, synthetic construct
EEVRGDYNSL

SEQ ID NO: 83078 - protein, 10 aa, synthetic construct
EEVRGDYTSM

SEQ ID NO: 83079 - protein, 10 aa, synthetic construct
EEVRGDFQNT

SEQ ID NO: 83080 - protein, 10 aa, synthetic construct
EEPRGDFNNT

SEQ ID NO: 83081 - protein, 10 aa, synthetic construct
EEPRGDFNNL

SEQ ID NO: 83082 - protein, 10 aa, synthetic construct
EELRGDYNSL

SEQ ID NO: 83083 - protein, 10 aa, synthetic construct
EELRGDYTSM

SEQ ID NO: 83084 - protein, 10 aa, synthetic construct
ERQRGDRSVV

SEQ ID NO: 83085 - protein, 10 aa, synthetic construct
EELRGDFQNT

SEQ ID NO: 83086 - protein, 10 aa, synthetic construct
EEIRGDYTSV

SEQ ID NO: 83087 - protein, 10 aa, synthetic construct
EEIRGDLIGR

SEQ ID NO: 83088 - protein, 10 aa, synthetic construct
EEMRGDYTSV

SEQ ID NO: 83089 - protein, 10 aa, synthetic construct
EEMRGDLIGR

SEQ ID NO: 83090 - protein, 10 aa, synthetic construct
EEWRGDYNSL

SEQ ID NO: 83091 - protein, 10 aa, synthetic construct
EEWRGDYTSM

SEQ ID NO: 83092 - protein, 10 aa, synthetic construct
EEWRGDFQNT

SEQ ID NO: 83093 - protein, 10 aa, synthetic construct
EEFRGDYTSV

SEQ ID NO: 83094 - protein, 10 aa, synthetic construct
EEFRGDLIGR

SEQ ID NO: 83095 - protein, 10 aa, synthetic construct
ERQRGDRGVV

SEQ ID NO: 83096 - protein, 10 aa, synthetic construct
EEKRGDYTSV

SEQ ID NO: 83097 - protein, 10 aa, synthetic construct
EEKRGDLIGR

SEQ ID NO: 83098 - protein, 10 aa, synthetic construct
EERRGDFNNT

SEQ ID NO: 83099 - protein, 10 aa, synthetic construct
EERRGDFNNL

SEQ ID NO: 83100 - protein, 10 aa, synthetic construct
EEHRGDYNSL

SEQ ID NO: 83101 - protein, 10 aa, synthetic construct
EEHRGDYTSM

SEQ ID NO: 83102 - protein, 10 aa, synthetic construct
EEHRGDFQNT

SEQ ID NO: 83103 - protein, 10 aa, synthetic construct
EESRGDYNSL

SEQ ID NO: 83104 - protein, 10 aa, synthetic construct
EESRGDYTSM

SEQ ID NO: 83105 - protein, 10 aa, synthetic construct
EESRGDFQNT

SEQ ID NO: 83106 - protein, 10 aa, synthetic construct
ERQRGDRSQT

SEQ ID NO: 83107 - protein, 10 aa, synthetic construct
EETRGDYNSL

SEQ ID NO: 83108 - protein, 10 aa, synthetic construct
EETRGDYTSM

SEQ ID NO: 83109 - protein, 10 aa, synthetic construct
EETRGDFQNT

SEQ ID NO: 83110 - protein, 10 aa, synthetic construct
EEYRGDYTSV

SEQ ID NO: 83111 - protein, 10 aa, synthetic construct
EEYRGDLIGR

SEQ ID NO: 83112 - protein, 10 aa, synthetic construct
EENRGDYTSV

SEQ ID NO: 83113 - protein, 10 aa, synthetic construct
EENRGDLIGR

SEQ ID NO: 83114 - protein, 10 aa, synthetic construct
EEQRGDYNSL

SEQ ID NO: 83115 - protein, 10 aa, synthetic construct
EEQRGDYTSM

SEQ ID NO: 83116 - protein, 10 aa, synthetic construct
EEQRGDFQNT

SEQ ID NO: 83117 - protein, 10 aa, synthetic construct
ERDRGDRGQI

SEQ ID NO: 83118 - protein, 10 aa, synthetic construct
EEDRGDYNSL

SEQ ID NO: 83119 - protein, 10 aa, synthetic construct
EEDRGDYTSM

SEQ ID NO: 83120 - protein, 10 aa, synthetic construct
EEDRGDFQNT

SEQ ID NO: 83121 - protein, 10 aa, synthetic construct
EEERGDYNSL

SEQ ID NO: 83122 - protein, 10 aa, synthetic construct
EEERGDYTSM

SEQ ID NO: 83123 - protein, 10 aa, synthetic construct
EEERGDFQNT

SEQ ID NO: 83124 - protein, 10 aa, synthetic construct
NGGRGDFNNT

SEQ ID NO: 83125 - protein, 10 aa, synthetic construct
NGGRGDFNNL

SEQ ID NO: 83126 - protein, 10 aa, synthetic construct
NGARGDFNNT

SEQ ID NO: 83127 - protein, 10 aa, synthetic construct
NGARGDFNNL

SEQ ID NO: 83128 - protein, 10 aa, synthetic construct
ERDRGDRQGI

SEQ ID NO: 83129 - protein, 10 aa, synthetic construct
NGVRGDYNSL

SEQ ID NO: 83130 - protein, 10 aa, synthetic construct
NGVRGDYTSM

SEQ ID NO: 83131 - protein, 10 aa, synthetic construct
NGVRGDFQNT

SEQ ID NO: 83132 - protein, 10 aa, synthetic construct
NGPRGDFNNT

SEQ ID NO: 83133 - protein, 10 aa, synthetic construct
NGPRGDFNNL

SEQ ID NO: 83134 - protein, 10 aa, synthetic construct
NGLRGDYNSL

SEQ ID NO: 83135 - protein, 10 aa, synthetic construct
NGLRGDYTSM

SEQ ID NO: 83136 - protein, 10 aa, synthetic construct
NGLRGDFQNT

SEQ ID NO: 83137 - protein, 10 aa, synthetic construct
NGIRGDYTSV

SEQ ID NO: 83138 - protein, 10 aa, synthetic construct
NGIRGDLIGR

SEQ ID NO: 83139 - protein, 10 aa, synthetic construct
ERDRGDRSVV

SEQ ID NO: 83140 - protein, 10 aa, synthetic construct
NGMRGDYTSV

SEQ ID NO: 83141 - protein, 10 aa, synthetic construct
NGMRGDLIGR

SEQ ID NO: 83142 - protein, 10 aa, synthetic construct
NGWRGDYNSL

SEQ ID NO: 83143 - protein, 10 aa, synthetic construct
NGWRGDYTSM

SEQ ID NO: 83144 - protein, 10 aa, synthetic construct
NGWRGDFQNT

SEQ ID NO: 83145 - protein, 10 aa, synthetic construct
NGFRGDYTSV

SEQ ID NO: 83146 - protein, 10 aa, synthetic construct
NGFRGDLIGR

SEQ ID NO: 83147 - protein, 10 aa, synthetic construct
NGKRGDYTSV

SEQ ID NO: 83148 - protein, 10 aa, synthetic construct
NGKRGDLIGR

SEQ ID NO: 83149 - protein, 10 aa, synthetic construct
NGRRGDFNNT

SEQ ID NO: 83150 - protein, 10 aa, synthetic construct
ERDRGDRGVV

SEQ ID NO: 83151 - protein, 10 aa, synthetic construct
NGRRGDFNNL

SEQ ID NO: 83152 - protein, 10 aa, synthetic construct
NGHRGDYNSL

SEQ ID NO: 83153 - protein, 10 aa, synthetic construct
NGHRGDYTSM

SEQ ID NO: 83154 - protein, 10 aa, synthetic construct
NGHRGDFQNT

SEQ ID NO: 83155 - protein, 10 aa, synthetic construct
NGSRGDYNSL

SEQ ID NO: 83156 - protein, 10 aa, synthetic construct
NGSRGDYTSM

SEQ ID NO: 83157 - protein, 10 aa, synthetic construct
NGSRGDFQNT

SEQ ID NO: 83158 - protein, 10 aa, synthetic construct
NGTRGDYNSL

SEQ ID NO: 83159 - protein, 10 aa, synthetic construct
NGTRGDYTSM

SEQ ID NO: 83160 - protein, 10 aa, synthetic construct
NGTRGDFQNT

SEQ ID NO: 83161 - protein, 10 aa, synthetic construct
ERDRGDRSQT

SEQ ID NO: 83162 - protein, 10 aa, synthetic construct
NGYRGDYTSV

SEQ ID NO: 83163 - protein, 10 aa, synthetic construct
NGYRGDLIGR

SEQ ID NO: 83164 - protein, 10 aa, synthetic construct
NGNRGDYTSV

SEQ ID NO: 83165 - protein, 10 aa, synthetic construct
NGNRGDLIGR

SEQ ID NO: 83166 - protein, 10 aa, synthetic construct
NGQRGDYNSL

SEQ ID NO: 83167 - protein, 10 aa, synthetic construct
NGQRGDYTSM

SEQ ID NO: 83168 - protein, 10 aa, synthetic construct
NGQRGDFQNT

SEQ ID NO: 83169 - protein, 10 aa, synthetic construct
NGDRGDYNSL

SEQ ID NO: 83170 - protein, 10 aa, synthetic construct
NGDRGDYTSM

SEQ ID NO: 83171 - protein, 10 aa, synthetic construct
NGDRGDFQNT

SEQ ID NO: 83172 - protein, 10 aa, synthetic construct
ERERGDRGQI

SEQ ID NO: 83173 - protein, 10 aa, synthetic construct
NGERGDYNSL

SEQ ID NO: 83174 - protein, 10 aa, synthetic construct
NGERGDYTSM

SEQ ID NO: 83175 - protein, 10 aa, synthetic construct
NGERGDFQNT

SEQ ID NO: 83176 - protein, 10 aa, synthetic construct
NAGRGDFNNT

SEQ ID NO: 83177 - protein, 10 aa, synthetic construct
NAGRGDFNNL

SEQ ID NO: 83178 - protein, 10 aa, synthetic construct
NAARGDFNNT

SEQ ID NO: 83179 - protein, 10 aa, synthetic construct
NAARGDFNNL

SEQ ID NO: 83180 - protein, 10 aa, synthetic construct
NAVRGDYNSL

SEQ ID NO: 83181 - protein, 10 aa, synthetic construct
NAVRGDYTSM

SEQ ID NO: 83182 - protein, 10 aa, synthetic construct
NAVRGDFQNT

SEQ ID NO: 83183 - protein, 10 aa, synthetic construct
EFFRGDQSTL

SEQ ID NO: 83184 - protein, 10 aa, synthetic construct
ERERGDRQGI

SEQ ID NO: 83185 - protein, 10 aa, synthetic construct
NAPRGDFNNT

SEQ ID NO: 83186 - protein, 10 aa, synthetic construct
NAPRGDFNNL

SEQ ID NO: 83187 - protein, 10 aa, synthetic construct
NALRGDYNSL

SEQ ID NO: 83188 - protein, 10 aa, synthetic construct
NALRGDYTSM

SEQ ID NO: 83189 - protein, 10 aa, synthetic construct
NALRGDFQNT

SEQ ID NO: 83190 - protein, 10 aa, synthetic construct
NAIRGDYTSV

SEQ ID NO: 83191 - protein, 10 aa, synthetic construct
NAIRGDLIGR

SEQ ID NO: 83192 - protein, 10 aa, synthetic construct
NAMRGDYTSV

SEQ ID NO: 83193 - protein, 10 aa, synthetic construct
NAMRGDLIGR

SEQ ID NO: 83194 - protein, 10 aa, synthetic construct
NAWRGDYNSL

SEQ ID NO: 83195 - protein, 10 aa, synthetic construct
ERERGDRSVV

SEQ ID NO: 83196 - protein, 10 aa, synthetic construct
NAWRGDYTSM

SEQ ID NO: 83197 - protein, 10 aa, synthetic construct
NAWRGDFQNT

SEQ ID NO: 83198 - protein, 10 aa, synthetic construct
NAFRGDYTSV

SEQ ID NO: 83199 - protein, 10 aa, synthetic construct
NAFRGDLIGR

SEQ ID NO: 83200 - protein, 10 aa, synthetic construct
NAKRGDYTSV

SEQ ID NO: 83201 - protein, 10 aa, synthetic construct
NAKRGDLIGR

SEQ ID NO: 83202 - protein, 10 aa, synthetic construct
NARRGDFNNT

SEQ ID NO: 83203 - protein, 10 aa, synthetic construct
NARRGDFNNL

SEQ ID NO: 83204 - protein, 10 aa, synthetic construct
NAHRGDYNSL

SEQ ID NO: 83205 - protein, 10 aa, synthetic construct
NAHRGDYTSM

SEQ ID NO: 83206 - protein, 10 aa, synthetic construct
ERERGDRGVV

SEQ ID NO: 83207 - protein, 10 aa, synthetic construct
NAHRGDFQNT

SEQ ID NO: 83208 - protein, 10 aa, synthetic construct
NASRGDYNSL

SEQ ID NO: 83209 - protein, 10 aa, synthetic construct
NASRGDYTSM

SEQ ID NO: 83210 - protein, 10 aa, synthetic construct
NASRGDFQNT

SEQ ID NO: 83211 - protein, 10 aa, synthetic construct
NATRGDYNSL

SEQ ID NO: 83212 - protein, 10 aa, synthetic construct
NATRGDYTSM

SEQ ID NO: 83213 - protein, 10 aa, synthetic construct
NATRGDFQNT

SEQ ID NO: 83214 - protein, 10 aa, synthetic construct
NAYRGDYTSV

SEQ ID NO: 83215 - protein, 10 aa, synthetic construct
NAYRGDLIGR

SEQ ID NO: 83216 - protein, 10 aa, synthetic construct
NANRGDYTSV

SEQ ID NO: 83217 - protein, 10 aa, synthetic construct
ERERGDRSQT

SEQ ID NO: 83218 - protein, 10 aa, synthetic construct
NANRGDLIGR

SEQ ID NO: 83219 - protein, 10 aa, synthetic construct
NAQRGDYNSL

SEQ ID NO: 83220 - protein, 10 aa, synthetic construct
NAQRGDYTSM

SEQ ID NO: 83221 - protein, 10 aa, synthetic construct
NAQRGDFQNT

SEQ ID NO: 83222 - protein, 10 aa, synthetic construct
NADRGDYNSL

SEQ ID NO: 83223 - protein, 10 aa, synthetic construct
NADRGDYTSM

SEQ ID NO: 83224 - protein, 10 aa, synthetic construct
NADRGDFQNT

SEQ ID NO: 83225 - protein, 10 aa, synthetic construct
NAERGDYNSL

SEQ ID NO: 83226 - protein, 10 aa, synthetic construct
NAERGDYTSM

SEQ ID NO: 83227 - protein, 10 aa, synthetic construct
NAERGDFQNT

SEQ ID NO: 83228 - protein, 10 aa, synthetic construct
EHGRGDRGQI

SEQ ID NO: 83229 - protein, 10 aa, synthetic construct
NVGRGDFNNT

SEQ ID NO: 83230 - protein, 10 aa, synthetic construct
NVGRGDFNNL

SEQ ID NO: 83231 - protein, 10 aa, synthetic construct
NVARGDFNNT

SEQ ID NO: 83232 - protein, 10 aa, synthetic construct
NVARGDFNNL

SEQ ID NO: 83233 - protein, 10 aa, synthetic construct
NVVRGDYNSL

SEQ ID NO: 83234 - protein, 10 aa, synthetic construct
NVVRGDYTSM

SEQ ID NO: 83235 - protein, 10 aa, synthetic construct
NVVRGDFQNT

SEQ ID NO: 83236 - protein, 10 aa, synthetic construct
NVPRGDFNNT

SEQ ID NO: 83237 - protein, 10 aa, synthetic construct
NVPRGDFNNL

SEQ ID NO: 83238 - protein, 10 aa, synthetic construct
NVLRGDYNSL

SEQ ID NO: 83239 - protein, 10 aa, synthetic construct
EHGRGDRQGI

SEQ ID NO: 83240 - protein, 10 aa, synthetic construct
NVLRGDYTSM

SEQ ID NO: 83241 - protein, 10 aa, synthetic construct
NVLRGDFQNT

SEQ ID NO: 83242 - protein, 10 aa, synthetic construct
NVIRGDYTSV

SEQ ID NO: 83243 - protein, 10 aa, synthetic construct
NVMRGDYTSV

SEQ ID NO: 83244 - protein, 10 aa, synthetic construct
NVWRGDYNSL

SEQ ID NO: 83245 - protein, 10 aa, synthetic construct
NVWRGDYTSM

SEQ ID NO: 83246 - protein, 10 aa, synthetic construct
NVWRGDFQNT

SEQ ID NO: 83247 - protein, 10 aa, synthetic construct
NVFRGDYTSV

SEQ ID NO: 83248 - protein, 10 aa, synthetic construct
NVKRGDYTSV

SEQ ID NO: 83249 - protein, 10 aa, synthetic construct
NVRRGDFNNT

SEQ ID NO: 83250 - protein, 10 aa, synthetic construct
EHGRGDRSVV

SEQ ID NO: 83251 - protein, 10 aa, synthetic construct
NVRRGDFNNL

SEQ ID NO: 83252 - protein, 10 aa, synthetic construct
NVHRGDYNSL

SEQ ID NO: 83253 - protein, 10 aa, synthetic construct
NVHRGDYTSM

SEQ ID NO: 83254 - protein, 10 aa, synthetic construct
NVHRGDFQNT

SEQ ID NO: 83255 - protein, 10 aa, synthetic construct
NVSRGDYNSL

SEQ ID NO: 83256 - protein, 10 aa, synthetic construct
NVSRGDYTSM

SEQ ID NO: 83257 - protein, 10 aa, synthetic construct
NVSRGDFQNT

SEQ ID NO: 83258 - protein, 10 aa, synthetic construct
NVTRGDYNSL

SEQ ID NO: 83259 - protein, 10 aa, synthetic construct
NVTRGDYTSM

SEQ ID NO: 83260 - protein, 10 aa, synthetic construct
NVTRGDFQNT

SEQ ID NO: 83261 - protein, 10 aa, synthetic construct
EHGRGDRGVV

SEQ ID NO: 83262 - protein, 10 aa, synthetic construct
NVYRGDYTSV

SEQ ID NO: 83263 - protein, 10 aa, synthetic construct
NVNRGDYTSV

SEQ ID NO: 83264 - protein, 10 aa, synthetic construct
NVQRGDYNSL

SEQ ID NO: 83265 - protein, 10 aa, synthetic construct
NVQRGDYTSM

SEQ ID NO: 83266 - protein, 10 aa, synthetic construct
NVQRGDFQNT

SEQ ID NO: 83267 - protein, 10 aa, synthetic construct
NVDRGDYNSL

SEQ ID NO: 83268 - protein, 10 aa, synthetic construct
NVDRGDYTSM

SEQ ID NO: 83269 - protein, 10 aa, synthetic construct
NVDRGDFQNT

SEQ ID NO: 83270 - protein, 10 aa, synthetic construct
NVERGDYNSL

SEQ ID NO: 83271 - protein, 10 aa, synthetic construct
NVERGDYTSM

SEQ ID NO: 83272 - protein, 10 aa, synthetic construct
EHGRGDRSQT

SEQ ID NO: 83273 - protein, 10 aa, synthetic construct
NVERGDFQNT

SEQ ID NO: 83274 - protein, 10 aa, synthetic construct
NPGRGDFNNT

SEQ ID NO: 83275 - protein, 10 aa, synthetic construct
NPGRGDFNNL

SEQ ID NO: 83276 - protein, 10 aa, synthetic construct
NPARGDFNNT

SEQ ID NO: 83277 - protein, 10 aa, synthetic construct
NPARGDFNNL

SEQ ID NO: 83278 - protein, 10 aa, synthetic construct
NPVRGDYNSL

SEQ ID NO: 83279 - protein, 10 aa, synthetic construct
NPVRGDYTSM

SEQ ID NO: 83280 - protein, 10 aa, synthetic construct
NPVRGDFQNT

SEQ ID NO: 83281 - protein, 10 aa, synthetic construct
NPPRGDFNNT

SEQ ID NO: 83282 - protein, 10 aa, synthetic construct
NPPRGDFNNL

SEQ ID NO: 83283 - protein, 10 aa, synthetic construct
EHARGDRGQI

SEQ ID NO: 83284 - protein, 10 aa, synthetic construct
NPLRGDYNSL

SEQ ID NO: 83285 - protein, 10 aa, synthetic construct
NPLRGDYTSM

SEQ ID NO: 83286 - protein, 10 aa, synthetic construct
NPLRGDFQNT

SEQ ID NO: 83287 - protein, 10 aa, synthetic construct
NPIRGDYTSV

SEQ ID NO: 83288 - protein, 10 aa, synthetic construct
NPIRGDLIGR

SEQ ID NO: 83289 - protein, 10 aa, synthetic construct
NPMRGDYTSV

SEQ ID NO: 83290 - protein, 10 aa, synthetic construct
NPMRGDLIGR

SEQ ID NO: 83291 - protein, 10 aa, synthetic construct
NPWRGDYNSL

SEQ ID NO: 83292 - protein, 10 aa, synthetic construct
NPWRGDYTSM

SEQ ID NO: 83293 - protein, 10 aa, synthetic construct
NPWRGDFQNT

SEQ ID NO: 83294 - protein, 10 aa, synthetic construct
EFFRGDLLLS

SEQ ID NO: 83295 - protein, 10 aa, synthetic construct
EHARGDRQGI

SEQ ID NO: 83296 - protein, 10 aa, synthetic construct
NPFRGDYTSV

SEQ ID NO: 83297 - protein, 10 aa, synthetic construct
NPFRGDLIGR

SEQ ID NO: 83298 - protein, 10 aa, synthetic construct
NPKRGDYTSV

SEQ ID NO: 83299 - protein, 10 aa, synthetic construct
NPKRGDLIGR

SEQ ID NO: 83300 - protein, 10 aa, synthetic construct
NPRRGDFNNT

SEQ ID NO: 83301 - protein, 10 aa, synthetic construct
NPRRGDFNNL

SEQ ID NO: 83302 - protein, 10 aa, synthetic construct
NPHRGDYNSL

SEQ ID NO: 83303 - protein, 10 aa, synthetic construct
NPHRGDYTSM

SEQ ID NO: 83304 - protein, 10 aa, synthetic construct
NPHRGDFQNT

SEQ ID NO: 83305 - protein, 10 aa, synthetic construct
NPSRGDYNSL

SEQ ID NO: 83306 - protein, 10 aa, synthetic construct
EHARGDRSVV

SEQ ID NO: 83307 - protein, 10 aa, synthetic construct
NPSRGDYTSM

SEQ ID NO: 83308 - protein, 10 aa, synthetic construct
NPSRGDFQNT

SEQ ID NO: 83309 - protein, 10 aa, synthetic construct
NPTRGDYNSL

SEQ ID NO: 83310 - protein, 10 aa, synthetic construct
NPTRGDYTSM

SEQ ID NO: 83311 - protein, 10 aa, synthetic construct
NPTRGDFQNT

SEQ ID NO: 83312 - protein, 10 aa, synthetic construct
NPYRGDYTSV

SEQ ID NO: 83313 - protein, 10 aa, synthetic construct
NPYRGDLIGR

SEQ ID NO: 83314 - protein, 10 aa, synthetic construct
NPNRGDYTSV

SEQ ID NO: 83315 - protein, 10 aa, synthetic construct
NPNRGDLIGR

SEQ ID NO: 83316 - protein, 10 aa, synthetic construct
NPQRGDYNSL

SEQ ID NO: 83317 - protein, 10 aa, synthetic construct
EHARGDRGVV

SEQ ID NO: 83318 - protein, 10 aa, synthetic construct
NPQRGDYTSM

SEQ ID NO: 83319 - protein, 10 aa, synthetic construct
NPQRGDFQNT

SEQ ID NO: 83320 - protein, 10 aa, synthetic construct
NPDRGDYNSL

SEQ ID NO: 83321 - protein, 10 aa, synthetic construct
NPDRGDYTSM

SEQ ID NO: 83322 - protein, 10 aa, synthetic construct
NPDRGDFQNT

SEQ ID NO: 83323 - protein, 10 aa, synthetic construct
NPERGDYNSL

SEQ ID NO: 83324 - protein, 10 aa, synthetic construct
NPERGDYTSM

SEQ ID NO: 83325 - protein, 10 aa, synthetic construct
NPERGDFQNT

SEQ ID NO: 83326 - protein, 10 aa, synthetic construct
NLGRGDFNNT

SEQ ID NO: 83327 - protein, 10 aa, synthetic construct
NLGRGDFNNL

SEQ ID NO: 83328 - protein, 10 aa, synthetic construct
EHARGDRSQT

SEQ ID NO: 83329 - protein, 10 aa, synthetic construct
NLARGDFNNT

SEQ ID NO: 83330 - protein, 10 aa, synthetic construct
NLARGDFNNL

SEQ ID NO: 83331 - protein, 10 aa, synthetic construct
NLVRGDYNSL

SEQ ID NO: 83332 - protein, 10 aa, synthetic construct
NLVRGDYTSM

SEQ ID NO: 83333 - protein, 10 aa, synthetic construct
NLVRGDFQNT

SEQ ID NO: 83334 - protein, 10 aa, synthetic construct
NLPRGDFNNT

SEQ ID NO: 83335 - protein, 10 aa, synthetic construct
NLPRGDFNNL

SEQ ID NO: 83336 - protein, 10 aa, synthetic construct
NLLRGDYNSL

SEQ ID NO: 83337 - protein, 10 aa, synthetic construct
NLLRGDYTSM

SEQ ID NO: 83338 - protein, 10 aa, synthetic construct
NLLRGDFQNT

SEQ ID NO: 83339 - protein, 10 aa, synthetic construct
EHPRGDRGQI

SEQ ID NO: 83340 - protein, 10 aa, synthetic construct
NLIRGDYTSV

SEQ ID NO: 83341 - protein, 10 aa, synthetic construct
NLMRGDYTSV

SEQ ID NO: 83342 - protein, 10 aa, synthetic construct
NLWRGDYNSL

SEQ ID NO: 83343 - protein, 10 aa, synthetic construct
NLWRGDYTSM

SEQ ID NO: 83344 - protein, 10 aa, synthetic construct
NLWRGDFQNT

SEQ ID NO: 83345 - protein, 10 aa, synthetic construct
NLFRGDYTSV

SEQ ID NO: 83346 - protein, 10 aa, synthetic construct
NLKRGDYTSV

SEQ ID NO: 83347 - protein, 10 aa, synthetic construct
NLRRGDFNNT

SEQ ID NO: 83348 - protein, 10 aa, synthetic construct
NLRRGDFNNL

SEQ ID NO: 83349 - protein, 10 aa, synthetic construct
NLHRGDYNSL

SEQ ID NO: 83350 - protein, 10 aa, synthetic construct
EHPRGDRQGI

SEQ ID NO: 83351 - protein, 10 aa, synthetic construct
NLHRGDYTSM

SEQ ID NO: 83352 - protein, 10 aa, synthetic construct
NLHRGDFQNT

SEQ ID NO: 83353 - protein, 10 aa, synthetic construct
NLSRGDYNSL

SEQ ID NO: 83354 - protein, 10 aa, synthetic construct
NLSRGDYTSM

SEQ ID NO: 83355 - protein, 10 aa, synthetic construct
NLSRGDFQNT

SEQ ID NO: 83356 - protein, 10 aa, synthetic construct
NLTRGDYNSL

SEQ ID NO: 83357 - protein, 10 aa, synthetic construct
NLTRGDYTSM

SEQ ID NO: 83358 - protein, 10 aa, synthetic construct
NLTRGDFQNT

SEQ ID NO: 83359 - protein, 10 aa, synthetic construct
NLYRGDYTSV

SEQ ID NO: 83360 - protein, 10 aa, synthetic construct
NLNRGDYTSV

SEQ ID NO: 83361 - protein, 10 aa, synthetic construct
EHPRGDRSVV

SEQ ID NO: 83362 - protein, 10 aa, synthetic construct
NLQRGDYNSL

SEQ ID NO: 83363 - protein, 10 aa, synthetic construct
NLQRGDYTSM

SEQ ID NO: 83364 - protein, 10 aa, synthetic construct
NLQRGDFQNT

SEQ ID NO: 83365 - protein, 10 aa, synthetic construct
NLDRGDYNSL

SEQ ID NO: 83366 - protein, 10 aa, synthetic construct
NLDRGDYTSM

SEQ ID NO: 83367 - protein, 10 aa, synthetic construct
NLDRGDFQNT

SEQ ID NO: 83368 - protein, 10 aa, synthetic construct
NLERGDYNSL

SEQ ID NO: 83369 - protein, 10 aa, synthetic construct
NLERGDYTSM

SEQ ID NO: 83370 - protein, 10 aa, synthetic construct
NLERGDFQNT

SEQ ID NO: 83371 - protein, 10 aa, synthetic construct
NIGRGDYTSV

SEQ ID NO: 83372 - protein, 10 aa, synthetic construct
EHPRGDRGVV

SEQ ID NO: 83373 - protein, 10 aa, synthetic construct
NIGRGDLIGR

SEQ ID NO: 83374 - protein, 10 aa, synthetic construct
NIARGDYTSV

SEQ ID NO: 83375 - protein, 10 aa, synthetic construct
NIARGDLIGR

SEQ ID NO: 83376 - protein, 10 aa, synthetic construct
NIVRGDHVNL

SEQ ID NO: 83377 - protein, 10 aa, synthetic construct
NIVRGDRDYL

SEQ ID NO: 83378 - protein, 10 aa, synthetic construct
NIVRGDYSSV

SEQ ID NO: 83379 - protein, 10 aa, synthetic construct
NIVRGDLTVT

SEQ ID NO: 83380 - protein, 10 aa, synthetic construct
NIPRGDYTSV

SEQ ID NO: 83381 - protein, 10 aa, synthetic construct
NIPRGDLIGR

SEQ ID NO: 83382 - protein, 10 aa, synthetic construct
NILRGDHVNL

SEQ ID NO: 83383 - protein, 10 aa, synthetic construct
EHPRGDRSQT

SEQ ID NO: 83384 - protein, 10 aa, synthetic construct
NILRGDRDYL

SEQ ID NO: 83385 - protein, 10 aa, synthetic construct
NILRGDYSSV

SEQ ID NO: 83386 - protein, 10 aa, synthetic construct
NILRGDLTVT

SEQ ID NO: 83387 - protein, 10 aa, synthetic construct
NIIRGDHGVL

SEQ ID NO: 83388 - protein, 10 aa, synthetic construct
NIIRGDRGQI

SEQ ID NO: 83389 - protein, 10 aa, synthetic construct
NIIRGDRQGI

SEQ ID NO: 83390 - protein, 10 aa, synthetic construct
NIIRGDYVGL

SEQ ID NO: 83391 - protein, 10 aa, synthetic construct
NIIRGDLIGR

SEQ ID NO: 83392 - protein, 10 aa, synthetic construct
NIIRGDQSTL

SEQ ID NO: 83393 - protein, 10 aa, synthetic construct
NIIRGDLLLS

SEQ ID NO: 83394 - protein, 10 aa, synthetic construct
EHRRGDRGQI

SEQ ID NO: 83395 - protein, 10 aa, synthetic construct
NIMRGDHGVL

SEQ ID NO: 83396 - protein, 10 aa, synthetic construct
NIMRGDRGQI

SEQ ID NO: 83397 - protein, 10 aa, synthetic construct
NIMRGDRQGI

SEQ ID NO: 83398 - protein, 10 aa, synthetic construct
NIMRGDYVGL

SEQ ID NO: 83399 - protein, 10 aa, synthetic construct
NIMRGDLIGR

SEQ ID NO: 83400 - protein, 10 aa, synthetic construct
NIMRGDQSTL

SEQ ID NO: 83401 - protein, 10 aa, synthetic construct
NIMRGDLLLS

SEQ ID NO: 83402 - protein, 10 aa, synthetic construct
NIWRGDHVNL

SEQ ID NO: 83403 - protein, 10 aa, synthetic construct
NIWRGDRDYL

SEQ ID NO: 83404 - protein, 10 aa, synthetic construct
NIWRGDYSSV

SEQ ID NO: 83405 - protein, 10 aa, synthetic construct
NFFRGDRSVV

SEQ ID NO: 83406 - protein, 10 aa, synthetic construct
EHRRGDRQGI

SEQ ID NO: 83407 - protein, 10 aa, synthetic construct
NIWRGDLTVT

SEQ ID NO: 83408 - protein, 10 aa, synthetic construct
NIFRGDHGVL

SEQ ID NO: 83409 - protein, 10 aa, synthetic construct
NIFRGDRGQI

SEQ ID NO: 83410 - protein, 10 aa, synthetic construct
NIFRGDRQGI

SEQ ID NO: 83411 - protein, 10 aa, synthetic construct
NIFRGDYVGL

SEQ ID NO: 83412 - protein, 10 aa, synthetic construct
NIFRGDLIGR

SEQ ID NO: 83413 - protein, 10 aa, synthetic construct
NIFRGDQSTL

SEQ ID NO: 83414 - protein, 10 aa, synthetic construct
NIFRGDLLLS

SEQ ID NO: 83415 - protein, 10 aa, synthetic construct
NIKRGDHGVL

SEQ ID NO: 83416 - protein, 10 aa, synthetic construct
NIKRGDRGQI

SEQ ID NO: 83417 - protein, 10 aa, synthetic construct
EHRRGDRSVV

SEQ ID NO: 83418 - protein, 10 aa, synthetic construct
NIKRGDRQGI

SEQ ID NO: 83419 - protein, 10 aa, synthetic construct
NIKRGDYVGL

SEQ ID NO: 83420 - protein, 10 aa, synthetic construct
NIKRGDLIGR

SEQ ID NO: 83421 - protein, 10 aa, synthetic construct
NIKRGDQSTL

SEQ ID NO: 83422 - protein, 10 aa, synthetic construct
NIKRGDLLLS

SEQ ID NO: 83423 - protein, 10 aa, synthetic construct
NIRRGDYTSV

SEQ ID NO: 83424 - protein, 10 aa, synthetic construct
NIRRGDLIGR

SEQ ID NO: 83425 - protein, 10 aa, synthetic construct
NIHRGDHVNL

SEQ ID NO: 83426 - protein, 10 aa, synthetic construct
NIHRGDRDYL

SEQ ID NO: 83427 - protein, 10 aa, synthetic construct
NIHRGDYSSV

SEQ ID NO: 83428 - protein, 10 aa, synthetic construct
EHRRGDRGVV

SEQ ID NO: 83429 - protein, 10 aa, synthetic construct
NIHRGDLTVT

SEQ ID NO: 83430 - protein, 10 aa, synthetic construct
NISRGDHVNL

SEQ ID NO: 83431 - protein, 10 aa, synthetic construct
NISRGDRDYL

SEQ ID NO: 83432 - protein, 10 aa, synthetic construct
NISRGDYSSV

SEQ ID NO: 83433 - protein, 10 aa, synthetic construct
NISRGDLTVT

SEQ ID NO: 83434 - protein, 10 aa, synthetic construct
NITRGDHVNL

SEQ ID NO: 83435 - protein, 10 aa, synthetic construct
NITRGDRDYL

SEQ ID NO: 83436 - protein, 10 aa, synthetic construct
NITRGDYSSV

SEQ ID NO: 83437 - protein, 10 aa, synthetic construct
NITRGDLTVT

SEQ ID NO: 83438 - protein, 10 aa, synthetic construct
NIYRGDHGVL

SEQ ID NO: 83439 - protein, 10 aa, synthetic construct
EHRRGDRSQT

SEQ ID NO: 83440 - protein, 10 aa, synthetic construct
NIYRGDRGQI

SEQ ID NO: 83441 - protein, 10 aa, synthetic construct
NIYRGDRQGI

SEQ ID NO: 83442 - protein, 10 aa, synthetic construct
NIYRGDYVGL

SEQ ID NO: 83443 - protein, 10 aa, synthetic construct
NIYRGDLIGR

SEQ ID NO: 83444 - protein, 10 aa, synthetic construct
NIYRGDQSTL

SEQ ID NO: 83445 - protein, 10 aa, synthetic construct
NIYRGDLLLS

SEQ ID NO: 83446 - protein, 10 aa, synthetic construct
NINRGDHGVL

SEQ ID NO: 83447 - protein, 10 aa, synthetic construct
NINRGDRGQI

SEQ ID NO: 83448 - protein, 10 aa, synthetic construct
NINRGDRQGI

SEQ ID NO: 83449 - protein, 10 aa, synthetic construct
NINRGDYVGL

SEQ ID NO: 83450 - protein, 10 aa, synthetic construct
ESGRGDHGVL

SEQ ID NO: 83451 - protein, 10 aa, synthetic construct
NINRGDLIGR

SEQ ID NO: 83452 - protein, 10 aa, synthetic construct
NINRGDQSTL

SEQ ID NO: 83453 - protein, 10 aa, synthetic construct
NINRGDLLLS

SEQ ID NO: 83454 - protein, 10 aa, synthetic construct
NIQRGDHVNL

SEQ ID NO: 83455 - protein, 10 aa, synthetic construct
NIQRGDRDYL

SEQ ID NO: 83456 - protein, 10 aa, synthetic construct
NIQRGDYSSV

SEQ ID NO: 83457 - protein, 10 aa, synthetic construct
NIQRGDLTVT

SEQ ID NO: 83458 - protein, 10 aa, synthetic construct
NIDRGDHVNL

SEQ ID NO: 83459 - protein, 10 aa, synthetic construct
NIDRGDRDYL

SEQ ID NO: 83460 - protein, 10 aa, synthetic construct
NIDRGDYSSV

SEQ ID NO: 83461 - protein, 10 aa, synthetic construct
ESGRGDYVGL

SEQ ID NO: 83462 - protein, 10 aa, synthetic construct
NIDRGDLTVT

SEQ ID NO: 83463 - protein, 10 aa, synthetic construct
NIERGDHVNL

SEQ ID NO: 83464 - protein, 10 aa, synthetic construct
NIERGDRDYL

SEQ ID NO: 83465 - protein, 10 aa, synthetic construct
NIERGDYSSV

SEQ ID NO: 83466 - protein, 10 aa, synthetic construct
NIERGDLTVT

SEQ ID NO: 83467 - protein, 10 aa, synthetic construct
NMGRGDHVNL

SEQ ID NO: 83468 - protein, 10 aa, synthetic construct
NMGRGDYNSL

SEQ ID NO: 83469 - protein, 10 aa, synthetic construct
NMGRGDYTSM

SEQ ID NO: 83470 - protein, 10 aa, synthetic construct
NMARGDHVNL

SEQ ID NO: 83471 - protein, 10 aa, synthetic construct
NMARGDYNSL

SEQ ID NO: 83472 - protein, 10 aa, synthetic construct
ESGRGDQSTL

SEQ ID NO: 83473 - protein, 10 aa, synthetic construct
NMARGDYTSM

SEQ ID NO: 83474 - protein, 10 aa, synthetic construct
NMVRGDHVNL

SEQ ID NO: 83475 - protein, 10 aa, synthetic construct
NMVRGDYNSL

SEQ ID NO: 83476 - protein, 10 aa, synthetic construct
NMVRGDYTSM

SEQ ID NO: 83477 - protein, 10 aa, synthetic construct
NMPRGDHVNL

SEQ ID NO: 83478 - protein, 10 aa, synthetic construct
NMPRGDYNSL

SEQ ID NO: 83479 - protein, 10 aa, synthetic construct
NMPRGDYTSM

SEQ ID NO: 83480 - protein, 10 aa, synthetic construct
NMLRGDHVNL

SEQ ID NO: 83481 - protein, 10 aa, synthetic construct
NMLRGDYNSL

SEQ ID NO: 83482 - protein, 10 aa, synthetic construct
NMLRGDYTSM

SEQ ID NO: 83483 - protein, 10 aa, synthetic construct
ESGRGDLLLS

SEQ ID NO: 83484 - protein, 10 aa, synthetic construct
NMIRGDRGQI

SEQ ID NO: 83485 - protein, 10 aa, synthetic construct
NMIRGDRQGI

SEQ ID NO: 83486 - protein, 10 aa, synthetic construct
NMIRGDRSQT

SEQ ID NO: 83487 - protein, 10 aa, synthetic construct
NMMRGDHVNL

SEQ ID NO: 83488 - protein, 10 aa, synthetic construct
NMMRGDRDYL

SEQ ID NO: 83489 - protein, 10 aa, synthetic construct
NMMRGDYSSV

SEQ ID NO: 83490 - protein, 10 aa, synthetic construct
NMMRGDLTVT

SEQ ID NO: 83491 - protein, 10 aa, synthetic construct
NMWRGDYTSV

SEQ ID NO: 83492 - protein, 10 aa, synthetic construct
NMFRGDRGQI

SEQ ID NO: 83493 - protein, 10 aa, synthetic construct
NMFRGDRQGI

SEQ ID NO: 83494 - protein, 10 aa, synthetic construct
ESARGDHGVL

SEQ ID NO: 83495 - protein, 10 aa, synthetic construct
NMFRGDRSQT

SEQ ID NO: 83496 - protein, 10 aa, synthetic construct
NMKRGDRGQI

SEQ ID NO: 83497 - protein, 10 aa, synthetic construct
NMKRGDRQGI

SEQ ID NO: 83498 - protein, 10 aa, synthetic construct
NMKRGDRSQT

SEQ ID NO: 83499 - protein, 10 aa, synthetic construct
NMRRGDHVNL

SEQ ID NO: 83500 - protein, 10 aa, synthetic construct
NMRRGDYNSL

SEQ ID NO: 83501 - protein, 10 aa, synthetic construct
NMRRGDYTSM

SEQ ID NO: 83502 - protein, 10 aa, synthetic construct
NMHRGDRDYL

SEQ ID NO: 83503 - protein, 10 aa, synthetic construct
NMHRGDYVGL

SEQ ID NO: 83504 - protein, 10 aa, synthetic construct
NMHRGDYSSV

SEQ ID NO: 83505 - protein, 10 aa, synthetic construct
ESARGDYVGL

SEQ ID NO: 83506 - protein, 10 aa, synthetic construct
NMHRGDYTSV

SEQ ID NO: 83507 - protein, 10 aa, synthetic construct
NMHRGDQSTL

SEQ ID NO: 83508 - protein, 10 aa, synthetic construct
NMSRGDHVNL

SEQ ID NO: 83509 - protein, 10 aa, synthetic construct
NMSRGDYNSL

SEQ ID NO: 83510 - protein, 10 aa, synthetic construct
NMSRGDYTSM

SEQ ID NO: 83511 - protein, 10 aa, synthetic construct
NMTRGDRDYL

SEQ ID NO: 83512 - protein, 10 aa, synthetic construct
NMTRGDYVGL

SEQ ID NO: 83513 - protein, 10 aa, synthetic construct
NMTRGDYSSV

SEQ ID NO: 83514 - protein, 10 aa, synthetic construct
NMTRGDYTSV

SEQ ID NO: 83515 - protein, 10 aa, synthetic construct
NMTRGDQSTL

SEQ ID NO: 83516 - protein, 10 aa, synthetic construct
NFFRGDRGVV

SEQ ID NO: 83517 - protein, 10 aa, synthetic construct
ESARGDQSTL

SEQ ID NO: 83518 - protein, 10 aa, synthetic construct
NMYRGDRGQI

SEQ ID NO: 83519 - protein, 10 aa, synthetic construct
NMYRGDRQGI

SEQ ID NO: 83520 - protein, 10 aa, synthetic construct
NMYRGDRSQT

SEQ ID NO: 83521 - protein, 10 aa, synthetic construct
NMNRGDRGQI

SEQ ID NO: 83522 - protein, 10 aa, synthetic construct
NMNRGDRQGI

SEQ ID NO: 83523 - protein, 10 aa, synthetic construct
NMNRGDRSQT

SEQ ID NO: 83524 - protein, 10 aa, synthetic construct
NMQRGDRDYL

SEQ ID NO: 83525 - protein, 10 aa, synthetic construct
NMQRGDYVGL

SEQ ID NO: 83526 - protein, 10 aa, synthetic construct
NMQRGDYSSV

SEQ ID NO: 83527 - protein, 10 aa, synthetic construct
NMQRGDYTSV

SEQ ID NO: 83528 - protein, 10 aa, synthetic construct
ESARGDLLLS

SEQ ID NO: 83529 - protein, 10 aa, synthetic construct
NMQRGDQSTL

SEQ ID NO: 83530 - protein, 10 aa, synthetic construct
NMDRGDRDYL

SEQ ID NO: 83531 - protein, 10 aa, synthetic construct
NMDRGDYVGL

SEQ ID NO: 83532 - protein, 10 aa, synthetic construct
NMDRGDYSSV

SEQ ID NO: 83533 - protein, 10 aa, synthetic construct
NMDRGDYTSV

SEQ ID NO: 83534 - protein, 10 aa, synthetic construct
NMDRGDQSTL

SEQ ID NO: 83535 - protein, 10 aa, synthetic construct
NMERGDRDYL

SEQ ID NO: 83536 - protein, 10 aa, synthetic construct
NMERGDYVGL

SEQ ID NO: 83537 - protein, 10 aa, synthetic construct
NMERGDYSSV

SEQ ID NO: 83538 - protein, 10 aa, synthetic construct
NMERGDYTSV

SEQ ID NO: 83539 - protein, 10 aa, synthetic construct
ESVRGDRGQI

SEQ ID NO: 83540 - protein, 10 aa, synthetic construct
NMERGDQSTL

SEQ ID NO: 83541 - protein, 10 aa, synthetic construct
NWGRGDFQNT

SEQ ID NO: 83542 - protein, 10 aa, synthetic construct
NWARGDFQNT

SEQ ID NO: 83543 - protein, 10 aa, synthetic construct
NWVRGDFQNT

SEQ ID NO: 83544 - protein, 10 aa, synthetic construct
NWPRGDFQNT

SEQ ID NO: 83545 - protein, 10 aa, synthetic construct
NWLRGDFQNT

SEQ ID NO: 83546 - protein, 10 aa, synthetic construct
NWIRGDRDYL

SEQ ID NO: 83547 - protein, 10 aa, synthetic construct
NWIRGDYVGL

SEQ ID NO: 83548 - protein, 10 aa, synthetic construct
NWIRGDYSSV

SEQ ID NO: 83549 - protein, 10 aa, synthetic construct
NWIRGDYTSV

SEQ ID NO: 83550 - protein, 10 aa, synthetic construct
ESVRGDRQGI

SEQ ID NO: 83551 - protein, 10 aa, synthetic construct
NWIRGDQSTL

SEQ ID NO: 83552 - protein, 10 aa, synthetic construct
NWMRGDYTSV

SEQ ID NO: 83553 - protein, 10 aa, synthetic construct
NWWRGDYNSL

SEQ ID NO: 83554 - protein, 10 aa, synthetic construct
NWWRGDYTSM

SEQ ID NO: 83555 - protein, 10 aa, synthetic construct
NWWRGDFQNT

SEQ ID NO: 83556 - protein, 10 aa, synthetic construct
NWFRGDRDYL

SEQ ID NO: 83557 - protein, 10 aa, synthetic construct
NWFRGDYVGL

SEQ ID NO: 83558 - protein, 10 aa, synthetic construct
NWFRGDYSSV

SEQ ID NO: 83559 - protein, 10 aa, synthetic construct
NWFRGDYTSV

SEQ ID NO: 83560 - protein, 10 aa, synthetic construct
NWFRGDQSTL

SEQ ID NO: 83561 - protein, 10 aa, synthetic construct
ESVRGDRSVV

SEQ ID NO: 83562 - protein, 10 aa, synthetic construct
NWKRGDRDYL

SEQ ID NO: 83563 - protein, 10 aa, synthetic construct
NWKRGDYVGL

SEQ ID NO: 83564 - protein, 10 aa, synthetic construct
NWKRGDYSSV

SEQ ID NO: 83565 - protein, 10 aa, synthetic construct
NWKRGDYTSV

SEQ ID NO: 83566 - protein, 10 aa, synthetic construct
NWKRGDQSTL

SEQ ID NO: 83567 - protein, 10 aa, synthetic construct
NWRRGDFQNT

SEQ ID NO: 83568 - protein, 10 aa, synthetic construct
NWHRGDHVNL

SEQ ID NO: 83569 - protein, 10 aa, synthetic construct
NWHRGDYNSL

SEQ ID NO: 83570 - protein, 10 aa, synthetic construct
NWHRGDYTSM

SEQ ID NO: 83571 - protein, 10 aa, synthetic construct
NWSRGDFQNT

SEQ ID NO: 83572 - protein, 10 aa, synthetic construct
ESVRGDRGVV

SEQ ID NO: 83573 - protein, 10 aa, synthetic construct
NWTRGDHVNL

SEQ ID NO: 83574 - protein, 10 aa, synthetic construct
NWTRGDYNSL

SEQ ID NO: 83575 - protein, 10 aa, synthetic construct
NWTRGDYTSM

SEQ ID NO: 83576 - protein, 10 aa, synthetic construct
NWYRGDRDYL

SEQ ID NO: 83577 - protein, 10 aa, synthetic construct
NWYRGDYVGL

SEQ ID NO: 83578 - protein, 10 aa, synthetic construct
NWYRGDYSSV

SEQ ID NO: 83579 - protein, 10 aa, synthetic construct
NWYRGDYTSV

SEQ ID NO: 83580 - protein, 10 aa, synthetic construct
NWYRGDQSTL

SEQ ID NO: 83581 - protein, 10 aa, synthetic construct
NWNRGDRDYL

SEQ ID NO: 83582 - protein, 10 aa, synthetic construct
NWNRGDYVGL

SEQ ID NO: 83583 - protein, 10 aa, synthetic construct
ESVRGDRSQT

SEQ ID NO: 83584 - protein, 10 aa, synthetic construct
NWNRGDYSSV

SEQ ID NO: 83585 - protein, 10 aa, synthetic construct
NWNRGDYTSV

SEQ ID NO: 83586 - protein, 10 aa, synthetic construct
NWNRGDQSTL

SEQ ID NO: 83587 - protein, 10 aa, synthetic construct
NWQRGDHVNL

SEQ ID NO: 83588 - protein, 10 aa, synthetic construct
NWQRGDYNSL

SEQ ID NO: 83589 - protein, 10 aa, synthetic construct
NWQRGDYTSM

SEQ ID NO: 83590 - protein, 10 aa, synthetic construct
NWDRGDHVNL

SEQ ID NO: 83591 - protein, 10 aa, synthetic construct
NWDRGDYNSL

SEQ ID NO: 83592 - protein, 10 aa, synthetic construct
NWDRGDYTSM

SEQ ID NO: 83593 - protein, 10 aa, synthetic construct
NWERGDHVNL

SEQ ID NO: 83594 - protein, 10 aa, synthetic construct
ESLRGDRGQI

SEQ ID NO: 83595 - protein, 10 aa, synthetic construct
NWERGDYNSL

SEQ ID NO: 83596 - protein, 10 aa, synthetic construct
NWERGDYTSM

SEQ ID NO: 83597 - protein, 10 aa, synthetic construct
NFGRGDYTSV

SEQ ID NO: 83598 - protein, 10 aa, synthetic construct
NFGRGDLIGR

SEQ ID NO: 83599 - protein, 10 aa, synthetic construct
NFARGDYTSV

SEQ ID NO: 83600 - protein, 10 aa, synthetic construct
NFARGDLIGR

SEQ ID NO: 83601 - protein, 10 aa, synthetic construct
NFVRGDHVNL

SEQ ID NO: 83602 - protein, 10 aa, synthetic construct
NFVRGDRDYL

SEQ ID NO: 83603 - protein, 10 aa, synthetic construct
NFVRGDYSSV

SEQ ID NO: 83604 - protein, 10 aa, synthetic construct
NFVRGDLTVT

SEQ ID NO: 83605 - protein, 10 aa, synthetic construct
ESLRGDRQGI

SEQ ID NO: 83606 - protein, 10 aa, synthetic construct
NFPRGDYTSV

SEQ ID NO: 83607 - protein, 10 aa, synthetic construct
NFPRGDLIGR

SEQ ID NO: 83608 - protein, 10 aa, synthetic construct
NFLRGDHVNL

SEQ ID NO: 83609 - protein, 10 aa, synthetic construct
NFLRGDRDYL

SEQ ID NO: 83610 - protein, 10 aa, synthetic construct
NFLRGDYSSV

SEQ ID NO: 83611 - protein, 10 aa, synthetic construct
NFLRGDLTVT

SEQ ID NO: 83612 - protein, 10 aa, synthetic construct
NFIRGDHGVL

SEQ ID NO: 83613 - protein, 10 aa, synthetic construct
NFIRGDRGQI

SEQ ID NO: 83614 - protein, 10 aa, synthetic construct
NFIRGDRQGI

SEQ ID NO: 83615 - protein, 10 aa, synthetic construct
NFIRGDYVGL

SEQ ID NO: 83616 - protein, 10 aa, synthetic construct
ESLRGDRSVV

SEQ ID NO: 83617 - protein, 10 aa, synthetic construct
NFIRGDLIGR

SEQ ID NO: 83618 - protein, 10 aa, synthetic construct
NFIRGDQSTL

SEQ ID NO: 83619 - protein, 10 aa, synthetic construct
NFIRGDLLLS

SEQ ID NO: 83620 - protein, 10 aa, synthetic construct
NFMRGDHGVL

SEQ ID NO: 83621 - protein, 10 aa, synthetic construct
NFMRGDRGQI

SEQ ID NO: 83622 - protein, 10 aa, synthetic construct
NFMRGDRQGI

SEQ ID NO: 83623 - protein, 10 aa, synthetic construct
NFMRGDYVGL

SEQ ID NO: 83624 - protein, 10 aa, synthetic construct
NFMRGDLIGR

SEQ ID NO: 83625 - protein, 10 aa, synthetic construct
NFMRGDQSTL

SEQ ID NO: 83626 - protein, 10 aa, synthetic construct
NFMRGDLLLS

SEQ ID NO: 83627 - protein, 10 aa, synthetic construct
NFFRGDRSQT

SEQ ID NO: 83628 - protein, 10 aa, synthetic construct
ESLRGDRGVV

SEQ ID NO: 83629 - protein, 10 aa, synthetic construct
NFWRGDHVNL

SEQ ID NO: 83630 - protein, 10 aa, synthetic construct
NFWRGDRDYL

SEQ ID NO: 83631 - protein, 10 aa, synthetic construct
NFWRGDYSSV

SEQ ID NO: 83632 - protein, 10 aa, synthetic construct
NFWRGDLTVT

SEQ ID NO: 83633 - protein, 10 aa, synthetic construct
NFKRGDHGVL

SEQ ID NO: 83634 - protein, 10 aa, synthetic construct
NFKRGDRGQI

SEQ ID NO: 83635 - protein, 10 aa, synthetic construct
NFKRGDRQGI

SEQ ID NO: 83636 - protein, 10 aa, synthetic construct
NFKRGDYVGL

SEQ ID NO: 83637 - protein, 10 aa, synthetic construct
NFKRGDLIGR

SEQ ID NO: 83638 - protein, 10 aa, synthetic construct
NFKRGDQSTL

SEQ ID NO: 83639 - protein, 10 aa, synthetic construct
ESLRGDRSQT

SEQ ID NO: 83640 - protein, 10 aa, synthetic construct
NFKRGDLLLS

SEQ ID NO: 83641 - protein, 10 aa, synthetic construct
NFRRGDYTSV

SEQ ID NO: 83642 - protein, 10 aa, synthetic construct
NFRRGDLIGR

SEQ ID NO: 83643 - protein, 10 aa, synthetic construct
NFHRGDHVNL

SEQ ID NO: 83644 - protein, 10 aa, synthetic construct
NFHRGDRDYL

SEQ ID NO: 83645 - protein, 10 aa, synthetic construct
NFHRGDYSSV

SEQ ID NO: 83646 - protein, 10 aa, synthetic construct
NFHRGDLTVT

SEQ ID NO: 83647 - protein, 10 aa, synthetic construct
NFSRGDHVNL

SEQ ID NO: 83648 - protein, 10 aa, synthetic construct
NFSRGDRDYL

SEQ ID NO: 83649 - protein, 10 aa, synthetic construct
NFSRGDYSSV

SEQ ID NO: 83650 - protein, 10 aa, synthetic construct
ESWRGDRGQI

SEQ ID NO: 83651 - protein, 10 aa, synthetic construct
NFSRGDLTVT

SEQ ID NO: 83652 - protein, 10 aa, synthetic construct
NFTRGDHVNL

SEQ ID NO: 83653 - protein, 10 aa, synthetic construct
NFTRGDRDYL

SEQ ID NO: 83654 - protein, 10 aa, synthetic construct
NFTRGDYSSV

SEQ ID NO: 83655 - protein, 10 aa, synthetic construct
NFTRGDLTVT

SEQ ID NO: 83656 - protein, 10 aa, synthetic construct
NFYRGDHGVL

SEQ ID NO: 83657 - protein, 10 aa, synthetic construct
NFYRGDRGQI

SEQ ID NO: 83658 - protein, 10 aa, synthetic construct
NFYRGDRQGI

SEQ ID NO: 83659 - protein, 10 aa, synthetic construct
NFYRGDYVGL

SEQ ID NO: 83660 - protein, 10 aa, synthetic construct
NFYRGDLIGR

SEQ ID NO: 83661 - protein, 10 aa, synthetic construct
ESWRGDRQGI

SEQ ID NO: 83662 - protein, 10 aa, synthetic construct
NFYRGDQSTL

SEQ ID NO: 83663 - protein, 10 aa, synthetic construct
NFYRGDLLLS

SEQ ID NO: 83664 - protein, 10 aa, synthetic construct
NFNRGDHGVL

SEQ ID NO: 83665 - protein, 10 aa, synthetic construct
NFNRGDRGQI

SEQ ID NO: 83666 - protein, 10 aa, synthetic construct
NFNRGDRQGI

SEQ ID NO: 83667 - protein, 10 aa, synthetic construct
NFNRGDYVGL

SEQ ID NO: 83668 - protein, 10 aa, synthetic construct
NFNRGDLIGR

SEQ ID NO: 83669 - protein, 10 aa, synthetic construct
NFNRGDQSTL

SEQ ID NO: 83670 - protein, 10 aa, synthetic construct
NFNRGDLLLS

SEQ ID NO: 83671 - protein, 10 aa, synthetic construct
NFQRGDHVNL

SEQ ID NO: 83672 - protein, 10 aa, synthetic construct
ESWRGDRSVV

SEQ ID NO: 83673 - protein, 10 aa, synthetic construct
NFQRGDRDYL

SEQ ID NO: 83674 - protein, 10 aa, synthetic construct
NFQRGDYSSV

SEQ ID NO: 83675 - protein, 10 aa, synthetic construct
NFQRGDLTVT

SEQ ID NO: 83676 - protein, 10 aa, synthetic construct
NFDRGDHVNL

SEQ ID NO: 83677 - protein, 10 aa, synthetic construct
NFDRGDRDYL

SEQ ID NO: 83678 - protein, 10 aa, synthetic construct
NFDRGDYSSV

SEQ ID NO: 83679 - protein, 10 aa, synthetic construct
NFDRGDLTVT

SEQ ID NO: 83680 - protein, 10 aa, synthetic construct
NFERGDHVNL

SEQ ID NO: 83681 - protein, 10 aa, synthetic construct
NFERGDRDYL

SEQ ID NO: 83682 - protein, 10 aa, synthetic construct
NFERGDYSSV

SEQ ID NO: 83683 - protein, 10 aa, synthetic construct
ESWRGDRGVV

SEQ ID NO: 83684 - protein, 10 aa, synthetic construct
NFERGDLTVT

SEQ ID NO: 83685 - protein, 10 aa, synthetic construct
NKGRGDYTSV

SEQ ID NO: 83686 - protein, 10 aa, synthetic construct
NKGRGDLIGR

SEQ ID NO: 83687 - protein, 10 aa, synthetic construct
NKARGDYTSV

SEQ ID NO: 83688 - protein, 10 aa, synthetic construct
NKARGDLIGR

SEQ ID NO: 83689 - protein, 10 aa, synthetic construct
NKVRGDHVNL

SEQ ID NO: 83690 - protein, 10 aa, synthetic construct
NKVRGDRDYL

SEQ ID NO: 83691 - protein, 10 aa, synthetic construct
NKVRGDYSSV

SEQ ID NO: 83692 - protein, 10 aa, synthetic construct
NKVRGDLTVT

SEQ ID NO: 83693 - protein, 10 aa, synthetic construct
NKPRGDYTSV

SEQ ID NO: 83694 - protein, 10 aa, synthetic construct
ESWRGDRSQT

SEQ ID NO: 83695 - protein, 10 aa, synthetic construct
NKPRGDLIGR

SEQ ID NO: 83696 - protein, 10 aa, synthetic construct
NKLRGDHVNL

SEQ ID NO: 83697 - protein, 10 aa, synthetic construct
NKLRGDRDYL

SEQ ID NO: 83698 - protein, 10 aa, synthetic construct
NKLRGDYSSV

SEQ ID NO: 83699 - protein, 10 aa, synthetic construct
NKLRGDLTVT

SEQ ID NO: 83700 - protein, 10 aa, synthetic construct
NKIRGDHGVL

SEQ ID NO: 83701 - protein, 10 aa, synthetic construct
NKIRGDRGQI

SEQ ID NO: 83702 - protein, 10 aa, synthetic construct
NKIRGDRQGI

SEQ ID NO: 83703 - protein, 10 aa, synthetic construct
NKIRGDYVGL

SEQ ID NO: 83704 - protein, 10 aa, synthetic construct
NKIRGDLIGR

SEQ ID NO: 83705 - protein, 10 aa, synthetic construct
ESRRGDHGVL

SEQ ID NO: 83706 - protein, 10 aa, synthetic construct
NKIRGDQSTL

SEQ ID NO: 83707 - protein, 10 aa, synthetic construct
NKIRGDLLLS

SEQ ID NO: 83708 - protein, 10 aa, synthetic construct
NKMRGDHGVL

SEQ ID NO: 83709 - protein, 10 aa, synthetic construct
NKMRGDRGQI

SEQ ID NO: 83710 - protein, 10 aa, synthetic construct
NKMRGDRQGI

SEQ ID NO: 83711 - protein, 10 aa, synthetic construct
NKMRGDYVGL

SEQ ID NO: 83712 - protein, 10 aa, synthetic construct
NKMRGDLIGR

SEQ ID NO: 83713 - protein, 10 aa, synthetic construct
NKMRGDQSTL

SEQ ID NO: 83714 - protein, 10 aa, synthetic construct
NKMRGDLLLS

SEQ ID NO: 83715 - protein, 10 aa, synthetic construct
NKWRGDHVNL

SEQ ID NO: 83716 - protein, 10 aa, synthetic construct
ESRRGDYVGL

SEQ ID NO: 83717 - protein, 10 aa, synthetic construct
NKWRGDRDYL

SEQ ID NO: 83718 - protein, 10 aa, synthetic construct
NKWRGDYSSV

SEQ ID NO: 83719 - protein, 10 aa, synthetic construct
NKWRGDLTVT

SEQ ID NO: 83720 - protein, 10 aa, synthetic construct
NKFRGDHGVL

SEQ ID NO: 83721 - protein, 10 aa, synthetic construct
NKFRGDRGQI

SEQ ID NO: 83722 - protein, 10 aa, synthetic construct
NKFRGDRQGI

SEQ ID NO: 83723 - protein, 10 aa, synthetic construct
NKFRGDYVGL

SEQ ID NO: 83724 - protein, 10 aa, synthetic construct
NKFRGDLIGR

SEQ ID NO: 83725 - protein, 10 aa, synthetic construct
NKFRGDQSTL

SEQ ID NO: 83726 - protein, 10 aa, synthetic construct
NKFRGDLLLS

SEQ ID NO: 83727 - protein, 10 aa, synthetic construct
ESRRGDQSTL

SEQ ID NO: 83728 - protein, 10 aa, synthetic construct
NKRRGDYTSV

SEQ ID NO: 83729 - protein, 10 aa, synthetic construct
NKRRGDLIGR

SEQ ID NO: 83730 - protein, 10 aa, synthetic construct
NKHRGDHVNL

SEQ ID NO: 83731 - protein, 10 aa, synthetic construct
NKHRGDRDYL

SEQ ID NO: 83732 - protein, 10 aa, synthetic construct
NKHRGDYSSV

SEQ ID NO: 83733 - protein, 10 aa, synthetic construct
NKHRGDLTVT

SEQ ID NO: 83734 - protein, 10 aa, synthetic construct
NKSRGDHVNL

SEQ ID NO: 83735 - protein, 10 aa, synthetic construct
NKSRGDRDYL

SEQ ID NO: 83736 - protein, 10 aa, synthetic construct
NKSRGDYSSV

SEQ ID NO: 83737 - protein, 10 aa, synthetic construct
NKSRGDLTVT

SEQ ID NO: 83738 - protein, 10 aa, synthetic construct
DFFRGDHGVL

SEQ ID NO: 83739 - protein, 10 aa, synthetic construct
ESRRGDLLLS

SEQ ID NO: 83740 - protein, 10 aa, synthetic construct
NKTRGDHVNL

SEQ ID NO: 83741 - protein, 10 aa, synthetic construct
NKTRGDRDYL

SEQ ID NO: 83742 - protein, 10 aa, synthetic construct
NKTRGDYSSV

SEQ ID NO: 83743 - protein, 10 aa, synthetic construct
NKTRGDLTVT

SEQ ID NO: 83744 - protein, 10 aa, synthetic construct
NKYRGDHGVL

SEQ ID NO: 83745 - protein, 10 aa, synthetic construct
NKYRGDRGQI

SEQ ID NO: 83746 - protein, 10 aa, synthetic construct
NKYRGDRQGI

SEQ ID NO: 83747 - protein, 10 aa, synthetic construct
NKYRGDYVGL

SEQ ID NO: 83748 - protein, 10 aa, synthetic construct
NKYRGDLIGR

SEQ ID NO: 83749 - protein, 10 aa, synthetic construct
NKYRGDQSTL

SEQ ID NO: 83750 - protein, 10 aa, synthetic construct
ESHRGDRGQI

SEQ ID NO: 83751 - protein, 10 aa, synthetic construct
NKYRGDLLLS

SEQ ID NO: 83752 - protein, 10 aa, synthetic construct
NKQRGDHVNL

SEQ ID NO: 83753 - protein, 10 aa, synthetic construct
NKQRGDRDYL

SEQ ID NO: 83754 - protein, 10 aa, synthetic construct
NKQRGDYSSV

SEQ ID NO: 83755 - protein, 10 aa, synthetic construct
NKQRGDLTVT

SEQ ID NO: 83756 - protein, 10 aa, synthetic construct
NKDRGDHVNL

SEQ ID NO: 83757 - protein, 10 aa, synthetic construct
NKDRGDRDYL

SEQ ID NO: 83758 - protein, 10 aa, synthetic construct
NKDRGDYSSV

SEQ ID NO: 83759 - protein, 10 aa, synthetic construct
NKDRGDLTVT

SEQ ID NO: 83760 - protein, 10 aa, synthetic construct
NKERGDHVNL

SEQ ID NO: 83761 - protein, 10 aa, synthetic construct
ESHRGDRQGI

SEQ ID NO: 83762 - protein, 10 aa, synthetic construct
NKERGDRDYL

SEQ ID NO: 83763 - protein, 10 aa, synthetic construct
NKERGDYSSV

SEQ ID NO: 83764 - protein, 10 aa, synthetic construct
NKERGDLTVT

SEQ ID NO: 83765 - protein, 10 aa, synthetic construct
NRGRGDFNNT

SEQ ID NO: 83766 - protein, 10 aa, synthetic construct
NRGRGDFNNL

SEQ ID NO: 83767 - protein, 10 aa, synthetic construct
NRARGDFNNT

SEQ ID NO: 83768 - protein, 10 aa, synthetic construct
NRARGDFNNL

SEQ ID NO: 83769 - protein, 10 aa, synthetic construct
NRVRGDYNSL

SEQ ID NO: 83770 - protein, 10 aa, synthetic construct
NRVRGDYTSM

SEQ ID NO: 83771 - protein, 10 aa, synthetic construct
NRVRGDFQNT

SEQ ID NO: 83772 - protein, 10 aa, synthetic construct
ESHRGDRSVV

SEQ ID NO: 83773 - protein, 10 aa, synthetic construct
NRPRGDFNNT

SEQ ID NO: 83774 - protein, 10 aa, synthetic construct
NRPRGDFNNL

SEQ ID NO: 83775 - protein, 10 aa, synthetic construct
NRLRGDYNSL

SEQ ID NO: 83776 - protein, 10 aa, synthetic construct
NRLRGDYTSM

SEQ ID NO: 83777 - protein, 10 aa, synthetic construct
NRLRGDFQNT

SEQ ID NO: 83778 - protein, 10 aa, synthetic construct
NRIRGDYTSV

SEQ ID NO: 83779 - protein, 10 aa, synthetic construct
NRIRGDLIGR

SEQ ID NO: 83780 - protein, 10 aa, synthetic construct
NRMRGDYTSV

SEQ ID NO: 83781 - protein, 10 aa, synthetic construct
NRMRGDLIGR

SEQ ID NO: 83782 - protein, 10 aa, synthetic construct
NRWRGDYNSL

SEQ ID NO: 83783 - protein, 10 aa, synthetic construct
ESHRGDRGVV

SEQ ID NO: 83784 - protein, 10 aa, synthetic construct
NRWRGDYTSM

SEQ ID NO: 83785 - protein, 10 aa, synthetic construct
NRWRGDFQNT

SEQ ID NO: 83786 - protein, 10 aa, synthetic construct
NRFRGDYTSV

SEQ ID NO: 83787 - protein, 10 aa, synthetic construct
NRFRGDLIGR

SEQ ID NO: 83788 - protein, 10 aa, synthetic construct
NRKRGDYTSV

SEQ ID NO: 83789 - protein, 10 aa, synthetic construct
NRKRGDLIGR

SEQ ID NO: 83790 - protein, 10 aa, synthetic construct
NRRRGDFNNT

SEQ ID NO: 83791 - protein, 10 aa, synthetic construct
NRRRGDFNNL

SEQ ID NO: 83792 - protein, 10 aa, synthetic construct
NRHRGDYNSL

SEQ ID NO: 83793 - protein, 10 aa, synthetic construct
NRHRGDYTSM

SEQ ID NO: 83794 - protein, 10 aa, synthetic construct
ESHRGDRSQT

SEQ ID NO: 83795 - protein, 10 aa, synthetic construct
NRHRGDFQNT

SEQ ID NO: 83796 - protein, 10 aa, synthetic construct
NRSRGDYNSL

SEQ ID NO: 83797 - protein, 10 aa, synthetic construct
NRSRGDYTSM

SEQ ID NO: 83798 - protein, 10 aa, synthetic construct
NRSRGDFQNT

SEQ ID NO: 83799 - protein, 10 aa, synthetic construct
NRTRGDYNSL

SEQ ID NO: 83800 - protein, 10 aa, synthetic construct
NRTRGDYTSM

SEQ ID NO: 83801 - protein, 10 aa, synthetic construct
NRTRGDFQNT

SEQ ID NO: 83802 - protein, 10 aa, synthetic construct
NRYRGDYTSV

SEQ ID NO: 83803 - protein, 10 aa, synthetic construct
NRYRGDLIGR

SEQ ID NO: 83804 - protein, 10 aa, synthetic construct
NRNRGDYTSV

SEQ ID NO: 83805 - protein, 10 aa, synthetic construct
ESSRGDRGQI

SEQ ID NO: 83806 - protein, 10 aa, synthetic construct
NRNRGDLIGR

SEQ ID NO: 83807 - protein, 10 aa, synthetic construct
NRQRGDYNSL

SEQ ID NO: 83808 - protein, 10 aa, synthetic construct
NRQRGDYTSM

SEQ ID NO: 83809 - protein, 10 aa, synthetic construct
NRQRGDFQNT

SEQ ID NO: 83810 - protein, 10 aa, synthetic construct
NRDRGDYNSL

SEQ ID NO: 83811 - protein, 10 aa, synthetic construct
NRDRGDYTSM

SEQ ID NO: 83812 - protein, 10 aa, synthetic construct
NRDRGDFQNT

SEQ ID NO: 83813 - protein, 10 aa, synthetic construct
NRERGDYNSL

SEQ ID NO: 83814 - protein, 10 aa, synthetic construct
NRERGDYTSM

SEQ ID NO: 83815 - protein, 10 aa, synthetic construct
NRERGDFQNT

SEQ ID NO: 83816 - protein, 10 aa, synthetic construct
ESSRGDRQGI

SEQ ID NO: 83817 - protein, 10 aa, synthetic construct
NHGRGDYNSL

SEQ ID NO: 83818 - protein, 10 aa, synthetic construct
NHGRGDYTSM

SEQ ID NO: 83819 - protein, 10 aa, synthetic construct
NHGRGDFQNT

SEQ ID NO: 83820 - protein, 10 aa, synthetic construct
NHARGDYNSL

SEQ ID NO: 83821 - protein, 10 aa, synthetic construct
NHARGDYTSM

SEQ ID NO: 83822 - protein, 10 aa, synthetic construct
NHARGDFQNT

SEQ ID NO: 83823 - protein, 10 aa, synthetic construct
NHVRGDYTSV

SEQ ID NO: 83824 - protein, 10 aa, synthetic construct
NHVRGDLIGR

SEQ ID NO: 83825 - protein, 10 aa, synthetic construct
NHPRGDYNSL

SEQ ID NO: 83826 - protein, 10 aa, synthetic construct
NHPRGDYTSM

SEQ ID NO: 83827 - protein, 10 aa, synthetic construct
ESSRGDRSVV

SEQ ID NO: 83828 - protein, 10 aa, synthetic construct
NHPRGDFQNT

SEQ ID NO: 83829 - protein, 10 aa, synthetic construct
NHLRGDYTSV

SEQ ID NO: 83830 - protein, 10 aa, synthetic construct
NHLRGDLIGR

SEQ ID NO: 83831 - protein, 10 aa, synthetic construct
NHIRGDHVNL

SEQ ID NO: 83832 - protein, 10 aa, synthetic construct
NHIRGDRDYL

SEQ ID NO: 83833 - protein, 10 aa, synthetic construct
NHIRGDYSSV

SEQ ID NO: 83834 - protein, 10 aa, synthetic construct
NHIRGDLTVT

SEQ ID NO: 83835 - protein, 10 aa, synthetic construct
NHMRGDHVNL

SEQ ID NO: 83836 - protein, 10 aa, synthetic construct
NHMRGDRDYL

SEQ ID NO: 83837 - protein, 10 aa, synthetic construct
NHMRGDYSSV

SEQ ID NO: 83838 - protein, 10 aa, synthetic construct
ESSRGDRGVV

SEQ ID NO: 83839 - protein, 10 aa, synthetic construct
NHMRGDLTVT

SEQ ID NO: 83840 - protein, 10 aa, synthetic construct
NHWRGDYTSV

SEQ ID NO: 83841 - protein, 10 aa, synthetic construct
NHWRGDLIGR

SEQ ID NO: 83842 - protein, 10 aa, synthetic construct
NHFRGDHVNL

SEQ ID NO: 83843 - protein, 10 aa, synthetic construct
NHFRGDRDYL

SEQ ID NO: 83844 - protein, 10 aa, synthetic construct
NHFRGDYSSV

SEQ ID NO: 83845 - protein, 10 aa, synthetic construct
NHFRGDLTVT

SEQ ID NO: 83846 - protein, 10 aa, synthetic construct
NHKRGDHVNL

SEQ ID NO: 83847 - protein, 10 aa, synthetic construct
NHKRGDRDYL

SEQ ID NO: 83848 - protein, 10 aa, synthetic construct
NHKRGDYSSV

SEQ ID NO: 83849 - protein, 10 aa, synthetic construct
DFFRGDRGQI

SEQ ID NO: 83850 - protein, 10 aa, synthetic construct
ESSRGDRSQT

SEQ ID NO: 83851 - protein, 10 aa, synthetic construct
NHKRGDLTVT

SEQ ID NO: 83852 - protein, 10 aa, synthetic construct
NHRRGDYNSL

SEQ ID NO: 83853 - protein, 10 aa, synthetic construct
NHRRGDYTSM

SEQ ID NO: 83854 - protein, 10 aa, synthetic construct
NHRRGDFQNT

SEQ ID NO: 83855 - protein, 10 aa, synthetic construct
NHHRGDYTSV

SEQ ID NO: 83856 - protein, 10 aa, synthetic construct
NHHRGDLIGR

SEQ ID NO: 83857 - protein, 10 aa, synthetic construct
NHSRGDYTSV

SEQ ID NO: 83858 - protein, 10 aa, synthetic construct
NHSRGDLIGR

SEQ ID NO: 83859 - protein, 10 aa, synthetic construct
NHTRGDYTSV

SEQ ID NO: 83860 - protein, 10 aa, synthetic construct
NHTRGDLIGR

SEQ ID NO: 83861 - protein, 10 aa, synthetic construct
ESTRGDRGQI

SEQ ID NO: 83862 - protein, 10 aa, synthetic construct
NHYRGDHVNL

SEQ ID NO: 83863 - protein, 10 aa, synthetic construct
NHYRGDRDYL

SEQ ID NO: 83864 - protein, 10 aa, synthetic construct
NHYRGDYSSV

SEQ ID NO: 83865 - protein, 10 aa, synthetic construct
NHYRGDLTVT

SEQ ID NO: 83866 - protein, 10 aa, synthetic construct
NHNRGDHVNL

SEQ ID NO: 83867 - protein, 10 aa, synthetic construct
NHNRGDRDYL

SEQ ID NO: 83868 - protein, 10 aa, synthetic construct
NHNRGDYSSV

SEQ ID NO: 83869 - protein, 10 aa, synthetic construct
NHNRGDLTVT

SEQ ID NO: 83870 - protein, 10 aa, synthetic construct
NHQRGDYTSV

SEQ ID NO: 83871 - protein, 10 aa, synthetic construct
NHQRGDLIGR

SEQ ID NO: 83872 - protein, 10 aa, synthetic construct
ESTRGDRQGI

SEQ ID NO: 83873 - protein, 10 aa, synthetic construct
NHDRGDYTSV

SEQ ID NO: 83874 - protein, 10 aa, synthetic construct
NHDRGDLIGR

SEQ ID NO: 83875 - protein, 10 aa, synthetic construct
NHERGDYTSV

SEQ ID NO: 83876 - protein, 10 aa, synthetic construct
NHERGDLIGR

SEQ ID NO: 83877 - protein, 10 aa, synthetic construct
NSGRGDFNNT

SEQ ID NO: 83878 - protein, 10 aa, synthetic construct
NSGRGDFNNL

SEQ ID NO: 83879 - protein, 10 aa, synthetic construct
NSARGDFNNT

SEQ ID NO: 83880 - protein, 10 aa, synthetic construct
NSARGDFNNL

SEQ ID NO: 83881 - protein, 10 aa, synthetic construct
NSVRGDYNSL

SEQ ID NO: 83882 - protein, 10 aa, synthetic construct
NSVRGDYTSM

SEQ ID NO: 83883 - protein, 10 aa, synthetic construct
ESTRGDRSVV

SEQ ID NO: 83884 - protein, 10 aa, synthetic construct
NSVRGDFQNT

SEQ ID NO: 83885 - protein, 10 aa, synthetic construct
NSLRGDYNSL

SEQ ID NO: 83886 - protein, 10 aa, synthetic construct
NSLRGDYTSM

SEQ ID NO: 83887 - protein, 10 aa, synthetic construct
NSLRGDFQNT

SEQ ID NO: 83888 - protein, 10 aa, synthetic construct
NSIRGDYTSV

SEQ ID NO: 83889 - protein, 10 aa, synthetic construct
NSMRGDYTSV

SEQ ID NO: 83890 - protein, 10 aa, synthetic construct
NSWRGDYNSL

SEQ ID NO: 83891 - protein, 10 aa, synthetic construct
NSWRGDYTSM

SEQ ID NO: 83892 - protein, 10 aa, synthetic construct
NSWRGDFQNT

SEQ ID NO: 83893 - protein, 10 aa, synthetic construct
NSFRGDYTSV

SEQ ID NO: 83894 - protein, 10 aa, synthetic construct
ESTRGDRGVV

SEQ ID NO: 83895 - protein, 10 aa, synthetic construct
NSKRGDYTSV

SEQ ID NO: 83896 - protein, 10 aa, synthetic construct
NSRRGDFNNT

SEQ ID NO: 83897 - protein, 10 aa, synthetic construct
NSRRGDFNNL

SEQ ID NO: 83898 - protein, 10 aa, synthetic construct
NSHRGDYNSL

SEQ ID NO: 83899 - protein, 10 aa, synthetic construct
NSHRGDYTSM

SEQ ID NO: 83900 - protein, 10 aa, synthetic construct
NSHRGDFQNT

SEQ ID NO: 83901 - protein, 10 aa, synthetic construct
NSSRGDYNSL

SEQ ID NO: 83902 - protein, 10 aa, synthetic construct
NSSRGDYTSM

SEQ ID NO: 83903 - protein, 10 aa, synthetic construct
NSSRGDFQNT

SEQ ID NO: 83904 - protein, 10 aa, synthetic construct
NSTRGDYNSL

SEQ ID NO: 83905 - protein, 10 aa, synthetic construct
ESTRGDRSQT

SEQ ID NO: 83906 - protein, 10 aa, synthetic construct
NSTRGDYTSM

SEQ ID NO: 83907 - protein, 10 aa, synthetic construct
NSTRGDFQNT

SEQ ID NO: 83908 - protein, 10 aa, synthetic construct
NSYRGDYTSV

SEQ ID NO: 83909 - protein, 10 aa, synthetic construct
NSNRGDYTSV

SEQ ID NO: 83910 - protein, 10 aa, synthetic construct
NSQRGDYNSL

SEQ ID NO: 83911 - protein, 10 aa, synthetic construct
NSQRGDYTSM

SEQ ID NO: 83912 - protein, 10 aa, synthetic construct
NSQRGDFQNT

SEQ ID NO: 83913 - protein, 10 aa, synthetic construct
NSDRGDYNSL

SEQ ID NO: 83914 - protein, 10 aa, synthetic construct
NSDRGDYTSM

SEQ ID NO: 83915 - protein, 10 aa, synthetic construct
NSDRGDFQNT

SEQ ID NO: 83916 - protein, 10 aa, synthetic construct
ESQRGDRGQI

SEQ ID NO: 83917 - protein, 10 aa, synthetic construct
NSERGDYNSL

SEQ ID NO: 83918 - protein, 10 aa, synthetic construct
NSERGDYTSM

SEQ ID NO: 83919 - protein, 10 aa, synthetic construct
NSERGDFQNT

SEQ ID NO: 83920 - protein, 10 aa, synthetic construct
NTGRGDYNSL

SEQ ID NO: 83921 - protein, 10 aa, synthetic construct
NTGRGDYTSM

SEQ ID NO: 83922 - protein, 10 aa, synthetic construct
NTGRGDFQNT

SEQ ID NO: 83923 - protein, 10 aa, synthetic construct
NTARGDYNSL

SEQ ID NO: 83924 - protein, 10 aa, synthetic construct
NTARGDYTSM

SEQ ID NO: 83925 - protein, 10 aa, synthetic construct
NTARGDFQNT

SEQ ID NO: 83926 - protein, 10 aa, synthetic construct
NTVRGDYTSV

SEQ ID NO: 83927 - protein, 10 aa, synthetic construct
ESQRGDRQGI

SEQ ID NO: 83928 - protein, 10 aa, synthetic construct
NTVRGDLIGR

SEQ ID NO: 83929 - protein, 10 aa, synthetic construct
NTPRGDYNSL

SEQ ID NO: 83930 - protein, 10 aa, synthetic construct
NTPRGDYTSM

SEQ ID NO: 83931 - protein, 10 aa, synthetic construct
NTPRGDFQNT

SEQ ID NO: 83932 - protein, 10 aa, synthetic construct
NTLRGDYTSV

SEQ ID NO: 83933 - protein, 10 aa, synthetic construct
NTLRGDLIGR

SEQ ID NO: 83934 - protein, 10 aa, synthetic construct
NTIRGDHVNL

SEQ ID NO: 83935 - protein, 10 aa, synthetic construct
NTIRGDRDYL

SEQ ID NO: 83936 - protein, 10 aa, synthetic construct
NTIRGDYSSV

SEQ ID NO: 83937 - protein, 10 aa, synthetic construct
NTIRGDLTVT

SEQ ID NO: 83938 - protein, 10 aa, synthetic construct
ESQRGDRSVV

SEQ ID NO: 83939 - protein, 10 aa, synthetic construct
NTMRGDHVNL

SEQ ID NO: 83940 - protein, 10 aa, synthetic construct
NTMRGDRDYL

SEQ ID NO: 83941 - protein, 10 aa, synthetic construct
NTMRGDYSSV

SEQ ID NO: 83942 - protein, 10 aa, synthetic construct
NTMRGDLTVT

SEQ ID NO: 83943 - protein, 10 aa, synthetic construct
NTWRGDYTSV

SEQ ID NO: 83944 - protein, 10 aa, synthetic construct
NTWRGDLIGR

SEQ ID NO: 83945 - protein, 10 aa, synthetic construct
NTFRGDHVNL

SEQ ID NO: 83946 - protein, 10 aa, synthetic construct
NTFRGDRDYL

SEQ ID NO: 83947 - protein, 10 aa, synthetic construct
NTFRGDYSSV

SEQ ID NO: 83948 - protein, 10 aa, synthetic construct
NTFRGDLTVT

SEQ ID NO: 83949 - protein, 10 aa, synthetic construct
ESQRGDRGVV

SEQ ID NO: 83950 - protein, 10 aa, synthetic construct
NTKRGDHVNL

SEQ ID NO: 83951 - protein, 10 aa, synthetic construct
NTKRGDRDYL

SEQ ID NO: 83952 - protein, 10 aa, synthetic construct
NTKRGDYSSV

SEQ ID NO: 83953 - protein, 10 aa, synthetic construct
NTKRGDLTVT

SEQ ID NO: 83954 - protein, 10 aa, synthetic construct
NTRRGDYNSL

SEQ ID NO: 83955 - protein, 10 aa, synthetic construct
NTRRGDYTSM

SEQ ID NO: 83956 - protein, 10 aa, synthetic construct
NTRRGDFQNT

SEQ ID NO: 83957 - protein, 10 aa, synthetic construct
NTHRGDYTSV

SEQ ID NO: 83958 - protein, 10 aa, synthetic construct
NTHRGDLIGR

SEQ ID NO: 83959 - protein, 10 aa, synthetic construct
NTSRGDYTSV

SEQ ID NO: 83960 - protein, 10 aa, synthetic construct
TKKRGDLIGR

SEQ ID NO: 83961 - protein, 10 aa, synthetic construct
DFFRGDRQGI

SEQ ID NO: 83962 - protein, 10 aa, synthetic construct
ESQRGDRSQT

SEQ ID NO: 83963 - protein, 10 aa, synthetic construct
NTSRGDLIGR

SEQ ID NO: 83964 - protein, 10 aa, synthetic construct
NTTRGDYTSV

SEQ ID NO: 83965 - protein, 10 aa, synthetic construct
NTTRGDLIGR

SEQ ID NO: 83966 - protein, 10 aa, synthetic construct
NTYRGDHVNL

SEQ ID NO: 83967 - protein, 10 aa, synthetic construct
NTYRGDRDYL

SEQ ID NO: 83968 - protein, 10 aa, synthetic construct
NTYRGDYSSV

SEQ ID NO: 83969 - protein, 10 aa, synthetic construct
NTYRGDLTVT

SEQ ID NO: 83970 - protein, 10 aa, synthetic construct
NTNRGDHVNL

SEQ ID NO: 83971 - protein, 10 aa, synthetic construct
NTNRGDRDYL

SEQ ID NO: 83972 - protein, 10 aa, synthetic construct
NTNRGDYSSV

SEQ ID NO: 83973 - protein, 10 aa, synthetic construct
ESDRGDRGQI

SEQ ID NO: 83974 - protein, 10 aa, synthetic construct
NTNRGDLTVT

SEQ ID NO: 83975 - protein, 10 aa, synthetic construct
NTQRGDYTSV

SEQ ID NO: 83976 - protein, 10 aa, synthetic construct
NTQRGDLIGR

SEQ ID NO: 83977 - protein, 10 aa, synthetic construct
NTDRGDYTSV

SEQ ID NO: 83978 - protein, 10 aa, synthetic construct
NTDRGDLIGR

SEQ ID NO: 83979 - protein, 10 aa, synthetic construct
NTERGDYTSV

SEQ ID NO: 83980 - protein, 10 aa, synthetic construct
NTERGDLIGR

SEQ ID NO: 83981 - protein, 10 aa, synthetic construct
NYGRGDYTSV

SEQ ID NO: 83982 - protein, 10 aa, synthetic construct
NYGRGDLIGR

SEQ ID NO: 83983 - protein, 10 aa, synthetic construct
NYARGDYTSV

SEQ ID NO: 83984 - protein, 10 aa, synthetic construct
ESDRGDRQGI

SEQ ID NO: 83985 - protein, 10 aa, synthetic construct
NYARGDLIGR

SEQ ID NO: 83986 - protein, 10 aa, synthetic construct
NYVRGDHVNL

SEQ ID NO: 83987 - protein, 10 aa, synthetic construct
NYVRGDRDYL

SEQ ID NO: 83988 - protein, 10 aa, synthetic construct
NYVRGDYSSV

SEQ ID NO: 83989 - protein, 10 aa, synthetic construct
NYVRGDLTVT

SEQ ID NO: 83990 - protein, 10 aa, synthetic construct
NYPRGDYTSV

SEQ ID NO: 83991 - protein, 10 aa, synthetic construct
NYPRGDLIGR

SEQ ID NO: 83992 - protein, 10 aa, synthetic construct
NYLRGDHVNL

SEQ ID NO: 83993 - protein, 10 aa, synthetic construct
NYLRGDRDYL

SEQ ID NO: 83994 - protein, 10 aa, synthetic construct
NYLRGDYSSV

SEQ ID NO: 83995 - protein, 10 aa, synthetic construct
ESDRGDRSVV

SEQ ID NO: 83996 - protein, 10 aa, synthetic construct
NYLRGDLTVT

SEQ ID NO: 83997 - protein, 10 aa, synthetic construct
NYIRGDHGVL

SEQ ID NO: 83998 - protein, 10 aa, synthetic construct
NYIRGDRGQI

SEQ ID NO: 83999 - protein, 10 aa, synthetic construct
NYIRGDRQGI

SEQ ID NO: 84000 - protein, 10 aa, synthetic construct
NYIRGDYVGL

SEQ ID NO: 84001 - protein, 10 aa, synthetic construct
NYIRGDLIGR

SEQ ID NO: 84002 - protein, 10 aa, synthetic construct
NYIRGDQSTL

SEQ ID NO: 84003 - protein, 10 aa, synthetic construct
NYIRGDLLLS

SEQ ID NO: 84004 - protein, 10 aa, synthetic construct
NYMRGDHGVL

SEQ ID NO: 84005 - protein, 10 aa, synthetic construct
NYMRGDRGQI

SEQ ID NO: 84006 - protein, 10 aa, synthetic construct
ESDRGDRGVV

SEQ ID NO: 84007 - protein, 10 aa, synthetic construct
NYMRGDRQGI

SEQ ID NO: 84008 - protein, 10 aa, synthetic construct
NYMRGDYVGL

SEQ ID NO: 84009 - protein, 10 aa, synthetic construct
NYMRGDLIGR

SEQ ID NO: 84010 - protein, 10 aa, synthetic construct
NYMRGDQSTL

SEQ ID NO: 84011 - protein, 10 aa, synthetic construct
NYMRGDLLLS

SEQ ID NO: 84012 - protein, 10 aa, synthetic construct
NYWRGDHVNL

SEQ ID NO: 84013 - protein, 10 aa, synthetic construct
NYWRGDRDYL

SEQ ID NO: 84014 - protein, 10 aa, synthetic construct
NYWRGDYSSV

SEQ ID NO: 84015 - protein, 10 aa, synthetic construct
NYWRGDLTVT

SEQ ID NO: 84016 - protein, 10 aa, synthetic construct
NYFRGDHGVL

SEQ ID NO: 84017 - protein, 10 aa, synthetic construct
ESDRGDRSQT

SEQ ID NO: 84018 - protein, 10 aa, synthetic construct
NYFRGDRGQI

SEQ ID NO: 84019 - protein, 10 aa, synthetic construct
NYFRGDRQGI

SEQ ID NO: 84020 - protein, 10 aa, synthetic construct
NYFRGDYVGL

SEQ ID NO: 84021 - protein, 10 aa, synthetic construct
NYFRGDLIGR

SEQ ID NO: 84022 - protein, 10 aa, synthetic construct
NYFRGDQSTL

SEQ ID NO: 84023 - protein, 10 aa, synthetic construct
NYFRGDLLLS

SEQ ID NO: 84024 - protein, 10 aa, synthetic construct
NYKRGDHGVL

SEQ ID NO: 84025 - protein, 10 aa, synthetic construct
NYKRGDRGQI

SEQ ID NO: 84026 - protein, 10 aa, synthetic construct
NYKRGDRQGI

SEQ ID NO: 84027 - protein, 10 aa, synthetic construct
NYKRGDYVGL

SEQ ID NO: 84028 - protein, 10 aa, synthetic construct
ESERGDRGQI

SEQ ID NO: 84029 - protein, 10 aa, synthetic construct
NYKRGDLIGR

SEQ ID NO: 84030 - protein, 10 aa, synthetic construct
NYKRGDQSTL

SEQ ID NO: 84031 - protein, 10 aa, synthetic construct
NYKRGDLLLS

SEQ ID NO: 84032 - protein, 10 aa, synthetic construct
NYRRGDYTSV

SEQ ID NO: 84033 - protein, 10 aa, synthetic construct
NYRRGDLIGR

SEQ ID NO: 84034 - protein, 10 aa, synthetic construct
NYHRGDHVNL

SEQ ID NO: 84035 - protein, 10 aa, synthetic construct
NYHRGDRDYL

SEQ ID NO: 84036 - protein, 10 aa, synthetic construct
NYHRGDYSSV

SEQ ID NO: 84037 - protein, 10 aa, synthetic construct
NYHRGDLTVT

SEQ ID NO: 84038 - protein, 10 aa, synthetic construct
NYSRGDHVNL

SEQ ID NO: 84039 - protein, 10 aa, synthetic construct
ESERGDRQGI

SEQ ID NO: 84040 - protein, 10 aa, synthetic construct
NYSRGDRDYL

SEQ ID NO: 84041 - protein, 10 aa, synthetic construct
NYSRGDYSSV

SEQ ID NO: 84042 - protein, 10 aa, synthetic construct
NYSRGDLTVT

SEQ ID NO: 84043 - protein, 10 aa, synthetic construct
NYTRGDHVNL

SEQ ID NO: 84044 - protein, 10 aa, synthetic construct
NYTRGDRDYL

SEQ ID NO: 84045 - protein, 10 aa, synthetic construct
NYTRGDYSSV

SEQ ID NO: 84046 - protein, 10 aa, synthetic construct
NYTRGDLTVT

SEQ ID NO: 84047 - protein, 10 aa, synthetic construct
NYYRGDHGVL

SEQ ID NO: 84048 - protein, 10 aa, synthetic construct
NYYRGDRGQI

SEQ ID NO: 84049 - protein, 10 aa, synthetic construct
NYYRGDRQGI

SEQ ID NO: 84050 - protein, 10 aa, synthetic construct
ESERGDRSVV

SEQ ID NO: 84051 - protein, 10 aa, synthetic construct
NYYRGDYVGL

SEQ ID NO: 84052 - protein, 10 aa, synthetic construct
NYYRGDLIGR

SEQ ID NO: 84053 - protein, 10 aa, synthetic construct
NYYRGDQSTL

SEQ ID NO: 84054 - protein, 10 aa, synthetic construct
NYYRGDLLLS

SEQ ID NO: 84055 - protein, 10 aa, synthetic construct
NYNRGDHGVL

SEQ ID NO: 84056 - protein, 10 aa, synthetic construct
NYNRGDRGQI

SEQ ID NO: 84057 - protein, 10 aa, synthetic construct
NYNRGDRQGI

SEQ ID NO: 84058 - protein, 10 aa, synthetic construct
NYNRGDYVGL

SEQ ID NO: 84059 - protein, 10 aa, synthetic construct
NYNRGDLIGR

SEQ ID NO: 84060 - protein, 10 aa, synthetic construct
NYNRGDQSTL

SEQ ID NO: 84061 - protein, 10 aa, synthetic construct
ESERGDRGVV

SEQ ID NO: 84062 - protein, 10 aa, synthetic construct
NYNRGDLLLS

SEQ ID NO: 84063 - protein, 10 aa, synthetic construct
NYQRGDHVNL

SEQ ID NO: 84064 - protein, 10 aa, synthetic construct
NYQRGDRDYL

SEQ ID NO: 84065 - protein, 10 aa, synthetic construct
NYQRGDYSSV

SEQ ID NO: 84066 - protein, 10 aa, synthetic construct
NYQRGDLTVT

SEQ ID NO: 84067 - protein, 10 aa, synthetic construct
NYDRGDHVNL

SEQ ID NO: 84068 - protein, 10 aa, synthetic construct
NYDRGDRDYL

SEQ ID NO: 84069 - protein, 10 aa, synthetic construct
NYDRGDYSSV

SEQ ID NO: 84070 - protein, 10 aa, synthetic construct
NYDRGDLTVT

SEQ ID NO: 84071 - protein, 10 aa, synthetic construct
NYERGDHVNL

SEQ ID NO: 84072 - protein, 10 aa, synthetic construct
DFFRGDRGVV

SEQ ID NO: 84073 - protein, 10 aa, synthetic construct
ESERGDRSQT

SEQ ID NO: 84074 - protein, 10 aa, synthetic construct
NYERGDRDYL

SEQ ID NO: 84075 - protein, 10 aa, synthetic construct
NYERGDYSSV

SEQ ID NO: 84076 - protein, 10 aa, synthetic construct
NYERGDLTVT

SEQ ID NO: 84077 - protein, 10 aa, synthetic construct
NNGRGDYTSV

SEQ ID NO: 84078 - protein, 10 aa, synthetic construct
NNGRGDLIGR

SEQ ID NO: 84079 - protein, 10 aa, synthetic construct
NNARGDYTSV

SEQ ID NO: 84080 - protein, 10 aa, synthetic construct
NNARGDLIGR

SEQ ID NO: 84081 - protein, 10 aa, synthetic construct
NNVRGDHVNL

SEQ ID NO: 84082 - protein, 10 aa, synthetic construct
NNVRGDRDYL

SEQ ID NO: 84083 - protein, 10 aa, synthetic construct
NNVRGDYSSV

SEQ ID NO: 84084 - protein, 10 aa, synthetic construct
ETGRGDRGQI

SEQ ID NO: 84085 - protein, 10 aa, synthetic construct
NNVRGDLTVT

SEQ ID NO: 84086 - protein, 10 aa, synthetic construct
NNPRGDYTSV

SEQ ID NO: 84087 - protein, 10 aa, synthetic construct
NNPRGDLIGR

SEQ ID NO: 84088 - protein, 10 aa, synthetic construct
NNLRGDHVNL

SEQ ID NO: 84089 - protein, 10 aa, synthetic construct
NNLRGDRDYL

SEQ ID NO: 84090 - protein, 10 aa, synthetic construct
NNLRGDYSSV

SEQ ID NO: 84091 - protein, 10 aa, synthetic construct
NNLRGDLTVT

SEQ ID NO: 84092 - protein, 10 aa, synthetic construct
NNIRGDHGVL

SEQ ID NO: 84093 - protein, 10 aa, synthetic construct
NNIRGDRGQI

SEQ ID NO: 84094 - protein, 10 aa, synthetic construct
NNIRGDRQGI

SEQ ID NO: 84095 - protein, 10 aa, synthetic construct
ETGRGDRQGI

SEQ ID NO: 84096 - protein, 10 aa, synthetic construct
NNIRGDYVGL

SEQ ID NO: 84097 - protein, 10 aa, synthetic construct
NNIRGDLIGR

SEQ ID NO: 84098 - protein, 10 aa, synthetic construct
NNIRGDQSTL

SEQ ID NO: 84099 - protein, 10 aa, synthetic construct
NNIRGDLLLS

SEQ ID NO: 84100 - protein, 10 aa, synthetic construct
NNMRGDHGVL

SEQ ID NO: 84101 - protein, 10 aa, synthetic construct
NNMRGDRGQI

SEQ ID NO: 84102 - protein, 10 aa, synthetic construct
NNMRGDRQGI

SEQ ID NO: 84103 - protein, 10 aa, synthetic construct
NNMRGDYVGL

SEQ ID NO: 84104 - protein, 10 aa, synthetic construct
NNMRGDLIGR

SEQ ID NO: 84105 - protein, 10 aa, synthetic construct
NNMRGDQSTL

SEQ ID NO: 84106 - protein, 10 aa, synthetic construct
ETGRGDRSVV

SEQ ID NO: 84107 - protein, 10 aa, synthetic construct
NNMRGDLLLS

SEQ ID NO: 84108 - protein, 10 aa, synthetic construct
NNWRGDHVNL

SEQ ID NO: 84109 - protein, 10 aa, synthetic construct
NNWRGDRDYL

SEQ ID NO: 84110 - protein, 10 aa, synthetic construct
NNWRGDYSSV

SEQ ID NO: 84111 - protein, 10 aa, synthetic construct
NNWRGDLTVT

SEQ ID NO: 84112 - protein, 10 aa, synthetic construct
NNFRGDHGVL

SEQ ID NO: 84113 - protein, 10 aa, synthetic construct
NNFRGDRGQI

SEQ ID NO: 84114 - protein, 10 aa, synthetic construct
NNFRGDRQGI

SEQ ID NO: 84115 - protein, 10 aa, synthetic construct
NNFRGDYVGL

SEQ ID NO: 84116 - protein, 10 aa, synthetic construct
NNFRGDLIGR

SEQ ID NO: 84117 - protein, 10 aa, synthetic construct
ETGRGDRGVV

SEQ ID NO: 84118 - protein, 10 aa, synthetic construct
NNFRGDQSTL

SEQ ID NO: 84119 - protein, 10 aa, synthetic construct
NNFRGDLLLS

SEQ ID NO: 84120 - protein, 10 aa, synthetic construct
NNKRGDHGVL

SEQ ID NO: 84121 - protein, 10 aa, synthetic construct
NNKRGDRGQI

SEQ ID NO: 84122 - protein, 10 aa, synthetic construct
NNKRGDRQGI

SEQ ID NO: 84123 - protein, 10 aa, synthetic construct
NNKRGDYVGL

SEQ ID NO: 84124 - protein, 10 aa, synthetic construct
NNKRGDLIGR

SEQ ID NO: 84125 - protein, 10 aa, synthetic construct
NNKRGDQSTL

SEQ ID NO: 84126 - protein, 10 aa, synthetic construct
NNKRGDLLLS

SEQ ID NO: 84127 - protein, 10 aa, synthetic construct
NNRRGDYTSV

SEQ ID NO: 84128 - protein, 10 aa, synthetic construct
ETGRGDRSQT

SEQ ID NO: 84129 - protein, 10 aa, synthetic construct
NNRRGDLIGR

SEQ ID NO: 84130 - protein, 10 aa, synthetic construct
NNHRGDHVNL

SEQ ID NO: 84131 - protein, 10 aa, synthetic construct
NNHRGDRDYL

SEQ ID NO: 84132 - protein, 10 aa, synthetic construct
NNHRGDYSSV

SEQ ID NO: 84133 - protein, 10 aa, synthetic construct
NNHRGDLTVT

SEQ ID NO: 84134 - protein, 10 aa, synthetic construct
NNSRGDHVNL

SEQ ID NO: 84135 - protein, 10 aa, synthetic construct
NNSRGDRDYL

SEQ ID NO: 84136 - protein, 10 aa, synthetic construct
NNSRGDYSSV

SEQ ID NO: 84137 - protein, 10 aa, synthetic construct
NNSRGDLTVT

SEQ ID NO: 84138 - protein, 10 aa, synthetic construct
NNTRGDHVNL

SEQ ID NO: 84139 - protein, 10 aa, synthetic construct
ETARGDRGQI

SEQ ID NO: 84140 - protein, 10 aa, synthetic construct
NNTRGDRDYL

SEQ ID NO: 84141 - protein, 10 aa, synthetic construct
NNTRGDYSSV

SEQ ID NO: 84142 - protein, 10 aa, synthetic construct
NNTRGDLTVT

SEQ ID NO: 84143 - protein, 10 aa, synthetic construct
NNYRGDHGVL

SEQ ID NO: 84144 - protein, 10 aa, synthetic construct
NNYRGDRGQI

SEQ ID NO: 84145 - protein, 10 aa, synthetic construct
NNYRGDRQGI

SEQ ID NO: 84146 - protein, 10 aa, synthetic construct
NNYRGDYVGL

SEQ ID NO: 84147 - protein, 10 aa, synthetic construct
NNYRGDLIGR

SEQ ID NO: 84148 - protein, 10 aa, synthetic construct
NNYRGDQSTL

SEQ ID NO: 84149 - protein, 10 aa, synthetic construct
NNYRGDLLLS

SEQ ID NO: 84150 - protein, 10 aa, synthetic construct
ETARGDRQGI

SEQ ID NO: 84151 - protein, 10 aa, synthetic construct
NNNRGDHGVL

SEQ ID NO: 84152 - protein, 10 aa, synthetic construct
NNNRGDRGQI

SEQ ID NO: 84153 - protein, 10 aa, synthetic construct
NNNRGDRQGI

SEQ ID NO: 84154 - protein, 10 aa, synthetic construct
NNNRGDYVGL

SEQ ID NO: 84155 - protein, 10 aa, synthetic construct
NNNRGDLIGR

SEQ ID NO: 84156 - protein, 10 aa, synthetic construct
NNNRGDQSTL

SEQ ID NO: 84157 - protein, 10 aa, synthetic construct
NNNRGDLLLS

SEQ ID NO: 84158 - protein, 10 aa, synthetic construct
NNQRGDHVNL

SEQ ID NO: 84159 - protein, 10 aa, synthetic construct
NNQRGDRDYL

SEQ ID NO: 84160 - protein, 10 aa, synthetic construct
NNQRGDYSSV

SEQ ID NO: 84161 - protein, 10 aa, synthetic construct
ETARGDRSVV

SEQ ID NO: 84162 - protein, 10 aa, synthetic construct
NNQRGDLTVT

SEQ ID NO: 84163 - protein, 10 aa, synthetic construct
NNDRGDHVNL

SEQ ID NO: 84164 - protein, 10 aa, synthetic construct
NNDRGDRDYL

SEQ ID NO: 84165 - protein, 10 aa, synthetic construct
NNDRGDYSSV

SEQ ID NO: 84166 - protein, 10 aa, synthetic construct
NNDRGDLTVT

SEQ ID NO: 84167 - protein, 10 aa, synthetic construct
NNERGDHVNL

SEQ ID NO: 84168 - protein, 10 aa, synthetic construct
NNERGDRDYL

SEQ ID NO: 84169 - protein, 10 aa, synthetic construct
NNERGDYSSV

SEQ ID NO: 84170 - protein, 10 aa, synthetic construct
NNERGDLTVT

SEQ ID NO: 84171 - protein, 10 aa, synthetic construct
NQGRGDYNSL

SEQ ID NO: 84172 - protein, 10 aa, synthetic construct
ETARGDRGVV

SEQ ID NO: 84173 - protein, 10 aa, synthetic construct
NQGRGDYTSM

SEQ ID NO: 84174 - protein, 10 aa, synthetic construct
NQGRGDFQNT

SEQ ID NO: 84175 - protein, 10 aa, synthetic construct
NQARGDYNSL

SEQ ID NO: 84176 - protein, 10 aa, synthetic construct
NQARGDYTSM

SEQ ID NO: 84177 - protein, 10 aa, synthetic construct
NQARGDFQNT

SEQ ID NO: 84178 - protein, 10 aa, synthetic construct
NQVRGDYTSV

SEQ ID NO: 84179 - protein, 10 aa, synthetic construct
NQVRGDLIGR

SEQ ID NO: 84180 - protein, 10 aa, synthetic construct
NQPRGDYNSL

SEQ ID NO: 84181 - protein, 10 aa, synthetic construct
NQPRGDYTSM

SEQ ID NO: 84182 - protein, 10 aa, synthetic construct
NQPRGDFQNT

SEQ ID NO: 84183 - protein, 10 aa, synthetic construct
DFFRGDYVGL

SEQ ID NO: 84184 - protein, 10 aa, synthetic construct
ETARGDRSQT

SEQ ID NO: 84185 - protein, 10 aa, synthetic construct
NQLRGDYTSV

SEQ ID NO: 84186 - protein, 10 aa, synthetic construct
NQLRGDLIGR

SEQ ID NO: 84187 - protein, 10 aa, synthetic construct
NQIRGDHVNL

SEQ ID NO: 84188 - protein, 10 aa, synthetic construct
NQIRGDRDYL

SEQ ID NO: 84189 - protein, 10 aa, synthetic construct
NQIRGDYSSV

SEQ ID NO: 84190 - protein, 10 aa, synthetic construct
NQIRGDLTVT

SEQ ID NO: 84191 - protein, 10 aa, synthetic construct
NQMRGDHVNL

SEQ ID NO: 84192 - protein, 10 aa, synthetic construct
NQMRGDRDYL

SEQ ID NO: 84193 - protein, 10 aa, synthetic construct
NQMRGDYSSV

SEQ ID NO: 84194 - protein, 10 aa, synthetic construct
NQMRGDLTVT

SEQ ID NO: 84195 - protein, 10 aa, synthetic construct
ETPRGDRGQI

SEQ ID NO: 84196 - protein, 10 aa, synthetic construct
NQWRGDYTSV

SEQ ID NO: 84197 - protein, 10 aa, synthetic construct
NQWRGDLIGR

SEQ ID NO: 84198 - protein, 10 aa, synthetic construct
NQFRGDHVNL

SEQ ID NO: 84199 - protein, 10 aa, synthetic construct
NQFRGDRDYL

SEQ ID NO: 84200 - protein, 10 aa, synthetic construct
NQFRGDYSSV

SEQ ID NO: 84201 - protein, 10 aa, synthetic construct
NQFRGDLTVT

SEQ ID NO: 84202 - protein, 10 aa, synthetic construct
NQKRGDHVNL

SEQ ID NO: 84203 - protein, 10 aa, synthetic construct
NQKRGDRDYL

SEQ ID NO: 84204 - protein, 10 aa, synthetic construct
NQKRGDYSSV

SEQ ID NO: 84205 - protein, 10 aa, synthetic construct
NQKRGDLTVT

SEQ ID NO: 84206 - protein, 10 aa, synthetic construct
ETPRGDRQGI

SEQ ID NO: 84207 - protein, 10 aa, synthetic construct
NQRRGDYNSL

SEQ ID NO: 84208 - protein, 10 aa, synthetic construct
NQRRGDYTSM

SEQ ID NO: 84209 - protein, 10 aa, synthetic construct
NQRRGDFQNT

SEQ ID NO: 84210 - protein, 10 aa, synthetic construct
NQHRGDYTSV

SEQ ID NO: 84211 - protein, 10 aa, synthetic construct
NQHRGDLIGR

SEQ ID NO: 84212 - protein, 10 aa, synthetic construct
NQSRGDYTSV

SEQ ID NO: 84213 - protein, 10 aa, synthetic construct
NQSRGDLIGR

SEQ ID NO: 84214 - protein, 10 aa, synthetic construct
NQTRGDYTSV

SEQ ID NO: 84215 - protein, 10 aa, synthetic construct
NQTRGDLIGR

SEQ ID NO: 84216 - protein, 10 aa, synthetic construct
NQYRGDHVNL

SEQ ID NO: 84217 - protein, 10 aa, synthetic construct
ETPRGDRSVV

SEQ ID NO: 84218 - protein, 10 aa, synthetic construct
NQYRGDRDYL

SEQ ID NO: 84219 - protein, 10 aa, synthetic construct
NQYRGDYSSV

SEQ ID NO: 84220 - protein, 10 aa, synthetic construct
NQYRGDLTVT

SEQ ID NO: 84221 - protein, 10 aa, synthetic construct
NQNRGDHVNL

SEQ ID NO: 84222 - protein, 10 aa, synthetic construct
NQNRGDRDYL

SEQ ID NO: 84223 - protein, 10 aa, synthetic construct
NQNRGDYSSV

SEQ ID NO: 84224 - protein, 10 aa, synthetic construct
NQNRGDLTVT

SEQ ID NO: 84225 - protein, 10 aa, synthetic construct
NQQRGDYTSV

SEQ ID NO: 84226 - protein, 10 aa, synthetic construct
NQQRGDLIGR

SEQ ID NO: 84227 - protein, 10 aa, synthetic construct
NQDRGDYTSV

SEQ ID NO: 84228 - protein, 10 aa, synthetic construct
ETPRGDRGVV

SEQ ID NO: 84229 - protein, 10 aa, synthetic construct
NQDRGDLIGR

SEQ ID NO: 84230 - protein, 10 aa, synthetic construct
NQERGDYTSV

SEQ ID NO: 84231 - protein, 10 aa, synthetic construct
NQERGDLIGR

SEQ ID NO: 84232 - protein, 10 aa, synthetic construct
NDGRGDYNSL

SEQ ID NO: 84233 - protein, 10 aa, synthetic construct
NDGRGDYTSM

SEQ ID NO: 84234 - protein, 10 aa, synthetic construct
NDGRGDFQNT

SEQ ID NO: 84235 - protein, 10 aa, synthetic construct
NDARGDYNSL

SEQ ID NO: 84236 - protein, 10 aa, synthetic construct
NDARGDYTSM

SEQ ID NO: 84237 - protein, 10 aa, synthetic construct
NDARGDFQNT

SEQ ID NO: 84238 - protein, 10 aa, synthetic construct
NDVRGDYTSV

SEQ ID NO: 84239 - protein, 10 aa, synthetic construct
ETPRGDRSQT

SEQ ID NO: 84240 - protein, 10 aa, synthetic construct
NDVRGDLIGR

SEQ ID NO: 84241 - protein, 10 aa, synthetic construct
NDPRGDYNSL

SEQ ID NO: 84242 - protein, 10 aa, synthetic construct
NDPRGDYTSM

SEQ ID NO: 84243 - protein, 10 aa, synthetic construct
NDPRGDFQNT

SEQ ID NO: 84244 - protein, 10 aa, synthetic construct
NDLRGDYTSV

SEQ ID NO: 84245 - protein, 10 aa, synthetic construct
NDLRGDLIGR

SEQ ID NO: 84246 - protein, 10 aa, synthetic construct
NDIRGDHVNL

SEQ ID NO: 84247 - protein, 10 aa, synthetic construct
NDIRGDRDYL

SEQ ID NO: 84248 - protein, 10 aa, synthetic construct
NDIRGDYSSV

SEQ ID NO: 84249 - protein, 10 aa, synthetic construct
NDIRGDLTVT

SEQ ID NO: 84250 - protein, 10 aa, synthetic construct
ETRRGDRGQI

SEQ ID NO: 84251 - protein, 10 aa, synthetic construct
NDMRGDHVNL

SEQ ID NO: 84252 - protein, 10 aa, synthetic construct
NDMRGDRDYL

SEQ ID NO: 84253 - protein, 10 aa, synthetic construct
NDMRGDYSSV

SEQ ID NO: 84254 - protein, 10 aa, synthetic construct
NDMRGDLTVT

SEQ ID NO: 84255 - protein, 10 aa, synthetic construct
NDWRGDYTSV

SEQ ID NO: 84256 - protein, 10 aa, synthetic construct
NDWRGDLIGR

SEQ ID NO: 84257 - protein, 10 aa, synthetic construct
NDFRGDHVNL

SEQ ID NO: 84258 - protein, 10 aa, synthetic construct
NDFRGDRDYL

SEQ ID NO: 84259 - protein, 10 aa, synthetic construct
NDFRGDYSSV

SEQ ID NO: 84260 - protein, 10 aa, synthetic construct
NDFRGDLTVT

SEQ ID NO: 84261 - protein, 10 aa, synthetic construct
ETRRGDRQGI

SEQ ID NO: 84262 - protein, 10 aa, synthetic construct
NDKRGDHVNL

SEQ ID NO: 84263 - protein, 10 aa, synthetic construct
NDKRGDRDYL

SEQ ID NO: 84264 - protein, 10 aa, synthetic construct
NDKRGDYSSV

SEQ ID NO: 84265 - protein, 10 aa, synthetic construct
NDKRGDLTVT

SEQ ID NO: 84266 - protein, 10 aa, synthetic construct
NDRRGDYNSL

SEQ ID NO: 84267 - protein, 10 aa, synthetic construct
NDRRGDYTSM

SEQ ID NO: 84268 - protein, 10 aa, synthetic construct
NDRRGDFQNT

SEQ ID NO: 84269 - protein, 10 aa, synthetic construct
NDHRGDYTSV

SEQ ID NO: 84270 - protein, 10 aa, synthetic construct
NDHRGDLIGR

SEQ ID NO: 84271 - protein, 10 aa, synthetic construct
NDSRGDYTSV

SEQ ID NO: 84272 - protein, 10 aa, synthetic construct
ETRRGDRSVV

SEQ ID NO: 84273 - protein, 10 aa, synthetic construct
NDSRGDLIGR

SEQ ID NO: 84274 - protein, 10 aa, synthetic construct
NDTRGDYTSV

SEQ ID NO: 84275 - protein, 10 aa, synthetic construct
NDTRGDLIGR

SEQ ID NO: 84276 - protein, 10 aa, synthetic construct
NDYRGDHVNL

SEQ ID NO: 84277 - protein, 10 aa, synthetic construct
NDYRGDRDYL

SEQ ID NO: 84278 - protein, 10 aa, synthetic construct
NDYRGDYSSV

SEQ ID NO: 84279 - protein, 10 aa, synthetic construct
NDYRGDLTVT

SEQ ID NO: 84280 - protein, 10 aa, synthetic construct
NDNRGDHVNL

SEQ ID NO: 84281 - protein, 10 aa, synthetic construct
NDNRGDRDYL

SEQ ID NO: 84282 - protein, 10 aa, synthetic construct
NDNRGDYSSV

SEQ ID NO: 84283 - protein, 10 aa, synthetic construct
ETRRGDRGVV

SEQ ID NO: 84284 - protein, 10 aa, synthetic construct
NDNRGDLTVT

SEQ ID NO: 84285 - protein, 10 aa, synthetic construct
NDQRGDYTSV

SEQ ID NO: 84286 - protein, 10 aa, synthetic construct
NDQRGDLIGR

SEQ ID NO: 84287 - protein, 10 aa, synthetic construct
NDDRGDYTSV

SEQ ID NO: 84288 - protein, 10 aa, synthetic construct
NDDRGDLIGR

SEQ ID NO: 84289 - protein, 10 aa, synthetic construct
NDERGDYTSV

SEQ ID NO: 84290 - protein, 10 aa, synthetic construct
NDERGDLIGR

SEQ ID NO: 84291 - protein, 10 aa, synthetic construct
NEGRGDYNSL

SEQ ID NO: 84292 - protein, 10 aa, synthetic construct
NEGRGDYTSM

SEQ ID NO: 84293 - protein, 10 aa, synthetic construct
NEGRGDFQNT

SEQ ID NO: 84294 - protein, 10 aa, synthetic construct
DFFRGDLIGR

SEQ ID NO: 84295 - protein, 10 aa, synthetic construct
ETRRGDRSQT

SEQ ID NO: 84296 - protein, 10 aa, synthetic construct
NEARGDYNSL

SEQ ID NO: 84297 - protein, 10 aa, synthetic construct
NEARGDYTSM

SEQ ID NO: 84298 - protein, 10 aa, synthetic construct
NEARGDFQNT

SEQ ID NO: 84299 - protein, 10 aa, synthetic construct
NEVRGDYTSV

SEQ ID NO: 84300 - protein, 10 aa, synthetic construct
NEVRGDLIGR

SEQ ID NO: 84301 - protein, 10 aa, synthetic construct
NEPRGDYNSL

SEQ ID NO: 84302 - protein, 10 aa, synthetic construct
NEPRGDYTSM

SEQ ID NO: 84303 - protein, 10 aa, synthetic construct
NEPRGDFQNT

SEQ ID NO: 84304 - protein, 10 aa, synthetic construct
NELRGDYTSV

SEQ ID NO: 84305 - protein, 10 aa, synthetic construct
NELRGDLIGR

SEQ ID NO: 84306 - protein, 10 aa, synthetic construct
EQGRGDRGQI

SEQ ID NO: 84307 - protein, 10 aa, synthetic construct
NEIRGDHVNL

SEQ ID NO: 84308 - protein, 10 aa, synthetic construct
NEIRGDRDYL

SEQ ID NO: 84309 - protein, 10 aa, synthetic construct
NEIRGDYSSV

SEQ ID NO: 84310 - protein, 10 aa, synthetic construct
NEIRGDLTVT

SEQ ID NO: 84311 - protein, 10 aa, synthetic construct
NEMRGDHVNL

SEQ ID NO: 84312 - protein, 10 aa, synthetic construct
NEMRGDRDYL

SEQ ID NO: 84313 - protein, 10 aa, synthetic construct
NEMRGDYSSV

SEQ ID NO: 84314 - protein, 10 aa, synthetic construct
NEMRGDLTVT

SEQ ID NO: 84315 - protein, 10 aa, synthetic construct
NEWRGDYTSV

SEQ ID NO: 84316 - protein, 10 aa, synthetic construct
NEWRGDLIGR

SEQ ID NO: 84317 - protein, 10 aa, synthetic construct
EQGRGDRQGI

SEQ ID NO: 84318 - protein, 10 aa, synthetic construct
NEFRGDHVNL

SEQ ID NO: 84319 - protein, 10 aa, synthetic construct
NEFRGDRDYL

SEQ ID NO: 84320 - protein, 10 aa, synthetic construct
NEFRGDYSSV

SEQ ID NO: 84321 - protein, 10 aa, synthetic construct
NEFRGDLTVT

SEQ ID NO: 84322 - protein, 10 aa, synthetic construct
NEKRGDHVNL

SEQ ID NO: 84323 - protein, 10 aa, synthetic construct
NEKRGDRDYL

SEQ ID NO: 84324 - protein, 10 aa, synthetic construct
NEKRGDYSSV

SEQ ID NO: 84325 - protein, 10 aa, synthetic construct
NEKRGDLTVT

SEQ ID NO: 84326 - protein, 10 aa, synthetic construct
NERRGDYNSL

SEQ ID NO: 84327 - protein, 10 aa, synthetic construct
NERRGDYTSM

SEQ ID NO: 84328 - protein, 10 aa, synthetic construct
EQGRGDRSVV

SEQ ID NO: 84329 - protein, 10 aa, synthetic construct
NERRGDFQNT

SEQ ID NO: 84330 - protein, 10 aa, synthetic construct
NEHRGDYTSV

SEQ ID NO: 84331 - protein, 10 aa, synthetic construct
NEHRGDLIGR

SEQ ID NO: 84332 - protein, 10 aa, synthetic construct
NESRGDYTSV

SEQ ID NO: 84333 - protein, 10 aa, synthetic construct
NESRGDLIGR

SEQ ID NO: 84334 - protein, 10 aa, synthetic construct
NETRGDYTSV

SEQ ID NO: 84335 - protein, 10 aa, synthetic construct
NETRGDLIGR

SEQ ID NO: 84336 - protein, 10 aa, synthetic construct
NEYRGDHVNL

SEQ ID NO: 84337 - protein, 10 aa, synthetic construct
NEYRGDRDYL

SEQ ID NO: 84338 - protein, 10 aa, synthetic construct
NEYRGDYSSV

SEQ ID NO: 84339 - protein, 10 aa, synthetic construct
EQGRGDRGVV

SEQ ID NO: 84340 - protein, 10 aa, synthetic construct
NEYRGDLTVT

SEQ ID NO: 84341 - protein, 10 aa, synthetic construct
NENRGDHVNL

SEQ ID NO: 84342 - protein, 10 aa, synthetic construct
NENRGDRDYL

SEQ ID NO: 84343 - protein, 10 aa, synthetic construct
NENRGDYSSV

SEQ ID NO: 84344 - protein, 10 aa, synthetic construct
NENRGDLTVT

SEQ ID NO: 84345 - protein, 10 aa, synthetic construct
NEQRGDYTSV

SEQ ID NO: 84346 - protein, 10 aa, synthetic construct
NEQRGDLIGR

SEQ ID NO: 84347 - protein, 10 aa, synthetic construct
NEDRGDYTSV

SEQ ID NO: 84348 - protein, 10 aa, synthetic construct
NEDRGDLIGR

SEQ ID NO: 84349 - protein, 10 aa, synthetic construct
NEERGDYTSV

SEQ ID NO: 84350 - protein, 10 aa, synthetic construct
EQGRGDRSQT

SEQ ID NO: 84351 - protein, 10 aa, synthetic construct
NEERGDLIGR

SEQ ID NO: 84352 - protein, 10 aa, synthetic construct
DGVRGDFNNT

SEQ ID NO: 84353 - protein, 10 aa, synthetic construct
DGVRGDFNNL

SEQ ID NO: 84354 - protein, 10 aa, synthetic construct
DGLRGDFNNT

SEQ ID NO: 84355 - protein, 10 aa, synthetic construct
DGLRGDFNNL

SEQ ID NO: 84356 - protein, 10 aa, synthetic construct
DGIRGDYNSL

SEQ ID NO: 84357 - protein, 10 aa, synthetic construct
DGIRGDYTSM

SEQ ID NO: 84358 - protein, 10 aa, synthetic construct
DGIRGDFQNT

SEQ ID NO: 84359 - protein, 10 aa, synthetic construct
DGMRGDYNSL

SEQ ID NO: 84360 - protein, 10 aa, synthetic construct
DGMRGDYTSM

SEQ ID NO: 84361 - protein, 10 aa, synthetic construct
EQARGDRGQI

SEQ ID NO: 84362 - protein, 10 aa, synthetic construct
DGMRGDFQNT

SEQ ID NO: 84363 - protein, 10 aa, synthetic construct
DGWRGDFNNT

SEQ ID NO: 84364 - protein, 10 aa, synthetic construct
DGWRGDFNNL

SEQ ID NO: 84365 - protein, 10 aa, synthetic construct
DGFRGDYNSL

SEQ ID NO: 84366 - protein, 10 aa, synthetic construct
DGFRGDYTSM

SEQ ID NO: 84367 - protein, 10 aa, synthetic construct
DGFRGDFQNT

SEQ ID NO: 84368 - protein, 10 aa, synthetic construct
DGKRGDYNSL

SEQ ID NO: 84369 - protein, 10 aa, synthetic construct
DGKRGDYTSM

SEQ ID NO: 84370 - protein, 10 aa, synthetic construct
DGKRGDFQNT

SEQ ID NO: 84371 - protein, 10 aa, synthetic construct
DGHRGDFNNT

SEQ ID NO: 84372 - protein, 10 aa, synthetic construct
EQARGDRQGI

SEQ ID NO: 84373 - protein, 10 aa, synthetic construct
DGHRGDFNNL

SEQ ID NO: 84374 - protein, 10 aa, synthetic construct
DGSRGDFNNT

SEQ ID NO: 84375 - protein, 10 aa, synthetic construct
DGSRGDFNNL

SEQ ID NO: 84376 - protein, 10 aa, synthetic construct
DGTRGDFNNT

SEQ ID NO: 84377 - protein, 10 aa, synthetic construct
DGTRGDFNNL

SEQ ID NO: 84378 - protein, 10 aa, synthetic construct
DGYRGDYNSL

SEQ ID NO: 84379 - protein, 10 aa, synthetic construct
DGYRGDYTSM

SEQ ID NO: 84380 - protein, 10 aa, synthetic construct
DGYRGDFQNT

SEQ ID NO: 84381 - protein, 10 aa, synthetic construct
DGNRGDYNSL

SEQ ID NO: 84382 - protein, 10 aa, synthetic construct
DGNRGDYTSM

SEQ ID NO: 84383 - protein, 10 aa, synthetic construct
EQARGDRSVV

SEQ ID NO: 84384 - protein, 10 aa, synthetic construct
DGNRGDFQNT

SEQ ID NO: 84385 - protein, 10 aa, synthetic construct
DGQRGDFNNT

SEQ ID NO: 84386 - protein, 10 aa, synthetic construct
DGQRGDFNNL

SEQ ID NO: 84387 - protein, 10 aa, synthetic construct
DGDRGDFNNT

SEQ ID NO: 84388 - protein, 10 aa, synthetic construct
DGDRGDFNNL

SEQ ID NO: 84389 - protein, 10 aa, synthetic construct
DGERGDFNNT

SEQ ID NO: 84390 - protein, 10 aa, synthetic construct
DGERGDFNNL

SEQ ID NO: 84391 - protein, 10 aa, synthetic construct
DAVRGDFNNT

SEQ ID NO: 84392 - protein, 10 aa, synthetic construct
DAVRGDFNNL

SEQ ID NO: 84393 - protein, 10 aa, synthetic construct
DALRGDFNNT

SEQ ID NO: 84394 - protein, 10 aa, synthetic construct
EQARGDRGVV

SEQ ID NO: 84395 - protein, 10 aa, synthetic construct
DALRGDFNNL

SEQ ID NO: 84396 - protein, 10 aa, synthetic construct
DAIRGDYNSL

SEQ ID NO: 84397 - protein, 10 aa, synthetic construct
DAIRGDYTSM

SEQ ID NO: 84398 - protein, 10 aa, synthetic construct
DAIRGDFQNT

SEQ ID NO: 84399 - protein, 10 aa, synthetic construct
DAMRGDYNSL

SEQ ID NO: 84400 - protein, 10 aa, synthetic construct
DAMRGDYTSM

SEQ ID NO: 84401 - protein, 10 aa, synthetic construct
DAMRGDFQNT

SEQ ID NO: 84402 - protein, 10 aa, synthetic construct
DAWRGDFNNT

SEQ ID NO: 84403 - protein, 10 aa, synthetic construct
DAWRGDFNNL

SEQ ID NO: 84404 - protein, 10 aa, synthetic construct
DAFRGDYNSL

SEQ ID NO: 84405 - protein, 10 aa, synthetic construct
DFFRGDQSTL

SEQ ID NO: 84406 - protein, 10 aa, synthetic construct
EQARGDRSQT

SEQ ID NO: 84407 - protein, 10 aa, synthetic construct
DAFRGDYTSM

SEQ ID NO: 84408 - protein, 10 aa, synthetic construct
DAFRGDFQNT

SEQ ID NO: 84409 - protein, 10 aa, synthetic construct
DAKRGDYNSL

SEQ ID NO: 84410 - protein, 10 aa, synthetic construct
DAKRGDYTSM

SEQ ID NO: 84411 - protein, 10 aa, synthetic construct
DAKRGDFQNT

SEQ ID NO: 84412 - protein, 10 aa, synthetic construct
DAHRGDFNNT

SEQ ID NO: 84413 - protein, 10 aa, synthetic construct
DAHRGDFNNL

SEQ ID NO: 84414 - protein, 10 aa, synthetic construct
DASRGDFNNT

SEQ ID NO: 84415 - protein, 10 aa, synthetic construct
DASRGDFNNL

SEQ ID NO: 84416 - protein, 10 aa, synthetic construct
DATRGDFNNT

SEQ ID NO: 84417 - protein, 10 aa, synthetic construct
EQPRGDRGQI

SEQ ID NO: 84418 - protein, 10 aa, synthetic construct
DATRGDFNNL

SEQ ID NO: 84419 - protein, 10 aa, synthetic construct
DAYRGDYNSL

SEQ ID NO: 84420 - protein, 10 aa, synthetic construct
DAYRGDYTSM

SEQ ID NO: 84421 - protein, 10 aa, synthetic construct
DAYRGDFQNT

SEQ ID NO: 84422 - protein, 10 aa, synthetic construct
DANRGDYNSL

SEQ ID NO: 84423 - protein, 10 aa, synthetic construct
DANRGDYTSM

SEQ ID NO: 84424 - protein, 10 aa, synthetic construct
DANRGDFQNT

SEQ ID NO: 84425 - protein, 10 aa, synthetic construct
DAQRGDFNNT

SEQ ID NO: 84426 - protein, 10 aa, synthetic construct
DAQRGDFNNL

SEQ ID NO: 84427 - protein, 10 aa, synthetic construct
DADRGDFNNT

SEQ ID NO: 84428 - protein, 10 aa, synthetic construct
EQPRGDRQGI

SEQ ID NO: 84429 - protein, 10 aa, synthetic construct
DADRGDFNNL

SEQ ID NO: 84430 - protein, 10 aa, synthetic construct
DAERGDFNNT

SEQ ID NO: 84431 - protein, 10 aa, synthetic construct
DAERGDFNNL

SEQ ID NO: 84432 - protein, 10 aa, synthetic construct
DVVRGDFNNT

SEQ ID NO: 84433 - protein, 10 aa, synthetic construct
DVVRGDFNNL

SEQ ID NO: 84434 - protein, 10 aa, synthetic construct
DVLRGDFNNT

SEQ ID NO: 84435 - protein, 10 aa, synthetic construct
DVLRGDFNNL

SEQ ID NO: 84436 - protein, 10 aa, synthetic construct
DVIRGDYNSL

SEQ ID NO: 84437 - protein, 10 aa, synthetic construct
DVIRGDYTSM

SEQ ID NO: 84438 - protein, 10 aa, synthetic construct
DVIRGDFQNT

SEQ ID NO: 84439 - protein, 10 aa, synthetic construct
EQPRGDRSVV

SEQ ID NO: 84440 - protein, 10 aa, synthetic construct
DVMRGDYNSL

SEQ ID NO: 84441 - protein, 10 aa, synthetic construct
DVMRGDYTSM

SEQ ID NO: 84442 - protein, 10 aa, synthetic construct
DVMRGDFQNT

SEQ ID NO: 84443 - protein, 10 aa, synthetic construct
DVWRGDFNNT

SEQ ID NO: 84444 - protein, 10 aa, synthetic construct
DVWRGDFNNL

SEQ ID NO: 84445 - protein, 10 aa, synthetic construct
DVFRGDYNSL

SEQ ID NO: 84446 - protein, 10 aa, synthetic construct
DVFRGDYTSM

SEQ ID NO: 84447 - protein, 10 aa, synthetic construct
DVFRGDFQNT

SEQ ID NO: 84448 - protein, 10 aa, synthetic construct
DVKRGDYNSL

SEQ ID NO: 84449 - protein, 10 aa, synthetic construct
DVKRGDYTSM

SEQ ID NO: 84450 - protein, 10 aa, synthetic construct
EQPRGDRGVV

SEQ ID NO: 84451 - protein, 10 aa, synthetic construct
DVKRGDFQNT

SEQ ID NO: 84452 - protein, 10 aa, synthetic construct
DVHRGDFNNT

SEQ ID NO: 84453 - protein, 10 aa, synthetic construct
DVHRGDFNNL

SEQ ID NO: 84454 - protein, 10 aa, synthetic construct
DVSRGDFNNT

SEQ ID NO: 84455 - protein, 10 aa, synthetic construct
DVSRGDFNNL

SEQ ID NO: 84456 - protein, 10 aa, synthetic construct
DVTRGDFNNT

SEQ ID NO: 84457 - protein, 10 aa, synthetic construct
DVTRGDFNNL

SEQ ID NO: 84458 - protein, 10 aa, synthetic construct
DVYRGDYNSL

SEQ ID NO: 84459 - protein, 10 aa, synthetic construct
DVYRGDYTSM

SEQ ID NO: 84460 - protein, 10 aa, synthetic construct
DVYRGDFQNT

SEQ ID NO: 84461 - protein, 10 aa, synthetic construct
EQPRGDRSQT

SEQ ID NO: 84462 - protein, 10 aa, synthetic construct
DVNRGDYNSL

SEQ ID NO: 84463 - protein, 10 aa, synthetic construct
DVNRGDYTSM

SEQ ID NO: 84464 - protein, 10 aa, synthetic construct
DVNRGDFQNT

SEQ ID NO: 84465 - protein, 10 aa, synthetic construct
DVQRGDFNNT

SEQ ID NO: 84466 - protein, 10 aa, synthetic construct
DVQRGDFNNL

SEQ ID NO: 84467 - protein, 10 aa, synthetic construct
DVDRGDFNNT

SEQ ID NO: 84468 - protein, 10 aa, synthetic construct
DVDRGDFNNL

SEQ ID NO: 84469 - protein, 10 aa, synthetic construct
DVERGDFNNT

SEQ ID NO: 84470 - protein, 10 aa, synthetic construct
DVERGDFNNL

SEQ ID NO: 84471 - protein, 10 aa, synthetic construct
DPVRGDFNNT

SEQ ID NO: 84472 - protein, 10 aa, synthetic construct
EQRRGDRGQI

SEQ ID NO: 84473 - protein, 10 aa, synthetic construct
DPVRGDFNNL

SEQ ID NO: 84474 - protein, 10 aa, synthetic construct
DPLRGDFNNT

SEQ ID NO: 84475 - protein, 10 aa, synthetic construct
DPLRGDFNNL

SEQ ID NO: 84476 - protein, 10 aa, synthetic construct
DPIRGDYNSL

SEQ ID NO: 84477 - protein, 10 aa, synthetic construct
DPIRGDYTSM

SEQ ID NO: 84478 - protein, 10 aa, synthetic construct
DPIRGDFQNT

SEQ ID NO: 84479 - protein, 10 aa, synthetic construct
DPMRGDYNSL

SEQ ID NO: 84480 - protein, 10 aa, synthetic construct
DPMRGDYTSM

SEQ ID NO: 84481 - protein, 10 aa, synthetic construct
DPMRGDFQNT

SEQ ID NO: 84482 - protein, 10 aa, synthetic construct
DPWRGDFNNT

SEQ ID NO: 84483 - protein, 10 aa, synthetic construct
EQRRGDRQGI

SEQ ID NO: 84484 - protein, 10 aa, synthetic construct
DPWRGDFNNL

SEQ ID NO: 84485 - protein, 10 aa, synthetic construct
DPFRGDYNSL

SEQ ID NO: 84486 - protein, 10 aa, synthetic construct
DPFRGDYTSM

SEQ ID NO: 84487 - protein, 10 aa, synthetic construct
DPFRGDFQNT

SEQ ID NO: 84488 - protein, 10 aa, synthetic construct
DPKRGDYNSL

SEQ ID NO: 84489 - protein, 10 aa, synthetic construct
DPKRGDYTSM

SEQ ID NO: 84490 - protein, 10 aa, synthetic construct
DPKRGDFQNT

SEQ ID NO: 84491 - protein, 10 aa, synthetic construct
DPHRGDFNNT

SEQ ID NO: 84492 - protein, 10 aa, synthetic construct
DPHRGDFNNL

SEQ ID NO: 84493 - protein, 10 aa, synthetic construct
DPSRGDFNNT

SEQ ID NO: 84494 - protein, 10 aa, synthetic construct
EQRRGDRSVV

SEQ ID NO: 84495 - protein, 10 aa, synthetic construct
DPSRGDFNNL

SEQ ID NO: 84496 - protein, 10 aa, synthetic construct
DPTRGDFNNT

SEQ ID NO: 84497 - protein, 10 aa, synthetic construct
DPTRGDFNNL

SEQ ID NO: 84498 - protein, 10 aa, synthetic construct
DPYRGDYNSL

SEQ ID NO: 84499 - protein, 10 aa, synthetic construct
DPYRGDYTSM

SEQ ID NO: 84500 - protein, 10 aa, synthetic construct
DPYRGDFQNT

SEQ ID NO: 84501 - protein, 10 aa, synthetic construct
DPNRGDYNSL

SEQ ID NO: 84502 - protein, 10 aa, synthetic construct
DPNRGDYTSM

SEQ ID NO: 84503 - protein, 10 aa, synthetic construct
DPNRGDFQNT

SEQ ID NO: 84504 - protein, 10 aa, synthetic construct
DPQRGDFNNT

SEQ ID NO: 84505 - protein, 10 aa, synthetic construct
EQRRGDRGVV

SEQ ID NO: 84506 - protein, 10 aa, synthetic construct
DPQRGDFNNL

SEQ ID NO: 84507 - protein, 10 aa, synthetic construct
DPDRGDFNNT

SEQ ID NO: 84508 - protein, 10 aa, synthetic construct
DPDRGDFNNL

SEQ ID NO: 84509 - protein, 10 aa, synthetic construct
DPERGDFNNT

SEQ ID NO: 84510 - protein, 10 aa, synthetic construct
DPERGDFNNL

SEQ ID NO: 84511 - protein, 10 aa, synthetic construct
DLVRGDFNNT

SEQ ID NO: 84512 - protein, 10 aa, synthetic construct
DLVRGDFNNL

SEQ ID NO: 84513 - protein, 10 aa, synthetic construct
DLLRGDFNNT

SEQ ID NO: 84514 - protein, 10 aa, synthetic construct
DLLRGDFNNL

SEQ ID NO: 84515 - protein, 10 aa, synthetic construct
DLIRGDYNSL

SEQ ID NO: 84516 - protein, 10 aa, synthetic construct
DFFRGDLLLS

SEQ ID NO: 84517 - protein, 10 aa, synthetic construct
EQRRGDRSQT

SEQ ID NO: 84518 - protein, 10 aa, synthetic construct
DLIRGDYTSM

SEQ ID NO: 84519 - protein, 10 aa, synthetic construct
DLIRGDFQNT

SEQ ID NO: 84520 - protein, 10 aa, synthetic construct
DLMRGDYNSL

SEQ ID NO: 84521 - protein, 10 aa, synthetic construct
DLMRGDYTSM

SEQ ID NO: 84522 - protein, 10 aa, synthetic construct
DLMRGDFQNT

SEQ ID NO: 84523 - protein, 10 aa, synthetic construct
DLWRGDFNNT

SEQ ID NO: 84524 - protein, 10 aa, synthetic construct
DLWRGDFNNL

SEQ ID NO: 84525 - protein, 10 aa, synthetic construct
DLFRGDYNSL

SEQ ID NO: 84526 - protein, 10 aa, synthetic construct
DLFRGDYTSM

SEQ ID NO: 84527 - protein, 10 aa, synthetic construct
DLFRGDFQNT

SEQ ID NO: 84528 - protein, 10 aa, synthetic construct
EDGRGDRGQI

SEQ ID NO: 84529 - protein, 10 aa, synthetic construct
DLKRGDYNSL

SEQ ID NO: 84530 - protein, 10 aa, synthetic construct
DLKRGDYTSM

SEQ ID NO: 84531 - protein, 10 aa, synthetic construct
DLKRGDFQNT

SEQ ID NO: 84532 - protein, 10 aa, synthetic construct
DLHRGDFNNT

SEQ ID NO: 84533 - protein, 10 aa, synthetic construct
DLHRGDFNNL

SEQ ID NO: 84534 - protein, 10 aa, synthetic construct
DLSRGDFNNT

SEQ ID NO: 84535 - protein, 10 aa, synthetic construct
DLSRGDFNNL

SEQ ID NO: 84536 - protein, 10 aa, synthetic construct
DLTRGDFNNT

SEQ ID NO: 84537 - protein, 10 aa, synthetic construct
DLTRGDFNNL

SEQ ID NO: 84538 - protein, 10 aa, synthetic construct
DLYRGDYNSL

SEQ ID NO: 84539 - protein, 10 aa, synthetic construct
EDGRGDRQGI

SEQ ID NO: 84540 - protein, 10 aa, synthetic construct
DLYRGDYTSM

SEQ ID NO: 84541 - protein, 10 aa, synthetic construct
DLYRGDFQNT

SEQ ID NO: 84542 - protein, 10 aa, synthetic construct
DLNRGDYNSL

SEQ ID NO: 84543 - protein, 10 aa, synthetic construct
DLNRGDYTSM

SEQ ID NO: 84544 - protein, 10 aa, synthetic construct
DLNRGDFQNT

SEQ ID NO: 84545 - protein, 10 aa, synthetic construct
DLQRGDFNNT

SEQ ID NO: 84546 - protein, 10 aa, synthetic construct
DLQRGDFNNL

SEQ ID NO: 84547 - protein, 10 aa, synthetic construct
DLDRGDFNNT

SEQ ID NO: 84548 - protein, 10 aa, synthetic construct
DLDRGDFNNL

SEQ ID NO: 84549 - protein, 10 aa, synthetic construct
DLERGDFNNT

SEQ ID NO: 84550 - protein, 10 aa, synthetic construct
EDGRGDRSVV

SEQ ID NO: 84551 - protein, 10 aa, synthetic construct
DLERGDFNNL

SEQ ID NO: 84552 - protein, 10 aa, synthetic construct
DIGRGDYNSL

SEQ ID NO: 84553 - protein, 10 aa, synthetic construct
DIGRGDYTSM

SEQ ID NO: 84554 - protein, 10 aa, synthetic construct
DIGRGDFQNT

SEQ ID NO: 84555 - protein, 10 aa, synthetic construct
DIARGDYNSL

SEQ ID NO: 84556 - protein, 10 aa, synthetic construct
DIARGDYTSM

SEQ ID NO: 84557 - protein, 10 aa, synthetic construct
DIARGDFQNT

SEQ ID NO: 84558 - protein, 10 aa, synthetic construct
DIVRGDYTSV

SEQ ID NO: 84559 - protein, 10 aa, synthetic construct
DIVRGDLIGR

SEQ ID NO: 84560 - protein, 10 aa, synthetic construct
DIPRGDYNSL

SEQ ID NO: 84561 - protein, 10 aa, synthetic construct
EDGRGDRGVV

SEQ ID NO: 84562 - protein, 10 aa, synthetic construct
DIPRGDYTSM

SEQ ID NO: 84563 - protein, 10 aa, synthetic construct
DIPRGDFQNT

SEQ ID NO: 84564 - protein, 10 aa, synthetic construct
DILRGDYTSV

SEQ ID NO: 84565 - protein, 10 aa, synthetic construct
DILRGDLIGR

SEQ ID NO: 84566 - protein, 10 aa, synthetic construct
DIIRGDHVNL

SEQ ID NO: 84567 - protein, 10 aa, synthetic construct
DIIRGDRDYL

SEQ ID NO: 84568 - protein, 10 aa, synthetic construct
DIIRGDYSSV

SEQ ID NO: 84569 - protein, 10 aa, synthetic construct
DIIRGDLTVT

SEQ ID NO: 84570 - protein, 10 aa, synthetic construct
DIMRGDHVNL

SEQ ID NO: 84571 - protein, 10 aa, synthetic construct
DIMRGDRDYL

SEQ ID NO: 84572 - protein, 10 aa, synthetic construct
EDGRGDRSQT

SEQ ID NO: 84573 - protein, 10 aa, synthetic construct
DIMRGDYSSV

SEQ ID NO: 84574 - protein, 10 aa, synthetic construct
DIMRGDLTVT

SEQ ID NO: 84575 - protein, 10 aa, synthetic construct
DIWRGDYTSV

SEQ ID NO: 84576 - protein, 10 aa, synthetic construct
DIWRGDLIGR

SEQ ID NO: 84577 - protein, 10 aa, synthetic construct
DIFRGDHVNL

SEQ ID NO: 84578 - protein, 10 aa, synthetic construct
DIFRGDRDYL

SEQ ID NO: 84579 - protein, 10 aa, synthetic construct
DIFRGDYSSV

SEQ ID NO: 84580 - protein, 10 aa, synthetic construct
DIFRGDLTVT

SEQ ID NO: 84581 - protein, 10 aa, synthetic construct
DIKRGDHVNL

SEQ ID NO: 84582 - protein, 10 aa, synthetic construct
DIKRGDRDYL

SEQ ID NO: 84583 - protein, 10 aa, synthetic construct
EDARGDRGQI

SEQ ID NO: 84584 - protein, 10 aa, synthetic construct
DIKRGDYSSV

SEQ ID NO: 84585 - protein, 10 aa, synthetic construct
DIKRGDLTVT

SEQ ID NO: 84586 - protein, 10 aa, synthetic construct
DIRRGDYNSL

SEQ ID NO: 84587 - protein, 10 aa, synthetic construct
DIRRGDYTSM

SEQ ID NO: 84588 - protein, 10 aa, synthetic construct
DIRRGDFQNT

SEQ ID NO: 84589 - protein, 10 aa, synthetic construct
DIHRGDYTSV

SEQ ID NO: 84590 - protein, 10 aa, synthetic construct
DIHRGDLIGR

SEQ ID NO: 84591 - protein, 10 aa, synthetic construct
DISRGDYTSV

SEQ ID NO: 84592 - protein, 10 aa, synthetic construct
DISRGDLIGR

SEQ ID NO: 84593 - protein, 10 aa, synthetic construct
DITRGDYTSV

SEQ ID NO: 84594 - protein, 10 aa, synthetic construct
EDARGDRQGI

SEQ ID NO: 84595 - protein, 10 aa, synthetic construct
DITRGDLIGR

SEQ ID NO: 84596 - protein, 10 aa, synthetic construct
DIYRGDHVNL

SEQ ID NO: 84597 - protein, 10 aa, synthetic construct
DIYRGDRDYL

SEQ ID NO: 84598 - protein, 10 aa, synthetic construct
DIYRGDYSSV

SEQ ID NO: 84599 - protein, 10 aa, synthetic construct
DIYRGDLTVT

SEQ ID NO: 84600 - protein, 10 aa, synthetic construct
DINRGDHVNL

SEQ ID NO: 84601 - protein, 10 aa, synthetic construct
DINRGDRDYL

SEQ ID NO: 84602 - protein, 10 aa, synthetic construct
DINRGDYSSV

SEQ ID NO: 84603 - protein, 10 aa, synthetic construct
DINRGDLTVT

SEQ ID NO: 84604 - protein, 10 aa, synthetic construct
DIQRGDYTSV

SEQ ID NO: 84605 - protein, 10 aa, synthetic construct
EDARGDRSVV

SEQ ID NO: 84606 - protein, 10 aa, synthetic construct
DIQRGDLIGR

SEQ ID NO: 84607 - protein, 10 aa, synthetic construct
DIDRGDYTSV

SEQ ID NO: 84608 - protein, 10 aa, synthetic construct
DIDRGDLIGR

SEQ ID NO: 84609 - protein, 10 aa, synthetic construct
DIERGDYTSV

SEQ ID NO: 84610 - protein, 10 aa, synthetic construct
DIERGDLIGR

SEQ ID NO: 84611 - protein, 10 aa, synthetic construct
DMGRGDFQNT

SEQ ID NO: 84612 - protein, 10 aa, synthetic construct
DMARGDFQNT

SEQ ID NO: 84613 - protein, 10 aa, synthetic construct
DMVRGDFQNT

SEQ ID NO: 84614 - protein, 10 aa, synthetic construct
DMPRGDFQNT

SEQ ID NO: 84615 - protein, 10 aa, synthetic construct
DMLRGDFQNT

SEQ ID NO: 84616 - protein, 10 aa, synthetic construct
EDARGDRGVV

SEQ ID NO: 84617 - protein, 10 aa, synthetic construct
DMIRGDRDYL

SEQ ID NO: 84618 - protein, 10 aa, synthetic construct
DMIRGDYVGL

SEQ ID NO: 84619 - protein, 10 aa, synthetic construct
DMIRGDYSSV

SEQ ID NO: 84620 - protein, 10 aa, synthetic construct
DMIRGDYTSV

SEQ ID NO: 84621 - protein, 10 aa, synthetic construct
DMIRGDQSTL

SEQ ID NO: 84622 - protein, 10 aa, synthetic construct
DMMRGDYTSV

SEQ ID NO: 84623 - protein, 10 aa, synthetic construct
DMWRGDYNSL

SEQ ID NO: 84624 - protein, 10 aa, synthetic construct
DMWRGDYTSM

SEQ ID NO: 84625 - protein, 10 aa, synthetic construct
DMWRGDFQNT

SEQ ID NO: 84626 - protein, 10 aa, synthetic construct
DMFRGDRDYL

SEQ ID NO: 84627 - protein, 10 aa, synthetic construct
QFFRGDHGVL

SEQ ID NO: 84628 - protein, 10 aa, synthetic construct
EDARGDRSQT

SEQ ID NO: 84629 - protein, 10 aa, synthetic construct
DMFRGDYVGL

SEQ ID NO: 84630 - protein, 10 aa, synthetic construct
DMFRGDYSSV

SEQ ID NO: 84631 - protein, 10 aa, synthetic construct
DMFRGDYTSV

SEQ ID NO: 84632 - protein, 10 aa, synthetic construct
DMFRGDQSTL

SEQ ID NO: 84633 - protein, 10 aa, synthetic construct
DMKRGDRDYL

SEQ ID NO: 84634 - protein, 10 aa, synthetic construct
DMKRGDYVGL

SEQ ID NO: 84635 - protein, 10 aa, synthetic construct
DMKRGDYSSV

SEQ ID NO: 84636 - protein, 10 aa, synthetic construct
DMKRGDYTSV

SEQ ID NO: 84637 - protein, 10 aa, synthetic construct
DMKRGDQSTL

SEQ ID NO: 84638 - protein, 10 aa, synthetic construct
DMRRGDFQNT

SEQ ID NO: 84639 - protein, 10 aa, synthetic construct
EDPRGDRGQI

SEQ ID NO: 84640 - protein, 10 aa, synthetic construct
DMHRGDHVNL

SEQ ID NO: 84641 - protein, 10 aa, synthetic construct
DMHRGDYNSL

SEQ ID NO: 84642 - protein, 10 aa, synthetic construct
DMHRGDYTSM

SEQ ID NO: 84643 - protein, 10 aa, synthetic construct
DMSRGDFQNT

SEQ ID NO: 84644 - protein, 10 aa, synthetic construct
DMTRGDHVNL

SEQ ID NO: 84645 - protein, 10 aa, synthetic construct
DMTRGDYNSL

SEQ ID NO: 84646 - protein, 10 aa, synthetic construct
DMTRGDYTSM

SEQ ID NO: 84647 - protein, 10 aa, synthetic construct
DMYRGDRDYL

SEQ ID NO: 84648 - protein, 10 aa, synthetic construct
DMYRGDYVGL

SEQ ID NO: 84649 - protein, 10 aa, synthetic construct
DMYRGDYSSV

SEQ ID NO: 84650 - protein, 10 aa, synthetic construct
EDPRGDRQGI

SEQ ID NO: 84651 - protein, 10 aa, synthetic construct
DMYRGDYTSV

SEQ ID NO: 84652 - protein, 10 aa, synthetic construct
DMYRGDQSTL

SEQ ID NO: 84653 - protein, 10 aa, synthetic construct
DMNRGDRDYL

SEQ ID NO: 84654 - protein, 10 aa, synthetic construct
DMNRGDYVGL

SEQ ID NO: 84655 - protein, 10 aa, synthetic construct
DMNRGDYSSV

SEQ ID NO: 84656 - protein, 10 aa, synthetic construct
DMNRGDYTSV

SEQ ID NO: 84657 - protein, 10 aa, synthetic construct
DMNRGDQSTL

SEQ ID NO: 84658 - protein, 10 aa, synthetic construct
DMQRGDHVNL

SEQ ID NO: 84659 - protein, 10 aa, synthetic construct
DMQRGDYNSL

SEQ ID NO: 84660 - protein, 10 aa, synthetic construct
DMQRGDYTSM

SEQ ID NO: 84661 - protein, 10 aa, synthetic construct
EDPRGDRSVV

SEQ ID NO: 84662 - protein, 10 aa, synthetic construct
DMDRGDHVNL

SEQ ID NO: 84663 - protein, 10 aa, synthetic construct
DMDRGDYNSL

SEQ ID NO: 84664 - protein, 10 aa, synthetic construct
DMDRGDYTSM

SEQ ID NO: 84665 - protein, 10 aa, synthetic construct
DMERGDHVNL

SEQ ID NO: 84666 - protein, 10 aa, synthetic construct
DMERGDYNSL

SEQ ID NO: 84667 - protein, 10 aa, synthetic construct
DMERGDYTSM

SEQ ID NO: 84668 - protein, 10 aa, synthetic construct
DWGRGDFNNT

SEQ ID NO: 84669 - protein, 10 aa, synthetic construct
DWGRGDFNNL

SEQ ID NO: 84670 - protein, 10 aa, synthetic construct
DWARGDFNNT

SEQ ID NO: 84671 - protein, 10 aa, synthetic construct
DWARGDFNNL

SEQ ID NO: 84672 - protein, 10 aa, synthetic construct
EDPRGDRGVV

SEQ ID NO: 84673 - protein, 10 aa, synthetic construct
DWVRGDFNNT

SEQ ID NO: 84674 - protein, 10 aa, synthetic construct
DWVRGDFNNL

SEQ ID NO: 84675 - protein, 10 aa, synthetic construct
DWPRGDFNNT

SEQ ID NO: 84676 - protein, 10 aa, synthetic construct
DWPRGDFNNL

SEQ ID NO: 84677 - protein, 10 aa, synthetic construct
DWLRGDFNNT

SEQ ID NO: 84678 - protein, 10 aa, synthetic construct
DWLRGDFNNL

SEQ ID NO: 84679 - protein, 10 aa, synthetic construct
DWIRGDHVNL

SEQ ID NO: 84680 - protein, 10 aa, synthetic construct
DWIRGDYNSL

SEQ ID NO: 84681 - protein, 10 aa, synthetic construct
DWIRGDYTSM

SEQ ID NO: 84682 - protein, 10 aa, synthetic construct
DWMRGDYNSL

SEQ ID NO: 84683 - protein, 10 aa, synthetic construct
EDPRGDRSQT

SEQ ID NO: 84684 - protein, 10 aa, synthetic construct
DWMRGDYTSM

SEQ ID NO: 84685 - protein, 10 aa, synthetic construct
DWMRGDFQNT

SEQ ID NO: 84686 - protein, 10 aa, synthetic construct
DWWRGDFNNT

SEQ ID NO: 84687 - protein, 10 aa, synthetic construct
DWWRGDFNNL

SEQ ID NO: 84688 - protein, 10 aa, synthetic construct
DWFRGDHVNL

SEQ ID NO: 84689 - protein, 10 aa, synthetic construct
DWFRGDYNSL

SEQ ID NO: 84690 - protein, 10 aa, synthetic construct
DWFRGDYTSM

SEQ ID NO: 84691 - protein, 10 aa, synthetic construct
DWKRGDHVNL

SEQ ID NO: 84692 - protein, 10 aa, synthetic construct
DWKRGDYNSL

SEQ ID NO: 84693 - protein, 10 aa, synthetic construct
DWKRGDYTSM

SEQ ID NO: 84694 - protein, 10 aa, synthetic construct
EDRRGDRGQI

SEQ ID NO: 84695 - protein, 10 aa, synthetic construct
DWRRGDFNNT

SEQ ID NO: 84696 - protein, 10 aa, synthetic construct
DWRRGDFNNL

SEQ ID NO: 84697 - protein, 10 aa, synthetic construct
DWHRGDFQNT

SEQ ID NO: 84698 - protein, 10 aa, synthetic construct
DWSRGDFNNT

SEQ ID NO: 84699 - protein, 10 aa, synthetic construct
DWSRGDFNNL

SEQ ID NO: 84700 - protein, 10 aa, synthetic construct
DWTRGDFQNT

SEQ ID NO: 84701 - protein, 10 aa, synthetic construct
DWYRGDHVNL

SEQ ID NO: 84702 - protein, 10 aa, synthetic construct
DWYRGDYNSL

SEQ ID NO: 84703 - protein, 10 aa, synthetic construct
DWYRGDYTSM

SEQ ID NO: 84704 - protein, 10 aa, synthetic construct
DWNRGDHVNL

SEQ ID NO: 84705 - protein, 10 aa, synthetic construct
EDRRGDRQGI

SEQ ID NO: 84706 - protein, 10 aa, synthetic construct
DWNRGDYNSL

SEQ ID NO: 84707 - protein, 10 aa, synthetic construct
DWNRGDYTSM

SEQ ID NO: 84708 - protein, 10 aa, synthetic construct
DWQRGDFQNT

SEQ ID NO: 84709 - protein, 10 aa, synthetic construct
DWDRGDFQNT

SEQ ID NO: 84710 - protein, 10 aa, synthetic construct
DWERGDFQNT

SEQ ID NO: 84711 - protein, 10 aa, synthetic construct
DFGRGDYNSL

SEQ ID NO: 84712 - protein, 10 aa, synthetic construct
DFGRGDYTSM

SEQ ID NO: 84713 - protein, 10 aa, synthetic construct
DFGRGDFQNT

SEQ ID NO: 84714 - protein, 10 aa, synthetic construct
DFARGDYNSL

SEQ ID NO: 84715 - protein, 10 aa, synthetic construct
DFARGDYTSM

SEQ ID NO: 84716 - protein, 10 aa, synthetic construct
EDRRGDRSVV

SEQ ID NO: 84717 - protein, 10 aa, synthetic construct
DFARGDFQNT

SEQ ID NO: 84718 - protein, 10 aa, synthetic construct
DFVRGDYTSV

SEQ ID NO: 84719 - protein, 10 aa, synthetic construct
DFVRGDLIGR

SEQ ID NO: 84720 - protein, 10 aa, synthetic construct
DFPRGDYNSL

SEQ ID NO: 84721 - protein, 10 aa, synthetic construct
DFPRGDYTSM

SEQ ID NO: 84722 - protein, 10 aa, synthetic construct
DFPRGDFQNT

SEQ ID NO: 84723 - protein, 10 aa, synthetic construct
DFLRGDYTSV

SEQ ID NO: 84724 - protein, 10 aa, synthetic construct
DFLRGDLIGR

SEQ ID NO: 84725 - protein, 10 aa, synthetic construct
DFIRGDHVNL

SEQ ID NO: 84726 - protein, 10 aa, synthetic construct
DFIRGDRDYL

SEQ ID NO: 84727 - protein, 10 aa, synthetic construct
EDRRGDRGVV

SEQ ID NO: 84728 - protein, 10 aa, synthetic construct
DFIRGDYSSV

SEQ ID NO: 84729 - protein, 10 aa, synthetic construct
DFIRGDLTVT

SEQ ID NO: 84730 - protein, 10 aa, synthetic construct
DFMRGDHVNL

SEQ ID NO: 84731 - protein, 10 aa, synthetic construct
DFMRGDRDYL

SEQ ID NO: 84732 - protein, 10 aa, synthetic construct
DFMRGDYSSV

SEQ ID NO: 84733 - protein, 10 aa, synthetic construct
DFMRGDLTVT

SEQ ID NO: 84734 - protein, 10 aa, synthetic construct
DFWRGDYTSV

SEQ ID NO: 84735 - protein, 10 aa, synthetic construct
DFWRGDLIGR

SEQ ID NO: 84736 - protein, 10 aa, synthetic construct
DFKRGDHVNL

SEQ ID NO: 84737 - protein, 10 aa, synthetic construct
DFKRGDRDYL

SEQ ID NO: 84738 - protein, 10 aa, synthetic construct
QFFRGDRGQI

SEQ ID NO: 84739 - protein, 10 aa, synthetic construct
EDRRGDRSQT

SEQ ID NO: 84740 - protein, 10 aa, synthetic construct
DFKRGDYSSV

SEQ ID NO: 84741 - protein, 10 aa, synthetic construct
DFKRGDLTVT

SEQ ID NO: 84742 - protein, 10 aa, synthetic construct
DFRRGDYNSL

SEQ ID NO: 84743 - protein, 10 aa, synthetic construct
DFRRGDYTSM

SEQ ID NO: 84744 - protein, 10 aa, synthetic construct
DFRRGDFQNT

SEQ ID NO: 84745 - protein, 10 aa, synthetic construct
DFHRGDYTSV

SEQ ID NO: 84746 - protein, 10 aa, synthetic construct
DFHRGDLIGR

SEQ ID NO: 84747 - protein, 10 aa, synthetic construct
DFSRGDYTSV

SEQ ID NO: 84748 - protein, 10 aa, synthetic construct
DFSRGDLIGR

SEQ ID NO: 84749 - protein, 10 aa, synthetic construct
DFTRGDYTSV

SEQ ID NO: 84750 - protein, 10 aa, synthetic construct
EEGRGDRGQI

SEQ ID NO: 84751 - protein, 10 aa, synthetic construct
DFTRGDLIGR

SEQ ID NO: 84752 - protein, 10 aa, synthetic construct
DFYRGDHVNL

SEQ ID NO: 84753 - protein, 10 aa, synthetic construct
DFYRGDRDYL

SEQ ID NO: 84754 - protein, 10 aa, synthetic construct
DFYRGDYSSV

SEQ ID NO: 84755 - protein, 10 aa, synthetic construct
DFYRGDLTVT

SEQ ID NO: 84756 - protein, 10 aa, synthetic construct
DFNRGDHVNL

SEQ ID NO: 84757 - protein, 10 aa, synthetic construct
DFNRGDRDYL

SEQ ID NO: 84758 - protein, 10 aa, synthetic construct
DFNRGDYSSV

SEQ ID NO: 84759 - protein, 10 aa, synthetic construct
DFNRGDLTVT

SEQ ID NO: 84760 - protein, 10 aa, synthetic construct
DFQRGDYTSV

SEQ ID NO: 84761 - protein, 10 aa, synthetic construct
EEGRGDRQGI

SEQ ID NO: 84762 - protein, 10 aa, synthetic construct
DFQRGDLIGR

SEQ ID NO: 84763 - protein, 10 aa, synthetic construct
DFDRGDYTSV

SEQ ID NO: 84764 - protein, 10 aa, synthetic construct
DFDRGDLIGR

SEQ ID NO: 84765 - protein, 10 aa, synthetic construct
DFERGDYTSV

SEQ ID NO: 84766 - protein, 10 aa, synthetic construct
DFERGDLIGR

SEQ ID NO: 84767 - protein, 10 aa, synthetic construct
DKGRGDYNSL

SEQ ID NO: 84768 - protein, 10 aa, synthetic construct
DKGRGDYTSM

SEQ ID NO: 84769 - protein, 10 aa, synthetic construct
DKGRGDFQNT

SEQ ID NO: 84770 - protein, 10 aa, synthetic construct
DKARGDYNSL

SEQ ID NO: 84771 - protein, 10 aa, synthetic construct
DKARGDYTSM

SEQ ID NO: 84772 - protein, 10 aa, synthetic construct
EEGRGDRSVV

SEQ ID NO: 84773 - protein, 10 aa, synthetic construct
DKARGDFQNT

SEQ ID NO: 84774 - protein, 10 aa, synthetic construct
DKVRGDYTSV

SEQ ID NO: 84775 - protein, 10 aa, synthetic construct
DKVRGDLIGR

SEQ ID NO: 84776 - protein, 10 aa, synthetic construct
DKPRGDYNSL

SEQ ID NO: 84777 - protein, 10 aa, synthetic construct
DKPRGDYTSM

SEQ ID NO: 84778 - protein, 10 aa, synthetic construct
DKPRGDFQNT

SEQ ID NO: 84779 - protein, 10 aa, synthetic construct
DKLRGDYTSV

SEQ ID NO: 84780 - protein, 10 aa, synthetic construct
DKLRGDLIGR

SEQ ID NO: 84781 - protein, 10 aa, synthetic construct
DKIRGDHVNL

SEQ ID NO: 84782 - protein, 10 aa, synthetic construct
DKIRGDRDYL

SEQ ID NO: 84783 - protein, 10 aa, synthetic construct
EEGRGDRGVV

SEQ ID NO: 84784 - protein, 10 aa, synthetic construct
DKIRGDYSSV

SEQ ID NO: 84785 - protein, 10 aa, synthetic construct
DKIRGDLTVT

SEQ ID NO: 84786 - protein, 10 aa, synthetic construct
DKMRGDHVNL

SEQ ID NO: 84787 - protein, 10 aa, synthetic construct
DKMRGDRDYL

SEQ ID NO: 84788 - protein, 10 aa, synthetic construct
DKMRGDYSSV

SEQ ID NO: 84789 - protein, 10 aa, synthetic construct
DKMRGDLTVT

SEQ ID NO: 84790 - protein, 10 aa, synthetic construct
DKWRGDYTSV

SEQ ID NO: 84791 - protein, 10 aa, synthetic construct
DKWRGDLIGR

SEQ ID NO: 84792 - protein, 10 aa, synthetic construct
DKFRGDHVNL

SEQ ID NO: 84793 - protein, 10 aa, synthetic construct
DKFRGDRDYL

SEQ ID NO: 84794 - protein, 10 aa, synthetic construct
EEGRGDRSQT

SEQ ID NO: 84795 - protein, 10 aa, synthetic construct
DKFRGDYSSV

SEQ ID NO: 84796 - protein, 10 aa, synthetic construct
DKFRGDLTVT

SEQ ID NO: 84797 - protein, 10 aa, synthetic construct
DKRRGDYNSL

SEQ ID NO: 84798 - protein, 10 aa, synthetic construct
DKRRGDYTSM

SEQ ID NO: 84799 - protein, 10 aa, synthetic construct
DKRRGDFQNT

SEQ ID NO: 84800 - protein, 10 aa, synthetic construct
DKHRGDYTSV

SEQ ID NO: 84801 - protein, 10 aa, synthetic construct
DKHRGDLIGR

SEQ ID NO: 84802 - protein, 10 aa, synthetic construct
DKSRGDYTSV

SEQ ID NO: 84803 - protein, 10 aa, synthetic construct
DKSRGDLIGR

SEQ ID NO: 84804 - protein, 10 aa, synthetic construct
DKTRGDYTSV

SEQ ID NO: 84805 - protein, 10 aa, synthetic construct
EEARGDRGQI

SEQ ID NO: 84806 - protein, 10 aa, synthetic construct
DKTRGDLIGR

SEQ ID NO: 84807 - protein, 10 aa, synthetic construct
DKYRGDHVNL

SEQ ID NO: 84808 - protein, 10 aa, synthetic construct
DKYRGDRDYL

SEQ ID NO: 84809 - protein, 10 aa, synthetic construct
DKYRGDYSSV

SEQ ID NO: 84810 - protein, 10 aa, synthetic construct
DKYRGDLTVT

SEQ ID NO: 84811 - protein, 10 aa, synthetic construct
DKQRGDYTSV

SEQ ID NO: 84812 - protein, 10 aa, synthetic construct
DKQRGDLIGR

SEQ ID NO: 84813 - protein, 10 aa, synthetic construct
DKDRGDYTSV

SEQ ID NO: 84814 - protein, 10 aa, synthetic construct
DKDRGDLIGR

SEQ ID NO: 84815 - protein, 10 aa, synthetic construct
DKERGDYTSV

SEQ ID NO: 84816 - protein, 10 aa, synthetic construct
EEARGDRQGI

SEQ ID NO: 84817 - protein, 10 aa, synthetic construct
DKERGDLIGR

SEQ ID NO: 84818 - protein, 10 aa, synthetic construct
DRVRGDFNNT

SEQ ID NO: 84819 - protein, 10 aa, synthetic construct
DRVRGDFNNL

SEQ ID NO: 84820 - protein, 10 aa, synthetic construct
DRLRGDFNNT

SEQ ID NO: 84821 - protein, 10 aa, synthetic construct
DRLRGDFNNL

SEQ ID NO: 84822 - protein, 10 aa, synthetic construct
DRIRGDYNSL

SEQ ID NO: 84823 - protein, 10 aa, synthetic construct
DRIRGDYTSM

SEQ ID NO: 84824 - protein, 10 aa, synthetic construct
DRIRGDFQNT

SEQ ID NO: 84825 - protein, 10 aa, synthetic construct
DRMRGDYNSL

SEQ ID NO: 84826 - protein, 10 aa, synthetic construct
DRMRGDYTSM

SEQ ID NO: 84827 - protein, 10 aa, synthetic construct
EEARGDRSVV

SEQ ID NO: 84828 - protein, 10 aa, synthetic construct
DRMRGDFQNT

SEQ ID NO: 84829 - protein, 10 aa, synthetic construct
DRWRGDFNNT

SEQ ID NO: 84830 - protein, 10 aa, synthetic construct
DRWRGDFNNL

SEQ ID NO: 84831 - protein, 10 aa, synthetic construct
DRFRGDYNSL

SEQ ID NO: 84832 - protein, 10 aa, synthetic construct
DRFRGDYTSM

SEQ ID NO: 84833 - protein, 10 aa, synthetic construct
DRFRGDFQNT

SEQ ID NO: 84834 - protein, 10 aa, synthetic construct
DRKRGDYNSL

SEQ ID NO: 84835 - protein, 10 aa, synthetic construct
DRKRGDYTSM

SEQ ID NO: 84836 - protein, 10 aa, synthetic construct
DRKRGDFQNT

SEQ ID NO: 84837 - protein, 10 aa, synthetic construct
DRHRGDFNNT

SEQ ID NO: 84838 - protein, 10 aa, synthetic construct
EEARGDRGVV

SEQ ID NO: 84839 - protein, 10 aa, synthetic construct
DRHRGDFNNL

SEQ ID NO: 84840 - protein, 10 aa, synthetic construct
DRSRGDFNNT

SEQ ID NO: 84841 - protein, 10 aa, synthetic construct
DRSRGDFNNL

SEQ ID NO: 84842 - protein, 10 aa, synthetic construct
DRTRGDFNNT

SEQ ID NO: 84843 - protein, 10 aa, synthetic construct
DRTRGDFNNL

SEQ ID NO: 84844 - protein, 10 aa, synthetic construct
DRYRGDYNSL

SEQ ID NO: 84845 - protein, 10 aa, synthetic construct
DRYRGDYTSM

SEQ ID NO: 84846 - protein, 10 aa, synthetic construct
DRYRGDFQNT

SEQ ID NO: 84847 - protein, 10 aa, synthetic construct
DRNRGDYNSL

SEQ ID NO: 84848 - protein, 10 aa, synthetic construct
DRNRGDYTSM

SEQ ID NO: 84849 - protein, 10 aa, synthetic construct
QFFRGDRQGI

SEQ ID NO: 84850 - protein, 10 aa, synthetic construct
EEARGDRSQT

SEQ ID NO: 84851 - protein, 10 aa, synthetic construct
DRNRGDFQNT

SEQ ID NO: 84852 - protein, 10 aa, synthetic construct
DRQRGDFNNT

SEQ ID NO: 84853 - protein, 10 aa, synthetic construct
DRQRGDFNNL

SEQ ID NO: 84854 - protein, 10 aa, synthetic construct
DRDRGDFNNT

SEQ ID NO: 84855 - protein, 10 aa, synthetic construct
DRDRGDFNNL

SEQ ID NO: 84856 - protein, 10 aa, synthetic construct
DRERGDFNNT

SEQ ID NO: 84857 - protein, 10 aa, synthetic construct
DRERGDFNNL

SEQ ID NO: 84858 - protein, 10 aa, synthetic construct
DHGRGDFNNT

SEQ ID NO: 84859 - protein, 10 aa, synthetic construct
DHGRGDFNNL

SEQ ID NO: 84860 - protein, 10 aa, synthetic construct
DHARGDFNNT

SEQ ID NO: 84861 - protein, 10 aa, synthetic construct
EEPRGDRGQI

SEQ ID NO: 84862 - protein, 10 aa, synthetic construct
DHARGDFNNL

SEQ ID NO: 84863 - protein, 10 aa, synthetic construct
DHVRGDYNSL

SEQ ID NO: 84864 - protein, 10 aa, synthetic construct
DHVRGDYTSM

SEQ ID NO: 84865 - protein, 10 aa, synthetic construct
DHVRGDFQNT

SEQ ID NO: 84866 - protein, 10 aa, synthetic construct
DHPRGDFNNT

SEQ ID NO: 84867 - protein, 10 aa, synthetic construct
DHPRGDFNNL

SEQ ID NO: 84868 - protein, 10 aa, synthetic construct
DHLRGDYNSL

SEQ ID NO: 84869 - protein, 10 aa, synthetic construct
DHLRGDYTSM

SEQ ID NO: 84870 - protein, 10 aa, synthetic construct
DHLRGDFQNT

SEQ ID NO: 84871 - protein, 10 aa, synthetic construct
DHIRGDYTSV

SEQ ID NO: 84872 - protein, 10 aa, synthetic construct
EEPRGDRQGI

SEQ ID NO: 84873 - protein, 10 aa, synthetic construct
DHIRGDLIGR

SEQ ID NO: 84874 - protein, 10 aa, synthetic construct
DHMRGDYTSV

SEQ ID NO: 84875 - protein, 10 aa, synthetic construct
DHMRGDLIGR

SEQ ID NO: 84876 - protein, 10 aa, synthetic construct
DHWRGDYNSL

SEQ ID NO: 84877 - protein, 10 aa, synthetic construct
DHWRGDYTSM

SEQ ID NO: 84878 - protein, 10 aa, synthetic construct
DHWRGDFQNT

SEQ ID NO: 84879 - protein, 10 aa, synthetic construct
DHFRGDYTSV

SEQ ID NO: 84880 - protein, 10 aa, synthetic construct
DHFRGDLIGR

SEQ ID NO: 84881 - protein, 10 aa, synthetic construct
DHKRGDYTSV

SEQ ID NO: 84882 - protein, 10 aa, synthetic construct
DHKRGDLIGR

SEQ ID NO: 84883 - protein, 10 aa, synthetic construct
EEPRGDRSVV

SEQ ID NO: 84884 - protein, 10 aa, synthetic construct
DHRRGDFNNT

SEQ ID NO: 84885 - protein, 10 aa, synthetic construct
DHRRGDFNNL

SEQ ID NO: 84886 - protein, 10 aa, synthetic construct
DHHRGDYNSL

SEQ ID NO: 84887 - protein, 10 aa, synthetic construct
DHHRGDYTSM

SEQ ID NO: 84888 - protein, 10 aa, synthetic construct
DHHRGDFQNT

SEQ ID NO: 84889 - protein, 10 aa, synthetic construct
DHSRGDYNSL

SEQ ID NO: 84890 - protein, 10 aa, synthetic construct
DHSRGDYTSM

SEQ ID NO: 84891 - protein, 10 aa, synthetic construct
DHSRGDFQNT

SEQ ID NO: 84892 - protein, 10 aa, synthetic construct
DHTRGDYNSL

SEQ ID NO: 84893 - protein, 10 aa, synthetic construct
DHTRGDYTSM

SEQ ID NO: 84894 - protein, 10 aa, synthetic construct
EEPRGDRGVV

SEQ ID NO: 84895 - protein, 10 aa, synthetic construct
DHTRGDFQNT

SEQ ID NO: 84896 - protein, 10 aa, synthetic construct
DHYRGDYTSV

SEQ ID NO: 84897 - protein, 10 aa, synthetic construct
DHYRGDLIGR

SEQ ID NO: 84898 - protein, 10 aa, synthetic construct
DHNRGDYTSV

SEQ ID NO: 84899 - protein, 10 aa, synthetic construct
DHNRGDLIGR

SEQ ID NO: 84900 - protein, 10 aa, synthetic construct
DHQRGDYNSL

SEQ ID NO: 84901 - protein, 10 aa, synthetic construct
DHQRGDYTSM

SEQ ID NO: 84902 - protein, 10 aa, synthetic construct
DHQRGDFQNT

SEQ ID NO: 84903 - protein, 10 aa, synthetic construct
DHDRGDYNSL

SEQ ID NO: 84904 - protein, 10 aa, synthetic construct
DHDRGDYTSM

SEQ ID NO: 84905 - protein, 10 aa, synthetic construct
EEPRGDRSQT

SEQ ID NO: 84906 - protein, 10 aa, synthetic construct
DHDRGDFQNT

SEQ ID NO: 84907 - protein, 10 aa, synthetic construct
DHERGDYNSL

SEQ ID NO: 84908 - protein, 10 aa, synthetic construct
DHERGDYTSM

SEQ ID NO: 84909 - protein, 10 aa, synthetic construct
DHERGDFQNT

SEQ ID NO: 84910 - protein, 10 aa, synthetic construct
DSVRGDFNNT

SEQ ID NO: 84911 - protein, 10 aa, synthetic construct
DSVRGDFNNL

SEQ ID NO: 84912 - protein, 10 aa, synthetic construct
DSLRGDFNNT

SEQ ID NO: 84913 - protein, 10 aa, synthetic construct
DSLRGDFNNL

SEQ ID NO: 84914 - protein, 10 aa, synthetic construct
DSIRGDYNSL

SEQ ID NO: 84915 - protein, 10 aa, synthetic construct
DSIRGDYTSM

SEQ ID NO: 84916 - protein, 10 aa, synthetic construct
EERRGDRGQI

SEQ ID NO: 84917 - protein, 10 aa, synthetic construct
DSIRGDFQNT

SEQ ID NO: 84918 - protein, 10 aa, synthetic construct
DSMRGDYNSL

SEQ ID NO: 84919 - protein, 10 aa, synthetic construct
DSMRGDYTSM

SEQ ID NO: 84920 - protein, 10 aa, synthetic construct
DSMRGDFQNT

SEQ ID NO: 84921 - protein, 10 aa, synthetic construct
DSWRGDFNNT

SEQ ID NO: 84922 - protein, 10 aa, synthetic construct
DSWRGDFNNL

SEQ ID NO: 84923 - protein, 10 aa, synthetic construct
DSFRGDYNSL

SEQ ID NO: 84924 - protein, 10 aa, synthetic construct
DSFRGDYTSM

SEQ ID NO: 84925 - protein, 10 aa, synthetic construct
DSFRGDFQNT

SEQ ID NO: 84926 - protein, 10 aa, synthetic construct
DSKRGDYNSL

SEQ ID NO: 84927 - protein, 10 aa, synthetic construct
EERRGDRQGI

SEQ ID NO: 84928 - protein, 10 aa, synthetic construct
DSKRGDYTSM

SEQ ID NO: 84929 - protein, 10 aa, synthetic construct
DSKRGDFQNT

SEQ ID NO: 84930 - protein, 10 aa, synthetic construct
DSHRGDFNNT

SEQ ID NO: 84931 - protein, 10 aa, synthetic construct
DSHRGDFNNL

SEQ ID NO: 84932 - protein, 10 aa, synthetic construct
DSSRGDFNNT

SEQ ID NO: 84933 - protein, 10 aa, synthetic construct
DSSRGDFNNL

SEQ ID NO: 84934 - protein, 10 aa, synthetic construct
DSTRGDFNNT

SEQ ID NO: 84935 - protein, 10 aa, synthetic construct
DSTRGDFNNL

SEQ ID NO: 84936 - protein, 10 aa, synthetic construct
DSYRGDYNSL

SEQ ID NO: 84937 - protein, 10 aa, synthetic construct
DSYRGDYTSM

SEQ ID NO: 84938 - protein, 10 aa, synthetic construct
EERRGDRSVV

SEQ ID NO: 84939 - protein, 10 aa, synthetic construct
DSYRGDFQNT

SEQ ID NO: 84940 - protein, 10 aa, synthetic construct
DSNRGDYNSL

SEQ ID NO: 84941 - protein, 10 aa, synthetic construct
DSNRGDYTSM

SEQ ID NO: 84942 - protein, 10 aa, synthetic construct
DSNRGDFQNT

SEQ ID NO: 84943 - protein, 10 aa, synthetic construct
DSQRGDFNNT

SEQ ID NO: 84944 - protein, 10 aa, synthetic construct
DSQRGDFNNL

SEQ ID NO: 84945 - protein, 10 aa, synthetic construct
DSDRGDFNNT

SEQ ID NO: 84946 - protein, 10 aa, synthetic construct
DSDRGDFNNL

SEQ ID NO: 84947 - protein, 10 aa, synthetic construct
DSERGDFNNT

SEQ ID NO: 84948 - protein, 10 aa, synthetic construct
DSERGDFNNL

SEQ ID NO: 84949 - protein, 10 aa, synthetic construct
EERRGDRGVV

SEQ ID NO: 84950 - protein, 10 aa, synthetic construct
DTGRGDFNNT

SEQ ID NO: 84951 - protein, 10 aa, synthetic construct
DTGRGDFNNL

SEQ ID NO: 84952 - protein, 10 aa, synthetic construct
DTARGDFNNT

SEQ ID NO: 84953 - protein, 10 aa, synthetic construct
DTARGDFNNL

SEQ ID NO: 84954 - protein, 10 aa, synthetic construct
DTVRGDYNSL

SEQ ID NO: 84955 - protein, 10 aa, synthetic construct
DTVRGDYTSM

SEQ ID NO: 84956 - protein, 10 aa, synthetic construct
DTVRGDFQNT

SEQ ID NO: 84957 - protein, 10 aa, synthetic construct
DTPRGDFNNT

SEQ ID NO: 84958 - protein, 10 aa, synthetic construct
DTPRGDFNNL

SEQ ID NO: 84959 - protein, 10 aa, synthetic construct
DTLRGDYNSL

SEQ ID NO: 84960 - protein, 10 aa, synthetic construct
QFFRGDRGVV

SEQ ID NO: 84961 - protein, 10 aa, synthetic construct
EERRGDRSQT

SEQ ID NO: 84962 - protein, 10 aa, synthetic construct
DTLRGDYTSM

SEQ ID NO: 84963 - protein, 10 aa, synthetic construct
DTLRGDFQNT

SEQ ID NO: 84964 - protein, 10 aa, synthetic construct
DTIRGDYTSV

SEQ ID NO: 84965 - protein, 10 aa, synthetic construct
DTIRGDLIGR

SEQ ID NO: 84966 - protein, 10 aa, synthetic construct
DTMRGDYTSV

SEQ ID NO: 84967 - protein, 10 aa, synthetic construct
DTMRGDLIGR

SEQ ID NO: 84968 - protein, 10 aa, synthetic construct
DTWRGDYNSL

SEQ ID NO: 84969 - protein, 10 aa, synthetic construct
DTWRGDYTSM

SEQ ID NO: 84970 - protein, 10 aa, synthetic construct
DTWRGDFQNT

SEQ ID NO: 84971 - protein, 10 aa, synthetic construct
DTFRGDYTSV

SEQ ID NO: 84972 - protein, 10 aa, synthetic construct
NGGRGDRGQI

SEQ ID NO: 84973 - protein, 10 aa, synthetic construct
DTFRGDLIGR

SEQ ID NO: 84974 - protein, 10 aa, synthetic construct
DTKRGDYTSV

SEQ ID NO: 84975 - protein, 10 aa, synthetic construct
DTKRGDLIGR

SEQ ID NO: 84976 - protein, 10 aa, synthetic construct
DTRRGDFNNT

SEQ ID NO: 84977 - protein, 10 aa, synthetic construct
DTRRGDFNNL

SEQ ID NO: 84978 - protein, 10 aa, synthetic construct
DTHRGDYNSL

SEQ ID NO: 84979 - protein, 10 aa, synthetic construct
DTHRGDYTSM

SEQ ID NO: 84980 - protein, 10 aa, synthetic construct
DTHRGDFQNT

SEQ ID NO: 84981 - protein, 10 aa, synthetic construct
DTSRGDYNSL

SEQ ID NO: 84982 - protein, 10 aa, synthetic construct
DTSRGDYTSM

SEQ ID NO: 84983 - protein, 10 aa, synthetic construct
NGGRGDRQGI

SEQ ID NO: 84984 - protein, 10 aa, synthetic construct
DTSRGDFQNT

SEQ ID NO: 84985 - protein, 10 aa, synthetic construct
DTTRGDYNSL

SEQ ID NO: 84986 - protein, 10 aa, synthetic construct
DTTRGDYTSM

SEQ ID NO: 84987 - protein, 10 aa, synthetic construct
DTTRGDFQNT

SEQ ID NO: 84988 - protein, 10 aa, synthetic construct
DTYRGDYTSV

SEQ ID NO: 84989 - protein, 10 aa, synthetic construct
DTYRGDLIGR

SEQ ID NO: 84990 - protein, 10 aa, synthetic construct
DTNRGDYTSV

SEQ ID NO: 84991 - protein, 10 aa, synthetic construct
DTNRGDLIGR

SEQ ID NO: 84992 - protein, 10 aa, synthetic construct
DTQRGDYNSL

SEQ ID NO: 84993 - protein, 10 aa, synthetic construct
DTQRGDYTSM

SEQ ID NO: 84994 - protein, 10 aa, synthetic construct
NGGRGDRSVV

SEQ ID NO: 84995 - protein, 10 aa, synthetic construct
DTQRGDFQNT

SEQ ID NO: 84996 - protein, 10 aa, synthetic construct
DTDRGDYNSL

SEQ ID NO: 84997 - protein, 10 aa, synthetic construct
DTDRGDYTSM

SEQ ID NO: 84998 - protein, 10 aa, synthetic construct
DTDRGDFQNT

SEQ ID NO: 84999 - protein, 10 aa, synthetic construct
DTERGDYNSL

SEQ ID NO: 85000 - protein, 10 aa, synthetic construct
DTERGDYTSM

SEQ ID NO: 85001 - protein, 10 aa, synthetic construct
DTERGDFQNT

SEQ ID NO: 85002 - protein, 10 aa, synthetic construct
DYGRGDYNSL

SEQ ID NO: 85003 - protein, 10 aa, synthetic construct
DYGRGDYTSM

SEQ ID NO: 85004 - protein, 10 aa, synthetic construct
DYGRGDFQNT

SEQ ID NO: 85005 - protein, 10 aa, synthetic construct
NGGRGDRGVV

SEQ ID NO: 85006 - protein, 10 aa, synthetic construct
DYARGDYNSL

SEQ ID NO: 85007 - protein, 10 aa, synthetic construct
DYARGDYTSM

SEQ ID NO: 85008 - protein, 10 aa, synthetic construct
DYARGDFQNT

SEQ ID NO: 85009 - protein, 10 aa, synthetic construct
DYVRGDYTSV

SEQ ID NO: 85010 - protein, 10 aa, synthetic construct
DYVRGDLIGR

SEQ ID NO: 85011 - protein, 10 aa, synthetic construct
DYPRGDYNSL

SEQ ID NO: 85012 - protein, 10 aa, synthetic construct
DYPRGDYTSM

SEQ ID NO: 85013 - protein, 10 aa, synthetic construct
DYPRGDFQNT

SEQ ID NO: 85014 - protein, 10 aa, synthetic construct
DYLRGDYTSV

SEQ ID NO: 85015 - protein, 10 aa, synthetic construct
DYLRGDLIGR

SEQ ID NO: 85016 - protein, 10 aa, synthetic construct
NGGRGDRSQT

SEQ ID NO: 85017 - protein, 10 aa, synthetic construct
DYIRGDHVNL

SEQ ID NO: 85018 - protein, 10 aa, synthetic construct
DYIRGDRDYL

SEQ ID NO: 85019 - protein, 10 aa, synthetic construct
DYIRGDYSSV

SEQ ID NO: 85020 - protein, 10 aa, synthetic construct
DYIRGDLTVT

SEQ ID NO: 85021 - protein, 10 aa, synthetic construct
DYMRGDHVNL

SEQ ID NO: 85022 - protein, 10 aa, synthetic construct
DYMRGDRDYL

SEQ ID NO: 85023 - protein, 10 aa, synthetic construct
DYMRGDYSSV

SEQ ID NO: 85024 - protein, 10 aa, synthetic construct
DYMRGDLTVT

SEQ ID NO: 85025 - protein, 10 aa, synthetic construct
DYWRGDYTSV

SEQ ID NO: 85026 - protein, 10 aa, synthetic construct
DYWRGDLIGR

SEQ ID NO: 85027 - protein, 10 aa, synthetic construct
NGARGDRGQI

SEQ ID NO: 85028 - protein, 10 aa, synthetic construct
DYFRGDHVNL

SEQ ID NO: 85029 - protein, 10 aa, synthetic construct
DYFRGDRDYL

SEQ ID NO: 85030 - protein, 10 aa, synthetic construct
DYFRGDYSSV

SEQ ID NO: 85031 - protein, 10 aa, synthetic construct
DYFRGDLTVT

SEQ ID NO: 85032 - protein, 10 aa, synthetic construct
DYKRGDHVNL

SEQ ID NO: 85033 - protein, 10 aa, synthetic construct
DYKRGDRDYL

SEQ ID NO: 85034 - protein, 10 aa, synthetic construct
DYKRGDYSSV

SEQ ID NO: 85035 - protein, 10 aa, synthetic construct
DYKRGDLTVT

SEQ ID NO: 85036 - protein, 10 aa, synthetic construct
DYRRGDYNSL

SEQ ID NO: 85037 - protein, 10 aa, synthetic construct
DYRRGDYTSM

SEQ ID NO: 85038 - protein, 10 aa, synthetic construct
NGARGDRQGI

SEQ ID NO: 85039 - protein, 10 aa, synthetic construct
DYRRGDFQNT

SEQ ID NO: 85040 - protein, 10 aa, synthetic construct
DYHRGDYTSV

SEQ ID NO: 85041 - protein, 10 aa, synthetic construct
DYHRGDLIGR

SEQ ID NO: 85042 - protein, 10 aa, synthetic construct
DYSRGDYTSV

SEQ ID NO: 85043 - protein, 10 aa, synthetic construct
DYSRGDLIGR

SEQ ID NO: 85044 - protein, 10 aa, synthetic construct
DYTRGDYTSV

SEQ ID NO: 85045 - protein, 10 aa, synthetic construct
DYTRGDLIGR

SEQ ID NO: 85046 - protein, 10 aa, synthetic construct
DYYRGDHVNL

SEQ ID NO: 85047 - protein, 10 aa, synthetic construct
DYYRGDRDYL

SEQ ID NO: 85048 - protein, 10 aa, synthetic construct
DYYRGDYSSV

SEQ ID NO: 85049 - protein, 10 aa, synthetic construct
NGARGDRSVV

SEQ ID NO: 85050 - protein, 10 aa, synthetic construct
DYYRGDLTVT

SEQ ID NO: 85051 - protein, 10 aa, synthetic construct
DYNRGDHVNL

SEQ ID NO: 85052 - protein, 10 aa, synthetic construct
DYNRGDRDYL

SEQ ID NO: 85053 - protein, 10 aa, synthetic construct
DYNRGDYSSV

SEQ ID NO: 85054 - protein, 10 aa, synthetic construct
DYNRGDLTVT

SEQ ID NO: 85055 - protein, 10 aa, synthetic construct
DYQRGDYTSV

SEQ ID NO: 85056 - protein, 10 aa, synthetic construct
DYQRGDLIGR

SEQ ID NO: 85057 - protein, 10 aa, synthetic construct
DYDRGDYTSV

SEQ ID NO: 85058 - protein, 10 aa, synthetic construct
DYDRGDLIGR

SEQ ID NO: 85059 - protein, 10 aa, synthetic construct
DYERGDYTSV

SEQ ID NO: 85060 - protein, 10 aa, synthetic construct
NGARGDRGVV

SEQ ID NO: 85061 - protein, 10 aa, synthetic construct
DYERGDLIGR

SEQ ID NO: 85062 - protein, 10 aa, synthetic construct
DNGRGDYNSL

SEQ ID NO: 85063 - protein, 10 aa, synthetic construct
DNGRGDYTSM

SEQ ID NO: 85064 - protein, 10 aa, synthetic construct
DNGRGDFQNT

SEQ ID NO: 85065 - protein, 10 aa, synthetic construct
DNARGDYNSL

SEQ ID NO: 85066 - protein, 10 aa, synthetic construct
DNARGDYTSM

SEQ ID NO: 85067 - protein, 10 aa, synthetic construct
DNARGDFQNT

SEQ ID NO: 85068 - protein, 10 aa, synthetic construct
DNVRGDYTSV

SEQ ID NO: 85069 - protein, 10 aa, synthetic construct
DNVRGDLIGR

SEQ ID NO: 85070 - protein, 10 aa, synthetic construct
DNPRGDYNSL

SEQ ID NO: 85071 - protein, 10 aa, synthetic construct
TKKRGDQSTL

SEQ ID NO: 85072 - protein, 10 aa, synthetic construct
QFFRGDYVGL

SEQ ID NO: 85073 - protein, 10 aa, synthetic construct
NGARGDRSQT

SEQ ID NO: 85074 - protein, 10 aa, synthetic construct
DNPRGDYTSM

SEQ ID NO: 85075 - protein, 10 aa, synthetic construct
DNPRGDFQNT

SEQ ID NO: 85076 - protein, 10 aa, synthetic construct
DNLRGDYTSV

SEQ ID NO: 85077 - protein, 10 aa, synthetic construct
DNLRGDLIGR

SEQ ID NO: 85078 - protein, 10 aa, synthetic construct
DNIRGDHVNL

SEQ ID NO: 85079 - protein, 10 aa, synthetic construct
DNIRGDRDYL

SEQ ID NO: 85080 - protein, 10 aa, synthetic construct
DNIRGDYSSV

SEQ ID NO: 85081 - protein, 10 aa, synthetic construct
DNIRGDLTVT

SEQ ID NO: 85082 - protein, 10 aa, synthetic construct
DNMRGDHVNL

SEQ ID NO: 85083 - protein, 10 aa, synthetic construct
DNMRGDRDYL

SEQ ID NO: 85084 - protein, 10 aa, synthetic construct
NGPRGDRGQI

SEQ ID NO: 85085 - protein, 10 aa, synthetic construct
DNMRGDYSSV

SEQ ID NO: 85086 - protein, 10 aa, synthetic construct
DNMRGDLTVT

SEQ ID NO: 85087 - protein, 10 aa, synthetic construct
DNWRGDYTSV

SEQ ID NO: 85088 - protein, 10 aa, synthetic construct
DNWRGDLIGR

SEQ ID NO: 85089 - protein, 10 aa, synthetic construct
DNFRGDHVNL

SEQ ID NO: 85090 - protein, 10 aa, synthetic construct
DNFRGDRDYL

SEQ ID NO: 85091 - protein, 10 aa, synthetic construct
DNFRGDYSSV

SEQ ID NO: 85092 - protein, 10 aa, synthetic construct
DNFRGDLTVT

SEQ ID NO: 85093 - protein, 10 aa, synthetic construct
DNKRGDHVNL

SEQ ID NO: 85094 - protein, 10 aa, synthetic construct
DNKRGDRDYL

SEQ ID NO: 85095 - protein, 10 aa, synthetic construct
NGPRGDRQGI

SEQ ID NO: 85096 - protein, 10 aa, synthetic construct
DNKRGDYSSV

SEQ ID NO: 85097 - protein, 10 aa, synthetic construct
DNKRGDLTVT

SEQ ID NO: 85098 - protein, 10 aa, synthetic construct
DNRRGDYNSL

SEQ ID NO: 85099 - protein, 10 aa, synthetic construct
DNRRGDYTSM

SEQ ID NO: 85100 - protein, 10 aa, synthetic construct
DNRRGDFQNT

SEQ ID NO: 85101 - protein, 10 aa, synthetic construct
DNHRGDYTSV

SEQ ID NO: 85102 - protein, 10 aa, synthetic construct
DNHRGDLIGR

SEQ ID NO: 85103 - protein, 10 aa, synthetic construct
DNSRGDYTSV

SEQ ID NO: 85104 - protein, 10 aa, synthetic construct
DNSRGDLIGR

SEQ ID NO: 85105 - protein, 10 aa, synthetic construct
DNTRGDYTSV

SEQ ID NO: 85106 - protein, 10 aa, synthetic construct
NGPRGDRSVV

SEQ ID NO: 85107 - protein, 10 aa, synthetic construct
DNTRGDLIGR

SEQ ID NO: 85108 - protein, 10 aa, synthetic construct
DNYRGDHVNL

SEQ ID NO: 85109 - protein, 10 aa, synthetic construct
DNYRGDRDYL

SEQ ID NO: 85110 - protein, 10 aa, synthetic construct
DNYRGDYSSV

SEQ ID NO: 85111 - protein, 10 aa, synthetic construct
DNYRGDLTVT

SEQ ID NO: 85112 - protein, 10 aa, synthetic construct
DNNRGDHVNL

SEQ ID NO: 85113 - protein, 10 aa, synthetic construct
DNNRGDRDYL

SEQ ID NO: 85114 - protein, 10 aa, synthetic construct
DNNRGDYSSV

SEQ ID NO: 85115 - protein, 10 aa, synthetic construct
DNNRGDLTVT

SEQ ID NO: 85116 - protein, 10 aa, synthetic construct
DNQRGDYTSV

SEQ ID NO: 85117 - protein, 10 aa, synthetic construct
NGPRGDRGVV

SEQ ID NO: 85118 - protein, 10 aa, synthetic construct
DNQRGDLIGR

SEQ ID NO: 85119 - protein, 10 aa, synthetic construct
DNDRGDYTSV

SEQ ID NO: 85120 - protein, 10 aa, synthetic construct
DNDRGDLIGR

SEQ ID NO: 85121 - protein, 10 aa, synthetic construct
DNERGDYTSV

SEQ ID NO: 85122 - protein, 10 aa, synthetic construct
DNERGDLIGR

SEQ ID NO: 85123 - protein, 10 aa, synthetic construct
DQGRGDFNNT

SEQ ID NO: 85124 - protein, 10 aa, synthetic construct
DQGRGDFNNL

SEQ ID NO: 85125 - protein, 10 aa, synthetic construct
DQARGDFNNT

SEQ ID NO: 85126 - protein, 10 aa, synthetic construct
DQARGDFNNL

SEQ ID NO: 85127 - protein, 10 aa, synthetic construct
DQVRGDYNSL

SEQ ID NO: 85128 - protein, 10 aa, synthetic construct
NGPRGDRSQT

SEQ ID NO: 85129 - protein, 10 aa, synthetic construct
DQVRGDYTSM

SEQ ID NO: 85130 - protein, 10 aa, synthetic construct
DQVRGDFQNT

SEQ ID NO: 85131 - protein, 10 aa, synthetic construct
DQPRGDFNNT

SEQ ID NO: 85132 - protein, 10 aa, synthetic construct
DQPRGDFNNL

SEQ ID NO: 85133 - protein, 10 aa, synthetic construct
DQLRGDYNSL

SEQ ID NO: 85134 - protein, 10 aa, synthetic construct
DQLRGDYTSM

SEQ ID NO: 85135 - protein, 10 aa, synthetic construct
DQLRGDFQNT

SEQ ID NO: 85136 - protein, 10 aa, synthetic construct
DQIRGDYTSV

SEQ ID NO: 85137 - protein, 10 aa, synthetic construct
DQIRGDLIGR

SEQ ID NO: 85138 - protein, 10 aa, synthetic construct
DQMRGDYTSV

SEQ ID NO: 85139 - protein, 10 aa, synthetic construct
NGRRGDRGQI

SEQ ID NO: 85140 - protein, 10 aa, synthetic construct
DQMRGDLIGR

SEQ ID NO: 85141 - protein, 10 aa, synthetic construct
DQWRGDYNSL

SEQ ID NO: 85142 - protein, 10 aa, synthetic construct
DQWRGDYTSM

SEQ ID NO: 85143 - protein, 10 aa, synthetic construct
DQWRGDFQNT

SEQ ID NO: 85144 - protein, 10 aa, synthetic construct
DQFRGDYTSV

SEQ ID NO: 85145 - protein, 10 aa, synthetic construct
DQFRGDLIGR

SEQ ID NO: 85146 - protein, 10 aa, synthetic construct
DQKRGDYTSV

SEQ ID NO: 85147 - protein, 10 aa, synthetic construct
DQKRGDLIGR

SEQ ID NO: 85148 - protein, 10 aa, synthetic construct
DQRRGDFNNT

SEQ ID NO: 85149 - protein, 10 aa, synthetic construct
DQRRGDFNNL

SEQ ID NO: 85150 - protein, 10 aa, synthetic construct
NGRRGDRQGI

SEQ ID NO: 85151 - protein, 10 aa, synthetic construct
DQHRGDYNSL

SEQ ID NO: 85152 - protein, 10 aa, synthetic construct
DQHRGDYTSM

SEQ ID NO: 85153 - protein, 10 aa, synthetic construct
DQHRGDFQNT

SEQ ID NO: 85154 - protein, 10 aa, synthetic construct
DQSRGDYNSL

SEQ ID NO: 85155 - protein, 10 aa, synthetic construct
DQSRGDYTSM

SEQ ID NO: 85156 - protein, 10 aa, synthetic construct
DQSRGDFQNT

SEQ ID NO: 85157 - protein, 10 aa, synthetic construct
DQTRGDYNSL

SEQ ID NO: 85158 - protein, 10 aa, synthetic construct
DQTRGDYTSM

SEQ ID NO: 85159 - protein, 10 aa, synthetic construct
DQTRGDFQNT

SEQ ID NO: 85160 - protein, 10 aa, synthetic construct
DQYRGDYTSV

SEQ ID NO: 85161 - protein, 10 aa, synthetic construct
NGRRGDRSVV

SEQ ID NO: 85162 - protein, 10 aa, synthetic construct
DQYRGDLIGR

SEQ ID NO: 85163 - protein, 10 aa, synthetic construct
DQNRGDYTSV

SEQ ID NO: 85164 - protein, 10 aa, synthetic construct
DQNRGDLIGR

SEQ ID NO: 85165 - protein, 10 aa, synthetic construct
DQQRGDYNSL

SEQ ID NO: 85166 - protein, 10 aa, synthetic construct
DQQRGDYTSM

SEQ ID NO: 85167 - protein, 10 aa, synthetic construct
DQQRGDFQNT

SEQ ID NO: 85168 - protein, 10 aa, synthetic construct
DQDRGDYNSL

SEQ ID NO: 85169 - protein, 10 aa, synthetic construct
DQDRGDYTSM

SEQ ID NO: 85170 - protein, 10 aa, synthetic construct
DQDRGDFQNT

SEQ ID NO: 85171 - protein, 10 aa, synthetic construct
DQERGDYNSL

SEQ ID NO: 85172 - protein, 10 aa, synthetic construct
NGRRGDRGVV

SEQ ID NO: 85173 - protein, 10 aa, synthetic construct
DQERGDYTSM

SEQ ID NO: 85174 - protein, 10 aa, synthetic construct
DQERGDFQNT

SEQ ID NO: 85175 - protein, 10 aa, synthetic construct
DDGRGDFNNT

SEQ ID NO: 85176 - protein, 10 aa, synthetic construct
DDGRGDFNNL

SEQ ID NO: 85177 - protein, 10 aa, synthetic construct
DDARGDFNNT

SEQ ID NO: 85178 - protein, 10 aa, synthetic construct
DDARGDFNNL

SEQ ID NO: 85179 - protein, 10 aa, synthetic construct
DDVRGDYNSL

SEQ ID NO: 85180 - protein, 10 aa, synthetic construct
DDVRGDYTSM

SEQ ID NO: 85181 - protein, 10 aa, synthetic construct
DDVRGDFQNT

SEQ ID NO: 85182 - protein, 10 aa, synthetic construct
DDPRGDFNNT

SEQ ID NO: 85183 - protein, 10 aa, synthetic construct
QFFRGDLIGR

SEQ ID NO: 85184 - protein, 10 aa, synthetic construct
NGRRGDRSQT

SEQ ID NO: 85185 - protein, 10 aa, synthetic construct
DDPRGDFNNL

SEQ ID NO: 85186 - protein, 10 aa, synthetic construct
DDLRGDYNSL

SEQ ID NO: 85187 - protein, 10 aa, synthetic construct
DDLRGDYTSM

SEQ ID NO: 85188 - protein, 10 aa, synthetic construct
DDLRGDFQNT

SEQ ID NO: 85189 - protein, 10 aa, synthetic construct
DDIRGDYTSV

SEQ ID NO: 85190 - protein, 10 aa, synthetic construct
DDIRGDLIGR

SEQ ID NO: 85191 - protein, 10 aa, synthetic construct
DDMRGDYTSV

SEQ ID NO: 85192 - protein, 10 aa, synthetic construct
DDMRGDLIGR

SEQ ID NO: 85193 - protein, 10 aa, synthetic construct
DDWRGDYNSL

SEQ ID NO: 85194 - protein, 10 aa, synthetic construct
DDWRGDYTSM

SEQ ID NO: 85195 - protein, 10 aa, synthetic construct
NAGRGDRGQI

SEQ ID NO: 85196 - protein, 10 aa, synthetic construct
DDWRGDFQNT

SEQ ID NO: 85197 - protein, 10 aa, synthetic construct
DDFRGDYTSV

SEQ ID NO: 85198 - protein, 10 aa, synthetic construct
DDFRGDLIGR

SEQ ID NO: 85199 - protein, 10 aa, synthetic construct
DDKRGDYTSV

SEQ ID NO: 85200 - protein, 10 aa, synthetic construct
DDKRGDLIGR

SEQ ID NO: 85201 - protein, 10 aa, synthetic construct
DDRRGDFNNT

SEQ ID NO: 85202 - protein, 10 aa, synthetic construct
DDRRGDFNNL

SEQ ID NO: 85203 - protein, 10 aa, synthetic construct
DDHRGDYNSL

SEQ ID NO: 85204 - protein, 10 aa, synthetic construct
DDHRGDYTSM

SEQ ID NO: 85205 - protein, 10 aa, synthetic construct
DDHRGDFQNT

SEQ ID NO: 85206 - protein, 10 aa, synthetic construct
NAGRGDRQGI

SEQ ID NO: 85207 - protein, 10 aa, synthetic construct
DDSRGDYNSL

SEQ ID NO: 85208 - protein, 10 aa, synthetic construct
DDSRGDYTSM

SEQ ID NO: 85209 - protein, 10 aa, synthetic construct
DDSRGDFQNT

SEQ ID NO: 85210 - protein, 10 aa, synthetic construct
DDTRGDYNSL

SEQ ID NO: 85211 - protein, 10 aa, synthetic construct
DDTRGDYTSM

SEQ ID NO: 85212 - protein, 10 aa, synthetic construct
DDTRGDFQNT

SEQ ID NO: 85213 - protein, 10 aa, synthetic construct
DDYRGDYTSV

SEQ ID NO: 85214 - protein, 10 aa, synthetic construct
DDYRGDLIGR

SEQ ID NO: 85215 - protein, 10 aa, synthetic construct
DDNRGDYTSV

SEQ ID NO: 85216 - protein, 10 aa, synthetic construct
DDNRGDLIGR

SEQ ID NO: 85217 - protein, 10 aa, synthetic construct
NAGRGDRSVV

SEQ ID NO: 85218 - protein, 10 aa, synthetic construct
DDQRGDYNSL

SEQ ID NO: 85219 - protein, 10 aa, synthetic construct
DDQRGDYTSM

SEQ ID NO: 85220 - protein, 10 aa, synthetic construct
DDQRGDFQNT

SEQ ID NO: 85221 - protein, 10 aa, synthetic construct
DDDRGDYNSL

SEQ ID NO: 85222 - protein, 10 aa, synthetic construct
DDDRGDYTSM

SEQ ID NO: 85223 - protein, 10 aa, synthetic construct
DDDRGDFQNT

SEQ ID NO: 85224 - protein, 10 aa, synthetic construct
DDERGDYNSL

SEQ ID NO: 85225 - protein, 10 aa, synthetic construct
DDERGDYTSM

SEQ ID NO: 85226 - protein, 10 aa, synthetic construct
DDERGDFQNT

SEQ ID NO: 85227 - protein, 10 aa, synthetic construct
DEGRGDFNNT

SEQ ID NO: 85228 - protein, 10 aa, synthetic construct
NAGRGDRGVV

SEQ ID NO: 85229 - protein, 10 aa, synthetic construct
DEGRGDFNNL

SEQ ID NO: 85230 - protein, 10 aa, synthetic construct
DEARGDFNNT

SEQ ID NO: 85231 - protein, 10 aa, synthetic construct
DEARGDFNNL

SEQ ID NO: 85232 - protein, 10 aa, synthetic construct
DEVRGDYNSL

SEQ ID NO: 85233 - protein, 10 aa, synthetic construct
DEVRGDYTSM

SEQ ID NO: 85234 - protein, 10 aa, synthetic construct
DEVRGDFQNT

SEQ ID NO: 85235 - protein, 10 aa, synthetic construct
DEPRGDFNNT

SEQ ID NO: 85236 - protein, 10 aa, synthetic construct
DEPRGDFNNL

SEQ ID NO: 85237 - protein, 10 aa, synthetic construct
DELRGDYNSL

SEQ ID NO: 85238 - protein, 10 aa, synthetic construct
DELRGDYTSM

SEQ ID NO: 85239 - protein, 10 aa, synthetic construct
NAGRGDRSQT

SEQ ID NO: 85240 - protein, 10 aa, synthetic construct
DELRGDFQNT

SEQ ID NO: 85241 - protein, 10 aa, synthetic construct
DEIRGDYTSV

SEQ ID NO: 85242 - protein, 10 aa, synthetic construct
DEIRGDLIGR

SEQ ID NO: 85243 - protein, 10 aa, synthetic construct
DEMRGDYTSV

SEQ ID NO: 85244 - protein, 10 aa, synthetic construct
DEMRGDLIGR

SEQ ID NO: 85245 - protein, 10 aa, synthetic construct
DEWRGDYNSL

SEQ ID NO: 85246 - protein, 10 aa, synthetic construct
DEWRGDYTSM

SEQ ID NO: 85247 - protein, 10 aa, synthetic construct
DEWRGDFQNT

SEQ ID NO: 85248 - protein, 10 aa, synthetic construct
DEFRGDYTSV

SEQ ID NO: 85249 - protein, 10 aa, synthetic construct
DEFRGDLIGR

SEQ ID NO: 85250 - protein, 10 aa, synthetic construct
NAARGDRGQI

SEQ ID NO: 85251 - protein, 10 aa, synthetic construct
DEKRGDYTSV

SEQ ID NO: 85252 - protein, 10 aa, synthetic construct
DEKRGDLIGR

SEQ ID NO: 85253 - protein, 10 aa, synthetic construct
DERRGDFNNT

SEQ ID NO: 85254 - protein, 10 aa, synthetic construct
DERRGDFNNL

SEQ ID NO: 85255 - protein, 10 aa, synthetic construct
DEHRGDYNSL

SEQ ID NO: 85256 - protein, 10 aa, synthetic construct
DEHRGDYTSM

SEQ ID NO: 85257 - protein, 10 aa, synthetic construct
DEHRGDFQNT

SEQ ID NO: 85258 - protein, 10 aa, synthetic construct
DESRGDYNSL

SEQ ID NO: 85259 - protein, 10 aa, synthetic construct
DESRGDYTSM

SEQ ID NO: 85260 - protein, 10 aa, synthetic construct
DESRGDFQNT

SEQ ID NO: 85261 - protein, 10 aa, synthetic construct
NAARGDRQGI

SEQ ID NO: 85262 - protein, 10 aa, synthetic construct
DETRGDYNSL

SEQ ID NO: 85263 - protein, 10 aa, synthetic construct
DETRGDYTSM

SEQ ID NO: 85264 - protein, 10 aa, synthetic construct
DETRGDFQNT

SEQ ID NO: 85265 - protein, 10 aa, synthetic construct
DEYRGDYTSV

SEQ ID NO: 85266 - protein, 10 aa, synthetic construct
DEYRGDLIGR

SEQ ID NO: 85267 - protein, 10 aa, synthetic construct
DENRGDYTSV

SEQ ID NO: 85268 - protein, 10 aa, synthetic construct
DENRGDLIGR

SEQ ID NO: 85269 - protein, 10 aa, synthetic construct
DEQRGDYNSL

SEQ ID NO: 85270 - protein, 10 aa, synthetic construct
DEQRGDYTSM

SEQ ID NO: 85271 - protein, 10 aa, synthetic construct
DEQRGDFQNT

SEQ ID NO: 85272 - protein, 10 aa, synthetic construct
NAARGDRSVV

SEQ ID NO: 85273 - protein, 10 aa, synthetic construct
DEDRGDYNSL

SEQ ID NO: 85274 - protein, 10 aa, synthetic construct
DEDRGDYTSM

SEQ ID NO: 85275 - protein, 10 aa, synthetic construct
DEDRGDFQNT

SEQ ID NO: 85276 - protein, 10 aa, synthetic construct
DEERGDYNSL

SEQ ID NO: 85277 - protein, 10 aa, synthetic construct
DEERGDYTSM

SEQ ID NO: 85278 - protein, 10 aa, synthetic construct
DEERGDFQNT

SEQ ID NO: 85279 - protein, 10 aa, synthetic construct
QGVRGDFNNT

SEQ ID NO: 85280 - protein, 10 aa, synthetic construct
QGVRGDFNNL

SEQ ID NO: 85281 - protein, 10 aa, synthetic construct
QGLRGDFNNT

SEQ ID NO: 85282 - protein, 10 aa, synthetic construct
QGLRGDFNNL

SEQ ID NO: 85283 - protein, 10 aa, synthetic construct
NAARGDRGVV

SEQ ID NO: 85284 - protein, 10 aa, synthetic construct
QGIRGDYNSL

SEQ ID NO: 85285 - protein, 10 aa, synthetic construct
QGIRGDYTSM

SEQ ID NO: 85286 - protein, 10 aa, synthetic construct
QGIRGDFQNT

SEQ ID NO: 85287 - protein, 10 aa, synthetic construct
QGMRGDYNSL

SEQ ID NO: 85288 - protein, 10 aa, synthetic construct
QGMRGDYTSM

SEQ ID NO: 85289 - protein, 10 aa, synthetic construct
QGMRGDFQNT

SEQ ID NO: 85290 - protein, 10 aa, synthetic construct
QGWRGDFNNT

SEQ ID NO: 85291 - protein, 10 aa, synthetic construct
QGWRGDFNNL

SEQ ID NO: 85292 - protein, 10 aa, synthetic construct
QGFRGDYNSL

SEQ ID NO: 85293 - protein, 10 aa, synthetic construct
QGFRGDYTSM

SEQ ID NO: 85294 - protein, 10 aa, synthetic construct
QFFRGDQSTL

SEQ ID NO: 85295 - protein, 10 aa, synthetic construct
NAARGDRSQT

SEQ ID NO: 85296 - protein, 10 aa, synthetic construct
QGFRGDFQNT

SEQ ID NO: 85297 - protein, 10 aa, synthetic construct
QGKRGDYNSL

SEQ ID NO: 85298 - protein, 10 aa, synthetic construct
QGKRGDYTSM

SEQ ID NO: 85299 - protein, 10 aa, synthetic construct
QGKRGDFQNT

SEQ ID NO: 85300 - protein, 10 aa, synthetic construct
QGHRGDFNNT

SEQ ID NO: 85301 - protein, 10 aa, synthetic construct
QGHRGDFNNL

SEQ ID NO: 85302 - protein, 10 aa, synthetic construct
QGSRGDFNNT

SEQ ID NO: 85303 - protein, 10 aa, synthetic construct
QGSRGDFNNL

SEQ ID NO: 85304 - protein, 10 aa, synthetic construct
QGTRGDFNNT

SEQ ID NO: 85305 - protein, 10 aa, synthetic construct
QGTRGDFNNL

SEQ ID NO: 85306 - protein, 10 aa, synthetic construct
NAPRGDRGQI

SEQ ID NO: 85307 - protein, 10 aa, synthetic construct
QGYRGDYNSL

SEQ ID NO: 85308 - protein, 10 aa, synthetic construct
QGYRGDYTSM

SEQ ID NO: 85309 - protein, 10 aa, synthetic construct
QGYRGDFQNT

SEQ ID NO: 85310 - protein, 10 aa, synthetic construct
QGNRGDYNSL

SEQ ID NO: 85311 - protein, 10 aa, synthetic construct
QGNRGDYTSM

SEQ ID NO: 85312 - protein, 10 aa, synthetic construct
QGNRGDFQNT

SEQ ID NO: 85313 - protein, 10 aa, synthetic construct
QGQRGDFNNT

SEQ ID NO: 85314 - protein, 10 aa, synthetic construct
QGQRGDFNNL

SEQ ID NO: 85315 - protein, 10 aa, synthetic construct
QGDRGDFNNT

SEQ ID NO: 85316 - protein, 10 aa, synthetic construct
QGDRGDFNNL

SEQ ID NO: 85317 - protein, 10 aa, synthetic construct
NAPRGDRQGI

SEQ ID NO: 85318 - protein, 10 aa, synthetic construct
QGERGDFNNT

SEQ ID NO: 85319 - protein, 10 aa, synthetic construct
QGERGDFNNL

SEQ ID NO: 85320 - protein, 10 aa, synthetic construct
QAVRGDFNNT

SEQ ID NO: 85321 - protein, 10 aa, synthetic construct
QAVRGDFNNL

SEQ ID NO: 85322 - protein, 10 aa, synthetic construct
QALRGDFNNT

SEQ ID NO: 85323 - protein, 10 aa, synthetic construct
QALRGDFNNL

SEQ ID NO: 85324 - protein, 10 aa, synthetic construct
QAIRGDYNSL

SEQ ID NO: 85325 - protein, 10 aa, synthetic construct
QAIRGDYTSM

SEQ ID NO: 85326 - protein, 10 aa, synthetic construct
QAIRGDFQNT

SEQ ID NO: 85327 - protein, 10 aa, synthetic construct
QAMRGDYNSL

SEQ ID NO: 85328 - protein, 10 aa, synthetic construct
NAPRGDRSVV

SEQ ID NO: 85329 - protein, 10 aa, synthetic construct
QAMRGDYTSM

SEQ ID NO: 85330 - protein, 10 aa, synthetic construct
QAMRGDFQNT

SEQ ID NO: 85331 - protein, 10 aa, synthetic construct
QAWRGDFNNT

SEQ ID NO: 85332 - protein, 10 aa, synthetic construct
QAWRGDFNNL

SEQ ID NO: 85333 - protein, 10 aa, synthetic construct
QAFRGDYNSL

SEQ ID NO: 85334 - protein, 10 aa, synthetic construct
QAFRGDYTSM

SEQ ID NO: 85335 - protein, 10 aa, synthetic construct
QAFRGDFQNT

SEQ ID NO: 85336 - protein, 10 aa, synthetic construct
QAKRGDYNSL

SEQ ID NO: 85337 - protein, 10 aa, synthetic construct
QAKRGDYTSM

SEQ ID NO: 85338 - protein, 10 aa, synthetic construct
QAKRGDFQNT

SEQ ID NO: 85339 - protein, 10 aa, synthetic construct
NAPRGDRGVV

SEQ ID NO: 85340 - protein, 10 aa, synthetic construct
QAHRGDFNNT

SEQ ID NO: 85341 - protein, 10 aa, synthetic construct
QAHRGDFNNL

SEQ ID NO: 85342 - protein, 10 aa, synthetic construct
QASRGDFNNT

SEQ ID NO: 85343 - protein, 10 aa, synthetic construct
QASRGDFNNL

SEQ ID NO: 85344 - protein, 10 aa, synthetic construct
QATRGDFNNT

SEQ ID NO: 85345 - protein, 10 aa, synthetic construct
QATRGDFNNL

SEQ ID NO: 85346 - protein, 10 aa, synthetic construct
QAYRGDYNSL

SEQ ID NO: 85347 - protein, 10 aa, synthetic construct
QAYRGDYTSM

SEQ ID NO: 85348 - protein, 10 aa, synthetic construct
QAYRGDFQNT

SEQ ID NO: 85349 - protein, 10 aa, synthetic construct
QANRGDYNSL

SEQ ID NO: 85350 - protein, 10 aa, synthetic construct
NAPRGDRSQT

SEQ ID NO: 85351 - protein, 10 aa, synthetic construct
QANRGDYTSM

SEQ ID NO: 85352 - protein, 10 aa, synthetic construct
QANRGDFQNT

SEQ ID NO: 85353 - protein, 10 aa, synthetic construct
QAQRGDFNNT

SEQ ID NO: 85354 - protein, 10 aa, synthetic construct
QAQRGDFNNL

SEQ ID NO: 85355 - protein, 10 aa, synthetic construct
QADRGDFNNT

SEQ ID NO: 85356 - protein, 10 aa, synthetic construct
QADRGDFNNL

SEQ ID NO: 85357 - protein, 10 aa, synthetic construct
QAERGDFNNT

SEQ ID NO: 85358 - protein, 10 aa, synthetic construct
QAERGDFNNL

SEQ ID NO: 85359 - protein, 10 aa, synthetic construct
QVVRGDFNNT

SEQ ID NO: 85360 - protein, 10 aa, synthetic construct
QVVRGDFNNL

SEQ ID NO: 85361 - protein, 10 aa, synthetic construct
NARRGDRGQI

SEQ ID NO: 85362 - protein, 10 aa, synthetic construct
QVLRGDFNNT

SEQ ID NO: 85363 - protein, 10 aa, synthetic construct
QVLRGDFNNL

SEQ ID NO: 85364 - protein, 10 aa, synthetic construct
QVIRGDYNSL

SEQ ID NO: 85365 - protein, 10 aa, synthetic construct
QVIRGDYTSM

SEQ ID NO: 85366 - protein, 10 aa, synthetic construct
QVIRGDFQNT

SEQ ID NO: 85367 - protein, 10 aa, synthetic construct
QVMRGDYNSL

SEQ ID NO: 85368 - protein, 10 aa, synthetic construct
QVMRGDYTSM

SEQ ID NO: 85369 - protein, 10 aa, synthetic construct
QVMRGDFQNT

SEQ ID NO: 85370 - protein, 10 aa, synthetic construct
QVWRGDFNNT

SEQ ID NO: 85371 - protein, 10 aa, synthetic construct
QVWRGDFNNL

SEQ ID NO: 85372 - protein, 10 aa, synthetic construct
NARRGDRQGI

SEQ ID NO: 85373 - protein, 10 aa, synthetic construct
QVFRGDYNSL

SEQ ID NO: 85374 - protein, 10 aa, synthetic construct
QVFRGDYTSM

SEQ ID NO: 85375 - protein, 10 aa, synthetic construct
QVFRGDFQNT

SEQ ID NO: 85376 - protein, 10 aa, synthetic construct
QVKRGDYNSL

SEQ ID NO: 85377 - protein, 10 aa, synthetic construct
QVKRGDYTSM

SEQ ID NO: 85378 - protein, 10 aa, synthetic construct
QVKRGDFQNT

SEQ ID NO: 85379 - protein, 10 aa, synthetic construct
QVHRGDFNNT

SEQ ID NO: 85380 - protein, 10 aa, synthetic construct
QVHRGDFNNL

SEQ ID NO: 85381 - protein, 10 aa, synthetic construct
QVSRGDFNNT

SEQ ID NO: 85382 - protein, 10 aa, synthetic construct
QVSRGDFNNL

SEQ ID NO: 85383 - protein, 10 aa, synthetic construct
NARRGDRSVV

SEQ ID NO: 85384 - protein, 10 aa, synthetic construct
QVTRGDFNNT

SEQ ID NO: 85385 - protein, 10 aa, synthetic construct
QVTRGDFNNL

SEQ ID NO: 85386 - protein, 10 aa, synthetic construct
QVYRGDYNSL

SEQ ID NO: 85387 - protein, 10 aa, synthetic construct
QVYRGDYTSM

SEQ ID NO: 85388 - protein, 10 aa, synthetic construct
QVYRGDFQNT

SEQ ID NO: 85389 - protein, 10 aa, synthetic construct
QVNRGDYNSL

SEQ ID NO: 85390 - protein, 10 aa, synthetic construct
QVNRGDYTSM

SEQ ID NO: 85391 - protein, 10 aa, synthetic construct
QVNRGDFQNT

SEQ ID NO: 85392 - protein, 10 aa, synthetic construct
QVQRGDFNNT

SEQ ID NO: 85393 - protein, 10 aa, synthetic construct
QVQRGDFNNL

SEQ ID NO: 85394 - protein, 10 aa, synthetic construct
NARRGDRGVV

SEQ ID NO: 85395 - protein, 10 aa, synthetic construct
QVDRGDFNNT

SEQ ID NO: 85396 - protein, 10 aa, synthetic construct
QVDRGDFNNL

SEQ ID NO: 85397 - protein, 10 aa, synthetic construct
QVERGDFNNT

SEQ ID NO: 85398 - protein, 10 aa, synthetic construct
QVERGDFNNL

SEQ ID NO: 85399 - protein, 10 aa, synthetic construct
QPVRGDFNNT

SEQ ID NO: 85400 - protein, 10 aa, synthetic construct
QPVRGDFNNL

SEQ ID NO: 85401 - protein, 10 aa, synthetic construct
QPLRGDFNNT

SEQ ID NO: 85402 - protein, 10 aa, synthetic construct
QPLRGDFNNL

SEQ ID NO: 85403 - protein, 10 aa, synthetic construct
QPIRGDYNSL

SEQ ID NO: 85404 - protein, 10 aa, synthetic construct
QPIRGDYTSM

SEQ ID NO: 85405 - protein, 10 aa, synthetic construct
QFFRGDLLLS

SEQ ID NO: 85406 - protein, 10 aa, synthetic construct
NARRGDRSQT

SEQ ID NO: 85407 - protein, 10 aa, synthetic construct
QPIRGDFQNT

SEQ ID NO: 85408 - protein, 10 aa, synthetic construct
QPMRGDYNSL

SEQ ID NO: 85409 - protein, 10 aa, synthetic construct
QPMRGDYTSM

SEQ ID NO: 85410 - protein, 10 aa, synthetic construct
QPMRGDFQNT

SEQ ID NO: 85411 - protein, 10 aa, synthetic construct
QPWRGDFNNT

SEQ ID NO: 85412 - protein, 10 aa, synthetic construct
QPWRGDFNNL

SEQ ID NO: 85413 - protein, 10 aa, synthetic construct
QPFRGDYNSL

SEQ ID NO: 85414 - protein, 10 aa, synthetic construct
QPFRGDYTSM

SEQ ID NO: 85415 - protein, 10 aa, synthetic construct
QPFRGDFQNT

SEQ ID NO: 85416 - protein, 10 aa, synthetic construct
QPKRGDYNSL

SEQ ID NO: 85417 - protein, 10 aa, synthetic construct
NVGRGDRGQI

SEQ ID NO: 85418 - protein, 10 aa, synthetic construct
QPKRGDYTSM

SEQ ID NO: 85419 - protein, 10 aa, synthetic construct
QPKRGDFQNT

SEQ ID NO: 85420 - protein, 10 aa, synthetic construct
QPHRGDFNNT

SEQ ID NO: 85421 - protein, 10 aa, synthetic construct
QPHRGDFNNL

SEQ ID NO: 85422 - protein, 10 aa, synthetic construct
QPSRGDFNNT

SEQ ID NO: 85423 - protein, 10 aa, synthetic construct
QPSRGDFNNL

SEQ ID NO: 85424 - protein, 10 aa, synthetic construct
QPTRGDFNNT

SEQ ID NO: 85425 - protein, 10 aa, synthetic construct
QPTRGDFNNL

SEQ ID NO: 85426 - protein, 10 aa, synthetic construct
QPYRGDYNSL

SEQ ID NO: 85427 - protein, 10 aa, synthetic construct
QPYRGDYTSM

SEQ ID NO: 85428 - protein, 10 aa, synthetic construct
NVGRGDRQGI

SEQ ID NO: 85429 - protein, 10 aa, synthetic construct
QPYRGDFQNT

SEQ ID NO: 85430 - protein, 10 aa, synthetic construct
QPNRGDYNSL

SEQ ID NO: 85431 - protein, 10 aa, synthetic construct
QPNRGDYTSM

SEQ ID NO: 85432 - protein, 10 aa, synthetic construct
QPNRGDFQNT

SEQ ID NO: 85433 - protein, 10 aa, synthetic construct
QPQRGDFNNT

SEQ ID NO: 85434 - protein, 10 aa, synthetic construct
QPQRGDFNNL

SEQ ID NO: 85435 - protein, 10 aa, synthetic construct
QPDRGDFNNT

SEQ ID NO: 85436 - protein, 10 aa, synthetic construct
QPDRGDFNNL

SEQ ID NO: 85437 - protein, 10 aa, synthetic construct
QPERGDFNNT

SEQ ID NO: 85438 - protein, 10 aa, synthetic construct
QPERGDFNNL

SEQ ID NO: 85439 - protein, 10 aa, synthetic construct
NVGRGDRSVV

SEQ ID NO: 85440 - protein, 10 aa, synthetic construct
QLVRGDFNNT

SEQ ID NO: 85441 - protein, 10 aa, synthetic construct
QLVRGDFNNL

SEQ ID NO: 85442 - protein, 10 aa, synthetic construct
QLLRGDFNNT

SEQ ID NO: 85443 - protein, 10 aa, synthetic construct
QLLRGDFNNL

SEQ ID NO: 85444 - protein, 10 aa, synthetic construct
QLIRGDYNSL

SEQ ID NO: 85445 - protein, 10 aa, synthetic construct
QLIRGDYTSM

SEQ ID NO: 85446 - protein, 10 aa, synthetic construct
QLIRGDFQNT

SEQ ID NO: 85447 - protein, 10 aa, synthetic construct
QLMRGDYNSL

SEQ ID NO: 85448 - protein, 10 aa, synthetic construct
QLMRGDYTSM

SEQ ID NO: 85449 - protein, 10 aa, synthetic construct
QLMRGDFQNT

SEQ ID NO: 85450 - protein, 10 aa, synthetic construct
NVGRGDRGVV

SEQ ID NO: 85451 - protein, 10 aa, synthetic construct
QLWRGDFNNT

SEQ ID NO: 85452 - protein, 10 aa, synthetic construct
QLWRGDFNNL

SEQ ID NO: 85453 - protein, 10 aa, synthetic construct
QLFRGDYNSL

SEQ ID NO: 85454 - protein, 10 aa, synthetic construct
QLFRGDYTSM

SEQ ID NO: 85455 - protein, 10 aa, synthetic construct
QLFRGDFQNT

SEQ ID NO: 85456 - protein, 10 aa, synthetic construct
QLKRGDYNSL

SEQ ID NO: 85457 - protein, 10 aa, synthetic construct
QLKRGDYTSM

SEQ ID NO: 85458 - protein, 10 aa, synthetic construct
QLKRGDFQNT

SEQ ID NO: 85459 - protein, 10 aa, synthetic construct
QLHRGDFNNT

SEQ ID NO: 85460 - protein, 10 aa, synthetic construct
QLHRGDFNNL

SEQ ID NO: 85461 - protein, 10 aa, synthetic construct
NVGRGDRSQT

SEQ ID NO: 85462 - protein, 10 aa, synthetic construct
QLSRGDFNNT

SEQ ID NO: 85463 - protein, 10 aa, synthetic construct
QLSRGDFNNL

SEQ ID NO: 85464 - protein, 10 aa, synthetic construct
QLTRGDFNNT

SEQ ID NO: 85465 - protein, 10 aa, synthetic construct
QLTRGDFNNL

SEQ ID NO: 85466 - protein, 10 aa, synthetic construct
QLYRGDYNSL

SEQ ID NO: 85467 - protein, 10 aa, synthetic construct
QLYRGDYTSM

SEQ ID NO: 85468 - protein, 10 aa, synthetic construct
QLYRGDFQNT

SEQ ID NO: 85469 - protein, 10 aa, synthetic construct
QLNRGDYNSL

SEQ ID NO: 85470 - protein, 10 aa, synthetic construct
QLNRGDYTSM

SEQ ID NO: 85471 - protein, 10 aa, synthetic construct
QLNRGDFQNT

SEQ ID NO: 85472 - protein, 10 aa, synthetic construct
NVARGDRGQI

SEQ ID NO: 85473 - protein, 10 aa, synthetic construct
QLQRGDFNNT

SEQ ID NO: 85474 - protein, 10 aa, synthetic construct
QLQRGDFNNL

SEQ ID NO: 85475 - protein, 10 aa, synthetic construct
QLDRGDFNNT

SEQ ID NO: 85476 - protein, 10 aa, synthetic construct
QLDRGDFNNL

SEQ ID NO: 85477 - protein, 10 aa, synthetic construct
QLERGDFNNT

SEQ ID NO: 85478 - protein, 10 aa, synthetic construct
QLERGDFNNL

SEQ ID NO: 85479 - protein, 10 aa, synthetic construct
QIGRGDYNSL

SEQ ID NO: 85480 - protein, 10 aa, synthetic construct
QIGRGDYTSM

SEQ ID NO: 85481 - protein, 10 aa, synthetic construct
QIGRGDFQNT

SEQ ID NO: 85482 - protein, 10 aa, synthetic construct
QIARGDYNSL

SEQ ID NO: 85483 - protein, 10 aa, synthetic construct
NVARGDRQGI

SEQ ID NO: 85484 - protein, 10 aa, synthetic construct
QIARGDYTSM

SEQ ID NO: 85485 - protein, 10 aa, synthetic construct
QIARGDFQNT

SEQ ID NO: 85486 - protein, 10 aa, synthetic construct
QIVRGDYTSV

SEQ ID NO: 85487 - protein, 10 aa, synthetic construct
QIVRGDLIGR

SEQ ID NO: 85488 - protein, 10 aa, synthetic construct
QIPRGDYNSL

SEQ ID NO: 85489 - protein, 10 aa, synthetic construct
QIPRGDYTSM

SEQ ID NO: 85490 - protein, 10 aa, synthetic construct
QIPRGDFQNT

SEQ ID NO: 85491 - protein, 10 aa, synthetic construct
QILRGDYTSV

SEQ ID NO: 85492 - protein, 10 aa, synthetic construct
QILRGDLIGR

SEQ ID NO: 85493 - protein, 10 aa, synthetic construct
QIIRGDHVNL

SEQ ID NO: 85494 - protein, 10 aa, synthetic construct
NVARGDRSVV

SEQ ID NO: 85495 - protein, 10 aa, synthetic construct
QIIRGDRDYL

SEQ ID NO: 85496 - protein, 10 aa, synthetic construct
QIIRGDYSSV

SEQ ID NO: 85497 - protein, 10 aa, synthetic construct
QIIRGDLTVT

SEQ ID NO: 85498 - protein, 10 aa, synthetic construct
QIMRGDHVNL

SEQ ID NO: 85499 - protein, 10 aa, synthetic construct
QIMRGDRDYL

SEQ ID NO: 85500 - protein, 10 aa, synthetic construct
QIMRGDYSSV

SEQ ID NO: 85501 - protein, 10 aa, synthetic construct
QIMRGDLTVT

SEQ ID NO: 85502 - protein, 10 aa, synthetic construct
QIWRGDYTSV

SEQ ID NO: 85503 - protein, 10 aa, synthetic construct
QIWRGDLIGR

SEQ ID NO: 85504 - protein, 10 aa, synthetic construct
QIFRGDHVNL

SEQ ID NO: 85505 - protein, 10 aa, synthetic construct
NVARGDRGVV

SEQ ID NO: 85506 - protein, 10 aa, synthetic construct
QIFRGDRDYL

SEQ ID NO: 85507 - protein, 10 aa, synthetic construct
QIFRGDYSSV

SEQ ID NO: 85508 - protein, 10 aa, synthetic construct
QIFRGDLTVT

SEQ ID NO: 85509 - protein, 10 aa, synthetic construct
QIKRGDHVNL

SEQ ID NO: 85510 - protein, 10 aa, synthetic construct
QIKRGDRDYL

SEQ ID NO: 85511 - protein, 10 aa, synthetic construct
QIKRGDYSSV

SEQ ID NO: 85512 - protein, 10 aa, synthetic construct
QIKRGDLTVT

SEQ ID NO: 85513 - protein, 10 aa, synthetic construct
QIRRGDYNSL

SEQ ID NO: 85514 - protein, 10 aa, synthetic construct
QIRRGDYTSM

SEQ ID NO: 85515 - protein, 10 aa, synthetic construct
QIRRGDFQNT

SEQ ID NO: 85516 - protein, 10 aa, synthetic construct
SFFRGDHVNL

SEQ ID NO: 85517 - protein, 10 aa, synthetic construct
NVARGDRSQT

SEQ ID NO: 85518 - protein, 10 aa, synthetic construct
QIHRGDYTSV

SEQ ID NO: 85519 - protein, 10 aa, synthetic construct
QIHRGDLIGR

SEQ ID NO: 85520 - protein, 10 aa, synthetic construct
QISRGDYTSV

SEQ ID NO: 85521 - protein, 10 aa, synthetic construct
QISRGDLIGR

SEQ ID NO: 85522 - protein, 10 aa, synthetic construct
QITRGDYTSV

SEQ ID NO: 85523 - protein, 10 aa, synthetic construct
QITRGDLIGR

SEQ ID NO: 85524 - protein, 10 aa, synthetic construct
QIYRGDHVNL

SEQ ID NO: 85525 - protein, 10 aa, synthetic construct
QIYRGDRDYL

SEQ ID NO: 85526 - protein, 10 aa, synthetic construct
QIYRGDYSSV

SEQ ID NO: 85527 - protein, 10 aa, synthetic construct
QIYRGDLTVT

SEQ ID NO: 85528 - protein, 10 aa, synthetic construct
NVPRGDRGQI

SEQ ID NO: 85529 - protein, 10 aa, synthetic construct
QINRGDHVNL

SEQ ID NO: 85530 - protein, 10 aa, synthetic construct
QINRGDRDYL

SEQ ID NO: 85531 - protein, 10 aa, synthetic construct
QINRGDYSSV

SEQ ID NO: 85532 - protein, 10 aa, synthetic construct
QINRGDLTVT

SEQ ID NO: 85533 - protein, 10 aa, synthetic construct
QIQRGDYTSV

SEQ ID NO: 85534 - protein, 10 aa, synthetic construct
QIQRGDLIGR

SEQ ID NO: 85535 - protein, 10 aa, synthetic construct
QIDRGDYTSV

SEQ ID NO: 85536 - protein, 10 aa, synthetic construct
QIDRGDLIGR

SEQ ID NO: 85537 - protein, 10 aa, synthetic construct
QIERGDYTSV

SEQ ID NO: 85538 - protein, 10 aa, synthetic construct
QIERGDLIGR

SEQ ID NO: 85539 - protein, 10 aa, synthetic construct
NVPRGDRQGI

SEQ ID NO: 85540 - protein, 10 aa, synthetic construct
QMGRGDFQNT

SEQ ID NO: 85541 - protein, 10 aa, synthetic construct
QMARGDFQNT

SEQ ID NO: 85542 - protein, 10 aa, synthetic construct
QMVRGDFQNT

SEQ ID NO: 85543 - protein, 10 aa, synthetic construct
QMPRGDFQNT

SEQ ID NO: 85544 - protein, 10 aa, synthetic construct
QMLRGDFQNT

SEQ ID NO: 85545 - protein, 10 aa, synthetic construct
QMIRGDRDYL

SEQ ID NO: 85546 - protein, 10 aa, synthetic construct
QMIRGDYVGL

SEQ ID NO: 85547 - protein, 10 aa, synthetic construct
QMIRGDYSSV

SEQ ID NO: 85548 - protein, 10 aa, synthetic construct
QMIRGDYTSV

SEQ ID NO: 85549 - protein, 10 aa, synthetic construct
QMIRGDQSTL

SEQ ID NO: 85550 - protein, 10 aa, synthetic construct
NVPRGDRSVV

SEQ ID NO: 85551 - protein, 10 aa, synthetic construct
QMMRGDYTSV

SEQ ID NO: 85552 - protein, 10 aa, synthetic construct
QMWRGDYNSL

SEQ ID NO: 85553 - protein, 10 aa, synthetic construct
QMWRGDYTSM

SEQ ID NO: 85554 - protein, 10 aa, synthetic construct
QMWRGDFQNT

SEQ ID NO: 85555 - protein, 10 aa, synthetic construct
QMFRGDRDYL

SEQ ID NO: 85556 - protein, 10 aa, synthetic construct
QMFRGDYVGL

SEQ ID NO: 85557 - protein, 10 aa, synthetic construct
QMFRGDYSSV

SEQ ID NO: 85558 - protein, 10 aa, synthetic construct
QMFRGDYTSV

SEQ ID NO: 85559 - protein, 10 aa, synthetic construct
QMFRGDQSTL

SEQ ID NO: 85560 - protein, 10 aa, synthetic construct
QMKRGDRDYL

SEQ ID NO: 85561 - protein, 10 aa, synthetic construct
NVPRGDRGVV

SEQ ID NO: 85562 - protein, 10 aa, synthetic construct
QMKRGDYVGL

SEQ ID NO: 85563 - protein, 10 aa, synthetic construct
QMKRGDYSSV

SEQ ID NO: 85564 - protein, 10 aa, synthetic construct
QMKRGDYTSV

SEQ ID NO: 85565 - protein, 10 aa, synthetic construct
QMKRGDQSTL

SEQ ID NO: 85566 - protein, 10 aa, synthetic construct
QMRRGDFQNT

SEQ ID NO: 85567 - protein, 10 aa, synthetic construct
QMHRGDHVNL

SEQ ID NO: 85568 - protein, 10 aa, synthetic construct
QMHRGDYNSL

SEQ ID NO: 85569 - protein, 10 aa, synthetic construct
QMHRGDYTSM

SEQ ID NO: 85570 - protein, 10 aa, synthetic construct
QMSRGDFQNT

SEQ ID NO: 85571 - protein, 10 aa, synthetic construct
QMTRGDHVNL

SEQ ID NO: 85572 - protein, 10 aa, synthetic construct
NVPRGDRSQT

SEQ ID NO: 85573 - protein, 10 aa, synthetic construct
QMTRGDYNSL

SEQ ID NO: 85574 - protein, 10 aa, synthetic construct
QMTRGDYTSM

SEQ ID NO: 85575 - protein, 10 aa, synthetic construct
QMYRGDRDYL

SEQ ID NO: 85576 - protein, 10 aa, synthetic construct
QMYRGDYVGL

SEQ ID NO: 85577 - protein, 10 aa, synthetic construct
QMYRGDYSSV

SEQ ID NO: 85578 - protein, 10 aa, synthetic construct
QMYRGDYTSV

SEQ ID NO: 85579 - protein, 10 aa, synthetic construct
QMYRGDQSTL

SEQ ID NO: 85580 - protein, 10 aa, synthetic construct
QMNRGDRDYL

SEQ ID NO: 85581 - protein, 10 aa, synthetic construct
QMNRGDYVGL

SEQ ID NO: 85582 - protein, 10 aa, synthetic construct
QMNRGDYSSV

SEQ ID NO: 85583 - protein, 10 aa, synthetic construct
NVRRGDRGQI

SEQ ID NO: 85584 - protein, 10 aa, synthetic construct
QMNRGDYTSV

SEQ ID NO: 85585 - protein, 10 aa, synthetic construct
QMNRGDQSTL

SEQ ID NO: 85586 - protein, 10 aa, synthetic construct
QMQRGDHVNL

SEQ ID NO: 85587 - protein, 10 aa, synthetic construct
QMQRGDYNSL

SEQ ID NO: 85588 - protein, 10 aa, synthetic construct
QMQRGDYTSM

SEQ ID NO: 85589 - protein, 10 aa, synthetic construct
QMDRGDHVNL

SEQ ID NO: 85590 - protein, 10 aa, synthetic construct
QMDRGDYNSL

SEQ ID NO: 85591 - protein, 10 aa, synthetic construct
QMDRGDYTSM

SEQ ID NO: 85592 - protein, 10 aa, synthetic construct
QMERGDHVNL

SEQ ID NO: 85593 - protein, 10 aa, synthetic construct
QMERGDYNSL

SEQ ID NO: 85594 - protein, 10 aa, synthetic construct
NVRRGDRQGI

SEQ ID NO: 85595 - protein, 10 aa, synthetic construct
QMERGDYTSM

SEQ ID NO: 85596 - protein, 10 aa, synthetic construct
QWGRGDFNNT

SEQ ID NO: 85597 - protein, 10 aa, synthetic construct
QWGRGDFNNL

SEQ ID NO: 85598 - protein, 10 aa, synthetic construct
QWARGDFNNT

SEQ ID NO: 85599 - protein, 10 aa, synthetic construct
QWARGDFNNL

SEQ ID NO: 85600 - protein, 10 aa, synthetic construct
QWVRGDFNNT

SEQ ID NO: 85601 - protein, 10 aa, synthetic construct
QWVRGDFNNL

SEQ ID NO: 85602 - protein, 10 aa, synthetic construct
QWPRGDFNNT

SEQ ID NO: 85603 - protein, 10 aa, synthetic construct
QWPRGDFNNL

SEQ ID NO: 85604 - protein, 10 aa, synthetic construct
QWLRGDFNNT

SEQ ID NO: 85605 - protein, 10 aa, synthetic construct
NVRRGDRSVV

SEQ ID NO: 85606 - protein, 10 aa, synthetic construct
QWLRGDFNNL

SEQ ID NO: 85607 - protein, 10 aa, synthetic construct
QWIRGDHVNL

SEQ ID NO: 85608 - protein, 10 aa, synthetic construct
QWIRGDYNSL

SEQ ID NO: 85609 - protein, 10 aa, synthetic construct
QWIRGDYTSM

SEQ ID NO: 85610 - protein, 10 aa, synthetic construct
QWMRGDYNSL

SEQ ID NO: 85611 - protein, 10 aa, synthetic construct
QWMRGDYTSM

SEQ ID NO: 85612 - protein, 10 aa, synthetic construct
QWMRGDFQNT

SEQ ID NO: 85613 - protein, 10 aa, synthetic construct
QWWRGDFNNT

SEQ ID NO: 85614 - protein, 10 aa, synthetic construct
QWWRGDFNNL

SEQ ID NO: 85615 - protein, 10 aa, synthetic construct
QWFRGDHVNL

SEQ ID NO: 85616 - protein, 10 aa, synthetic construct
NVRRGDRGVV

SEQ ID NO: 85617 - protein, 10 aa, synthetic construct
QWFRGDYNSL

SEQ ID NO: 85618 - protein, 10 aa, synthetic construct
QWFRGDYTSM

SEQ ID NO: 85619 - protein, 10 aa, synthetic construct
QWKRGDHVNL

SEQ ID NO: 85620 - protein, 10 aa, synthetic construct
QWKRGDYNSL

SEQ ID NO: 85621 - protein, 10 aa, synthetic construct
QWKRGDYTSM

SEQ ID NO: 85622 - protein, 10 aa, synthetic construct
QWRRGDFNNT

SEQ ID NO: 85623 - protein, 10 aa, synthetic construct
QWRRGDFNNL

SEQ ID NO: 85624 - protein, 10 aa, synthetic construct
QWHRGDFQNT

SEQ ID NO: 85625 - protein, 10 aa, synthetic construct
QWSRGDFNNT

SEQ ID NO: 85626 - protein, 10 aa, synthetic construct
QWSRGDFNNL

SEQ ID NO: 85627 - protein, 10 aa, synthetic construct
SFFRGDRDYL

SEQ ID NO: 85628 - protein, 10 aa, synthetic construct
NVRRGDRSQT

SEQ ID NO: 85629 - protein, 10 aa, synthetic construct
QWTRGDFQNT

SEQ ID NO: 85630 - protein, 10 aa, synthetic construct
QWYRGDHVNL

SEQ ID NO: 85631 - protein, 10 aa, synthetic construct
QWYRGDYNSL

SEQ ID NO: 85632 - protein, 10 aa, synthetic construct
QWYRGDYTSM

SEQ ID NO: 85633 - protein, 10 aa, synthetic construct
QWNRGDHVNL

SEQ ID NO: 85634 - protein, 10 aa, synthetic construct
QWNRGDYNSL

SEQ ID NO: 85635 - protein, 10 aa, synthetic construct
QWNRGDYTSM

SEQ ID NO: 85636 - protein, 10 aa, synthetic construct
QWQRGDFQNT

SEQ ID NO: 85637 - protein, 10 aa, synthetic construct
QWDRGDFQNT

SEQ ID NO: 85638 - protein, 10 aa, synthetic construct
QWERGDFQNT

SEQ ID NO: 85639 - protein, 10 aa, synthetic construct
NPGRGDRGQI

SEQ ID NO: 85640 - protein, 10 aa, synthetic construct
QFGRGDYNSL

SEQ ID NO: 85641 - protein, 10 aa, synthetic construct
QFGRGDYTSM

SEQ ID NO: 85642 - protein, 10 aa, synthetic construct
QFGRGDFQNT

SEQ ID NO: 85643 - protein, 10 aa, synthetic construct
QFARGDYNSL

SEQ ID NO: 85644 - protein, 10 aa, synthetic construct
QFARGDYTSM

SEQ ID NO: 85645 - protein, 10 aa, synthetic construct
QFARGDFQNT

SEQ ID NO: 85646 - protein, 10 aa, synthetic construct
QFVRGDYTSV

SEQ ID NO: 85647 - protein, 10 aa, synthetic construct
QFVRGDLIGR

SEQ ID NO: 85648 - protein, 10 aa, synthetic construct
QFPRGDYNSL

SEQ ID NO: 85649 - protein, 10 aa, synthetic construct
QFPRGDYTSM

SEQ ID NO: 85650 - protein, 10 aa, synthetic construct
NPGRGDRQGI

SEQ ID NO: 85651 - protein, 10 aa, synthetic construct
QFPRGDFQNT

SEQ ID NO: 85652 - protein, 10 aa, synthetic construct
QFLRGDYTSV

SEQ ID NO: 85653 - protein, 10 aa, synthetic construct
QFLRGDLIGR

SEQ ID NO: 85654 - protein, 10 aa, synthetic construct
QFIRGDHVNL

SEQ ID NO: 85655 - protein, 10 aa, synthetic construct
QFIRGDRDYL

SEQ ID NO: 85656 - protein, 10 aa, synthetic construct
QFIRGDYSSV

SEQ ID NO: 85657 - protein, 10 aa, synthetic construct
QFIRGDLTVT

SEQ ID NO: 85658 - protein, 10 aa, synthetic construct
QFMRGDHVNL

SEQ ID NO: 85659 - protein, 10 aa, synthetic construct
QFMRGDRDYL

SEQ ID NO: 85660 - protein, 10 aa, synthetic construct
QFMRGDYSSV

SEQ ID NO: 85661 - protein, 10 aa, synthetic construct
NPGRGDRSVV

SEQ ID NO: 85662 - protein, 10 aa, synthetic construct
QFMRGDLTVT

SEQ ID NO: 85663 - protein, 10 aa, synthetic construct
QFWRGDYTSV

SEQ ID NO: 85664 - protein, 10 aa, synthetic construct
QFWRGDLIGR

SEQ ID NO: 85665 - protein, 10 aa, synthetic construct
QFKRGDHVNL

SEQ ID NO: 85666 - protein, 10 aa, synthetic construct
QFKRGDRDYL

SEQ ID NO: 85667 - protein, 10 aa, synthetic construct
QFKRGDYSSV

SEQ ID NO: 85668 - protein, 10 aa, synthetic construct
QFKRGDLTVT

SEQ ID NO: 85669 - protein, 10 aa, synthetic construct
QFRRGDYNSL

SEQ ID NO: 85670 - protein, 10 aa, synthetic construct
QFRRGDYTSM

SEQ ID NO: 85671 - protein, 10 aa, synthetic construct
QFRRGDFQNT

SEQ ID NO: 85672 - protein, 10 aa, synthetic construct
NPGRGDRGVV

SEQ ID NO: 85673 - protein, 10 aa, synthetic construct
QFHRGDYTSV

SEQ ID NO: 85674 - protein, 10 aa, synthetic construct
QFHRGDLIGR

SEQ ID NO: 85675 - protein, 10 aa, synthetic construct
QFSRGDYTSV

SEQ ID NO: 85676 - protein, 10 aa, synthetic construct
QFSRGDLIGR

SEQ ID NO: 85677 - protein, 10 aa, synthetic construct
QFTRGDYTSV

SEQ ID NO: 85678 - protein, 10 aa, synthetic construct
QFTRGDLIGR

SEQ ID NO: 85679 - protein, 10 aa, synthetic construct
QFYRGDHVNL

SEQ ID NO: 85680 - protein, 10 aa, synthetic construct
QFYRGDRDYL

SEQ ID NO: 85681 - protein, 10 aa, synthetic construct
QFYRGDYSSV

SEQ ID NO: 85682 - protein, 10 aa, synthetic construct
QFYRGDLTVT

SEQ ID NO: 85683 - protein, 10 aa, synthetic construct
NPGRGDRSQT

SEQ ID NO: 85684 - protein, 10 aa, synthetic construct
QFNRGDHVNL

SEQ ID NO: 85685 - protein, 10 aa, synthetic construct
QFNRGDRDYL

SEQ ID NO: 85686 - protein, 10 aa, synthetic construct
QFNRGDYSSV

SEQ ID NO: 85687 - protein, 10 aa, synthetic construct
QFNRGDLTVT

SEQ ID NO: 85688 - protein, 10 aa, synthetic construct
QFQRGDYTSV

SEQ ID NO: 85689 - protein, 10 aa, synthetic construct
QFQRGDLIGR

SEQ ID NO: 85690 - protein, 10 aa, synthetic construct
QFDRGDYTSV

SEQ ID NO: 85691 - protein, 10 aa, synthetic construct
QFDRGDLIGR

SEQ ID NO: 85692 - protein, 10 aa, synthetic construct
QFERGDYTSV

SEQ ID NO: 85693 - protein, 10 aa, synthetic construct
QFERGDLIGR

SEQ ID NO: 85694 - protein, 10 aa, synthetic construct
NPARGDRGQI

SEQ ID NO: 85695 - protein, 10 aa, synthetic construct
QKGRGDYNSL

SEQ ID NO: 85696 - protein, 10 aa, synthetic construct
QKGRGDYTSM

SEQ ID NO: 85697 - protein, 10 aa, synthetic construct
QKGRGDFQNT

SEQ ID NO: 85698 - protein, 10 aa, synthetic construct
QKARGDYNSL

SEQ ID NO: 85699 - protein, 10 aa, synthetic construct
QKARGDYTSM

SEQ ID NO: 85700 - protein, 10 aa, synthetic construct
QKARGDFQNT

SEQ ID NO: 85701 - protein, 10 aa, synthetic construct
QKVRGDYTSV

SEQ ID NO: 85702 - protein, 10 aa, synthetic construct
QKVRGDLIGR

SEQ ID NO: 85703 - protein, 10 aa, synthetic construct
QKPRGDYNSL

SEQ ID NO: 85704 - protein, 10 aa, synthetic construct
QKPRGDYTSM

SEQ ID NO: 85705 - protein, 10 aa, synthetic construct
NPARGDRQGI

SEQ ID NO: 85706 - protein, 10 aa, synthetic construct
QKPRGDFQNT

SEQ ID NO: 85707 - protein, 10 aa, synthetic construct
QKLRGDYTSV

SEQ ID NO: 85708 - protein, 10 aa, synthetic construct
QKLRGDLIGR

SEQ ID NO: 85709 - protein, 10 aa, synthetic construct
QKIRGDHVNL

SEQ ID NO: 85710 - protein, 10 aa, synthetic construct
QKIRGDRDYL

SEQ ID NO: 85711 - protein, 10 aa, synthetic construct
QKIRGDYSSV

SEQ ID NO: 85712 - protein, 10 aa, synthetic construct
QKIRGDLTVT

SEQ ID NO: 85713 - protein, 10 aa, synthetic construct
QKMRGDHVNL

SEQ ID NO: 85714 - protein, 10 aa, synthetic construct
QKMRGDRDYL

SEQ ID NO: 85715 - protein, 10 aa, synthetic construct
QKMRGDYSSV

SEQ ID NO: 85716 - protein, 10 aa, synthetic construct
NPARGDRSVV

SEQ ID NO: 85717 - protein, 10 aa, synthetic construct
QKMRGDLTVT

SEQ ID NO: 85718 - protein, 10 aa, synthetic construct
QKWRGDYTSV

SEQ ID NO: 85719 - protein, 10 aa, synthetic construct
QKWRGDLIGR

SEQ ID NO: 85720 - protein, 10 aa, synthetic construct
QKFRGDHVNL

SEQ ID NO: 85721 - protein, 10 aa, synthetic construct
QKFRGDRDYL

SEQ ID NO: 85722 - protein, 10 aa, synthetic construct
QKFRGDYSSV

SEQ ID NO: 85723 - protein, 10 aa, synthetic construct
QKFRGDLTVT

SEQ ID NO: 85724 - protein, 10 aa, synthetic construct
QKRRGDYNSL

SEQ ID NO: 85725 - protein, 10 aa, synthetic construct
QKRRGDYTSM

SEQ ID NO: 85726 - protein, 10 aa, synthetic construct
QKRRGDFQNT

SEQ ID NO: 85727 - protein, 10 aa, synthetic construct
NPARGDRGVV

SEQ ID NO: 85728 - protein, 10 aa, synthetic construct
QKHRGDYTSV

SEQ ID NO: 85729 - protein, 10 aa, synthetic construct
QKHRGDLIGR

SEQ ID NO: 85730 - protein, 10 aa, synthetic construct
QKSRGDYTSV

SEQ ID NO: 85731 - protein, 10 aa, synthetic construct
QKSRGDLIGR

SEQ ID NO: 85732 - protein, 10 aa, synthetic construct
QKTRGDYTSV

SEQ ID NO: 85733 - protein, 10 aa, synthetic construct
QKTRGDLIGR

SEQ ID NO: 85734 - protein, 10 aa, synthetic construct
QKYRGDHVNL

SEQ ID NO: 85735 - protein, 10 aa, synthetic construct
QKYRGDRDYL

SEQ ID NO: 85736 - protein, 10 aa, synthetic construct
QKYRGDYSSV

SEQ ID NO: 85737 - protein, 10 aa, synthetic construct
QKYRGDLTVT

SEQ ID NO: 85738 - protein, 10 aa, synthetic construct
SFFRGDYSSV

SEQ ID NO: 85739 - protein, 10 aa, synthetic construct
NPARGDRSQT

SEQ ID NO: 85740 - protein, 10 aa, synthetic construct
QKQRGDYTSV

SEQ ID NO: 85741 - protein, 10 aa, synthetic construct
QKQRGDLIGR

SEQ ID NO: 85742 - protein, 10 aa, synthetic construct
QKDRGDYTSV

SEQ ID NO: 85743 - protein, 10 aa, synthetic construct
QKDRGDLIGR

SEQ ID NO: 85744 - protein, 10 aa, synthetic construct
QKERGDYTSV

SEQ ID NO: 85745 - protein, 10 aa, synthetic construct
QKERGDLIGR

SEQ ID NO: 85746 - protein, 10 aa, synthetic construct
QRVRGDFNNT

SEQ ID NO: 85747 - protein, 10 aa, synthetic construct
QRVRGDFNNL

SEQ ID NO: 85748 - protein, 10 aa, synthetic construct
QRLRGDFNNT

SEQ ID NO: 85749 - protein, 10 aa, synthetic construct
QRLRGDFNNL

SEQ ID NO: 85750 - protein, 10 aa, synthetic construct
NPPRGDRGQI

SEQ ID NO: 85751 - protein, 10 aa, synthetic construct
QRIRGDYNSL

SEQ ID NO: 85752 - protein, 10 aa, synthetic construct
QRIRGDYTSM

SEQ ID NO: 85753 - protein, 10 aa, synthetic construct
QRIRGDFQNT

SEQ ID NO: 85754 - protein, 10 aa, synthetic construct
QRMRGDYNSL

SEQ ID NO: 85755 - protein, 10 aa, synthetic construct
QRMRGDYTSM

SEQ ID NO: 85756 - protein, 10 aa, synthetic construct
QRMRGDFQNT

SEQ ID NO: 85757 - protein, 10 aa, synthetic construct
QRWRGDFNNT

SEQ ID NO: 85758 - protein, 10 aa, synthetic construct
QRWRGDFNNL

SEQ ID NO: 85759 - protein, 10 aa, synthetic construct
QRFRGDYNSL

SEQ ID NO: 85760 - protein, 10 aa, synthetic construct
QRFRGDYTSM

SEQ ID NO: 85761 - protein, 10 aa, synthetic construct
NPPRGDRQGI

SEQ ID NO: 85762 - protein, 10 aa, synthetic construct
QRFRGDFQNT

SEQ ID NO: 85763 - protein, 10 aa, synthetic construct
QRKRGDYNSL

SEQ ID NO: 85764 - protein, 10 aa, synthetic construct
QRKRGDYTSM

SEQ ID NO: 85765 - protein, 10 aa, synthetic construct
QRKRGDFQNT

SEQ ID NO: 85766 - protein, 10 aa, synthetic construct
QRHRGDFNNT

SEQ ID NO: 85767 - protein, 10 aa, synthetic construct
QRHRGDFNNL

SEQ ID NO: 85768 - protein, 10 aa, synthetic construct
QRSRGDFNNT

SEQ ID NO: 85769 - protein, 10 aa, synthetic construct
QRSRGDFNNL

SEQ ID NO: 85770 - protein, 10 aa, synthetic construct
QRTRGDFNNT

SEQ ID NO: 85771 - protein, 10 aa, synthetic construct
QRTRGDFNNL

SEQ ID NO: 85772 - protein, 10 aa, synthetic construct
NPPRGDRSVV

SEQ ID NO: 85773 - protein, 10 aa, synthetic construct
QRYRGDYNSL

SEQ ID NO: 85774 - protein, 10 aa, synthetic construct
QRYRGDYTSM

SEQ ID NO: 85775 - protein, 10 aa, synthetic construct
QRYRGDFQNT

SEQ ID NO: 85776 - protein, 10 aa, synthetic construct
QRNRGDYNSL

SEQ ID NO: 85777 - protein, 10 aa, synthetic construct
QRNRGDYTSM

SEQ ID NO: 85778 - protein, 10 aa, synthetic construct
QRNRGDFQNT

SEQ ID NO: 85779 - protein, 10 aa, synthetic construct
QRQRGDFNNT

SEQ ID NO: 85780 - protein, 10 aa, synthetic construct
QRQRGDFNNL

SEQ ID NO: 85781 - protein, 10 aa, synthetic construct
QRDRGDFNNT

SEQ ID NO: 85782 - protein, 10 aa, synthetic construct
QRDRGDFNNL

SEQ ID NO: 85783 - protein, 10 aa, synthetic construct
NPPRGDRGVV

SEQ ID NO: 85784 - protein, 10 aa, synthetic construct
QRERGDFNNT

SEQ ID NO: 85785 - protein, 10 aa, synthetic construct
QRERGDFNNL

SEQ ID NO: 85786 - protein, 10 aa, synthetic construct
QHGRGDFNNT

SEQ ID NO: 85787 - protein, 10 aa, synthetic construct
QHGRGDFNNL

SEQ ID NO: 85788 - protein, 10 aa, synthetic construct
QHARGDFNNT

SEQ ID NO: 85789 - protein, 10 aa, synthetic construct
QHARGDFNNL

SEQ ID NO: 85790 - protein, 10 aa, synthetic construct
QHVRGDYNSL

SEQ ID NO: 85791 - protein, 10 aa, synthetic construct
QHVRGDYTSM

SEQ ID NO: 85792 - protein, 10 aa, synthetic construct
QHVRGDFQNT

SEQ ID NO: 85793 - protein, 10 aa, synthetic construct
QHPRGDFNNT

SEQ ID NO: 85794 - protein, 10 aa, synthetic construct
NPPRGDRSQT

SEQ ID NO: 85795 - protein, 10 aa, synthetic construct
QHPRGDFNNL

SEQ ID NO: 85796 - protein, 10 aa, synthetic construct
QHLRGDYNSL

SEQ ID NO: 85797 - protein, 10 aa, synthetic construct
QHLRGDYTSM

SEQ ID NO: 85798 - protein, 10 aa, synthetic construct
QHLRGDFQNT

SEQ ID NO: 85799 - protein, 10 aa, synthetic construct
QHIRGDYTSV

SEQ ID NO: 85800 - protein, 10 aa, synthetic construct
QHIRGDLIGR

SEQ ID NO: 85801 - protein, 10 aa, synthetic construct
QHMRGDYTSV

SEQ ID NO: 85802 - protein, 10 aa, synthetic construct
QHMRGDLIGR

SEQ ID NO: 85803 - protein, 10 aa, synthetic construct
QHWRGDYNSL

SEQ ID NO: 85804 - protein, 10 aa, synthetic construct
QHWRGDYTSM

SEQ ID NO: 85805 - protein, 10 aa, synthetic construct
NPRRGDRGQI

SEQ ID NO: 85806 - protein, 10 aa, synthetic construct
QHWRGDFQNT

SEQ ID NO: 85807 - protein, 10 aa, synthetic construct
QHFRGDYTSV

SEQ ID NO: 85808 - protein, 10 aa, synthetic construct
QHFRGDLIGR

SEQ ID NO: 85809 - protein, 10 aa, synthetic construct
QHKRGDYTSV

SEQ ID NO: 85810 - protein, 10 aa, synthetic construct
QHKRGDLIGR

SEQ ID NO: 85811 - protein, 10 aa, synthetic construct
QHRRGDFNNT

SEQ ID NO: 85812 - protein, 10 aa, synthetic construct
QHRRGDFNNL

SEQ ID NO: 85813 - protein, 10 aa, synthetic construct
QHHRGDYNSL

SEQ ID NO: 85814 - protein, 10 aa, synthetic construct
QHHRGDYTSM

SEQ ID NO: 85815 - protein, 10 aa, synthetic construct
QHHRGDFQNT

SEQ ID NO: 85816 - protein, 10 aa, synthetic construct
NPRRGDRQGI

SEQ ID NO: 85817 - protein, 10 aa, synthetic construct
QHSRGDYNSL

SEQ ID NO: 85818 - protein, 10 aa, synthetic construct
QHSRGDYTSM

SEQ ID NO: 85819 - protein, 10 aa, synthetic construct
QHSRGDFQNT

SEQ ID NO: 85820 - protein, 10 aa, synthetic construct
QHTRGDYNSL

SEQ ID NO: 85821 - protein, 10 aa, synthetic construct
QHTRGDYTSM

SEQ ID NO: 85822 - protein, 10 aa, synthetic construct
QHTRGDFQNT

SEQ ID NO: 85823 - protein, 10 aa, synthetic construct
QHYRGDYTSV

SEQ ID NO: 85824 - protein, 10 aa, synthetic construct
QHYRGDLIGR

SEQ ID NO: 85825 - protein, 10 aa, synthetic construct
QHNRGDYTSV

SEQ ID NO: 85826 - protein, 10 aa, synthetic construct
QHNRGDLIGR

SEQ ID NO: 85827 - protein, 10 aa, synthetic construct
NPRRGDRSVV

SEQ ID NO: 85828 - protein, 10 aa, synthetic construct
QHQRGDYNSL

SEQ ID NO: 85829 - protein, 10 aa, synthetic construct
QHQRGDYTSM

SEQ ID NO: 85830 - protein, 10 aa, synthetic construct
QHQRGDFQNT

SEQ ID NO: 85831 - protein, 10 aa, synthetic construct
QHDRGDYNSL

SEQ ID NO: 85832 - protein, 10 aa, synthetic construct
QHDRGDYTSM

SEQ ID NO: 85833 - protein, 10 aa, synthetic construct
QHDRGDFQNT

SEQ ID NO: 85834 - protein, 10 aa, synthetic construct
QHERGDYNSL

SEQ ID NO: 85835 - protein, 10 aa, synthetic construct
QHERGDYTSM

SEQ ID NO: 85836 - protein, 10 aa, synthetic construct
QHERGDFQNT

SEQ ID NO: 85837 - protein, 10 aa, synthetic construct
QSVRGDFNNT

SEQ ID NO: 85838 - protein, 10 aa, synthetic construct
NPRRGDRGVV

SEQ ID NO: 85839 - protein, 10 aa, synthetic construct
QSVRGDFNNL

SEQ ID NO: 85840 - protein, 10 aa, synthetic construct
QSLRGDFNNT

SEQ ID NO: 85841 - protein, 10 aa, synthetic construct
QSLRGDFNNL

SEQ ID NO: 85842 - protein, 10 aa, synthetic construct
QSIRGDYNSL

SEQ ID NO: 85843 - protein, 10 aa, synthetic construct
QSIRGDYTSM

SEQ ID NO: 85844 - protein, 10 aa, synthetic construct
QSIRGDFQNT

SEQ ID NO: 85845 - protein, 10 aa, synthetic construct
QSMRGDYNSL

SEQ ID NO: 85846 - protein, 10 aa, synthetic construct
QSMRGDYTSM

SEQ ID NO: 85847 - protein, 10 aa, synthetic construct
QSMRGDFQNT

SEQ ID NO: 85848 - protein, 10 aa, synthetic construct
QSWRGDFNNT

SEQ ID NO: 85849 - protein, 10 aa, synthetic construct
SFFRGDLTVT

SEQ ID NO: 85850 - protein, 10 aa, synthetic construct
NPRRGDRSQT

SEQ ID NO: 85851 - protein, 10 aa, synthetic construct
QSWRGDFNNL

SEQ ID NO: 85852 - protein, 10 aa, synthetic construct
QSFRGDYNSL

SEQ ID NO: 85853 - protein, 10 aa, synthetic construct
QSFRGDYTSM

SEQ ID NO: 85854 - protein, 10 aa, synthetic construct
QSFRGDFQNT

SEQ ID NO: 85855 - protein, 10 aa, synthetic construct
QSKRGDYNSL

SEQ ID NO: 85856 - protein, 10 aa, synthetic construct
QSKRGDYTSM

SEQ ID NO: 85857 - protein, 10 aa, synthetic construct
QSKRGDFQNT

SEQ ID NO: 85858 - protein, 10 aa, synthetic construct
QSHRGDFNNT

SEQ ID NO: 85859 - protein, 10 aa, synthetic construct
QSHRGDFNNL

SEQ ID NO: 85860 - protein, 10 aa, synthetic construct
QSSRGDFNNT

SEQ ID NO: 85861 - protein, 10 aa, synthetic construct
NLGRGDRGQI

SEQ ID NO: 85862 - protein, 10 aa, synthetic construct
QSSRGDFNNL

SEQ ID NO: 85863 - protein, 10 aa, synthetic construct
QSTRGDFNNT

SEQ ID NO: 85864 - protein, 10 aa, synthetic construct
QSTRGDFNNL

SEQ ID NO: 85865 - protein, 10 aa, synthetic construct
QSYRGDYNSL

SEQ ID NO: 85866 - protein, 10 aa, synthetic construct
QSYRGDYTSM

SEQ ID NO: 85867 - protein, 10 aa, synthetic construct
QSYRGDFQNT

SEQ ID NO: 85868 - protein, 10 aa, synthetic construct
QSNRGDYNSL

SEQ ID NO: 85869 - protein, 10 aa, synthetic construct
QSNRGDYTSM

SEQ ID NO: 85870 - protein, 10 aa, synthetic construct
QSNRGDFQNT

SEQ ID NO: 85871 - protein, 10 aa, synthetic construct
QSQRGDFNNT

SEQ ID NO: 85872 - protein, 10 aa, synthetic construct
NLGRGDRQGI

SEQ ID NO: 85873 - protein, 10 aa, synthetic construct
QSQRGDFNNL

SEQ ID NO: 85874 - protein, 10 aa, synthetic construct
QSDRGDFNNT

SEQ ID NO: 85875 - protein, 10 aa, synthetic construct
QSDRGDFNNL

SEQ ID NO: 85876 - protein, 10 aa, synthetic construct
QSERGDFNNT

SEQ ID NO: 85877 - protein, 10 aa, synthetic construct
QSERGDFNNL

SEQ ID NO: 85878 - protein, 10 aa, synthetic construct
QTGRGDFNNT

SEQ ID NO: 85879 - protein, 10 aa, synthetic construct
QTGRGDFNNL

SEQ ID NO: 85880 - protein, 10 aa, synthetic construct
QTARGDFNNT

SEQ ID NO: 85881 - protein, 10 aa, synthetic construct
QTARGDFNNL

SEQ ID NO: 85882 - protein, 10 aa, synthetic construct
QTVRGDYNSL

SEQ ID NO: 85883 - protein, 10 aa, synthetic construct
NLGRGDRSVV

SEQ ID NO: 85884 - protein, 10 aa, synthetic construct
QTVRGDYTSM

SEQ ID NO: 85885 - protein, 10 aa, synthetic construct
QTVRGDFQNT

SEQ ID NO: 85886 - protein, 10 aa, synthetic construct
QTPRGDFNNT

SEQ ID NO: 85887 - protein, 10 aa, synthetic construct
QTPRGDFNNL

SEQ ID NO: 85888 - protein, 10 aa, synthetic construct
QTLRGDYNSL

SEQ ID NO: 85889 - protein, 10 aa, synthetic construct
QTLRGDYTSM

SEQ ID NO: 85890 - protein, 10 aa, synthetic construct
QTLRGDFQNT

SEQ ID NO: 85891 - protein, 10 aa, synthetic construct
QTIRGDYTSV

SEQ ID NO: 85892 - protein, 10 aa, synthetic construct
QTIRGDLIGR

SEQ ID NO: 85893 - protein, 10 aa, synthetic construct
QTMRGDYTSV

SEQ ID NO: 85894 - protein, 10 aa, synthetic construct
NLGRGDRGVV

SEQ ID NO: 85895 - protein, 10 aa, synthetic construct
QTMRGDLIGR

SEQ ID NO: 85896 - protein, 10 aa, synthetic construct
QTWRGDYNSL

SEQ ID NO: 85897 - protein, 10 aa, synthetic construct
QTWRGDYTSM

SEQ ID NO: 85898 - protein, 10 aa, synthetic construct
QTWRGDFQNT

SEQ ID NO: 85899 - protein, 10 aa, synthetic construct
QTFRGDYTSV

SEQ ID NO: 85900 - protein, 10 aa, synthetic construct
QTFRGDLIGR

SEQ ID NO: 85901 - protein, 10 aa, synthetic construct
QTKRGDYTSV

SEQ ID NO: 85902 - protein, 10 aa, synthetic construct
QTKRGDLIGR

SEQ ID NO: 85903 - protein, 10 aa, synthetic construct
QTRRGDFNNT

SEQ ID NO: 85904 - protein, 10 aa, synthetic construct
QTRRGDFNNL

SEQ ID NO: 85905 - protein, 10 aa, synthetic construct
NLGRGDRSQT

SEQ ID NO: 85906 - protein, 10 aa, synthetic construct
QTHRGDYNSL

SEQ ID NO: 85907 - protein, 10 aa, synthetic construct
QTHRGDYTSM

SEQ ID NO: 85908 - protein, 10 aa, synthetic construct
QTHRGDFQNT

SEQ ID NO: 85909 - protein, 10 aa, synthetic construct
QTSRGDYNSL

SEQ ID NO: 85910 - protein, 10 aa, synthetic construct
QTSRGDYTSM

SEQ ID NO: 85911 - protein, 10 aa, synthetic construct
QTSRGDFQNT

SEQ ID NO: 85912 - protein, 10 aa, synthetic construct
QTTRGDYNSL

SEQ ID NO: 85913 - protein, 10 aa, synthetic construct
QTTRGDYTSM

SEQ ID NO: 85914 - protein, 10 aa, synthetic construct
QTTRGDFQNT

SEQ ID NO: 85915 - protein, 10 aa, synthetic construct
QTYRGDYTSV

SEQ ID NO: 85916 - protein, 10 aa, synthetic construct
NLARGDRGQI

SEQ ID NO: 85917 - protein, 10 aa, synthetic construct
QTYRGDLIGR

SEQ ID NO: 85918 - protein, 10 aa, synthetic construct
QTNRGDYTSV

SEQ ID NO: 85919 - protein, 10 aa, synthetic construct
QTNRGDLIGR

SEQ ID NO: 85920 - protein, 10 aa, synthetic construct
QTQRGDYNSL

SEQ ID NO: 85921 - protein, 10 aa, synthetic construct
QTQRGDYTSM

SEQ ID NO: 85922 - protein, 10 aa, synthetic construct
QTQRGDFQNT

SEQ ID NO: 85923 - protein, 10 aa, synthetic construct
QTDRGDYNSL

SEQ ID NO: 85924 - protein, 10 aa, synthetic construct
QTDRGDYTSM

SEQ ID NO: 85925 - protein, 10 aa, synthetic construct
QTDRGDFQNT

SEQ ID NO: 85926 - protein, 10 aa, synthetic construct
QTERGDYNSL

SEQ ID NO: 85927 - protein, 10 aa, synthetic construct
NLARGDRQGI

SEQ ID NO: 85928 - protein, 10 aa, synthetic construct
QTERGDYTSM

SEQ ID NO: 85929 - protein, 10 aa, synthetic construct
QTERGDFQNT

SEQ ID NO: 85930 - protein, 10 aa, synthetic construct
QYGRGDYNSL

SEQ ID NO: 85931 - protein, 10 aa, synthetic construct
QYGRGDYTSM

SEQ ID NO: 85932 - protein, 10 aa, synthetic construct
QYGRGDFQNT

SEQ ID NO: 85933 - protein, 10 aa, synthetic construct
QYARGDYNSL

SEQ ID NO: 85934 - protein, 10 aa, synthetic construct
QYARGDYTSM

SEQ ID NO: 85935 - protein, 10 aa, synthetic construct
QYARGDFQNT

SEQ ID NO: 85936 - protein, 10 aa, synthetic construct
QYVRGDYTSV

SEQ ID NO: 85937 - protein, 10 aa, synthetic construct
QYVRGDLIGR

SEQ ID NO: 85938 - protein, 10 aa, synthetic construct
NLARGDRSVV

SEQ ID NO: 85939 - protein, 10 aa, synthetic construct
QYPRGDYNSL

SEQ ID NO: 85940 - protein, 10 aa, synthetic construct
QYPRGDYTSM

SEQ ID NO: 85941 - protein, 10 aa, synthetic construct
QYPRGDFQNT

SEQ ID NO: 85942 - protein, 10 aa, synthetic construct
QYLRGDYTSV

SEQ ID NO: 85943 - protein, 10 aa, synthetic construct
QYLRGDLIGR

SEQ ID NO: 85944 - protein, 10 aa, synthetic construct
QYIRGDHVNL

SEQ ID NO: 85945 - protein, 10 aa, synthetic construct
QYIRGDRDYL

SEQ ID NO: 85946 - protein, 10 aa, synthetic construct
QYIRGDYSSV

SEQ ID NO: 85947 - protein, 10 aa, synthetic construct
QYIRGDLTVT

SEQ ID NO: 85948 - protein, 10 aa, synthetic construct
QYMRGDHVNL

SEQ ID NO: 85949 - protein, 10 aa, synthetic construct
NLARGDRGVV

SEQ ID NO: 85950 - protein, 10 aa, synthetic construct
QYMRGDRDYL

SEQ ID NO: 85951 - protein, 10 aa, synthetic construct
QYMRGDYSSV

SEQ ID NO: 85952 - protein, 10 aa, synthetic construct
QYMRGDLTVT

SEQ ID NO: 85953 - protein, 10 aa, synthetic construct
QYWRGDYTSV

SEQ ID NO: 85954 - protein, 10 aa, synthetic construct
QYWRGDLIGR

SEQ ID NO: 85955 - protein, 10 aa, synthetic construct
QYFRGDHVNL

SEQ ID NO: 85956 - protein, 10 aa, synthetic construct
QYFRGDRDYL

SEQ ID NO: 85957 - protein, 10 aa, synthetic construct
QYFRGDYSSV

SEQ ID NO: 85958 - protein, 10 aa, synthetic construct
QYFRGDLTVT

SEQ ID NO: 85959 - protein, 10 aa, synthetic construct
QYKRGDHVNL

SEQ ID NO: 85960 - protein, 10 aa, synthetic construct
TFFRGDHVNL

SEQ ID NO: 85961 - protein, 10 aa, synthetic construct
NLARGDRSQT

SEQ ID NO: 85962 - protein, 10 aa, synthetic construct
QYKRGDRDYL

SEQ ID NO: 85963 - protein, 10 aa, synthetic construct
QYKRGDYSSV

SEQ ID NO: 85964 - protein, 10 aa, synthetic construct
QYKRGDLTVT

SEQ ID NO: 85965 - protein, 10 aa, synthetic construct
QYRRGDYNSL

SEQ ID NO: 85966 - protein, 10 aa, synthetic construct
QYRRGDYTSM

SEQ ID NO: 85967 - protein, 10 aa, synthetic construct
QYRRGDFQNT

SEQ ID NO: 85968 - protein, 10 aa, synthetic construct
QYHRGDYTSV

SEQ ID NO: 85969 - protein, 10 aa, synthetic construct
QYHRGDLIGR

SEQ ID NO: 85970 - protein, 10 aa, synthetic construct
QYSRGDYTSV

SEQ ID NO: 85971 - protein, 10 aa, synthetic construct
QYSRGDLIGR

SEQ ID NO: 85972 - protein, 10 aa, synthetic construct
NLPRGDRGQI

SEQ ID NO: 85973 - protein, 10 aa, synthetic construct
QYTRGDYTSV

SEQ ID NO: 85974 - protein, 10 aa, synthetic construct
QYTRGDLIGR

SEQ ID NO: 85975 - protein, 10 aa, synthetic construct
QYYRGDHVNL

SEQ ID NO: 85976 - protein, 10 aa, synthetic construct
QYYRGDRDYL

SEQ ID NO: 85977 - protein, 10 aa, synthetic construct
QYYRGDYSSV

SEQ ID NO: 85978 - protein, 10 aa, synthetic construct
QYYRGDLTVT

SEQ ID NO: 85979 - protein, 10 aa, synthetic construct
QYNRGDHVNL

SEQ ID NO: 85980 - protein, 10 aa, synthetic construct
QYNRGDRDYL

SEQ ID NO: 85981 - protein, 10 aa, synthetic construct
QYNRGDYSSV

SEQ ID NO: 85982 - protein, 10 aa, synthetic construct
QYNRGDLTVT

SEQ ID NO: 85983 - protein, 10 aa, synthetic construct
NLPRGDRQGI

SEQ ID NO: 85984 - protein, 10 aa, synthetic construct
QYQRGDYTSV

SEQ ID NO: 85985 - protein, 10 aa, synthetic construct
QYQRGDLIGR

SEQ ID NO: 85986 - protein, 10 aa, synthetic construct
QYDRGDYTSV

SEQ ID NO: 85987 - protein, 10 aa, synthetic construct
QYDRGDLIGR

SEQ ID NO: 85988 - protein, 10 aa, synthetic construct
QYERGDYTSV

SEQ ID NO: 85989 - protein, 10 aa, synthetic construct
QYERGDLIGR

SEQ ID NO: 85990 - protein, 10 aa, synthetic construct
QNGRGDYNSL

SEQ ID NO: 85991 - protein, 10 aa, synthetic construct
QNGRGDYTSM

SEQ ID NO: 85992 - protein, 10 aa, synthetic construct
QNGRGDFQNT

SEQ ID NO: 85993 - protein, 10 aa, synthetic construct
QNARGDYNSL

SEQ ID NO: 85994 - protein, 10 aa, synthetic construct
NLPRGDRSVV

SEQ ID NO: 85995 - protein, 10 aa, synthetic construct
QNARGDYTSM

SEQ ID NO: 85996 - protein, 10 aa, synthetic construct
QNARGDFQNT

SEQ ID NO: 85997 - protein, 10 aa, synthetic construct
QNVRGDYTSV

SEQ ID NO: 85998 - protein, 10 aa, synthetic construct
QNVRGDLIGR

SEQ ID NO: 85999 - protein, 10 aa, synthetic construct
QNPRGDYNSL

SEQ ID NO: 86000 - protein, 10 aa, synthetic construct
QNPRGDYTSM

SEQ ID NO: 86001 - protein, 10 aa, synthetic construct
QNPRGDFQNT

SEQ ID NO: 86002 - protein, 10 aa, synthetic construct
QNLRGDYTSV

SEQ ID NO: 86003 - protein, 10 aa, synthetic construct
QNLRGDLIGR

SEQ ID NO: 86004 - protein, 10 aa, synthetic construct
QNIRGDHVNL

SEQ ID NO: 86005 - protein, 10 aa, synthetic construct
NLPRGDRGVV

SEQ ID NO: 86006 - protein, 10 aa, synthetic construct
QNIRGDRDYL

SEQ ID NO: 86007 - protein, 10 aa, synthetic construct
QNIRGDYSSV

SEQ ID NO: 86008 - protein, 10 aa, synthetic construct
QNIRGDLTVT

SEQ ID NO: 86009 - protein, 10 aa, synthetic construct
QNMRGDHVNL

SEQ ID NO: 86010 - protein, 10 aa, synthetic construct
QNMRGDRDYL

SEQ ID NO: 86011 - protein, 10 aa, synthetic construct
QNMRGDYSSV

SEQ ID NO: 86012 - protein, 10 aa, synthetic construct
QNMRGDLTVT

SEQ ID NO: 86013 - protein, 10 aa, synthetic construct
QNWRGDYTSV

SEQ ID NO: 86014 - protein, 10 aa, synthetic construct
QNWRGDLIGR

SEQ ID NO: 86015 - protein, 10 aa, synthetic construct
QNFRGDHVNL

SEQ ID NO: 86016 - protein, 10 aa, synthetic construct
NLPRGDRSQT

SEQ ID NO: 86017 - protein, 10 aa, synthetic construct
QNFRGDRDYL

SEQ ID NO: 86018 - protein, 10 aa, synthetic construct
QNFRGDYSSV

SEQ ID NO: 86019 - protein, 10 aa, synthetic construct
QNFRGDLTVT

SEQ ID NO: 86020 - protein, 10 aa, synthetic construct
QNKRGDHVNL

SEQ ID NO: 86021 - protein, 10 aa, synthetic construct
QNKRGDRDYL

SEQ ID NO: 86022 - protein, 10 aa, synthetic construct
QNKRGDYSSV

SEQ ID NO: 86023 - protein, 10 aa, synthetic construct
QNKRGDLTVT

SEQ ID NO: 86024 - protein, 10 aa, synthetic construct
QNRRGDYNSL

SEQ ID NO: 86025 - protein, 10 aa, synthetic construct
QNRRGDYTSM

SEQ ID NO: 86026 - protein, 10 aa, synthetic construct
QNRRGDFQNT

SEQ ID NO: 86027 - protein, 10 aa, synthetic construct
NLRRGDRGQI

SEQ ID NO: 86028 - protein, 10 aa, synthetic construct
QNHRGDYTSV

SEQ ID NO: 86029 - protein, 10 aa, synthetic construct
QNHRGDLIGR

SEQ ID NO: 86030 - protein, 10 aa, synthetic construct
QNSRGDYTSV

SEQ ID NO: 86031 - protein, 10 aa, synthetic construct
QNSRGDLIGR

SEQ ID NO: 86032 - protein, 10 aa, synthetic construct
QNTRGDYTSV

SEQ ID NO: 86033 - protein, 10 aa, synthetic construct
QNTRGDLIGR

SEQ ID NO: 86034 - protein, 10 aa, synthetic construct
QNYRGDHVNL

SEQ ID NO: 86035 - protein, 10 aa, synthetic construct
QNYRGDRDYL

SEQ ID NO: 86036 - protein, 10 aa, synthetic construct
QNYRGDYSSV

SEQ ID NO: 86037 - protein, 10 aa, synthetic construct
QNYRGDLTVT

SEQ ID NO: 86038 - protein, 10 aa, synthetic construct
NLRRGDRQGI

SEQ ID NO: 86039 - protein, 10 aa, synthetic construct
QNNRGDHVNL

SEQ ID NO: 86040 - protein, 10 aa, synthetic construct
QNNRGDRDYL

SEQ ID NO: 86041 - protein, 10 aa, synthetic construct
QNNRGDYSSV

SEQ ID NO: 86042 - protein, 10 aa, synthetic construct
QNNRGDLTVT

SEQ ID NO: 86043 - protein, 10 aa, synthetic construct
QNQRGDYTSV

SEQ ID NO: 86044 - protein, 10 aa, synthetic construct
QNQRGDLIGR

SEQ ID NO: 86045 - protein, 10 aa, synthetic construct
QNDRGDYTSV

SEQ ID NO: 86046 - protein, 10 aa, synthetic construct
QNDRGDLIGR

SEQ ID NO: 86047 - protein, 10 aa, synthetic construct
QNERGDYTSV

SEQ ID NO: 86048 - protein, 10 aa, synthetic construct
QNERGDLIGR

SEQ ID NO: 86049 - protein, 10 aa, synthetic construct
NLRRGDRSVV

SEQ ID NO: 86050 - protein, 10 aa, synthetic construct
QQGRGDFNNT

SEQ ID NO: 86051 - protein, 10 aa, synthetic construct
QQGRGDFNNL

SEQ ID NO: 86052 - protein, 10 aa, synthetic construct
QQARGDFNNT

SEQ ID NO: 86053 - protein, 10 aa, synthetic construct
QQARGDFNNL

SEQ ID NO: 86054 - protein, 10 aa, synthetic construct
QQVRGDYNSL

SEQ ID NO: 86055 - protein, 10 aa, synthetic construct
QQVRGDYTSM

SEQ ID NO: 86056 - protein, 10 aa, synthetic construct
QQVRGDFQNT

SEQ ID NO: 86057 - protein, 10 aa, synthetic construct
QQPRGDFNNT

SEQ ID NO: 86058 - protein, 10 aa, synthetic construct
QQPRGDFNNL

SEQ ID NO: 86059 - protein, 10 aa, synthetic construct
QQLRGDYNSL

SEQ ID NO: 86060 - protein, 10 aa, synthetic construct
NLRRGDRGVV

SEQ ID NO: 86061 - protein, 10 aa, synthetic construct
QQLRGDYTSM

SEQ ID NO: 86062 - protein, 10 aa, synthetic construct
QQLRGDFQNT

SEQ ID NO: 86063 - protein, 10 aa, synthetic construct
QQIRGDYTSV

SEQ ID NO: 86064 - protein, 10 aa, synthetic construct
QQIRGDLIGR

SEQ ID NO: 86065 - protein, 10 aa, synthetic construct
QQMRGDYTSV

SEQ ID NO: 86066 - protein, 10 aa, synthetic construct
QQMRGDLIGR

SEQ ID NO: 86067 - protein, 10 aa, synthetic construct
QQWRGDYNSL

SEQ ID NO: 86068 - protein, 10 aa, synthetic construct
QQWRGDYTSM

SEQ ID NO: 86069 - protein, 10 aa, synthetic construct
QQWRGDFQNT

SEQ ID NO: 86070 - protein, 10 aa, synthetic construct
QQFRGDYTSV

SEQ ID NO: 86071 - protein, 10 aa, synthetic construct
TFFRGDRDYL

SEQ ID NO: 86072 - protein, 10 aa, synthetic construct
NLRRGDRSQT

SEQ ID NO: 86073 - protein, 10 aa, synthetic construct
QQFRGDLIGR

SEQ ID NO: 86074 - protein, 10 aa, synthetic construct
QQKRGDYTSV

SEQ ID NO: 86075 - protein, 10 aa, synthetic construct
QQKRGDLIGR

SEQ ID NO: 86076 - protein, 10 aa, synthetic construct
QQRRGDFNNT

SEQ ID NO: 86077 - protein, 10 aa, synthetic construct
QQRRGDFNNL

SEQ ID NO: 86078 - protein, 10 aa, synthetic construct
QQHRGDYNSL

SEQ ID NO: 86079 - protein, 10 aa, synthetic construct
QQHRGDYTSM

SEQ ID NO: 86080 - protein, 10 aa, synthetic construct
QQHRGDFQNT

SEQ ID NO: 86081 - protein, 10 aa, synthetic construct
QQSRGDYNSL

SEQ ID NO: 86082 - protein, 10 aa, synthetic construct
QQSRGDYTSM

SEQ ID NO: 86083 - protein, 10 aa, synthetic construct
NWGRGDRGVV

SEQ ID NO: 86084 - protein, 10 aa, synthetic construct
QQSRGDFQNT

SEQ ID NO: 86085 - protein, 10 aa, synthetic construct
QQTRGDYNSL

SEQ ID NO: 86086 - protein, 10 aa, synthetic construct
QQTRGDYTSM

SEQ ID NO: 86087 - protein, 10 aa, synthetic construct
QQTRGDFQNT

SEQ ID NO: 86088 - protein, 10 aa, synthetic construct
QQYRGDYTSV

SEQ ID NO: 86089 - protein, 10 aa, synthetic construct
QQYRGDLIGR

SEQ ID NO: 86090 - protein, 10 aa, synthetic construct
QQNRGDYTSV

SEQ ID NO: 86091 - protein, 10 aa, synthetic construct
QQNRGDLIGR

SEQ ID NO: 86092 - protein, 10 aa, synthetic construct
QQQRGDYNSL

SEQ ID NO: 86093 - protein, 10 aa, synthetic construct
QQQRGDYTSM

SEQ ID NO: 86094 - protein, 10 aa, synthetic construct
NWARGDRGVV

SEQ ID NO: 86095 - protein, 10 aa, synthetic construct
QQQRGDFQNT

SEQ ID NO: 86096 - protein, 10 aa, synthetic construct
QQDRGDYNSL

SEQ ID NO: 86097 - protein, 10 aa, synthetic construct
QQDRGDYTSM

SEQ ID NO: 86098 - protein, 10 aa, synthetic construct
QQDRGDFQNT

SEQ ID NO: 86099 - protein, 10 aa, synthetic construct
QQERGDYNSL

SEQ ID NO: 86100 - protein, 10 aa, synthetic construct
QQERGDYTSM

SEQ ID NO: 86101 - protein, 10 aa, synthetic construct
QQERGDFQNT

SEQ ID NO: 86102 - protein, 10 aa, synthetic construct
QDGRGDFNNT

SEQ ID NO: 86103 - protein, 10 aa, synthetic construct
QDGRGDFNNL

SEQ ID NO: 86104 - protein, 10 aa, synthetic construct
QDARGDFNNT

SEQ ID NO: 86105 - protein, 10 aa, synthetic construct
NWVRGDRGVV

SEQ ID NO: 86106 - protein, 10 aa, synthetic construct
QDARGDFNNL

SEQ ID NO: 86107 - protein, 10 aa, synthetic construct
QDVRGDYNSL

SEQ ID NO: 86108 - protein, 10 aa, synthetic construct
QDVRGDYTSM

SEQ ID NO: 86109 - protein, 10 aa, synthetic construct
QDVRGDFQNT

SEQ ID NO: 86110 - protein, 10 aa, synthetic construct
QDPRGDFNNT

SEQ ID NO: 86111 - protein, 10 aa, synthetic construct
QDPRGDFNNL

SEQ ID NO: 86112 - protein, 10 aa, synthetic construct
QDLRGDYNSL

SEQ ID NO: 86113 - protein, 10 aa, synthetic construct
QDLRGDYTSM

SEQ ID NO: 86114 - protein, 10 aa, synthetic construct
QDLRGDFQNT

SEQ ID NO: 86115 - protein, 10 aa, synthetic construct
QDIRGDYTSV

SEQ ID NO: 86116 - protein, 10 aa, synthetic construct
NWVRGDLTVT

SEQ ID NO: 86117 - protein, 10 aa, synthetic construct
QDIRGDLIGR

SEQ ID NO: 86118 - protein, 10 aa, synthetic construct
QDMRGDYTSV

SEQ ID NO: 86119 - protein, 10 aa, synthetic construct
QDMRGDLIGR

SEQ ID NO: 86120 - protein, 10 aa, synthetic construct
QDWRGDYNSL

SEQ ID NO: 86121 - protein, 10 aa, synthetic construct
QDWRGDYTSM

SEQ ID NO: 86122 - protein, 10 aa, synthetic construct
QDWRGDFQNT

SEQ ID NO: 86123 - protein, 10 aa, synthetic construct
QDFRGDYTSV

SEQ ID NO: 86124 - protein, 10 aa, synthetic construct
QDFRGDLIGR

SEQ ID NO: 86125 - protein, 10 aa, synthetic construct
QDKRGDYTSV

SEQ ID NO: 86126 - protein, 10 aa, synthetic construct
QDKRGDLIGR

SEQ ID NO: 86127 - protein, 10 aa, synthetic construct
NWVRGDLLLS

SEQ ID NO: 86128 - protein, 10 aa, synthetic construct
QDRRGDFNNT

SEQ ID NO: 86129 - protein, 10 aa, synthetic construct
QDRRGDFNNL

SEQ ID NO: 86130 - protein, 10 aa, synthetic construct
QDHRGDYNSL

SEQ ID NO: 86131 - protein, 10 aa, synthetic construct
QDHRGDYTSM

SEQ ID NO: 86132 - protein, 10 aa, synthetic construct
QDHRGDFQNT

SEQ ID NO: 86133 - protein, 10 aa, synthetic construct
QDSRGDYNSL

SEQ ID NO: 86134 - protein, 10 aa, synthetic construct
QDSRGDYTSM

SEQ ID NO: 86135 - protein, 10 aa, synthetic construct
QDSRGDFQNT

SEQ ID NO: 86136 - protein, 10 aa, synthetic construct
QDTRGDYNSL

SEQ ID NO: 86137 - protein, 10 aa, synthetic construct
QDTRGDYTSM

SEQ ID NO: 86138 - protein, 10 aa, synthetic construct
NWPRGDRGVV

SEQ ID NO: 86139 - protein, 10 aa, synthetic construct
QDTRGDFQNT

SEQ ID NO: 86140 - protein, 10 aa, synthetic construct
QDYRGDYTSV

SEQ ID NO: 86141 - protein, 10 aa, synthetic construct
QDYRGDLIGR

SEQ ID NO: 86142 - protein, 10 aa, synthetic construct
QDNRGDYTSV

SEQ ID NO: 86143 - protein, 10 aa, synthetic construct
QDNRGDLIGR

SEQ ID NO: 86144 - protein, 10 aa, synthetic construct
QDQRGDYNSL

SEQ ID NO: 86145 - protein, 10 aa, synthetic construct
QDQRGDYTSM

SEQ ID NO: 86146 - protein, 10 aa, synthetic construct
QDQRGDFQNT

SEQ ID NO: 86147 - protein, 10 aa, synthetic construct
QDDRGDYNSL

SEQ ID NO: 86148 - protein, 10 aa, synthetic construct
QDDRGDYTSM

SEQ ID NO: 86149 - protein, 10 aa, synthetic construct
NWLRGDRGVV

SEQ ID NO: 86150 - protein, 10 aa, synthetic construct
QDDRGDFQNT

SEQ ID NO: 86151 - protein, 10 aa, synthetic construct
QDERGDYNSL

SEQ ID NO: 86152 - protein, 10 aa, synthetic construct
QDERGDYTSM

SEQ ID NO: 86153 - protein, 10 aa, synthetic construct
QDERGDFQNT

SEQ ID NO: 86154 - protein, 10 aa, synthetic construct
QEGRGDFNNT

SEQ ID NO: 86155 - protein, 10 aa, synthetic construct
QEGRGDFNNL

SEQ ID NO: 86156 - protein, 10 aa, synthetic construct
QEARGDFNNT

SEQ ID NO: 86157 - protein, 10 aa, synthetic construct
QEARGDFNNL

SEQ ID NO: 86158 - protein, 10 aa, synthetic construct
QEVRGDYNSL

SEQ ID NO: 86159 - protein, 10 aa, synthetic construct
QEVRGDYTSM

SEQ ID NO: 86160 - protein, 10 aa, synthetic construct
NWLRGDLTVT

SEQ ID NO: 86161 - protein, 10 aa, synthetic construct
QEVRGDFQNT

SEQ ID NO: 86162 - protein, 10 aa, synthetic construct
QEPRGDFNNT

SEQ ID NO: 86163 - protein, 10 aa, synthetic construct
QEPRGDFNNL

SEQ ID NO: 86164 - protein, 10 aa, synthetic construct
QELRGDYNSL

SEQ ID NO: 86165 - protein, 10 aa, synthetic construct
QELRGDYTSM

SEQ ID NO: 86166 - protein, 10 aa, synthetic construct
QELRGDFQNT

SEQ ID NO: 86167 - protein, 10 aa, synthetic construct
QEIRGDYTSV

SEQ ID NO: 86168 - protein, 10 aa, synthetic construct
QEIRGDLIGR

SEQ ID NO: 86169 - protein, 10 aa, synthetic construct
QEMRGDYTSV

SEQ ID NO: 86170 - protein, 10 aa, synthetic construct
QEMRGDLIGR

SEQ ID NO: 86171 - protein, 10 aa, synthetic construct
NWLRGDLLLS

SEQ ID NO: 86172 - protein, 10 aa, synthetic construct
QEWRGDYNSL

SEQ ID NO: 86173 - protein, 10 aa, synthetic construct
QEWRGDYTSM

SEQ ID NO: 86174 - protein, 10 aa, synthetic construct
QEWRGDFQNT

SEQ ID NO: 86175 - protein, 10 aa, synthetic construct
QEFRGDYTSV

SEQ ID NO: 86176 - protein, 10 aa, synthetic construct
QEFRGDLIGR

SEQ ID NO: 86177 - protein, 10 aa, synthetic construct
QEKRGDYTSV

SEQ ID NO: 86178 - protein, 10 aa, synthetic construct
QEKRGDLIGR

SEQ ID NO: 86179 - protein, 10 aa, synthetic construct
QERRGDFNNT

SEQ ID NO: 86180 - protein, 10 aa, synthetic construct
QERRGDFNNL

SEQ ID NO: 86181 - protein, 10 aa, synthetic construct
QEHRGDYNSL

SEQ ID NO: 86182 - protein, 10 aa, synthetic construct
TKKRGDLLLS

SEQ ID NO: 86183 - protein, 10 aa, synthetic construct
TFFRGDYSSV

SEQ ID NO: 86184 - protein, 10 aa, synthetic construct
NWRRGDRGVV

SEQ ID NO: 86185 - protein, 10 aa, synthetic construct
QEHRGDYTSM

SEQ ID NO: 86186 - protein, 10 aa, synthetic construct
QEHRGDFQNT

SEQ ID NO: 86187 - protein, 10 aa, synthetic construct
QESRGDYNSL

SEQ ID NO: 86188 - protein, 10 aa, synthetic construct
QESRGDYTSM

SEQ ID NO: 86189 - protein, 10 aa, synthetic construct
QESRGDFQNT

SEQ ID NO: 86190 - protein, 10 aa, synthetic construct
QETRGDYNSL

SEQ ID NO: 86191 - protein, 10 aa, synthetic construct
QETRGDYTSM

SEQ ID NO: 86192 - protein, 10 aa, synthetic construct
QETRGDFQNT

SEQ ID NO: 86193 - protein, 10 aa, synthetic construct
QEYRGDYTSV

SEQ ID NO: 86194 - protein, 10 aa, synthetic construct
QEYRGDLIGR

SEQ ID NO: 86195 - protein, 10 aa, synthetic construct
NWSRGDRGVV

SEQ ID NO: 86196 - protein, 10 aa, synthetic construct
QENRGDYTSV

SEQ ID NO: 86197 - protein, 10 aa, synthetic construct
QENRGDLIGR

SEQ ID NO: 86198 - protein, 10 aa, synthetic construct
QEQRGDYNSL

SEQ ID NO: 86199 - protein, 10 aa, synthetic construct
QEQRGDYTSM

SEQ ID NO: 86200 - protein, 10 aa, synthetic construct
QEQRGDFQNT

SEQ ID NO: 86201 - protein, 10 aa, synthetic construct
QEDRGDYNSL

SEQ ID NO: 86202 - protein, 10 aa, synthetic construct
QEDRGDYTSM

SEQ ID NO: 86203 - protein, 10 aa, synthetic construct
QEDRGDFQNT

SEQ ID NO: 86204 - protein, 10 aa, synthetic construct
QEERGDYNSL

SEQ ID NO: 86205 - protein, 10 aa, synthetic construct
QEERGDYTSM

SEQ ID NO: 86206 - protein, 10 aa, synthetic construct
NWSRGDLTVT

SEQ ID NO: 86207 - protein, 10 aa, synthetic construct
QEERGDFQNT

SEQ ID NO: 86208 - protein, 10 aa, synthetic construct
SGIRGDFNNT

SEQ ID NO: 86209 - protein, 10 aa, synthetic construct
SGIRGDFNNL

SEQ ID NO: 86210 - protein, 10 aa, synthetic construct
SGMRGDFNNT

SEQ ID NO: 86211 - protein, 10 aa, synthetic construct
SGMRGDFNNL

SEQ ID NO: 86212 - protein, 10 aa, synthetic construct
SGFRGDFNNT

SEQ ID NO: 86213 - protein, 10 aa, synthetic construct
SGFRGDFNNL

SEQ ID NO: 86214 - protein, 10 aa, synthetic construct
SGKRGDFNNT

SEQ ID NO: 86215 - protein, 10 aa, synthetic construct
SGKRGDFNNL

SEQ ID NO: 86216 - protein, 10 aa, synthetic construct
SGYRGDFNNT

SEQ ID NO: 86217 - protein, 10 aa, synthetic construct
NWSRGDLLLS

SEQ ID NO: 86218 - protein, 10 aa, synthetic construct
SGYRGDFNNL

SEQ ID NO: 86219 - protein, 10 aa, synthetic construct
SGNRGDFNNT

SEQ ID NO: 86220 - protein, 10 aa, synthetic construct
SGNRGDFNNL

SEQ ID NO: 86221 - protein, 10 aa, synthetic construct
SAIRGDFNNT

SEQ ID NO: 86222 - protein, 10 aa, synthetic construct
SAIRGDFNNL

SEQ ID NO: 86223 - protein, 10 aa, synthetic construct
SAMRGDFNNT

SEQ ID NO: 86224 - protein, 10 aa, synthetic construct
SAMRGDFNNL

SEQ ID NO: 86225 - protein, 10 aa, synthetic construct
SAFRGDFNNT

SEQ ID NO: 86226 - protein, 10 aa, synthetic construct
SAFRGDFNNL

SEQ ID NO: 86227 - protein, 10 aa, synthetic construct
SAKRGDFNNT

SEQ ID NO: 86228 - protein, 10 aa, synthetic construct
NRGRGDRGQI

SEQ ID NO: 86229 - protein, 10 aa, synthetic construct
SAKRGDFNNL

SEQ ID NO: 86230 - protein, 10 aa, synthetic construct
SAYRGDFNNT

SEQ ID NO: 86231 - protein, 10 aa, synthetic construct
SAYRGDFNNL

SEQ ID NO: 86232 - protein, 10 aa, synthetic construct
SANRGDFNNT

SEQ ID NO: 86233 - protein, 10 aa, synthetic construct
SANRGDFNNL

SEQ ID NO: 86234 - protein, 10 aa, synthetic construct
SVIRGDFNNT

SEQ ID NO: 86235 - protein, 10 aa, synthetic construct
SVIRGDFNNL

SEQ ID NO: 86236 - protein, 10 aa, synthetic construct
SVMRGDFNNT

SEQ ID NO: 86237 - protein, 10 aa, synthetic construct
SVMRGDFNNL

SEQ ID NO: 86238 - protein, 10 aa, synthetic construct
SVFRGDFNNT

SEQ ID NO: 86239 - protein, 10 aa, synthetic construct
NRGRGDRQGI

SEQ ID NO: 86240 - protein, 10 aa, synthetic construct
SVFRGDFNNL

SEQ ID NO: 86241 - protein, 10 aa, synthetic construct
SVKRGDFNNT

SEQ ID NO: 86242 - protein, 10 aa, synthetic construct
SVKRGDFNNL

SEQ ID NO: 86243 - protein, 10 aa, synthetic construct
SVYRGDFNNT

SEQ ID NO: 86244 - protein, 10 aa, synthetic construct
SVYRGDFNNL

SEQ ID NO: 86245 - protein, 10 aa, synthetic construct
SVNRGDFNNT

SEQ ID NO: 86246 - protein, 10 aa, synthetic construct
SVNRGDFNNL

SEQ ID NO: 86247 - protein, 10 aa, synthetic construct
SPIRGDFNNT

SEQ ID NO: 86248 - protein, 10 aa, synthetic construct
SPIRGDFNNL

SEQ ID NO: 86249 - protein, 10 aa, synthetic construct
SPMRGDFNNT

SEQ ID NO: 86250 - protein, 10 aa, synthetic construct
NRGRGDRSVV

SEQ ID NO: 86251 - protein, 10 aa, synthetic construct
SPMRGDFNNL

SEQ ID NO: 86252 - protein, 10 aa, synthetic construct
SPFRGDFNNT

SEQ ID NO: 86253 - protein, 10 aa, synthetic construct
SPFRGDFNNL

SEQ ID NO: 86254 - protein, 10 aa, synthetic construct
SPKRGDFNNT

SEQ ID NO: 86255 - protein, 10 aa, synthetic construct
SPKRGDFNNL

SEQ ID NO: 86256 - protein, 10 aa, synthetic construct
SPYRGDFNNT

SEQ ID NO: 86257 - protein, 10 aa, synthetic construct
SPYRGDFNNL

SEQ ID NO: 86258 - protein, 10 aa, synthetic construct
SPNRGDFNNT

SEQ ID NO: 86259 - protein, 10 aa, synthetic construct
SPNRGDFNNL

SEQ ID NO: 86260 - protein, 10 aa, synthetic construct
SLIRGDFNNT

SEQ ID NO: 86261 - protein, 10 aa, synthetic construct
NRGRGDRGVV

SEQ ID NO: 86262 - protein, 10 aa, synthetic construct
SLIRGDFNNL

SEQ ID NO: 86263 - protein, 10 aa, synthetic construct
SLMRGDFNNT

SEQ ID NO: 86264 - protein, 10 aa, synthetic construct
SLMRGDFNNL

SEQ ID NO: 86265 - protein, 10 aa, synthetic construct
SLFRGDFNNT

SEQ ID NO: 86266 - protein, 10 aa, synthetic construct
SLFRGDFNNL

SEQ ID NO: 86267 - protein, 10 aa, synthetic construct
SLKRGDFNNT

SEQ ID NO: 86268 - protein, 10 aa, synthetic construct
SLKRGDFNNL

SEQ ID NO: 86269 - protein, 10 aa, synthetic construct
SLYRGDFNNT

SEQ ID NO: 86270 - protein, 10 aa, synthetic construct
SLYRGDFNNL

SEQ ID NO: 86271 - protein, 10 aa, synthetic construct
SLNRGDFNNT

SEQ ID NO: 86272 - protein, 10 aa, synthetic construct
NRGRGDRSQT

SEQ ID NO: 86273 - protein, 10 aa, synthetic construct
SLNRGDFNNL

SEQ ID NO: 86274 - protein, 10 aa, synthetic construct
SIGRGDFNNT

SEQ ID NO: 86275 - protein, 10 aa, synthetic construct
SIGRGDFNNL

SEQ ID NO: 86276 - protein, 10 aa, synthetic construct
SIARGDFNNT

SEQ ID NO: 86277 - protein, 10 aa, synthetic construct
SIARGDFNNL

SEQ ID NO: 86278 - protein, 10 aa, synthetic construct
SIVRGDYNSL

SEQ ID NO: 86279 - protein, 10 aa, synthetic construct
SIVRGDYTSM

SEQ ID NO: 86280 - protein, 10 aa, synthetic construct
SIVRGDFQNT

SEQ ID NO: 86281 - protein, 10 aa, synthetic construct
SIPRGDFNNT

SEQ ID NO: 86282 - protein, 10 aa, synthetic construct
SIPRGDFNNL

SEQ ID NO: 86283 - protein, 10 aa, synthetic construct
NRARGDRGQI

SEQ ID NO: 86284 - protein, 10 aa, synthetic construct
SILRGDYNSL

SEQ ID NO: 86285 - protein, 10 aa, synthetic construct
SILRGDYTSM

SEQ ID NO: 86286 - protein, 10 aa, synthetic construct
SILRGDFQNT

SEQ ID NO: 86287 - protein, 10 aa, synthetic construct
SIIRGDYTSV

SEQ ID NO: 86288 - protein, 10 aa, synthetic construct
SIMRGDYTSV

SEQ ID NO: 86289 - protein, 10 aa, synthetic construct
SIWRGDYNSL

SEQ ID NO: 86290 - protein, 10 aa, synthetic construct
SIWRGDYTSM

SEQ ID NO: 86291 - protein, 10 aa, synthetic construct
SIWRGDFQNT

SEQ ID NO: 86292 - protein, 10 aa, synthetic construct
SIFRGDYTSV

SEQ ID NO: 86293 - protein, 10 aa, synthetic construct
SIKRGDYTSV

SEQ ID NO: 86294 - protein, 10 aa, synthetic construct
TFFRGDLTVT

SEQ ID NO: 86295 - protein, 10 aa, synthetic construct
NRARGDRQGI

SEQ ID NO: 86296 - protein, 10 aa, synthetic construct
SIRRGDFNNT

SEQ ID NO: 86297 - protein, 10 aa, synthetic construct
SIRRGDFNNL

SEQ ID NO: 86298 - protein, 10 aa, synthetic construct
SIHRGDYNSL

SEQ ID NO: 86299 - protein, 10 aa, synthetic construct
SIHRGDYTSM

SEQ ID NO: 86300 - protein, 10 aa, synthetic construct
SIHRGDFQNT

SEQ ID NO: 86301 - protein, 10 aa, synthetic construct
SISRGDYNSL

SEQ ID NO: 86302 - protein, 10 aa, synthetic construct
SISRGDYTSM

SEQ ID NO: 86303 - protein, 10 aa, synthetic construct
SISRGDFQNT

SEQ ID NO: 86304 - protein, 10 aa, synthetic construct
SITRGDYNSL

SEQ ID NO: 86305 - protein, 10 aa, synthetic construct
SITRGDYTSM

SEQ ID NO: 86306 - protein, 10 aa, synthetic construct
NRARGDRSVV

SEQ ID NO: 86307 - protein, 10 aa, synthetic construct
SITRGDFQNT

SEQ ID NO: 86308 - protein, 10 aa, synthetic construct
SIYRGDYTSV

SEQ ID NO: 86309 - protein, 10 aa, synthetic construct
SINRGDYTSV

SEQ ID NO: 86310 - protein, 10 aa, synthetic construct
SIQRGDYNSL

SEQ ID NO: 86311 - protein, 10 aa, synthetic construct
SIQRGDYTSM

SEQ ID NO: 86312 - protein, 10 aa, synthetic construct
SIQRGDFQNT

SEQ ID NO: 86313 - protein, 10 aa, synthetic construct
SIDRGDYNSL

SEQ ID NO: 86314 - protein, 10 aa, synthetic construct
SIDRGDYTSM

SEQ ID NO: 86315 - protein, 10 aa, synthetic construct
SIDRGDFQNT

SEQ ID NO: 86316 - protein, 10 aa, synthetic construct
SIERGDYNSL

SEQ ID NO: 86317 - protein, 10 aa, synthetic construct
NRARGDRGVV

SEQ ID NO: 86318 - protein, 10 aa, synthetic construct
SIERGDYTSM

SEQ ID NO: 86319 - protein, 10 aa, synthetic construct
SIERGDFQNT

SEQ ID NO: 86320 - protein, 10 aa, synthetic construct
SMGRGDFNNT

SEQ ID NO: 86321 - protein, 10 aa, synthetic construct
SMGRGDFNNL

SEQ ID NO: 86322 - protein, 10 aa, synthetic construct
SMARGDFNNT

SEQ ID NO: 86323 - protein, 10 aa, synthetic construct
SMARGDFNNL

SEQ ID NO: 86324 - protein, 10 aa, synthetic construct
SMVRGDFNNT

SEQ ID NO: 86325 - protein, 10 aa, synthetic construct
SMVRGDFNNL

SEQ ID NO: 86326 - protein, 10 aa, synthetic construct
SMPRGDFNNT

SEQ ID NO: 86327 - protein, 10 aa, synthetic construct
SMPRGDFNNL

SEQ ID NO: 86328 - protein, 10 aa, synthetic construct
NRARGDRSQT

SEQ ID NO: 86329 - protein, 10 aa, synthetic construct
SMLRGDFNNT

SEQ ID NO: 86330 - protein, 10 aa, synthetic construct
SMLRGDFNNL

SEQ ID NO: 86331 - protein, 10 aa, synthetic construct
SMIRGDHVNL

SEQ ID NO: 86332 - protein, 10 aa, synthetic construct
SMIRGDYNSL

SEQ ID NO: 86333 - protein, 10 aa, synthetic construct
SMIRGDYTSM

SEQ ID NO: 86334 - protein, 10 aa, synthetic construct
SMMRGDYNSL

SEQ ID NO: 86335 - protein, 10 aa, synthetic construct
SMMRGDYTSM

SEQ ID NO: 86336 - protein, 10 aa, synthetic construct
SMMRGDFQNT

SEQ ID NO: 86337 - protein, 10 aa, synthetic construct
SMWRGDFNNT

SEQ ID NO: 86338 - protein, 10 aa, synthetic construct
SMWRGDFNNL

SEQ ID NO: 86339 - protein, 10 aa, synthetic construct
NRPRGDRGQI

SEQ ID NO: 86340 - protein, 10 aa, synthetic construct
SMFRGDHVNL

SEQ ID NO: 86341 - protein, 10 aa, synthetic construct
SMFRGDYNSL

SEQ ID NO: 86342 - protein, 10 aa, synthetic construct
SMFRGDYTSM

SEQ ID NO: 86343 - protein, 10 aa, synthetic construct
SMKRGDHVNL

SEQ ID NO: 86344 - protein, 10 aa, synthetic construct
SMKRGDYNSL

SEQ ID NO: 86345 - protein, 10 aa, synthetic construct
SMKRGDYTSM

SEQ ID NO: 86346 - protein, 10 aa, synthetic construct
SMRRGDFNNT

SEQ ID NO: 86347 - protein, 10 aa, synthetic construct
SMRRGDFNNL

SEQ ID NO: 86348 - protein, 10 aa, synthetic construct
SMHRGDFQNT

SEQ ID NO: 86349 - protein, 10 aa, synthetic construct
SMSRGDFNNT

SEQ ID NO: 86350 - protein, 10 aa, synthetic construct
NRPRGDRQGI

SEQ ID NO: 86351 - protein, 10 aa, synthetic construct
SMSRGDFNNL

SEQ ID NO: 86352 - protein, 10 aa, synthetic construct
SMTRGDFQNT

SEQ ID NO: 86353 - protein, 10 aa, synthetic construct
SMYRGDHVNL

SEQ ID NO: 86354 - protein, 10 aa, synthetic construct
SMYRGDYNSL

SEQ ID NO: 86355 - protein, 10 aa, synthetic construct
SMYRGDYTSM

SEQ ID NO: 86356 - protein, 10 aa, synthetic construct
SMNRGDHVNL

SEQ ID NO: 86357 - protein, 10 aa, synthetic construct
SMNRGDYNSL

SEQ ID NO: 86358 - protein, 10 aa, synthetic construct
SMNRGDYTSM

SEQ ID NO: 86359 - protein, 10 aa, synthetic construct
SMQRGDFQNT

SEQ ID NO: 86360 - protein, 10 aa, synthetic construct
SMDRGDFQNT

SEQ ID NO: 86361 - protein, 10 aa, synthetic construct
NRPRGDRSVV

SEQ ID NO: 86362 - protein, 10 aa, synthetic construct
SMERGDFQNT

SEQ ID NO: 86363 - protein, 10 aa, synthetic construct
SWIRGDFQNT

SEQ ID NO: 86364 - protein, 10 aa, synthetic construct
SWMRGDFNNT

SEQ ID NO: 86365 - protein, 10 aa, synthetic construct
SWMRGDFNNL

SEQ ID NO: 86366 - protein, 10 aa, synthetic construct
SWFRGDFQNT

SEQ ID NO: 86367 - protein, 10 aa, synthetic construct
SWKRGDFQNT

SEQ ID NO: 86368 - protein, 10 aa, synthetic construct
SWHRGDFNNT

SEQ ID NO: 86369 - protein, 10 aa, synthetic construct
SWHRGDFNNL

SEQ ID NO: 86370 - protein, 10 aa, synthetic construct
SWTRGDFNNT

SEQ ID NO: 86371 - protein, 10 aa, synthetic construct
SWTRGDFNNL

SEQ ID NO: 86372 - protein, 10 aa, synthetic construct
NRPRGDRGVV

SEQ ID NO: 86373 - protein, 10 aa, synthetic construct
SWYRGDFQNT

SEQ ID NO: 86374 - protein, 10 aa, synthetic construct
SWNRGDFQNT

SEQ ID NO: 86375 - protein, 10 aa, synthetic construct
SWQRGDFNNT

SEQ ID NO: 86376 - protein, 10 aa, synthetic construct
SWQRGDFNNL

SEQ ID NO: 86377 - protein, 10 aa, synthetic construct
SWDRGDFNNT

SEQ ID NO: 86378 - protein, 10 aa, synthetic construct
SWDRGDFNNL

SEQ ID NO: 86379 - protein, 10 aa, synthetic construct
SWERGDFNNT

SEQ ID NO: 86380 - protein, 10 aa, synthetic construct
SWERGDFNNL

SEQ ID NO: 86381 - protein, 10 aa, synthetic construct
SFGRGDFNNT

SEQ ID NO: 86382 - protein, 10 aa, synthetic construct
SFGRGDFNNL

SEQ ID NO: 86383 - protein, 10 aa, synthetic construct
NRPRGDRSQT

SEQ ID NO: 86384 - protein, 10 aa, synthetic construct
SFARGDFNNT

SEQ ID NO: 86385 - protein, 10 aa, synthetic construct
SFARGDFNNL

SEQ ID NO: 86386 - protein, 10 aa, synthetic construct
SFVRGDYNSL

SEQ ID NO: 86387 - protein, 10 aa, synthetic construct
SFVRGDYTSM

SEQ ID NO: 86388 - protein, 10 aa, synthetic construct
SFVRGDFQNT

SEQ ID NO: 86389 - protein, 10 aa, synthetic construct
SFPRGDFNNT

SEQ ID NO: 86390 - protein, 10 aa, synthetic construct
SFPRGDFNNL

SEQ ID NO: 86391 - protein, 10 aa, synthetic construct
SFLRGDYNSL

SEQ ID NO: 86392 - protein, 10 aa, synthetic construct
SFLRGDYTSM

SEQ ID NO: 86393 - protein, 10 aa, synthetic construct
SFLRGDFQNT

SEQ ID NO: 86394 - protein, 10 aa, synthetic construct
NRRRGDRGQI

SEQ ID NO: 86395 - protein, 10 aa, synthetic construct
SFIRGDYTSV

SEQ ID NO: 86396 - protein, 10 aa, synthetic construct
SFMRGDYTSV

SEQ ID NO: 86397 - protein, 10 aa, synthetic construct
SFWRGDYNSL

SEQ ID NO: 86398 - protein, 10 aa, synthetic construct
SFWRGDYTSM

SEQ ID NO: 86399 - protein, 10 aa, synthetic construct
SFWRGDFQNT

SEQ ID NO: 86400 - protein, 10 aa, synthetic construct
SFKRGDYTSV

SEQ ID NO: 86401 - protein, 10 aa, synthetic construct
SFRRGDFNNT

SEQ ID NO: 86402 - protein, 10 aa, synthetic construct
SFRRGDFNNL

SEQ ID NO: 86403 - protein, 10 aa, synthetic construct
SFHRGDYNSL

SEQ ID NO: 86404 - protein, 10 aa, synthetic construct
SFHRGDYTSM

SEQ ID NO: 86405 - protein, 10 aa, synthetic construct
EFFRGDHVNL

SEQ ID NO: 86406 - protein, 10 aa, synthetic construct
NRRRGDRQGI

SEQ ID NO: 86407 - protein, 10 aa, synthetic construct
SFHRGDFQNT

SEQ ID NO: 86408 - protein, 10 aa, synthetic construct
SFSRGDYNSL

SEQ ID NO: 86409 - protein, 10 aa, synthetic construct
SFSRGDYTSM

SEQ ID NO: 86410 - protein, 10 aa, synthetic construct
SFSRGDFQNT

SEQ ID NO: 86411 - protein, 10 aa, synthetic construct
SFTRGDYNSL

SEQ ID NO: 86412 - protein, 10 aa, synthetic construct
SFTRGDYTSM

SEQ ID NO: 86413 - protein, 10 aa, synthetic construct
SFTRGDFQNT

SEQ ID NO: 86414 - protein, 10 aa, synthetic construct
SFYRGDYTSV

SEQ ID NO: 86415 - protein, 10 aa, synthetic construct
SFNRGDYTSV

SEQ ID NO: 86416 - protein, 10 aa, synthetic construct
SFQRGDYNSL

SEQ ID NO: 86417 - protein, 10 aa, synthetic construct
NRRRGDRSVV

SEQ ID NO: 86418 - protein, 10 aa, synthetic construct
SFQRGDYTSM

SEQ ID NO: 86419 - protein, 10 aa, synthetic construct
SFQRGDFQNT

SEQ ID NO: 86420 - protein, 10 aa, synthetic construct
SFDRGDYNSL

SEQ ID NO: 86421 - protein, 10 aa, synthetic construct
SFDRGDYTSM

SEQ ID NO: 86422 - protein, 10 aa, synthetic construct
SFDRGDFQNT

SEQ ID NO: 86423 - protein, 10 aa, synthetic construct
SFERGDYNSL

SEQ ID NO: 86424 - protein, 10 aa, synthetic construct
SFERGDYTSM

SEQ ID NO: 86425 - protein, 10 aa, synthetic construct
SFERGDFQNT

SEQ ID NO: 86426 - protein, 10 aa, synthetic construct
SKGRGDFNNT

SEQ ID NO: 86427 - protein, 10 aa, synthetic construct
SKGRGDFNNL

SEQ ID NO: 86428 - protein, 10 aa, synthetic construct
NRRRGDRGVV

SEQ ID NO: 86429 - protein, 10 aa, synthetic construct
SKARGDFNNT

SEQ ID NO: 86430 - protein, 10 aa, synthetic construct
SKARGDFNNL

SEQ ID NO: 86431 - protein, 10 aa, synthetic construct
SKVRGDYNSL

SEQ ID NO: 86432 - protein, 10 aa, synthetic construct
SKVRGDYTSM

SEQ ID NO: 86433 - protein, 10 aa, synthetic construct
SKVRGDFQNT

SEQ ID NO: 86434 - protein, 10 aa, synthetic construct
SKPRGDFNNT

SEQ ID NO: 86435 - protein, 10 aa, synthetic construct
SKPRGDFNNL

SEQ ID NO: 86436 - protein, 10 aa, synthetic construct
SKLRGDYNSL

SEQ ID NO: 86437 - protein, 10 aa, synthetic construct
SKLRGDYTSM

SEQ ID NO: 86438 - protein, 10 aa, synthetic construct
SKLRGDFQNT

SEQ ID NO: 86439 - protein, 10 aa, synthetic construct
NRRRGDRSQT

SEQ ID NO: 86440 - protein, 10 aa, synthetic construct
SKIRGDYTSV

SEQ ID NO: 86441 - protein, 10 aa, synthetic construct
SKMRGDYTSV

SEQ ID NO: 86442 - protein, 10 aa, synthetic construct
SKWRGDYNSL

SEQ ID NO: 86443 - protein, 10 aa, synthetic construct
SKWRGDYTSM

SEQ ID NO: 86444 - protein, 10 aa, synthetic construct
SKWRGDFQNT

SEQ ID NO: 86445 - protein, 10 aa, synthetic construct
SKFRGDYTSV

SEQ ID NO: 86446 - protein, 10 aa, synthetic construct
SKRRGDFNNT

SEQ ID NO: 86447 - protein, 10 aa, synthetic construct
SKRRGDFNNL

SEQ ID NO: 86448 - protein, 10 aa, synthetic construct
SKHRGDYNSL

SEQ ID NO: 86449 - protein, 10 aa, synthetic construct
SKHRGDYTSM

SEQ ID NO: 86450 - protein, 10 aa, synthetic construct
NSGRGDRGQI

SEQ ID NO: 86451 - protein, 10 aa, synthetic construct
SKHRGDFQNT

SEQ ID NO: 86452 - protein, 10 aa, synthetic construct
SKSRGDYNSL

SEQ ID NO: 86453 - protein, 10 aa, synthetic construct
SKSRGDYTSM

SEQ ID NO: 86454 - protein, 10 aa, synthetic construct
SKSRGDFQNT

SEQ ID NO: 86455 - protein, 10 aa, synthetic construct
SKTRGDYNSL

SEQ ID NO: 86456 - protein, 10 aa, synthetic construct
SKTRGDYTSM

SEQ ID NO: 86457 - protein, 10 aa, synthetic construct
SKTRGDFQNT

SEQ ID NO: 86458 - protein, 10 aa, synthetic construct
SKYRGDYTSV

SEQ ID NO: 86459 - protein, 10 aa, synthetic construct
SKQRGDYNSL

SEQ ID NO: 86460 - protein, 10 aa, synthetic construct
SKQRGDYTSM

SEQ ID NO: 86461 - protein, 10 aa, synthetic construct
NSGRGDRQGI

SEQ ID NO: 86462 - protein, 10 aa, synthetic construct
SKQRGDFQNT

SEQ ID NO: 86463 - protein, 10 aa, synthetic construct
SKDRGDYNSL

SEQ ID NO: 86464 - protein, 10 aa, synthetic construct
SKDRGDYTSM

SEQ ID NO: 86465 - protein, 10 aa, synthetic construct
SKDRGDFQNT

SEQ ID NO: 86466 - protein, 10 aa, synthetic construct
SKERGDYNSL

SEQ ID NO: 86467 - protein, 10 aa, synthetic construct
SKERGDYTSM

SEQ ID NO: 86468 - protein, 10 aa, synthetic construct
SKERGDFQNT

SEQ ID NO: 86469 - protein, 10 aa, synthetic construct
SRIRGDFNNT

SEQ ID NO: 86470 - protein, 10 aa, synthetic construct
SRIRGDFNNL

SEQ ID NO: 86471 - protein, 10 aa, synthetic construct
SRMRGDFNNT

SEQ ID NO: 86472 - protein, 10 aa, synthetic construct
NSGRGDRSVV

SEQ ID NO: 86473 - protein, 10 aa, synthetic construct
SRMRGDFNNL

SEQ ID NO: 86474 - protein, 10 aa, synthetic construct
SRFRGDFNNT

SEQ ID NO: 86475 - protein, 10 aa, synthetic construct
SRFRGDFNNL

SEQ ID NO: 86476 - protein, 10 aa, synthetic construct
SRKRGDFNNT

SEQ ID NO: 86477 - protein, 10 aa, synthetic construct
SRKRGDFNNL

SEQ ID NO: 86478 - protein, 10 aa, synthetic construct
SRYRGDFNNT

SEQ ID NO: 86479 - protein, 10 aa, synthetic construct
SRYRGDFNNL

SEQ ID NO: 86480 - protein, 10 aa, synthetic construct
SRNRGDFNNT

SEQ ID NO: 86481 - protein, 10 aa, synthetic construct
SRNRGDFNNL

SEQ ID NO: 86482 - protein, 10 aa, synthetic construct
SHVRGDFNNT

SEQ ID NO: 86483 - protein, 10 aa, synthetic construct
NSGRGDRGVV

SEQ ID NO: 86484 - protein, 10 aa, synthetic construct
SHVRGDFNNL

SEQ ID NO: 86485 - protein, 10 aa, synthetic construct
SHLRGDFNNT

SEQ ID NO: 86486 - protein, 10 aa, synthetic construct
SHLRGDFNNL

SEQ ID NO: 86487 - protein, 10 aa, synthetic construct
SHIRGDYNSL

SEQ ID NO: 86488 - protein, 10 aa, synthetic construct
SHIRGDYTSM

SEQ ID NO: 86489 - protein, 10 aa, synthetic construct
SHIRGDFQNT

SEQ ID NO: 86490 - protein, 10 aa, synthetic construct
SHMRGDYNSL

SEQ ID NO: 86491 - protein, 10 aa, synthetic construct
SHMRGDYTSM

SEQ ID NO: 86492 - protein, 10 aa, synthetic construct
SHMRGDFQNT

SEQ ID NO: 86493 - protein, 10 aa, synthetic construct
SHWRGDFNNT

SEQ ID NO: 86494 - protein, 10 aa, synthetic construct
NSGRGDRSQT

SEQ ID NO: 86495 - protein, 10 aa, synthetic construct
SHWRGDFNNL

SEQ ID NO: 86496 - protein, 10 aa, synthetic construct
SHFRGDYNSL

SEQ ID NO: 86497 - protein, 10 aa, synthetic construct
SHFRGDYTSM

SEQ ID NO: 86498 - protein, 10 aa, synthetic construct
SHFRGDFQNT

SEQ ID NO: 86499 - protein, 10 aa, synthetic construct
SHKRGDYNSL

SEQ ID NO: 86500 - protein, 10 aa, synthetic construct
SHKRGDYTSM

SEQ ID NO: 86501 - protein, 10 aa, synthetic construct
SHKRGDFQNT

SEQ ID NO: 86502 - protein, 10 aa, synthetic construct
SHHRGDFNNT

SEQ ID NO: 86503 - protein, 10 aa, synthetic construct
SHHRGDFNNL

SEQ ID NO: 86504 - protein, 10 aa, synthetic construct
SHSRGDFNNT

SEQ ID NO: 86505 - protein, 10 aa, synthetic construct
NSARGDRGQI

SEQ ID NO: 86506 - protein, 10 aa, synthetic construct
SHSRGDFNNL

SEQ ID NO: 86507 - protein, 10 aa, synthetic construct
SHTRGDFNNT

SEQ ID NO: 86508 - protein, 10 aa, synthetic construct
SHTRGDFNNL

SEQ ID NO: 86509 - protein, 10 aa, synthetic construct
SHYRGDYNSL

SEQ ID NO: 86510 - protein, 10 aa, synthetic construct
SHYRGDYTSM

SEQ ID NO: 86511 - protein, 10 aa, synthetic construct
SHYRGDFQNT

SEQ ID NO: 86512 - protein, 10 aa, synthetic construct
SHNRGDYNSL

SEQ ID NO: 86513 - protein, 10 aa, synthetic construct
SHNRGDYTSM

SEQ ID NO: 86514 - protein, 10 aa, synthetic construct
SHNRGDFQNT

SEQ ID NO: 86515 - protein, 10 aa, synthetic construct
SHQRGDFNNT

SEQ ID NO: 86516 - protein, 10 aa, synthetic construct
EFFRGDRDYL

SEQ ID NO: 86517 - protein, 10 aa, synthetic construct
NSARGDRQGI

SEQ ID NO: 86518 - protein, 10 aa, synthetic construct
SHQRGDFNNL

SEQ ID NO: 86519 - protein, 10 aa, synthetic construct
SHDRGDFNNT

SEQ ID NO: 86520 - protein, 10 aa, synthetic construct
SHDRGDFNNL

SEQ ID NO: 86521 - protein, 10 aa, synthetic construct
SHERGDFNNT

SEQ ID NO: 86522 - protein, 10 aa, synthetic construct
SHERGDFNNL

SEQ ID NO: 86523 - protein, 10 aa, synthetic construct
SSIRGDFNNT

SEQ ID NO: 86524 - protein, 10 aa, synthetic construct
SSIRGDFNNL

SEQ ID NO: 86525 - protein, 10 aa, synthetic construct
SSMRGDFNNT

SEQ ID NO: 86526 - protein, 10 aa, synthetic construct
SSMRGDFNNL

SEQ ID NO: 86527 - protein, 10 aa, synthetic construct
SSFRGDFNNT

SEQ ID NO: 86528 - protein, 10 aa, synthetic construct
NSARGDRSVV

SEQ ID NO: 86529 - protein, 10 aa, synthetic construct
SSFRGDFNNL

SEQ ID NO: 86530 - protein, 10 aa, synthetic construct
SSKRGDFNNT

SEQ ID NO: 86531 - protein, 10 aa, synthetic construct
SSKRGDFNNL

SEQ ID NO: 86532 - protein, 10 aa, synthetic construct
SSYRGDFNNT

SEQ ID NO: 86533 - protein, 10 aa, synthetic construct
SSYRGDFNNL

SEQ ID NO: 86534 - protein, 10 aa, synthetic construct
SSNRGDFNNT

SEQ ID NO: 86535 - protein, 10 aa, synthetic construct
SSNRGDFNNL

SEQ ID NO: 86536 - protein, 10 aa, synthetic construct
STVRGDFNNT

SEQ ID NO: 86537 - protein, 10 aa, synthetic construct
STVRGDFNNL

SEQ ID NO: 86538 - protein, 10 aa, synthetic construct
STLRGDFNNT

SEQ ID NO: 86539 - protein, 10 aa, synthetic construct
NSARGDRGVV

SEQ ID NO: 86540 - protein, 10 aa, synthetic construct
STLRGDFNNL

SEQ ID NO: 86541 - protein, 10 aa, synthetic construct
STIRGDYNSL

SEQ ID NO: 86542 - protein, 10 aa, synthetic construct
STIRGDYTSM

SEQ ID NO: 86543 - protein, 10 aa, synthetic construct
STIRGDFQNT

SEQ ID NO: 86544 - protein, 10 aa, synthetic construct
STMRGDYNSL

SEQ ID NO: 86545 - protein, 10 aa, synthetic construct
STMRGDYTSM

SEQ ID NO: 86546 - protein, 10 aa, synthetic construct
STMRGDFQNT

SEQ ID NO: 86547 - protein, 10 aa, synthetic construct
STWRGDFNNT

SEQ ID NO: 86548 - protein, 10 aa, synthetic construct
STWRGDFNNL

SEQ ID NO: 86549 - protein, 10 aa, synthetic construct
STFRGDYNSL

SEQ ID NO: 86550 - protein, 10 aa, synthetic construct
NSARGDRSQT

SEQ ID NO: 86551 - protein, 10 aa, synthetic construct
STFRGDYTSM

SEQ ID NO: 86552 - protein, 10 aa, synthetic construct
STFRGDFQNT

SEQ ID NO: 86553 - protein, 10 aa, synthetic construct
STKRGDYNSL

SEQ ID NO: 86554 - protein, 10 aa, synthetic construct
STKRGDYTSM

SEQ ID NO: 86555 - protein, 10 aa, synthetic construct
STKRGDFQNT

SEQ ID NO: 86556 - protein, 10 aa, synthetic construct
STHRGDFNNT

SEQ ID NO: 86557 - protein, 10 aa, synthetic construct
STHRGDFNNL

SEQ ID NO: 86558 - protein, 10 aa, synthetic construct
STSRGDFNNT

SEQ ID NO: 86559 - protein, 10 aa, synthetic construct
STSRGDFNNL

SEQ ID NO: 86560 - protein, 10 aa, synthetic construct
STTRGDFNNT

SEQ ID NO: 86561 - protein, 10 aa, synthetic construct
NSRRGDRGQI

SEQ ID NO: 86562 - protein, 10 aa, synthetic construct
STTRGDFNNL

SEQ ID NO: 86563 - protein, 10 aa, synthetic construct
STYRGDYNSL

SEQ ID NO: 86564 - protein, 10 aa, synthetic construct
STYRGDYTSM

SEQ ID NO: 86565 - protein, 10 aa, synthetic construct
STYRGDFQNT

SEQ ID NO: 86566 - protein, 10 aa, synthetic construct
STNRGDYNSL

SEQ ID NO: 86567 - protein, 10 aa, synthetic construct
STNRGDYTSM

SEQ ID NO: 86568 - protein, 10 aa, synthetic construct
STNRGDFQNT

SEQ ID NO: 86569 - protein, 10 aa, synthetic construct
STQRGDFNNT

SEQ ID NO: 86570 - protein, 10 aa, synthetic construct
STQRGDFNNL

SEQ ID NO: 86571 - protein, 10 aa, synthetic construct
STDRGDFNNT

SEQ ID NO: 86572 - protein, 10 aa, synthetic construct
NSRRGDRQGI

SEQ ID NO: 86573 - protein, 10 aa, synthetic construct
STDRGDFNNL

SEQ ID NO: 86574 - protein, 10 aa, synthetic construct
STERGDFNNT

SEQ ID NO: 86575 - protein, 10 aa, synthetic construct
STERGDFNNL

SEQ ID NO: 86576 - protein, 10 aa, synthetic construct
SYGRGDFNNT

SEQ ID NO: 86577 - protein, 10 aa, synthetic construct
SYGRGDFNNL

SEQ ID NO: 86578 - protein, 10 aa, synthetic construct
SYARGDFNNT

SEQ ID NO: 86579 - protein, 10 aa, synthetic construct
SYARGDFNNL

SEQ ID NO: 86580 - protein, 10 aa, synthetic construct
SYVRGDYNSL

SEQ ID NO: 86581 - protein, 10 aa, synthetic construct
SYVRGDYTSM

SEQ ID NO: 86582 - protein, 10 aa, synthetic construct
SYVRGDFQNT

SEQ ID NO: 86583 - protein, 10 aa, synthetic construct
NSRRGDRSVV

SEQ ID NO: 86584 - protein, 10 aa, synthetic construct
SYPRGDFNNT

SEQ ID NO: 86585 - protein, 10 aa, synthetic construct
SYPRGDFNNL

SEQ ID NO: 86586 - protein, 10 aa, synthetic construct
SYLRGDYNSL

SEQ ID NO: 86587 - protein, 10 aa, synthetic construct
SYLRGDYTSM

SEQ ID NO: 86588 - protein, 10 aa, synthetic construct
SYLRGDFQNT

SEQ ID NO: 86589 - protein, 10 aa, synthetic construct
SYIRGDYTSV

SEQ ID NO: 86590 - protein, 10 aa, synthetic construct
SYMRGDYTSV

SEQ ID NO: 86591 - protein, 10 aa, synthetic construct
SYWRGDYNSL

SEQ ID NO: 86592 - protein, 10 aa, synthetic construct
SYWRGDYTSM

SEQ ID NO: 86593 - protein, 10 aa, synthetic construct
SYWRGDFQNT

SEQ ID NO: 86594 - protein, 10 aa, synthetic construct
NSRRGDRGVV

SEQ ID NO: 86595 - protein, 10 aa, synthetic construct
SYFRGDYTSV

SEQ ID NO: 86596 - protein, 10 aa, synthetic construct
SYKRGDYTSV

SEQ ID NO: 86597 - protein, 10 aa, synthetic construct
SYRRGDFNNT

SEQ ID NO: 86598 - protein, 10 aa, synthetic construct
SYRRGDFNNL

SEQ ID NO: 86599 - protein, 10 aa, synthetic construct
SYHRGDYNSL

SEQ ID NO: 86600 - protein, 10 aa, synthetic construct
SYHRGDYTSM

SEQ ID NO: 86601 - protein, 10 aa, synthetic construct
SYHRGDFQNT

SEQ ID NO: 86602 - protein, 10 aa, synthetic construct
SYSRGDYNSL

SEQ ID NO: 86603 - protein, 10 aa, synthetic construct
SYSRGDYTSM

SEQ ID NO: 86604 - protein, 10 aa, synthetic construct
SYSRGDFQNT

SEQ ID NO: 86605 - protein, 10 aa, synthetic construct
NSRRGDRSQT

SEQ ID NO: 86606 - protein, 10 aa, synthetic construct
SYTRGDYNSL

SEQ ID NO: 86607 - protein, 10 aa, synthetic construct
SYTRGDYTSM

SEQ ID NO: 86608 - protein, 10 aa, synthetic construct
SYTRGDFQNT

SEQ ID NO: 86609 - protein, 10 aa, synthetic construct
SYYRGDYTSV

SEQ ID NO: 86610 - protein, 10 aa, synthetic construct
SYNRGDYTSV

SEQ ID NO: 86611 - protein, 10 aa, synthetic construct
SYQRGDYNSL

SEQ ID NO: 86612 - protein, 10 aa, synthetic construct
SYQRGDYTSM

SEQ ID NO: 86613 - protein, 10 aa, synthetic construct
SYQRGDFQNT

SEQ ID NO: 86614 - protein, 10 aa, synthetic construct
SYDRGDYNSL

SEQ ID NO: 86615 - protein, 10 aa, synthetic construct
SYDRGDYTSM

SEQ ID NO: 86616 - protein, 10 aa, synthetic construct
DGGRGDHGVL

SEQ ID NO: 86617 - protein, 10 aa, synthetic construct
SYDRGDFQNT

SEQ ID NO: 86618 - protein, 10 aa, synthetic construct
SYERGDYNSL

SEQ ID NO: 86619 - protein, 10 aa, synthetic construct
SYERGDYTSM

SEQ ID NO: 86620 - protein, 10 aa, synthetic construct
SYERGDFQNT

SEQ ID NO: 86621 - protein, 10 aa, synthetic construct
SNGRGDFNNT

SEQ ID NO: 86622 - protein, 10 aa, synthetic construct
SNGRGDFNNL

SEQ ID NO: 86623 - protein, 10 aa, synthetic construct
SNARGDFNNT

SEQ ID NO: 86624 - protein, 10 aa, synthetic construct
SNARGDFNNL

SEQ ID NO: 86625 - protein, 10 aa, synthetic construct
SNVRGDYNSL

SEQ ID NO: 86626 - protein, 10 aa, synthetic construct
SNVRGDYTSM

SEQ ID NO: 86627 - protein, 10 aa, synthetic construct
EFFRGDYSSV

SEQ ID NO: 86628 - protein, 10 aa, synthetic construct
DGGRGDYVGL

SEQ ID NO: 86629 - protein, 10 aa, synthetic construct
SNVRGDFQNT

SEQ ID NO: 86630 - protein, 10 aa, synthetic construct
SNPRGDFNNT

SEQ ID NO: 86631 - protein, 10 aa, synthetic construct
SNPRGDFNNL

SEQ ID NO: 86632 - protein, 10 aa, synthetic construct
SNLRGDYNSL

SEQ ID NO: 86633 - protein, 10 aa, synthetic construct
SNLRGDYTSM

SEQ ID NO: 86634 - protein, 10 aa, synthetic construct
SNLRGDFQNT

SEQ ID NO: 86635 - protein, 10 aa, synthetic construct
SNIRGDYTSV

SEQ ID NO: 86636 - protein, 10 aa, synthetic construct
SNMRGDYTSV

SEQ ID NO: 86637 - protein, 10 aa, synthetic construct
SNWRGDYNSL

SEQ ID NO: 86638 - protein, 10 aa, synthetic construct
SNWRGDYTSM

SEQ ID NO: 86639 - protein, 10 aa, synthetic construct
DGGRGDQSTL

SEQ ID NO: 86640 - protein, 10 aa, synthetic construct
SNWRGDFQNT

SEQ ID NO: 86641 - protein, 10 aa, synthetic construct
SNFRGDYTSV

SEQ ID NO: 86642 - protein, 10 aa, synthetic construct
SNKRGDYTSV

SEQ ID NO: 86643 - protein, 10 aa, synthetic construct
SNRRGDFNNT

SEQ ID NO: 86644 - protein, 10 aa, synthetic construct
SNRRGDFNNL

SEQ ID NO: 86645 - protein, 10 aa, synthetic construct
SNHRGDYNSL

SEQ ID NO: 86646 - protein, 10 aa, synthetic construct
SNHRGDYTSM

SEQ ID NO: 86647 - protein, 10 aa, synthetic construct
SNHRGDFQNT

SEQ ID NO: 86648 - protein, 10 aa, synthetic construct
SNSRGDYTSM

SEQ ID NO: 86649 - protein, 10 aa, synthetic construct
SNSRGDFQNT

SEQ ID NO: 86650 - protein, 10 aa, synthetic construct
DGGRGDLLLS

SEQ ID NO: 86651 - protein, 10 aa, synthetic construct
SNTRGDYNSL

SEQ ID NO: 86652 - protein, 10 aa, synthetic construct
SNTRGDYTSM

SEQ ID NO: 86653 - protein, 10 aa, synthetic construct
SNTRGDFQNT

SEQ ID NO: 86654 - protein, 10 aa, synthetic construct
SNYRGDYTSV

SEQ ID NO: 86655 - protein, 10 aa, synthetic construct
SNNRGDYTSV

SEQ ID NO: 86656 - protein, 10 aa, synthetic construct
SNQRGDYNSL

SEQ ID NO: 86657 - protein, 10 aa, synthetic construct
SNQRGDYTSM

SEQ ID NO: 86658 - protein, 10 aa, synthetic construct
SNQRGDFQNT

SEQ ID NO: 86659 - protein, 10 aa, synthetic construct
SNDRGDYNSL

SEQ ID NO: 86660 - protein, 10 aa, synthetic construct
SNDRGDYTSM

SEQ ID NO: 86661 - protein, 10 aa, synthetic construct
DGARGDHGVL

SEQ ID NO: 86662 - protein, 10 aa, synthetic construct
SNDRGDFQNT

SEQ ID NO: 86663 - protein, 10 aa, synthetic construct
SNERGDYNSL

SEQ ID NO: 86664 - protein, 10 aa, synthetic construct
SNERGDYTSM

SEQ ID NO: 86665 - protein, 10 aa, synthetic construct
SNERGDFQNT

SEQ ID NO: 86666 - protein, 10 aa, synthetic construct
SQVRGDFNNT

SEQ ID NO: 86667 - protein, 10 aa, synthetic construct
SQVRGDFNNL

SEQ ID NO: 86668 - protein, 10 aa, synthetic construct
SQLRGDFNNT

SEQ ID NO: 86669 - protein, 10 aa, synthetic construct
SQLRGDFNNL

SEQ ID NO: 86670 - protein, 10 aa, synthetic construct
SQIRGDYNSL

SEQ ID NO: 86671 - protein, 10 aa, synthetic construct
SQIRGDYTSM

SEQ ID NO: 86672 - protein, 10 aa, synthetic construct
DGARGDYVGL

SEQ ID NO: 86673 - protein, 10 aa, synthetic construct
SQIRGDFQNT

SEQ ID NO: 86674 - protein, 10 aa, synthetic construct
SQMRGDYNSL

SEQ ID NO: 86675 - protein, 10 aa, synthetic construct
SQMRGDYTSM

SEQ ID NO: 86676 - protein, 10 aa, synthetic construct
SQMRGDFQNT

SEQ ID NO: 86677 - protein, 10 aa, synthetic construct
SQWRGDFNNT

SEQ ID NO: 86678 - protein, 10 aa, synthetic construct
SQWRGDFNNL

SEQ ID NO: 86679 - protein, 10 aa, synthetic construct
SQFRGDYNSL

SEQ ID NO: 86680 - protein, 10 aa, synthetic construct
SQFRGDYTSM

SEQ ID NO: 86681 - protein, 10 aa, synthetic construct
SQFRGDFQNT

SEQ ID NO: 86682 - protein, 10 aa, synthetic construct
SQKRGDYNSL

SEQ ID NO: 86683 - protein, 10 aa, synthetic construct
DGARGDQSTL

SEQ ID NO: 86684 - protein, 10 aa, synthetic construct
SQKRGDYTSM

SEQ ID NO: 86685 - protein, 10 aa, synthetic construct
SQKRGDFQNT

SEQ ID NO: 86686 - protein, 10 aa, synthetic construct
SQHRGDFNNT

SEQ ID NO: 86687 - protein, 10 aa, synthetic construct
SQHRGDFNNL

SEQ ID NO: 86688 - protein, 10 aa, synthetic construct
SQSRGDFNNT

SEQ ID NO: 86689 - protein, 10 aa, synthetic construct
SQSRGDFNNL

SEQ ID NO: 86690 - protein, 10 aa, synthetic construct
SQTRGDFNNT

SEQ ID NO: 86691 - protein, 10 aa, synthetic construct
SQTRGDFNNL

SEQ ID NO: 86692 - protein, 10 aa, synthetic construct
SQYRGDYNSL

SEQ ID NO: 86693 - protein, 10 aa, synthetic construct
SQYRGDYTSM

SEQ ID NO: 86694 - protein, 10 aa, synthetic construct
DGARGDLLLS

SEQ ID NO: 86695 - protein, 10 aa, synthetic construct
SQYRGDFQNT

SEQ ID NO: 86696 - protein, 10 aa, synthetic construct
SQNRGDYNSL

SEQ ID NO: 86697 - protein, 10 aa, synthetic construct
SQNRGDYTSM

SEQ ID NO: 86698 - protein, 10 aa, synthetic construct
SQNRGDFQNT

SEQ ID NO: 86699 - protein, 10 aa, synthetic construct
SQQRGDFNNT

SEQ ID NO: 86700 - protein, 10 aa, synthetic construct
SQQRGDFNNL

SEQ ID NO: 86701 - protein, 10 aa, synthetic construct
SQDRGDFNNT

SEQ ID NO: 86702 - protein, 10 aa, synthetic construct
SQDRGDFNNL

SEQ ID NO: 86703 - protein, 10 aa, synthetic construct
SQERGDFNNT

SEQ ID NO: 86704 - protein, 10 aa, synthetic construct
SQERGDFNNL

SEQ ID NO: 86705 - protein, 10 aa, synthetic construct
DGVRGDRGQI

SEQ ID NO: 86706 - protein, 10 aa, synthetic construct
SDVRGDFNNT

SEQ ID NO: 86707 - protein, 10 aa, synthetic construct
SDVRGDFNNL

SEQ ID NO: 86708 - protein, 10 aa, synthetic construct
SDLRGDFNNT

SEQ ID NO: 86709 - protein, 10 aa, synthetic construct
SDLRGDFNNL

SEQ ID NO: 86710 - protein, 10 aa, synthetic construct
SDIRGDYNSL

SEQ ID NO: 86711 - protein, 10 aa, synthetic construct
SDIRGDYTSM

SEQ ID NO: 86712 - protein, 10 aa, synthetic construct
SDIRGDFQNT

SEQ ID NO: 86713 - protein, 10 aa, synthetic construct
SDMRGDYNSL

SEQ ID NO: 86714 - protein, 10 aa, synthetic construct
SDMRGDYTSM

SEQ ID NO: 86715 - protein, 10 aa, synthetic construct
SDMRGDFQNT

SEQ ID NO: 86716 - protein, 10 aa, synthetic construct
DGVRGDRQGI

SEQ ID NO: 86717 - protein, 10 aa, synthetic construct
SDWRGDFNNT

SEQ ID NO: 86718 - protein, 10 aa, synthetic construct
SDWRGDFNNL

SEQ ID NO: 86719 - protein, 10 aa, synthetic construct
SDFRGDYNSL

SEQ ID NO: 86720 - protein, 10 aa, synthetic construct
SDFRGDYTSM

SEQ ID NO: 86721 - protein, 10 aa, synthetic construct
SDFRGDFQNT

SEQ ID NO: 86722 - protein, 10 aa, synthetic construct
SDKRGDYNSL

SEQ ID NO: 86723 - protein, 10 aa, synthetic construct
SDKRGDYTSM

SEQ ID NO: 86724 - protein, 10 aa, synthetic construct
SDKRGDFQNT

SEQ ID NO: 86725 - protein, 10 aa, synthetic construct
SDHRGDFNNT

SEQ ID NO: 86726 - protein, 10 aa, synthetic construct
SDHRGDFNNL

SEQ ID NO: 86727 - protein, 10 aa, synthetic construct
DGVRGDRSVV

SEQ ID NO: 86728 - protein, 10 aa, synthetic construct
SDSRGDFNNT

SEQ ID NO: 86729 - protein, 10 aa, synthetic construct
SDSRGDFNNL

SEQ ID NO: 86730 - protein, 10 aa, synthetic construct
SDTRGDFNNT

SEQ ID NO: 86731 - protein, 10 aa, synthetic construct
SDTRGDFNNL

SEQ ID NO: 86732 - protein, 10 aa, synthetic construct
SDYRGDYNSL

SEQ ID NO: 86733 - protein, 10 aa, synthetic construct
SDYRGDYTSM

SEQ ID NO: 86734 - protein, 10 aa, synthetic construct
SDYRGDFQNT

SEQ ID NO: 86735 - protein, 10 aa, synthetic construct
SDNRGDYNSL

SEQ ID NO: 86736 - protein, 10 aa, synthetic construct
SDNRGDYTSM

SEQ ID NO: 86737 - protein, 10 aa, synthetic construct
SDNRGDFQNT

SEQ ID NO: 86738 - protein, 10 aa, synthetic construct
EFFRGDLTVT

SEQ ID NO: 86739 - protein, 10 aa, synthetic construct
DGVRGDRGVV

SEQ ID NO: 86740 - protein, 10 aa, synthetic construct
SDQRGDFNNT

SEQ ID NO: 86741 - protein, 10 aa, synthetic construct
SDQRGDFNNL

SEQ ID NO: 86742 - protein, 10 aa, synthetic construct
SDDRGDFNNT

SEQ ID NO: 86743 - protein, 10 aa, synthetic construct
SDDRGDFNNL

SEQ ID NO: 86744 - protein, 10 aa, synthetic construct
SDERGDFNNT

SEQ ID NO: 86745 - protein, 10 aa, synthetic construct
SDERGDFNNL

SEQ ID NO: 86746 - protein, 10 aa, synthetic construct
SEVRGDFNNT

SEQ ID NO: 86747 - protein, 10 aa, synthetic construct
SEVRGDFNNL

SEQ ID NO: 86748 - protein, 10 aa, synthetic construct
SELRGDFNNT

SEQ ID NO: 86749 - protein, 10 aa, synthetic construct
SELRGDFNNL

SEQ ID NO: 86750 - protein, 10 aa, synthetic construct
DGVRGDRSQT

SEQ ID NO: 86751 - protein, 10 aa, synthetic construct
SEIRGDYNSL

SEQ ID NO: 86752 - protein, 10 aa, synthetic construct
SEIRGDYTSM

SEQ ID NO: 86753 - protein, 10 aa, synthetic construct
SEIRGDFQNT

SEQ ID NO: 86754 - protein, 10 aa, synthetic construct
SEMRGDYNSL

SEQ ID NO: 86755 - protein, 10 aa, synthetic construct
SEMRGDYTSM

SEQ ID NO: 86756 - protein, 10 aa, synthetic construct
SEMRGDFQNT

SEQ ID NO: 86757 - protein, 10 aa, synthetic construct
SEWRGDFNNT

SEQ ID NO: 86758 - protein, 10 aa, synthetic construct
SEWRGDFNNL

SEQ ID NO: 86759 - protein, 10 aa, synthetic construct
SEFRGDYNSL

SEQ ID NO: 86760 - protein, 10 aa, synthetic construct
SEFRGDYTSM

SEQ ID NO: 86761 - protein, 10 aa, synthetic construct
DGPRGDHGVL

SEQ ID NO: 86762 - protein, 10 aa, synthetic construct
SEFRGDFQNT

SEQ ID NO: 86763 - protein, 10 aa, synthetic construct
SEKRGDYNSL

SEQ ID NO: 86764 - protein, 10 aa, synthetic construct
SEKRGDYTSM

SEQ ID NO: 86765 - protein, 10 aa, synthetic construct
SEKRGDFQNT

SEQ ID NO: 86766 - protein, 10 aa, synthetic construct
SEHRGDFNNT

SEQ ID NO: 86767 - protein, 10 aa, synthetic construct
SEHRGDFNNL

SEQ ID NO: 86768 - protein, 10 aa, synthetic construct
SESRGDFNNT

SEQ ID NO: 86769 - protein, 10 aa, synthetic construct
SESRGDFNNL

SEQ ID NO: 86770 - protein, 10 aa, synthetic construct
SETRGDFNNT

SEQ ID NO: 86771 - protein, 10 aa, synthetic construct
SETRGDFNNL

SEQ ID NO: 86772 - protein, 10 aa, synthetic construct
DGPRGDYVGL

SEQ ID NO: 86773 - protein, 10 aa, synthetic construct
SEYRGDYNSL

SEQ ID NO: 86774 - protein, 10 aa, synthetic construct
SEYRGDYTSM

SEQ ID NO: 86775 - protein, 10 aa, synthetic construct
SEYRGDFQNT

SEQ ID NO: 86776 - protein, 10 aa, synthetic construct
SENRGDYNSL

SEQ ID NO: 86777 - protein, 10 aa, synthetic construct
SENRGDYTSM

SEQ ID NO: 86778 - protein, 10 aa, synthetic construct
SENRGDFQNT

SEQ ID NO: 86779 - protein, 10 aa, synthetic construct
SEQRGDFNNT

SEQ ID NO: 86780 - protein, 10 aa, synthetic construct
SEQRGDFNNL

SEQ ID NO: 86781 - protein, 10 aa, synthetic construct
SEDRGDFNNT

SEQ ID NO: 86782 - protein, 10 aa, synthetic construct
SEDRGDFNNL

SEQ ID NO: 86783 - protein, 10 aa, synthetic construct
DGPRGDQSTL

SEQ ID NO: 86784 - protein, 10 aa, synthetic construct
SEERGDFNNT

SEQ ID NO: 86785 - protein, 10 aa, synthetic construct
SEERGDFNNL

SEQ ID NO: 86786 - protein, 10 aa, synthetic construct
TGIRGDFNNT

SEQ ID NO: 86787 - protein, 10 aa, synthetic construct
TGIRGDFNNL

SEQ ID NO: 86788 - protein, 10 aa, synthetic construct
TGMRGDFNNT

SEQ ID NO: 86789 - protein, 10 aa, synthetic construct
TGMRGDFNNL

SEQ ID NO: 86790 - protein, 10 aa, synthetic construct
TGFRGDFNNT

SEQ ID NO: 86791 - protein, 10 aa, synthetic construct
TGFRGDFNNL

SEQ ID NO: 86792 - protein, 10 aa, synthetic construct
TGKRGDFNNT

SEQ ID NO: 86793 - protein, 10 aa, synthetic construct
TGKRGDFNNL

SEQ ID NO: 86794 - protein, 10 aa, synthetic construct
DGPRGDLLLS

SEQ ID NO: 86795 - protein, 10 aa, synthetic construct
TGYRGDFNNT

SEQ ID NO: 86796 - protein, 10 aa, synthetic construct
TGYRGDFNNL

SEQ ID NO: 86797 - protein, 10 aa, synthetic construct
TGNRGDFNNT

SEQ ID NO: 86798 - protein, 10 aa, synthetic construct
TGNRGDFNNL

SEQ ID NO: 86799 - protein, 10 aa, synthetic construct
TAIRGDFNNT

SEQ ID NO: 86800 - protein, 10 aa, synthetic construct
TAIRGDFNNL

SEQ ID NO: 86801 - protein, 10 aa, synthetic construct
TAMRGDFNNT

SEQ ID NO: 86802 - protein, 10 aa, synthetic construct
TAMRGDFNNL

SEQ ID NO: 86803 - protein, 10 aa, synthetic construct
TAFRGDFNNT

SEQ ID NO: 86804 - protein, 10 aa, synthetic construct
TAFRGDFNNL

SEQ ID NO: 86805 - protein, 10 aa, synthetic construct
DGLRGDRGQI

SEQ ID NO: 86806 - protein, 10 aa, synthetic construct
TAKRGDFNNT

SEQ ID NO: 86807 - protein, 10 aa, synthetic construct
TAKRGDFNNL

SEQ ID NO: 86808 - protein, 10 aa, synthetic construct
TAYRGDFNNT

SEQ ID NO: 86809 - protein, 10 aa, synthetic construct
TAYRGDFNNL

SEQ ID NO: 86810 - protein, 10 aa, synthetic construct
TANRGDFNNT

SEQ ID NO: 86811 - protein, 10 aa, synthetic construct
TANRGDFNNL

SEQ ID NO: 86812 - protein, 10 aa, synthetic construct
TVIRGDFNNT

SEQ ID NO: 86813 - protein, 10 aa, synthetic construct
TVIRGDFNNL

SEQ ID NO: 86814 - protein, 10 aa, synthetic construct
TVMRGDFNNT

SEQ ID NO: 86815 - protein, 10 aa, synthetic construct
TVMRGDFNNL

SEQ ID NO: 86816 - protein, 10 aa, synthetic construct
DGLRGDRQGI

SEQ ID NO: 86817 - protein, 10 aa, synthetic construct
TVFRGDFNNT

SEQ ID NO: 86818 - protein, 10 aa, synthetic construct
TVFRGDFNNL

SEQ ID NO: 86819 - protein, 10 aa, synthetic construct
TVKRGDFNNT

SEQ ID NO: 86820 - protein, 10 aa, synthetic construct
TVKRGDFNNL

SEQ ID NO: 86821 - protein, 10 aa, synthetic construct
TVYRGDFNNT

SEQ ID NO: 86822 - protein, 10 aa, synthetic construct
TVYRGDFNNL

SEQ ID NO: 86823 - protein, 10 aa, synthetic construct
TVNRGDFNNT

SEQ ID NO: 86824 - protein, 10 aa, synthetic construct
TVNRGDFNNL

SEQ ID NO: 86825 - protein, 10 aa, synthetic construct
TPIRGDFNNT

SEQ ID NO: 86826 - protein, 10 aa, synthetic construct
TPIRGDFNNL

SEQ ID NO: 86827 - protein, 10 aa, synthetic construct
DGLRGDRSVV

SEQ ID NO: 86828 - protein, 10 aa, synthetic construct
TPMRGDFNNT

SEQ ID NO: 86829 - protein, 10 aa, synthetic construct
TPMRGDFNNL

SEQ ID NO: 86830 - protein, 10 aa, synthetic construct
TPFRGDFNNT

SEQ ID NO: 86831 - protein, 10 aa, synthetic construct
TPFRGDFNNL

SEQ ID NO: 86832 - protein, 10 aa, synthetic construct
TPKRGDFNNT

SEQ ID NO: 86833 - protein, 10 aa, synthetic construct
TPKRGDFNNL

SEQ ID NO: 86834 - protein, 10 aa, synthetic construct
TPYRGDFNNT

SEQ ID NO: 86835 - protein, 10 aa, synthetic construct
TPYRGDFNNL

SEQ ID NO: 86836 - protein, 10 aa, synthetic construct
TPNRGDFNNT

SEQ ID NO: 86837 - protein, 10 aa, synthetic construct
TPNRGDFNNL

SEQ ID NO: 86838 - protein, 10 aa, synthetic construct
DGLRGDRGVV

SEQ ID NO: 86839 - protein, 10 aa, synthetic construct
TLIRGDFNNT

SEQ ID NO: 86840 - protein, 10 aa, synthetic construct
TLIRGDFNNL

SEQ ID NO: 86841 - protein, 10 aa, synthetic construct
TLMRGDFNNT

SEQ ID NO: 86842 - protein, 10 aa, synthetic construct
TLMRGDFNNL

SEQ ID NO: 86843 - protein, 10 aa, synthetic construct
TLFRGDFNNT

SEQ ID NO: 86844 - protein, 10 aa, synthetic construct
TLFRGDFNNL

SEQ ID NO: 86845 - protein, 10 aa, synthetic construct
TLKRGDFNNT

SEQ ID NO: 86846 - protein, 10 aa, synthetic construct
TLKRGDFNNL

SEQ ID NO: 86847 - protein, 10 aa, synthetic construct
TLYRGDFNNT

SEQ ID NO: 86848 - protein, 10 aa, synthetic construct
TLYRGDFNNL

SEQ ID NO: 86849 - protein, 10 aa, synthetic construct
NFFRGDHGVL

SEQ ID NO: 86850 - protein, 10 aa, synthetic construct
DGLRGDRSQT

SEQ ID NO: 86851 - protein, 10 aa, synthetic construct
TLNRGDFNNT

SEQ ID NO: 86852 - protein, 10 aa, synthetic construct
TLNRGDFNNL

SEQ ID NO: 86853 - protein, 10 aa, synthetic construct
TIGRGDFNNT

SEQ ID NO: 86854 - protein, 10 aa, synthetic construct
TIGRGDFNNL

SEQ ID NO: 86855 - protein, 10 aa, synthetic construct
TIARGDFNNT

SEQ ID NO: 86856 - protein, 10 aa, synthetic construct
TIARGDFNNL

SEQ ID NO: 86857 - protein, 10 aa, synthetic construct
TIVRGDYNSL

SEQ ID NO: 86858 - protein, 10 aa, synthetic construct
TIVRGDYTSM

SEQ ID NO: 86859 - protein, 10 aa, synthetic construct
TIVRGDFQNT

SEQ ID NO: 86860 - protein, 10 aa, synthetic construct
TIPRGDFNNT

SEQ ID NO: 86861 - protein, 10 aa, synthetic construct
DGWRGDRGQI

SEQ ID NO: 86862 - protein, 10 aa, synthetic construct
TIPRGDFNNL

SEQ ID NO: 86863 - protein, 10 aa, synthetic construct
TILRGDYNSL

SEQ ID NO: 86864 - protein, 10 aa, synthetic construct
TILRGDYTSM

SEQ ID NO: 86865 - protein, 10 aa, synthetic construct
TILRGDFQNT

SEQ ID NO: 86866 - protein, 10 aa, synthetic construct
TIIRGDYTSV

SEQ ID NO: 86867 - protein, 10 aa, synthetic construct
TIMRGDYTSV

SEQ ID NO: 86868 - protein, 10 aa, synthetic construct
TIWRGDYNSL

SEQ ID NO: 86869 - protein, 10 aa, synthetic construct
TIWRGDYTSM

SEQ ID NO: 86870 - protein, 10 aa, synthetic construct
TIWRGDFQNT

SEQ ID NO: 86871 - protein, 10 aa, synthetic construct
TIFRGDYTSV

SEQ ID NO: 86872 - protein, 10 aa, synthetic construct
DGWRGDRQGI

SEQ ID NO: 86873 - protein, 10 aa, synthetic construct
TIKRGDYTSV

SEQ ID NO: 86874 - protein, 10 aa, synthetic construct
TIRRGDFNNT

SEQ ID NO: 86875 - protein, 10 aa, synthetic construct
TIRRGDFNNL

SEQ ID NO: 86876 - protein, 10 aa, synthetic construct
TIHRGDYNSL

SEQ ID NO: 86877 - protein, 10 aa, synthetic construct
TIHRGDYTSM

SEQ ID NO: 86878 - protein, 10 aa, synthetic construct
TIHRGDFQNT

SEQ ID NO: 86879 - protein, 10 aa, synthetic construct
TISRGDYNSL

SEQ ID NO: 86880 - protein, 10 aa, synthetic construct
TISRGDYTSM

SEQ ID NO: 86881 - protein, 10 aa, synthetic construct
TISRGDFQNT

SEQ ID NO: 86882 - protein, 10 aa, synthetic construct
TITRGDYNSL

SEQ ID NO: 86883 - protein, 10 aa, synthetic construct
DGWRGDRSVV

SEQ ID NO: 86884 - protein, 10 aa, synthetic construct
TITRGDYTSM

SEQ ID NO: 86885 - protein, 10 aa, synthetic construct
TITRGDFQNT

SEQ ID NO: 86886 - protein, 10 aa, synthetic construct
TIYRGDYTSV

SEQ ID NO: 86887 - protein, 10 aa, synthetic construct
TINRGDYTSV

SEQ ID NO: 86888 - protein, 10 aa, synthetic construct
TIQRGDYNSL

SEQ ID NO: 86889 - protein, 10 aa, synthetic construct
TIQRGDYTSM

SEQ ID NO: 86890 - protein, 10 aa, synthetic construct
TIQRGDFQNT

SEQ ID NO: 86891 - protein, 10 aa, synthetic construct
TIDRGDYNSL

SEQ ID NO: 86892 - protein, 10 aa, synthetic construct
TIDRGDYTSM

SEQ ID NO: 86893 - protein, 10 aa, synthetic construct
TIDRGDFQNT

SEQ ID NO: 86894 - protein, 10 aa, synthetic construct
DGWRGDRGVV

SEQ ID NO: 86895 - protein, 10 aa, synthetic construct
TIERGDYNSL

SEQ ID NO: 86896 - protein, 10 aa, synthetic construct
TIERGDYTSM

SEQ ID NO: 86897 - protein, 10 aa, synthetic construct
TIERGDFQNT

SEQ ID NO: 86898 - protein, 10 aa, synthetic construct
TMGRGDFNNT

SEQ ID NO: 86899 - protein, 10 aa, synthetic construct
TMGRGDFNNL

SEQ ID NO: 86900 - protein, 10 aa, synthetic construct
TMARGDFNNT

SEQ ID NO: 86901 - protein, 10 aa, synthetic construct
TMARGDFNNL

SEQ ID NO: 86902 - protein, 10 aa, synthetic construct
TMVRGDFNNT

SEQ ID NO: 86903 - protein, 10 aa, synthetic construct
TMVRGDFNNL

SEQ ID NO: 86904 - protein, 10 aa, synthetic construct
TMPRGDFNNT

SEQ ID NO: 86905 - protein, 10 aa, synthetic construct
DGWRGDRSQT

SEQ ID NO: 86906 - protein, 10 aa, synthetic construct
TMPRGDFNNL

SEQ ID NO: 86907 - protein, 10 aa, synthetic construct
TMLRGDFNNT

SEQ ID NO: 86908 - protein, 10 aa, synthetic construct
TMLRGDFNNL

SEQ ID NO: 86909 - protein, 10 aa, synthetic construct
TMIRGDHVNL

SEQ ID NO: 86910 - protein, 10 aa, synthetic construct
TMIRGDYNSL

SEQ ID NO: 86911 - protein, 10 aa, synthetic construct
TMIRGDYTSM

SEQ ID NO: 86912 - protein, 10 aa, synthetic construct
TMMRGDYNSL

SEQ ID NO: 86913 - protein, 10 aa, synthetic construct
TMMRGDYTSM

SEQ ID NO: 86914 - protein, 10 aa, synthetic construct
TMMRGDFQNT

SEQ ID NO: 86915 - protein, 10 aa, synthetic construct
TMWRGDFNNT

SEQ ID NO: 86916 - protein, 10 aa, synthetic construct
DGRRGDHGVL

SEQ ID NO: 86917 - protein, 10 aa, synthetic construct
TMWRGDFNNL

SEQ ID NO: 86918 - protein, 10 aa, synthetic construct
TMFRGDHVNL

SEQ ID NO: 86919 - protein, 10 aa, synthetic construct
TMFRGDYNSL

SEQ ID NO: 86920 - protein, 10 aa, synthetic construct
TMFRGDYTSM

SEQ ID NO: 86921 - protein, 10 aa, synthetic construct
TMKRGDHVNL

SEQ ID NO: 86922 - protein, 10 aa, synthetic construct
TMKRGDYNSL

SEQ ID NO: 86923 - protein, 10 aa, synthetic construct
TMKRGDYTSM

SEQ ID NO: 86924 - protein, 10 aa, synthetic construct
TMRRGDFNNT

SEQ ID NO: 86925 - protein, 10 aa, synthetic construct
TMRRGDFNNL

SEQ ID NO: 86926 - protein, 10 aa, synthetic construct
TMHRGDFQNT

SEQ ID NO: 86927 - protein, 10 aa, synthetic construct
DGRRGDYVGL

SEQ ID NO: 86928 - protein, 10 aa, synthetic construct
TMSRGDFNNT

SEQ ID NO: 86929 - protein, 10 aa, synthetic construct
TMSRGDFNNL

SEQ ID NO: 86930 - protein, 10 aa, synthetic construct
TMTRGDFQNT

SEQ ID NO: 86931 - protein, 10 aa, synthetic construct
TMYRGDHVNL

SEQ ID NO: 86932 - protein, 10 aa, synthetic construct
TMYRGDYNSL

SEQ ID NO: 86933 - protein, 10 aa, synthetic construct
TMYRGDYTSM

SEQ ID NO: 86934 - protein, 10 aa, synthetic construct
TMNRGDHVNL

SEQ ID NO: 86935 - protein, 10 aa, synthetic construct
TMNRGDYNSL

SEQ ID NO: 86936 - protein, 10 aa, synthetic construct
TMNRGDYTSM

SEQ ID NO: 86937 - protein, 10 aa, synthetic construct
TMQRGDFQNT

SEQ ID NO: 86938 - protein, 10 aa, synthetic construct
DGRRGDQSTL

SEQ ID NO: 86939 - protein, 10 aa, synthetic construct
TMDRGDFQNT

SEQ ID NO: 86940 - protein, 10 aa, synthetic construct
TMERGDFQNT

SEQ ID NO: 86941 - protein, 10 aa, synthetic construct
TWIRGDFQNT

SEQ ID NO: 86942 - protein, 10 aa, synthetic construct
TWMRGDFNNT

SEQ ID NO: 86943 - protein, 10 aa, synthetic construct
TWMRGDFNNL

SEQ ID NO: 86944 - protein, 10 aa, synthetic construct
TWFRGDFQNT

SEQ ID NO: 86945 - protein, 10 aa, synthetic construct
TWKRGDFQNT

SEQ ID NO: 86946 - protein, 10 aa, synthetic construct
TWHRGDFNNT

SEQ ID NO: 86947 - protein, 10 aa, synthetic construct
TWHRGDFNNL

SEQ ID NO: 86948 - protein, 10 aa, synthetic construct
TWTRGDFNNT

SEQ ID NO: 86949 - protein, 10 aa, synthetic construct
DGRRGDLLLS

SEQ ID NO: 86950 - protein, 10 aa, synthetic construct
TWTRGDFNNL

SEQ ID NO: 86951 - protein, 10 aa, synthetic construct
TWYRGDFQNT

SEQ ID NO: 86952 - protein, 10 aa, synthetic construct
TWNRGDFQNT

SEQ ID NO: 86953 - protein, 10 aa, synthetic construct
TWQRGDFNNT

SEQ ID NO: 86954 - protein, 10 aa, synthetic construct
TWQRGDFNNL

SEQ ID NO: 86955 - protein, 10 aa, synthetic construct
TWDRGDFNNT

SEQ ID NO: 86956 - protein, 10 aa, synthetic construct
TWDRGDFNNL

SEQ ID NO: 86957 - protein, 10 aa, synthetic construct
TWERGDFNNT

SEQ ID NO: 86958 - protein, 10 aa, synthetic construct
TWERGDFNNL

SEQ ID NO: 86959 - protein, 10 aa, synthetic construct
TFGRGDFNNT

SEQ ID NO: 86960 - protein, 10 aa, synthetic construct
NFFRGDRGQI

SEQ ID NO: 86961 - protein, 10 aa, synthetic construct
DGHRGDRGQI

SEQ ID NO: 86962 - protein, 10 aa, synthetic construct
TFGRGDFNNL

SEQ ID NO: 86963 - protein, 10 aa, synthetic construct
TFARGDFNNT

SEQ ID NO: 86964 - protein, 10 aa, synthetic construct
TFARGDFNNL

SEQ ID NO: 86965 - protein, 10 aa, synthetic construct
TFVRGDYNSL

SEQ ID NO: 86966 - protein, 10 aa, synthetic construct
TFVRGDYTSM

SEQ ID NO: 86967 - protein, 10 aa, synthetic construct
TFVRGDFQNT

SEQ ID NO: 86968 - protein, 10 aa, synthetic construct
TFPRGDFNNT

SEQ ID NO: 86969 - protein, 10 aa, synthetic construct
TFPRGDFNNL

SEQ ID NO: 86970 - protein, 10 aa, synthetic construct
TFLRGDYNSL

SEQ ID NO: 86971 - protein, 10 aa, synthetic construct
TFLRGDYTSM

SEQ ID NO: 86972 - protein, 10 aa, synthetic construct
DGHRGDRQGI

SEQ ID NO: 86973 - protein, 10 aa, synthetic construct
TFLRGDFQNT

SEQ ID NO: 86974 - protein, 10 aa, synthetic construct
TFIRGDYTSV

SEQ ID NO: 86975 - protein, 10 aa, synthetic construct
TFMRGDYTSV

SEQ ID NO: 86976 - protein, 10 aa, synthetic construct
TFWRGDYNSL

SEQ ID NO: 86977 - protein, 10 aa, synthetic construct
TFWRGDYTSM

SEQ ID NO: 86978 - protein, 10 aa, synthetic construct
TFWRGDFQNT

SEQ ID NO: 86979 - protein, 10 aa, synthetic construct
TFKRGDYTSV

SEQ ID NO: 86980 - protein, 10 aa, synthetic construct
TFRRGDFNNT

SEQ ID NO: 86981 - protein, 10 aa, synthetic construct
TFRRGDFNNL

SEQ ID NO: 86982 - protein, 10 aa, synthetic construct
TFHRGDYNSL

SEQ ID NO: 86983 - protein, 10 aa, synthetic construct
DGHRGDRSVV

SEQ ID NO: 86984 - protein, 10 aa, synthetic construct
TFHRGDYTSM

SEQ ID NO: 86985 - protein, 10 aa, synthetic construct
TFHRGDFQNT

SEQ ID NO: 86986 - protein, 10 aa, synthetic construct
TFSRGDYNSL

SEQ ID NO: 86987 - protein, 10 aa, synthetic construct
TFSRGDYTSM

SEQ ID NO: 86988 - protein, 10 aa, synthetic construct
TFSRGDFQNT

SEQ ID NO: 86989 - protein, 10 aa, synthetic construct
TFTRGDYNSL

SEQ ID NO: 86990 - protein, 10 aa, synthetic construct
TFTRGDYTSM

SEQ ID NO: 86991 - protein, 10 aa, synthetic construct
TFTRGDFQNT

SEQ ID NO: 86992 - protein, 10 aa, synthetic construct
TFYRGDYTSV

SEQ ID NO: 86993 - protein, 10 aa, synthetic construct
TFNRGDYTSV

SEQ ID NO: 86994 - protein, 10 aa, synthetic construct
DGHRGDRGVV

SEQ ID NO: 86995 - protein, 10 aa, synthetic construct
TFQRGDYNSL

SEQ ID NO: 86996 - protein, 10 aa, synthetic construct
TFQRGDYTSM

SEQ ID NO: 86997 - protein, 10 aa, synthetic construct
TFQRGDFQNT

SEQ ID NO: 86998 - protein, 10 aa, synthetic construct
TFDRGDYNSL

SEQ ID NO: 86999 - protein, 10 aa, synthetic construct
TFDRGDYTSM

SEQ ID NO: 87000 - protein, 10 aa, synthetic construct
TFDRGDFQNT

SEQ ID NO: 87001 - protein, 10 aa, synthetic construct
TFERGDYNSL

SEQ ID NO: 87002 - protein, 10 aa, synthetic construct
TFERGDYTSM

SEQ ID NO: 87003 - protein, 10 aa, synthetic construct
TFERGDFQNT

SEQ ID NO: 87004 - protein, 10 aa, synthetic construct
TKGRGDFNNT

SEQ ID NO: 87005 - protein, 10 aa, synthetic construct
DGHRGDRSQT

SEQ ID NO: 87006 - protein, 10 aa, synthetic construct
TKGRGDFNNL

SEQ ID NO: 87007 - protein, 10 aa, synthetic construct
TKARGDFNNT

SEQ ID NO: 87008 - protein, 10 aa, synthetic construct
TKARGDFNNL

SEQ ID NO: 87009 - protein, 10 aa, synthetic construct
TKVRGDYNSL

SEQ ID NO: 87010 - protein, 10 aa, synthetic construct
TKVRGDYTSM

SEQ ID NO: 87011 - protein, 10 aa, synthetic construct
TKVRGDFQNT

SEQ ID NO: 87012 - protein, 10 aa, synthetic construct
TKPRGDFNNT

SEQ ID NO: 87013 - protein, 10 aa, synthetic construct
TKPRGDFNNL

SEQ ID NO: 87014 - protein, 10 aa, synthetic construct
TKLRGDYNSL

SEQ ID NO: 87015 - protein, 10 aa, synthetic construct
TKLRGDYTSM

SEQ ID NO: 87016 - protein, 10 aa, synthetic construct
DGSRGDRGQI

SEQ ID NO: 87017 - protein, 10 aa, synthetic construct
TKLRGDFQNT

SEQ ID NO: 87018 - protein, 10 aa, synthetic construct
TKIRGDYTSV

SEQ ID NO: 87019 - protein, 10 aa, synthetic construct
TKMRGDYTSV

SEQ ID NO: 87020 - protein, 10 aa, synthetic construct
TKWRGDYNSL

SEQ ID NO: 87021 - protein, 10 aa, synthetic construct
TKWRGDYTSM

SEQ ID NO: 87022 - protein, 10 aa, synthetic construct
TKWRGDFQNT

SEQ ID NO: 87023 - protein, 10 aa, synthetic construct
TKFRGDYTSV

SEQ ID NO: 87024 - protein, 10 aa, synthetic construct
TKRRGDFNNT

SEQ ID NO: 87025 - protein, 10 aa, synthetic construct
TKRRGDFNNL

SEQ ID NO: 87026 - protein, 10 aa, synthetic construct
TKHRGDYNSL

SEQ ID NO: 87027 - protein, 10 aa, synthetic construct
DGSRGDRQGI

SEQ ID NO: 87028 - protein, 10 aa, synthetic construct
TKHRGDYTSM

SEQ ID NO: 87029 - protein, 10 aa, synthetic construct
TKHRGDFQNT

SEQ ID NO: 87030 - protein, 10 aa, synthetic construct
TKSRGDYNSL

SEQ ID NO: 87031 - protein, 10 aa, synthetic construct
TKSRGDYTSM

SEQ ID NO: 87032 - protein, 10 aa, synthetic construct
TKSRGDFQNT

SEQ ID NO: 87033 - protein, 10 aa, synthetic construct
TKTRGDYNSL

SEQ ID NO: 87034 - protein, 10 aa, synthetic construct
TKTRGDYTSM

SEQ ID NO: 87035 - protein, 10 aa, synthetic construct
TKTRGDFQNT

SEQ ID NO: 87036 - protein, 10 aa, synthetic construct
TKYRGDYTSV

SEQ ID NO: 87037 - protein, 10 aa, synthetic construct
TKQRGDYNSL

SEQ ID NO: 87038 - protein, 10 aa, synthetic construct
DGSRGDRSVV

SEQ ID NO: 87039 - protein, 10 aa, synthetic construct
TKQRGDYTSM

SEQ ID NO: 87040 - protein, 10 aa, synthetic construct
TKQRGDFQNT

SEQ ID NO: 87041 - protein, 10 aa, synthetic construct
TKDRGDYNSL

SEQ ID NO: 87042 - protein, 10 aa, synthetic construct
TKDRGDYTSM

SEQ ID NO: 87043 - protein, 10 aa, synthetic construct
TKDRGDFQNT

SEQ ID NO: 87044 - protein, 10 aa, synthetic construct
TKERGDYNSL

SEQ ID NO: 87045 - protein, 10 aa, synthetic construct
TKERGDYTSM

SEQ ID NO: 87046 - protein, 10 aa, synthetic construct
TKERGDFQNT

SEQ ID NO: 87047 - protein, 10 aa, synthetic construct
TRIRGDFNNT

SEQ ID NO: 87048 - protein, 10 aa, synthetic construct
TRIRGDFNNL

SEQ ID NO: 87049 - protein, 10 aa, synthetic construct
DGSRGDRGVV

SEQ ID NO: 87050 - protein, 10 aa, synthetic construct
TRMRGDFNNT

SEQ ID NO: 87051 - protein, 10 aa, synthetic construct
TRMRGDFNNL

SEQ ID NO: 87052 - protein, 10 aa, synthetic construct
TRFRGDFNNT

SEQ ID NO: 87053 - protein, 10 aa, synthetic construct
TRFRGDFNNL

SEQ ID NO: 87054 - protein, 10 aa, synthetic construct
TRKRGDFNNT

SEQ ID NO: 87055 - protein, 10 aa, synthetic construct
TRKRGDFNNL

SEQ ID NO: 87056 - protein, 10 aa, synthetic construct
TRYRGDFNNT

SEQ ID NO: 87057 - protein, 10 aa, synthetic construct
TRYRGDFNNL

SEQ ID NO: 87058 - protein, 10 aa, synthetic construct
TRNRGDFNNT

SEQ ID NO: 87059 - protein, 10 aa, synthetic construct
TRNRGDFNNL

SEQ ID NO: 87060 - protein, 10 aa, synthetic construct
DGSRGDRSQT

SEQ ID NO: 87061 - protein, 10 aa, synthetic construct
THVRGDFNNT

SEQ ID NO: 87062 - protein, 10 aa, synthetic construct
THVRGDFNNL

SEQ ID NO: 87063 - protein, 10 aa, synthetic construct
THLRGDFNNT

SEQ ID NO: 87064 - protein, 10 aa, synthetic construct
THLRGDFNNL

SEQ ID NO: 87065 - protein, 10 aa, synthetic construct
THIRGDYNSL

SEQ ID NO: 87066 - protein, 10 aa, synthetic construct
THIRGDYTSM

SEQ ID NO: 87067 - protein, 10 aa, synthetic construct
THIRGDFQNT

SEQ ID NO: 87068 - protein, 10 aa, synthetic construct
THMRGDYNSL

SEQ ID NO: 87069 - protein, 10 aa, synthetic construct
THMRGDYTSM

SEQ ID NO: 87070 - protein, 10 aa, synthetic construct
THMRGDFQNT

SEQ ID NO: 87071 - protein, 10 aa, synthetic construct
NFFRGDRQGI

SEQ ID NO: 87072 - protein, 10 aa, synthetic construct
DGTRGDRGQI

SEQ ID NO: 87073 - protein, 10 aa, synthetic construct
THWRGDFNNT

SEQ ID NO: 87074 - protein, 10 aa, synthetic construct
THWRGDFNNL

SEQ ID NO: 87075 - protein, 10 aa, synthetic construct
THFRGDYNSL

SEQ ID NO: 87076 - protein, 10 aa, synthetic construct
THFRGDYTSM

SEQ ID NO: 87077 - protein, 10 aa, synthetic construct
THFRGDFQNT

SEQ ID NO: 87078 - protein, 10 aa, synthetic construct
THKRGDYNSL

SEQ ID NO: 87079 - protein, 10 aa, synthetic construct
THKRGDYTSM

SEQ ID NO: 87080 - protein, 10 aa, synthetic construct
THKRGDFQNT

SEQ ID NO: 87081 - protein, 10 aa, synthetic construct
THHRGDFNNT

SEQ ID NO: 87082 - protein, 10 aa, synthetic construct
THHRGDFNNL

SEQ ID NO: 87083 - protein, 10 aa, synthetic construct
DGTRGDRQGI

SEQ ID NO: 87084 - protein, 10 aa, synthetic construct
THSRGDFNNT

SEQ ID NO: 87085 - protein, 10 aa, synthetic construct
THSRGDFNNL

SEQ ID NO: 87086 - protein, 10 aa, synthetic construct
THTRGDFNNT

SEQ ID NO: 87087 - protein, 10 aa, synthetic construct
THTRGDFNNL

SEQ ID NO: 87088 - protein, 10 aa, synthetic construct
THYRGDYNSL

SEQ ID NO: 87089 - protein, 10 aa, synthetic construct
THYRGDYTSM

SEQ ID NO: 87090 - protein, 10 aa, synthetic construct
THYRGDFQNT

SEQ ID NO: 87091 - protein, 10 aa, synthetic construct
THNRGDYNSL

SEQ ID NO: 87092 - protein, 10 aa, synthetic construct
THNRGDYTSM

SEQ ID NO: 87093 - protein, 10 aa, synthetic construct
THNRGDFQNT

SEQ ID NO: 87094 - protein, 10 aa, synthetic construct
DGTRGDRSVV

SEQ ID NO: 87095 - protein, 10 aa, synthetic construct
THQRGDFNNT

SEQ ID NO: 87096 - protein, 10 aa, synthetic construct
THQRGDFNNL

SEQ ID NO: 87097 - protein, 10 aa, synthetic construct
THDRGDFNNT

SEQ ID NO: 87098 - protein, 10 aa, synthetic construct
THDRGDFNNL

SEQ ID NO: 87099 - protein, 10 aa, synthetic construct
THERGDFNNT

SEQ ID NO: 87100 - protein, 10 aa, synthetic construct
THERGDFNNL

SEQ ID NO: 87101 - protein, 10 aa, synthetic construct
TSIRGDFNNT

SEQ ID NO: 87102 - protein, 10 aa, synthetic construct
TSIRGDFNNL

SEQ ID NO: 87103 - protein, 10 aa, synthetic construct
TSMRGDFNNT

SEQ ID NO: 87104 - protein, 10 aa, synthetic construct
TSMRGDFNNL

SEQ ID NO: 87105 - protein, 10 aa, synthetic construct
DGTRGDRGVV

SEQ ID NO: 87106 - protein, 10 aa, synthetic construct
TSFRGDFNNT

SEQ ID NO: 87107 - protein, 10 aa, synthetic construct
TSFRGDFNNL

SEQ ID NO: 87108 - protein, 10 aa, synthetic construct
TSKRGDFNNT

SEQ ID NO: 87109 - protein, 10 aa, synthetic construct
TSKRGDFNNL

SEQ ID NO: 87110 - protein, 10 aa, synthetic construct
TSYRGDFNNT

SEQ ID NO: 87111 - protein, 10 aa, synthetic construct
TSYRGDFNNL

SEQ ID NO: 87112 - protein, 10 aa, synthetic construct
TSNRGDFNNT

SEQ ID NO: 87113 - protein, 10 aa, synthetic construct
TSNRGDFNNL

SEQ ID NO: 87114 - protein, 10 aa, synthetic construct
TTVRGDFNNT

SEQ ID NO: 87115 - protein, 10 aa, synthetic construct
TTVRGDFNNL

SEQ ID NO: 87116 - protein, 10 aa, synthetic construct
DGTRGDRSQT

SEQ ID NO: 87117 - protein, 10 aa, synthetic construct
TTLRGDFNNT

SEQ ID NO: 87118 - protein, 10 aa, synthetic construct
TTLRGDFNNL

SEQ ID NO: 87119 - protein, 10 aa, synthetic construct
TTIRGDYNSL

SEQ ID NO: 87120 - protein, 10 aa, synthetic construct
TTIRGDYTSM

SEQ ID NO: 87121 - protein, 10 aa, synthetic construct
TTIRGDFQNT

SEQ ID NO: 87122 - protein, 10 aa, synthetic construct
TTMRGDYNSL

SEQ ID NO: 87123 - protein, 10 aa, synthetic construct
TTMRGDYTSM

SEQ ID NO: 87124 - protein, 10 aa, synthetic construct
TTMRGDFQNT

SEQ ID NO: 87125 - protein, 10 aa, synthetic construct
TTWRGDFNNT

SEQ ID NO: 87126 - protein, 10 aa, synthetic construct
TTWRGDFNNL

SEQ ID NO: 87127 - protein, 10 aa, synthetic construct
DGQRGDRGQI

SEQ ID NO: 87128 - protein, 10 aa, synthetic construct
TTFRGDYNSL

SEQ ID NO: 87129 - protein, 10 aa, synthetic construct
TTFRGDYTSM

SEQ ID NO: 87130 - protein, 10 aa, synthetic construct
TTFRGDFQNT

SEQ ID NO: 87131 - protein, 10 aa, synthetic construct
TTKRGDYNSL

SEQ ID NO: 87132 - protein, 10 aa, synthetic construct
TTKRGDYTSM

SEQ ID NO: 87133 - protein, 10 aa, synthetic construct
TTKRGDFQNT

SEQ ID NO: 87134 - protein, 10 aa, synthetic construct
TTHRGDFNNT

SEQ ID NO: 87135 - protein, 10 aa, synthetic construct
TTHRGDFNNL

SEQ ID NO: 87136 - protein, 10 aa, synthetic construct
TTSRGDFNNT

SEQ ID NO: 87137 - protein, 10 aa, synthetic construct
TTSRGDFNNL

SEQ ID NO: 87138 - protein, 10 aa, synthetic construct
DGQRGDRQGI

SEQ ID NO: 87139 - protein, 10 aa, synthetic construct
TTTRGDFNNT

SEQ ID NO: 87140 - protein, 10 aa, synthetic construct
TTTRGDFNNL

SEQ ID NO: 87141 - protein, 10 aa, synthetic construct
TTYRGDYNSL

SEQ ID NO: 87142 - protein, 10 aa, synthetic construct
TTYRGDYTSM

SEQ ID NO: 87143 - protein, 10 aa, synthetic construct
TTYRGDFQNT

SEQ ID NO: 87144 - protein, 10 aa, synthetic construct
TTNRGDYNSL

SEQ ID NO: 87145 - protein, 10 aa, synthetic construct
TTNRGDYTSM

SEQ ID NO: 87146 - protein, 10 aa, synthetic construct
TTNRGDFQNT

SEQ ID NO: 87147 - protein, 10 aa, synthetic construct
TTQRGDFNNT

SEQ ID NO: 87148 - protein, 10 aa, synthetic construct
TTQRGDFNNL

SEQ ID NO: 87149 - protein, 10 aa, synthetic construct
DGQRGDRSVV

SEQ ID NO: 87150 - protein, 10 aa, synthetic construct
TTDRGDFNNT

SEQ ID NO: 87151 - protein, 10 aa, synthetic construct
TTDRGDFNNL

SEQ ID NO: 87152 - protein, 10 aa, synthetic construct
TTERGDFNNT

SEQ ID NO: 87153 - protein, 10 aa, synthetic construct
TTERGDFNNL

SEQ ID NO: 87154 - protein, 10 aa, synthetic construct
TYGRGDFNNT

SEQ ID NO: 87155 - protein, 10 aa, synthetic construct
TYGRGDFNNL

SEQ ID NO: 87156 - protein, 10 aa, synthetic construct
TYARGDFNNT

SEQ ID NO: 87157 - protein, 10 aa, synthetic construct
TYARGDFNNL

SEQ ID NO: 87158 - protein, 10 aa, synthetic construct
TYVRGDYNSL

SEQ ID NO: 87159 - protein, 10 aa, synthetic construct
TYVRGDYTSM

SEQ ID NO: 87160 - protein, 10 aa, synthetic construct
DGQRGDRGVV

SEQ ID NO: 87161 - protein, 10 aa, synthetic construct
TYVRGDFQNT

SEQ ID NO: 87162 - protein, 10 aa, synthetic construct
TYPRGDFNNT

SEQ ID NO: 87163 - protein, 10 aa, synthetic construct
TYPRGDFNNL

SEQ ID NO: 87164 - protein, 10 aa, synthetic construct
TYLRGDYNSL

SEQ ID NO: 87165 - protein, 10 aa, synthetic construct
TYLRGDYTSM

SEQ ID NO: 87166 - protein, 10 aa, synthetic construct
TYLRGDFQNT

SEQ ID NO: 87167 - protein, 10 aa, synthetic construct
TYIRGDYTSV

SEQ ID NO: 87168 - protein, 10 aa, synthetic construct
TYMRGDYTSV

SEQ ID NO: 87169 - protein, 10 aa, synthetic construct
TYWRGDYNSL

SEQ ID NO: 87170 - protein, 10 aa, synthetic construct
TYWRGDYTSM

SEQ ID NO: 87171 - protein, 10 aa, synthetic construct
DGQRGDRSQT

SEQ ID NO: 87172 - protein, 10 aa, synthetic construct
TYWRGDFQNT

SEQ ID NO: 87173 - protein, 10 aa, synthetic construct
TYFRGDYTSV

SEQ ID NO: 87174 - protein, 10 aa, synthetic construct
TYKRGDYTSV

SEQ ID NO: 87175 - protein, 10 aa, synthetic construct
TYRRGDFNNT

SEQ ID NO: 87176 - protein, 10 aa, synthetic construct
TYRRGDFNNL

SEQ ID NO: 87177 - protein, 10 aa, synthetic construct
TYHRGDYNSL

SEQ ID NO: 87178 - protein, 10 aa, synthetic construct
TYHRGDYTSM

SEQ ID NO: 87179 - protein, 10 aa, synthetic construct
TYHRGDFQNT

SEQ ID NO: 87180 - protein, 10 aa, synthetic construct
TYSRGDYNSL

SEQ ID NO: 87181 - protein, 10 aa, synthetic construct
TYSRGDYTSM

SEQ ID NO: 87182 - protein, 10 aa, synthetic construct
NFFRGDYVGL

SEQ ID NO: 87183 - protein, 10 aa, synthetic construct
DGDRGDRGQI

SEQ ID NO: 87184 - protein, 10 aa, synthetic construct
TYSRGDFQNT

SEQ ID NO: 87185 - protein, 10 aa, synthetic construct
TYTRGDYNSL

SEQ ID NO: 87186 - protein, 10 aa, synthetic construct
TYTRGDYTSM

SEQ ID NO: 87187 - protein, 10 aa, synthetic construct
TYTRGDFQNT

SEQ ID NO: 87188 - protein, 10 aa, synthetic construct
TYYRGDYTSV

SEQ ID NO: 87189 - protein, 10 aa, synthetic construct
TYNRGDYTSV

SEQ ID NO: 87190 - protein, 10 aa, synthetic construct
TYQRGDYNSL

SEQ ID NO: 87191 - protein, 10 aa, synthetic construct
TYQRGDYTSM

SEQ ID NO: 87192 - protein, 10 aa, synthetic construct
TYQRGDFQNT

SEQ ID NO: 87193 - protein, 10 aa, synthetic construct
TYDRGDYNSL

SEQ ID NO: 87194 - protein, 10 aa, synthetic construct
DGDRGDRQGI

SEQ ID NO: 87195 - protein, 10 aa, synthetic construct
TYDRGDYTSM

SEQ ID NO: 87196 - protein, 10 aa, synthetic construct
TYDRGDFQNT

SEQ ID NO: 87197 - protein, 10 aa, synthetic construct
TYERGDYNSL

SEQ ID NO: 87198 - protein, 10 aa, synthetic construct
TYERGDYTSM

SEQ ID NO: 87199 - protein, 10 aa, synthetic construct
TYERGDFQNT

SEQ ID NO: 87200 - protein, 10 aa, synthetic construct
TNGRGDFNNT

SEQ ID NO: 87201 - protein, 10 aa, synthetic construct
TNGRGDFNNL

SEQ ID NO: 87202 - protein, 10 aa, synthetic construct
TNARGDFNNT

SEQ ID NO: 87203 - protein, 10 aa, synthetic construct
TNARGDFNNL

SEQ ID NO: 87204 - protein, 10 aa, synthetic construct
TNVRGDYNSL

SEQ ID NO: 87205 - protein, 10 aa, synthetic construct
DGDRGDRSVV

SEQ ID NO: 87206 - protein, 10 aa, synthetic construct
TNVRGDYTSM

SEQ ID NO: 87207 - protein, 10 aa, synthetic construct
TNVRGDFQNT

SEQ ID NO: 87208 - protein, 10 aa, synthetic construct
TNPRGDFNNT

SEQ ID NO: 87209 - protein, 10 aa, synthetic construct
TNPRGDFNNL

SEQ ID NO: 87210 - protein, 10 aa, synthetic construct
TNLRGDYNSL

SEQ ID NO: 87211 - protein, 10 aa, synthetic construct
TNLRGDYTSM

SEQ ID NO: 87212 - protein, 10 aa, synthetic construct
TNLRGDFQNT

SEQ ID NO: 87213 - protein, 10 aa, synthetic construct
TNIRGDYTSV

SEQ ID NO: 87214 - protein, 10 aa, synthetic construct
TNMRGDYTSV

SEQ ID NO: 87215 - protein, 10 aa, synthetic construct
TNWRGDYNSL

SEQ ID NO: 87216 - protein, 10 aa, synthetic construct
DGDRGDRGVV

SEQ ID NO: 87217 - protein, 10 aa, synthetic construct
TNWRGDYTSM

SEQ ID NO: 87218 - protein, 10 aa, synthetic construct
TNWRGDFQNT

SEQ ID NO: 87219 - protein, 10 aa, synthetic construct
TNFRGDYTSV

SEQ ID NO: 87220 - protein, 10 aa, synthetic construct
TNKRGDYTSV

SEQ ID NO: 87221 - protein, 10 aa, synthetic construct
TNRRGDFNNT

SEQ ID NO: 87222 - protein, 10 aa, synthetic construct
TNRRGDFNNL

SEQ ID NO: 87223 - protein, 10 aa, synthetic construct
TNHRGDYNSL

SEQ ID NO: 87224 - protein, 10 aa, synthetic construct
TNHRGDYTSM

SEQ ID NO: 87225 - protein, 10 aa, synthetic construct
TNHRGDFQNT

SEQ ID NO: 87226 - protein, 10 aa, synthetic construct
TNSRGDYNSL

SEQ ID NO: 87227 - protein, 10 aa, synthetic construct
DGDRGDRSQT

SEQ ID NO: 87228 - protein, 10 aa, synthetic construct
TNSRGDYTSM

SEQ ID NO: 87229 - protein, 10 aa, synthetic construct
TNSRGDFQNT

SEQ ID NO: 87230 - protein, 10 aa, synthetic construct
TNTRGDYNSL

SEQ ID NO: 87231 - protein, 10 aa, synthetic construct
TNTRGDYTSM

SEQ ID NO: 87232 - protein, 10 aa, synthetic construct
TNTRGDFQNT

SEQ ID NO: 87233 - protein, 10 aa, synthetic construct
TNYRGDYTSV

SEQ ID NO: 87234 - protein, 10 aa, synthetic construct
TNNRGDYTSV

SEQ ID NO: 87235 - protein, 10 aa, synthetic construct
TNQRGDYNSL

SEQ ID NO: 87236 - protein, 10 aa, synthetic construct
TNQRGDYTSM

SEQ ID NO: 87237 - protein, 10 aa, synthetic construct
TNQRGDFQNT

SEQ ID NO: 87238 - protein, 10 aa, synthetic construct
DGERGDRGQI

SEQ ID NO: 87239 - protein, 10 aa, synthetic construct
TNDRGDYNSL

SEQ ID NO: 87240 - protein, 10 aa, synthetic construct
TNDRGDYTSM

SEQ ID NO: 87241 - protein, 10 aa, synthetic construct
TNDRGDFQNT

SEQ ID NO: 87242 - protein, 10 aa, synthetic construct
TNERGDYNSL

SEQ ID NO: 87243 - protein, 10 aa, synthetic construct
TNERGDYTSM

SEQ ID NO: 87244 - protein, 10 aa, synthetic construct
TNERGDFQNT

SEQ ID NO: 87245 - protein, 10 aa, synthetic construct
TQVRGDFNNT

SEQ ID NO: 87246 - protein, 10 aa, synthetic construct
TQVRGDFNNL

SEQ ID NO: 87247 - protein, 10 aa, synthetic construct
TQLRGDFNNT

SEQ ID NO: 87248 - protein, 10 aa, synthetic construct
TQLRGDFNNL

SEQ ID NO: 87249 - protein, 10 aa, synthetic construct
DGERGDRQGI

SEQ ID NO: 87250 - protein, 10 aa, synthetic construct
TQIRGDYNSL

SEQ ID NO: 87251 - protein, 10 aa, synthetic construct
TQIRGDYTSM

SEQ ID NO: 87252 - protein, 10 aa, synthetic construct
TQIRGDFQNT

SEQ ID NO: 87253 - protein, 10 aa, synthetic construct
TQMRGDYNSL

SEQ ID NO: 87254 - protein, 10 aa, synthetic construct
TQMRGDYTSM

SEQ ID NO: 87255 - protein, 10 aa, synthetic construct
TQMRGDFQNT

SEQ ID NO: 87256 - protein, 10 aa, synthetic construct
TQWRGDFNNT

SEQ ID NO: 87257 - protein, 10 aa, synthetic construct
TQWRGDFNNL

SEQ ID NO: 87258 - protein, 10 aa, synthetic construct
TQFRGDYNSL

SEQ ID NO: 87259 - protein, 10 aa, synthetic construct
TQFRGDYTSM

SEQ ID NO: 87260 - protein, 10 aa, synthetic construct
DGERGDRSVV

SEQ ID NO: 87261 - protein, 10 aa, synthetic construct
TQFRGDFQNT

SEQ ID NO: 87262 - protein, 10 aa, synthetic construct
TQKRGDYNSL

SEQ ID NO: 87263 - protein, 10 aa, synthetic construct
TQKRGDYTSM

SEQ ID NO: 87264 - protein, 10 aa, synthetic construct
TQKRGDFQNT

SEQ ID NO: 87265 - protein, 10 aa, synthetic construct
TQHRGDFNNT

SEQ ID NO: 87266 - protein, 10 aa, synthetic construct
TQHRGDFNNL

SEQ ID NO: 87267 - protein, 10 aa, synthetic construct
TQSRGDFNNT

SEQ ID NO: 87268 - protein, 10 aa, synthetic construct
TQSRGDFNNL

SEQ ID NO: 87269 - protein, 10 aa, synthetic construct
TQTRGDFNNT

SEQ ID NO: 87270 - protein, 10 aa, synthetic construct
TQTRGDFNNL

SEQ ID NO: 87271 - protein, 10 aa, synthetic construct
DGERGDRGVV

SEQ ID NO: 87272 - protein, 10 aa, synthetic construct
TQYRGDYNSL

SEQ ID NO: 87273 - protein, 10 aa, synthetic construct
TQYRGDYTSM

SEQ ID NO: 87274 - protein, 10 aa, synthetic construct
TQYRGDFQNT

SEQ ID NO: 87275 - protein, 10 aa, synthetic construct
TQNRGDYNSL

SEQ ID NO: 87276 - protein, 10 aa, synthetic construct
TQNRGDYTSM

SEQ ID NO: 87277 - protein, 10 aa, synthetic construct
TQNRGDFQNT

SEQ ID NO: 87278 - protein, 10 aa, synthetic construct
TQQRGDFNNT

SEQ ID NO: 87279 - protein, 10 aa, synthetic construct
TQQRGDFNNL

SEQ ID NO: 87280 - protein, 10 aa, synthetic construct
TQDRGDFNNT

SEQ ID NO: 87281 - protein, 10 aa, synthetic construct
TQDRGDFNNL

SEQ ID NO: 87282 - protein, 10 aa, synthetic construct
DGERGDRSQT

SEQ ID NO: 87283 - protein, 10 aa, synthetic construct
TQERGDFNNT

SEQ ID NO: 87284 - protein, 10 aa, synthetic construct
TQERGDFNNL

SEQ ID NO: 87285 - protein, 10 aa, synthetic construct
TDVRGDFNNT

SEQ ID NO: 87286 - protein, 10 aa, synthetic construct
TDVRGDFNNL

SEQ ID NO: 87287 - protein, 10 aa, synthetic construct
TDLRGDFNNT

SEQ ID NO: 87288 - protein, 10 aa, synthetic construct
TDLRGDFNNL

SEQ ID NO: 87289 - protein, 10 aa, synthetic construct
TDIRGDYNSL

SEQ ID NO: 87290 - protein, 10 aa, synthetic construct
TDIRGDYTSM

SEQ ID NO: 87291 - protein, 10 aa, synthetic construct
TDIRGDFQNT

SEQ ID NO: 87292 - protein, 10 aa, synthetic construct
TDMRGDYNSL

SEQ ID NO: 87293 - protein, 10 aa, synthetic construct
TKNRGDHGVL

SEQ ID NO: 87294 - protein, 10 aa, synthetic construct
NFFRGDLIGR

SEQ ID NO: 87295 - protein, 10 aa, synthetic construct
DAGRGDHGVL

SEQ ID NO: 87296 - protein, 10 aa, synthetic construct
TDMRGDYTSM

SEQ ID NO: 87297 - protein, 10 aa, synthetic construct
TDMRGDFQNT

SEQ ID NO: 87298 - protein, 10 aa, synthetic construct
TDWRGDFNNT

SEQ ID NO: 87299 - protein, 10 aa, synthetic construct
TDWRGDFNNL

SEQ ID NO: 87300 - protein, 10 aa, synthetic construct
TDFRGDYNSL

SEQ ID NO: 87301 - protein, 10 aa, synthetic construct
TDFRGDYTSM

SEQ ID NO: 87302 - protein, 10 aa, synthetic construct
TDFRGDFQNT

SEQ ID NO: 87303 - protein, 10 aa, synthetic construct
TDKRGDYNSL

SEQ ID NO: 87304 - protein, 10 aa, synthetic construct
TDKRGDYTSM

SEQ ID NO: 87305 - protein, 10 aa, synthetic construct
TDKRGDFQNT

SEQ ID NO: 87306 - protein, 10 aa, synthetic construct
DAGRGDYVGL

SEQ ID NO: 87307 - protein, 10 aa, synthetic construct
TDHRGDFNNT

SEQ ID NO: 87308 - protein, 10 aa, synthetic construct
TDHRGDFNNL

SEQ ID NO: 87309 - protein, 10 aa, synthetic construct
TDSRGDFNNT

SEQ ID NO: 87310 - protein, 10 aa, synthetic construct
TDSRGDFNNL

SEQ ID NO: 87311 - protein, 10 aa, synthetic construct
TDTRGDFNNT

SEQ ID NO: 87312 - protein, 10 aa, synthetic construct
TDTRGDFNNL

SEQ ID NO: 87313 - protein, 10 aa, synthetic construct
TDYRGDYNSL

SEQ ID NO: 87314 - protein, 10 aa, synthetic construct
TDYRGDYTSM

SEQ ID NO: 87315 - protein, 10 aa, synthetic construct
TDYRGDFQNT

SEQ ID NO: 87316 - protein, 10 aa, synthetic construct
TDNRGDYNSL

SEQ ID NO: 87317 - protein, 10 aa, synthetic construct
DAGRGDQSTL

SEQ ID NO: 87318 - protein, 10 aa, synthetic construct
TDNRGDYTSM

SEQ ID NO: 87319 - protein, 10 aa, synthetic construct
TDNRGDFQNT

SEQ ID NO: 87320 - protein, 10 aa, synthetic construct
TDQRGDFNNT

SEQ ID NO: 87321 - protein, 10 aa, synthetic construct
TDQRGDFNNL

SEQ ID NO: 87322 - protein, 10 aa, synthetic construct
TDDRGDFNNT

SEQ ID NO: 87323 - protein, 10 aa, synthetic construct
TDDRGDFNNL

SEQ ID NO: 87324 - protein, 10 aa, synthetic construct
TDERGDFNNT

SEQ ID NO: 87325 - protein, 10 aa, synthetic construct
TDERGDFNNL

SEQ ID NO: 87326 - protein, 10 aa, synthetic construct
TEVRGDFNNT

SEQ ID NO: 87327 - protein, 10 aa, synthetic construct
TEVRGDFNNL

SEQ ID NO: 87328 - protein, 10 aa, synthetic construct
DAGRGDLLLS

SEQ ID NO: 87329 - protein, 10 aa, synthetic construct
TELRGDFNNT

SEQ ID NO: 87330 - protein, 10 aa, synthetic construct
TELRGDFNNL

SEQ ID NO: 87331 - protein, 10 aa, synthetic construct
TEIRGDYNSL

SEQ ID NO: 87332 - protein, 10 aa, synthetic construct
TEIRGDYTSM

SEQ ID NO: 87333 - protein, 10 aa, synthetic construct
TEIRGDFQNT

SEQ ID NO: 87334 - protein, 10 aa, synthetic construct
TEMRGDYNSL

SEQ ID NO: 87335 - protein, 10 aa, synthetic construct
TEMRGDYTSM

SEQ ID NO: 87336 - protein, 10 aa, synthetic construct
TEMRGDFQNT

SEQ ID NO: 87337 - protein, 10 aa, synthetic construct
TEWRGDFNNT

SEQ ID NO: 87338 - protein, 10 aa, synthetic construct
TEWRGDFNNL

SEQ ID NO: 87339 - protein, 10 aa, synthetic construct
DAARGDHGVL

SEQ ID NO: 87340 - protein, 10 aa, synthetic construct
TEFRGDYNSL

SEQ ID NO: 87341 - protein, 10 aa, synthetic construct
TEFRGDYTSM

SEQ ID NO: 87342 - protein, 10 aa, synthetic construct
TEFRGDFQNT

SEQ ID NO: 87343 - protein, 10 aa, synthetic construct
TEKRGDYNSL

SEQ ID NO: 87344 - protein, 10 aa, synthetic construct
TEKRGDYTSM

SEQ ID NO: 87345 - protein, 10 aa, synthetic construct
TEKRGDFQNT

SEQ ID NO: 87346 - protein, 10 aa, synthetic construct
TEHRGDFNNT

SEQ ID NO: 87347 - protein, 10 aa, synthetic construct
TEHRGDFNNL

SEQ ID NO: 87348 - protein, 10 aa, synthetic construct
TESRGDFNNT

SEQ ID NO: 87349 - protein, 10 aa, synthetic construct
TESRGDFNNL

SEQ ID NO: 87350 - protein, 10 aa, synthetic construct
DAARGDYVGL

SEQ ID NO: 87351 - protein, 10 aa, synthetic construct
TETRGDFNNT

SEQ ID NO: 87352 - protein, 10 aa, synthetic construct
TETRGDFNNL

SEQ ID NO: 87353 - protein, 10 aa, synthetic construct
TEYRGDYNSL

SEQ ID NO: 87354 - protein, 10 aa, synthetic construct
TEYRGDYTSM

SEQ ID NO: 87355 - protein, 10 aa, synthetic construct
TEYRGDFQNT

SEQ ID NO: 87356 - protein, 10 aa, synthetic construct
TENRGDYNSL

SEQ ID NO: 87357 - protein, 10 aa, synthetic construct
TENRGDYTSM

SEQ ID NO: 87358 - protein, 10 aa, synthetic construct
TENRGDFQNT

SEQ ID NO: 87359 - protein, 10 aa, synthetic construct
TEQRGDFNNT

SEQ ID NO: 87360 - protein, 10 aa, synthetic construct
TEQRGDFNNL

SEQ ID NO: 87361 - protein, 10 aa, synthetic construct
DAARGDQSTL

SEQ ID NO: 87362 - protein, 10 aa, synthetic construct
TEDRGDFNNT

SEQ ID NO: 87363 - protein, 10 aa, synthetic construct
TEDRGDFNNL

SEQ ID NO: 87364 - protein, 10 aa, synthetic construct
TEERGDFNNT

SEQ ID NO: 87365 - protein, 10 aa, synthetic construct
TEERGDFNNL

SEQ ID NO: 87366 - protein, 10 aa, synthetic construct
AGIRGDFNNT

SEQ ID NO: 87367 - protein, 10 aa, synthetic construct
AGIRGDFNNL

SEQ ID NO: 87368 - protein, 10 aa, synthetic construct
AGFRGDFNNT

SEQ ID NO: 87369 - protein, 10 aa, synthetic construct
AGFRGDFNNL

SEQ ID NO: 87370 - protein, 10 aa, synthetic construct
AGKRGDFNNT

SEQ ID NO: 87371 - protein, 10 aa, synthetic construct
AGKRGDFNNL

SEQ ID NO: 87372 - protein, 10 aa, synthetic construct
DAARGDLLLS

SEQ ID NO: 87373 - protein, 10 aa, synthetic construct
AGYRGDFNNT

SEQ ID NO: 87374 - protein, 10 aa, synthetic construct
AGYRGDFNNL

SEQ ID NO: 87375 - protein, 10 aa, synthetic construct
AGNRGDFNNT

SEQ ID NO: 87376 - protein, 10 aa, synthetic construct
AGNRGDFNNL

SEQ ID NO: 87377 - protein, 10 aa, synthetic construct
AAIRGDFNNT

SEQ ID NO: 87378 - protein, 10 aa, synthetic construct
AAIRGDFNNL

SEQ ID NO: 87379 - protein, 10 aa, synthetic construct
AAFRGDFNNT

SEQ ID NO: 87380 - protein, 10 aa, synthetic construct
AAFRGDFNNL

SEQ ID NO: 87381 - protein, 10 aa, synthetic construct
AAKRGDFNNT

SEQ ID NO: 87382 - protein, 10 aa, synthetic construct
AAKRGDFNNL

SEQ ID NO: 87383 - protein, 10 aa, synthetic construct
DAVRGDRGQI

SEQ ID NO: 87384 - protein, 10 aa, synthetic construct
AAYRGDFNNT

SEQ ID NO: 87385 - protein, 10 aa, synthetic construct
AAYRGDFNNL

SEQ ID NO: 87386 - protein, 10 aa, synthetic construct
AANRGDFNNT

SEQ ID NO: 87387 - protein, 10 aa, synthetic construct
AANRGDFNNL

SEQ ID NO: 87388 - protein, 10 aa, synthetic construct
AVIRGDFQNT

SEQ ID NO: 87389 - protein, 10 aa, synthetic construct
AVMRGDFNNT

SEQ ID NO: 87390 - protein, 10 aa, synthetic construct
AVMRGDFNNL

SEQ ID NO: 87391 - protein, 10 aa, synthetic construct
AVFRGDFQNT

SEQ ID NO: 87392 - protein, 10 aa, synthetic construct
AVKRGDFQNT

SEQ ID NO: 87393 - protein, 10 aa, synthetic construct
AVHRGDFNNT

SEQ ID NO: 87394 - protein, 10 aa, synthetic construct
DAVRGDRQGI

SEQ ID NO: 87395 - protein, 10 aa, synthetic construct
AVHRGDFNNL

SEQ ID NO: 87396 - protein, 10 aa, synthetic construct
AVTRGDFNNT

SEQ ID NO: 87397 - protein, 10 aa, synthetic construct
AVTRGDFNNL

SEQ ID NO: 87398 - protein, 10 aa, synthetic construct
AVYRGDFQNT

SEQ ID NO: 87399 - protein, 10 aa, synthetic construct
AVNRGDFQNT

SEQ ID NO: 87400 - protein, 10 aa, synthetic construct
AVQRGDFNNT

SEQ ID NO: 87401 - protein, 10 aa, synthetic construct
AVQRGDFNNL

SEQ ID NO: 87402 - protein, 10 aa, synthetic construct
AVDRGDFNNT

SEQ ID NO: 87403 - protein, 10 aa, synthetic construct
AVDRGDFNNL

SEQ ID NO: 87404 - protein, 10 aa, synthetic construct
AVERGDFNNT

SEQ ID NO: 87405 - protein, 10 aa, synthetic construct
NFFRGDQSTL

SEQ ID NO: 87406 - protein, 10 aa, synthetic construct
DAVRGDRSVV

SEQ ID NO: 87407 - protein, 10 aa, synthetic construct
AVERGDFNNL

SEQ ID NO: 87408 - protein, 10 aa, synthetic construct
APIRGDFNNT

SEQ ID NO: 87409 - protein, 10 aa, synthetic construct
APIRGDFNNL

SEQ ID NO: 87410 - protein, 10 aa, synthetic construct
APFRGDFNNT

SEQ ID NO: 87411 - protein, 10 aa, synthetic construct
APFRGDFNNL

SEQ ID NO: 87412 - protein, 10 aa, synthetic construct
APKRGDFNNT

SEQ ID NO: 87413 - protein, 10 aa, synthetic construct
APKRGDFNNL

SEQ ID NO: 87414 - protein, 10 aa, synthetic construct
APYRGDFNNT

SEQ ID NO: 87415 - protein, 10 aa, synthetic construct
APYRGDFNNL

SEQ ID NO: 87416 - protein, 10 aa, synthetic construct
APNRGDFNNT

SEQ ID NO: 87417 - protein, 10 aa, synthetic construct
DAVRGDRGVV

SEQ ID NO: 87418 - protein, 10 aa, synthetic construct
APNRGDFNNL

SEQ ID NO: 87419 - protein, 10 aa, synthetic construct
ALIRGDFQNT

SEQ ID NO: 87420 - protein, 10 aa, synthetic construct
ALMRGDFNNT

SEQ ID NO: 87421 - protein, 10 aa, synthetic construct
ALMRGDFNNL

SEQ ID NO: 87422 - protein, 10 aa, synthetic construct
ALFRGDFQNT

SEQ ID NO: 87423 - protein, 10 aa, synthetic construct
ALKRGDFQNT

SEQ ID NO: 87424 - protein, 10 aa, synthetic construct
ALHRGDFNNT

SEQ ID NO: 87425 - protein, 10 aa, synthetic construct
ALHRGDFNNL

SEQ ID NO: 87426 - protein, 10 aa, synthetic construct
ALTRGDFNNT

SEQ ID NO: 87427 - protein, 10 aa, synthetic construct
ALTRGDFNNL

SEQ ID NO: 87428 - protein, 10 aa, synthetic construct
DAVRGDRSQT

SEQ ID NO: 87429 - protein, 10 aa, synthetic construct
ALYRGDFQNT

SEQ ID NO: 87430 - protein, 10 aa, synthetic construct
ALNRGDFQNT

SEQ ID NO: 87431 - protein, 10 aa, synthetic construct
ALQRGDFNNT

SEQ ID NO: 87432 - protein, 10 aa, synthetic construct
ALQRGDFNNL

SEQ ID NO: 87433 - protein, 10 aa, synthetic construct
ALDRGDFNNT

SEQ ID NO: 87434 - protein, 10 aa, synthetic construct
ALDRGDFNNL

SEQ ID NO: 87435 - protein, 10 aa, synthetic construct
ALERGDFNNT

SEQ ID NO: 87436 - protein, 10 aa, synthetic construct
ALERGDFNNL

SEQ ID NO: 87437 - protein, 10 aa, synthetic construct
AIGRGDFNNT

SEQ ID NO: 87438 - protein, 10 aa, synthetic construct
AIGRGDFNNL

SEQ ID NO: 87439 - protein, 10 aa, synthetic construct
DAPRGDHGVL

SEQ ID NO: 87440 - protein, 10 aa, synthetic construct
AIARGDFNNT

SEQ ID NO: 87441 - protein, 10 aa, synthetic construct
AIARGDFNNL

SEQ ID NO: 87442 - protein, 10 aa, synthetic construct
AIVRGDFNNT

SEQ ID NO: 87443 - protein, 10 aa, synthetic construct
AIVRGDFNNL

SEQ ID NO: 87444 - protein, 10 aa, synthetic construct
AIPRGDFNNT

SEQ ID NO: 87445 - protein, 10 aa, synthetic construct
AIPRGDFNNL

SEQ ID NO: 87446 - protein, 10 aa, synthetic construct
AILRGDFNNT

SEQ ID NO: 87447 - protein, 10 aa, synthetic construct
AILRGDFNNL

SEQ ID NO: 87448 - protein, 10 aa, synthetic construct
AIIRGDHVNL

SEQ ID NO: 87449 - protein, 10 aa, synthetic construct
AIIRGDYNSL

SEQ ID NO: 87450 - protein, 10 aa, synthetic construct
DAPRGDYVGL

SEQ ID NO: 87451 - protein, 10 aa, synthetic construct
AIIRGDYTSM

SEQ ID NO: 87452 - protein, 10 aa, synthetic construct
AIMRGDYNSL

SEQ ID NO: 87453 - protein, 10 aa, synthetic construct
AIMRGDYTSM

SEQ ID NO: 87454 - protein, 10 aa, synthetic construct
AIMRGDFQNT

SEQ ID NO: 87455 - protein, 10 aa, synthetic construct
AIWRGDFNNT

SEQ ID NO: 87456 - protein, 10 aa, synthetic construct
AIWRGDFNNL

SEQ ID NO: 87457 - protein, 10 aa, synthetic construct
AIFRGDHVNL

SEQ ID NO: 87458 - protein, 10 aa, synthetic construct
AIFRGDYNSL

SEQ ID NO: 87459 - protein, 10 aa, synthetic construct
AIFRGDYTSM

SEQ ID NO: 87460 - protein, 10 aa, synthetic construct
AIKRGDHVNL

SEQ ID NO: 87461 - protein, 10 aa, synthetic construct
DAPRGDQSTL

SEQ ID NO: 87462 - protein, 10 aa, synthetic construct
AIKRGDYNSL

SEQ ID NO: 87463 - protein, 10 aa, synthetic construct
AIKRGDYTSM

SEQ ID NO: 87464 - protein, 10 aa, synthetic construct
AIRRGDFNNT

SEQ ID NO: 87465 - protein, 10 aa, synthetic construct
AIRRGDFNNL

SEQ ID NO: 87466 - protein, 10 aa, synthetic construct
AIHRGDFQNT

SEQ ID NO: 87467 - protein, 10 aa, synthetic construct
AISRGDFNNT

SEQ ID NO: 87468 - protein, 10 aa, synthetic construct
AISRGDFNNL

SEQ ID NO: 87469 - protein, 10 aa, synthetic construct
AITRGDFQNT

SEQ ID NO: 87470 - protein, 10 aa, synthetic construct
AIYRGDHVNL

SEQ ID NO: 87471 - protein, 10 aa, synthetic construct
AIYRGDYNSL

SEQ ID NO: 87472 - protein, 10 aa, synthetic construct
DAPRGDLLLS

SEQ ID NO: 87473 - protein, 10 aa, synthetic construct
AIYRGDYTSM

SEQ ID NO: 87474 - protein, 10 aa, synthetic construct
AINRGDHVNL

SEQ ID NO: 87475 - protein, 10 aa, synthetic construct
AINRGDYNSL

SEQ ID NO: 87476 - protein, 10 aa, synthetic construct
AINRGDYTSM

SEQ ID NO: 87477 - protein, 10 aa, synthetic construct
AIQRGDFQNT

SEQ ID NO: 87478 - protein, 10 aa, synthetic construct
AIDRGDFQNT

SEQ ID NO: 87479 - protein, 10 aa, synthetic construct
AIERGDFQNT

SEQ ID NO: 87480 - protein, 10 aa, synthetic construct
AMGRGDFNNT

SEQ ID NO: 87481 - protein, 10 aa, synthetic construct
AMGRGDFNNL

SEQ ID NO: 87482 - protein, 10 aa, synthetic construct
AMARGDFNNT

SEQ ID NO: 87483 - protein, 10 aa, synthetic construct
DALRGDRGQI

SEQ ID NO: 87484 - protein, 10 aa, synthetic construct
AMARGDFNNL

SEQ ID NO: 87485 - protein, 10 aa, synthetic construct
AMVRGDFNNT

SEQ ID NO: 87486 - protein, 10 aa, synthetic construct
AMVRGDFNNL

SEQ ID NO: 87487 - protein, 10 aa, synthetic construct
AMPRGDFNNT

SEQ ID NO: 87488 - protein, 10 aa, synthetic construct
AMPRGDFNNL

SEQ ID NO: 87489 - protein, 10 aa, synthetic construct
AMLRGDFNNT

SEQ ID NO: 87490 - protein, 10 aa, synthetic construct
AMLRGDFNNL

SEQ ID NO: 87491 - protein, 10 aa, synthetic construct
AMIRGDHVNL

SEQ ID NO: 87492 - protein, 10 aa, synthetic construct
AMIRGDYNSL

SEQ ID NO: 87493 - protein, 10 aa, synthetic construct
AMIRGDYTSM

SEQ ID NO: 87494 - protein, 10 aa, synthetic construct
DALRGDRQGI

SEQ ID NO: 87495 - protein, 10 aa, synthetic construct
AMMRGDYNSL

SEQ ID NO: 87496 - protein, 10 aa, synthetic construct
AMMRGDYTSM

SEQ ID NO: 87497 - protein, 10 aa, synthetic construct
AMMRGDFQNT

SEQ ID NO: 87498 - protein, 10 aa, synthetic construct
AMWRGDFNNT

SEQ ID NO: 87499 - protein, 10 aa, synthetic construct
AMWRGDFNNL

SEQ ID NO: 87500 - protein, 10 aa, synthetic construct
AMFRGDHVNL

SEQ ID NO: 87501 - protein, 10 aa, synthetic construct
AMFRGDYNSL

SEQ ID NO: 87502 - protein, 10 aa, synthetic construct
AMFRGDYTSM

SEQ ID NO: 87503 - protein, 10 aa, synthetic construct
AMKRGDHVNL

SEQ ID NO: 87504 - protein, 10 aa, synthetic construct
AMKRGDYNSL

SEQ ID NO: 87505 - protein, 10 aa, synthetic construct
DALRGDRSVV

SEQ ID NO: 87506 - protein, 10 aa, synthetic construct
AMKRGDYTSM

SEQ ID NO: 87507 - protein, 10 aa, synthetic construct
AMRRGDFNNT

SEQ ID NO: 87508 - protein, 10 aa, synthetic construct
AMRRGDFNNL

SEQ ID NO: 87509 - protein, 10 aa, synthetic construct
AMHRGDFQNT

SEQ ID NO: 87510 - protein, 10 aa, synthetic construct
AMSRGDFNNT

SEQ ID NO: 87511 - protein, 10 aa, synthetic construct
AMSRGDFNNL

SEQ ID NO: 87512 - protein, 10 aa, synthetic construct
AMTRGDFQNT

SEQ ID NO: 87513 - protein, 10 aa, synthetic construct
AMYRGDHVNL

SEQ ID NO: 87514 - protein, 10 aa, synthetic construct
AMYRGDYNSL

SEQ ID NO: 87515 - protein, 10 aa, synthetic construct
AMYRGDYTSM

SEQ ID NO: 87516 - protein, 10 aa, synthetic construct
NFFRGDLLLS

SEQ ID NO: 87517 - protein, 10 aa, synthetic construct
DALRGDRGVV

SEQ ID NO: 87518 - protein, 10 aa, synthetic construct
AMNRGDHVNL

SEQ ID NO: 87519 - protein, 10 aa, synthetic construct
AMNRGDYNSL

SEQ ID NO: 87520 - protein, 10 aa, synthetic construct
AMNRGDYTSM

SEQ ID NO: 87521 - protein, 10 aa, synthetic construct
AMQRGDFQNT

SEQ ID NO: 87522 - protein, 10 aa, synthetic construct
AMDRGDFQNT

SEQ ID NO: 87523 - protein, 10 aa, synthetic construct
AMERGDFQNT

SEQ ID NO: 87524 - protein, 10 aa, synthetic construct
AWIRGDFQNT

SEQ ID NO: 87525 - protein, 10 aa, synthetic construct
AWMRGDFNNT

SEQ ID NO: 87526 - protein, 10 aa, synthetic construct
AWMRGDFNNL

SEQ ID NO: 87527 - protein, 10 aa, synthetic construct
AWFRGDFQNT

SEQ ID NO: 87528 - protein, 10 aa, synthetic construct
DALRGDRSQT

SEQ ID NO: 87529 - protein, 10 aa, synthetic construct
AWKRGDFQNT

SEQ ID NO: 87530 - protein, 10 aa, synthetic construct
AWHRGDFNNT

SEQ ID NO: 87531 - protein, 10 aa, synthetic construct
AWHRGDFNNL

SEQ ID NO: 87532 - protein, 10 aa, synthetic construct
AWTRGDFNNT

SEQ ID NO: 87533 - protein, 10 aa, synthetic construct
AWTRGDFNNL

SEQ ID NO: 87534 - protein, 10 aa, synthetic construct
AWYRGDFQNT

SEQ ID NO: 87535 - protein, 10 aa, synthetic construct
AWNRGDFQNT

SEQ ID NO: 87536 - protein, 10 aa, synthetic construct
AWQRGDFNNT

SEQ ID NO: 87537 - protein, 10 aa, synthetic construct
AWQRGDFNNL

SEQ ID NO: 87538 - protein, 10 aa, synthetic construct
AWDRGDFNNT

SEQ ID NO: 87539 - protein, 10 aa, synthetic construct
DAWRGDRGQI

SEQ ID NO: 87540 - protein, 10 aa, synthetic construct
AWDRGDFNNL

SEQ ID NO: 87541 - protein, 10 aa, synthetic construct
AWERGDFNNT

SEQ ID NO: 87542 - protein, 10 aa, synthetic construct
AWERGDFNNL

SEQ ID NO: 87543 - protein, 10 aa, synthetic construct
AFGRGDFNNT

SEQ ID NO: 87544 - protein, 10 aa, synthetic construct
AFGRGDFNNL

SEQ ID NO: 87545 - protein, 10 aa, synthetic construct
AFARGDFNNT

SEQ ID NO: 87546 - protein, 10 aa, synthetic construct
AFARGDFNNL

SEQ ID NO: 87547 - protein, 10 aa, synthetic construct
AFVRGDFNNT

SEQ ID NO: 87548 - protein, 10 aa, synthetic construct
AFVRGDFNNL

SEQ ID NO: 87549 - protein, 10 aa, synthetic construct
AFPRGDFNNT

SEQ ID NO: 87550 - protein, 10 aa, synthetic construct
DAWRGDRQGI

SEQ ID NO: 87551 - protein, 10 aa, synthetic construct
AFPRGDFNNL

SEQ ID NO: 87552 - protein, 10 aa, synthetic construct
AFLRGDFNNT

SEQ ID NO: 87553 - protein, 10 aa, synthetic construct
AFLRGDFNNL

SEQ ID NO: 87554 - protein, 10 aa, synthetic construct
AFIRGDHVNL

SEQ ID NO: 87555 - protein, 10 aa, synthetic construct
AFIRGDYNSL

SEQ ID NO: 87556 - protein, 10 aa, synthetic construct
AFIRGDYTSM

SEQ ID NO: 87557 - protein, 10 aa, synthetic construct
AFMRGDYNSL

SEQ ID NO: 87558 - protein, 10 aa, synthetic construct
AFMRGDYTSM

SEQ ID NO: 87559 - protein, 10 aa, synthetic construct
AFMRGDFQNT

SEQ ID NO: 87560 - protein, 10 aa, synthetic construct
AFWRGDFNNT

SEQ ID NO: 87561 - protein, 10 aa, synthetic construct
DAWRGDRSVV

SEQ ID NO: 87562 - protein, 10 aa, synthetic construct
AFWRGDFNNL

SEQ ID NO: 87563 - protein, 10 aa, synthetic construct
AFFRGDHVNL

SEQ ID NO: 87564 - protein, 10 aa, synthetic construct
AFFRGDYNSL

SEQ ID NO: 87565 - protein, 10 aa, synthetic construct
AFFRGDYTSM

SEQ ID NO: 87566 - protein, 10 aa, synthetic construct
AFKRGDHVNL

SEQ ID NO: 87567 - protein, 10 aa, synthetic construct
AFKRGDYNSL

SEQ ID NO: 87568 - protein, 10 aa, synthetic construct
AFKRGDYTSM

SEQ ID NO: 87569 - protein, 10 aa, synthetic construct
AFRRGDFNNT

SEQ ID NO: 87570 - protein, 10 aa, synthetic construct
AFRRGDFNNL

SEQ ID NO: 87571 - protein, 10 aa, synthetic construct
AFHRGDFQNT

SEQ ID NO: 87572 - protein, 10 aa, synthetic construct
DAWRGDRGVV

SEQ ID NO: 87573 - protein, 10 aa, synthetic construct
AFSRGDFNNT

SEQ ID NO: 87574 - protein, 10 aa, synthetic construct
AFSRGDFNNL

SEQ ID NO: 87575 - protein, 10 aa, synthetic construct
AFTRGDFQNT

SEQ ID NO: 87576 - protein, 10 aa, synthetic construct
AFYRGDHVNL

SEQ ID NO: 87577 - protein, 10 aa, synthetic construct
AFYRGDYNSL

SEQ ID NO: 87578 - protein, 10 aa, synthetic construct
AFYRGDYTSM

SEQ ID NO: 87579 - protein, 10 aa, synthetic construct
AFNRGDHVNL

SEQ ID NO: 87580 - protein, 10 aa, synthetic construct
AFNRGDYNSL

SEQ ID NO: 87581 - protein, 10 aa, synthetic construct
AFNRGDYTSM

SEQ ID NO: 87582 - protein, 10 aa, synthetic construct
AFQRGDFQNT

SEQ ID NO: 87583 - protein, 10 aa, synthetic construct
DAWRGDRSQT

SEQ ID NO: 87584 - protein, 10 aa, synthetic construct
AFDRGDFQNT

SEQ ID NO: 87585 - protein, 10 aa, synthetic construct
AFERGDFQNT

SEQ ID NO: 87586 - protein, 10 aa, synthetic construct
AKGRGDFNNT

SEQ ID NO: 87587 - protein, 10 aa, synthetic construct
AKGRGDFNNL

SEQ ID NO: 87588 - protein, 10 aa, synthetic construct
AKARGDFNNT

SEQ ID NO: 87589 - protein, 10 aa, synthetic construct
AKARGDFNNL

SEQ ID NO: 87590 - protein, 10 aa, synthetic construct
AKVRGDFNNT

SEQ ID NO: 87591 - protein, 10 aa, synthetic construct
AKVRGDFNNL

SEQ ID NO: 87592 - protein, 10 aa, synthetic construct
AKPRGDFNNT

SEQ ID NO: 87593 - protein, 10 aa, synthetic construct
AKPRGDFNNL

SEQ ID NO: 87594 - protein, 10 aa, synthetic construct
DARRGDHGVL

SEQ ID NO: 87595 - protein, 10 aa, synthetic construct
AKLRGDFNNT

SEQ ID NO: 87596 - protein, 10 aa, synthetic construct
AKLRGDFNNL

SEQ ID NO: 87597 - protein, 10 aa, synthetic construct
AKIRGDHVNL

SEQ ID NO: 87598 - protein, 10 aa, synthetic construct
AKIRGDYNSL

SEQ ID NO: 87599 - protein, 10 aa, synthetic construct
AKIRGDYTSM

SEQ ID NO: 87600 - protein, 10 aa, synthetic construct
AKMRGDYNSL

SEQ ID NO: 87601 - protein, 10 aa, synthetic construct
AKMRGDYTSM

SEQ ID NO: 87602 - protein, 10 aa, synthetic construct
AKMRGDFQNT

SEQ ID NO: 87603 - protein, 10 aa, synthetic construct
AKWRGDFNNT

SEQ ID NO: 87604 - protein, 10 aa, synthetic construct
AKWRGDFNNL

SEQ ID NO: 87605 - protein, 10 aa, synthetic construct
DARRGDYVGL

SEQ ID NO: 87606 - protein, 10 aa, synthetic construct
AKFRGDHVNL

SEQ ID NO: 87607 - protein, 10 aa, synthetic construct
AKFRGDYNSL

SEQ ID NO: 87608 - protein, 10 aa, synthetic construct
AKFRGDYTSM

SEQ ID NO: 87609 - protein, 10 aa, synthetic construct
AKKRGDHVNL

SEQ ID NO: 87610 - protein, 10 aa, synthetic construct
AKKRGDYNSL

SEQ ID NO: 87611 - protein, 10 aa, synthetic construct
AKKRGDYTSM

SEQ ID NO: 87612 - protein, 10 aa, synthetic construct
AKRRGDFNNT

SEQ ID NO: 87613 - protein, 10 aa, synthetic construct
AKRRGDFNNL

SEQ ID NO: 87614 - protein, 10 aa, synthetic construct
AKHRGDFQNT

SEQ ID NO: 87615 - protein, 10 aa, synthetic construct
AKSRGDFNNT

SEQ ID NO: 87616 - protein, 10 aa, synthetic construct
DARRGDQSTL

SEQ ID NO: 87617 - protein, 10 aa, synthetic construct
AKSRGDFNNL

SEQ ID NO: 87618 - protein, 10 aa, synthetic construct
AKTRGDFQNT

SEQ ID NO: 87619 - protein, 10 aa, synthetic construct
AKYRGDHVNL

SEQ ID NO: 87620 - protein, 10 aa, synthetic construct
AKYRGDYNSL

SEQ ID NO: 87621 - protein, 10 aa, synthetic construct
AKYRGDYTSM

SEQ ID NO: 87622 - protein, 10 aa, synthetic construct
AKNRGDHVNL

SEQ ID NO: 87623 - protein, 10 aa, synthetic construct
AKNRGDYNSL

SEQ ID NO: 87624 - protein, 10 aa, synthetic construct
AKNRGDYTSM

SEQ ID NO: 87625 - protein, 10 aa, synthetic construct
AKQRGDFQNT

SEQ ID NO: 87626 - protein, 10 aa, synthetic construct
AKDRGDFQNT

SEQ ID NO: 87627 - protein, 10 aa, synthetic construct
DFFRGDHVNL

SEQ ID NO: 87628 - protein, 10 aa, synthetic construct
DARRGDLLLS

SEQ ID NO: 87629 - protein, 10 aa, synthetic construct
AKERGDFQNT

SEQ ID NO: 87630 - protein, 10 aa, synthetic construct
ARIRGDFNNT

SEQ ID NO: 87631 - protein, 10 aa, synthetic construct
ARIRGDFNNL

SEQ ID NO: 87632 - protein, 10 aa, synthetic construct
ARFRGDFNNT

SEQ ID NO: 87633 - protein, 10 aa, synthetic construct
ARFRGDFNNL

SEQ ID NO: 87634 - protein, 10 aa, synthetic construct
ARKRGDFNNT

SEQ ID NO: 87635 - protein, 10 aa, synthetic construct
ARKRGDFNNL

SEQ ID NO: 87636 - protein, 10 aa, synthetic construct
ARYRGDFNNT

SEQ ID NO: 87637 - protein, 10 aa, synthetic construct
ARYRGDFNNL

SEQ ID NO: 87638 - protein, 10 aa, synthetic construct
ARNRGDFNNT

SEQ ID NO: 87639 - protein, 10 aa, synthetic construct
DAHRGDRGQI

SEQ ID NO: 87640 - protein, 10 aa, synthetic construct
ARNRGDFNNL

SEQ ID NO: 87641 - protein, 10 aa, synthetic construct
AHIRGDFQNT

SEQ ID NO: 87642 - protein, 10 aa, synthetic construct
AHMRGDFNNT

SEQ ID NO: 87643 - protein, 10 aa, synthetic construct
AHMRGDFNNL

SEQ ID NO: 87644 - protein, 10 aa, synthetic construct
AHFRGDFQNT

SEQ ID NO: 87645 - protein, 10 aa, synthetic construct
AHKRGDFQNT

SEQ ID NO: 87646 - protein, 10 aa, synthetic construct
AHHRGDFNNT

SEQ ID NO: 87647 - protein, 10 aa, synthetic construct
AHHRGDFNNL

SEQ ID NO: 87648 - protein, 10 aa, synthetic construct
AHTRGDFNNT

SEQ ID NO: 87649 - protein, 10 aa, synthetic construct
AHTRGDFNNL

SEQ ID NO: 87650 - protein, 10 aa, synthetic construct
DAHRGDRQGI

SEQ ID NO: 87651 - protein, 10 aa, synthetic construct
AHYRGDFQNT

SEQ ID NO: 87652 - protein, 10 aa, synthetic construct
AHNRGDFQNT

SEQ ID NO: 87653 - protein, 10 aa, synthetic construct
AHQRGDFNNT

SEQ ID NO: 87654 - protein, 10 aa, synthetic construct
AHQRGDFNNL

SEQ ID NO: 87655 - protein, 10 aa, synthetic construct
AHDRGDFNNT

SEQ ID NO: 87656 - protein, 10 aa, synthetic construct
AHDRGDFNNL

SEQ ID NO: 87657 - protein, 10 aa, synthetic construct
AHERGDFNNT

SEQ ID NO: 87658 - protein, 10 aa, synthetic construct
AHERGDFNNL

SEQ ID NO: 87659 - protein, 10 aa, synthetic construct
ASIRGDFQNT

SEQ ID NO: 87660 - protein, 10 aa, synthetic construct
ASMRGDFNNT

SEQ ID NO: 87661 - protein, 10 aa, synthetic construct
DAHRGDRSVV

SEQ ID NO: 87662 - protein, 10 aa, synthetic construct
ASMRGDFNNL

SEQ ID NO: 87663 - protein, 10 aa, synthetic construct
ASFRGDFQNT

SEQ ID NO: 87664 - protein, 10 aa, synthetic construct
ASKRGDFQNT

SEQ ID NO: 87665 - protein, 10 aa, synthetic construct
ASHRGDFNNT

SEQ ID NO: 87666 - protein, 10 aa, synthetic construct
ASHRGDFNNL

SEQ ID NO: 87667 - protein, 10 aa, synthetic construct
ASTRGDFNNT

SEQ ID NO: 87668 - protein, 10 aa, synthetic construct
ASTRGDFNNL

SEQ ID NO: 87669 - protein, 10 aa, synthetic construct
ASYRGDFQNT

SEQ ID NO: 87670 - protein, 10 aa, synthetic construct
ASNRGDFQNT

SEQ ID NO: 87671 - protein, 10 aa, synthetic construct
ASQRGDFNNT

SEQ ID NO: 87672 - protein, 10 aa, synthetic construct
DAHRGDRGVV

SEQ ID NO: 87673 - protein, 10 aa, synthetic construct
ASQRGDFNNL

SEQ ID NO: 87674 - protein, 10 aa, synthetic construct
ASDRGDFNNT

SEQ ID NO: 87675 - protein, 10 aa, synthetic construct
ASDRGDFNNL

SEQ ID NO: 87676 - protein, 10 aa, synthetic construct
ASERGDFNNT

SEQ ID NO: 87677 - protein, 10 aa, synthetic construct
ASERGDFNNL

SEQ ID NO: 87678 - protein, 10 aa, synthetic construct
ATIRGDFQNT

SEQ ID NO: 87679 - protein, 10 aa, synthetic construct
ATMRGDFNNT

SEQ ID NO: 87680 - protein, 10 aa, synthetic construct
ATMRGDFNNL

SEQ ID NO: 87681 - protein, 10 aa, synthetic construct
ATFRGDFQNT

SEQ ID NO: 87682 - protein, 10 aa, synthetic construct
ATKRGDFQNT

SEQ ID NO: 87683 - protein, 10 aa, synthetic construct
DAHRGDRSQT

SEQ ID NO: 87684 - protein, 10 aa, synthetic construct
ATHRGDFNNT

SEQ ID NO: 87685 - protein, 10 aa, synthetic construct
ATHRGDFNNL

SEQ ID NO: 87686 - protein, 10 aa, synthetic construct
ATTRGDFNNT

SEQ ID NO: 87687 - protein, 10 aa, synthetic construct
ATTRGDFNNL

SEQ ID NO: 87688 - protein, 10 aa, synthetic construct
ATYRGDFQNT

SEQ ID NO: 87689 - protein, 10 aa, synthetic construct
ATNRGDFQNT

SEQ ID NO: 87690 - protein, 10 aa, synthetic construct
ATQRGDFNNT

SEQ ID NO: 87691 - protein, 10 aa, synthetic construct
ATQRGDFNNL

SEQ ID NO: 87692 - protein, 10 aa, synthetic construct
ATDRGDFNNT

SEQ ID NO: 87693 - protein, 10 aa, synthetic construct
ATDRGDFNNL

SEQ ID NO: 87694 - protein, 10 aa, synthetic construct
DASRGDRGQI

SEQ ID NO: 87695 - protein, 10 aa, synthetic construct
ATERGDFNNT

SEQ ID NO: 87696 - protein, 10 aa, synthetic construct
ATERGDFNNL

SEQ ID NO: 87697 - protein, 10 aa, synthetic construct
AYGRGDFNNT

SEQ ID NO: 87698 - protein, 10 aa, synthetic construct
AYGRGDFNNL

SEQ ID NO: 87699 - protein, 10 aa, synthetic construct
AYARGDFNNT

SEQ ID NO: 87700 - protein, 10 aa, synthetic construct
AYARGDFNNL

SEQ ID NO: 87701 - protein, 10 aa, synthetic construct
AYVRGDFNNT

SEQ ID NO: 87702 - protein, 10 aa, synthetic construct
AYVRGDFNNL

SEQ ID NO: 87703 - protein, 10 aa, synthetic construct
AYPRGDFNNT

SEQ ID NO: 87704 - protein, 10 aa, synthetic construct
AYPRGDFNNL

SEQ ID NO: 87705 - protein, 10 aa, synthetic construct
DASRGDRQGI

SEQ ID NO: 87706 - protein, 10 aa, synthetic construct
AYLRGDFNNT

SEQ ID NO: 87707 - protein, 10 aa, synthetic construct
AYLRGDFNNL

SEQ ID NO: 87708 - protein, 10 aa, synthetic construct
AYIRGDHVNL

SEQ ID NO: 87709 - protein, 10 aa, synthetic construct
AYIRGDYNSL

SEQ ID NO: 87710 - protein, 10 aa, synthetic construct
AYIRGDYTSM

SEQ ID NO: 87711 - protein, 10 aa, synthetic construct
AYMRGDYNSL

SEQ ID NO: 87712 - protein, 10 aa, synthetic construct
AYMRGDYTSM

SEQ ID NO: 87713 - protein, 10 aa, synthetic construct
AYMRGDFQNT

SEQ ID NO: 87714 - protein, 10 aa, synthetic construct
AYWRGDFNNT

SEQ ID NO: 87715 - protein, 10 aa, synthetic construct
AYWRGDFNNL

SEQ ID NO: 87716 - protein, 10 aa, synthetic construct
DASRGDRSVV

SEQ ID NO: 87717 - protein, 10 aa, synthetic construct
AYFRGDHVNL

SEQ ID NO: 87718 - protein, 10 aa, synthetic construct
AYFRGDYNSL

SEQ ID NO: 87719 - protein, 10 aa, synthetic construct
AYFRGDYTSM

SEQ ID NO: 87720 - protein, 10 aa, synthetic construct
AYKRGDHVNL

SEQ ID NO: 87721 - protein, 10 aa, synthetic construct
AYKRGDYNSL

SEQ ID NO: 87722 - protein, 10 aa, synthetic construct
AYKRGDYTSM

SEQ ID NO: 87723 - protein, 10 aa, synthetic construct
AYRRGDFNNT

SEQ ID NO: 87724 - protein, 10 aa, synthetic construct
AYRRGDFNNL

SEQ ID NO: 87725 - protein, 10 aa, synthetic construct
AYHRGDFQNT

SEQ ID NO: 87726 - protein, 10 aa, synthetic construct
AYSRGDFNNT

SEQ ID NO: 87727 - protein, 10 aa, synthetic construct
DASRGDRGVV

SEQ ID NO: 87728 - protein, 10 aa, synthetic construct
AYSRGDFNNL

SEQ ID NO: 87729 - protein, 10 aa, synthetic construct
AYTRGDFQNT

SEQ ID NO: 87730 - protein, 10 aa, synthetic construct
AYYRGDHVNL

SEQ ID NO: 87731 - protein, 10 aa, synthetic construct
AYYRGDYNSL

SEQ ID NO: 87732 - protein, 10 aa, synthetic construct
AYYRGDYTSM

SEQ ID NO: 87733 - protein, 10 aa, synthetic construct
AYNRGDHVNL

SEQ ID NO: 87734 - protein, 10 aa, synthetic construct
AYNRGDYNSL

SEQ ID NO: 87735 - protein, 10 aa, synthetic construct
AYNRGDYTSM

SEQ ID NO: 87736 - protein, 10 aa, synthetic construct
AYQRGDFQNT

SEQ ID NO: 87737 - protein, 10 aa, synthetic construct
AYDRGDFQNT

SEQ ID NO: 87738 - protein, 10 aa, synthetic construct
DFFRGDRDYL

SEQ ID NO: 87739 - protein, 10 aa, synthetic construct
DASRGDRSQT

SEQ ID NO: 87740 - protein, 10 aa, synthetic construct
AYERGDFQNT

SEQ ID NO: 87741 - protein, 10 aa, synthetic construct
ANGRGDFNNT

SEQ ID NO: 87742 - protein, 10 aa, synthetic construct
ANGRGDFNNL

SEQ ID NO: 87743 - protein, 10 aa, synthetic construct
ANARGDFNNT

SEQ ID NO: 87744 - protein, 10 aa, synthetic construct
ANARGDFNNL

SEQ ID NO: 87745 - protein, 10 aa, synthetic construct
ANVRGDFNNT

SEQ ID NO: 87746 - protein, 10 aa, synthetic construct
ANVRGDFNNL

SEQ ID NO: 87747 - protein, 10 aa, synthetic construct
ANPRGDFNNT

SEQ ID NO: 87748 - protein, 10 aa, synthetic construct
ANPRGDFNNL

SEQ ID NO: 87749 - protein, 10 aa, synthetic construct
ANLRGDFNNT

SEQ ID NO: 87750 - protein, 10 aa, synthetic construct
DATRGDRGQI

SEQ ID NO: 87751 - protein, 10 aa, synthetic construct
ANLRGDFNNL

SEQ ID NO: 87752 - protein, 10 aa, synthetic construct
ANIRGDHVNL

SEQ ID NO: 87753 - protein, 10 aa, synthetic construct
ANIRGDYNSL

SEQ ID NO: 87754 - protein, 10 aa, synthetic construct
ANIRGDYTSM

SEQ ID NO: 87755 - protein, 10 aa, synthetic construct
ANMRGDYNSL

SEQ ID NO: 87756 - protein, 10 aa, synthetic construct
ANMRGDYTSM

SEQ ID NO: 87757 - protein, 10 aa, synthetic construct
ANMRGDFQNT

SEQ ID NO: 87758 - protein, 10 aa, synthetic construct
ANWRGDFNNT

SEQ ID NO: 87759 - protein, 10 aa, synthetic construct
ANWRGDFNNL

SEQ ID NO: 87760 - protein, 10 aa, synthetic construct
ANFRGDHVNL

SEQ ID NO: 87761 - protein, 10 aa, synthetic construct
DATRGDRQGI

SEQ ID NO: 87762 - protein, 10 aa, synthetic construct
ANFRGDYNSL

SEQ ID NO: 87763 - protein, 10 aa, synthetic construct
ANFRGDYTSM

SEQ ID NO: 87764 - protein, 10 aa, synthetic construct
ANKRGDHVNL

SEQ ID NO: 87765 - protein, 10 aa, synthetic construct
ANKRGDYNSL

SEQ ID NO: 87766 - protein, 10 aa, synthetic construct
ANKRGDYTSM

SEQ ID NO: 87767 - protein, 10 aa, synthetic construct
ANRRGDFNNT

SEQ ID NO: 87768 - protein, 10 aa, synthetic construct
ANRRGDFNNL

SEQ ID NO: 87769 - protein, 10 aa, synthetic construct
ANHRGDFQNT

SEQ ID NO: 87770 - protein, 10 aa, synthetic construct
ANSRGDFNNT

SEQ ID NO: 87771 - protein, 10 aa, synthetic construct
ANSRGDFNNL

SEQ ID NO: 87772 - protein, 10 aa, synthetic construct
DATRGDRSVV

SEQ ID NO: 87773 - protein, 10 aa, synthetic construct
ANTRGDFQNT

SEQ ID NO: 87774 - protein, 10 aa, synthetic construct
ANYRGDHVNL

SEQ ID NO: 87775 - protein, 10 aa, synthetic construct
ANYRGDYNSL

SEQ ID NO: 87776 - protein, 10 aa, synthetic construct
ANYRGDYTSM

SEQ ID NO: 87777 - protein, 10 aa, synthetic construct
ANNRGDHVNL

SEQ ID NO: 87778 - protein, 10 aa, synthetic construct
ANNRGDYNSL

SEQ ID NO: 87779 - protein, 10 aa, synthetic construct
ANNRGDYTSM

SEQ ID NO: 87780 - protein, 10 aa, synthetic construct
ANQRGDFQNT

SEQ ID NO: 87781 - protein, 10 aa, synthetic construct
ANDRGDFQNT

SEQ ID NO: 87782 - protein, 10 aa, synthetic construct
ANERGDFQNT

SEQ ID NO: 87783 - protein, 10 aa, synthetic construct
DATRGDRGVV

SEQ ID NO: 87784 - protein, 10 aa, synthetic construct
AQIRGDFQNT

SEQ ID NO: 87785 - protein, 10 aa, synthetic construct
AQMRGDFNNT

SEQ ID NO: 87786 - protein, 10 aa, synthetic construct
AQMRGDFNNL

SEQ ID NO: 87787 - protein, 10 aa, synthetic construct
AQFRGDFQNT

SEQ ID NO: 87788 - protein, 10 aa, synthetic construct
AQKRGDFQNT

SEQ ID NO: 87789 - protein, 10 aa, synthetic construct
AQHRGDFNNT

SEQ ID NO: 87790 - protein, 10 aa, synthetic construct
AQHRGDFNNL

SEQ ID NO: 87791 - protein, 10 aa, synthetic construct
AQTRGDFNNT

SEQ ID NO: 87792 - protein, 10 aa, synthetic construct
AQTRGDFNNL

SEQ ID NO: 87793 - protein, 10 aa, synthetic construct
AQYRGDFQNT

SEQ ID NO: 87794 - protein, 10 aa, synthetic construct
DATRGDRSQT

SEQ ID NO: 87795 - protein, 10 aa, synthetic construct
AQNRGDFQNT

SEQ ID NO: 87796 - protein, 10 aa, synthetic construct
AQQRGDFNNT

SEQ ID NO: 87797 - protein, 10 aa, synthetic construct
AQQRGDFNNL

SEQ ID NO: 87798 - protein, 10 aa, synthetic construct
AQDRGDFNNT

SEQ ID NO: 87799 - protein, 10 aa, synthetic construct
AQDRGDFNNL

SEQ ID NO: 87800 - protein, 10 aa, synthetic construct
AQERGDFNNT

SEQ ID NO: 87801 - protein, 10 aa, synthetic construct
AQERGDFNNL

SEQ ID NO: 87802 - protein, 10 aa, synthetic construct
ADIRGDFQNT

SEQ ID NO: 87803 - protein, 10 aa, synthetic construct
ADMRGDFNNT

SEQ ID NO: 87804 - protein, 10 aa, synthetic construct
ADMRGDFNNL

SEQ ID NO: 87805 - protein, 10 aa, synthetic construct
DAQRGDRGQI

SEQ ID NO: 87806 - protein, 10 aa, synthetic construct
ADFRGDFQNT

SEQ ID NO: 87807 - protein, 10 aa, synthetic construct
ADKRGDFQNT

SEQ ID NO: 87808 - protein, 10 aa, synthetic construct
ADHRGDFNNT

SEQ ID NO: 87809 - protein, 10 aa, synthetic construct
ADHRGDFNNL

SEQ ID NO: 87810 - protein, 10 aa, synthetic construct
ADTRGDFNNT

SEQ ID NO: 87811 - protein, 10 aa, synthetic construct
ADTRGDFNNL

SEQ ID NO: 87812 - protein, 10 aa, synthetic construct
ADYRGDFQNT

SEQ ID NO: 87813 - protein, 10 aa, synthetic construct
ADNRGDFQNT

SEQ ID NO: 87814 - protein, 10 aa, synthetic construct
ADQRGDFNNT

SEQ ID NO: 87815 - protein, 10 aa, synthetic construct
ADQRGDFNNL

SEQ ID NO: 87816 - protein, 10 aa, synthetic construct
DAQRGDRQGI

SEQ ID NO: 87817 - protein, 10 aa, synthetic construct
ADDRGDFNNT

SEQ ID NO: 87818 - protein, 10 aa, synthetic construct
ADDRGDFNNL

SEQ ID NO: 87819 - protein, 10 aa, synthetic construct
ADERGDFNNT

SEQ ID NO: 87820 - protein, 10 aa, synthetic construct
ADERGDFNNL

SEQ ID NO: 87821 - protein, 10 aa, synthetic construct
AEIRGDFQNT

SEQ ID NO: 87822 - protein, 10 aa, synthetic construct
AEMRGDFNNT

SEQ ID NO: 87823 - protein, 10 aa, synthetic construct
AEMRGDFNNL

SEQ ID NO: 87824 - protein, 10 aa, synthetic construct
AEFRGDFQNT

SEQ ID NO: 87825 - protein, 10 aa, synthetic construct
AEKRGDFQNT

SEQ ID NO: 87826 - protein, 10 aa, synthetic construct
AEHRGDFNNT

SEQ ID NO: 87827 - protein, 10 aa, synthetic construct
DAQRGDRSVV

SEQ ID NO: 87828 - protein, 10 aa, synthetic construct
AEHRGDFNNL

SEQ ID NO: 87829 - protein, 10 aa, synthetic construct
AETRGDFNNT

SEQ ID NO: 87830 - protein, 10 aa, synthetic construct
AETRGDFNNL

SEQ ID NO: 87831 - protein, 10 aa, synthetic construct
AEYRGDFQNT

SEQ ID NO: 87832 - protein, 10 aa, synthetic construct
AENRGDFQNT

SEQ ID NO: 87833 - protein, 10 aa, synthetic construct
AEQRGDFNNT

SEQ ID NO: 87834 - protein, 10 aa, synthetic construct
AEQRGDFNNL

SEQ ID NO: 87835 - protein, 10 aa, synthetic construct
AEDRGDFNNT

SEQ ID NO: 87836 - protein, 10 aa, synthetic construct
AEDRGDFNNL

SEQ ID NO: 87837 - protein, 10 aa, synthetic construct
AEERGDFNNT

SEQ ID NO: 87838 - protein, 10 aa, synthetic construct
DAQRGDRGVV

SEQ ID NO: 87839 - protein, 10 aa, synthetic construct
AEERGDFNNL

SEQ ID NO: 87840 - protein, 10 aa, synthetic construct
EGIRGDFNNT

SEQ ID NO: 87841 - protein, 10 aa, synthetic construct
EGIRGDFNNL

SEQ ID NO: 87842 - protein, 10 aa, synthetic construct
EGMRGDFNNT

SEQ ID NO: 87843 - protein, 10 aa, synthetic construct
EGMRGDFNNL

SEQ ID NO: 87844 - protein, 10 aa, synthetic construct
EGFRGDFNNT

SEQ ID NO: 87845 - protein, 10 aa, synthetic construct
EGFRGDFNNL

SEQ ID NO: 87846 - protein, 10 aa, synthetic construct
EGKRGDFNNT

SEQ ID NO: 87847 - protein, 10 aa, synthetic construct
EGKRGDFNNL

SEQ ID NO: 87848 - protein, 10 aa, synthetic construct
EGYRGDFNNT

SEQ ID NO: 87849 - protein, 10 aa, synthetic construct
DFFRGDYSSV

SEQ ID NO: 87850 - protein, 10 aa, synthetic construct
DAQRGDRSQT

SEQ ID NO: 87851 - protein, 10 aa, synthetic construct
EGYRGDFNNL

SEQ ID NO: 87852 - protein, 10 aa, synthetic construct
EGNRGDFNNT

SEQ ID NO: 87853 - protein, 10 aa, synthetic construct
EGNRGDFNNL

SEQ ID NO: 87854 - protein, 10 aa, synthetic construct
EAIRGDFNNT

SEQ ID NO: 87855 - protein, 10 aa, synthetic construct
EAIRGDFNNL

SEQ ID NO: 87856 - protein, 10 aa, synthetic construct
EAMRGDFNNT

SEQ ID NO: 87857 - protein, 10 aa, synthetic construct
EAMRGDFNNL

SEQ ID NO: 87858 - protein, 10 aa, synthetic construct
EAFRGDFNNT

SEQ ID NO: 87859 - protein, 10 aa, synthetic construct
EAFRGDFNNL

SEQ ID NO: 87860 - protein, 10 aa, synthetic construct
EAKRGDFNNT

SEQ ID NO: 87861 - protein, 10 aa, synthetic construct
DADRGDRGQI

SEQ ID NO: 87862 - protein, 10 aa, synthetic construct
EAKRGDFNNL

SEQ ID NO: 87863 - protein, 10 aa, synthetic construct
EAYRGDFNNT

SEQ ID NO: 87864 - protein, 10 aa, synthetic construct
EAYRGDFNNL

SEQ ID NO: 87865 - protein, 10 aa, synthetic construct
EANRGDFNNT

SEQ ID NO: 87866 - protein, 10 aa, synthetic construct
EANRGDFNNL

SEQ ID NO: 87867 - protein, 10 aa, synthetic construct
EVIRGDFNNT

SEQ ID NO: 87868 - protein, 10 aa, synthetic construct
EVIRGDFNNL

SEQ ID NO: 87869 - protein, 10 aa, synthetic construct
EVMRGDFNNT

SEQ ID NO: 87870 - protein, 10 aa, synthetic construct
EVMRGDFNNL

SEQ ID NO: 87871 - protein, 10 aa, synthetic construct
EVFRGDFNNT

SEQ ID NO: 87872 - protein, 10 aa, synthetic construct
DADRGDRQGI

SEQ ID NO: 87873 - protein, 10 aa, synthetic construct
EVFRGDFNNL

SEQ ID NO: 87874 - protein, 10 aa, synthetic construct
EVKRGDFNNT

SEQ ID NO: 87875 - protein, 10 aa, synthetic construct
EVKRGDFNNL

SEQ ID NO: 87876 - protein, 10 aa, synthetic construct
EVYRGDFNNT

SEQ ID NO: 87877 - protein, 10 aa, synthetic construct
EVYRGDFNNL

SEQ ID NO: 87878 - protein, 10 aa, synthetic construct
EVNRGDFNNT

SEQ ID NO: 87879 - protein, 10 aa, synthetic construct
EVNRGDFNNL

SEQ ID NO: 87880 - protein, 10 aa, synthetic construct
EPIRGDFNNT

SEQ ID NO: 87881 - protein, 10 aa, synthetic construct
EPIRGDFNNL

SEQ ID NO: 87882 - protein, 10 aa, synthetic construct
EPMRGDFNNT

SEQ ID NO: 87883 - protein, 10 aa, synthetic construct
DADRGDRSVV

SEQ ID NO: 87884 - protein, 10 aa, synthetic construct
EPMRGDFNNL

SEQ ID NO: 87885 - protein, 10 aa, synthetic construct
EPFRGDFNNT

SEQ ID NO: 87886 - protein, 10 aa, synthetic construct
EPFRGDFNNL

SEQ ID NO: 87887 - protein, 10 aa, synthetic construct
EPKRGDFNNT

SEQ ID NO: 87888 - protein, 10 aa, synthetic construct
EPKRGDFNNL

SEQ ID NO: 87889 - protein, 10 aa, synthetic construct
EPYRGDFNNT

SEQ ID NO: 87890 - protein, 10 aa, synthetic construct
EPYRGDFNNL

SEQ ID NO: 87891 - protein, 10 aa, synthetic construct
EPNRGDFNNT

SEQ ID NO: 87892 - protein, 10 aa, synthetic construct
EPNRGDFNNL

SEQ ID NO: 87893 - protein, 10 aa, synthetic construct
ELIRGDFNNT

SEQ ID NO: 87894 - protein, 10 aa, synthetic construct
DADRGDRGVV

SEQ ID NO: 87895 - protein, 10 aa, synthetic construct
ELIRGDFNNL

SEQ ID NO: 87896 - protein, 10 aa, synthetic construct
ELMRGDFNNT

SEQ ID NO: 87897 - protein, 10 aa, synthetic construct
ELMRGDFNNL

SEQ ID NO: 87898 - protein, 10 aa, synthetic construct
ELFRGDFNNT

SEQ ID NO: 87899 - protein, 10 aa, synthetic construct
ELFRGDFNNL

SEQ ID NO: 87900 - protein, 10 aa, synthetic construct
ELKRGDFNNT

SEQ ID NO: 87901 - protein, 10 aa, synthetic construct
ELKRGDFNNL

SEQ ID NO: 87902 - protein, 10 aa, synthetic construct
ELYRGDFNNT

SEQ ID NO: 87903 - protein, 10 aa, synthetic construct
ELYRGDFNNL

SEQ ID NO: 87904 - protein, 10 aa, synthetic construct
ELNRGDFNNT

SEQ ID NO: 87905 - protein, 10 aa, synthetic construct
DADRGDRSQT

SEQ ID NO: 87906 - protein, 10 aa, synthetic construct
ELNRGDFNNL

SEQ ID NO: 87907 - protein, 10 aa, synthetic construct
EIGRGDFNNT

SEQ ID NO: 87908 - protein, 10 aa, synthetic construct
EIGRGDFNNL

SEQ ID NO: 87909 - protein, 10 aa, synthetic construct
EIARGDFNNT

SEQ ID NO: 87910 - protein, 10 aa, synthetic construct
EIARGDFNNL

SEQ ID NO: 87911 - protein, 10 aa, synthetic construct
EIVRGDYNSL

SEQ ID NO: 87912 - protein, 10 aa, synthetic construct
EIVRGDYTSM

SEQ ID NO: 87913 - protein, 10 aa, synthetic construct
EIVRGDFQNT

SEQ ID NO: 87914 - protein, 10 aa, synthetic construct
EIPRGDFNNT

SEQ ID NO: 87915 - protein, 10 aa, synthetic construct
EIPRGDFNNL

SEQ ID NO: 87916 - protein, 10 aa, synthetic construct
DAERGDRGQI

SEQ ID NO: 87917 - protein, 10 aa, synthetic construct
EILRGDYNSL

SEQ ID NO: 87918 - protein, 10 aa, synthetic construct
EILRGDYTSM

SEQ ID NO: 87919 - protein, 10 aa, synthetic construct
EILRGDFQNT

SEQ ID NO: 87920 - protein, 10 aa, synthetic construct
EIIRGDYTSV

SEQ ID NO: 87921 - protein, 10 aa, synthetic construct
EIMRGDYTSV

SEQ ID NO: 87922 - protein, 10 aa, synthetic construct
EIWRGDYNSL

SEQ ID NO: 87923 - protein, 10 aa, synthetic construct
EIWRGDYTSM

SEQ ID NO: 87924 - protein, 10 aa, synthetic construct
EIWRGDFQNT

SEQ ID NO: 87925 - protein, 10 aa, synthetic construct
EIFRGDYTSV

SEQ ID NO: 87926 - protein, 10 aa, synthetic construct
EIKRGDYTSV

SEQ ID NO: 87927 - protein, 10 aa, synthetic construct
DAERGDRQGI

SEQ ID NO: 87928 - protein, 10 aa, synthetic construct
EIRRGDFNNT

SEQ ID NO: 87929 - protein, 10 aa, synthetic construct
EIRRGDFNNL

SEQ ID NO: 87930 - protein, 10 aa, synthetic construct
EIHRGDYNSL

SEQ ID NO: 87931 - protein, 10 aa, synthetic construct
EIHRGDYTSM

SEQ ID NO: 87932 - protein, 10 aa, synthetic construct
EIHRGDFQNT

SEQ ID NO: 87933 - protein, 10 aa, synthetic construct
EISRGDYNSL

SEQ ID NO: 87934 - protein, 10 aa, synthetic construct
EISRGDYTSM

SEQ ID NO: 87935 - protein, 10 aa, synthetic construct
EISRGDFQNT

SEQ ID NO: 87936 - protein, 10 aa, synthetic construct
EITRGDYNSL

SEQ ID NO: 87937 - protein, 10 aa, synthetic construct
EITRGDYTSM

SEQ ID NO: 87938 - protein, 10 aa, synthetic construct
DAERGDRSVV

SEQ ID NO: 87939 - protein, 10 aa, synthetic construct
EITRGDFQNT

SEQ ID NO: 87940 - protein, 10 aa, synthetic construct
EIYRGDYTSV

SEQ ID NO: 87941 - protein, 10 aa, synthetic construct
EINRGDYTSV

SEQ ID NO: 87942 - protein, 10 aa, synthetic construct
EIQRGDYNSL

SEQ ID NO: 87943 - protein, 10 aa, synthetic construct
EIQRGDYTSM

SEQ ID NO: 87944 - protein, 10 aa, synthetic construct
EIQRGDFQNT

SEQ ID NO: 87945 - protein, 10 aa, synthetic construct
EIDRGDYNSL

SEQ ID NO: 87946 - protein, 10 aa, synthetic construct
EIDRGDYTSM

SEQ ID NO: 87947 - protein, 10 aa, synthetic construct
EIDRGDFQNT

SEQ ID NO: 87948 - protein, 10 aa, synthetic construct
EIERGDYNSL

SEQ ID NO: 87949 - protein, 10 aa, synthetic construct
DAERGDRGVV

SEQ ID NO: 87950 - protein, 10 aa, synthetic construct
EIERGDYTSM

SEQ ID NO: 87951 - protein, 10 aa, synthetic construct
EIERGDFQNT

SEQ ID NO: 87952 - protein, 10 aa, synthetic construct
EMGRGDFNNT

SEQ ID NO: 87953 - protein, 10 aa, synthetic construct
EMGRGDFNNL

SEQ ID NO: 87954 - protein, 10 aa, synthetic construct
EMARGDFNNT

SEQ ID NO: 87955 - protein, 10 aa, synthetic construct
EMARGDFNNL

SEQ ID NO: 87956 - protein, 10 aa, synthetic construct
EMVRGDFNNT

SEQ ID NO: 87957 - protein, 10 aa, synthetic construct
EMVRGDFNNL

SEQ ID NO: 87958 - protein, 10 aa, synthetic construct
EMPRGDFNNT

SEQ ID NO: 87959 - protein, 10 aa, synthetic construct
EMPRGDFNNL

SEQ ID NO: 87960 - protein, 10 aa, synthetic construct
DFFRGDLTVT

SEQ ID NO: 87961 - protein, 10 aa, synthetic construct
DAERGDRSQT

SEQ ID NO: 87962 - protein, 10 aa, synthetic construct
EMLRGDFNNT

SEQ ID NO: 87963 - protein, 10 aa, synthetic construct
EMLRGDFNNL

SEQ ID NO: 87964 - protein, 10 aa, synthetic construct
EMIRGDHVNL

SEQ ID NO: 87965 - protein, 10 aa, synthetic construct
EMIRGDYNSL

SEQ ID NO: 87966 - protein, 10 aa, synthetic construct
EMIRGDYTSM

SEQ ID NO: 87967 - protein, 10 aa, synthetic construct
EMMRGDYNSL

SEQ ID NO: 87968 - protein, 10 aa, synthetic construct
EMMRGDYTSM

SEQ ID NO: 87969 - protein, 10 aa, synthetic construct
EMMRGDFQNT

SEQ ID NO: 87970 - protein, 10 aa, synthetic construct
EMWRGDFNNT

SEQ ID NO: 87971 - protein, 10 aa, synthetic construct
EMWRGDFNNL

SEQ ID NO: 87972 - protein, 10 aa, synthetic construct
DVGRGDHGVL

SEQ ID NO: 87973 - protein, 10 aa, synthetic construct
EMFRGDHVNL

SEQ ID NO: 87974 - protein, 10 aa, synthetic construct
EMFRGDYNSL

SEQ ID NO: 87975 - protein, 10 aa, synthetic construct
EMFRGDYTSM

SEQ ID NO: 87976 - protein, 10 aa, synthetic construct
EMKRGDHVNL

SEQ ID NO: 87977 - protein, 10 aa, synthetic construct
EMKRGDYNSL

SEQ ID NO: 87978 - protein, 10 aa, synthetic construct
EMKRGDYTSM

SEQ ID NO: 87979 - protein, 10 aa, synthetic construct
EMRRGDFNNT

SEQ ID NO: 87980 - protein, 10 aa, synthetic construct
EMRRGDFNNL

SEQ ID NO: 87981 - protein, 10 aa, synthetic construct
EMHRGDFQNT

SEQ ID NO: 87982 - protein, 10 aa, synthetic construct
EMSRGDFNNT

SEQ ID NO: 87983 - protein, 10 aa, synthetic construct
DVGRGDYVGL

SEQ ID NO: 87984 - protein, 10 aa, synthetic construct
EMSRGDFNNL

SEQ ID NO: 87985 - protein, 10 aa, synthetic construct
EMTRGDFQNT

SEQ ID NO: 87986 - protein, 10 aa, synthetic construct
EMYRGDHVNL

SEQ ID NO: 87987 - protein, 10 aa, synthetic construct
EMYRGDYNSL

SEQ ID NO: 87988 - protein, 10 aa, synthetic construct
EMYRGDYTSM

SEQ ID NO: 87989 - protein, 10 aa, synthetic construct
EMNRGDHVNL

SEQ ID NO: 87990 - protein, 10 aa, synthetic construct
EMNRGDYNSL

SEQ ID NO: 87991 - protein, 10 aa, synthetic construct
EMNRGDYTSM

SEQ ID NO: 87992 - protein, 10 aa, synthetic construct
EMQRGDFQNT

SEQ ID NO: 87993 - protein, 10 aa, synthetic construct
EMDRGDFQNT

SEQ ID NO: 87994 - protein, 10 aa, synthetic construct
DVGRGDQSTL

SEQ ID NO: 87995 - protein, 10 aa, synthetic construct
EMERGDFQNT

SEQ ID NO: 87996 - protein, 10 aa, synthetic construct
EWIRGDFQNT

SEQ ID NO: 87997 - protein, 10 aa, synthetic construct
EWMRGDFNNT

SEQ ID NO: 87998 - protein, 10 aa, synthetic construct
EWMRGDFNNL

SEQ ID NO: 87999 - protein, 10 aa, synthetic construct
EWFRGDFQNT

SEQ ID NO: 88000 - protein, 10 aa, synthetic construct
EWKRGDFQNT

SEQ ID NO: 88001 - protein, 10 aa, synthetic construct
EWHRGDFNNT

SEQ ID NO: 88002 - protein, 10 aa, synthetic construct
EWHRGDFNNL

SEQ ID NO: 88003 - protein, 10 aa, synthetic construct
EWTRGDFNNT

SEQ ID NO: 88004 - protein, 10 aa, synthetic construct
EWTRGDFNNL

SEQ ID NO: 88005 - protein, 10 aa, synthetic construct
DVGRGDLLLS

SEQ ID NO: 88006 - protein, 10 aa, synthetic construct
EWYRGDFQNT

SEQ ID NO: 88007 - protein, 10 aa, synthetic construct
EWNRGDFQNT

SEQ ID NO: 88008 - protein, 10 aa, synthetic construct
EWQRGDFNNT

SEQ ID NO: 88009 - protein, 10 aa, synthetic construct
EWQRGDFNNL

SEQ ID NO: 88010 - protein, 10 aa, synthetic construct
EWDRGDFNNT

SEQ ID NO: 88011 - protein, 10 aa, synthetic construct
EWDRGDFNNL

SEQ ID NO: 88012 - protein, 10 aa, synthetic construct
EWERGDFNNT

SEQ ID NO: 88013 - protein, 10 aa, synthetic construct
EWERGDFNNL

SEQ ID NO: 88014 - protein, 10 aa, synthetic construct
EFGRGDFNNT

SEQ ID NO: 88015 - protein, 10 aa, synthetic construct
EFGRGDFNNL

SEQ ID NO: 88016 - protein, 10 aa, synthetic construct
DVARGDHGVL

SEQ ID NO: 88017 - protein, 10 aa, synthetic construct
EFARGDFNNT

SEQ ID NO: 88018 - protein, 10 aa, synthetic construct
EFARGDFNNL

SEQ ID NO: 88019 - protein, 10 aa, synthetic construct
EFVRGDYNSL

SEQ ID NO: 88020 - protein, 10 aa, synthetic construct
EFVRGDYTSM

SEQ ID NO: 88021 - protein, 10 aa, synthetic construct
EFVRGDFQNT

SEQ ID NO: 88022 - protein, 10 aa, synthetic construct
EFPRGDFNNT

SEQ ID NO: 88023 - protein, 10 aa, synthetic construct
EFPRGDFNNL

SEQ ID NO: 88024 - protein, 10 aa, synthetic construct
EFLRGDYNSL

SEQ ID NO: 88025 - protein, 10 aa, synthetic construct
EFLRGDYTSM

SEQ ID NO: 88026 - protein, 10 aa, synthetic construct
EFLRGDFQNT

SEQ ID NO: 88027 - protein, 10 aa, synthetic construct
DVARGDYVGL

SEQ ID NO: 88028 - protein, 10 aa, synthetic construct
EFIRGDYTSV

SEQ ID NO: 88029 - protein, 10 aa, synthetic construct
EFMRGDYTSV

SEQ ID NO: 88030 - protein, 10 aa, synthetic construct
EFWRGDYNSL

SEQ ID NO: 88031 - protein, 10 aa, synthetic construct
EFWRGDYTSM

SEQ ID NO: 88032 - protein, 10 aa, synthetic construct
EFWRGDFQNT

SEQ ID NO: 88033 - protein, 10 aa, synthetic construct
EFKRGDYTSV

SEQ ID NO: 88034 - protein, 10 aa, synthetic construct
EFRRGDFNNT

SEQ ID NO: 88035 - protein, 10 aa, synthetic construct
EFRRGDFNNL

SEQ ID NO: 88036 - protein, 10 aa, synthetic construct
EFHRGDYNSL

SEQ ID NO: 88037 - protein, 10 aa, synthetic construct
EFHRGDYTSM

SEQ ID NO: 88038 - protein, 10 aa, synthetic construct
DVARGDQSTL

SEQ ID NO: 88039 - protein, 10 aa, synthetic construct
EFHRGDFQNT

SEQ ID NO: 88040 - protein, 10 aa, synthetic construct
EFSRGDYNSL

SEQ ID NO: 88041 - protein, 10 aa, synthetic construct
EFSRGDYTSM

SEQ ID NO: 88042 - protein, 10 aa, synthetic construct
EFSRGDFQNT

SEQ ID NO: 88043 - protein, 10 aa, synthetic construct
EFTRGDYNSL

SEQ ID NO: 88044 - protein, 10 aa, synthetic construct
EFTRGDYTSM

SEQ ID NO: 88045 - protein, 10 aa, synthetic construct
EFTRGDFQNT

SEQ ID NO: 88046 - protein, 10 aa, synthetic construct
EFYRGDYTSV

SEQ ID NO: 88047 - protein, 10 aa, synthetic construct
EFNRGDYTSV

SEQ ID NO: 88048 - protein, 10 aa, synthetic construct
EFQRGDYNSL

SEQ ID NO: 88049 - protein, 10 aa, synthetic construct
DVARGDLLLS

SEQ ID NO: 88050 - protein, 10 aa, synthetic construct
EFQRGDYTSM

SEQ ID NO: 88051 - protein, 10 aa, synthetic construct
EFQRGDFQNT

SEQ ID NO: 88052 - protein, 10 aa, synthetic construct
EFDRGDYNSL

SEQ ID NO: 88053 - protein, 10 aa, synthetic construct
EFDRGDYTSM

SEQ ID NO: 88054 - protein, 10 aa, synthetic construct
EFDRGDFQNT

SEQ ID NO: 88055 - protein, 10 aa, synthetic construct
EFERGDYNSL

SEQ ID NO: 88056 - protein, 10 aa, synthetic construct
EFERGDYTSM

SEQ ID NO: 88057 - protein, 10 aa, synthetic construct
EFERGDFQNT

SEQ ID NO: 88058 - protein, 10 aa, synthetic construct
EKGRGDFNNT

SEQ ID NO: 88059 - protein, 10 aa, synthetic construct
EKGRGDFNNL

SEQ ID NO: 88060 - protein, 10 aa, synthetic construct
DVVRGDRGQI

SEQ ID NO: 88061 - protein, 10 aa, synthetic construct
EKARGDFNNT

SEQ ID NO: 88062 - protein, 10 aa, synthetic construct
EKARGDFNNL

SEQ ID NO: 88063 - protein, 10 aa, synthetic construct
EKVRGDYNSL

SEQ ID NO: 88064 - protein, 10 aa, synthetic construct
EKVRGDYTSM

SEQ ID NO: 88065 - protein, 10 aa, synthetic construct
EKVRGDFQNT

SEQ ID NO: 88066 - protein, 10 aa, synthetic construct
EKPRGDFNNT

SEQ ID NO: 88067 - protein, 10 aa, synthetic construct
EKPRGDFNNL

SEQ ID NO: 88068 - protein, 10 aa, synthetic construct
EKLRGDYNSL

SEQ ID NO: 88069 - protein, 10 aa, synthetic construct
EKLRGDYTSM

SEQ ID NO: 88070 - protein, 10 aa, synthetic construct
EKLRGDFQNT

SEQ ID NO: 88071 - protein, 10 aa, synthetic construct
QFFRGDHVNL

SEQ ID NO: 88072 - protein, 10 aa, synthetic construct
DVVRGDRQGI

SEQ ID NO: 88073 - protein, 10 aa, synthetic construct
EKIRGDYTSV

SEQ ID NO: 88074 - protein, 10 aa, synthetic construct
EKMRGDYTSV

SEQ ID NO: 88075 - protein, 10 aa, synthetic construct
EKWRGDYNSL

SEQ ID NO: 88076 - protein, 10 aa, synthetic construct
EKWRGDYTSM

SEQ ID NO: 88077 - protein, 10 aa, synthetic construct
EKWRGDFQNT

SEQ ID NO: 88078 - protein, 10 aa, synthetic construct
EKFRGDYTSV

SEQ ID NO: 88079 - protein, 10 aa, synthetic construct
EKRRGDFNNT

SEQ ID NO: 88080 - protein, 10 aa, synthetic construct
EKRRGDFNNL

SEQ ID NO: 88081 - protein, 10 aa, synthetic construct
EKHRGDYNSL

SEQ ID NO: 88082 - protein, 10 aa, synthetic construct
EKHRGDYTSM

SEQ ID NO: 88083 - protein, 10 aa, synthetic construct
DVVRGDRSVV

SEQ ID NO: 88084 - protein, 10 aa, synthetic construct
EKHRGDFQNT

SEQ ID NO: 88085 - protein, 10 aa, synthetic construct
EKSRGDYNSL

SEQ ID NO: 88086 - protein, 10 aa, synthetic construct
EKSRGDYTSM

SEQ ID NO: 88087 - protein, 10 aa, synthetic construct
EKSRGDFQNT

SEQ ID NO: 88088 - protein, 10 aa, synthetic construct
EKTRGDYNSL

SEQ ID NO: 88089 - protein, 10 aa, synthetic construct
EKTRGDYTSM

SEQ ID NO: 88090 - protein, 10 aa, synthetic construct
EKTRGDFQNT

SEQ ID NO: 88091 - protein, 10 aa, synthetic construct
EKYRGDYTSV

SEQ ID NO: 88092 - protein, 10 aa, synthetic construct
EKQRGDYNSL

SEQ ID NO: 88093 - protein, 10 aa, synthetic construct
EKQRGDYTSM

SEQ ID NO: 88094 - protein, 10 aa, synthetic construct
DVVRGDRGVV

SEQ ID NO: 88095 - protein, 10 aa, synthetic construct
EKQRGDFQNT

SEQ ID NO: 88096 - protein, 10 aa, synthetic construct
EKDRGDYNSL

SEQ ID NO: 88097 - protein, 10 aa, synthetic construct
EKDRGDYTSM

SEQ ID NO: 88098 - protein, 10 aa, synthetic construct
EKDRGDFQNT

SEQ ID NO: 88099 - protein, 10 aa, synthetic construct
EKERGDYNSL

SEQ ID NO: 88100 - protein, 10 aa, synthetic construct
EKERGDYTSM

SEQ ID NO: 88101 - protein, 10 aa, synthetic construct
EKERGDFQNT

SEQ ID NO: 88102 - protein, 10 aa, synthetic construct
ERIRGDFNNT

SEQ ID NO: 88103 - protein, 10 aa, synthetic construct
ERIRGDFNNL

SEQ ID NO: 88104 - protein, 10 aa, synthetic construct
ERMRGDFNNT

SEQ ID NO: 88105 - protein, 10 aa, synthetic construct
DVVRGDRSQT

SEQ ID NO: 88106 - protein, 10 aa, synthetic construct
ERMRGDFNNL

SEQ ID NO: 88107 - protein, 10 aa, synthetic construct
ERFRGDFNNT

SEQ ID NO: 88108 - protein, 10 aa, synthetic construct
ERFRGDFNNL

SEQ ID NO: 88109 - protein, 10 aa, synthetic construct
ERKRGDFNNT

SEQ ID NO: 88110 - protein, 10 aa, synthetic construct
ERKRGDFNNL

SEQ ID NO: 88111 - protein, 10 aa, synthetic construct
ERYRGDFNNT

SEQ ID NO: 88112 - protein, 10 aa, synthetic construct
ERYRGDFNNL

SEQ ID NO: 88113 - protein, 10 aa, synthetic construct
ERNRGDFNNT

SEQ ID NO: 88114 - protein, 10 aa, synthetic construct
ERNRGDFNNL

SEQ ID NO: 88115 - protein, 10 aa, synthetic construct
EHVRGDFNNT

SEQ ID NO: 88116 - protein, 10 aa, synthetic construct
DVPRGDHGVL

SEQ ID NO: 88117 - protein, 10 aa, synthetic construct
EHVRGDFNNL

SEQ ID NO: 88118 - protein, 10 aa, synthetic construct
EHLRGDFNNT

SEQ ID NO: 88119 - protein, 10 aa, synthetic construct
EHLRGDFNNL

SEQ ID NO: 88120 - protein, 10 aa, synthetic construct
EHIRGDYNSL

SEQ ID NO: 88121 - protein, 10 aa, synthetic construct
EHIRGDYTSM

SEQ ID NO: 88122 - protein, 10 aa, synthetic construct
EHIRGDFQNT

SEQ ID NO: 88123 - protein, 10 aa, synthetic construct
EHMRGDYNSL

SEQ ID NO: 88124 - protein, 10 aa, synthetic construct
EHMRGDYTSM

SEQ ID NO: 88125 - protein, 10 aa, synthetic construct
EHMRGDFQNT

SEQ ID NO: 88126 - protein, 10 aa, synthetic construct
EHWRGDFNNT

SEQ ID NO: 88127 - protein, 10 aa, synthetic construct
DVPRGDYVGL

SEQ ID NO: 88128 - protein, 10 aa, synthetic construct
EHWRGDFNNL

SEQ ID NO: 88129 - protein, 10 aa, synthetic construct
EHFRGDYNSL

SEQ ID NO: 88130 - protein, 10 aa, synthetic construct
EHFRGDYTSM

SEQ ID NO: 88131 - protein, 10 aa, synthetic construct
EHFRGDFQNT

SEQ ID NO: 88132 - protein, 10 aa, synthetic construct
EHKRGDYNSL

SEQ ID NO: 88133 - protein, 10 aa, synthetic construct
EHKRGDYTSM

SEQ ID NO: 88134 - protein, 10 aa, synthetic construct
EHKRGDFQNT

SEQ ID NO: 88135 - protein, 10 aa, synthetic construct
EHHRGDFNNT

SEQ ID NO: 88136 - protein, 10 aa, synthetic construct
EHHRGDFNNL

SEQ ID NO: 88137 - protein, 10 aa, synthetic construct
EHSRGDFNNT

SEQ ID NO: 88138 - protein, 10 aa, synthetic construct
DVPRGDQSTL

SEQ ID NO: 88139 - protein, 10 aa, synthetic construct
EHSRGDFNNL

SEQ ID NO: 88140 - protein, 10 aa, synthetic construct
EHTRGDFNNT

SEQ ID NO: 88141 - protein, 10 aa, synthetic construct
EHTRGDFNNL

SEQ ID NO: 88142 - protein, 10 aa, synthetic construct
EHYRGDYNSL

SEQ ID NO: 88143 - protein, 10 aa, synthetic construct
EHYRGDYTSM

SEQ ID NO: 88144 - protein, 10 aa, synthetic construct
EHYRGDFQNT

SEQ ID NO: 88145 - protein, 10 aa, synthetic construct
EHNRGDYNSL

SEQ ID NO: 88146 - protein, 10 aa, synthetic construct
EHNRGDYTSM

SEQ ID NO: 88147 - protein, 10 aa, synthetic construct
EHNRGDFQNT

SEQ ID NO: 88148 - protein, 10 aa, synthetic construct
EHQRGDFNNT

SEQ ID NO: 88149 - protein, 10 aa, synthetic construct
DVPRGDLLLS

SEQ ID NO: 88150 - protein, 10 aa, synthetic construct
EHQRGDFNNL

SEQ ID NO: 88151 - protein, 10 aa, synthetic construct
EHDRGDFNNT

SEQ ID NO: 88152 - protein, 10 aa, synthetic construct
EHDRGDFNNL

SEQ ID NO: 88153 - protein, 10 aa, synthetic construct
EHERGDFNNT

SEQ ID NO: 88154 - protein, 10 aa, synthetic construct
EHERGDFNNL

SEQ ID NO: 88155 - protein, 10 aa, synthetic construct
ESIRGDFNNT

SEQ ID NO: 88156 - protein, 10 aa, synthetic construct
ESIRGDFNNL

SEQ ID NO: 88157 - protein, 10 aa, synthetic construct
ESMRGDFNNT

SEQ ID NO: 88158 - protein, 10 aa, synthetic construct
ESMRGDFNNL

SEQ ID NO: 88159 - protein, 10 aa, synthetic construct
ESFRGDFNNT

SEQ ID NO: 88160 - protein, 10 aa, synthetic construct
DVLRGDRGQI

SEQ ID NO: 88161 - protein, 10 aa, synthetic construct
ESFRGDFNNL

SEQ ID NO: 88162 - protein, 10 aa, synthetic construct
ESKRGDFNNT

SEQ ID NO: 88163 - protein, 10 aa, synthetic construct
ESKRGDFNNL

SEQ ID NO: 88164 - protein, 10 aa, synthetic construct
ESYRGDFNNT

SEQ ID NO: 88165 - protein, 10 aa, synthetic construct
ESYRGDFNNL

SEQ ID NO: 88166 - protein, 10 aa, synthetic construct
ESNRGDFNNT

SEQ ID NO: 88167 - protein, 10 aa, synthetic construct
ESNRGDFNNL

SEQ ID NO: 88168 - protein, 10 aa, synthetic construct
ETVRGDFNNT

SEQ ID NO: 88169 - protein, 10 aa, synthetic construct
ETVRGDFNNL

SEQ ID NO: 88170 - protein, 10 aa, synthetic construct
ETLRGDFNNT

SEQ ID NO: 88171 - protein, 10 aa, synthetic construct
DVLRGDRQGI

SEQ ID NO: 88172 - protein, 10 aa, synthetic construct
ETLRGDFNNL

SEQ ID NO: 88173 - protein, 10 aa, synthetic construct
ETIRGDYNSL

SEQ ID NO: 88174 - protein, 10 aa, synthetic construct
ETIRGDYTSM

SEQ ID NO: 88175 - protein, 10 aa, synthetic construct
ETIRGDFQNT

SEQ ID NO: 88176 - protein, 10 aa, synthetic construct
ETMRGDYNSL

SEQ ID NO: 88177 - protein, 10 aa, synthetic construct
ETMRGDYTSM

SEQ ID NO: 88178 - protein, 10 aa, synthetic construct
ETMRGDFQNT

SEQ ID NO: 88179 - protein, 10 aa, synthetic construct
ETWRGDFNNT

SEQ ID NO: 88180 - protein, 10 aa, synthetic construct
ETWRGDFNNL

SEQ ID NO: 88181 - protein, 10 aa, synthetic construct
ETFRGDYNSL

SEQ ID NO: 88182 - protein, 10 aa, synthetic construct
QFFRGDRDYL

SEQ ID NO: 88183 - protein, 10 aa, synthetic construct
DVLRGDRSVV

SEQ ID NO: 88184 - protein, 10 aa, synthetic construct
ETFRGDYTSM

SEQ ID NO: 88185 - protein, 10 aa, synthetic construct
ETFRGDFQNT

SEQ ID NO: 88186 - protein, 10 aa, synthetic construct
ETKRGDYNSL

SEQ ID NO: 88187 - protein, 10 aa, synthetic construct
ETKRGDYTSM

SEQ ID NO: 88188 - protein, 10 aa, synthetic construct
ETKRGDFQNT

SEQ ID NO: 88189 - protein, 10 aa, synthetic construct
ETHRGDFNNT

SEQ ID NO: 88190 - protein, 10 aa, synthetic construct
ETHRGDFNNL

SEQ ID NO: 88191 - protein, 10 aa, synthetic construct
ETSRGDFNNT

SEQ ID NO: 88192 - protein, 10 aa, synthetic construct
ETSRGDFNNL

SEQ ID NO: 88193 - protein, 10 aa, synthetic construct
ETTRGDFNNT

SEQ ID NO: 88194 - protein, 10 aa, synthetic construct
DVLRGDRGVV

SEQ ID NO: 88195 - protein, 10 aa, synthetic construct
ETTRGDFNNL

SEQ ID NO: 88196 - protein, 10 aa, synthetic construct
ETYRGDYNSL

SEQ ID NO: 88197 - protein, 10 aa, synthetic construct
ETYRGDYTSM

SEQ ID NO: 88198 - protein, 10 aa, synthetic construct
ETYRGDFQNT

SEQ ID NO: 88199 - protein, 10 aa, synthetic construct
ETNRGDYNSL

SEQ ID NO: 88200 - protein, 10 aa, synthetic construct
ETNRGDYTSM

SEQ ID NO: 88201 - protein, 10 aa, synthetic construct
ETNRGDFQNT

SEQ ID NO: 88202 - protein, 10 aa, synthetic construct
ETQRGDFNNT

SEQ ID NO: 88203 - protein, 10 aa, synthetic construct
ETQRGDFNNL

SEQ ID NO: 88204 - protein, 10 aa, synthetic construct
ETDRGDFNNT

SEQ ID NO: 88205 - protein, 10 aa, synthetic construct
DVLRGDRSQT

SEQ ID NO: 88206 - protein, 10 aa, synthetic construct
ETDRGDFNNL

SEQ ID NO: 88207 - protein, 10 aa, synthetic construct
ETERGDFNNT

SEQ ID NO: 88208 - protein, 10 aa, synthetic construct
ETERGDFNNL

SEQ ID NO: 88209 - protein, 10 aa, synthetic construct
EYGRGDFNNT

SEQ ID NO: 88210 - protein, 10 aa, synthetic construct
EYGRGDFNNL

SEQ ID NO: 88211 - protein, 10 aa, synthetic construct
EYARGDFNNT

SEQ ID NO: 88212 - protein, 10 aa, synthetic construct
EYARGDFNNL

SEQ ID NO: 88213 - protein, 10 aa, synthetic construct
EYVRGDYNSL

SEQ ID NO: 88214 - protein, 10 aa, synthetic construct
EYVRGDYTSM

SEQ ID NO: 88215 - protein, 10 aa, synthetic construct
EYVRGDFQNT

SEQ ID NO: 88216 - protein, 10 aa, synthetic construct
DVWRGDRGQI

SEQ ID NO: 88217 - protein, 10 aa, synthetic construct
EYPRGDFNNT

SEQ ID NO: 88218 - protein, 10 aa, synthetic construct
EYPRGDFNNL

SEQ ID NO: 88219 - protein, 10 aa, synthetic construct
EYLRGDYNSL

SEQ ID NO: 88220 - protein, 10 aa, synthetic construct
EYLRGDYTSM

SEQ ID NO: 88221 - protein, 10 aa, synthetic construct
EYLRGDFQNT

SEQ ID NO: 88222 - protein, 10 aa, synthetic construct
EYIRGDYTSV

SEQ ID NO: 88223 - protein, 10 aa, synthetic construct
EYMRGDYTSV

SEQ ID NO: 88224 - protein, 10 aa, synthetic construct
EYWRGDYNSL

SEQ ID NO: 88225 - protein, 10 aa, synthetic construct
EYWRGDYTSM

SEQ ID NO: 88226 - protein, 10 aa, synthetic construct
EYWRGDFQNT

SEQ ID NO: 88227 - protein, 10 aa, synthetic construct
DVWRGDRQGI

SEQ ID NO: 88228 - protein, 10 aa, synthetic construct
EYFRGDYTSV

SEQ ID NO: 88229 - protein, 10 aa, synthetic construct
EYKRGDYTSV

SEQ ID NO: 88230 - protein, 10 aa, synthetic construct
EYRRGDFNNT

SEQ ID NO: 88231 - protein, 10 aa, synthetic construct
EYRRGDFNNL

SEQ ID NO: 88232 - protein, 10 aa, synthetic construct
EYHRGDYNSL

SEQ ID NO: 88233 - protein, 10 aa, synthetic construct
EYHRGDYTSM

SEQ ID NO: 88234 - protein, 10 aa, synthetic construct
EYHRGDFQNT

SEQ ID NO: 88235 - protein, 10 aa, synthetic construct
EYSRGDYNSL

SEQ ID NO: 88236 - protein, 10 aa, synthetic construct
EYSRGDYTSM

SEQ ID NO: 88237 - protein, 10 aa, synthetic construct
EYSRGDFQNT

SEQ ID NO: 88238 - protein, 10 aa, synthetic construct
DVWRGDRSVV

SEQ ID NO: 88239 - protein, 10 aa, synthetic construct
EYTRGDYNSL

SEQ ID NO: 88240 - protein, 10 aa, synthetic construct
EYTRGDYTSM

SEQ ID NO: 88241 - protein, 10 aa, synthetic construct
EYTRGDFQNT

SEQ ID NO: 88242 - protein, 10 aa, synthetic construct
EYYRGDYTSV

SEQ ID NO: 88243 - protein, 10 aa, synthetic construct
EYNRGDYTSV

SEQ ID NO: 88244 - protein, 10 aa, synthetic construct
EYQRGDYNSL

SEQ ID NO: 88245 - protein, 10 aa, synthetic construct
EYQRGDYTSM

SEQ ID NO: 88246 - protein, 10 aa, synthetic construct
EYQRGDFQNT

SEQ ID NO: 88247 - protein, 10 aa, synthetic construct
EYDRGDYNSL

SEQ ID NO: 88248 - protein, 10 aa, synthetic construct
EYDRGDYTSM

SEQ ID NO: 88249 - protein, 10 aa, synthetic construct
DVWRGDRGVV

SEQ ID NO: 88250 - protein, 10 aa, synthetic construct
EYDRGDFQNT

SEQ ID NO: 88251 - protein, 10 aa, synthetic construct
EYERGDYNSL

SEQ ID NO: 88252 - protein, 10 aa, synthetic construct
EYERGDYTSM

SEQ ID NO: 88253 - protein, 10 aa, synthetic construct
EYERGDFQNT

SEQ ID NO: 88254 - protein, 10 aa, synthetic construct
ENGRGDFNNT

SEQ ID NO: 88255 - protein, 10 aa, synthetic construct
ENGRGDFNNL

SEQ ID NO: 88256 - protein, 10 aa, synthetic construct
ENARGDFNNT

SEQ ID NO: 88257 - protein, 10 aa, synthetic construct
ENARGDFNNL

SEQ ID NO: 88258 - protein, 10 aa, synthetic construct
ENVRGDYNSL

SEQ ID NO: 88259 - protein, 10 aa, synthetic construct
ENVRGDYTSM

SEQ ID NO: 88260 - protein, 10 aa, synthetic construct
DVWRGDRSQT

SEQ ID NO: 88261 - protein, 10 aa, synthetic construct
ENVRGDFQNT

SEQ ID NO: 88262 - protein, 10 aa, synthetic construct
ENPRGDFNNT

SEQ ID NO: 88263 - protein, 10 aa, synthetic construct
ENPRGDFNNL

SEQ ID NO: 88264 - protein, 10 aa, synthetic construct
ENLRGDYNSL

SEQ ID NO: 88265 - protein, 10 aa, synthetic construct
ENLRGDYTSM

SEQ ID NO: 88266 - protein, 10 aa, synthetic construct
ENLRGDFQNT

SEQ ID NO: 88267 - protein, 10 aa, synthetic construct
ENIRGDYTSV

SEQ ID NO: 88268 - protein, 10 aa, synthetic construct
ENMRGDYTSV

SEQ ID NO: 88269 - protein, 10 aa, synthetic construct
ENWRGDYNSL

SEQ ID NO: 88270 - protein, 10 aa, synthetic construct
ENWRGDYTSM

SEQ ID NO: 88271 - protein, 10 aa, synthetic construct
DVRRGDHGVL

SEQ ID NO: 88272 - protein, 10 aa, synthetic construct
ENWRGDFQNT

SEQ ID NO: 88273 - protein, 10 aa, synthetic construct
ENFRGDYTSV

SEQ ID NO: 88274 - protein, 10 aa, synthetic construct
ENKRGDYTSV

SEQ ID NO: 88275 - protein, 10 aa, synthetic construct
ENHRGDYNSL

SEQ ID NO: 88276 - protein, 10 aa, synthetic construct
ENHRGDYTSM

SEQ ID NO: 88277 - protein, 10 aa, synthetic construct
ENHRGDFQNT

SEQ ID NO: 88278 - protein, 10 aa, synthetic construct
ENSRGDYNSL

SEQ ID NO: 88279 - protein, 10 aa, synthetic construct
ENSRGDYTSM

SEQ ID NO: 88280 - protein, 10 aa, synthetic construct
ENSRGDFQNT

SEQ ID NO: 88281 - protein, 10 aa, synthetic construct
ENTRGDYNSL

SEQ ID NO: 88282 - protein, 10 aa, synthetic construct
DVRRGDYVGL

SEQ ID NO: 88283 - protein, 10 aa, synthetic construct
ENTRGDYTSM

SEQ ID NO: 88284 - protein, 10 aa, synthetic construct
ENTRGDFQNT

SEQ ID NO: 88285 - protein, 10 aa, synthetic construct
ENYRGDYTSV

SEQ ID NO: 88286 - protein, 10 aa, synthetic construct
ENNRGDYTSV

SEQ ID NO: 88287 - protein, 10 aa, synthetic construct
ENQRGDYNSL

SEQ ID NO: 88288 - protein, 10 aa, synthetic construct
ENQRGDYTSM

SEQ ID NO: 88289 - protein, 10 aa, synthetic construct
ENQRGDFQNT

SEQ ID NO: 88290 - protein, 10 aa, synthetic construct
ENDRGDYNSL

SEQ ID NO: 88291 - protein, 10 aa, synthetic construct
ENDRGDYTSM

SEQ ID NO: 88292 - protein, 10 aa, synthetic construct
ENDRGDFQNT

SEQ ID NO: 88293 - protein, 10 aa, synthetic construct
QFFRGDYSSV

SEQ ID NO: 88294 - protein, 10 aa, synthetic construct
DVRRGDQSTL

SEQ ID NO: 88295 - protein, 10 aa, synthetic construct
ENERGDYNSL

SEQ ID NO: 88296 - protein, 10 aa, synthetic construct
ENERGDYTSM

SEQ ID NO: 88297 - protein, 10 aa, synthetic construct
ENERGDFQNT

SEQ ID NO: 88298 - protein, 10 aa, synthetic construct
EQVRGDFNNT

SEQ ID NO: 88299 - protein, 10 aa, synthetic construct
EQVRGDFNNL

SEQ ID NO: 88300 - protein, 10 aa, synthetic construct
EQLRGDFNNT

SEQ ID NO: 88301 - protein, 10 aa, synthetic construct
EQLRGDFNNL

SEQ ID NO: 88302 - protein, 10 aa, synthetic construct
EQIRGDYNSL

SEQ ID NO: 88303 - protein, 10 aa, synthetic construct
EQIRGDYTSM

SEQ ID NO: 88304 - protein, 10 aa, synthetic construct
EQIRGDFQNT

SEQ ID NO: 88305 - protein, 10 aa, synthetic construct
DVRRGDLLLS

SEQ ID NO: 88306 - protein, 10 aa, synthetic construct
EQMRGDYNSL

SEQ ID NO: 88307 - protein, 10 aa, synthetic construct
EQMRGDYTSM

SEQ ID NO: 88308 - protein, 10 aa, synthetic construct
EQMRGDFQNT

SEQ ID NO: 88309 - protein, 10 aa, synthetic construct
EQWRGDFNNT

SEQ ID NO: 88310 - protein, 10 aa, synthetic construct
EQWRGDFNNL

SEQ ID NO: 88311 - protein, 10 aa, synthetic construct
EQFRGDYNSL

SEQ ID NO: 88312 - protein, 10 aa, synthetic construct
EQFRGDYTSM

SEQ ID NO: 88313 - protein, 10 aa, synthetic construct
EQFRGDFQNT

SEQ ID NO: 88314 - protein, 10 aa, synthetic construct
EQKRGDYNSL

SEQ ID NO: 88315 - protein, 10 aa, synthetic construct
EQKRGDYTSM

SEQ ID NO: 88316 - protein, 10 aa, synthetic construct
DVHRGDRGQI

SEQ ID NO: 88317 - protein, 10 aa, synthetic construct
EQKRGDFQNT

SEQ ID NO: 88318 - protein, 10 aa, synthetic construct
EQHRGDFNNT

SEQ ID NO: 88319 - protein, 10 aa, synthetic construct
EQHRGDFNNL

SEQ ID NO: 88320 - protein, 10 aa, synthetic construct
EQSRGDFNNT

SEQ ID NO: 88321 - protein, 10 aa, synthetic construct
EQSRGDFNNL

SEQ ID NO: 88322 - protein, 10 aa, synthetic construct
EQTRGDFNNT

SEQ ID NO: 88323 - protein, 10 aa, synthetic construct
EQTRGDFNNL

SEQ ID NO: 88324 - protein, 10 aa, synthetic construct
EQYRGDYNSL

SEQ ID NO: 88325 - protein, 10 aa, synthetic construct
EQYRGDYTSM

SEQ ID NO: 88326 - protein, 10 aa, synthetic construct
EQYRGDFQNT

SEQ ID NO: 88327 - protein, 10 aa, synthetic construct
DVHRGDRQGI

SEQ ID NO: 88328 - protein, 10 aa, synthetic construct
EQNRGDYNSL

SEQ ID NO: 88329 - protein, 10 aa, synthetic construct
EQNRGDYTSM

SEQ ID NO: 88330 - protein, 10 aa, synthetic construct
EQNRGDFQNT

SEQ ID NO: 88331 - protein, 10 aa, synthetic construct
EQQRGDFNNT

SEQ ID NO: 88332 - protein, 10 aa, synthetic construct
EQQRGDFNNL

SEQ ID NO: 88333 - protein, 10 aa, synthetic construct
EQDRGDFNNT

SEQ ID NO: 88334 - protein, 10 aa, synthetic construct
EQDRGDFNNL

SEQ ID NO: 88335 - protein, 10 aa, synthetic construct
EQERGDFNNT

SEQ ID NO: 88336 - protein, 10 aa, synthetic construct
EQERGDFNNL

SEQ ID NO: 88337 - protein, 10 aa, synthetic construct
EDVRGDFNNT

SEQ ID NO: 88338 - protein, 10 aa, synthetic construct
DVHRGDRSVV

SEQ ID NO: 88339 - protein, 10 aa, synthetic construct
EDVRGDFNNL

SEQ ID NO: 88340 - protein, 10 aa, synthetic construct
EDLRGDFNNT

SEQ ID NO: 88341 - protein, 10 aa, synthetic construct
EDLRGDFNNL

SEQ ID NO: 88342 - protein, 10 aa, synthetic construct
EDIRGDYNSL

SEQ ID NO: 88343 - protein, 10 aa, synthetic construct
EDIRGDYTSM

SEQ ID NO: 88344 - protein, 10 aa, synthetic construct
EDIRGDFQNT

SEQ ID NO: 88345 - protein, 10 aa, synthetic construct
EDMRGDYNSL

SEQ ID NO: 88346 - protein, 10 aa, synthetic construct
EDMRGDYTSM

SEQ ID NO: 88347 - protein, 10 aa, synthetic construct
EDMRGDFQNT

SEQ ID NO: 88348 - protein, 10 aa, synthetic construct
EDWRGDFNNT

SEQ ID NO: 88349 - protein, 10 aa, synthetic construct
DVHRGDRGVV

SEQ ID NO: 88350 - protein, 10 aa, synthetic construct
EDWRGDFNNL

SEQ ID NO: 88351 - protein, 10 aa, synthetic construct
EDFRGDYNSL

SEQ ID NO: 88352 - protein, 10 aa, synthetic construct
EDFRGDYTSM

SEQ ID NO: 88353 - protein, 10 aa, synthetic construct
EDFRGDFQNT

SEQ ID NO: 88354 - protein, 10 aa, synthetic construct
EDKRGDYNSL

SEQ ID NO: 88355 - protein, 10 aa, synthetic construct
EDKRGDYTSM

SEQ ID NO: 88356 - protein, 10 aa, synthetic construct
EDKRGDFQNT

SEQ ID NO: 88357 - protein, 10 aa, synthetic construct
EDHRGDFNNT

SEQ ID NO: 88358 - protein, 10 aa, synthetic construct
EDHRGDFNNL

SEQ ID NO: 88359 - protein, 10 aa, synthetic construct
EDSRGDFNNT

SEQ ID NO: 88360 - protein, 10 aa, synthetic construct
DVHRGDRSQT

SEQ ID NO: 88361 - protein, 10 aa, synthetic construct
EDSRGDFNNL

SEQ ID NO: 88362 - protein, 10 aa, synthetic construct
EDTRGDFNNT

SEQ ID NO: 88363 - protein, 10 aa, synthetic construct
EDTRGDFNNL

SEQ ID NO: 88364 - protein, 10 aa, synthetic construct
EDYRGDYNSL

SEQ ID NO: 88365 - protein, 10 aa, synthetic construct
EDYRGDYTSM

SEQ ID NO: 88366 - protein, 10 aa, synthetic construct
EDYRGDFQNT

SEQ ID NO: 88367 - protein, 10 aa, synthetic construct
EDNRGDYNSL

SEQ ID NO: 88368 - protein, 10 aa, synthetic construct
EDNRGDYTSM

SEQ ID NO: 88369 - protein, 10 aa, synthetic construct
EDNRGDFQNT

SEQ ID NO: 88370 - protein, 10 aa, synthetic construct
EDQRGDFNNT

SEQ ID NO: 88371 - protein, 10 aa, synthetic construct
DVSRGDRGQI

SEQ ID NO: 88372 - protein, 10 aa, synthetic construct
EDQRGDFNNL

SEQ ID NO: 88373 - protein, 10 aa, synthetic construct
EDDRGDFNNT

SEQ ID NO: 88374 - protein, 10 aa, synthetic construct
EDDRGDFNNL

SEQ ID NO: 88375 - protein, 10 aa, synthetic construct
EDERGDFNNT

SEQ ID NO: 88376 - protein, 10 aa, synthetic construct
EDERGDFNNL

SEQ ID NO: 88377 - protein, 10 aa, synthetic construct
EEVRGDFNNT

SEQ ID NO: 88378 - protein, 10 aa, synthetic construct
EEVRGDFNNL

SEQ ID NO: 88379 - protein, 10 aa, synthetic construct
EELRGDFNNT

SEQ ID NO: 88380 - protein, 10 aa, synthetic construct
EELRGDFNNL

SEQ ID NO: 88381 - protein, 10 aa, synthetic construct
EEIRGDYNSL

SEQ ID NO: 88382 - protein, 10 aa, synthetic construct
DVSRGDRQGI

SEQ ID NO: 88383 - protein, 10 aa, synthetic construct
EEIRGDYTSM

SEQ ID NO: 88384 - protein, 10 aa, synthetic construct
EEIRGDFQNT

SEQ ID NO: 88385 - protein, 10 aa, synthetic construct
EEMRGDYNSL

SEQ ID NO: 88386 - protein, 10 aa, synthetic construct
EEMRGDYTSM

SEQ ID NO: 88387 - protein, 10 aa, synthetic construct
EEMRGDFQNT

SEQ ID NO: 88388 - protein, 10 aa, synthetic construct
EEWRGDFNNT

SEQ ID NO: 88389 - protein, 10 aa, synthetic construct
EEWRGDFNNL

SEQ ID NO: 88390 - protein, 10 aa, synthetic construct
EEFRGDYNSL

SEQ ID NO: 88391 - protein, 10 aa, synthetic construct
EEFRGDYTSM

SEQ ID NO: 88392 - protein, 10 aa, synthetic construct
EEFRGDFQNT

SEQ ID NO: 88393 - protein, 10 aa, synthetic construct
DVSRGDRSVV

SEQ ID NO: 88394 - protein, 10 aa, synthetic construct
EEKRGDYNSL

SEQ ID NO: 88395 - protein, 10 aa, synthetic construct
EEKRGDYTSM

SEQ ID NO: 88396 - protein, 10 aa, synthetic construct
EEKRGDFQNT

SEQ ID NO: 88397 - protein, 10 aa, synthetic construct
EEHRGDFNNT

SEQ ID NO: 88398 - protein, 10 aa, synthetic construct
EEHRGDFNNL

SEQ ID NO: 88399 - protein, 10 aa, synthetic construct
EESRGDFNNT

SEQ ID NO: 88400 - protein, 10 aa, synthetic construct
EESRGDFNNL

SEQ ID NO: 88401 - protein, 10 aa, synthetic construct
EETRGDFNNT

SEQ ID NO: 88402 - protein, 10 aa, synthetic construct
EETRGDFNNL

SEQ ID NO: 88403 - protein, 10 aa, synthetic construct
EEYRGDYNSL

SEQ ID NO: 88404 - protein, 10 aa, synthetic construct
TKNRGDRGQI

SEQ ID NO: 88405 - protein, 10 aa, synthetic construct
QFFRGDLTVT

SEQ ID NO: 88406 - protein, 10 aa, synthetic construct
DVSRGDRGVV

SEQ ID NO: 88407 - protein, 10 aa, synthetic construct
EEYRGDYTSM

SEQ ID NO: 88408 - protein, 10 aa, synthetic construct
EEYRGDFQNT

SEQ ID NO: 88409 - protein, 10 aa, synthetic construct
EENRGDYNSL

SEQ ID NO: 88410 - protein, 10 aa, synthetic construct
EENRGDYTSM

SEQ ID NO: 88411 - protein, 10 aa, synthetic construct
EENRGDFQNT

SEQ ID NO: 88412 - protein, 10 aa, synthetic construct
EEQRGDFNNT

SEQ ID NO: 88413 - protein, 10 aa, synthetic construct
EEQRGDFNNL

SEQ ID NO: 88414 - protein, 10 aa, synthetic construct
EEDRGDFNNT

SEQ ID NO: 88415 - protein, 10 aa, synthetic construct
EEDRGDFNNL

SEQ ID NO: 88416 - protein, 10 aa, synthetic construct
EEERGDFNNT

SEQ ID NO: 88417 - protein, 10 aa, synthetic construct
DVSRGDRSQT

SEQ ID NO: 88418 - protein, 10 aa, synthetic construct
EEERGDFNNL

SEQ ID NO: 88419 - protein, 10 aa, synthetic construct
NGVRGDFNNT

SEQ ID NO: 88420 - protein, 10 aa, synthetic construct
NGVRGDFNNL

SEQ ID NO: 88421 - protein, 10 aa, synthetic construct
NGLRGDFNNT

SEQ ID NO: 88422 - protein, 10 aa, synthetic construct
NGLRGDFNNL

SEQ ID NO: 88423 - protein, 10 aa, synthetic construct
NGIRGDYNSL

SEQ ID NO: 88424 - protein, 10 aa, synthetic construct
NGIRGDYTSM

SEQ ID NO: 88425 - protein, 10 aa, synthetic construct
NGIRGDFQNT

SEQ ID NO: 88426 - protein, 10 aa, synthetic construct
NGMRGDYNSL

SEQ ID NO: 88427 - protein, 10 aa, synthetic construct
NGMRGDYTSM

SEQ ID NO: 88428 - protein, 10 aa, synthetic construct
DVTRGDRGQI

SEQ ID NO: 88429 - protein, 10 aa, synthetic construct
NGMRGDFQNT

SEQ ID NO: 88430 - protein, 10 aa, synthetic construct
NGWRGDFNNT

SEQ ID NO: 88431 - protein, 10 aa, synthetic construct
NGWRGDFNNL

SEQ ID NO: 88432 - protein, 10 aa, synthetic construct
NGFRGDYNSL

SEQ ID NO: 88433 - protein, 10 aa, synthetic construct
NGFRGDYTSM

SEQ ID NO: 88434 - protein, 10 aa, synthetic construct
NGFRGDFQNT

SEQ ID NO: 88435 - protein, 10 aa, synthetic construct
NGKRGDYNSL

SEQ ID NO: 88436 - protein, 10 aa, synthetic construct
NGKRGDYTSM

SEQ ID NO: 88437 - protein, 10 aa, synthetic construct
NGKRGDFQNT

SEQ ID NO: 88438 - protein, 10 aa, synthetic construct
NGHRGDFNNT

SEQ ID NO: 88439 - protein, 10 aa, synthetic construct
DVTRGDRQGI

SEQ ID NO: 88440 - protein, 10 aa, synthetic construct
NGHRGDFNNL

SEQ ID NO: 88441 - protein, 10 aa, synthetic construct
NGSRGDFNNT

SEQ ID NO: 88442 - protein, 10 aa, synthetic construct
NGSRGDFNNL

SEQ ID NO: 88443 - protein, 10 aa, synthetic construct
NGTRGDFNNT

SEQ ID NO: 88444 - protein, 10 aa, synthetic construct
NGTRGDFNNL

SEQ ID NO: 88445 - protein, 10 aa, synthetic construct
NGYRGDYNSL

SEQ ID NO: 88446 - protein, 10 aa, synthetic construct
NGYRGDYTSM

SEQ ID NO: 88447 - protein, 10 aa, synthetic construct
NGYRGDFQNT

SEQ ID NO: 88448 - protein, 10 aa, synthetic construct
NGNRGDYNSL

SEQ ID NO: 88449 - protein, 10 aa, synthetic construct
NGNRGDYTSM

SEQ ID NO: 88450 - protein, 10 aa, synthetic construct
DVTRGDRSVV

SEQ ID NO: 88451 - protein, 10 aa, synthetic construct
NGNRGDFQNT

SEQ ID NO: 88452 - protein, 10 aa, synthetic construct
NGQRGDFNNT

SEQ ID NO: 88453 - protein, 10 aa, synthetic construct
NGQRGDFNNL

SEQ ID NO: 88454 - protein, 10 aa, synthetic construct
NGDRGDFNNT

SEQ ID NO: 88455 - protein, 10 aa, synthetic construct
NGDRGDFNNL

SEQ ID NO: 88456 - protein, 10 aa, synthetic construct
NGERGDFNNT

SEQ ID NO: 88457 - protein, 10 aa, synthetic construct
NGERGDFNNL

SEQ ID NO: 88458 - protein, 10 aa, synthetic construct
NAVRGDFNNT

SEQ ID NO: 88459 - protein, 10 aa, synthetic construct
NAVRGDFNNL

SEQ ID NO: 88460 - protein, 10 aa, synthetic construct
NALRGDFNNT

SEQ ID NO: 88461 - protein, 10 aa, synthetic construct
DVTRGDRGVV

SEQ ID NO: 88462 - protein, 10 aa, synthetic construct
NALRGDFNNL

SEQ ID NO: 88463 - protein, 10 aa, synthetic construct
NAIRGDYNSL

SEQ ID NO: 88464 - protein, 10 aa, synthetic construct
NAIRGDYTSM

SEQ ID NO: 88465 - protein, 10 aa, synthetic construct
NAIRGDFQNT

SEQ ID NO: 88466 - protein, 10 aa, synthetic construct
NAMRGDYNSL

SEQ ID NO: 88467 - protein, 10 aa, synthetic construct
NAMRGDYTSM

SEQ ID NO: 88468 - protein, 10 aa, synthetic construct
NAMRGDFQNT

SEQ ID NO: 88469 - protein, 10 aa, synthetic construct
NAWRGDFNNT

SEQ ID NO: 88470 - protein, 10 aa, synthetic construct
NAWRGDFNNL

SEQ ID NO: 88471 - protein, 10 aa, synthetic construct
NAFRGDYNSL

SEQ ID NO: 88472 - protein, 10 aa, synthetic construct
DVTRGDRSQT

SEQ ID NO: 88473 - protein, 10 aa, synthetic construct
NAFRGDYTSM

SEQ ID NO: 88474 - protein, 10 aa, synthetic construct
NAFRGDFQNT

SEQ ID NO: 88475 - protein, 10 aa, synthetic construct
NAKRGDYNSL

SEQ ID NO: 88476 - protein, 10 aa, synthetic construct
NAKRGDYTSM

SEQ ID NO: 88477 - protein, 10 aa, synthetic construct
NAKRGDFQNT

SEQ ID NO: 88478 - protein, 10 aa, synthetic construct
NAHRGDFNNT

SEQ ID NO: 88479 - protein, 10 aa, synthetic construct
NAHRGDFNNL

SEQ ID NO: 88480 - protein, 10 aa, synthetic construct
NASRGDFNNT

SEQ ID NO: 88481 - protein, 10 aa, synthetic construct
NASRGDFNNL

SEQ ID NO: 88482 - protein, 10 aa, synthetic construct
NATRGDFNNT

SEQ ID NO: 88483 - protein, 10 aa, synthetic construct
DVQRGDRGQI

SEQ ID NO: 88484 - protein, 10 aa, synthetic construct
NATRGDFNNL

SEQ ID NO: 88485 - protein, 10 aa, synthetic construct
NAYRGDYNSL

SEQ ID NO: 88486 - protein, 10 aa, synthetic construct
NAYRGDYTSM

SEQ ID NO: 88487 - protein, 10 aa, synthetic construct
NAYRGDFQNT

SEQ ID NO: 88488 - protein, 10 aa, synthetic construct
NANRGDYNSL

SEQ ID NO: 88489 - protein, 10 aa, synthetic construct
NANRGDYTSM

SEQ ID NO: 88490 - protein, 10 aa, synthetic construct
NANRGDFQNT

SEQ ID NO: 88491 - protein, 10 aa, synthetic construct
NAQRGDFNNT

SEQ ID NO: 88492 - protein, 10 aa, synthetic construct
NAQRGDFNNL

SEQ ID NO: 88493 - protein, 10 aa, synthetic construct
NADRGDFNNT

SEQ ID NO: 88494 - protein, 10 aa, synthetic construct
DVQRGDRQGI

SEQ ID NO: 88495 - protein, 10 aa, synthetic construct
NADRGDFNNL

SEQ ID NO: 88496 - protein, 10 aa, synthetic construct
NAERGDFNNT

SEQ ID NO: 88497 - protein, 10 aa, synthetic construct
NAERGDFNNL

SEQ ID NO: 88498 - protein, 10 aa, synthetic construct
NVVRGDFNNT

SEQ ID NO: 88499 - protein, 10 aa, synthetic construct
NVVRGDFNNL

SEQ ID NO: 88500 - protein, 10 aa, synthetic construct
NVLRGDFNNT

SEQ ID NO: 88501 - protein, 10 aa, synthetic construct
NVLRGDFNNL

SEQ ID NO: 88502 - protein, 10 aa, synthetic construct
NVIRGDYNSL

SEQ ID NO: 88503 - protein, 10 aa, synthetic construct
NVIRGDYTSM

SEQ ID NO: 88504 - protein, 10 aa, synthetic construct
NVIRGDFQNT

SEQ ID NO: 88505 - protein, 10 aa, synthetic construct
DVQRGDRSVV

SEQ ID NO: 88506 - protein, 10 aa, synthetic construct
NVMRGDYNSL

SEQ ID NO: 88507 - protein, 10 aa, synthetic construct
NVMRGDYTSM

SEQ ID NO: 88508 - protein, 10 aa, synthetic construct
NVMRGDFQNT

SEQ ID NO: 88509 - protein, 10 aa, synthetic construct
NVWRGDFNNT

SEQ ID NO: 88510 - protein, 10 aa, synthetic construct
NVWRGDFNNL

SEQ ID NO: 88511 - protein, 10 aa, synthetic construct
NVFRGDYNSL

SEQ ID NO: 88512 - protein, 10 aa, synthetic construct
NVFRGDYTSM

SEQ ID NO: 88513 - protein, 10 aa, synthetic construct
NVFRGDFQNT

SEQ ID NO: 88514 - protein, 10 aa, synthetic construct
NVKRGDYNSL

SEQ ID NO: 88515 - protein, 10 aa, synthetic construct
NVKRGDYTSM

SEQ ID NO: 88516 - protein, 10 aa, synthetic construct
SFFRGDYTSV

SEQ ID NO: 88517 - protein, 10 aa, synthetic construct
DVQRGDRGVV

SEQ ID NO: 88518 - protein, 10 aa, synthetic construct
NVKRGDFQNT

SEQ ID NO: 88519 - protein, 10 aa, synthetic construct
NVHRGDFNNT

SEQ ID NO: 88520 - protein, 10 aa, synthetic construct
NVHRGDFNNL

SEQ ID NO: 88521 - protein, 10 aa, synthetic construct
NVSRGDFNNT

SEQ ID NO: 88522 - protein, 10 aa, synthetic construct
NVSRGDFNNL

SEQ ID NO: 88523 - protein, 10 aa, synthetic construct
NVTRGDFNNT

SEQ ID NO: 88524 - protein, 10 aa, synthetic construct
NVTRGDFNNL

SEQ ID NO: 88525 - protein, 10 aa, synthetic construct
NVYRGDYNSL

SEQ ID NO: 88526 - protein, 10 aa, synthetic construct
NVYRGDYTSM

SEQ ID NO: 88527 - protein, 10 aa, synthetic construct
NVYRGDFQNT

SEQ ID NO: 88528 - protein, 10 aa, synthetic construct
DVQRGDRSQT

SEQ ID NO: 88529 - protein, 10 aa, synthetic construct
NVNRGDYNSL

SEQ ID NO: 88530 - protein, 10 aa, synthetic construct
NVNRGDYTSM

SEQ ID NO: 88531 - protein, 10 aa, synthetic construct
NVNRGDFQNT

SEQ ID NO: 88532 - protein, 10 aa, synthetic construct
NVQRGDFNNT

SEQ ID NO: 88533 - protein, 10 aa, synthetic construct
NVQRGDFNNL

SEQ ID NO: 88534 - protein, 10 aa, synthetic construct
NVDRGDFNNT

SEQ ID NO: 88535 - protein, 10 aa, synthetic construct
NVDRGDFNNL

SEQ ID NO: 88536 - protein, 10 aa, synthetic construct
NVERGDFNNT

SEQ ID NO: 88537 - protein, 10 aa, synthetic construct
NVERGDFNNL

SEQ ID NO: 88538 - protein, 10 aa, synthetic construct
NPVRGDFNNT

SEQ ID NO: 88539 - protein, 10 aa, synthetic construct
DVDRGDRGQI

SEQ ID NO: 88540 - protein, 10 aa, synthetic construct
NPVRGDFNNL

SEQ ID NO: 88541 - protein, 10 aa, synthetic construct
NPLRGDFNNT

SEQ ID NO: 88542 - protein, 10 aa, synthetic construct
NPLRGDFNNL

SEQ ID NO: 88543 - protein, 10 aa, synthetic construct
NPIRGDYNSL

SEQ ID NO: 88544 - protein, 10 aa, synthetic construct
NPIRGDYTSM

SEQ ID NO: 88545 - protein, 10 aa, synthetic construct
NPIRGDFQNT

SEQ ID NO: 88546 - protein, 10 aa, synthetic construct
NPMRGDYNSL

SEQ ID NO: 88547 - protein, 10 aa, synthetic construct
NPMRGDYTSM

SEQ ID NO: 88548 - protein, 10 aa, synthetic construct
NPMRGDFQNT

SEQ ID NO: 88549 - protein, 10 aa, synthetic construct
NPWRGDFNNT

SEQ ID NO: 88550 - protein, 10 aa, synthetic construct
DVDRGDRQGI

SEQ ID NO: 88551 - protein, 10 aa, synthetic construct
NPWRGDFNNL

SEQ ID NO: 88552 - protein, 10 aa, synthetic construct
NPFRGDYNSL

SEQ ID NO: 88553 - protein, 10 aa, synthetic construct
NPFRGDYTSM

SEQ ID NO: 88554 - protein, 10 aa, synthetic construct
NPFRGDFQNT

SEQ ID NO: 88555 - protein, 10 aa, synthetic construct
NPKRGDYNSL

SEQ ID NO: 88556 - protein, 10 aa, synthetic construct
NPKRGDYTSM

SEQ ID NO: 88557 - protein, 10 aa, synthetic construct
NPKRGDFQNT

SEQ ID NO: 88558 - protein, 10 aa, synthetic construct
NPHRGDFNNT

SEQ ID NO: 88559 - protein, 10 aa, synthetic construct
NPHRGDFNNL

SEQ ID NO: 88560 - protein, 10 aa, synthetic construct
NPSRGDFNNT

SEQ ID NO: 88561 - protein, 10 aa, synthetic construct
DVDRGDRSVV

SEQ ID NO: 88562 - protein, 10 aa, synthetic construct
NPSRGDFNNL

SEQ ID NO: 88563 - protein, 10 aa, synthetic construct
NPTRGDFNNT

SEQ ID NO: 88564 - protein, 10 aa, synthetic construct
NPTRGDFNNL

SEQ ID NO: 88565 - protein, 10 aa, synthetic construct
NPYRGDYNSL

SEQ ID NO: 88566 - protein, 10 aa, synthetic construct
NPYRGDYTSM

SEQ ID NO: 88567 - protein, 10 aa, synthetic construct
NPYRGDFQNT

SEQ ID NO: 88568 - protein, 10 aa, synthetic construct
NPNRGDYNSL

SEQ ID NO: 88569 - protein, 10 aa, synthetic construct
NPNRGDYTSM

SEQ ID NO: 88570 - protein, 10 aa, synthetic construct
NPNRGDFQNT

SEQ ID NO: 88571 - protein, 10 aa, synthetic construct
NPQRGDFNNT

SEQ ID NO: 88572 - protein, 10 aa, synthetic construct
DVDRGDRGVV

SEQ ID NO: 88573 - protein, 10 aa, synthetic construct
NPQRGDFNNL

SEQ ID NO: 88574 - protein, 10 aa, synthetic construct
NPDRGDFNNT

SEQ ID NO: 88575 - protein, 10 aa, synthetic construct
NPDRGDFNNL

SEQ ID NO: 88576 - protein, 10 aa, synthetic construct
NPERGDFNNT

SEQ ID NO: 88577 - protein, 10 aa, synthetic construct
NPERGDFNNL

SEQ ID NO: 88578 - protein, 10 aa, synthetic construct
NLVRGDFNNT

SEQ ID NO: 88579 - protein, 10 aa, synthetic construct
NLVRGDFNNL

SEQ ID NO: 88580 - protein, 10 aa, synthetic construct
NLLRGDFNNT

SEQ ID NO: 88581 - protein, 10 aa, synthetic construct
NLLRGDFNNL

SEQ ID NO: 88582 - protein, 10 aa, synthetic construct
NLIRGDYNSL

SEQ ID NO: 88583 - protein, 10 aa, synthetic construct
DVDRGDRSQT

SEQ ID NO: 88584 - protein, 10 aa, synthetic construct
NLIRGDYTSM

SEQ ID NO: 88585 - protein, 10 aa, synthetic construct
NLIRGDFQNT

SEQ ID NO: 88586 - protein, 10 aa, synthetic construct
NLMRGDYNSL

SEQ ID NO: 88587 - protein, 10 aa, synthetic construct
NLMRGDYTSM

SEQ ID NO: 88588 - protein, 10 aa, synthetic construct
NLMRGDFQNT

SEQ ID NO: 88589 - protein, 10 aa, synthetic construct
NLWRGDFNNT

SEQ ID NO: 88590 - protein, 10 aa, synthetic construct
NLWRGDFNNL

SEQ ID NO: 88591 - protein, 10 aa, synthetic construct
NLFRGDYNSL

SEQ ID NO: 88592 - protein, 10 aa, synthetic construct
NLFRGDYTSM

SEQ ID NO: 88593 - protein, 10 aa, synthetic construct
NLFRGDFQNT

SEQ ID NO: 88594 - protein, 10 aa, synthetic construct
DVERGDRGQI

SEQ ID NO: 88595 - protein, 10 aa, synthetic construct
NLKRGDYNSL

SEQ ID NO: 88596 - protein, 10 aa, synthetic construct
NLKRGDYTSM

SEQ ID NO: 88597 - protein, 10 aa, synthetic construct
NLKRGDFQNT

SEQ ID NO: 88598 - protein, 10 aa, synthetic construct
NLHRGDFNNT

SEQ ID NO: 88599 - protein, 10 aa, synthetic construct
NLHRGDFNNL

SEQ ID NO: 88600 - protein, 10 aa, synthetic construct
NLSRGDFNNT

SEQ ID NO: 88601 - protein, 10 aa, synthetic construct
NLSRGDFNNL

SEQ ID NO: 88602 - protein, 10 aa, synthetic construct
NLTRGDFNNT

SEQ ID NO: 88603 - protein, 10 aa, synthetic construct
NLTRGDFNNL

SEQ ID NO: 88604 - protein, 10 aa, synthetic construct
NLYRGDYNSL

SEQ ID NO: 88605 - protein, 10 aa, synthetic construct
DVERGDRQGI

SEQ ID NO: 88606 - protein, 10 aa, synthetic construct
NLYRGDYTSM

SEQ ID NO: 88607 - protein, 10 aa, synthetic construct
NLYRGDFQNT

SEQ ID NO: 88608 - protein, 10 aa, synthetic construct
NLNRGDYNSL

SEQ ID NO: 88609 - protein, 10 aa, synthetic construct
NLNRGDYTSM

SEQ ID NO: 88610 - protein, 10 aa, synthetic construct
NLNRGDFQNT

SEQ ID NO: 88611 - protein, 10 aa, synthetic construct
NLQRGDFNNT

SEQ ID NO: 88612 - protein, 10 aa, synthetic construct
NLQRGDFNNL

SEQ ID NO: 88613 - protein, 10 aa, synthetic construct
NLDRGDFNNT

SEQ ID NO: 88614 - protein, 10 aa, synthetic construct
NLDRGDFNNL

SEQ ID NO: 88615 - protein, 10 aa, synthetic construct
NLERGDFNNT

SEQ ID NO: 88616 - protein, 10 aa, synthetic construct
DVERGDRSVV

SEQ ID NO: 88617 - protein, 10 aa, synthetic construct
NLERGDFNNL

SEQ ID NO: 88618 - protein, 10 aa, synthetic construct
NIGRGDYNSL

SEQ ID NO: 88619 - protein, 10 aa, synthetic construct
NIGRGDYTSM

SEQ ID NO: 88620 - protein, 10 aa, synthetic construct
NIGRGDFQNT

SEQ ID NO: 88621 - protein, 10 aa, synthetic construct
NIARGDYNSL

SEQ ID NO: 88622 - protein, 10 aa, synthetic construct
NIARGDYTSM

SEQ ID NO: 88623 - protein, 10 aa, synthetic construct
NIARGDFQNT

SEQ ID NO: 88624 - protein, 10 aa, synthetic construct
NIVRGDYTSV

SEQ ID NO: 88625 - protein, 10 aa, synthetic construct
NIPRGDYNSL

SEQ ID NO: 88626 - protein, 10 aa, synthetic construct
NIPRGDYTSM

SEQ ID NO: 88627 - protein, 10 aa, synthetic construct
TFFRGDYTSV

SEQ ID NO: 88628 - protein, 10 aa, synthetic construct
DVERGDRGVV

SEQ ID NO: 88629 - protein, 10 aa, synthetic construct
NIPRGDFQNT

SEQ ID NO: 88630 - protein, 10 aa, synthetic construct
NILRGDYTSV

SEQ ID NO: 88631 - protein, 10 aa, synthetic construct
NIIRGDHVNL

SEQ ID NO: 88632 - protein, 10 aa, synthetic construct
NIIRGDRDYL

SEQ ID NO: 88633 - protein, 10 aa, synthetic construct
NIIRGDYSSV

SEQ ID NO: 88634 - protein, 10 aa, synthetic construct
NIIRGDLTVT

SEQ ID NO: 88635 - protein, 10 aa, synthetic construct
NIMRGDHVNL

SEQ ID NO: 88636 - protein, 10 aa, synthetic construct
NIMRGDRDYL

SEQ ID NO: 88637 - protein, 10 aa, synthetic construct
NIMRGDYSSV

SEQ ID NO: 88638 - protein, 10 aa, synthetic construct
NIMRGDLTVT

SEQ ID NO: 88639 - protein, 10 aa, synthetic construct
DVERGDRSQT

SEQ ID NO: 88640 - protein, 10 aa, synthetic construct
NIWRGDYTSV

SEQ ID NO: 88641 - protein, 10 aa, synthetic construct
NIFRGDHVNL

SEQ ID NO: 88642 - protein, 10 aa, synthetic construct
NIFRGDRDYL

SEQ ID NO: 88643 - protein, 10 aa, synthetic construct
NIFRGDYSSV

SEQ ID NO: 88644 - protein, 10 aa, synthetic construct
NIFRGDLTVT

SEQ ID NO: 88645 - protein, 10 aa, synthetic construct
NIKRGDHVNL

SEQ ID NO: 88646 - protein, 10 aa, synthetic construct
NIKRGDRDYL

SEQ ID NO: 88647 - protein, 10 aa, synthetic construct
NIKRGDYSSV

SEQ ID NO: 88648 - protein, 10 aa, synthetic construct
NIKRGDLTVT

SEQ ID NO: 88649 - protein, 10 aa, synthetic construct
NIRRGDYNSL

SEQ ID NO: 88650 - protein, 10 aa, synthetic construct
DPGRGDHGVL

SEQ ID NO: 88651 - protein, 10 aa, synthetic construct
NIRRGDYTSM

SEQ ID NO: 88652 - protein, 10 aa, synthetic construct
NIRRGDFQNT

SEQ ID NO: 88653 - protein, 10 aa, synthetic construct
NIHRGDYTSV

SEQ ID NO: 88654 - protein, 10 aa, synthetic construct
NISRGDYTSV

SEQ ID NO: 88655 - protein, 10 aa, synthetic construct
NITRGDYTSV

SEQ ID NO: 88656 - protein, 10 aa, synthetic construct
NIYRGDHVNL

SEQ ID NO: 88657 - protein, 10 aa, synthetic construct
NIYRGDRDYL

SEQ ID NO: 88658 - protein, 10 aa, synthetic construct
NIYRGDYSSV

SEQ ID NO: 88659 - protein, 10 aa, synthetic construct
NIYRGDLTVT

SEQ ID NO: 88660 - protein, 10 aa, synthetic construct
NINRGDHVNL

SEQ ID NO: 88661 - protein, 10 aa, synthetic construct
DPGRGDYVGL

SEQ ID NO: 88662 - protein, 10 aa, synthetic construct
NINRGDRDYL

SEQ ID NO: 88663 - protein, 10 aa, synthetic construct
NINRGDYSSV

SEQ ID NO: 88664 - protein, 10 aa, synthetic construct
NINRGDLTVT

SEQ ID NO: 88665 - protein, 10 aa, synthetic construct
NIQRGDYTSV

SEQ ID NO: 88666 - protein, 10 aa, synthetic construct
NIDRGDYTSV

SEQ ID NO: 88667 - protein, 10 aa, synthetic construct
NIERGDYTSV

SEQ ID NO: 88668 - protein, 10 aa, synthetic construct
NMGRGDFQNT

SEQ ID NO: 88669 - protein, 10 aa, synthetic construct
NMARGDFQNT

SEQ ID NO: 88670 - protein, 10 aa, synthetic construct
NMVRGDFQNT

SEQ ID NO: 88671 - protein, 10 aa, synthetic construct
NMPRGDFQNT

SEQ ID NO: 88672 - protein, 10 aa, synthetic construct
DPGRGDQSTL

SEQ ID NO: 88673 - protein, 10 aa, synthetic construct
NMLRGDFQNT

SEQ ID NO: 88674 - protein, 10 aa, synthetic construct
NMIRGDRDYL

SEQ ID NO: 88675 - protein, 10 aa, synthetic construct
NMIRGDYVGL

SEQ ID NO: 88676 - protein, 10 aa, synthetic construct
NMIRGDYSSV

SEQ ID NO: 88677 - protein, 10 aa, synthetic construct
NMIRGDYTSV

SEQ ID NO: 88678 - protein, 10 aa, synthetic construct
NMIRGDQSTL

SEQ ID NO: 88679 - protein, 10 aa, synthetic construct
NMMRGDYTSV

SEQ ID NO: 88680 - protein, 10 aa, synthetic construct
NMWRGDYNSL

SEQ ID NO: 88681 - protein, 10 aa, synthetic construct
NMWRGDYTSM

SEQ ID NO: 88682 - protein, 10 aa, synthetic construct
NMWRGDFQNT

SEQ ID NO: 88683 - protein, 10 aa, synthetic construct
DPGRGDLLLS

SEQ ID NO: 88684 - protein, 10 aa, synthetic construct
NMFRGDRDYL

SEQ ID NO: 88685 - protein, 10 aa, synthetic construct
NMFRGDYVGL

SEQ ID NO: 88686 - protein, 10 aa, synthetic construct
NMFRGDYSSV

SEQ ID NO: 88687 - protein, 10 aa, synthetic construct
NMFRGDYTSV

SEQ ID NO: 88688 - protein, 10 aa, synthetic construct
NMFRGDQSTL

SEQ ID NO: 88689 - protein, 10 aa, synthetic construct
NMKRGDRDYL

SEQ ID NO: 88690 - protein, 10 aa, synthetic construct
NMKRGDYVGL

SEQ ID NO: 88691 - protein, 10 aa, synthetic construct
NMKRGDYSSV

SEQ ID NO: 88692 - protein, 10 aa, synthetic construct
NMKRGDYTSV

SEQ ID NO: 88693 - protein, 10 aa, synthetic construct
NMKRGDQSTL

SEQ ID NO: 88694 - protein, 10 aa, synthetic construct
DPARGDHGVL

SEQ ID NO: 88695 - protein, 10 aa, synthetic construct
NMRRGDFQNT

SEQ ID NO: 88696 - protein, 10 aa, synthetic construct
NMHRGDHVNL

SEQ ID NO: 88697 - protein, 10 aa, synthetic construct
NMHRGDYNSL

SEQ ID NO: 88698 - protein, 10 aa, synthetic construct
NMHRGDYTSM

SEQ ID NO: 88699 - protein, 10 aa, synthetic construct
NMSRGDFQNT

SEQ ID NO: 88700 - protein, 10 aa, synthetic construct
NMTRGDHVNL

SEQ ID NO: 88701 - protein, 10 aa, synthetic construct
NMTRGDYNSL

SEQ ID NO: 88702 - protein, 10 aa, synthetic construct
NMTRGDYTSM

SEQ ID NO: 88703 - protein, 10 aa, synthetic construct
NMYRGDRDYL

SEQ ID NO: 88704 - protein, 10 aa, synthetic construct
NMYRGDYVGL

SEQ ID NO: 88705 - protein, 10 aa, synthetic construct
DPARGDYVGL

SEQ ID NO: 88706 - protein, 10 aa, synthetic construct
NMYRGDYSSV

SEQ ID NO: 88707 - protein, 10 aa, synthetic construct
NMYRGDYTSV

SEQ ID NO: 88708 - protein, 10 aa, synthetic construct
NMYRGDQSTL

SEQ ID NO: 88709 - protein, 10 aa, synthetic construct
NMNRGDRDYL

SEQ ID NO: 88710 - protein, 10 aa, synthetic construct
NMNRGDYVGL

SEQ ID NO: 88711 - protein, 10 aa, synthetic construct
NMNRGDYSSV

SEQ ID NO: 88712 - protein, 10 aa, synthetic construct
NMNRGDYTSV

SEQ ID NO: 88713 - protein, 10 aa, synthetic construct
NMNRGDQSTL

SEQ ID NO: 88714 - protein, 10 aa, synthetic construct
NMQRGDHVNL

SEQ ID NO: 88715 - protein, 10 aa, synthetic construct
NMQRGDYNSL

SEQ ID NO: 88716 - protein, 10 aa, synthetic construct
DPARGDQSTL

SEQ ID NO: 88717 - protein, 10 aa, synthetic construct
NMQRGDYTSM

SEQ ID NO: 88718 - protein, 10 aa, synthetic construct
NMDRGDHVNL

SEQ ID NO: 88719 - protein, 10 aa, synthetic construct
NMDRGDYNSL

SEQ ID NO: 88720 - protein, 10 aa, synthetic construct
NMDRGDYTSM

SEQ ID NO: 88721 - protein, 10 aa, synthetic construct
NMERGDHVNL

SEQ ID NO: 88722 - protein, 10 aa, synthetic construct
NMERGDYNSL

SEQ ID NO: 88723 - protein, 10 aa, synthetic construct
NMERGDYTSM

SEQ ID NO: 88724 - protein, 10 aa, synthetic construct
NWGRGDFNNT

SEQ ID NO: 88725 - protein, 10 aa, synthetic construct
NWGRGDFNNL

SEQ ID NO: 88726 - protein, 10 aa, synthetic construct
NWARGDFNNT

SEQ ID NO: 88727 - protein, 10 aa, synthetic construct
DPARGDLLLS

SEQ ID NO: 88728 - protein, 10 aa, synthetic construct
NWARGDFNNL

SEQ ID NO: 88729 - protein, 10 aa, synthetic construct
NWVRGDFNNT

SEQ ID NO: 88730 - protein, 10 aa, synthetic construct
NWVRGDFNNL

SEQ ID NO: 88731 - protein, 10 aa, synthetic construct
NWPRGDFNNT

SEQ ID NO: 88732 - protein, 10 aa, synthetic construct
NWPRGDFNNL

SEQ ID NO: 88733 - protein, 10 aa, synthetic construct
NWLRGDFNNT

SEQ ID NO: 88734 - protein, 10 aa, synthetic construct
NWLRGDFNNL

SEQ ID NO: 88735 - protein, 10 aa, synthetic construct
NWIRGDHVNL

SEQ ID NO: 88736 - protein, 10 aa, synthetic construct
NWIRGDYNSL

SEQ ID NO: 88737 - protein, 10 aa, synthetic construct
NWIRGDYTSM

SEQ ID NO: 88738 - protein, 10 aa, synthetic construct
EFFRGDYTSV

SEQ ID NO: 88739 - protein, 10 aa, synthetic construct
DPVRGDRGQI

SEQ ID NO: 88740 - protein, 10 aa, synthetic construct
NWMRGDYNSL

SEQ ID NO: 88741 - protein, 10 aa, synthetic construct
NWMRGDYTSM

SEQ ID NO: 88742 - protein, 10 aa, synthetic construct
NWMRGDFQNT

SEQ ID NO: 88743 - protein, 10 aa, synthetic construct
NWWRGDFNNT

SEQ ID NO: 88744 - protein, 10 aa, synthetic construct
NWWRGDFNNL

SEQ ID NO: 88745 - protein, 10 aa, synthetic construct
NWFRGDHVNL

SEQ ID NO: 88746 - protein, 10 aa, synthetic construct
NWFRGDYNSL

SEQ ID NO: 88747 - protein, 10 aa, synthetic construct
NWFRGDYTSM

SEQ ID NO: 88748 - protein, 10 aa, synthetic construct
NWKRGDHVNL

SEQ ID NO: 88749 - protein, 10 aa, synthetic construct
NWKRGDYNSL

SEQ ID NO: 88750 - protein, 10 aa, synthetic construct
DPVRGDRQGI

SEQ ID NO: 88751 - protein, 10 aa, synthetic construct
NWKRGDYTSM

SEQ ID NO: 88752 - protein, 10 aa, synthetic construct
NWRRGDFNNT

SEQ ID NO: 88753 - protein, 10 aa, synthetic construct
NWRRGDFNNL

SEQ ID NO: 88754 - protein, 10 aa, synthetic construct
NWHRGDFQNT

SEQ ID NO: 88755 - protein, 10 aa, synthetic construct
NWSRGDFNNT

SEQ ID NO: 88756 - protein, 10 aa, synthetic construct
NWSRGDFNNL

SEQ ID NO: 88757 - protein, 10 aa, synthetic construct
NWTRGDFQNT

SEQ ID NO: 88758 - protein, 10 aa, synthetic construct
NWYRGDHVNL

SEQ ID NO: 88759 - protein, 10 aa, synthetic construct
NWYRGDYNSL

SEQ ID NO: 88760 - protein, 10 aa, synthetic construct
NWYRGDYTSM

SEQ ID NO: 88761 - protein, 10 aa, synthetic construct
DPVRGDRSVV

SEQ ID NO: 88762 - protein, 10 aa, synthetic construct
NWNRGDHVNL

SEQ ID NO: 88763 - protein, 10 aa, synthetic construct
NWNRGDYNSL

SEQ ID NO: 88764 - protein, 10 aa, synthetic construct
NWNRGDYTSM

SEQ ID NO: 88765 - protein, 10 aa, synthetic construct
NWQRGDFQNT

SEQ ID NO: 88766 - protein, 10 aa, synthetic construct
NWDRGDFQNT

SEQ ID NO: 88767 - protein, 10 aa, synthetic construct
NWERGDFQNT

SEQ ID NO: 88768 - protein, 10 aa, synthetic construct
NFGRGDYNSL

SEQ ID NO: 88769 - protein, 10 aa, synthetic construct
NFGRGDYTSM

SEQ ID NO: 88770 - protein, 10 aa, synthetic construct
NFGRGDFQNT

SEQ ID NO: 88771 - protein, 10 aa, synthetic construct
NFARGDYNSL

SEQ ID NO: 88772 - protein, 10 aa, synthetic construct
DPVRGDRGVV

SEQ ID NO: 88773 - protein, 10 aa, synthetic construct
NFARGDYTSM

SEQ ID NO: 88774 - protein, 10 aa, synthetic construct
NFARGDFQNT

SEQ ID NO: 88775 - protein, 10 aa, synthetic construct
NFVRGDYTSV

SEQ ID NO: 88776 - protein, 10 aa, synthetic construct
NFPRGDYNSL

SEQ ID NO: 88777 - protein, 10 aa, synthetic construct
NFPRGDYTSM

SEQ ID NO: 88778 - protein, 10 aa, synthetic construct
NFPRGDFQNT

SEQ ID NO: 88779 - protein, 10 aa, synthetic construct
NFLRGDYTSV

SEQ ID NO: 88780 - protein, 10 aa, synthetic construct
NFIRGDHVNL

SEQ ID NO: 88781 - protein, 10 aa, synthetic construct
NFIRGDRDYL

SEQ ID NO: 88782 - protein, 10 aa, synthetic construct
NFIRGDYSSV

SEQ ID NO: 88783 - protein, 10 aa, synthetic construct
DPVRGDRSQT

SEQ ID NO: 88784 - protein, 10 aa, synthetic construct
NFIRGDLTVT

SEQ ID NO: 88785 - protein, 10 aa, synthetic construct
NFMRGDHVNL

SEQ ID NO: 88786 - protein, 10 aa, synthetic construct
NFMRGDRDYL

SEQ ID NO: 88787 - protein, 10 aa, synthetic construct
NFMRGDYSSV

SEQ ID NO: 88788 - protein, 10 aa, synthetic construct
NFMRGDLTVT

SEQ ID NO: 88789 - protein, 10 aa, synthetic construct
NFWRGDYTSV

SEQ ID NO: 88790 - protein, 10 aa, synthetic construct
NFKRGDHVNL

SEQ ID NO: 88791 - protein, 10 aa, synthetic construct
NFKRGDRDYL

SEQ ID NO: 88792 - protein, 10 aa, synthetic construct
NFKRGDYSSV

SEQ ID NO: 88793 - protein, 10 aa, synthetic construct
NFKRGDLTVT

SEQ ID NO: 88794 - protein, 10 aa, synthetic construct
DPPRGDHGVL

SEQ ID NO: 88795 - protein, 10 aa, synthetic construct
NFRRGDYNSL

SEQ ID NO: 88796 - protein, 10 aa, synthetic construct
NFRRGDYTSM

SEQ ID NO: 88797 - protein, 10 aa, synthetic construct
NFRRGDFQNT

SEQ ID NO: 88798 - protein, 10 aa, synthetic construct
NFHRGDYTSV

SEQ ID NO: 88799 - protein, 10 aa, synthetic construct
NFSRGDYTSV

SEQ ID NO: 88800 - protein, 10 aa, synthetic construct
NFTRGDYTSV

SEQ ID NO: 88801 - protein, 10 aa, synthetic construct
NFYRGDHVNL

SEQ ID NO: 88802 - protein, 10 aa, synthetic construct
NFYRGDRDYL

SEQ ID NO: 88803 - protein, 10 aa, synthetic construct
NFYRGDYSSV

SEQ ID NO: 88804 - protein, 10 aa, synthetic construct
NFYRGDLTVT

SEQ ID NO: 88805 - protein, 10 aa, synthetic construct
DPPRGDYVGL

SEQ ID NO: 88806 - protein, 10 aa, synthetic construct
NFNRGDHVNL

SEQ ID NO: 88807 - protein, 10 aa, synthetic construct
NFNRGDRDYL

SEQ ID NO: 88808 - protein, 10 aa, synthetic construct
NFNRGDYSSV

SEQ ID NO: 88809 - protein, 10 aa, synthetic construct
NFNRGDLTVT

SEQ ID NO: 88810 - protein, 10 aa, synthetic construct
NFQRGDYTSV

SEQ ID NO: 88811 - protein, 10 aa, synthetic construct
NFDRGDYTSV

SEQ ID NO: 88812 - protein, 10 aa, synthetic construct
NFERGDYTSV

SEQ ID NO: 88813 - protein, 10 aa, synthetic construct
NKGRGDYNSL

SEQ ID NO: 88814 - protein, 10 aa, synthetic construct
NKGRGDYTSM

SEQ ID NO: 88815 - protein, 10 aa, synthetic construct
NKGRGDFQNT

SEQ ID NO: 88816 - protein, 10 aa, synthetic construct
DPPRGDQSTL

SEQ ID NO: 88817 - protein, 10 aa, synthetic construct
NKARGDYNSL

SEQ ID NO: 88818 - protein, 10 aa, synthetic construct
NKARGDYTSM

SEQ ID NO: 88819 - protein, 10 aa, synthetic construct
NKARGDFQNT

SEQ ID NO: 88820 - protein, 10 aa, synthetic construct
NKVRGDYTSV

SEQ ID NO: 88821 - protein, 10 aa, synthetic construct
NKPRGDYNSL

SEQ ID NO: 88822 - protein, 10 aa, synthetic construct
NKPRGDYTSM

SEQ ID NO: 88823 - protein, 10 aa, synthetic construct
NKPRGDFQNT

SEQ ID NO: 88824 - protein, 10 aa, synthetic construct
NKLRGDYTSV

SEQ ID NO: 88825 - protein, 10 aa, synthetic construct
NKIRGDHVNL

SEQ ID NO: 88826 - protein, 10 aa, synthetic construct
NKIRGDRDYL

SEQ ID NO: 88827 - protein, 10 aa, synthetic construct
DPPRGDLLLS

SEQ ID NO: 88828 - protein, 10 aa, synthetic construct
NKIRGDYSSV

SEQ ID NO: 88829 - protein, 10 aa, synthetic construct
NKIRGDLTVT

SEQ ID NO: 88830 - protein, 10 aa, synthetic construct
NKMRGDHVNL

SEQ ID NO: 88831 - protein, 10 aa, synthetic construct
NKMRGDRDYL

SEQ ID NO: 88832 - protein, 10 aa, synthetic construct
NKMRGDYSSV

SEQ ID NO: 88833 - protein, 10 aa, synthetic construct
NKMRGDLTVT

SEQ ID NO: 88834 - protein, 10 aa, synthetic construct
NKWRGDYTSV

SEQ ID NO: 88835 - protein, 10 aa, synthetic construct
NKFRGDHVNL

SEQ ID NO: 88836 - protein, 10 aa, synthetic construct
NKFRGDRDYL

SEQ ID NO: 88837 - protein, 10 aa, synthetic construct
NKFRGDYSSV

SEQ ID NO: 88838 - protein, 10 aa, synthetic construct
DPLRGDRGQI

SEQ ID NO: 88839 - protein, 10 aa, synthetic construct
NKFRGDLTVT

SEQ ID NO: 88840 - protein, 10 aa, synthetic construct
NKRRGDYNSL

SEQ ID NO: 88841 - protein, 10 aa, synthetic construct
NKRRGDYTSM

SEQ ID NO: 88842 - protein, 10 aa, synthetic construct
NKRRGDFQNT

SEQ ID NO: 88843 - protein, 10 aa, synthetic construct
NKHRGDYTSV

SEQ ID NO: 88844 - protein, 10 aa, synthetic construct
NKSRGDYTSV

SEQ ID NO: 88845 - protein, 10 aa, synthetic construct
NKTRGDYTSV

SEQ ID NO: 88846 - protein, 10 aa, synthetic construct
NKYRGDHVNL

SEQ ID NO: 88847 - protein, 10 aa, synthetic construct
NKYRGDRDYL

SEQ ID NO: 88848 - protein, 10 aa, synthetic construct
NKYRGDYSSV

SEQ ID NO: 88849 - protein, 10 aa, synthetic construct
NFFRGDHVNL

SEQ ID NO: 88850 - protein, 10 aa, synthetic construct
DPLRGDRQGI

SEQ ID NO: 88851 - protein, 10 aa, synthetic construct
NKYRGDLTVT

SEQ ID NO: 88852 - protein, 10 aa, synthetic construct
NKQRGDYTSV

SEQ ID NO: 88853 - protein, 10 aa, synthetic construct
NKDRGDYTSV

SEQ ID NO: 88854 - protein, 10 aa, synthetic construct
NKERGDYTSV

SEQ ID NO: 88855 - protein, 10 aa, synthetic construct
NRVRGDFNNT

SEQ ID NO: 88856 - protein, 10 aa, synthetic construct
NRVRGDFNNL

SEQ ID NO: 88857 - protein, 10 aa, synthetic construct
NRLRGDFNNT

SEQ ID NO: 88858 - protein, 10 aa, synthetic construct
NRLRGDFNNL

SEQ ID NO: 88859 - protein, 10 aa, synthetic construct
NRIRGDYNSL

SEQ ID NO: 88860 - protein, 10 aa, synthetic construct
NRIRGDYTSM

SEQ ID NO: 88861 - protein, 10 aa, synthetic construct
DPLRGDRSVV

SEQ ID NO: 88862 - protein, 10 aa, synthetic construct
NRIRGDFQNT

SEQ ID NO: 88863 - protein, 10 aa, synthetic construct
NRMRGDYNSL

SEQ ID NO: 88864 - protein, 10 aa, synthetic construct
NRMRGDYTSM

SEQ ID NO: 88865 - protein, 10 aa, synthetic construct
NRMRGDFQNT

SEQ ID NO: 88866 - protein, 10 aa, synthetic construct
NRWRGDFNNT

SEQ ID NO: 88867 - protein, 10 aa, synthetic construct
NRWRGDFNNL

SEQ ID NO: 88868 - protein, 10 aa, synthetic construct
NRFRGDYNSL

SEQ ID NO: 88869 - protein, 10 aa, synthetic construct
NRFRGDYTSM

SEQ ID NO: 88870 - protein, 10 aa, synthetic construct
NRFRGDFQNT

SEQ ID NO: 88871 - protein, 10 aa, synthetic construct
NRKRGDYNSL

SEQ ID NO: 88872 - protein, 10 aa, synthetic construct
DPLRGDRGVV

SEQ ID NO: 88873 - protein, 10 aa, synthetic construct
NRKRGDYTSM

SEQ ID NO: 88874 - protein, 10 aa, synthetic construct
NRKRGDFQNT

SEQ ID NO: 88875 - protein, 10 aa, synthetic construct
NRHRGDFNNT

SEQ ID NO: 88876 - protein, 10 aa, synthetic construct
NRHRGDFNNL

SEQ ID NO: 88877 - protein, 10 aa, synthetic construct
NRSRGDFNNT

SEQ ID NO: 88878 - protein, 10 aa, synthetic construct
NRSRGDFNNL

SEQ ID NO: 88879 - protein, 10 aa, synthetic construct
NRTRGDFNNT

SEQ ID NO: 88880 - protein, 10 aa, synthetic construct
NRTRGDFNNL

SEQ ID NO: 88881 - protein, 10 aa, synthetic construct
NRYRGDYNSL

SEQ ID NO: 88882 - protein, 10 aa, synthetic construct
NRYRGDYTSM

SEQ ID NO: 88883 - protein, 10 aa, synthetic construct
DPLRGDRSQT

SEQ ID NO: 88884 - protein, 10 aa, synthetic construct
NRYRGDFQNT

SEQ ID NO: 88885 - protein, 10 aa, synthetic construct
NRNRGDYNSL

SEQ ID NO: 88886 - protein, 10 aa, synthetic construct
NRNRGDYTSM

SEQ ID NO: 88887 - protein, 10 aa, synthetic construct
NRNRGDFQNT

SEQ ID NO: 88888 - protein, 10 aa, synthetic construct
NRQRGDFNNT

SEQ ID NO: 88889 - protein, 10 aa, synthetic construct
NRQRGDFNNL

SEQ ID NO: 88890 - protein, 10 aa, synthetic construct
NRDRGDFNNT

SEQ ID NO: 88891 - protein, 10 aa, synthetic construct
NRDRGDFNNL

SEQ ID NO: 88892 - protein, 10 aa, synthetic construct
NRERGDFNNT

SEQ ID NO: 88893 - protein, 10 aa, synthetic construct
NRERGDFNNL

SEQ ID NO: 88894 - protein, 10 aa, synthetic construct
DPWRGDRGQI

SEQ ID NO: 88895 - protein, 10 aa, synthetic construct
NHGRGDFNNT

SEQ ID NO: 88896 - protein, 10 aa, synthetic construct
NHGRGDFNNL

SEQ ID NO: 88897 - protein, 10 aa, synthetic construct
NHARGDFNNT

SEQ ID NO: 88898 - protein, 10 aa, synthetic construct
NHARGDFNNL

SEQ ID NO: 88899 - protein, 10 aa, synthetic construct
NHVRGDYNSL

SEQ ID NO: 88900 - protein, 10 aa, synthetic construct
NHVRGDYTSM

SEQ ID NO: 88901 - protein, 10 aa, synthetic construct
NHVRGDFQNT

SEQ ID NO: 88902 - protein, 10 aa, synthetic construct
NHPRGDFNNT

SEQ ID NO: 88903 - protein, 10 aa, synthetic construct
NHPRGDFNNL

SEQ ID NO: 88904 - protein, 10 aa, synthetic construct
NHLRGDYNSL

SEQ ID NO: 88905 - protein, 10 aa, synthetic construct
DPWRGDRQGI

SEQ ID NO: 88906 - protein, 10 aa, synthetic construct
NHLRGDYTSM

SEQ ID NO: 88907 - protein, 10 aa, synthetic construct
NHLRGDFQNT

SEQ ID NO: 88908 - protein, 10 aa, synthetic construct
NHIRGDYTSV

SEQ ID NO: 88909 - protein, 10 aa, synthetic construct
NHMRGDYTSV

SEQ ID NO: 88910 - protein, 10 aa, synthetic construct
NHWRGDYNSL

SEQ ID NO: 88911 - protein, 10 aa, synthetic construct
NHWRGDYTSM

SEQ ID NO: 88912 - protein, 10 aa, synthetic construct
NHWRGDFQNT

SEQ ID NO: 88913 - protein, 10 aa, synthetic construct
NHFRGDYTSV

SEQ ID NO: 88914 - protein, 10 aa, synthetic construct
NHKRGDYTSV

SEQ ID NO: 88915 - protein, 10 aa, synthetic construct
NHRRGDFNNT

SEQ ID NO: 88916 - protein, 10 aa, synthetic construct
DPWRGDRSVV

SEQ ID NO: 88917 - protein, 10 aa, synthetic construct
NHRRGDFNNL

SEQ ID NO: 88918 - protein, 10 aa, synthetic construct
NHHRGDYNSL

SEQ ID NO: 88919 - protein, 10 aa, synthetic construct
NHHRGDYTSM

SEQ ID NO: 88920 - protein, 10 aa, synthetic construct
NHHRGDFQNT

SEQ ID NO: 88921 - protein, 10 aa, synthetic construct
NHSRGDYNSL

SEQ ID NO: 88922 - protein, 10 aa, synthetic construct
NHSRGDYTSM

SEQ ID NO: 88923 - protein, 10 aa, synthetic construct
NHSRGDFQNT

SEQ ID NO: 88924 - protein, 10 aa, synthetic construct
NHTRGDYNSL

SEQ ID NO: 88925 - protein, 10 aa, synthetic construct
NHTRGDYTSM

SEQ ID NO: 88926 - protein, 10 aa, synthetic construct
NHTRGDFQNT

SEQ ID NO: 88927 - protein, 10 aa, synthetic construct
DPWRGDRGVV

SEQ ID NO: 88928 - protein, 10 aa, synthetic construct
NHYRGDYTSV

SEQ ID NO: 88929 - protein, 10 aa, synthetic construct
NHNRGDYTSV

SEQ ID NO: 88930 - protein, 10 aa, synthetic construct
NHQRGDYNSL

SEQ ID NO: 88931 - protein, 10 aa, synthetic construct
NHQRGDYTSM

SEQ ID NO: 88932 - protein, 10 aa, synthetic construct
NHQRGDFQNT

SEQ ID NO: 88933 - protein, 10 aa, synthetic construct
NHDRGDYNSL

SEQ ID NO: 88934 - protein, 10 aa, synthetic construct
NHDRGDYTSM

SEQ ID NO: 88935 - protein, 10 aa, synthetic construct
NHDRGDFQNT

SEQ ID NO: 88936 - protein, 10 aa, synthetic construct
NHERGDYNSL

SEQ ID NO: 88937 - protein, 10 aa, synthetic construct
NHERGDYTSM

SEQ ID NO: 88938 - protein, 10 aa, synthetic construct
DPWRGDRSQT

SEQ ID NO: 88939 - protein, 10 aa, synthetic construct
NHERGDFQNT

SEQ ID NO: 88940 - protein, 10 aa, synthetic construct
NSVRGDFNNT

SEQ ID NO: 88941 - protein, 10 aa, synthetic construct
NSVRGDFNNL

SEQ ID NO: 88942 - protein, 10 aa, synthetic construct
NSLRGDFNNT

SEQ ID NO: 88943 - protein, 10 aa, synthetic construct
NSLRGDFNNL

SEQ ID NO: 88944 - protein, 10 aa, synthetic construct
NSIRGDYNSL

SEQ ID NO: 88945 - protein, 10 aa, synthetic construct
NSIRGDYTSM

SEQ ID NO: 88946 - protein, 10 aa, synthetic construct
NSIRGDFQNT

SEQ ID NO: 88947 - protein, 10 aa, synthetic construct
NSMRGDYNSL

SEQ ID NO: 88948 - protein, 10 aa, synthetic construct
NSMRGDYTSM

SEQ ID NO: 88949 - protein, 10 aa, synthetic construct
DPRRGDHGVL

SEQ ID NO: 88950 - protein, 10 aa, synthetic construct
NSMRGDFQNT

SEQ ID NO: 88951 - protein, 10 aa, synthetic construct
NSWRGDFNNT

SEQ ID NO: 88952 - protein, 10 aa, synthetic construct
NSWRGDFNNL

SEQ ID NO: 88953 - protein, 10 aa, synthetic construct
NSFRGDYNSL

SEQ ID NO: 88954 - protein, 10 aa, synthetic construct
NSFRGDYTSM

SEQ ID NO: 88955 - protein, 10 aa, synthetic construct
NSFRGDFQNT

SEQ ID NO: 88956 - protein, 10 aa, synthetic construct
NSKRGDYNSL

SEQ ID NO: 88957 - protein, 10 aa, synthetic construct
NSKRGDYTSM

SEQ ID NO: 88958 - protein, 10 aa, synthetic construct
NSKRGDFQNT

SEQ ID NO: 88959 - protein, 10 aa, synthetic construct
NSHRGDFNNT

SEQ ID NO: 88960 - protein, 10 aa, synthetic construct
NFFRGDRDYL

SEQ ID NO: 88961 - protein, 10 aa, synthetic construct
DPRRGDYVGL

SEQ ID NO: 88962 - protein, 10 aa, synthetic construct
NSHRGDFNNL

SEQ ID NO: 88963 - protein, 10 aa, synthetic construct
NSSRGDFNNT

SEQ ID NO: 88964 - protein, 10 aa, synthetic construct
NSSRGDFNNL

SEQ ID NO: 88965 - protein, 10 aa, synthetic construct
NSTRGDFNNT

SEQ ID NO: 88966 - protein, 10 aa, synthetic construct
NSTRGDFNNL

SEQ ID NO: 88967 - protein, 10 aa, synthetic construct
NSYRGDYNSL

SEQ ID NO: 88968 - protein, 10 aa, synthetic construct
NSYRGDYTSM

SEQ ID NO: 88969 - protein, 10 aa, synthetic construct
NSYRGDFQNT

SEQ ID NO: 88970 - protein, 10 aa, synthetic construct
NSNRGDYNSL

SEQ ID NO: 88971 - protein, 10 aa, synthetic construct
NSNRGDYTSM

SEQ ID NO: 88972 - protein, 10 aa, synthetic construct
DPRRGDQSTL

SEQ ID NO: 88973 - protein, 10 aa, synthetic construct
NSNRGDFQNT

SEQ ID NO: 88974 - protein, 10 aa, synthetic construct
NSQRGDFNNT

SEQ ID NO: 88975 - protein, 10 aa, synthetic construct
NSQRGDFNNL

SEQ ID NO: 88976 - protein, 10 aa, synthetic construct
NSDRGDFNNT

SEQ ID NO: 88977 - protein, 10 aa, synthetic construct
NSDRGDFNNL

SEQ ID NO: 88978 - protein, 10 aa, synthetic construct
NSERGDFNNT

SEQ ID NO: 88979 - protein, 10 aa, synthetic construct
NSERGDFNNL

SEQ ID NO: 88980 - protein, 10 aa, synthetic construct
NTGRGDFNNT

SEQ ID NO: 88981 - protein, 10 aa, synthetic construct
NTGRGDFNNL

SEQ ID NO: 88982 - protein, 10 aa, synthetic construct
NTARGDFNNT

SEQ ID NO: 88983 - protein, 10 aa, synthetic construct
DPRRGDLLLS

SEQ ID NO: 88984 - protein, 10 aa, synthetic construct
NTARGDFNNL

SEQ ID NO: 88985 - protein, 10 aa, synthetic construct
NTVRGDYNSL

SEQ ID NO: 88986 - protein, 10 aa, synthetic construct
NTVRGDYTSM

SEQ ID NO: 88987 - protein, 10 aa, synthetic construct
NTVRGDFQNT

SEQ ID NO: 88988 - protein, 10 aa, synthetic construct
NTPRGDFNNT

SEQ ID NO: 88989 - protein, 10 aa, synthetic construct
NTPRGDFNNL

SEQ ID NO: 88990 - protein, 10 aa, synthetic construct
NTLRGDYNSL

SEQ ID NO: 88991 - protein, 10 aa, synthetic construct
NTLRGDYTSM

SEQ ID NO: 88992 - protein, 10 aa, synthetic construct
NTLRGDFQNT

SEQ ID NO: 88993 - protein, 10 aa, synthetic construct
NTIRGDYTSV

SEQ ID NO: 88994 - protein, 10 aa, synthetic construct
DPHRGDRGQI

SEQ ID NO: 88995 - protein, 10 aa, synthetic construct
NTMRGDYTSV

SEQ ID NO: 88996 - protein, 10 aa, synthetic construct
NTWRGDYNSL

SEQ ID NO: 88997 - protein, 10 aa, synthetic construct
NTWRGDYTSM

SEQ ID NO: 88998 - protein, 10 aa, synthetic construct
NTWRGDFQNT

SEQ ID NO: 88999 - protein, 10 aa, synthetic construct
NTFRGDYTSV

SEQ ID NO: 89000 - protein, 10 aa, synthetic construct
NTKRGDYTSV

SEQ ID NO: 89001 - protein, 10 aa, synthetic construct
NTRRGDFNNT

SEQ ID NO: 89002 - protein, 10 aa, synthetic construct
NTRRGDFNNL

SEQ ID NO: 89003 - protein, 10 aa, synthetic construct
NTHRGDYNSL

SEQ ID NO: 89004 - protein, 10 aa, synthetic construct
NTHRGDYTSM

SEQ ID NO: 89005 - protein, 10 aa, synthetic construct
DPHRGDRQGI

SEQ ID NO: 89006 - protein, 10 aa, synthetic construct
NTHRGDFQNT

SEQ ID NO: 89007 - protein, 10 aa, synthetic construct
NTSRGDYNSL

SEQ ID NO: 89008 - protein, 10 aa, synthetic construct
NTSRGDYTSM

SEQ ID NO: 89009 - protein, 10 aa, synthetic construct
NTSRGDFQNT

SEQ ID NO: 89010 - protein, 10 aa, synthetic construct
NTTRGDYNSL

SEQ ID NO: 89011 - protein, 10 aa, synthetic construct
NTTRGDYTSM

SEQ ID NO: 89012 - protein, 10 aa, synthetic construct
NTTRGDFQNT

SEQ ID NO: 89013 - protein, 10 aa, synthetic construct
NTYRGDYTSV

SEQ ID NO: 89014 - protein, 10 aa, synthetic construct
NTNRGDYTSV

SEQ ID NO: 89015 - protein, 10 aa, synthetic construct
NTQRGDYNSL

SEQ ID NO: 89016 - protein, 10 aa, synthetic construct
DPHRGDRSVV

SEQ ID NO: 89017 - protein, 10 aa, synthetic construct
NTQRGDYTSM

SEQ ID NO: 89018 - protein, 10 aa, synthetic construct
NTQRGDFQNT

SEQ ID NO: 89019 - protein, 10 aa, synthetic construct
NTDRGDYNSL

SEQ ID NO: 89020 - protein, 10 aa, synthetic construct
NTDRGDYTSM

SEQ ID NO: 89021 - protein, 10 aa, synthetic construct
NTDRGDFQNT

SEQ ID NO: 89022 - protein, 10 aa, synthetic construct
NTERGDYNSL

SEQ ID NO: 89023 - protein, 10 aa, synthetic construct
NTERGDYTSM

SEQ ID NO: 89024 - protein, 10 aa, synthetic construct
NTERGDFQNT

SEQ ID NO: 89025 - protein, 10 aa, synthetic construct
NYGRGDYNSL

SEQ ID NO: 89026 - protein, 10 aa, synthetic construct
NYGRGDYTSM

SEQ ID NO: 89027 - protein, 10 aa, synthetic construct
DPHRGDRGVV

SEQ ID NO: 89028 - protein, 10 aa, synthetic construct
NYGRGDFQNT

SEQ ID NO: 89029 - protein, 10 aa, synthetic construct
NYARGDYNSL

SEQ ID NO: 89030 - protein, 10 aa, synthetic construct
NYARGDYTSM

SEQ ID NO: 89031 - protein, 10 aa, synthetic construct
NYARGDFQNT

SEQ ID NO: 89032 - protein, 10 aa, synthetic construct
NYVRGDYTSV

SEQ ID NO: 89033 - protein, 10 aa, synthetic construct
NYPRGDYNSL

SEQ ID NO: 89034 - protein, 10 aa, synthetic construct
NYPRGDYTSM

SEQ ID NO: 89035 - protein, 10 aa, synthetic construct
NYPRGDFQNT

SEQ ID NO: 89036 - protein, 10 aa, synthetic construct
NYLRGDYTSV

SEQ ID NO: 89037 - protein, 10 aa, synthetic construct
NYIRGDHVNL

SEQ ID NO: 89038 - protein, 10 aa, synthetic construct
DPHRGDRSQT

SEQ ID NO: 89039 - protein, 10 aa, synthetic construct
NYIRGDRDYL

SEQ ID NO: 89040 - protein, 10 aa, synthetic construct
NYIRGDYSSV

SEQ ID NO: 89041 - protein, 10 aa, synthetic construct
NYIRGDLTVT

SEQ ID NO: 89042 - protein, 10 aa, synthetic construct
NYMRGDHVNL

SEQ ID NO: 89043 - protein, 10 aa, synthetic construct
NYMRGDRDYL

SEQ ID NO: 89044 - protein, 10 aa, synthetic construct
NYMRGDYSSV

SEQ ID NO: 89045 - protein, 10 aa, synthetic construct
NYMRGDLTVT

SEQ ID NO: 89046 - protein, 10 aa, synthetic construct
NYWRGDYTSV

SEQ ID NO: 89047 - protein, 10 aa, synthetic construct
NYFRGDHVNL

SEQ ID NO: 89048 - protein, 10 aa, synthetic construct
NYFRGDRDYL

SEQ ID NO: 89049 - protein, 10 aa, synthetic construct
DPSRGDRGQI

SEQ ID NO: 89050 - protein, 10 aa, synthetic construct
NYFRGDYSSV

SEQ ID NO: 89051 - protein, 10 aa, synthetic construct
NYFRGDLTVT

SEQ ID NO: 89052 - protein, 10 aa, synthetic construct
NYKRGDHVNL

SEQ ID NO: 89053 - protein, 10 aa, synthetic construct
NYKRGDRDYL

SEQ ID NO: 89054 - protein, 10 aa, synthetic construct
NYKRGDYSSV

SEQ ID NO: 89055 - protein, 10 aa, synthetic construct
NYKRGDLTVT

SEQ ID NO: 89056 - protein, 10 aa, synthetic construct
NYRRGDYNSL

SEQ ID NO: 89057 - protein, 10 aa, synthetic construct
NYRRGDYTSM

SEQ ID NO: 89058 - protein, 10 aa, synthetic construct
NYRRGDFQNT

SEQ ID NO: 89059 - protein, 10 aa, synthetic construct
NYHRGDYTSV

SEQ ID NO: 89060 - protein, 10 aa, synthetic construct
DPSRGDRQGI

SEQ ID NO: 89061 - protein, 10 aa, synthetic construct
NYSRGDYTSV

SEQ ID NO: 89062 - protein, 10 aa, synthetic construct
NYTRGDYTSV

SEQ ID NO: 89063 - protein, 10 aa, synthetic construct
NYYRGDHVNL

SEQ ID NO: 89064 - protein, 10 aa, synthetic construct
NYYRGDRDYL

SEQ ID NO: 89065 - protein, 10 aa, synthetic construct
NYYRGDYSSV

SEQ ID NO: 89066 - protein, 10 aa, synthetic construct
NYYRGDLTVT

SEQ ID NO: 89067 - protein, 10 aa, synthetic construct
NYNRGDHVNL

SEQ ID NO: 89068 - protein, 10 aa, synthetic construct
NYNRGDRDYL

SEQ ID NO: 89069 - protein, 10 aa, synthetic construct
NYNRGDYSSV

SEQ ID NO: 89070 - protein, 10 aa, synthetic construct
NYNRGDLTVT

SEQ ID NO: 89071 - protein, 10 aa, synthetic construct
NFFRGDYSSV

SEQ ID NO: 89072 - protein, 10 aa, synthetic construct
DPSRGDRSVV

SEQ ID NO: 89073 - protein, 10 aa, synthetic construct
NYQRGDYTSV

SEQ ID NO: 89074 - protein, 10 aa, synthetic construct
NYDRGDYTSV

SEQ ID NO: 89075 - protein, 10 aa, synthetic construct
NYERGDYTSV

SEQ ID NO: 89076 - protein, 10 aa, synthetic construct
NNGRGDYNSL

SEQ ID NO: 89077 - protein, 10 aa, synthetic construct
NNGRGDYTSM

SEQ ID NO: 89078 - protein, 10 aa, synthetic construct
NNGRGDFQNT

SEQ ID NO: 89079 - protein, 10 aa, synthetic construct
NNARGDYNSL

SEQ ID NO: 89080 - protein, 10 aa, synthetic construct
NNARGDYTSM

SEQ ID NO: 89081 - protein, 10 aa, synthetic construct
NNARGDFQNT

SEQ ID NO: 89082 - protein, 10 aa, synthetic construct
NNVRGDYTSV

SEQ ID NO: 89083 - protein, 10 aa, synthetic construct
DPSRGDRGVV

SEQ ID NO: 89084 - protein, 10 aa, synthetic construct
NNPRGDYNSL

SEQ ID NO: 89085 - protein, 10 aa, synthetic construct
NNPRGDYTSM

SEQ ID NO: 89086 - protein, 10 aa, synthetic construct
NNPRGDFQNT

SEQ ID NO: 89087 - protein, 10 aa, synthetic construct
NNLRGDYTSV

SEQ ID NO: 89088 - protein, 10 aa, synthetic construct
NNIRGDHVNL

SEQ ID NO: 89089 - protein, 10 aa, synthetic construct
NNIRGDRDYL

SEQ ID NO: 89090 - protein, 10 aa, synthetic construct
NNIRGDYSSV

SEQ ID NO: 89091 - protein, 10 aa, synthetic construct
NNIRGDLTVT

SEQ ID NO: 89092 - protein, 10 aa, synthetic construct
NNMRGDHVNL

SEQ ID NO: 89093 - protein, 10 aa, synthetic construct
NNMRGDRDYL

SEQ ID NO: 89094 - protein, 10 aa, synthetic construct
DPSRGDRSQT

SEQ ID NO: 89095 - protein, 10 aa, synthetic construct
NNMRGDYSSV

SEQ ID NO: 89096 - protein, 10 aa, synthetic construct
NNMRGDLTVT

SEQ ID NO: 89097 - protein, 10 aa, synthetic construct
NNWRGDYTSV

SEQ ID NO: 89098 - protein, 10 aa, synthetic construct
NNFRGDHVNL

SEQ ID NO: 89099 - protein, 10 aa, synthetic construct
NNFRGDRDYL

SEQ ID NO: 89100 - protein, 10 aa, synthetic construct
NNFRGDYSSV

SEQ ID NO: 89101 - protein, 10 aa, synthetic construct
NNFRGDLTVT

SEQ ID NO: 89102 - protein, 10 aa, synthetic construct
NNKRGDHVNL

SEQ ID NO: 89103 - protein, 10 aa, synthetic construct
NNKRGDRDYL

SEQ ID NO: 89104 - protein, 10 aa, synthetic construct
NNKRGDYSSV

SEQ ID NO: 89105 - protein, 10 aa, synthetic construct
DPTRGDRGQI

SEQ ID NO: 89106 - protein, 10 aa, synthetic construct
NNKRGDLTVT

SEQ ID NO: 89107 - protein, 10 aa, synthetic construct
NNRRGDYNSL

SEQ ID NO: 89108 - protein, 10 aa, synthetic construct
NNRRGDYTSM

SEQ ID NO: 89109 - protein, 10 aa, synthetic construct
NNRRGDFQNT

SEQ ID NO: 89110 - protein, 10 aa, synthetic construct
NNHRGDYTSV

SEQ ID NO: 89111 - protein, 10 aa, synthetic construct
NNSRGDYTSV

SEQ ID NO: 89112 - protein, 10 aa, synthetic construct
NNTRGDYTSV

SEQ ID NO: 89113 - protein, 10 aa, synthetic construct
NNYRGDHVNL

SEQ ID NO: 89114 - protein, 10 aa, synthetic construct
NNYRGDRDYL

SEQ ID NO: 89115 - protein, 10 aa, synthetic construct
NNYRGDYSSV

SEQ ID NO: 89116 - protein, 10 aa, synthetic construct
DPTRGDRQGI

SEQ ID NO: 89117 - protein, 10 aa, synthetic construct
NNYRGDLTVT

SEQ ID NO: 89118 - protein, 10 aa, synthetic construct
NNNRGDHVNL

SEQ ID NO: 89119 - protein, 10 aa, synthetic construct
NNNRGDRDYL

SEQ ID NO: 89120 - protein, 10 aa, synthetic construct
NNNRGDYSSV

SEQ ID NO: 89121 - protein, 10 aa, synthetic construct
NNNRGDLTVT

SEQ ID NO: 89122 - protein, 10 aa, synthetic construct
NNQRGDYTSV

SEQ ID NO: 89123 - protein, 10 aa, synthetic construct
NNDRGDYTSV

SEQ ID NO: 89124 - protein, 10 aa, synthetic construct
NNERGDYTSV

SEQ ID NO: 89125 - protein, 10 aa, synthetic construct
NQGRGDFNNT

SEQ ID NO: 89126 - protein, 10 aa, synthetic construct
NQGRGDFNNL

SEQ ID NO: 89127 - protein, 10 aa, synthetic construct
DPTRGDRSVV

SEQ ID NO: 89128 - protein, 10 aa, synthetic construct
NQARGDFNNT

SEQ ID NO: 89129 - protein, 10 aa, synthetic construct
NQARGDFNNL

SEQ ID NO: 89130 - protein, 10 aa, synthetic construct
NQVRGDYNSL

SEQ ID NO: 89131 - protein, 10 aa, synthetic construct
NQVRGDYTSM

SEQ ID NO: 89132 - protein, 10 aa, synthetic construct
NQVRGDFQNT

SEQ ID NO: 89133 - protein, 10 aa, synthetic construct
NQPRGDFNNT

SEQ ID NO: 89134 - protein, 10 aa, synthetic construct
NQPRGDFNNL

SEQ ID NO: 89135 - protein, 10 aa, synthetic construct
NQLRGDYNSL

SEQ ID NO: 89136 - protein, 10 aa, synthetic construct
NQLRGDYTSM

SEQ ID NO: 89137 - protein, 10 aa, synthetic construct
NQLRGDFQNT

SEQ ID NO: 89138 - protein, 10 aa, synthetic construct
DPTRGDRGVV

SEQ ID NO: 89139 - protein, 10 aa, synthetic construct
NQIRGDYTSV

SEQ ID NO: 89140 - protein, 10 aa, synthetic construct
NQMRGDYTSV

SEQ ID NO: 89141 - protein, 10 aa, synthetic construct
NQWRGDYNSL

SEQ ID NO: 89142 - protein, 10 aa, synthetic construct
NQWRGDYTSM

SEQ ID NO: 89143 - protein, 10 aa, synthetic construct
NQWRGDFQNT

SEQ ID NO: 89144 - protein, 10 aa, synthetic construct
NQFRGDYTSV

SEQ ID NO: 89145 - protein, 10 aa, synthetic construct
NQKRGDYTSV

SEQ ID NO: 89146 - protein, 10 aa, synthetic construct
NQRRGDFNNT

SEQ ID NO: 89147 - protein, 10 aa, synthetic construct
NQRRGDFNNL

SEQ ID NO: 89148 - protein, 10 aa, synthetic construct
NQHRGDYNSL

SEQ ID NO: 89149 - protein, 10 aa, synthetic construct
DPTRGDRSQT

SEQ ID NO: 89150 - protein, 10 aa, synthetic construct
NQHRGDYTSM

SEQ ID NO: 89151 - protein, 10 aa, synthetic construct
NQHRGDFQNT

SEQ ID NO: 89152 - protein, 10 aa, synthetic construct
NQSRGDYNSL

SEQ ID NO: 89153 - protein, 10 aa, synthetic construct
NQSRGDYTSM

SEQ ID NO: 89154 - protein, 10 aa, synthetic construct
NQSRGDFQNT

SEQ ID NO: 89155 - protein, 10 aa, synthetic construct
NQTRGDYNSL

SEQ ID NO: 89156 - protein, 10 aa, synthetic construct
NQTRGDYTSM

SEQ ID NO: 89157 - protein, 10 aa, synthetic construct
NQTRGDFQNT

SEQ ID NO: 89158 - protein, 10 aa, synthetic construct
NQYRGDYTSV

SEQ ID NO: 89159 - protein, 10 aa, synthetic construct
NQNRGDYTSV

SEQ ID NO: 89160 - protein, 10 aa, synthetic construct
DPQRGDRGQI

SEQ ID NO: 89161 - protein, 10 aa, synthetic construct
NQQRGDYNSL

SEQ ID NO: 89162 - protein, 10 aa, synthetic construct
NQQRGDYTSM

SEQ ID NO: 89163 - protein, 10 aa, synthetic construct
NQQRGDFQNT

SEQ ID NO: 89164 - protein, 10 aa, synthetic construct
NQDRGDYNSL

SEQ ID NO: 89165 - protein, 10 aa, synthetic construct
NQDRGDYTSM

SEQ ID NO: 89166 - protein, 10 aa, synthetic construct
NQDRGDFQNT

SEQ ID NO: 89167 - protein, 10 aa, synthetic construct
NQERGDYNSL

SEQ ID NO: 89168 - protein, 10 aa, synthetic construct
NQERGDYTSM

SEQ ID NO: 89169 - protein, 10 aa, synthetic construct
NQERGDFQNT

SEQ ID NO: 89170 - protein, 10 aa, synthetic construct
NDGRGDFNNT

SEQ ID NO: 89171 - protein, 10 aa, synthetic construct
DPQRGDRQGI

SEQ ID NO: 89172 - protein, 10 aa, synthetic construct
NDGRGDFNNL

SEQ ID NO: 89173 - protein, 10 aa, synthetic construct
NDARGDFNNT

SEQ ID NO: 89174 - protein, 10 aa, synthetic construct
NDARGDFNNL

SEQ ID NO: 89175 - protein, 10 aa, synthetic construct
NDVRGDYNSL

SEQ ID NO: 89176 - protein, 10 aa, synthetic construct
NDVRGDYTSM

SEQ ID NO: 89177 - protein, 10 aa, synthetic construct
NDVRGDFQNT

SEQ ID NO: 89178 - protein, 10 aa, synthetic construct
NDPRGDFNNT

SEQ ID NO: 89179 - protein, 10 aa, synthetic construct
NDPRGDFNNL

SEQ ID NO: 89180 - protein, 10 aa, synthetic construct
NDLRGDYNSL

SEQ ID NO: 89181 - protein, 10 aa, synthetic construct
NDLRGDYTSM

SEQ ID NO: 89182 - protein, 10 aa, synthetic construct
NFFRGDLTVT

SEQ ID NO: 89183 - protein, 10 aa, synthetic construct
DPQRGDRSVV

SEQ ID NO: 89184 - protein, 10 aa, synthetic construct
NDLRGDFQNT

SEQ ID NO: 89185 - protein, 10 aa, synthetic construct
NDIRGDYTSV

SEQ ID NO: 89186 - protein, 10 aa, synthetic construct
NDMRGDYTSV

SEQ ID NO: 89187 - protein, 10 aa, synthetic construct
NDWRGDYNSL

SEQ ID NO: 89188 - protein, 10 aa, synthetic construct
NDWRGDYTSM

SEQ ID NO: 89189 - protein, 10 aa, synthetic construct
NDWRGDFQNT

SEQ ID NO: 89190 - protein, 10 aa, synthetic construct
NDFRGDYTSV

SEQ ID NO: 89191 - protein, 10 aa, synthetic construct
NDKRGDYTSV

SEQ ID NO: 89192 - protein, 10 aa, synthetic construct
NDRRGDFNNT

SEQ ID NO: 89193 - protein, 10 aa, synthetic construct
NDRRGDFNNL

SEQ ID NO: 89194 - protein, 10 aa, synthetic construct
DPQRGDRGVV

SEQ ID NO: 89195 - protein, 10 aa, synthetic construct
NDHRGDYNSL

SEQ ID NO: 89196 - protein, 10 aa, synthetic construct
NDHRGDYTSM

SEQ ID NO: 89197 - protein, 10 aa, synthetic construct
NDHRGDFQNT

SEQ ID NO: 89198 - protein, 10 aa, synthetic construct
NDSRGDYNSL

SEQ ID NO: 89199 - protein, 10 aa, synthetic construct
NDSRGDYTSM

SEQ ID NO: 89200 - protein, 10 aa, synthetic construct
NDSRGDFQNT

SEQ ID NO: 89201 - protein, 10 aa, synthetic construct
NDTRGDYNSL

SEQ ID NO: 89202 - protein, 10 aa, synthetic construct
NDTRGDYTSM

SEQ ID NO: 89203 - protein, 10 aa, synthetic construct
NDTRGDFQNT

SEQ ID NO: 89204 - protein, 10 aa, synthetic construct
NDYRGDYTSV

SEQ ID NO: 89205 - protein, 10 aa, synthetic construct
DPQRGDRSQT

SEQ ID NO: 89206 - protein, 10 aa, synthetic construct
NDNRGDYTSV

SEQ ID NO: 89207 - protein, 10 aa, synthetic construct
NDQRGDYNSL

SEQ ID NO: 89208 - protein, 10 aa, synthetic construct
NDQRGDYTSM

SEQ ID NO: 89209 - protein, 10 aa, synthetic construct
NDQRGDFQNT

SEQ ID NO: 89210 - protein, 10 aa, synthetic construct
NDDRGDYNSL

SEQ ID NO: 89211 - protein, 10 aa, synthetic construct
NDDRGDYTSM

SEQ ID NO: 89212 - protein, 10 aa, synthetic construct
NDDRGDFQNT

SEQ ID NO: 89213 - protein, 10 aa, synthetic construct
NDERGDYNSL

SEQ ID NO: 89214 - protein, 10 aa, synthetic construct
NDERGDYTSM

SEQ ID NO: 89215 - protein, 10 aa, synthetic construct
NDERGDFQNT

SEQ ID NO: 89216 - protein, 10 aa, synthetic construct
DPDRGDRGQI

SEQ ID NO: 89217 - protein, 10 aa, synthetic construct
NEGRGDFNNT

SEQ ID NO: 89218 - protein, 10 aa, synthetic construct
NEGRGDFNNL

SEQ ID NO: 89219 - protein, 10 aa, synthetic construct
NEARGDFNNT

SEQ ID NO: 89220 - protein, 10 aa, synthetic construct
NEARGDFNNL

SEQ ID NO: 89221 - protein, 10 aa, synthetic construct
NEVRGDYNSL

SEQ ID NO: 89222 - protein, 10 aa, synthetic construct
NEVRGDYTSM

SEQ ID NO: 89223 - protein, 10 aa, synthetic construct
NEVRGDFQNT

SEQ ID NO: 89224 - protein, 10 aa, synthetic construct
NEPRGDFNNT

SEQ ID NO: 89225 - protein, 10 aa, synthetic construct
NEPRGDFNNL

SEQ ID NO: 89226 - protein, 10 aa, synthetic construct
NELRGDYNSL

SEQ ID NO: 89227 - protein, 10 aa, synthetic construct
DPDRGDRQGI

SEQ ID NO: 89228 - protein, 10 aa, synthetic construct
NELRGDYTSM

SEQ ID NO: 89229 - protein, 10 aa, synthetic construct
NELRGDFQNT

SEQ ID NO: 89230 - protein, 10 aa, synthetic construct
NEIRGDYTSV

SEQ ID NO: 89231 - protein, 10 aa, synthetic construct
NEMRGDYTSV

SEQ ID NO: 89232 - protein, 10 aa, synthetic construct
NEWRGDYNSL

SEQ ID NO: 89233 - protein, 10 aa, synthetic construct
NEWRGDYTSM

SEQ ID NO: 89234 - protein, 10 aa, synthetic construct
NEWRGDFQNT

SEQ ID NO: 89235 - protein, 10 aa, synthetic construct
NEFRGDYTSV

SEQ ID NO: 89236 - protein, 10 aa, synthetic construct
NEKRGDYTSV

SEQ ID NO: 89237 - protein, 10 aa, synthetic construct
NERRGDFNNT

SEQ ID NO: 89238 - protein, 10 aa, synthetic construct
DPDRGDRSVV

SEQ ID NO: 89239 - protein, 10 aa, synthetic construct
NERRGDFNNL

SEQ ID NO: 89240 - protein, 10 aa, synthetic construct
NEHRGDYNSL

SEQ ID NO: 89241 - protein, 10 aa, synthetic construct
NEHRGDYTSM

SEQ ID NO: 89242 - protein, 10 aa, synthetic construct
NEHRGDFQNT

SEQ ID NO: 89243 - protein, 10 aa, synthetic construct
NESRGDYNSL

SEQ ID NO: 89244 - protein, 10 aa, synthetic construct
NESRGDYTSM

SEQ ID NO: 89245 - protein, 10 aa, synthetic construct
NESRGDFQNT

SEQ ID NO: 89246 - protein, 10 aa, synthetic construct
NETRGDYNSL

SEQ ID NO: 89247 - protein, 10 aa, synthetic construct
NETRGDYTSM

SEQ ID NO: 89248 - protein, 10 aa, synthetic construct
NETRGDFQNT

SEQ ID NO: 89249 - protein, 10 aa, synthetic construct
DPDRGDRGVV

SEQ ID NO: 89250 - protein, 10 aa, synthetic construct
NEYRGDYTSV

SEQ ID NO: 89251 - protein, 10 aa, synthetic construct
NENRGDYTSV

SEQ ID NO: 89252 - protein, 10 aa, synthetic construct
NEQRGDYNSL

SEQ ID NO: 89253 - protein, 10 aa, synthetic construct
NEQRGDYTSM

SEQ ID NO: 89254 - protein, 10 aa, synthetic construct
NEQRGDFQNT

SEQ ID NO: 89255 - protein, 10 aa, synthetic construct
NEDRGDYNSL

SEQ ID NO: 89256 - protein, 10 aa, synthetic construct
NEDRGDYTSM

SEQ ID NO: 89257 - protein, 10 aa, synthetic construct
NEDRGDFQNT

SEQ ID NO: 89258 - protein, 10 aa, synthetic construct
NEERGDYNSL

SEQ ID NO: 89259 - protein, 10 aa, synthetic construct
NEERGDYTSM

SEQ ID NO: 89260 - protein, 10 aa, synthetic construct
DPDRGDRSQT

SEQ ID NO: 89261 - protein, 10 aa, synthetic construct
NEERGDFQNT

SEQ ID NO: 89262 - protein, 10 aa, synthetic construct
DGIRGDFNNT

SEQ ID NO: 89263 - protein, 10 aa, synthetic construct
DGIRGDFNNL

SEQ ID NO: 89264 - protein, 10 aa, synthetic construct
DGMRGDFNNT

SEQ ID NO: 89265 - protein, 10 aa, synthetic construct
DGMRGDFNNL

SEQ ID NO: 89266 - protein, 10 aa, synthetic construct
DGFRGDFNNT

SEQ ID NO: 89267 - protein, 10 aa, synthetic construct
DGFRGDFNNL

SEQ ID NO: 89268 - protein, 10 aa, synthetic construct
DGKRGDFNNT

SEQ ID NO: 89269 - protein, 10 aa, synthetic construct
DGKRGDFNNL

SEQ ID NO: 89270 - protein, 10 aa, synthetic construct
DGYRGDFNNT

SEQ ID NO: 89271 - protein, 10 aa, synthetic construct
DPERGDRGQI

SEQ ID NO: 89272 - protein, 10 aa, synthetic construct
DGYRGDFNNL

SEQ ID NO: 89273 - protein, 10 aa, synthetic construct
DGNRGDFNNT

SEQ ID NO: 89274 - protein, 10 aa, synthetic construct
DGNRGDFNNL

SEQ ID NO: 89275 - protein, 10 aa, synthetic construct
DAIRGDFNNT

SEQ ID NO: 89276 - protein, 10 aa, synthetic construct
DAIRGDFNNL

SEQ ID NO: 89277 - protein, 10 aa, synthetic construct
DAMRGDFNNT

SEQ ID NO: 89278 - protein, 10 aa, synthetic construct
DAMRGDFNNL

SEQ ID NO: 89279 - protein, 10 aa, synthetic construct
DAFRGDFNNT

SEQ ID NO: 89280 - protein, 10 aa, synthetic construct
DAFRGDFNNL

SEQ ID NO: 89281 - protein, 10 aa, synthetic construct
DAKRGDFNNT

SEQ ID NO: 89282 - protein, 10 aa, synthetic construct
DPERGDRQGI

SEQ ID NO: 89283 - protein, 10 aa, synthetic construct
DAKRGDFNNL

SEQ ID NO: 89284 - protein, 10 aa, synthetic construct
DAYRGDFNNT

SEQ ID NO: 89285 - protein, 10 aa, synthetic construct
DAYRGDFNNL

SEQ ID NO: 89286 - protein, 10 aa, synthetic construct
DANRGDFNNT

SEQ ID NO: 89287 - protein, 10 aa, synthetic construct
DANRGDFNNL

SEQ ID NO: 89288 - protein, 10 aa, synthetic construct
DVIRGDFNNT

SEQ ID NO: 89289 - protein, 10 aa, synthetic construct
DVIRGDFNNL

SEQ ID NO: 89290 - protein, 10 aa, synthetic construct
DVMRGDFNNT

SEQ ID NO: 89291 - protein, 10 aa, synthetic construct
DVMRGDFNNL

SEQ ID NO: 89292 - protein, 10 aa, synthetic construct
DVFRGDFNNT

SEQ ID NO: 89293 - protein, 10 aa, synthetic construct
DFFRGDYTSV

SEQ ID NO: 89294 - protein, 10 aa, synthetic construct
DPERGDRSVV

SEQ ID NO: 89295 - protein, 10 aa, synthetic construct
DVFRGDFNNL

SEQ ID NO: 89296 - protein, 10 aa, synthetic construct
DVKRGDFNNT

SEQ ID NO: 89297 - protein, 10 aa, synthetic construct
DVKRGDFNNL

SEQ ID NO: 89298 - protein, 10 aa, synthetic construct
DVYRGDFNNT

SEQ ID NO: 89299 - protein, 10 aa, synthetic construct
DVYRGDFNNL

SEQ ID NO: 89300 - protein, 10 aa, synthetic construct
DVNRGDFNNT

SEQ ID NO: 89301 - protein, 10 aa, synthetic construct
DVNRGDFNNL

SEQ ID NO: 89302 - protein, 10 aa, synthetic construct
DPIRGDFNNT

SEQ ID NO: 89303 - protein, 10 aa, synthetic construct
DPIRGDFNNL

SEQ ID NO: 89304 - protein, 10 aa, synthetic construct
DPMRGDFNNT

SEQ ID NO: 89305 - protein, 10 aa, synthetic construct
DPERGDRGVV

SEQ ID NO: 89306 - protein, 10 aa, synthetic construct
DPMRGDFNNL

SEQ ID NO: 89307 - protein, 10 aa, synthetic construct
DPFRGDFNNT

SEQ ID NO: 89308 - protein, 10 aa, synthetic construct
DPFRGDFNNL

SEQ ID NO: 89309 - protein, 10 aa, synthetic construct
DPKRGDFNNT

SEQ ID NO: 89310 - protein, 10 aa, synthetic construct
DPKRGDFNNL

SEQ ID NO: 89311 - protein, 10 aa, synthetic construct
DPYRGDFNNT

SEQ ID NO: 89312 - protein, 10 aa, synthetic construct
DPYRGDFNNL

SEQ ID NO: 89313 - protein, 10 aa, synthetic construct
DPNRGDFNNT

SEQ ID NO: 89314 - protein, 10 aa, synthetic construct
DPNRGDFNNL

SEQ ID NO: 89315 - protein, 10 aa, synthetic construct
DLIRGDFNNT

SEQ ID NO: 89316 - protein, 10 aa, synthetic construct
DPERGDRSQT

SEQ ID NO: 89317 - protein, 10 aa, synthetic construct
DLIRGDFNNL

SEQ ID NO: 89318 - protein, 10 aa, synthetic construct
DLMRGDFNNT

SEQ ID NO: 89319 - protein, 10 aa, synthetic construct
DLMRGDFNNL

SEQ ID NO: 89320 - protein, 10 aa, synthetic construct
DLFRGDFNNT

SEQ ID NO: 89321 - protein, 10 aa, synthetic construct
DLFRGDFNNL

SEQ ID NO: 89322 - protein, 10 aa, synthetic construct
DLKRGDFNNT

SEQ ID NO: 89323 - protein, 10 aa, synthetic construct
DLKRGDFNNL

SEQ ID NO: 89324 - protein, 10 aa, synthetic construct
DLYRGDFNNT

SEQ ID NO: 89325 - protein, 10 aa, synthetic construct
DLYRGDFNNL

SEQ ID NO: 89326 - protein, 10 aa, synthetic construct
DLNRGDFNNT

SEQ ID NO: 89327 - protein, 10 aa, synthetic construct
DLGRGDHGVL

SEQ ID NO: 89328 - protein, 10 aa, synthetic construct
DLNRGDFNNL

SEQ ID NO: 89329 - protein, 10 aa, synthetic construct
DIGRGDFNNT

SEQ ID NO: 89330 - protein, 10 aa, synthetic construct
DIGRGDFNNL

SEQ ID NO: 89331 - protein, 10 aa, synthetic construct
DIARGDFNNT

SEQ ID NO: 89332 - protein, 10 aa, synthetic construct
DIARGDFNNL

SEQ ID NO: 89333 - protein, 10 aa, synthetic construct
DIVRGDYNSL

SEQ ID NO: 89334 - protein, 10 aa, synthetic construct
DIVRGDYTSM

SEQ ID NO: 89335 - protein, 10 aa, synthetic construct
DIVRGDFQNT

SEQ ID NO: 89336 - protein, 10 aa, synthetic construct
DIPRGDFNNT

SEQ ID NO: 89337 - protein, 10 aa, synthetic construct
DIPRGDFNNL

SEQ ID NO: 89338 - protein, 10 aa, synthetic construct
DLGRGDYVGL

SEQ ID NO: 89339 - protein, 10 aa, synthetic construct
DILRGDYNSL

SEQ ID NO: 89340 - protein, 10 aa, synthetic construct
DILRGDYTSM

SEQ ID NO: 89341 - protein, 10 aa, synthetic construct
DILRGDFQNT

SEQ ID NO: 89342 - protein, 10 aa, synthetic construct
DIIRGDYTSV

SEQ ID NO: 89343 - protein, 10 aa, synthetic construct
DIMRGDYTSV

SEQ ID NO: 89344 - protein, 10 aa, synthetic construct
DIWRGDYNSL

SEQ ID NO: 89345 - protein, 10 aa, synthetic construct
DIWRGDYTSM

SEQ ID NO: 89346 - protein, 10 aa, synthetic construct
DIWRGDFQNT

SEQ ID NO: 89347 - protein, 10 aa, synthetic construct
DIFRGDYTSV

SEQ ID NO: 89348 - protein, 10 aa, synthetic construct
DIKRGDYTSV

SEQ ID NO: 89349 - protein, 10 aa, synthetic construct
DLGRGDQSTL

SEQ ID NO: 89350 - protein, 10 aa, synthetic construct
DIRRGDFNNT

SEQ ID NO: 89351 - protein, 10 aa, synthetic construct
DIRRGDFNNL

SEQ ID NO: 89352 - protein, 10 aa, synthetic construct
DIHRGDYNSL

SEQ ID NO: 89353 - protein, 10 aa, synthetic construct
DIHRGDYTSM

SEQ ID NO: 89354 - protein, 10 aa, synthetic construct
DIHRGDFQNT

SEQ ID NO: 89355 - protein, 10 aa, synthetic construct
DISRGDYNSL

SEQ ID NO: 89356 - protein, 10 aa, synthetic construct
DISRGDYTSM

SEQ ID NO: 89357 - protein, 10 aa, synthetic construct
DISRGDFQNT

SEQ ID NO: 89358 - protein, 10 aa, synthetic construct
DITRGDYNSL

SEQ ID NO: 89359 - protein, 10 aa, synthetic construct
DITRGDYTSM

SEQ ID NO: 89360 - protein, 10 aa, synthetic construct
DLGRGDLLLS

SEQ ID NO: 89361 - protein, 10 aa, synthetic construct
DITRGDFQNT

SEQ ID NO: 89362 - protein, 10 aa, synthetic construct
DIYRGDYTSV

SEQ ID NO: 89363 - protein, 10 aa, synthetic construct
DINRGDYTSV

SEQ ID NO: 89364 - protein, 10 aa, synthetic construct
DIQRGDYNSL

SEQ ID NO: 89365 - protein, 10 aa, synthetic construct
DIQRGDYTSM

SEQ ID NO: 89366 - protein, 10 aa, synthetic construct
DIQRGDFQNT

SEQ ID NO: 89367 - protein, 10 aa, synthetic construct
DIDRGDYNSL

SEQ ID NO: 89368 - protein, 10 aa, synthetic construct
DIDRGDYTSM

SEQ ID NO: 89369 - protein, 10 aa, synthetic construct
DIDRGDFQNT

SEQ ID NO: 89370 - protein, 10 aa, synthetic construct
DIERGDYNSL

SEQ ID NO: 89371 - protein, 10 aa, synthetic construct
DLARGDHGVL

SEQ ID NO: 89372 - protein, 10 aa, synthetic construct
DIERGDYTSM

SEQ ID NO: 89373 - protein, 10 aa, synthetic construct
DIERGDFQNT

SEQ ID NO: 89374 - protein, 10 aa, synthetic construct
DMGRGDFNNT

SEQ ID NO: 89375 - protein, 10 aa, synthetic construct
DMGRGDFNNL

SEQ ID NO: 89376 - protein, 10 aa, synthetic construct
DMARGDFNNT

SEQ ID NO: 89377 - protein, 10 aa, synthetic construct
DMARGDFNNL

SEQ ID NO: 89378 - protein, 10 aa, synthetic construct
DMVRGDFNNT

SEQ ID NO: 89379 - protein, 10 aa, synthetic construct
DMVRGDFNNL

SEQ ID NO: 89380 - protein, 10 aa, synthetic construct
DMPRGDFNNT

SEQ ID NO: 89381 - protein, 10 aa, synthetic construct
DMPRGDFNNL

SEQ ID NO: 89382 - protein, 10 aa, synthetic construct
DLARGDYVGL

SEQ ID NO: 89383 - protein, 10 aa, synthetic construct
DMLRGDFNNT

SEQ ID NO: 89384 - protein, 10 aa, synthetic construct
DMLRGDFNNL

SEQ ID NO: 89385 - protein, 10 aa, synthetic construct
DMIRGDHVNL

SEQ ID NO: 89386 - protein, 10 aa, synthetic construct
DMIRGDYNSL

SEQ ID NO: 89387 - protein, 10 aa, synthetic construct
DMIRGDYTSM

SEQ ID NO: 89388 - protein, 10 aa, synthetic construct
DMMRGDYNSL

SEQ ID NO: 89389 - protein, 10 aa, synthetic construct
DMMRGDYTSM

SEQ ID NO: 89390 - protein, 10 aa, synthetic construct
DMMRGDFQNT

SEQ ID NO: 89391 - protein, 10 aa, synthetic construct
DMWRGDFNNT

SEQ ID NO: 89392 - protein, 10 aa, synthetic construct
DMWRGDFNNL

SEQ ID NO: 89393 - protein, 10 aa, synthetic construct
DLARGDQSTL

SEQ ID NO: 89394 - protein, 10 aa, synthetic construct
DMFRGDHVNL

SEQ ID NO: 89395 - protein, 10 aa, synthetic construct
DMFRGDYNSL

SEQ ID NO: 89396 - protein, 10 aa, synthetic construct
DMFRGDYTSM

SEQ ID NO: 89397 - protein, 10 aa, synthetic construct
DMKRGDHVNL

SEQ ID NO: 89398 - protein, 10 aa, synthetic construct
DMKRGDYNSL

SEQ ID NO: 89399 - protein, 10 aa, synthetic construct
DMKRGDYTSM

SEQ ID NO: 89400 - protein, 10 aa, synthetic construct
DMRRGDFNNT

SEQ ID NO: 89401 - protein, 10 aa, synthetic construct
DMRRGDFNNL

SEQ ID NO: 89402 - protein, 10 aa, synthetic construct
DMHRGDFQNT

SEQ ID NO: 89403 - protein, 10 aa, synthetic construct
DMSRGDFNNT

SEQ ID NO: 89404 - protein, 10 aa, synthetic construct
QFFRGDYTSV

SEQ ID NO: 89405 - protein, 10 aa, synthetic construct
DLARGDLLLS

SEQ ID NO: 89406 - protein, 10 aa, synthetic construct
DMSRGDFNNL

SEQ ID NO: 89407 - protein, 10 aa, synthetic construct
DMTRGDFQNT

SEQ ID NO: 89408 - protein, 10 aa, synthetic construct
DMYRGDHVNL

SEQ ID NO: 89409 - protein, 10 aa, synthetic construct
DMYRGDYNSL

SEQ ID NO: 89410 - protein, 10 aa, synthetic construct
DMYRGDYTSM

SEQ ID NO: 89411 - protein, 10 aa, synthetic construct
DMNRGDHVNL

SEQ ID NO: 89412 - protein, 10 aa, synthetic construct
DMNRGDYNSL

SEQ ID NO: 89413 - protein, 10 aa, synthetic construct
DMNRGDYTSM

SEQ ID NO: 89414 - protein, 10 aa, synthetic construct
DMQRGDFQNT

SEQ ID NO: 89415 - protein, 10 aa, synthetic construct
DMDRGDFQNT

SEQ ID NO: 89416 - protein, 10 aa, synthetic construct
DLVRGDRGQI

SEQ ID NO: 89417 - protein, 10 aa, synthetic construct
DMERGDFQNT

SEQ ID NO: 89418 - protein, 10 aa, synthetic construct
DWIRGDFQNT

SEQ ID NO: 89419 - protein, 10 aa, synthetic construct
DWMRGDFNNT

SEQ ID NO: 89420 - protein, 10 aa, synthetic construct
DWMRGDFNNL

SEQ ID NO: 89421 - protein, 10 aa, synthetic construct
DWFRGDFQNT

SEQ ID NO: 89422 - protein, 10 aa, synthetic construct
DWKRGDFQNT

SEQ ID NO: 89423 - protein, 10 aa, synthetic construct
DWHRGDFNNT

SEQ ID NO: 89424 - protein, 10 aa, synthetic construct
DWHRGDFNNL

SEQ ID NO: 89425 - protein, 10 aa, synthetic construct
DWTRGDFNNT

SEQ ID NO: 89426 - protein, 10 aa, synthetic construct
DWTRGDFNNL

SEQ ID NO: 89427 - protein, 10 aa, synthetic construct
DLVRGDRQGI

SEQ ID NO: 89428 - protein, 10 aa, synthetic construct
DWYRGDFQNT

SEQ ID NO: 89429 - protein, 10 aa, synthetic construct
DWNRGDFQNT

SEQ ID NO: 89430 - protein, 10 aa, synthetic construct
DWQRGDFNNT

SEQ ID NO: 89431 - protein, 10 aa, synthetic construct
DWQRGDFNNL

SEQ ID NO: 89432 - protein, 10 aa, synthetic construct
DWDRGDFNNT

SEQ ID NO: 89433 - protein, 10 aa, synthetic construct
DWDRGDFNNL

SEQ ID NO: 89434 - protein, 10 aa, synthetic construct
DWERGDFNNT

SEQ ID NO: 89435 - protein, 10 aa, synthetic construct
DWERGDFNNL

SEQ ID NO: 89436 - protein, 10 aa, synthetic construct
DFGRGDFNNT

SEQ ID NO: 89437 - protein, 10 aa, synthetic construct
DFGRGDFNNL

SEQ ID NO: 89438 - protein, 10 aa, synthetic construct
DLVRGDRSVV

SEQ ID NO: 89439 - protein, 10 aa, synthetic construct
DFARGDFNNT

SEQ ID NO: 89440 - protein, 10 aa, synthetic construct
DFARGDFNNL

SEQ ID NO: 89441 - protein, 10 aa, synthetic construct
DFVRGDYNSL

SEQ ID NO: 89442 - protein, 10 aa, synthetic construct
DFVRGDYTSM

SEQ ID NO: 89443 - protein, 10 aa, synthetic construct
DFVRGDFQNT

SEQ ID NO: 89444 - protein, 10 aa, synthetic construct
DFPRGDFNNT

SEQ ID NO: 89445 - protein, 10 aa, synthetic construct
DFPRGDFNNL

SEQ ID NO: 89446 - protein, 10 aa, synthetic construct
DFLRGDYNSL

SEQ ID NO: 89447 - protein, 10 aa, synthetic construct
DFLRGDYTSM

SEQ ID NO: 89448 - protein, 10 aa, synthetic construct
DFLRGDFQNT

SEQ ID NO: 89449 - protein, 10 aa, synthetic construct
DLVRGDRGVV

SEQ ID NO: 89450 - protein, 10 aa, synthetic construct
DFIRGDYTSV

SEQ ID NO: 89451 - protein, 10 aa, synthetic construct
DFMRGDYTSV

SEQ ID NO: 89452 - protein, 10 aa, synthetic construct
DFWRGDYNSL

SEQ ID NO: 89453 - protein, 10 aa, synthetic construct
DFWRGDYTSM

SEQ ID NO: 89454 - protein, 10 aa, synthetic construct
DFWRGDFQNT

SEQ ID NO: 89455 - protein, 10 aa, synthetic construct
DFKRGDYTSV

SEQ ID NO: 89456 - protein, 10 aa, synthetic construct
DFRRGDFNNT

SEQ ID NO: 89457 - protein, 10 aa, synthetic construct
DFRRGDFNNL

SEQ ID NO: 89458 - protein, 10 aa, synthetic construct
DFHRGDYNSL

SEQ ID NO: 89459 - protein, 10 aa, synthetic construct
DFHRGDYTSM

SEQ ID NO: 89460 - protein, 10 aa, synthetic construct
DLVRGDRSQT

SEQ ID NO: 89461 - protein, 10 aa, synthetic construct
DFHRGDFQNT

SEQ ID NO: 89462 - protein, 10 aa, synthetic construct
DFSRGDYNSL

SEQ ID NO: 89463 - protein, 10 aa, synthetic construct
DFSRGDYTSM

SEQ ID NO: 89464 - protein, 10 aa, synthetic construct
DFSRGDFQNT

SEQ ID NO: 89465 - protein, 10 aa, synthetic construct
DFTRGDYNSL

SEQ ID NO: 89466 - protein, 10 aa, synthetic construct
DFTRGDYTSM

SEQ ID NO: 89467 - protein, 10 aa, synthetic construct
DFTRGDFQNT

SEQ ID NO: 89468 - protein, 10 aa, synthetic construct
DFYRGDYTSV

SEQ ID NO: 89469 - protein, 10 aa, synthetic construct
DFNRGDYTSV

SEQ ID NO: 89470 - protein, 10 aa, synthetic construct
DFQRGDYNSL

SEQ ID NO: 89471 - protein, 10 aa, synthetic construct
DLPRGDHGVL

SEQ ID NO: 89472 - protein, 10 aa, synthetic construct
DFQRGDYTSM

SEQ ID NO: 89473 - protein, 10 aa, synthetic construct
DFQRGDFQNT

SEQ ID NO: 89474 - protein, 10 aa, synthetic construct
DFDRGDYNSL

SEQ ID NO: 89475 - protein, 10 aa, synthetic construct
DFDRGDYTSM

SEQ ID NO: 89476 - protein, 10 aa, synthetic construct
DFDRGDFQNT

SEQ ID NO: 89477 - protein, 10 aa, synthetic construct
DFERGDYNSL

SEQ ID NO: 89478 - protein, 10 aa, synthetic construct
DFERGDYTSM

SEQ ID NO: 89479 - protein, 10 aa, synthetic construct
DFERGDFQNT

SEQ ID NO: 89480 - protein, 10 aa, synthetic construct
DKGRGDFNNT

SEQ ID NO: 89481 - protein, 10 aa, synthetic construct
DKGRGDFNNL

SEQ ID NO: 89482 - protein, 10 aa, synthetic construct
DLPRGDYVGL

SEQ ID NO: 89483 - protein, 10 aa, synthetic construct
DKARGDFNNT

SEQ ID NO: 89484 - protein, 10 aa, synthetic construct
DKARGDFNNL

SEQ ID NO: 89485 - protein, 10 aa, synthetic construct
DKVRGDYNSL

SEQ ID NO: 89486 - protein, 10 aa, synthetic construct
DKVRGDYTSM

SEQ ID NO: 89487 - protein, 10 aa, synthetic construct
DKVRGDFQNT

SEQ ID NO: 89488 - protein, 10 aa, synthetic construct
DKPRGDFNNT

SEQ ID NO: 89489 - protein, 10 aa, synthetic construct
DKPRGDFNNL

SEQ ID NO: 89490 - protein, 10 aa, synthetic construct
DKLRGDYNSL

SEQ ID NO: 89491 - protein, 10 aa, synthetic construct
DKLRGDYTSM

SEQ ID NO: 89492 - protein, 10 aa, synthetic construct
DKLRGDFQNT

SEQ ID NO: 89493 - protein, 10 aa, synthetic construct
DLPRGDQSTL

SEQ ID NO: 89494 - protein, 10 aa, synthetic construct
DKIRGDYTSV

SEQ ID NO: 89495 - protein, 10 aa, synthetic construct
DKMRGDYTSV

SEQ ID NO: 89496 - protein, 10 aa, synthetic construct
DKWRGDYNSL

SEQ ID NO: 89497 - protein, 10 aa, synthetic construct
DKWRGDYTSM

SEQ ID NO: 89498 - protein, 10 aa, synthetic construct
DKWRGDFQNT

SEQ ID NO: 89499 - protein, 10 aa, synthetic construct
DKFRGDYTSV

SEQ ID NO: 89500 - protein, 10 aa, synthetic construct
DKRRGDFNNT

SEQ ID NO: 89501 - protein, 10 aa, synthetic construct
DKRRGDFNNL

SEQ ID NO: 89502 - protein, 10 aa, synthetic construct
DKHRGDYNSL

SEQ ID NO: 89503 - protein, 10 aa, synthetic construct
DKHRGDYTSM

SEQ ID NO: 89504 - protein, 10 aa, synthetic construct
DLPRGDLLLS

SEQ ID NO: 89505 - protein, 10 aa, synthetic construct
DKHRGDFQNT

SEQ ID NO: 89506 - protein, 10 aa, synthetic construct
DKSRGDYNSL

SEQ ID NO: 89507 - protein, 10 aa, synthetic construct
DKSRGDYTSM

SEQ ID NO: 89508 - protein, 10 aa, synthetic construct
DKSRGDFQNT

SEQ ID NO: 89509 - protein, 10 aa, synthetic construct
DKTRGDYNSL

SEQ ID NO: 89510 - protein, 10 aa, synthetic construct
DKTRGDYTSM

SEQ ID NO: 89511 - protein, 10 aa, synthetic construct
DKTRGDFQNT

SEQ ID NO: 89512 - protein, 10 aa, synthetic construct
DKYRGDYTSV

SEQ ID NO: 89513 - protein, 10 aa, synthetic construct
DKQRGDYNSL

SEQ ID NO: 89514 - protein, 10 aa, synthetic construct
DKQRGDYTSM

SEQ ID NO: 89515 - protein, 10 aa, synthetic construct
TKNRGDRQGI

SEQ ID NO: 89516 - protein, 10 aa, synthetic construct
SFFRGDYNSL

SEQ ID NO: 89517 - protein, 10 aa, synthetic construct
DLLRGDRGQI

SEQ ID NO: 89518 - protein, 10 aa, synthetic construct
DKQRGDFQNT

SEQ ID NO: 89519 - protein, 10 aa, synthetic construct
DKDRGDYNSL

SEQ ID NO: 89520 - protein, 10 aa, synthetic construct
DKDRGDYTSM

SEQ ID NO: 89521 - protein, 10 aa, synthetic construct
DKDRGDFQNT

SEQ ID NO: 89522 - protein, 10 aa, synthetic construct
DKERGDYNSL

SEQ ID NO: 89523 - protein, 10 aa, synthetic construct
DKERGDYTSM

SEQ ID NO: 89524 - protein, 10 aa, synthetic construct
DKERGDFQNT

SEQ ID NO: 89525 - protein, 10 aa, synthetic construct
DRIRGDFNNT

SEQ ID NO: 89526 - protein, 10 aa, synthetic construct
DRIRGDFNNL

SEQ ID NO: 89527 - protein, 10 aa, synthetic construct
DRMRGDFNNT

SEQ ID NO: 89528 - protein, 10 aa, synthetic construct
DLLRGDRQGI

SEQ ID NO: 89529 - protein, 10 aa, synthetic construct
DRMRGDFNNL

SEQ ID NO: 89530 - protein, 10 aa, synthetic construct
DRFRGDFNNT

SEQ ID NO: 89531 - protein, 10 aa, synthetic construct
DRFRGDFNNL

SEQ ID NO: 89532 - protein, 10 aa, synthetic construct
DRKRGDFNNT

SEQ ID NO: 89533 - protein, 10 aa, synthetic construct
DRKRGDFNNL

SEQ ID NO: 89534 - protein, 10 aa, synthetic construct
DRYRGDFNNT

SEQ ID NO: 89535 - protein, 10 aa, synthetic construct
DRYRGDFNNL

SEQ ID NO: 89536 - protein, 10 aa, synthetic construct
DRNRGDFNNT

SEQ ID NO: 89537 - protein, 10 aa, synthetic construct
DRNRGDFNNL

SEQ ID NO: 89538 - protein, 10 aa, synthetic construct
DHVRGDFNNT

SEQ ID NO: 89539 - protein, 10 aa, synthetic construct
DLLRGDRSVV

SEQ ID NO: 89540 - protein, 10 aa, synthetic construct
DHVRGDFNNL

SEQ ID NO: 89541 - protein, 10 aa, synthetic construct
DHLRGDFNNT

SEQ ID NO: 89542 - protein, 10 aa, synthetic construct
DHLRGDFNNL

SEQ ID NO: 89543 - protein, 10 aa, synthetic construct
DHIRGDYNSL

SEQ ID NO: 89544 - protein, 10 aa, synthetic construct
DHIRGDYTSM

SEQ ID NO: 89545 - protein, 10 aa, synthetic construct
DHIRGDFQNT

SEQ ID NO: 89546 - protein, 10 aa, synthetic construct
DHMRGDYNSL

SEQ ID NO: 89547 - protein, 10 aa, synthetic construct
DHMRGDYTSM

SEQ ID NO: 89548 - protein, 10 aa, synthetic construct
DHMRGDFQNT

SEQ ID NO: 89549 - protein, 10 aa, synthetic construct
DHWRGDFNNT

SEQ ID NO: 89550 - protein, 10 aa, synthetic construct
DLLRGDRGVV

SEQ ID NO: 89551 - protein, 10 aa, synthetic construct
DHWRGDFNNL

SEQ ID NO: 89552 - protein, 10 aa, synthetic construct
DHFRGDYNSL

SEQ ID NO: 89553 - protein, 10 aa, synthetic construct
DHFRGDYTSM

SEQ ID NO: 89554 - protein, 10 aa, synthetic construct
DHFRGDFQNT

SEQ ID NO: 89555 - protein, 10 aa, synthetic construct
DHKRGDYNSL

SEQ ID NO: 89556 - protein, 10 aa, synthetic construct
DHKRGDYTSM

SEQ ID NO: 89557 - protein, 10 aa, synthetic construct
DHKRGDFQNT

SEQ ID NO: 89558 - protein, 10 aa, synthetic construct
DHHRGDFNNT

SEQ ID NO: 89559 - protein, 10 aa, synthetic construct
DHHRGDFNNL

SEQ ID NO: 89560 - protein, 10 aa, synthetic construct
DHSRGDFNNT

SEQ ID NO: 89561 - protein, 10 aa, synthetic construct
DLLRGDRSQT

SEQ ID NO: 89562 - protein, 10 aa, synthetic construct
DHSRGDFNNL

SEQ ID NO: 89563 - protein, 10 aa, synthetic construct
DHTRGDFNNT

SEQ ID NO: 89564 - protein, 10 aa, synthetic construct
DHTRGDFNNL

SEQ ID NO: 89565 - protein, 10 aa, synthetic construct
DHYRGDYNSL

SEQ ID NO: 89566 - protein, 10 aa, synthetic construct
DHYRGDYTSM

SEQ ID NO: 89567 - protein, 10 aa, synthetic construct
DHYRGDFQNT

SEQ ID NO: 89568 - protein, 10 aa, synthetic construct
DHNRGDYNSL

SEQ ID NO: 89569 - protein, 10 aa, synthetic construct
DHNRGDYTSM

SEQ ID NO: 89570 - protein, 10 aa, synthetic construct
DHNRGDFQNT

SEQ ID NO: 89571 - protein, 10 aa, synthetic construct
DHQRGDFNNT

SEQ ID NO: 89572 - protein, 10 aa, synthetic construct
DLWRGDRGQI

SEQ ID NO: 89573 - protein, 10 aa, synthetic construct
DHQRGDFNNL

SEQ ID NO: 89574 - protein, 10 aa, synthetic construct
DHDRGDFNNT

SEQ ID NO: 89575 - protein, 10 aa, synthetic construct
DHDRGDFNNL

SEQ ID NO: 89576 - protein, 10 aa, synthetic construct
DHERGDFNNT

SEQ ID NO: 89577 - protein, 10 aa, synthetic construct
DHERGDFNNL

SEQ ID NO: 89578 - protein, 10 aa, synthetic construct
DSIRGDFNNT

SEQ ID NO: 89579 - protein, 10 aa, synthetic construct
DSIRGDFNNL

SEQ ID NO: 89580 - protein, 10 aa, synthetic construct
DSMRGDFNNT

SEQ ID NO: 89581 - protein, 10 aa, synthetic construct
DSMRGDFNNL

SEQ ID NO: 89582 - protein, 10 aa, synthetic construct
DSFRGDFNNT

SEQ ID NO: 89583 - protein, 10 aa, synthetic construct
DLWRGDRQGI

SEQ ID NO: 89584 - protein, 10 aa, synthetic construct
DSFRGDFNNL

SEQ ID NO: 89585 - protein, 10 aa, synthetic construct
DSKRGDFNNT

SEQ ID NO: 89586 - protein, 10 aa, synthetic construct
DSKRGDFNNL

SEQ ID NO: 89587 - protein, 10 aa, synthetic construct
DSYRGDFNNT

SEQ ID NO: 89588 - protein, 10 aa, synthetic construct
DSYRGDFNNL

SEQ ID NO: 89589 - protein, 10 aa, synthetic construct
DSNRGDFNNT

SEQ ID NO: 89590 - protein, 10 aa, synthetic construct
DSNRGDFNNL

SEQ ID NO: 89591 - protein, 10 aa, synthetic construct
DTVRGDFNNT

SEQ ID NO: 89592 - protein, 10 aa, synthetic construct
DTVRGDFNNL

SEQ ID NO: 89593 - protein, 10 aa, synthetic construct
DTLRGDFNNT

SEQ ID NO: 89594 - protein, 10 aa, synthetic construct
DLWRGDRSVV

SEQ ID NO: 89595 - protein, 10 aa, synthetic construct
DTLRGDFNNL

SEQ ID NO: 89596 - protein, 10 aa, synthetic construct
DTIRGDYNSL

SEQ ID NO: 89597 - protein, 10 aa, synthetic construct
DTIRGDYTSM

SEQ ID NO: 89598 - protein, 10 aa, synthetic construct
DTIRGDFQNT

SEQ ID NO: 89599 - protein, 10 aa, synthetic construct
DTMRGDYNSL

SEQ ID NO: 89600 - protein, 10 aa, synthetic construct
DTMRGDYTSM

SEQ ID NO: 89601 - protein, 10 aa, synthetic construct
DTMRGDFQNT

SEQ ID NO: 89602 - protein, 10 aa, synthetic construct
DTWRGDFNNT

SEQ ID NO: 89603 - protein, 10 aa, synthetic construct
DTWRGDFNNL

SEQ ID NO: 89604 - protein, 10 aa, synthetic construct
DTFRGDYNSL

SEQ ID NO: 89605 - protein, 10 aa, synthetic construct
DLWRGDRGVV

SEQ ID NO: 89606 - protein, 10 aa, synthetic construct
DTFRGDYTSM

SEQ ID NO: 89607 - protein, 10 aa, synthetic construct
DTFRGDFQNT

SEQ ID NO: 89608 - protein, 10 aa, synthetic construct
DTKRGDYNSL

SEQ ID NO: 89609 - protein, 10 aa, synthetic construct
DTKRGDYTSM

SEQ ID NO: 89610 - protein, 10 aa, synthetic construct
DTKRGDFQNT

SEQ ID NO: 89611 - protein, 10 aa, synthetic construct
DTHRGDFNNT

SEQ ID NO: 89612 - protein, 10 aa, synthetic construct
DTHRGDFNNL

SEQ ID NO: 89613 - protein, 10 aa, synthetic construct
DTSRGDFNNT

SEQ ID NO: 89614 - protein, 10 aa, synthetic construct
DTSRGDFNNL

SEQ ID NO: 89615 - protein, 10 aa, synthetic construct
DTTRGDFNNT

SEQ ID NO: 89616 - protein, 10 aa, synthetic construct
DLWRGDRSQT

SEQ ID NO: 89617 - protein, 10 aa, synthetic construct
DTTRGDFNNL

SEQ ID NO: 89618 - protein, 10 aa, synthetic construct
DTYRGDYNSL

SEQ ID NO: 89619 - protein, 10 aa, synthetic construct
DTYRGDYTSM

SEQ ID NO: 89620 - protein, 10 aa, synthetic construct
DTYRGDFQNT

SEQ ID NO: 89621 - protein, 10 aa, synthetic construct
DTNRGDYNSL

SEQ ID NO: 89622 - protein, 10 aa, synthetic construct
DTNRGDYTSM

SEQ ID NO: 89623 - protein, 10 aa, synthetic construct
DTNRGDFQNT

SEQ ID NO: 89624 - protein, 10 aa, synthetic construct
DTQRGDFNNT

SEQ ID NO: 89625 - protein, 10 aa, synthetic construct
DTQRGDFNNL

SEQ ID NO: 89626 - protein, 10 aa, synthetic construct
DTDRGDFNNT

SEQ ID NO: 89627 - protein, 10 aa, synthetic construct
SFFRGDYTSM

SEQ ID NO: 89628 - protein, 10 aa, synthetic construct
DLRRGDHGVL

SEQ ID NO: 89629 - protein, 10 aa, synthetic construct
DTDRGDFNNL

SEQ ID NO: 89630 - protein, 10 aa, synthetic construct
DTERGDFNNT

SEQ ID NO: 89631 - protein, 10 aa, synthetic construct
DTERGDFNNL

SEQ ID NO: 89632 - protein, 10 aa, synthetic construct
DYGRGDFNNT

SEQ ID NO: 89633 - protein, 10 aa, synthetic construct
DYGRGDFNNL

SEQ ID NO: 89634 - protein, 10 aa, synthetic construct
DYARGDFNNT

SEQ ID NO: 89635 - protein, 10 aa, synthetic construct
DYARGDFNNL

SEQ ID NO: 89636 - protein, 10 aa, synthetic construct
DYVRGDYNSL

SEQ ID NO: 89637 - protein, 10 aa, synthetic construct
DYVRGDYTSM

SEQ ID NO: 89638 - protein, 10 aa, synthetic construct
DYVRGDFQNT

SEQ ID NO: 89639 - protein, 10 aa, synthetic construct
DLRRGDYVGL

SEQ ID NO: 89640 - protein, 10 aa, synthetic construct
DYPRGDFNNT

SEQ ID NO: 89641 - protein, 10 aa, synthetic construct
DYPRGDFNNL

SEQ ID NO: 89642 - protein, 10 aa, synthetic construct
DYLRGDYNSL

SEQ ID NO: 89643 - protein, 10 aa, synthetic construct
DYLRGDYTSM

SEQ ID NO: 89644 - protein, 10 aa, synthetic construct
DYLRGDFQNT

SEQ ID NO: 89645 - protein, 10 aa, synthetic construct
DYIRGDYTSV

SEQ ID NO: 89646 - protein, 10 aa, synthetic construct
DYMRGDYTSV

SEQ ID NO: 89647 - protein, 10 aa, synthetic construct
DYWRGDYNSL

SEQ ID NO: 89648 - protein, 10 aa, synthetic construct
DYWRGDYTSM

SEQ ID NO: 89649 - protein, 10 aa, synthetic construct
DYWRGDFQNT

SEQ ID NO: 89650 - protein, 10 aa, synthetic construct
DLRRGDQSTL

SEQ ID NO: 89651 - protein, 10 aa, synthetic construct
DYFRGDYTSV

SEQ ID NO: 89652 - protein, 10 aa, synthetic construct
DYKRGDYTSV

SEQ ID NO: 89653 - protein, 10 aa, synthetic construct
DYRRGDFNNT

SEQ ID NO: 89654 - protein, 10 aa, synthetic construct
DYRRGDFNNL

SEQ ID NO: 89655 - protein, 10 aa, synthetic construct
DYHRGDYNSL

SEQ ID NO: 89656 - protein, 10 aa, synthetic construct
DYHRGDYTSM

SEQ ID NO: 89657 - protein, 10 aa, synthetic construct
DYHRGDFQNT

SEQ ID NO: 89658 - protein, 10 aa, synthetic construct
DYSRGDYNSL

SEQ ID NO: 89659 - protein, 10 aa, synthetic construct
DYSRGDYTSM

SEQ ID NO: 89660 - protein, 10 aa, synthetic construct
DYSRGDFQNT

SEQ ID NO: 89661 - protein, 10 aa, synthetic construct
DLRRGDLLLS

SEQ ID NO: 89662 - protein, 10 aa, synthetic construct
DYTRGDYNSL

SEQ ID NO: 89663 - protein, 10 aa, synthetic construct
DYTRGDYTSM

SEQ ID NO: 89664 - protein, 10 aa, synthetic construct
DYTRGDFQNT

SEQ ID NO: 89665 - protein, 10 aa, synthetic construct
DYYRGDYTSV

SEQ ID NO: 89666 - protein, 10 aa, synthetic construct
DYNRGDYTSV

SEQ ID NO: 89667 - protein, 10 aa, synthetic construct
DYQRGDYNSL

SEQ ID NO: 89668 - protein, 10 aa, synthetic construct
DYQRGDYTSM

SEQ ID NO: 89669 - protein, 10 aa, synthetic construct
DYQRGDFQNT

SEQ ID NO: 89670 - protein, 10 aa, synthetic construct
DYDRGDYNSL

SEQ ID NO: 89671 - protein, 10 aa, synthetic construct
DYDRGDYTSM

SEQ ID NO: 89672 - protein, 10 aa, synthetic construct
DLHRGDRGQI

SEQ ID NO: 89673 - protein, 10 aa, synthetic construct
DYDRGDFQNT

SEQ ID NO: 89674 - protein, 10 aa, synthetic construct
DYERGDYNSL

SEQ ID NO: 89675 - protein, 10 aa, synthetic construct
DYERGDYTSM

SEQ ID NO: 89676 - protein, 10 aa, synthetic construct
DYERGDFQNT

SEQ ID NO: 89677 - protein, 10 aa, synthetic construct
DNGRGDFNNT

SEQ ID NO: 89678 - protein, 10 aa, synthetic construct
DNGRGDFNNL

SEQ ID NO: 89679 - protein, 10 aa, synthetic construct
DNARGDFNNT

SEQ ID NO: 89680 - protein, 10 aa, synthetic construct
DNARGDFNNL

SEQ ID NO: 89681 - protein, 10 aa, synthetic construct
DNVRGDYNSL

SEQ ID NO: 89682 - protein, 10 aa, synthetic construct
DNVRGDYTSM

SEQ ID NO: 89683 - protein, 10 aa, synthetic construct
DLHRGDRQGI

SEQ ID NO: 89684 - protein, 10 aa, synthetic construct
DNVRGDFQNT

SEQ ID NO: 89685 - protein, 10 aa, synthetic construct
DNPRGDFNNT

SEQ ID NO: 89686 - protein, 10 aa, synthetic construct
DNPRGDFNNL

SEQ ID NO: 89687 - protein, 10 aa, synthetic construct
DNLRGDYNSL

SEQ ID NO: 89688 - protein, 10 aa, synthetic construct
DNLRGDYTSM

SEQ ID NO: 89689 - protein, 10 aa, synthetic construct
DNLRGDFQNT

SEQ ID NO: 89690 - protein, 10 aa, synthetic construct
DNIRGDYTSV

SEQ ID NO: 89691 - protein, 10 aa, synthetic construct
DNMRGDYTSV

SEQ ID NO: 89692 - protein, 10 aa, synthetic construct
DNWRGDYNSL

SEQ ID NO: 89693 - protein, 10 aa, synthetic construct
DNWRGDYTSM

SEQ ID NO: 89694 - protein, 10 aa, synthetic construct
DLHRGDRSVV

SEQ ID NO: 89695 - protein, 10 aa, synthetic construct
DNWRGDFQNT

SEQ ID NO: 89696 - protein, 10 aa, synthetic construct
DNFRGDYTSV

SEQ ID NO: 89697 - protein, 10 aa, synthetic construct
DNKRGDYTSV

SEQ ID NO: 89698 - protein, 10 aa, synthetic construct
DNRRGDFNNT

SEQ ID NO: 89699 - protein, 10 aa, synthetic construct
DNRRGDFNNL

SEQ ID NO: 89700 - protein, 10 aa, synthetic construct
DNHRGDYNSL

SEQ ID NO: 89701 - protein, 10 aa, synthetic construct
DNHRGDYTSM

SEQ ID NO: 89702 - protein, 10 aa, synthetic construct
DNHRGDFQNT

SEQ ID NO: 89703 - protein, 10 aa, synthetic construct
DNSRGDYNSL

SEQ ID NO: 89704 - protein, 10 aa, synthetic construct
DNSRGDYTSM

SEQ ID NO: 89705 - protein, 10 aa, synthetic construct
DLHRGDRGVV

SEQ ID NO: 89706 - protein, 10 aa, synthetic construct
DNSRGDFQNT

SEQ ID NO: 89707 - protein, 10 aa, synthetic construct
DNTRGDYNSL

SEQ ID NO: 89708 - protein, 10 aa, synthetic construct
DNTRGDYTSM

SEQ ID NO: 89709 - protein, 10 aa, synthetic construct
DNTRGDFQNT

SEQ ID NO: 89710 - protein, 10 aa, synthetic construct
DNYRGDYTSV

SEQ ID NO: 89711 - protein, 10 aa, synthetic construct
DNNRGDYTSV

SEQ ID NO: 89712 - protein, 10 aa, synthetic construct
DNQRGDYNSL

SEQ ID NO: 89713 - protein, 10 aa, synthetic construct
DNQRGDYTSM

SEQ ID NO: 89714 - protein, 10 aa, synthetic construct
DNQRGDFQNT

SEQ ID NO: 89715 - protein, 10 aa, synthetic construct
DNDRGDYNSL

SEQ ID NO: 89716 - protein, 10 aa, synthetic construct
DLHRGDRSQT

SEQ ID NO: 89717 - protein, 10 aa, synthetic construct
DNDRGDYTSM

SEQ ID NO: 89718 - protein, 10 aa, synthetic construct
DNDRGDFQNT

SEQ ID NO: 89719 - protein, 10 aa, synthetic construct
DNERGDYNSL

SEQ ID NO: 89720 - protein, 10 aa, synthetic construct
DNERGDYTSM

SEQ ID NO: 89721 - protein, 10 aa, synthetic construct
DNERGDFQNT

SEQ ID NO: 89722 - protein, 10 aa, synthetic construct
DQVRGDFNNT

SEQ ID NO: 89723 - protein, 10 aa, synthetic construct
DQVRGDFNNL

SEQ ID NO: 89724 - protein, 10 aa, synthetic construct
DQLRGDFNNT

SEQ ID NO: 89725 - protein, 10 aa, synthetic construct
DQLRGDFNNL

SEQ ID NO: 89726 - protein, 10 aa, synthetic construct
DQIRGDYNSL

SEQ ID NO: 89727 - protein, 10 aa, synthetic construct
DLSRGDRGQI

SEQ ID NO: 89728 - protein, 10 aa, synthetic construct
DQIRGDYTSM

SEQ ID NO: 89729 - protein, 10 aa, synthetic construct
DQIRGDFQNT

SEQ ID NO: 89730 - protein, 10 aa, synthetic construct
DQMRGDYNSL

SEQ ID NO: 89731 - protein, 10 aa, synthetic construct
DQMRGDYTSM

SEQ ID NO: 89732 - protein, 10 aa, synthetic construct
DQMRGDFQNT

SEQ ID NO: 89733 - protein, 10 aa, synthetic construct
DQWRGDFNNT

SEQ ID NO: 89734 - protein, 10 aa, synthetic construct
DQWRGDFNNL

SEQ ID NO: 89735 - protein, 10 aa, synthetic construct
DQFRGDYNSL

SEQ ID NO: 89736 - protein, 10 aa, synthetic construct
DQFRGDYTSM

SEQ ID NO: 89737 - protein, 10 aa, synthetic construct
DQFRGDFQNT

SEQ ID NO: 89738 - protein, 10 aa, synthetic construct
SFFRGDFQNT

SEQ ID NO: 89739 - protein, 10 aa, synthetic construct
DLSRGDRQGI

SEQ ID NO: 89740 - protein, 10 aa, synthetic construct
DQKRGDYNSL

SEQ ID NO: 89741 - protein, 10 aa, synthetic construct
DQKRGDYTSM

SEQ ID NO: 89742 - protein, 10 aa, synthetic construct
DQKRGDFQNT

SEQ ID NO: 89743 - protein, 10 aa, synthetic construct
DQHRGDFNNT

SEQ ID NO: 89744 - protein, 10 aa, synthetic construct
DQHRGDFNNL

SEQ ID NO: 89745 - protein, 10 aa, synthetic construct
DQSRGDFNNT

SEQ ID NO: 89746 - protein, 10 aa, synthetic construct
DQSRGDFNNL

SEQ ID NO: 89747 - protein, 10 aa, synthetic construct
DQTRGDFNNT

SEQ ID NO: 89748 - protein, 10 aa, synthetic construct
DQTRGDFNNL

SEQ ID NO: 89749 - protein, 10 aa, synthetic construct
DQYRGDYNSL

SEQ ID NO: 89750 - protein, 10 aa, synthetic construct
DLSRGDRSVV

SEQ ID NO: 89751 - protein, 10 aa, synthetic construct
DQYRGDYTSM

SEQ ID NO: 89752 - protein, 10 aa, synthetic construct
DQYRGDFQNT

SEQ ID NO: 89753 - protein, 10 aa, synthetic construct
DQNRGDYNSL

SEQ ID NO: 89754 - protein, 10 aa, synthetic construct
DQNRGDYTSM

SEQ ID NO: 89755 - protein, 10 aa, synthetic construct
DQNRGDFQNT

SEQ ID NO: 89756 - protein, 10 aa, synthetic construct
DQQRGDFNNT

SEQ ID NO: 89757 - protein, 10 aa, synthetic construct
DQQRGDFNNL

SEQ ID NO: 89758 - protein, 10 aa, synthetic construct
DQDRGDFNNT

SEQ ID NO: 89759 - protein, 10 aa, synthetic construct
DQDRGDFNNL

SEQ ID NO: 89760 - protein, 10 aa, synthetic construct
DQERGDFNNT

SEQ ID NO: 89761 - protein, 10 aa, synthetic construct
DLSRGDRGVV

SEQ ID NO: 89762 - protein, 10 aa, synthetic construct
DQERGDFNNL

SEQ ID NO: 89763 - protein, 10 aa, synthetic construct
DDVRGDFNNT

SEQ ID NO: 89764 - protein, 10 aa, synthetic construct
DDVRGDFNNL

SEQ ID NO: 89765 - protein, 10 aa, synthetic construct
DDLRGDFNNT

SEQ ID NO: 89766 - protein, 10 aa, synthetic construct
DDLRGDFNNL

SEQ ID NO: 89767 - protein, 10 aa, synthetic construct
DDIRGDYNSL

SEQ ID NO: 89768 - protein, 10 aa, synthetic construct
DDIRGDYTSM

SEQ ID NO: 89769 - protein, 10 aa, synthetic construct
DDIRGDFQNT

SEQ ID NO: 89770 - protein, 10 aa, synthetic construct
DDMRGDYNSL

SEQ ID NO: 89771 - protein, 10 aa, synthetic construct
DDMRGDYTSM

SEQ ID NO: 89772 - protein, 10 aa, synthetic construct
DLSRGDRSQT

SEQ ID NO: 89773 - protein, 10 aa, synthetic construct
DDMRGDFQNT

SEQ ID NO: 89774 - protein, 10 aa, synthetic construct
DDWRGDFNNT

SEQ ID NO: 89775 - protein, 10 aa, synthetic construct
DDWRGDFNNL

SEQ ID NO: 89776 - protein, 10 aa, synthetic construct
DDFRGDYNSL

SEQ ID NO: 89777 - protein, 10 aa, synthetic construct
DDFRGDYTSM

SEQ ID NO: 89778 - protein, 10 aa, synthetic construct
DDFRGDFQNT

SEQ ID NO: 89779 - protein, 10 aa, synthetic construct
DDKRGDYNSL

SEQ ID NO: 89780 - protein, 10 aa, synthetic construct
DDKRGDYTSM

SEQ ID NO: 89781 - protein, 10 aa, synthetic construct
DDKRGDFQNT

SEQ ID NO: 89782 - protein, 10 aa, synthetic construct
DDHRGDFNNT

SEQ ID NO: 89783 - protein, 10 aa, synthetic construct
DLTRGDRGQI

SEQ ID NO: 89784 - protein, 10 aa, synthetic construct
DDHRGDFNNL

SEQ ID NO: 89785 - protein, 10 aa, synthetic construct
DDSRGDFNNT

SEQ ID NO: 89786 - protein, 10 aa, synthetic construct
DDSRGDFNNL

SEQ ID NO: 89787 - protein, 10 aa, synthetic construct
DDTRGDFNNT

SEQ ID NO: 89788 - protein, 10 aa, synthetic construct
DDTRGDFNNL

SEQ ID NO: 89789 - protein, 10 aa, synthetic construct
DDYRGDYNSL

SEQ ID NO: 89790 - protein, 10 aa, synthetic construct
DDYRGDYTSM

SEQ ID NO: 89791 - protein, 10 aa, synthetic construct
DDYRGDFQNT

SEQ ID NO: 89792 - protein, 10 aa, synthetic construct
DDNRGDYNSL

SEQ ID NO: 89793 - protein, 10 aa, synthetic construct
DDNRGDYTSM

SEQ ID NO: 89794 - protein, 10 aa, synthetic construct
DLTRGDRQGI

SEQ ID NO: 89795 - protein, 10 aa, synthetic construct
DDNRGDFQNT

SEQ ID NO: 89796 - protein, 10 aa, synthetic construct
DDQRGDFNNT

SEQ ID NO: 89797 - protein, 10 aa, synthetic construct
DDQRGDFNNL

SEQ ID NO: 89798 - protein, 10 aa, synthetic construct
DDDRGDFNNT

SEQ ID NO: 89799 - protein, 10 aa, synthetic construct
DDDRGDFNNL

SEQ ID NO: 89800 - protein, 10 aa, synthetic construct
DDERGDFNNT

SEQ ID NO: 89801 - protein, 10 aa, synthetic construct
DDERGDFNNL

SEQ ID NO: 89802 - protein, 10 aa, synthetic construct
DEVRGDFNNT

SEQ ID NO: 89803 - protein, 10 aa, synthetic construct
DEVRGDFNNL

SEQ ID NO: 89804 - protein, 10 aa, synthetic construct
DELRGDFNNT

SEQ ID NO: 89805 - protein, 10 aa, synthetic construct
DLTRGDRSVV

SEQ ID NO: 89806 - protein, 10 aa, synthetic construct
DELRGDFNNL

SEQ ID NO: 89807 - protein, 10 aa, synthetic construct
DEIRGDYNSL

SEQ ID NO: 89808 - protein, 10 aa, synthetic construct
DEIRGDYTSM

SEQ ID NO: 89809 - protein, 10 aa, synthetic construct
DEIRGDFQNT

SEQ ID NO: 89810 - protein, 10 aa, synthetic construct
DEMRGDYNSL

SEQ ID NO: 89811 - protein, 10 aa, synthetic construct
DEMRGDYTSM

SEQ ID NO: 89812 - protein, 10 aa, synthetic construct
DEMRGDFQNT

SEQ ID NO: 89813 - protein, 10 aa, synthetic construct
DEWRGDFNNT

SEQ ID NO: 89814 - protein, 10 aa, synthetic construct
DEWRGDFNNL

SEQ ID NO: 89815 - protein, 10 aa, synthetic construct
DEFRGDYNSL

SEQ ID NO: 89816 - protein, 10 aa, synthetic construct
DLTRGDRGVV

SEQ ID NO: 89817 - protein, 10 aa, synthetic construct
DEFRGDYTSM

SEQ ID NO: 89818 - protein, 10 aa, synthetic construct
DEFRGDFQNT

SEQ ID NO: 89819 - protein, 10 aa, synthetic construct
DEKRGDYNSL

SEQ ID NO: 89820 - protein, 10 aa, synthetic construct
DEKRGDYTSM

SEQ ID NO: 89821 - protein, 10 aa, synthetic construct
DEKRGDFQNT

SEQ ID NO: 89822 - protein, 10 aa, synthetic construct
DEHRGDFNNT

SEQ ID NO: 89823 - protein, 10 aa, synthetic construct
DEHRGDFNNL

SEQ ID NO: 89824 - protein, 10 aa, synthetic construct
DESRGDFNNT

SEQ ID NO: 89825 - protein, 10 aa, synthetic construct
DESRGDFNNL

SEQ ID NO: 89826 - protein, 10 aa, synthetic construct
DETRGDFNNT

SEQ ID NO: 89827 - protein, 10 aa, synthetic construct
DLTRGDRSQT

SEQ ID NO: 89828 - protein, 10 aa, synthetic construct
DETRGDFNNL

SEQ ID NO: 89829 - protein, 10 aa, synthetic construct
DEYRGDYNSL

SEQ ID NO: 89830 - protein, 10 aa, synthetic construct
DEYRGDYTSM

SEQ ID NO: 89831 - protein, 10 aa, synthetic construct
DEYRGDFQNT

SEQ ID NO: 89832 - protein, 10 aa, synthetic construct
DENRGDYNSL

SEQ ID NO: 89833 - protein, 10 aa, synthetic construct
DENRGDYTSM

SEQ ID NO: 89834 - protein, 10 aa, synthetic construct
DENRGDFQNT

SEQ ID NO: 89835 - protein, 10 aa, synthetic construct
DEQRGDFNNT

SEQ ID NO: 89836 - protein, 10 aa, synthetic construct
DEQRGDFNNL

SEQ ID NO: 89837 - protein, 10 aa, synthetic construct
DEDRGDFNNT

SEQ ID NO: 89838 - protein, 10 aa, synthetic construct
DLQRGDRGQI

SEQ ID NO: 89839 - protein, 10 aa, synthetic construct
DEDRGDFNNL

SEQ ID NO: 89840 - protein, 10 aa, synthetic construct
DEERGDFNNT

SEQ ID NO: 89841 - protein, 10 aa, synthetic construct
DEERGDFNNL

SEQ ID NO: 89842 - protein, 10 aa, synthetic construct
QGIRGDFNNT

SEQ ID NO: 89843 - protein, 10 aa, synthetic construct
QGIRGDFNNL

SEQ ID NO: 89844 - protein, 10 aa, synthetic construct
QGMRGDFNNT

SEQ ID NO: 89845 - protein, 10 aa, synthetic construct
QGMRGDFNNL

SEQ ID NO: 89846 - protein, 10 aa, synthetic construct
QGFRGDFNNT

SEQ ID NO: 89847 - protein, 10 aa, synthetic construct
QGFRGDFNNL

SEQ ID NO: 89848 - protein, 10 aa, synthetic construct
QGKRGDFNNT

SEQ ID NO: 89849 - protein, 10 aa, synthetic construct
TFFRGDYNSL

SEQ ID NO: 89850 - protein, 10 aa, synthetic construct
DLQRGDRQGI

SEQ ID NO: 89851 - protein, 10 aa, synthetic construct
QGKRGDFNNL

SEQ ID NO: 89852 - protein, 10 aa, synthetic construct
QGYRGDFNNT

SEQ ID NO: 89853 - protein, 10 aa, synthetic construct
QGYRGDFNNL

SEQ ID NO: 89854 - protein, 10 aa, synthetic construct
QGNRGDFNNT

SEQ ID NO: 89855 - protein, 10 aa, synthetic construct
QGNRGDFNNL

SEQ ID NO: 89856 - protein, 10 aa, synthetic construct
QAIRGDFNNT

SEQ ID NO: 89857 - protein, 10 aa, synthetic construct
QAIRGDFNNL

SEQ ID NO: 89858 - protein, 10 aa, synthetic construct
QAMRGDFNNT

SEQ ID NO: 89859 - protein, 10 aa, synthetic construct
QAMRGDFNNL

SEQ ID NO: 89860 - protein, 10 aa, synthetic construct
QAFRGDFNNT

SEQ ID NO: 89861 - protein, 10 aa, synthetic construct
DLQRGDRSVV

SEQ ID NO: 89862 - protein, 10 aa, synthetic construct
QAFRGDFNNL

SEQ ID NO: 89863 - protein, 10 aa, synthetic construct
QAKRGDFNNT

SEQ ID NO: 89864 - protein, 10 aa, synthetic construct
QAKRGDFNNL

SEQ ID NO: 89865 - protein, 10 aa, synthetic construct
QAYRGDFNNT

SEQ ID NO: 89866 - protein, 10 aa, synthetic construct
QAYRGDFNNL

SEQ ID NO: 89867 - protein, 10 aa, synthetic construct
QANRGDFNNT

SEQ ID NO: 89868 - protein, 10 aa, synthetic construct
QANRGDFNNL

SEQ ID NO: 89869 - protein, 10 aa, synthetic construct
QVIRGDFNNT

SEQ ID NO: 89870 - protein, 10 aa, synthetic construct
QVIRGDFNNL

SEQ ID NO: 89871 - protein, 10 aa, synthetic construct
QVMRGDFNNT

SEQ ID NO: 89872 - protein, 10 aa, synthetic construct
DLQRGDRGVV

SEQ ID NO: 89873 - protein, 10 aa, synthetic construct
QVMRGDFNNL

SEQ ID NO: 89874 - protein, 10 aa, synthetic construct
QVFRGDFNNT

SEQ ID NO: 89875 - protein, 10 aa, synthetic construct
QVFRGDFNNL

SEQ ID NO: 89876 - protein, 10 aa, synthetic construct
QVKRGDFNNT

SEQ ID NO: 89877 - protein, 10 aa, synthetic construct
QVKRGDFNNL

SEQ ID NO: 89878 - protein, 10 aa, synthetic construct
QVYRGDFNNT

SEQ ID NO: 89879 - protein, 10 aa, synthetic construct
QVYRGDFNNL

SEQ ID NO: 89880 - protein, 10 aa, synthetic construct
QVNRGDFNNT

SEQ ID NO: 89881 - protein, 10 aa, synthetic construct
QVNRGDFNNL

SEQ ID NO: 89882 - protein, 10 aa, synthetic construct
QPIRGDFNNT

SEQ ID NO: 89883 - protein, 10 aa, synthetic construct
DLQRGDRSQT

SEQ ID NO: 89884 - protein, 10 aa, synthetic construct
QPIRGDFNNL

SEQ ID NO: 89885 - protein, 10 aa, synthetic construct
QPMRGDFNNT

SEQ ID NO: 89886 - protein, 10 aa, synthetic construct
QPMRGDFNNL

SEQ ID NO: 89887 - protein, 10 aa, synthetic construct
QPFRGDFNNT

SEQ ID NO: 89888 - protein, 10 aa, synthetic construct
QPFRGDFNNL

SEQ ID NO: 89889 - protein, 10 aa, synthetic construct
QPKRGDFNNT

SEQ ID NO: 89890 - protein, 10 aa, synthetic construct
QPKRGDFNNL

SEQ ID NO: 89891 - protein, 10 aa, synthetic construct
QPYRGDFNNT

SEQ ID NO: 89892 - protein, 10 aa, synthetic construct
QPYRGDFNNL

SEQ ID NO: 89893 - protein, 10 aa, synthetic construct
QPNRGDFNNT

SEQ ID NO: 89894 - protein, 10 aa, synthetic construct
DLDRGDRGQI

SEQ ID NO: 89895 - protein, 10 aa, synthetic construct
QPNRGDFNNL

SEQ ID NO: 89896 - protein, 10 aa, synthetic construct
QLIRGDFNNT

SEQ ID NO: 89897 - protein, 10 aa, synthetic construct
QLIRGDFNNL

SEQ ID NO: 89898 - protein, 10 aa, synthetic construct
QLMRGDFNNT

SEQ ID NO: 89899 - protein, 10 aa, synthetic construct
QLMRGDFNNL

SEQ ID NO: 89900 - protein, 10 aa, synthetic construct
QLFRGDFNNT

SEQ ID NO: 89901 - protein, 10 aa, synthetic construct
QLFRGDFNNL

SEQ ID NO: 89902 - protein, 10 aa, synthetic construct
QLKRGDFNNT

SEQ ID NO: 89903 - protein, 10 aa, synthetic construct
QLKRGDFNNL

SEQ ID NO: 89904 - protein, 10 aa, synthetic construct
QLYRGDFNNT

SEQ ID NO: 89905 - protein, 10 aa, synthetic construct
DLDRGDRQGI

SEQ ID NO: 89906 - protein, 10 aa, synthetic construct
QLYRGDFNNL

SEQ ID NO: 89907 - protein, 10 aa, synthetic construct
QLNRGDFNNT

SEQ ID NO: 89908 - protein, 10 aa, synthetic construct
QLNRGDFNNL

SEQ ID NO: 89909 - protein, 10 aa, synthetic construct
QIGRGDFNNT

SEQ ID NO: 89910 - protein, 10 aa, synthetic construct
QIGRGDFNNL

SEQ ID NO: 89911 - protein, 10 aa, synthetic construct
QIARGDFNNT

SEQ ID NO: 89912 - protein, 10 aa, synthetic construct
QIARGDFNNL

SEQ ID NO: 89913 - protein, 10 aa, synthetic construct
QIVRGDYNSL

SEQ ID NO: 89914 - protein, 10 aa, synthetic construct
QIVRGDYTSM

SEQ ID NO: 89915 - protein, 10 aa, synthetic construct
QIVRGDFQNT

SEQ ID NO: 89916 - protein, 10 aa, synthetic construct
DLDRGDRSVV

SEQ ID NO: 89917 - protein, 10 aa, synthetic construct
QIPRGDFNNT

SEQ ID NO: 89918 - protein, 10 aa, synthetic construct
QIPRGDFNNL

SEQ ID NO: 89919 - protein, 10 aa, synthetic construct
QILRGDYNSL

SEQ ID NO: 89920 - protein, 10 aa, synthetic construct
QILRGDYTSM

SEQ ID NO: 89921 - protein, 10 aa, synthetic construct
QILRGDFQNT

SEQ ID NO: 89922 - protein, 10 aa, synthetic construct
QIIRGDYTSV

SEQ ID NO: 89923 - protein, 10 aa, synthetic construct
QIMRGDYTSV

SEQ ID NO: 89924 - protein, 10 aa, synthetic construct
QIWRGDYNSL

SEQ ID NO: 89925 - protein, 10 aa, synthetic construct
QIWRGDYTSM

SEQ ID NO: 89926 - protein, 10 aa, synthetic construct
QIWRGDFQNT

SEQ ID NO: 89927 - protein, 10 aa, synthetic construct
DLDRGDRGVV

SEQ ID NO: 89928 - protein, 10 aa, synthetic construct
QIFRGDYTSV

SEQ ID NO: 89929 - protein, 10 aa, synthetic construct
QIKRGDYTSV

SEQ ID NO: 89930 - protein, 10 aa, synthetic construct
QIRRGDFNNT

SEQ ID NO: 89931 - protein, 10 aa, synthetic construct
QIRRGDFNNL

SEQ ID NO: 89932 - protein, 10 aa, synthetic construct
QIHRGDYNSL

SEQ ID NO: 89933 - protein, 10 aa, synthetic construct
QIHRGDYTSM

SEQ ID NO: 89934 - protein, 10 aa, synthetic construct
QIHRGDFQNT

SEQ ID NO: 89935 - protein, 10 aa, synthetic construct
QISRGDYNSL

SEQ ID NO: 89936 - protein, 10 aa, synthetic construct
QISRGDYTSM

SEQ ID NO: 89937 - protein, 10 aa, synthetic construct
QISRGDFQNT

SEQ ID NO: 89938 - protein, 10 aa, synthetic construct
DLDRGDRSQT

SEQ ID NO: 89939 - protein, 10 aa, synthetic construct
QITRGDYNSL

SEQ ID NO: 89940 - protein, 10 aa, synthetic construct
QITRGDYTSM

SEQ ID NO: 89941 - protein, 10 aa, synthetic construct
QITRGDFQNT

SEQ ID NO: 89942 - protein, 10 aa, synthetic construct
QIYRGDYTSV

SEQ ID NO: 89943 - protein, 10 aa, synthetic construct
QINRGDYTSV

SEQ ID NO: 89944 - protein, 10 aa, synthetic construct
QIQRGDYNSL

SEQ ID NO: 89945 - protein, 10 aa, synthetic construct
QIQRGDYTSM

SEQ ID NO: 89946 - protein, 10 aa, synthetic construct
QIQRGDFQNT

SEQ ID NO: 89947 - protein, 10 aa, synthetic construct
QIDRGDYNSL

SEQ ID NO: 89948 - protein, 10 aa, synthetic construct
QIDRGDYTSM

SEQ ID NO: 89949 - protein, 10 aa, synthetic construct
DLERGDRGQI

SEQ ID NO: 89950 - protein, 10 aa, synthetic construct
QIDRGDFQNT

SEQ ID NO: 89951 - protein, 10 aa, synthetic construct
QIERGDYNSL

SEQ ID NO: 89952 - protein, 10 aa, synthetic construct
QIERGDYTSM

SEQ ID NO: 89953 - protein, 10 aa, synthetic construct
QIERGDFQNT

SEQ ID NO: 89954 - protein, 10 aa, synthetic construct
QMGRGDFNNT

SEQ ID NO: 89955 - protein, 10 aa, synthetic construct
QMGRGDFNNL

SEQ ID NO: 89956 - protein, 10 aa, synthetic construct
QMARGDFNNT

SEQ ID NO: 89957 - protein, 10 aa, synthetic construct
QMARGDFNNL

SEQ ID NO: 89958 - protein, 10 aa, synthetic construct
QMVRGDFNNT

SEQ ID NO: 89959 - protein, 10 aa, synthetic construct
QMVRGDFNNL

SEQ ID NO: 89960 - protein, 10 aa, synthetic construct
TFFRGDYTSM

SEQ ID NO: 89961 - protein, 10 aa, synthetic construct
DLERGDRQGI

SEQ ID NO: 89962 - protein, 10 aa, synthetic construct
QMPRGDFNNT

SEQ ID NO: 89963 - protein, 10 aa, synthetic construct
QMPRGDFNNL

SEQ ID NO: 89964 - protein, 10 aa, synthetic construct
QMLRGDFNNT

SEQ ID NO: 89965 - protein, 10 aa, synthetic construct
QMLRGDFNNL

SEQ ID NO: 89966 - protein, 10 aa, synthetic construct
QMIRGDHVNL

SEQ ID NO: 89967 - protein, 10 aa, synthetic construct
QMIRGDYNSL

SEQ ID NO: 89968 - protein, 10 aa, synthetic construct
QMIRGDYTSM

SEQ ID NO: 89969 - protein, 10 aa, synthetic construct
QMMRGDYNSL

SEQ ID NO: 89970 - protein, 10 aa, synthetic construct
QMMRGDYTSM

SEQ ID NO: 89971 - protein, 10 aa, synthetic construct
QMMRGDFQNT

SEQ ID NO: 89972 - protein, 10 aa, synthetic construct
DLERGDRSVV

SEQ ID NO: 89973 - protein, 10 aa, synthetic construct
QMWRGDFNNT

SEQ ID NO: 89974 - protein, 10 aa, synthetic construct
QMWRGDFNNL

SEQ ID NO: 89975 - protein, 10 aa, synthetic construct
QMFRGDHVNL

SEQ ID NO: 89976 - protein, 10 aa, synthetic construct
QMFRGDYNSL

SEQ ID NO: 89977 - protein, 10 aa, synthetic construct
QMFRGDYTSM

SEQ ID NO: 89978 - protein, 10 aa, synthetic construct
QMKRGDHVNL

SEQ ID NO: 89979 - protein, 10 aa, synthetic construct
QMKRGDYNSL

SEQ ID NO: 89980 - protein, 10 aa, synthetic construct
QMKRGDYTSM

SEQ ID NO: 89981 - protein, 10 aa, synthetic construct
QMRRGDFNNT

SEQ ID NO: 89982 - protein, 10 aa, synthetic construct
QMRRGDFNNL

SEQ ID NO: 89983 - protein, 10 aa, synthetic construct
DLERGDRGVV

SEQ ID NO: 89984 - protein, 10 aa, synthetic construct
QMHRGDFQNT

SEQ ID NO: 89985 - protein, 10 aa, synthetic construct
QMSRGDFNNT

SEQ ID NO: 89986 - protein, 10 aa, synthetic construct
QMSRGDFNNL

SEQ ID NO: 89987 - protein, 10 aa, synthetic construct
QMTRGDFQNT

SEQ ID NO: 89988 - protein, 10 aa, synthetic construct
QMYRGDHVNL

SEQ ID NO: 89989 - protein, 10 aa, synthetic construct
QMYRGDYNSL

SEQ ID NO: 89990 - protein, 10 aa, synthetic construct
QMYRGDYTSM

SEQ ID NO: 89991 - protein, 10 aa, synthetic construct
QMNRGDHVNL

SEQ ID NO: 89992 - protein, 10 aa, synthetic construct
QMNRGDYNSL

SEQ ID NO: 89993 - protein, 10 aa, synthetic construct
QMNRGDYTSM

SEQ ID NO: 89994 - protein, 10 aa, synthetic construct
DLERGDRSQT

SEQ ID NO: 89995 - protein, 10 aa, synthetic construct
QMQRGDFQNT

SEQ ID NO: 89996 - protein, 10 aa, synthetic construct
QMDRGDFQNT

SEQ ID NO: 89997 - protein, 10 aa, synthetic construct
QMERGDFQNT

SEQ ID NO: 89998 - protein, 10 aa, synthetic construct
QWIRGDFQNT

SEQ ID NO: 89999 - protein, 10 aa, synthetic construct
QWMRGDFNNT

SEQ ID NO: 90000 - protein, 10 aa, synthetic construct
QWMRGDFNNL

SEQ ID NO: 90001 - protein, 10 aa, synthetic construct
QWFRGDFQNT

SEQ ID NO: 90002 - protein, 10 aa, synthetic construct
QWKRGDFQNT

SEQ ID NO: 90003 - protein, 10 aa, synthetic construct
QWHRGDFNNT

SEQ ID NO: 90004 - protein, 10 aa, synthetic construct
QWHRGDFNNL

SEQ ID NO: 90005 - protein, 10 aa, synthetic construct
DMGRGDRGVV

SEQ ID NO: 90006 - protein, 10 aa, synthetic construct
QWTRGDFNNT

SEQ ID NO: 90007 - protein, 10 aa, synthetic construct
QWTRGDFNNL

SEQ ID NO: 90008 - protein, 10 aa, synthetic construct
QWYRGDFQNT

SEQ ID NO: 90009 - protein, 10 aa, synthetic construct
QWNRGDFQNT

SEQ ID NO: 90010 - protein, 10 aa, synthetic construct
QWQRGDFNNT

SEQ ID NO: 90011 - protein, 10 aa, synthetic construct
QWQRGDFNNL

SEQ ID NO: 90012 - protein, 10 aa, synthetic construct
QWDRGDFNNT

SEQ ID NO: 90013 - protein, 10 aa, synthetic construct
QWDRGDFNNL

SEQ ID NO: 90014 - protein, 10 aa, synthetic construct
QWERGDFNNT

SEQ ID NO: 90015 - protein, 10 aa, synthetic construct
QWERGDFNNL

SEQ ID NO: 90016 - protein, 10 aa, synthetic construct
DMARGDRGVV

SEQ ID NO: 90017 - protein, 10 aa, synthetic construct
QFGRGDFNNT

SEQ ID NO: 90018 - protein, 10 aa, synthetic construct
QFGRGDFNNL

SEQ ID NO: 90019 - protein, 10 aa, synthetic construct
QFARGDFNNT

SEQ ID NO: 90020 - protein, 10 aa, synthetic construct
QFARGDFNNL

SEQ ID NO: 90021 - protein, 10 aa, synthetic construct
QFVRGDYNSL

SEQ ID NO: 90022 - protein, 10 aa, synthetic construct
QFVRGDYTSM

SEQ ID NO: 90023 - protein, 10 aa, synthetic construct
QFVRGDFQNT

SEQ ID NO: 90024 - protein, 10 aa, synthetic construct
QFPRGDFNNT

SEQ ID NO: 90025 - protein, 10 aa, synthetic construct
QFPRGDFNNL

SEQ ID NO: 90026 - protein, 10 aa, synthetic construct
QFLRGDYNSL

SEQ ID NO: 90027 - protein, 10 aa, synthetic construct
DMVRGDRGVV

SEQ ID NO: 90028 - protein, 10 aa, synthetic construct
QFLRGDYTSM

SEQ ID NO: 90029 - protein, 10 aa, synthetic construct
QFLRGDFQNT

SEQ ID NO: 90030 - protein, 10 aa, synthetic construct
QFIRGDYTSV

SEQ ID NO: 90031 - protein, 10 aa, synthetic construct
QFMRGDYTSV

SEQ ID NO: 90032 - protein, 10 aa, synthetic construct
QFWRGDYNSL

SEQ ID NO: 90033 - protein, 10 aa, synthetic construct
QFWRGDYTSM

SEQ ID NO: 90034 - protein, 10 aa, synthetic construct
QFWRGDFQNT

SEQ ID NO: 90035 - protein, 10 aa, synthetic construct
QFKRGDYTSV

SEQ ID NO: 90036 - protein, 10 aa, synthetic construct
QFRRGDFNNT

SEQ ID NO: 90037 - protein, 10 aa, synthetic construct
QFRRGDFNNL

SEQ ID NO: 90038 - protein, 10 aa, synthetic construct
DMVRGDLTVT

SEQ ID NO: 90039 - protein, 10 aa, synthetic construct
QFHRGDYNSL

SEQ ID NO: 90040 - protein, 10 aa, synthetic construct
QFHRGDYTSM

SEQ ID NO: 90041 - protein, 10 aa, synthetic construct
QFHRGDFQNT

SEQ ID NO: 90042 - protein, 10 aa, synthetic construct
QFSRGDYNSL

SEQ ID NO: 90043 - protein, 10 aa, synthetic construct
QFSRGDYTSM

SEQ ID NO: 90044 - protein, 10 aa, synthetic construct
QFSRGDFQNT

SEQ ID NO: 90045 - protein, 10 aa, synthetic construct
QFTRGDYNSL

SEQ ID NO: 90046 - protein, 10 aa, synthetic construct
QFTRGDYTSM

SEQ ID NO: 90047 - protein, 10 aa, synthetic construct
QFTRGDFQNT

SEQ ID NO: 90048 - protein, 10 aa, synthetic construct
QFYRGDYTSV

SEQ ID NO: 90049 - protein, 10 aa, synthetic construct
DMVRGDLLLS

SEQ ID NO: 90050 - protein, 10 aa, synthetic construct
QFNRGDYTSV

SEQ ID NO: 90051 - protein, 10 aa, synthetic construct
QFQRGDYNSL

SEQ ID NO: 90052 - protein, 10 aa, synthetic construct
QFQRGDYTSM

SEQ ID NO: 90053 - protein, 10 aa, synthetic construct
QFQRGDFQNT

SEQ ID NO: 90054 - protein, 10 aa, synthetic construct
QFDRGDYNSL

SEQ ID NO: 90055 - protein, 10 aa, synthetic construct
QFDRGDYTSM

SEQ ID NO: 90056 - protein, 10 aa, synthetic construct
QFDRGDFQNT

SEQ ID NO: 90057 - protein, 10 aa, synthetic construct
QFERGDYNSL

SEQ ID NO: 90058 - protein, 10 aa, synthetic construct
QFERGDYTSM

SEQ ID NO: 90059 - protein, 10 aa, synthetic construct
QFERGDFQNT

SEQ ID NO: 90060 - protein, 10 aa, synthetic construct
DMPRGDRGVV

SEQ ID NO: 90061 - protein, 10 aa, synthetic construct
QKGRGDFNNT

SEQ ID NO: 90062 - protein, 10 aa, synthetic construct
QKGRGDFNNL

SEQ ID NO: 90063 - protein, 10 aa, synthetic construct
QKARGDFNNT

SEQ ID NO: 90064 - protein, 10 aa, synthetic construct
QKARGDFNNL

SEQ ID NO: 90065 - protein, 10 aa, synthetic construct
QKVRGDYNSL

SEQ ID NO: 90066 - protein, 10 aa, synthetic construct
QKVRGDYTSM

SEQ ID NO: 90067 - protein, 10 aa, synthetic construct
QKVRGDFQNT

SEQ ID NO: 90068 - protein, 10 aa, synthetic construct
QKPRGDFNNT

SEQ ID NO: 90069 - protein, 10 aa, synthetic construct
QKPRGDFNNL

SEQ ID NO: 90070 - protein, 10 aa, synthetic construct
QKLRGDYNSL

SEQ ID NO: 90071 - protein, 10 aa, synthetic construct
TFFRGDFQNT

SEQ ID NO: 90072 - protein, 10 aa, synthetic construct
DMLRGDRGVV

SEQ ID NO: 90073 - protein, 10 aa, synthetic construct
QKLRGDYTSM

SEQ ID NO: 90074 - protein, 10 aa, synthetic construct
QKLRGDFQNT

SEQ ID NO: 90075 - protein, 10 aa, synthetic construct
QKIRGDYTSV

SEQ ID NO: 90076 - protein, 10 aa, synthetic construct
QKMRGDYTSV

SEQ ID NO: 90077 - protein, 10 aa, synthetic construct
QKWRGDYNSL

SEQ ID NO: 90078 - protein, 10 aa, synthetic construct
QKWRGDYTSM

SEQ ID NO: 90079 - protein, 10 aa, synthetic construct
QKWRGDFQNT

SEQ ID NO: 90080 - protein, 10 aa, synthetic construct
QKFRGDYTSV

SEQ ID NO: 90081 - protein, 10 aa, synthetic construct
QKRRGDFNNT

SEQ ID NO: 90082 - protein, 10 aa, synthetic construct
QKRRGDFNNL

SEQ ID NO: 90083 - protein, 10 aa, synthetic construct
DMLRGDLTVT

SEQ ID NO: 90084 - protein, 10 aa, synthetic construct
QKHRGDYNSL

SEQ ID NO: 90085 - protein, 10 aa, synthetic construct
QKHRGDYTSM

SEQ ID NO: 90086 - protein, 10 aa, synthetic construct
QKHRGDFQNT

SEQ ID NO: 90087 - protein, 10 aa, synthetic construct
QKSRGDYNSL

SEQ ID NO: 90088 - protein, 10 aa, synthetic construct
QKSRGDYTSM

SEQ ID NO: 90089 - protein, 10 aa, synthetic construct
QKSRGDFQNT

SEQ ID NO: 90090 - protein, 10 aa, synthetic construct
QKTRGDYNSL

SEQ ID NO: 90091 - protein, 10 aa, synthetic construct
QKTRGDYTSM

SEQ ID NO: 90092 - protein, 10 aa, synthetic construct
QKTRGDFQNT

SEQ ID NO: 90093 - protein, 10 aa, synthetic construct
QKYRGDYTSV

SEQ ID NO: 90094 - protein, 10 aa, synthetic construct
DMLRGDLLLS

SEQ ID NO: 90095 - protein, 10 aa, synthetic construct
QKQRGDYNSL

SEQ ID NO: 90096 - protein, 10 aa, synthetic construct
QKQRGDYTSM

SEQ ID NO: 90097 - protein, 10 aa, synthetic construct
QKQRGDFQNT

SEQ ID NO: 90098 - protein, 10 aa, synthetic construct
QKDRGDYNSL

SEQ ID NO: 90099 - protein, 10 aa, synthetic construct
QKDRGDYTSM

SEQ ID NO: 90100 - protein, 10 aa, synthetic construct
QKDRGDFQNT

SEQ ID NO: 90101 - protein, 10 aa, synthetic construct
QKERGDYNSL

SEQ ID NO: 90102 - protein, 10 aa, synthetic construct
QKERGDYTSM

SEQ ID NO: 90103 - protein, 10 aa, synthetic construct
QKERGDFQNT

SEQ ID NO: 90104 - protein, 10 aa, synthetic construct
QRIRGDFNNT

SEQ ID NO: 90105 - protein, 10 aa, synthetic construct
DMRRGDRGVV

SEQ ID NO: 90106 - protein, 10 aa, synthetic construct
QRIRGDFNNL

SEQ ID NO: 90107 - protein, 10 aa, synthetic construct
QRMRGDFNNT

SEQ ID NO: 90108 - protein, 10 aa, synthetic construct
QRMRGDFNNL

SEQ ID NO: 90109 - protein, 10 aa, synthetic construct
QRFRGDFNNT

SEQ ID NO: 90110 - protein, 10 aa, synthetic construct
QRFRGDFNNL

SEQ ID NO: 90111 - protein, 10 aa, synthetic construct
QRKRGDFNNT

SEQ ID NO: 90112 - protein, 10 aa, synthetic construct
QRKRGDFNNL

SEQ ID NO: 90113 - protein, 10 aa, synthetic construct
QRYRGDFNNT

SEQ ID NO: 90114 - protein, 10 aa, synthetic construct
QRYRGDFNNL

SEQ ID NO: 90115 - protein, 10 aa, synthetic construct
QRNRGDFNNT

SEQ ID NO: 90116 - protein, 10 aa, synthetic construct
DMSRGDRGVV

SEQ ID NO: 90117 - protein, 10 aa, synthetic construct
QRNRGDFNNL

SEQ ID NO: 90118 - protein, 10 aa, synthetic construct
QHVRGDFNNT

SEQ ID NO: 90119 - protein, 10 aa, synthetic construct
QHVRGDFNNL

SEQ ID NO: 90120 - protein, 10 aa, synthetic construct
QHLRGDFNNT

SEQ ID NO: 90121 - protein, 10 aa, synthetic construct
QHLRGDFNNL

SEQ ID NO: 90122 - protein, 10 aa, synthetic construct
QHIRGDYNSL

SEQ ID NO: 90123 - protein, 10 aa, synthetic construct
QHIRGDYTSM

SEQ ID NO: 90124 - protein, 10 aa, synthetic construct
QHIRGDFQNT

SEQ ID NO: 90125 - protein, 10 aa, synthetic construct
QHMRGDYNSL

SEQ ID NO: 90126 - protein, 10 aa, synthetic construct
QHMRGDYTSM

SEQ ID NO: 90127 - protein, 10 aa, synthetic construct
DMSRGDLTVT

SEQ ID NO: 90128 - protein, 10 aa, synthetic construct
QHMRGDFQNT

SEQ ID NO: 90129 - protein, 10 aa, synthetic construct
QHWRGDFNNT

SEQ ID NO: 90130 - protein, 10 aa, synthetic construct
QHWRGDFNNL

SEQ ID NO: 90131 - protein, 10 aa, synthetic construct
QHFRGDYNSL

SEQ ID NO: 90132 - protein, 10 aa, synthetic construct
QHFRGDYTSM

SEQ ID NO: 90133 - protein, 10 aa, synthetic construct
QHFRGDFQNT

SEQ ID NO: 90134 - protein, 10 aa, synthetic construct
QHKRGDYNSL

SEQ ID NO: 90135 - protein, 10 aa, synthetic construct
QHKRGDYTSM

SEQ ID NO: 90136 - protein, 10 aa, synthetic construct
QHKRGDFQNT

SEQ ID NO: 90137 - protein, 10 aa, synthetic construct
QHHRGDFNNT

SEQ ID NO: 90138 - protein, 10 aa, synthetic construct
DMSRGDLLLS

SEQ ID NO: 90139 - protein, 10 aa, synthetic construct
QHHRGDFNNL

SEQ ID NO: 90140 - protein, 10 aa, synthetic construct
QHSRGDFNNT

SEQ ID NO: 90141 - protein, 10 aa, synthetic construct
QHSRGDFNNL

SEQ ID NO: 90142 - protein, 10 aa, synthetic construct
QHTRGDFNNT

SEQ ID NO: 90143 - protein, 10 aa, synthetic construct
QHTRGDFNNL

SEQ ID NO: 90144 - protein, 10 aa, synthetic construct
QHYRGDYNSL

SEQ ID NO: 90145 - protein, 10 aa, synthetic construct
QHYRGDYTSM

SEQ ID NO: 90146 - protein, 10 aa, synthetic construct
QHYRGDFQNT

SEQ ID NO: 90147 - protein, 10 aa, synthetic construct
QHNRGDYNSL

SEQ ID NO: 90148 - protein, 10 aa, synthetic construct
QHNRGDYTSM

SEQ ID NO: 90149 - protein, 10 aa, synthetic construct
DWGRGDHGVL

SEQ ID NO: 90150 - protein, 10 aa, synthetic construct
QHNRGDFQNT

SEQ ID NO: 90151 - protein, 10 aa, synthetic construct
QHQRGDFNNT

SEQ ID NO: 90152 - protein, 10 aa, synthetic construct
QHQRGDFNNL

SEQ ID NO: 90153 - protein, 10 aa, synthetic construct
QHDRGDFNNT

SEQ ID NO: 90154 - protein, 10 aa, synthetic construct
QHDRGDFNNL

SEQ ID NO: 90155 - protein, 10 aa, synthetic construct
QHERGDFNNT

SEQ ID NO: 90156 - protein, 10 aa, synthetic construct
QHERGDFNNL

SEQ ID NO: 90157 - protein, 10 aa, synthetic construct
QSIRGDFNNT

SEQ ID NO: 90158 - protein, 10 aa, synthetic construct
QSIRGDFNNL

SEQ ID NO: 90159 - protein, 10 aa, synthetic construct
QSMRGDFNNT

SEQ ID NO: 90160 - protein, 10 aa, synthetic construct
DWGRGDRGQI

SEQ ID NO: 90161 - protein, 10 aa, synthetic construct
QSMRGDFNNL

SEQ ID NO: 90162 - protein, 10 aa, synthetic construct
QSFRGDFNNT

SEQ ID NO: 90163 - protein, 10 aa, synthetic construct
QSFRGDFNNL

SEQ ID NO: 90164 - protein, 10 aa, synthetic construct
QSKRGDFNNT

SEQ ID NO: 90165 - protein, 10 aa, synthetic construct
QSKRGDFNNL

SEQ ID NO: 90166 - protein, 10 aa, synthetic construct
QSYRGDFNNT

SEQ ID NO: 90167 - protein, 10 aa, synthetic construct
QSYRGDFNNL

SEQ ID NO: 90168 - protein, 10 aa, synthetic construct
QSNRGDFNNT

SEQ ID NO: 90169 - protein, 10 aa, synthetic construct
QSNRGDFNNL

SEQ ID NO: 90170 - protein, 10 aa, synthetic construct
QTVRGDFNNT

SEQ ID NO: 90171 - protein, 10 aa, synthetic construct
DWGRGDRQGI

SEQ ID NO: 90172 - protein, 10 aa, synthetic construct
QTVRGDFNNL

SEQ ID NO: 90173 - protein, 10 aa, synthetic construct
QTLRGDFNNT

SEQ ID NO: 90174 - protein, 10 aa, synthetic construct
QTLRGDFNNL

SEQ ID NO: 90175 - protein, 10 aa, synthetic construct
QTIRGDYNSL

SEQ ID NO: 90176 - protein, 10 aa, synthetic construct
QTIRGDYTSM

SEQ ID NO: 90177 - protein, 10 aa, synthetic construct
QTIRGDFQNT

SEQ ID NO: 90178 - protein, 10 aa, synthetic construct
QTMRGDYNSL

SEQ ID NO: 90179 - protein, 10 aa, synthetic construct
QTMRGDYTSM

SEQ ID NO: 90180 - protein, 10 aa, synthetic construct
QTMRGDFQNT

SEQ ID NO: 90181 - protein, 10 aa, synthetic construct
QTWRGDFNNT

SEQ ID NO: 90182 - protein, 10 aa, synthetic construct
EFFRGDYNSL

SEQ ID NO: 90183 - protein, 10 aa, synthetic construct
DWGRGDRSVV

SEQ ID NO: 90184 - protein, 10 aa, synthetic construct
QTWRGDFNNL

SEQ ID NO: 90185 - protein, 10 aa, synthetic construct
QTFRGDYNSL

SEQ ID NO: 90186 - protein, 10 aa, synthetic construct
QTFRGDYTSM

SEQ ID NO: 90187 - protein, 10 aa, synthetic construct
QTFRGDFQNT

SEQ ID NO: 90188 - protein, 10 aa, synthetic construct
QTKRGDYNSL

SEQ ID NO: 90189 - protein, 10 aa, synthetic construct
QTKRGDYTSM

SEQ ID NO: 90190 - protein, 10 aa, synthetic construct
QTKRGDFQNT

SEQ ID NO: 90191 - protein, 10 aa, synthetic construct
QTHRGDFNNT

SEQ ID NO: 90192 - protein, 10 aa, synthetic construct
QTHRGDFNNL

SEQ ID NO: 90193 - protein, 10 aa, synthetic construct
QTSRGDFNNT

SEQ ID NO: 90194 - protein, 10 aa, synthetic construct
DWGRGDLTVT

SEQ ID NO: 90195 - protein, 10 aa, synthetic construct
QTSRGDFNNL

SEQ ID NO: 90196 - protein, 10 aa, synthetic construct
QTTRGDFNNT

SEQ ID NO: 90197 - protein, 10 aa, synthetic construct
QTTRGDFNNL

SEQ ID NO: 90198 - protein, 10 aa, synthetic construct
QTYRGDYNSL

SEQ ID NO: 90199 - protein, 10 aa, synthetic construct
QTYRGDYTSM

SEQ ID NO: 90200 - protein, 10 aa, synthetic construct
QTYRGDFQNT

SEQ ID NO: 90201 - protein, 10 aa, synthetic construct
QTNRGDYNSL

SEQ ID NO: 90202 - protein, 10 aa, synthetic construct
QTNRGDYTSM

SEQ ID NO: 90203 - protein, 10 aa, synthetic construct
QTNRGDFQNT

SEQ ID NO: 90204 - protein, 10 aa, synthetic construct
QTQRGDFNNT

SEQ ID NO: 90205 - protein, 10 aa, synthetic construct
DWGRGDLIGR

SEQ ID NO: 90206 - protein, 10 aa, synthetic construct
QTQRGDFNNL

SEQ ID NO: 90207 - protein, 10 aa, synthetic construct
QTDRGDFNNT

SEQ ID NO: 90208 - protein, 10 aa, synthetic construct
QTDRGDFNNL

SEQ ID NO: 90209 - protein, 10 aa, synthetic construct
QTERGDFNNT

SEQ ID NO: 90210 - protein, 10 aa, synthetic construct
QTERGDFNNL

SEQ ID NO: 90211 - protein, 10 aa, synthetic construct
QYGRGDFNNT

SEQ ID NO: 90212 - protein, 10 aa, synthetic construct
QYGRGDFNNL

SEQ ID NO: 90213 - protein, 10 aa, synthetic construct
QYARGDFNNT

SEQ ID NO: 90214 - protein, 10 aa, synthetic construct
QYARGDFNNL

SEQ ID NO: 90215 - protein, 10 aa, synthetic construct
QYVRGDYNSL

SEQ ID NO: 90216 - protein, 10 aa, synthetic construct
DWGRGDRSQT

SEQ ID NO: 90217 - protein, 10 aa, synthetic construct
QYVRGDYTSM

SEQ ID NO: 90218 - protein, 10 aa, synthetic construct
QYVRGDFQNT

SEQ ID NO: 90219 - protein, 10 aa, synthetic construct
QYPRGDFNNT

SEQ ID NO: 90220 - protein, 10 aa, synthetic construct
QYPRGDFNNL

SEQ ID NO: 90221 - protein, 10 aa, synthetic construct
QYLRGDYNSL

SEQ ID NO: 90222 - protein, 10 aa, synthetic construct
QYLRGDYTSM

SEQ ID NO: 90223 - protein, 10 aa, synthetic construct
QYLRGDFQNT

SEQ ID NO: 90224 - protein, 10 aa, synthetic construct
QYIRGDYTSV

SEQ ID NO: 90225 - protein, 10 aa, synthetic construct
QYMRGDYTSV

SEQ ID NO: 90226 - protein, 10 aa, synthetic construct
QYWRGDYNSL

SEQ ID NO: 90227 - protein, 10 aa, synthetic construct
DWGRGDLLLS

SEQ ID NO: 90228 - protein, 10 aa, synthetic construct
QYWRGDYTSM

SEQ ID NO: 90229 - protein, 10 aa, synthetic construct
QYWRGDFQNT

SEQ ID NO: 90230 - protein, 10 aa, synthetic construct
QYFRGDYTSV

SEQ ID NO: 90231 - protein, 10 aa, synthetic construct
QYKRGDYTSV

SEQ ID NO: 90232 - protein, 10 aa, synthetic construct
QYRRGDFNNT

SEQ ID NO: 90233 - protein, 10 aa, synthetic construct
QYRRGDFNNL

SEQ ID NO: 90234 - protein, 10 aa, synthetic construct
QYHRGDYNSL

SEQ ID NO: 90235 - protein, 10 aa, synthetic construct
QYHRGDYTSM

SEQ ID NO: 90236 - protein, 10 aa, synthetic construct
QYHRGDFQNT

SEQ ID NO: 90237 - protein, 10 aa, synthetic construct
QYSRGDYNSL

SEQ ID NO: 90238 - protein, 10 aa, synthetic construct
DWARGDHGVL

SEQ ID NO: 90239 - protein, 10 aa, synthetic construct
QYSRGDYTSM

SEQ ID NO: 90240 - protein, 10 aa, synthetic construct
QYSRGDFQNT

SEQ ID NO: 90241 - protein, 10 aa, synthetic construct
QYTRGDYNSL

SEQ ID NO: 90242 - protein, 10 aa, synthetic construct
QYTRGDYTSM

SEQ ID NO: 90243 - protein, 10 aa, synthetic construct
QYTRGDFQNT

SEQ ID NO: 90244 - protein, 10 aa, synthetic construct
QYYRGDYTSV

SEQ ID NO: 90245 - protein, 10 aa, synthetic construct
QYNRGDYTSV

SEQ ID NO: 90246 - protein, 10 aa, synthetic construct
QYQRGDYNSL

SEQ ID NO: 90247 - protein, 10 aa, synthetic construct
QYQRGDYTSM

SEQ ID NO: 90248 - protein, 10 aa, synthetic construct
QYQRGDFQNT

SEQ ID NO: 90249 - protein, 10 aa, synthetic construct
DWARGDRGQI

SEQ ID NO: 90250 - protein, 10 aa, synthetic construct
QYDRGDYNSL

SEQ ID NO: 90251 - protein, 10 aa, synthetic construct
QYDRGDYTSM

SEQ ID NO: 90252 - protein, 10 aa, synthetic construct
QYDRGDFQNT

SEQ ID NO: 90253 - protein, 10 aa, synthetic construct
QYERGDYNSL

SEQ ID NO: 90254 - protein, 10 aa, synthetic construct
QYERGDYTSM

SEQ ID NO: 90255 - protein, 10 aa, synthetic construct
QYERGDFQNT

SEQ ID NO: 90256 - protein, 10 aa, synthetic construct
QNGRGDFNNT

SEQ ID NO: 90257 - protein, 10 aa, synthetic construct
QNGRGDFNNL

SEQ ID NO: 90258 - protein, 10 aa, synthetic construct
QNARGDFNNT

SEQ ID NO: 90259 - protein, 10 aa, synthetic construct
QNARGDFNNL

SEQ ID NO: 90260 - protein, 10 aa, synthetic construct
DWARGDRQGI

SEQ ID NO: 90261 - protein, 10 aa, synthetic construct
QNVRGDYNSL

SEQ ID NO: 90262 - protein, 10 aa, synthetic construct
QNVRGDYTSM

SEQ ID NO: 90263 - protein, 10 aa, synthetic construct
QNVRGDFQNT

SEQ ID NO: 90264 - protein, 10 aa, synthetic construct
QNPRGDFNNT

SEQ ID NO: 90265 - protein, 10 aa, synthetic construct
QNPRGDFNNL

SEQ ID NO: 90266 - protein, 10 aa, synthetic construct
QNLRGDYNSL

SEQ ID NO: 90267 - protein, 10 aa, synthetic construct
QNLRGDYTSM

SEQ ID NO: 90268 - protein, 10 aa, synthetic construct
QNLRGDFQNT

SEQ ID NO: 90269 - protein, 10 aa, synthetic construct
QNIRGDYTSV

SEQ ID NO: 90270 - protein, 10 aa, synthetic construct
QNMRGDYTSV

SEQ ID NO: 90271 - protein, 10 aa, synthetic construct
DWARGDRSVV

SEQ ID NO: 90272 - protein, 10 aa, synthetic construct
QNWRGDYNSL

SEQ ID NO: 90273 - protein, 10 aa, synthetic construct
QNWRGDYTSM

SEQ ID NO: 90274 - protein, 10 aa, synthetic construct
QNWRGDFQNT

SEQ ID NO: 90275 - protein, 10 aa, synthetic construct
QNFRGDYTSV

SEQ ID NO: 90276 - protein, 10 aa, synthetic construct
QNKRGDYTSV

SEQ ID NO: 90277 - protein, 10 aa, synthetic construct
QNRRGDFNNT

SEQ ID NO: 90278 - protein, 10 aa, synthetic construct
QNRRGDFNNL

SEQ ID NO: 90279 - protein, 10 aa, synthetic construct
QNHRGDYNSL

SEQ ID NO: 90280 - protein, 10 aa, synthetic construct
QNHRGDYTSM

SEQ ID NO: 90281 - protein, 10 aa, synthetic construct
QNHRGDFQNT

SEQ ID NO: 90282 - protein, 10 aa, synthetic construct
DWARGDLTVT

SEQ ID NO: 90283 - protein, 10 aa, synthetic construct
QNSRGDYNSL

SEQ ID NO: 90284 - protein, 10 aa, synthetic construct
QNSRGDYTSM

SEQ ID NO: 90285 - protein, 10 aa, synthetic construct
QNSRGDFQNT

SEQ ID NO: 90286 - protein, 10 aa, synthetic construct
QNTRGDYNSL

SEQ ID NO: 90287 - protein, 10 aa, synthetic construct
QNTRGDYTSM

SEQ ID NO: 90288 - protein, 10 aa, synthetic construct
QNTRGDFQNT

SEQ ID NO: 90289 - protein, 10 aa, synthetic construct
QNYRGDYTSV

SEQ ID NO: 90290 - protein, 10 aa, synthetic construct
QNNRGDYTSV

SEQ ID NO: 90291 - protein, 10 aa, synthetic construct
QNQRGDYNSL

SEQ ID NO: 90292 - protein, 10 aa, synthetic construct
QNQRGDYTSM

SEQ ID NO: 90293 - protein, 10 aa, synthetic construct
EFFRGDYTSM

SEQ ID NO: 90294 - protein, 10 aa, synthetic construct
DWARGDLIGR

SEQ ID NO: 90295 - protein, 10 aa, synthetic construct
QNQRGDFQNT

SEQ ID NO: 90296 - protein, 10 aa, synthetic construct
QNDRGDYNSL

SEQ ID NO: 90297 - protein, 10 aa, synthetic construct
QNDRGDYTSM

SEQ ID NO: 90298 - protein, 10 aa, synthetic construct
QNDRGDFQNT

SEQ ID NO: 90299 - protein, 10 aa, synthetic construct
QNERGDYNSL

SEQ ID NO: 90300 - protein, 10 aa, synthetic construct
QNERGDYTSM

SEQ ID NO: 90301 - protein, 10 aa, synthetic construct
QNERGDFQNT

SEQ ID NO: 90302 - protein, 10 aa, synthetic construct
QQVRGDFNNT

SEQ ID NO: 90303 - protein, 10 aa, synthetic construct
QQVRGDFNNL

SEQ ID NO: 90304 - protein, 10 aa, synthetic construct
QQLRGDFNNT

SEQ ID NO: 90305 - protein, 10 aa, synthetic construct
DWARGDRSQT

SEQ ID NO: 90306 - protein, 10 aa, synthetic construct
QQLRGDFNNL

SEQ ID NO: 90307 - protein, 10 aa, synthetic construct
QQIRGDYNSL

SEQ ID NO: 90308 - protein, 10 aa, synthetic construct
QQIRGDYTSM

SEQ ID NO: 90309 - protein, 10 aa, synthetic construct
QQIRGDFQNT

SEQ ID NO: 90310 - protein, 10 aa, synthetic construct
QQMRGDYNSL

SEQ ID NO: 90311 - protein, 10 aa, synthetic construct
QQMRGDYTSM

SEQ ID NO: 90312 - protein, 10 aa, synthetic construct
QQMRGDFQNT

SEQ ID NO: 90313 - protein, 10 aa, synthetic construct
QQWRGDFNNT

SEQ ID NO: 90314 - protein, 10 aa, synthetic construct
QQWRGDFNNL

SEQ ID NO: 90315 - protein, 10 aa, synthetic construct
QQFRGDYNSL

SEQ ID NO: 90316 - protein, 10 aa, synthetic construct
DWARGDLLLS

SEQ ID NO: 90317 - protein, 10 aa, synthetic construct
QQFRGDYTSM

SEQ ID NO: 90318 - protein, 10 aa, synthetic construct
QQFRGDFQNT

SEQ ID NO: 90319 - protein, 10 aa, synthetic construct
QQKRGDYNSL

SEQ ID NO: 90320 - protein, 10 aa, synthetic construct
QQKRGDYTSM

SEQ ID NO: 90321 - protein, 10 aa, synthetic construct
QQKRGDFQNT

SEQ ID NO: 90322 - protein, 10 aa, synthetic construct
QQHRGDFNNT

SEQ ID NO: 90323 - protein, 10 aa, synthetic construct
QQHRGDFNNL

SEQ ID NO: 90324 - protein, 10 aa, synthetic construct
QQSRGDFNNT

SEQ ID NO: 90325 - protein, 10 aa, synthetic construct
QQSRGDFNNL

SEQ ID NO: 90326 - protein, 10 aa, synthetic construct
QQTRGDFNNT

SEQ ID NO: 90327 - protein, 10 aa, synthetic construct
DWVRGDHGVL

SEQ ID NO: 90328 - protein, 10 aa, synthetic construct
QQTRGDFNNL

SEQ ID NO: 90329 - protein, 10 aa, synthetic construct
QQYRGDYNSL

SEQ ID NO: 90330 - protein, 10 aa, synthetic construct
QQYRGDYTSM

SEQ ID NO: 90331 - protein, 10 aa, synthetic construct
QQYRGDFQNT

SEQ ID NO: 90332 - protein, 10 aa, synthetic construct
QQNRGDYNSL

SEQ ID NO: 90333 - protein, 10 aa, synthetic construct
QQNRGDYTSM

SEQ ID NO: 90334 - protein, 10 aa, synthetic construct
QQNRGDFQNT

SEQ ID NO: 90335 - protein, 10 aa, synthetic construct
QQQRGDFNNT

SEQ ID NO: 90336 - protein, 10 aa, synthetic construct
QQQRGDFNNL

SEQ ID NO: 90337 - protein, 10 aa, synthetic construct
QQDRGDFNNT

SEQ ID NO: 90338 - protein, 10 aa, synthetic construct
DWVRGDRGQI

SEQ ID NO: 90339 - protein, 10 aa, synthetic construct
QQDRGDFNNL

SEQ ID NO: 90340 - protein, 10 aa, synthetic construct
QQERGDFNNT

SEQ ID NO: 90341 - protein, 10 aa, synthetic construct
QQERGDFNNL

SEQ ID NO: 90342 - protein, 10 aa, synthetic construct
QDVRGDFNNT

SEQ ID NO: 90343 - protein, 10 aa, synthetic construct
QDVRGDFNNL

SEQ ID NO: 90344 - protein, 10 aa, synthetic construct
QDLRGDFNNT

SEQ ID NO: 90345 - protein, 10 aa, synthetic construct
QDLRGDFNNL

SEQ ID NO: 90346 - protein, 10 aa, synthetic construct
QDIRGDYNSL

SEQ ID NO: 90347 - protein, 10 aa, synthetic construct
QDIRGDYTSM

SEQ ID NO: 90348 - protein, 10 aa, synthetic construct
QDIRGDFQNT

SEQ ID NO: 90349 - protein, 10 aa, synthetic construct
DWVRGDRQGI

SEQ ID NO: 90350 - protein, 10 aa, synthetic construct
QDMRGDYNSL

SEQ ID NO: 90351 - protein, 10 aa, synthetic construct
QDMRGDYTSM

SEQ ID NO: 90352 - protein, 10 aa, synthetic construct
QDMRGDFQNT

SEQ ID NO: 90353 - protein, 10 aa, synthetic construct
QDWRGDFNNT

SEQ ID NO: 90354 - protein, 10 aa, synthetic construct
QDWRGDFNNL

SEQ ID NO: 90355 - protein, 10 aa, synthetic construct
QDFRGDYNSL

SEQ ID NO: 90356 - protein, 10 aa, synthetic construct
QDFRGDYTSM

SEQ ID NO: 90357 - protein, 10 aa, synthetic construct
QDFRGDFQNT

SEQ ID NO: 90358 - protein, 10 aa, synthetic construct
QDKRGDYNSL

SEQ ID NO: 90359 - protein, 10 aa, synthetic construct
QDKRGDYTSM

SEQ ID NO: 90360 - protein, 10 aa, synthetic construct
DWVRGDRSVV

SEQ ID NO: 90361 - protein, 10 aa, synthetic construct
QDKRGDFQNT

SEQ ID NO: 90362 - protein, 10 aa, synthetic construct
QDHRGDFNNT

SEQ ID NO: 90363 - protein, 10 aa, synthetic construct
QDHRGDFNNL

SEQ ID NO: 90364 - protein, 10 aa, synthetic construct
QDSRGDFNNT

SEQ ID NO: 90365 - protein, 10 aa, synthetic construct
QDSRGDFNNL

SEQ ID NO: 90366 - protein, 10 aa, synthetic construct
QDTRGDFNNT

SEQ ID NO: 90367 - protein, 10 aa, synthetic construct
QDTRGDFNNL

SEQ ID NO: 90368 - protein, 10 aa, synthetic construct
QDYRGDYNSL

SEQ ID NO: 90369 - protein, 10 aa, synthetic construct
QDYRGDYTSM

SEQ ID NO: 90370 - protein, 10 aa, synthetic construct
QDYRGDFQNT

SEQ ID NO: 90371 - protein, 10 aa, synthetic construct
DWVRGDLTVT

SEQ ID NO: 90372 - protein, 10 aa, synthetic construct
QDNRGDYNSL

SEQ ID NO: 90373 - protein, 10 aa, synthetic construct
QDNRGDYTSM

SEQ ID NO: 90374 - protein, 10 aa, synthetic construct
QDNRGDFQNT

SEQ ID NO: 90375 - protein, 10 aa, synthetic construct
QDQRGDFNNT

SEQ ID NO: 90376 - protein, 10 aa, synthetic construct
QDQRGDFNNL

SEQ ID NO: 90377 - protein, 10 aa, synthetic construct
QDDRGDFNNT

SEQ ID NO: 90378 - protein, 10 aa, synthetic construct
QDDRGDFNNL

SEQ ID NO: 90379 - protein, 10 aa, synthetic construct
QDERGDFNNT

SEQ ID NO: 90380 - protein, 10 aa, synthetic construct
QDERGDFNNL

SEQ ID NO: 90381 - protein, 10 aa, synthetic construct
QEVRGDFNNT

SEQ ID NO: 90382 - protein, 10 aa, synthetic construct
DWVRGDLIGR

SEQ ID NO: 90383 - protein, 10 aa, synthetic construct
QEVRGDFNNL

SEQ ID NO: 90384 - protein, 10 aa, synthetic construct
QELRGDFNNT

SEQ ID NO: 90385 - protein, 10 aa, synthetic construct
QELRGDFNNL

SEQ ID NO: 90386 - protein, 10 aa, synthetic construct
QEIRGDYNSL

SEQ ID NO: 90387 - protein, 10 aa, synthetic construct
QEIRGDYTSM

SEQ ID NO: 90388 - protein, 10 aa, synthetic construct
QEIRGDFQNT

SEQ ID NO: 90389 - protein, 10 aa, synthetic construct
QEMRGDYNSL

SEQ ID NO: 90390 - protein, 10 aa, synthetic construct
QEMRGDYTSM

SEQ ID NO: 90391 - protein, 10 aa, synthetic construct
QEMRGDFQNT

SEQ ID NO: 90392 - protein, 10 aa, synthetic construct
QEWRGDFNNT

SEQ ID NO: 90393 - protein, 10 aa, synthetic construct
DWVRGDRSQT

SEQ ID NO: 90394 - protein, 10 aa, synthetic construct
QEWRGDFNNL

SEQ ID NO: 90395 - protein, 10 aa, synthetic construct
QEFRGDYNSL

SEQ ID NO: 90396 - protein, 10 aa, synthetic construct
QEFRGDYTSM

SEQ ID NO: 90397 - protein, 10 aa, synthetic construct
QEFRGDFQNT

SEQ ID NO: 90398 - protein, 10 aa, synthetic construct
QEKRGDYNSL

SEQ ID NO: 90399 - protein, 10 aa, synthetic construct
QEKRGDYTSM

SEQ ID NO: 90400 - protein, 10 aa, synthetic construct
QEKRGDFQNT

SEQ ID NO: 90401 - protein, 10 aa, synthetic construct
QEHRGDFNNT

SEQ ID NO: 90402 - protein, 10 aa, synthetic construct
QEHRGDFNNL

SEQ ID NO: 90403 - protein, 10 aa, synthetic construct
QESRGDFNNT

SEQ ID NO: 90404 - protein, 10 aa, synthetic construct
EFFRGDFQNT

SEQ ID NO: 90405 - protein, 10 aa, synthetic construct
DWVRGDLLLS

SEQ ID NO: 90406 - protein, 10 aa, synthetic construct
QESRGDFNNL

SEQ ID NO: 90407 - protein, 10 aa, synthetic construct
QETRGDFNNT

SEQ ID NO: 90408 - protein, 10 aa, synthetic construct
QETRGDFNNL

SEQ ID NO: 90409 - protein, 10 aa, synthetic construct
QEYRGDYNSL

SEQ ID NO: 90410 - protein, 10 aa, synthetic construct
QEYRGDYTSM

SEQ ID NO: 90411 - protein, 10 aa, synthetic construct
QEYRGDFQNT

SEQ ID NO: 90412 - protein, 10 aa, synthetic construct
QENRGDYNSL

SEQ ID NO: 90413 - protein, 10 aa, synthetic construct
QENRGDYTSM

SEQ ID NO: 90414 - protein, 10 aa, synthetic construct
QENRGDFQNT

SEQ ID NO: 90415 - protein, 10 aa, synthetic construct
QEQRGDFNNT

SEQ ID NO: 90416 - protein, 10 aa, synthetic construct
DWPRGDHGVL

SEQ ID NO: 90417 - protein, 10 aa, synthetic construct
QEQRGDFNNL

SEQ ID NO: 90418 - protein, 10 aa, synthetic construct
QEDRGDFNNT

SEQ ID NO: 90419 - protein, 10 aa, synthetic construct
QEDRGDFNNL

SEQ ID NO: 90420 - protein, 10 aa, synthetic construct
QEERGDFNNT

SEQ ID NO: 90421 - protein, 10 aa, synthetic construct
QEERGDFNNL

SEQ ID NO: 90422 - protein, 10 aa, synthetic construct
SIVRGDFNNT

SEQ ID NO: 90423 - protein, 10 aa, synthetic construct
SIVRGDFNNL

SEQ ID NO: 90424 - protein, 10 aa, synthetic construct
SILRGDFNNT

SEQ ID NO: 90425 - protein, 10 aa, synthetic construct
SILRGDFNNL

SEQ ID NO: 90426 - protein, 10 aa, synthetic construct
SIIRGDYNSL

SEQ ID NO: 90427 - protein, 10 aa, synthetic construct
DWPRGDRGQI

SEQ ID NO: 90428 - protein, 10 aa, synthetic construct
SIIRGDYTSM

SEQ ID NO: 90429 - protein, 10 aa, synthetic construct
SIIRGDFQNT

SEQ ID NO: 90430 - protein, 10 aa, synthetic construct
SIMRGDYNSL

SEQ ID NO: 90431 - protein, 10 aa, synthetic construct
SIMRGDYTSM

SEQ ID NO: 90432 - protein, 10 aa, synthetic construct
SIMRGDFQNT

SEQ ID NO: 90433 - protein, 10 aa, synthetic construct
SIWRGDFNNT

SEQ ID NO: 90434 - protein, 10 aa, synthetic construct
SIWRGDFNNL

SEQ ID NO: 90435 - protein, 10 aa, synthetic construct
SIFRGDYNSL

SEQ ID NO: 90436 - protein, 10 aa, synthetic construct
SIFRGDYTSM

SEQ ID NO: 90437 - protein, 10 aa, synthetic construct
SIFRGDFQNT

SEQ ID NO: 90438 - protein, 10 aa, synthetic construct
DWPRGDRQGI

SEQ ID NO: 90439 - protein, 10 aa, synthetic construct
SIKRGDYNSL

SEQ ID NO: 90440 - protein, 10 aa, synthetic construct
SIKRGDYTSM

SEQ ID NO: 90441 - protein, 10 aa, synthetic construct
SIKRGDFQNT

SEQ ID NO: 90442 - protein, 10 aa, synthetic construct
SIHRGDFNNT

SEQ ID NO: 90443 - protein, 10 aa, synthetic construct
SIHRGDFNNL

SEQ ID NO: 90444 - protein, 10 aa, synthetic construct
SISRGDFNNT

SEQ ID NO: 90445 - protein, 10 aa, synthetic construct
SISRGDFNNL

SEQ ID NO: 90446 - protein, 10 aa, synthetic construct
SITRGDFNNT

SEQ ID NO: 90447 - protein, 10 aa, synthetic construct
SITRGDFNNL

SEQ ID NO: 90448 - protein, 10 aa, synthetic construct
SIYRGDYNSL

SEQ ID NO: 90449 - protein, 10 aa, synthetic construct
DWPRGDRSVV

SEQ ID NO: 90450 - protein, 10 aa, synthetic construct
SIYRGDYTSM

SEQ ID NO: 90451 - protein, 10 aa, synthetic construct
SIYRGDFQNT

SEQ ID NO: 90452 - protein, 10 aa, synthetic construct
SINRGDYNSL

SEQ ID NO: 90453 - protein, 10 aa, synthetic construct
SINRGDYTSM

SEQ ID NO: 90454 - protein, 10 aa, synthetic construct
SINRGDFQNT

SEQ ID NO: 90455 - protein, 10 aa, synthetic construct
SIQRGDFNNT

SEQ ID NO: 90456 - protein, 10 aa, synthetic construct
SIQRGDFNNL

SEQ ID NO: 90457 - protein, 10 aa, synthetic construct
SIDRGDFNNT

SEQ ID NO: 90458 - protein, 10 aa, synthetic construct
SIDRGDFNNL

SEQ ID NO: 90459 - protein, 10 aa, synthetic construct
SIERGDFNNT

SEQ ID NO: 90460 - protein, 10 aa, synthetic construct
DWPRGDLTVT

SEQ ID NO: 90461 - protein, 10 aa, synthetic construct
SIERGDFNNL

SEQ ID NO: 90462 - protein, 10 aa, synthetic construct
SMIRGDFQNT

SEQ ID NO: 90463 - protein, 10 aa, synthetic construct
SMMRGDFNNT

SEQ ID NO: 90464 - protein, 10 aa, synthetic construct
SMMRGDFNNL

SEQ ID NO: 90465 - protein, 10 aa, synthetic construct
SMFRGDFQNT

SEQ ID NO: 90466 - protein, 10 aa, synthetic construct
SMKRGDFQNT

SEQ ID NO: 90467 - protein, 10 aa, synthetic construct
SMHRGDFNNT

SEQ ID NO: 90468 - protein, 10 aa, synthetic construct
SMHRGDFNNL

SEQ ID NO: 90469 - protein, 10 aa, synthetic construct
SMTRGDFNNT

SEQ ID NO: 90470 - protein, 10 aa, synthetic construct
SMTRGDFNNL

SEQ ID NO: 90471 - protein, 10 aa, synthetic construct
DWPRGDLIGR

SEQ ID NO: 90472 - protein, 10 aa, synthetic construct
SMYRGDFQNT

SEQ ID NO: 90473 - protein, 10 aa, synthetic construct
SMNRGDFQNT

SEQ ID NO: 90474 - protein, 10 aa, synthetic construct
SMQRGDFNNT

SEQ ID NO: 90475 - protein, 10 aa, synthetic construct
SMQRGDFNNL

SEQ ID NO: 90476 - protein, 10 aa, synthetic construct
SMDRGDFNNT

SEQ ID NO: 90477 - protein, 10 aa, synthetic construct
SMDRGDFNNL

SEQ ID NO: 90478 - protein, 10 aa, synthetic construct
SMERGDFNNT

SEQ ID NO: 90479 - protein, 10 aa, synthetic construct
SMERGDFNNL

SEQ ID NO: 90480 - protein, 10 aa, synthetic construct
SWIRGDFNNT

SEQ ID NO: 90481 - protein, 10 aa, synthetic construct
SWIRGDFNNL

SEQ ID NO: 90482 - protein, 10 aa, synthetic construct
DWPRGDRSQT

SEQ ID NO: 90483 - protein, 10 aa, synthetic construct
SWFRGDFNNT

SEQ ID NO: 90484 - protein, 10 aa, synthetic construct
SWFRGDFNNL

SEQ ID NO: 90485 - protein, 10 aa, synthetic construct
SWKRGDFNNT

SEQ ID NO: 90486 - protein, 10 aa, synthetic construct
SWKRGDFNNL

SEQ ID NO: 90487 - protein, 10 aa, synthetic construct
SWYRGDFNNT

SEQ ID NO: 90488 - protein, 10 aa, synthetic construct
SWYRGDFNNL

SEQ ID NO: 90489 - protein, 10 aa, synthetic construct
SWNRGDFNNT

SEQ ID NO: 90490 - protein, 10 aa, synthetic construct
SWNRGDFNNL

SEQ ID NO: 90491 - protein, 10 aa, synthetic construct
SFVRGDFNNT

SEQ ID NO: 90492 - protein, 10 aa, synthetic construct
SFVRGDFNNL

SEQ ID NO: 90493 - protein, 10 aa, synthetic construct
DWPRGDLLLS

SEQ ID NO: 90494 - protein, 10 aa, synthetic construct
SFLRGDFNNT

SEQ ID NO: 90495 - protein, 10 aa, synthetic construct
SFLRGDFNNL

SEQ ID NO: 90496 - protein, 10 aa, synthetic construct
SFIRGDYNSL

SEQ ID NO: 90497 - protein, 10 aa, synthetic construct
SFIRGDYTSM

SEQ ID NO: 90498 - protein, 10 aa, synthetic construct
SFIRGDFQNT

SEQ ID NO: 90499 - protein, 10 aa, synthetic construct
SFMRGDYNSL

SEQ ID NO: 90500 - protein, 10 aa, synthetic construct
SFMRGDYTSM

SEQ ID NO: 90501 - protein, 10 aa, synthetic construct
SFMRGDFQNT

SEQ ID NO: 90502 - protein, 10 aa, synthetic construct
SFWRGDFNNT

SEQ ID NO: 90503 - protein, 10 aa, synthetic construct
SFWRGDFNNL

SEQ ID NO: 90504 - protein, 10 aa, synthetic construct
DWLRGDHGVL

SEQ ID NO: 90505 - protein, 10 aa, synthetic construct
SFKRGDYNSL

SEQ ID NO: 90506 - protein, 10 aa, synthetic construct
SFKRGDYTSM

SEQ ID NO: 90507 - protein, 10 aa, synthetic construct
SFKRGDFQNT

SEQ ID NO: 90508 - protein, 10 aa, synthetic construct
SFHRGDFNNT

SEQ ID NO: 90509 - protein, 10 aa, synthetic construct
SFHRGDFNNL

SEQ ID NO: 90510 - protein, 10 aa, synthetic construct
SFSRGDFNNT

SEQ ID NO: 90511 - protein, 10 aa, synthetic construct
SFSRGDFNNL

SEQ ID NO: 90512 - protein, 10 aa, synthetic construct
SFTRGDFNNT

SEQ ID NO: 90513 - protein, 10 aa, synthetic construct
SFTRGDFNNL

SEQ ID NO: 90514 - protein, 10 aa, synthetic construct
SFYRGDYNSL

SEQ ID NO: 90515 - protein, 10 aa, synthetic construct
NFFRGDYTSV

SEQ ID NO: 90516 - protein, 10 aa, synthetic construct
DWLRGDRGQI

SEQ ID NO: 90517 - protein, 10 aa, synthetic construct
SFYRGDYTSM

SEQ ID NO: 90518 - protein, 10 aa, synthetic construct
SFYRGDFQNT

SEQ ID NO: 90519 - protein, 10 aa, synthetic construct
SFNRGDYNSL

SEQ ID NO: 90520 - protein, 10 aa, synthetic construct
SFNRGDYTSM

SEQ ID NO: 90521 - protein, 10 aa, synthetic construct
SFNRGDFQNT

SEQ ID NO: 90522 - protein, 10 aa, synthetic construct
SFQRGDFNNT

SEQ ID NO: 90523 - protein, 10 aa, synthetic construct
SFQRGDFNNL

SEQ ID NO: 90524 - protein, 10 aa, synthetic construct
SFDRGDFNNT

SEQ ID NO: 90525 - protein, 10 aa, synthetic construct
SFDRGDFNNL

SEQ ID NO: 90526 - protein, 10 aa, synthetic construct
SFERGDFNNT

SEQ ID NO: 90527 - protein, 10 aa, synthetic construct
DWLRGDRQGI

SEQ ID NO: 90528 - protein, 10 aa, synthetic construct
SFERGDFNNL

SEQ ID NO: 90529 - protein, 10 aa, synthetic construct
SKVRGDFNNT

SEQ ID NO: 90530 - protein, 10 aa, synthetic construct
SKVRGDFNNL

SEQ ID NO: 90531 - protein, 10 aa, synthetic construct
SKLRGDFNNT

SEQ ID NO: 90532 - protein, 10 aa, synthetic construct
SKLRGDFNNL

SEQ ID NO: 90533 - protein, 10 aa, synthetic construct
SKIRGDYNSL

SEQ ID NO: 90534 - protein, 10 aa, synthetic construct
SKIRGDYTSM

SEQ ID NO: 90535 - protein, 10 aa, synthetic construct
SKIRGDFQNT

SEQ ID NO: 90536 - protein, 10 aa, synthetic construct
SKMRGDYNSL

SEQ ID NO: 90537 - protein, 10 aa, synthetic construct
SKMRGDYTSM

SEQ ID NO: 90538 - protein, 10 aa, synthetic construct
DWLRGDRSVV

SEQ ID NO: 90539 - protein, 10 aa, synthetic construct
SKMRGDFQNT

SEQ ID NO: 90540 - protein, 10 aa, synthetic construct
SKWRGDFNNT

SEQ ID NO: 90541 - protein, 10 aa, synthetic construct
SKWRGDFNNL

SEQ ID NO: 90542 - protein, 10 aa, synthetic construct
SKFRGDYNSL

SEQ ID NO: 90543 - protein, 10 aa, synthetic construct
SKFRGDYTSM

SEQ ID NO: 90544 - protein, 10 aa, synthetic construct
SKFRGDFQNT

SEQ ID NO: 90545 - protein, 10 aa, synthetic construct
SKHRGDFNNT

SEQ ID NO: 90546 - protein, 10 aa, synthetic construct
SKHRGDFNNL

SEQ ID NO: 90547 - protein, 10 aa, synthetic construct
SKSRGDFNNT

SEQ ID NO: 90548 - protein, 10 aa, synthetic construct
SKSRGDFNNL

SEQ ID NO: 90549 - protein, 10 aa, synthetic construct
DWLRGDLTVT

SEQ ID NO: 90550 - protein, 10 aa, synthetic construct
SKTRGDFNNT

SEQ ID NO: 90551 - protein, 10 aa, synthetic construct
SKTRGDFNNL

SEQ ID NO: 90552 - protein, 10 aa, synthetic construct
SKYRGDYNSL

SEQ ID NO: 90553 - protein, 10 aa, synthetic construct
SKYRGDYTSM

SEQ ID NO: 90554 - protein, 10 aa, synthetic construct
SKYRGDFQNT

SEQ ID NO: 90555 - protein, 10 aa, synthetic construct
SKQRGDFNNT

SEQ ID NO: 90556 - protein, 10 aa, synthetic construct
SKQRGDFNNL

SEQ ID NO: 90557 - protein, 10 aa, synthetic construct
SKDRGDFNNT

SEQ ID NO: 90558 - protein, 10 aa, synthetic construct
SKDRGDFNNL

SEQ ID NO: 90559 - protein, 10 aa, synthetic construct
SKERGDFNNT

SEQ ID NO: 90560 - protein, 10 aa, synthetic construct
DWLRGDLIGR

SEQ ID NO: 90561 - protein, 10 aa, synthetic construct
SKERGDFNNL

SEQ ID NO: 90562 - protein, 10 aa, synthetic construct
SHIRGDFNNT

SEQ ID NO: 90563 - protein, 10 aa, synthetic construct
SHIRGDFNNL

SEQ ID NO: 90564 - protein, 10 aa, synthetic construct
SHMRGDFNNT

SEQ ID NO: 90565 - protein, 10 aa, synthetic construct
SHMRGDFNNL

SEQ ID NO: 90566 - protein, 10 aa, synthetic construct
SHFRGDFNNT

SEQ ID NO: 90567 - protein, 10 aa, synthetic construct
SHFRGDFNNL

SEQ ID NO: 90568 - protein, 10 aa, synthetic construct
SHKRGDFNNT

SEQ ID NO: 90569 - protein, 10 aa, synthetic construct
SHKRGDFNNL

SEQ ID NO: 90570 - protein, 10 aa, synthetic construct
SHYRGDFNNT

SEQ ID NO: 90571 - protein, 10 aa, synthetic construct
DWLRGDRSQT

SEQ ID NO: 90572 - protein, 10 aa, synthetic construct
SHYRGDFNNL

SEQ ID NO: 90573 - protein, 10 aa, synthetic construct
SHNRGDFNNT

SEQ ID NO: 90574 - protein, 10 aa, synthetic construct
SHNRGDFNNL

SEQ ID NO: 90575 - protein, 10 aa, synthetic construct
STIRGDFNNT

SEQ ID NO: 90576 - protein, 10 aa, synthetic construct
STIRGDFNNL

SEQ ID NO: 90577 - protein, 10 aa, synthetic construct
STMRGDFNNT

SEQ ID NO: 90578 - protein, 10 aa, synthetic construct
STMRGDFNNL

SEQ ID NO: 90579 - protein, 10 aa, synthetic construct
STFRGDFNNT

SEQ ID NO: 90580 - protein, 10 aa, synthetic construct
STFRGDFNNL

SEQ ID NO: 90581 - protein, 10 aa, synthetic construct
STKRGDFNNT

SEQ ID NO: 90582 - protein, 10 aa, synthetic construct
DWLRGDLLLS

SEQ ID NO: 90583 - protein, 10 aa, synthetic construct
STKRGDFNNL

SEQ ID NO: 90584 - protein, 10 aa, synthetic construct
STYRGDFNNT

SEQ ID NO: 90585 - protein, 10 aa, synthetic construct
STYRGDFNNL

SEQ ID NO: 90586 - protein, 10 aa, synthetic construct
STNRGDFNNT

SEQ ID NO: 90587 - protein, 10 aa, synthetic construct
STNRGDFNNL

SEQ ID NO: 90588 - protein, 10 aa, synthetic construct
SYVRGDFNNT

SEQ ID NO: 90589 - protein, 10 aa, synthetic construct
SYVRGDFNNL

SEQ ID NO: 90590 - protein, 10 aa, synthetic construct
SYLRGDFNNT

SEQ ID NO: 90591 - protein, 10 aa, synthetic construct
SYLRGDFNNL

SEQ ID NO: 90592 - protein, 10 aa, synthetic construct
SYIRGDYNSL

SEQ ID NO: 90593 - protein, 10 aa, synthetic construct
DWWRGDRGQI

SEQ ID NO: 90594 - protein, 10 aa, synthetic construct
SYIRGDYTSM

SEQ ID NO: 90595 - protein, 10 aa, synthetic construct
SYIRGDFQNT

SEQ ID NO: 90596 - protein, 10 aa, synthetic construct
SYMRGDYNSL

SEQ ID NO: 90597 - protein, 10 aa, synthetic construct
SYMRGDYTSM

SEQ ID NO: 90598 - protein, 10 aa, synthetic construct
SYMRGDFQNT

SEQ ID NO: 90599 - protein, 10 aa, synthetic construct
SYWRGDFNNT

SEQ ID NO: 90600 - protein, 10 aa, synthetic construct
SYWRGDFNNL

SEQ ID NO: 90601 - protein, 10 aa, synthetic construct
SYFRGDYNSL

SEQ ID NO: 90602 - protein, 10 aa, synthetic construct
SYFRGDYTSM

SEQ ID NO: 90603 - protein, 10 aa, synthetic construct
SYFRGDFQNT

SEQ ID NO: 90604 - protein, 10 aa, synthetic construct
DWWRGDRQGI

SEQ ID NO: 90605 - protein, 10 aa, synthetic construct
SYKRGDYNSL

SEQ ID NO: 90606 - protein, 10 aa, synthetic construct
SYKRGDYTSM

SEQ ID NO: 90607 - protein, 10 aa, synthetic construct
SYKRGDFQNT

SEQ ID NO: 90608 - protein, 10 aa, synthetic construct
SYHRGDFNNT

SEQ ID NO: 90609 - protein, 10 aa, synthetic construct
SYHRGDFNNL

SEQ ID NO: 90610 - protein, 10 aa, synthetic construct
SYSRGDFNNT

SEQ ID NO: 90611 - protein, 10 aa, synthetic construct
SYSRGDFNNL

SEQ ID NO: 90612 - protein, 10 aa, synthetic construct
SYTRGDFNNT

SEQ ID NO: 90613 - protein, 10 aa, synthetic construct
SYTRGDFNNL

SEQ ID NO: 90614 - protein, 10 aa, synthetic construct
SYYRGDYNSL

SEQ ID NO: 90615 - protein, 10 aa, synthetic construct
DWWRGDRSVV

SEQ ID NO: 90616 - protein, 10 aa, synthetic construct
SYYRGDYTSM

SEQ ID NO: 90617 - protein, 10 aa, synthetic construct
SYYRGDFQNT

SEQ ID NO: 90618 - protein, 10 aa, synthetic construct
SYNRGDYNSL

SEQ ID NO: 90619 - protein, 10 aa, synthetic construct
SYNRGDYTSM

SEQ ID NO: 90620 - protein, 10 aa, synthetic construct
SYNRGDFQNT

SEQ ID NO: 90621 - protein, 10 aa, synthetic construct
SYQRGDFNNT

SEQ ID NO: 90622 - protein, 10 aa, synthetic construct
SYQRGDFNNL

SEQ ID NO: 90623 - protein, 10 aa, synthetic construct
SYDRGDFNNT

SEQ ID NO: 90624 - protein, 10 aa, synthetic construct
SYDRGDFNNL

SEQ ID NO: 90625 - protein, 10 aa, synthetic construct
SYERGDFNNT

SEQ ID NO: 90626 - protein, 10 aa, synthetic construct
TKNRGDRGVV

SEQ ID NO: 90627 - protein, 10 aa, synthetic construct
DFFRGDYNSL

SEQ ID NO: 90628 - protein, 10 aa, synthetic construct
DWWRGDRGVV

SEQ ID NO: 90629 - protein, 10 aa, synthetic construct
SYERGDFNNL

SEQ ID NO: 90630 - protein, 10 aa, synthetic construct
SNVRGDFNNT

SEQ ID NO: 90631 - protein, 10 aa, synthetic construct
SNVRGDFNNL

SEQ ID NO: 90632 - protein, 10 aa, synthetic construct
SNLRGDFNNT

SEQ ID NO: 90633 - protein, 10 aa, synthetic construct
SNLRGDFNNL

SEQ ID NO: 90634 - protein, 10 aa, synthetic construct
SNIRGDYNSL

SEQ ID NO: 90635 - protein, 10 aa, synthetic construct
SNIRGDYTSM

SEQ ID NO: 90636 - protein, 10 aa, synthetic construct
SNIRGDFQNT

SEQ ID NO: 90637 - protein, 10 aa, synthetic construct
SNMRGDYNSL

SEQ ID NO: 90638 - protein, 10 aa, synthetic construct
SNMRGDYTSM

SEQ ID NO: 90639 - protein, 10 aa, synthetic construct
DWWRGDRSQT

SEQ ID NO: 90640 - protein, 10 aa, synthetic construct
SNMRGDFQNT

SEQ ID NO: 90641 - protein, 10 aa, synthetic construct
SNWRGDFNNT

SEQ ID NO: 90642 - protein, 10 aa, synthetic construct
SNWRGDFNNL

SEQ ID NO: 90643 - protein, 10 aa, synthetic construct
SNFRGDYNSL

SEQ ID NO: 90644 - protein, 10 aa, synthetic construct
SNFRGDYTSM

SEQ ID NO: 90645 - protein, 10 aa, synthetic construct
SNFRGDFQNT

SEQ ID NO: 90646 - protein, 10 aa, synthetic construct
SNKRGDYNSL

SEQ ID NO: 90647 - protein, 10 aa, synthetic construct
SNKRGDYTSM

SEQ ID NO: 90648 - protein, 10 aa, synthetic construct
SNKRGDFQNT

SEQ ID NO: 90649 - protein, 10 aa, synthetic construct
SNHRGDFNNT

SEQ ID NO: 90650 - protein, 10 aa, synthetic construct
DWRRGDHGVL

SEQ ID NO: 90651 - protein, 10 aa, synthetic construct
SNHRGDFNNL

SEQ ID NO: 90652 - protein, 10 aa, synthetic construct
SNSRGDFNNT

SEQ ID NO: 90653 - protein, 10 aa, synthetic construct
SNSRGDFNNL

SEQ ID NO: 90654 - protein, 10 aa, synthetic construct
SNTRGDFNNT

SEQ ID NO: 90655 - protein, 10 aa, synthetic construct
SNTRGDFNNL

SEQ ID NO: 90656 - protein, 10 aa, synthetic construct
SNYRGDYNSL

SEQ ID NO: 90657 - protein, 10 aa, synthetic construct
SNYRGDYTSM

SEQ ID NO: 90658 - protein, 10 aa, synthetic construct
SNYRGDFQNT

SEQ ID NO: 90659 - protein, 10 aa, synthetic construct
SNNRGDYNSL

SEQ ID NO: 90660 - protein, 10 aa, synthetic construct
SNNRGDYTSM

SEQ ID NO: 90661 - protein, 10 aa, synthetic construct
DWRRGDRGQI

SEQ ID NO: 90662 - protein, 10 aa, synthetic construct
SNNRGDFQNT

SEQ ID NO: 90663 - protein, 10 aa, synthetic construct
SNQRGDFNNT

SEQ ID NO: 90664 - protein, 10 aa, synthetic construct
SNQRGDFNNL

SEQ ID NO: 90665 - protein, 10 aa, synthetic construct
SNDRGDFNNT

SEQ ID NO: 90666 - protein, 10 aa, synthetic construct
SNDRGDFNNL

SEQ ID NO: 90667 - protein, 10 aa, synthetic construct
SNERGDFNNT

SEQ ID NO: 90668 - protein, 10 aa, synthetic construct
SNERGDFNNL

SEQ ID NO: 90669 - protein, 10 aa, synthetic construct
SQIRGDFNNT

SEQ ID NO: 90670 - protein, 10 aa, synthetic construct
SQIRGDFNNL

SEQ ID NO: 90671 - protein, 10 aa, synthetic construct
SQMRGDFNNT

SEQ ID NO: 90672 - protein, 10 aa, synthetic construct
DWRRGDRQGI

SEQ ID NO: 90673 - protein, 10 aa, synthetic construct
SQMRGDFNNL

SEQ ID NO: 90674 - protein, 10 aa, synthetic construct
SQFRGDFNNT

SEQ ID NO: 90675 - protein, 10 aa, synthetic construct
SQFRGDFNNL

SEQ ID NO: 90676 - protein, 10 aa, synthetic construct
SQKRGDFNNT

SEQ ID NO: 90677 - protein, 10 aa, synthetic construct
SQKRGDFNNL

SEQ ID NO: 90678 - protein, 10 aa, synthetic construct
SQYRGDFNNT

SEQ ID NO: 90679 - protein, 10 aa, synthetic construct
SQYRGDFNNL

SEQ ID NO: 90680 - protein, 10 aa, synthetic construct
SQNRGDFNNT

SEQ ID NO: 90681 - protein, 10 aa, synthetic construct
SQNRGDFNNL

SEQ ID NO: 90682 - protein, 10 aa, synthetic construct
SDIRGDFNNT

SEQ ID NO: 90683 - protein, 10 aa, synthetic construct
DWRRGDRSVV

SEQ ID NO: 90684 - protein, 10 aa, synthetic construct
SDIRGDFNNL

SEQ ID NO: 90685 - protein, 10 aa, synthetic construct
SDMRGDFNNT

SEQ ID NO: 90686 - protein, 10 aa, synthetic construct
SDMRGDFNNL

SEQ ID NO: 90687 - protein, 10 aa, synthetic construct
SDFRGDFNNT

SEQ ID NO: 90688 - protein, 10 aa, synthetic construct
SDFRGDFNNL

SEQ ID NO: 90689 - protein, 10 aa, synthetic construct
SDKRGDFNNT

SEQ ID NO: 90690 - protein, 10 aa, synthetic construct
SDKRGDFNNL

SEQ ID NO: 90691 - protein, 10 aa, synthetic construct
SDYRGDFNNT

SEQ ID NO: 90692 - protein, 10 aa, synthetic construct
SDYRGDFNNL

SEQ ID NO: 90693 - protein, 10 aa, synthetic construct
SDNRGDFNNT

SEQ ID NO: 90694 - protein, 10 aa, synthetic construct
DWRRGDLTVT

SEQ ID NO: 90695 - protein, 10 aa, synthetic construct
SDNRGDFNNL

SEQ ID NO: 90696 - protein, 10 aa, synthetic construct
SEIRGDFNNT

SEQ ID NO: 90697 - protein, 10 aa, synthetic construct
SEIRGDFNNL

SEQ ID NO: 90698 - protein, 10 aa, synthetic construct
SEMRGDFNNT

SEQ ID NO: 90699 - protein, 10 aa, synthetic construct
SEMRGDFNNL

SEQ ID NO: 90700 - protein, 10 aa, synthetic construct
SEFRGDFNNT

SEQ ID NO: 90701 - protein, 10 aa, synthetic construct
SEFRGDFNNL

SEQ ID NO: 90702 - protein, 10 aa, synthetic construct
SEKRGDFNNT

SEQ ID NO: 90703 - protein, 10 aa, synthetic construct
SEKRGDFNNL

SEQ ID NO: 90704 - protein, 10 aa, synthetic construct
SEYRGDFNNT

SEQ ID NO: 90705 - protein, 10 aa, synthetic construct
DWRRGDLIGR

SEQ ID NO: 90706 - protein, 10 aa, synthetic construct
SEYRGDFNNL

SEQ ID NO: 90707 - protein, 10 aa, synthetic construct
SENRGDFNNT

SEQ ID NO: 90708 - protein, 10 aa, synthetic construct
SENRGDFNNL

SEQ ID NO: 90709 - protein, 10 aa, synthetic construct
TIVRGDFNNT

SEQ ID NO: 90710 - protein, 10 aa, synthetic construct
TIVRGDFNNL

SEQ ID NO: 90711 - protein, 10 aa, synthetic construct
TILRGDFNNT

SEQ ID NO: 90712 - protein, 10 aa, synthetic construct
TILRGDFNNL

SEQ ID NO: 90713 - protein, 10 aa, synthetic construct
TIIRGDYNSL

SEQ ID NO: 90714 - protein, 10 aa, synthetic construct
TIIRGDYTSM

SEQ ID NO: 90715 - protein, 10 aa, synthetic construct
TIIRGDFQNT

SEQ ID NO: 90716 - protein, 10 aa, synthetic construct
DWRRGDRSQT

SEQ ID NO: 90717 - protein, 10 aa, synthetic construct
TIMRGDYNSL

SEQ ID NO: 90718 - protein, 10 aa, synthetic construct
TIMRGDYTSM

SEQ ID NO: 90719 - protein, 10 aa, synthetic construct
TIMRGDFQNT

SEQ ID NO: 90720 - protein, 10 aa, synthetic construct
TIWRGDFNNT

SEQ ID NO: 90721 - protein, 10 aa, synthetic construct
TIWRGDFNNL

SEQ ID NO: 90722 - protein, 10 aa, synthetic construct
TIFRGDYNSL

SEQ ID NO: 90723 - protein, 10 aa, synthetic construct
TIFRGDYTSM

SEQ ID NO: 90724 - protein, 10 aa, synthetic construct
TIFRGDFQNT

SEQ ID NO: 90725 - protein, 10 aa, synthetic construct
TIKRGDYNSL

SEQ ID NO: 90726 - protein, 10 aa, synthetic construct
TIKRGDYTSM

SEQ ID NO: 90727 - protein, 10 aa, synthetic construct
DWRRGDLLLS

SEQ ID NO: 90728 - protein, 10 aa, synthetic construct
TIKRGDFQNT

SEQ ID NO: 90729 - protein, 10 aa, synthetic construct
TIHRGDFNNT

SEQ ID NO: 90730 - protein, 10 aa, synthetic construct
TIHRGDFNNL

SEQ ID NO: 90731 - protein, 10 aa, synthetic construct
TISRGDFNNT

SEQ ID NO: 90732 - protein, 10 aa, synthetic construct
TISRGDFNNL

SEQ ID NO: 90733 - protein, 10 aa, synthetic construct
TITRGDFNNT

SEQ ID NO: 90734 - protein, 10 aa, synthetic construct
TITRGDFNNL

SEQ ID NO: 90735 - protein, 10 aa, synthetic construct
TIYRGDYNSL

SEQ ID NO: 90736 - protein, 10 aa, synthetic construct
TIYRGDYTSM

SEQ ID NO: 90737 - protein, 10 aa, synthetic construct
TIYRGDFQNT

SEQ ID NO: 90738 - protein, 10 aa, synthetic construct
DFFRGDYTSM

SEQ ID NO: 90739 - protein, 10 aa, synthetic construct
DWHRGDRGVV

SEQ ID NO: 90740 - protein, 10 aa, synthetic construct
TINRGDYNSL

SEQ ID NO: 90741 - protein, 10 aa, synthetic construct
TINRGDYTSM

SEQ ID NO: 90742 - protein, 10 aa, synthetic construct
TINRGDFQNT

SEQ ID NO: 90743 - protein, 10 aa, synthetic construct
TIQRGDFNNT

SEQ ID NO: 90744 - protein, 10 aa, synthetic construct
TIQRGDFNNL

SEQ ID NO: 90745 - protein, 10 aa, synthetic construct
TIDRGDFNNT

SEQ ID NO: 90746 - protein, 10 aa, synthetic construct
TIDRGDFNNL

SEQ ID NO: 90747 - protein, 10 aa, synthetic construct
TIERGDFNNT

SEQ ID NO: 90748 - protein, 10 aa, synthetic construct
TIERGDFNNL

SEQ ID NO: 90749 - protein, 10 aa, synthetic construct
TMIRGDFQNT

SEQ ID NO: 90750 - protein, 10 aa, synthetic construct
DWSRGDHGVL

SEQ ID NO: 90751 - protein, 10 aa, synthetic construct
TMMRGDFNNT

SEQ ID NO: 90752 - protein, 10 aa, synthetic construct
TMMRGDFNNL

SEQ ID NO: 90753 - protein, 10 aa, synthetic construct
TMFRGDFQNT

SEQ ID NO: 90754 - protein, 10 aa, synthetic construct
TMKRGDFQNT

SEQ ID NO: 90755 - protein, 10 aa, synthetic construct
TMHRGDFNNT

SEQ ID NO: 90756 - protein, 10 aa, synthetic construct
TMHRGDFNNL

SEQ ID NO: 90757 - protein, 10 aa, synthetic construct
TMTRGDFNNT

SEQ ID NO: 90758 - protein, 10 aa, synthetic construct
TMTRGDFNNL

SEQ ID NO: 90759 - protein, 10 aa, synthetic construct
TMYRGDFQNT

SEQ ID NO: 90760 - protein, 10 aa, synthetic construct
TMNRGDFQNT

SEQ ID NO: 90761 - protein, 10 aa, synthetic construct
DWSRGDRGQI

SEQ ID NO: 90762 - protein, 10 aa, synthetic construct
TMQRGDFNNT

SEQ ID NO: 90763 - protein, 10 aa, synthetic construct
TMQRGDFNNL

SEQ ID NO: 90764 - protein, 10 aa, synthetic construct
TMDRGDFNNT

SEQ ID NO: 90765 - protein, 10 aa, synthetic construct
TMDRGDFNNL

SEQ ID NO: 90766 - protein, 10 aa, synthetic construct
TMERGDFNNT

SEQ ID NO: 90767 - protein, 10 aa, synthetic construct
TMERGDFNNL

SEQ ID NO: 90768 - protein, 10 aa, synthetic construct
TWIRGDFNNT

SEQ ID NO: 90769 - protein, 10 aa, synthetic construct
TWIRGDFNNL

SEQ ID NO: 90770 - protein, 10 aa, synthetic construct
TWFRGDFNNT

SEQ ID NO: 90771 - protein, 10 aa, synthetic construct
TWFRGDFNNL

SEQ ID NO: 90772 - protein, 10 aa, synthetic construct
DWSRGDRQGI

SEQ ID NO: 90773 - protein, 10 aa, synthetic construct
TWKRGDFNNT

SEQ ID NO: 90774 - protein, 10 aa, synthetic construct
TWKRGDFNNL

SEQ ID NO: 90775 - protein, 10 aa, synthetic construct
TWYRGDFNNT

SEQ ID NO: 90776 - protein, 10 aa, synthetic construct
TWYRGDFNNL

SEQ ID NO: 90777 - protein, 10 aa, synthetic construct
TWNRGDFNNT

SEQ ID NO: 90778 - protein, 10 aa, synthetic construct
TWNRGDFNNL

SEQ ID NO: 90779 - protein, 10 aa, synthetic construct
TFVRGDFNNT

SEQ ID NO: 90780 - protein, 10 aa, synthetic construct
TFVRGDFNNL

SEQ ID NO: 90781 - protein, 10 aa, synthetic construct
TFLRGDFNNT

SEQ ID NO: 90782 - protein, 10 aa, synthetic construct
TFLRGDFNNL

SEQ ID NO: 90783 - protein, 10 aa, synthetic construct
DWSRGDRSVV

SEQ ID NO: 90784 - protein, 10 aa, synthetic construct
TFIRGDYNSL

SEQ ID NO: 90785 - protein, 10 aa, synthetic construct
TFIRGDYTSM

SEQ ID NO: 90786 - protein, 10 aa, synthetic construct
TFIRGDFQNT

SEQ ID NO: 90787 - protein, 10 aa, synthetic construct
TFMRGDYNSL

SEQ ID NO: 90788 - protein, 10 aa, synthetic construct
TFMRGDYTSM

SEQ ID NO: 90789 - protein, 10 aa, synthetic construct
TFMRGDFQNT

SEQ ID NO: 90790 - protein, 10 aa, synthetic construct
TFWRGDFNNT

SEQ ID NO: 90791 - protein, 10 aa, synthetic construct
TFWRGDFNNL

SEQ ID NO: 90792 - protein, 10 aa, synthetic construct
TFKRGDYNSL

SEQ ID NO: 90793 - protein, 10 aa, synthetic construct
TFKRGDYTSM

SEQ ID NO: 90794 - protein, 10 aa, synthetic construct
DWSRGDLTVT

SEQ ID NO: 90795 - protein, 10 aa, synthetic construct
TFKRGDFQNT

SEQ ID NO: 90796 - protein, 10 aa, synthetic construct
TFHRGDFNNT

SEQ ID NO: 90797 - protein, 10 aa, synthetic construct
TFHRGDFNNL

SEQ ID NO: 90798 - protein, 10 aa, synthetic construct
TFSRGDFNNT

SEQ ID NO: 90799 - protein, 10 aa, synthetic construct
TFSRGDFNNL

SEQ ID NO: 90800 - protein, 10 aa, synthetic construct
TFTRGDFNNT

SEQ ID NO: 90801 - protein, 10 aa, synthetic construct
TFTRGDFNNL

SEQ ID NO: 90802 - protein, 10 aa, synthetic construct
TFYRGDYNSL

SEQ ID NO: 90803 - protein, 10 aa, synthetic construct
TFYRGDYTSM

SEQ ID NO: 90804 - protein, 10 aa, synthetic construct
TFYRGDFQNT

SEQ ID NO: 90805 - protein, 10 aa, synthetic construct
DWSRGDLIGR

SEQ ID NO: 90806 - protein, 10 aa, synthetic construct
TFNRGDYNSL

SEQ ID NO: 90807 - protein, 10 aa, synthetic construct
TFNRGDYTSM

SEQ ID NO: 90808 - protein, 10 aa, synthetic construct
TFNRGDFQNT

SEQ ID NO: 90809 - protein, 10 aa, synthetic construct
TFQRGDFNNT

SEQ ID NO: 90810 - protein, 10 aa, synthetic construct
TFQRGDFNNL

SEQ ID NO: 90811 - protein, 10 aa, synthetic construct
TFDRGDFNNT

SEQ ID NO: 90812 - protein, 10 aa, synthetic construct
TFDRGDFNNL

SEQ ID NO: 90813 - protein, 10 aa, synthetic construct
TFERGDFNNT

SEQ ID NO: 90814 - protein, 10 aa, synthetic construct
TFERGDFNNL

SEQ ID NO: 90815 - protein, 10 aa, synthetic construct
TKVRGDFNNT

SEQ ID NO: 90816 - protein, 10 aa, synthetic construct
DWSRGDRSQT

SEQ ID NO: 90817 - protein, 10 aa, synthetic construct
TKVRGDFNNL

SEQ ID NO: 90818 - protein, 10 aa, synthetic construct
TKLRGDFNNT

SEQ ID NO: 90819 - protein, 10 aa, synthetic construct
TKLRGDFNNL

SEQ ID NO: 90820 - protein, 10 aa, synthetic construct
TKIRGDYNSL

SEQ ID NO: 90821 - protein, 10 aa, synthetic construct
TKIRGDYTSM

SEQ ID NO: 90822 - protein, 10 aa, synthetic construct
TKIRGDFQNT

SEQ ID NO: 90823 - protein, 10 aa, synthetic construct
TKMRGDYNSL

SEQ ID NO: 90824 - protein, 10 aa, synthetic construct
TKMRGDYTSM

SEQ ID NO: 90825 - protein, 10 aa, synthetic construct
TKMRGDFQNT

SEQ ID NO: 90826 - protein, 10 aa, synthetic construct
TKWRGDFNNT

SEQ ID NO: 90827 - protein, 10 aa, synthetic construct
DWSRGDLLLS

SEQ ID NO: 90828 - protein, 10 aa, synthetic construct
TKWRGDFNNL

SEQ ID NO: 90829 - protein, 10 aa, synthetic construct
TKFRGDYNSL

SEQ ID NO: 90830 - protein, 10 aa, synthetic construct
TKFRGDYTSM

SEQ ID NO: 90831 - protein, 10 aa, synthetic construct
TKFRGDFQNT

SEQ ID NO: 90832 - protein, 10 aa, synthetic construct
TKHRGDFNNT

SEQ ID NO: 90833 - protein, 10 aa, synthetic construct
TKHRGDFNNL

SEQ ID NO: 90834 - protein, 10 aa, synthetic construct
TKSRGDFNNT

SEQ ID NO: 90835 - protein, 10 aa, synthetic construct
TKSRGDFNNL

SEQ ID NO: 90836 - protein, 10 aa, synthetic construct
TKTRGDFNNT

SEQ ID NO: 90837 - protein, 10 aa, synthetic construct
TKTRGDFNNL

SEQ ID NO: 90838 - protein, 10 aa, synthetic construct
DWTRGDRGVV

SEQ ID NO: 90839 - protein, 10 aa, synthetic construct
TKYRGDYNSL

SEQ ID NO: 90840 - protein, 10 aa, synthetic construct
TKYRGDYTSM

SEQ ID NO: 90841 - protein, 10 aa, synthetic construct
TKYRGDFQNT

SEQ ID NO: 90842 - protein, 10 aa, synthetic construct
TKQRGDFNNT

SEQ ID NO: 90843 - protein, 10 aa, synthetic construct
TKQRGDFNNL

SEQ ID NO: 90844 - protein, 10 aa, synthetic construct
TKDRGDFNNT

SEQ ID NO: 90845 - protein, 10 aa, synthetic construct
TKDRGDFNNL

SEQ ID NO: 90846 - protein, 10 aa, synthetic construct
TKERGDFNNT

SEQ ID NO: 90847 - protein, 10 aa, synthetic construct
TKERGDFNNL

SEQ ID NO: 90848 - protein, 10 aa, synthetic construct
THIRGDFNNT

SEQ ID NO: 90849 - protein, 10 aa, synthetic construct
DFFRGDFQNT

SEQ ID NO: 90850 - protein, 10 aa, synthetic construct
DWQRGDRGVV

SEQ ID NO: 90851 - protein, 10 aa, synthetic construct
THIRGDFNNL

SEQ ID NO: 90852 - protein, 10 aa, synthetic construct
THMRGDFNNT

SEQ ID NO: 90853 - protein, 10 aa, synthetic construct
THMRGDFNNL

SEQ ID NO: 90854 - protein, 10 aa, synthetic construct
THFRGDFNNT

SEQ ID NO: 90855 - protein, 10 aa, synthetic construct
THFRGDFNNL

SEQ ID NO: 90856 - protein, 10 aa, synthetic construct
THKRGDFNNT

SEQ ID NO: 90857 - protein, 10 aa, synthetic construct
THKRGDFNNL

SEQ ID NO: 90858 - protein, 10 aa, synthetic construct
THYRGDFNNT

SEQ ID NO: 90859 - protein, 10 aa, synthetic construct
THYRGDFNNL

SEQ ID NO: 90860 - protein, 10 aa, synthetic construct
THNRGDFNNT

SEQ ID NO: 90861 - protein, 10 aa, synthetic construct
DWDRGDRGVV

SEQ ID NO: 90862 - protein, 10 aa, synthetic construct
THNRGDFNNL

SEQ ID NO: 90863 - protein, 10 aa, synthetic construct
TTIRGDFNNT

SEQ ID NO: 90864 - protein, 10 aa, synthetic construct
TTIRGDFNNL

SEQ ID NO: 90865 - protein, 10 aa, synthetic construct
TTMRGDFNNT

SEQ ID NO: 90866 - protein, 10 aa, synthetic construct
TTMRGDFNNL

SEQ ID NO: 90867 - protein, 10 aa, synthetic construct
TTFRGDFNNT

SEQ ID NO: 90868 - protein, 10 aa, synthetic construct
TTFRGDFNNL

SEQ ID NO: 90869 - protein, 10 aa, synthetic construct
TTKRGDFNNT

SEQ ID NO: 90870 - protein, 10 aa, synthetic construct
TTKRGDFNNL

SEQ ID NO: 90871 - protein, 10 aa, synthetic construct
TTYRGDFNNT

SEQ ID NO: 90872 - protein, 10 aa, synthetic construct
DWERGDRGVV

SEQ ID NO: 90873 - protein, 10 aa, synthetic construct
TTYRGDFNNL

SEQ ID NO: 90874 - protein, 10 aa, synthetic construct
TTNRGDFNNT

SEQ ID NO: 90875 - protein, 10 aa, synthetic construct
TTNRGDFNNL

SEQ ID NO: 90876 - protein, 10 aa, synthetic construct
TYVRGDFNNT

SEQ ID NO: 90877 - protein, 10 aa, synthetic construct
TYVRGDFNNL

SEQ ID NO: 90878 - protein, 10 aa, synthetic construct
TYLRGDFNNT

SEQ ID NO: 90879 - protein, 10 aa, synthetic construct
TYLRGDFNNL

SEQ ID NO: 90880 - protein, 10 aa, synthetic construct
TYIRGDYNSL

SEQ ID NO: 90881 - protein, 10 aa, synthetic construct
TYIRGDYTSM

SEQ ID NO: 90882 - protein, 10 aa, synthetic construct
TYIRGDFQNT

SEQ ID NO: 90883 - protein, 10 aa, synthetic construct
DRGRGDHGVL

SEQ ID NO: 90884 - protein, 10 aa, synthetic construct
TYMRGDYNSL

SEQ ID NO: 90885 - protein, 10 aa, synthetic construct
TYMRGDYTSM

SEQ ID NO: 90886 - protein, 10 aa, synthetic construct
TYMRGDFQNT

SEQ ID NO: 90887 - protein, 10 aa, synthetic construct
TYWRGDFNNT

SEQ ID NO: 90888 - protein, 10 aa, synthetic construct
TYWRGDFNNL

SEQ ID NO: 90889 - protein, 10 aa, synthetic construct
TYFRGDYNSL

SEQ ID NO: 90890 - protein, 10 aa, synthetic construct
TYFRGDYTSM

SEQ ID NO: 90891 - protein, 10 aa, synthetic construct
TYFRGDFQNT

SEQ ID NO: 90892 - protein, 10 aa, synthetic construct
TYKRGDYNSL

SEQ ID NO: 90893 - protein, 10 aa, synthetic construct
TYKRGDYTSM

SEQ ID NO: 90894 - protein, 10 aa, synthetic construct
DRGRGDYVGL

SEQ ID NO: 90895 - protein, 10 aa, synthetic construct
TYKRGDFQNT

SEQ ID NO: 90896 - protein, 10 aa, synthetic construct
TYHRGDFNNT

SEQ ID NO: 90897 - protein, 10 aa, synthetic construct
TYHRGDFNNL

SEQ ID NO: 90898 - protein, 10 aa, synthetic construct
TYSRGDFNNT

SEQ ID NO: 90899 - protein, 10 aa, synthetic construct
TYSRGDFNNL

SEQ ID NO: 90900 - protein, 10 aa, synthetic construct
TYTRGDFNNT

SEQ ID NO: 90901 - protein, 10 aa, synthetic construct
TYTRGDFNNL

SEQ ID NO: 90902 - protein, 10 aa, synthetic construct
TYYRGDYNSL

SEQ ID NO: 90903 - protein, 10 aa, synthetic construct
TYYRGDYTSM

SEQ ID NO: 90904 - protein, 10 aa, synthetic construct
TYYRGDFQNT

SEQ ID NO: 90905 - protein, 10 aa, synthetic construct
DRGRGDQSTL

SEQ ID NO: 90906 - protein, 10 aa, synthetic construct
TYNRGDYNSL

SEQ ID NO: 90907 - protein, 10 aa, synthetic construct
TYNRGDYTSM

SEQ ID NO: 90908 - protein, 10 aa, synthetic construct
TYNRGDFQNT

SEQ ID NO: 90909 - protein, 10 aa, synthetic construct
TYQRGDFNNT

SEQ ID NO: 90910 - protein, 10 aa, synthetic construct
TYQRGDFNNL

SEQ ID NO: 90911 - protein, 10 aa, synthetic construct
TYDRGDFNNT

SEQ ID NO: 90912 - protein, 10 aa, synthetic construct
TYDRGDFNNL

SEQ ID NO: 90913 - protein, 10 aa, synthetic construct
TYERGDFNNT

SEQ ID NO: 90914 - protein, 10 aa, synthetic construct
TYERGDFNNL

SEQ ID NO: 90915 - protein, 10 aa, synthetic construct
TNVRGDFNNT

SEQ ID NO: 90916 - protein, 10 aa, synthetic construct
DRGRGDLLLS

SEQ ID NO: 90917 - protein, 10 aa, synthetic construct
TNVRGDFNNL

SEQ ID NO: 90918 - protein, 10 aa, synthetic construct
TNLRGDFNNT

SEQ ID NO: 90919 - protein, 10 aa, synthetic construct
TNLRGDFNNL

SEQ ID NO: 90920 - protein, 10 aa, synthetic construct
TNIRGDYNSL

SEQ ID NO: 90921 - protein, 10 aa, synthetic construct
TNIRGDYTSM

SEQ ID NO: 90922 - protein, 10 aa, synthetic construct
TNIRGDFQNT

SEQ ID NO: 90923 - protein, 10 aa, synthetic construct
TNMRGDYNSL

SEQ ID NO: 90924 - protein, 10 aa, synthetic construct
TNMRGDYTSM

SEQ ID NO: 90925 - protein, 10 aa, synthetic construct
TNMRGDFQNT

SEQ ID NO: 90926 - protein, 10 aa, synthetic construct
TNWRGDFNNT

SEQ ID NO: 90927 - protein, 10 aa, synthetic construct
DRARGDHGVL

SEQ ID NO: 90928 - protein, 10 aa, synthetic construct
TNWRGDFNNL

SEQ ID NO: 90929 - protein, 10 aa, synthetic construct
TNFRGDYNSL

SEQ ID NO: 90930 - protein, 10 aa, synthetic construct
TNFRGDYTSM

SEQ ID NO: 90931 - protein, 10 aa, synthetic construct
TNFRGDFQNT

SEQ ID NO: 90932 - protein, 10 aa, synthetic construct
TNKRGDYNSL

SEQ ID NO: 90933 - protein, 10 aa, synthetic construct
TNKRGDYTSM

SEQ ID NO: 90934 - protein, 10 aa, synthetic construct
TNKRGDFQNT

SEQ ID NO: 90935 - protein, 10 aa, synthetic construct
TNHRGDFNNT

SEQ ID NO: 90936 - protein, 10 aa, synthetic construct
TNHRGDFNNL

SEQ ID NO: 90937 - protein, 10 aa, synthetic construct
TNSRGDFNNT

SEQ ID NO: 90938 - protein, 10 aa, synthetic construct
DRARGDYVGL

SEQ ID NO: 90939 - protein, 10 aa, synthetic construct
TNSRGDFNNL

SEQ ID NO: 90940 - protein, 10 aa, synthetic construct
TNTRGDFNNT

SEQ ID NO: 90941 - protein, 10 aa, synthetic construct
TNTRGDFNNL

SEQ ID NO: 90942 - protein, 10 aa, synthetic construct
TNYRGDYNSL

SEQ ID NO: 90943 - protein, 10 aa, synthetic construct
TNYRGDYTSM

SEQ ID NO: 90944 - protein, 10 aa, synthetic construct
TNYRGDFQNT

SEQ ID NO: 90945 - protein, 10 aa, synthetic construct
TNNRGDYNSL

SEQ ID NO: 90946 - protein, 10 aa, synthetic construct
TNNRGDYTSM

SEQ ID NO: 90947 - protein, 10 aa, synthetic construct
TNNRGDFQNT

SEQ ID NO: 90948 - protein, 10 aa, synthetic construct
TNQRGDFNNT

SEQ ID NO: 90949 - protein, 10 aa, synthetic construct
DRARGDQSTL

SEQ ID NO: 90950 - protein, 10 aa, synthetic construct
TNQRGDFNNL

SEQ ID NO: 90951 - protein, 10 aa, synthetic construct
TNDRGDFNNT

SEQ ID NO: 90952 - protein, 10 aa, synthetic construct
TNDRGDFNNL

SEQ ID NO: 90953 - protein, 10 aa, synthetic construct
TNERGDFNNT

SEQ ID NO: 90954 - protein, 10 aa, synthetic construct
TNERGDFNNL

SEQ ID NO: 90955 - protein, 10 aa, synthetic construct
TQIRGDFNNT

SEQ ID NO: 90956 - protein, 10 aa, synthetic construct
TQIRGDFNNL

SEQ ID NO: 90957 - protein, 10 aa, synthetic construct
TQMRGDFNNT

SEQ ID NO: 90958 - protein, 10 aa, synthetic construct
TQMRGDFNNL

SEQ ID NO: 90959 - protein, 10 aa, synthetic construct
TQFRGDFNNT

SEQ ID NO: 90960 - protein, 10 aa, synthetic construct
QFFRGDYNSL

SEQ ID NO: 90961 - protein, 10 aa, synthetic construct
DRARGDLLLS

SEQ ID NO: 90962 - protein, 10 aa, synthetic construct
TQFRGDFNNL

SEQ ID NO: 90963 - protein, 10 aa, synthetic construct
TQKRGDFNNT

SEQ ID NO: 90964 - protein, 10 aa, synthetic construct
TQKRGDFNNL

SEQ ID NO: 90965 - protein, 10 aa, synthetic construct
TQYRGDFNNT

SEQ ID NO: 90966 - protein, 10 aa, synthetic construct
TQYRGDFNNL

SEQ ID NO: 90967 - protein, 10 aa, synthetic construct
TQNRGDFNNT

SEQ ID NO: 90968 - protein, 10 aa, synthetic construct
TQNRGDFNNL

SEQ ID NO: 90969 - protein, 10 aa, synthetic construct
TDIRGDFNNT

SEQ ID NO: 90970 - protein, 10 aa, synthetic construct
TDIRGDFNNL

SEQ ID NO: 90971 - protein, 10 aa, synthetic construct
TDMRGDFNNT

SEQ ID NO: 90972 - protein, 10 aa, synthetic construct
DRVRGDRGQI

SEQ ID NO: 90973 - protein, 10 aa, synthetic construct
TDMRGDFNNL

SEQ ID NO: 90974 - protein, 10 aa, synthetic construct
TDFRGDFNNT

SEQ ID NO: 90975 - protein, 10 aa, synthetic construct
TDFRGDFNNL

SEQ ID NO: 90976 - protein, 10 aa, synthetic construct
TDKRGDFNNT

SEQ ID NO: 90977 - protein, 10 aa, synthetic construct
TDKRGDFNNL

SEQ ID NO: 90978 - protein, 10 aa, synthetic construct
TDYRGDFNNT

SEQ ID NO: 90979 - protein, 10 aa, synthetic construct
TDYRGDFNNL

SEQ ID NO: 90980 - protein, 10 aa, synthetic construct
TDNRGDFNNT

SEQ ID NO: 90981 - protein, 10 aa, synthetic construct
TDNRGDFNNL

SEQ ID NO: 90982 - protein, 10 aa, synthetic construct
TEIRGDFNNT

SEQ ID NO: 90983 - protein, 10 aa, synthetic construct
DRVRGDRQGI

SEQ ID NO: 90984 - protein, 10 aa, synthetic construct
TEIRGDFNNL

SEQ ID NO: 90985 - protein, 10 aa, synthetic construct
TEMRGDFNNT

SEQ ID NO: 90986 - protein, 10 aa, synthetic construct
TEMRGDFNNL

SEQ ID NO: 90987 - protein, 10 aa, synthetic construct
TEFRGDFNNT

SEQ ID NO: 90988 - protein, 10 aa, synthetic construct
TEFRGDFNNL

SEQ ID NO: 90989 - protein, 10 aa, synthetic construct
TEKRGDFNNT

SEQ ID NO: 90990 - protein, 10 aa, synthetic construct
TEKRGDFNNL

SEQ ID NO: 90991 - protein, 10 aa, synthetic construct
TEYRGDFNNT

SEQ ID NO: 90992 - protein, 10 aa, synthetic construct
TEYRGDFNNL

SEQ ID NO: 90993 - protein, 10 aa, synthetic construct
TENRGDFNNT

SEQ ID NO: 90994 - protein, 10 aa, synthetic construct
DRVRGDRSVV

SEQ ID NO: 90995 - protein, 10 aa, synthetic construct
TENRGDFNNL

SEQ ID NO: 90996 - protein, 10 aa, synthetic construct
AVIRGDFNNT

SEQ ID NO: 90997 - protein, 10 aa, synthetic construct
AVIRGDFNNL

SEQ ID NO: 90998 - protein, 10 aa, synthetic construct
AVFRGDFNNT

SEQ ID NO: 90999 - protein, 10 aa, synthetic construct
AVFRGDFNNL

SEQ ID NO: 91000 - protein, 10 aa, synthetic construct
AVKRGDFNNT

SEQ ID NO: 91001 - protein, 10 aa, synthetic construct
AVKRGDFNNL

SEQ ID NO: 91002 - protein, 10 aa, synthetic construct
AVYRGDFNNT

SEQ ID NO: 91003 - protein, 10 aa, synthetic construct
AVYRGDFNNL

SEQ ID NO: 91004 - protein, 10 aa, synthetic construct
AVNRGDFNNT

SEQ ID NO: 91005 - protein, 10 aa, synthetic construct
DRVRGDRGVV

SEQ ID NO: 91006 - protein, 10 aa, synthetic construct
AVNRGDFNNL

SEQ ID NO: 91007 - protein, 10 aa, synthetic construct
ALIRGDFNNT

SEQ ID NO: 91008 - protein, 10 aa, synthetic construct
ALIRGDFNNL

SEQ ID NO: 91009 - protein, 10 aa, synthetic construct
ALFRGDFNNT

SEQ ID NO: 91010 - protein, 10 aa, synthetic construct
ALFRGDFNNL

SEQ ID NO: 91011 - protein, 10 aa, synthetic construct
ALKRGDFNNT

SEQ ID NO: 91012 - protein, 10 aa, synthetic construct
ALKRGDFNNL

SEQ ID NO: 91013 - protein, 10 aa, synthetic construct
ALYRGDFNNT

SEQ ID NO: 91014 - protein, 10 aa, synthetic construct
ALYRGDFNNL

SEQ ID NO: 91015 - protein, 10 aa, synthetic construct
ALNRGDFNNT

SEQ ID NO: 91016 - protein, 10 aa, synthetic construct
DRVRGDRSQT

SEQ ID NO: 91017 - protein, 10 aa, synthetic construct
ALNRGDFNNL

SEQ ID NO: 91018 - protein, 10 aa, synthetic construct
AIIRGDFQNT

SEQ ID NO: 91019 - protein, 10 aa, synthetic construct
AIMRGDFNNT

SEQ ID NO: 91020 - protein, 10 aa, synthetic construct
AIMRGDFNNL

SEQ ID NO: 91021 - protein, 10 aa, synthetic construct
AIFRGDFQNT

SEQ ID NO: 91022 - protein, 10 aa, synthetic construct
AIKRGDFQNT

SEQ ID NO: 91023 - protein, 10 aa, synthetic construct
AIHRGDFNNT

SEQ ID NO: 91024 - protein, 10 aa, synthetic construct
AIHRGDFNNL

SEQ ID NO: 91025 - protein, 10 aa, synthetic construct
AITRGDFNNT

SEQ ID NO: 91026 - protein, 10 aa, synthetic construct
AITRGDFNNL

SEQ ID NO: 91027 - protein, 10 aa, synthetic construct
DRPRGDHGVL

SEQ ID NO: 91028 - protein, 10 aa, synthetic construct
AIYRGDFQNT

SEQ ID NO: 91029 - protein, 10 aa, synthetic construct
AINRGDFQNT

SEQ ID NO: 91030 - protein, 10 aa, synthetic construct
AIQRGDFNNT

SEQ ID NO: 91031 - protein, 10 aa, synthetic construct
AIQRGDFNNL

SEQ ID NO: 91032 - protein, 10 aa, synthetic construct
AIDRGDFNNT

SEQ ID NO: 91033 - protein, 10 aa, synthetic construct
AIDRGDFNNL

SEQ ID NO: 91034 - protein, 10 aa, synthetic construct
AIERGDFNNT

SEQ ID NO: 91035 - protein, 10 aa, synthetic construct
AIERGDFNNL

SEQ ID NO: 91036 - protein, 10 aa, synthetic construct
AMIRGDFQNT

SEQ ID NO: 91037 - protein, 10 aa, synthetic construct
AMMRGDFNNT

SEQ ID NO: 91038 - protein, 10 aa, synthetic construct
DRPRGDYVGL

SEQ ID NO: 91039 - protein, 10 aa, synthetic construct
AMMRGDFNNL

SEQ ID NO: 91040 - protein, 10 aa, synthetic construct
AMFRGDFQNT

SEQ ID NO: 91041 - protein, 10 aa, synthetic construct
AMKRGDFQNT

SEQ ID NO: 91042 - protein, 10 aa, synthetic construct
AMHRGDFNNT

SEQ ID NO: 91043 - protein, 10 aa, synthetic construct
AMHRGDFNNL

SEQ ID NO: 91044 - protein, 10 aa, synthetic construct
AMTRGDFNNT

SEQ ID NO: 91045 - protein, 10 aa, synthetic construct
AMTRGDFNNL

SEQ ID NO: 91046 - protein, 10 aa, synthetic construct
AMYRGDFQNT

SEQ ID NO: 91047 - protein, 10 aa, synthetic construct
AMNRGDFQNT

SEQ ID NO: 91048 - protein, 10 aa, synthetic construct
AMQRGDFNNT

SEQ ID NO: 91049 - protein, 10 aa, synthetic construct
DRPRGDQSTL

SEQ ID NO: 91050 - protein, 10 aa, synthetic construct
AMQRGDFNNL

SEQ ID NO: 91051 - protein, 10 aa, synthetic construct
AMDRGDFNNT

SEQ ID NO: 91052 - protein, 10 aa, synthetic construct
AMDRGDFNNL

SEQ ID NO: 91053 - protein, 10 aa, synthetic construct
AMERGDFNNT

SEQ ID NO: 91054 - protein, 10 aa, synthetic construct
AMERGDFNNL

SEQ ID NO: 91055 - protein, 10 aa, synthetic construct
AWIRGDFNNT

SEQ ID NO: 91056 - protein, 10 aa, synthetic construct
AWIRGDFNNL

SEQ ID NO: 91057 - protein, 10 aa, synthetic construct
AWFRGDFNNT

SEQ ID NO: 91058 - protein, 10 aa, synthetic construct
AWFRGDFNNL

SEQ ID NO: 91059 - protein, 10 aa, synthetic construct
AWKRGDFNNT

SEQ ID NO: 91060 - protein, 10 aa, synthetic construct
DRPRGDLLLS

SEQ ID NO: 91061 - protein, 10 aa, synthetic construct
AWKRGDFNNL

SEQ ID NO: 91062 - protein, 10 aa, synthetic construct
AWYRGDFNNT

SEQ ID NO: 91063 - protein, 10 aa, synthetic construct
AWYRGDFNNL

SEQ ID NO: 91064 - protein, 10 aa, synthetic construct
AWNRGDFNNT

SEQ ID NO: 91065 - protein, 10 aa, synthetic construct
AWNRGDFNNL

SEQ ID NO: 91066 - protein, 10 aa, synthetic construct
AFIRGDFQNT

SEQ ID NO: 91067 - protein, 10 aa, synthetic construct
AFMRGDFNNT

SEQ ID NO: 91068 - protein, 10 aa, synthetic construct
AFMRGDFNNL

SEQ ID NO: 91069 - protein, 10 aa, synthetic construct
AFFRGDFQNT

SEQ ID NO: 91070 - protein, 10 aa, synthetic construct
AFKRGDFQNT

SEQ ID NO: 91071 - protein, 10 aa, synthetic construct
QFFRGDYTSM

SEQ ID NO: 91072 - protein, 10 aa, synthetic construct
DRLRGDRGQI

SEQ ID NO: 91073 - protein, 10 aa, synthetic construct
AFHRGDFNNT

SEQ ID NO: 91074 - protein, 10 aa, synthetic construct
AFHRGDFNNL

SEQ ID NO: 91075 - protein, 10 aa, synthetic construct
AFTRGDFNNT

SEQ ID NO: 91076 - protein, 10 aa, synthetic construct
AFTRGDFNNL

SEQ ID NO: 91077 - protein, 10 aa, synthetic construct
AFYRGDFQNT

SEQ ID NO: 91078 - protein, 10 aa, synthetic construct
AFNRGDFQNT

SEQ ID NO: 91079 - protein, 10 aa, synthetic construct
AFQRGDFNNT

SEQ ID NO: 91080 - protein, 10 aa, synthetic construct
AFQRGDFNNL

SEQ ID NO: 91081 - protein, 10 aa, synthetic construct
AFDRGDFNNT

SEQ ID NO: 91082 - protein, 10 aa, synthetic construct
AFDRGDFNNL

SEQ ID NO: 91083 - protein, 10 aa, synthetic construct
DRLRGDRQGI

SEQ ID NO: 91084 - protein, 10 aa, synthetic construct
AFERGDFNNT

SEQ ID NO: 91085 - protein, 10 aa, synthetic construct
AFERGDFNNL

SEQ ID NO: 91086 - protein, 10 aa, synthetic construct
AKIRGDFQNT

SEQ ID NO: 91087 - protein, 10 aa, synthetic construct
AKMRGDFNNT

SEQ ID NO: 91088 - protein, 10 aa, synthetic construct
AKMRGDFNNL

SEQ ID NO: 91089 - protein, 10 aa, synthetic construct
AKFRGDFQNT

SEQ ID NO: 91090 - protein, 10 aa, synthetic construct
AKKRGDFQNT

SEQ ID NO: 91091 - protein, 10 aa, synthetic construct
AKHRGDFNNT

SEQ ID NO: 91092 - protein, 10 aa, synthetic construct
AKHRGDFNNL

SEQ ID NO: 91093 - protein, 10 aa, synthetic construct
AKTRGDFNNT

SEQ ID NO: 91094 - protein, 10 aa, synthetic construct
DRLRGDRSVV

SEQ ID NO: 91095 - protein, 10 aa, synthetic construct
AKTRGDFNNL

SEQ ID NO: 91096 - protein, 10 aa, synthetic construct
AKYRGDFQNT

SEQ ID NO: 91097 - protein, 10 aa, synthetic construct
AKNRGDFQNT

SEQ ID NO: 91098 - protein, 10 aa, synthetic construct
AKQRGDFNNT

SEQ ID NO: 91099 - protein, 10 aa, synthetic construct
AKQRGDFNNL

SEQ ID NO: 91100 - protein, 10 aa, synthetic construct
AKDRGDFNNT

SEQ ID NO: 91101 - protein, 10 aa, synthetic construct
AKDRGDFNNL

SEQ ID NO: 91102 - protein, 10 aa, synthetic construct
AKERGDFNNT

SEQ ID NO: 91103 - protein, 10 aa, synthetic construct
AKERGDFNNL

SEQ ID NO: 91104 - protein, 10 aa, synthetic construct
AHIRGDFNNT

SEQ ID NO: 91105 - protein, 10 aa, synthetic construct
DRLRGDRGVV

SEQ ID NO: 91106 - protein, 10 aa, synthetic construct
AHIRGDFNNL

SEQ ID NO: 91107 - protein, 10 aa, synthetic construct
AHFRGDFNNT

SEQ ID NO: 91108 - protein, 10 aa, synthetic construct
AHFRGDFNNL

SEQ ID NO: 91109 - protein, 10 aa, synthetic construct
AHKRGDFNNT

SEQ ID NO: 91110 - protein, 10 aa, synthetic construct
AHKRGDFNNL

SEQ ID NO: 91111 - protein, 10 aa, synthetic construct
AHYRGDFNNT

SEQ ID NO: 91112 - protein, 10 aa, synthetic construct
AHYRGDFNNL

SEQ ID NO: 91113 - protein, 10 aa, synthetic construct
AHNRGDFNNT

SEQ ID NO: 91114 - protein, 10 aa, synthetic construct
AHNRGDFNNL

SEQ ID NO: 91115 - protein, 10 aa, synthetic construct
ASIRGDFNNT

SEQ ID NO: 91116 - protein, 10 aa, synthetic construct
DRLRGDRSQT

SEQ ID NO: 91117 - protein, 10 aa, synthetic construct
ASIRGDFNNL

SEQ ID NO: 91118 - protein, 10 aa, synthetic construct
ASFRGDFNNT

SEQ ID NO: 91119 - protein, 10 aa, synthetic construct
ASFRGDFNNL

SEQ ID NO: 91120 - protein, 10 aa, synthetic construct
ASKRGDFNNT

SEQ ID NO: 91121 - protein, 10 aa, synthetic construct
ASKRGDFNNL

SEQ ID NO: 91122 - protein, 10 aa, synthetic construct
ASYRGDFNNT

SEQ ID NO: 91123 - protein, 10 aa, synthetic construct
ASYRGDFNNL

SEQ ID NO: 91124 - protein, 10 aa, synthetic construct
ASNRGDFNNT

SEQ ID NO: 91125 - protein, 10 aa, synthetic construct
ASNRGDFNNL

SEQ ID NO: 91126 - protein, 10 aa, synthetic construct
ATIRGDFNNT

SEQ ID NO: 91127 - protein, 10 aa, synthetic construct
DRWRGDRGQI

SEQ ID NO: 91128 - protein, 10 aa, synthetic construct
ATIRGDFNNL

SEQ ID NO: 91129 - protein, 10 aa, synthetic construct
ATFRGDFNNT

SEQ ID NO: 91130 - protein, 10 aa, synthetic construct
ATFRGDFNNL

SEQ ID NO: 91131 - protein, 10 aa, synthetic construct
ATKRGDFNNT

SEQ ID NO: 91132 - protein, 10 aa, synthetic construct
ATKRGDFNNL

SEQ ID NO: 91133 - protein, 10 aa, synthetic construct
ATYRGDFNNT

SEQ ID NO: 91134 - protein, 10 aa, synthetic construct
ATYRGDFNNL

SEQ ID NO: 91135 - protein, 10 aa, synthetic construct
ATNRGDFNNT

SEQ ID NO: 91136 - protein, 10 aa, synthetic construct
ATNRGDFNNL

SEQ ID NO: 91137 - protein, 10 aa, synthetic construct
AYIRGDFQNT

SEQ ID NO: 91138 - protein, 10 aa, synthetic construct
DRWRGDRQGI

SEQ ID NO: 91139 - protein, 10 aa, synthetic construct
AYMRGDFNNT

SEQ ID NO: 91140 - protein, 10 aa, synthetic construct
AYMRGDFNNL

SEQ ID NO: 91141 - protein, 10 aa, synthetic construct
AYFRGDFQNT

SEQ ID NO: 91142 - protein, 10 aa, synthetic construct
AYKRGDFQNT

SEQ ID NO: 91143 - protein, 10 aa, synthetic construct
AYHRGDFNNT

SEQ ID NO: 91144 - protein, 10 aa, synthetic construct
AYHRGDFNNL

SEQ ID NO: 91145 - protein, 10 aa, synthetic construct
AYTRGDFNNT

SEQ ID NO: 91146 - protein, 10 aa, synthetic construct
AYTRGDFNNL

SEQ ID NO: 91147 - protein, 10 aa, synthetic construct
AYYRGDFQNT

SEQ ID NO: 91148 - protein, 10 aa, synthetic construct
AYNRGDFQNT

SEQ ID NO: 91149 - protein, 10 aa, synthetic construct
DRWRGDRSVV

SEQ ID NO: 91150 - protein, 10 aa, synthetic construct
AYQRGDFNNT

SEQ ID NO: 91151 - protein, 10 aa, synthetic construct
AYQRGDFNNL

SEQ ID NO: 91152 - protein, 10 aa, synthetic construct
AYDRGDFNNT

SEQ ID NO: 91153 - protein, 10 aa, synthetic construct
AYDRGDFNNL

SEQ ID NO: 91154 - protein, 10 aa, synthetic construct
AYERGDFNNT

SEQ ID NO: 91155 - protein, 10 aa, synthetic construct
AYERGDFNNL

SEQ ID NO: 91156 - protein, 10 aa, synthetic construct
ANIRGDFQNT

SEQ ID NO: 91157 - protein, 10 aa, synthetic construct
ANMRGDFNNT

SEQ ID NO: 91158 - protein, 10 aa, synthetic construct
ANMRGDFNNL

SEQ ID NO: 91159 - protein, 10 aa, synthetic construct
ANFRGDFQNT

SEQ ID NO: 91160 - protein, 10 aa, synthetic construct
DRWRGDRGVV

SEQ ID NO: 91161 - protein, 10 aa, synthetic construct
ANKRGDFQNT

SEQ ID NO: 91162 - protein, 10 aa, synthetic construct
ANHRGDFNNT

SEQ ID NO: 91163 - protein, 10 aa, synthetic construct
ANHRGDFNNL

SEQ ID NO: 91164 - protein, 10 aa, synthetic construct
ANTRGDFNNT

SEQ ID NO: 91165 - protein, 10 aa, synthetic construct
ANTRGDFNNL

SEQ ID NO: 91166 - protein, 10 aa, synthetic construct
ANYRGDFQNT

SEQ ID NO: 91167 - protein, 10 aa, synthetic construct
ANNRGDFQNT

SEQ ID NO: 91168 - protein, 10 aa, synthetic construct
ANQRGDFNNT

SEQ ID NO: 91169 - protein, 10 aa, synthetic construct
ANQRGDFNNL

SEQ ID NO: 91170 - protein, 10 aa, synthetic construct
ANDRGDFNNT

SEQ ID NO: 91171 - protein, 10 aa, synthetic construct
DRWRGDRSQT

SEQ ID NO: 91172 - protein, 10 aa, synthetic construct
ANDRGDFNNL

SEQ ID NO: 91173 - protein, 10 aa, synthetic construct
ANERGDFNNT

SEQ ID NO: 91174 - protein, 10 aa, synthetic construct
ANERGDFNNL

SEQ ID NO: 91175 - protein, 10 aa, synthetic construct
AQIRGDFNNT

SEQ ID NO: 91176 - protein, 10 aa, synthetic construct
AQIRGDFNNL

SEQ ID NO: 91177 - protein, 10 aa, synthetic construct
AQFRGDFNNT

SEQ ID NO: 91178 - protein, 10 aa, synthetic construct
AQFRGDFNNL

SEQ ID NO: 91179 - protein, 10 aa, synthetic construct
AQKRGDFNNT

SEQ ID NO: 91180 - protein, 10 aa, synthetic construct
AQKRGDFNNL

SEQ ID NO: 91181 - protein, 10 aa, synthetic construct
AQYRGDFNNT

SEQ ID NO: 91182 - protein, 10 aa, synthetic construct
QFFRGDFQNT

SEQ ID NO: 91183 - protein, 10 aa, synthetic construct
DRRRGDHGVL

SEQ ID NO: 91184 - protein, 10 aa, synthetic construct
AQYRGDFNNL

SEQ ID NO: 91185 - protein, 10 aa, synthetic construct
AQNRGDFNNT

SEQ ID NO: 91186 - protein, 10 aa, synthetic construct
AQNRGDFNNL

SEQ ID NO: 91187 - protein, 10 aa, synthetic construct
ADIRGDFNNT

SEQ ID NO: 91188 - protein, 10 aa, synthetic construct
ADIRGDFNNL

SEQ ID NO: 91189 - protein, 10 aa, synthetic construct
ADFRGDFNNT

SEQ ID NO: 91190 - protein, 10 aa, synthetic construct
ADFRGDFNNL

SEQ ID NO: 91191 - protein, 10 aa, synthetic construct
ADKRGDFNNT

SEQ ID NO: 91192 - protein, 10 aa, synthetic construct
ADKRGDFNNL

SEQ ID NO: 91193 - protein, 10 aa, synthetic construct
ADYRGDFNNT

SEQ ID NO: 91194 - protein, 10 aa, synthetic construct
DRRRGDYVGL

SEQ ID NO: 91195 - protein, 10 aa, synthetic construct
ADYRGDFNNL

SEQ ID NO: 91196 - protein, 10 aa, synthetic construct
ADNRGDFNNT

SEQ ID NO: 91197 - protein, 10 aa, synthetic construct
ADNRGDFNNL

SEQ ID NO: 91198 - protein, 10 aa, synthetic construct
AEIRGDFNNT

SEQ ID NO: 91199 - protein, 10 aa, synthetic construct
AEIRGDFNNL

SEQ ID NO: 91200 - protein, 10 aa, synthetic construct
AEFRGDFNNT

SEQ ID NO: 91201 - protein, 10 aa, synthetic construct
AEFRGDFNNL

SEQ ID NO: 91202 - protein, 10 aa, synthetic construct
AEKRGDFNNT

SEQ ID NO: 91203 - protein, 10 aa, synthetic construct
AEKRGDFNNL

SEQ ID NO: 91204 - protein, 10 aa, synthetic construct
AEYRGDFNNT

SEQ ID NO: 91205 - protein, 10 aa, synthetic construct
DRRRGDQSTL

SEQ ID NO: 91206 - protein, 10 aa, synthetic construct
AEYRGDFNNL

SEQ ID NO: 91207 - protein, 10 aa, synthetic construct
AENRGDFNNT

SEQ ID NO: 91208 - protein, 10 aa, synthetic construct
AENRGDFNNL

SEQ ID NO: 91209 - protein, 10 aa, synthetic construct
EIVRGDFNNT

SEQ ID NO: 91210 - protein, 10 aa, synthetic construct
EIVRGDFNNL

SEQ ID NO: 91211 - protein, 10 aa, synthetic construct
EILRGDFNNT

SEQ ID NO: 91212 - protein, 10 aa, synthetic construct
EILRGDFNNL

SEQ ID NO: 91213 - protein, 10 aa, synthetic construct
EIIRGDYNSL

SEQ ID NO: 91214 - protein, 10 aa, synthetic construct
EIIRGDYTSM

SEQ ID NO: 91215 - protein, 10 aa, synthetic construct
EIIRGDFQNT

SEQ ID NO: 91216 - protein, 10 aa, synthetic construct
DRRRGDLLLS

SEQ ID NO: 91217 - protein, 10 aa, synthetic construct
EIMRGDYNSL

SEQ ID NO: 91218 - protein, 10 aa, synthetic construct
EIMRGDYTSM

SEQ ID NO: 91219 - protein, 10 aa, synthetic construct
EIMRGDFQNT

SEQ ID NO: 91220 - protein, 10 aa, synthetic construct
EIWRGDFNNT

SEQ ID NO: 91221 - protein, 10 aa, synthetic construct
EIWRGDFNNL

SEQ ID NO: 91222 - protein, 10 aa, synthetic construct
EIFRGDYNSL

SEQ ID NO: 91223 - protein, 10 aa, synthetic construct
EIFRGDYTSM

SEQ ID NO: 91224 - protein, 10 aa, synthetic construct
EIFRGDFQNT

SEQ ID NO: 91225 - protein, 10 aa, synthetic construct
EIKRGDYNSL

SEQ ID NO: 91226 - protein, 10 aa, synthetic construct
EIKRGDYTSM

SEQ ID NO: 91227 - protein, 10 aa, synthetic construct
DRHRGDRGQI

SEQ ID NO: 91228 - protein, 10 aa, synthetic construct
EIKRGDFQNT

SEQ ID NO: 91229 - protein, 10 aa, synthetic construct
EIHRGDFNNT

SEQ ID NO: 91230 - protein, 10 aa, synthetic construct
EIHRGDFNNL

SEQ ID NO: 91231 - protein, 10 aa, synthetic construct
EISRGDFNNT

SEQ ID NO: 91232 - protein, 10 aa, synthetic construct
EISRGDFNNL

SEQ ID NO: 91233 - protein, 10 aa, synthetic construct
EITRGDFNNT

SEQ ID NO: 91234 - protein, 10 aa, synthetic construct
EITRGDFNNL

SEQ ID NO: 91235 - protein, 10 aa, synthetic construct
EIYRGDYNSL

SEQ ID NO: 91236 - protein, 10 aa, synthetic construct
EIYRGDYTSM

SEQ ID NO: 91237 - protein, 10 aa, synthetic construct
EIYRGDFQNT

SEQ ID NO: 91238 - protein, 10 aa, synthetic construct
DRHRGDRQGI

SEQ ID NO: 91239 - protein, 10 aa, synthetic construct
EINRGDYNSL

SEQ ID NO: 91240 - protein, 10 aa, synthetic construct
EINRGDYTSM

SEQ ID NO: 91241 - protein, 10 aa, synthetic construct
EINRGDFQNT

SEQ ID NO: 91242 - protein, 10 aa, synthetic construct
EIQRGDFNNT

SEQ ID NO: 91243 - protein, 10 aa, synthetic construct
EIQRGDFNNL

SEQ ID NO: 91244 - protein, 10 aa, synthetic construct
EIDRGDFNNT

SEQ ID NO: 91245 - protein, 10 aa, synthetic construct
EIDRGDFNNL

SEQ ID NO: 91246 - protein, 10 aa, synthetic construct
EIERGDFNNT

SEQ ID NO: 91247 - protein, 10 aa, synthetic construct
EIERGDFNNL

SEQ ID NO: 91248 - protein, 10 aa, synthetic construct
EMIRGDFQNT

SEQ ID NO: 91249 - protein, 10 aa, synthetic construct
DRHRGDRSVV

SEQ ID NO: 91250 - protein, 10 aa, synthetic construct
EMMRGDFNNT

SEQ ID NO: 91251 - protein, 10 aa, synthetic construct
EMMRGDFNNL

SEQ ID NO: 91252 - protein, 10 aa, synthetic construct
EMFRGDFQNT

SEQ ID NO: 91253 - protein, 10 aa, synthetic construct
EMKRGDFQNT

SEQ ID NO: 91254 - protein, 10 aa, synthetic construct
EMHRGDFNNT

SEQ ID NO: 91255 - protein, 10 aa, synthetic construct
EMHRGDFNNL

SEQ ID NO: 91256 - protein, 10 aa, synthetic construct
EMTRGDFNNT

SEQ ID NO: 91257 - protein, 10 aa, synthetic construct
EMTRGDFNNL

SEQ ID NO: 91258 - protein, 10 aa, synthetic construct
EMYRGDFQNT

SEQ ID NO: 91259 - protein, 10 aa, synthetic construct
EMNRGDFQNT

SEQ ID NO: 91260 - protein, 10 aa, synthetic construct
DRHRGDRGVV

SEQ ID NO: 91261 - protein, 10 aa, synthetic construct
EMQRGDFNNT

SEQ ID NO: 91262 - protein, 10 aa, synthetic construct
EMQRGDFNNL

SEQ ID NO: 91263 - protein, 10 aa, synthetic construct
EMDRGDFNNT

SEQ ID NO: 91264 - protein, 10 aa, synthetic construct
EMDRGDFNNL

SEQ ID NO: 91265 - protein, 10 aa, synthetic construct
EMERGDFNNT

SEQ ID NO: 91266 - protein, 10 aa, synthetic construct
EMERGDFNNL

SEQ ID NO: 91267 - protein, 10 aa, synthetic construct
EWIRGDFNNT

SEQ ID NO: 91268 - protein, 10 aa, synthetic construct
EWIRGDFNNL

SEQ ID NO: 91269 - protein, 10 aa, synthetic construct
EWFRGDFNNT

SEQ ID NO: 91270 - protein, 10 aa, synthetic construct
EWFRGDFNNL

SEQ ID NO: 91271 - protein, 10 aa, synthetic construct
DRHRGDRSQT

SEQ ID NO: 91272 - protein, 10 aa, synthetic construct
EWKRGDFNNT

SEQ ID NO: 91273 - protein, 10 aa, synthetic construct
EWKRGDFNNL

SEQ ID NO: 91274 - protein, 10 aa, synthetic construct
EWYRGDFNNT

SEQ ID NO: 91275 - protein, 10 aa, synthetic construct
EWYRGDFNNL

SEQ ID NO: 91276 - protein, 10 aa, synthetic construct
EWNRGDFNNT

SEQ ID NO: 91277 - protein, 10 aa, synthetic construct
EWNRGDFNNL

SEQ ID NO: 91278 - protein, 10 aa, synthetic construct
EFVRGDFNNT

SEQ ID NO: 91279 - protein, 10 aa, synthetic construct
EFVRGDFNNL

SEQ ID NO: 91280 - protein, 10 aa, synthetic construct
EFLRGDFNNT

SEQ ID NO: 91281 - protein, 10 aa, synthetic construct
EFLRGDFNNL

SEQ ID NO: 91282 - protein, 10 aa, synthetic construct
DRSRGDRGQI

SEQ ID NO: 91283 - protein, 10 aa, synthetic construct
EFIRGDYNSL

SEQ ID NO: 91284 - protein, 10 aa, synthetic construct
EFIRGDYTSM

SEQ ID NO: 91285 - protein, 10 aa, synthetic construct
EFIRGDFQNT

SEQ ID NO: 91286 - protein, 10 aa, synthetic construct
EFMRGDYNSL

SEQ ID NO: 91287 - protein, 10 aa, synthetic construct
EFMRGDYTSM

SEQ ID NO: 91288 - protein, 10 aa, synthetic construct
EFMRGDFQNT

SEQ ID NO: 91289 - protein, 10 aa, synthetic construct
EFWRGDFNNT

SEQ ID NO: 91290 - protein, 10 aa, synthetic construct
EFWRGDFNNL

SEQ ID NO: 91291 - protein, 10 aa, synthetic construct
EFKRGDYNSL

SEQ ID NO: 91292 - protein, 10 aa, synthetic construct
EFKRGDYTSM

SEQ ID NO: 91293 - protein, 10 aa, synthetic construct
SFFRGDFNNT

SEQ ID NO: 91294 - protein, 10 aa, synthetic construct
DRSRGDRQGI

SEQ ID NO: 91295 - protein, 10 aa, synthetic construct
EFKRGDFQNT

SEQ ID NO: 91296 - protein, 10 aa, synthetic construct
EFHRGDFNNT

SEQ ID NO: 91297 - protein, 10 aa, synthetic construct
EFHRGDFNNL

SEQ ID NO: 91298 - protein, 10 aa, synthetic construct
EFSRGDFNNT

SEQ ID NO: 91299 - protein, 10 aa, synthetic construct
EFSRGDFNNL

SEQ ID NO: 91300 - protein, 10 aa, synthetic construct
EFTRGDFNNT

SEQ ID NO: 91301 - protein, 10 aa, synthetic construct
EFTRGDFNNL

SEQ ID NO: 91302 - protein, 10 aa, synthetic construct
EFYRGDYNSL

SEQ ID NO: 91303 - protein, 10 aa, synthetic construct
EFYRGDYTSM

SEQ ID NO: 91304 - protein, 10 aa, synthetic construct
EFYRGDFQNT

SEQ ID NO: 91305 - protein, 10 aa, synthetic construct
DRSRGDRSVV

SEQ ID NO: 91306 - protein, 10 aa, synthetic construct
EFNRGDYNSL

SEQ ID NO: 91307 - protein, 10 aa, synthetic construct
EFNRGDYTSM

SEQ ID NO: 91308 - protein, 10 aa, synthetic construct
EFNRGDFQNT

SEQ ID NO: 91309 - protein, 10 aa, synthetic construct
EFQRGDFNNT

SEQ ID NO: 91310 - protein, 10 aa, synthetic construct
EFQRGDFNNL

SEQ ID NO: 91311 - protein, 10 aa, synthetic construct
EFDRGDFNNT

SEQ ID NO: 91312 - protein, 10 aa, synthetic construct
EFDRGDFNNL

SEQ ID NO: 91313 - protein, 10 aa, synthetic construct
EFERGDFNNT

SEQ ID NO: 91314 - protein, 10 aa, synthetic construct
EFERGDFNNL

SEQ ID NO: 91315 - protein, 10 aa, synthetic construct
EKVRGDFNNT

SEQ ID NO: 91316 - protein, 10 aa, synthetic construct
DRSRGDRGVV

SEQ ID NO: 91317 - protein, 10 aa, synthetic construct
EKVRGDFNNL

SEQ ID NO: 91318 - protein, 10 aa, synthetic construct
EKLRGDFNNT

SEQ ID NO: 91319 - protein, 10 aa, synthetic construct
EKLRGDFNNL

SEQ ID NO: 91320 - protein, 10 aa, synthetic construct
EKIRGDYNSL

SEQ ID NO: 91321 - protein, 10 aa, synthetic construct
EKIRGDYTSM

SEQ ID NO: 91322 - protein, 10 aa, synthetic construct
EKIRGDFQNT

SEQ ID NO: 91323 - protein, 10 aa, synthetic construct
EKMRGDYNSL

SEQ ID NO: 91324 - protein, 10 aa, synthetic construct
EKMRGDYTSM

SEQ ID NO: 91325 - protein, 10 aa, synthetic construct
EKMRGDFQNT

SEQ ID NO: 91326 - protein, 10 aa, synthetic construct
EKWRGDFNNT

SEQ ID NO: 91327 - protein, 10 aa, synthetic construct
DRSRGDRSQT

SEQ ID NO: 91328 - protein, 10 aa, synthetic construct
EKWRGDFNNL

SEQ ID NO: 91329 - protein, 10 aa, synthetic construct
EKFRGDYNSL

SEQ ID NO: 91330 - protein, 10 aa, synthetic construct
EKFRGDYTSM

SEQ ID NO: 91331 - protein, 10 aa, synthetic construct
EKFRGDFQNT

SEQ ID NO: 91332 - protein, 10 aa, synthetic construct
EKHRGDFNNT

SEQ ID NO: 91333 - protein, 10 aa, synthetic construct
EKHRGDFNNL

SEQ ID NO: 91334 - protein, 10 aa, synthetic construct
EKSRGDFNNT

SEQ ID NO: 91335 - protein, 10 aa, synthetic construct
EKSRGDFNNL

SEQ ID NO: 91336 - protein, 10 aa, synthetic construct
EKTRGDFNNT

SEQ ID NO: 91337 - protein, 10 aa, synthetic construct
EKTRGDFNNL

SEQ ID NO: 91338 - protein, 10 aa, synthetic construct
DRTRGDRGQI

SEQ ID NO: 91339 - protein, 10 aa, synthetic construct
EKYRGDYNSL

SEQ ID NO: 91340 - protein, 10 aa, synthetic construct
EKYRGDYTSM

SEQ ID NO: 91341 - protein, 10 aa, synthetic construct
EKYRGDFQNT

SEQ ID NO: 91342 - protein, 10 aa, synthetic construct
EKQRGDFNNT

SEQ ID NO: 91343 - protein, 10 aa, synthetic construct
EKQRGDFNNL

SEQ ID NO: 91344 - protein, 10 aa, synthetic construct
EKDRGDFNNT

SEQ ID NO: 91345 - protein, 10 aa, synthetic construct
EKDRGDFNNL

SEQ ID NO: 91346 - protein, 10 aa, synthetic construct
EKERGDFNNT

SEQ ID NO: 91347 - protein, 10 aa, synthetic construct
EKERGDFNNL

SEQ ID NO: 91348 - protein, 10 aa, synthetic construct
EHIRGDFNNT

SEQ ID NO: 91349 - protein, 10 aa, synthetic construct
DRTRGDRQGI

SEQ ID NO: 91350 - protein, 10 aa, synthetic construct
EHIRGDFNNL

SEQ ID NO: 91351 - protein, 10 aa, synthetic construct
EHMRGDFNNT

SEQ ID NO: 91352 - protein, 10 aa, synthetic construct
EHMRGDFNNL

SEQ ID NO: 91353 - protein, 10 aa, synthetic construct
EHFRGDFNNT

SEQ ID NO: 91354 - protein, 10 aa, synthetic construct
EHFRGDFNNL

SEQ ID NO: 91355 - protein, 10 aa, synthetic construct
EHKRGDFNNT

SEQ ID NO: 91356 - protein, 10 aa, synthetic construct
EHKRGDFNNL

SEQ ID NO: 91357 - protein, 10 aa, synthetic construct
EHYRGDFNNT

SEQ ID NO: 91358 - protein, 10 aa, synthetic construct
EHYRGDFNNL

SEQ ID NO: 91359 - protein, 10 aa, synthetic construct
EHNRGDFNNT

SEQ ID NO: 91360 - protein, 10 aa, synthetic construct
DRTRGDRSVV

SEQ ID NO: 91361 - protein, 10 aa, synthetic construct
EHNRGDFNNL

SEQ ID NO: 91362 - protein, 10 aa, synthetic construct
ETIRGDFNNT

SEQ ID NO: 91363 - protein, 10 aa, synthetic construct
ETIRGDFNNL

SEQ ID NO: 91364 - protein, 10 aa, synthetic construct
ETMRGDFNNT

SEQ ID NO: 91365 - protein, 10 aa, synthetic construct
ETMRGDFNNL

SEQ ID NO: 91366 - protein, 10 aa, synthetic construct
ETFRGDFNNT

SEQ ID NO: 91367 - protein, 10 aa, synthetic construct
ETFRGDFNNL

SEQ ID NO: 91368 - protein, 10 aa, synthetic construct
ETKRGDFNNT

SEQ ID NO: 91369 - protein, 10 aa, synthetic construct
ETKRGDFNNL

SEQ ID NO: 91370 - protein, 10 aa, synthetic construct
ETYRGDFNNT

SEQ ID NO: 91371 - protein, 10 aa, synthetic construct
DRTRGDRGVV

SEQ ID NO: 91372 - protein, 10 aa, synthetic construct
ETYRGDFNNL

SEQ ID NO: 91373 - protein, 10 aa, synthetic construct
ETNRGDFNNT

SEQ ID NO: 91374 - protein, 10 aa, synthetic construct
ETNRGDFNNL

SEQ ID NO: 91375 - protein, 10 aa, synthetic construct
EYVRGDFNNT

SEQ ID NO: 91376 - protein, 10 aa, synthetic construct
EYVRGDFNNL

SEQ ID NO: 91377 - protein, 10 aa, synthetic construct
EYLRGDFNNT

SEQ ID NO: 91378 - protein, 10 aa, synthetic construct
EYLRGDFNNL

SEQ ID NO: 91379 - protein, 10 aa, synthetic construct
EYIRGDYNSL

SEQ ID NO: 91380 - protein, 10 aa, synthetic construct
EYIRGDYTSM

SEQ ID NO: 91381 - protein, 10 aa, synthetic construct
EYIRGDFQNT

SEQ ID NO: 91382 - protein, 10 aa, synthetic construct
DRTRGDRSQT

SEQ ID NO: 91383 - protein, 10 aa, synthetic construct
EYMRGDYNSL

SEQ ID NO: 91384 - protein, 10 aa, synthetic construct
EYMRGDYTSM

SEQ ID NO: 91385 - protein, 10 aa, synthetic construct
EYMRGDFQNT

SEQ ID NO: 91386 - protein, 10 aa, synthetic construct
EYWRGDFNNT

SEQ ID NO: 91387 - protein, 10 aa, synthetic construct
EYWRGDFNNL

SEQ ID NO: 91388 - protein, 10 aa, synthetic construct
EYFRGDYNSL

SEQ ID NO: 91389 - protein, 10 aa, synthetic construct
EYFRGDYTSM

SEQ ID NO: 91390 - protein, 10 aa, synthetic construct
EYFRGDFQNT

SEQ ID NO: 91391 - protein, 10 aa, synthetic construct
EYKRGDYNSL

SEQ ID NO: 91392 - protein, 10 aa, synthetic construct
EYKRGDYTSM

SEQ ID NO: 91393 - protein, 10 aa, synthetic construct
DRQRGDRGQI

SEQ ID NO: 91394 - protein, 10 aa, synthetic construct
EYKRGDFQNT

SEQ ID NO: 91395 - protein, 10 aa, synthetic construct
EYHRGDFNNT

SEQ ID NO: 91396 - protein, 10 aa, synthetic construct
EYHRGDFNNL

SEQ ID NO: 91397 - protein, 10 aa, synthetic construct
EYSRGDFNNT

SEQ ID NO: 91398 - protein, 10 aa, synthetic construct
EYSRGDFNNL

SEQ ID NO: 91399 - protein, 10 aa, synthetic construct
EYTRGDFNNT

SEQ ID NO: 91400 - protein, 10 aa, synthetic construct
EYTRGDFNNL

SEQ ID NO: 91401 - protein, 10 aa, synthetic construct
EYYRGDYNSL

SEQ ID NO: 91402 - protein, 10 aa, synthetic construct
EYYRGDYTSM

SEQ ID NO: 91403 - protein, 10 aa, synthetic construct
EYYRGDFQNT

SEQ ID NO: 91404 - protein, 10 aa, synthetic construct
SFFRGDFNNL

SEQ ID NO: 91405 - protein, 10 aa, synthetic construct
DRQRGDRQGI

SEQ ID NO: 91406 - protein, 10 aa, synthetic construct
EYNRGDYNSL

SEQ ID NO: 91407 - protein, 10 aa, synthetic construct
EYNRGDYTSM

SEQ ID NO: 91408 - protein, 10 aa, synthetic construct
EYNRGDFQNT

SEQ ID NO: 91409 - protein, 10 aa, synthetic construct
EYQRGDFNNT

SEQ ID NO: 91410 - protein, 10 aa, synthetic construct
EYQRGDFNNL

SEQ ID NO: 91411 - protein, 10 aa, synthetic construct
EYDRGDFNNT

SEQ ID NO: 91412 - protein, 10 aa, synthetic construct
EYDRGDFNNL

SEQ ID NO: 91413 - protein, 10 aa, synthetic construct
EYERGDFNNT

SEQ ID NO: 91414 - protein, 10 aa, synthetic construct
EYERGDFNNL

SEQ ID NO: 91415 - protein, 10 aa, synthetic construct
ENVRGDFNNT

SEQ ID NO: 91416 - protein, 10 aa, synthetic construct
DRQRGDRSVV

SEQ ID NO: 91417 - protein, 10 aa, synthetic construct
ENVRGDFNNL

SEQ ID NO: 91418 - protein, 10 aa, synthetic construct
ENLRGDFNNT

SEQ ID NO: 91419 - protein, 10 aa, synthetic construct
ENLRGDFNNL

SEQ ID NO: 91420 - protein, 10 aa, synthetic construct
ENIRGDYNSL

SEQ ID NO: 91421 - protein, 10 aa, synthetic construct
ENIRGDYTSM

SEQ ID NO: 91422 - protein, 10 aa, synthetic construct
ENIRGDFQNT

SEQ ID NO: 91423 - protein, 10 aa, synthetic construct
ENMRGDYNSL

SEQ ID NO: 91424 - protein, 10 aa, synthetic construct
ENMRGDYTSM

SEQ ID NO: 91425 - protein, 10 aa, synthetic construct
ENMRGDFQNT

SEQ ID NO: 91426 - protein, 10 aa, synthetic construct
ENWRGDFNNT

SEQ ID NO: 91427 - protein, 10 aa, synthetic construct
DRQRGDRGVV

SEQ ID NO: 91428 - protein, 10 aa, synthetic construct
ENWRGDFNNL

SEQ ID NO: 91429 - protein, 10 aa, synthetic construct
ENFRGDYNSL

SEQ ID NO: 91430 - protein, 10 aa, synthetic construct
ENFRGDYTSM

SEQ ID NO: 91431 - protein, 10 aa, synthetic construct
ENFRGDFQNT

SEQ ID NO: 91432 - protein, 10 aa, synthetic construct
ENKRGDYNSL

SEQ ID NO: 91433 - protein, 10 aa, synthetic construct
ENKRGDYTSM

SEQ ID NO: 91434 - protein, 10 aa, synthetic construct
ENKRGDFQNT

SEQ ID NO: 91435 - protein, 10 aa, synthetic construct
ENHRGDFNNT

SEQ ID NO: 91436 - protein, 10 aa, synthetic construct
ENHRGDFNNL

SEQ ID NO: 91437 - protein, 10 aa, synthetic construct
ENSRGDFNNT

SEQ ID NO: 91438 - protein, 10 aa, synthetic construct
DRQRGDRSQT

SEQ ID NO: 91439 - protein, 10 aa, synthetic construct
ENSRGDFNNL

SEQ ID NO: 91440 - protein, 10 aa, synthetic construct
ENTRGDFNNT

SEQ ID NO: 91441 - protein, 10 aa, synthetic construct
ENTRGDFNNL

SEQ ID NO: 91442 - protein, 10 aa, synthetic construct
ENYRGDYNSL

SEQ ID NO: 91443 - protein, 10 aa, synthetic construct
ENYRGDYTSM

SEQ ID NO: 91444 - protein, 10 aa, synthetic construct
ENYRGDFQNT

SEQ ID NO: 91445 - protein, 10 aa, synthetic construct
ENNRGDYNSL

SEQ ID NO: 91446 - protein, 10 aa, synthetic construct
ENNRGDYTSM

SEQ ID NO: 91447 - protein, 10 aa, synthetic construct
ENNRGDFQNT

SEQ ID NO: 91448 - protein, 10 aa, synthetic construct
ENQRGDFNNT

SEQ ID NO: 91449 - protein, 10 aa, synthetic construct
DRDRGDRGQI

SEQ ID NO: 91450 - protein, 10 aa, synthetic construct
ENQRGDFNNL

SEQ ID NO: 91451 - protein, 10 aa, synthetic construct
ENDRGDFNNT

SEQ ID NO: 91452 - protein, 10 aa, synthetic construct
ENDRGDFNNL

SEQ ID NO: 91453 - protein, 10 aa, synthetic construct
ENERGDFNNT

SEQ ID NO: 91454 - protein, 10 aa, synthetic construct
ENERGDFNNL

SEQ ID NO: 91455 - protein, 10 aa, synthetic construct
EQIRGDFNNT

SEQ ID NO: 91456 - protein, 10 aa, synthetic construct
EQIRGDFNNL

SEQ ID NO: 91457 - protein, 10 aa, synthetic construct
EQMRGDFNNT

SEQ ID NO: 91458 - protein, 10 aa, synthetic construct
EQMRGDFNNL

SEQ ID NO: 91459 - protein, 10 aa, synthetic construct
EQFRGDFNNT

SEQ ID NO: 91460 - protein, 10 aa, synthetic construct
DRDRGDRQGI

SEQ ID NO: 91461 - protein, 10 aa, synthetic construct
EQFRGDFNNL

SEQ ID NO: 91462 - protein, 10 aa, synthetic construct
EQKRGDFNNT

SEQ ID NO: 91463 - protein, 10 aa, synthetic construct
EQKRGDFNNL

SEQ ID NO: 91464 - protein, 10 aa, synthetic construct
EQYRGDFNNT

SEQ ID NO: 91465 - protein, 10 aa, synthetic construct
EQYRGDFNNL

SEQ ID NO: 91466 - protein, 10 aa, synthetic construct
EQNRGDFNNT

SEQ ID NO: 91467 - protein, 10 aa, synthetic construct
EQNRGDFNNL

SEQ ID NO: 91468 - protein, 10 aa, synthetic construct
EDIRGDFNNT

SEQ ID NO: 91469 - protein, 10 aa, synthetic construct
EDIRGDFNNL

SEQ ID NO: 91470 - protein, 10 aa, synthetic construct
EDMRGDFNNT

SEQ ID NO: 91471 - protein, 10 aa, synthetic construct
DRDRGDRSVV

SEQ ID NO: 91472 - protein, 10 aa, synthetic construct
EDMRGDFNNL

SEQ ID NO: 91473 - protein, 10 aa, synthetic construct
EDFRGDFNNT

SEQ ID NO: 91474 - protein, 10 aa, synthetic construct
EDFRGDFNNL

SEQ ID NO: 91475 - protein, 10 aa, synthetic construct
EDKRGDFNNT

SEQ ID NO: 91476 - protein, 10 aa, synthetic construct
EDKRGDFNNL

SEQ ID NO: 91477 - protein, 10 aa, synthetic construct
EDYRGDFNNT

SEQ ID NO: 91478 - protein, 10 aa, synthetic construct
EDYRGDFNNL

SEQ ID NO: 91479 - protein, 10 aa, synthetic construct
EDNRGDFNNT

SEQ ID NO: 91480 - protein, 10 aa, synthetic construct
EDNRGDFNNL

SEQ ID NO: 91481 - protein, 10 aa, synthetic construct
EEIRGDFNNT

SEQ ID NO: 91482 - protein, 10 aa, synthetic construct
DRDRGDRGVV

SEQ ID NO: 91483 - protein, 10 aa, synthetic construct
EEIRGDFNNL

SEQ ID NO: 91484 - protein, 10 aa, synthetic construct
EEMRGDFNNT

SEQ ID NO: 91485 - protein, 10 aa, synthetic construct
EEMRGDFNNL

SEQ ID NO: 91486 - protein, 10 aa, synthetic construct
EEFRGDFNNT

SEQ ID NO: 91487 - protein, 10 aa, synthetic construct
EEFRGDFNNL

SEQ ID NO: 91488 - protein, 10 aa, synthetic construct
EEKRGDFNNT

SEQ ID NO: 91489 - protein, 10 aa, synthetic construct
EEKRGDFNNL

SEQ ID NO: 91490 - protein, 10 aa, synthetic construct
EEYRGDFNNT

SEQ ID NO: 91491 - protein, 10 aa, synthetic construct
EEYRGDFNNL

SEQ ID NO: 91492 - protein, 10 aa, synthetic construct
EENRGDFNNT

SEQ ID NO: 91493 - protein, 10 aa, synthetic construct
DRDRGDRSQT

SEQ ID NO: 91494 - protein, 10 aa, synthetic construct
EENRGDFNNL

SEQ ID NO: 91495 - protein, 10 aa, synthetic construct
NGIRGDFNNT

SEQ ID NO: 91496 - protein, 10 aa, synthetic construct
NGIRGDFNNL

SEQ ID NO: 91497 - protein, 10 aa, synthetic construct
NGMRGDFNNT

SEQ ID NO: 91498 - protein, 10 aa, synthetic construct
NGMRGDFNNL

SEQ ID NO: 91499 - protein, 10 aa, synthetic construct
NGFRGDFNNT

SEQ ID NO: 91500 - protein, 10 aa, synthetic construct
NGFRGDFNNL

SEQ ID NO: 91501 - protein, 10 aa, synthetic construct
NGKRGDFNNT

SEQ ID NO: 91502 - protein, 10 aa, synthetic construct
NGKRGDFNNL

SEQ ID NO: 91503 - protein, 10 aa, synthetic construct
NGYRGDFNNT

SEQ ID NO: 91504 - protein, 10 aa, synthetic construct
DRERGDRGQI

SEQ ID NO: 91505 - protein, 10 aa, synthetic construct
NGYRGDFNNL

SEQ ID NO: 91506 - protein, 10 aa, synthetic construct
NGNRGDFNNT

SEQ ID NO: 91507 - protein, 10 aa, synthetic construct
NGNRGDFNNL

SEQ ID NO: 91508 - protein, 10 aa, synthetic construct
NAIRGDFNNT

SEQ ID NO: 91509 - protein, 10 aa, synthetic construct
NAIRGDFNNL

SEQ ID NO: 91510 - protein, 10 aa, synthetic construct
NAMRGDFNNT

SEQ ID NO: 91511 - protein, 10 aa, synthetic construct
NAMRGDFNNL

SEQ ID NO: 91512 - protein, 10 aa, synthetic construct
NAFRGDFNNT

SEQ ID NO: 91513 - protein, 10 aa, synthetic construct
NAFRGDFNNL

SEQ ID NO: 91514 - protein, 10 aa, synthetic construct
NAKRGDFNNT

SEQ ID NO: 91515 - protein, 10 aa, synthetic construct
TFFRGDFNNT

SEQ ID NO: 91516 - protein, 10 aa, synthetic construct
DRERGDRQGI

SEQ ID NO: 91517 - protein, 10 aa, synthetic construct
NAKRGDFNNL

SEQ ID NO: 91518 - protein, 10 aa, synthetic construct
NAYRGDFNNT

SEQ ID NO: 91519 - protein, 10 aa, synthetic construct
NAYRGDFNNL

SEQ ID NO: 91520 - protein, 10 aa, synthetic construct
NANRGDFNNT

SEQ ID NO: 91521 - protein, 10 aa, synthetic construct
NANRGDFNNL

SEQ ID NO: 91522 - protein, 10 aa, synthetic construct
NVIRGDFNNT

SEQ ID NO: 91523 - protein, 10 aa, synthetic construct
NVIRGDFNNL

SEQ ID NO: 91524 - protein, 10 aa, synthetic construct
NVMRGDFNNT

SEQ ID NO: 91525 - protein, 10 aa, synthetic construct
NVMRGDFNNL

SEQ ID NO: 91526 - protein, 10 aa, synthetic construct
NVFRGDFNNT

SEQ ID NO: 91527 - protein, 10 aa, synthetic construct
DRERGDRSVV

SEQ ID NO: 91528 - protein, 10 aa, synthetic construct
NVFRGDFNNL

SEQ ID NO: 91529 - protein, 10 aa, synthetic construct
NVKRGDFNNT

SEQ ID NO: 91530 - protein, 10 aa, synthetic construct
NVKRGDFNNL

SEQ ID NO: 91531 - protein, 10 aa, synthetic construct
NVYRGDFNNT

SEQ ID NO: 91532 - protein, 10 aa, synthetic construct
NVYRGDFNNL

SEQ ID NO: 91533 - protein, 10 aa, synthetic construct
NVNRGDFNNT

SEQ ID NO: 91534 - protein, 10 aa, synthetic construct
NVNRGDFNNL

SEQ ID NO: 91535 - protein, 10 aa, synthetic construct
NPIRGDFNNT

SEQ ID NO: 91536 - protein, 10 aa, synthetic construct
NPIRGDFNNL

SEQ ID NO: 91537 - protein, 10 aa, synthetic construct
NPMRGDFNNT

SEQ ID NO: 91538 - protein, 10 aa, synthetic construct
DRERGDRGVV

SEQ ID NO: 91539 - protein, 10 aa, synthetic construct
NPMRGDFNNL

SEQ ID NO: 91540 - protein, 10 aa, synthetic construct
NPFRGDFNNT

SEQ ID NO: 91541 - protein, 10 aa, synthetic construct
NPFRGDFNNL

SEQ ID NO: 91542 - protein, 10 aa, synthetic construct
NPKRGDFNNT

SEQ ID NO: 91543 - protein, 10 aa, synthetic construct
NPKRGDFNNL

SEQ ID NO: 91544 - protein, 10 aa, synthetic construct
NPYRGDFNNT

SEQ ID NO: 91545 - protein, 10 aa, synthetic construct
NPYRGDFNNL

SEQ ID NO: 91546 - protein, 10 aa, synthetic construct
NPNRGDFNNT

SEQ ID NO: 91547 - protein, 10 aa, synthetic construct
NPNRGDFNNL

SEQ ID NO: 91548 - protein, 10 aa, synthetic construct
NLIRGDFNNT

SEQ ID NO: 91549 - protein, 10 aa, synthetic construct
DRERGDRSQT

SEQ ID NO: 91550 - protein, 10 aa, synthetic construct
NLIRGDFNNL

SEQ ID NO: 91551 - protein, 10 aa, synthetic construct
NLMRGDFNNT

SEQ ID NO: 91552 - protein, 10 aa, synthetic construct
NLMRGDFNNL

SEQ ID NO: 91553 - protein, 10 aa, synthetic construct
NLFRGDFNNT

SEQ ID NO: 91554 - protein, 10 aa, synthetic construct
NLFRGDFNNL

SEQ ID NO: 91555 - protein, 10 aa, synthetic construct
NLKRGDFNNT

SEQ ID NO: 91556 - protein, 10 aa, synthetic construct
NLKRGDFNNL

SEQ ID NO: 91557 - protein, 10 aa, synthetic construct
NLYRGDFNNT

SEQ ID NO: 91558 - protein, 10 aa, synthetic construct
NLYRGDFNNL

SEQ ID NO: 91559 - protein, 10 aa, synthetic construct
NLNRGDFNNT

SEQ ID NO: 91560 - protein, 10 aa, synthetic construct
DHGRGDRGQI

SEQ ID NO: 91561 - protein, 10 aa, synthetic construct
NLNRGDFNNL

SEQ ID NO: 91562 - protein, 10 aa, synthetic construct
NIGRGDFNNT

SEQ ID NO: 91563 - protein, 10 aa, synthetic construct
NIGRGDFNNL

SEQ ID NO: 91564 - protein, 10 aa, synthetic construct
NIARGDFNNT

SEQ ID NO: 91565 - protein, 10 aa, synthetic construct
NIARGDFNNL

SEQ ID NO: 91566 - protein, 10 aa, synthetic construct
NIVRGDYNSL

SEQ ID NO: 91567 - protein, 10 aa, synthetic construct
NIVRGDYTSM

SEQ ID NO: 91568 - protein, 10 aa, synthetic construct
NIVRGDFQNT

SEQ ID NO: 91569 - protein, 10 aa, synthetic construct
NIPRGDFNNT

SEQ ID NO: 91570 - protein, 10 aa, synthetic construct
NIPRGDFNNL

SEQ ID NO: 91571 - protein, 10 aa, synthetic construct
DHGRGDRQGI

SEQ ID NO: 91572 - protein, 10 aa, synthetic construct
NILRGDYNSL

SEQ ID NO: 91573 - protein, 10 aa, synthetic construct
NILRGDYTSM

SEQ ID NO: 91574 - protein, 10 aa, synthetic construct
NILRGDFQNT

SEQ ID NO: 91575 - protein, 10 aa, synthetic construct
NIIRGDYTSV

SEQ ID NO: 91576 - protein, 10 aa, synthetic construct
NIMRGDYTSV

SEQ ID NO: 91577 - protein, 10 aa, synthetic construct
NIWRGDYNSL

SEQ ID NO: 91578 - protein, 10 aa, synthetic construct
NIWRGDYTSM

SEQ ID NO: 91579 - protein, 10 aa, synthetic construct
NIWRGDFQNT

SEQ ID NO: 91580 - protein, 10 aa, synthetic construct
NIFRGDYTSV

SEQ ID NO: 91581 - protein, 10 aa, synthetic construct
NIKRGDYTSV

SEQ ID NO: 91582 - protein, 10 aa, synthetic construct
DHGRGDRSVV

SEQ ID NO: 91583 - protein, 10 aa, synthetic construct
NIRRGDFNNT

SEQ ID NO: 91584 - protein, 10 aa, synthetic construct
NIRRGDFNNL

SEQ ID NO: 91585 - protein, 10 aa, synthetic construct
NIHRGDYNSL

SEQ ID NO: 91586 - protein, 10 aa, synthetic construct
NIHRGDYTSM

SEQ ID NO: 91587 - protein, 10 aa, synthetic construct
NIHRGDFQNT

SEQ ID NO: 91588 - protein, 10 aa, synthetic construct
NISRGDYNSL

SEQ ID NO: 91589 - protein, 10 aa, synthetic construct
NISRGDYTSM

SEQ ID NO: 91590 - protein, 10 aa, synthetic construct
NISRGDFQNT

SEQ ID NO: 91591 - protein, 10 aa, synthetic construct
NITRGDYNSL

SEQ ID NO: 91592 - protein, 10 aa, synthetic construct
NITRGDYTSM

SEQ ID NO: 91593 - protein, 10 aa, synthetic construct
DHGRGDRGVV

SEQ ID NO: 91594 - protein, 10 aa, synthetic construct
NITRGDFQNT

SEQ ID NO: 91595 - protein, 10 aa, synthetic construct
NIYRGDYTSV

SEQ ID NO: 91596 - protein, 10 aa, synthetic construct
NINRGDYTSV

SEQ ID NO: 91597 - protein, 10 aa, synthetic construct
NIQRGDYNSL

SEQ ID NO: 91598 - protein, 10 aa, synthetic construct
NIQRGDYTSM

SEQ ID NO: 91599 - protein, 10 aa, synthetic construct
NIQRGDFQNT

SEQ ID NO: 91600 - protein, 10 aa, synthetic construct
NIDRGDYNSL

SEQ ID NO: 91601 - protein, 10 aa, synthetic construct
NIDRGDYTSM

SEQ ID NO: 91602 - protein, 10 aa, synthetic construct
NIDRGDFQNT

SEQ ID NO: 91603 - protein, 10 aa, synthetic construct
NIERGDYNSL

SEQ ID NO: 91604 - protein, 10 aa, synthetic construct
DHGRGDRSQT

SEQ ID NO: 91605 - protein, 10 aa, synthetic construct
NIERGDYTSM

SEQ ID NO: 91606 - protein, 10 aa, synthetic construct
NIERGDFQNT

SEQ ID NO: 91607 - protein, 10 aa, synthetic construct
NMGRGDFNNT

SEQ ID NO: 91608 - protein, 10 aa, synthetic construct
NMGRGDFNNL

SEQ ID NO: 91609 - protein, 10 aa, synthetic construct
NMARGDFNNT

SEQ ID NO: 91610 - protein, 10 aa, synthetic construct
NMARGDFNNL

SEQ ID NO: 91611 - protein, 10 aa, synthetic construct
NMVRGDFNNT

SEQ ID NO: 91612 - protein, 10 aa, synthetic construct
NMVRGDFNNL

SEQ ID NO: 91613 - protein, 10 aa, synthetic construct
NMPRGDFNNT

SEQ ID NO: 91614 - protein, 10 aa, synthetic construct
NMPRGDFNNL

SEQ ID NO: 91615 - protein, 10 aa, synthetic construct
DHARGDRGQI

SEQ ID NO: 91616 - protein, 10 aa, synthetic construct
NMLRGDFNNT

SEQ ID NO: 91617 - protein, 10 aa, synthetic construct
NMLRGDFNNL

SEQ ID NO: 91618 - protein, 10 aa, synthetic construct
NMIRGDHVNL

SEQ ID NO: 91619 - protein, 10 aa, synthetic construct
NMIRGDYNSL

SEQ ID NO: 91620 - protein, 10 aa, synthetic construct
NMIRGDYTSM

SEQ ID NO: 91621 - protein, 10 aa, synthetic construct
NMMRGDYNSL

SEQ ID NO: 91622 - protein, 10 aa, synthetic construct
NMMRGDYTSM

SEQ ID NO: 91623 - protein, 10 aa, synthetic construct
NMMRGDFQNT

SEQ ID NO: 91624 - protein, 10 aa, synthetic construct
NMWRGDFNNT

SEQ ID NO: 91625 - protein, 10 aa, synthetic construct
NMWRGDFNNL

SEQ ID NO: 91626 - protein, 10 aa, synthetic construct
TFFRGDFNNL

SEQ ID NO: 91627 - protein, 10 aa, synthetic construct
DHARGDRQGI

SEQ ID NO: 91628 - protein, 10 aa, synthetic construct
NMFRGDHVNL

SEQ ID NO: 91629 - protein, 10 aa, synthetic construct
NMFRGDYNSL

SEQ ID NO: 91630 - protein, 10 aa, synthetic construct
NMFRGDYTSM

SEQ ID NO: 91631 - protein, 10 aa, synthetic construct
NMKRGDHVNL

SEQ ID NO: 91632 - protein, 10 aa, synthetic construct
NMKRGDYNSL

SEQ ID NO: 91633 - protein, 10 aa, synthetic construct
NMKRGDYTSM

SEQ ID NO: 91634 - protein, 10 aa, synthetic construct
NMRRGDFNNT

SEQ ID NO: 91635 - protein, 10 aa, synthetic construct
NMRRGDFNNL

SEQ ID NO: 91636 - protein, 10 aa, synthetic construct
NMHRGDFQNT

SEQ ID NO: 91637 - protein, 10 aa, synthetic construct
NMSRGDFNNT

SEQ ID NO: 91638 - protein, 10 aa, synthetic construct
DHARGDRSVV

SEQ ID NO: 91639 - protein, 10 aa, synthetic construct
NMSRGDFNNL

SEQ ID NO: 91640 - protein, 10 aa, synthetic construct
NMTRGDFQNT

SEQ ID NO: 91641 - protein, 10 aa, synthetic construct
NMYRGDHVNL

SEQ ID NO: 91642 - protein, 10 aa, synthetic construct
NMYRGDYNSL

SEQ ID NO: 91643 - protein, 10 aa, synthetic construct
NMYRGDYTSM

SEQ ID NO: 91644 - protein, 10 aa, synthetic construct
NMNRGDHVNL

SEQ ID NO: 91645 - protein, 10 aa, synthetic construct
NMNRGDYNSL

SEQ ID NO: 91646 - protein, 10 aa, synthetic construct
NMNRGDYTSM

SEQ ID NO: 91647 - protein, 10 aa, synthetic construct
NMQRGDFQNT

SEQ ID NO: 91648 - protein, 10 aa, synthetic construct
NMDRGDFQNT

SEQ ID NO: 91649 - protein, 10 aa, synthetic construct
DHARGDRGVV

SEQ ID NO: 91650 - protein, 10 aa, synthetic construct
NMERGDFQNT

SEQ ID NO: 91651 - protein, 10 aa, synthetic construct
NWIRGDFQNT

SEQ ID NO: 91652 - protein, 10 aa, synthetic construct
NWMRGDFNNT

SEQ ID NO: 91653 - protein, 10 aa, synthetic construct
NWMRGDFNNL

SEQ ID NO: 91654 - protein, 10 aa, synthetic construct
NWFRGDFQNT

SEQ ID NO: 91655 - protein, 10 aa, synthetic construct
NWKRGDFQNT

SEQ ID NO: 91656 - protein, 10 aa, synthetic construct
NWHRGDFNNT

SEQ ID NO: 91657 - protein, 10 aa, synthetic construct
NWHRGDFNNL

SEQ ID NO: 91658 - protein, 10 aa, synthetic construct
NWTRGDFNNT

SEQ ID NO: 91659 - protein, 10 aa, synthetic construct
NWTRGDFNNL

SEQ ID NO: 91660 - protein, 10 aa, synthetic construct
DHARGDRSQT

SEQ ID NO: 91661 - protein, 10 aa, synthetic construct
NWYRGDFQNT

SEQ ID NO: 91662 - protein, 10 aa, synthetic construct
NWNRGDFQNT

SEQ ID NO: 91663 - protein, 10 aa, synthetic construct
NWQRGDFNNT

SEQ ID NO: 91664 - protein, 10 aa, synthetic construct
NWQRGDFNNL

SEQ ID NO: 91665 - protein, 10 aa, synthetic construct
NWDRGDFNNT

SEQ ID NO: 91666 - protein, 10 aa, synthetic construct
NWDRGDFNNL

SEQ ID NO: 91667 - protein, 10 aa, synthetic construct
NWERGDFNNT

SEQ ID NO: 91668 - protein, 10 aa, synthetic construct
NWERGDFNNL

SEQ ID NO: 91669 - protein, 10 aa, synthetic construct
NFGRGDFNNT

SEQ ID NO: 91670 - protein, 10 aa, synthetic construct
NFGRGDFNNL

SEQ ID NO: 91671 - protein, 10 aa, synthetic construct
DHPRGDRGQI

SEQ ID NO: 91672 - protein, 10 aa, synthetic construct
NFARGDFNNT

SEQ ID NO: 91673 - protein, 10 aa, synthetic construct
NFARGDFNNL

SEQ ID NO: 91674 - protein, 10 aa, synthetic construct
NFVRGDYNSL

SEQ ID NO: 91675 - protein, 10 aa, synthetic construct
NFVRGDYTSM

SEQ ID NO: 91676 - protein, 10 aa, synthetic construct
NFVRGDFQNT

SEQ ID NO: 91677 - protein, 10 aa, synthetic construct
NFPRGDFNNT

SEQ ID NO: 91678 - protein, 10 aa, synthetic construct
NFPRGDFNNL

SEQ ID NO: 91679 - protein, 10 aa, synthetic construct
NFLRGDYNSL

SEQ ID NO: 91680 - protein, 10 aa, synthetic construct
NFLRGDYTSM

SEQ ID NO: 91681 - protein, 10 aa, synthetic construct
NFLRGDFQNT

SEQ ID NO: 91682 - protein, 10 aa, synthetic construct
DHPRGDRQGI

SEQ ID NO: 91683 - protein, 10 aa, synthetic construct
NFIRGDYTSV

SEQ ID NO: 91684 - protein, 10 aa, synthetic construct
NFMRGDYTSV

SEQ ID NO: 91685 - protein, 10 aa, synthetic construct
NFWRGDYNSL

SEQ ID NO: 91686 - protein, 10 aa, synthetic construct
NFWRGDYTSM

SEQ ID NO: 91687 - protein, 10 aa, synthetic construct
NFWRGDFQNT

SEQ ID NO: 91688 - protein, 10 aa, synthetic construct
NFKRGDYTSV

SEQ ID NO: 91689 - protein, 10 aa, synthetic construct
NFRRGDFNNT

SEQ ID NO: 91690 - protein, 10 aa, synthetic construct
NFRRGDFNNL

SEQ ID NO: 91691 - protein, 10 aa, synthetic construct
NFHRGDYNSL

SEQ ID NO: 91692 - protein, 10 aa, synthetic construct
NFHRGDYTSM

SEQ ID NO: 91693 - protein, 10 aa, synthetic construct
DHPRGDRSVV

SEQ ID NO: 91694 - protein, 10 aa, synthetic construct
NFHRGDFQNT

SEQ ID NO: 91695 - protein, 10 aa, synthetic construct
NFSRGDYNSL

SEQ ID NO: 91696 - protein, 10 aa, synthetic construct
NFSRGDYTSM

SEQ ID NO: 91697 - protein, 10 aa, synthetic construct
NFSRGDFQNT

SEQ ID NO: 91698 - protein, 10 aa, synthetic construct
NFTRGDYNSL

SEQ ID NO: 91699 - protein, 10 aa, synthetic construct
NFTRGDYTSM

SEQ ID NO: 91700 - protein, 10 aa, synthetic construct
NFTRGDFQNT

SEQ ID NO: 91701 - protein, 10 aa, synthetic construct
NFYRGDYTSV

SEQ ID NO: 91702 - protein, 10 aa, synthetic construct
NFNRGDYTSV

SEQ ID NO: 91703 - protein, 10 aa, synthetic construct
NFQRGDYNSL

SEQ ID NO: 91704 - protein, 10 aa, synthetic construct
DHPRGDRGVV

SEQ ID NO: 91705 - protein, 10 aa, synthetic construct
NFQRGDYTSM

SEQ ID NO: 91706 - protein, 10 aa, synthetic construct
NFQRGDFQNT

SEQ ID NO: 91707 - protein, 10 aa, synthetic construct
NFDRGDYNSL

SEQ ID NO: 91708 - protein, 10 aa, synthetic construct
NFDRGDYTSM

SEQ ID NO: 91709 - protein, 10 aa, synthetic construct
NFDRGDFQNT

SEQ ID NO: 91710 - protein, 10 aa, synthetic construct
NFERGDYNSL

SEQ ID NO: 91711 - protein, 10 aa, synthetic construct
NFERGDYTSM

SEQ ID NO: 91712 - protein, 10 aa, synthetic construct
NFERGDFQNT

SEQ ID NO: 91713 - protein, 10 aa, synthetic construct
NKGRGDFNNT

SEQ ID NO: 91714 - protein, 10 aa, synthetic construct
NKGRGDFNNL

SEQ ID NO: 91715 - protein, 10 aa, synthetic construct
DHPRGDRSQT

SEQ ID NO: 91716 - protein, 10 aa, synthetic construct
NKARGDFNNT

SEQ ID NO: 91717 - protein, 10 aa, synthetic construct
NKARGDFNNL

SEQ ID NO: 91718 - protein, 10 aa, synthetic construct
NKVRGDYNSL

SEQ ID NO: 91719 - protein, 10 aa, synthetic construct
NKVRGDYTSM

SEQ ID NO: 91720 - protein, 10 aa, synthetic construct
NKVRGDFQNT

SEQ ID NO: 91721 - protein, 10 aa, synthetic construct
NKPRGDFNNT

SEQ ID NO: 91722 - protein, 10 aa, synthetic construct
NKPRGDFNNL

SEQ ID NO: 91723 - protein, 10 aa, synthetic construct
NKLRGDYNSL

SEQ ID NO: 91724 - protein, 10 aa, synthetic construct
NKLRGDYTSM

SEQ ID NO: 91725 - protein, 10 aa, synthetic construct
NKLRGDFQNT

SEQ ID NO: 91726 - protein, 10 aa, synthetic construct
DHRRGDRGQI

SEQ ID NO: 91727 - protein, 10 aa, synthetic construct
NKIRGDYTSV

SEQ ID NO: 91728 - protein, 10 aa, synthetic construct
NKMRGDYTSV

SEQ ID NO: 91729 - protein, 10 aa, synthetic construct
NKWRGDYNSL

SEQ ID NO: 91730 - protein, 10 aa, synthetic construct
NKWRGDYTSM

SEQ ID NO: 91731 - protein, 10 aa, synthetic construct
NKWRGDFQNT

SEQ ID NO: 91732 - protein, 10 aa, synthetic construct
NKFRGDYTSV

SEQ ID NO: 91733 - protein, 10 aa, synthetic construct
NKRRGDFNNT

SEQ ID NO: 91734 - protein, 10 aa, synthetic construct
NKRRGDFNNL

SEQ ID NO: 91735 - protein, 10 aa, synthetic construct
NKHRGDYNSL

SEQ ID NO: 91736 - protein, 10 aa, synthetic construct
NKHRGDYTSM

SEQ ID NO: 91737 - protein, 10 aa, synthetic construct
TKNRGDYVGL

SEQ ID NO: 91738 - protein, 10 aa, synthetic construct
EFFRGDFNNT

SEQ ID NO: 91739 - protein, 10 aa, synthetic construct
DHRRGDRQGI

SEQ ID NO: 91740 - protein, 10 aa, synthetic construct
NKHRGDFQNT

SEQ ID NO: 91741 - protein, 10 aa, synthetic construct
NKSRGDYNSL

SEQ ID NO: 91742 - protein, 10 aa, synthetic construct
NKSRGDYTSM

SEQ ID NO: 91743 - protein, 10 aa, synthetic construct
NKSRGDFQNT

SEQ ID NO: 91744 - protein, 10 aa, synthetic construct
NKTRGDYNSL

SEQ ID NO: 91745 - protein, 10 aa, synthetic construct
NKTRGDYTSM

SEQ ID NO: 91746 - protein, 10 aa, synthetic construct
NKTRGDFQNT

SEQ ID NO: 91747 - protein, 10 aa, synthetic construct
NKYRGDYTSV

SEQ ID NO: 91748 - protein, 10 aa, synthetic construct
NKQRGDYNSL

SEQ ID NO: 91749 - protein, 10 aa, synthetic construct
NKQRGDYTSM

SEQ ID NO: 91750 - protein, 10 aa, synthetic construct
DHRRGDRSVV

SEQ ID NO: 91751 - protein, 10 aa, synthetic construct
NKQRGDFQNT

SEQ ID NO: 91752 - protein, 10 aa, synthetic construct
NKDRGDYNSL

SEQ ID NO: 91753 - protein, 10 aa, synthetic construct
NKDRGDYTSM

SEQ ID NO: 91754 - protein, 10 aa, synthetic construct
NKDRGDFQNT

SEQ ID NO: 91755 - protein, 10 aa, synthetic construct
NKERGDYNSL

SEQ ID NO: 91756 - protein, 10 aa, synthetic construct
NKERGDYTSM

SEQ ID NO: 91757 - protein, 10 aa, synthetic construct
NKERGDFQNT

SEQ ID NO: 91758 - protein, 10 aa, synthetic construct
NRIRGDFNNT

SEQ ID NO: 91759 - protein, 10 aa, synthetic construct
NRIRGDFNNL

SEQ ID NO: 91760 - protein, 10 aa, synthetic construct
NRMRGDFNNT

SEQ ID NO: 91761 - protein, 10 aa, synthetic construct
DHRRGDRGVV

SEQ ID NO: 91762 - protein, 10 aa, synthetic construct
NRMRGDFNNL

SEQ ID NO: 91763 - protein, 10 aa, synthetic construct
NRFRGDFNNT

SEQ ID NO: 91764 - protein, 10 aa, synthetic construct
NRFRGDFNNL

SEQ ID NO: 91765 - protein, 10 aa, synthetic construct
NRKRGDFNNT

SEQ ID NO: 91766 - protein, 10 aa, synthetic construct
NRKRGDFNNL

SEQ ID NO: 91767 - protein, 10 aa, synthetic construct
NRYRGDFNNT

SEQ ID NO: 91768 - protein, 10 aa, synthetic construct
NRYRGDFNNL

SEQ ID NO: 91769 - protein, 10 aa, synthetic construct
NRNRGDFNNT

SEQ ID NO: 91770 - protein, 10 aa, synthetic construct
NRNRGDFNNL

SEQ ID NO: 91771 - protein, 10 aa, synthetic construct
NHVRGDFNNT

SEQ ID NO: 91772 - protein, 10 aa, synthetic construct
DHRRGDRSQT

SEQ ID NO: 91773 - protein, 10 aa, synthetic construct
NHVRGDFNNL

SEQ ID NO: 91774 - protein, 10 aa, synthetic construct
NHLRGDFNNT

SEQ ID NO: 91775 - protein, 10 aa, synthetic construct
NHLRGDFNNL

SEQ ID NO: 91776 - protein, 10 aa, synthetic construct
NHIRGDYNSL

SEQ ID NO: 91777 - protein, 10 aa, synthetic construct
NHIRGDYTSM

SEQ ID NO: 91778 - protein, 10 aa, synthetic construct
NHIRGDFQNT

SEQ ID NO: 91779 - protein, 10 aa, synthetic construct
NHMRGDYNSL

SEQ ID NO: 91780 - protein, 10 aa, synthetic construct
NHMRGDYTSM

SEQ ID NO: 91781 - protein, 10 aa, synthetic construct
NHMRGDFQNT

SEQ ID NO: 91782 - protein, 10 aa, synthetic construct
NHWRGDFNNT

SEQ ID NO: 91783 - protein, 10 aa, synthetic construct
DSGRGDHGVL

SEQ ID NO: 91784 - protein, 10 aa, synthetic construct
NHWRGDFNNL

SEQ ID NO: 91785 - protein, 10 aa, synthetic construct
NHFRGDYNSL

SEQ ID NO: 91786 - protein, 10 aa, synthetic construct
NHFRGDYTSM

SEQ ID NO: 91787 - protein, 10 aa, synthetic construct
NHFRGDFQNT

SEQ ID NO: 91788 - protein, 10 aa, synthetic construct
NHKRGDYNSL

SEQ ID NO: 91789 - protein, 10 aa, synthetic construct
NHKRGDYTSM

SEQ ID NO: 91790 - protein, 10 aa, synthetic construct
NHKRGDFQNT

SEQ ID NO: 91791 - protein, 10 aa, synthetic construct
NHHRGDFNNT

SEQ ID NO: 91792 - protein, 10 aa, synthetic construct
NHHRGDFNNL

SEQ ID NO: 91793 - protein, 10 aa, synthetic construct
NHSRGDFNNT

SEQ ID NO: 91794 - protein, 10 aa, synthetic construct
DSGRGDYVGL

SEQ ID NO: 91795 - protein, 10 aa, synthetic construct
NHSRGDFNNL

SEQ ID NO: 91796 - protein, 10 aa, synthetic construct
NHTRGDFNNT

SEQ ID NO: 91797 - protein, 10 aa, synthetic construct
NHTRGDFNNL

SEQ ID NO: 91798 - protein, 10 aa, synthetic construct
NHYRGDYNSL

SEQ ID NO: 91799 - protein, 10 aa, synthetic construct
NHYRGDYTSM

SEQ ID NO: 91800 - protein, 10 aa, synthetic construct
NHYRGDFQNT

SEQ ID NO: 91801 - protein, 10 aa, synthetic construct
NHNRGDYNSL

SEQ ID NO: 91802 - protein, 10 aa, synthetic construct
NHNRGDYTSM

SEQ ID NO: 91803 - protein, 10 aa, synthetic construct
NHNRGDFQNT

SEQ ID NO: 91804 - protein, 10 aa, synthetic construct
NHQRGDFNNT

SEQ ID NO: 91805 - protein, 10 aa, synthetic construct
DSGRGDQSTL

SEQ ID NO: 91806 - protein, 10 aa, synthetic construct
NHQRGDFNNL

SEQ ID NO: 91807 - protein, 10 aa, synthetic construct
NHDRGDFNNT

SEQ ID NO: 91808 - protein, 10 aa, synthetic construct
NHDRGDFNNL

SEQ ID NO: 91809 - protein, 10 aa, synthetic construct
NHERGDFNNT

SEQ ID NO: 91810 - protein, 10 aa, synthetic construct
NHERGDFNNL

SEQ ID NO: 91811 - protein, 10 aa, synthetic construct
NSIRGDFNNT

SEQ ID NO: 91812 - protein, 10 aa, synthetic construct
NSIRGDFNNL

SEQ ID NO: 91813 - protein, 10 aa, synthetic construct
NSMRGDFNNT

SEQ ID NO: 91814 - protein, 10 aa, synthetic construct
NSMRGDFNNL

SEQ ID NO: 91815 - protein, 10 aa, synthetic construct
NSFRGDFNNT

SEQ ID NO: 91816 - protein, 10 aa, synthetic construct
DSGRGDLLLS

SEQ ID NO: 91817 - protein, 10 aa, synthetic construct
NSFRGDFNNL

SEQ ID NO: 91818 - protein, 10 aa, synthetic construct
NSKRGDFNNT

SEQ ID NO: 91819 - protein, 10 aa, synthetic construct
NSKRGDFNNL

SEQ ID NO: 91820 - protein, 10 aa, synthetic construct
NSYRGDFNNT

SEQ ID NO: 91821 - protein, 10 aa, synthetic construct
NSYRGDFNNL

SEQ ID NO: 91822 - protein, 10 aa, synthetic construct
NSNRGDFNNT

SEQ ID NO: 91823 - protein, 10 aa, synthetic construct
NSNRGDFNNL

SEQ ID NO: 91824 - protein, 10 aa, synthetic construct
NTVRGDFNNT

SEQ ID NO: 91825 - protein, 10 aa, synthetic construct
NTVRGDFNNL

SEQ ID NO: 91826 - protein, 10 aa, synthetic construct
NTLRGDFNNT

SEQ ID NO: 91827 - protein, 10 aa, synthetic construct
DSARGDHGVL

SEQ ID NO: 91828 - protein, 10 aa, synthetic construct
NTLRGDFNNL

SEQ ID NO: 91829 - protein, 10 aa, synthetic construct
NTIRGDYNSL

SEQ ID NO: 91830 - protein, 10 aa, synthetic construct
NTIRGDYTSM

SEQ ID NO: 91831 - protein, 10 aa, synthetic construct
NTIRGDFQNT

SEQ ID NO: 91832 - protein, 10 aa, synthetic construct
NTMRGDYNSL

SEQ ID NO: 91833 - protein, 10 aa, synthetic construct
NTMRGDYTSM

SEQ ID NO: 91834 - protein, 10 aa, synthetic construct
NTMRGDFQNT

SEQ ID NO: 91835 - protein, 10 aa, synthetic construct
NTWRGDFNNT

SEQ ID NO: 91836 - protein, 10 aa, synthetic construct
NTWRGDFNNL

SEQ ID NO: 91837 - protein, 10 aa, synthetic construct
NTFRGDYNSL

SEQ ID NO: 91838 - protein, 10 aa, synthetic construct
DSARGDYVGL

SEQ ID NO: 91839 - protein, 10 aa, synthetic construct
NTFRGDYTSM

SEQ ID NO: 91840 - protein, 10 aa, synthetic construct
NTFRGDFQNT

SEQ ID NO: 91841 - protein, 10 aa, synthetic construct
NTKRGDYNSL

SEQ ID NO: 91842 - protein, 10 aa, synthetic construct
NTKRGDYTSM

SEQ ID NO: 91843 - protein, 10 aa, synthetic construct
NTKRGDFQNT

SEQ ID NO: 91844 - protein, 10 aa, synthetic construct
NTHRGDFNNT

SEQ ID NO: 91845 - protein, 10 aa, synthetic construct
NTHRGDFNNL

SEQ ID NO: 91846 - protein, 10 aa, synthetic construct
NTSRGDFNNT

SEQ ID NO: 91847 - protein, 10 aa, synthetic construct
NTSRGDFNNL

SEQ ID NO: 91848 - protein, 10 aa, synthetic construct
NTTRGDFNNT

SEQ ID NO: 91849 - protein, 10 aa, synthetic construct
EFFRGDFNNL

SEQ ID NO: 91850 - protein, 10 aa, synthetic construct
DSARGDQSTL

SEQ ID NO: 91851 - protein, 10 aa, synthetic construct
NTTRGDFNNL

SEQ ID NO: 91852 - protein, 10 aa, synthetic construct
NTYRGDYNSL

SEQ ID NO: 91853 - protein, 10 aa, synthetic construct
NTYRGDYTSM

SEQ ID NO: 91854 - protein, 10 aa, synthetic construct
NTYRGDFQNT

SEQ ID NO: 91855 - protein, 10 aa, synthetic construct
NTNRGDYNSL

SEQ ID NO: 91856 - protein, 10 aa, synthetic construct
NTNRGDYTSM

SEQ ID NO: 91857 - protein, 10 aa, synthetic construct
NTNRGDFQNT

SEQ ID NO: 91858 - protein, 10 aa, synthetic construct
NTQRGDFNNT

SEQ ID NO: 91859 - protein, 10 aa, synthetic construct
NTQRGDFNNL

SEQ ID NO: 91860 - protein, 10 aa, synthetic construct
NTDRGDFNNT

SEQ ID NO: 91861 - protein, 10 aa, synthetic construct
DSARGDLLLS

SEQ ID NO: 91862 - protein, 10 aa, synthetic construct
NTDRGDFNNL

SEQ ID NO: 91863 - protein, 10 aa, synthetic construct
NTERGDFNNT

SEQ ID NO: 91864 - protein, 10 aa, synthetic construct
NTERGDFNNL

SEQ ID NO: 91865 - protein, 10 aa, synthetic construct
NYGRGDFNNT

SEQ ID NO: 91866 - protein, 10 aa, synthetic construct
NYGRGDFNNL

SEQ ID NO: 91867 - protein, 10 aa, synthetic construct
NYARGDFNNT

SEQ ID NO: 91868 - protein, 10 aa, synthetic construct
NYARGDFNNL

SEQ ID NO: 91869 - protein, 10 aa, synthetic construct
NYVRGDYNSL

SEQ ID NO: 91870 - protein, 10 aa, synthetic construct
NYVRGDYTSM

SEQ ID NO: 91871 - protein, 10 aa, synthetic construct
NYVRGDFQNT

SEQ ID NO: 91872 - protein, 10 aa, synthetic construct
DSVRGDRGQI

SEQ ID NO: 91873 - protein, 10 aa, synthetic construct
NYPRGDFNNT

SEQ ID NO: 91874 - protein, 10 aa, synthetic construct
NYPRGDFNNL

SEQ ID NO: 91875 - protein, 10 aa, synthetic construct
NYLRGDYNSL

SEQ ID NO: 91876 - protein, 10 aa, synthetic construct
NYLRGDYTSM

SEQ ID NO: 91877 - protein, 10 aa, synthetic construct
NYLRGDFQNT

SEQ ID NO: 91878 - protein, 10 aa, synthetic construct
NYIRGDYTSV

SEQ ID NO: 91879 - protein, 10 aa, synthetic construct
NYMRGDYTSV

SEQ ID NO: 91880 - protein, 10 aa, synthetic construct
NYWRGDYNSL

SEQ ID NO: 91881 - protein, 10 aa, synthetic construct
NYWRGDYTSM

SEQ ID NO: 91882 - protein, 10 aa, synthetic construct
NYWRGDFQNT

SEQ ID NO: 91883 - protein, 10 aa, synthetic construct
DSVRGDRQGI

SEQ ID NO: 91884 - protein, 10 aa, synthetic construct
NYFRGDYTSV

SEQ ID NO: 91885 - protein, 10 aa, synthetic construct
NYKRGDYTSV

SEQ ID NO: 91886 - protein, 10 aa, synthetic construct
NYRRGDFNNT

SEQ ID NO: 91887 - protein, 10 aa, synthetic construct
NYRRGDFNNL

SEQ ID NO: 91888 - protein, 10 aa, synthetic construct
NYHRGDYNSL

SEQ ID NO: 91889 - protein, 10 aa, synthetic construct
NYHRGDYTSM

SEQ ID NO: 91890 - protein, 10 aa, synthetic construct
NYHRGDFQNT

SEQ ID NO: 91891 - protein, 10 aa, synthetic construct
NYSRGDYNSL

SEQ ID NO: 91892 - protein, 10 aa, synthetic construct
NYSRGDYTSM

SEQ ID NO: 91893 - protein, 10 aa, synthetic construct
NYSRGDFQNT

SEQ ID NO: 91894 - protein, 10 aa, synthetic construct
DSVRGDRSVV

SEQ ID NO: 91895 - protein, 10 aa, synthetic construct
NYTRGDYNSL

SEQ ID NO: 91896 - protein, 10 aa, synthetic construct
NYTRGDYTSM

SEQ ID NO: 91897 - protein, 10 aa, synthetic construct
NYTRGDFQNT

SEQ ID NO: 91898 - protein, 10 aa, synthetic construct
NYYRGDYTSV

SEQ ID NO: 91899 - protein, 10 aa, synthetic construct
NYNRGDYTSV

SEQ ID NO: 91900 - protein, 10 aa, synthetic construct
NYQRGDYNSL

SEQ ID NO: 91901 - protein, 10 aa, synthetic construct
NYQRGDYTSM

SEQ ID NO: 91902 - protein, 10 aa, synthetic construct
NYQRGDFQNT

SEQ ID NO: 91903 - protein, 10 aa, synthetic construct
NYDRGDYNSL

SEQ ID NO: 91904 - protein, 10 aa, synthetic construct
NYDRGDYTSM

SEQ ID NO: 91905 - protein, 10 aa, synthetic construct
DSVRGDRGVV

SEQ ID NO: 91906 - protein, 10 aa, synthetic construct
NYDRGDFQNT

SEQ ID NO: 91907 - protein, 10 aa, synthetic construct
NYERGDYNSL

SEQ ID NO: 91908 - protein, 10 aa, synthetic construct
NYERGDYTSM

SEQ ID NO: 91909 - protein, 10 aa, synthetic construct
NYERGDFQNT

SEQ ID NO: 91910 - protein, 10 aa, synthetic construct
NNGRGDFNNT

SEQ ID NO: 91911 - protein, 10 aa, synthetic construct
NNGRGDFNNL

SEQ ID NO: 91912 - protein, 10 aa, synthetic construct
NNARGDFNNT

SEQ ID NO: 91913 - protein, 10 aa, synthetic construct
NNARGDFNNL

SEQ ID NO: 91914 - protein, 10 aa, synthetic construct
NNVRGDYNSL

SEQ ID NO: 91915 - protein, 10 aa, synthetic construct
NNVRGDYTSM

SEQ ID NO: 91916 - protein, 10 aa, synthetic construct
DSVRGDRSQT

SEQ ID NO: 91917 - protein, 10 aa, synthetic construct
NNVRGDFQNT

SEQ ID NO: 91918 - protein, 10 aa, synthetic construct
NNPRGDFNNT

SEQ ID NO: 91919 - protein, 10 aa, synthetic construct
NNPRGDFNNL

SEQ ID NO: 91920 - protein, 10 aa, synthetic construct
NNLRGDYNSL

SEQ ID NO: 91921 - protein, 10 aa, synthetic construct
NNLRGDYTSM

SEQ ID NO: 91922 - protein, 10 aa, synthetic construct
NNLRGDFQNT

SEQ ID NO: 91923 - protein, 10 aa, synthetic construct
NNIRGDYTSV

SEQ ID NO: 91924 - protein, 10 aa, synthetic construct
NNMRGDYTSV

SEQ ID NO: 91925 - protein, 10 aa, synthetic construct
NNWRGDYNSL

SEQ ID NO: 91926 - protein, 10 aa, synthetic construct
NNWRGDYTSM

SEQ ID NO: 91927 - protein, 10 aa, synthetic construct
DSLRGDRGQI

SEQ ID NO: 91928 - protein, 10 aa, synthetic construct
NNWRGDFQNT

SEQ ID NO: 91929 - protein, 10 aa, synthetic construct
NNFRGDYTSV

SEQ ID NO: 91930 - protein, 10 aa, synthetic construct
NNKRGDYTSV

SEQ ID NO: 91931 - protein, 10 aa, synthetic construct
NNRRGDFNNT

SEQ ID NO: 91932 - protein, 10 aa, synthetic construct
NNRRGDFNNL

SEQ ID NO: 91933 - protein, 10 aa, synthetic construct
NNHRGDYNSL

SEQ ID NO: 91934 - protein, 10 aa, synthetic construct
NNHRGDYTSM

SEQ ID NO: 91935 - protein, 10 aa, synthetic construct
NNHRGDFQNT

SEQ ID NO: 91936 - protein, 10 aa, synthetic construct
NNSRGDYNSL

SEQ ID NO: 91937 - protein, 10 aa, synthetic construct
NNSRGDYTSM

SEQ ID NO: 91938 - protein, 10 aa, synthetic construct
DSLRGDRQGI

SEQ ID NO: 91939 - protein, 10 aa, synthetic construct
NNSRGDFQNT

SEQ ID NO: 91940 - protein, 10 aa, synthetic construct
NNTRGDYNSL

SEQ ID NO: 91941 - protein, 10 aa, synthetic construct
NNTRGDYTSM

SEQ ID NO: 91942 - protein, 10 aa, synthetic construct
NNTRGDFQNT

SEQ ID NO: 91943 - protein, 10 aa, synthetic construct
NNYRGDYTSV

SEQ ID NO: 91944 - protein, 10 aa, synthetic construct
NNNRGDYTSV

SEQ ID NO: 91945 - protein, 10 aa, synthetic construct
NNQRGDYNSL

SEQ ID NO: 91946 - protein, 10 aa, synthetic construct
NNQRGDYTSM

SEQ ID NO: 91947 - protein, 10 aa, synthetic construct
NNQRGDFQNT

SEQ ID NO: 91948 - protein, 10 aa, synthetic construct
NNDRGDYNSL

SEQ ID NO: 91949 - protein, 10 aa, synthetic construct
DSLRGDRSVV

SEQ ID NO: 91950 - protein, 10 aa, synthetic construct
NNDRGDYTSM

SEQ ID NO: 91951 - protein, 10 aa, synthetic construct
NNDRGDFQNT

SEQ ID NO: 91952 - protein, 10 aa, synthetic construct
NNERGDYNSL

SEQ ID NO: 91953 - protein, 10 aa, synthetic construct
NNERGDYTSM

SEQ ID NO: 91954 - protein, 10 aa, synthetic construct
NNERGDFQNT

SEQ ID NO: 91955 - protein, 10 aa, synthetic construct
NQVRGDFNNT

SEQ ID NO: 91956 - protein, 10 aa, synthetic construct
NQVRGDFNNL

SEQ ID NO: 91957 - protein, 10 aa, synthetic construct
NQLRGDFNNT

SEQ ID NO: 91958 - protein, 10 aa, synthetic construct
NQLRGDFNNL

SEQ ID NO: 91959 - protein, 10 aa, synthetic construct
NQIRGDYNSL

SEQ ID NO: 91960 - protein, 10 aa, synthetic construct
NFFRGDYNSL

SEQ ID NO: 91961 - protein, 10 aa, synthetic construct
DSLRGDRGVV

SEQ ID NO: 91962 - protein, 10 aa, synthetic construct
NQIRGDYTSM

SEQ ID NO: 91963 - protein, 10 aa, synthetic construct
NQIRGDFQNT

SEQ ID NO: 91964 - protein, 10 aa, synthetic construct
NQMRGDYNSL

SEQ ID NO: 91965 - protein, 10 aa, synthetic construct
NQMRGDYTSM

SEQ ID NO: 91966 - protein, 10 aa, synthetic construct
NQMRGDFQNT

SEQ ID NO: 91967 - protein, 10 aa, synthetic construct
NQWRGDFNNT

SEQ ID NO: 91968 - protein, 10 aa, synthetic construct
NQWRGDFNNL

SEQ ID NO: 91969 - protein, 10 aa, synthetic construct
NQFRGDYNSL

SEQ ID NO: 91970 - protein, 10 aa, synthetic construct
NQFRGDYTSM

SEQ ID NO: 91971 - protein, 10 aa, synthetic construct
NQFRGDFQNT

SEQ ID NO: 91972 - protein, 10 aa, synthetic construct
DSLRGDRSQT

SEQ ID NO: 91973 - protein, 10 aa, synthetic construct
NQKRGDYNSL

SEQ ID NO: 91974 - protein, 10 aa, synthetic construct
NQKRGDYTSM

SEQ ID NO: 91975 - protein, 10 aa, synthetic construct
NQKRGDFQNT

SEQ ID NO: 91976 - protein, 10 aa, synthetic construct
NQHRGDFNNT

SEQ ID NO: 91977 - protein, 10 aa, synthetic construct
NQHRGDFNNL

SEQ ID NO: 91978 - protein, 10 aa, synthetic construct
NQSRGDFNNT

SEQ ID NO: 91979 - protein, 10 aa, synthetic construct
NQSRGDFNNL

SEQ ID NO: 91980 - protein, 10 aa, synthetic construct
NQTRGDFNNT

SEQ ID NO: 91981 - protein, 10 aa, synthetic construct
NQTRGDFNNL

SEQ ID NO: 91982 - protein, 10 aa, synthetic construct
NQYRGDYNSL

SEQ ID NO: 91983 - protein, 10 aa, synthetic construct
DSWRGDRGQI

SEQ ID NO: 91984 - protein, 10 aa, synthetic construct
NQYRGDYTSM

SEQ ID NO: 91985 - protein, 10 aa, synthetic construct
NQYRGDFQNT

SEQ ID NO: 91986 - protein, 10 aa, synthetic construct
NQNRGDYNSL

SEQ ID NO: 91987 - protein, 10 aa, synthetic construct
NQNRGDYTSM

SEQ ID NO: 91988 - protein, 10 aa, synthetic construct
NQNRGDFQNT

SEQ ID NO: 91989 - protein, 10 aa, synthetic construct
NQQRGDFNNT

SEQ ID NO: 91990 - protein, 10 aa, synthetic construct
NQQRGDFNNL

SEQ ID NO: 91991 - protein, 10 aa, synthetic construct
NQDRGDFNNT

SEQ ID NO: 91992 - protein, 10 aa, synthetic construct
NQDRGDFNNL

SEQ ID NO: 91993 - protein, 10 aa, synthetic construct
NQERGDFNNT

SEQ ID NO: 91994 - protein, 10 aa, synthetic construct
DSWRGDRQGI

SEQ ID NO: 91995 - protein, 10 aa, synthetic construct
NQERGDFNNL

SEQ ID NO: 91996 - protein, 10 aa, synthetic construct
NDVRGDFNNT

SEQ ID NO: 91997 - protein, 10 aa, synthetic construct
NDVRGDFNNL

SEQ ID NO: 91998 - protein, 10 aa, synthetic construct
NDLRGDFNNT

SEQ ID NO: 91999 - protein, 10 aa, synthetic construct
NDLRGDFNNL

SEQ ID NO: 92000 - protein, 10 aa, synthetic construct
NDIRGDYNSL

SEQ ID NO: 92001 - protein, 10 aa, synthetic construct
NDIRGDYTSM

SEQ ID NO: 92002 - protein, 10 aa, synthetic construct
NDIRGDFQNT

SEQ ID NO: 92003 - protein, 10 aa, synthetic construct
NDMRGDYNSL

SEQ ID NO: 92004 - protein, 10 aa, synthetic construct
NDMRGDYTSM

SEQ ID NO: 92005 - protein, 10 aa, synthetic construct
DSWRGDRSVV

SEQ ID NO: 92006 - protein, 10 aa, synthetic construct
NDMRGDFQNT

SEQ ID NO: 92007 - protein, 10 aa, synthetic construct
NDWRGDFNNT

SEQ ID NO: 92008 - protein, 10 aa, synthetic construct
NDWRGDFNNL

SEQ ID NO: 92009 - protein, 10 aa, synthetic construct
NDFRGDYNSL

SEQ ID NO: 92010 - protein, 10 aa, synthetic construct
NDFRGDYTSM

SEQ ID NO: 92011 - protein, 10 aa, synthetic construct
NDFRGDFQNT

SEQ ID NO: 92012 - protein, 10 aa, synthetic construct
NDKRGDYNSL

SEQ ID NO: 92013 - protein, 10 aa, synthetic construct
NDKRGDYTSM

SEQ ID NO: 92014 - protein, 10 aa, synthetic construct
NDKRGDFQNT

SEQ ID NO: 92015 - protein, 10 aa, synthetic construct
NDHRGDFNNT

SEQ ID NO: 92016 - protein, 10 aa, synthetic construct
DSWRGDRGVV

SEQ ID NO: 92017 - protein, 10 aa, synthetic construct
NDHRGDFNNL

SEQ ID NO: 92018 - protein, 10 aa, synthetic construct
NDSRGDFNNT

SEQ ID NO: 92019 - protein, 10 aa, synthetic construct
NDSRGDFNNL

SEQ ID NO: 92020 - protein, 10 aa, synthetic construct
NDTRGDFNNT

SEQ ID NO: 92021 - protein, 10 aa, synthetic construct
NDTRGDFNNL

SEQ ID NO: 92022 - protein, 10 aa, synthetic construct
NDYRGDYNSL

SEQ ID NO: 92023 - protein, 10 aa, synthetic construct
NDYRGDYTSM

SEQ ID NO: 92024 - protein, 10 aa, synthetic construct
NDYRGDFQNT

SEQ ID NO: 92025 - protein, 10 aa, synthetic construct
NDNRGDYNSL

SEQ ID NO: 92026 - protein, 10 aa, synthetic construct
NDNRGDYTSM

SEQ ID NO: 92027 - protein, 10 aa, synthetic construct
DSWRGDRSQT

SEQ ID NO: 92028 - protein, 10 aa, synthetic construct
NDNRGDFQNT

SEQ ID NO: 92029 - protein, 10 aa, synthetic construct
NDQRGDFNNT

SEQ ID NO: 92030 - protein, 10 aa, synthetic construct
NDQRGDFNNL

SEQ ID NO: 92031 - protein, 10 aa, synthetic construct
NDDRGDFNNT

SEQ ID NO: 92032 - protein, 10 aa, synthetic construct
NDDRGDFNNL

SEQ ID NO: 92033 - protein, 10 aa, synthetic construct
NDERGDFNNT

SEQ ID NO: 92034 - protein, 10 aa, synthetic construct
NDERGDFNNL

SEQ ID NO: 92035 - protein, 10 aa, synthetic construct
NEVRGDFNNT

SEQ ID NO: 92036 - protein, 10 aa, synthetic construct
NEVRGDFNNL

SEQ ID NO: 92037 - protein, 10 aa, synthetic construct
NELRGDFNNT

SEQ ID NO: 92038 - protein, 10 aa, synthetic construct
DSRRGDHGVL

SEQ ID NO: 92039 - protein, 10 aa, synthetic construct
NELRGDFNNL

SEQ ID NO: 92040 - protein, 10 aa, synthetic construct
NEIRGDYNSL

SEQ ID NO: 92041 - protein, 10 aa, synthetic construct
NEIRGDYTSM

SEQ ID NO: 92042 - protein, 10 aa, synthetic construct
NEIRGDFQNT

SEQ ID NO: 92043 - protein, 10 aa, synthetic construct
NEMRGDYNSL

SEQ ID NO: 92044 - protein, 10 aa, synthetic construct
NEMRGDYTSM

SEQ ID NO: 92045 - protein, 10 aa, synthetic construct
NEMRGDFQNT

SEQ ID NO: 92046 - protein, 10 aa, synthetic construct
NEWRGDFNNT

SEQ ID NO: 92047 - protein, 10 aa, synthetic construct
NEWRGDFNNL

SEQ ID NO: 92048 - protein, 10 aa, synthetic construct
NEFRGDYNSL

SEQ ID NO: 92049 - protein, 10 aa, synthetic construct
DSRRGDYVGL

SEQ ID NO: 92050 - protein, 10 aa, synthetic construct
NEFRGDYTSM

SEQ ID NO: 92051 - protein, 10 aa, synthetic construct
NEFRGDFQNT

SEQ ID NO: 92052 - protein, 10 aa, synthetic construct
NEKRGDYNSL

SEQ ID NO: 92053 - protein, 10 aa, synthetic construct
NEKRGDYTSM

SEQ ID NO: 92054 - protein, 10 aa, synthetic construct
NEKRGDFQNT

SEQ ID NO: 92055 - protein, 10 aa, synthetic construct
NEHRGDFNNT

SEQ ID NO: 92056 - protein, 10 aa, synthetic construct
NEHRGDFNNL

SEQ ID NO: 92057 - protein, 10 aa, synthetic construct
NESRGDFNNT

SEQ ID NO: 92058 - protein, 10 aa, synthetic construct
NESRGDFNNL

SEQ ID NO: 92059 - protein, 10 aa, synthetic construct
NETRGDFNNT

SEQ ID NO: 92060 - protein, 10 aa, synthetic construct
DSRRGDQSTL

SEQ ID NO: 92061 - protein, 10 aa, synthetic construct
NETRGDFNNL

SEQ ID NO: 92062 - protein, 10 aa, synthetic construct
NEYRGDYNSL

SEQ ID NO: 92063 - protein, 10 aa, synthetic construct
NEYRGDYTSM

SEQ ID NO: 92064 - protein, 10 aa, synthetic construct
NEYRGDFQNT

SEQ ID NO: 92065 - protein, 10 aa, synthetic construct
NENRGDYNSL

SEQ ID NO: 92066 - protein, 10 aa, synthetic construct
NENRGDYTSM

SEQ ID NO: 92067 - protein, 10 aa, synthetic construct
NENRGDFQNT

SEQ ID NO: 92068 - protein, 10 aa, synthetic construct
NEQRGDFNNT

SEQ ID NO: 92069 - protein, 10 aa, synthetic construct
NEQRGDFNNL

SEQ ID NO: 92070 - protein, 10 aa, synthetic construct
NEDRGDFNNT

SEQ ID NO: 92071 - protein, 10 aa, synthetic construct
NFFRGDYTSM

SEQ ID NO: 92072 - protein, 10 aa, synthetic construct
DSRRGDLLLS

SEQ ID NO: 92073 - protein, 10 aa, synthetic construct
NEDRGDFNNL

SEQ ID NO: 92074 - protein, 10 aa, synthetic construct
NEERGDFNNT

SEQ ID NO: 92075 - protein, 10 aa, synthetic construct
NEERGDFNNL

SEQ ID NO: 92076 - protein, 10 aa, synthetic construct
DIVRGDFNNT

SEQ ID NO: 92077 - protein, 10 aa, synthetic construct
DIVRGDFNNL

SEQ ID NO: 92078 - protein, 10 aa, synthetic construct
DILRGDFNNT

SEQ ID NO: 92079 - protein, 10 aa, synthetic construct
DILRGDFNNL

SEQ ID NO: 92080 - protein, 10 aa, synthetic construct
DIIRGDYNSL

SEQ ID NO: 92081 - protein, 10 aa, synthetic construct
DIIRGDYTSM

SEQ ID NO: 92082 - protein, 10 aa, synthetic construct
DIIRGDFQNT

SEQ ID NO: 92083 - protein, 10 aa, synthetic construct
DSHRGDRGQI

SEQ ID NO: 92084 - protein, 10 aa, synthetic construct
DIMRGDYNSL

SEQ ID NO: 92085 - protein, 10 aa, synthetic construct
DIMRGDYTSM

SEQ ID NO: 92086 - protein, 10 aa, synthetic construct
DIMRGDFQNT

SEQ ID NO: 92087 - protein, 10 aa, synthetic construct
DIWRGDFNNT

SEQ ID NO: 92088 - protein, 10 aa, synthetic construct
DIWRGDFNNL

SEQ ID NO: 92089 - protein, 10 aa, synthetic construct
DIFRGDYNSL

SEQ ID NO: 92090 - protein, 10 aa, synthetic construct
DIFRGDYTSM

SEQ ID NO: 92091 - protein, 10 aa, synthetic construct
DIFRGDFQNT

SEQ ID NO: 92092 - protein, 10 aa, synthetic construct
DIKRGDYNSL

SEQ ID NO: 92093 - protein, 10 aa, synthetic construct
DIKRGDYTSM

SEQ ID NO: 92094 - protein, 10 aa, synthetic construct
DSHRGDRQGI

SEQ ID NO: 92095 - protein, 10 aa, synthetic construct
DIKRGDFQNT

SEQ ID NO: 92096 - protein, 10 aa, synthetic construct
DIHRGDFNNT

SEQ ID NO: 92097 - protein, 10 aa, synthetic construct
DIHRGDFNNL

SEQ ID NO: 92098 - protein, 10 aa, synthetic construct
DISRGDFNNT

SEQ ID NO: 92099 - protein, 10 aa, synthetic construct
DISRGDFNNL

SEQ ID NO: 92100 - protein, 10 aa, synthetic construct
DITRGDFNNT

SEQ ID NO: 92101 - protein, 10 aa, synthetic construct
DITRGDFNNL

SEQ ID NO: 92102 - protein, 10 aa, synthetic construct
DIYRGDYNSL

SEQ ID NO: 92103 - protein, 10 aa, synthetic construct
DIYRGDYTSM

SEQ ID NO: 92104 - protein, 10 aa, synthetic construct
DIYRGDFQNT

SEQ ID NO: 92105 - protein, 10 aa, synthetic construct
DSHRGDRSVV

SEQ ID NO: 92106 - protein, 10 aa, synthetic construct
DINRGDYNSL

SEQ ID NO: 92107 - protein, 10 aa, synthetic construct
DINRGDYTSM

SEQ ID NO: 92108 - protein, 10 aa, synthetic construct
DINRGDFQNT

SEQ ID NO: 92109 - protein, 10 aa, synthetic construct
DIQRGDFNNT

SEQ ID NO: 92110 - protein, 10 aa, synthetic construct
DIQRGDFNNL

SEQ ID NO: 92111 - protein, 10 aa, synthetic construct
DIDRGDFNNT

SEQ ID NO: 92112 - protein, 10 aa, synthetic construct
DIDRGDFNNL

SEQ ID NO: 92113 - protein, 10 aa, synthetic construct
DIERGDFNNT

SEQ ID NO: 92114 - protein, 10 aa, synthetic construct
DIERGDFNNL

SEQ ID NO: 92115 - protein, 10 aa, synthetic construct
DMIRGDFQNT

SEQ ID NO: 92116 - protein, 10 aa, synthetic construct
DSHRGDRGVV

SEQ ID NO: 92117 - protein, 10 aa, synthetic construct
DMMRGDFNNT

SEQ ID NO: 92118 - protein, 10 aa, synthetic construct
DMMRGDFNNL

SEQ ID NO: 92119 - protein, 10 aa, synthetic construct
DMFRGDFQNT

SEQ ID NO: 92120 - protein, 10 aa, synthetic construct
DMKRGDFQNT

SEQ ID NO: 92121 - protein, 10 aa, synthetic construct
DMHRGDFNNT

SEQ ID NO: 92122 - protein, 10 aa, synthetic construct
DMHRGDFNNL

SEQ ID NO: 92123 - protein, 10 aa, synthetic construct
DMTRGDFNNT

SEQ ID NO: 92124 - protein, 10 aa, synthetic construct
DMTRGDFNNL

SEQ ID NO: 92125 - protein, 10 aa, synthetic construct
DMYRGDFQNT

SEQ ID NO: 92126 - protein, 10 aa, synthetic construct
DMNRGDFQNT

SEQ ID NO: 92127 - protein, 10 aa, synthetic construct
DSHRGDRSQT

SEQ ID NO: 92128 - protein, 10 aa, synthetic construct
DMQRGDFNNT

SEQ ID NO: 92129 - protein, 10 aa, synthetic construct
DMQRGDFNNL

SEQ ID NO: 92130 - protein, 10 aa, synthetic construct
DMDRGDFNNT

SEQ ID NO: 92131 - protein, 10 aa, synthetic construct
DMDRGDFNNL

SEQ ID NO: 92132 - protein, 10 aa, synthetic construct
DMERGDFNNT

SEQ ID NO: 92133 - protein, 10 aa, synthetic construct
DMERGDFNNL

SEQ ID NO: 92134 - protein, 10 aa, synthetic construct
DWIRGDFNNT

SEQ ID NO: 92135 - protein, 10 aa, synthetic construct
DWIRGDFNNL

SEQ ID NO: 92136 - protein, 10 aa, synthetic construct
DWFRGDFNNT

SEQ ID NO: 92137 - protein, 10 aa, synthetic construct
DWFRGDFNNL

SEQ ID NO: 92138 - protein, 10 aa, synthetic construct
DSSRGDRGQI

SEQ ID NO: 92139 - protein, 10 aa, synthetic construct
DWKRGDFNNT

SEQ ID NO: 92140 - protein, 10 aa, synthetic construct
DWKRGDFNNL

SEQ ID NO: 92141 - protein, 10 aa, synthetic construct
DWYRGDFNNT

SEQ ID NO: 92142 - protein, 10 aa, synthetic construct
DWYRGDFNNL

SEQ ID NO: 92143 - protein, 10 aa, synthetic construct
DWNRGDFNNT

SEQ ID NO: 92144 - protein, 10 aa, synthetic construct
DWNRGDFNNL

SEQ ID NO: 92145 - protein, 10 aa, synthetic construct
DFVRGDFNNT

SEQ ID NO: 92146 - protein, 10 aa, synthetic construct
DFVRGDFNNL

SEQ ID NO: 92147 - protein, 10 aa, synthetic construct
DFLRGDFNNT

SEQ ID NO: 92148 - protein, 10 aa, synthetic construct
DFLRGDFNNL

SEQ ID NO: 92149 - protein, 10 aa, synthetic construct
DSSRGDRQGI

SEQ ID NO: 92150 - protein, 10 aa, synthetic construct
DFIRGDYNSL

SEQ ID NO: 92151 - protein, 10 aa, synthetic construct
DFIRGDYTSM

SEQ ID NO: 92152 - protein, 10 aa, synthetic construct
DFIRGDFQNT

SEQ ID NO: 92153 - protein, 10 aa, synthetic construct
DFMRGDYNSL

SEQ ID NO: 92154 - protein, 10 aa, synthetic construct
DFMRGDYTSM

SEQ ID NO: 92155 - protein, 10 aa, synthetic construct
DFMRGDFQNT

SEQ ID NO: 92156 - protein, 10 aa, synthetic construct
DFWRGDFNNT

SEQ ID NO: 92157 - protein, 10 aa, synthetic construct
DFWRGDFNNL

SEQ ID NO: 92158 - protein, 10 aa, synthetic construct
DFKRGDYNSL

SEQ ID NO: 92159 - protein, 10 aa, synthetic construct
DFKRGDYTSM

SEQ ID NO: 92160 - protein, 10 aa, synthetic construct
DSSRGDRSVV

SEQ ID NO: 92161 - protein, 10 aa, synthetic construct
DFKRGDFQNT

SEQ ID NO: 92162 - protein, 10 aa, synthetic construct
DFHRGDFNNT

SEQ ID NO: 92163 - protein, 10 aa, synthetic construct
DFHRGDFNNL

SEQ ID NO: 92164 - protein, 10 aa, synthetic construct
DFSRGDFNNT

SEQ ID NO: 92165 - protein, 10 aa, synthetic construct
DFSRGDFNNL

SEQ ID NO: 92166 - protein, 10 aa, synthetic construct
DFTRGDFNNT

SEQ ID NO: 92167 - protein, 10 aa, synthetic construct
DFTRGDFNNL

SEQ ID NO: 92168 - protein, 10 aa, synthetic construct
DFYRGDYNSL

SEQ ID NO: 92169 - protein, 10 aa, synthetic construct
DFYRGDYTSM

SEQ ID NO: 92170 - protein, 10 aa, synthetic construct
DFYRGDFQNT

SEQ ID NO: 92171 - protein, 10 aa, synthetic construct
DSSRGDRGVV

SEQ ID NO: 92172 - protein, 10 aa, synthetic construct
DFNRGDYNSL

SEQ ID NO: 92173 - protein, 10 aa, synthetic construct
DFNRGDYTSM

SEQ ID NO: 92174 - protein, 10 aa, synthetic construct
DFNRGDFQNT

SEQ ID NO: 92175 - protein, 10 aa, synthetic construct
DFQRGDFNNT

SEQ ID NO: 92176 - protein, 10 aa, synthetic construct
DFQRGDFNNL

SEQ ID NO: 92177 - protein, 10 aa, synthetic construct
DFDRGDFNNT

SEQ ID NO: 92178 - protein, 10 aa, synthetic construct
DFDRGDFNNL

SEQ ID NO: 92179 - protein, 10 aa, synthetic construct
DFERGDFNNT

SEQ ID NO: 92180 - protein, 10 aa, synthetic construct
DFERGDFNNL

SEQ ID NO: 92181 - protein, 10 aa, synthetic construct
DKVRGDFNNT

SEQ ID NO: 92182 - protein, 10 aa, synthetic construct
NFFRGDFQNT

SEQ ID NO: 92183 - protein, 10 aa, synthetic construct
DSSRGDRSQT

SEQ ID NO: 92184 - protein, 10 aa, synthetic construct
DKVRGDFNNL

SEQ ID NO: 92185 - protein, 10 aa, synthetic construct
DKLRGDFNNT

SEQ ID NO: 92186 - protein, 10 aa, synthetic construct
DKLRGDFNNL

SEQ ID NO: 92187 - protein, 10 aa, synthetic construct
DKIRGDYNSL

SEQ ID NO: 92188 - protein, 10 aa, synthetic construct
DKIRGDYTSM

SEQ ID NO: 92189 - protein, 10 aa, synthetic construct
DKIRGDFQNT

SEQ ID NO: 92190 - protein, 10 aa, synthetic construct
DKMRGDYNSL

SEQ ID NO: 92191 - protein, 10 aa, synthetic construct
DKMRGDYTSM

SEQ ID NO: 92192 - protein, 10 aa, synthetic construct
DKMRGDFQNT

SEQ ID NO: 92193 - protein, 10 aa, synthetic construct
DKWRGDFNNT

SEQ ID NO: 92194 - protein, 10 aa, synthetic construct
DSTRGDRGQI

SEQ ID NO: 92195 - protein, 10 aa, synthetic construct
DKWRGDFNNL

SEQ ID NO: 92196 - protein, 10 aa, synthetic construct
DKFRGDYNSL

SEQ ID NO: 92197 - protein, 10 aa, synthetic construct
DKFRGDYTSM

SEQ ID NO: 92198 - protein, 10 aa, synthetic construct
DKFRGDFQNT

SEQ ID NO: 92199 - protein, 10 aa, synthetic construct
DKHRGDFNNT

SEQ ID NO: 92200 - protein, 10 aa, synthetic construct
DKHRGDFNNL

SEQ ID NO: 92201 - protein, 10 aa, synthetic construct
DKSRGDFNNT

SEQ ID NO: 92202 - protein, 10 aa, synthetic construct
DKSRGDFNNL

SEQ ID NO: 92203 - protein, 10 aa, synthetic construct
DKTRGDFNNT

SEQ ID NO: 92204 - protein, 10 aa, synthetic construct
DKTRGDFNNL

SEQ ID NO: 92205 - protein, 10 aa, synthetic construct
DSTRGDRQGI

SEQ ID NO: 92206 - protein, 10 aa, synthetic construct
DKYRGDYNSL

SEQ ID NO: 92207 - protein, 10 aa, synthetic construct
DKYRGDYTSM

SEQ ID NO: 92208 - protein, 10 aa, synthetic construct
DKYRGDFQNT

SEQ ID NO: 92209 - protein, 10 aa, synthetic construct
DKQRGDFNNT

SEQ ID NO: 92210 - protein, 10 aa, synthetic construct
DKQRGDFNNL

SEQ ID NO: 92211 - protein, 10 aa, synthetic construct
DKDRGDFNNT

SEQ ID NO: 92212 - protein, 10 aa, synthetic construct
DKDRGDFNNL

SEQ ID NO: 92213 - protein, 10 aa, synthetic construct
DKERGDFNNT

SEQ ID NO: 92214 - protein, 10 aa, synthetic construct
DKERGDFNNL

SEQ ID NO: 92215 - protein, 10 aa, synthetic construct
DHIRGDFNNT

SEQ ID NO: 92216 - protein, 10 aa, synthetic construct
DSTRGDRSVV

SEQ ID NO: 92217 - protein, 10 aa, synthetic construct
DHIRGDFNNL

SEQ ID NO: 92218 - protein, 10 aa, synthetic construct
DHMRGDFNNT

SEQ ID NO: 92219 - protein, 10 aa, synthetic construct
DHMRGDFNNL

SEQ ID NO: 92220 - protein, 10 aa, synthetic construct
DHFRGDFNNT

SEQ ID NO: 92221 - protein, 10 aa, synthetic construct
DHFRGDFNNL

SEQ ID NO: 92222 - protein, 10 aa, synthetic construct
DHKRGDFNNT

SEQ ID NO: 92223 - protein, 10 aa, synthetic construct
DHKRGDFNNL

SEQ ID NO: 92224 - protein, 10 aa, synthetic construct
DHYRGDFNNT

SEQ ID NO: 92225 - protein, 10 aa, synthetic construct
DHYRGDFNNL

SEQ ID NO: 92226 - protein, 10 aa, synthetic construct
DHNRGDFNNT

SEQ ID NO: 92227 - protein, 10 aa, synthetic construct
DSTRGDRGVV

SEQ ID NO: 92228 - protein, 10 aa, synthetic construct
DHNRGDFNNL

SEQ ID NO: 92229 - protein, 10 aa, synthetic construct
DTIRGDFNNT

SEQ ID NO: 92230 - protein, 10 aa, synthetic construct
DTIRGDFNNL

SEQ ID NO: 92231 - protein, 10 aa, synthetic construct
DTMRGDFNNT

SEQ ID NO: 92232 - protein, 10 aa, synthetic construct
DTMRGDFNNL

SEQ ID NO: 92233 - protein, 10 aa, synthetic construct
DTFRGDFNNT

SEQ ID NO: 92234 - protein, 10 aa, synthetic construct
DTFRGDFNNL

SEQ ID NO: 92235 - protein, 10 aa, synthetic construct
DTKRGDFNNT

SEQ ID NO: 92236 - protein, 10 aa, synthetic construct
DTKRGDFNNL

SEQ ID NO: 92237 - protein, 10 aa, synthetic construct
DTYRGDFNNT

SEQ ID NO: 92238 - protein, 10 aa, synthetic construct
DSTRGDRSQT

SEQ ID NO: 92239 - protein, 10 aa, synthetic construct
DTYRGDFNNL

SEQ ID NO: 92240 - protein, 10 aa, synthetic construct
DTNRGDFNNT

SEQ ID NO: 92241 - protein, 10 aa, synthetic construct
DTNRGDFNNL

SEQ ID NO: 92242 - protein, 10 aa, synthetic construct
DYVRGDFNNT

SEQ ID NO: 92243 - protein, 10 aa, synthetic construct
DYVRGDFNNL

SEQ ID NO: 92244 - protein, 10 aa, synthetic construct
DYLRGDFNNT

SEQ ID NO: 92245 - protein, 10 aa, synthetic construct
DYLRGDFNNL

SEQ ID NO: 92246 - protein, 10 aa, synthetic construct
DYIRGDYNSL

SEQ ID NO: 92247 - protein, 10 aa, synthetic construct
DYIRGDYTSM

SEQ ID NO: 92248 - protein, 10 aa, synthetic construct
DYIRGDFQNT

SEQ ID NO: 92249 - protein, 10 aa, synthetic construct
DSQRGDRGQI

SEQ ID NO: 92250 - protein, 10 aa, synthetic construct
DYMRGDYNSL

SEQ ID NO: 92251 - protein, 10 aa, synthetic construct
DYMRGDYTSM

SEQ ID NO: 92252 - protein, 10 aa, synthetic construct
DYMRGDFQNT

SEQ ID NO: 92253 - protein, 10 aa, synthetic construct
DYWRGDFNNT

SEQ ID NO: 92254 - protein, 10 aa, synthetic construct
DYWRGDFNNL

SEQ ID NO: 92255 - protein, 10 aa, synthetic construct
DYFRGDYNSL

SEQ ID NO: 92256 - protein, 10 aa, synthetic construct
DYFRGDYTSM

SEQ ID NO: 92257 - protein, 10 aa, synthetic construct
DYFRGDFQNT

SEQ ID NO: 92258 - protein, 10 aa, synthetic construct
DYKRGDYNSL

SEQ ID NO: 92259 - protein, 10 aa, synthetic construct
DYKRGDYTSM

SEQ ID NO: 92260 - protein, 10 aa, synthetic construct
DSQRGDRQGI

SEQ ID NO: 92261 - protein, 10 aa, synthetic construct
DYKRGDFQNT

SEQ ID NO: 92262 - protein, 10 aa, synthetic construct
DYHRGDFNNT

SEQ ID NO: 92263 - protein, 10 aa, synthetic construct
DYHRGDFNNL

SEQ ID NO: 92264 - protein, 10 aa, synthetic construct
DYSRGDFNNT

SEQ ID NO: 92265 - protein, 10 aa, synthetic construct
DYSRGDFNNL

SEQ ID NO: 92266 - protein, 10 aa, synthetic construct
DYTRGDFNNT

SEQ ID NO: 92267 - protein, 10 aa, synthetic construct
DYTRGDFNNL

SEQ ID NO: 92268 - protein, 10 aa, synthetic construct
DYYRGDYNSL

SEQ ID NO: 92269 - protein, 10 aa, synthetic construct
DYYRGDYTSM

SEQ ID NO: 92270 - protein, 10 aa, synthetic construct
DYYRGDFQNT

SEQ ID NO: 92271 - protein, 10 aa, synthetic construct
DSQRGDRSVV

SEQ ID NO: 92272 - protein, 10 aa, synthetic construct
DYNRGDYNSL

SEQ ID NO: 92273 - protein, 10 aa, synthetic construct
DYNRGDYTSM

SEQ ID NO: 92274 - protein, 10 aa, synthetic construct
DYNRGDFQNT

SEQ ID NO: 92275 - protein, 10 aa, synthetic construct
DYQRGDFNNT

SEQ ID NO: 92276 - protein, 10 aa, synthetic construct
DYQRGDFNNL

SEQ ID NO: 92277 - protein, 10 aa, synthetic construct
DYDRGDFNNT

SEQ ID NO: 92278 - protein, 10 aa, synthetic construct
DYDRGDFNNL

SEQ ID NO: 92279 - protein, 10 aa, synthetic construct
DYERGDFNNT

SEQ ID NO: 92280 - protein, 10 aa, synthetic construct
DYERGDFNNL

SEQ ID NO: 92281 - protein, 10 aa, synthetic construct
DNVRGDFNNT

SEQ ID NO: 92282 - protein, 10 aa, synthetic construct
DSQRGDRGVV

SEQ ID NO: 92283 - protein, 10 aa, synthetic construct
DNVRGDFNNL

SEQ ID NO: 92284 - protein, 10 aa, synthetic construct
DNLRGDFNNT

SEQ ID NO: 92285 - protein, 10 aa, synthetic construct
DNLRGDFNNL

SEQ ID NO: 92286 - protein, 10 aa, synthetic construct
DNIRGDYNSL

SEQ ID NO: 92287 - protein, 10 aa, synthetic construct
DNIRGDYTSM

SEQ ID NO: 92288 - protein, 10 aa, synthetic construct
DNIRGDFQNT

SEQ ID NO: 92289 - protein, 10 aa, synthetic construct
DNMRGDYNSL

SEQ ID NO: 92290 - protein, 10 aa, synthetic construct
DNMRGDYTSM

SEQ ID NO: 92291 - protein, 10 aa, synthetic construct
DNMRGDFQNT

SEQ ID NO: 92292 - protein, 10 aa, synthetic construct
DNWRGDFNNT

SEQ ID NO: 92293 - protein, 10 aa, synthetic construct
DFFRGDFNNT

SEQ ID NO: 92294 - protein, 10 aa, synthetic construct
DSQRGDRSQT

SEQ ID NO: 92295 - protein, 10 aa, synthetic construct
DNWRGDFNNL

SEQ ID NO: 92296 - protein, 10 aa, synthetic construct
DNFRGDYNSL

SEQ ID NO: 92297 - protein, 10 aa, synthetic construct
DNFRGDYTSM

SEQ ID NO: 92298 - protein, 10 aa, synthetic construct
DNFRGDFQNT

SEQ ID NO: 92299 - protein, 10 aa, synthetic construct
DNKRGDYNSL

SEQ ID NO: 92300 - protein, 10 aa, synthetic construct
DNKRGDYTSM

SEQ ID NO: 92301 - protein, 10 aa, synthetic construct
DNKRGDFQNT

SEQ ID NO: 92302 - protein, 10 aa, synthetic construct
DNHRGDFNNT

SEQ ID NO: 92303 - protein, 10 aa, synthetic construct
DNHRGDFNNL

SEQ ID NO: 92304 - protein, 10 aa, synthetic construct
DNSRGDFNNT

SEQ ID NO: 92305 - protein, 10 aa, synthetic construct
DSDRGDRGQI

SEQ ID NO: 92306 - protein, 10 aa, synthetic construct
DNSRGDFNNL

SEQ ID NO: 92307 - protein, 10 aa, synthetic construct
DNTRGDFNNT

SEQ ID NO: 92308 - protein, 10 aa, synthetic construct
DNTRGDFNNL

SEQ ID NO: 92309 - protein, 10 aa, synthetic construct
DNYRGDYNSL

SEQ ID NO: 92310 - protein, 10 aa, synthetic construct
DNYRGDYTSM

SEQ ID NO: 92311 - protein, 10 aa, synthetic construct
DNYRGDFQNT

SEQ ID NO: 92312 - protein, 10 aa, synthetic construct
DNNRGDYNSL

SEQ ID NO: 92313 - protein, 10 aa, synthetic construct
DNNRGDYTSM

SEQ ID NO: 92314 - protein, 10 aa, synthetic construct
DNNRGDFQNT

SEQ ID NO: 92315 - protein, 10 aa, synthetic construct
DNQRGDFNNT

SEQ ID NO: 92316 - protein, 10 aa, synthetic construct
DSDRGDRQGI

SEQ ID NO: 92317 - protein, 10 aa, synthetic construct
DNQRGDFNNL

SEQ ID NO: 92318 - protein, 10 aa, synthetic construct
DNDRGDFNNT

SEQ ID NO: 92319 - protein, 10 aa, synthetic construct
DNDRGDFNNL

SEQ ID NO: 92320 - protein, 10 aa, synthetic construct
DNERGDFNNT

SEQ ID NO: 92321 - protein, 10 aa, synthetic construct
DNERGDFNNL

SEQ ID NO: 92322 - protein, 10 aa, synthetic construct
DQIRGDFNNT

SEQ ID NO: 92323 - protein, 10 aa, synthetic construct
DQIRGDFNNL

SEQ ID NO: 92324 - protein, 10 aa, synthetic construct
DQMRGDFNNT

SEQ ID NO: 92325 - protein, 10 aa, synthetic construct
DQMRGDFNNL

SEQ ID NO: 92326 - protein, 10 aa, synthetic construct
DQFRGDFNNT

SEQ ID NO: 92327 - protein, 10 aa, synthetic construct
DSDRGDRSVV

SEQ ID NO: 92328 - protein, 10 aa, synthetic construct
DQFRGDFNNL

SEQ ID NO: 92329 - protein, 10 aa, synthetic construct
DQKRGDFNNT

SEQ ID NO: 92330 - protein, 10 aa, synthetic construct
DQKRGDFNNL

SEQ ID NO: 92331 - protein, 10 aa, synthetic construct
DQYRGDFNNT

SEQ ID NO: 92332 - protein, 10 aa, synthetic construct
DQYRGDFNNL

SEQ ID NO: 92333 - protein, 10 aa, synthetic construct
DQNRGDFNNT

SEQ ID NO: 92334 - protein, 10 aa, synthetic construct
DQNRGDFNNL

SEQ ID NO: 92335 - protein, 10 aa, synthetic construct
DDIRGDFNNT

SEQ ID NO: 92336 - protein, 10 aa, synthetic construct
DDIRGDFNNL

SEQ ID NO: 92337 - protein, 10 aa, synthetic construct
DDMRGDFNNT

SEQ ID NO: 92338 - protein, 10 aa, synthetic construct
DSDRGDRGVV

SEQ ID NO: 92339 - protein, 10 aa, synthetic construct
DDMRGDFNNL

SEQ ID NO: 92340 - protein, 10 aa, synthetic construct
DDFRGDFNNT

SEQ ID NO: 92341 - protein, 10 aa, synthetic construct
DDFRGDFNNL

SEQ ID NO: 92342 - protein, 10 aa, synthetic construct
DDKRGDFNNT

SEQ ID NO: 92343 - protein, 10 aa, synthetic construct
DDKRGDFNNL

SEQ ID NO: 92344 - protein, 10 aa, synthetic construct
DDYRGDFNNT

SEQ ID NO: 92345 - protein, 10 aa, synthetic construct
DDYRGDFNNL

SEQ ID NO: 92346 - protein, 10 aa, synthetic construct
DDNRGDFNNT

SEQ ID NO: 92347 - protein, 10 aa, synthetic construct
DDNRGDFNNL

SEQ ID NO: 92348 - protein, 10 aa, synthetic construct
DEIRGDFNNT

SEQ ID NO: 92349 - protein, 10 aa, synthetic construct
DSDRGDRSQT

SEQ ID NO: 92350 - protein, 10 aa, synthetic construct
DEIRGDFNNL

SEQ ID NO: 92351 - protein, 10 aa, synthetic construct
DEMRGDFNNT

SEQ ID NO: 92352 - protein, 10 aa, synthetic construct
DEMRGDFNNL

SEQ ID NO: 92353 - protein, 10 aa, synthetic construct
DEFRGDFNNT

SEQ ID NO: 92354 - protein, 10 aa, synthetic construct
DEFRGDFNNL

SEQ ID NO: 92355 - protein, 10 aa, synthetic construct
DEKRGDFNNT

SEQ ID NO: 92356 - protein, 10 aa, synthetic construct
DEKRGDFNNL

SEQ ID NO: 92357 - protein, 10 aa, synthetic construct
DEYRGDFNNT

SEQ ID NO: 92358 - protein, 10 aa, synthetic construct
DEYRGDFNNL

SEQ ID NO: 92359 - protein, 10 aa, synthetic construct
DENRGDFNNT

SEQ ID NO: 92360 - protein, 10 aa, synthetic construct
DSERGDRGQI

SEQ ID NO: 92361 - protein, 10 aa, synthetic construct
DENRGDFNNL

SEQ ID NO: 92362 - protein, 10 aa, synthetic construct
QIVRGDFNNT

SEQ ID NO: 92363 - protein, 10 aa, synthetic construct
QIVRGDFNNL

SEQ ID NO: 92364 - protein, 10 aa, synthetic construct
QILRGDFNNT

SEQ ID NO: 92365 - protein, 10 aa, synthetic construct
QILRGDFNNL

SEQ ID NO: 92366 - protein, 10 aa, synthetic construct
QIIRGDYNSL

SEQ ID NO: 92367 - protein, 10 aa, synthetic construct
QIIRGDYTSM

SEQ ID NO: 92368 - protein, 10 aa, synthetic construct
QIIRGDFQNT

SEQ ID NO: 92369 - protein, 10 aa, synthetic construct
QIMRGDYNSL

SEQ ID NO: 92370 - protein, 10 aa, synthetic construct
QIMRGDYTSM

SEQ ID NO: 92371 - protein, 10 aa, synthetic construct
DSERGDRQGI

SEQ ID NO: 92372 - protein, 10 aa, synthetic construct
QIMRGDFQNT

SEQ ID NO: 92373 - protein, 10 aa, synthetic construct
QIWRGDFNNT

SEQ ID NO: 92374 - protein, 10 aa, synthetic construct
QIWRGDFNNL

SEQ ID NO: 92375 - protein, 10 aa, synthetic construct
QIFRGDYNSL

SEQ ID NO: 92376 - protein, 10 aa, synthetic construct
QIFRGDYTSM

SEQ ID NO: 92377 - protein, 10 aa, synthetic construct
QIFRGDFQNT

SEQ ID NO: 92378 - protein, 10 aa, synthetic construct
QIKRGDYNSL

SEQ ID NO: 92379 - protein, 10 aa, synthetic construct
QIKRGDYTSM

SEQ ID NO: 92380 - protein, 10 aa, synthetic construct
QIKRGDFQNT

SEQ ID NO: 92381 - protein, 10 aa, synthetic construct
QIHRGDFNNT

SEQ ID NO: 92382 - protein, 10 aa, synthetic construct
DSERGDRSVV

SEQ ID NO: 92383 - protein, 10 aa, synthetic construct
QIHRGDFNNL

SEQ ID NO: 92384 - protein, 10 aa, synthetic construct
QISRGDFNNT

SEQ ID NO: 92385 - protein, 10 aa, synthetic construct
QISRGDFNNL

SEQ ID NO: 92386 - protein, 10 aa, synthetic construct
QITRGDFNNT

SEQ ID NO: 92387 - protein, 10 aa, synthetic construct
QITRGDFNNL

SEQ ID NO: 92388 - protein, 10 aa, synthetic construct
QIYRGDYNSL

SEQ ID NO: 92389 - protein, 10 aa, synthetic construct
QIYRGDYTSM

SEQ ID NO: 92390 - protein, 10 aa, synthetic construct
QIYRGDFQNT

SEQ ID NO: 92391 - protein, 10 aa, synthetic construct
QINRGDYNSL

SEQ ID NO: 92392 - protein, 10 aa, synthetic construct
QINRGDYTSM

SEQ ID NO: 92393 - protein, 10 aa, synthetic construct
DSERGDRGVV

SEQ ID NO: 92394 - protein, 10 aa, synthetic construct
QINRGDFQNT

SEQ ID NO: 92395 - protein, 10 aa, synthetic construct
QIQRGDFNNT

SEQ ID NO: 92396 - protein, 10 aa, synthetic construct
QIQRGDFNNL

SEQ ID NO: 92397 - protein, 10 aa, synthetic construct
QIDRGDFNNT

SEQ ID NO: 92398 - protein, 10 aa, synthetic construct
QIDRGDFNNL

SEQ ID NO: 92399 - protein, 10 aa, synthetic construct
QIERGDFNNT

SEQ ID NO: 92400 - protein, 10 aa, synthetic construct
QIERGDFNNL

SEQ ID NO: 92401 - protein, 10 aa, synthetic construct
QMIRGDFQNT

SEQ ID NO: 92402 - protein, 10 aa, synthetic construct
QMMRGDFNNT

SEQ ID NO: 92403 - protein, 10 aa, synthetic construct
QMMRGDFNNL

SEQ ID NO: 92404 - protein, 10 aa, synthetic construct
DFFRGDFNNL

SEQ ID NO: 92405 - protein, 10 aa, synthetic construct
DSERGDRSQT

SEQ ID NO: 92406 - protein, 10 aa, synthetic construct
QMFRGDFQNT

SEQ ID NO: 92407 - protein, 10 aa, synthetic construct
QMKRGDFQNT

SEQ ID NO: 92408 - protein, 10 aa, synthetic construct
QMHRGDFNNT

SEQ ID NO: 92409 - protein, 10 aa, synthetic construct
QMHRGDFNNL

SEQ ID NO: 92410 - protein, 10 aa, synthetic construct
QMTRGDFNNT

SEQ ID NO: 92411 - protein, 10 aa, synthetic construct
QMTRGDFNNL

SEQ ID NO: 92412 - protein, 10 aa, synthetic construct
QMYRGDFQNT

SEQ ID NO: 92413 - protein, 10 aa, synthetic construct
QMNRGDFQNT

SEQ ID NO: 92414 - protein, 10 aa, synthetic construct
QMQRGDFNNT

SEQ ID NO: 92415 - protein, 10 aa, synthetic construct
QMQRGDFNNL

SEQ ID NO: 92416 - protein, 10 aa, synthetic construct
DTGRGDRGQI

SEQ ID NO: 92417 - protein, 10 aa, synthetic construct
QMDRGDFNNT

SEQ ID NO: 92418 - protein, 10 aa, synthetic construct
QMDRGDFNNL

SEQ ID NO: 92419 - protein, 10 aa, synthetic construct
QMERGDFNNT

SEQ ID NO: 92420 - protein, 10 aa, synthetic construct
QMERGDFNNL

SEQ ID NO: 92421 - protein, 10 aa, synthetic construct
QWIRGDFNNT

SEQ ID NO: 92422 - protein, 10 aa, synthetic construct
QWIRGDFNNL

SEQ ID NO: 92423 - protein, 10 aa, synthetic construct
QWFRGDFNNT

SEQ ID NO: 92424 - protein, 10 aa, synthetic construct
QWFRGDFNNL

SEQ ID NO: 92425 - protein, 10 aa, synthetic construct
QWKRGDFNNT

SEQ ID NO: 92426 - protein, 10 aa, synthetic construct
QWKRGDFNNL

SEQ ID NO: 92427 - protein, 10 aa, synthetic construct
DTGRGDRQGI

SEQ ID NO: 92428 - protein, 10 aa, synthetic construct
QWYRGDFNNT

SEQ ID NO: 92429 - protein, 10 aa, synthetic construct
QWYRGDFNNL

SEQ ID NO: 92430 - protein, 10 aa, synthetic construct
QWNRGDFNNT

SEQ ID NO: 92431 - protein, 10 aa, synthetic construct
QWNRGDFNNL

SEQ ID NO: 92432 - protein, 10 aa, synthetic construct
QFVRGDFNNT

SEQ ID NO: 92433 - protein, 10 aa, synthetic construct
QFVRGDFNNL

SEQ ID NO: 92434 - protein, 10 aa, synthetic construct
QFLRGDFNNT

SEQ ID NO: 92435 - protein, 10 aa, synthetic construct
QFLRGDFNNL

SEQ ID NO: 92436 - protein, 10 aa, synthetic construct
QFIRGDYNSL

SEQ ID NO: 92437 - protein, 10 aa, synthetic construct
QFIRGDYTSM

SEQ ID NO: 92438 - protein, 10 aa, synthetic construct
DTGRGDRSVV

SEQ ID NO: 92439 - protein, 10 aa, synthetic construct
QFIRGDFQNT

SEQ ID NO: 92440 - protein, 10 aa, synthetic construct
QFMRGDYNSL

SEQ ID NO: 92441 - protein, 10 aa, synthetic construct
QFMRGDYTSM

SEQ ID NO: 92442 - protein, 10 aa, synthetic construct
QFMRGDFQNT

SEQ ID NO: 92443 - protein, 10 aa, synthetic construct
QFWRGDFNNT

SEQ ID NO: 92444 - protein, 10 aa, synthetic construct
QFWRGDFNNL

SEQ ID NO: 92445 - protein, 10 aa, synthetic construct
QFKRGDYNSL

SEQ ID NO: 92446 - protein, 10 aa, synthetic construct
QFKRGDYTSM

SEQ ID NO: 92447 - protein, 10 aa, synthetic construct
QFKRGDFQNT

SEQ ID NO: 92448 - protein, 10 aa, synthetic construct
QFHRGDFNNT

SEQ ID NO: 92449 - protein, 10 aa, synthetic construct
DTGRGDRGVV

SEQ ID NO: 92450 - protein, 10 aa, synthetic construct
QFHRGDFNNL

SEQ ID NO: 92451 - protein, 10 aa, synthetic construct
QFSRGDFNNT

SEQ ID NO: 92452 - protein, 10 aa, synthetic construct
QFSRGDFNNL

SEQ ID NO: 92453 - protein, 10 aa, synthetic construct
QFTRGDFNNT

SEQ ID NO: 92454 - protein, 10 aa, synthetic construct
QFTRGDFNNL

SEQ ID NO: 92455 - protein, 10 aa, synthetic construct
QFYRGDYNSL

SEQ ID NO: 92456 - protein, 10 aa, synthetic construct
QFYRGDYTSM

SEQ ID NO: 92457 - protein, 10 aa, synthetic construct
QFYRGDFQNT

SEQ ID NO: 92458 - protein, 10 aa, synthetic construct
QFNRGDYNSL

SEQ ID NO: 92459 - protein, 10 aa, synthetic construct
QFNRGDYTSM

SEQ ID NO: 92460 - protein, 10 aa, synthetic construct
DTGRGDRSQT

SEQ ID NO: 92461 - protein, 10 aa, synthetic construct
QFNRGDFQNT

SEQ ID NO: 92462 - protein, 10 aa, synthetic construct
QFQRGDFNNT

SEQ ID NO: 92463 - protein, 10 aa, synthetic construct
QFQRGDFNNL

SEQ ID NO: 92464 - protein, 10 aa, synthetic construct
QFDRGDFNNT

SEQ ID NO: 92465 - protein, 10 aa, synthetic construct
QFDRGDFNNL

SEQ ID NO: 92466 - protein, 10 aa, synthetic construct
QFERGDFNNT

SEQ ID NO: 92467 - protein, 10 aa, synthetic construct
QFERGDFNNL

SEQ ID NO: 92468 - protein, 10 aa, synthetic construct
QKVRGDFNNT

SEQ ID NO: 92469 - protein, 10 aa, synthetic construct
QKVRGDFNNL

SEQ ID NO: 92470 - protein, 10 aa, synthetic construct
QKLRGDFNNT

SEQ ID NO: 92471 - protein, 10 aa, synthetic construct
DTARGDRGQI

SEQ ID NO: 92472 - protein, 10 aa, synthetic construct
QKLRGDFNNL

SEQ ID NO: 92473 - protein, 10 aa, synthetic construct
QKIRGDYNSL

SEQ ID NO: 92474 - protein, 10 aa, synthetic construct
QKIRGDYTSM

SEQ ID NO: 92475 - protein, 10 aa, synthetic construct
QKIRGDFQNT

SEQ ID NO: 92476 - protein, 10 aa, synthetic construct
QKMRGDYNSL

SEQ ID NO: 92477 - protein, 10 aa, synthetic construct
QKMRGDYTSM

SEQ ID NO: 92478 - protein, 10 aa, synthetic construct
QKMRGDFQNT

SEQ ID NO: 92479 - protein, 10 aa, synthetic construct
QKWRGDFNNT

SEQ ID NO: 92480 - protein, 10 aa, synthetic construct
QKWRGDFNNL

SEQ ID NO: 92481 - protein, 10 aa, synthetic construct
QKFRGDYNSL

SEQ ID NO: 92482 - protein, 10 aa, synthetic construct
DTARGDRQGI

SEQ ID NO: 92483 - protein, 10 aa, synthetic construct
QKFRGDYTSM

SEQ ID NO: 92484 - protein, 10 aa, synthetic construct
QKFRGDFQNT

SEQ ID NO: 92485 - protein, 10 aa, synthetic construct
QKHRGDFNNT

SEQ ID NO: 92486 - protein, 10 aa, synthetic construct
QKHRGDFNNL

SEQ ID NO: 92487 - protein, 10 aa, synthetic construct
QKSRGDFNNT

SEQ ID NO: 92488 - protein, 10 aa, synthetic construct
QKSRGDFNNL

SEQ ID NO: 92489 - protein, 10 aa, synthetic construct
QKTRGDFNNT

SEQ ID NO: 92490 - protein, 10 aa, synthetic construct
QKTRGDFNNL

SEQ ID NO: 92491 - protein, 10 aa, synthetic construct
QKYRGDYNSL

SEQ ID NO: 92492 - protein, 10 aa, synthetic construct
QKYRGDYTSM

SEQ ID NO: 92493 - protein, 10 aa, synthetic construct
DTARGDRSVV

SEQ ID NO: 92494 - protein, 10 aa, synthetic construct
QKYRGDFQNT

SEQ ID NO: 92495 - protein, 10 aa, synthetic construct
QKQRGDFNNT

SEQ ID NO: 92496 - protein, 10 aa, synthetic construct
QKQRGDFNNL

SEQ ID NO: 92497 - protein, 10 aa, synthetic construct
QKDRGDFNNT

SEQ ID NO: 92498 - protein, 10 aa, synthetic construct
QKDRGDFNNL

SEQ ID NO: 92499 - protein, 10 aa, synthetic construct
QKERGDFNNT

SEQ ID NO: 92500 - protein, 10 aa, synthetic construct
QKERGDFNNL

SEQ ID NO: 92501 - protein, 10 aa, synthetic construct
QHIRGDFNNT

SEQ ID NO: 92502 - protein, 10 aa, synthetic construct
QHIRGDFNNL

SEQ ID NO: 92503 - protein, 10 aa, synthetic construct
QHMRGDFNNT

SEQ ID NO: 92504 - protein, 10 aa, synthetic construct
DTARGDRGVV

SEQ ID NO: 92505 - protein, 10 aa, synthetic construct
QHMRGDFNNL

SEQ ID NO: 92506 - protein, 10 aa, synthetic construct
QHFRGDFNNT

SEQ ID NO: 92507 - protein, 10 aa, synthetic construct
QHFRGDFNNL

SEQ ID NO: 92508 - protein, 10 aa, synthetic construct
QHKRGDFNNT

SEQ ID NO: 92509 - protein, 10 aa, synthetic construct
QHKRGDFNNL

SEQ ID NO: 92510 - protein, 10 aa, synthetic construct
QHYRGDFNNT

SEQ ID NO: 92511 - protein, 10 aa, synthetic construct
QHYRGDFNNL

SEQ ID NO: 92512 - protein, 10 aa, synthetic construct
QHNRGDFNNT

SEQ ID NO: 92513 - protein, 10 aa, synthetic construct
QHNRGDFNNL

SEQ ID NO: 92514 - protein, 10 aa, synthetic construct
QTIRGDFNNT

SEQ ID NO: 92515 - protein, 10 aa, synthetic construct
QFFRGDFNNT

SEQ ID NO: 92516 - protein, 10 aa, synthetic construct
DTARGDRSQT

SEQ ID NO: 92517 - protein, 10 aa, synthetic construct
QTIRGDFNNL

SEQ ID NO: 92518 - protein, 10 aa, synthetic construct
QTMRGDFNNT

SEQ ID NO: 92519 - protein, 10 aa, synthetic construct
QTMRGDFNNL

SEQ ID NO: 92520 - protein, 10 aa, synthetic construct
QTFRGDFNNT

SEQ ID NO: 92521 - protein, 10 aa, synthetic construct
QTFRGDFNNL

SEQ ID NO: 92522 - protein, 10 aa, synthetic construct
QTKRGDFNNT

SEQ ID NO: 92523 - protein, 10 aa, synthetic construct
QTKRGDFNNL

SEQ ID NO: 92524 - protein, 10 aa, synthetic construct
QTYRGDFNNT

SEQ ID NO: 92525 - protein, 10 aa, synthetic construct
QTYRGDFNNL

SEQ ID NO: 92526 - protein, 10 aa, synthetic construct
QTNRGDFNNT

SEQ ID NO: 92527 - protein, 10 aa, synthetic construct
DTPRGDRGQI

SEQ ID NO: 92528 - protein, 10 aa, synthetic construct
QTNRGDFNNL

SEQ ID NO: 92529 - protein, 10 aa, synthetic construct
QYVRGDFNNT

SEQ ID NO: 92530 - protein, 10 aa, synthetic construct
QYVRGDFNNL

SEQ ID NO: 92531 - protein, 10 aa, synthetic construct
QYLRGDFNNT

SEQ ID NO: 92532 - protein, 10 aa, synthetic construct
QYLRGDFNNL

SEQ ID NO: 92533 - protein, 10 aa, synthetic construct
QYIRGDYNSL

SEQ ID NO: 92534 - protein, 10 aa, synthetic construct
QYIRGDYTSM

SEQ ID NO: 92535 - protein, 10 aa, synthetic construct
QYIRGDFQNT

SEQ ID NO: 92536 - protein, 10 aa, synthetic construct
QYMRGDYNSL

SEQ ID NO: 92537 - protein, 10 aa, synthetic construct
QYMRGDYTSM

SEQ ID NO: 92538 - protein, 10 aa, synthetic construct
DTPRGDRQGI

SEQ ID NO: 92539 - protein, 10 aa, synthetic construct
QYMRGDFQNT

SEQ ID NO: 92540 - protein, 10 aa, synthetic construct
QYWRGDFNNT

SEQ ID NO: 92541 - protein, 10 aa, synthetic construct
QYWRGDFNNL

SEQ ID NO: 92542 - protein, 10 aa, synthetic construct
QYFRGDYNSL

SEQ ID NO: 92543 - protein, 10 aa, synthetic construct
QYFRGDYTSM

SEQ ID NO: 92544 - protein, 10 aa, synthetic construct
QYFRGDFQNT

SEQ ID NO: 92545 - protein, 10 aa, synthetic construct
QYKRGDYNSL

SEQ ID NO: 92546 - protein, 10 aa, synthetic construct
QYKRGDYTSM

SEQ ID NO: 92547 - protein, 10 aa, synthetic construct
QYKRGDFQNT

SEQ ID NO: 92548 - protein, 10 aa, synthetic construct
QYHRGDFNNT

SEQ ID NO: 92549 - protein, 10 aa, synthetic construct
DTPRGDRSVV

SEQ ID NO: 92550 - protein, 10 aa, synthetic construct
QYHRGDFNNL

SEQ ID NO: 92551 - protein, 10 aa, synthetic construct
QYSRGDFNNT

SEQ ID NO: 92552 - protein, 10 aa, synthetic construct
QYSRGDFNNL

SEQ ID NO: 92553 - protein, 10 aa, synthetic construct
QYTRGDFNNT

SEQ ID NO: 92554 - protein, 10 aa, synthetic construct
QYTRGDFNNL

SEQ ID NO: 92555 - protein, 10 aa, synthetic construct
QYYRGDYNSL

SEQ ID NO: 92556 - protein, 10 aa, synthetic construct
QYYRGDYTSM

SEQ ID NO: 92557 - protein, 10 aa, synthetic construct
QYYRGDFQNT

SEQ ID NO: 92558 - protein, 10 aa, synthetic construct
QYNRGDYNSL

SEQ ID NO: 92559 - protein, 10 aa, synthetic construct
QYNRGDYTSM

SEQ ID NO: 92560 - protein, 10 aa, synthetic construct
DTPRGDRGVV

SEQ ID NO: 92561 - protein, 10 aa, synthetic construct
QYNRGDFQNT

SEQ ID NO: 92562 - protein, 10 aa, synthetic construct
QYQRGDFNNT

SEQ ID NO: 92563 - protein, 10 aa, synthetic construct
QYQRGDFNNL

SEQ ID NO: 92564 - protein, 10 aa, synthetic construct
QYDRGDFNNT

SEQ ID NO: 92565 - protein, 10 aa, synthetic construct
QYDRGDFNNL

SEQ ID NO: 92566 - protein, 10 aa, synthetic construct
QYERGDFNNT

SEQ ID NO: 92567 - protein, 10 aa, synthetic construct
QYERGDFNNL

SEQ ID NO: 92568 - protein, 10 aa, synthetic construct
QNVRGDFNNT

SEQ ID NO: 92569 - protein, 10 aa, synthetic construct
QNVRGDFNNL

SEQ ID NO: 92570 - protein, 10 aa, synthetic construct
QNLRGDFNNT

SEQ ID NO: 92571 - protein, 10 aa, synthetic construct
DTPRGDRSQT

SEQ ID NO: 92572 - protein, 10 aa, synthetic construct
QNLRGDFNNL

SEQ ID NO: 92573 - protein, 10 aa, synthetic construct
QNIRGDYNSL

SEQ ID NO: 92574 - protein, 10 aa, synthetic construct
QNIRGDYTSM

SEQ ID NO: 92575 - protein, 10 aa, synthetic construct
QNIRGDFQNT

SEQ ID NO: 92576 - protein, 10 aa, synthetic construct
QNMRGDYNSL

SEQ ID NO: 92577 - protein, 10 aa, synthetic construct
QNMRGDYTSM

SEQ ID NO: 92578 - protein, 10 aa, synthetic construct
QNMRGDFQNT

SEQ ID NO: 92579 - protein, 10 aa, synthetic construct
QNWRGDFNNT

SEQ ID NO: 92580 - protein, 10 aa, synthetic construct
QNWRGDFNNL

SEQ ID NO: 92581 - protein, 10 aa, synthetic construct
QNFRGDYNSL

SEQ ID NO: 92582 - protein, 10 aa, synthetic construct
DTRRGDRGQI

SEQ ID NO: 92583 - protein, 10 aa, synthetic construct
QNFRGDYTSM

SEQ ID NO: 92584 - protein, 10 aa, synthetic construct
QNFRGDFQNT

SEQ ID NO: 92585 - protein, 10 aa, synthetic construct
QNKRGDYNSL

SEQ ID NO: 92586 - protein, 10 aa, synthetic construct
QNKRGDYTSM

SEQ ID NO: 92587 - protein, 10 aa, synthetic construct
QNKRGDFQNT

SEQ ID NO: 92588 - protein, 10 aa, synthetic construct
QNHRGDFNNT

SEQ ID NO: 92589 - protein, 10 aa, synthetic construct
QNHRGDFNNL

SEQ ID NO: 92590 - protein, 10 aa, synthetic construct
QNSRGDFNNT

SEQ ID NO: 92591 - protein, 10 aa, synthetic construct
QNSRGDFNNL

SEQ ID NO: 92592 - protein, 10 aa, synthetic construct
QNTRGDFNNT

SEQ ID NO: 92593 - protein, 10 aa, synthetic construct
DTRRGDRQGI

SEQ ID NO: 92594 - protein, 10 aa, synthetic construct
QNTRGDFNNL

SEQ ID NO: 92595 - protein, 10 aa, synthetic construct
QNYRGDYNSL

SEQ ID NO: 92596 - protein, 10 aa, synthetic construct
QNYRGDYTSM

SEQ ID NO: 92597 - protein, 10 aa, synthetic construct
QNYRGDFQNT

SEQ ID NO: 92598 - protein, 10 aa, synthetic construct
QNNRGDYNSL

SEQ ID NO: 92599 - protein, 10 aa, synthetic construct
QNNRGDYTSM

SEQ ID NO: 92600 - protein, 10 aa, synthetic construct
QNNRGDFQNT

SEQ ID NO: 92601 - protein, 10 aa, synthetic construct
QNQRGDFNNT

SEQ ID NO: 92602 - protein, 10 aa, synthetic construct
QNQRGDFNNL

SEQ ID NO: 92603 - protein, 10 aa, synthetic construct
QNDRGDFNNT

SEQ ID NO: 92604 - protein, 10 aa, synthetic construct
DTRRGDRSVV

SEQ ID NO: 92605 - protein, 10 aa, synthetic construct
QNDRGDFNNL

SEQ ID NO: 92606 - protein, 10 aa, synthetic construct
QNERGDFNNT

SEQ ID NO: 92607 - protein, 10 aa, synthetic construct
QNERGDFNNL

SEQ ID NO: 92608 - protein, 10 aa, synthetic construct
QQIRGDFNNT

SEQ ID NO: 92609 - protein, 10 aa, synthetic construct
QQIRGDFNNL

SEQ ID NO: 92610 - protein, 10 aa, synthetic construct
QQMRGDFNNT

SEQ ID NO: 92611 - protein, 10 aa, synthetic construct
QQMRGDFNNL

SEQ ID NO: 92612 - protein, 10 aa, synthetic construct
QQFRGDFNNT

SEQ ID NO: 92613 - protein, 10 aa, synthetic construct
QQFRGDFNNL

SEQ ID NO: 92614 - protein, 10 aa, synthetic construct
QQKRGDFNNT

SEQ ID NO: 92615 - protein, 10 aa, synthetic construct
DTRRGDRGVV

SEQ ID NO: 92616 - protein, 10 aa, synthetic construct
QQKRGDFNNL

SEQ ID NO: 92617 - protein, 10 aa, synthetic construct
QQYRGDFNNT

SEQ ID NO: 92618 - protein, 10 aa, synthetic construct
QQYRGDFNNL

SEQ ID NO: 92619 - protein, 10 aa, synthetic construct
QQNRGDFNNT

SEQ ID NO: 92620 - protein, 10 aa, synthetic construct
QQNRGDFNNL

SEQ ID NO: 92621 - protein, 10 aa, synthetic construct
QDIRGDFNNT

SEQ ID NO: 92622 - protein, 10 aa, synthetic construct
QDIRGDFNNL

SEQ ID NO: 92623 - protein, 10 aa, synthetic construct
QDMRGDFNNT

SEQ ID NO: 92624 - protein, 10 aa, synthetic construct
QDMRGDFNNL

SEQ ID NO: 92625 - protein, 10 aa, synthetic construct
QDFRGDFNNT

SEQ ID NO: 92626 - protein, 10 aa, synthetic construct
QFFRGDFNNL

SEQ ID NO: 92627 - protein, 10 aa, synthetic construct
DTRRGDRSQT

SEQ ID NO: 92628 - protein, 10 aa, synthetic construct
QDFRGDFNNL

SEQ ID NO: 92629 - protein, 10 aa, synthetic construct
QDKRGDFNNT

SEQ ID NO: 92630 - protein, 10 aa, synthetic construct
QDKRGDFNNL

SEQ ID NO: 92631 - protein, 10 aa, synthetic construct
QDYRGDFNNT

SEQ ID NO: 92632 - protein, 10 aa, synthetic construct
QDYRGDFNNL

SEQ ID NO: 92633 - protein, 10 aa, synthetic construct
QDNRGDFNNT

SEQ ID NO: 92634 - protein, 10 aa, synthetic construct
QDNRGDFNNL

SEQ ID NO: 92635 - protein, 10 aa, synthetic construct
QEIRGDFNNT

SEQ ID NO: 92636 - protein, 10 aa, synthetic construct
QEIRGDFNNL

SEQ ID NO: 92637 - protein, 10 aa, synthetic construct
QEMRGDFNNT

SEQ ID NO: 92638 - protein, 10 aa, synthetic construct
DQGRGDRGQI

SEQ ID NO: 92639 - protein, 10 aa, synthetic construct
QEMRGDFNNL

SEQ ID NO: 92640 - protein, 10 aa, synthetic construct
QEFRGDFNNT

SEQ ID NO: 92641 - protein, 10 aa, synthetic construct
QEFRGDFNNL

SEQ ID NO: 92642 - protein, 10 aa, synthetic construct
QEKRGDFNNT

SEQ ID NO: 92643 - protein, 10 aa, synthetic construct
QEKRGDFNNL

SEQ ID NO: 92644 - protein, 10 aa, synthetic construct
QEYRGDFNNT

SEQ ID NO: 92645 - protein, 10 aa, synthetic construct
QEYRGDFNNL

SEQ ID NO: 92646 - protein, 10 aa, synthetic construct
QENRGDFNNT

SEQ ID NO: 92647 - protein, 10 aa, synthetic construct
QENRGDFNNL

SEQ ID NO: 92648 - protein, 10 aa, synthetic construct
SIIRGDFNNT

SEQ ID NO: 92649 - protein, 10 aa, synthetic construct
DQGRGDRQGI

SEQ ID NO: 92650 - protein, 10 aa, synthetic construct
SIIRGDFNNL

SEQ ID NO: 92651 - protein, 10 aa, synthetic construct
SIMRGDFNNT

SEQ ID NO: 92652 - protein, 10 aa, synthetic construct
SIMRGDFNNL

SEQ ID NO: 92653 - protein, 10 aa, synthetic construct
SIFRGDFNNT

SEQ ID NO: 92654 - protein, 10 aa, synthetic construct
SIFRGDFNNL

SEQ ID NO: 92655 - protein, 10 aa, synthetic construct
SIKRGDFNNT

SEQ ID NO: 92656 - protein, 10 aa, synthetic construct
SIKRGDFNNL

SEQ ID NO: 92657 - protein, 10 aa, synthetic construct
SIYRGDFNNT

SEQ ID NO: 92658 - protein, 10 aa, synthetic construct
SIYRGDFNNL

SEQ ID NO: 92659 - protein, 10 aa, synthetic construct
SINRGDFNNT

SEQ ID NO: 92660 - protein, 10 aa, synthetic construct
DQGRGDRSVV

SEQ ID NO: 92661 - protein, 10 aa, synthetic construct
SINRGDFNNL

SEQ ID NO: 92662 - protein, 10 aa, synthetic construct
SMIRGDFNNT

SEQ ID NO: 92663 - protein, 10 aa, synthetic construct
SMIRGDFNNL

SEQ ID NO: 92664 - protein, 10 aa, synthetic construct
SMFRGDFNNT

SEQ ID NO: 92665 - protein, 10 aa, synthetic construct
SMFRGDFNNL

SEQ ID NO: 92666 - protein, 10 aa, synthetic construct
SMKRGDFNNT

SEQ ID NO: 92667 - protein, 10 aa, synthetic construct
SMKRGDFNNL

SEQ ID NO: 92668 - protein, 10 aa, synthetic construct
SMYRGDFNNT

SEQ ID NO: 92669 - protein, 10 aa, synthetic construct
SMYRGDFNNL

SEQ ID NO: 92670 - protein, 10 aa, synthetic construct
SMNRGDFNNT

SEQ ID NO: 92671 - protein, 10 aa, synthetic construct
DQGRGDRGVV

SEQ ID NO: 92672 - protein, 10 aa, synthetic construct
SMNRGDFNNL

SEQ ID NO: 92673 - protein, 10 aa, synthetic construct
SFIRGDFNNT

SEQ ID NO: 92674 - protein, 10 aa, synthetic construct
SFIRGDFNNL

SEQ ID NO: 92675 - protein, 10 aa, synthetic construct
SFMRGDFNNT

SEQ ID NO: 92676 - protein, 10 aa, synthetic construct
SFMRGDFNNL

SEQ ID NO: 92677 - protein, 10 aa, synthetic construct
SFKRGDFNNT

SEQ ID NO: 92678 - protein, 10 aa, synthetic construct
SFKRGDFNNL

SEQ ID NO: 92679 - protein, 10 aa, synthetic construct
SFYRGDFNNT

SEQ ID NO: 92680 - protein, 10 aa, synthetic construct
SFYRGDFNNL

SEQ ID NO: 92681 - protein, 10 aa, synthetic construct
SFNRGDFNNT

SEQ ID NO: 92682 - protein, 10 aa, synthetic construct
DQGRGDRSQT

SEQ ID NO: 92683 - protein, 10 aa, synthetic construct
SFNRGDFNNL

SEQ ID NO: 92684 - protein, 10 aa, synthetic construct
SKIRGDFNNT

SEQ ID NO: 92685 - protein, 10 aa, synthetic construct
SKIRGDFNNL

SEQ ID NO: 92686 - protein, 10 aa, synthetic construct
SKMRGDFNNT

SEQ ID NO: 92687 - protein, 10 aa, synthetic construct
SKMRGDFNNL

SEQ ID NO: 92688 - protein, 10 aa, synthetic construct
SKFRGDFNNT

SEQ ID NO: 92689 - protein, 10 aa, synthetic construct
SKFRGDFNNL

SEQ ID NO: 92690 - protein, 10 aa, synthetic construct
SKYRGDFNNT

SEQ ID NO: 92691 - protein, 10 aa, synthetic construct
SKYRGDFNNL

SEQ ID NO: 92692 - protein, 10 aa, synthetic construct
SYIRGDFNNT

SEQ ID NO: 92693 - protein, 10 aa, synthetic construct
DQARGDRGQI

SEQ ID NO: 92694 - protein, 10 aa, synthetic construct
SYIRGDFNNL

SEQ ID NO: 92695 - protein, 10 aa, synthetic construct
SYMRGDFNNT

SEQ ID NO: 92696 - protein, 10 aa, synthetic construct
SYMRGDFNNL

SEQ ID NO: 92697 - protein, 10 aa, synthetic construct
SYFRGDFNNT

SEQ ID NO: 92698 - protein, 10 aa, synthetic construct
SYFRGDFNNL

SEQ ID NO: 92699 - protein, 10 aa, synthetic construct
SYKRGDFNNT

SEQ ID NO: 92700 - protein, 10 aa, synthetic construct
SYKRGDFNNL

SEQ ID NO: 92701 - protein, 10 aa, synthetic construct
SYYRGDFNNT

SEQ ID NO: 92702 - protein, 10 aa, synthetic construct
SYYRGDFNNL

SEQ ID NO: 92703 - protein, 10 aa, synthetic construct
SYNRGDFNNT

SEQ ID NO: 92704 - protein, 10 aa, synthetic construct
DQARGDRQGI

SEQ ID NO: 92705 - protein, 10 aa, synthetic construct
SYNRGDFNNL

SEQ ID NO: 92706 - protein, 10 aa, synthetic construct
SNIRGDFNNT

SEQ ID NO: 92707 - protein, 10 aa, synthetic construct
SNIRGDFNNL

SEQ ID NO: 92708 - protein, 10 aa, synthetic construct
SNMRGDFNNT

SEQ ID NO: 92709 - protein, 10 aa, synthetic construct
SNMRGDFNNL

SEQ ID NO: 92710 - protein, 10 aa, synthetic construct
SNFRGDFNNT

SEQ ID NO: 92711 - protein, 10 aa, synthetic construct
SNFRGDFNNL

SEQ ID NO: 92712 - protein, 10 aa, synthetic construct
SNKRGDFNNT

SEQ ID NO: 92713 - protein, 10 aa, synthetic construct
SNKRGDFNNL

SEQ ID NO: 92714 - protein, 10 aa, synthetic construct
SNYRGDFNNT

SEQ ID NO: 92715 - protein, 10 aa, synthetic construct
DQARGDRSVV

SEQ ID NO: 92716 - protein, 10 aa, synthetic construct
SNYRGDFNNL

SEQ ID NO: 92717 - protein, 10 aa, synthetic construct
SNNRGDFNNT

SEQ ID NO: 92718 - protein, 10 aa, synthetic construct
SNNRGDFNNL

SEQ ID NO: 92719 - protein, 10 aa, synthetic construct
TIIRGDFNNT

SEQ ID NO: 92720 - protein, 10 aa, synthetic construct
TIIRGDFNNL

SEQ ID NO: 92721 - protein, 10 aa, synthetic construct
TIMRGDFNNT

SEQ ID NO: 92722 - protein, 10 aa, synthetic construct
TIMRGDFNNL

SEQ ID NO: 92723 - protein, 10 aa, synthetic construct
TIFRGDFNNT

SEQ ID NO: 92724 - protein, 10 aa, synthetic construct
TIFRGDFNNL

SEQ ID NO: 92725 - protein, 10 aa, synthetic construct
TIKRGDFNNT

SEQ ID NO: 92726 - protein, 10 aa, synthetic construct
DQARGDRGVV

SEQ ID NO: 92727 - protein, 10 aa, synthetic construct
TIKRGDFNNL

SEQ ID NO: 92728 - protein, 10 aa, synthetic construct
TIYRGDFNNT

SEQ ID NO: 92729 - protein, 10 aa, synthetic construct
TIYRGDFNNL

SEQ ID NO: 92730 - protein, 10 aa, synthetic construct
TINRGDFNNT

SEQ ID NO: 92731 - protein, 10 aa, synthetic construct
TINRGDFNNL

SEQ ID NO: 92732 - protein, 10 aa, synthetic construct
TMIRGDFNNT

SEQ ID NO: 92733 - protein, 10 aa, synthetic construct
TMIRGDFNNL

SEQ ID NO: 92734 - protein, 10 aa, synthetic construct
TMFRGDFNNT

SEQ ID NO: 92735 - protein, 10 aa, synthetic construct
TMFRGDFNNL

SEQ ID NO: 92736 - protein, 10 aa, synthetic construct
TMKRGDFNNT

SEQ ID NO: 92737 - protein, 10 aa, synthetic construct
NFFRGDFNNT

SEQ ID NO: 92738 - protein, 10 aa, synthetic construct
DQARGDRSQT

SEQ ID NO: 92739 - protein, 10 aa, synthetic construct
TMKRGDFNNL

SEQ ID NO: 92740 - protein, 10 aa, synthetic construct
TMYRGDFNNT

SEQ ID NO: 92741 - protein, 10 aa, synthetic construct
TMYRGDFNNL

SEQ ID NO: 92742 - protein, 10 aa, synthetic construct
TMNRGDFNNT

SEQ ID NO: 92743 - protein, 10 aa, synthetic construct
TMNRGDFNNL

SEQ ID NO: 92744 - protein, 10 aa, synthetic construct
TFIRGDFNNT

SEQ ID NO: 92745 - protein, 10 aa, synthetic construct
TFIRGDFNNL

SEQ ID NO: 92746 - protein, 10 aa, synthetic construct
TFMRGDFNNT

SEQ ID NO: 92747 - protein, 10 aa, synthetic construct
TFMRGDFNNL

SEQ ID NO: 92748 - protein, 10 aa, synthetic construct
TFKRGDFNNT

SEQ ID NO: 92749 - protein, 10 aa, synthetic construct
DQPRGDRGQI

SEQ ID NO: 92750 - protein, 10 aa, synthetic construct
TFKRGDFNNL

SEQ ID NO: 92751 - protein, 10 aa, synthetic construct
TFYRGDFNNT

SEQ ID NO: 92752 - protein, 10 aa, synthetic construct
TFYRGDFNNL

SEQ ID NO: 92753 - protein, 10 aa, synthetic construct
TFNRGDFNNT

SEQ ID NO: 92754 - protein, 10 aa, synthetic construct
TFNRGDFNNL

SEQ ID NO: 92755 - protein, 10 aa, synthetic construct
TKIRGDFNNT

SEQ ID NO: 92756 - protein, 10 aa, synthetic construct
TKIRGDFNNL

SEQ ID NO: 92757 - protein, 10 aa, synthetic construct
TKMRGDFNNT

SEQ ID NO: 92758 - protein, 10 aa, synthetic construct
TKMRGDFNNL

SEQ ID NO: 92759 - protein, 10 aa, synthetic construct
TKFRGDFNNT

SEQ ID NO: 92760 - protein, 10 aa, synthetic construct
DQPRGDRQGI

SEQ ID NO: 92761 - protein, 10 aa, synthetic construct
TKFRGDFNNL

SEQ ID NO: 92762 - protein, 10 aa, synthetic construct
TKYRGDFNNT

SEQ ID NO: 92763 - protein, 10 aa, synthetic construct
TKYRGDFNNL

SEQ ID NO: 92764 - protein, 10 aa, synthetic construct
TYIRGDFNNT

SEQ ID NO: 92765 - protein, 10 aa, synthetic construct
TYIRGDFNNL

SEQ ID NO: 92766 - protein, 10 aa, synthetic construct
TYMRGDFNNT

SEQ ID NO: 92767 - protein, 10 aa, synthetic construct
TYMRGDFNNL

SEQ ID NO: 92768 - protein, 10 aa, synthetic construct
TYFRGDFNNT

SEQ ID NO: 92769 - protein, 10 aa, synthetic construct
TYFRGDFNNL

SEQ ID NO: 92770 - protein, 10 aa, synthetic construct
TYKRGDFNNT

SEQ ID NO: 92771 - protein, 10 aa, synthetic construct
DQPRGDRSVV

SEQ ID NO: 92772 - protein, 10 aa, synthetic construct
TYKRGDFNNL

SEQ ID NO: 92773 - protein, 10 aa, synthetic construct
TYYRGDFNNT

SEQ ID NO: 92774 - protein, 10 aa, synthetic construct
TYYRGDFNNL

SEQ ID NO: 92775 - protein, 10 aa, synthetic construct
TYNRGDFNNT

SEQ ID NO: 92776 - protein, 10 aa, synthetic construct
TYNRGDFNNL

SEQ ID NO: 92777 - protein, 10 aa, synthetic construct
TNIRGDFNNT

SEQ ID NO: 92778 - protein, 10 aa, synthetic construct
TNIRGDFNNL

SEQ ID NO: 92779 - protein, 10 aa, synthetic construct
TNMRGDFNNT

SEQ ID NO: 92780 - protein, 10 aa, synthetic construct
TNMRGDFNNL

SEQ ID NO: 92781 - protein, 10 aa, synthetic construct
TNFRGDFNNT

SEQ ID NO: 92782 - protein, 10 aa, synthetic construct
DQPRGDRGVV

SEQ ID NO: 92783 - protein, 10 aa, synthetic construct
TNFRGDFNNL

SEQ ID NO: 92784 - protein, 10 aa, synthetic construct
TNKRGDFNNT

SEQ ID NO: 92785 - protein, 10 aa, synthetic construct
TNKRGDFNNL

SEQ ID NO: 92786 - protein, 10 aa, synthetic construct
TNYRGDFNNT

SEQ ID NO: 92787 - protein, 10 aa, synthetic construct
TNYRGDFNNL

SEQ ID NO: 92788 - protein, 10 aa, synthetic construct
TNNRGDFNNT

SEQ ID NO: 92789 - protein, 10 aa, synthetic construct
TNNRGDFNNL

SEQ ID NO: 92790 - protein, 10 aa, synthetic construct
AIIRGDFNNT

SEQ ID NO: 92791 - protein, 10 aa, synthetic construct
AIIRGDFNNL

SEQ ID NO: 92792 - protein, 10 aa, synthetic construct
AIFRGDFNNT

SEQ ID NO: 92793 - protein, 10 aa, synthetic construct
DQPRGDRSQT

SEQ ID NO: 92794 - protein, 10 aa, synthetic construct
AIFRGDFNNL

SEQ ID NO: 92795 - protein, 10 aa, synthetic construct
AIKRGDFNNT

SEQ ID NO: 92796 - protein, 10 aa, synthetic construct
AIKRGDFNNL

SEQ ID NO: 92797 - protein, 10 aa, synthetic construct
AIYRGDFNNT

SEQ ID NO: 92798 - protein, 10 aa, synthetic construct
AIYRGDFNNL

SEQ ID NO: 92799 - protein, 10 aa, synthetic construct
AINRGDFNNT

SEQ ID NO: 92800 - protein, 10 aa, synthetic construct
AINRGDFNNL

SEQ ID NO: 92801 - protein, 10 aa, synthetic construct
AMIRGDFNNT

SEQ ID NO: 92802 - protein, 10 aa, synthetic construct
AMIRGDFNNL

SEQ ID NO: 92803 - protein, 10 aa, synthetic construct
AMFRGDFNNT

SEQ ID NO: 92804 - protein, 10 aa, synthetic construct
DQRRGDRGQI

SEQ ID NO: 92805 - protein, 10 aa, synthetic construct
AMFRGDFNNL

SEQ ID NO: 92806 - protein, 10 aa, synthetic construct
AMKRGDFNNT

SEQ ID NO: 92807 - protein, 10 aa, synthetic construct
AMKRGDFNNL

SEQ ID NO: 92808 - protein, 10 aa, synthetic construct
AMYRGDFNNT

SEQ ID NO: 92809 - protein, 10 aa, synthetic construct
AMYRGDFNNL

SEQ ID NO: 92810 - protein, 10 aa, synthetic construct
AMNRGDFNNT

SEQ ID NO: 92811 - protein, 10 aa, synthetic construct
AMNRGDFNNL

SEQ ID NO: 92812 - protein, 10 aa, synthetic construct
AFIRGDFNNT

SEQ ID NO: 92813 - protein, 10 aa, synthetic construct
AFIRGDFNNL

SEQ ID NO: 92814 - protein, 10 aa, synthetic construct
AFFRGDFNNT

SEQ ID NO: 92815 - protein, 10 aa, synthetic construct
DQRRGDRQGI

SEQ ID NO: 92816 - protein, 10 aa, synthetic construct
AFFRGDFNNL

SEQ ID NO: 92817 - protein, 10 aa, synthetic construct
AFKRGDFNNT

SEQ ID NO: 92818 - protein, 10 aa, synthetic construct
AFKRGDFNNL

SEQ ID NO: 92819 - protein, 10 aa, synthetic construct
AFYRGDFNNT

SEQ ID NO: 92820 - protein, 10 aa, synthetic construct
AFYRGDFNNL

SEQ ID NO: 92821 - protein, 10 aa, synthetic construct
AFNRGDFNNT

SEQ ID NO: 92822 - protein, 10 aa, synthetic construct
AFNRGDFNNL

SEQ ID NO: 92823 - protein, 10 aa, synthetic construct
AKIRGDFNNT

SEQ ID NO: 92824 - protein, 10 aa, synthetic construct
AKIRGDFNNL

SEQ ID NO: 92825 - protein, 10 aa, synthetic construct
AKFRGDFNNT

SEQ ID NO: 92826 - protein, 10 aa, synthetic construct
DQRRGDRSVV

SEQ ID NO: 92827 - protein, 10 aa, synthetic construct
AKFRGDFNNL

SEQ ID NO: 92828 - protein, 10 aa, synthetic construct
AKKRGDFNNT

SEQ ID NO: 92829 - protein, 10 aa, synthetic construct
AKKRGDFNNL

SEQ ID NO: 92830 - protein, 10 aa, synthetic construct
AKYRGDFNNT

SEQ ID NO: 92831 - protein, 10 aa, synthetic construct
AKYRGDFNNL

SEQ ID NO: 92832 - protein, 10 aa, synthetic construct
AKNRGDFNNT

SEQ ID NO: 92833 - protein, 10 aa, synthetic construct
AKNRGDFNNL

SEQ ID NO: 92834 - protein, 10 aa, synthetic construct
AYIRGDFNNT

SEQ ID NO: 92835 - protein, 10 aa, synthetic construct
AYIRGDFNNL

SEQ ID NO: 92836 - protein, 10 aa, synthetic construct
AYFRGDFNNT

SEQ ID NO: 92837 - protein, 10 aa, synthetic construct
DQRRGDRGVV

SEQ ID NO: 92838 - protein, 10 aa, synthetic construct
AYFRGDFNNL

SEQ ID NO: 92839 - protein, 10 aa, synthetic construct
AYKRGDFNNT

SEQ ID NO: 92840 - protein, 10 aa, synthetic construct
AYKRGDFNNL

SEQ ID NO: 92841 - protein, 10 aa, synthetic construct
AYYRGDFNNT

SEQ ID NO: 92842 - protein, 10 aa, synthetic construct
AYYRGDFNNL

SEQ ID NO: 92843 - protein, 10 aa, synthetic construct
AYNRGDFNNT

SEQ ID NO: 92844 - protein, 10 aa, synthetic construct
AYNRGDFNNL

SEQ ID NO: 92845 - protein, 10 aa, synthetic construct
ANIRGDFNNT

SEQ ID NO: 92846 - protein, 10 aa, synthetic construct
ANIRGDFNNL

SEQ ID NO: 92847 - protein, 10 aa, synthetic construct
ANFRGDFNNT

SEQ ID NO: 92848 - protein, 10 aa, synthetic construct
TKKRGDRSVV

SEQ ID NO: 92849 - protein, 10 aa, synthetic construct
TKNRGDLIGR

SEQ ID NO: 92850 - protein, 10 aa, synthetic construct
NFFRGDFNNL

SEQ ID NO: 92851 - protein, 10 aa, synthetic construct
DQRRGDRSQT

SEQ ID NO: 92852 - protein, 10 aa, synthetic construct
ANFRGDFNNL

SEQ ID NO: 92853 - protein, 10 aa, synthetic construct
ANKRGDFNNT

SEQ ID NO: 92854 - protein, 10 aa, synthetic construct
ANKRGDFNNL

SEQ ID NO: 92855 - protein, 10 aa, synthetic construct
ANYRGDFNNT

SEQ ID NO: 92856 - protein, 10 aa, synthetic construct
ANYRGDFNNL

SEQ ID NO: 92857 - protein, 10 aa, synthetic construct
ANNRGDFNNT

SEQ ID NO: 92858 - protein, 10 aa, synthetic construct
ANNRGDFNNL

SEQ ID NO: 92859 - protein, 10 aa, synthetic construct
EIIRGDFNNT

SEQ ID NO: 92860 - protein, 10 aa, synthetic construct
EIIRGDFNNL

SEQ ID NO: 92861 - protein, 10 aa, synthetic construct
EIMRGDFNNT

SEQ ID NO: 92862 - protein, 10 aa, synthetic construct
DDGRGDRGQI

SEQ ID NO: 92863 - protein, 10 aa, synthetic construct
EIMRGDFNNL

SEQ ID NO: 92864 - protein, 10 aa, synthetic construct
EIFRGDFNNT

SEQ ID NO: 92865 - protein, 10 aa, synthetic construct
EIFRGDFNNL

SEQ ID NO: 92866 - protein, 10 aa, synthetic construct
EIKRGDFNNT

SEQ ID NO: 92867 - protein, 10 aa, synthetic construct
EIKRGDFNNL

SEQ ID NO: 92868 - protein, 10 aa, synthetic construct
EIYRGDFNNT

SEQ ID NO: 92869 - protein, 10 aa, synthetic construct
EIYRGDFNNL

SEQ ID NO: 92870 - protein, 10 aa, synthetic construct
EINRGDFNNT

SEQ ID NO: 92871 - protein, 10 aa, synthetic construct
EINRGDFNNL

SEQ ID NO: 92872 - protein, 10 aa, synthetic construct
EMIRGDFNNT

SEQ ID NO: 92873 - protein, 10 aa, synthetic construct
DDGRGDRQGI

SEQ ID NO: 92874 - protein, 10 aa, synthetic construct
EMIRGDFNNL

SEQ ID NO: 92875 - protein, 10 aa, synthetic construct
EMFRGDFNNT

SEQ ID NO: 92876 - protein, 10 aa, synthetic construct
EMFRGDFNNL

SEQ ID NO: 92877 - protein, 10 aa, synthetic construct
EMKRGDFNNT

SEQ ID NO: 92878 - protein, 10 aa, synthetic construct
EMKRGDFNNL

SEQ ID NO: 92879 - protein, 10 aa, synthetic construct
EMYRGDFNNT

SEQ ID NO: 92880 - protein, 10 aa, synthetic construct
EMYRGDFNNL

SEQ ID NO: 92881 - protein, 10 aa, synthetic construct
EMNRGDFNNT

SEQ ID NO: 92882 - protein, 10 aa, synthetic construct
EMNRGDFNNL

SEQ ID NO: 92883 - protein, 10 aa, synthetic construct
EFIRGDFNNT

SEQ ID NO: 92884 - protein, 10 aa, synthetic construct
DDGRGDRSVV

SEQ ID NO: 92885 - protein, 10 aa, synthetic construct
EFIRGDFNNL

SEQ ID NO: 92886 - protein, 10 aa, synthetic construct
EFMRGDFNNT

SEQ ID NO: 92887 - protein, 10 aa, synthetic construct
EFMRGDFNNL

SEQ ID NO: 92888 - protein, 10 aa, synthetic construct
EFKRGDFNNT

SEQ ID NO: 92889 - protein, 10 aa, synthetic construct
EFKRGDFNNL

SEQ ID NO: 92890 - protein, 10 aa, synthetic construct
EFYRGDFNNT

SEQ ID NO: 92891 - protein, 10 aa, synthetic construct
EFYRGDFNNL

SEQ ID NO: 92892 - protein, 10 aa, synthetic construct
EFNRGDFNNT

SEQ ID NO: 92893 - protein, 10 aa, synthetic construct
EFNRGDFNNL

SEQ ID NO: 92894 - protein, 10 aa, synthetic construct
EKIRGDFNNT

SEQ ID NO: 92895 - protein, 10 aa, synthetic construct
DDGRGDRGVV

SEQ ID NO: 92896 - protein, 10 aa, synthetic construct
EKIRGDFNNL

SEQ ID NO: 92897 - protein, 10 aa, synthetic construct
EKMRGDFNNT

SEQ ID NO: 92898 - protein, 10 aa, synthetic construct
EKMRGDFNNL

SEQ ID NO: 92899 - protein, 10 aa, synthetic construct
EKFRGDFNNT

SEQ ID NO: 92900 - protein, 10 aa, synthetic construct
EKFRGDFNNL

SEQ ID NO: 92901 - protein, 10 aa, synthetic construct
EKYRGDFNNT

SEQ ID NO: 92902 - protein, 10 aa, synthetic construct
EKYRGDFNNL

SEQ ID NO: 92903 - protein, 10 aa, synthetic construct
EYIRGDFNNT

SEQ ID NO: 92904 - protein, 10 aa, synthetic construct
EYIRGDFNNL

SEQ ID NO: 92905 - protein, 10 aa, synthetic construct
EYMRGDFNNT

SEQ ID NO: 92906 - protein, 10 aa, synthetic construct
DDGRGDRSQT

SEQ ID NO: 92907 - protein, 10 aa, synthetic construct
EYMRGDFNNL

SEQ ID NO: 92908 - protein, 10 aa, synthetic construct
EYFRGDFNNT

SEQ ID NO: 92909 - protein, 10 aa, synthetic construct
EYFRGDFNNL

SEQ ID NO: 92910 - protein, 10 aa, synthetic construct
EYKRGDFNNT

SEQ ID NO: 92911 - protein, 10 aa, synthetic construct
EYKRGDFNNL

SEQ ID NO: 92912 - protein, 10 aa, synthetic construct
EYYRGDFNNT

SEQ ID NO: 92913 - protein, 10 aa, synthetic construct
EYYRGDFNNL

SEQ ID NO: 92914 - protein, 10 aa, synthetic construct
EYNRGDFNNT

SEQ ID NO: 92915 - protein, 10 aa, synthetic construct
EYNRGDFNNL

SEQ ID NO: 92916 - protein, 10 aa, synthetic construct
ENIRGDFNNT

SEQ ID NO: 92917 - protein, 10 aa, synthetic construct
DDARGDRGQI

SEQ ID NO: 92918 - protein, 10 aa, synthetic construct
ENIRGDFNNL

SEQ ID NO: 92919 - protein, 10 aa, synthetic construct
ENMRGDFNNT

SEQ ID NO: 92920 - protein, 10 aa, synthetic construct
ENMRGDFNNL

SEQ ID NO: 92921 - protein, 10 aa, synthetic construct
ENFRGDFNNT

SEQ ID NO: 92922 - protein, 10 aa, synthetic construct
ENFRGDFNNL

SEQ ID NO: 92923 - protein, 10 aa, synthetic construct
ENKRGDFNNT

SEQ ID NO: 92924 - protein, 10 aa, synthetic construct
ENKRGDFNNL

SEQ ID NO: 92925 - protein, 10 aa, synthetic construct
ENYRGDFNNT

SEQ ID NO: 92926 - protein, 10 aa, synthetic construct
ENYRGDFNNL

SEQ ID NO: 92927 - protein, 10 aa, synthetic construct
ENNRGDFNNT

SEQ ID NO: 92928 - protein, 10 aa, synthetic construct
DDARGDRQGI

SEQ ID NO: 92929 - protein, 10 aa, synthetic construct
ENNRGDFNNL

SEQ ID NO: 92930 - protein, 10 aa, synthetic construct
NIVRGDFNNT

SEQ ID NO: 92931 - protein, 10 aa, synthetic construct
NIVRGDFNNL

SEQ ID NO: 92932 - protein, 10 aa, synthetic construct
NILRGDFNNT

SEQ ID NO: 92933 - protein, 10 aa, synthetic construct
NILRGDFNNL

SEQ ID NO: 92934 - protein, 10 aa, synthetic construct
NIIRGDYNSL

SEQ ID NO: 92935 - protein, 10 aa, synthetic construct
NIIRGDYTSM

SEQ ID NO: 92936 - protein, 10 aa, synthetic construct
NIIRGDFQNT

SEQ ID NO: 92937 - protein, 10 aa, synthetic construct
NIMRGDYNSL

SEQ ID NO: 92938 - protein, 10 aa, synthetic construct
NIMRGDYTSM

SEQ ID NO: 92939 - protein, 10 aa, synthetic construct
DDARGDRSVV

SEQ ID NO: 92940 - protein, 10 aa, synthetic construct
NIMRGDFQNT

SEQ ID NO: 92941 - protein, 10 aa, synthetic construct
NIWRGDFNNT

SEQ ID NO: 92942 - protein, 10 aa, synthetic construct
NIWRGDFNNL

SEQ ID NO: 92943 - protein, 10 aa, synthetic construct
NIFRGDYNSL

SEQ ID NO: 92944 - protein, 10 aa, synthetic construct
NIFRGDYTSM

SEQ ID NO: 92945 - protein, 10 aa, synthetic construct
NIFRGDFQNT

SEQ ID NO: 92946 - protein, 10 aa, synthetic construct
NIKRGDYNSL

SEQ ID NO: 92947 - protein, 10 aa, synthetic construct
NIKRGDYTSM

SEQ ID NO: 92948 - protein, 10 aa, synthetic construct
NIKRGDFQNT

SEQ ID NO: 92949 - protein, 10 aa, synthetic construct
NIHRGDFNNT

SEQ ID NO: 92950 - protein, 10 aa, synthetic construct
DDARGDRGVV

SEQ ID NO: 92951 - protein, 10 aa, synthetic construct
NIHRGDFNNL

SEQ ID NO: 92952 - protein, 10 aa, synthetic construct
NISRGDFNNT

SEQ ID NO: 92953 - protein, 10 aa, synthetic construct
NISRGDFNNL

SEQ ID NO: 92954 - protein, 10 aa, synthetic construct
NITRGDFNNT

SEQ ID NO: 92955 - protein, 10 aa, synthetic construct
NITRGDFNNL

SEQ ID NO: 92956 - protein, 10 aa, synthetic construct
NIYRGDYNSL

SEQ ID NO: 92957 - protein, 10 aa, synthetic construct
NIYRGDYTSM

SEQ ID NO: 92958 - protein, 10 aa, synthetic construct
NIYRGDFQNT

SEQ ID NO: 92959 - protein, 10 aa, synthetic construct
NINRGDYNSL

SEQ ID NO: 92960 - protein, 10 aa, synthetic construct
NINRGDYTSM

SEQ ID NO: 92961 - protein, 10 aa, synthetic construct
AGGRGDRGVV

SEQ ID NO: 92962 - protein, 10 aa, synthetic construct
DDARGDRSQT

SEQ ID NO: 92963 - protein, 10 aa, synthetic construct
NINRGDFQNT

SEQ ID NO: 92964 - protein, 10 aa, synthetic construct
NIQRGDFNNT

SEQ ID NO: 92965 - protein, 10 aa, synthetic construct
NIQRGDFNNL

SEQ ID NO: 92966 - protein, 10 aa, synthetic construct
NIDRGDFNNT

SEQ ID NO: 92967 - protein, 10 aa, synthetic construct
NIDRGDFNNL

SEQ ID NO: 92968 - protein, 10 aa, synthetic construct
NIERGDFNNT

SEQ ID NO: 92969 - protein, 10 aa, synthetic construct
NIERGDFNNL

SEQ ID NO: 92970 - protein, 10 aa, synthetic construct
NMIRGDFQNT

SEQ ID NO: 92971 - protein, 10 aa, synthetic construct
NMMRGDFNNT

SEQ ID NO: 92972 - protein, 10 aa, synthetic construct
NMMRGDFNNL

SEQ ID NO: 92973 - protein, 10 aa, synthetic construct
DDPRGDRGQI

SEQ ID NO: 92974 - protein, 10 aa, synthetic construct
NMFRGDFQNT

SEQ ID NO: 92975 - protein, 10 aa, synthetic construct
NMKRGDFQNT

SEQ ID NO: 92976 - protein, 10 aa, synthetic construct
NMHRGDFNNT

SEQ ID NO: 92977 - protein, 10 aa, synthetic construct
NMHRGDFNNL

SEQ ID NO: 92978 - protein, 10 aa, synthetic construct
NMTRGDFNNT

SEQ ID NO: 92979 - protein, 10 aa, synthetic construct
NMTRGDFNNL

SEQ ID NO: 92980 - protein, 10 aa, synthetic construct
NMYRGDFQNT

SEQ ID NO: 92981 - protein, 10 aa, synthetic construct
NMNRGDFQNT

SEQ ID NO: 92982 - protein, 10 aa, synthetic construct
NMQRGDFNNT

SEQ ID NO: 92983 - protein, 10 aa, synthetic construct
NMQRGDFNNL

SEQ ID NO: 92984 - protein, 10 aa, synthetic construct
DDPRGDRQGI

SEQ ID NO: 92985 - protein, 10 aa, synthetic construct
NMDRGDFNNT

SEQ ID NO: 92986 - protein, 10 aa, synthetic construct
NMDRGDFNNL

SEQ ID NO: 92987 - protein, 10 aa, synthetic construct
NMERGDFNNT

SEQ ID NO: 92988 - protein, 10 aa, synthetic construct
NMERGDFNNL

SEQ ID NO: 92989 - protein, 10 aa, synthetic construct
NWIRGDFNNT

SEQ ID NO: 92990 - protein, 10 aa, synthetic construct
NWIRGDFNNL

SEQ ID NO: 92991 - protein, 10 aa, synthetic construct
NWFRGDFNNT

SEQ ID NO: 92992 - protein, 10 aa, synthetic construct
NWFRGDFNNL

SEQ ID NO: 92993 - protein, 10 aa, synthetic construct
NWKRGDFNNT

SEQ ID NO: 92994 - protein, 10 aa, synthetic construct
NWKRGDFNNL

SEQ ID NO: 92995 - protein, 10 aa, synthetic construct
DDPRGDRSVV

SEQ ID NO: 92996 - protein, 10 aa, synthetic construct
NWYRGDFNNT

SEQ ID NO: 92997 - protein, 10 aa, synthetic construct
NWYRGDFNNL

SEQ ID NO: 92998 - protein, 10 aa, synthetic construct
NWNRGDFNNT

SEQ ID NO: 92999 - protein, 10 aa, synthetic construct
NWNRGDFNNL

SEQ ID NO: 93000 - protein, 10 aa, synthetic construct
NFVRGDFNNT

SEQ ID NO: 93001 - protein, 10 aa, synthetic construct
NFVRGDFNNL

SEQ ID NO: 93002 - protein, 10 aa, synthetic construct
NFLRGDFNNT

SEQ ID NO: 93003 - protein, 10 aa, synthetic construct
NFLRGDFNNL

SEQ ID NO: 93004 - protein, 10 aa, synthetic construct
NFIRGDYNSL

SEQ ID NO: 93005 - protein, 10 aa, synthetic construct
NFIRGDYTSM

SEQ ID NO: 93006 - protein, 10 aa, synthetic construct
DDPRGDRGVV

SEQ ID NO: 93007 - protein, 10 aa, synthetic construct
NFIRGDFQNT

SEQ ID NO: 93008 - protein, 10 aa, synthetic construct
NFMRGDYNSL

SEQ ID NO: 93009 - protein, 10 aa, synthetic construct
NFMRGDYTSM

SEQ ID NO: 93010 - protein, 10 aa, synthetic construct
NFMRGDFQNT

SEQ ID NO: 93011 - protein, 10 aa, synthetic construct
NFWRGDFNNT

SEQ ID NO: 93012 - protein, 10 aa, synthetic construct
NFWRGDFNNL

SEQ ID NO: 93013 - protein, 10 aa, synthetic construct
NFKRGDYNSL

SEQ ID NO: 93014 - protein, 10 aa, synthetic construct
NFKRGDYTSM

SEQ ID NO: 93015 - protein, 10 aa, synthetic construct
NFKRGDFQNT

SEQ ID NO: 93016 - protein, 10 aa, synthetic construct
NFHRGDFNNT

SEQ ID NO: 93017 - protein, 10 aa, synthetic construct
DDPRGDRSQT

SEQ ID NO: 93018 - protein, 10 aa, synthetic construct
NFHRGDFNNL

SEQ ID NO: 93019 - protein, 10 aa, synthetic construct
NFSRGDFNNT

SEQ ID NO: 93020 - protein, 10 aa, synthetic construct
NFSRGDFNNL

SEQ ID NO: 93021 - protein, 10 aa, synthetic construct
NFTRGDFNNT

SEQ ID NO: 93022 - protein, 10 aa, synthetic construct
NFTRGDFNNL

SEQ ID NO: 93023 - protein, 10 aa, synthetic construct
NFYRGDYNSL

SEQ ID NO: 93024 - protein, 10 aa, synthetic construct
NFYRGDYTSM

SEQ ID NO: 93025 - protein, 10 aa, synthetic construct
NFYRGDFQNT

SEQ ID NO: 93026 - protein, 10 aa, synthetic construct
NFNRGDYNSL

SEQ ID NO: 93027 - protein, 10 aa, synthetic construct
NFNRGDYTSM

SEQ ID NO: 93028 - protein, 10 aa, synthetic construct
DDRRGDRGQI

SEQ ID NO: 93029 - protein, 10 aa, synthetic construct
NFNRGDFQNT

SEQ ID NO: 93030 - protein, 10 aa, synthetic construct
NFQRGDFNNT

SEQ ID NO: 93031 - protein, 10 aa, synthetic construct
NFQRGDFNNL

SEQ ID NO: 93032 - protein, 10 aa, synthetic construct
NFDRGDFNNT

SEQ ID NO: 93033 - protein, 10 aa, synthetic construct
NFDRGDFNNL

SEQ ID NO: 93034 - protein, 10 aa, synthetic construct
NFERGDFNNT

SEQ ID NO: 93035 - protein, 10 aa, synthetic construct
NFERGDFNNL

SEQ ID NO: 93036 - protein, 10 aa, synthetic construct
NKVRGDFNNT

SEQ ID NO: 93037 - protein, 10 aa, synthetic construct
NKVRGDFNNL

SEQ ID NO: 93038 - protein, 10 aa, synthetic construct
NKLRGDFNNT

SEQ ID NO: 93039 - protein, 10 aa, synthetic construct
DDRRGDRQGI

SEQ ID NO: 93040 - protein, 10 aa, synthetic construct
NKLRGDFNNL

SEQ ID NO: 93041 - protein, 10 aa, synthetic construct
NKIRGDYNSL

SEQ ID NO: 93042 - protein, 10 aa, synthetic construct
NKIRGDYTSM

SEQ ID NO: 93043 - protein, 10 aa, synthetic construct
NKIRGDFQNT

SEQ ID NO: 93044 - protein, 10 aa, synthetic construct
NKMRGDYNSL

SEQ ID NO: 93045 - protein, 10 aa, synthetic construct
NKMRGDYTSM

SEQ ID NO: 93046 - protein, 10 aa, synthetic construct
NKMRGDFQNT

SEQ ID NO: 93047 - protein, 10 aa, synthetic construct
NKWRGDFNNT

SEQ ID NO: 93048 - protein, 10 aa, synthetic construct
NKWRGDFNNL

SEQ ID NO: 93049 - protein, 10 aa, synthetic construct
NKFRGDYNSL

SEQ ID NO: 93050 - protein, 10 aa, synthetic construct
DDRRGDRSVV

SEQ ID NO: 93051 - protein, 10 aa, synthetic construct
NKFRGDYTSM

SEQ ID NO: 93052 - protein, 10 aa, synthetic construct
NKFRGDFQNT

SEQ ID NO: 93053 - protein, 10 aa, synthetic construct
NKHRGDFNNT

SEQ ID NO: 93054 - protein, 10 aa, synthetic construct
NKHRGDFNNL

SEQ ID NO: 93055 - protein, 10 aa, synthetic construct
NKSRGDFNNT

SEQ ID NO: 93056 - protein, 10 aa, synthetic construct
NKSRGDFNNL

SEQ ID NO: 93057 - protein, 10 aa, synthetic construct
NKTRGDFNNT

SEQ ID NO: 93058 - protein, 10 aa, synthetic construct
NKTRGDFNNL

SEQ ID NO: 93059 - protein, 10 aa, synthetic construct
NKYRGDYNSL

SEQ ID NO: 93060 - protein, 10 aa, synthetic construct
NKYRGDYTSM

SEQ ID NO: 93061 - protein, 10 aa, synthetic construct
DDRRGDRGVV

SEQ ID NO: 93062 - protein, 10 aa, synthetic construct
NKYRGDFQNT

SEQ ID NO: 93063 - protein, 10 aa, synthetic construct
NKQRGDFNNT

SEQ ID NO: 93064 - protein, 10 aa, synthetic construct
NKQRGDFNNL

SEQ ID NO: 93065 - protein, 10 aa, synthetic construct
NKDRGDFNNT

SEQ ID NO: 93066 - protein, 10 aa, synthetic construct
NKDRGDFNNL

SEQ ID NO: 93067 - protein, 10 aa, synthetic construct
NKERGDFNNT

SEQ ID NO: 93068 - protein, 10 aa, synthetic construct
NKERGDFNNL

SEQ ID NO: 93069 - protein, 10 aa, synthetic construct
NHIRGDFNNT

SEQ ID NO: 93070 - protein, 10 aa, synthetic construct
NHIRGDFNNL

SEQ ID NO: 93071 - protein, 10 aa, synthetic construct
NHMRGDFNNT

SEQ ID NO: 93072 - protein, 10 aa, synthetic construct
AGARGDRGVV

SEQ ID NO: 93073 - protein, 10 aa, synthetic construct
DDRRGDRSQT

SEQ ID NO: 93074 - protein, 10 aa, synthetic construct
NHMRGDFNNL

SEQ ID NO: 93075 - protein, 10 aa, synthetic construct
NHFRGDFNNT

SEQ ID NO: 93076 - protein, 10 aa, synthetic construct
NHFRGDFNNL

SEQ ID NO: 93077 - protein, 10 aa, synthetic construct
NHKRGDFNNT

SEQ ID NO: 93078 - protein, 10 aa, synthetic construct
NHKRGDFNNL

SEQ ID NO: 93079 - protein, 10 aa, synthetic construct
NHYRGDFNNT

SEQ ID NO: 93080 - protein, 10 aa, synthetic construct
NHYRGDFNNL

SEQ ID NO: 93081 - protein, 10 aa, synthetic construct
NHNRGDFNNT

SEQ ID NO: 93082 - protein, 10 aa, synthetic construct
NHNRGDFNNL

SEQ ID NO: 93083 - protein, 10 aa, synthetic construct
NTIRGDFNNT

SEQ ID NO: 93084 - protein, 10 aa, synthetic construct
DEGRGDRGQI

SEQ ID NO: 93085 - protein, 10 aa, synthetic construct
NTIRGDFNNL

SEQ ID NO: 93086 - protein, 10 aa, synthetic construct
NTMRGDFNNT

SEQ ID NO: 93087 - protein, 10 aa, synthetic construct
NTMRGDFNNL

SEQ ID NO: 93088 - protein, 10 aa, synthetic construct
NTFRGDFNNT

SEQ ID NO: 93089 - protein, 10 aa, synthetic construct
NTFRGDFNNL

SEQ ID NO: 93090 - protein, 10 aa, synthetic construct
NTKRGDFNNT

SEQ ID NO: 93091 - protein, 10 aa, synthetic construct
NTKRGDFNNL

SEQ ID NO: 93092 - protein, 10 aa, synthetic construct
NTYRGDFNNT

SEQ ID NO: 93093 - protein, 10 aa, synthetic construct
NTYRGDFNNL

SEQ ID NO: 93094 - protein, 10 aa, synthetic construct
NTNRGDFNNT

SEQ ID NO: 93095 - protein, 10 aa, synthetic construct
DEGRGDRQGI

SEQ ID NO: 93096 - protein, 10 aa, synthetic construct
NTNRGDFNNL

SEQ ID NO: 93097 - protein, 10 aa, synthetic construct
NYVRGDFNNT

SEQ ID NO: 93098 - protein, 10 aa, synthetic construct
NYVRGDFNNL

SEQ ID NO: 93099 - protein, 10 aa, synthetic construct
NYLRGDFNNT

SEQ ID NO: 93100 - protein, 10 aa, synthetic construct
NYLRGDFNNL

SEQ ID NO: 93101 - protein, 10 aa, synthetic construct
NYIRGDYNSL

SEQ ID NO: 93102 - protein, 10 aa, synthetic construct
NYIRGDYTSM

SEQ ID NO: 93103 - protein, 10 aa, synthetic construct
NYIRGDFQNT

SEQ ID NO: 93104 - protein, 10 aa, synthetic construct
NYMRGDYNSL

SEQ ID NO: 93105 - protein, 10 aa, synthetic construct
NYMRGDYTSM

SEQ ID NO: 93106 - protein, 10 aa, synthetic construct
DEGRGDRSVV

SEQ ID NO: 93107 - protein, 10 aa, synthetic construct
NYMRGDFQNT

SEQ ID NO: 93108 - protein, 10 aa, synthetic construct
NYWRGDFNNT

SEQ ID NO: 93109 - protein, 10 aa, synthetic construct
NYWRGDFNNL

SEQ ID NO: 93110 - protein, 10 aa, synthetic construct
NYFRGDYNSL

SEQ ID NO: 93111 - protein, 10 aa, synthetic construct
NYFRGDYTSM

SEQ ID NO: 93112 - protein, 10 aa, synthetic construct
NYFRGDFQNT

SEQ ID NO: 93113 - protein, 10 aa, synthetic construct
NYKRGDYNSL

SEQ ID NO: 93114 - protein, 10 aa, synthetic construct
NYKRGDYTSM

SEQ ID NO: 93115 - protein, 10 aa, synthetic construct
NYKRGDFQNT

SEQ ID NO: 93116 - protein, 10 aa, synthetic construct
NYHRGDFNNT

SEQ ID NO: 93117 - protein, 10 aa, synthetic construct
DEGRGDRGVV

SEQ ID NO: 93118 - protein, 10 aa, synthetic construct
NYHRGDFNNL

SEQ ID NO: 93119 - protein, 10 aa, synthetic construct
NYSRGDFNNT

SEQ ID NO: 93120 - protein, 10 aa, synthetic construct
NYSRGDFNNL

SEQ ID NO: 93121 - protein, 10 aa, synthetic construct
NYTRGDFNNT

SEQ ID NO: 93122 - protein, 10 aa, synthetic construct
NYTRGDFNNL

SEQ ID NO: 93123 - protein, 10 aa, synthetic construct
NYYRGDYNSL

SEQ ID NO: 93124 - protein, 10 aa, synthetic construct
NYYRGDYTSM

SEQ ID NO: 93125 - protein, 10 aa, synthetic construct
NYYRGDFQNT

SEQ ID NO: 93126 - protein, 10 aa, synthetic construct
NYNRGDYNSL

SEQ ID NO: 93127 - protein, 10 aa, synthetic construct
NYNRGDYTSM

SEQ ID NO: 93128 - protein, 10 aa, synthetic construct
DEGRGDRSQT

SEQ ID NO: 93129 - protein, 10 aa, synthetic construct
NYNRGDFQNT

SEQ ID NO: 93130 - protein, 10 aa, synthetic construct
NYQRGDFNNT

SEQ ID NO: 93131 - protein, 10 aa, synthetic construct
NYQRGDFNNL

SEQ ID NO: 93132 - protein, 10 aa, synthetic construct
NYDRGDFNNT

SEQ ID NO: 93133 - protein, 10 aa, synthetic construct
NYDRGDFNNL

SEQ ID NO: 93134 - protein, 10 aa, synthetic construct
NYERGDFNNT

SEQ ID NO: 93135 - protein, 10 aa, synthetic construct
NYERGDFNNL

SEQ ID NO: 93136 - protein, 10 aa, synthetic construct
NNVRGDFNNT

SEQ ID NO: 93137 - protein, 10 aa, synthetic construct
NNVRGDFNNL

SEQ ID NO: 93138 - protein, 10 aa, synthetic construct
NNLRGDFNNT

SEQ ID NO: 93139 - protein, 10 aa, synthetic construct
DEARGDRGQI

SEQ ID NO: 93140 - protein, 10 aa, synthetic construct
NNLRGDFNNL

SEQ ID NO: 93141 - protein, 10 aa, synthetic construct
NNIRGDYNSL

SEQ ID NO: 93142 - protein, 10 aa, synthetic construct
NNIRGDYTSM

SEQ ID NO: 93143 - protein, 10 aa, synthetic construct
NNIRGDFQNT

SEQ ID NO: 93144 - protein, 10 aa, synthetic construct
NNMRGDYNSL

SEQ ID NO: 93145 - protein, 10 aa, synthetic construct
NNMRGDYTSM

SEQ ID NO: 93146 - protein, 10 aa, synthetic construct
NNMRGDFQNT

SEQ ID NO: 93147 - protein, 10 aa, synthetic construct
NNWRGDFNNT

SEQ ID NO: 93148 - protein, 10 aa, synthetic construct
NNWRGDFNNL

SEQ ID NO: 93149 - protein, 10 aa, synthetic construct
NNFRGDYNSL

SEQ ID NO: 93150 - protein, 10 aa, synthetic construct
DEARGDRQGI

SEQ ID NO: 93151 - protein, 10 aa, synthetic construct
NNFRGDYTSM

SEQ ID NO: 93152 - protein, 10 aa, synthetic construct
NNFRGDFQNT

SEQ ID NO: 93153 - protein, 10 aa, synthetic construct
NNKRGDYNSL

SEQ ID NO: 93154 - protein, 10 aa, synthetic construct
NNKRGDYTSM

SEQ ID NO: 93155 - protein, 10 aa, synthetic construct
NNKRGDFQNT

SEQ ID NO: 93156 - protein, 10 aa, synthetic construct
NNHRGDFNNT

SEQ ID NO: 93157 - protein, 10 aa, synthetic construct
NNHRGDFNNL

SEQ ID NO: 93158 - protein, 10 aa, synthetic construct
NNSRGDFNNT

SEQ ID NO: 93159 - protein, 10 aa, synthetic construct
NNSRGDFNNL

SEQ ID NO: 93160 - protein, 10 aa, synthetic construct
NNTRGDFNNT

SEQ ID NO: 93161 - protein, 10 aa, synthetic construct
DEARGDRSVV

SEQ ID NO: 93162 - protein, 10 aa, synthetic construct
NNTRGDFNNL

SEQ ID NO: 93163 - protein, 10 aa, synthetic construct
NNYRGDYNSL

SEQ ID NO: 93164 - protein, 10 aa, synthetic construct
NNYRGDYTSM

SEQ ID NO: 93165 - protein, 10 aa, synthetic construct
NNYRGDFQNT

SEQ ID NO: 93166 - protein, 10 aa, synthetic construct
NNNRGDYNSL

SEQ ID NO: 93167 - protein, 10 aa, synthetic construct
NNNRGDYTSM

SEQ ID NO: 93168 - protein, 10 aa, synthetic construct
NNNRGDFQNT

SEQ ID NO: 93169 - protein, 10 aa, synthetic construct
NNQRGDFNNT

SEQ ID NO: 93170 - protein, 10 aa, synthetic construct
NNQRGDFNNL

SEQ ID NO: 93171 - protein, 10 aa, synthetic construct
NNDRGDFNNT

SEQ ID NO: 93172 - protein, 10 aa, synthetic construct
DEARGDRGVV

SEQ ID NO: 93173 - protein, 10 aa, synthetic construct
NNDRGDFNNL

SEQ ID NO: 93174 - protein, 10 aa, synthetic construct
NNERGDFNNT

SEQ ID NO: 93175 - protein, 10 aa, synthetic construct
NNERGDFNNL

SEQ ID NO: 93176 - protein, 10 aa, synthetic construct
NQIRGDFNNT

SEQ ID NO: 93177 - protein, 10 aa, synthetic construct
NQIRGDFNNL

SEQ ID NO: 93178 - protein, 10 aa, synthetic construct
NQMRGDFNNT

SEQ ID NO: 93179 - protein, 10 aa, synthetic construct
NQMRGDFNNL

SEQ ID NO: 93180 - protein, 10 aa, synthetic construct
NQFRGDFNNT

SEQ ID NO: 93181 - protein, 10 aa, synthetic construct
NQFRGDFNNL

SEQ ID NO: 93182 - protein, 10 aa, synthetic construct
NQKRGDFNNT

SEQ ID NO: 93183 - protein, 10 aa, synthetic construct
AGVRGDRGVV

SEQ ID NO: 93184 - protein, 10 aa, synthetic construct
DEARGDRSQT

SEQ ID NO: 93185 - protein, 10 aa, synthetic construct
NQKRGDFNNL

SEQ ID NO: 93186 - protein, 10 aa, synthetic construct
NQYRGDFNNT

SEQ ID NO: 93187 - protein, 10 aa, synthetic construct
NQYRGDFNNL

SEQ ID NO: 93188 - protein, 10 aa, synthetic construct
NQNRGDFNNT

SEQ ID NO: 93189 - protein, 10 aa, synthetic construct
NQNRGDFNNL

SEQ ID NO: 93190 - protein, 10 aa, synthetic construct
NDIRGDFNNT

SEQ ID NO: 93191 - protein, 10 aa, synthetic construct
NDIRGDFNNL

SEQ ID NO: 93192 - protein, 10 aa, synthetic construct
NDMRGDFNNT

SEQ ID NO: 93193 - protein, 10 aa, synthetic construct
NDMRGDFNNL

SEQ ID NO: 93194 - protein, 10 aa, synthetic construct
NDFRGDFNNT

SEQ ID NO: 93195 - protein, 10 aa, synthetic construct
DEPRGDRGQI

SEQ ID NO: 93196 - protein, 10 aa, synthetic construct
NDFRGDFNNL

SEQ ID NO: 93197 - protein, 10 aa, synthetic construct
NDKRGDFNNT

SEQ ID NO: 93198 - protein, 10 aa, synthetic construct
NDKRGDFNNL

SEQ ID NO: 93199 - protein, 10 aa, synthetic construct
NDYRGDFNNT

SEQ ID NO: 93200 - protein, 10 aa, synthetic construct
NDYRGDFNNL

SEQ ID NO: 93201 - protein, 10 aa, synthetic construct
NDNRGDFNNT

SEQ ID NO: 93202 - protein, 10 aa, synthetic construct
NDNRGDFNNL

SEQ ID NO: 93203 - protein, 10 aa, synthetic construct
NEIRGDFNNT

SEQ ID NO: 93204 - protein, 10 aa, synthetic construct
NEIRGDFNNL

SEQ ID NO: 93205 - protein, 10 aa, synthetic construct
NEMRGDFNNT

SEQ ID NO: 93206 - protein, 10 aa, synthetic construct
DEPRGDRQGI

SEQ ID NO: 93207 - protein, 10 aa, synthetic construct
NEMRGDFNNL

SEQ ID NO: 93208 - protein, 10 aa, synthetic construct
NEFRGDFNNT

SEQ ID NO: 93209 - protein, 10 aa, synthetic construct
NEFRGDFNNL

SEQ ID NO: 93210 - protein, 10 aa, synthetic construct
NEKRGDFNNT

SEQ ID NO: 93211 - protein, 10 aa, synthetic construct
NEKRGDFNNL

SEQ ID NO: 93212 - protein, 10 aa, synthetic construct
NEYRGDFNNT

SEQ ID NO: 93213 - protein, 10 aa, synthetic construct
NEYRGDFNNL

SEQ ID NO: 93214 - protein, 10 aa, synthetic construct
NENRGDFNNT

SEQ ID NO: 93215 - protein, 10 aa, synthetic construct
NENRGDFNNL

SEQ ID NO: 93216 - protein, 10 aa, synthetic construct
DIIRGDFNNT

SEQ ID NO: 93217 - protein, 10 aa, synthetic construct
DEPRGDRSVV

SEQ ID NO: 93218 - protein, 10 aa, synthetic construct
DIIRGDFNNL

SEQ ID NO: 93219 - protein, 10 aa, synthetic construct
DIMRGDFNNT

SEQ ID NO: 93220 - protein, 10 aa, synthetic construct
DIMRGDFNNL

SEQ ID NO: 93221 - protein, 10 aa, synthetic construct
DIFRGDFNNT

SEQ ID NO: 93222 - protein, 10 aa, synthetic construct
DIFRGDFNNL

SEQ ID NO: 93223 - protein, 10 aa, synthetic construct
DIKRGDFNNT

SEQ ID NO: 93224 - protein, 10 aa, synthetic construct
DIKRGDFNNL

SEQ ID NO: 93225 - protein, 10 aa, synthetic construct
DIYRGDFNNT

SEQ ID NO: 93226 - protein, 10 aa, synthetic construct
DIYRGDFNNL

SEQ ID NO: 93227 - protein, 10 aa, synthetic construct
DINRGDFNNT

SEQ ID NO: 93228 - protein, 10 aa, synthetic construct
DEPRGDRGVV

SEQ ID NO: 93229 - protein, 10 aa, synthetic construct
DINRGDFNNL

SEQ ID NO: 93230 - protein, 10 aa, synthetic construct
DMIRGDFNNT

SEQ ID NO: 93231 - protein, 10 aa, synthetic construct
DMIRGDFNNL

SEQ ID NO: 93232 - protein, 10 aa, synthetic construct
DMFRGDFNNT

SEQ ID NO: 93233 - protein, 10 aa, synthetic construct
DMFRGDFNNL

SEQ ID NO: 93234 - protein, 10 aa, synthetic construct
DMKRGDFNNT

SEQ ID NO: 93235 - protein, 10 aa, synthetic construct
DMKRGDFNNL

SEQ ID NO: 93236 - protein, 10 aa, synthetic construct
DMYRGDFNNT

SEQ ID NO: 93237 - protein, 10 aa, synthetic construct
DMYRGDFNNL

SEQ ID NO: 93238 - protein, 10 aa, synthetic construct
DMNRGDFNNT

SEQ ID NO: 93239 - protein, 10 aa, synthetic construct
DEPRGDRSQT

SEQ ID NO: 93240 - protein, 10 aa, synthetic construct
DMNRGDFNNL

SEQ ID NO: 93241 - protein, 10 aa, synthetic construct
DFIRGDFNNT

SEQ ID NO: 93242 - protein, 10 aa, synthetic construct
DFIRGDFNNL

SEQ ID NO: 93243 - protein, 10 aa, synthetic construct
DFMRGDFNNT

SEQ ID NO: 93244 - protein, 10 aa, synthetic construct
DFMRGDFNNL

SEQ ID NO: 93245 - protein, 10 aa, synthetic construct
DFKRGDFNNT

SEQ ID NO: 93246 - protein, 10 aa, synthetic construct
DFKRGDFNNL

SEQ ID NO: 93247 - protein, 10 aa, synthetic construct
DFYRGDFNNT

SEQ ID NO: 93248 - protein, 10 aa, synthetic construct
DFYRGDFNNL

SEQ ID NO: 93249 - protein, 10 aa, synthetic construct
DFNRGDFNNT

SEQ ID NO: 93250 - protein, 10 aa, synthetic construct
DERRGDRGQI

SEQ ID NO: 93251 - protein, 10 aa, synthetic construct
DFNRGDFNNL

SEQ ID NO: 93252 - protein, 10 aa, synthetic construct
DKIRGDFNNT

SEQ ID NO: 93253 - protein, 10 aa, synthetic construct
DKIRGDFNNL

SEQ ID NO: 93254 - protein, 10 aa, synthetic construct
DKMRGDFNNT

SEQ ID NO: 93255 - protein, 10 aa, synthetic construct
DKMRGDFNNL

SEQ ID NO: 93256 - protein, 10 aa, synthetic construct
DKFRGDFNNT

SEQ ID NO: 93257 - protein, 10 aa, synthetic construct
DKFRGDFNNL

SEQ ID NO: 93258 - protein, 10 aa, synthetic construct
DKYRGDFNNT

SEQ ID NO: 93259 - protein, 10 aa, synthetic construct
DKYRGDFNNL

SEQ ID NO: 93260 - protein, 10 aa, synthetic construct
DYIRGDFNNT

SEQ ID NO: 93261 - protein, 10 aa, synthetic construct
DERRGDRQGI

SEQ ID NO: 93262 - protein, 10 aa, synthetic construct
DYIRGDFNNL

SEQ ID NO: 93263 - protein, 10 aa, synthetic construct
DYMRGDFNNT

SEQ ID NO: 93264 - protein, 10 aa, synthetic construct
DYMRGDFNNL

SEQ ID NO: 93265 - protein, 10 aa, synthetic construct
DYFRGDFNNT

SEQ ID NO: 93266 - protein, 10 aa, synthetic construct
DYFRGDFNNL

SEQ ID NO: 93267 - protein, 10 aa, synthetic construct
DYKRGDFNNT

SEQ ID NO: 93268 - protein, 10 aa, synthetic construct
DYKRGDFNNL

SEQ ID NO: 93269 - protein, 10 aa, synthetic construct
DYYRGDFNNT

SEQ ID NO: 93270 - protein, 10 aa, synthetic construct
DYYRGDFNNL

SEQ ID NO: 93271 - protein, 10 aa, synthetic construct
DYNRGDFNNT

SEQ ID NO: 93272 - protein, 10 aa, synthetic construct
DERRGDRSVV

SEQ ID NO: 93273 - protein, 10 aa, synthetic construct
DYNRGDFNNL

SEQ ID NO: 93274 - protein, 10 aa, synthetic construct
DNIRGDFNNT

SEQ ID NO: 93275 - protein, 10 aa, synthetic construct
DNIRGDFNNL

SEQ ID NO: 93276 - protein, 10 aa, synthetic construct
DNMRGDFNNT

SEQ ID NO: 93277 - protein, 10 aa, synthetic construct
DNMRGDFNNL

SEQ ID NO: 93278 - protein, 10 aa, synthetic construct
DNFRGDFNNT

SEQ ID NO: 93279 - protein, 10 aa, synthetic construct
DNFRGDFNNL

SEQ ID NO: 93280 - protein, 10 aa, synthetic construct
DNKRGDFNNT

SEQ ID NO: 93281 - protein, 10 aa, synthetic construct
DNKRGDFNNL

SEQ ID NO: 93282 - protein, 10 aa, synthetic construct
DNYRGDFNNT

SEQ ID NO: 93283 - protein, 10 aa, synthetic construct
DERRGDRGVV

SEQ ID NO: 93284 - protein, 10 aa, synthetic construct
DNYRGDFNNL

SEQ ID NO: 93285 - protein, 10 aa, synthetic construct
DNNRGDFNNT

SEQ ID NO: 93286 - protein, 10 aa, synthetic construct
DNNRGDFNNL

SEQ ID NO: 93287 - protein, 10 aa, synthetic construct
QIIRGDFNNT

SEQ ID NO: 93288 - protein, 10 aa, synthetic construct
QIIRGDFNNL

SEQ ID NO: 93289 - protein, 10 aa, synthetic construct
QIMRGDFNNT

SEQ ID NO: 93290 - protein, 10 aa, synthetic construct
QIMRGDFNNL

SEQ ID NO: 93291 - protein, 10 aa, synthetic construct
QIFRGDFNNT

SEQ ID NO: 93292 - protein, 10 aa, synthetic construct
QIFRGDFNNL

SEQ ID NO: 93293 - protein, 10 aa, synthetic construct
QIKRGDFNNT

SEQ ID NO: 93294 - protein, 10 aa, synthetic construct
AGPRGDRGVV

SEQ ID NO: 93295 - protein, 10 aa, synthetic construct
DERRGDRSQT

SEQ ID NO: 93296 - protein, 10 aa, synthetic construct
QIKRGDFNNL

SEQ ID NO: 93297 - protein, 10 aa, synthetic construct
QIYRGDFNNT

SEQ ID NO: 93298 - protein, 10 aa, synthetic construct
QIYRGDFNNL

SEQ ID NO: 93299 - protein, 10 aa, synthetic construct
QINRGDFNNT

SEQ ID NO: 93300 - protein, 10 aa, synthetic construct
QINRGDFNNL

SEQ ID NO: 93301 - protein, 10 aa, synthetic construct
QMIRGDFNNT

SEQ ID NO: 93302 - protein, 10 aa, synthetic construct
QMIRGDFNNL

SEQ ID NO: 93303 - protein, 10 aa, synthetic construct
QMFRGDFNNT

SEQ ID NO: 93304 - protein, 10 aa, synthetic construct
QMFRGDFNNL

SEQ ID NO: 93305 - protein, 10 aa, synthetic construct
QMKRGDFNNT

SEQ ID NO: 93306 - protein, 10 aa, synthetic construct
QGGRGDHGVL

SEQ ID NO: 93307 - protein, 10 aa, synthetic construct
QMKRGDFNNL

SEQ ID NO: 93308 - protein, 10 aa, synthetic construct
QMYRGDFNNT

SEQ ID NO: 93309 - protein, 10 aa, synthetic construct
QMYRGDFNNL

SEQ ID NO: 93310 - protein, 10 aa, synthetic construct
QMNRGDFNNT

SEQ ID NO: 93311 - protein, 10 aa, synthetic construct
QMNRGDFNNL

SEQ ID NO: 93312 - protein, 10 aa, synthetic construct
QFIRGDFNNT

SEQ ID NO: 93313 - protein, 10 aa, synthetic construct
QFIRGDFNNL

SEQ ID NO: 93314 - protein, 10 aa, synthetic construct
QFMRGDFNNT

SEQ ID NO: 93315 - protein, 10 aa, synthetic construct
QFMRGDFNNL

SEQ ID NO: 93316 - protein, 10 aa, synthetic construct
QFKRGDFNNT

SEQ ID NO: 93317 - protein, 10 aa, synthetic construct
QGGRGDYVGL

SEQ ID NO: 93318 - protein, 10 aa, synthetic construct
QFKRGDFNNL

SEQ ID NO: 93319 - protein, 10 aa, synthetic construct
QFYRGDFNNT

SEQ ID NO: 93320 - protein, 10 aa, synthetic construct
QFYRGDFNNL

SEQ ID NO: 93321 - protein, 10 aa, synthetic construct
QFNRGDFNNT

SEQ ID NO: 93322 - protein, 10 aa, synthetic construct
QFNRGDFNNL

SEQ ID NO: 93323 - protein, 10 aa, synthetic construct
QKIRGDFNNT

SEQ ID NO: 93324 - protein, 10 aa, synthetic construct
QKIRGDFNNL

SEQ ID NO: 93325 - protein, 10 aa, synthetic construct
QKMRGDFNNT

SEQ ID NO: 93326 - protein, 10 aa, synthetic construct
QKMRGDFNNL

SEQ ID NO: 93327 - protein, 10 aa, synthetic construct
QKFRGDFNNT

SEQ ID NO: 93328 - protein, 10 aa, synthetic construct
QGGRGDQSTL

SEQ ID NO: 93329 - protein, 10 aa, synthetic construct
QKFRGDFNNL

SEQ ID NO: 93330 - protein, 10 aa, synthetic construct
QKYRGDFNNT

SEQ ID NO: 93331 - protein, 10 aa, synthetic construct
QKYRGDFNNL

SEQ ID NO: 93332 - protein, 10 aa, synthetic construct
QYIRGDFNNT

SEQ ID NO: 93333 - protein, 10 aa, synthetic construct
QYIRGDFNNL

SEQ ID NO: 93334 - protein, 10 aa, synthetic construct
QYMRGDFNNT

SEQ ID NO: 93335 - protein, 10 aa, synthetic construct
QYMRGDFNNL

SEQ ID NO: 93336 - protein, 10 aa, synthetic construct
QYFRGDFNNT

SEQ ID NO: 93337 - protein, 10 aa, synthetic construct
QYFRGDFNNL

SEQ ID NO: 93338 - protein, 10 aa, synthetic construct
QYKRGDFNNT

SEQ ID NO: 93339 - protein, 10 aa, synthetic construct
QGGRGDLLLS

SEQ ID NO: 93340 - protein, 10 aa, synthetic construct
QYKRGDFNNL

SEQ ID NO: 93341 - protein, 10 aa, synthetic construct
QYYRGDFNNT

SEQ ID NO: 93342 - protein, 10 aa, synthetic construct
QYYRGDFNNL

SEQ ID NO: 93343 - protein, 10 aa, synthetic construct
QYNRGDFNNT

SEQ ID NO: 93344 - protein, 10 aa, synthetic construct
QYNRGDFNNL

SEQ ID NO: 93345 - protein, 10 aa, synthetic construct
QNIRGDFNNT

SEQ ID NO: 93346 - protein, 10 aa, synthetic construct
QNIRGDFNNL

SEQ ID NO: 93347 - protein, 10 aa, synthetic construct
QNMRGDFNNT

SEQ ID NO: 93348 - protein, 10 aa, synthetic construct
QNMRGDFNNL

SEQ ID NO: 93349 - protein, 10 aa, synthetic construct
QNFRGDFNNT

SEQ ID NO: 93350 - protein, 10 aa, synthetic construct
QGARGDHGVL

SEQ ID NO: 93351 - protein, 10 aa, synthetic construct
QNFRGDFNNL

SEQ ID NO: 93352 - protein, 10 aa, synthetic construct
QNKRGDFNNT

SEQ ID NO: 93353 - protein, 10 aa, synthetic construct
QNKRGDFNNL

SEQ ID NO: 93354 - protein, 10 aa, synthetic construct
QNYRGDFNNT

SEQ ID NO: 93355 - protein, 10 aa, synthetic construct
QNYRGDFNNL

SEQ ID NO: 93356 - protein, 10 aa, synthetic construct
QNNRGDFNNT

SEQ ID NO: 93357 - protein, 10 aa, synthetic construct
QNNRGDFNNL

SEQ ID NO: 93358 - protein, 10 aa, synthetic construct
NIIRGDFNNT

SEQ ID NO: 93359 - protein, 10 aa, synthetic construct
NIIRGDFNNL

SEQ ID NO: 93360 - protein, 10 aa, synthetic construct
NIMRGDFNNT

SEQ ID NO: 93361 - protein, 10 aa, synthetic construct
QGARGDYVGL

SEQ ID NO: 93362 - protein, 10 aa, synthetic construct
NIMRGDFNNL

SEQ ID NO: 93363 - protein, 10 aa, synthetic construct
NIFRGDFNNT

SEQ ID NO: 93364 - protein, 10 aa, synthetic construct
NIFRGDFNNL

SEQ ID NO: 93365 - protein, 10 aa, synthetic construct
NIKRGDFNNT

SEQ ID NO: 93366 - protein, 10 aa, synthetic construct
NIKRGDFNNL

SEQ ID NO: 93367 - protein, 10 aa, synthetic construct
NIYRGDFNNT

SEQ ID NO: 93368 - protein, 10 aa, synthetic construct
NIYRGDFNNL

SEQ ID NO: 93369 - protein, 10 aa, synthetic construct
NINRGDFNNT

SEQ ID NO: 93370 - protein, 10 aa, synthetic construct
NINRGDFNNL

SEQ ID NO: 93371 - protein, 10 aa, synthetic construct
NMIRGDFNNT

SEQ ID NO: 93372 - protein, 10 aa, synthetic construct
QGARGDQSTL

SEQ ID NO: 93373 - protein, 10 aa, synthetic construct
NMIRGDFNNL

SEQ ID NO: 93374 - protein, 10 aa, synthetic construct
NMFRGDFNNT

SEQ ID NO: 93375 - protein, 10 aa, synthetic construct
NMFRGDFNNL

SEQ ID NO: 93376 - protein, 10 aa, synthetic construct
NMKRGDFNNT

SEQ ID NO: 93377 - protein, 10 aa, synthetic construct
NMKRGDFNNL

SEQ ID NO: 93378 - protein, 10 aa, synthetic construct
NMYRGDFNNT

SEQ ID NO: 93379 - protein, 10 aa, synthetic construct
NMYRGDFNNL

SEQ ID NO: 93380 - protein, 10 aa, synthetic construct
NMNRGDFNNT

SEQ ID NO: 93381 - protein, 10 aa, synthetic construct
NMNRGDFNNL

SEQ ID NO: 93382 - protein, 10 aa, synthetic construct
NFIRGDFNNT

SEQ ID NO: 93383 - protein, 10 aa, synthetic construct
QGARGDLLLS

SEQ ID NO: 93384 - protein, 10 aa, synthetic construct
NFIRGDFNNL

SEQ ID NO: 93385 - protein, 10 aa, synthetic construct
NFMRGDFNNT

SEQ ID NO: 93386 - protein, 10 aa, synthetic construct
NFMRGDFNNL

SEQ ID NO: 93387 - protein, 10 aa, synthetic construct
NFKRGDFNNT

SEQ ID NO: 93388 - protein, 10 aa, synthetic construct
NFKRGDFNNL

SEQ ID NO: 93389 - protein, 10 aa, synthetic construct
NFYRGDFNNT

SEQ ID NO: 93390 - protein, 10 aa, synthetic construct
NFYRGDFNNL

SEQ ID NO: 93391 - protein, 10 aa, synthetic construct
NFNRGDFNNT

SEQ ID NO: 93392 - protein, 10 aa, synthetic construct
NFNRGDFNNL

SEQ ID NO: 93393 - protein, 10 aa, synthetic construct
NKIRGDFNNT

SEQ ID NO: 93394 - protein, 10 aa, synthetic construct
QGVRGDRGQI

SEQ ID NO: 93395 - protein, 10 aa, synthetic construct
NKIRGDFNNL

SEQ ID NO: 93396 - protein, 10 aa, synthetic construct
NKMRGDFNNT

SEQ ID NO: 93397 - protein, 10 aa, synthetic construct
NKMRGDFNNL

SEQ ID NO: 93398 - protein, 10 aa, synthetic construct
NKFRGDFNNT

SEQ ID NO: 93399 - protein, 10 aa, synthetic construct
NKFRGDFNNL

SEQ ID NO: 93400 - protein, 10 aa, synthetic construct
NKYRGDFNNT

SEQ ID NO: 93401 - protein, 10 aa, synthetic construct
NKYRGDFNNL

SEQ ID NO: 93402 - protein, 10 aa, synthetic construct
NYIRGDFNNT

SEQ ID NO: 93403 - protein, 10 aa, synthetic construct
NYIRGDFNNL

SEQ ID NO: 93404 - protein, 10 aa, synthetic construct
NYMRGDFNNT

SEQ ID NO: 93405 - protein, 10 aa, synthetic construct
AGLRGDRGVV

SEQ ID NO: 93406 - protein, 10 aa, synthetic construct
QGVRGDRQGI

SEQ ID NO: 93407 - protein, 10 aa, synthetic construct
NYMRGDFNNL

SEQ ID NO: 93408 - protein, 10 aa, synthetic construct
NYFRGDFNNT

SEQ ID NO: 93409 - protein, 10 aa, synthetic construct
NYFRGDFNNL

SEQ ID NO: 93410 - protein, 10 aa, synthetic construct
NYKRGDFNNT

SEQ ID NO: 93411 - protein, 10 aa, synthetic construct
NYKRGDFNNL

SEQ ID NO: 93412 - protein, 10 aa, synthetic construct
NYYRGDFNNT

SEQ ID NO: 93413 - protein, 10 aa, synthetic construct
NYYRGDFNNL

SEQ ID NO: 93414 - protein, 10 aa, synthetic construct
NYNRGDFNNT

SEQ ID NO: 93415 - protein, 10 aa, synthetic construct
NYNRGDFNNL

SEQ ID NO: 93416 - protein, 10 aa, synthetic construct
NNIRGDFNNT

SEQ ID NO: 93417 - protein, 10 aa, synthetic construct
QGVRGDRSVV

SEQ ID NO: 93418 - protein, 10 aa, synthetic construct
NNIRGDFNNL

SEQ ID NO: 93419 - protein, 10 aa, synthetic construct
NNMRGDFNNT

SEQ ID NO: 93420 - protein, 10 aa, synthetic construct
NNMRGDFNNL

SEQ ID NO: 93421 - protein, 10 aa, synthetic construct
NNFRGDFNNT

SEQ ID NO: 93422 - protein, 10 aa, synthetic construct
NNFRGDFNNL

SEQ ID NO: 93423 - protein, 10 aa, synthetic construct
NNKRGDFNNT

SEQ ID NO: 93424 - protein, 10 aa, synthetic construct
NNKRGDFNNL

SEQ ID NO: 93425 - protein, 10 aa, synthetic construct
NNYRGDFNNT

SEQ ID NO: 93426 - protein, 10 aa, synthetic construct
NNYRGDFNNL

SEQ ID NO: 93427 - protein, 10 aa, synthetic construct
NNNRGDFNNT

SEQ ID NO: 93428 - protein, 10 aa, synthetic construct
QGVRGDRGVV

SEQ ID NO: 93429 - protein, 10 aa, synthetic construct
NNNRGDFNNL

SEQ ID NO: 93430 - protein, 10 aa, synthetic construct
QGVRGDRSQT

SEQ ID NO: 93431 - protein, 10 aa, synthetic construct
QGPRGDHGVL

SEQ ID NO: 93432 - protein, 10 aa, synthetic construct
QGPRGDYVGL

SEQ ID NO: 93433 - protein, 10 aa, synthetic construct
QGPRGDQSTL

SEQ ID NO: 93434 - protein, 10 aa, synthetic construct
QGPRGDLLLS

SEQ ID NO: 93435 - protein, 10 aa, synthetic construct
QGLRGDRGQI

SEQ ID NO: 93436 - protein, 10 aa, synthetic construct
QGLRGDRQGI

SEQ ID NO: 93437 - protein, 10 aa, synthetic construct
AGRRGDRGVV

SEQ ID NO: 93438 - protein, 10 aa, synthetic construct
QGLRGDRSVV

SEQ ID NO: 93439 - protein, 10 aa, synthetic construct
QGLRGDRGVV

SEQ ID NO: 93440 - protein, 10 aa, synthetic construct
QGLRGDRSQT

SEQ ID NO: 93441 - protein, 10 aa, synthetic construct
QGWRGDRGQI

SEQ ID NO: 93442 - protein, 10 aa, synthetic construct
QGWRGDRQGI

SEQ ID NO: 93443 - protein, 10 aa, synthetic construct
QGWRGDRSVV

SEQ ID NO: 93444 - protein, 10 aa, synthetic construct
QGWRGDRGVV

SEQ ID NO: 93445 - protein, 10 aa, synthetic construct
QGWRGDRSQT

SEQ ID NO: 93446 - protein, 10 aa, synthetic construct
QGRRGDHGVL

SEQ ID NO: 93447 - protein, 10 aa, synthetic construct
QGRRGDYVGL

SEQ ID NO: 93448 - protein, 10 aa, synthetic construct
AGSRGDRGVV

SEQ ID NO: 93449 - protein, 10 aa, synthetic construct
QGRRGDQSTL

SEQ ID NO: 93450 - protein, 10 aa, synthetic construct
QGRRGDLLLS

SEQ ID NO: 93451 - protein, 10 aa, synthetic construct
QGHRGDRGQI

SEQ ID NO: 93452 - protein, 10 aa, synthetic construct
QGHRGDRQGI

SEQ ID NO: 93453 - protein, 10 aa, synthetic construct
QGHRGDRSVV

SEQ ID NO: 93454 - protein, 10 aa, synthetic construct
QGHRGDRGVV

SEQ ID NO: 93455 - protein, 10 aa, synthetic construct
QGHRGDRSQT

SEQ ID NO: 93456 - protein, 10 aa, synthetic construct
QGSRGDRGQI

SEQ ID NO: 93457 - protein, 10 aa, synthetic construct
QGSRGDRQGI

SEQ ID NO: 93458 - protein, 10 aa, synthetic construct
QGSRGDRSVV

SEQ ID NO: 93459 - protein, 10 aa, synthetic construct
AAGRGDRGVV

SEQ ID NO: 93460 - protein, 10 aa, synthetic construct
QGSRGDRGVV

SEQ ID NO: 93461 - protein, 10 aa, synthetic construct
QGSRGDRSQT

SEQ ID NO: 93462 - protein, 10 aa, synthetic construct
QGTRGDRGQI

SEQ ID NO: 93463 - protein, 10 aa, synthetic construct
QGTRGDRQGI

SEQ ID NO: 93464 - protein, 10 aa, synthetic construct
QGTRGDRSVV

SEQ ID NO: 93465 - protein, 10 aa, synthetic construct
QGTRGDRGVV

SEQ ID NO: 93466 - protein, 10 aa, synthetic construct
QGTRGDRSQT

SEQ ID NO: 93467 - protein, 10 aa, synthetic construct
QGQRGDRGQI

SEQ ID NO: 93468 - protein, 10 aa, synthetic construct
QGQRGDRQGI

SEQ ID NO: 93469 - protein, 10 aa, synthetic construct
QGQRGDRSVV

SEQ ID NO: 93470 - protein, 10 aa, synthetic construct
AAARGDRGVV

SEQ ID NO: 93471 - protein, 10 aa, synthetic construct
QGQRGDRGVV

SEQ ID NO: 93472 - protein, 10 aa, synthetic construct
QGQRGDRSQT

SEQ ID NO: 93473 - protein, 10 aa, synthetic construct
QGDRGDRGQI

SEQ ID NO: 93474 - protein, 10 aa, synthetic construct
QGDRGDRQGI

SEQ ID NO: 93475 - protein, 10 aa, synthetic construct
QGDRGDRSVV

SEQ ID NO: 93476 - protein, 10 aa, synthetic construct
QGDRGDRGVV

SEQ ID NO: 93477 - protein, 10 aa, synthetic construct
QGDRGDRSQT

SEQ ID NO: 93478 - protein, 10 aa, synthetic construct
QGERGDRGQI

SEQ ID NO: 93479 - protein, 10 aa, synthetic construct
QGERGDRQGI

SEQ ID NO: 93480 - protein, 10 aa, synthetic construct
QGERGDRSVV

SEQ ID NO: 93481 - protein, 10 aa, synthetic construct
TKNRGDQSTL

SEQ ID NO: 93482 - protein, 10 aa, synthetic construct
AAVRGDRGVV

SEQ ID NO: 93483 - protein, 10 aa, synthetic construct
QGERGDRGVV

SEQ ID NO: 93484 - protein, 10 aa, synthetic construct
QGERGDRSQT

SEQ ID NO: 93485 - protein, 10 aa, synthetic construct
QAGRGDHGVL

SEQ ID NO: 93486 - protein, 10 aa, synthetic construct
QAGRGDYVGL

SEQ ID NO: 93487 - protein, 10 aa, synthetic construct
QAGRGDQSTL

SEQ ID NO: 93488 - protein, 10 aa, synthetic construct
QAGRGDLLLS

SEQ ID NO: 93489 - protein, 10 aa, synthetic construct
QAARGDHGVL

SEQ ID NO: 93490 - protein, 10 aa, synthetic construct
QAARGDYVGL

SEQ ID NO: 93491 - protein, 10 aa, synthetic construct
QAARGDQSTL

SEQ ID NO: 93492 - protein, 10 aa, synthetic construct
QAARGDLLLS

SEQ ID NO: 93493 - protein, 10 aa, synthetic construct
AAPRGDRGVV

SEQ ID NO: 93494 - protein, 10 aa, synthetic construct
QAVRGDRGQI

SEQ ID NO: 93495 - protein, 10 aa, synthetic construct
QAVRGDRQGI

SEQ ID NO: 93496 - protein, 10 aa, synthetic construct
QAVRGDRSVV

SEQ ID NO: 93497 - protein, 10 aa, synthetic construct
QAVRGDRGVV

SEQ ID NO: 93498 - protein, 10 aa, synthetic construct
QAVRGDRSQT

SEQ ID NO: 93499 - protein, 10 aa, synthetic construct
QAPRGDHGVL

SEQ ID NO: 93500 - protein, 10 aa, synthetic construct
QAPRGDYVGL

SEQ ID NO: 93501 - protein, 10 aa, synthetic construct
QAPRGDQSTL

SEQ ID NO: 93502 - protein, 10 aa, synthetic construct
QAPRGDLLLS

SEQ ID NO: 93503 - protein, 10 aa, synthetic construct
QALRGDRGQI

SEQ ID NO: 93504 - protein, 10 aa, synthetic construct
AALRGDRGVV

SEQ ID NO: 93505 - protein, 10 aa, synthetic construct
QALRGDRQGI

SEQ ID NO: 93506 - protein, 10 aa, synthetic construct
QALRGDRSVV

SEQ ID NO: 93507 - protein, 10 aa, synthetic construct
QALRGDRGVV

SEQ ID NO: 93508 - protein, 10 aa, synthetic construct
QALRGDRSQT

SEQ ID NO: 93509 - protein, 10 aa, synthetic construct
QAWRGDRGQI

SEQ ID NO: 93510 - protein, 10 aa, synthetic construct
QAWRGDRQGI

SEQ ID NO: 93511 - protein, 10 aa, synthetic construct
QAWRGDRSVV

SEQ ID NO: 93512 - protein, 10 aa, synthetic construct
QAWRGDRGVV

SEQ ID NO: 93513 - protein, 10 aa, synthetic construct
QAWRGDRSQT

SEQ ID NO: 93514 - protein, 10 aa, synthetic construct
QARRGDHGVL

SEQ ID NO: 93515 - protein, 10 aa, synthetic construct
AARRGDRGVV

SEQ ID NO: 93516 - protein, 10 aa, synthetic construct
QARRGDYVGL

SEQ ID NO: 93517 - protein, 10 aa, synthetic construct
QARRGDQSTL

SEQ ID NO: 93518 - protein, 10 aa, synthetic construct
QARRGDLLLS

SEQ ID NO: 93519 - protein, 10 aa, synthetic construct
QAHRGDRGQI

SEQ ID NO: 93520 - protein, 10 aa, synthetic construct
QAHRGDRQGI

SEQ ID NO: 93521 - protein, 10 aa, synthetic construct
QAHRGDRSVV

SEQ ID NO: 93522 - protein, 10 aa, synthetic construct
QAHRGDRGVV

SEQ ID NO: 93523 - protein, 10 aa, synthetic construct
QAHRGDRSQT

SEQ ID NO: 93524 - protein, 10 aa, synthetic construct
QASRGDRGQI

SEQ ID NO: 93525 - protein, 10 aa, synthetic construct
QASRGDRQGI

SEQ ID NO: 93526 - protein, 10 aa, synthetic construct
AASRGDRGVV

SEQ ID NO: 93527 - protein, 10 aa, synthetic construct
QASRGDRSVV

SEQ ID NO: 93528 - protein, 10 aa, synthetic construct
QASRGDRGVV

SEQ ID NO: 93529 - protein, 10 aa, synthetic construct
QASRGDRSQT

SEQ ID NO: 93530 - protein, 10 aa, synthetic construct
QATRGDRGQI

SEQ ID NO: 93531 - protein, 10 aa, synthetic construct
QATRGDRQGI

SEQ ID NO: 93532 - protein, 10 aa, synthetic construct
QATRGDRSVV

SEQ ID NO: 93533 - protein, 10 aa, synthetic construct
QATRGDRGVV

SEQ ID NO: 93534 - protein, 10 aa, synthetic construct
QATRGDRSQT

SEQ ID NO: 93535 - protein, 10 aa, synthetic construct
QAQRGDRGQI

SEQ ID NO: 93536 - protein, 10 aa, synthetic construct
QAQRGDRQGI

SEQ ID NO: 93537 - protein, 10 aa, synthetic construct
APGRGDRGVV

SEQ ID NO: 93538 - protein, 10 aa, synthetic construct
QAQRGDRSVV

SEQ ID NO: 93539 - protein, 10 aa, synthetic construct
QAQRGDRGVV

SEQ ID NO: 93540 - protein, 10 aa, synthetic construct
QAQRGDRSQT

SEQ ID NO: 93541 - protein, 10 aa, synthetic construct
QADRGDRGQI

SEQ ID NO: 93542 - protein, 10 aa, synthetic construct
QADRGDRQGI

SEQ ID NO: 93543 - protein, 10 aa, synthetic construct
QADRGDRSVV

SEQ ID NO: 93544 - protein, 10 aa, synthetic construct
QADRGDRGVV

SEQ ID NO: 93545 - protein, 10 aa, synthetic construct
QADRGDRSQT

SEQ ID NO: 93546 - protein, 10 aa, synthetic construct
QAERGDRGQI

SEQ ID NO: 93547 - protein, 10 aa, synthetic construct
QAERGDRQGI

SEQ ID NO: 93548 - protein, 10 aa, synthetic construct
APARGDRGVV

SEQ ID NO: 93549 - protein, 10 aa, synthetic construct
QAERGDRSVV

SEQ ID NO: 93550 - protein, 10 aa, synthetic construct
QAERGDRGVV

SEQ ID NO: 93551 - protein, 10 aa, synthetic construct
QAERGDRSQT

SEQ ID NO: 93552 - protein, 10 aa, synthetic construct
QVGRGDHGVL

SEQ ID NO: 93553 - protein, 10 aa, synthetic construct
QVGRGDYVGL

SEQ ID NO: 93554 - protein, 10 aa, synthetic construct
QVGRGDQSTL

SEQ ID NO: 93555 - protein, 10 aa, synthetic construct
QVGRGDLLLS

SEQ ID NO: 93556 - protein, 10 aa, synthetic construct
QVARGDHGVL

SEQ ID NO: 93557 - protein, 10 aa, synthetic construct
QVARGDYVGL

SEQ ID NO: 93558 - protein, 10 aa, synthetic construct
QVARGDQSTL

SEQ ID NO: 93559 - protein, 10 aa, synthetic construct
APVRGDRGVV

SEQ ID NO: 93560 - protein, 10 aa, synthetic construct
QVARGDLLLS

SEQ ID NO: 93561 - protein, 10 aa, synthetic construct
QVVRGDRGQI

SEQ ID NO: 93562 - protein, 10 aa, synthetic construct
QVVRGDRQGI

SEQ ID NO: 93563 - protein, 10 aa, synthetic construct
QVVRGDRSVV

SEQ ID NO: 93564 - protein, 10 aa, synthetic construct
QVVRGDRGVV

SEQ ID NO: 93565 - protein, 10 aa, synthetic construct
QVVRGDRSQT

SEQ ID NO: 93566 - protein, 10 aa, synthetic construct
QVPRGDHGVL

SEQ ID NO: 93567 - protein, 10 aa, synthetic construct
QVPRGDYVGL

SEQ ID NO: 93568 - protein, 10 aa, synthetic construct
QVPRGDQSTL

SEQ ID NO: 93569 - protein, 10 aa, synthetic construct
QVPRGDLLLS

SEQ ID NO: 93570 - protein, 10 aa, synthetic construct
APLRGDRGVV

SEQ ID NO: 93571 - protein, 10 aa, synthetic construct
QVLRGDRGQI

SEQ ID NO: 93572 - protein, 10 aa, synthetic construct
QVLRGDRQGI

SEQ ID NO: 93573 - protein, 10 aa, synthetic construct
QVLRGDRSVV

SEQ ID NO: 93574 - protein, 10 aa, synthetic construct
QVLRGDRGVV

SEQ ID NO: 93575 - protein, 10 aa, synthetic construct
QVLRGDRSQT

SEQ ID NO: 93576 - protein, 10 aa, synthetic construct
QVWRGDRGQI

SEQ ID NO: 93577 - protein, 10 aa, synthetic construct
QVWRGDRQGI

SEQ ID NO: 93578 - protein, 10 aa, synthetic construct
QVWRGDRSVV

SEQ ID NO: 93579 - protein, 10 aa, synthetic construct
QVWRGDRGVV

SEQ ID NO: 93580 - protein, 10 aa, synthetic construct
QVWRGDRSQT

SEQ ID NO: 93581 - protein, 10 aa, synthetic construct
APRRGDRGVV

SEQ ID NO: 93582 - protein, 10 aa, synthetic construct
QVRRGDHGVL

SEQ ID NO: 93583 - protein, 10 aa, synthetic construct
QVRRGDYVGL

SEQ ID NO: 93584 - protein, 10 aa, synthetic construct
QVRRGDQSTL

SEQ ID NO: 93585 - protein, 10 aa, synthetic construct
QVRRGDLLLS

SEQ ID NO: 93586 - protein, 10 aa, synthetic construct
QVHRGDRGQI

SEQ ID NO: 93587 - protein, 10 aa, synthetic construct
QVHRGDRQGI

SEQ ID NO: 93588 - protein, 10 aa, synthetic construct
QVHRGDRSVV

SEQ ID NO: 93589 - protein, 10 aa, synthetic construct
QVHRGDRGVV

SEQ ID NO: 93590 - protein, 10 aa, synthetic construct
QVHRGDRSQT

SEQ ID NO: 93591 - protein, 10 aa, synthetic construct
QVSRGDRGQI

SEQ ID NO: 93592 - protein, 10 aa, synthetic construct
TKNRGDLLLS

SEQ ID NO: 93593 - protein, 10 aa, synthetic construct
APSRGDRGVV

SEQ ID NO: 93594 - protein, 10 aa, synthetic construct
QVSRGDRQGI

SEQ ID NO: 93595 - protein, 10 aa, synthetic construct
QVSRGDRSVV

SEQ ID NO: 93596 - protein, 10 aa, synthetic construct
QVSRGDRGVV

SEQ ID NO: 93597 - protein, 10 aa, synthetic construct
QVSRGDRSQT

SEQ ID NO: 93598 - protein, 10 aa, synthetic construct
QVTRGDRGQI

SEQ ID NO: 93599 - protein, 10 aa, synthetic construct
QVTRGDRQGI

SEQ ID NO: 93600 - protein, 10 aa, synthetic construct
QVTRGDRSVV

SEQ ID NO: 93601 - protein, 10 aa, synthetic construct
QVTRGDRGVV

SEQ ID NO: 93602 - protein, 10 aa, synthetic construct
QVTRGDRSQT

SEQ ID NO: 93603 - protein, 10 aa, synthetic construct
QVQRGDRGQI

SEQ ID NO: 93604 - protein, 10 aa, synthetic construct
ARGRGDRGVV

SEQ ID NO: 93605 - protein, 10 aa, synthetic construct
QVQRGDRQGI

SEQ ID NO: 93606 - protein, 10 aa, synthetic construct
QVQRGDRSVV

SEQ ID NO: 93607 - protein, 10 aa, synthetic construct
QVQRGDRGVV

SEQ ID NO: 93608 - protein, 10 aa, synthetic construct
QVQRGDRSQT

SEQ ID NO: 93609 - protein, 10 aa, synthetic construct
QVDRGDRGQI

SEQ ID NO: 93610 - protein, 10 aa, synthetic construct
QVDRGDRQGI

SEQ ID NO: 93611 - protein, 10 aa, synthetic construct
QVDRGDRSVV

SEQ ID NO: 93612 - protein, 10 aa, synthetic construct
QVDRGDRGVV

SEQ ID NO: 93613 - protein, 10 aa, synthetic construct
QVDRGDRSQT

SEQ ID NO: 93614 - protein, 10 aa, synthetic construct
QVERGDRGQI

SEQ ID NO: 93615 - protein, 10 aa, synthetic construct
ARARGDRGVV

SEQ ID NO: 93616 - protein, 10 aa, synthetic construct
QVERGDRQGI

SEQ ID NO: 93617 - protein, 10 aa, synthetic construct
QVERGDRSVV

SEQ ID NO: 93618 - protein, 10 aa, synthetic construct
QVERGDRGVV

SEQ ID NO: 93619 - protein, 10 aa, synthetic construct
QVERGDRSQT

SEQ ID NO: 93620 - protein, 10 aa, synthetic construct
QPGRGDHGVL

SEQ ID NO: 93621 - protein, 10 aa, synthetic construct
QPGRGDYVGL

SEQ ID NO: 93622 - protein, 10 aa, synthetic construct
QPGRGDQSTL

SEQ ID NO: 93623 - protein, 10 aa, synthetic construct
QPGRGDLLLS

SEQ ID NO: 93624 - protein, 10 aa, synthetic construct
QPARGDHGVL

SEQ ID NO: 93625 - protein, 10 aa, synthetic construct
QPARGDYVGL

SEQ ID NO: 93626 - protein, 10 aa, synthetic construct
ARVRGDRGVV

SEQ ID NO: 93627 - protein, 10 aa, synthetic construct
QPARGDQSTL

SEQ ID NO: 93628 - protein, 10 aa, synthetic construct
QPARGDLLLS

SEQ ID NO: 93629 - protein, 10 aa, synthetic construct
QPVRGDRGQI

SEQ ID NO: 93630 - protein, 10 aa, synthetic construct
QPVRGDRQGI

SEQ ID NO: 93631 - protein, 10 aa, synthetic construct
QPVRGDRSVV

SEQ ID NO: 93632 - protein, 10 aa, synthetic construct
QPVRGDRGVV

SEQ ID NO: 93633 - protein, 10 aa, synthetic construct
QPVRGDRSQT

SEQ ID NO: 93634 - protein, 10 aa, synthetic construct
QPPRGDHGVL

SEQ ID NO: 93635 - protein, 10 aa, synthetic construct
QPPRGDYVGL

SEQ ID NO: 93636 - protein, 10 aa, synthetic construct
QPPRGDQSTL

SEQ ID NO: 93637 - protein, 10 aa, synthetic construct
ARPRGDRGVV

SEQ ID NO: 93638 - protein, 10 aa, synthetic construct
QPPRGDLLLS

SEQ ID NO: 93639 - protein, 10 aa, synthetic construct
QPLRGDRGQI

SEQ ID NO: 93640 - protein, 10 aa, synthetic construct
QPLRGDRQGI

SEQ ID NO: 93641 - protein, 10 aa, synthetic construct
QPLRGDRSVV

SEQ ID NO: 93642 - protein, 10 aa, synthetic construct
QPLRGDRGVV

SEQ ID NO: 93643 - protein, 10 aa, synthetic construct
QPLRGDRSQT

SEQ ID NO: 93644 - protein, 10 aa, synthetic construct
QPWRGDRGQI

SEQ ID NO: 93645 - protein, 10 aa, synthetic construct
QPWRGDRQGI

SEQ ID NO: 93646 - protein, 10 aa, synthetic construct
QPWRGDRSVV

SEQ ID NO: 93647 - protein, 10 aa, synthetic construct
QPWRGDRGVV

SEQ ID NO: 93648 - protein, 10 aa, synthetic construct
ARLRGDRGVV

SEQ ID NO: 93649 - protein, 10 aa, synthetic construct
QPWRGDRSQT

SEQ ID NO: 93650 - protein, 10 aa, synthetic construct
QPRRGDHGVL

SEQ ID NO: 93651 - protein, 10 aa, synthetic construct
QPRRGDYVGL

SEQ ID NO: 93652 - protein, 10 aa, synthetic construct
QPRRGDQSTL

SEQ ID NO: 93653 - protein, 10 aa, synthetic construct
QPRRGDLLLS

SEQ ID NO: 93654 - protein, 10 aa, synthetic construct
QPHRGDRGQI

SEQ ID NO: 93655 - protein, 10 aa, synthetic construct
QPHRGDRQGI

SEQ ID NO: 93656 - protein, 10 aa, synthetic construct
QPHRGDRSVV

SEQ ID NO: 93657 - protein, 10 aa, synthetic construct
QPHRGDRGVV

SEQ ID NO: 93658 - protein, 10 aa, synthetic construct
QPHRGDRSQT

SEQ ID NO: 93659 - protein, 10 aa, synthetic construct
ARRRGDRGVV

SEQ ID NO: 93660 - protein, 10 aa, synthetic construct
QPSRGDRGQI

SEQ ID NO: 93661 - protein, 10 aa, synthetic construct
QPSRGDRQGI

SEQ ID NO: 93662 - protein, 10 aa, synthetic construct
QPSRGDRSVV

SEQ ID NO: 93663 - protein, 10 aa, synthetic construct
QPSRGDRGVV

SEQ ID NO: 93664 - protein, 10 aa, synthetic construct
QPSRGDRSQT

SEQ ID NO: 93665 - protein, 10 aa, synthetic construct
QPTRGDRGQI

SEQ ID NO: 93666 - protein, 10 aa, synthetic construct
QPTRGDRQGI

SEQ ID NO: 93667 - protein, 10 aa, synthetic construct
QPTRGDRSVV

SEQ ID NO: 93668 - protein, 10 aa, synthetic construct
QPTRGDRGVV

SEQ ID NO: 93669 - protein, 10 aa, synthetic construct
QPTRGDRSQT

SEQ ID NO: 93670 - protein, 10 aa, synthetic construct
ARSRGDRGVV

SEQ ID NO: 93671 - protein, 10 aa, synthetic construct
QPQRGDRGQI

SEQ ID NO: 93672 - protein, 10 aa, synthetic construct
QPQRGDRQGI

SEQ ID NO: 93673 - protein, 10 aa, synthetic construct
QPQRGDRSVV

SEQ ID NO: 93674 - protein, 10 aa, synthetic construct
QPQRGDRGVV

SEQ ID NO: 93675 - protein, 10 aa, synthetic construct
QPQRGDRSQT

SEQ ID NO: 93676 - protein, 10 aa, synthetic construct
QPDRGDRGQI

SEQ ID NO: 93677 - protein, 10 aa, synthetic construct
QPDRGDRQGI

SEQ ID NO: 93678 - protein, 10 aa, synthetic construct
QPDRGDRSVV

SEQ ID NO: 93679 - protein, 10 aa, synthetic construct
QPDRGDRGVV

SEQ ID NO: 93680 - protein, 10 aa, synthetic construct
QPDRGDRSQT

SEQ ID NO: 93681 - protein, 10 aa, synthetic construct
SGGRGDRGQI

SEQ ID NO: 93682 - protein, 10 aa, synthetic construct
QPERGDRGQI

SEQ ID NO: 93683 - protein, 10 aa, synthetic construct
QPERGDRQGI

SEQ ID NO: 93684 - protein, 10 aa, synthetic construct
QPERGDRSVV

SEQ ID NO: 93685 - protein, 10 aa, synthetic construct
QPERGDRGVV

SEQ ID NO: 93686 - protein, 10 aa, synthetic construct
QPERGDRSQT

SEQ ID NO: 93687 - protein, 10 aa, synthetic construct
QLGRGDHGVL

SEQ ID NO: 93688 - protein, 10 aa, synthetic construct
QLGRGDYVGL

SEQ ID NO: 93689 - protein, 10 aa, synthetic construct
QLGRGDQSTL

SEQ ID NO: 93690 - protein, 10 aa, synthetic construct
QLGRGDLLLS

SEQ ID NO: 93691 - protein, 10 aa, synthetic construct
QLARGDHGVL

SEQ ID NO: 93692 - protein, 10 aa, synthetic construct
SGGRGDRQGI

SEQ ID NO: 93693 - protein, 10 aa, synthetic construct
QLARGDYVGL

SEQ ID NO: 93694 - protein, 10 aa, synthetic construct
QLARGDQSTL

SEQ ID NO: 93695 - protein, 10 aa, synthetic construct
QLARGDLLLS

SEQ ID NO: 93696 - protein, 10 aa, synthetic construct
QLVRGDRGQI

SEQ ID NO: 93697 - protein, 10 aa, synthetic construct
QLVRGDRQGI

SEQ ID NO: 93698 - protein, 10 aa, synthetic construct
QLVRGDRSVV

SEQ ID NO: 93699 - protein, 10 aa, synthetic construct
QLVRGDRGVV

SEQ ID NO: 93700 - protein, 10 aa, synthetic construct
QLVRGDRSQT

SEQ ID NO: 93701 - protein, 10 aa, synthetic construct
QLPRGDHGVL

SEQ ID NO: 93702 - protein, 10 aa, synthetic construct
QLPRGDYVGL

SEQ ID NO: 93703 - protein, 10 aa, synthetic construct
EKKRGDHGVL

SEQ ID NO: 93704 - protein, 10 aa, synthetic construct
SGGRGDRSVV

SEQ ID NO: 93705 - protein, 10 aa, synthetic construct
QLPRGDQSTL

SEQ ID NO: 93706 - protein, 10 aa, synthetic construct
QLPRGDLLLS

SEQ ID NO: 93707 - protein, 10 aa, synthetic construct
QLLRGDRGQI

SEQ ID NO: 93708 - protein, 10 aa, synthetic construct
QLLRGDRQGI

SEQ ID NO: 93709 - protein, 10 aa, synthetic construct
QLLRGDRSVV

SEQ ID NO: 93710 - protein, 10 aa, synthetic construct
QLLRGDRGVV

SEQ ID NO: 93711 - protein, 10 aa, synthetic construct
QLLRGDRSQT

SEQ ID NO: 93712 - protein, 10 aa, synthetic construct
QLWRGDRGQI

SEQ ID NO: 93713 - protein, 10 aa, synthetic construct
QLWRGDRQGI

SEQ ID NO: 93714 - protein, 10 aa, synthetic construct
QLWRGDRSVV

SEQ ID NO: 93715 - protein, 10 aa, synthetic construct
SGGRGDRGVV

SEQ ID NO: 93716 - protein, 10 aa, synthetic construct
QLWRGDRGVV

SEQ ID NO: 93717 - protein, 10 aa, synthetic construct
QLWRGDRSQT

SEQ ID NO: 93718 - protein, 10 aa, synthetic construct
QLRRGDHGVL

SEQ ID NO: 93719 - protein, 10 aa, synthetic construct
QLRRGDYVGL

SEQ ID NO: 93720 - protein, 10 aa, synthetic construct
QLRRGDQSTL

SEQ ID NO: 93721 - protein, 10 aa, synthetic construct
QLRRGDLLLS

SEQ ID NO: 93722 - protein, 10 aa, synthetic construct
QLHRGDRGQI

SEQ ID NO: 93723 - protein, 10 aa, synthetic construct
QLHRGDRQGI

SEQ ID NO: 93724 - protein, 10 aa, synthetic construct
QLHRGDRSVV

SEQ ID NO: 93725 - protein, 10 aa, synthetic construct
QLHRGDRGVV

SEQ ID NO: 93726 - protein, 10 aa, synthetic construct
SGGRGDRSQT

SEQ ID NO: 93727 - protein, 10 aa, synthetic construct
QLHRGDRSQT

SEQ ID NO: 93728 - protein, 10 aa, synthetic construct
QLSRGDRGQI

SEQ ID NO: 93729 - protein, 10 aa, synthetic construct
QLSRGDRQGI

SEQ ID NO: 93730 - protein, 10 aa, synthetic construct
QLSRGDRSVV

SEQ ID NO: 93731 - protein, 10 aa, synthetic construct
QLSRGDRGVV

SEQ ID NO: 93732 - protein, 10 aa, synthetic construct
QLSRGDRSQT

SEQ ID NO: 93733 - protein, 10 aa, synthetic construct
QLTRGDRGQI

SEQ ID NO: 93734 - protein, 10 aa, synthetic construct
QLTRGDRQGI

SEQ ID NO: 93735 - protein, 10 aa, synthetic construct
QLTRGDRSVV

SEQ ID NO: 93736 - protein, 10 aa, synthetic construct
QLTRGDRGVV

SEQ ID NO: 93737 - protein, 10 aa, synthetic construct
SGARGDRGQI

SEQ ID NO: 93738 - protein, 10 aa, synthetic construct
QLTRGDRSQT

SEQ ID NO: 93739 - protein, 10 aa, synthetic construct
QLQRGDRGQI

SEQ ID NO: 93740 - protein, 10 aa, synthetic construct
QLQRGDRQGI

SEQ ID NO: 93741 - protein, 10 aa, synthetic construct
QLQRGDRSVV

SEQ ID NO: 93742 - protein, 10 aa, synthetic construct
QLQRGDRGVV

SEQ ID NO: 93743 - protein, 10 aa, synthetic construct
QLQRGDRSQT

SEQ ID NO: 93744 - protein, 10 aa, synthetic construct
QLDRGDRGQI

SEQ ID NO: 93745 - protein, 10 aa, synthetic construct
QLDRGDRQGI

SEQ ID NO: 93746 - protein, 10 aa, synthetic construct
QLDRGDRSVV

SEQ ID NO: 93747 - protein, 10 aa, synthetic construct
QLDRGDRGVV

SEQ ID NO: 93748 - protein, 10 aa, synthetic construct
SGARGDRQGI

SEQ ID NO: 93749 - protein, 10 aa, synthetic construct
QLDRGDRSQT

SEQ ID NO: 93750 - protein, 10 aa, synthetic construct
QLERGDRGQI

SEQ ID NO: 93751 - protein, 10 aa, synthetic construct
QLERGDRQGI

SEQ ID NO: 93752 - protein, 10 aa, synthetic construct
QLERGDRSVV

SEQ ID NO: 93753 - protein, 10 aa, synthetic construct
QLERGDRGVV

SEQ ID NO: 93754 - protein, 10 aa, synthetic construct
QLERGDRSQT

SEQ ID NO: 93755 - protein, 10 aa, synthetic construct
QMGRGDRGVV

SEQ ID NO: 93756 - protein, 10 aa, synthetic construct
QMARGDRGVV

SEQ ID NO: 93757 - protein, 10 aa, synthetic construct
QMVRGDRGVV

SEQ ID NO: 93758 - protein, 10 aa, synthetic construct
QMVRGDLTVT

SEQ ID NO: 93759 - protein, 10 aa, synthetic construct
SGARGDRSVV

SEQ ID NO: 93760 - protein, 10 aa, synthetic construct
QMVRGDLLLS

SEQ ID NO: 93761 - protein, 10 aa, synthetic construct
QMPRGDRGVV

SEQ ID NO: 93762 - protein, 10 aa, synthetic construct
QMLRGDRGVV

SEQ ID NO: 93763 - protein, 10 aa, synthetic construct
QMLRGDLTVT

SEQ ID NO: 93764 - protein, 10 aa, synthetic construct
QMLRGDLLLS

SEQ ID NO: 93765 - protein, 10 aa, synthetic construct
QMRRGDRGVV

SEQ ID NO: 93766 - protein, 10 aa, synthetic construct
QMSRGDRGVV

SEQ ID NO: 93767 - protein, 10 aa, synthetic construct
QMSRGDLTVT

SEQ ID NO: 93768 - protein, 10 aa, synthetic construct
QMSRGDLLLS

SEQ ID NO: 93769 - protein, 10 aa, synthetic construct
QWGRGDHGVL

SEQ ID NO: 93770 - protein, 10 aa, synthetic construct
SGARGDRGVV

SEQ ID NO: 93771 - protein, 10 aa, synthetic construct
QWGRGDRGQI

SEQ ID NO: 93772 - protein, 10 aa, synthetic construct
QWGRGDRQGI

SEQ ID NO: 93773 - protein, 10 aa, synthetic construct
QWGRGDRSVV

SEQ ID NO: 93774 - protein, 10 aa, synthetic construct
QWGRGDLTVT

SEQ ID NO: 93775 - protein, 10 aa, synthetic construct
QWGRGDLIGR

SEQ ID NO: 93776 - protein, 10 aa, synthetic construct
QWGRGDRSQT

SEQ ID NO: 93777 - protein, 10 aa, synthetic construct
QWGRGDLLLS

SEQ ID NO: 93778 - protein, 10 aa, synthetic construct
QWARGDHGVL

SEQ ID NO: 93779 - protein, 10 aa, synthetic construct
QWARGDRGQI

SEQ ID NO: 93780 - protein, 10 aa, synthetic construct
QWARGDRQGI

SEQ ID NO: 93781 - protein, 10 aa, synthetic construct
SGARGDRSQT

SEQ ID NO: 93782 - protein, 10 aa, synthetic construct
QWARGDRSVV

SEQ ID NO: 93783 - protein, 10 aa, synthetic construct
QWARGDLTVT

SEQ ID NO: 93784 - protein, 10 aa, synthetic construct
QWARGDLIGR

SEQ ID NO: 93785 - protein, 10 aa, synthetic construct
QWARGDRSQT

SEQ ID NO: 93786 - protein, 10 aa, synthetic construct
QWARGDLLLS

SEQ ID NO: 93787 - protein, 10 aa, synthetic construct
QWVRGDHGVL

SEQ ID NO: 93788 - protein, 10 aa, synthetic construct
QWVRGDRGQI

SEQ ID NO: 93789 - protein, 10 aa, synthetic construct
QWVRGDRQGI

SEQ ID NO: 93790 - protein, 10 aa, synthetic construct
QWVRGDRSVV

SEQ ID NO: 93791 - protein, 10 aa, synthetic construct
QWVRGDLTVT

SEQ ID NO: 93792 - protein, 10 aa, synthetic construct
SGPRGDRGQI

SEQ ID NO: 93793 - protein, 10 aa, synthetic construct
QWVRGDLIGR

SEQ ID NO: 93794 - protein, 10 aa, synthetic construct
QWVRGDRSQT

SEQ ID NO: 93795 - protein, 10 aa, synthetic construct
QWVRGDLLLS

SEQ ID NO: 93796 - protein, 10 aa, synthetic construct
QWPRGDHGVL

SEQ ID NO: 93797 - protein, 10 aa, synthetic construct
QWPRGDRGQI

SEQ ID NO: 93798 - protein, 10 aa, synthetic construct
QWPRGDRQGI

SEQ ID NO: 93799 - protein, 10 aa, synthetic construct
QWPRGDRSVV

SEQ ID NO: 93800 - protein, 10 aa, synthetic construct
QWPRGDLTVT

SEQ ID NO: 93801 - protein, 10 aa, synthetic construct
QWPRGDLIGR

SEQ ID NO: 93802 - protein, 10 aa, synthetic construct
QWPRGDRSQT

SEQ ID NO: 93803 - protein, 10 aa, synthetic construct
SGPRGDRQGI

SEQ ID NO: 93804 - protein, 10 aa, synthetic construct
QWPRGDLLLS

SEQ ID NO: 93805 - protein, 10 aa, synthetic construct
QWLRGDHGVL

SEQ ID NO: 93806 - protein, 10 aa, synthetic construct
QWLRGDRGQI

SEQ ID NO: 93807 - protein, 10 aa, synthetic construct
QWLRGDRQGI

SEQ ID NO: 93808 - protein, 10 aa, synthetic construct
QWLRGDRSVV

SEQ ID NO: 93809 - protein, 10 aa, synthetic construct
QWLRGDLTVT

SEQ ID NO: 93810 - protein, 10 aa, synthetic construct
QWLRGDLIGR

SEQ ID NO: 93811 - protein, 10 aa, synthetic construct
QWLRGDRSQT

SEQ ID NO: 93812 - protein, 10 aa, synthetic construct
QWLRGDLLLS

SEQ ID NO: 93813 - protein, 10 aa, synthetic construct
QWWRGDRGQI

SEQ ID NO: 93814 - protein, 10 aa, synthetic construct
EKKRGDRGQI

SEQ ID NO: 93815 - protein, 10 aa, synthetic construct
SGPRGDRSVV

SEQ ID NO: 93816 - protein, 10 aa, synthetic construct
QWWRGDRQGI

SEQ ID NO: 93817 - protein, 10 aa, synthetic construct
QWWRGDRSVV

SEQ ID NO: 93818 - protein, 10 aa, synthetic construct
QWWRGDRGVV

SEQ ID NO: 93819 - protein, 10 aa, synthetic construct
QWWRGDRSQT

SEQ ID NO: 93820 - protein, 10 aa, synthetic construct
QWRRGDHGVL

SEQ ID NO: 93821 - protein, 10 aa, synthetic construct
QWRRGDRGQI

SEQ ID NO: 93822 - protein, 10 aa, synthetic construct
QWRRGDRQGI

SEQ ID NO: 93823 - protein, 10 aa, synthetic construct
QWRRGDRSVV

SEQ ID NO: 93824 - protein, 10 aa, synthetic construct
QWRRGDLTVT

SEQ ID NO: 93825 - protein, 10 aa, synthetic construct
QWRRGDLIGR

SEQ ID NO: 93826 - protein, 10 aa, synthetic construct
SGPRGDRGVV

SEQ ID NO: 93827 - protein, 10 aa, synthetic construct
QWRRGDRSQT

SEQ ID NO: 93828 - protein, 10 aa, synthetic construct
QWRRGDLLLS

SEQ ID NO: 93829 - protein, 10 aa, synthetic construct
QWHRGDRGVV

SEQ ID NO: 93830 - protein, 10 aa, synthetic construct
QWSRGDHGVL

SEQ ID NO: 93831 - protein, 10 aa, synthetic construct
QWSRGDRGQI

SEQ ID NO: 93832 - protein, 10 aa, synthetic construct
QWSRGDRQGI

SEQ ID NO: 93833 - protein, 10 aa, synthetic construct
QWSRGDRSVV

SEQ ID NO: 93834 - protein, 10 aa, synthetic construct
QWSRGDLTVT

SEQ ID NO: 93835 - protein, 10 aa, synthetic construct
QWSRGDLIGR

SEQ ID NO: 93836 - protein, 10 aa, synthetic construct
QWSRGDRSQT

SEQ ID NO: 93837 - protein, 10 aa, synthetic construct
SGPRGDRSQT

SEQ ID NO: 93838 - protein, 10 aa, synthetic construct
QWSRGDLLLS

SEQ ID NO: 93839 - protein, 10 aa, synthetic construct
QWTRGDRGVV

SEQ ID NO: 93840 - protein, 10 aa, synthetic construct
QWQRGDRGVV

SEQ ID NO: 93841 - protein, 10 aa, synthetic construct
QWDRGDRGVV

SEQ ID NO: 93842 - protein, 10 aa, synthetic construct
QWERGDRGVV

SEQ ID NO: 93843 - protein, 10 aa, synthetic construct
QRGRGDHGVL

SEQ ID NO: 93844 - protein, 10 aa, synthetic construct
QRGRGDYVGL

SEQ ID NO: 93845 - protein, 10 aa, synthetic construct
QRGRGDQSTL

SEQ ID NO: 93846 - protein, 10 aa, synthetic construct
QRGRGDLLLS

SEQ ID NO: 93847 - protein, 10 aa, synthetic construct
QRARGDHGVL

SEQ ID NO: 93848 - protein, 10 aa, synthetic construct
SGRRGDRGQI

SEQ ID NO: 93849 - protein, 10 aa, synthetic construct
QRARGDYVGL

SEQ ID NO: 93850 - protein, 10 aa, synthetic construct
QRARGDQSTL

SEQ ID NO: 93851 - protein, 10 aa, synthetic construct
QRARGDLLLS

SEQ ID NO: 93852 - protein, 10 aa, synthetic construct
QRVRGDRGQI

SEQ ID NO: 93853 - protein, 10 aa, synthetic construct
QRVRGDRQGI

SEQ ID NO: 93854 - protein, 10 aa, synthetic construct
QRVRGDRSVV

SEQ ID NO: 93855 - protein, 10 aa, synthetic construct
QRVRGDRGVV

SEQ ID NO: 93856 - protein, 10 aa, synthetic construct
QRVRGDRSQT

SEQ ID NO: 93857 - protein, 10 aa, synthetic construct
QRPRGDHGVL

SEQ ID NO: 93858 - protein, 10 aa, synthetic construct
QRPRGDYVGL

SEQ ID NO: 93859 - protein, 10 aa, synthetic construct
SGRRGDRQGI

SEQ ID NO: 93860 - protein, 10 aa, synthetic construct
QRPRGDQSTL

SEQ ID NO: 93861 - protein, 10 aa, synthetic construct
QRPRGDLLLS

SEQ ID NO: 93862 - protein, 10 aa, synthetic construct
QRLRGDRGQI

SEQ ID NO: 93863 - protein, 10 aa, synthetic construct
QRLRGDRQGI

SEQ ID NO: 93864 - protein, 10 aa, synthetic construct
QRLRGDRSVV

SEQ ID NO: 93865 - protein, 10 aa, synthetic construct
QRLRGDRGVV

SEQ ID NO: 93866 - protein, 10 aa, synthetic construct
QRLRGDRSQT

SEQ ID NO: 93867 - protein, 10 aa, synthetic construct
QRWRGDRGQI

SEQ ID NO: 93868 - protein, 10 aa, synthetic construct
QRWRGDRQGI

SEQ ID NO: 93869 - protein, 10 aa, synthetic construct
QRWRGDRSVV

SEQ ID NO: 93870 - protein, 10 aa, synthetic construct
SGRRGDRSVV

SEQ ID NO: 93871 - protein, 10 aa, synthetic construct
QRWRGDRGVV

SEQ ID NO: 93872 - protein, 10 aa, synthetic construct
QRWRGDRSQT

SEQ ID NO: 93873 - protein, 10 aa, synthetic construct
QRRRGDHGVL

SEQ ID NO: 93874 - protein, 10 aa, synthetic construct
QRRRGDYVGL

SEQ ID NO: 93875 - protein, 10 aa, synthetic construct
QRRRGDQSTL

SEQ ID NO: 93876 - protein, 10 aa, synthetic construct
QRRRGDLLLS

SEQ ID NO: 93877 - protein, 10 aa, synthetic construct
QRHRGDRGQI

SEQ ID NO: 93878 - protein, 10 aa, synthetic construct
QRHRGDRQGI

SEQ ID NO: 93879 - protein, 10 aa, synthetic construct
QRHRGDRSVV

SEQ ID NO: 93880 - protein, 10 aa, synthetic construct
QRHRGDRGVV

SEQ ID NO: 93881 - protein, 10 aa, synthetic construct
SGRRGDRGVV

SEQ ID NO: 93882 - protein, 10 aa, synthetic construct
QRHRGDRSQT

SEQ ID NO: 93883 - protein, 10 aa, synthetic construct
QRSRGDRGQI

SEQ ID NO: 93884 - protein, 10 aa, synthetic construct
QRSRGDRQGI

SEQ ID NO: 93885 - protein, 10 aa, synthetic construct
QRSRGDRSVV

SEQ ID NO: 93886 - protein, 10 aa, synthetic construct
QRSRGDRGVV

SEQ ID NO: 93887 - protein, 10 aa, synthetic construct
QRSRGDRSQT

SEQ ID NO: 93888 - protein, 10 aa, synthetic construct
QRTRGDRGQI

SEQ ID NO: 93889 - protein, 10 aa, synthetic construct
QRTRGDRQGI

SEQ ID NO: 93890 - protein, 10 aa, synthetic construct
QRTRGDRSVV

SEQ ID NO: 93891 - protein, 10 aa, synthetic construct
QRTRGDRGVV

SEQ ID NO: 93892 - protein, 10 aa, synthetic construct
SGRRGDRSQT

SEQ ID NO: 93893 - protein, 10 aa, synthetic construct
QRTRGDRSQT

SEQ ID NO: 93894 - protein, 10 aa, synthetic construct
QRQRGDRGQI

SEQ ID NO: 93895 - protein, 10 aa, synthetic construct
QRQRGDRQGI

SEQ ID NO: 93896 - protein, 10 aa, synthetic construct
QRQRGDRSVV

SEQ ID NO: 93897 - protein, 10 aa, synthetic construct
QRQRGDRGVV

SEQ ID NO: 93898 - protein, 10 aa, synthetic construct
QRQRGDRSQT

SEQ ID NO: 93899 - protein, 10 aa, synthetic construct
QRDRGDRGQI

SEQ ID NO: 93900 - protein, 10 aa, synthetic construct
QRDRGDRQGI

SEQ ID NO: 93901 - protein, 10 aa, synthetic construct
QRDRGDRSVV

SEQ ID NO: 93902 - protein, 10 aa, synthetic construct
QRDRGDRGVV

SEQ ID NO: 93903 - protein, 10 aa, synthetic construct
SAGRGDRGQI

SEQ ID NO: 93904 - protein, 10 aa, synthetic construct
QRDRGDRSQT

SEQ ID NO: 93905 - protein, 10 aa, synthetic construct
QRERGDRGQI

SEQ ID NO: 93906 - protein, 10 aa, synthetic construct
QRERGDRQGI

SEQ ID NO: 93907 - protein, 10 aa, synthetic construct
QRERGDRSVV

SEQ ID NO: 93908 - protein, 10 aa, synthetic construct
QRERGDRGVV

SEQ ID NO: 93909 - protein, 10 aa, synthetic construct
QRERGDRSQT

SEQ ID NO: 93910 - protein, 10 aa, synthetic construct
QHGRGDRGQI

SEQ ID NO: 93911 - protein, 10 aa, synthetic construct
QHGRGDRQGI

SEQ ID NO: 93912 - protein, 10 aa, synthetic construct
QHGRGDRSVV

SEQ ID NO: 93913 - protein, 10 aa, synthetic construct
QHGRGDRGVV

SEQ ID NO: 93914 - protein, 10 aa, synthetic construct
SAGRGDRQGI

SEQ ID NO: 93915 - protein, 10 aa, synthetic construct
QHGRGDRSQT

SEQ ID NO: 93916 - protein, 10 aa, synthetic construct
QHARGDRGQI

SEQ ID NO: 93917 - protein, 10 aa, synthetic construct
QHARGDRQGI

SEQ ID NO: 93918 - protein, 10 aa, synthetic construct
QHARGDRSVV

SEQ ID NO: 93919 - protein, 10 aa, synthetic construct
QHARGDRGVV

SEQ ID NO: 93920 - protein, 10 aa, synthetic construct
QHARGDRSQT

SEQ ID NO: 93921 - protein, 10 aa, synthetic construct
QHPRGDRGQI

SEQ ID NO: 93922 - protein, 10 aa, synthetic construct
QHPRGDRQGI

SEQ ID NO: 93923 - protein, 10 aa, synthetic construct
QHPRGDRSVV

SEQ ID NO: 93924 - protein, 10 aa, synthetic construct
QHPRGDRGVV

SEQ ID NO: 93925 - protein, 10 aa, synthetic construct
EKKRGDRQGI

SEQ ID NO: 93926 - protein, 10 aa, synthetic construct
SAGRGDRSVV

SEQ ID NO: 93927 - protein, 10 aa, synthetic construct
QHPRGDRSQT

SEQ ID NO: 93928 - protein, 10 aa, synthetic construct
QHRRGDRGQI

SEQ ID NO: 93929 - protein, 10 aa, synthetic construct
QHRRGDRQGI

SEQ ID NO: 93930 - protein, 10 aa, synthetic construct
QHRRGDRSVV

SEQ ID NO: 93931 - protein, 10 aa, synthetic construct
QHRRGDRGVV

SEQ ID NO: 93932 - protein, 10 aa, synthetic construct
QHRRGDRSQT

SEQ ID NO: 93933 - protein, 10 aa, synthetic construct
QSGRGDHGVL

SEQ ID NO: 93934 - protein, 10 aa, synthetic construct
QSGRGDYVGL

SEQ ID NO: 93935 - protein, 10 aa, synthetic construct
QSGRGDQSTL

SEQ ID NO: 93936 - protein, 10 aa, synthetic construct
QSGRGDLLLS

SEQ ID NO: 93937 - protein, 10 aa, synthetic construct
SAGRGDRGVV

SEQ ID NO: 93938 - protein, 10 aa, synthetic construct
QSARGDHGVL

SEQ ID NO: 93939 - protein, 10 aa, synthetic construct
QSARGDYVGL

SEQ ID NO: 93940 - protein, 10 aa, synthetic construct
QSARGDQSTL

SEQ ID NO: 93941 - protein, 10 aa, synthetic construct
QSARGDLLLS

SEQ ID NO: 93942 - protein, 10 aa, synthetic construct
QSVRGDRGQI

SEQ ID NO: 93943 - protein, 10 aa, synthetic construct
QSVRGDRQGI

SEQ ID NO: 93944 - protein, 10 aa, synthetic construct
QSVRGDRSVV

SEQ ID NO: 93945 - protein, 10 aa, synthetic construct
QSVRGDRGVV

SEQ ID NO: 93946 - protein, 10 aa, synthetic construct
QSVRGDRSQT

SEQ ID NO: 93947 - protein, 10 aa, synthetic construct
QSLRGDRGQI

SEQ ID NO: 93948 - protein, 10 aa, synthetic construct
SAGRGDRSQT

SEQ ID NO: 93949 - protein, 10 aa, synthetic construct
QSLRGDRQGI

SEQ ID NO: 93950 - protein, 10 aa, synthetic construct
QSLRGDRSVV

SEQ ID NO: 93951 - protein, 10 aa, synthetic construct
QSLRGDRGVV

SEQ ID NO: 93952 - protein, 10 aa, synthetic construct
QSLRGDRSQT

SEQ ID NO: 93953 - protein, 10 aa, synthetic construct
QSWRGDRGQI

SEQ ID NO: 93954 - protein, 10 aa, synthetic construct
QSWRGDRQGI

SEQ ID NO: 93955 - protein, 10 aa, synthetic construct
QSWRGDRSVV

SEQ ID NO: 93956 - protein, 10 aa, synthetic construct
QSWRGDRGVV

SEQ ID NO: 93957 - protein, 10 aa, synthetic construct
QSWRGDRSQT

SEQ ID NO: 93958 - protein, 10 aa, synthetic construct
QSRRGDHGVL

SEQ ID NO: 93959 - protein, 10 aa, synthetic construct
SAARGDRGQI

SEQ ID NO: 93960 - protein, 10 aa, synthetic construct
QSRRGDYVGL

SEQ ID NO: 93961 - protein, 10 aa, synthetic construct
QSRRGDQSTL

SEQ ID NO: 93962 - protein, 10 aa, synthetic construct
QSRRGDLLLS

SEQ ID NO: 93963 - protein, 10 aa, synthetic construct
QSHRGDRGQI

SEQ ID NO: 93964 - protein, 10 aa, synthetic construct
QSHRGDRQGI

SEQ ID NO: 93965 - protein, 10 aa, synthetic construct
QSHRGDRSVV

SEQ ID NO: 93966 - protein, 10 aa, synthetic construct
QSHRGDRGVV

SEQ ID NO: 93967 - protein, 10 aa, synthetic construct
QSHRGDRSQT

SEQ ID NO: 93968 - protein, 10 aa, synthetic construct
QSSRGDRGQI

SEQ ID NO: 93969 - protein, 10 aa, synthetic construct
QSSRGDRQGI

SEQ ID NO: 93970 - protein, 10 aa, synthetic construct
SAARGDRQGI

SEQ ID NO: 93971 - protein, 10 aa, synthetic construct
QSSRGDRSVV

SEQ ID NO: 93972 - protein, 10 aa, synthetic construct
QSSRGDRGVV

SEQ ID NO: 93973 - protein, 10 aa, synthetic construct
QSSRGDRSQT

SEQ ID NO: 93974 - protein, 10 aa, synthetic construct
QSTRGDRGQI

SEQ ID NO: 93975 - protein, 10 aa, synthetic construct
QSTRGDRQGI

SEQ ID NO: 93976 - protein, 10 aa, synthetic construct
QSTRGDRSVV

SEQ ID NO: 93977 - protein, 10 aa, synthetic construct
QSTRGDRGVV

SEQ ID NO: 93978 - protein, 10 aa, synthetic construct
QSTRGDRSQT

SEQ ID NO: 93979 - protein, 10 aa, synthetic construct
QSQRGDRGQI

SEQ ID NO: 93980 - protein, 10 aa, synthetic construct
QSQRGDRQGI

SEQ ID NO: 93981 - protein, 10 aa, synthetic construct
SAARGDRSVV

SEQ ID NO: 93982 - protein, 10 aa, synthetic construct
QSQRGDRSVV

SEQ ID NO: 93983 - protein, 10 aa, synthetic construct
QSQRGDRGVV

SEQ ID NO: 93984 - protein, 10 aa, synthetic construct
QSQRGDRSQT

SEQ ID NO: 93985 - protein, 10 aa, synthetic construct
QSDRGDRGQI

SEQ ID NO: 93986 - protein, 10 aa, synthetic construct
QSDRGDRQGI

SEQ ID NO: 93987 - protein, 10 aa, synthetic construct
QSDRGDRSVV

SEQ ID NO: 93988 - protein, 10 aa, synthetic construct
QSDRGDRGVV

SEQ ID NO: 93989 - protein, 10 aa, synthetic construct
QSDRGDRSQT

SEQ ID NO: 93990 - protein, 10 aa, synthetic construct
QSERGDRGQI

SEQ ID NO: 93991 - protein, 10 aa, synthetic construct
QSERGDRQGI

SEQ ID NO: 93992 - protein, 10 aa, synthetic construct
SAARGDRGVV

SEQ ID NO: 93993 - protein, 10 aa, synthetic construct
QSERGDRSVV

SEQ ID NO: 93994 - protein, 10 aa, synthetic construct
QSERGDRGVV

SEQ ID NO: 93995 - protein, 10 aa, synthetic construct
QSERGDRSQT

SEQ ID NO: 93996 - protein, 10 aa, synthetic construct
QTGRGDRGQI

SEQ ID NO: 93997 - protein, 10 aa, synthetic construct
QTGRGDRQGI

SEQ ID NO: 93998 - protein, 10 aa, synthetic construct
QTGRGDRSVV

SEQ ID NO: 93999 - protein, 10 aa, synthetic construct
QTGRGDRGVV

SEQ ID NO: 94000 - protein, 10 aa, synthetic construct
QTGRGDRSQT

SEQ ID NO: 94001 - protein, 10 aa, synthetic construct
QTARGDRGQI

SEQ ID NO: 94002 - protein, 10 aa, synthetic construct
QTARGDRQGI

SEQ ID NO: 94003 - protein, 10 aa, synthetic construct
SAARGDRSQT

SEQ ID NO: 94004 - protein, 10 aa, synthetic construct
QTARGDRSVV

SEQ ID NO: 94005 - protein, 10 aa, synthetic construct
QTARGDRGVV

SEQ ID NO: 94006 - protein, 10 aa, synthetic construct
QTARGDRSQT

SEQ ID NO: 94007 - protein, 10 aa, synthetic construct
QTPRGDRGQI

SEQ ID NO: 94008 - protein, 10 aa, synthetic construct
QTPRGDRQGI

SEQ ID NO: 94009 - protein, 10 aa, synthetic construct
QTPRGDRSVV

SEQ ID NO: 94010 - protein, 10 aa, synthetic construct
QTPRGDRGVV

SEQ ID NO: 94011 - protein, 10 aa, synthetic construct
QTPRGDRSQT

SEQ ID NO: 94012 - protein, 10 aa, synthetic construct
QTRRGDRGQI

SEQ ID NO: 94013 - protein, 10 aa, synthetic construct
QTRRGDRQGI

SEQ ID NO: 94014 - protein, 10 aa, synthetic construct
SAPRGDRGQI

SEQ ID NO: 94015 - protein, 10 aa, synthetic construct
QTRRGDRSVV

SEQ ID NO: 94016 - protein, 10 aa, synthetic construct
QTRRGDRGVV

SEQ ID NO: 94017 - protein, 10 aa, synthetic construct
QTRRGDRSQT

SEQ ID NO: 94018 - protein, 10 aa, synthetic construct
QQGRGDRGQI

SEQ ID NO: 94019 - protein, 10 aa, synthetic construct
QQGRGDRQGI

SEQ ID NO: 94020 - protein, 10 aa, synthetic construct
QQGRGDRSVV

SEQ ID NO: 94021 - protein, 10 aa, synthetic construct
QQGRGDRGVV

SEQ ID NO: 94022 - protein, 10 aa, synthetic construct
QQGRGDRSQT

SEQ ID NO: 94023 - protein, 10 aa, synthetic construct
QQARGDRGQI

SEQ ID NO: 94024 - protein, 10 aa, synthetic construct
QQARGDRQGI

SEQ ID NO: 94025 - protein, 10 aa, synthetic construct
SAPRGDRQGI

SEQ ID NO: 94026 - protein, 10 aa, synthetic construct
QQARGDRSVV

SEQ ID NO: 94027 - protein, 10 aa, synthetic construct
QQARGDRGVV

SEQ ID NO: 94028 - protein, 10 aa, synthetic construct
QQARGDRSQT

SEQ ID NO: 94029 - protein, 10 aa, synthetic construct
QQPRGDRGQI

SEQ ID NO: 94030 - protein, 10 aa, synthetic construct
QQPRGDRQGI

SEQ ID NO: 94031 - protein, 10 aa, synthetic construct
QQPRGDRSVV

SEQ ID NO: 94032 - protein, 10 aa, synthetic construct
QQPRGDRGVV

SEQ ID NO: 94033 - protein, 10 aa, synthetic construct
QQPRGDRSQT

SEQ ID NO: 94034 - protein, 10 aa, synthetic construct
QQRRGDRGQI

SEQ ID NO: 94035 - protein, 10 aa, synthetic construct
QQRRGDRQGI

SEQ ID NO: 94036 - protein, 10 aa, synthetic construct
EKKRGDRGVV

SEQ ID NO: 94037 - protein, 10 aa, synthetic construct
SAPRGDRSVV

SEQ ID NO: 94038 - protein, 10 aa, synthetic construct
QQRRGDRSVV

SEQ ID NO: 94039 - protein, 10 aa, synthetic construct
QQRRGDRGVV

SEQ ID NO: 94040 - protein, 10 aa, synthetic construct
QQRRGDRSQT

SEQ ID NO: 94041 - protein, 10 aa, synthetic construct
QDGRGDRGQI

SEQ ID NO: 94042 - protein, 10 aa, synthetic construct
QDGRGDRQGI

SEQ ID NO: 94043 - protein, 10 aa, synthetic construct
QDGRGDRSVV

SEQ ID NO: 94044 - protein, 10 aa, synthetic construct
QDGRGDRGVV

SEQ ID NO: 94045 - protein, 10 aa, synthetic construct
QDGRGDRSQT

SEQ ID NO: 94046 - protein, 10 aa, synthetic construct
QDARGDRGQI

SEQ ID NO: 94047 - protein, 10 aa, synthetic construct
QDARGDRQGI

SEQ ID NO: 94048 - protein, 10 aa, synthetic construct
SAPRGDRGVV

SEQ ID NO: 94049 - protein, 10 aa, synthetic construct
QDARGDRSVV

SEQ ID NO: 94050 - protein, 10 aa, synthetic construct
QDARGDRGVV

SEQ ID NO: 94051 - protein, 10 aa, synthetic construct
QDARGDRSQT

SEQ ID NO: 94052 - protein, 10 aa, synthetic construct
QDPRGDRGQI

SEQ ID NO: 94053 - protein, 10 aa, synthetic construct
QDPRGDRQGI

SEQ ID NO: 94054 - protein, 10 aa, synthetic construct
QDPRGDRSVV

SEQ ID NO: 94055 - protein, 10 aa, synthetic construct
QDPRGDRGVV

SEQ ID NO: 94056 - protein, 10 aa, synthetic construct
QDPRGDRSQT

SEQ ID NO: 94057 - protein, 10 aa, synthetic construct
QDRRGDRGQI

SEQ ID NO: 94058 - protein, 10 aa, synthetic construct
QDRRGDRQGI

SEQ ID NO: 94059 - protein, 10 aa, synthetic construct
SAPRGDRSQT

SEQ ID NO: 94060 - protein, 10 aa, synthetic construct
QDRRGDRSVV

SEQ ID NO: 94061 - protein, 10 aa, synthetic construct
QDRRGDRGVV

SEQ ID NO: 94062 - protein, 10 aa, synthetic construct
QDRRGDRSQT

SEQ ID NO: 94063 - protein, 10 aa, synthetic construct
QEGRGDRGQI

SEQ ID NO: 94064 - protein, 10 aa, synthetic construct
QEGRGDRQGI

SEQ ID NO: 94065 - protein, 10 aa, synthetic construct
QEGRGDRSVV

SEQ ID NO: 94066 - protein, 10 aa, synthetic construct
QEGRGDRGVV

SEQ ID NO: 94067 - protein, 10 aa, synthetic construct
QEGRGDRSQT

SEQ ID NO: 94068 - protein, 10 aa, synthetic construct
QEARGDRGQI

SEQ ID NO: 94069 - protein, 10 aa, synthetic construct
QEARGDRQGI

SEQ ID NO: 94070 - protein, 10 aa, synthetic construct
SARRGDRGQI

SEQ ID NO: 94071 - protein, 10 aa, synthetic construct
QEARGDRSVV

SEQ ID NO: 94072 - protein, 10 aa, synthetic construct
QEARGDRGVV

SEQ ID NO: 94073 - protein, 10 aa, synthetic construct
QEARGDRSQT

SEQ ID NO: 94074 - protein, 10 aa, synthetic construct
QEPRGDRGQI

SEQ ID NO: 94075 - protein, 10 aa, synthetic construct
QEPRGDRQGI

SEQ ID NO: 94076 - protein, 10 aa, synthetic construct
QEPRGDRSVV

SEQ ID NO: 94077 - protein, 10 aa, synthetic construct
QEPRGDRGVV

SEQ ID NO: 94078 - protein, 10 aa, synthetic construct
QEPRGDRSQT

SEQ ID NO: 94079 - protein, 10 aa, synthetic construct
QERRGDRGQI

SEQ ID NO: 94080 - protein, 10 aa, synthetic construct
QERRGDRQGI

SEQ ID NO: 94081 - protein, 10 aa, synthetic construct
SARRGDRQGI

SEQ ID NO: 94082 - protein, 10 aa, synthetic construct
QERRGDRSVV

SEQ ID NO: 94083 - protein, 10 aa, synthetic construct
QERRGDRGVV

SEQ ID NO: 94084 - protein, 10 aa, synthetic construct
QERRGDRSQT

SEQ ID NO: 94085 - protein, 10 aa, synthetic construct
SGGRGDHVNL

SEQ ID NO: 94086 - protein, 10 aa, synthetic construct
SGGRGDRDYL

SEQ ID NO: 94087 - protein, 10 aa, synthetic construct
SGGRGDYSSV

SEQ ID NO: 94088 - protein, 10 aa, synthetic construct
SGGRGDLTVT

SEQ ID NO: 94089 - protein, 10 aa, synthetic construct
SGGRGDLIGR

SEQ ID NO: 94090 - protein, 10 aa, synthetic construct
SGARGDHVNL

SEQ ID NO: 94091 - protein, 10 aa, synthetic construct
SGARGDRDYL

SEQ ID NO: 94092 - protein, 10 aa, synthetic construct
SARRGDRSVV

SEQ ID NO: 94093 - protein, 10 aa, synthetic construct
SGARGDYSSV

SEQ ID NO: 94094 - protein, 10 aa, synthetic construct
SGARGDLTVT

SEQ ID NO: 94095 - protein, 10 aa, synthetic construct
SGARGDLIGR

SEQ ID NO: 94096 - protein, 10 aa, synthetic construct
SGVRGDHGVL

SEQ ID NO: 94097 - protein, 10 aa, synthetic construct
SGVRGDYVGL

SEQ ID NO: 94098 - protein, 10 aa, synthetic construct
SGVRGDQSTL

SEQ ID NO: 94099 - protein, 10 aa, synthetic construct
SGVRGDLLLS

SEQ ID NO: 94100 - protein, 10 aa, synthetic construct
SGPRGDHVNL

SEQ ID NO: 94101 - protein, 10 aa, synthetic construct
SGPRGDRDYL

SEQ ID NO: 94102 - protein, 10 aa, synthetic construct
SGPRGDYSSV

SEQ ID NO: 94103 - protein, 10 aa, synthetic construct
SARRGDRGVV

SEQ ID NO: 94104 - protein, 10 aa, synthetic construct
SGPRGDLTVT

SEQ ID NO: 94105 - protein, 10 aa, synthetic construct
SGPRGDLIGR

SEQ ID NO: 94106 - protein, 10 aa, synthetic construct
SGLRGDHGVL

SEQ ID NO: 94107 - protein, 10 aa, synthetic construct
SGLRGDYVGL

SEQ ID NO: 94108 - protein, 10 aa, synthetic construct
SGLRGDQSTL

SEQ ID NO: 94109 - protein, 10 aa, synthetic construct
SGLRGDLLLS

SEQ ID NO: 94110 - protein, 10 aa, synthetic construct
SGIRGDRGQI

SEQ ID NO: 94111 - protein, 10 aa, synthetic construct
SGIRGDRQGI

SEQ ID NO: 94112 - protein, 10 aa, synthetic construct
SGIRGDRSVV

SEQ ID NO: 94113 - protein, 10 aa, synthetic construct
SGIRGDRGVV

SEQ ID NO: 94114 - protein, 10 aa, synthetic construct
SARRGDRSQT

SEQ ID NO: 94115 - protein, 10 aa, synthetic construct
SGIRGDRSQT

SEQ ID NO: 94116 - protein, 10 aa, synthetic construct
SGMRGDRGQI

SEQ ID NO: 94117 - protein, 10 aa, synthetic construct
SGMRGDRQGI

SEQ ID NO: 94118 - protein, 10 aa, synthetic construct
SGMRGDRSVV

SEQ ID NO: 94119 - protein, 10 aa, synthetic construct
SGMRGDRGVV

SEQ ID NO: 94120 - protein, 10 aa, synthetic construct
SGMRGDRSQT

SEQ ID NO: 94121 - protein, 10 aa, synthetic construct
SGWRGDHGVL

SEQ ID NO: 94122 - protein, 10 aa, synthetic construct
SGWRGDYVGL

SEQ ID NO: 94123 - protein, 10 aa, synthetic construct
SGWRGDQSTL

SEQ ID NO: 94124 - protein, 10 aa, synthetic construct
SGWRGDLLLS

SEQ ID NO: 94125 - protein, 10 aa, synthetic construct
SVGRGDRGQI

SEQ ID NO: 94126 - protein, 10 aa, synthetic construct
SGFRGDRGQI

SEQ ID NO: 94127 - protein, 10 aa, synthetic construct
SGFRGDRQGI

SEQ ID NO: 94128 - protein, 10 aa, synthetic construct
SGFRGDRSVV

SEQ ID NO: 94129 - protein, 10 aa, synthetic construct
SGFRGDRGVV

SEQ ID NO: 94130 - protein, 10 aa, synthetic construct
SGFRGDRSQT

SEQ ID NO: 94131 - protein, 10 aa, synthetic construct
SGKRGDRGQI

SEQ ID NO: 94132 - protein, 10 aa, synthetic construct
SGKRGDRQGI

SEQ ID NO: 94133 - protein, 10 aa, synthetic construct
SGKRGDRSVV

SEQ ID NO: 94134 - protein, 10 aa, synthetic construct
SGKRGDRGVV

SEQ ID NO: 94135 - protein, 10 aa, synthetic construct
SGKRGDRSQT

SEQ ID NO: 94136 - protein, 10 aa, synthetic construct
SVGRGDRQGI

SEQ ID NO: 94137 - protein, 10 aa, synthetic construct
SGRRGDHVNL

SEQ ID NO: 94138 - protein, 10 aa, synthetic construct
SGRRGDRDYL

SEQ ID NO: 94139 - protein, 10 aa, synthetic construct
SGRRGDYSSV

SEQ ID NO: 94140 - protein, 10 aa, synthetic construct
SGRRGDLTVT

SEQ ID NO: 94141 - protein, 10 aa, synthetic construct
SGRRGDLIGR

SEQ ID NO: 94142 - protein, 10 aa, synthetic construct
SGHRGDHGVL

SEQ ID NO: 94143 - protein, 10 aa, synthetic construct
SGHRGDYVGL

SEQ ID NO: 94144 - protein, 10 aa, synthetic construct
SGHRGDQSTL

SEQ ID NO: 94145 - protein, 10 aa, synthetic construct
SGHRGDLLLS

SEQ ID NO: 94146 - protein, 10 aa, synthetic construct
SGSRGDHGVL

SEQ ID NO: 94147 - protein, 10 aa, synthetic construct
EKKRGDYVGL

SEQ ID NO: 94148 - protein, 10 aa, synthetic construct
SVGRGDRSVV

SEQ ID NO: 94149 - protein, 10 aa, synthetic construct
SGSRGDYVGL

SEQ ID NO: 94150 - protein, 10 aa, synthetic construct
SGSRGDQSTL

SEQ ID NO: 94151 - protein, 10 aa, synthetic construct
SGSRGDLLLS

SEQ ID NO: 94152 - protein, 10 aa, synthetic construct
SGTRGDHGVL

SEQ ID NO: 94153 - protein, 10 aa, synthetic construct
SGTRGDYVGL

SEQ ID NO: 94154 - protein, 10 aa, synthetic construct
SGTRGDQSTL

SEQ ID NO: 94155 - protein, 10 aa, synthetic construct
SGTRGDLLLS

SEQ ID NO: 94156 - protein, 10 aa, synthetic construct
SGYRGDRGQI

SEQ ID NO: 94157 - protein, 10 aa, synthetic construct
SGYRGDRQGI

SEQ ID NO: 94158 - protein, 10 aa, synthetic construct
SGYRGDRSVV

SEQ ID NO: 94159 - protein, 10 aa, synthetic construct
SVGRGDRGVV

SEQ ID NO: 94160 - protein, 10 aa, synthetic construct
SGYRGDRGVV

SEQ ID NO: 94161 - protein, 10 aa, synthetic construct
SGYRGDRSQT

SEQ ID NO: 94162 - protein, 10 aa, synthetic construct
SGNRGDRGQI

SEQ ID NO: 94163 - protein, 10 aa, synthetic construct
SGNRGDRQGI

SEQ ID NO: 94164 - protein, 10 aa, synthetic construct
SGNRGDRSVV

SEQ ID NO: 94165 - protein, 10 aa, synthetic construct
SGNRGDRGVV

SEQ ID NO: 94166 - protein, 10 aa, synthetic construct
SGNRGDRSQT

SEQ ID NO: 94167 - protein, 10 aa, synthetic construct
SGQRGDHGVL

SEQ ID NO: 94168 - protein, 10 aa, synthetic construct
SGQRGDYVGL

SEQ ID NO: 94169 - protein, 10 aa, synthetic construct
SGQRGDQSTL

SEQ ID NO: 94170 - protein, 10 aa, synthetic construct
SVGRGDRSQT

SEQ ID NO: 94171 - protein, 10 aa, synthetic construct
SGQRGDLLLS

SEQ ID NO: 94172 - protein, 10 aa, synthetic construct
SGDRGDHGVL

SEQ ID NO: 94173 - protein, 10 aa, synthetic construct
SGDRGDYVGL

SEQ ID NO: 94174 - protein, 10 aa, synthetic construct
SGDRGDQSTL

SEQ ID NO: 94175 - protein, 10 aa, synthetic construct
SGDRGDLLLS

SEQ ID NO: 94176 - protein, 10 aa, synthetic construct
SGERGDHGVL

SEQ ID NO: 94177 - protein, 10 aa, synthetic construct
SGERGDYVGL

SEQ ID NO: 94178 - protein, 10 aa, synthetic construct
SGERGDQSTL

SEQ ID NO: 94179 - protein, 10 aa, synthetic construct
SGERGDLLLS

SEQ ID NO: 94180 - protein, 10 aa, synthetic construct
SAGRGDHVNL

SEQ ID NO: 94181 - protein, 10 aa, synthetic construct
SVARGDRGQI

SEQ ID NO: 94182 - protein, 10 aa, synthetic construct
SAGRGDRDYL

SEQ ID NO: 94183 - protein, 10 aa, synthetic construct
SAGRGDYSSV

SEQ ID NO: 94184 - protein, 10 aa, synthetic construct
SAGRGDLTVT

SEQ ID NO: 94185 - protein, 10 aa, synthetic construct
SAGRGDLIGR

SEQ ID NO: 94186 - protein, 10 aa, synthetic construct
SAARGDHVNL

SEQ ID NO: 94187 - protein, 10 aa, synthetic construct
SAARGDRDYL

SEQ ID NO: 94188 - protein, 10 aa, synthetic construct
SAARGDYSSV

SEQ ID NO: 94189 - protein, 10 aa, synthetic construct
SAARGDLTVT

SEQ ID NO: 94190 - protein, 10 aa, synthetic construct
SAARGDLIGR

SEQ ID NO: 94191 - protein, 10 aa, synthetic construct
SAVRGDHGVL

SEQ ID NO: 94192 - protein, 10 aa, synthetic construct
SVARGDRQGI

SEQ ID NO: 94193 - protein, 10 aa, synthetic construct
SAVRGDYVGL

SEQ ID NO: 94194 - protein, 10 aa, synthetic construct
SAVRGDQSTL

SEQ ID NO: 94195 - protein, 10 aa, synthetic construct
SAVRGDLLLS

SEQ ID NO: 94196 - protein, 10 aa, synthetic construct
SAPRGDHVNL

SEQ ID NO: 94197 - protein, 10 aa, synthetic construct
SAPRGDRDYL

SEQ ID NO: 94198 - protein, 10 aa, synthetic construct
SAPRGDYSSV

SEQ ID NO: 94199 - protein, 10 aa, synthetic construct
SAPRGDLTVT

SEQ ID NO: 94200 - protein, 10 aa, synthetic construct
SAPRGDLIGR

SEQ ID NO: 94201 - protein, 10 aa, synthetic construct
SALRGDHGVL

SEQ ID NO: 94202 - protein, 10 aa, synthetic construct
SALRGDYVGL

SEQ ID NO: 94203 - protein, 10 aa, synthetic construct
SVARGDRSVV

SEQ ID NO: 94204 - protein, 10 aa, synthetic construct
SALRGDQSTL

SEQ ID NO: 94205 - protein, 10 aa, synthetic construct
SALRGDLLLS

SEQ ID NO: 94206 - protein, 10 aa, synthetic construct
SAIRGDRGQI

SEQ ID NO: 94207 - protein, 10 aa, synthetic construct
SAIRGDRQGI

SEQ ID NO: 94208 - protein, 10 aa, synthetic construct
SAIRGDRSVV

SEQ ID NO: 94209 - protein, 10 aa, synthetic construct
SAIRGDRGVV

SEQ ID NO: 94210 - protein, 10 aa, synthetic construct
SAIRGDRSQT

SEQ ID NO: 94211 - protein, 10 aa, synthetic construct
SAMRGDRGQI

SEQ ID NO: 94212 - protein, 10 aa, synthetic construct
SAMRGDRQGI

SEQ ID NO: 94213 - protein, 10 aa, synthetic construct
SAMRGDRSVV

SEQ ID NO: 94214 - protein, 10 aa, synthetic construct
SVARGDRGVV

SEQ ID NO: 94215 - protein, 10 aa, synthetic construct
SAMRGDRGVV

SEQ ID NO: 94216 - protein, 10 aa, synthetic construct
SAMRGDRSQT

SEQ ID NO: 94217 - protein, 10 aa, synthetic construct
SAWRGDHGVL

SEQ ID NO: 94218 - protein, 10 aa, synthetic construct
SAWRGDYVGL

SEQ ID NO: 94219 - protein, 10 aa, synthetic construct
SAWRGDQSTL

SEQ ID NO: 94220 - protein, 10 aa, synthetic construct
SAWRGDLLLS

SEQ ID NO: 94221 - protein, 10 aa, synthetic construct
SAFRGDRGQI

SEQ ID NO: 94222 - protein, 10 aa, synthetic construct
SAFRGDRQGI

SEQ ID NO: 94223 - protein, 10 aa, synthetic construct
SAFRGDRSVV

SEQ ID NO: 94224 - protein, 10 aa, synthetic construct
SAFRGDRGVV

SEQ ID NO: 94225 - protein, 10 aa, synthetic construct
SVARGDRSQT

SEQ ID NO: 94226 - protein, 10 aa, synthetic construct
SAFRGDRSQT

SEQ ID NO: 94227 - protein, 10 aa, synthetic construct
SAKRGDRGQI

SEQ ID NO: 94228 - protein, 10 aa, synthetic construct
SAKRGDRQGI

SEQ ID NO: 94229 - protein, 10 aa, synthetic construct
SAKRGDRSVV

SEQ ID NO: 94230 - protein, 10 aa, synthetic construct
SAKRGDRGVV

SEQ ID NO: 94231 - protein, 10 aa, synthetic construct
SAKRGDRSQT

SEQ ID NO: 94232 - protein, 10 aa, synthetic construct
SARRGDHVNL

SEQ ID NO: 94233 - protein, 10 aa, synthetic construct
SARRGDRDYL

SEQ ID NO: 94234 - protein, 10 aa, synthetic construct
SARRGDYSSV

SEQ ID NO: 94235 - protein, 10 aa, synthetic construct
SARRGDLTVT

SEQ ID NO: 94236 - protein, 10 aa, synthetic construct
SVPRGDRGQI

SEQ ID NO: 94237 - protein, 10 aa, synthetic construct
SARRGDLIGR

SEQ ID NO: 94238 - protein, 10 aa, synthetic construct
SAHRGDHGVL

SEQ ID NO: 94239 - protein, 10 aa, synthetic construct
SAHRGDYVGL

SEQ ID NO: 94240 - protein, 10 aa, synthetic construct
SAHRGDQSTL

SEQ ID NO: 94241 - protein, 10 aa, synthetic construct
SAHRGDLLLS

SEQ ID NO: 94242 - protein, 10 aa, synthetic construct
SASRGDHGVL

SEQ ID NO: 94243 - protein, 10 aa, synthetic construct
SASRGDYVGL

SEQ ID NO: 94244 - protein, 10 aa, synthetic construct
SASRGDQSTL

SEQ ID NO: 94245 - protein, 10 aa, synthetic construct
SASRGDLLLS

SEQ ID NO: 94246 - protein, 10 aa, synthetic construct
SATRGDHGVL

SEQ ID NO: 94247 - protein, 10 aa, synthetic construct
SVPRGDRQGI

SEQ ID NO: 94248 - protein, 10 aa, synthetic construct
SATRGDYVGL

SEQ ID NO: 94249 - protein, 10 aa, synthetic construct
SATRGDQSTL

SEQ ID NO: 94250 - protein, 10 aa, synthetic construct
SATRGDLLLS

SEQ ID NO: 94251 - protein, 10 aa, synthetic construct
SAYRGDRGQI

SEQ ID NO: 94252 - protein, 10 aa, synthetic construct
SAYRGDRQGI

SEQ ID NO: 94253 - protein, 10 aa, synthetic construct
SAYRGDRSVV

SEQ ID NO: 94254 - protein, 10 aa, synthetic construct
SAYRGDRGVV

SEQ ID NO: 94255 - protein, 10 aa, synthetic construct
SAYRGDRSQT

SEQ ID NO: 94256 - protein, 10 aa, synthetic construct
SANRGDRGQI

SEQ ID NO: 94257 - protein, 10 aa, synthetic construct
SANRGDRQGI

SEQ ID NO: 94258 - protein, 10 aa, synthetic construct
EKKRGDLIGR

SEQ ID NO: 94259 - protein, 10 aa, synthetic construct
SVPRGDRSVV

SEQ ID NO: 94260 - protein, 10 aa, synthetic construct
SANRGDRSVV

SEQ ID NO: 94261 - protein, 10 aa, synthetic construct
SANRGDRGVV

SEQ ID NO: 94262 - protein, 10 aa, synthetic construct
SANRGDRSQT

SEQ ID NO: 94263 - protein, 10 aa, synthetic construct
SADRGDHGVL

SEQ ID NO: 94264 - protein, 10 aa, synthetic construct
SADRGDYVGL

SEQ ID NO: 94265 - protein, 10 aa, synthetic construct
SADRGDQSTL

SEQ ID NO: 94266 - protein, 10 aa, synthetic construct
SADRGDLLLS

SEQ ID NO: 94267 - protein, 10 aa, synthetic construct
SAERGDHGVL

SEQ ID NO: 94268 - protein, 10 aa, synthetic construct
SAERGDYVGL

SEQ ID NO: 94269 - protein, 10 aa, synthetic construct
SAERGDQSTL

SEQ ID NO: 94270 - protein, 10 aa, synthetic construct
SVPRGDRGVV

SEQ ID NO: 94271 - protein, 10 aa, synthetic construct
SAERGDLLLS

SEQ ID NO: 94272 - protein, 10 aa, synthetic construct
SVGRGDHVNL

SEQ ID NO: 94273 - protein, 10 aa, synthetic construct
SVGRGDRDYL

SEQ ID NO: 94274 - protein, 10 aa, synthetic construct
SVGRGDYSSV

SEQ ID NO: 94275 - protein, 10 aa, synthetic construct
SVGRGDLTVT

SEQ ID NO: 94276 - protein, 10 aa, synthetic construct
SVGRGDLIGR

SEQ ID NO: 94277 - protein, 10 aa, synthetic construct
SVARGDHVNL

SEQ ID NO: 94278 - protein, 10 aa, synthetic construct
SVARGDRDYL

SEQ ID NO: 94279 - protein, 10 aa, synthetic construct
SVARGDYSSV

SEQ ID NO: 94280 - protein, 10 aa, synthetic construct
SVARGDLTVT

SEQ ID NO: 94281 - protein, 10 aa, synthetic construct
SVPRGDRSQT

SEQ ID NO: 94282 - protein, 10 aa, synthetic construct
SVARGDLIGR

SEQ ID NO: 94283 - protein, 10 aa, synthetic construct
SVVRGDHGVL

SEQ ID NO: 94284 - protein, 10 aa, synthetic construct
SVVRGDHVNL

SEQ ID NO: 94285 - protein, 10 aa, synthetic construct
SVVRGDYVGL

SEQ ID NO: 94286 - protein, 10 aa, synthetic construct
SVVRGDYSSV

SEQ ID NO: 94287 - protein, 10 aa, synthetic construct
SVVRGDQSTL

SEQ ID NO: 94288 - protein, 10 aa, synthetic construct
SVVRGDLLLS

SEQ ID NO: 94289 - protein, 10 aa, synthetic construct
SVPRGDHVNL

SEQ ID NO: 94290 - protein, 10 aa, synthetic construct
SVPRGDRDYL

SEQ ID NO: 94291 - protein, 10 aa, synthetic construct
SVPRGDYSSV

SEQ ID NO: 94292 - protein, 10 aa, synthetic construct
SVRRGDRGQI

SEQ ID NO: 94293 - protein, 10 aa, synthetic construct
SVPRGDLTVT

SEQ ID NO: 94294 - protein, 10 aa, synthetic construct
SVPRGDLIGR

SEQ ID NO: 94295 - protein, 10 aa, synthetic construct
SVLRGDHGVL

SEQ ID NO: 94296 - protein, 10 aa, synthetic construct
SVLRGDHVNL

SEQ ID NO: 94297 - protein, 10 aa, synthetic construct
SVLRGDYVGL

SEQ ID NO: 94298 - protein, 10 aa, synthetic construct
SVLRGDYSSV

SEQ ID NO: 94299 - protein, 10 aa, synthetic construct
SVLRGDQSTL

SEQ ID NO: 94300 - protein, 10 aa, synthetic construct
SVLRGDLLLS

SEQ ID NO: 94301 - protein, 10 aa, synthetic construct
SVIRGDRGQI

SEQ ID NO: 94302 - protein, 10 aa, synthetic construct
SVIRGDRQGI

SEQ ID NO: 94303 - protein, 10 aa, synthetic construct
SVRRGDRQGI

SEQ ID NO: 94304 - protein, 10 aa, synthetic construct
SVIRGDRSVV

SEQ ID NO: 94305 - protein, 10 aa, synthetic construct
SVIRGDRGVV

SEQ ID NO: 94306 - protein, 10 aa, synthetic construct
SVIRGDYVGL

SEQ ID NO: 94307 - protein, 10 aa, synthetic construct
SVIRGDQSTL

SEQ ID NO: 94308 - protein, 10 aa, synthetic construct
SVIRGDRSQT

SEQ ID NO: 94309 - protein, 10 aa, synthetic construct
SVIRGDLLLS

SEQ ID NO: 94310 - protein, 10 aa, synthetic construct
SVMRGDRGQI

SEQ ID NO: 94311 - protein, 10 aa, synthetic construct
SVMRGDRQGI

SEQ ID NO: 94312 - protein, 10 aa, synthetic construct
SVMRGDRSVV

SEQ ID NO: 94313 - protein, 10 aa, synthetic construct
SVMRGDRGVV

SEQ ID NO: 94314 - protein, 10 aa, synthetic construct
SVRRGDRSVV

SEQ ID NO: 94315 - protein, 10 aa, synthetic construct
SVMRGDYVGL

SEQ ID NO: 94316 - protein, 10 aa, synthetic construct
SVMRGDQSTL

SEQ ID NO: 94317 - protein, 10 aa, synthetic construct
SVMRGDRSQT

SEQ ID NO: 94318 - protein, 10 aa, synthetic construct
SVMRGDLLLS

SEQ ID NO: 94319 - protein, 10 aa, synthetic construct
SVWRGDHGVL

SEQ ID NO: 94320 - protein, 10 aa, synthetic construct
SVWRGDHVNL

SEQ ID NO: 94321 - protein, 10 aa, synthetic construct
SVWRGDYVGL

SEQ ID NO: 94322 - protein, 10 aa, synthetic construct
SVWRGDYSSV

SEQ ID NO: 94323 - protein, 10 aa, synthetic construct
SVWRGDQSTL

SEQ ID NO: 94324 - protein, 10 aa, synthetic construct
SVWRGDLLLS

SEQ ID NO: 94325 - protein, 10 aa, synthetic construct
SVRRGDRGVV

SEQ ID NO: 94326 - protein, 10 aa, synthetic construct
SVFRGDRGQI

SEQ ID NO: 94327 - protein, 10 aa, synthetic construct
SVFRGDRQGI

SEQ ID NO: 94328 - protein, 10 aa, synthetic construct
SVFRGDRSVV

SEQ ID NO: 94329 - protein, 10 aa, synthetic construct
SVFRGDRGVV

SEQ ID NO: 94330 - protein, 10 aa, synthetic construct
SVFRGDYVGL

SEQ ID NO: 94331 - protein, 10 aa, synthetic construct
SVFRGDQSTL

SEQ ID NO: 94332 - protein, 10 aa, synthetic construct
SVFRGDRSQT

SEQ ID NO: 94333 - protein, 10 aa, synthetic construct
SVFRGDLLLS

SEQ ID NO: 94334 - protein, 10 aa, synthetic construct
SVKRGDRGQI

SEQ ID NO: 94335 - protein, 10 aa, synthetic construct
SVKRGDRQGI

SEQ ID NO: 94336 - protein, 10 aa, synthetic construct
SVRRGDRSQT

SEQ ID NO: 94337 - protein, 10 aa, synthetic construct
SVKRGDRSVV

SEQ ID NO: 94338 - protein, 10 aa, synthetic construct
SVKRGDRGVV

SEQ ID NO: 94339 - protein, 10 aa, synthetic construct
SVKRGDYVGL

SEQ ID NO: 94340 - protein, 10 aa, synthetic construct
SVKRGDQSTL

SEQ ID NO: 94341 - protein, 10 aa, synthetic construct
SVKRGDRSQT

SEQ ID NO: 94342 - protein, 10 aa, synthetic construct
SVKRGDLLLS

SEQ ID NO: 94343 - protein, 10 aa, synthetic construct
SVRRGDHVNL

SEQ ID NO: 94344 - protein, 10 aa, synthetic construct
SVRRGDRDYL

SEQ ID NO: 94345 - protein, 10 aa, synthetic construct
SVRRGDYSSV

SEQ ID NO: 94346 - protein, 10 aa, synthetic construct
SVRRGDLTVT

SEQ ID NO: 94347 - protein, 10 aa, synthetic construct
SPGRGDRGQI

SEQ ID NO: 94348 - protein, 10 aa, synthetic construct
SVRRGDLIGR

SEQ ID NO: 94349 - protein, 10 aa, synthetic construct
SVHRGDHGVL

SEQ ID NO: 94350 - protein, 10 aa, synthetic construct
SVHRGDHVNL

SEQ ID NO: 94351 - protein, 10 aa, synthetic construct
SVHRGDYVGL

SEQ ID NO: 94352 - protein, 10 aa, synthetic construct
SVHRGDYSSV

SEQ ID NO: 94353 - protein, 10 aa, synthetic construct
SVHRGDQSTL

SEQ ID NO: 94354 - protein, 10 aa, synthetic construct
SVHRGDLLLS

SEQ ID NO: 94355 - protein, 10 aa, synthetic construct
SVSRGDHGVL

SEQ ID NO: 94356 - protein, 10 aa, synthetic construct
SVSRGDHVNL

SEQ ID NO: 94357 - protein, 10 aa, synthetic construct
SVSRGDYVGL

SEQ ID NO: 94358 - protein, 10 aa, synthetic construct
SPGRGDRQGI

SEQ ID NO: 94359 - protein, 10 aa, synthetic construct
SVSRGDYSSV

SEQ ID NO: 94360 - protein, 10 aa, synthetic construct
SVSRGDQSTL

SEQ ID NO: 94361 - protein, 10 aa, synthetic construct
SVSRGDLLLS

SEQ ID NO: 94362 - protein, 10 aa, synthetic construct
SVTRGDHGVL

SEQ ID NO: 94363 - protein, 10 aa, synthetic construct
SVTRGDHVNL

SEQ ID NO: 94364 - protein, 10 aa, synthetic construct
SVTRGDYVGL

SEQ ID NO: 94365 - protein, 10 aa, synthetic construct
SVTRGDYSSV

SEQ ID NO: 94366 - protein, 10 aa, synthetic construct
SVTRGDQSTL

SEQ ID NO: 94367 - protein, 10 aa, synthetic construct
SVTRGDLLLS

SEQ ID NO: 94368 - protein, 10 aa, synthetic construct
SVYRGDRGQI

SEQ ID NO: 94369 - protein, 10 aa, synthetic construct
EKKRGDQSTL

SEQ ID NO: 94370 - protein, 10 aa, synthetic construct
SPGRGDRSVV

SEQ ID NO: 94371 - protein, 10 aa, synthetic construct
SVYRGDRQGI

SEQ ID NO: 94372 - protein, 10 aa, synthetic construct
SVYRGDRSVV

SEQ ID NO: 94373 - protein, 10 aa, synthetic construct
SVYRGDRGVV

SEQ ID NO: 94374 - protein, 10 aa, synthetic construct
SVYRGDYVGL

SEQ ID NO: 94375 - protein, 10 aa, synthetic construct
SVYRGDQSTL

SEQ ID NO: 94376 - protein, 10 aa, synthetic construct
SVYRGDRSQT

SEQ ID NO: 94377 - protein, 10 aa, synthetic construct
SVYRGDLLLS

SEQ ID NO: 94378 - protein, 10 aa, synthetic construct
SVNRGDRGQI

SEQ ID NO: 94379 - protein, 10 aa, synthetic construct
SVNRGDRQGI

SEQ ID NO: 94380 - protein, 10 aa, synthetic construct
SVNRGDRSVV

SEQ ID NO: 94381 - protein, 10 aa, synthetic construct
SPGRGDRGVV

SEQ ID NO: 94382 - protein, 10 aa, synthetic construct
SVNRGDRGVV

SEQ ID NO: 94383 - protein, 10 aa, synthetic construct
SVNRGDYVGL

SEQ ID NO: 94384 - protein, 10 aa, synthetic construct
SVNRGDQSTL

SEQ ID NO: 94385 - protein, 10 aa, synthetic construct
SVNRGDRSQT

SEQ ID NO: 94386 - protein, 10 aa, synthetic construct
SVNRGDLLLS

SEQ ID NO: 94387 - protein, 10 aa, synthetic construct
SVQRGDHGVL

SEQ ID NO: 94388 - protein, 10 aa, synthetic construct
SVQRGDHVNL

SEQ ID NO: 94389 - protein, 10 aa, synthetic construct
SVQRGDYVGL

SEQ ID NO: 94390 - protein, 10 aa, synthetic construct
SVQRGDYSSV

SEQ ID NO: 94391 - protein, 10 aa, synthetic construct
SVQRGDQSTL

SEQ ID NO: 94392 - protein, 10 aa, synthetic construct
SPGRGDRSQT

SEQ ID NO: 94393 - protein, 10 aa, synthetic construct
SVQRGDLLLS

SEQ ID NO: 94394 - protein, 10 aa, synthetic construct
SVDRGDHGVL

SEQ ID NO: 94395 - protein, 10 aa, synthetic construct
SVDRGDHVNL

SEQ ID NO: 94396 - protein, 10 aa, synthetic construct
SVDRGDYVGL

SEQ ID NO: 94397 - protein, 10 aa, synthetic construct
SVDRGDYSSV

SEQ ID NO: 94398 - protein, 10 aa, synthetic construct
SVDRGDQSTL

SEQ ID NO: 94399 - protein, 10 aa, synthetic construct
SVDRGDLLLS

SEQ ID NO: 94400 - protein, 10 aa, synthetic construct
SVERGDHGVL

SEQ ID NO: 94401 - protein, 10 aa, synthetic construct
SVERGDHVNL

SEQ ID NO: 94402 - protein, 10 aa, synthetic construct
SVERGDYVGL

SEQ ID NO: 94403 - protein, 10 aa, synthetic construct
SPARGDRGQI

SEQ ID NO: 94404 - protein, 10 aa, synthetic construct
SVERGDYSSV

SEQ ID NO: 94405 - protein, 10 aa, synthetic construct
SVERGDQSTL

SEQ ID NO: 94406 - protein, 10 aa, synthetic construct
SVERGDLLLS

SEQ ID NO: 94407 - protein, 10 aa, synthetic construct
SPGRGDHVNL

SEQ ID NO: 94408 - protein, 10 aa, synthetic construct
SPGRGDRDYL

SEQ ID NO: 94409 - protein, 10 aa, synthetic construct
SPGRGDYSSV

SEQ ID NO: 94410 - protein, 10 aa, synthetic construct
SPGRGDLTVT

SEQ ID NO: 94411 - protein, 10 aa, synthetic construct
SPGRGDLIGR

SEQ ID NO: 94412 - protein, 10 aa, synthetic construct
SPARGDHVNL

SEQ ID NO: 94413 - protein, 10 aa, synthetic construct
SPARGDRDYL

SEQ ID NO: 94414 - protein, 10 aa, synthetic construct
SPARGDRQGI

SEQ ID NO: 94415 - protein, 10 aa, synthetic construct
SPARGDYSSV

SEQ ID NO: 94416 - protein, 10 aa, synthetic construct
SPARGDLTVT

SEQ ID NO: 94417 - protein, 10 aa, synthetic construct
SPARGDLIGR

SEQ ID NO: 94418 - protein, 10 aa, synthetic construct
SPVRGDHGVL

SEQ ID NO: 94419 - protein, 10 aa, synthetic construct
SPVRGDYVGL

SEQ ID NO: 94420 - protein, 10 aa, synthetic construct
SPVRGDQSTL

SEQ ID NO: 94421 - protein, 10 aa, synthetic construct
SPVRGDLLLS

SEQ ID NO: 94422 - protein, 10 aa, synthetic construct
SPPRGDHVNL

SEQ ID NO: 94423 - protein, 10 aa, synthetic construct
SPPRGDRDYL

SEQ ID NO: 94424 - protein, 10 aa, synthetic construct
SPPRGDYSSV

SEQ ID NO: 94425 - protein, 10 aa, synthetic construct
SPARGDRSVV

SEQ ID NO: 94426 - protein, 10 aa, synthetic construct
SPPRGDLTVT

SEQ ID NO: 94427 - protein, 10 aa, synthetic construct
SPPRGDLIGR

SEQ ID NO: 94428 - protein, 10 aa, synthetic construct
SPLRGDHGVL

SEQ ID NO: 94429 - protein, 10 aa, synthetic construct
SPLRGDYVGL

SEQ ID NO: 94430 - protein, 10 aa, synthetic construct
SPLRGDQSTL

SEQ ID NO: 94431 - protein, 10 aa, synthetic construct
SPLRGDLLLS

SEQ ID NO: 94432 - protein, 10 aa, synthetic construct
SPIRGDRGQI

SEQ ID NO: 94433 - protein, 10 aa, synthetic construct
SPIRGDRQGI

SEQ ID NO: 94434 - protein, 10 aa, synthetic construct
SPIRGDRSVV

SEQ ID NO: 94435 - protein, 10 aa, synthetic construct
SPIRGDRGVV

SEQ ID NO: 94436 - protein, 10 aa, synthetic construct
SPARGDRGVV

SEQ ID NO: 94437 - protein, 10 aa, synthetic construct
SPIRGDRSQT

SEQ ID NO: 94438 - protein, 10 aa, synthetic construct
SPMRGDRGQI

SEQ ID NO: 94439 - protein, 10 aa, synthetic construct
SPMRGDRQGI

SEQ ID NO: 94440 - protein, 10 aa, synthetic construct
SPMRGDRSVV

SEQ ID NO: 94441 - protein, 10 aa, synthetic construct
SPMRGDRGVV

SEQ ID NO: 94442 - protein, 10 aa, synthetic construct
SPMRGDRSQT

SEQ ID NO: 94443 - protein, 10 aa, synthetic construct
SPWRGDHGVL

SEQ ID NO: 94444 - protein, 10 aa, synthetic construct
SPWRGDYVGL

SEQ ID NO: 94445 - protein, 10 aa, synthetic construct
SPWRGDQSTL

SEQ ID NO: 94446 - protein, 10 aa, synthetic construct
SPWRGDLLLS

SEQ ID NO: 94447 - protein, 10 aa, synthetic construct
SPARGDRSQT

SEQ ID NO: 94448 - protein, 10 aa, synthetic construct
SPFRGDRGQI

SEQ ID NO: 94449 - protein, 10 aa, synthetic construct
SPFRGDRQGI

SEQ ID NO: 94450 - protein, 10 aa, synthetic construct
SPFRGDRSVV

SEQ ID NO: 94451 - protein, 10 aa, synthetic construct
SPFRGDRGVV

SEQ ID NO: 94452 - protein, 10 aa, synthetic construct
SPFRGDRSQT

SEQ ID NO: 94453 - protein, 10 aa, synthetic construct
SPKRGDRGQI

SEQ ID NO: 94454 - protein, 10 aa, synthetic construct
SPKRGDRQGI

SEQ ID NO: 94455 - protein, 10 aa, synthetic construct
SPKRGDRSVV

SEQ ID NO: 94456 - protein, 10 aa, synthetic construct
SPKRGDRGVV

SEQ ID NO: 94457 - protein, 10 aa, synthetic construct
SPKRGDRSQT

SEQ ID NO: 94458 - protein, 10 aa, synthetic construct
SPPRGDRGQI

SEQ ID NO: 94459 - protein, 10 aa, synthetic construct
SPRRGDHVNL

SEQ ID NO: 94460 - protein, 10 aa, synthetic construct
SPRRGDRDYL

SEQ ID NO: 94461 - protein, 10 aa, synthetic construct
SPRRGDYSSV

SEQ ID NO: 94462 - protein, 10 aa, synthetic construct
SPRRGDLTVT

SEQ ID NO: 94463 - protein, 10 aa, synthetic construct
SPRRGDLIGR

SEQ ID NO: 94464 - protein, 10 aa, synthetic construct
SPHRGDHGVL

SEQ ID NO: 94465 - protein, 10 aa, synthetic construct
SPHRGDYVGL

SEQ ID NO: 94466 - protein, 10 aa, synthetic construct
SPHRGDQSTL

SEQ ID NO: 94467 - protein, 10 aa, synthetic construct
SPHRGDLLLS

SEQ ID NO: 94468 - protein, 10 aa, synthetic construct
SPSRGDHGVL

SEQ ID NO: 94469 - protein, 10 aa, synthetic construct
SPPRGDRQGI

SEQ ID NO: 94470 - protein, 10 aa, synthetic construct
SPSRGDYVGL

SEQ ID NO: 94471 - protein, 10 aa, synthetic construct
SPSRGDQSTL

SEQ ID NO: 94472 - protein, 10 aa, synthetic construct
SPSRGDLLLS

SEQ ID NO: 94473 - protein, 10 aa, synthetic construct
SPTRGDHGVL

SEQ ID NO: 94474 - protein, 10 aa, synthetic construct
SPTRGDYVGL

SEQ ID NO: 94475 - protein, 10 aa, synthetic construct
SPTRGDQSTL

SEQ ID NO: 94476 - protein, 10 aa, synthetic construct
SPTRGDLLLS

SEQ ID NO: 94477 - protein, 10 aa, synthetic construct
SPYRGDRGQI

SEQ ID NO: 94478 - protein, 10 aa, synthetic construct
SPYRGDRQGI

SEQ ID NO: 94479 - protein, 10 aa, synthetic construct
SPYRGDRSVV

SEQ ID NO: 94480 - protein, 10 aa, synthetic construct
TKKRGDRSQT

SEQ ID NO: 94481 - protein, 10 aa, synthetic construct
EKKRGDLLLS

SEQ ID NO: 94482 - protein, 10 aa, synthetic construct
SPPRGDRSVV

SEQ ID NO: 94483 - protein, 10 aa, synthetic construct
SPYRGDRGVV

SEQ ID NO: 94484 - protein, 10 aa, synthetic construct
SPYRGDRSQT

SEQ ID NO: 94485 - protein, 10 aa, synthetic construct
SPNRGDRGQI

SEQ ID NO: 94486 - protein, 10 aa, synthetic construct
SPNRGDRQGI

SEQ ID NO: 94487 - protein, 10 aa, synthetic construct
SPNRGDRSVV

SEQ ID NO: 94488 - protein, 10 aa, synthetic construct
SPNRGDRGVV

SEQ ID NO: 94489 - protein, 10 aa, synthetic construct
SPNRGDRSQT

SEQ ID NO: 94490 - protein, 10 aa, synthetic construct
SPQRGDHGVL

SEQ ID NO: 94491 - protein, 10 aa, synthetic construct
SPQRGDYVGL

SEQ ID NO: 94492 - protein, 10 aa, synthetic construct
SPQRGDQSTL

SEQ ID NO: 94493 - protein, 10 aa, synthetic construct
SPPRGDRGVV

SEQ ID NO: 94494 - protein, 10 aa, synthetic construct
SPQRGDLLLS

SEQ ID NO: 94495 - protein, 10 aa, synthetic construct
SPDRGDHGVL

SEQ ID NO: 94496 - protein, 10 aa, synthetic construct
SPDRGDYVGL

SEQ ID NO: 94497 - protein, 10 aa, synthetic construct
SPDRGDQSTL

SEQ ID NO: 94498 - protein, 10 aa, synthetic construct
SPDRGDLLLS

SEQ ID NO: 94499 - protein, 10 aa, synthetic construct
SPERGDHGVL

SEQ ID NO: 94500 - protein, 10 aa, synthetic construct
SPERGDYVGL

SEQ ID NO: 94501 - protein, 10 aa, synthetic construct
SPERGDQSTL

SEQ ID NO: 94502 - protein, 10 aa, synthetic construct
SPERGDLLLS

SEQ ID NO: 94503 - protein, 10 aa, synthetic construct
SLGRGDHVNL

SEQ ID NO: 94504 - protein, 10 aa, synthetic construct
SPPRGDRSQT

SEQ ID NO: 94505 - protein, 10 aa, synthetic construct
SLGRGDRDYL

SEQ ID NO: 94506 - protein, 10 aa, synthetic construct
SLGRGDYSSV

SEQ ID NO: 94507 - protein, 10 aa, synthetic construct
SLGRGDLTVT

SEQ ID NO: 94508 - protein, 10 aa, synthetic construct
SLGRGDLIGR

SEQ ID NO: 94509 - protein, 10 aa, synthetic construct
SLARGDHVNL

SEQ ID NO: 94510 - protein, 10 aa, synthetic construct
SLARGDRDYL

SEQ ID NO: 94511 - protein, 10 aa, synthetic construct
SLARGDYSSV

SEQ ID NO: 94512 - protein, 10 aa, synthetic construct
SLARGDLTVT

SEQ ID NO: 94513 - protein, 10 aa, synthetic construct
SLARGDLIGR

SEQ ID NO: 94514 - protein, 10 aa, synthetic construct
SLVRGDHGVL

SEQ ID NO: 94515 - protein, 10 aa, synthetic construct
SPRRGDRGQI

SEQ ID NO: 94516 - protein, 10 aa, synthetic construct
SLVRGDHVNL

SEQ ID NO: 94517 - protein, 10 aa, synthetic construct
SLVRGDYVGL

SEQ ID NO: 94518 - protein, 10 aa, synthetic construct
SLVRGDYSSV

SEQ ID NO: 94519 - protein, 10 aa, synthetic construct
SLVRGDQSTL

SEQ ID NO: 94520 - protein, 10 aa, synthetic construct
SLVRGDLLLS

SEQ ID NO: 94521 - protein, 10 aa, synthetic construct
SLPRGDHVNL

SEQ ID NO: 94522 - protein, 10 aa, synthetic construct
SLPRGDRDYL

SEQ ID NO: 94523 - protein, 10 aa, synthetic construct
SLPRGDYSSV

SEQ ID NO: 94524 - protein, 10 aa, synthetic construct
SLPRGDLTVT

SEQ ID NO: 94525 - protein, 10 aa, synthetic construct
SLPRGDLIGR

SEQ ID NO: 94526 - protein, 10 aa, synthetic construct
SPRRGDRQGI

SEQ ID NO: 94527 - protein, 10 aa, synthetic construct
SLLRGDHGVL

SEQ ID NO: 94528 - protein, 10 aa, synthetic construct
SLLRGDHVNL

SEQ ID NO: 94529 - protein, 10 aa, synthetic construct
SLLRGDYVGL

SEQ ID NO: 94530 - protein, 10 aa, synthetic construct
SLLRGDYSSV

SEQ ID NO: 94531 - protein, 10 aa, synthetic construct
SLLRGDQSTL

SEQ ID NO: 94532 - protein, 10 aa, synthetic construct
SLLRGDLLLS

SEQ ID NO: 94533 - protein, 10 aa, synthetic construct
SLIRGDRGQI

SEQ ID NO: 94534 - protein, 10 aa, synthetic construct
SLIRGDRQGI

SEQ ID NO: 94535 - protein, 10 aa, synthetic construct
SLIRGDRSVV

SEQ ID NO: 94536 - protein, 10 aa, synthetic construct
SLIRGDRGVV

SEQ ID NO: 94537 - protein, 10 aa, synthetic construct
SPRRGDRSVV

SEQ ID NO: 94538 - protein, 10 aa, synthetic construct
SLIRGDYVGL

SEQ ID NO: 94539 - protein, 10 aa, synthetic construct
SLIRGDQSTL

SEQ ID NO: 94540 - protein, 10 aa, synthetic construct
SLIRGDRSQT

SEQ ID NO: 94541 - protein, 10 aa, synthetic construct
SLIRGDLLLS

SEQ ID NO: 94542 - protein, 10 aa, synthetic construct
SLMRGDRGQI

SEQ ID NO: 94543 - protein, 10 aa, synthetic construct
SLMRGDRQGI

SEQ ID NO: 94544 - protein, 10 aa, synthetic construct
SLMRGDRSVV

SEQ ID NO: 94545 - protein, 10 aa, synthetic construct
SLMRGDRGVV

SEQ ID NO: 94546 - protein, 10 aa, synthetic construct
SLMRGDYVGL

SEQ ID NO: 94547 - protein, 10 aa, synthetic construct
SLMRGDQSTL

SEQ ID NO: 94548 - protein, 10 aa, synthetic construct
SPRRGDRGVV

SEQ ID NO: 94549 - protein, 10 aa, synthetic construct
SLMRGDRSQT

SEQ ID NO: 94550 - protein, 10 aa, synthetic construct
SLMRGDLLLS

SEQ ID NO: 94551 - protein, 10 aa, synthetic construct
SLWRGDHGVL

SEQ ID NO: 94552 - protein, 10 aa, synthetic construct
SLWRGDHVNL

SEQ ID NO: 94553 - protein, 10 aa, synthetic construct
SLWRGDYVGL

SEQ ID NO: 94554 - protein, 10 aa, synthetic construct
SLWRGDYSSV

SEQ ID NO: 94555 - protein, 10 aa, synthetic construct
SLWRGDQSTL

SEQ ID NO: 94556 - protein, 10 aa, synthetic construct
SLWRGDLLLS

SEQ ID NO: 94557 - protein, 10 aa, synthetic construct
SLFRGDRGQI

SEQ ID NO: 94558 - protein, 10 aa, synthetic construct
SLFRGDRQGI

SEQ ID NO: 94559 - protein, 10 aa, synthetic construct
SPRRGDRSQT

SEQ ID NO: 94560 - protein, 10 aa, synthetic construct
SLFRGDRSVV

SEQ ID NO: 94561 - protein, 10 aa, synthetic construct
SLFRGDRGVV

SEQ ID NO: 94562 - protein, 10 aa, synthetic construct
SLFRGDYVGL

SEQ ID NO: 94563 - protein, 10 aa, synthetic construct
SLFRGDQSTL

SEQ ID NO: 94564 - protein, 10 aa, synthetic construct
SLFRGDRSQT

SEQ ID NO: 94565 - protein, 10 aa, synthetic construct
SLFRGDLLLS

SEQ ID NO: 94566 - protein, 10 aa, synthetic construct
SLKRGDRGQI

SEQ ID NO: 94567 - protein, 10 aa, synthetic construct
SLKRGDRQGI

SEQ ID NO: 94568 - protein, 10 aa, synthetic construct
SLKRGDRSVV

SEQ ID NO: 94569 - protein, 10 aa, synthetic construct
SLKRGDRGVV

SEQ ID NO: 94570 - protein, 10 aa, synthetic construct
SLGRGDRGQI

SEQ ID NO: 94571 - protein, 10 aa, synthetic construct
SLKRGDYVGL

SEQ ID NO: 94572 - protein, 10 aa, synthetic construct
SLKRGDQSTL

SEQ ID NO: 94573 - protein, 10 aa, synthetic construct
SLKRGDRSQT

SEQ ID NO: 94574 - protein, 10 aa, synthetic construct
SLKRGDLLLS

SEQ ID NO: 94575 - protein, 10 aa, synthetic construct
SLRRGDHVNL

SEQ ID NO: 94576 - protein, 10 aa, synthetic construct
SLRRGDRDYL

SEQ ID NO: 94577 - protein, 10 aa, synthetic construct
SLRRGDYSSV

SEQ ID NO: 94578 - protein, 10 aa, synthetic construct
SLRRGDLTVT

SEQ ID NO: 94579 - protein, 10 aa, synthetic construct
SLRRGDLIGR

SEQ ID NO: 94580 - protein, 10 aa, synthetic construct
SLHRGDHGVL

SEQ ID NO: 94581 - protein, 10 aa, synthetic construct
SLGRGDRQGI

SEQ ID NO: 94582 - protein, 10 aa, synthetic construct
SLHRGDHVNL

SEQ ID NO: 94583 - protein, 10 aa, synthetic construct
SLHRGDYVGL

SEQ ID NO: 94584 - protein, 10 aa, synthetic construct
SLHRGDYSSV

SEQ ID NO: 94585 - protein, 10 aa, synthetic construct
SLHRGDQSTL

SEQ ID NO: 94586 - protein, 10 aa, synthetic construct
SLHRGDLLLS

SEQ ID NO: 94587 - protein, 10 aa, synthetic construct
SLSRGDHGVL

SEQ ID NO: 94588 - protein, 10 aa, synthetic construct
SLSRGDHVNL

SEQ ID NO: 94589 - protein, 10 aa, synthetic construct
SLSRGDYVGL

SEQ ID NO: 94590 - protein, 10 aa, synthetic construct
SLSRGDYSSV

SEQ ID NO: 94591 - protein, 10 aa, synthetic construct
SLSRGDQSTL

SEQ ID NO: 94592 - protein, 10 aa, synthetic construct
EKNRGDHGVL

SEQ ID NO: 94593 - protein, 10 aa, synthetic construct
SLGRGDRSVV

SEQ ID NO: 94594 - protein, 10 aa, synthetic construct
SLSRGDLLLS

SEQ ID NO: 94595 - protein, 10 aa, synthetic construct
SLTRGDHGVL

SEQ ID NO: 94596 - protein, 10 aa, synthetic construct
SLTRGDHVNL

SEQ ID NO: 94597 - protein, 10 aa, synthetic construct
SLTRGDYVGL

SEQ ID NO: 94598 - protein, 10 aa, synthetic construct
SLTRGDYSSV

SEQ ID NO: 94599 - protein, 10 aa, synthetic construct
SLTRGDQSTL

SEQ ID NO: 94600 - protein, 10 aa, synthetic construct
SLTRGDLLLS

SEQ ID NO: 94601 - protein, 10 aa, synthetic construct
SLYRGDRGQI

SEQ ID NO: 94602 - protein, 10 aa, synthetic construct
SLYRGDRQGI

SEQ ID NO: 94603 - protein, 10 aa, synthetic construct
SLYRGDRSVV

SEQ ID NO: 94604 - protein, 10 aa, synthetic construct
SLGRGDRGVV

SEQ ID NO: 94605 - protein, 10 aa, synthetic construct
SLYRGDRGVV

SEQ ID NO: 94606 - protein, 10 aa, synthetic construct
SLYRGDYVGL

SEQ ID NO: 94607 - protein, 10 aa, synthetic construct
SLYRGDQSTL

SEQ ID NO: 94608 - protein, 10 aa, synthetic construct
SLYRGDRSQT

SEQ ID NO: 94609 - protein, 10 aa, synthetic construct
SLYRGDLLLS

SEQ ID NO: 94610 - protein, 10 aa, synthetic construct
SLNRGDRGQI

SEQ ID NO: 94611 - protein, 10 aa, synthetic construct
SLNRGDRQGI

SEQ ID NO: 94612 - protein, 10 aa, synthetic construct
SLNRGDRSVV

SEQ ID NO: 94613 - protein, 10 aa, synthetic construct
SLNRGDRGVV

SEQ ID NO: 94614 - protein, 10 aa, synthetic construct
SLNRGDYVGL

SEQ ID NO: 94615 - protein, 10 aa, synthetic construct
SLGRGDRSQT

SEQ ID NO: 94616 - protein, 10 aa, synthetic construct
SLNRGDQSTL

SEQ ID NO: 94617 - protein, 10 aa, synthetic construct
SLNRGDRSQT

SEQ ID NO: 94618 - protein, 10 aa, synthetic construct
SLNRGDLLLS

SEQ ID NO: 94619 - protein, 10 aa, synthetic construct
SLQRGDHGVL

SEQ ID NO: 94620 - protein, 10 aa, synthetic construct
SLQRGDHVNL

SEQ ID NO: 94621 - protein, 10 aa, synthetic construct
SLQRGDYVGL

SEQ ID NO: 94622 - protein, 10 aa, synthetic construct
SLQRGDYSSV

SEQ ID NO: 94623 - protein, 10 aa, synthetic construct
SLQRGDQSTL

SEQ ID NO: 94624 - protein, 10 aa, synthetic construct
SLQRGDLLLS

SEQ ID NO: 94625 - protein, 10 aa, synthetic construct
SLDRGDHGVL

SEQ ID NO: 94626 - protein, 10 aa, synthetic construct
SLARGDRGQI

SEQ ID NO: 94627 - protein, 10 aa, synthetic construct
SLDRGDHVNL

SEQ ID NO: 94628 - protein, 10 aa, synthetic construct
SLDRGDYVGL

SEQ ID NO: 94629 - protein, 10 aa, synthetic construct
SLDRGDYSSV

SEQ ID NO: 94630 - protein, 10 aa, synthetic construct
SLDRGDQSTL

SEQ ID NO: 94631 - protein, 10 aa, synthetic construct
SLDRGDLLLS

SEQ ID NO: 94632 - protein, 10 aa, synthetic construct
SLERGDHGVL

SEQ ID NO: 94633 - protein, 10 aa, synthetic construct
SLERGDHVNL

SEQ ID NO: 94634 - protein, 10 aa, synthetic construct
SLERGDYVGL

SEQ ID NO: 94635 - protein, 10 aa, synthetic construct
SLERGDYSSV

SEQ ID NO: 94636 - protein, 10 aa, synthetic construct
SLERGDQSTL

SEQ ID NO: 94637 - protein, 10 aa, synthetic construct
SLARGDRQGI

SEQ ID NO: 94638 - protein, 10 aa, synthetic construct
SLERGDLLLS

SEQ ID NO: 94639 - protein, 10 aa, synthetic construct
SIGRGDRGQI

SEQ ID NO: 94640 - protein, 10 aa, synthetic construct
SIGRGDRQGI

SEQ ID NO: 94641 - protein, 10 aa, synthetic construct
SIGRGDRSVV

SEQ ID NO: 94642 - protein, 10 aa, synthetic construct
SIGRGDRGVV

SEQ ID NO: 94643 - protein, 10 aa, synthetic construct
SIGRGDRSQT

SEQ ID NO: 94644 - protein, 10 aa, synthetic construct
SIARGDRGQI

SEQ ID NO: 94645 - protein, 10 aa, synthetic construct
SIARGDRQGI

SEQ ID NO: 94646 - protein, 10 aa, synthetic construct
SIARGDRSVV

SEQ ID NO: 94647 - protein, 10 aa, synthetic construct
SIARGDRGVV

SEQ ID NO: 94648 - protein, 10 aa, synthetic construct
SLARGDRSVV

SEQ ID NO: 94649 - protein, 10 aa, synthetic construct
SIARGDRSQT

SEQ ID NO: 94650 - protein, 10 aa, synthetic construct
SIPRGDRGQI

SEQ ID NO: 94651 - protein, 10 aa, synthetic construct
SIPRGDRQGI

SEQ ID NO: 94652 - protein, 10 aa, synthetic construct
SIPRGDRSVV

SEQ ID NO: 94653 - protein, 10 aa, synthetic construct
SIPRGDRGVV

SEQ ID NO: 94654 - protein, 10 aa, synthetic construct
SIPRGDRSQT

SEQ ID NO: 94655 - protein, 10 aa, synthetic construct
SIRRGDRGQI

SEQ ID NO: 94656 - protein, 10 aa, synthetic construct
SIRRGDRQGI

SEQ ID NO: 94657 - protein, 10 aa, synthetic construct
SIRRGDRSVV

SEQ ID NO: 94658 - protein, 10 aa, synthetic construct
SIRRGDRGVV

SEQ ID NO: 94659 - protein, 10 aa, synthetic construct
SLARGDRGVV

SEQ ID NO: 94660 - protein, 10 aa, synthetic construct
SIRRGDRSQT

SEQ ID NO: 94661 - protein, 10 aa, synthetic construct
SMGRGDHGVL

SEQ ID NO: 94662 - protein, 10 aa, synthetic construct
SMGRGDRGQI

SEQ ID NO: 94663 - protein, 10 aa, synthetic construct
SMGRGDRQGI

SEQ ID NO: 94664 - protein, 10 aa, synthetic construct
SMGRGDRSVV

SEQ ID NO: 94665 - protein, 10 aa, synthetic construct
SMGRGDLTVT

SEQ ID NO: 94666 - protein, 10 aa, synthetic construct
SMGRGDLIGR

SEQ ID NO: 94667 - protein, 10 aa, synthetic construct
SMGRGDRSQT

SEQ ID NO: 94668 - protein, 10 aa, synthetic construct
SMGRGDLLLS

SEQ ID NO: 94669 - protein, 10 aa, synthetic construct
SMARGDHGVL

SEQ ID NO: 94670 - protein, 10 aa, synthetic construct
SLARGDRSQT

SEQ ID NO: 94671 - protein, 10 aa, synthetic construct
SMARGDRGQI

SEQ ID NO: 94672 - protein, 10 aa, synthetic construct
SMARGDRQGI

SEQ ID NO: 94673 - protein, 10 aa, synthetic construct
SMARGDRSVV

SEQ ID NO: 94674 - protein, 10 aa, synthetic construct
SMARGDLTVT

SEQ ID NO: 94675 - protein, 10 aa, synthetic construct
SMARGDLIGR

SEQ ID NO: 94676 - protein, 10 aa, synthetic construct
SMARGDRSQT

SEQ ID NO: 94677 - protein, 10 aa, synthetic construct
SMARGDLLLS

SEQ ID NO: 94678 - protein, 10 aa, synthetic construct
SMVRGDHGVL

SEQ ID NO: 94679 - protein, 10 aa, synthetic construct
SMVRGDRGQI

SEQ ID NO: 94680 - protein, 10 aa, synthetic construct
SMVRGDRQGI

SEQ ID NO: 94681 - protein, 10 aa, synthetic construct
SLPRGDRGQI

SEQ ID NO: 94682 - protein, 10 aa, synthetic construct
SMVRGDRSVV

SEQ ID NO: 94683 - protein, 10 aa, synthetic construct
SMVRGDLIGR

SEQ ID NO: 94684 - protein, 10 aa, synthetic construct
SMVRGDRSQT

SEQ ID NO: 94685 - protein, 10 aa, synthetic construct
SMPRGDHGVL

SEQ ID NO: 94686 - protein, 10 aa, synthetic construct
SMPRGDRGQI

SEQ ID NO: 94687 - protein, 10 aa, synthetic construct
SMPRGDRQGI

SEQ ID NO: 94688 - protein, 10 aa, synthetic construct
SMPRGDRSVV

SEQ ID NO: 94689 - protein, 10 aa, synthetic construct
SMPRGDLTVT

SEQ ID NO: 94690 - protein, 10 aa, synthetic construct
SMPRGDLIGR

SEQ ID NO: 94691 - protein, 10 aa, synthetic construct
SMPRGDRSQT

SEQ ID NO: 94692 - protein, 10 aa, synthetic construct
SLPRGDRQGI

SEQ ID NO: 94693 - protein, 10 aa, synthetic construct
SMPRGDLLLS

SEQ ID NO: 94694 - protein, 10 aa, synthetic construct
SMLRGDHGVL

SEQ ID NO: 94695 - protein, 10 aa, synthetic construct
SMLRGDRGQI

SEQ ID NO: 94696 - protein, 10 aa, synthetic construct
SMLRGDRQGI

SEQ ID NO: 94697 - protein, 10 aa, synthetic construct
SMLRGDRSVV

SEQ ID NO: 94698 - protein, 10 aa, synthetic construct
SMLRGDLIGR

SEQ ID NO: 94699 - protein, 10 aa, synthetic construct
SMLRGDRSQT

SEQ ID NO: 94700 - protein, 10 aa, synthetic construct
SMMRGDRSVV

SEQ ID NO: 94701 - protein, 10 aa, synthetic construct
SMMRGDRSQT

SEQ ID NO: 94702 - protein, 10 aa, synthetic construct
SMWRGDRGQI

SEQ ID NO: 94703 - protein, 10 aa, synthetic construct
EKNRGDRGQI

SEQ ID NO: 94704 - protein, 10 aa, synthetic construct
SLPRGDRSVV

SEQ ID NO: 94705 - protein, 10 aa, synthetic construct
SMWRGDRQGI

SEQ ID NO: 94706 - protein, 10 aa, synthetic construct
SMWRGDRSVV

SEQ ID NO: 94707 - protein, 10 aa, synthetic construct
SMWRGDRGVV

SEQ ID NO: 94708 - protein, 10 aa, synthetic construct
SMWRGDYVGL

SEQ ID NO: 94709 - protein, 10 aa, synthetic construct
SMWRGDQSTL

SEQ ID NO: 94710 - protein, 10 aa, synthetic construct
SMWRGDRSQT

SEQ ID NO: 94711 - protein, 10 aa, synthetic construct
SMWRGDLLLS

SEQ ID NO: 94712 - protein, 10 aa, synthetic construct
SMRRGDHGVL

SEQ ID NO: 94713 - protein, 10 aa, synthetic construct
SMRRGDRGQI

SEQ ID NO: 94714 - protein, 10 aa, synthetic construct
SMRRGDRQGI

SEQ ID NO: 94715 - protein, 10 aa, synthetic construct
SLPRGDRGVV

SEQ ID NO: 94716 - protein, 10 aa, synthetic construct
SMRRGDRSVV

SEQ ID NO: 94717 - protein, 10 aa, synthetic construct
SMRRGDLTVT

SEQ ID NO: 94718 - protein, 10 aa, synthetic construct
SMRRGDLIGR

SEQ ID NO: 94719 - protein, 10 aa, synthetic construct
SMRRGDRSQT

SEQ ID NO: 94720 - protein, 10 aa, synthetic construct
SMRRGDLLLS

SEQ ID NO: 94721 - protein, 10 aa, synthetic construct
SMHRGDRGVV

SEQ ID NO: 94722 - protein, 10 aa, synthetic construct
SMHRGDLTVT

SEQ ID NO: 94723 - protein, 10 aa, synthetic construct
SMHRGDLLLS

SEQ ID NO: 94724 - protein, 10 aa, synthetic construct
SMSRGDHGVL

SEQ ID NO: 94725 - protein, 10 aa, synthetic construct
SMSRGDRGQI

SEQ ID NO: 94726 - protein, 10 aa, synthetic construct
SLPRGDRSQT

SEQ ID NO: 94727 - protein, 10 aa, synthetic construct
SMSRGDRQGI

SEQ ID NO: 94728 - protein, 10 aa, synthetic construct
SMSRGDRSVV

SEQ ID NO: 94729 - protein, 10 aa, synthetic construct
SMSRGDLIGR

SEQ ID NO: 94730 - protein, 10 aa, synthetic construct
SMSRGDRSQT

SEQ ID NO: 94731 - protein, 10 aa, synthetic construct
SMTRGDRGVV

SEQ ID NO: 94732 - protein, 10 aa, synthetic construct
SMTRGDLTVT

SEQ ID NO: 94733 - protein, 10 aa, synthetic construct
SMTRGDLLLS

SEQ ID NO: 94734 - protein, 10 aa, synthetic construct
SMQRGDRGVV

SEQ ID NO: 94735 - protein, 10 aa, synthetic construct
SMQRGDLTVT

SEQ ID NO: 94736 - protein, 10 aa, synthetic construct
SMQRGDLLLS

SEQ ID NO: 94737 - protein, 10 aa, synthetic construct
SLRRGDRGQI

SEQ ID NO: 94738 - protein, 10 aa, synthetic construct
SMDRGDRGVV

SEQ ID NO: 94739 - protein, 10 aa, synthetic construct
SMDRGDLTVT

SEQ ID NO: 94740 - protein, 10 aa, synthetic construct
SMDRGDLLLS

SEQ ID NO: 94741 - protein, 10 aa, synthetic construct
SMERGDRGVV

SEQ ID NO: 94742 - protein, 10 aa, synthetic construct
SMERGDLTVT

SEQ ID NO: 94743 - protein, 10 aa, synthetic construct
SMERGDLLLS

SEQ ID NO: 94744 - protein, 10 aa, synthetic construct
SWGRGDRDYL

SEQ ID NO: 94745 - protein, 10 aa, synthetic construct
SWGRGDYVGL

SEQ ID NO: 94746 - protein, 10 aa, synthetic construct
SWGRGDQSTL

SEQ ID NO: 94747 - protein, 10 aa, synthetic construct
SWARGDRDYL

SEQ ID NO: 94748 - protein, 10 aa, synthetic construct
SLRRGDRQGI

SEQ ID NO: 94749 - protein, 10 aa, synthetic construct
SWARGDYVGL

SEQ ID NO: 94750 - protein, 10 aa, synthetic construct
SWARGDQSTL

SEQ ID NO: 94751 - protein, 10 aa, synthetic construct
SWVRGDRDYL

SEQ ID NO: 94752 - protein, 10 aa, synthetic construct
SWVRGDYVGL

SEQ ID NO: 94753 - protein, 10 aa, synthetic construct
SWVRGDYSSV

SEQ ID NO: 94754 - protein, 10 aa, synthetic construct
SWVRGDYTSV

SEQ ID NO: 94755 - protein, 10 aa, synthetic construct
SWVRGDQSTL

SEQ ID NO: 94756 - protein, 10 aa, synthetic construct
SWPRGDRDYL

SEQ ID NO: 94757 - protein, 10 aa, synthetic construct
SWPRGDYVGL

SEQ ID NO: 94758 - protein, 10 aa, synthetic construct
SWPRGDQSTL

SEQ ID NO: 94759 - protein, 10 aa, synthetic construct
SLRRGDRSVV

SEQ ID NO: 94760 - protein, 10 aa, synthetic construct
SWLRGDRDYL

SEQ ID NO: 94761 - protein, 10 aa, synthetic construct
SWLRGDYVGL

SEQ ID NO: 94762 - protein, 10 aa, synthetic construct
SWLRGDYSSV

SEQ ID NO: 94763 - protein, 10 aa, synthetic construct
SWLRGDYTSV

SEQ ID NO: 94764 - protein, 10 aa, synthetic construct
SWLRGDQSTL

SEQ ID NO: 94765 - protein, 10 aa, synthetic construct
SWIRGDRGVV

SEQ ID NO: 94766 - protein, 10 aa, synthetic construct
SWIRGDLTVT

SEQ ID NO: 94767 - protein, 10 aa, synthetic construct
SWIRGDLLLS

SEQ ID NO: 94768 - protein, 10 aa, synthetic construct
SWMRGDRGQI

SEQ ID NO: 94769 - protein, 10 aa, synthetic construct
SWMRGDRQGI

SEQ ID NO: 94770 - protein, 10 aa, synthetic construct
SLRRGDRGVV

SEQ ID NO: 94771 - protein, 10 aa, synthetic construct
SWMRGDRSVV

SEQ ID NO: 94772 - protein, 10 aa, synthetic construct
SWMRGDRGVV

SEQ ID NO: 94773 - protein, 10 aa, synthetic construct
SWMRGDYVGL

SEQ ID NO: 94774 - protein, 10 aa, synthetic construct
SWMRGDQSTL

SEQ ID NO: 94775 - protein, 10 aa, synthetic construct
SWMRGDRSQT

SEQ ID NO: 94776 - protein, 10 aa, synthetic construct
SWMRGDLLLS

SEQ ID NO: 94777 - protein, 10 aa, synthetic construct
SWWRGDHGVL

SEQ ID NO: 94778 - protein, 10 aa, synthetic construct
SWWRGDHVNL

SEQ ID NO: 94779 - protein, 10 aa, synthetic construct
SWWRGDYVGL

SEQ ID NO: 94780 - protein, 10 aa, synthetic construct
SWWRGDYSSV

SEQ ID NO: 94781 - protein, 10 aa, synthetic construct
SLRRGDRSQT

SEQ ID NO: 94782 - protein, 10 aa, synthetic construct
SWWRGDQSTL

SEQ ID NO: 94783 - protein, 10 aa, synthetic construct
SWWRGDLLLS

SEQ ID NO: 94784 - protein, 10 aa, synthetic construct
SWFRGDRGVV

SEQ ID NO: 94785 - protein, 10 aa, synthetic construct
SWFRGDLTVT

SEQ ID NO: 94786 - protein, 10 aa, synthetic construct
SWFRGDLLLS

SEQ ID NO: 94787 - protein, 10 aa, synthetic construct
SWKRGDRGVV

SEQ ID NO: 94788 - protein, 10 aa, synthetic construct
SWKRGDLTVT

SEQ ID NO: 94789 - protein, 10 aa, synthetic construct
SWKRGDLLLS

SEQ ID NO: 94790 - protein, 10 aa, synthetic construct
SWRRGDRDYL

SEQ ID NO: 94791 - protein, 10 aa, synthetic construct
SWRRGDYVGL

SEQ ID NO: 94792 - protein, 10 aa, synthetic construct
SWGRGDRGVV

SEQ ID NO: 94793 - protein, 10 aa, synthetic construct
SWRRGDQSTL

SEQ ID NO: 94794 - protein, 10 aa, synthetic construct
SWHRGDHGVL

SEQ ID NO: 94795 - protein, 10 aa, synthetic construct
SWHRGDRGQI

SEQ ID NO: 94796 - protein, 10 aa, synthetic construct
SWHRGDRQGI

SEQ ID NO: 94797 - protein, 10 aa, synthetic construct
SWHRGDRSVV

SEQ ID NO: 94798 - protein, 10 aa, synthetic construct
SWHRGDLTVT

SEQ ID NO: 94799 - protein, 10 aa, synthetic construct
SWHRGDLIGR

SEQ ID NO: 94800 - protein, 10 aa, synthetic construct
SWHRGDRSQT

SEQ ID NO: 94801 - protein, 10 aa, synthetic construct
SWHRGDLLLS

SEQ ID NO: 94802 - protein, 10 aa, synthetic construct
SWSRGDRDYL

SEQ ID NO: 94803 - protein, 10 aa, synthetic construct
SWARGDRGVV

SEQ ID NO: 94804 - protein, 10 aa, synthetic construct
SWSRGDYVGL

SEQ ID NO: 94805 - protein, 10 aa, synthetic construct
SWSRGDYSSV

SEQ ID NO: 94806 - protein, 10 aa, synthetic construct
SWSRGDYTSV

SEQ ID NO: 94807 - protein, 10 aa, synthetic construct
SWSRGDQSTL

SEQ ID NO: 94808 - protein, 10 aa, synthetic construct
SWTRGDHGVL

SEQ ID NO: 94809 - protein, 10 aa, synthetic construct
SWTRGDRGQI

SEQ ID NO: 94810 - protein, 10 aa, synthetic construct
SWTRGDRQGI

SEQ ID NO: 94811 - protein, 10 aa, synthetic construct
SWTRGDRSVV

SEQ ID NO: 94812 - protein, 10 aa, synthetic construct
SWTRGDLTVT

SEQ ID NO: 94813 - protein, 10 aa, synthetic construct
SWTRGDLIGR

SEQ ID NO: 94814 - protein, 10 aa, synthetic construct
EKNRGDRQGI

SEQ ID NO: 94815 - protein, 10 aa, synthetic construct
SWVRGDRGVV

SEQ ID NO: 94816 - protein, 10 aa, synthetic construct
SWTRGDRSQT

SEQ ID NO: 94817 - protein, 10 aa, synthetic construct
SWTRGDLLLS

SEQ ID NO: 94818 - protein, 10 aa, synthetic construct
SWYRGDRGVV

SEQ ID NO: 94819 - protein, 10 aa, synthetic construct
SWYRGDLTVT

SEQ ID NO: 94820 - protein, 10 aa, synthetic construct
SWYRGDLLLS

SEQ ID NO: 94821 - protein, 10 aa, synthetic construct
SWNRGDRGVV

SEQ ID NO: 94822 - protein, 10 aa, synthetic construct
SWNRGDLTVT

SEQ ID NO: 94823 - protein, 10 aa, synthetic construct
SWNRGDLLLS

SEQ ID NO: 94824 - protein, 10 aa, synthetic construct
SWQRGDHGVL

SEQ ID NO: 94825 - protein, 10 aa, synthetic construct
SWQRGDRGQI

SEQ ID NO: 94826 - protein, 10 aa, synthetic construct
SWPRGDRGVV

SEQ ID NO: 94827 - protein, 10 aa, synthetic construct
SWQRGDRQGI

SEQ ID NO: 94828 - protein, 10 aa, synthetic construct
SWQRGDRSVV

SEQ ID NO: 94829 - protein, 10 aa, synthetic construct
SWQRGDLTVT

SEQ ID NO: 94830 - protein, 10 aa, synthetic construct
SWQRGDLIGR

SEQ ID NO: 94831 - protein, 10 aa, synthetic construct
SWQRGDRSQT

SEQ ID NO: 94832 - protein, 10 aa, synthetic construct
SWQRGDLLLS

SEQ ID NO: 94833 - protein, 10 aa, synthetic construct
SWDRGDHGVL

SEQ ID NO: 94834 - protein, 10 aa, synthetic construct
SWDRGDRGQI

SEQ ID NO: 94835 - protein, 10 aa, synthetic construct
SWDRGDRQGI

SEQ ID NO: 94836 - protein, 10 aa, synthetic construct
SWDRGDRSVV

SEQ ID NO: 94837 - protein, 10 aa, synthetic construct
SWLRGDRGVV

SEQ ID NO: 94838 - protein, 10 aa, synthetic construct
SWDRGDLTVT

SEQ ID NO: 94839 - protein, 10 aa, synthetic construct
SWDRGDLIGR

SEQ ID NO: 94840 - protein, 10 aa, synthetic construct
SWDRGDRSQT

SEQ ID NO: 94841 - protein, 10 aa, synthetic construct
SWDRGDLLLS

SEQ ID NO: 94842 - protein, 10 aa, synthetic construct
SWERGDHGVL

SEQ ID NO: 94843 - protein, 10 aa, synthetic construct
SWERGDRGQI

SEQ ID NO: 94844 - protein, 10 aa, synthetic construct
SWERGDRQGI

SEQ ID NO: 94845 - protein, 10 aa, synthetic construct
SWERGDRSVV

SEQ ID NO: 94846 - protein, 10 aa, synthetic construct
SWERGDLTVT

SEQ ID NO: 94847 - protein, 10 aa, synthetic construct
SWERGDLIGR

SEQ ID NO: 94848 - protein, 10 aa, synthetic construct
SWRRGDRGVV

SEQ ID NO: 94849 - protein, 10 aa, synthetic construct
SWERGDRSQT

SEQ ID NO: 94850 - protein, 10 aa, synthetic construct
SWERGDLLLS

SEQ ID NO: 94851 - protein, 10 aa, synthetic construct
SFGRGDRGQI

SEQ ID NO: 94852 - protein, 10 aa, synthetic construct
SFGRGDRQGI

SEQ ID NO: 94853 - protein, 10 aa, synthetic construct
SFGRGDRSVV

SEQ ID NO: 94854 - protein, 10 aa, synthetic construct
SFGRGDRGVV

SEQ ID NO: 94855 - protein, 10 aa, synthetic construct
SFGRGDRSQT

SEQ ID NO: 94856 - protein, 10 aa, synthetic construct
SFARGDRGQI

SEQ ID NO: 94857 - protein, 10 aa, synthetic construct
SFARGDRQGI

SEQ ID NO: 94858 - protein, 10 aa, synthetic construct
SFARGDRSVV

SEQ ID NO: 94859 - protein, 10 aa, synthetic construct
SWSRGDRGVV

SEQ ID NO: 94860 - protein, 10 aa, synthetic construct
SFARGDRGVV

SEQ ID NO: 94861 - protein, 10 aa, synthetic construct
SFARGDRSQT

SEQ ID NO: 94862 - protein, 10 aa, synthetic construct
SFPRGDRGQI

SEQ ID NO: 94863 - protein, 10 aa, synthetic construct
SFPRGDRQGI

SEQ ID NO: 94864 - protein, 10 aa, synthetic construct
SFPRGDRSVV

SEQ ID NO: 94865 - protein, 10 aa, synthetic construct
SFPRGDRGVV

SEQ ID NO: 94866 - protein, 10 aa, synthetic construct
SFPRGDRSQT

SEQ ID NO: 94867 - protein, 10 aa, synthetic construct
SFRRGDRGQI

SEQ ID NO: 94868 - protein, 10 aa, synthetic construct
SFRRGDRQGI

SEQ ID NO: 94869 - protein, 10 aa, synthetic construct
SFRRGDRSVV

SEQ ID NO: 94870 - protein, 10 aa, synthetic construct
SRGRGDRGQI

SEQ ID NO: 94871 - protein, 10 aa, synthetic construct
SFRRGDRGVV

SEQ ID NO: 94872 - protein, 10 aa, synthetic construct
SFRRGDRSQT

SEQ ID NO: 94873 - protein, 10 aa, synthetic construct
SKGRGDRGQI

SEQ ID NO: 94874 - protein, 10 aa, synthetic construct
SKGRGDRQGI

SEQ ID NO: 94875 - protein, 10 aa, synthetic construct
SKGRGDRSVV

SEQ ID NO: 94876 - protein, 10 aa, synthetic construct
SKGRGDRGVV

SEQ ID NO: 94877 - protein, 10 aa, synthetic construct
SKGRGDRSQT

SEQ ID NO: 94878 - protein, 10 aa, synthetic construct
SKARGDRGQI

SEQ ID NO: 94879 - protein, 10 aa, synthetic construct
SKARGDRQGI

SEQ ID NO: 94880 - protein, 10 aa, synthetic construct
SKARGDRSVV

SEQ ID NO: 94881 - protein, 10 aa, synthetic construct
SRGRGDRQGI

SEQ ID NO: 94882 - protein, 10 aa, synthetic construct
SKARGDRGVV

SEQ ID NO: 94883 - protein, 10 aa, synthetic construct
SKARGDRSQT

SEQ ID NO: 94884 - protein, 10 aa, synthetic construct
SKPRGDRGQI

SEQ ID NO: 94885 - protein, 10 aa, synthetic construct
SKPRGDRQGI

SEQ ID NO: 94886 - protein, 10 aa, synthetic construct
SKPRGDRSVV

SEQ ID NO: 94887 - protein, 10 aa, synthetic construct
SKPRGDRGVV

SEQ ID NO: 94888 - protein, 10 aa, synthetic construct
SKPRGDRSQT

SEQ ID NO: 94889 - protein, 10 aa, synthetic construct
SKRRGDRGQI

SEQ ID NO: 94890 - protein, 10 aa, synthetic construct
SKRRGDRQGI

SEQ ID NO: 94891 - protein, 10 aa, synthetic construct
SKRRGDRSVV

SEQ ID NO: 94892 - protein, 10 aa, synthetic construct
SRGRGDRSVV

SEQ ID NO: 94893 - protein, 10 aa, synthetic construct
SKRRGDRGVV

SEQ ID NO: 94894 - protein, 10 aa, synthetic construct
SKRRGDRSQT

SEQ ID NO: 94895 - protein, 10 aa, synthetic construct
SRGRGDHVNL

SEQ ID NO: 94896 - protein, 10 aa, synthetic construct
SRGRGDRDYL

SEQ ID NO: 94897 - protein, 10 aa, synthetic construct
SRGRGDYSSV

SEQ ID NO: 94898 - protein, 10 aa, synthetic construct
SRGRGDLTVT

SEQ ID NO: 94899 - protein, 10 aa, synthetic construct
SRGRGDLIGR

SEQ ID NO: 94900 - protein, 10 aa, synthetic construct
SRARGDHVNL

SEQ ID NO: 94901 - protein, 10 aa, synthetic construct
SRARGDRDYL

SEQ ID NO: 94902 - protein, 10 aa, synthetic construct
SRARGDYSSV

SEQ ID NO: 94903 - protein, 10 aa, synthetic construct
SRGRGDRGVV

SEQ ID NO: 94904 - protein, 10 aa, synthetic construct
SRARGDLTVT

SEQ ID NO: 94905 - protein, 10 aa, synthetic construct
SRARGDLIGR

SEQ ID NO: 94906 - protein, 10 aa, synthetic construct
SRVRGDHGVL

SEQ ID NO: 94907 - protein, 10 aa, synthetic construct
SRVRGDYVGL

SEQ ID NO: 94908 - protein, 10 aa, synthetic construct
SRVRGDQSTL

SEQ ID NO: 94909 - protein, 10 aa, synthetic construct
SRVRGDLLLS

SEQ ID NO: 94910 - protein, 10 aa, synthetic construct
SRPRGDHVNL

SEQ ID NO: 94911 - protein, 10 aa, synthetic construct
SRPRGDRDYL

SEQ ID NO: 94912 - protein, 10 aa, synthetic construct
SRPRGDYSSV

SEQ ID NO: 94913 - protein, 10 aa, synthetic construct
SRPRGDLTVT

SEQ ID NO: 94914 - protein, 10 aa, synthetic construct
SRGRGDRSQT

SEQ ID NO: 94915 - protein, 10 aa, synthetic construct
SRPRGDLIGR

SEQ ID NO: 94916 - protein, 10 aa, synthetic construct
SRLRGDHGVL

SEQ ID NO: 94917 - protein, 10 aa, synthetic construct
SRLRGDYVGL

SEQ ID NO: 94918 - protein, 10 aa, synthetic construct
SRLRGDQSTL

SEQ ID NO: 94919 - protein, 10 aa, synthetic construct
SRLRGDLLLS

SEQ ID NO: 94920 - protein, 10 aa, synthetic construct
SRIRGDRGQI

SEQ ID NO: 94921 - protein, 10 aa, synthetic construct
SRIRGDRQGI

SEQ ID NO: 94922 - protein, 10 aa, synthetic construct
SRIRGDRSVV

SEQ ID NO: 94923 - protein, 10 aa, synthetic construct
SRIRGDRGVV

SEQ ID NO: 94924 - protein, 10 aa, synthetic construct
SRIRGDRSQT

SEQ ID NO: 94925 - protein, 10 aa, synthetic construct
EKNRGDRGVV

SEQ ID NO: 94926 - protein, 10 aa, synthetic construct
SRARGDRGQI

SEQ ID NO: 94927 - protein, 10 aa, synthetic construct
SRMRGDRGQI

SEQ ID NO: 94928 - protein, 10 aa, synthetic construct
SRMRGDRQGI

SEQ ID NO: 94929 - protein, 10 aa, synthetic construct
SRMRGDRSVV

SEQ ID NO: 94930 - protein, 10 aa, synthetic construct
SRMRGDRGVV

SEQ ID NO: 94931 - protein, 10 aa, synthetic construct
SRMRGDRSQT

SEQ ID NO: 94932 - protein, 10 aa, synthetic construct
SRWRGDHGVL

SEQ ID NO: 94933 - protein, 10 aa, synthetic construct
SRWRGDYVGL

SEQ ID NO: 94934 - protein, 10 aa, synthetic construct
SRWRGDQSTL

SEQ ID NO: 94935 - protein, 10 aa, synthetic construct
SRWRGDLLLS

SEQ ID NO: 94936 - protein, 10 aa, synthetic construct
SRFRGDRGQI

SEQ ID NO: 94937 - protein, 10 aa, synthetic construct
SRARGDRQGI

SEQ ID NO: 94938 - protein, 10 aa, synthetic construct
SRFRGDRQGI

SEQ ID NO: 94939 - protein, 10 aa, synthetic construct
SRFRGDRSVV

SEQ ID NO: 94940 - protein, 10 aa, synthetic construct
SRFRGDRGVV

SEQ ID NO: 94941 - protein, 10 aa, synthetic construct
SRFRGDRSQT

SEQ ID NO: 94942 - protein, 10 aa, synthetic construct
SRKRGDRGQI

SEQ ID NO: 94943 - protein, 10 aa, synthetic construct
SRKRGDRQGI

SEQ ID NO: 94944 - protein, 10 aa, synthetic construct
SRKRGDRSVV

SEQ ID NO: 94945 - protein, 10 aa, synthetic construct
SRKRGDRGVV

SEQ ID NO: 94946 - protein, 10 aa, synthetic construct
SRKRGDRSQT

SEQ ID NO: 94947 - protein, 10 aa, synthetic construct
SRRRGDHVNL

SEQ ID NO: 94948 - protein, 10 aa, synthetic construct
SRARGDRSVV

SEQ ID NO: 94949 - protein, 10 aa, synthetic construct
SRRRGDRDYL

SEQ ID NO: 94950 - protein, 10 aa, synthetic construct
SRRRGDYSSV

SEQ ID NO: 94951 - protein, 10 aa, synthetic construct
SRRRGDLTVT

SEQ ID NO: 94952 - protein, 10 aa, synthetic construct
SRRRGDLIGR

SEQ ID NO: 94953 - protein, 10 aa, synthetic construct
SRHRGDHGVL

SEQ ID NO: 94954 - protein, 10 aa, synthetic construct
SRHRGDYVGL

SEQ ID NO: 94955 - protein, 10 aa, synthetic construct
SRHRGDQSTL

SEQ ID NO: 94956 - protein, 10 aa, synthetic construct
SRHRGDLLLS

SEQ ID NO: 94957 - protein, 10 aa, synthetic construct
SRSRGDHGVL

SEQ ID NO: 94958 - protein, 10 aa, synthetic construct
SRSRGDYVGL

SEQ ID NO: 94959 - protein, 10 aa, synthetic construct
SRARGDRGVV

SEQ ID NO: 94960 - protein, 10 aa, synthetic construct
SRSRGDQSTL

SEQ ID NO: 94961 - protein, 10 aa, synthetic construct
SRSRGDLLLS

SEQ ID NO: 94962 - protein, 10 aa, synthetic construct
SRTRGDHGVL

SEQ ID NO: 94963 - protein, 10 aa, synthetic construct
SRTRGDYVGL

SEQ ID NO: 94964 - protein, 10 aa, synthetic construct
SRTRGDQSTL

SEQ ID NO: 94965 - protein, 10 aa, synthetic construct
SRTRGDLLLS

SEQ ID NO: 94966 - protein, 10 aa, synthetic construct
SRYRGDRGQI

SEQ ID NO: 94967 - protein, 10 aa, synthetic construct
SRYRGDRQGI

SEQ ID NO: 94968 - protein, 10 aa, synthetic construct
SRYRGDRSVV

SEQ ID NO: 94969 - protein, 10 aa, synthetic construct
SRYRGDRGVV

SEQ ID NO: 94970 - protein, 10 aa, synthetic construct
SRARGDRSQT

SEQ ID NO: 94971 - protein, 10 aa, synthetic construct
SRYRGDRSQT

SEQ ID NO: 94972 - protein, 10 aa, synthetic construct
SRNRGDRGQI

SEQ ID NO: 94973 - protein, 10 aa, synthetic construct
SRNRGDRQGI

SEQ ID NO: 94974 - protein, 10 aa, synthetic construct
SRNRGDRSVV

SEQ ID NO: 94975 - protein, 10 aa, synthetic construct
SRNRGDRGVV

SEQ ID NO: 94976 - protein, 10 aa, synthetic construct
SRNRGDRSQT

SEQ ID NO: 94977 - protein, 10 aa, synthetic construct
SRQRGDHGVL

SEQ ID NO: 94978 - protein, 10 aa, synthetic construct
SRQRGDYVGL

SEQ ID NO: 94979 - protein, 10 aa, synthetic construct
SRQRGDQSTL

SEQ ID NO: 94980 - protein, 10 aa, synthetic construct
SRQRGDLLLS

SEQ ID NO: 94981 - protein, 10 aa, synthetic construct
SRPRGDRGQI

SEQ ID NO: 94982 - protein, 10 aa, synthetic construct
SRDRGDHGVL

SEQ ID NO: 94983 - protein, 10 aa, synthetic construct
SRDRGDYVGL

SEQ ID NO: 94984 - protein, 10 aa, synthetic construct
SRDRGDQSTL

SEQ ID NO: 94985 - protein, 10 aa, synthetic construct
SRDRGDLLLS

SEQ ID NO: 94986 - protein, 10 aa, synthetic construct
SRERGDHGVL

SEQ ID NO: 94987 - protein, 10 aa, synthetic construct
SRERGDYVGL

SEQ ID NO: 94988 - protein, 10 aa, synthetic construct
SRERGDQSTL

SEQ ID NO: 94989 - protein, 10 aa, synthetic construct
SRERGDLLLS

SEQ ID NO: 94990 - protein, 10 aa, synthetic construct
SHGRGDHGVL

SEQ ID NO: 94991 - protein, 10 aa, synthetic construct
SHGRGDYVGL

SEQ ID NO: 94992 - protein, 10 aa, synthetic construct
SRPRGDRQGI

SEQ ID NO: 94993 - protein, 10 aa, synthetic construct
SHGRGDQSTL

SEQ ID NO: 94994 - protein, 10 aa, synthetic construct
SHGRGDLLLS

SEQ ID NO: 94995 - protein, 10 aa, synthetic construct
SHARGDHGVL

SEQ ID NO: 94996 - protein, 10 aa, synthetic construct
SHARGDYVGL

SEQ ID NO: 94997 - protein, 10 aa, synthetic construct
SHARGDQSTL

SEQ ID NO: 94998 - protein, 10 aa, synthetic construct
SHARGDLLLS

SEQ ID NO: 94999 - protein, 10 aa, synthetic construct
SHVRGDRGQI

SEQ ID NO: 95000 - protein, 10 aa, synthetic construct
SHVRGDRQGI

SEQ ID NO: 95001 - protein, 10 aa, synthetic construct
SHVRGDRSVV

SEQ ID NO: 95002 - protein, 10 aa, synthetic construct
SHVRGDRGVV

SEQ ID NO: 95003 - protein, 10 aa, synthetic construct
SRPRGDRSVV

SEQ ID NO: 95004 - protein, 10 aa, synthetic construct
SHVRGDRSQT

SEQ ID NO: 95005 - protein, 10 aa, synthetic construct
SHPRGDHGVL

SEQ ID NO: 95006 - protein, 10 aa, synthetic construct
SHPRGDYVGL

SEQ ID NO: 95007 - protein, 10 aa, synthetic construct
SHPRGDQSTL

SEQ ID NO: 95008 - protein, 10 aa, synthetic construct
SHPRGDLLLS

SEQ ID NO: 95009 - protein, 10 aa, synthetic construct
SHLRGDRGQI

SEQ ID NO: 95010 - protein, 10 aa, synthetic construct
SHLRGDRQGI

SEQ ID NO: 95011 - protein, 10 aa, synthetic construct
SHLRGDRSVV

SEQ ID NO: 95012 - protein, 10 aa, synthetic construct
SHLRGDRGVV

SEQ ID NO: 95013 - protein, 10 aa, synthetic construct
SHLRGDRSQT

SEQ ID NO: 95014 - protein, 10 aa, synthetic construct
SRPRGDRGVV

SEQ ID NO: 95015 - protein, 10 aa, synthetic construct
SHWRGDRGQI

SEQ ID NO: 95016 - protein, 10 aa, synthetic construct
SHWRGDRQGI

SEQ ID NO: 95017 - protein, 10 aa, synthetic construct
SHWRGDRSVV

SEQ ID NO: 95018 - protein, 10 aa, synthetic construct
SHWRGDRGVV

SEQ ID NO: 95019 - protein, 10 aa, synthetic construct
SHWRGDRSQT

SEQ ID NO: 95020 - protein, 10 aa, synthetic construct
SHRRGDHGVL

SEQ ID NO: 95021 - protein, 10 aa, synthetic construct
SHRRGDYVGL

SEQ ID NO: 95022 - protein, 10 aa, synthetic construct
SHRRGDQSTL

SEQ ID NO: 95023 - protein, 10 aa, synthetic construct
SHRRGDLLLS

SEQ ID NO: 95024 - protein, 10 aa, synthetic construct
SHHRGDRGQI

SEQ ID NO: 95025 - protein, 10 aa, synthetic construct
SRPRGDRSQT

SEQ ID NO: 95026 - protein, 10 aa, synthetic construct
SHHRGDRQGI

SEQ ID NO: 95027 - protein, 10 aa, synthetic construct
SHHRGDRSVV

SEQ ID NO: 95028 - protein, 10 aa, synthetic construct
SHHRGDRGVV

SEQ ID NO: 95029 - protein, 10 aa, synthetic construct
SHHRGDRSQT

SEQ ID NO: 95030 - protein, 10 aa, synthetic construct
SHSRGDRGQI

SEQ ID NO: 95031 - protein, 10 aa, synthetic construct
SHSRGDRQGI

SEQ ID NO: 95032 - protein, 10 aa, synthetic construct
SHSRGDRSVV

SEQ ID NO: 95033 - protein, 10 aa, synthetic construct
SHSRGDRGVV

SEQ ID NO: 95034 - protein, 10 aa, synthetic construct
SHSRGDRSQT

SEQ ID NO: 95035 - protein, 10 aa, synthetic construct
SHTRGDRGQI

SEQ ID NO: 95036 - protein, 10 aa, synthetic construct
EKNRGDYVGL

SEQ ID NO: 95037 - protein, 10 aa, synthetic construct
SRRRGDRGQI

SEQ ID NO: 95038 - protein, 10 aa, synthetic construct
SHTRGDRQGI

SEQ ID NO: 95039 - protein, 10 aa, synthetic construct
SHTRGDRSVV

SEQ ID NO: 95040 - protein, 10 aa, synthetic construct
SHTRGDRGVV

SEQ ID NO: 95041 - protein, 10 aa, synthetic construct
SHTRGDRSQT

SEQ ID NO: 95042 - protein, 10 aa, synthetic construct
SHQRGDRGQI

SEQ ID NO: 95043 - protein, 10 aa, synthetic construct
SHQRGDRQGI

SEQ ID NO: 95044 - protein, 10 aa, synthetic construct
SHQRGDRSVV

SEQ ID NO: 95045 - protein, 10 aa, synthetic construct
SHQRGDRGVV

SEQ ID NO: 95046 - protein, 10 aa, synthetic construct
SHQRGDRSQT

SEQ ID NO: 95047 - protein, 10 aa, synthetic construct
SHDRGDRGQI

SEQ ID NO: 95048 - protein, 10 aa, synthetic construct
SRRRGDRQGI

SEQ ID NO: 95049 - protein, 10 aa, synthetic construct
SHDRGDRQGI

SEQ ID NO: 95050 - protein, 10 aa, synthetic construct
SHDRGDRSVV

SEQ ID NO: 95051 - protein, 10 aa, synthetic construct
SHDRGDRGVV

SEQ ID NO: 95052 - protein, 10 aa, synthetic construct
SHDRGDRSQT

SEQ ID NO: 95053 - protein, 10 aa, synthetic construct
SHERGDRGQI

SEQ ID NO: 95054 - protein, 10 aa, synthetic construct
SHERGDRQGI

SEQ ID NO: 95055 - protein, 10 aa, synthetic construct
SHERGDRSVV

SEQ ID NO: 95056 - protein, 10 aa, synthetic construct
SHERGDRGVV

SEQ ID NO: 95057 - protein, 10 aa, synthetic construct
SHERGDRSQT

SEQ ID NO: 95058 - protein, 10 aa, synthetic construct
SSGRGDHVNL

SEQ ID NO: 95059 - protein, 10 aa, synthetic construct
SRRRGDRSVV

SEQ ID NO: 95060 - protein, 10 aa, synthetic construct
SSGRGDRDYL

SEQ ID NO: 95061 - protein, 10 aa, synthetic construct
SSGRGDYSSV

SEQ ID NO: 95062 - protein, 10 aa, synthetic construct
SSGRGDLTVT

SEQ ID NO: 95063 - protein, 10 aa, synthetic construct
SSGRGDLIGR

SEQ ID NO: 95064 - protein, 10 aa, synthetic construct
SSARGDHVNL

SEQ ID NO: 95065 - protein, 10 aa, synthetic construct
SSARGDYSSV

SEQ ID NO: 95066 - protein, 10 aa, synthetic construct
SSARGDLTVT

SEQ ID NO: 95067 - protein, 10 aa, synthetic construct
SSARGDLIGR

SEQ ID NO: 95068 - protein, 10 aa, synthetic construct
SSVRGDHGVL

SEQ ID NO: 95069 - protein, 10 aa, synthetic construct
SSVRGDHVNL

SEQ ID NO: 95070 - protein, 10 aa, synthetic construct
SRRRGDRGVV

SEQ ID NO: 95071 - protein, 10 aa, synthetic construct
SSVRGDYVGL

SEQ ID NO: 95072 - protein, 10 aa, synthetic construct
SSVRGDYSSV

SEQ ID NO: 95073 - protein, 10 aa, synthetic construct
SSVRGDQSTL

SEQ ID NO: 95074 - protein, 10 aa, synthetic construct
SSVRGDLLLS

SEQ ID NO: 95075 - protein, 10 aa, synthetic construct
SSLRGDHGVL

SEQ ID NO: 95076 - protein, 10 aa, synthetic construct
SSLRGDHVNL

SEQ ID NO: 95077 - protein, 10 aa, synthetic construct
SSLRGDYVGL

SEQ ID NO: 95078 - protein, 10 aa, synthetic construct
SSLRGDYSSV

SEQ ID NO: 95079 - protein, 10 aa, synthetic construct
SSLRGDQSTL

SEQ ID NO: 95080 - protein, 10 aa, synthetic construct
SSLRGDLLLS

SEQ ID NO: 95081 - protein, 10 aa, synthetic construct
SRRRGDRSQT

SEQ ID NO: 95082 - protein, 10 aa, synthetic construct
SSIRGDRGQI

SEQ ID NO: 95083 - protein, 10 aa, synthetic construct
SSIRGDRQGI

SEQ ID NO: 95084 - protein, 10 aa, synthetic construct
SSIRGDRSVV

SEQ ID NO: 95085 - protein, 10 aa, synthetic construct
SSIRGDRGVV

SEQ ID NO: 95086 - protein, 10 aa, synthetic construct
SSIRGDYVGL

SEQ ID NO: 95087 - protein, 10 aa, synthetic construct
SSIRGDQSTL

SEQ ID NO: 95088 - protein, 10 aa, synthetic construct
SSIRGDRSQT

SEQ ID NO: 95089 - protein, 10 aa, synthetic construct
SSIRGDLLLS

SEQ ID NO: 95090 - protein, 10 aa, synthetic construct
SSMRGDRGQI

SEQ ID NO: 95091 - protein, 10 aa, synthetic construct
SSMRGDRQGI

SEQ ID NO: 95092 - protein, 10 aa, synthetic construct
SSGRGDRGQI

SEQ ID NO: 95093 - protein, 10 aa, synthetic construct
SSMRGDRSVV

SEQ ID NO: 95094 - protein, 10 aa, synthetic construct
SSMRGDRGVV

SEQ ID NO: 95095 - protein, 10 aa, synthetic construct
SSMRGDYVGL

SEQ ID NO: 95096 - protein, 10 aa, synthetic construct
SSMRGDQSTL

SEQ ID NO: 95097 - protein, 10 aa, synthetic construct
SSMRGDRSQT

SEQ ID NO: 95098 - protein, 10 aa, synthetic construct
SSMRGDLLLS

SEQ ID NO: 95099 - protein, 10 aa, synthetic construct
SSWRGDHGVL

SEQ ID NO: 95100 - protein, 10 aa, synthetic construct
SSWRGDHVNL

SEQ ID NO: 95101 - protein, 10 aa, synthetic construct
SSWRGDYVGL

SEQ ID NO: 95102 - protein, 10 aa, synthetic construct
SSWRGDYSSV

SEQ ID NO: 95103 - protein, 10 aa, synthetic construct
SSGRGDRQGI

SEQ ID NO: 95104 - protein, 10 aa, synthetic construct
SSWRGDQSTL

SEQ ID NO: 95105 - protein, 10 aa, synthetic construct
SSWRGDLLLS

SEQ ID NO: 95106 - protein, 10 aa, synthetic construct
SSFRGDRGQI

SEQ ID NO: 95107 - protein, 10 aa, synthetic construct
SSFRGDRQGI

SEQ ID NO: 95108 - protein, 10 aa, synthetic construct
SSFRGDRSVV

SEQ ID NO: 95109 - protein, 10 aa, synthetic construct
SSFRGDRGVV

SEQ ID NO: 95110 - protein, 10 aa, synthetic construct
SSFRGDYVGL

SEQ ID NO: 95111 - protein, 10 aa, synthetic construct
SSFRGDQSTL

SEQ ID NO: 95112 - protein, 10 aa, synthetic construct
SSFRGDRSQT

SEQ ID NO: 95113 - protein, 10 aa, synthetic construct
SSFRGDLLLS

SEQ ID NO: 95114 - protein, 10 aa, synthetic construct
SSGRGDRSVV

SEQ ID NO: 95115 - protein, 10 aa, synthetic construct
SSKRGDRGQI

SEQ ID NO: 95116 - protein, 10 aa, synthetic construct
SSKRGDRQGI

SEQ ID NO: 95117 - protein, 10 aa, synthetic construct
SSKRGDRSVV

SEQ ID NO: 95118 - protein, 10 aa, synthetic construct
SSKRGDRGVV

SEQ ID NO: 95119 - protein, 10 aa, synthetic construct
SSKRGDYVGL

SEQ ID NO: 95120 - protein, 10 aa, synthetic construct
SSKRGDQSTL

SEQ ID NO: 95121 - protein, 10 aa, synthetic construct
SSKRGDRSQT

SEQ ID NO: 95122 - protein, 10 aa, synthetic construct
SSKRGDLLLS

SEQ ID NO: 95123 - protein, 10 aa, synthetic construct
SSRRGDHVNL

SEQ ID NO: 95124 - protein, 10 aa, synthetic construct
SSRRGDRDYL

SEQ ID NO: 95125 - protein, 10 aa, synthetic construct
SSGRGDRGVV

SEQ ID NO: 95126 - protein, 10 aa, synthetic construct
SSRRGDYSSV

SEQ ID NO: 95127 - protein, 10 aa, synthetic construct
SSRRGDLTVT

SEQ ID NO: 95128 - protein, 10 aa, synthetic construct
SSRRGDLIGR

SEQ ID NO: 95129 - protein, 10 aa, synthetic construct
SSHRGDHGVL

SEQ ID NO: 95130 - protein, 10 aa, synthetic construct
SSHRGDHVNL

SEQ ID NO: 95131 - protein, 10 aa, synthetic construct
SSHRGDYVGL

SEQ ID NO: 95132 - protein, 10 aa, synthetic construct
SSHRGDYSSV

SEQ ID NO: 95133 - protein, 10 aa, synthetic construct
SSHRGDQSTL

SEQ ID NO: 95134 - protein, 10 aa, synthetic construct
SSHRGDLLLS

SEQ ID NO: 95135 - protein, 10 aa, synthetic construct
SSSRGDHGVL

SEQ ID NO: 95136 - protein, 10 aa, synthetic construct
SSGRGDRSQT

SEQ ID NO: 95137 - protein, 10 aa, synthetic construct
SSSRGDHVNL

SEQ ID NO: 95138 - protein, 10 aa, synthetic construct
SSSRGDYVGL

SEQ ID NO: 95139 - protein, 10 aa, synthetic construct
SSSRGDYSSV

SEQ ID NO: 95140 - protein, 10 aa, synthetic construct
SSSRGDQSTL

SEQ ID NO: 95141 - protein, 10 aa, synthetic construct
SSSRGDLLLS

SEQ ID NO: 95142 - protein, 10 aa, synthetic construct
SSTRGDHGVL

SEQ ID NO: 95143 - protein, 10 aa, synthetic construct
SSTRGDHVNL

SEQ ID NO: 95144 - protein, 10 aa, synthetic construct
SSTRGDYVGL

SEQ ID NO: 95145 - protein, 10 aa, synthetic construct
SSTRGDYSSV

SEQ ID NO: 95146 - protein, 10 aa, synthetic construct
SSTRGDQSTL

SEQ ID NO: 95147 - protein, 10 aa, synthetic construct
EKNRGDLIGR

SEQ ID NO: 95148 - protein, 10 aa, synthetic construct
SSARGDRGQI

SEQ ID NO: 95149 - protein, 10 aa, synthetic construct
SSTRGDLLLS

SEQ ID NO: 95150 - protein, 10 aa, synthetic construct
SSYRGDRGQI

SEQ ID NO: 95151 - protein, 10 aa, synthetic construct
SSYRGDRQGI

SEQ ID NO: 95152 - protein, 10 aa, synthetic construct
SSYRGDRSVV

SEQ ID NO: 95153 - protein, 10 aa, synthetic construct
SSYRGDRGVV

SEQ ID NO: 95154 - protein, 10 aa, synthetic construct
SSYRGDYVGL

SEQ ID NO: 95155 - protein, 10 aa, synthetic construct
SSYRGDQSTL

SEQ ID NO: 95156 - protein, 10 aa, synthetic construct
SSYRGDRSQT

SEQ ID NO: 95157 - protein, 10 aa, synthetic construct
SSYRGDLLLS

SEQ ID NO: 95158 - protein, 10 aa, synthetic construct
SSNRGDRGQI

SEQ ID NO: 95159 - protein, 10 aa, synthetic construct
SSARGDRQGI

SEQ ID NO: 95160 - protein, 10 aa, synthetic construct
SSNRGDRQGI

SEQ ID NO: 95161 - protein, 10 aa, synthetic construct
SSNRGDRSVV

SEQ ID NO: 95162 - protein, 10 aa, synthetic construct
SSNRGDRGVV

SEQ ID NO: 95163 - protein, 10 aa, synthetic construct
SSNRGDYVGL

SEQ ID NO: 95164 - protein, 10 aa, synthetic construct
SSNRGDQSTL

SEQ ID NO: 95165 - protein, 10 aa, synthetic construct
SSNRGDRSQT

SEQ ID NO: 95166 - protein, 10 aa, synthetic construct
SSNRGDLLLS

SEQ ID NO: 95167 - protein, 10 aa, synthetic construct
SSQRGDHGVL

SEQ ID NO: 95168 - protein, 10 aa, synthetic construct
SSQRGDHVNL

SEQ ID NO: 95169 - protein, 10 aa, synthetic construct
SSQRGDYVGL

SEQ ID NO: 95170 - protein, 10 aa, synthetic construct
SSARGDRSVV

SEQ ID NO: 95171 - protein, 10 aa, synthetic construct
SSQRGDYSSV

SEQ ID NO: 95172 - protein, 10 aa, synthetic construct
SSQRGDQSTL

SEQ ID NO: 95173 - protein, 10 aa, synthetic construct
SSQRGDLLLS

SEQ ID NO: 95174 - protein, 10 aa, synthetic construct
SSDRGDHGVL

SEQ ID NO: 95175 - protein, 10 aa, synthetic construct
SSDRGDHVNL

SEQ ID NO: 95176 - protein, 10 aa, synthetic construct
SSDRGDYVGL

SEQ ID NO: 95177 - protein, 10 aa, synthetic construct
SSDRGDYSSV

SEQ ID NO: 95178 - protein, 10 aa, synthetic construct
SSDRGDQSTL

SEQ ID NO: 95179 - protein, 10 aa, synthetic construct
SSDRGDLLLS

SEQ ID NO: 95180 - protein, 10 aa, synthetic construct
SSERGDHGVL

SEQ ID NO: 95181 - protein, 10 aa, synthetic construct
SSARGDRGVV

SEQ ID NO: 95182 - protein, 10 aa, synthetic construct
SSERGDHVNL

SEQ ID NO: 95183 - protein, 10 aa, synthetic construct
SSERGDYVGL

SEQ ID NO: 95184 - protein, 10 aa, synthetic construct
SSERGDYSSV

SEQ ID NO: 95185 - protein, 10 aa, synthetic construct
SSERGDQSTL

SEQ ID NO: 95186 - protein, 10 aa, synthetic construct
SSERGDLLLS

SEQ ID NO: 95187 - protein, 10 aa, synthetic construct
STGRGDHGVL

SEQ ID NO: 95188 - protein, 10 aa, synthetic construct
STGRGDYVGL

SEQ ID NO: 95189 - protein, 10 aa, synthetic construct
STGRGDQSTL

SEQ ID NO: 95190 - protein, 10 aa, synthetic construct
STGRGDLLLS

SEQ ID NO: 95191 - protein, 10 aa, synthetic construct
STARGDHGVL

SEQ ID NO: 95192 - protein, 10 aa, synthetic construct
SSARGDRSQT

SEQ ID NO: 95193 - protein, 10 aa, synthetic construct
STARGDYVGL

SEQ ID NO: 95194 - protein, 10 aa, synthetic construct
STARGDQSTL

SEQ ID NO: 95195 - protein, 10 aa, synthetic construct
STARGDLLLS

SEQ ID NO: 95196 - protein, 10 aa, synthetic construct
STVRGDRGQI

SEQ ID NO: 95197 - protein, 10 aa, synthetic construct
STVRGDRQGI

SEQ ID NO: 95198 - protein, 10 aa, synthetic construct
STVRGDRSVV

SEQ ID NO: 95199 - protein, 10 aa, synthetic construct
STVRGDRGVV

SEQ ID NO: 95200 - protein, 10 aa, synthetic construct
STVRGDRSQT

SEQ ID NO: 95201 - protein, 10 aa, synthetic construct
STPRGDHGVL

SEQ ID NO: 95202 - protein, 10 aa, synthetic construct
STPRGDYVGL

SEQ ID NO: 95203 - protein, 10 aa, synthetic construct
SSRRGDRGQI

SEQ ID NO: 95204 - protein, 10 aa, synthetic construct
STPRGDQSTL

SEQ ID NO: 95205 - protein, 10 aa, synthetic construct
STPRGDLLLS

SEQ ID NO: 95206 - protein, 10 aa, synthetic construct
STLRGDRGQI

SEQ ID NO: 95207 - protein, 10 aa, synthetic construct
STLRGDRQGI

SEQ ID NO: 95208 - protein, 10 aa, synthetic construct
STLRGDRSVV

SEQ ID NO: 95209 - protein, 10 aa, synthetic construct
STLRGDRGVV

SEQ ID NO: 95210 - protein, 10 aa, synthetic construct
STLRGDRSQT

SEQ ID NO: 95211 - protein, 10 aa, synthetic construct
STWRGDRGQI

SEQ ID NO: 95212 - protein, 10 aa, synthetic construct
STWRGDRQGI

SEQ ID NO: 95213 - protein, 10 aa, synthetic construct
STWRGDRSVV

SEQ ID NO: 95214 - protein, 10 aa, synthetic construct
SSRRGDRQGI

SEQ ID NO: 95215 - protein, 10 aa, synthetic construct
STWRGDRGVV

SEQ ID NO: 95216 - protein, 10 aa, synthetic construct
STWRGDRSQT

SEQ ID NO: 95217 - protein, 10 aa, synthetic construct
STRRGDHGVL

SEQ ID NO: 95218 - protein, 10 aa, synthetic construct
STRRGDYVGL

SEQ ID NO: 95219 - protein, 10 aa, synthetic construct
STRRGDQSTL

SEQ ID NO: 95220 - protein, 10 aa, synthetic construct
STRRGDLLLS

SEQ ID NO: 95221 - protein, 10 aa, synthetic construct
STHRGDRGQI

SEQ ID NO: 95222 - protein, 10 aa, synthetic construct
STHRGDRQGI

SEQ ID NO: 95223 - protein, 10 aa, synthetic construct
STHRGDRSVV

SEQ ID NO: 95224 - protein, 10 aa, synthetic construct
STHRGDRGVV

SEQ ID NO: 95225 - protein, 10 aa, synthetic construct
SSRRGDRSVV

SEQ ID NO: 95226 - protein, 10 aa, synthetic construct
STHRGDRSQT

SEQ ID NO: 95227 - protein, 10 aa, synthetic construct
STSRGDRGQI

SEQ ID NO: 95228 - protein, 10 aa, synthetic construct
STSRGDRQGI

SEQ ID NO: 95229 - protein, 10 aa, synthetic construct
STSRGDRSVV

SEQ ID NO: 95230 - protein, 10 aa, synthetic construct
STSRGDRGVV

SEQ ID NO: 95231 - protein, 10 aa, synthetic construct
STSRGDRSQT

SEQ ID NO: 95232 - protein, 10 aa, synthetic construct
STTRGDRGQI

SEQ ID NO: 95233 - protein, 10 aa, synthetic construct
STTRGDRQGI

SEQ ID NO: 95234 - protein, 10 aa, synthetic construct
STTRGDRSVV

SEQ ID NO: 95235 - protein, 10 aa, synthetic construct
STTRGDRGVV

SEQ ID NO: 95236 - protein, 10 aa, synthetic construct
SSRRGDRGVV

SEQ ID NO: 95237 - protein, 10 aa, synthetic construct
STTRGDRSQT

SEQ ID NO: 95238 - protein, 10 aa, synthetic construct
STQRGDRGQI

SEQ ID NO: 95239 - protein, 10 aa, synthetic construct
STQRGDRQGI

SEQ ID NO: 95240 - protein, 10 aa, synthetic construct
STQRGDRSVV

SEQ ID NO: 95241 - protein, 10 aa, synthetic construct
STQRGDRGVV

SEQ ID NO: 95242 - protein, 10 aa, synthetic construct
STQRGDRSQT

SEQ ID NO: 95243 - protein, 10 aa, synthetic construct
STDRGDRGQI

SEQ ID NO: 95244 - protein, 10 aa, synthetic construct
STDRGDRQGI

SEQ ID NO: 95245 - protein, 10 aa, synthetic construct
STDRGDRSVV

SEQ ID NO: 95246 - protein, 10 aa, synthetic construct
STDRGDRGVV

SEQ ID NO: 95247 - protein, 10 aa, synthetic construct
SSRRGDRSQT

SEQ ID NO: 95248 - protein, 10 aa, synthetic construct
STDRGDRSQT

SEQ ID NO: 95249 - protein, 10 aa, synthetic construct
STERGDRGQI

SEQ ID NO: 95250 - protein, 10 aa, synthetic construct
STERGDRQGI

SEQ ID NO: 95251 - protein, 10 aa, synthetic construct
STERGDRSVV

SEQ ID NO: 95252 - protein, 10 aa, synthetic construct
STERGDRGVV

SEQ ID NO: 95253 - protein, 10 aa, synthetic construct
STERGDRSQT

SEQ ID NO: 95254 - protein, 10 aa, synthetic construct
SYGRGDRGQI

SEQ ID NO: 95255 - protein, 10 aa, synthetic construct
SYGRGDRQGI

SEQ ID NO: 95256 - protein, 10 aa, synthetic construct
SYGRGDRSVV

SEQ ID NO: 95257 - protein, 10 aa, synthetic construct
SYGRGDRGVV

SEQ ID NO: 95258 - protein, 10 aa, synthetic construct
EKNRGDQSTL

SEQ ID NO: 95259 - protein, 10 aa, synthetic construct
TGGRGDRGQI

SEQ ID NO: 95260 - protein, 10 aa, synthetic construct
SYGRGDRSQT

SEQ ID NO: 95261 - protein, 10 aa, synthetic construct
SYARGDRGQI

SEQ ID NO: 95262 - protein, 10 aa, synthetic construct
SYARGDRQGI

SEQ ID NO: 95263 - protein, 10 aa, synthetic construct
SYARGDRSVV

SEQ ID NO: 95264 - protein, 10 aa, synthetic construct
SYARGDRGVV

SEQ ID NO: 95265 - protein, 10 aa, synthetic construct
SYARGDRSQT

SEQ ID NO: 95266 - protein, 10 aa, synthetic construct
SYPRGDRGQI

SEQ ID NO: 95267 - protein, 10 aa, synthetic construct
SYPRGDRQGI

SEQ ID NO: 95268 - protein, 10 aa, synthetic construct
SYPRGDRSVV

SEQ ID NO: 95269 - protein, 10 aa, synthetic construct
SYPRGDRGVV

SEQ ID NO: 95270 - protein, 10 aa, synthetic construct
TGGRGDRQGI

SEQ ID NO: 95271 - protein, 10 aa, synthetic construct
SYPRGDRSQT

SEQ ID NO: 95272 - protein, 10 aa, synthetic construct
SYRRGDRGQI

SEQ ID NO: 95273 - protein, 10 aa, synthetic construct
SYRRGDRQGI

SEQ ID NO: 95274 - protein, 10 aa, synthetic construct
SYRRGDRSVV

SEQ ID NO: 95275 - protein, 10 aa, synthetic construct
SYRRGDRGVV

SEQ ID NO: 95276 - protein, 10 aa, synthetic construct
SYRRGDRSQT

SEQ ID NO: 95277 - protein, 10 aa, synthetic construct
SNGRGDRGQI

SEQ ID NO: 95278 - protein, 10 aa, synthetic construct
SNGRGDRQGI

SEQ ID NO: 95279 - protein, 10 aa, synthetic construct
SNGRGDRSVV

SEQ ID NO: 95280 - protein, 10 aa, synthetic construct
SNGRGDRGVV

SEQ ID NO: 95281 - protein, 10 aa, synthetic construct
TGGRGDRSVV

SEQ ID NO: 95282 - protein, 10 aa, synthetic construct
SNGRGDRSQT

SEQ ID NO: 95283 - protein, 10 aa, synthetic construct
SNARGDRGQI

SEQ ID NO: 95284 - protein, 10 aa, synthetic construct
SNARGDRQGI

SEQ ID NO: 95285 - protein, 10 aa, synthetic construct
SNARGDRSVV

SEQ ID NO: 95286 - protein, 10 aa, synthetic construct
SNARGDRGVV

SEQ ID NO: 95287 - protein, 10 aa, synthetic construct
SNARGDRSQT

SEQ ID NO: 95288 - protein, 10 aa, synthetic construct
SNPRGDRGQI

SEQ ID NO: 95289 - protein, 10 aa, synthetic construct
SNPRGDRQGI

SEQ ID NO: 95290 - protein, 10 aa, synthetic construct
SNPRGDRSVV

SEQ ID NO: 95291 - protein, 10 aa, synthetic construct
SNPRGDRGVV

SEQ ID NO: 95292 - protein, 10 aa, synthetic construct
TGGRGDRGVV

SEQ ID NO: 95293 - protein, 10 aa, synthetic construct
SNPRGDRSQT

SEQ ID NO: 95294 - protein, 10 aa, synthetic construct
SNRRGDRGQI

SEQ ID NO: 95295 - protein, 10 aa, synthetic construct
SNRRGDRQGI

SEQ ID NO: 95296 - protein, 10 aa, synthetic construct
SNRRGDRSVV

SEQ ID NO: 95297 - protein, 10 aa, synthetic construct
SNRRGDRGVV

SEQ ID NO: 95298 - protein, 10 aa, synthetic construct
SNRRGDRSQT

SEQ ID NO: 95299 - protein, 10 aa, synthetic construct
SQGRGDHGVL

SEQ ID NO: 95300 - protein, 10 aa, synthetic construct
SQGRGDYVGL

SEQ ID NO: 95301 - protein, 10 aa, synthetic construct
SQGRGDQSTL

SEQ ID NO: 95302 - protein, 10 aa, synthetic construct
SQGRGDLLLS

SEQ ID NO: 95303 - protein, 10 aa, synthetic construct
TGGRGDRSQT

SEQ ID NO: 95304 - protein, 10 aa, synthetic construct
SQARGDHGVL

SEQ ID NO: 95305 - protein, 10 aa, synthetic construct
SQARGDYVGL

SEQ ID NO: 95306 - protein, 10 aa, synthetic construct
SQARGDQSTL

SEQ ID NO: 95307 - protein, 10 aa, synthetic construct
SQARGDLLLS

SEQ ID NO: 95308 - protein, 10 aa, synthetic construct
SQVRGDRGQI

SEQ ID NO: 95309 - protein, 10 aa, synthetic construct
SQVRGDRQGI

SEQ ID NO: 95310 - protein, 10 aa, synthetic construct
SQVRGDRSVV

SEQ ID NO: 95311 - protein, 10 aa, synthetic construct
SQVRGDRGVV

SEQ ID NO: 95312 - protein, 10 aa, synthetic construct
SQVRGDRSQT

SEQ ID NO: 95313 - protein, 10 aa, synthetic construct
SQPRGDHGVL

SEQ ID NO: 95314 - protein, 10 aa, synthetic construct
TGARGDRGQI

SEQ ID NO: 95315 - protein, 10 aa, synthetic construct
SQPRGDYVGL

SEQ ID NO: 95316 - protein, 10 aa, synthetic construct
SQPRGDQSTL

SEQ ID NO: 95317 - protein, 10 aa, synthetic construct
SQPRGDLLLS

SEQ ID NO: 95318 - protein, 10 aa, synthetic construct
SQLRGDRGQI

SEQ ID NO: 95319 - protein, 10 aa, synthetic construct
SQLRGDRQGI

SEQ ID NO: 95320 - protein, 10 aa, synthetic construct
SQLRGDRSVV

SEQ ID NO: 95321 - protein, 10 aa, synthetic construct
SQLRGDRGVV

SEQ ID NO: 95322 - protein, 10 aa, synthetic construct
SQLRGDRSQT

SEQ ID NO: 95323 - protein, 10 aa, synthetic construct
SQWRGDRGQI

SEQ ID NO: 95324 - protein, 10 aa, synthetic construct
SQWRGDRQGI

SEQ ID NO: 95325 - protein, 10 aa, synthetic construct
TGARGDRQGI

SEQ ID NO: 95326 - protein, 10 aa, synthetic construct
SQWRGDRSVV

SEQ ID NO: 95327 - protein, 10 aa, synthetic construct
SQWRGDRGVV

SEQ ID NO: 95328 - protein, 10 aa, synthetic construct
SQWRGDRSQT

SEQ ID NO: 95329 - protein, 10 aa, synthetic construct
SQRRGDHGVL

SEQ ID NO: 95330 - protein, 10 aa, synthetic construct
SQRRGDYVGL

SEQ ID NO: 95331 - protein, 10 aa, synthetic construct
SQRRGDQSTL

SEQ ID NO: 95332 - protein, 10 aa, synthetic construct
SQRRGDLLLS

SEQ ID NO: 95333 - protein, 10 aa, synthetic construct
SQHRGDRGQI

SEQ ID NO: 95334 - protein, 10 aa, synthetic construct
SQHRGDRQGI

SEQ ID NO: 95335 - protein, 10 aa, synthetic construct
SQHRGDRSVV

SEQ ID NO: 95336 - protein, 10 aa, synthetic construct
TGARGDRSVV

SEQ ID NO: 95337 - protein, 10 aa, synthetic construct
SQHRGDRGVV

SEQ ID NO: 95338 - protein, 10 aa, synthetic construct
SQHRGDRSQT

SEQ ID NO: 95339 - protein, 10 aa, synthetic construct
SQSRGDRGQI

SEQ ID NO: 95340 - protein, 10 aa, synthetic construct
SQSRGDRQGI

SEQ ID NO: 95341 - protein, 10 aa, synthetic construct
SQSRGDRSVV

SEQ ID NO: 95342 - protein, 10 aa, synthetic construct
SQSRGDRGVV

SEQ ID NO: 95343 - protein, 10 aa, synthetic construct
SQSRGDRSQT

SEQ ID NO: 95344 - protein, 10 aa, synthetic construct
SQTRGDRGQI

SEQ ID NO: 95345 - protein, 10 aa, synthetic construct
SQTRGDRQGI

SEQ ID NO: 95346 - protein, 10 aa, synthetic construct
SQTRGDRSVV

SEQ ID NO: 95347 - protein, 10 aa, synthetic construct
TGARGDRGVV

SEQ ID NO: 95348 - protein, 10 aa, synthetic construct
SQTRGDRGVV

SEQ ID NO: 95349 - protein, 10 aa, synthetic construct
SQTRGDRSQT

SEQ ID NO: 95350 - protein, 10 aa, synthetic construct
SQQRGDRGQI

SEQ ID NO: 95351 - protein, 10 aa, synthetic construct
SQQRGDRQGI

SEQ ID NO: 95352 - protein, 10 aa, synthetic construct
SQQRGDRSVV

SEQ ID NO: 95353 - protein, 10 aa, synthetic construct
SQQRGDRGVV

SEQ ID NO: 95354 - protein, 10 aa, synthetic construct
SQQRGDRSQT

SEQ ID NO: 95355 - protein, 10 aa, synthetic construct
SQDRGDRGQI

SEQ ID NO: 95356 - protein, 10 aa, synthetic construct
SQDRGDRQGI

SEQ ID NO: 95357 - protein, 10 aa, synthetic construct
SQDRGDRSVV

SEQ ID NO: 95358 - protein, 10 aa, synthetic construct
TGARGDRSQT

SEQ ID NO: 95359 - protein, 10 aa, synthetic construct
SQDRGDRGVV

SEQ ID NO: 95360 - protein, 10 aa, synthetic construct
SQDRGDRSQT

SEQ ID NO: 95361 - protein, 10 aa, synthetic construct
SQERGDRGQI

SEQ ID NO: 95362 - protein, 10 aa, synthetic construct
SQERGDRQGI

SEQ ID NO: 95363 - protein, 10 aa, synthetic construct
SQERGDRSVV

SEQ ID NO: 95364 - protein, 10 aa, synthetic construct
SQERGDRGVV

SEQ ID NO: 95365 - protein, 10 aa, synthetic construct
SQERGDRSQT

SEQ ID NO: 95366 - protein, 10 aa, synthetic construct
SDGRGDHGVL

SEQ ID NO: 95367 - protein, 10 aa, synthetic construct
SDGRGDYVGL

SEQ ID NO: 95368 - protein, 10 aa, synthetic construct
SDGRGDQSTL

SEQ ID NO: 95369 - protein, 10 aa, synthetic construct
EKNRGDLLLS

SEQ ID NO: 95370 - protein, 10 aa, synthetic construct
TGPRGDRGQI

SEQ ID NO: 95371 - protein, 10 aa, synthetic construct
SDGRGDLLLS

SEQ ID NO: 95372 - protein, 10 aa, synthetic construct
SDARGDHGVL

SEQ ID NO: 95373 - protein, 10 aa, synthetic construct
SDARGDYVGL

SEQ ID NO: 95374 - protein, 10 aa, synthetic construct
SDARGDQSTL

SEQ ID NO: 95375 - protein, 10 aa, synthetic construct
SDARGDLLLS

SEQ ID NO: 95376 - protein, 10 aa, synthetic construct
SDVRGDRGQI

SEQ ID NO: 95377 - protein, 10 aa, synthetic construct
SDVRGDRQGI

SEQ ID NO: 95378 - protein, 10 aa, synthetic construct
SDVRGDRSVV

SEQ ID NO: 95379 - protein, 10 aa, synthetic construct
SDVRGDRGVV

SEQ ID NO: 95380 - protein, 10 aa, synthetic construct
SDVRGDRSQT

SEQ ID NO: 95381 - protein, 10 aa, synthetic construct
TGPRGDRQGI

SEQ ID NO: 95382 - protein, 10 aa, synthetic construct
SDPRGDHGVL

SEQ ID NO: 95383 - protein, 10 aa, synthetic construct
SDPRGDYVGL

SEQ ID NO: 95384 - protein, 10 aa, synthetic construct
SDPRGDQSTL

SEQ ID NO: 95385 - protein, 10 aa, synthetic construct
SDPRGDLLLS

SEQ ID NO: 95386 - protein, 10 aa, synthetic construct
SDLRGDRGQI

SEQ ID NO: 95387 - protein, 10 aa, synthetic construct
SDLRGDRQGI

SEQ ID NO: 95388 - protein, 10 aa, synthetic construct
SDLRGDRSVV

SEQ ID NO: 95389 - protein, 10 aa, synthetic construct
SDLRGDRGVV

SEQ ID NO: 95390 - protein, 10 aa, synthetic construct
SDLRGDRSQT

SEQ ID NO: 95391 - protein, 10 aa, synthetic construct
SDWRGDRGQI

SEQ ID NO: 95392 - protein, 10 aa, synthetic construct
TGPRGDRSVV

SEQ ID NO: 95393 - protein, 10 aa, synthetic construct
SDWRGDRQGI

SEQ ID NO: 95394 - protein, 10 aa, synthetic construct
SDWRGDRSVV

SEQ ID NO: 95395 - protein, 10 aa, synthetic construct
SDWRGDRGVV

SEQ ID NO: 95396 - protein, 10 aa, synthetic construct
SDWRGDRSQT

SEQ ID NO: 95397 - protein, 10 aa, synthetic construct
SDRRGDHGVL

SEQ ID NO: 95398 - protein, 10 aa, synthetic construct
SDRRGDYVGL

SEQ ID NO: 95399 - protein, 10 aa, synthetic construct
SDRRGDQSTL

SEQ ID NO: 95400 - protein, 10 aa, synthetic construct
SDRRGDLLLS

SEQ ID NO: 95401 - protein, 10 aa, synthetic construct
SDHRGDRGQI

SEQ ID NO: 95402 - protein, 10 aa, synthetic construct
SDHRGDRQGI

SEQ ID NO: 95403 - protein, 10 aa, synthetic construct
TGPRGDRGVV

SEQ ID NO: 95404 - protein, 10 aa, synthetic construct
SDHRGDRSVV

SEQ ID NO: 95405 - protein, 10 aa, synthetic construct
SDHRGDRGVV

SEQ ID NO: 95406 - protein, 10 aa, synthetic construct
SDHRGDRSQT

SEQ ID NO: 95407 - protein, 10 aa, synthetic construct
SDSRGDRGQI

SEQ ID NO: 95408 - protein, 10 aa, synthetic construct
SDSRGDRQGI

SEQ ID NO: 95409 - protein, 10 aa, synthetic construct
SDSRGDRSVV

SEQ ID NO: 95410 - protein, 10 aa, synthetic construct
SDSRGDRGVV

SEQ ID NO: 95411 - protein, 10 aa, synthetic construct
SDSRGDRSQT

SEQ ID NO: 95412 - protein, 10 aa, synthetic construct
SDTRGDRGQI

SEQ ID NO: 95413 - protein, 10 aa, synthetic construct
SDTRGDRQGI

SEQ ID NO: 95414 - protein, 10 aa, synthetic construct
TGPRGDRSQT

SEQ ID NO: 95415 - protein, 10 aa, synthetic construct
SDTRGDRSVV

SEQ ID NO: 95416 - protein, 10 aa, synthetic construct
SDTRGDRGVV

SEQ ID NO: 95417 - protein, 10 aa, synthetic construct
SDTRGDRSQT

SEQ ID NO: 95418 - protein, 10 aa, synthetic construct
SDQRGDRGQI

SEQ ID NO: 95419 - protein, 10 aa, synthetic construct
SDQRGDRQGI

SEQ ID NO: 95420 - protein, 10 aa, synthetic construct
SDQRGDRSVV

SEQ ID NO: 95421 - protein, 10 aa, synthetic construct
SDQRGDRGVV

SEQ ID NO: 95422 - protein, 10 aa, synthetic construct
SDQRGDRSQT

SEQ ID NO: 95423 - protein, 10 aa, synthetic construct
SDDRGDRGQI

SEQ ID NO: 95424 - protein, 10 aa, synthetic construct
SDDRGDRQGI

SEQ ID NO: 95425 - protein, 10 aa, synthetic construct
TGRRGDRGQI

SEQ ID NO: 95426 - protein, 10 aa, synthetic construct
SDDRGDRSVV

SEQ ID NO: 95427 - protein, 10 aa, synthetic construct
SDDRGDRGVV

SEQ ID NO: 95428 - protein, 10 aa, synthetic construct
SDDRGDRSQT

SEQ ID NO: 95429 - protein, 10 aa, synthetic construct
SDERGDRGQI

SEQ ID NO: 95430 - protein, 10 aa, synthetic construct
SDERGDRQGI

SEQ ID NO: 95431 - protein, 10 aa, synthetic construct
SDERGDRSVV

SEQ ID NO: 95432 - protein, 10 aa, synthetic construct
SDERGDRGVV

SEQ ID NO: 95433 - protein, 10 aa, synthetic construct
SDERGDRSQT

SEQ ID NO: 95434 - protein, 10 aa, synthetic construct
SEGRGDHGVL

SEQ ID NO: 95435 - protein, 10 aa, synthetic construct
SEGRGDYVGL

SEQ ID NO: 95436 - protein, 10 aa, synthetic construct
TGRRGDRQGI

SEQ ID NO: 95437 - protein, 10 aa, synthetic construct
SEGRGDQSTL

SEQ ID NO: 95438 - protein, 10 aa, synthetic construct
SEGRGDLLLS

SEQ ID NO: 95439 - protein, 10 aa, synthetic construct
SEARGDHGVL

SEQ ID NO: 95440 - protein, 10 aa, synthetic construct
SEARGDYVGL

SEQ ID NO: 95441 - protein, 10 aa, synthetic construct
SEARGDQSTL

SEQ ID NO: 95442 - protein, 10 aa, synthetic construct
SEARGDLLLS

SEQ ID NO: 95443 - protein, 10 aa, synthetic construct
SEVRGDRGQI

SEQ ID NO: 95444 - protein, 10 aa, synthetic construct
SEVRGDRQGI

SEQ ID NO: 95445 - protein, 10 aa, synthetic construct
SEVRGDRSVV

SEQ ID NO: 95446 - protein, 10 aa, synthetic construct
SEVRGDRGVV

SEQ ID NO: 95447 - protein, 10 aa, synthetic construct
TGRRGDRSVV

SEQ ID NO: 95448 - protein, 10 aa, synthetic construct
SEVRGDRSQT

SEQ ID NO: 95449 - protein, 10 aa, synthetic construct
SEPRGDHGVL

SEQ ID NO: 95450 - protein, 10 aa, synthetic construct
SEPRGDYVGL

SEQ ID NO: 95451 - protein, 10 aa, synthetic construct
SEPRGDQSTL

SEQ ID NO: 95452 - protein, 10 aa, synthetic construct
SEPRGDLLLS

SEQ ID NO: 95453 - protein, 10 aa, synthetic construct
SELRGDRGQI

SEQ ID NO: 95454 - protein, 10 aa, synthetic construct
SELRGDRQGI

SEQ ID NO: 95455 - protein, 10 aa, synthetic construct
SELRGDRSVV

SEQ ID NO: 95456 - protein, 10 aa, synthetic construct
SELRGDRGVV

SEQ ID NO: 95457 - protein, 10 aa, synthetic construct
SELRGDRSQT

SEQ ID NO: 95458 - protein, 10 aa, synthetic construct
TGRRGDRGVV

SEQ ID NO: 95459 - protein, 10 aa, synthetic construct
SEWRGDRGQI

SEQ ID NO: 95460 - protein, 10 aa, synthetic construct
SEWRGDRQGI

SEQ ID NO: 95461 - protein, 10 aa, synthetic construct
SEWRGDRSVV

SEQ ID NO: 95462 - protein, 10 aa, synthetic construct
SEWRGDRGVV

SEQ ID NO: 95463 - protein, 10 aa, synthetic construct
SEWRGDRSQT

SEQ ID NO: 95464 - protein, 10 aa, synthetic construct
SERRGDHGVL

SEQ ID NO: 95465 - protein, 10 aa, synthetic construct
SERRGDYVGL

SEQ ID NO: 95466 - protein, 10 aa, synthetic construct
SERRGDQSTL

SEQ ID NO: 95467 - protein, 10 aa, synthetic construct
SERRGDLLLS

SEQ ID NO: 95468 - protein, 10 aa, synthetic construct
SEHRGDRGQI

SEQ ID NO: 95469 - protein, 10 aa, synthetic construct
TGRRGDRSQT

SEQ ID NO: 95470 - protein, 10 aa, synthetic construct
SEHRGDRQGI

SEQ ID NO: 95471 - protein, 10 aa, synthetic construct
SEHRGDRSVV

SEQ ID NO: 95472 - protein, 10 aa, synthetic construct
SEHRGDRGVV

SEQ ID NO: 95473 - protein, 10 aa, synthetic construct
SEHRGDRSQT

SEQ ID NO: 95474 - protein, 10 aa, synthetic construct
SESRGDRGQI

SEQ ID NO: 95475 - protein, 10 aa, synthetic construct
SESRGDRQGI

SEQ ID NO: 95476 - protein, 10 aa, synthetic construct
SESRGDRSVV

SEQ ID NO: 95477 - protein, 10 aa, synthetic construct
SESRGDRGVV

SEQ ID NO: 95478 - protein, 10 aa, synthetic construct
SESRGDRSQT

SEQ ID NO: 95479 - protein, 10 aa, synthetic construct
SETRGDRGQI

SEQ ID NO: 95480 - protein, 10 aa, synthetic construct
NKKRGDRSVV

SEQ ID NO: 95481 - protein, 10 aa, synthetic construct
TAGRGDRGQI

SEQ ID NO: 95482 - protein, 10 aa, synthetic construct
SETRGDRQGI

SEQ ID NO: 95483 - protein, 10 aa, synthetic construct
SETRGDRSVV

SEQ ID NO: 95484 - protein, 10 aa, synthetic construct
SETRGDRGVV

SEQ ID NO: 95485 - protein, 10 aa, synthetic construct
SETRGDRSQT

SEQ ID NO: 95486 - protein, 10 aa, synthetic construct
SEQRGDRGQI

SEQ ID NO: 95487 - protein, 10 aa, synthetic construct
SEQRGDRQGI

SEQ ID NO: 95488 - protein, 10 aa, synthetic construct
SEQRGDRSVV

SEQ ID NO: 95489 - protein, 10 aa, synthetic construct
SEQRGDRGVV

SEQ ID NO: 95490 - protein, 10 aa, synthetic construct
SEQRGDRSQT

SEQ ID NO: 95491 - protein, 10 aa, synthetic construct
SEDRGDRGQI

SEQ ID NO: 95492 - protein, 10 aa, synthetic construct
TAGRGDRQGI

SEQ ID NO: 95493 - protein, 10 aa, synthetic construct
SEDRGDRQGI

SEQ ID NO: 95494 - protein, 10 aa, synthetic construct
SEDRGDRSVV

SEQ ID NO: 95495 - protein, 10 aa, synthetic construct
SEDRGDRGVV

SEQ ID NO: 95496 - protein, 10 aa, synthetic construct
SEDRGDRSQT

SEQ ID NO: 95497 - protein, 10 aa, synthetic construct
SEERGDRGQI

SEQ ID NO: 95498 - protein, 10 aa, synthetic construct
SEERGDRQGI

SEQ ID NO: 95499 - protein, 10 aa, synthetic construct
SEERGDRSVV

SEQ ID NO: 95500 - protein, 10 aa, synthetic construct
SEERGDRGVV

SEQ ID NO: 95501 - protein, 10 aa, synthetic construct
SEERGDRSQT

SEQ ID NO: 95502 - protein, 10 aa, synthetic construct
TGGRGDHVNL

SEQ ID NO: 95503 - protein, 10 aa, synthetic construct
TAGRGDRSVV

SEQ ID NO: 95504 - protein, 10 aa, synthetic construct
TGGRGDRDYL

SEQ ID NO: 95505 - protein, 10 aa, synthetic construct
TGGRGDYSSV

SEQ ID NO: 95506 - protein, 10 aa, synthetic construct
TGGRGDLTVT

SEQ ID NO: 95507 - protein, 10 aa, synthetic construct
TGGRGDLIGR

SEQ ID NO: 95508 - protein, 10 aa, synthetic construct
TGARGDHVNL

SEQ ID NO: 95509 - protein, 10 aa, synthetic construct
TGARGDRDYL

SEQ ID NO: 95510 - protein, 10 aa, synthetic construct
TGARGDYSSV

SEQ ID NO: 95511 - protein, 10 aa, synthetic construct
TGARGDLTVT

SEQ ID NO: 95512 - protein, 10 aa, synthetic construct
TGARGDLIGR

SEQ ID NO: 95513 - protein, 10 aa, synthetic construct
TGVRGDHGVL

SEQ ID NO: 95514 - protein, 10 aa, synthetic construct
TAGRGDRGVV

SEQ ID NO: 95515 - protein, 10 aa, synthetic construct
TGVRGDYVGL

SEQ ID NO: 95516 - protein, 10 aa, synthetic construct
TGVRGDQSTL

SEQ ID NO: 95517 - protein, 10 aa, synthetic construct
TGVRGDLLLS

SEQ ID NO: 95518 - protein, 10 aa, synthetic construct
TGPRGDHVNL

SEQ ID NO: 95519 - protein, 10 aa, synthetic construct
TGPRGDRDYL

SEQ ID NO: 95520 - protein, 10 aa, synthetic construct
TGPRGDYSSV

SEQ ID NO: 95521 - protein, 10 aa, synthetic construct
TGPRGDLTVT

SEQ ID NO: 95522 - protein, 10 aa, synthetic construct
TGPRGDLIGR

SEQ ID NO: 95523 - protein, 10 aa, synthetic construct
TGLRGDHGVL

SEQ ID NO: 95524 - protein, 10 aa, synthetic construct
TGLRGDYVGL

SEQ ID NO: 95525 - protein, 10 aa, synthetic construct
TAGRGDRSQT

SEQ ID NO: 95526 - protein, 10 aa, synthetic construct
TGLRGDQSTL

SEQ ID NO: 95527 - protein, 10 aa, synthetic construct
TGLRGDLLLS

SEQ ID NO: 95528 - protein, 10 aa, synthetic construct
TGIRGDRGQI

SEQ ID NO: 95529 - protein, 10 aa, synthetic construct
TGIRGDRQGI

SEQ ID NO: 95530 - protein, 10 aa, synthetic construct
TGIRGDRSVV

SEQ ID NO: 95531 - protein, 10 aa, synthetic construct
TGIRGDRGVV

SEQ ID NO: 95532 - protein, 10 aa, synthetic construct
TGIRGDRSQT

SEQ ID NO: 95533 - protein, 10 aa, synthetic construct
TGMRGDRGQI

SEQ ID NO: 95534 - protein, 10 aa, synthetic construct
TGMRGDRQGI

SEQ ID NO: 95535 - protein, 10 aa, synthetic construct
TGMRGDRSVV

SEQ ID NO: 95536 - protein, 10 aa, synthetic construct
TAARGDRGQI

SEQ ID NO: 95537 - protein, 10 aa, synthetic construct
TGMRGDRGVV

SEQ ID NO: 95538 - protein, 10 aa, synthetic construct
TGMRGDRSQT

SEQ ID NO: 95539 - protein, 10 aa, synthetic construct
TGWRGDHGVL

SEQ ID NO: 95540 - protein, 10 aa, synthetic construct
TGWRGDYVGL

SEQ ID NO: 95541 - protein, 10 aa, synthetic construct
TGWRGDQSTL

SEQ ID NO: 95542 - protein, 10 aa, synthetic construct
TGWRGDLLLS

SEQ ID NO: 95543 - protein, 10 aa, synthetic construct
TGFRGDRGQI

SEQ ID NO: 95544 - protein, 10 aa, synthetic construct
TGFRGDRQGI

SEQ ID NO: 95545 - protein, 10 aa, synthetic construct
TGFRGDRSVV

SEQ ID NO: 95546 - protein, 10 aa, synthetic construct
TGFRGDRGVV

SEQ ID NO: 95547 - protein, 10 aa, synthetic construct
TAARGDRQGI

SEQ ID NO: 95548 - protein, 10 aa, synthetic construct
TGFRGDRSQT

SEQ ID NO: 95549 - protein, 10 aa, synthetic construct
TGKRGDRGQI

SEQ ID NO: 95550 - protein, 10 aa, synthetic construct
TGKRGDRQGI

SEQ ID NO: 95551 - protein, 10 aa, synthetic construct
TGKRGDRSVV

SEQ ID NO: 95552 - protein, 10 aa, synthetic construct
TGKRGDRGVV

SEQ ID NO: 95553 - protein, 10 aa, synthetic construct
TGKRGDRSQT

SEQ ID NO: 95554 - protein, 10 aa, synthetic construct
TGRRGDHVNL

SEQ ID NO: 95555 - protein, 10 aa, synthetic construct
TGRRGDRDYL

SEQ ID NO: 95556 - protein, 10 aa, synthetic construct
TGRRGDYSSV

SEQ ID NO: 95557 - protein, 10 aa, synthetic construct
TGRRGDLTVT

SEQ ID NO: 95558 - protein, 10 aa, synthetic construct
TAARGDRSVV

SEQ ID NO: 95559 - protein, 10 aa, synthetic construct
TGRRGDLIGR

SEQ ID NO: 95560 - protein, 10 aa, synthetic construct
TGHRGDHGVL

SEQ ID NO: 95561 - protein, 10 aa, synthetic construct
TGHRGDYVGL

SEQ ID NO: 95562 - protein, 10 aa, synthetic construct
TGHRGDQSTL

SEQ ID NO: 95563 - protein, 10 aa, synthetic construct
TGHRGDLLLS

SEQ ID NO: 95564 - protein, 10 aa, synthetic construct
TGSRGDHGVL

SEQ ID NO: 95565 - protein, 10 aa, synthetic construct
TGSRGDYVGL

SEQ ID NO: 95566 - protein, 10 aa, synthetic construct
TGSRGDQSTL

SEQ ID NO: 95567 - protein, 10 aa, synthetic construct
TGSRGDLLLS

SEQ ID NO: 95568 - protein, 10 aa, synthetic construct
TGTRGDHGVL

SEQ ID NO: 95569 - protein, 10 aa, synthetic construct
TAARGDRGVV

SEQ ID NO: 95570 - protein, 10 aa, synthetic construct
TGTRGDYVGL

SEQ ID NO: 95571 - protein, 10 aa, synthetic construct
TGTRGDQSTL

SEQ ID NO: 95572 - protein, 10 aa, synthetic construct
TGTRGDLLLS

SEQ ID NO: 95573 - protein, 10 aa, synthetic construct
TGYRGDRGQI

SEQ ID NO: 95574 - protein, 10 aa, synthetic construct
TGYRGDRQGI

SEQ ID NO: 95575 - protein, 10 aa, synthetic construct
TGYRGDRSVV

SEQ ID NO: 95576 - protein, 10 aa, synthetic construct
TGYRGDRGVV

SEQ ID NO: 95577 - protein, 10 aa, synthetic construct
TGYRGDRSQT

SEQ ID NO: 95578 - protein, 10 aa, synthetic construct
TGNRGDRGQI

SEQ ID NO: 95579 - protein, 10 aa, synthetic construct
TGNRGDRQGI

SEQ ID NO: 95580 - protein, 10 aa, synthetic construct
TAARGDRSQT

SEQ ID NO: 95581 - protein, 10 aa, synthetic construct
TGNRGDRSVV

SEQ ID NO: 95582 - protein, 10 aa, synthetic construct
TGNRGDRGVV

SEQ ID NO: 95583 - protein, 10 aa, synthetic construct
TGNRGDRSQT

SEQ ID NO: 95584 - protein, 10 aa, synthetic construct
TGQRGDHGVL

SEQ ID NO: 95585 - protein, 10 aa, synthetic construct
TGQRGDYVGL

SEQ ID NO: 95586 - protein, 10 aa, synthetic construct
TGQRGDQSTL

SEQ ID NO: 95587 - protein, 10 aa, synthetic construct
TGQRGDLLLS

SEQ ID NO: 95588 - protein, 10 aa, synthetic construct
TGDRGDHGVL

SEQ ID NO: 95589 - protein, 10 aa, synthetic construct
TGDRGDYVGL

SEQ ID NO: 95590 - protein, 10 aa, synthetic construct
TGDRGDQSTL

SEQ ID NO: 95591 - protein, 10 aa, synthetic construct
TKNRGDRSVV

SEQ ID NO: 95592 - protein, 10 aa, synthetic construct
NKKRGDRGVV

SEQ ID NO: 95593 - protein, 10 aa, synthetic construct
TAPRGDRGQI

SEQ ID NO: 95594 - protein, 10 aa, synthetic construct
TGDRGDLLLS

SEQ ID NO: 95595 - protein, 10 aa, synthetic construct
TGERGDHGVL

SEQ ID NO: 95596 - protein, 10 aa, synthetic construct
TGERGDYVGL

SEQ ID NO: 95597 - protein, 10 aa, synthetic construct
TGERGDQSTL

SEQ ID NO: 95598 - protein, 10 aa, synthetic construct
TGERGDLLLS

SEQ ID NO: 95599 - protein, 10 aa, synthetic construct
TAGRGDHVNL

SEQ ID NO: 95600 - protein, 10 aa, synthetic construct
TAGRGDRDYL

SEQ ID NO: 95601 - protein, 10 aa, synthetic construct
TAGRGDYSSV

SEQ ID NO: 95602 - protein, 10 aa, synthetic construct
TAGRGDLTVT

SEQ ID NO: 95603 - protein, 10 aa, synthetic construct
TAGRGDLIGR

SEQ ID NO: 95604 - protein, 10 aa, synthetic construct
TAPRGDRQGI

SEQ ID NO: 95605 - protein, 10 aa, synthetic construct
TAARGDHVNL

SEQ ID NO: 95606 - protein, 10 aa, synthetic construct
TAARGDRDYL

SEQ ID NO: 95607 - protein, 10 aa, synthetic construct
TAARGDYSSV

SEQ ID NO: 95608 - protein, 10 aa, synthetic construct
TAARGDLTVT

SEQ ID NO: 95609 - protein, 10 aa, synthetic construct
TAARGDLIGR

SEQ ID NO: 95610 - protein, 10 aa, synthetic construct
TAVRGDHGVL

SEQ ID NO: 95611 - protein, 10 aa, synthetic construct
TAVRGDYVGL

SEQ ID NO: 95612 - protein, 10 aa, synthetic construct
TAVRGDQSTL

SEQ ID NO: 95613 - protein, 10 aa, synthetic construct
TAVRGDLLLS

SEQ ID NO: 95614 - protein, 10 aa, synthetic construct
TAPRGDHVNL

SEQ ID NO: 95615 - protein, 10 aa, synthetic construct
TAPRGDRSVV

SEQ ID NO: 95616 - protein, 10 aa, synthetic construct
TAPRGDRDYL

SEQ ID NO: 95617 - protein, 10 aa, synthetic construct
TAPRGDYSSV

SEQ ID NO: 95618 - protein, 10 aa, synthetic construct
TAPRGDLTVT

SEQ ID NO: 95619 - protein, 10 aa, synthetic construct
TAPRGDLIGR

SEQ ID NO: 95620 - protein, 10 aa, synthetic construct
TALRGDHGVL

SEQ ID NO: 95621 - protein, 10 aa, synthetic construct
TALRGDYVGL

SEQ ID NO: 95622 - protein, 10 aa, synthetic construct
TALRGDQSTL

SEQ ID NO: 95623 - protein, 10 aa, synthetic construct
TALRGDLLLS

SEQ ID NO: 95624 - protein, 10 aa, synthetic construct
TAIRGDRGQI

SEQ ID NO: 95625 - protein, 10 aa, synthetic construct
TAIRGDRQGI

SEQ ID NO: 95626 - protein, 10 aa, synthetic construct
TAPRGDRGVV

SEQ ID NO: 95627 - protein, 10 aa, synthetic construct
TAIRGDRSVV

SEQ ID NO: 95628 - protein, 10 aa, synthetic construct
TAIRGDRGVV

SEQ ID NO: 95629 - protein, 10 aa, synthetic construct
TAIRGDRSQT

SEQ ID NO: 95630 - protein, 10 aa, synthetic construct
TAMRGDRGQI

SEQ ID NO: 95631 - protein, 10 aa, synthetic construct
TAMRGDRQGI

SEQ ID NO: 95632 - protein, 10 aa, synthetic construct
TAMRGDRSVV

SEQ ID NO: 95633 - protein, 10 aa, synthetic construct
TAMRGDRGVV

SEQ ID NO: 95634 - protein, 10 aa, synthetic construct
TAMRGDRSQT

SEQ ID NO: 95635 - protein, 10 aa, synthetic construct
TAWRGDHGVL

SEQ ID NO: 95636 - protein, 10 aa, synthetic construct
TAWRGDYVGL

SEQ ID NO: 95637 - protein, 10 aa, synthetic construct
TAPRGDRSQT

SEQ ID NO: 95638 - protein, 10 aa, synthetic construct
TAWRGDQSTL

SEQ ID NO: 95639 - protein, 10 aa, synthetic construct
TAWRGDLLLS

SEQ ID NO: 95640 - protein, 10 aa, synthetic construct
TAFRGDRGQI

SEQ ID NO: 95641 - protein, 10 aa, synthetic construct
TAFRGDRQGI

SEQ ID NO: 95642 - protein, 10 aa, synthetic construct
TAFRGDRSVV

SEQ ID NO: 95643 - protein, 10 aa, synthetic construct
TAFRGDRGVV

SEQ ID NO: 95644 - protein, 10 aa, synthetic construct
TAFRGDRSQT

SEQ ID NO: 95645 - protein, 10 aa, synthetic construct
TAKRGDRGQI

SEQ ID NO: 95646 - protein, 10 aa, synthetic construct
TAKRGDRQGI

SEQ ID NO: 95647 - protein, 10 aa, synthetic construct
TAKRGDRSVV

SEQ ID NO: 95648 - protein, 10 aa, synthetic construct
TARRGDRGQI

SEQ ID NO: 95649 - protein, 10 aa, synthetic construct
TAKRGDRGVV

SEQ ID NO: 95650 - protein, 10 aa, synthetic construct
TAKRGDRSQT

SEQ ID NO: 95651 - protein, 10 aa, synthetic construct
TARRGDHVNL

SEQ ID NO: 95652 - protein, 10 aa, synthetic construct
TARRGDRDYL

SEQ ID NO: 95653 - protein, 10 aa, synthetic construct
TARRGDYSSV

SEQ ID NO: 95654 - protein, 10 aa, synthetic construct
TARRGDLTVT

SEQ ID NO: 95655 - protein, 10 aa, synthetic construct
TARRGDLIGR

SEQ ID NO: 95656 - protein, 10 aa, synthetic construct
TAHRGDHGVL

SEQ ID NO: 95657 - protein, 10 aa, synthetic construct
TAHRGDYVGL

SEQ ID NO: 95658 - protein, 10 aa, synthetic construct
TAHRGDQSTL

SEQ ID NO: 95659 - protein, 10 aa, synthetic construct
TARRGDRQGI

SEQ ID NO: 95660 - protein, 10 aa, synthetic construct
TAHRGDLLLS

SEQ ID NO: 95661 - protein, 10 aa, synthetic construct
TASRGDHGVL

SEQ ID NO: 95662 - protein, 10 aa, synthetic construct
TASRGDYVGL

SEQ ID NO: 95663 - protein, 10 aa, synthetic construct
TASRGDQSTL

SEQ ID NO: 95664 - protein, 10 aa, synthetic construct
TASRGDLLLS

SEQ ID NO: 95665 - protein, 10 aa, synthetic construct
TATRGDHGVL

SEQ ID NO: 95666 - protein, 10 aa, synthetic construct
TATRGDYVGL

SEQ ID NO: 95667 - protein, 10 aa, synthetic construct
TATRGDQSTL

SEQ ID NO: 95668 - protein, 10 aa, synthetic construct
TATRGDLLLS

SEQ ID NO: 95669 - protein, 10 aa, synthetic construct
TAYRGDRGQI

SEQ ID NO: 95670 - protein, 10 aa, synthetic construct
TARRGDRSVV

SEQ ID NO: 95671 - protein, 10 aa, synthetic construct
TAYRGDRQGI

SEQ ID NO: 95672 - protein, 10 aa, synthetic construct
TAYRGDRSVV

SEQ ID NO: 95673 - protein, 10 aa, synthetic construct
TAYRGDRGVV

SEQ ID NO: 95674 - protein, 10 aa, synthetic construct
TAYRGDRSQT

SEQ ID NO: 95675 - protein, 10 aa, synthetic construct
TANRGDRGQI

SEQ ID NO: 95676 - protein, 10 aa, synthetic construct
TANRGDRQGI

SEQ ID NO: 95677 - protein, 10 aa, synthetic construct
TANRGDRSVV

SEQ ID NO: 95678 - protein, 10 aa, synthetic construct
TANRGDRGVV

SEQ ID NO: 95679 - protein, 10 aa, synthetic construct
TANRGDRSQT

SEQ ID NO: 95680 - protein, 10 aa, synthetic construct
TAQRGDHGVL

SEQ ID NO: 95681 - protein, 10 aa, synthetic construct
TARRGDRGVV

SEQ ID NO: 95682 - protein, 10 aa, synthetic construct
TAQRGDYVGL

SEQ ID NO: 95683 - protein, 10 aa, synthetic construct
TAQRGDQSTL

SEQ ID NO: 95684 - protein, 10 aa, synthetic construct
TAQRGDLLLS

SEQ ID NO: 95685 - protein, 10 aa, synthetic construct
TADRGDHGVL

SEQ ID NO: 95686 - protein, 10 aa, synthetic construct
TADRGDYVGL

SEQ ID NO: 95687 - protein, 10 aa, synthetic construct
TADRGDQSTL

SEQ ID NO: 95688 - protein, 10 aa, synthetic construct
TADRGDLLLS

SEQ ID NO: 95689 - protein, 10 aa, synthetic construct
TAERGDHGVL

SEQ ID NO: 95690 - protein, 10 aa, synthetic construct
TAERGDYVGL

SEQ ID NO: 95691 - protein, 10 aa, synthetic construct
TAERGDQSTL

SEQ ID NO: 95692 - protein, 10 aa, synthetic construct
TARRGDRSQT

SEQ ID NO: 95693 - protein, 10 aa, synthetic construct
TAERGDLLLS

SEQ ID NO: 95694 - protein, 10 aa, synthetic construct
TVGRGDHVNL

SEQ ID NO: 95695 - protein, 10 aa, synthetic construct
TVGRGDRDYL

SEQ ID NO: 95696 - protein, 10 aa, synthetic construct
TVGRGDYSSV

SEQ ID NO: 95697 - protein, 10 aa, synthetic construct
TVGRGDLTVT

SEQ ID NO: 95698 - protein, 10 aa, synthetic construct
TVGRGDLIGR

SEQ ID NO: 95699 - protein, 10 aa, synthetic construct
TVARGDHVNL

SEQ ID NO: 95700 - protein, 10 aa, synthetic construct
TVARGDRDYL

SEQ ID NO: 95701 - protein, 10 aa, synthetic construct
TVARGDYSSV

SEQ ID NO: 95702 - protein, 10 aa, synthetic construct
TVARGDLTVT

SEQ ID NO: 95703 - protein, 10 aa, synthetic construct
NKKRGDRSQT

SEQ ID NO: 95704 - protein, 10 aa, synthetic construct
TVGRGDRGQI

SEQ ID NO: 95705 - protein, 10 aa, synthetic construct
TVARGDLIGR

SEQ ID NO: 95706 - protein, 10 aa, synthetic construct
TVVRGDHGVL

SEQ ID NO: 95707 - protein, 10 aa, synthetic construct
TVVRGDHVNL

SEQ ID NO: 95708 - protein, 10 aa, synthetic construct
TVVRGDYVGL

SEQ ID NO: 95709 - protein, 10 aa, synthetic construct
TVVRGDYSSV

SEQ ID NO: 95710 - protein, 10 aa, synthetic construct
TVVRGDQSTL

SEQ ID NO: 95711 - protein, 10 aa, synthetic construct
TVVRGDLLLS

SEQ ID NO: 95712 - protein, 10 aa, synthetic construct
TVPRGDHVNL

SEQ ID NO: 95713 - protein, 10 aa, synthetic construct
TVPRGDRDYL

SEQ ID NO: 95714 - protein, 10 aa, synthetic construct
TVPRGDYSSV

SEQ ID NO: 95715 - protein, 10 aa, synthetic construct
TVGRGDRQGI

SEQ ID NO: 95716 - protein, 10 aa, synthetic construct
TVPRGDLTVT

SEQ ID NO: 95717 - protein, 10 aa, synthetic construct
TVPRGDLIGR

SEQ ID NO: 95718 - protein, 10 aa, synthetic construct
TVLRGDHGVL

SEQ ID NO: 95719 - protein, 10 aa, synthetic construct
TVLRGDHVNL

SEQ ID NO: 95720 - protein, 10 aa, synthetic construct
TVLRGDYVGL

SEQ ID NO: 95721 - protein, 10 aa, synthetic construct
TVLRGDYSSV

SEQ ID NO: 95722 - protein, 10 aa, synthetic construct
TVLRGDQSTL

SEQ ID NO: 95723 - protein, 10 aa, synthetic construct
TVLRGDLLLS

SEQ ID NO: 95724 - protein, 10 aa, synthetic construct
TVIRGDRGQI

SEQ ID NO: 95725 - protein, 10 aa, synthetic construct
TVIRGDRQGI

SEQ ID NO: 95726 - protein, 10 aa, synthetic construct
TVGRGDRSVV

SEQ ID NO: 95727 - protein, 10 aa, synthetic construct
TVIRGDRSVV

SEQ ID NO: 95728 - protein, 10 aa, synthetic construct
TVIRGDRGVV

SEQ ID NO: 95729 - protein, 10 aa, synthetic construct
TVIRGDYVGL

SEQ ID NO: 95730 - protein, 10 aa, synthetic construct
TVIRGDQSTL

SEQ ID NO: 95731 - protein, 10 aa, synthetic construct
TVIRGDRSQT

SEQ ID NO: 95732 - protein, 10 aa, synthetic construct
TVIRGDLLLS

SEQ ID NO: 95733 - protein, 10 aa, synthetic construct
TVMRGDRGQI

SEQ ID NO: 95734 - protein, 10 aa, synthetic construct
TVMRGDRQGI

SEQ ID NO: 95735 - protein, 10 aa, synthetic construct
TVMRGDRSVV

SEQ ID NO: 95736 - protein, 10 aa, synthetic construct
TVMRGDRGVV

SEQ ID NO: 95737 - protein, 10 aa, synthetic construct
TVGRGDRGVV

SEQ ID NO: 95738 - protein, 10 aa, synthetic construct
TVMRGDYVGL

SEQ ID NO: 95739 - protein, 10 aa, synthetic construct
TVMRGDQSTL

SEQ ID NO: 95740 - protein, 10 aa, synthetic construct
TVMRGDRSQT

SEQ ID NO: 95741 - protein, 10 aa, synthetic construct
TVMRGDLLLS

SEQ ID NO: 95742 - protein, 10 aa, synthetic construct
TVWRGDHGVL

SEQ ID NO: 95743 - protein, 10 aa, synthetic construct
TVWRGDHVNL

SEQ ID NO: 95744 - protein, 10 aa, synthetic construct
TVWRGDYVGL

SEQ ID NO: 95745 - protein, 10 aa, synthetic construct
TVWRGDYSSV

SEQ ID NO: 95746 - protein, 10 aa, synthetic construct
TVWRGDQSTL

SEQ ID NO: 95747 - protein, 10 aa, synthetic construct
TVWRGDLLLS

SEQ ID NO: 95748 - protein, 10 aa, synthetic construct
TVGRGDRSQT

SEQ ID NO: 95749 - protein, 10 aa, synthetic construct
TVFRGDRGQI

SEQ ID NO: 95750 - protein, 10 aa, synthetic construct
TVFRGDRQGI

SEQ ID NO: 95751 - protein, 10 aa, synthetic construct
TVFRGDRSVV

SEQ ID NO: 95752 - protein, 10 aa, synthetic construct
TVFRGDRGVV

SEQ ID NO: 95753 - protein, 10 aa, synthetic construct
TVFRGDYVGL

SEQ ID NO: 95754 - protein, 10 aa, synthetic construct
TVFRGDQSTL

SEQ ID NO: 95755 - protein, 10 aa, synthetic construct
TVFRGDRSQT

SEQ ID NO: 95756 - protein, 10 aa, synthetic construct
TVFRGDLLLS

SEQ ID NO: 95757 - protein, 10 aa, synthetic construct
TVKRGDRGQI

SEQ ID NO: 95758 - protein, 10 aa, synthetic construct
TVKRGDRQGI

SEQ ID NO: 95759 - protein, 10 aa, synthetic construct
TVARGDRGQI

SEQ ID NO: 95760 - protein, 10 aa, synthetic construct
TVKRGDRSVV

SEQ ID NO: 95761 - protein, 10 aa, synthetic construct
TVKRGDRGVV

SEQ ID NO: 95762 - protein, 10 aa, synthetic construct
TVKRGDYVGL

SEQ ID NO: 95763 - protein, 10 aa, synthetic construct
TVKRGDQSTL

SEQ ID NO: 95764 - protein, 10 aa, synthetic construct
TVKRGDRSQT

SEQ ID NO: 95765 - protein, 10 aa, synthetic construct
TVKRGDLLLS

SEQ ID NO: 95766 - protein, 10 aa, synthetic construct
TVRRGDHVNL

SEQ ID NO: 95767 - protein, 10 aa, synthetic construct
TVRRGDRDYL

SEQ ID NO: 95768 - protein, 10 aa, synthetic construct
TVRRGDYSSV

SEQ ID NO: 95769 - protein, 10 aa, synthetic construct
TVRRGDLTVT

SEQ ID NO: 95770 - protein, 10 aa, synthetic construct
TVARGDRQGI

SEQ ID NO: 95771 - protein, 10 aa, synthetic construct
TVRRGDLIGR

SEQ ID NO: 95772 - protein, 10 aa, synthetic construct
TVHRGDHGVL

SEQ ID NO: 95773 - protein, 10 aa, synthetic construct
TVHRGDHVNL

SEQ ID NO: 95774 - protein, 10 aa, synthetic construct
TVHRGDYVGL

SEQ ID NO: 95775 - protein, 10 aa, synthetic construct
TVHRGDYSSV

SEQ ID NO: 95776 - protein, 10 aa, synthetic construct
TVHRGDQSTL

SEQ ID NO: 95777 - protein, 10 aa, synthetic construct
TVHRGDLLLS

SEQ ID NO: 95778 - protein, 10 aa, synthetic construct
TVSRGDHGVL

SEQ ID NO: 95779 - protein, 10 aa, synthetic construct
TVSRGDHVNL

SEQ ID NO: 95780 - protein, 10 aa, synthetic construct
TVSRGDYVGL

SEQ ID NO: 95781 - protein, 10 aa, synthetic construct
TVARGDRSVV

SEQ ID NO: 95782 - protein, 10 aa, synthetic construct
TVSRGDYSSV

SEQ ID NO: 95783 - protein, 10 aa, synthetic construct
TVSRGDQSTL

SEQ ID NO: 95784 - protein, 10 aa, synthetic construct
TVSRGDLLLS

SEQ ID NO: 95785 - protein, 10 aa, synthetic construct
TVTRGDHGVL

SEQ ID NO: 95786 - protein, 10 aa, synthetic construct
TVTRGDHVNL

SEQ ID NO: 95787 - protein, 10 aa, synthetic construct
TVTRGDYVGL

SEQ ID NO: 95788 - protein, 10 aa, synthetic construct
TVTRGDYSSV

SEQ ID NO: 95789 - protein, 10 aa, synthetic construct
TVTRGDQSTL

SEQ ID NO: 95790 - protein, 10 aa, synthetic construct
TVTRGDLLLS

SEQ ID NO: 95791 - protein, 10 aa, synthetic construct
TVYRGDRGQI

SEQ ID NO: 95792 - protein, 10 aa, synthetic construct
TVARGDRGVV

SEQ ID NO: 95793 - protein, 10 aa, synthetic construct
TVYRGDRQGI

SEQ ID NO: 95794 - protein, 10 aa, synthetic construct
TVYRGDRSVV

SEQ ID NO: 95795 - protein, 10 aa, synthetic construct
TVYRGDRGVV

SEQ ID NO: 95796 - protein, 10 aa, synthetic construct
TVYRGDYVGL

SEQ ID NO: 95797 - protein, 10 aa, synthetic construct
TVYRGDQSTL

SEQ ID NO: 95798 - protein, 10 aa, synthetic construct
TVYRGDRSQT

SEQ ID NO: 95799 - protein, 10 aa, synthetic construct
TVYRGDLLLS

SEQ ID NO: 95800 - protein, 10 aa, synthetic construct
TVNRGDRGQI

SEQ ID NO: 95801 - protein, 10 aa, synthetic construct
TVNRGDRQGI

SEQ ID NO: 95802 - protein, 10 aa, synthetic construct
TVNRGDRSVV

SEQ ID NO: 95803 - protein, 10 aa, synthetic construct
TVARGDRSQT

SEQ ID NO: 95804 - protein, 10 aa, synthetic construct
TVNRGDRGVV

SEQ ID NO: 95805 - protein, 10 aa, synthetic construct
TVNRGDYVGL

SEQ ID NO: 95806 - protein, 10 aa, synthetic construct
TVNRGDQSTL

SEQ ID NO: 95807 - protein, 10 aa, synthetic construct
TVNRGDRSQT

SEQ ID NO: 95808 - protein, 10 aa, synthetic construct
TVNRGDLLLS

SEQ ID NO: 95809 - protein, 10 aa, synthetic construct
TVQRGDHGVL

SEQ ID NO: 95810 - protein, 10 aa, synthetic construct
TVQRGDHVNL

SEQ ID NO: 95811 - protein, 10 aa, synthetic construct
TVQRGDYVGL

SEQ ID NO: 95812 - protein, 10 aa, synthetic construct
TVQRGDYSSV

SEQ ID NO: 95813 - protein, 10 aa, synthetic construct
TVQRGDQSTL

SEQ ID NO: 95814 - protein, 10 aa, synthetic construct
NKNRGDRSVV

SEQ ID NO: 95815 - protein, 10 aa, synthetic construct
TVPRGDRGQI

SEQ ID NO: 95816 - protein, 10 aa, synthetic construct
TVQRGDLLLS

SEQ ID NO: 95817 - protein, 10 aa, synthetic construct
TVDRGDHGVL

SEQ ID NO: 95818 - protein, 10 aa, synthetic construct
TVDRGDHVNL

SEQ ID NO: 95819 - protein, 10 aa, synthetic construct
TVDRGDYVGL

SEQ ID NO: 95820 - protein, 10 aa, synthetic construct
TVDRGDYSSV

SEQ ID NO: 95821 - protein, 10 aa, synthetic construct
TVDRGDQSTL

SEQ ID NO: 95822 - protein, 10 aa, synthetic construct
TVDRGDLLLS

SEQ ID NO: 95823 - protein, 10 aa, synthetic construct
TVERGDHGVL

SEQ ID NO: 95824 - protein, 10 aa, synthetic construct
TVERGDHVNL

SEQ ID NO: 95825 - protein, 10 aa, synthetic construct
TVERGDYVGL

SEQ ID NO: 95826 - protein, 10 aa, synthetic construct
TVPRGDRQGI

SEQ ID NO: 95827 - protein, 10 aa, synthetic construct
TVERGDYSSV

SEQ ID NO: 95828 - protein, 10 aa, synthetic construct
TVERGDQSTL

SEQ ID NO: 95829 - protein, 10 aa, synthetic construct
TVERGDLLLS

SEQ ID NO: 95830 - protein, 10 aa, synthetic construct
TPGRGDHVNL

SEQ ID NO: 95831 - protein, 10 aa, synthetic construct
TPGRGDRDYL

SEQ ID NO: 95832 - protein, 10 aa, synthetic construct
TPGRGDYSSV

SEQ ID NO: 95833 - protein, 10 aa, synthetic construct
TPGRGDLTVT

SEQ ID NO: 95834 - protein, 10 aa, synthetic construct
TPGRGDLIGR

SEQ ID NO: 95835 - protein, 10 aa, synthetic construct
TPARGDHVNL

SEQ ID NO: 95836 - protein, 10 aa, synthetic construct
TPARGDRDYL

SEQ ID NO: 95837 - protein, 10 aa, synthetic construct
TVPRGDRSVV

SEQ ID NO: 95838 - protein, 10 aa, synthetic construct
TPARGDYSSV

SEQ ID NO: 95839 - protein, 10 aa, synthetic construct
TPARGDLTVT

SEQ ID NO: 95840 - protein, 10 aa, synthetic construct
TPARGDLIGR

SEQ ID NO: 95841 - protein, 10 aa, synthetic construct
TPVRGDHGVL

SEQ ID NO: 95842 - protein, 10 aa, synthetic construct
TPVRGDYVGL

SEQ ID NO: 95843 - protein, 10 aa, synthetic construct
TPVRGDQSTL

SEQ ID NO: 95844 - protein, 10 aa, synthetic construct
TPVRGDLLLS

SEQ ID NO: 95845 - protein, 10 aa, synthetic construct
TPPRGDHVNL

SEQ ID NO: 95846 - protein, 10 aa, synthetic construct
TPPRGDRDYL

SEQ ID NO: 95847 - protein, 10 aa, synthetic construct
TPPRGDYSSV

SEQ ID NO: 95848 - protein, 10 aa, synthetic construct
TVPRGDRGVV

SEQ ID NO: 95849 - protein, 10 aa, synthetic construct
TPPRGDLTVT

SEQ ID NO: 95850 - protein, 10 aa, synthetic construct
TPPRGDLIGR

SEQ ID NO: 95851 - protein, 10 aa, synthetic construct
TPLRGDHGVL

SEQ ID NO: 95852 - protein, 10 aa, synthetic construct
TPLRGDYVGL

SEQ ID NO: 95853 - protein, 10 aa, synthetic construct
TPLRGDQSTL

SEQ ID NO: 95854 - protein, 10 aa, synthetic construct
TPLRGDLLLS

SEQ ID NO: 95855 - protein, 10 aa, synthetic construct
TPIRGDRGQI

SEQ ID NO: 95856 - protein, 10 aa, synthetic construct
TPIRGDRQGI

SEQ ID NO: 95857 - protein, 10 aa, synthetic construct
TPIRGDRSVV

SEQ ID NO: 95858 - protein, 10 aa, synthetic construct
TPIRGDRGVV

SEQ ID NO: 95859 - protein, 10 aa, synthetic construct
TVPRGDRSQT

SEQ ID NO: 95860 - protein, 10 aa, synthetic construct
TPIRGDRSQT

SEQ ID NO: 95861 - protein, 10 aa, synthetic construct
TPMRGDRGQI

SEQ ID NO: 95862 - protein, 10 aa, synthetic construct
TPMRGDRQGI

SEQ ID NO: 95863 - protein, 10 aa, synthetic construct
TPMRGDRSVV

SEQ ID NO: 95864 - protein, 10 aa, synthetic construct
TPMRGDRGVV

SEQ ID NO: 95865 - protein, 10 aa, synthetic construct
TPMRGDRSQT

SEQ ID NO: 95866 - protein, 10 aa, synthetic construct
TPWRGDHGVL

SEQ ID NO: 95867 - protein, 10 aa, synthetic construct
TPWRGDYVGL

SEQ ID NO: 95868 - protein, 10 aa, synthetic construct
TPWRGDQSTL

SEQ ID NO: 95869 - protein, 10 aa, synthetic construct
TPWRGDLLLS

SEQ ID NO: 95870 - protein, 10 aa, synthetic construct
TVRRGDRGQI

SEQ ID NO: 95871 - protein, 10 aa, synthetic construct
TPFRGDRGQI

SEQ ID NO: 95872 - protein, 10 aa, synthetic construct
TPFRGDRQGI

SEQ ID NO: 95873 - protein, 10 aa, synthetic construct
TPFRGDRSVV

SEQ ID NO: 95874 - protein, 10 aa, synthetic construct
TPFRGDRGVV

SEQ ID NO: 95875 - protein, 10 aa, synthetic construct
TPFRGDRSQT

SEQ ID NO: 95876 - protein, 10 aa, synthetic construct
TPKRGDRGQI

SEQ ID NO: 95877 - protein, 10 aa, synthetic construct
TPKRGDRQGI

SEQ ID NO: 95878 - protein, 10 aa, synthetic construct
TPKRGDRSVV

SEQ ID NO: 95879 - protein, 10 aa, synthetic construct
TPKRGDRGVV

SEQ ID NO: 95880 - protein, 10 aa, synthetic construct
TPKRGDRSQT

SEQ ID NO: 95881 - protein, 10 aa, synthetic construct
TVRRGDRQGI

SEQ ID NO: 95882 - protein, 10 aa, synthetic construct
TPRRGDHVNL

SEQ ID NO: 95883 - protein, 10 aa, synthetic construct
TPRRGDRDYL

SEQ ID NO: 95884 - protein, 10 aa, synthetic construct
TPRRGDYSSV

SEQ ID NO: 95885 - protein, 10 aa, synthetic construct
TPRRGDLTVT

SEQ ID NO: 95886 - protein, 10 aa, synthetic construct
TPRRGDLIGR

SEQ ID NO: 95887 - protein, 10 aa, synthetic construct
TPHRGDHGVL

SEQ ID NO: 95888 - protein, 10 aa, synthetic construct
TPHRGDYVGL

SEQ ID NO: 95889 - protein, 10 aa, synthetic construct
TPHRGDQSTL

SEQ ID NO: 95890 - protein, 10 aa, synthetic construct
TPHRGDLLLS

SEQ ID NO: 95891 - protein, 10 aa, synthetic construct
TPSRGDHGVL

SEQ ID NO: 95892 - protein, 10 aa, synthetic construct
TVRRGDRSVV

SEQ ID NO: 95893 - protein, 10 aa, synthetic construct
TPSRGDYVGL

SEQ ID NO: 95894 - protein, 10 aa, synthetic construct
TPSRGDQSTL

SEQ ID NO: 95895 - protein, 10 aa, synthetic construct
TPSRGDLLLS

SEQ ID NO: 95896 - protein, 10 aa, synthetic construct
TPTRGDHGVL

SEQ ID NO: 95897 - protein, 10 aa, synthetic construct
TPTRGDYVGL

SEQ ID NO: 95898 - protein, 10 aa, synthetic construct
TPTRGDQSTL

SEQ ID NO: 95899 - protein, 10 aa, synthetic construct
TPTRGDLLLS

SEQ ID NO: 95900 - protein, 10 aa, synthetic construct
TPYRGDRGQI

SEQ ID NO: 95901 - protein, 10 aa, synthetic construct
TPYRGDRQGI

SEQ ID NO: 95902 - protein, 10 aa, synthetic construct
TPYRGDRSVV

SEQ ID NO: 95903 - protein, 10 aa, synthetic construct
TVRRGDRGVV

SEQ ID NO: 95904 - protein, 10 aa, synthetic construct
TPYRGDRGVV

SEQ ID NO: 95905 - protein, 10 aa, synthetic construct
TPYRGDRSQT

SEQ ID NO: 95906 - protein, 10 aa, synthetic construct
TPNRGDRGQI

SEQ ID NO: 95907 - protein, 10 aa, synthetic construct
TPNRGDRQGI

SEQ ID NO: 95908 - protein, 10 aa, synthetic construct
TPNRGDRSVV

SEQ ID NO: 95909 - protein, 10 aa, synthetic construct
TPNRGDRGVV

SEQ ID NO: 95910 - protein, 10 aa, synthetic construct
TPNRGDRSQT

SEQ ID NO: 95911 - protein, 10 aa, synthetic construct
TPQRGDHGVL

SEQ ID NO: 95912 - protein, 10 aa, synthetic construct
TPQRGDYVGL

SEQ ID NO: 95913 - protein, 10 aa, synthetic construct
TPQRGDQSTL

SEQ ID NO: 95914 - protein, 10 aa, synthetic construct
TVRRGDRSQT

SEQ ID NO: 95915 - protein, 10 aa, synthetic construct
TPQRGDLLLS

SEQ ID NO: 95916 - protein, 10 aa, synthetic construct
TPDRGDHGVL

SEQ ID NO: 95917 - protein, 10 aa, synthetic construct
TPDRGDYVGL

SEQ ID NO: 95918 - protein, 10 aa, synthetic construct
TPDRGDQSTL

SEQ ID NO: 95919 - protein, 10 aa, synthetic construct
TPDRGDLLLS

SEQ ID NO: 95920 - protein, 10 aa, synthetic construct
TPERGDHGVL

SEQ ID NO: 95921 - protein, 10 aa, synthetic construct
TPERGDYVGL

SEQ ID NO: 95922 - protein, 10 aa, synthetic construct
TPERGDQSTL

SEQ ID NO: 95923 - protein, 10 aa, synthetic construct
TPERGDLLLS

SEQ ID NO: 95924 - protein, 10 aa, synthetic construct
TLGRGDHVNL

SEQ ID NO: 95925 - protein, 10 aa, synthetic construct
NKNRGDRGVV

SEQ ID NO: 95926 - protein, 10 aa, synthetic construct
TPGRGDRGQI

SEQ ID NO: 95927 - protein, 10 aa, synthetic construct
TLGRGDRDYL

SEQ ID NO: 95928 - protein, 10 aa, synthetic construct
TLGRGDYSSV

SEQ ID NO: 95929 - protein, 10 aa, synthetic construct
TLGRGDLTVT

SEQ ID NO: 95930 - protein, 10 aa, synthetic construct
TLGRGDLIGR

SEQ ID NO: 95931 - protein, 10 aa, synthetic construct
TLARGDHVNL

SEQ ID NO: 95932 - protein, 10 aa, synthetic construct
TLARGDRDYL

SEQ ID NO: 95933 - protein, 10 aa, synthetic construct
TLARGDYSSV

SEQ ID NO: 95934 - protein, 10 aa, synthetic construct
TLARGDLTVT

SEQ ID NO: 95935 - protein, 10 aa, synthetic construct
TLARGDLIGR

SEQ ID NO: 95936 - protein, 10 aa, synthetic construct
TLVRGDHGVL

SEQ ID NO: 95937 - protein, 10 aa, synthetic construct
TPGRGDRQGI

SEQ ID NO: 95938 - protein, 10 aa, synthetic construct
TLVRGDHVNL

SEQ ID NO: 95939 - protein, 10 aa, synthetic construct
TLVRGDYVGL

SEQ ID NO: 95940 - protein, 10 aa, synthetic construct
TLVRGDYSSV

SEQ ID NO: 95941 - protein, 10 aa, synthetic construct
TLVRGDQSTL

SEQ ID NO: 95942 - protein, 10 aa, synthetic construct
TLVRGDLLLS

SEQ ID NO: 95943 - protein, 10 aa, synthetic construct
TLPRGDHVNL

SEQ ID NO: 95944 - protein, 10 aa, synthetic construct
TLPRGDRDYL

SEQ ID NO: 95945 - protein, 10 aa, synthetic construct
TLPRGDYSSV

SEQ ID NO: 95946 - protein, 10 aa, synthetic construct
TLPRGDLTVT

SEQ ID NO: 95947 - protein, 10 aa, synthetic construct
TLPRGDLIGR

SEQ ID NO: 95948 - protein, 10 aa, synthetic construct
TPGRGDRSVV

SEQ ID NO: 95949 - protein, 10 aa, synthetic construct
TLLRGDHGVL

SEQ ID NO: 95950 - protein, 10 aa, synthetic construct
TLLRGDHVNL

SEQ ID NO: 95951 - protein, 10 aa, synthetic construct
TLLRGDYVGL

SEQ ID NO: 95952 - protein, 10 aa, synthetic construct
TLLRGDYSSV

SEQ ID NO: 95953 - protein, 10 aa, synthetic construct
TLLRGDQSTL

SEQ ID NO: 95954 - protein, 10 aa, synthetic construct
TLLRGDLLLS

SEQ ID NO: 95955 - protein, 10 aa, synthetic construct
TLIRGDRGQI

SEQ ID NO: 95956 - protein, 10 aa, synthetic construct
TLIRGDRQGI

SEQ ID NO: 95957 - protein, 10 aa, synthetic construct
TLIRGDRSVV

SEQ ID NO: 95958 - protein, 10 aa, synthetic construct
TLIRGDRGVV

SEQ ID NO: 95959 - protein, 10 aa, synthetic construct
TPGRGDRGVV

SEQ ID NO: 95960 - protein, 10 aa, synthetic construct
TLIRGDYVGL

SEQ ID NO: 95961 - protein, 10 aa, synthetic construct
TLIRGDQSTL

SEQ ID NO: 95962 - protein, 10 aa, synthetic construct
TLIRGDRSQT

SEQ ID NO: 95963 - protein, 10 aa, synthetic construct
TLIRGDLLLS

SEQ ID NO: 95964 - protein, 10 aa, synthetic construct
TLMRGDRGQI

SEQ ID NO: 95965 - protein, 10 aa, synthetic construct
TLMRGDRQGI

SEQ ID NO: 95966 - protein, 10 aa, synthetic construct
TLMRGDRSVV

SEQ ID NO: 95967 - protein, 10 aa, synthetic construct
TLMRGDRGVV

SEQ ID NO: 95968 - protein, 10 aa, synthetic construct
TLMRGDYVGL

SEQ ID NO: 95969 - protein, 10 aa, synthetic construct
TLMRGDQSTL

SEQ ID NO: 95970 - protein, 10 aa, synthetic construct
TPGRGDRSQT

SEQ ID NO: 95971 - protein, 10 aa, synthetic construct
TLMRGDRSQT

SEQ ID NO: 95972 - protein, 10 aa, synthetic construct
TLMRGDLLLS

SEQ ID NO: 95973 - protein, 10 aa, synthetic construct
TLWRGDHGVL

SEQ ID NO: 95974 - protein, 10 aa, synthetic construct
TLWRGDHVNL

SEQ ID NO: 95975 - protein, 10 aa, synthetic construct
TLWRGDYVGL

SEQ ID NO: 95976 - protein, 10 aa, synthetic construct
TLWRGDYSSV

SEQ ID NO: 95977 - protein, 10 aa, synthetic construct
TLWRGDQSTL

SEQ ID NO: 95978 - protein, 10 aa, synthetic construct
TLWRGDLLLS

SEQ ID NO: 95979 - protein, 10 aa, synthetic construct
TLFRGDRGQI

SEQ ID NO: 95980 - protein, 10 aa, synthetic construct
TLFRGDRQGI

SEQ ID NO: 95981 - protein, 10 aa, synthetic construct
TPARGDRGQI

SEQ ID NO: 95982 - protein, 10 aa, synthetic construct
TLFRGDRSVV

SEQ ID NO: 95983 - protein, 10 aa, synthetic construct
TLFRGDRGVV

SEQ ID NO: 95984 - protein, 10 aa, synthetic construct
TLFRGDYVGL

SEQ ID NO: 95985 - protein, 10 aa, synthetic construct
TLFRGDQSTL

SEQ ID NO: 95986 - protein, 10 aa, synthetic construct
TLFRGDRSQT

SEQ ID NO: 95987 - protein, 10 aa, synthetic construct
TLFRGDLLLS

SEQ ID NO: 95988 - protein, 10 aa, synthetic construct
TLKRGDRGQI

SEQ ID NO: 95989 - protein, 10 aa, synthetic construct
TLKRGDRQGI

SEQ ID NO: 95990 - protein, 10 aa, synthetic construct
TLKRGDRSVV

SEQ ID NO: 95991 - protein, 10 aa, synthetic construct
TLKRGDRGVV

SEQ ID NO: 95992 - protein, 10 aa, synthetic construct
TPARGDRQGI

SEQ ID NO: 95993 - protein, 10 aa, synthetic construct
TLKRGDYVGL

SEQ ID NO: 95994 - protein, 10 aa, synthetic construct
TLKRGDQSTL

SEQ ID NO: 95995 - protein, 10 aa, synthetic construct
TLKRGDRSQT

SEQ ID NO: 95996 - protein, 10 aa, synthetic construct
TLKRGDLLLS

SEQ ID NO: 95997 - protein, 10 aa, synthetic construct
TLRRGDHVNL

SEQ ID NO: 95998 - protein, 10 aa, synthetic construct
TLRRGDRDYL

SEQ ID NO: 95999 - protein, 10 aa, synthetic construct
TLRRGDYSSV

SEQ ID NO: 96000 - protein, 10 aa, synthetic construct
TLRRGDLTVT

SEQ ID NO: 96001 - protein, 10 aa, synthetic construct
TLRRGDLIGR

SEQ ID NO: 96002 - protein, 10 aa, synthetic construct
TLHRGDHGVL

SEQ ID NO: 96003 - protein, 10 aa, synthetic construct
TPARGDRSVV

SEQ ID NO: 96004 - protein, 10 aa, synthetic construct
TLHRGDHVNL

SEQ ID NO: 96005 - protein, 10 aa, synthetic construct
TLHRGDYVGL

SEQ ID NO: 96006 - protein, 10 aa, synthetic construct
TLHRGDYSSV

SEQ ID NO: 96007 - protein, 10 aa, synthetic construct
TLHRGDQSTL

SEQ ID NO: 96008 - protein, 10 aa, synthetic construct
TLHRGDLLLS

SEQ ID NO: 96009 - protein, 10 aa, synthetic construct
TLSRGDHGVL

SEQ ID NO: 96010 - protein, 10 aa, synthetic construct
TLSRGDHVNL

SEQ ID NO: 96011 - protein, 10 aa, synthetic construct
TLSRGDYVGL

SEQ ID NO: 96012 - protein, 10 aa, synthetic construct
TLSRGDYSSV

SEQ ID NO: 96013 - protein, 10 aa, synthetic construct
TLSRGDQSTL

SEQ ID NO: 96014 - protein, 10 aa, synthetic construct
TPARGDRGVV

SEQ ID NO: 96015 - protein, 10 aa, synthetic construct
TLSRGDLLLS

SEQ ID NO: 96016 - protein, 10 aa, synthetic construct
TLTRGDHGVL

SEQ ID NO: 96017 - protein, 10 aa, synthetic construct
TLTRGDHVNL

SEQ ID NO: 96018 - protein, 10 aa, synthetic construct
TLTRGDYVGL

SEQ ID NO: 96019 - protein, 10 aa, synthetic construct
TLTRGDYSSV

SEQ ID NO: 96020 - protein, 10 aa, synthetic construct
TLTRGDQSTL

SEQ ID NO: 96021 - protein, 10 aa, synthetic construct
TLTRGDLLLS

SEQ ID NO: 96022 - protein, 10 aa, synthetic construct
TLYRGDRGQI

SEQ ID NO: 96023 - protein, 10 aa, synthetic construct
TLYRGDRQGI

SEQ ID NO: 96024 - protein, 10 aa, synthetic construct
TLYRGDRSVV

SEQ ID NO: 96025 - protein, 10 aa, synthetic construct
TPARGDRSQT

SEQ ID NO: 96026 - protein, 10 aa, synthetic construct
TLYRGDRGVV

SEQ ID NO: 96027 - protein, 10 aa, synthetic construct
TLYRGDYVGL

SEQ ID NO: 96028 - protein, 10 aa, synthetic construct
TLYRGDQSTL

SEQ ID NO: 96029 - protein, 10 aa, synthetic construct
TLYRGDRSQT

SEQ ID NO: 96030 - protein, 10 aa, synthetic construct
TLYRGDLLLS

SEQ ID NO: 96031 - protein, 10 aa, synthetic construct
TLNRGDRGQI

SEQ ID NO: 96032 - protein, 10 aa, synthetic construct
TLNRGDRQGI

SEQ ID NO: 96033 - protein, 10 aa, synthetic construct
TLNRGDRSVV

SEQ ID NO: 96034 - protein, 10 aa, synthetic construct
TLNRGDRGVV

SEQ ID NO: 96035 - protein, 10 aa, synthetic construct
TLNRGDYVGL

SEQ ID NO: 96036 - protein, 10 aa, synthetic construct
NKNRGDRSQT

SEQ ID NO: 96037 - protein, 10 aa, synthetic construct
TPPRGDRGQI

SEQ ID NO: 96038 - protein, 10 aa, synthetic construct
TLNRGDQSTL

SEQ ID NO: 96039 - protein, 10 aa, synthetic construct
TLNRGDRSQT

SEQ ID NO: 96040 - protein, 10 aa, synthetic construct
TLNRGDLLLS

SEQ ID NO: 96041 - protein, 10 aa, synthetic construct
TLQRGDHGVL

SEQ ID NO: 96042 - protein, 10 aa, synthetic construct
TLQRGDHVNL

SEQ ID NO: 96043 - protein, 10 aa, synthetic construct
TLQRGDYVGL

SEQ ID NO: 96044 - protein, 10 aa, synthetic construct
TLQRGDYSSV

SEQ ID NO: 96045 - protein, 10 aa, synthetic construct
TLQRGDQSTL

SEQ ID NO: 96046 - protein, 10 aa, synthetic construct
TLQRGDLLLS

SEQ ID NO: 96047 - protein, 10 aa, synthetic construct
TLDRGDHGVL

SEQ ID NO: 96048 - protein, 10 aa, synthetic construct
TPPRGDRQGI

SEQ ID NO: 96049 - protein, 10 aa, synthetic construct
TLDRGDHVNL

SEQ ID NO: 96050 - protein, 10 aa, synthetic construct
TLDRGDYVGL

SEQ ID NO: 96051 - protein, 10 aa, synthetic construct
TLDRGDYSSV

SEQ ID NO: 96052 - protein, 10 aa, synthetic construct
TLDRGDQSTL

SEQ ID NO: 96053 - protein, 10 aa, synthetic construct
TLDRGDLLLS

SEQ ID NO: 96054 - protein, 10 aa, synthetic construct
TLERGDHGVL

SEQ ID NO: 96055 - protein, 10 aa, synthetic construct
TLERGDHVNL

SEQ ID NO: 96056 - protein, 10 aa, synthetic construct
TLERGDYVGL

SEQ ID NO: 96057 - protein, 10 aa, synthetic construct
TLERGDYSSV

SEQ ID NO: 96058 - protein, 10 aa, synthetic construct
TLERGDQSTL

SEQ ID NO: 96059 - protein, 10 aa, synthetic construct
TPPRGDRSVV

SEQ ID NO: 96060 - protein, 10 aa, synthetic construct
TLERGDLLLS

SEQ ID NO: 96061 - protein, 10 aa, synthetic construct
TIGRGDRGQI

SEQ ID NO: 96062 - protein, 10 aa, synthetic construct
TIGRGDRQGI

SEQ ID NO: 96063 - protein, 10 aa, synthetic construct
TIGRGDRSVV

SEQ ID NO: 96064 - protein, 10 aa, synthetic construct
TIGRGDRGVV

SEQ ID NO: 96065 - protein, 10 aa, synthetic construct
TIGRGDRSQT

SEQ ID NO: 96066 - protein, 10 aa, synthetic construct
TIARGDRGQI

SEQ ID NO: 96067 - protein, 10 aa, synthetic construct
TIARGDRQGI

SEQ ID NO: 96068 - protein, 10 aa, synthetic construct
TIARGDRSVV

SEQ ID NO: 96069 - protein, 10 aa, synthetic construct
TIARGDRGVV

SEQ ID NO: 96070 - protein, 10 aa, synthetic construct
TPPRGDRGVV

SEQ ID NO: 96071 - protein, 10 aa, synthetic construct
TIARGDRSQT

SEQ ID NO: 96072 - protein, 10 aa, synthetic construct
TIPRGDRGQI

SEQ ID NO: 96073 - protein, 10 aa, synthetic construct
TIPRGDRQGI

SEQ ID NO: 96074 - protein, 10 aa, synthetic construct
TIPRGDRSVV

SEQ ID NO: 96075 - protein, 10 aa, synthetic construct
TIPRGDRGVV

SEQ ID NO: 96076 - protein, 10 aa, synthetic construct
TIPRGDRSQT

SEQ ID NO: 96077 - protein, 10 aa, synthetic construct
TIRRGDRGQI

SEQ ID NO: 96078 - protein, 10 aa, synthetic construct
TIRRGDRQGI

SEQ ID NO: 96079 - protein, 10 aa, synthetic construct
TIRRGDRSVV

SEQ ID NO: 96080 - protein, 10 aa, synthetic construct
TIRRGDRGVV

SEQ ID NO: 96081 - protein, 10 aa, synthetic construct
TPPRGDRSQT

SEQ ID NO: 96082 - protein, 10 aa, synthetic construct
TIRRGDRSQT

SEQ ID NO: 96083 - protein, 10 aa, synthetic construct
TMGRGDHGVL

SEQ ID NO: 96084 - protein, 10 aa, synthetic construct
TMGRGDRGQI

SEQ ID NO: 96085 - protein, 10 aa, synthetic construct
TMGRGDRQGI

SEQ ID NO: 96086 - protein, 10 aa, synthetic construct
TMGRGDRSVV

SEQ ID NO: 96087 - protein, 10 aa, synthetic construct
TMGRGDLTVT

SEQ ID NO: 96088 - protein, 10 aa, synthetic construct
TMGRGDLIGR

SEQ ID NO: 96089 - protein, 10 aa, synthetic construct
TMGRGDRSQT

SEQ ID NO: 96090 - protein, 10 aa, synthetic construct
TMGRGDLLLS

SEQ ID NO: 96091 - protein, 10 aa, synthetic construct
TMARGDHGVL

SEQ ID NO: 96092 - protein, 10 aa, synthetic construct
TPRRGDRGQI

SEQ ID NO: 96093 - protein, 10 aa, synthetic construct
TMARGDRGQI

SEQ ID NO: 96094 - protein, 10 aa, synthetic construct
TMARGDRQGI

SEQ ID NO: 96095 - protein, 10 aa, synthetic construct
TMARGDRSVV

SEQ ID NO: 96096 - protein, 10 aa, synthetic construct
TMARGDLTVT

SEQ ID NO: 96097 - protein, 10 aa, synthetic construct
TMARGDLIGR

SEQ ID NO: 96098 - protein, 10 aa, synthetic construct
TMARGDRSQT

SEQ ID NO: 96099 - protein, 10 aa, synthetic construct
TMARGDLLLS

SEQ ID NO: 96100 - protein, 10 aa, synthetic construct
TMVRGDHGVL

SEQ ID NO: 96101 - protein, 10 aa, synthetic construct
TMVRGDRGQI

SEQ ID NO: 96102 - protein, 10 aa, synthetic construct
TMVRGDRQGI

SEQ ID NO: 96103 - protein, 10 aa, synthetic construct
TPRRGDRQGI

SEQ ID NO: 96104 - protein, 10 aa, synthetic construct
TMVRGDRSVV

SEQ ID NO: 96105 - protein, 10 aa, synthetic construct
TMVRGDLIGR

SEQ ID NO: 96106 - protein, 10 aa, synthetic construct
TMVRGDRSQT

SEQ ID NO: 96107 - protein, 10 aa, synthetic construct
TMPRGDHGVL

SEQ ID NO: 96108 - protein, 10 aa, synthetic construct
TMPRGDRGQI

SEQ ID NO: 96109 - protein, 10 aa, synthetic construct
TMPRGDRQGI

SEQ ID NO: 96110 - protein, 10 aa, synthetic construct
TMPRGDRSVV

SEQ ID NO: 96111 - protein, 10 aa, synthetic construct
TMPRGDLTVT

SEQ ID NO: 96112 - protein, 10 aa, synthetic construct
TMPRGDLIGR

SEQ ID NO: 96113 - protein, 10 aa, synthetic construct
TMPRGDRSQT

SEQ ID NO: 96114 - protein, 10 aa, synthetic construct
TPRRGDRSVV

SEQ ID NO: 96115 - protein, 10 aa, synthetic construct
TMPRGDLLLS

SEQ ID NO: 96116 - protein, 10 aa, synthetic construct
TMLRGDHGVL

SEQ ID NO: 96117 - protein, 10 aa, synthetic construct
TMLRGDRGQI

SEQ ID NO: 96118 - protein, 10 aa, synthetic construct
TMLRGDRQGI

SEQ ID NO: 96119 - protein, 10 aa, synthetic construct
TMLRGDRSVV

SEQ ID NO: 96120 - protein, 10 aa, synthetic construct
TMLRGDLIGR

SEQ ID NO: 96121 - protein, 10 aa, synthetic construct
TMLRGDRSQT

SEQ ID NO: 96122 - protein, 10 aa, synthetic construct
TMMRGDRSVV

SEQ ID NO: 96123 - protein, 10 aa, synthetic construct
TMMRGDRSQT

SEQ ID NO: 96124 - protein, 10 aa, synthetic construct
TMWRGDRGQI

SEQ ID NO: 96125 - protein, 10 aa, synthetic construct
TPRRGDRGVV

SEQ ID NO: 96126 - protein, 10 aa, synthetic construct
TMWRGDRQGI

SEQ ID NO: 96127 - protein, 10 aa, synthetic construct
TMWRGDRSVV

SEQ ID NO: 96128 - protein, 10 aa, synthetic construct
TMWRGDRGVV

SEQ ID NO: 96129 - protein, 10 aa, synthetic construct
TMWRGDYVGL

SEQ ID NO: 96130 - protein, 10 aa, synthetic construct
TMWRGDQSTL

SEQ ID NO: 96131 - protein, 10 aa, synthetic construct
TMWRGDRSQT

SEQ ID NO: 96132 - protein, 10 aa, synthetic construct
TMWRGDLLLS

SEQ ID NO: 96133 - protein, 10 aa, synthetic construct
TMRRGDHGVL

SEQ ID NO: 96134 - protein, 10 aa, synthetic construct
TMRRGDRGQI

SEQ ID NO: 96135 - protein, 10 aa, synthetic construct
TMRRGDRQGI

SEQ ID NO: 96136 - protein, 10 aa, synthetic construct
TPRRGDRSQT

SEQ ID NO: 96137 - protein, 10 aa, synthetic construct
TMRRGDRSVV

SEQ ID NO: 96138 - protein, 10 aa, synthetic construct
TMRRGDLTVT

SEQ ID NO: 96139 - protein, 10 aa, synthetic construct
TMRRGDLIGR

SEQ ID NO: 96140 - protein, 10 aa, synthetic construct
TMRRGDRSQT

SEQ ID NO: 96141 - protein, 10 aa, synthetic construct
TMRRGDLLLS

SEQ ID NO: 96142 - protein, 10 aa, synthetic construct
TMHRGDRGVV

SEQ ID NO: 96143 - protein, 10 aa, synthetic construct
TMHRGDLTVT

SEQ ID NO: 96144 - protein, 10 aa, synthetic construct
TMHRGDLLLS

SEQ ID NO: 96145 - protein, 10 aa, synthetic construct
TMSRGDHGVL

SEQ ID NO: 96146 - protein, 10 aa, synthetic construct
TMSRGDRGQI

SEQ ID NO: 96147 - protein, 10 aa, synthetic construct
DKKRGDHGVL

SEQ ID NO: 96148 - protein, 10 aa, synthetic construct
TLGRGDRGQI

SEQ ID NO: 96149 - protein, 10 aa, synthetic construct
TMSRGDRQGI

SEQ ID NO: 96150 - protein, 10 aa, synthetic construct
TMSRGDRSVV

SEQ ID NO: 96151 - protein, 10 aa, synthetic construct
TMSRGDLIGR

SEQ ID NO: 96152 - protein, 10 aa, synthetic construct
TMSRGDRSQT

SEQ ID NO: 96153 - protein, 10 aa, synthetic construct
TMTRGDRGVV

SEQ ID NO: 96154 - protein, 10 aa, synthetic construct
TMTRGDLTVT

SEQ ID NO: 96155 - protein, 10 aa, synthetic construct
TMTRGDLLLS

SEQ ID NO: 96156 - protein, 10 aa, synthetic construct
TMQRGDRGVV

SEQ ID NO: 96157 - protein, 10 aa, synthetic construct
TMQRGDLTVT

SEQ ID NO: 96158 - protein, 10 aa, synthetic construct
TMQRGDLLLS

SEQ ID NO: 96159 - protein, 10 aa, synthetic construct
TLGRGDRQGI

SEQ ID NO: 96160 - protein, 10 aa, synthetic construct
TMDRGDRGVV

SEQ ID NO: 96161 - protein, 10 aa, synthetic construct
TMDRGDLTVT

SEQ ID NO: 96162 - protein, 10 aa, synthetic construct
TMDRGDLLLS

SEQ ID NO: 96163 - protein, 10 aa, synthetic construct
TMERGDRGVV

SEQ ID NO: 96164 - protein, 10 aa, synthetic construct
TMERGDLTVT

SEQ ID NO: 96165 - protein, 10 aa, synthetic construct
TMERGDLLLS

SEQ ID NO: 96166 - protein, 10 aa, synthetic construct
TWGRGDRDYL

SEQ ID NO: 96167 - protein, 10 aa, synthetic construct
TWGRGDYVGL

SEQ ID NO: 96168 - protein, 10 aa, synthetic construct
TWGRGDQSTL

SEQ ID NO: 96169 - protein, 10 aa, synthetic construct
TWARGDRDYL

SEQ ID NO: 96170 - protein, 10 aa, synthetic construct
TLGRGDRSVV

SEQ ID NO: 96171 - protein, 10 aa, synthetic construct
TWARGDYVGL

SEQ ID NO: 96172 - protein, 10 aa, synthetic construct
TWARGDQSTL

SEQ ID NO: 96173 - protein, 10 aa, synthetic construct
TWVRGDRDYL

SEQ ID NO: 96174 - protein, 10 aa, synthetic construct
TWVRGDYVGL

SEQ ID NO: 96175 - protein, 10 aa, synthetic construct
TWVRGDYSSV

SEQ ID NO: 96176 - protein, 10 aa, synthetic construct
TWVRGDYTSV

SEQ ID NO: 96177 - protein, 10 aa, synthetic construct
TWVRGDQSTL

SEQ ID NO: 96178 - protein, 10 aa, synthetic construct
TWPRGDRDYL

SEQ ID NO: 96179 - protein, 10 aa, synthetic construct
TWPRGDYVGL

SEQ ID NO: 96180 - protein, 10 aa, synthetic construct
TWPRGDQSTL

SEQ ID NO: 96181 - protein, 10 aa, synthetic construct
TLGRGDRGVV

SEQ ID NO: 96182 - protein, 10 aa, synthetic construct
TWLRGDRDYL

SEQ ID NO: 96183 - protein, 10 aa, synthetic construct
TWLRGDYVGL

SEQ ID NO: 96184 - protein, 10 aa, synthetic construct
TWLRGDYSSV

SEQ ID NO: 96185 - protein, 10 aa, synthetic construct
TWLRGDYTSV

SEQ ID NO: 96186 - protein, 10 aa, synthetic construct
TWLRGDQSTL

SEQ ID NO: 96187 - protein, 10 aa, synthetic construct
TWIRGDRGVV

SEQ ID NO: 96188 - protein, 10 aa, synthetic construct
TWIRGDLTVT

SEQ ID NO: 96189 - protein, 10 aa, synthetic construct
TWIRGDLLLS

SEQ ID NO: 96190 - protein, 10 aa, synthetic construct
TWMRGDRGQI

SEQ ID NO: 96191 - protein, 10 aa, synthetic construct
TWMRGDRQGI

SEQ ID NO: 96192 - protein, 10 aa, synthetic construct
TLGRGDRSQT

SEQ ID NO: 96193 - protein, 10 aa, synthetic construct
TWMRGDRSVV

SEQ ID NO: 96194 - protein, 10 aa, synthetic construct
TWMRGDRGVV

SEQ ID NO: 96195 - protein, 10 aa, synthetic construct
TWMRGDYVGL

SEQ ID NO: 96196 - protein, 10 aa, synthetic construct
TWMRGDQSTL

SEQ ID NO: 96197 - protein, 10 aa, synthetic construct
TWMRGDRSQT

SEQ ID NO: 96198 - protein, 10 aa, synthetic construct
TWMRGDLLLS

SEQ ID NO: 96199 - protein, 10 aa, synthetic construct
TWWRGDHGVL

SEQ ID NO: 96200 - protein, 10 aa, synthetic construct
TWWRGDHVNL

SEQ ID NO: 96201 - protein, 10 aa, synthetic construct
TWWRGDYVGL

SEQ ID NO: 96202 - protein, 10 aa, synthetic construct
TWWRGDYSSV

SEQ ID NO: 96203 - protein, 10 aa, synthetic construct
TLARGDRGQI

SEQ ID NO: 96204 - protein, 10 aa, synthetic construct
TWWRGDQSTL

SEQ ID NO: 96205 - protein, 10 aa, synthetic construct
TWWRGDLLLS

SEQ ID NO: 96206 - protein, 10 aa, synthetic construct
TWFRGDRGVV

SEQ ID NO: 96207 - protein, 10 aa, synthetic construct
TWFRGDLTVT

SEQ ID NO: 96208 - protein, 10 aa, synthetic construct
TWFRGDLLLS

SEQ ID NO: 96209 - protein, 10 aa, synthetic construct
TWKRGDRGVV

SEQ ID NO: 96210 - protein, 10 aa, synthetic construct
TWKRGDLTVT

SEQ ID NO: 96211 - protein, 10 aa, synthetic construct
TWKRGDLLLS

SEQ ID NO: 96212 - protein, 10 aa, synthetic construct
TWRRGDRDYL

SEQ ID NO: 96213 - protein, 10 aa, synthetic construct
TWRRGDYVGL

SEQ ID NO: 96214 - protein, 10 aa, synthetic construct
TLARGDRQGI

SEQ ID NO: 96215 - protein, 10 aa, synthetic construct
TWRRGDQSTL

SEQ ID NO: 96216 - protein, 10 aa, synthetic construct
TWHRGDHGVL

SEQ ID NO: 96217 - protein, 10 aa, synthetic construct
TWHRGDRGQI

SEQ ID NO: 96218 - protein, 10 aa, synthetic construct
TWHRGDRQGI

SEQ ID NO: 96219 - protein, 10 aa, synthetic construct
TWHRGDRSVV

SEQ ID NO: 96220 - protein, 10 aa, synthetic construct
TWHRGDLTVT

SEQ ID NO: 96221 - protein, 10 aa, synthetic construct
TWHRGDLIGR

SEQ ID NO: 96222 - protein, 10 aa, synthetic construct
TWHRGDRSQT

SEQ ID NO: 96223 - protein, 10 aa, synthetic construct
TWHRGDLLLS

SEQ ID NO: 96224 - protein, 10 aa, synthetic construct
TWSRGDRDYL

SEQ ID NO: 96225 - protein, 10 aa, synthetic construct
TLARGDRSVV

SEQ ID NO: 96226 - protein, 10 aa, synthetic construct
TWSRGDYVGL

SEQ ID NO: 96227 - protein, 10 aa, synthetic construct
TWSRGDYSSV

SEQ ID NO: 96228 - protein, 10 aa, synthetic construct
TWSRGDYTSV

SEQ ID NO: 96229 - protein, 10 aa, synthetic construct
TWSRGDQSTL

SEQ ID NO: 96230 - protein, 10 aa, synthetic construct
TWTRGDHGVL

SEQ ID NO: 96231 - protein, 10 aa, synthetic construct
TWTRGDRGQI

SEQ ID NO: 96232 - protein, 10 aa, synthetic construct
TWTRGDRQGI

SEQ ID NO: 96233 - protein, 10 aa, synthetic construct
TWTRGDRSVV

SEQ ID NO: 96234 - protein, 10 aa, synthetic construct
TWTRGDLTVT

SEQ ID NO: 96235 - protein, 10 aa, synthetic construct
TWTRGDLIGR

SEQ ID NO: 96236 - protein, 10 aa, synthetic construct
TLARGDRGVV

SEQ ID NO: 96237 - protein, 10 aa, synthetic construct
TWTRGDRSQT

SEQ ID NO: 96238 - protein, 10 aa, synthetic construct
TWTRGDLLLS

SEQ ID NO: 96239 - protein, 10 aa, synthetic construct
TWYRGDRGVV

SEQ ID NO: 96240 - protein, 10 aa, synthetic construct
TWYRGDLTVT

SEQ ID NO: 96241 - protein, 10 aa, synthetic construct
TWYRGDLLLS

SEQ ID NO: 96242 - protein, 10 aa, synthetic construct
TWNRGDRGVV

SEQ ID NO: 96243 - protein, 10 aa, synthetic construct
TWNRGDLTVT

SEQ ID NO: 96244 - protein, 10 aa, synthetic construct
TWNRGDLLLS

SEQ ID NO: 96245 - protein, 10 aa, synthetic construct
TWQRGDHGVL

SEQ ID NO: 96246 - protein, 10 aa, synthetic construct
TWQRGDRGQI

SEQ ID NO: 96247 - protein, 10 aa, synthetic construct
TLARGDRSQT

SEQ ID NO: 96248 - protein, 10 aa, synthetic construct
TWQRGDRQGI

SEQ ID NO: 96249 - protein, 10 aa, synthetic construct
TWQRGDRSVV

SEQ ID NO: 96250 - protein, 10 aa, synthetic construct
TWQRGDLTVT

SEQ ID NO: 96251 - protein, 10 aa, synthetic construct
TWQRGDLIGR

SEQ ID NO: 96252 - protein, 10 aa, synthetic construct
TWQRGDRSQT

SEQ ID NO: 96253 - protein, 10 aa, synthetic construct
TWQRGDLLLS

SEQ ID NO: 96254 - protein, 10 aa, synthetic construct
TWDRGDHGVL

SEQ ID NO: 96255 - protein, 10 aa, synthetic construct
TWDRGDRGQI

SEQ ID NO: 96256 - protein, 10 aa, synthetic construct
TWDRGDRQGI

SEQ ID NO: 96257 - protein, 10 aa, synthetic construct
TWDRGDRSVV

SEQ ID NO: 96258 - protein, 10 aa, synthetic construct
DKKRGDRGQI

SEQ ID NO: 96259 - protein, 10 aa, synthetic construct
TLPRGDRGQI

SEQ ID NO: 96260 - protein, 10 aa, synthetic construct
TWDRGDLTVT

SEQ ID NO: 96261 - protein, 10 aa, synthetic construct
TWDRGDLIGR

SEQ ID NO: 96262 - protein, 10 aa, synthetic construct
TWDRGDRSQT

SEQ ID NO: 96263 - protein, 10 aa, synthetic construct
TWDRGDLLLS

SEQ ID NO: 96264 - protein, 10 aa, synthetic construct
TWERGDHGVL

SEQ ID NO: 96265 - protein, 10 aa, synthetic construct
TWERGDRGQI

SEQ ID NO: 96266 - protein, 10 aa, synthetic construct
TWERGDRQGI

SEQ ID NO: 96267 - protein, 10 aa, synthetic construct
TWERGDRSVV

SEQ ID NO: 96268 - protein, 10 aa, synthetic construct
TWERGDLTVT

SEQ ID NO: 96269 - protein, 10 aa, synthetic construct
TWERGDLIGR

SEQ ID NO: 96270 - protein, 10 aa, synthetic construct
TLPRGDRQGI

SEQ ID NO: 96271 - protein, 10 aa, synthetic construct
TWERGDRSQT

SEQ ID NO: 96272 - protein, 10 aa, synthetic construct
TWERGDLLLS

SEQ ID NO: 96273 - protein, 10 aa, synthetic construct
TFGRGDRGQI

SEQ ID NO: 96274 - protein, 10 aa, synthetic construct
TFGRGDRQGI

SEQ ID NO: 96275 - protein, 10 aa, synthetic construct
TFGRGDRSVV

SEQ ID NO: 96276 - protein, 10 aa, synthetic construct
TFGRGDRGVV

SEQ ID NO: 96277 - protein, 10 aa, synthetic construct
TFGRGDRSQT

SEQ ID NO: 96278 - protein, 10 aa, synthetic construct
TFARGDRGQI

SEQ ID NO: 96279 - protein, 10 aa, synthetic construct
TFARGDRQGI

SEQ ID NO: 96280 - protein, 10 aa, synthetic construct
TFARGDRSVV

SEQ ID NO: 96281 - protein, 10 aa, synthetic construct
TLPRGDRSVV

SEQ ID NO: 96282 - protein, 10 aa, synthetic construct
TFARGDRGVV

SEQ ID NO: 96283 - protein, 10 aa, synthetic construct
TFARGDRSQT

SEQ ID NO: 96284 - protein, 10 aa, synthetic construct
TFPRGDRGQI

SEQ ID NO: 96285 - protein, 10 aa, synthetic construct
TFPRGDRQGI

SEQ ID NO: 96286 - protein, 10 aa, synthetic construct
TFPRGDRSVV

SEQ ID NO: 96287 - protein, 10 aa, synthetic construct
TFPRGDRGVV

SEQ ID NO: 96288 - protein, 10 aa, synthetic construct
TFPRGDRSQT

SEQ ID NO: 96289 - protein, 10 aa, synthetic construct
TFRRGDRGQI

SEQ ID NO: 96290 - protein, 10 aa, synthetic construct
TFRRGDRQGI

SEQ ID NO: 96291 - protein, 10 aa, synthetic construct
TFRRGDRSVV

SEQ ID NO: 96292 - protein, 10 aa, synthetic construct
TLPRGDRGVV

SEQ ID NO: 96293 - protein, 10 aa, synthetic construct
TFRRGDRGVV

SEQ ID NO: 96294 - protein, 10 aa, synthetic construct
TFRRGDRSQT

SEQ ID NO: 96295 - protein, 10 aa, synthetic construct
TKGRGDRGQI

SEQ ID NO: 96296 - protein, 10 aa, synthetic construct
TKGRGDRQGI

SEQ ID NO: 96297 - protein, 10 aa, synthetic construct
TKGRGDRSVV

SEQ ID NO: 96298 - protein, 10 aa, synthetic construct
TKGRGDRGVV

SEQ ID NO: 96299 - protein, 10 aa, synthetic construct
TKGRGDRSQT

SEQ ID NO: 96300 - protein, 10 aa, synthetic construct
TKARGDRGQI

SEQ ID NO: 96301 - protein, 10 aa, synthetic construct
TKARGDRQGI

SEQ ID NO: 96302 - protein, 10 aa, synthetic construct
TKARGDRSVV

SEQ ID NO: 96303 - protein, 10 aa, synthetic construct
TLPRGDRSQT

SEQ ID NO: 96304 - protein, 10 aa, synthetic construct
TKARGDRGVV

SEQ ID NO: 96305 - protein, 10 aa, synthetic construct
TKARGDRSQT

SEQ ID NO: 96306 - protein, 10 aa, synthetic construct
TKPRGDRGQI

SEQ ID NO: 96307 - protein, 10 aa, synthetic construct
TKPRGDRQGI

SEQ ID NO: 96308 - protein, 10 aa, synthetic construct
TKPRGDRSVV

SEQ ID NO: 96309 - protein, 10 aa, synthetic construct
TKPRGDRGVV

SEQ ID NO: 96310 - protein, 10 aa, synthetic construct
TKPRGDRSQT

SEQ ID NO: 96311 - protein, 10 aa, synthetic construct
TKRRGDRGQI

SEQ ID NO: 96312 - protein, 10 aa, synthetic construct
TKRRGDRQGI

SEQ ID NO: 96313 - protein, 10 aa, synthetic construct
TKRRGDRSVV

SEQ ID NO: 96314 - protein, 10 aa, synthetic construct
TLRRGDRGQI

SEQ ID NO: 96315 - protein, 10 aa, synthetic construct
TKRRGDRGVV

SEQ ID NO: 96316 - protein, 10 aa, synthetic construct
TKRRGDRSQT

SEQ ID NO: 96317 - protein, 10 aa, synthetic construct
TRGRGDHVNL

SEQ ID NO: 96318 - protein, 10 aa, synthetic construct
TRGRGDRDYL

SEQ ID NO: 96319 - protein, 10 aa, synthetic construct
TRGRGDYSSV

SEQ ID NO: 96320 - protein, 10 aa, synthetic construct
TRGRGDLTVT

SEQ ID NO: 96321 - protein, 10 aa, synthetic construct
TRGRGDLIGR

SEQ ID NO: 96322 - protein, 10 aa, synthetic construct
TRARGDHVNL

SEQ ID NO: 96323 - protein, 10 aa, synthetic construct
TRARGDRDYL

SEQ ID NO: 96324 - protein, 10 aa, synthetic construct
TRARGDYSSV

SEQ ID NO: 96325 - protein, 10 aa, synthetic construct
TLRRGDRQGI

SEQ ID NO: 96326 - protein, 10 aa, synthetic construct
TRARGDLTVT

SEQ ID NO: 96327 - protein, 10 aa, synthetic construct
TRARGDLIGR

SEQ ID NO: 96328 - protein, 10 aa, synthetic construct
TRVRGDHGVL

SEQ ID NO: 96329 - protein, 10 aa, synthetic construct
TRVRGDYVGL

SEQ ID NO: 96330 - protein, 10 aa, synthetic construct
TRVRGDQSTL

SEQ ID NO: 96331 - protein, 10 aa, synthetic construct
TRVRGDLLLS

SEQ ID NO: 96332 - protein, 10 aa, synthetic construct
TRPRGDHVNL

SEQ ID NO: 96333 - protein, 10 aa, synthetic construct
TRPRGDRDYL

SEQ ID NO: 96334 - protein, 10 aa, synthetic construct
TRPRGDYSSV

SEQ ID NO: 96335 - protein, 10 aa, synthetic construct
TRPRGDLTVT

SEQ ID NO: 96336 - protein, 10 aa, synthetic construct
TLRRGDRSVV

SEQ ID NO: 96337 - protein, 10 aa, synthetic construct
TRPRGDLIGR

SEQ ID NO: 96338 - protein, 10 aa, synthetic construct
TRLRGDHGVL

SEQ ID NO: 96339 - protein, 10 aa, synthetic construct
TRLRGDYVGL

SEQ ID NO: 96340 - protein, 10 aa, synthetic construct
TRLRGDQSTL

SEQ ID NO: 96341 - protein, 10 aa, synthetic construct
TRLRGDLLLS

SEQ ID NO: 96342 - protein, 10 aa, synthetic construct
TRIRGDRGQI

SEQ ID NO: 96343 - protein, 10 aa, synthetic construct
TRIRGDRQGI

SEQ ID NO: 96344 - protein, 10 aa, synthetic construct
TRIRGDRSVV

SEQ ID NO: 96345 - protein, 10 aa, synthetic construct
TRIRGDRGVV

SEQ ID NO: 96346 - protein, 10 aa, synthetic construct
TRIRGDRSQT

SEQ ID NO: 96347 - protein, 10 aa, synthetic construct
TLRRGDRGVV

SEQ ID NO: 96348 - protein, 10 aa, synthetic construct
TRMRGDRGQI

SEQ ID NO: 96349 - protein, 10 aa, synthetic construct
TRMRGDRQGI

SEQ ID NO: 96350 - protein, 10 aa, synthetic construct
TRMRGDRSVV

SEQ ID NO: 96351 - protein, 10 aa, synthetic construct
TRMRGDRGVV

SEQ ID NO: 96352 - protein, 10 aa, synthetic construct
TRMRGDRSQT

SEQ ID NO: 96353 - protein, 10 aa, synthetic construct
TRWRGDHGVL

SEQ ID NO: 96354 - protein, 10 aa, synthetic construct
TRWRGDYVGL

SEQ ID NO: 96355 - protein, 10 aa, synthetic construct
TRWRGDQSTL

SEQ ID NO: 96356 - protein, 10 aa, synthetic construct
TRWRGDLLLS

SEQ ID NO: 96357 - protein, 10 aa, synthetic construct
TRFRGDRGQI

SEQ ID NO: 96358 - protein, 10 aa, synthetic construct
TLRRGDRSQT

SEQ ID NO: 96359 - protein, 10 aa, synthetic construct
TRFRGDRQGI

SEQ ID NO: 96360 - protein, 10 aa, synthetic construct
TRFRGDRSVV

SEQ ID NO: 96361 - protein, 10 aa, synthetic construct
TRFRGDRGVV

SEQ ID NO: 96362 - protein, 10 aa, synthetic construct
TRFRGDRSQT

SEQ ID NO: 96363 - protein, 10 aa, synthetic construct
TRKRGDRGQI

SEQ ID NO: 96364 - protein, 10 aa, synthetic construct
TRKRGDRQGI

SEQ ID NO: 96365 - protein, 10 aa, synthetic construct
TRKRGDRSVV

SEQ ID NO: 96366 - protein, 10 aa, synthetic construct
TRKRGDRGVV

SEQ ID NO: 96367 - protein, 10 aa, synthetic construct
TRKRGDRSQT

SEQ ID NO: 96368 - protein, 10 aa, synthetic construct
TRRRGDHVNL

SEQ ID NO: 96369 - protein, 10 aa, synthetic construct
DKKRGDRQGI

SEQ ID NO: 96370 - protein, 10 aa, synthetic construct
TWGRGDRGVV

SEQ ID NO: 96371 - protein, 10 aa, synthetic construct
TRRRGDRDYL

SEQ ID NO: 96372 - protein, 10 aa, synthetic construct
TRRRGDYSSV

SEQ ID NO: 96373 - protein, 10 aa, synthetic construct
TRRRGDLTVT

SEQ ID NO: 96374 - protein, 10 aa, synthetic construct
TRRRGDLIGR

SEQ ID NO: 96375 - protein, 10 aa, synthetic construct
TRHRGDHGVL

SEQ ID NO: 96376 - protein, 10 aa, synthetic construct
TRHRGDYVGL

SEQ ID NO: 96377 - protein, 10 aa, synthetic construct
TRHRGDQSTL

SEQ ID NO: 96378 - protein, 10 aa, synthetic construct
TRHRGDLLLS

SEQ ID NO: 96379 - protein, 10 aa, synthetic construct
TRSRGDHGVL

SEQ ID NO: 96380 - protein, 10 aa, synthetic construct
TRSRGDYVGL

SEQ ID NO: 96381 - protein, 10 aa, synthetic construct
TWARGDRGVV

SEQ ID NO: 96382 - protein, 10 aa, synthetic construct
TRSRGDQSTL

SEQ ID NO: 96383 - protein, 10 aa, synthetic construct
TRSRGDLLLS

SEQ ID NO: 96384 - protein, 10 aa, synthetic construct
TRTRGDHGVL

SEQ ID NO: 96385 - protein, 10 aa, synthetic construct
TRTRGDYVGL

SEQ ID NO: 96386 - protein, 10 aa, synthetic construct
TRTRGDQSTL

SEQ ID NO: 96387 - protein, 10 aa, synthetic construct
TRTRGDLLLS

SEQ ID NO: 96388 - protein, 10 aa, synthetic construct
TRYRGDRGQI

SEQ ID NO: 96389 - protein, 10 aa, synthetic construct
TRYRGDRQGI

SEQ ID NO: 96390 - protein, 10 aa, synthetic construct
TRYRGDRSVV

SEQ ID NO: 96391 - protein, 10 aa, synthetic construct
TRYRGDRGVV

SEQ ID NO: 96392 - protein, 10 aa, synthetic construct
TWVRGDRGVV

SEQ ID NO: 96393 - protein, 10 aa, synthetic construct
TRYRGDRSQT

SEQ ID NO: 96394 - protein, 10 aa, synthetic construct
TRNRGDRGQI

SEQ ID NO: 96395 - protein, 10 aa, synthetic construct
TRNRGDRQGI

SEQ ID NO: 96396 - protein, 10 aa, synthetic construct
TRNRGDRSVV

SEQ ID NO: 96397 - protein, 10 aa, synthetic construct
TRNRGDRGVV

SEQ ID NO: 96398 - protein, 10 aa, synthetic construct
TRNRGDRSQT

SEQ ID NO: 96399 - protein, 10 aa, synthetic construct
TRQRGDHGVL

SEQ ID NO: 96400 - protein, 10 aa, synthetic construct
TRQRGDYVGL

SEQ ID NO: 96401 - protein, 10 aa, synthetic construct
TRQRGDQSTL

SEQ ID NO: 96402 - protein, 10 aa, synthetic construct
TRQRGDLLLS

SEQ ID NO: 96403 - protein, 10 aa, synthetic construct
TWPRGDRGVV

SEQ ID NO: 96404 - protein, 10 aa, synthetic construct
TRDRGDHGVL

SEQ ID NO: 96405 - protein, 10 aa, synthetic construct
TRDRGDYVGL

SEQ ID NO: 96406 - protein, 10 aa, synthetic construct
TRDRGDQSTL

SEQ ID NO: 96407 - protein, 10 aa, synthetic construct
TRDRGDLLLS

SEQ ID NO: 96408 - protein, 10 aa, synthetic construct
TRERGDHGVL

SEQ ID NO: 96409 - protein, 10 aa, synthetic construct
TRERGDYVGL

SEQ ID NO: 96410 - protein, 10 aa, synthetic construct
TRERGDQSTL

SEQ ID NO: 96411 - protein, 10 aa, synthetic construct
TRERGDLLLS

SEQ ID NO: 96412 - protein, 10 aa, synthetic construct
THGRGDHGVL

SEQ ID NO: 96413 - protein, 10 aa, synthetic construct
THGRGDYVGL

SEQ ID NO: 96414 - protein, 10 aa, synthetic construct
TWLRGDRGVV

SEQ ID NO: 96415 - protein, 10 aa, synthetic construct
THGRGDQSTL

SEQ ID NO: 96416 - protein, 10 aa, synthetic construct
THGRGDLLLS

SEQ ID NO: 96417 - protein, 10 aa, synthetic construct
THARGDHGVL

SEQ ID NO: 96418 - protein, 10 aa, synthetic construct
THARGDYVGL

SEQ ID NO: 96419 - protein, 10 aa, synthetic construct
THARGDQSTL

SEQ ID NO: 96420 - protein, 10 aa, synthetic construct
THARGDLLLS

SEQ ID NO: 96421 - protein, 10 aa, synthetic construct
THVRGDRGQI

SEQ ID NO: 96422 - protein, 10 aa, synthetic construct
THVRGDRQGI

SEQ ID NO: 96423 - protein, 10 aa, synthetic construct
THVRGDRSVV

SEQ ID NO: 96424 - protein, 10 aa, synthetic construct
THVRGDRGVV

SEQ ID NO: 96425 - protein, 10 aa, synthetic construct
TWRRGDRGVV

SEQ ID NO: 96426 - protein, 10 aa, synthetic construct
THVRGDRSQT

SEQ ID NO: 96427 - protein, 10 aa, synthetic construct
THPRGDHGVL

SEQ ID NO: 96428 - protein, 10 aa, synthetic construct
THPRGDYVGL

SEQ ID NO: 96429 - protein, 10 aa, synthetic construct
THPRGDQSTL

SEQ ID NO: 96430 - protein, 10 aa, synthetic construct
THPRGDLLLS

SEQ ID NO: 96431 - protein, 10 aa, synthetic construct
THLRGDRGQI

SEQ ID NO: 96432 - protein, 10 aa, synthetic construct
THLRGDRQGI

SEQ ID NO: 96433 - protein, 10 aa, synthetic construct
THLRGDRSVV

SEQ ID NO: 96434 - protein, 10 aa, synthetic construct
THLRGDRGVV

SEQ ID NO: 96435 - protein, 10 aa, synthetic construct
THLRGDRSQT

SEQ ID NO: 96436 - protein, 10 aa, synthetic construct
TWSRGDRGVV

SEQ ID NO: 96437 - protein, 10 aa, synthetic construct
THWRGDRGQI

SEQ ID NO: 96438 - protein, 10 aa, synthetic construct
THWRGDRQGI

SEQ ID NO: 96439 - protein, 10 aa, synthetic construct
THWRGDRSVV

SEQ ID NO: 96440 - protein, 10 aa, synthetic construct
THWRGDRGVV

SEQ ID NO: 96441 - protein, 10 aa, synthetic construct
THWRGDRSQT

SEQ ID NO: 96442 - protein, 10 aa, synthetic construct
THRRGDHGVL

SEQ ID NO: 96443 - protein, 10 aa, synthetic construct
THRRGDYVGL

SEQ ID NO: 96444 - protein, 10 aa, synthetic construct
THRRGDQSTL

SEQ ID NO: 96445 - protein, 10 aa, synthetic construct
THRRGDLLLS

SEQ ID NO: 96446 - protein, 10 aa, synthetic construct
THHRGDRGQI

SEQ ID NO: 96447 - protein, 10 aa, synthetic construct
TRGRGDRGQI

SEQ ID NO: 96448 - protein, 10 aa, synthetic construct
THHRGDRQGI

SEQ ID NO: 96449 - protein, 10 aa, synthetic construct
THHRGDRSVV

SEQ ID NO: 96450 - protein, 10 aa, synthetic construct
THHRGDRGVV

SEQ ID NO: 96451 - protein, 10 aa, synthetic construct
THHRGDRSQT

SEQ ID NO: 96452 - protein, 10 aa, synthetic construct
THSRGDRGQI

SEQ ID NO: 96453 - protein, 10 aa, synthetic construct
THSRGDRQGI

SEQ ID NO: 96454 - protein, 10 aa, synthetic construct
THSRGDRSVV

SEQ ID NO: 96455 - protein, 10 aa, synthetic construct
THSRGDRGVV

SEQ ID NO: 96456 - protein, 10 aa, synthetic construct
THSRGDRSQT

SEQ ID NO: 96457 - protein, 10 aa, synthetic construct
THTRGDRGQI

SEQ ID NO: 96458 - protein, 10 aa, synthetic construct
TRGRGDRQGI

SEQ ID NO: 96459 - protein, 10 aa, synthetic construct
THTRGDRQGI

SEQ ID NO: 96460 - protein, 10 aa, synthetic construct
THTRGDRSVV

SEQ ID NO: 96461 - protein, 10 aa, synthetic construct
THTRGDRGVV

SEQ ID NO: 96462 - protein, 10 aa, synthetic construct
THTRGDRSQT

SEQ ID NO: 96463 - protein, 10 aa, synthetic construct
THQRGDRGQI

SEQ ID NO: 96464 - protein, 10 aa, synthetic construct
THQRGDRQGI

SEQ ID NO: 96465 - protein, 10 aa, synthetic construct
THQRGDRSVV

SEQ ID NO: 96466 - protein, 10 aa, synthetic construct
THQRGDRGVV

SEQ ID NO: 96467 - protein, 10 aa, synthetic construct
THQRGDRSQT

SEQ ID NO: 96468 - protein, 10 aa, synthetic construct
THDRGDRGQI

SEQ ID NO: 96469 - protein, 10 aa, synthetic construct
TRGRGDRSVV

SEQ ID NO: 96470 - protein, 10 aa, synthetic construct
THDRGDRQGI

SEQ ID NO: 96471 - protein, 10 aa, synthetic construct
THDRGDRSVV

SEQ ID NO: 96472 - protein, 10 aa, synthetic construct
THDRGDRGVV

SEQ ID NO: 96473 - protein, 10 aa, synthetic construct
THDRGDRSQT

SEQ ID NO: 96474 - protein, 10 aa, synthetic construct
THERGDRGQI

SEQ ID NO: 96475 - protein, 10 aa, synthetic construct
THERGDRQGI

SEQ ID NO: 96476 - protein, 10 aa, synthetic construct
THERGDRSVV

SEQ ID NO: 96477 - protein, 10 aa, synthetic construct
THERGDRGVV

SEQ ID NO: 96478 - protein, 10 aa, synthetic construct
THERGDRSQT

SEQ ID NO: 96479 - protein, 10 aa, synthetic construct
TSGRGDHVNL

SEQ ID NO: 96480 - protein, 10 aa, synthetic construct
DKKRGDRGVV

SEQ ID NO: 96481 - protein, 10 aa, synthetic construct
TRGRGDRGVV

SEQ ID NO: 96482 - protein, 10 aa, synthetic construct
TSGRGDRDYL

SEQ ID NO: 96483 - protein, 10 aa, synthetic construct
TSGRGDYSSV

SEQ ID NO: 96484 - protein, 10 aa, synthetic construct
TSGRGDLTVT

SEQ ID NO: 96485 - protein, 10 aa, synthetic construct
TSGRGDLIGR

SEQ ID NO: 96486 - protein, 10 aa, synthetic construct
TSARGDHVNL

SEQ ID NO: 96487 - protein, 10 aa, synthetic construct
TSARGDRDYL

SEQ ID NO: 96488 - protein, 10 aa, synthetic construct
TSARGDYSSV

SEQ ID NO: 96489 - protein, 10 aa, synthetic construct
TSARGDLTVT

SEQ ID NO: 96490 - protein, 10 aa, synthetic construct
TSARGDLIGR

SEQ ID NO: 96491 - protein, 10 aa, synthetic construct
TSVRGDHGVL

SEQ ID NO: 96492 - protein, 10 aa, synthetic construct
TRGRGDRSQT

SEQ ID NO: 96493 - protein, 10 aa, synthetic construct
TSVRGDHVNL

SEQ ID NO: 96494 - protein, 10 aa, synthetic construct
TSVRGDYVGL

SEQ ID NO: 96495 - protein, 10 aa, synthetic construct
TSVRGDYSSV

SEQ ID NO: 96496 - protein, 10 aa, synthetic construct
TSVRGDQSTL

SEQ ID NO: 96497 - protein, 10 aa, synthetic construct
TSVRGDLLLS

SEQ ID NO: 96498 - protein, 10 aa, synthetic construct
TSLRGDHGVL

SEQ ID NO: 96499 - protein, 10 aa, synthetic construct
TSLRGDHVNL

SEQ ID NO: 96500 - protein, 10 aa, synthetic construct
TSLRGDYVGL

SEQ ID NO: 96501 - protein, 10 aa, synthetic construct
TSLRGDYSSV

SEQ ID NO: 96502 - protein, 10 aa, synthetic construct
TSLRGDQSTL

SEQ ID NO: 96503 - protein, 10 aa, synthetic construct
TRARGDRGQI

SEQ ID NO: 96504 - protein, 10 aa, synthetic construct
TSLRGDLLLS

SEQ ID NO: 96505 - protein, 10 aa, synthetic construct
TSIRGDRGQI

SEQ ID NO: 96506 - protein, 10 aa, synthetic construct
TSIRGDRQGI

SEQ ID NO: 96507 - protein, 10 aa, synthetic construct
TSIRGDRSVV

SEQ ID NO: 96508 - protein, 10 aa, synthetic construct
TSIRGDRGVV

SEQ ID NO: 96509 - protein, 10 aa, synthetic construct
TSIRGDYVGL

SEQ ID NO: 96510 - protein, 10 aa, synthetic construct
TSIRGDQSTL

SEQ ID NO: 96511 - protein, 10 aa, synthetic construct
TSIRGDRSQT

SEQ ID NO: 96512 - protein, 10 aa, synthetic construct
TSIRGDLLLS

SEQ ID NO: 96513 - protein, 10 aa, synthetic construct
TSMRGDRGQI

SEQ ID NO: 96514 - protein, 10 aa, synthetic construct
TRARGDRQGI

SEQ ID NO: 96515 - protein, 10 aa, synthetic construct
TSMRGDRQGI

SEQ ID NO: 96516 - protein, 10 aa, synthetic construct
TSMRGDRSVV

SEQ ID NO: 96517 - protein, 10 aa, synthetic construct
TSMRGDRGVV

SEQ ID NO: 96518 - protein, 10 aa, synthetic construct
TSMRGDYVGL

SEQ ID NO: 96519 - protein, 10 aa, synthetic construct
TSMRGDQSTL

SEQ ID NO: 96520 - protein, 10 aa, synthetic construct
TSMRGDRSQT

SEQ ID NO: 96521 - protein, 10 aa, synthetic construct
TSMRGDLLLS

SEQ ID NO: 96522 - protein, 10 aa, synthetic construct
TSWRGDHGVL

SEQ ID NO: 96523 - protein, 10 aa, synthetic construct
TSWRGDHVNL

SEQ ID NO: 96524 - protein, 10 aa, synthetic construct
TSWRGDYVGL

SEQ ID NO: 96525 - protein, 10 aa, synthetic construct
TRARGDRSVV

SEQ ID NO: 96526 - protein, 10 aa, synthetic construct
TSWRGDYSSV

SEQ ID NO: 96527 - protein, 10 aa, synthetic construct
TSWRGDQSTL

SEQ ID NO: 96528 - protein, 10 aa, synthetic construct
TSWRGDLLLS

SEQ ID NO: 96529 - protein, 10 aa, synthetic construct
TSFRGDRGQI

SEQ ID NO: 96530 - protein, 10 aa, synthetic construct
TSFRGDRQGI

SEQ ID NO: 96531 - protein, 10 aa, synthetic construct
TSFRGDRSVV

SEQ ID NO: 96532 - protein, 10 aa, synthetic construct
TSFRGDRGVV

SEQ ID NO: 96533 - protein, 10 aa, synthetic construct
TSFRGDYVGL

SEQ ID NO: 96534 - protein, 10 aa, synthetic construct
TSFRGDQSTL

SEQ ID NO: 96535 - protein, 10 aa, synthetic construct
TSFRGDRSQT

SEQ ID NO: 96536 - protein, 10 aa, synthetic construct
TRARGDRGVV

SEQ ID NO: 96537 - protein, 10 aa, synthetic construct
TSFRGDLLLS

SEQ ID NO: 96538 - protein, 10 aa, synthetic construct
TSKRGDRGQI

SEQ ID NO: 96539 - protein, 10 aa, synthetic construct
TSKRGDRQGI

SEQ ID NO: 96540 - protein, 10 aa, synthetic construct
TSKRGDRSVV

SEQ ID NO: 96541 - protein, 10 aa, synthetic construct
TSKRGDRGVV

SEQ ID NO: 96542 - protein, 10 aa, synthetic construct
TSKRGDYVGL

SEQ ID NO: 96543 - protein, 10 aa, synthetic construct
TSKRGDQSTL

SEQ ID NO: 96544 - protein, 10 aa, synthetic construct
TSKRGDRSQT

SEQ ID NO: 96545 - protein, 10 aa, synthetic construct
TSKRGDLLLS

SEQ ID NO: 96546 - protein, 10 aa, synthetic construct
TSRRGDHVNL

SEQ ID NO: 96547 - protein, 10 aa, synthetic construct
TRARGDRSQT

SEQ ID NO: 96548 - protein, 10 aa, synthetic construct
TSRRGDRDYL

SEQ ID NO: 96549 - protein, 10 aa, synthetic construct
TSRRGDYSSV

SEQ ID NO: 96550 - protein, 10 aa, synthetic construct
TSRRGDLTVT

SEQ ID NO: 96551 - protein, 10 aa, synthetic construct
TSRRGDLIGR

SEQ ID NO: 96552 - protein, 10 aa, synthetic construct
TSHRGDHGVL

SEQ ID NO: 96553 - protein, 10 aa, synthetic construct
TSHRGDHVNL

SEQ ID NO: 96554 - protein, 10 aa, synthetic construct
TSHRGDYVGL

SEQ ID NO: 96555 - protein, 10 aa, synthetic construct
TSHRGDYSSV

SEQ ID NO: 96556 - protein, 10 aa, synthetic construct
TSHRGDQSTL

SEQ ID NO: 96557 - protein, 10 aa, synthetic construct
TSHRGDLLLS

SEQ ID NO: 96558 - protein, 10 aa, synthetic construct
TRPRGDRGQI

SEQ ID NO: 96559 - protein, 10 aa, synthetic construct
TSSRGDHGVL

SEQ ID NO: 96560 - protein, 10 aa, synthetic construct
TSSRGDHVNL

SEQ ID NO: 96561 - protein, 10 aa, synthetic construct
TSSRGDYVGL

SEQ ID NO: 96562 - protein, 10 aa, synthetic construct
TSSRGDYSSV

SEQ ID NO: 96563 - protein, 10 aa, synthetic construct
TSSRGDQSTL

SEQ ID NO: 96564 - protein, 10 aa, synthetic construct
TSSRGDLLLS

SEQ ID NO: 96565 - protein, 10 aa, synthetic construct
TSTRGDHGVL

SEQ ID NO: 96566 - protein, 10 aa, synthetic construct
TSTRGDHVNL

SEQ ID NO: 96567 - protein, 10 aa, synthetic construct
TSTRGDYVGL

SEQ ID NO: 96568 - protein, 10 aa, synthetic construct
TSTRGDYSSV

SEQ ID NO: 96569 - protein, 10 aa, synthetic construct
TRPRGDRQGI

SEQ ID NO: 96570 - protein, 10 aa, synthetic construct
TSTRGDQSTL

SEQ ID NO: 96571 - protein, 10 aa, synthetic construct
TSTRGDLLLS

SEQ ID NO: 96572 - protein, 10 aa, synthetic construct
TSYRGDRGQI

SEQ ID NO: 96573 - protein, 10 aa, synthetic construct
TSYRGDRQGI

SEQ ID NO: 96574 - protein, 10 aa, synthetic construct
TSYRGDRSVV

SEQ ID NO: 96575 - protein, 10 aa, synthetic construct
TSYRGDRGVV

SEQ ID NO: 96576 - protein, 10 aa, synthetic construct
TSYRGDYVGL

SEQ ID NO: 96577 - protein, 10 aa, synthetic construct
TSYRGDQSTL

SEQ ID NO: 96578 - protein, 10 aa, synthetic construct
TSYRGDRSQT

SEQ ID NO: 96579 - protein, 10 aa, synthetic construct
TSYRGDLLLS

SEQ ID NO: 96580 - protein, 10 aa, synthetic construct
TRPRGDRSVV

SEQ ID NO: 96581 - protein, 10 aa, synthetic construct
TSNRGDRGQI

SEQ ID NO: 96582 - protein, 10 aa, synthetic construct
TSNRGDRQGI

SEQ ID NO: 96583 - protein, 10 aa, synthetic construct
TSNRGDRSVV

SEQ ID NO: 96584 - protein, 10 aa, synthetic construct
TSNRGDRGVV

SEQ ID NO: 96585 - protein, 10 aa, synthetic construct
TSNRGDYVGL

SEQ ID NO: 96586 - protein, 10 aa, synthetic construct
TSNRGDQSTL

SEQ ID NO: 96587 - protein, 10 aa, synthetic construct
TSNRGDRSQT

SEQ ID NO: 96588 - protein, 10 aa, synthetic construct
TSNRGDLLLS

SEQ ID NO: 96589 - protein, 10 aa, synthetic construct
TSQRGDHGVL

SEQ ID NO: 96590 - protein, 10 aa, synthetic construct
TSQRGDHVNL

SEQ ID NO: 96591 - protein, 10 aa, synthetic construct
DKKRGDYVGL

SEQ ID NO: 96592 - protein, 10 aa, synthetic construct
TRPRGDRGVV

SEQ ID NO: 96593 - protein, 10 aa, synthetic construct
TSQRGDYVGL

SEQ ID NO: 96594 - protein, 10 aa, synthetic construct
TSQRGDYSSV

SEQ ID NO: 96595 - protein, 10 aa, synthetic construct
TSQRGDQSTL

SEQ ID NO: 96596 - protein, 10 aa, synthetic construct
TSQRGDLLLS

SEQ ID NO: 96597 - protein, 10 aa, synthetic construct
TSDRGDHGVL

SEQ ID NO: 96598 - protein, 10 aa, synthetic construct
TSDRGDHVNL

SEQ ID NO: 96599 - protein, 10 aa, synthetic construct
TSDRGDYVGL

SEQ ID NO: 96600 - protein, 10 aa, synthetic construct
TSDRGDYSSV

SEQ ID NO: 96601 - protein, 10 aa, synthetic construct
TSDRGDQSTL

SEQ ID NO: 96602 - protein, 10 aa, synthetic construct
TSDRGDLLLS

SEQ ID NO: 96603 - protein, 10 aa, synthetic construct
TRPRGDRSQT

SEQ ID NO: 96604 - protein, 10 aa, synthetic construct
TSERGDHGVL

SEQ ID NO: 96605 - protein, 10 aa, synthetic construct
TSERGDHVNL

SEQ ID NO: 96606 - protein, 10 aa, synthetic construct
TSERGDYVGL

SEQ ID NO: 96607 - protein, 10 aa, synthetic construct
TSERGDYSSV

SEQ ID NO: 96608 - protein, 10 aa, synthetic construct
TSERGDQSTL

SEQ ID NO: 96609 - protein, 10 aa, synthetic construct
TSERGDLLLS

SEQ ID NO: 96610 - protein, 10 aa, synthetic construct
TTGRGDHGVL

SEQ ID NO: 96611 - protein, 10 aa, synthetic construct
TTGRGDYVGL

SEQ ID NO: 96612 - protein, 10 aa, synthetic construct
TTGRGDQSTL

SEQ ID NO: 96613 - protein, 10 aa, synthetic construct
TTGRGDLLLS

SEQ ID NO: 96614 - protein, 10 aa, synthetic construct
TRRRGDRGQI

SEQ ID NO: 96615 - protein, 10 aa, synthetic construct
TTARGDHGVL

SEQ ID NO: 96616 - protein, 10 aa, synthetic construct
TTARGDYVGL

SEQ ID NO: 96617 - protein, 10 aa, synthetic construct
TTARGDQSTL

SEQ ID NO: 96618 - protein, 10 aa, synthetic construct
TTARGDLLLS

SEQ ID NO: 96619 - protein, 10 aa, synthetic construct
TTVRGDRGQI

SEQ ID NO: 96620 - protein, 10 aa, synthetic construct
TTVRGDRQGI

SEQ ID NO: 96621 - protein, 10 aa, synthetic construct
TTVRGDRSVV

SEQ ID NO: 96622 - protein, 10 aa, synthetic construct
TTVRGDRGVV

SEQ ID NO: 96623 - protein, 10 aa, synthetic construct
TTVRGDRSQT

SEQ ID NO: 96624 - protein, 10 aa, synthetic construct
TTPRGDHGVL

SEQ ID NO: 96625 - protein, 10 aa, synthetic construct
TRRRGDRQGI

SEQ ID NO: 96626 - protein, 10 aa, synthetic construct
TTPRGDYVGL

SEQ ID NO: 96627 - protein, 10 aa, synthetic construct
TTPRGDQSTL

SEQ ID NO: 96628 - protein, 10 aa, synthetic construct
TTPRGDLLLS

SEQ ID NO: 96629 - protein, 10 aa, synthetic construct
TTLRGDRGQI

SEQ ID NO: 96630 - protein, 10 aa, synthetic construct
TTLRGDRQGI

SEQ ID NO: 96631 - protein, 10 aa, synthetic construct
TTLRGDRSVV

SEQ ID NO: 96632 - protein, 10 aa, synthetic construct
TTLRGDRGVV

SEQ ID NO: 96633 - protein, 10 aa, synthetic construct
TTLRGDRSQT

SEQ ID NO: 96634 - protein, 10 aa, synthetic construct
TTWRGDRGQI

SEQ ID NO: 96635 - protein, 10 aa, synthetic construct
TTWRGDRQGI

SEQ ID NO: 96636 - protein, 10 aa, synthetic construct
TRRRGDRSVV

SEQ ID NO: 96637 - protein, 10 aa, synthetic construct
TTWRGDRSVV

SEQ ID NO: 96638 - protein, 10 aa, synthetic construct
TTWRGDRGVV

SEQ ID NO: 96639 - protein, 10 aa, synthetic construct
TTWRGDRSQT

SEQ ID NO: 96640 - protein, 10 aa, synthetic construct
TTRRGDHGVL

SEQ ID NO: 96641 - protein, 10 aa, synthetic construct
TTRRGDYVGL

SEQ ID NO: 96642 - protein, 10 aa, synthetic construct
TTRRGDQSTL

SEQ ID NO: 96643 - protein, 10 aa, synthetic construct
TTRRGDLLLS

SEQ ID NO: 96644 - protein, 10 aa, synthetic construct
TTHRGDRGQI

SEQ ID NO: 96645 - protein, 10 aa, synthetic construct
TTHRGDRQGI

SEQ ID NO: 96646 - protein, 10 aa, synthetic construct
TTHRGDRSVV

SEQ ID NO: 96647 - protein, 10 aa, synthetic construct
TRRRGDRGVV

SEQ ID NO: 96648 - protein, 10 aa, synthetic construct
TTHRGDRGVV

SEQ ID NO: 96649 - protein, 10 aa, synthetic construct
TTHRGDRSQT

SEQ ID NO: 96650 - protein, 10 aa, synthetic construct
TTSRGDRGQI

SEQ ID NO: 96651 - protein, 10 aa, synthetic construct
TTSRGDRQGI

SEQ ID NO: 96652 - protein, 10 aa, synthetic construct
TTSRGDRSVV

SEQ ID NO: 96653 - protein, 10 aa, synthetic construct
TTSRGDRGVV

SEQ ID NO: 96654 - protein, 10 aa, synthetic construct
TTSRGDRSQT

SEQ ID NO: 96655 - protein, 10 aa, synthetic construct
TTTRGDRGQI

SEQ ID NO: 96656 - protein, 10 aa, synthetic construct
TTTRGDRQGI

SEQ ID NO: 96657 - protein, 10 aa, synthetic construct
TTTRGDRSVV

SEQ ID NO: 96658 - protein, 10 aa, synthetic construct
TRRRGDRSQT

SEQ ID NO: 96659 - protein, 10 aa, synthetic construct
TTTRGDRGVV

SEQ ID NO: 96660 - protein, 10 aa, synthetic construct
TTTRGDRSQT

SEQ ID NO: 96661 - protein, 10 aa, synthetic construct
TTQRGDRGQI

SEQ ID NO: 96662 - protein, 10 aa, synthetic construct
TTQRGDRQGI

SEQ ID NO: 96663 - protein, 10 aa, synthetic construct
TTQRGDRSVV

SEQ ID NO: 96664 - protein, 10 aa, synthetic construct
TTQRGDRGVV

SEQ ID NO: 96665 - protein, 10 aa, synthetic construct
TTQRGDRSQT

SEQ ID NO: 96666 - protein, 10 aa, synthetic construct
TTDRGDRGQI

SEQ ID NO: 96667 - protein, 10 aa, synthetic construct
TTDRGDRQGI

SEQ ID NO: 96668 - protein, 10 aa, synthetic construct
TTDRGDRSVV

SEQ ID NO: 96669 - protein, 10 aa, synthetic construct
TSGRGDRGQI

SEQ ID NO: 96670 - protein, 10 aa, synthetic construct
TTDRGDRGVV

SEQ ID NO: 96671 - protein, 10 aa, synthetic construct
TTDRGDRSQT

SEQ ID NO: 96672 - protein, 10 aa, synthetic construct
TTERGDRGQI

SEQ ID NO: 96673 - protein, 10 aa, synthetic construct
TTERGDRQGI

SEQ ID NO: 96674 - protein, 10 aa, synthetic construct
TTERGDRSVV

SEQ ID NO: 96675 - protein, 10 aa, synthetic construct
TTERGDRGVV

SEQ ID NO: 96676 - protein, 10 aa, synthetic construct
TTERGDRSQT

SEQ ID NO: 96677 - protein, 10 aa, synthetic construct
TYGRGDRGQI

SEQ ID NO: 96678 - protein, 10 aa, synthetic construct
TYGRGDRQGI

SEQ ID NO: 96679 - protein, 10 aa, synthetic construct
TYGRGDRSVV

SEQ ID NO: 96680 - protein, 10 aa, synthetic construct
TSGRGDRQGI

SEQ ID NO: 96681 - protein, 10 aa, synthetic construct
TYGRGDRGVV

SEQ ID NO: 96682 - protein, 10 aa, synthetic construct
TYGRGDRSQT

SEQ ID NO: 96683 - protein, 10 aa, synthetic construct
TYARGDRGQI

SEQ ID NO: 96684 - protein, 10 aa, synthetic construct
TYARGDRQGI

SEQ ID NO: 96685 - protein, 10 aa, synthetic construct
TYARGDRSVV

SEQ ID NO: 96686 - protein, 10 aa, synthetic construct
TYARGDRGVV

SEQ ID NO: 96687 - protein, 10 aa, synthetic construct
TYARGDRSQT

SEQ ID NO: 96688 - protein, 10 aa, synthetic construct
TYPRGDRGQI

SEQ ID NO: 96689 - protein, 10 aa, synthetic construct
TYPRGDRQGI

SEQ ID NO: 96690 - protein, 10 aa, synthetic construct
TYPRGDRSVV

SEQ ID NO: 96691 - protein, 10 aa, synthetic construct
TSGRGDRSVV

SEQ ID NO: 96692 - protein, 10 aa, synthetic construct
TYPRGDRGVV

SEQ ID NO: 96693 - protein, 10 aa, synthetic construct
TYPRGDRSQT

SEQ ID NO: 96694 - protein, 10 aa, synthetic construct
TYRRGDRGQI

SEQ ID NO: 96695 - protein, 10 aa, synthetic construct
TYRRGDRQGI

SEQ ID NO: 96696 - protein, 10 aa, synthetic construct
TYRRGDRSVV

SEQ ID NO: 96697 - protein, 10 aa, synthetic construct
TYRRGDRGVV

SEQ ID NO: 96698 - protein, 10 aa, synthetic construct
TYRRGDRSQT

SEQ ID NO: 96699 - protein, 10 aa, synthetic construct
TNGRGDRGQI

SEQ ID NO: 96700 - protein, 10 aa, synthetic construct
TNGRGDRQGI

SEQ ID NO: 96701 - protein, 10 aa, synthetic construct
TNGRGDRSVV

SEQ ID NO: 96702 - protein, 10 aa, synthetic construct
TKNRGDRSQT

SEQ ID NO: 96703 - protein, 10 aa, synthetic construct
DKKRGDLIGR

SEQ ID NO: 96704 - protein, 10 aa, synthetic construct
TSGRGDRGVV

SEQ ID NO: 96705 - protein, 10 aa, synthetic construct
TNGRGDRGVV

SEQ ID NO: 96706 - protein, 10 aa, synthetic construct
TNGRGDRSQT

SEQ ID NO: 96707 - protein, 10 aa, synthetic construct
TNARGDRGQI

SEQ ID NO: 96708 - protein, 10 aa, synthetic construct
TNARGDRQGI

SEQ ID NO: 96709 - protein, 10 aa, synthetic construct
TNARGDRSVV

SEQ ID NO: 96710 - protein, 10 aa, synthetic construct
TNARGDRGVV

SEQ ID NO: 96711 - protein, 10 aa, synthetic construct
TNARGDRSQT

SEQ ID NO: 96712 - protein, 10 aa, synthetic construct
TNPRGDRGQI

SEQ ID NO: 96713 - protein, 10 aa, synthetic construct
TNPRGDRQGI

SEQ ID NO: 96714 - protein, 10 aa, synthetic construct
TNPRGDRSVV

SEQ ID NO: 96715 - protein, 10 aa, synthetic construct
TSGRGDRSQT

SEQ ID NO: 96716 - protein, 10 aa, synthetic construct
TNPRGDRGVV

SEQ ID NO: 96717 - protein, 10 aa, synthetic construct
TNPRGDRSQT

SEQ ID NO: 96718 - protein, 10 aa, synthetic construct
TNRRGDRGQI

SEQ ID NO: 96719 - protein, 10 aa, synthetic construct
TNRRGDRQGI

SEQ ID NO: 96720 - protein, 10 aa, synthetic construct
TNRRGDRSVV

SEQ ID NO: 96721 - protein, 10 aa, synthetic construct
TNRRGDRGVV

SEQ ID NO: 96722 - protein, 10 aa, synthetic construct
TNRRGDRSQT

SEQ ID NO: 96723 - protein, 10 aa, synthetic construct
TQGRGDHGVL

SEQ ID NO: 96724 - protein, 10 aa, synthetic construct
TQGRGDYVGL

SEQ ID NO: 96725 - protein, 10 aa, synthetic construct
TQGRGDQSTL

SEQ ID NO: 96726 - protein, 10 aa, synthetic construct
TSARGDRGQI

SEQ ID NO: 96727 - protein, 10 aa, synthetic construct
TQGRGDLLLS

SEQ ID NO: 96728 - protein, 10 aa, synthetic construct
TQARGDHGVL

SEQ ID NO: 96729 - protein, 10 aa, synthetic construct
TQARGDYVGL

SEQ ID NO: 96730 - protein, 10 aa, synthetic construct
TQARGDQSTL

SEQ ID NO: 96731 - protein, 10 aa, synthetic construct
TQARGDLLLS

SEQ ID NO: 96732 - protein, 10 aa, synthetic construct
TQVRGDRGQI

SEQ ID NO: 96733 - protein, 10 aa, synthetic construct
TQVRGDRQGI

SEQ ID NO: 96734 - protein, 10 aa, synthetic construct
TQVRGDRSVV

SEQ ID NO: 96735 - protein, 10 aa, synthetic construct
TQVRGDRGVV

SEQ ID NO: 96736 - protein, 10 aa, synthetic construct
TQVRGDRSQT

SEQ ID NO: 96737 - protein, 10 aa, synthetic construct
TSARGDRQGI

SEQ ID NO: 96738 - protein, 10 aa, synthetic construct
TQPRGDHGVL

SEQ ID NO: 96739 - protein, 10 aa, synthetic construct
TQPRGDYVGL

SEQ ID NO: 96740 - protein, 10 aa, synthetic construct
TQPRGDQSTL

SEQ ID NO: 96741 - protein, 10 aa, synthetic construct
TQPRGDLLLS

SEQ ID NO: 96742 - protein, 10 aa, synthetic construct
TQLRGDRGQI

SEQ ID NO: 96743 - protein, 10 aa, synthetic construct
TQLRGDRQGI

SEQ ID NO: 96744 - protein, 10 aa, synthetic construct
TQLRGDRSVV

SEQ ID NO: 96745 - protein, 10 aa, synthetic construct
TQLRGDRGVV

SEQ ID NO: 96746 - protein, 10 aa, synthetic construct
TQLRGDRSQT

SEQ ID NO: 96747 - protein, 10 aa, synthetic construct
TQWRGDRGQI

SEQ ID NO: 96748 - protein, 10 aa, synthetic construct
TSARGDRSVV

SEQ ID NO: 96749 - protein, 10 aa, synthetic construct
TQWRGDRQGI

SEQ ID NO: 96750 - protein, 10 aa, synthetic construct
TQWRGDRSVV

SEQ ID NO: 96751 - protein, 10 aa, synthetic construct
TQWRGDRGVV

SEQ ID NO: 96752 - protein, 10 aa, synthetic construct
TQWRGDRSQT

SEQ ID NO: 96753 - protein, 10 aa, synthetic construct
TQRRGDHGVL

SEQ ID NO: 96754 - protein, 10 aa, synthetic construct
TQRRGDYVGL

SEQ ID NO: 96755 - protein, 10 aa, synthetic construct
TQRRGDQSTL

SEQ ID NO: 96756 - protein, 10 aa, synthetic construct
TQRRGDLLLS

SEQ ID NO: 96757 - protein, 10 aa, synthetic construct
TQHRGDRGQI

SEQ ID NO: 96758 - protein, 10 aa, synthetic construct
TQHRGDRQGI

SEQ ID NO: 96759 - protein, 10 aa, synthetic construct
TSARGDRGVV

SEQ ID NO: 96760 - protein, 10 aa, synthetic construct
TQHRGDRSVV

SEQ ID NO: 96761 - protein, 10 aa, synthetic construct
TQHRGDRGVV

SEQ ID NO: 96762 - protein, 10 aa, synthetic construct
TQHRGDRSQT

SEQ ID NO: 96763 - protein, 10 aa, synthetic construct
TQSRGDRGQI

SEQ ID NO: 96764 - protein, 10 aa, synthetic construct
TQSRGDRQGI

SEQ ID NO: 96765 - protein, 10 aa, synthetic construct
TQSRGDRSVV

SEQ ID NO: 96766 - protein, 10 aa, synthetic construct
TQSRGDRGVV

SEQ ID NO: 96767 - protein, 10 aa, synthetic construct
TQSRGDRSQT

SEQ ID NO: 96768 - protein, 10 aa, synthetic construct
TQTRGDRGQI

SEQ ID NO: 96769 - protein, 10 aa, synthetic construct
TQTRGDRQGI

SEQ ID NO: 96770 - protein, 10 aa, synthetic construct
TSARGDRSQT

SEQ ID NO: 96771 - protein, 10 aa, synthetic construct
TQTRGDRSVV

SEQ ID NO: 96772 - protein, 10 aa, synthetic construct
TQTRGDRGVV

SEQ ID NO: 96773 - protein, 10 aa, synthetic construct
TQTRGDRSQT

SEQ ID NO: 96774 - protein, 10 aa, synthetic construct
TQQRGDRGQI

SEQ ID NO: 96775 - protein, 10 aa, synthetic construct
TQQRGDRQGI

SEQ ID NO: 96776 - protein, 10 aa, synthetic construct
TQQRGDRSVV

SEQ ID NO: 96777 - protein, 10 aa, synthetic construct
TQQRGDRGVV

SEQ ID NO: 96778 - protein, 10 aa, synthetic construct
TQQRGDRSQT

SEQ ID NO: 96779 - protein, 10 aa, synthetic construct
TQDRGDRGQI

SEQ ID NO: 96780 - protein, 10 aa, synthetic construct
TQDRGDRQGI

SEQ ID NO: 96781 - protein, 10 aa, synthetic construct
TSRRGDRGQI

SEQ ID NO: 96782 - protein, 10 aa, synthetic construct
TQDRGDRSVV

SEQ ID NO: 96783 - protein, 10 aa, synthetic construct
TQDRGDRGVV

SEQ ID NO: 96784 - protein, 10 aa, synthetic construct
TQDRGDRSQT

SEQ ID NO: 96785 - protein, 10 aa, synthetic construct
TQERGDRGQI

SEQ ID NO: 96786 - protein, 10 aa, synthetic construct
TQERGDRQGI

SEQ ID NO: 96787 - protein, 10 aa, synthetic construct
TQERGDRSVV

SEQ ID NO: 96788 - protein, 10 aa, synthetic construct
TQERGDRGVV

SEQ ID NO: 96789 - protein, 10 aa, synthetic construct
TQERGDRSQT

SEQ ID NO: 96790 - protein, 10 aa, synthetic construct
TDGRGDHGVL

SEQ ID NO: 96791 - protein, 10 aa, synthetic construct
TDGRGDYVGL

SEQ ID NO: 96792 - protein, 10 aa, synthetic construct
TSRRGDRQGI

SEQ ID NO: 96793 - protein, 10 aa, synthetic construct
TDGRGDQSTL

SEQ ID NO: 96794 - protein, 10 aa, synthetic construct
TDGRGDLLLS

SEQ ID NO: 96795 - protein, 10 aa, synthetic construct
TDARGDHGVL

SEQ ID NO: 96796 - protein, 10 aa, synthetic construct
TDARGDYVGL

SEQ ID NO: 96797 - protein, 10 aa, synthetic construct
TDARGDQSTL

SEQ ID NO: 96798 - protein, 10 aa, synthetic construct
TDARGDLLLS

SEQ ID NO: 96799 - protein, 10 aa, synthetic construct
TDVRGDRGQI

SEQ ID NO: 96800 - protein, 10 aa, synthetic construct
TDVRGDRQGI

SEQ ID NO: 96801 - protein, 10 aa, synthetic construct
TDVRGDRSVV

SEQ ID NO: 96802 - protein, 10 aa, synthetic construct
TDVRGDRGVV

SEQ ID NO: 96803 - protein, 10 aa, synthetic construct
TSRRGDRSVV

SEQ ID NO: 96804 - protein, 10 aa, synthetic construct
TDVRGDRSQT

SEQ ID NO: 96805 - protein, 10 aa, synthetic construct
TDPRGDHGVL

SEQ ID NO: 96806 - protein, 10 aa, synthetic construct
TDPRGDYVGL

SEQ ID NO: 96807 - protein, 10 aa, synthetic construct
TDPRGDQSTL

SEQ ID NO: 96808 - protein, 10 aa, synthetic construct
TDPRGDLLLS

SEQ ID NO: 96809 - protein, 10 aa, synthetic construct
TDLRGDRGQI

SEQ ID NO: 96810 - protein, 10 aa, synthetic construct
TDLRGDRQGI

SEQ ID NO: 96811 - protein, 10 aa, synthetic construct
TDLRGDRSVV

SEQ ID NO: 96812 - protein, 10 aa, synthetic construct
TDLRGDRGVV

SEQ ID NO: 96813 - protein, 10 aa, synthetic construct
TDLRGDRSQT

SEQ ID NO: 96814 - protein, 10 aa, synthetic construct
DKKRGDQSTL

SEQ ID NO: 96815 - protein, 10 aa, synthetic construct
TSRRGDRGVV

SEQ ID NO: 96816 - protein, 10 aa, synthetic construct
TDWRGDRGQI

SEQ ID NO: 96817 - protein, 10 aa, synthetic construct
TDWRGDRQGI

SEQ ID NO: 96818 - protein, 10 aa, synthetic construct
TDWRGDRSVV

SEQ ID NO: 96819 - protein, 10 aa, synthetic construct
TDWRGDRGVV

SEQ ID NO: 96820 - protein, 10 aa, synthetic construct
TDWRGDRSQT

SEQ ID NO: 96821 - protein, 10 aa, synthetic construct
TDRRGDHGVL

SEQ ID NO: 96822 - protein, 10 aa, synthetic construct
TDRRGDYVGL

SEQ ID NO: 96823 - protein, 10 aa, synthetic construct
TDRRGDQSTL

SEQ ID NO: 96824 - protein, 10 aa, synthetic construct
TDRRGDLLLS

SEQ ID NO: 96825 - protein, 10 aa, synthetic construct
TDHRGDRGQI

SEQ ID NO: 96826 - protein, 10 aa, synthetic construct
TSRRGDRSQT

SEQ ID NO: 96827 - protein, 10 aa, synthetic construct
TDHRGDRQGI

SEQ ID NO: 96828 - protein, 10 aa, synthetic construct
TDHRGDRSVV

SEQ ID NO: 96829 - protein, 10 aa, synthetic construct
TDHRGDRGVV

SEQ ID NO: 96830 - protein, 10 aa, synthetic construct
TDHRGDRSQT

SEQ ID NO: 96831 - protein, 10 aa, synthetic construct
TDSRGDRGQI

SEQ ID NO: 96832 - protein, 10 aa, synthetic construct
TDSRGDRQGI

SEQ ID NO: 96833 - protein, 10 aa, synthetic construct
TDSRGDRSVV

SEQ ID NO: 96834 - protein, 10 aa, synthetic construct
TDSRGDRGVV

SEQ ID NO: 96835 - protein, 10 aa, synthetic construct
TDSRGDRSQT

SEQ ID NO: 96836 - protein, 10 aa, synthetic construct
TDTRGDRGQI

SEQ ID NO: 96837 - protein, 10 aa, synthetic construct
AGGRGDHGVL

SEQ ID NO: 96838 - protein, 10 aa, synthetic construct
TDTRGDRQGI

SEQ ID NO: 96839 - protein, 10 aa, synthetic construct
TDTRGDRSVV

SEQ ID NO: 96840 - protein, 10 aa, synthetic construct
TDTRGDRGVV

SEQ ID NO: 96841 - protein, 10 aa, synthetic construct
TDTRGDRSQT

SEQ ID NO: 96842 - protein, 10 aa, synthetic construct
TDQRGDRGQI

SEQ ID NO: 96843 - protein, 10 aa, synthetic construct
TDQRGDRQGI

SEQ ID NO: 96844 - protein, 10 aa, synthetic construct
TDQRGDRSVV

SEQ ID NO: 96845 - protein, 10 aa, synthetic construct
TDQRGDRGVV

SEQ ID NO: 96846 - protein, 10 aa, synthetic construct
TDQRGDRSQT

SEQ ID NO: 96847 - protein, 10 aa, synthetic construct
TDDRGDRGQI

SEQ ID NO: 96848 - protein, 10 aa, synthetic construct
AGGRGDRGQI

SEQ ID NO: 96849 - protein, 10 aa, synthetic construct
TDDRGDRQGI

SEQ ID NO: 96850 - protein, 10 aa, synthetic construct
TDDRGDRSVV

SEQ ID NO: 96851 - protein, 10 aa, synthetic construct
TDDRGDRGVV

SEQ ID NO: 96852 - protein, 10 aa, synthetic construct
TDDRGDRSQT

SEQ ID NO: 96853 - protein, 10 aa, synthetic construct
TDERGDRGQI

SEQ ID NO: 96854 - protein, 10 aa, synthetic construct
TDERGDRQGI

SEQ ID NO: 96855 - protein, 10 aa, synthetic construct
TDERGDRSVV

SEQ ID NO: 96856 - protein, 10 aa, synthetic construct
TDERGDRGVV

SEQ ID NO: 96857 - protein, 10 aa, synthetic construct
TDERGDRSQT

SEQ ID NO: 96858 - protein, 10 aa, synthetic construct
TEGRGDHGVL

SEQ ID NO: 96859 - protein, 10 aa, synthetic construct
AGGRGDRQGI

SEQ ID NO: 96860 - protein, 10 aa, synthetic construct
TEGRGDYVGL

SEQ ID NO: 96861 - protein, 10 aa, synthetic construct
TEGRGDQSTL

SEQ ID NO: 96862 - protein, 10 aa, synthetic construct
TEGRGDLLLS

SEQ ID NO: 96863 - protein, 10 aa, synthetic construct
TEARGDHGVL

SEQ ID NO: 96864 - protein, 10 aa, synthetic construct
TEARGDYVGL

SEQ ID NO: 96865 - protein, 10 aa, synthetic construct
TEARGDQSTL

SEQ ID NO: 96866 - protein, 10 aa, synthetic construct
TEARGDLLLS

SEQ ID NO: 96867 - protein, 10 aa, synthetic construct
TEVRGDRGQI

SEQ ID NO: 96868 - protein, 10 aa, synthetic construct
TEVRGDRQGI

SEQ ID NO: 96869 - protein, 10 aa, synthetic construct
TEVRGDRSVV

SEQ ID NO: 96870 - protein, 10 aa, synthetic construct
AGGRGDRSVV

SEQ ID NO: 96871 - protein, 10 aa, synthetic construct
TEVRGDRGVV

SEQ ID NO: 96872 - protein, 10 aa, synthetic construct
TEVRGDRSQT

SEQ ID NO: 96873 - protein, 10 aa, synthetic construct
TEPRGDHGVL

SEQ ID NO: 96874 - protein, 10 aa, synthetic construct
TEPRGDYVGL

SEQ ID NO: 96875 - protein, 10 aa, synthetic construct
TEPRGDQSTL

SEQ ID NO: 96876 - protein, 10 aa, synthetic construct
TEPRGDLLLS

SEQ ID NO: 96877 - protein, 10 aa, synthetic construct
TELRGDRGQI

SEQ ID NO: 96878 - protein, 10 aa, synthetic construct
TELRGDRQGI

SEQ ID NO: 96879 - protein, 10 aa, synthetic construct
TELRGDRSVV

SEQ ID NO: 96880 - protein, 10 aa, synthetic construct
TELRGDRGVV

SEQ ID NO: 96881 - protein, 10 aa, synthetic construct
AGGRGDLTVT

SEQ ID NO: 96882 - protein, 10 aa, synthetic construct
TELRGDRSQT

SEQ ID NO: 96883 - protein, 10 aa, synthetic construct
TEWRGDRGQI

SEQ ID NO: 96884 - protein, 10 aa, synthetic construct
TEWRGDRQGI

SEQ ID NO: 96885 - protein, 10 aa, synthetic construct
TEWRGDRSVV

SEQ ID NO: 96886 - protein, 10 aa, synthetic construct
TEWRGDRGVV

SEQ ID NO: 96887 - protein, 10 aa, synthetic construct
TEWRGDRSQT

SEQ ID NO: 96888 - protein, 10 aa, synthetic construct
TERRGDHGVL

SEQ ID NO: 96889 - protein, 10 aa, synthetic construct
TERRGDYVGL

SEQ ID NO: 96890 - protein, 10 aa, synthetic construct
TERRGDQSTL

SEQ ID NO: 96891 - protein, 10 aa, synthetic construct
TERRGDLLLS

SEQ ID NO: 96892 - protein, 10 aa, synthetic construct
AGGRGDLIGR

SEQ ID NO: 96893 - protein, 10 aa, synthetic construct
TEHRGDRGQI

SEQ ID NO: 96894 - protein, 10 aa, synthetic construct
TEHRGDRQGI

SEQ ID NO: 96895 - protein, 10 aa, synthetic construct
TEHRGDRSVV

SEQ ID NO: 96896 - protein, 10 aa, synthetic construct
TEHRGDRGVV

SEQ ID NO: 96897 - protein, 10 aa, synthetic construct
TEHRGDRSQT

SEQ ID NO: 96898 - protein, 10 aa, synthetic construct
TESRGDRGQI

SEQ ID NO: 96899 - protein, 10 aa, synthetic construct
TESRGDRQGI

SEQ ID NO: 96900 - protein, 10 aa, synthetic construct
TESRGDRSVV

SEQ ID NO: 96901 - protein, 10 aa, synthetic construct
TESRGDRGVV

SEQ ID NO: 96902 - protein, 10 aa, synthetic construct
TESRGDRSQT

SEQ ID NO: 96903 - protein, 10 aa, synthetic construct
AGGRGDRSQT

SEQ ID NO: 96904 - protein, 10 aa, synthetic construct
TETRGDRGQI

SEQ ID NO: 96905 - protein, 10 aa, synthetic construct
TETRGDRQGI

SEQ ID NO: 96906 - protein, 10 aa, synthetic construct
TETRGDRSVV

SEQ ID NO: 96907 - protein, 10 aa, synthetic construct
TETRGDRGVV

SEQ ID NO: 96908 - protein, 10 aa, synthetic construct
TETRGDRSQT

SEQ ID NO: 96909 - protein, 10 aa, synthetic construct
TEQRGDRGQI

SEQ ID NO: 96910 - protein, 10 aa, synthetic construct
TEQRGDRQGI

SEQ ID NO: 96911 - protein, 10 aa, synthetic construct
TEQRGDRSVV

SEQ ID NO: 96912 - protein, 10 aa, synthetic construct
TEQRGDRGVV

SEQ ID NO: 96913 - protein, 10 aa, synthetic construct
TEQRGDRSQT

SEQ ID NO: 96914 - protein, 10 aa, synthetic construct
AGGRGDLLLS

SEQ ID NO: 96915 - protein, 10 aa, synthetic construct
TEDRGDRGQI

SEQ ID NO: 96916 - protein, 10 aa, synthetic construct
TEDRGDRQGI

SEQ ID NO: 96917 - protein, 10 aa, synthetic construct
TEDRGDRSVV

SEQ ID NO: 96918 - protein, 10 aa, synthetic construct
TEDRGDRGVV

SEQ ID NO: 96919 - protein, 10 aa, synthetic construct
TEDRGDRSQT

SEQ ID NO: 96920 - protein, 10 aa, synthetic construct
TEERGDRGQI

SEQ ID NO: 96921 - protein, 10 aa, synthetic construct
TEERGDRQGI

SEQ ID NO: 96922 - protein, 10 aa, synthetic construct
TEERGDRSVV

SEQ ID NO: 96923 - protein, 10 aa, synthetic construct
TEERGDRGVV

SEQ ID NO: 96924 - protein, 10 aa, synthetic construct
TEERGDRSQT

SEQ ID NO: 96925 - protein, 10 aa, synthetic construct
DKKRGDLLLS

SEQ ID NO: 96926 - protein, 10 aa, synthetic construct
AGARGDHGVL

SEQ ID NO: 96927 - protein, 10 aa, synthetic construct
AGGRGDHVNL

SEQ ID NO: 96928 - protein, 10 aa, synthetic construct
AGGRGDYSSV

SEQ ID NO: 96929 - protein, 10 aa, synthetic construct
AGGRGDYTSV

SEQ ID NO: 96930 - protein, 10 aa, synthetic construct
AGGRGDYTSM

SEQ ID NO: 96931 - protein, 10 aa, synthetic construct
AGARGDHVNL

SEQ ID NO: 96932 - protein, 10 aa, synthetic construct
AGARGDYSSV

SEQ ID NO: 96933 - protein, 10 aa, synthetic construct
AGARGDYTSV

SEQ ID NO: 96934 - protein, 10 aa, synthetic construct
AGARGDYTSM

SEQ ID NO: 96935 - protein, 10 aa, synthetic construct
AGVRGDHVNL

SEQ ID NO: 96936 - protein, 10 aa, synthetic construct
AGVRGDYSSV

SEQ ID NO: 96937 - protein, 10 aa, synthetic construct
AGARGDRGQI

SEQ ID NO: 96938 - protein, 10 aa, synthetic construct
AGVRGDYTSV

SEQ ID NO: 96939 - protein, 10 aa, synthetic construct
AGVRGDYTSM

SEQ ID NO: 96940 - protein, 10 aa, synthetic construct
AGPRGDHVNL

SEQ ID NO: 96941 - protein, 10 aa, synthetic construct
AGPRGDYSSV

SEQ ID NO: 96942 - protein, 10 aa, synthetic construct
AGPRGDYTSV

SEQ ID NO: 96943 - protein, 10 aa, synthetic construct
AGPRGDYTSM

SEQ ID NO: 96944 - protein, 10 aa, synthetic construct
AGLRGDHVNL

SEQ ID NO: 96945 - protein, 10 aa, synthetic construct
AGLRGDYSSV

SEQ ID NO: 96946 - protein, 10 aa, synthetic construct
AGLRGDYTSV

SEQ ID NO: 96947 - protein, 10 aa, synthetic construct
AGLRGDYTSM

SEQ ID NO: 96948 - protein, 10 aa, synthetic construct
AGARGDRQGI

SEQ ID NO: 96949 - protein, 10 aa, synthetic construct
AGIRGDHGVL

SEQ ID NO: 96950 - protein, 10 aa, synthetic construct
AGIRGDRGQI

SEQ ID NO: 96951 - protein, 10 aa, synthetic construct
AGIRGDRQGI

SEQ ID NO: 96952 - protein, 10 aa, synthetic construct
AGIRGDRSVV

SEQ ID NO: 96953 - protein, 10 aa, synthetic construct
AGIRGDLTVT

SEQ ID NO: 96954 - protein, 10 aa, synthetic construct
AGIRGDLIGR

SEQ ID NO: 96955 - protein, 10 aa, synthetic construct
AGIRGDRSQT

SEQ ID NO: 96956 - protein, 10 aa, synthetic construct
AGIRGDLLLS

SEQ ID NO: 96957 - protein, 10 aa, synthetic construct
AGMRGDHGVL

SEQ ID NO: 96958 - protein, 10 aa, synthetic construct
AGMRGDYVGL

SEQ ID NO: 96959 - protein, 10 aa, synthetic construct
AGARGDRSVV

SEQ ID NO: 96960 - protein, 10 aa, synthetic construct
AGMRGDQSTL

SEQ ID NO: 96961 - protein, 10 aa, synthetic construct
AGMRGDLLLS

SEQ ID NO: 96962 - protein, 10 aa, synthetic construct
AGWRGDHVNL

SEQ ID NO: 96963 - protein, 10 aa, synthetic construct
AGWRGDRDYL

SEQ ID NO: 96964 - protein, 10 aa, synthetic construct
AGWRGDYSSV

SEQ ID NO: 96965 - protein, 10 aa, synthetic construct
AGWRGDLTVT

SEQ ID NO: 96966 - protein, 10 aa, synthetic construct
AGWRGDLIGR

SEQ ID NO: 96967 - protein, 10 aa, synthetic construct
AGFRGDHGVL

SEQ ID NO: 96968 - protein, 10 aa, synthetic construct
AGFRGDRGQI

SEQ ID NO: 96969 - protein, 10 aa, synthetic construct
AGFRGDRQGI

SEQ ID NO: 96970 - protein, 10 aa, synthetic construct
AGARGDLTVT

SEQ ID NO: 96971 - protein, 10 aa, synthetic construct
AGFRGDRSVV

SEQ ID NO: 96972 - protein, 10 aa, synthetic construct
AGFRGDLTVT

SEQ ID NO: 96973 - protein, 10 aa, synthetic construct
AGFRGDLIGR

SEQ ID NO: 96974 - protein, 10 aa, synthetic construct
AGFRGDRSQT

SEQ ID NO: 96975 - protein, 10 aa, synthetic construct
AGFRGDLLLS

SEQ ID NO: 96976 - protein, 10 aa, synthetic construct
AGKRGDHGVL

SEQ ID NO: 96977 - protein, 10 aa, synthetic construct
AGKRGDRGQI

SEQ ID NO: 96978 - protein, 10 aa, synthetic construct
AGKRGDRQGI

SEQ ID NO: 96979 - protein, 10 aa, synthetic construct
AGKRGDRSVV

SEQ ID NO: 96980 - protein, 10 aa, synthetic construct
AGKRGDLTVT

SEQ ID NO: 96981 - protein, 10 aa, synthetic construct
AGARGDLIGR

SEQ ID NO: 96982 - protein, 10 aa, synthetic construct
AGKRGDLIGR

SEQ ID NO: 96983 - protein, 10 aa, synthetic construct
AGKRGDRSQT

SEQ ID NO: 96984 - protein, 10 aa, synthetic construct
AGKRGDLLLS

SEQ ID NO: 96985 - protein, 10 aa, synthetic construct
AGRRGDHVNL

SEQ ID NO: 96986 - protein, 10 aa, synthetic construct
AGRRGDYSSV

SEQ ID NO: 96987 - protein, 10 aa, synthetic construct
AGRRGDYTSV

SEQ ID NO: 96988 - protein, 10 aa, synthetic construct
AGRRGDYTSM

SEQ ID NO: 96989 - protein, 10 aa, synthetic construct
AGHRGDRDYL

SEQ ID NO: 96990 - protein, 10 aa, synthetic construct
AGHRGDYVGL

SEQ ID NO: 96991 - protein, 10 aa, synthetic construct
AGHRGDQSTL

SEQ ID NO: 96992 - protein, 10 aa, synthetic construct
AGARGDRSQT

SEQ ID NO: 96993 - protein, 10 aa, synthetic construct
AGSRGDHVNL

SEQ ID NO: 96994 - protein, 10 aa, synthetic construct
AGSRGDYSSV

SEQ ID NO: 96995 - protein, 10 aa, synthetic construct
AGSRGDYTSV

SEQ ID NO: 96996 - protein, 10 aa, synthetic construct
AGSRGDYTSM

SEQ ID NO: 96997 - protein, 10 aa, synthetic construct
AGTRGDRDYL

SEQ ID NO: 96998 - protein, 10 aa, synthetic construct
AGTRGDYVGL

SEQ ID NO: 96999 - protein, 10 aa, synthetic construct
AGTRGDQSTL

SEQ ID NO: 97000 - protein, 10 aa, synthetic construct
AGYRGDHGVL

SEQ ID NO: 97001 - protein, 10 aa, synthetic construct
AGYRGDRGQI

SEQ ID NO: 97002 - protein, 10 aa, synthetic construct
AGYRGDRQGI

SEQ ID NO: 97003 - protein, 10 aa, synthetic construct
AGARGDLLLS

SEQ ID NO: 97004 - protein, 10 aa, synthetic construct
AGYRGDRSVV

SEQ ID NO: 97005 - protein, 10 aa, synthetic construct
AGYRGDLTVT

SEQ ID NO: 97006 - protein, 10 aa, synthetic construct
AGYRGDLIGR

SEQ ID NO: 97007 - protein, 10 aa, synthetic construct
AGYRGDRSQT

SEQ ID NO: 97008 - protein, 10 aa, synthetic construct
AGYRGDLLLS

SEQ ID NO: 97009 - protein, 10 aa, synthetic construct
AGNRGDHGVL

SEQ ID NO: 97010 - protein, 10 aa, synthetic construct
AGNRGDRGQI

SEQ ID NO: 97011 - protein, 10 aa, synthetic construct
AGNRGDRQGI

SEQ ID NO: 97012 - protein, 10 aa, synthetic construct
AGNRGDRSVV

SEQ ID NO: 97013 - protein, 10 aa, synthetic construct
AGNRGDLTVT

SEQ ID NO: 97014 - protein, 10 aa, synthetic construct
AGVRGDHGVL

SEQ ID NO: 97015 - protein, 10 aa, synthetic construct
AGNRGDLIGR

SEQ ID NO: 97016 - protein, 10 aa, synthetic construct
AGNRGDRSQT

SEQ ID NO: 97017 - protein, 10 aa, synthetic construct
AGNRGDLLLS

SEQ ID NO: 97018 - protein, 10 aa, synthetic construct
AGQRGDRDYL

SEQ ID NO: 97019 - protein, 10 aa, synthetic construct
AGQRGDYVGL

SEQ ID NO: 97020 - protein, 10 aa, synthetic construct
AGQRGDQSTL

SEQ ID NO: 97021 - protein, 10 aa, synthetic construct
AGDRGDRDYL

SEQ ID NO: 97022 - protein, 10 aa, synthetic construct
AGDRGDYVGL

SEQ ID NO: 97023 - protein, 10 aa, synthetic construct
AGDRGDQSTL

SEQ ID NO: 97024 - protein, 10 aa, synthetic construct
AGERGDRDYL

SEQ ID NO: 97025 - protein, 10 aa, synthetic construct
AGVRGDRGQI

SEQ ID NO: 97026 - protein, 10 aa, synthetic construct
AGERGDYVGL

SEQ ID NO: 97027 - protein, 10 aa, synthetic construct
AGERGDQSTL

SEQ ID NO: 97028 - protein, 10 aa, synthetic construct
AAGRGDHVNL

SEQ ID NO: 97029 - protein, 10 aa, synthetic construct
AAGRGDYSSV

SEQ ID NO: 97030 - protein, 10 aa, synthetic construct
AAGRGDYTSV

SEQ ID NO: 97031 - protein, 10 aa, synthetic construct
AAGRGDYTSM

SEQ ID NO: 97032 - protein, 10 aa, synthetic construct
AAARGDHVNL

SEQ ID NO: 97033 - protein, 10 aa, synthetic construct
AAARGDYSSV

SEQ ID NO: 97034 - protein, 10 aa, synthetic construct
AAARGDYTSV

SEQ ID NO: 97035 - protein, 10 aa, synthetic construct
AAARGDYTSM

SEQ ID NO: 97036 - protein, 10 aa, synthetic construct
DKNRGDHGVL

SEQ ID NO: 97037 - protein, 10 aa, synthetic construct
AGVRGDRQGI

SEQ ID NO: 97038 - protein, 10 aa, synthetic construct
AAVRGDHVNL

SEQ ID NO: 97039 - protein, 10 aa, synthetic construct
AAVRGDYSSV

SEQ ID NO: 97040 - protein, 10 aa, synthetic construct
AAVRGDYTSV

SEQ ID NO: 97041 - protein, 10 aa, synthetic construct
AAVRGDYTSM

SEQ ID NO: 97042 - protein, 10 aa, synthetic construct
AAPRGDHVNL

SEQ ID NO: 97043 - protein, 10 aa, synthetic construct
AAPRGDYSSV

SEQ ID NO: 97044 - protein, 10 aa, synthetic construct
AAPRGDYTSV

SEQ ID NO: 97045 - protein, 10 aa, synthetic construct
AAPRGDYTSM

SEQ ID NO: 97046 - protein, 10 aa, synthetic construct
AALRGDHVNL

SEQ ID NO: 97047 - protein, 10 aa, synthetic construct
AALRGDYSSV

SEQ ID NO: 97048 - protein, 10 aa, synthetic construct
AGVRGDRSVV

SEQ ID NO: 97049 - protein, 10 aa, synthetic construct
AALRGDYTSV

SEQ ID NO: 97050 - protein, 10 aa, synthetic construct
AALRGDYTSM

SEQ ID NO: 97051 - protein, 10 aa, synthetic construct
AAIRGDHGVL

SEQ ID NO: 97052 - protein, 10 aa, synthetic construct
AAIRGDRGQI

SEQ ID NO: 97053 - protein, 10 aa, synthetic construct
AAIRGDRQGI

SEQ ID NO: 97054 - protein, 10 aa, synthetic construct
AAIRGDRSVV

SEQ ID NO: 97055 - protein, 10 aa, synthetic construct
AAIRGDLTVT

SEQ ID NO: 97056 - protein, 10 aa, synthetic construct
AAIRGDLIGR

SEQ ID NO: 97057 - protein, 10 aa, synthetic construct
AAIRGDRSQT

SEQ ID NO: 97058 - protein, 10 aa, synthetic construct
AAIRGDLLLS

SEQ ID NO: 97059 - protein, 10 aa, synthetic construct
AGVRGDLTVT

SEQ ID NO: 97060 - protein, 10 aa, synthetic construct
AAMRGDHGVL

SEQ ID NO: 97061 - protein, 10 aa, synthetic construct
AAMRGDYVGL

SEQ ID NO: 97062 - protein, 10 aa, synthetic construct
AAMRGDQSTL

SEQ ID NO: 97063 - protein, 10 aa, synthetic construct
AAMRGDLLLS

SEQ ID NO: 97064 - protein, 10 aa, synthetic construct
AAWRGDHVNL

SEQ ID NO: 97065 - protein, 10 aa, synthetic construct
AAWRGDRDYL

SEQ ID NO: 97066 - protein, 10 aa, synthetic construct
AAWRGDYSSV

SEQ ID NO: 97067 - protein, 10 aa, synthetic construct
AAWRGDLTVT

SEQ ID NO: 97068 - protein, 10 aa, synthetic construct
AAWRGDLIGR

SEQ ID NO: 97069 - protein, 10 aa, synthetic construct
AAFRGDHGVL

SEQ ID NO: 97070 - protein, 10 aa, synthetic construct
AGVRGDLIGR

SEQ ID NO: 97071 - protein, 10 aa, synthetic construct
AAFRGDRGQI

SEQ ID NO: 97072 - protein, 10 aa, synthetic construct
AAFRGDRQGI

SEQ ID NO: 97073 - protein, 10 aa, synthetic construct
AAFRGDRSVV

SEQ ID NO: 97074 - protein, 10 aa, synthetic construct
AAFRGDLTVT

SEQ ID NO: 97075 - protein, 10 aa, synthetic construct
AAFRGDLIGR

SEQ ID NO: 97076 - protein, 10 aa, synthetic construct
AAFRGDRSQT

SEQ ID NO: 97077 - protein, 10 aa, synthetic construct
AAFRGDLLLS

SEQ ID NO: 97078 - protein, 10 aa, synthetic construct
AAKRGDHGVL

SEQ ID NO: 97079 - protein, 10 aa, synthetic construct
AAKRGDRGQI

SEQ ID NO: 97080 - protein, 10 aa, synthetic construct
AAKRGDRQGI

SEQ ID NO: 97081 - protein, 10 aa, synthetic construct
AGVRGDRSQT

SEQ ID NO: 97082 - protein, 10 aa, synthetic construct
AAKRGDRSVV

SEQ ID NO: 97083 - protein, 10 aa, synthetic construct
AAKRGDLTVT

SEQ ID NO: 97084 - protein, 10 aa, synthetic construct
AAKRGDLIGR

SEQ ID NO: 97085 - protein, 10 aa, synthetic construct
AAKRGDRSQT

SEQ ID NO: 97086 - protein, 10 aa, synthetic construct
AAKRGDLLLS

SEQ ID NO: 97087 - protein, 10 aa, synthetic construct
AARRGDHVNL

SEQ ID NO: 97088 - protein, 10 aa, synthetic construct
AARRGDYSSV

SEQ ID NO: 97089 - protein, 10 aa, synthetic construct
AARRGDYTSV

SEQ ID NO: 97090 - protein, 10 aa, synthetic construct
AARRGDYTSM

SEQ ID NO: 97091 - protein, 10 aa, synthetic construct
AAHRGDRDYL

SEQ ID NO: 97092 - protein, 10 aa, synthetic construct
AGVRGDLLLS

SEQ ID NO: 97093 - protein, 10 aa, synthetic construct
AAHRGDYVGL

SEQ ID NO: 97094 - protein, 10 aa, synthetic construct
AAHRGDQSTL

SEQ ID NO: 97095 - protein, 10 aa, synthetic construct
AASRGDHVNL

SEQ ID NO: 97096 - protein, 10 aa, synthetic construct
AASRGDYSSV

SEQ ID NO: 97097 - protein, 10 aa, synthetic construct
AASRGDYTSV

SEQ ID NO: 97098 - protein, 10 aa, synthetic construct
AASRGDYTSM

SEQ ID NO: 97099 - protein, 10 aa, synthetic construct
AATRGDRDYL

SEQ ID NO: 97100 - protein, 10 aa, synthetic construct
AATRGDYVGL

SEQ ID NO: 97101 - protein, 10 aa, synthetic construct
AATRGDQSTL

SEQ ID NO: 97102 - protein, 10 aa, synthetic construct
AAYRGDHGVL

SEQ ID NO: 97103 - protein, 10 aa, synthetic construct
AGPRGDHGVL

SEQ ID NO: 97104 - protein, 10 aa, synthetic construct
AAYRGDRGQI

SEQ ID NO: 97105 - protein, 10 aa, synthetic construct
AAYRGDRQGI

SEQ ID NO: 97106 - protein, 10 aa, synthetic construct
AAYRGDRSVV

SEQ ID NO: 97107 - protein, 10 aa, synthetic construct
AAYRGDLTVT

SEQ ID NO: 97108 - protein, 10 aa, synthetic construct
AAYRGDLIGR

SEQ ID NO: 97109 - protein, 10 aa, synthetic construct
AAYRGDRSQT

SEQ ID NO: 97110 - protein, 10 aa, synthetic construct
AAYRGDLLLS

SEQ ID NO: 97111 - protein, 10 aa, synthetic construct
AANRGDHGVL

SEQ ID NO: 97112 - protein, 10 aa, synthetic construct
AANRGDRGQI

SEQ ID NO: 97113 - protein, 10 aa, synthetic construct
AANRGDRQGI

SEQ ID NO: 97114 - protein, 10 aa, synthetic construct
AGPRGDRGQI

SEQ ID NO: 97115 - protein, 10 aa, synthetic construct
AANRGDRSVV

SEQ ID NO: 97116 - protein, 10 aa, synthetic construct
AANRGDLTVT

SEQ ID NO: 97117 - protein, 10 aa, synthetic construct
AANRGDLIGR

SEQ ID NO: 97118 - protein, 10 aa, synthetic construct
AANRGDRSQT

SEQ ID NO: 97119 - protein, 10 aa, synthetic construct
AANRGDLLLS

SEQ ID NO: 97120 - protein, 10 aa, synthetic construct
AAQRGDRDYL

SEQ ID NO: 97121 - protein, 10 aa, synthetic construct
AAQRGDYVGL

SEQ ID NO: 97122 - protein, 10 aa, synthetic construct
AAQRGDQSTL

SEQ ID NO: 97123 - protein, 10 aa, synthetic construct
AADRGDRDYL

SEQ ID NO: 97124 - protein, 10 aa, synthetic construct
AADRGDYVGL

SEQ ID NO: 97125 - protein, 10 aa, synthetic construct
AGPRGDRQGI

SEQ ID NO: 97126 - protein, 10 aa, synthetic construct
AADRGDQSTL

SEQ ID NO: 97127 - protein, 10 aa, synthetic construct
AAERGDRDYL

SEQ ID NO: 97128 - protein, 10 aa, synthetic construct
AAERGDYVGL

SEQ ID NO: 97129 - protein, 10 aa, synthetic construct
AAERGDQSTL

SEQ ID NO: 97130 - protein, 10 aa, synthetic construct
AVGRGDRDYL

SEQ ID NO: 97131 - protein, 10 aa, synthetic construct
AVGRGDYVGL

SEQ ID NO: 97132 - protein, 10 aa, synthetic construct
AVGRGDQSTL

SEQ ID NO: 97133 - protein, 10 aa, synthetic construct
AVARGDRDYL

SEQ ID NO: 97134 - protein, 10 aa, synthetic construct
AVARGDYVGL

SEQ ID NO: 97135 - protein, 10 aa, synthetic construct
AVARGDQSTL

SEQ ID NO: 97136 - protein, 10 aa, synthetic construct
AGPRGDRSVV

SEQ ID NO: 97137 - protein, 10 aa, synthetic construct
AVVRGDRDYL

SEQ ID NO: 97138 - protein, 10 aa, synthetic construct
AVVRGDYVGL

SEQ ID NO: 97139 - protein, 10 aa, synthetic construct
AVVRGDQSTL

SEQ ID NO: 97140 - protein, 10 aa, synthetic construct
AVPRGDRDYL

SEQ ID NO: 97141 - protein, 10 aa, synthetic construct
AVPRGDYVGL

SEQ ID NO: 97142 - protein, 10 aa, synthetic construct
AVPRGDQSTL

SEQ ID NO: 97143 - protein, 10 aa, synthetic construct
AVLRGDRDYL

SEQ ID NO: 97144 - protein, 10 aa, synthetic construct
AVLRGDYVGL

SEQ ID NO: 97145 - protein, 10 aa, synthetic construct
AVLRGDQSTL

SEQ ID NO: 97146 - protein, 10 aa, synthetic construct
AVIRGDRGVV

SEQ ID NO: 97147 - protein, 10 aa, synthetic construct
DKNRGDRGQI

SEQ ID NO: 97148 - protein, 10 aa, synthetic construct
AGPRGDLTVT

SEQ ID NO: 97149 - protein, 10 aa, synthetic construct
AVMRGDRGQI

SEQ ID NO: 97150 - protein, 10 aa, synthetic construct
AVMRGDRQGI

SEQ ID NO: 97151 - protein, 10 aa, synthetic construct
AVMRGDRSVV

SEQ ID NO: 97152 - protein, 10 aa, synthetic construct
AVMRGDRGVV

SEQ ID NO: 97153 - protein, 10 aa, synthetic construct
AVMRGDRSQT

SEQ ID NO: 97154 - protein, 10 aa, synthetic construct
AVWRGDHGVL

SEQ ID NO: 97155 - protein, 10 aa, synthetic construct
AVWRGDYVGL

SEQ ID NO: 97156 - protein, 10 aa, synthetic construct
AVWRGDQSTL

SEQ ID NO: 97157 - protein, 10 aa, synthetic construct
AVWRGDLLLS

SEQ ID NO: 97158 - protein, 10 aa, synthetic construct
AVFRGDRGVV

SEQ ID NO: 97159 - protein, 10 aa, synthetic construct
AGPRGDLIGR

SEQ ID NO: 97160 - protein, 10 aa, synthetic construct
AVKRGDRGVV

SEQ ID NO: 97161 - protein, 10 aa, synthetic construct
AVRRGDRDYL

SEQ ID NO: 97162 - protein, 10 aa, synthetic construct
AVRRGDYVGL

SEQ ID NO: 97163 - protein, 10 aa, synthetic construct
AVRRGDQSTL

SEQ ID NO: 97164 - protein, 10 aa, synthetic construct
AVHRGDHGVL

SEQ ID NO: 97165 - protein, 10 aa, synthetic construct
AVHRGDRGQI

SEQ ID NO: 97166 - protein, 10 aa, synthetic construct
AVHRGDRQGI

SEQ ID NO: 97167 - protein, 10 aa, synthetic construct
AVHRGDRSVV

SEQ ID NO: 97168 - protein, 10 aa, synthetic construct
AVHRGDLTVT

SEQ ID NO: 97169 - protein, 10 aa, synthetic construct
AVHRGDLIGR

SEQ ID NO: 97170 - protein, 10 aa, synthetic construct
AGPRGDRSQT

SEQ ID NO: 97171 - protein, 10 aa, synthetic construct
AVHRGDRSQT

SEQ ID NO: 97172 - protein, 10 aa, synthetic construct
AVHRGDLLLS

SEQ ID NO: 97173 - protein, 10 aa, synthetic construct
AVSRGDRDYL

SEQ ID NO: 97174 - protein, 10 aa, synthetic construct
AVSRGDYVGL

SEQ ID NO: 97175 - protein, 10 aa, synthetic construct
AVSRGDQSTL

SEQ ID NO: 97176 - protein, 10 aa, synthetic construct
AVTRGDHGVL

SEQ ID NO: 97177 - protein, 10 aa, synthetic construct
AVTRGDRGQI

SEQ ID NO: 97178 - protein, 10 aa, synthetic construct
AVTRGDRQGI

SEQ ID NO: 97179 - protein, 10 aa, synthetic construct
AVTRGDRSVV

SEQ ID NO: 97180 - protein, 10 aa, synthetic construct
AVTRGDLTVT

SEQ ID NO: 97181 - protein, 10 aa, synthetic construct
AGPRGDLLLS

SEQ ID NO: 97182 - protein, 10 aa, synthetic construct
AVTRGDLIGR

SEQ ID NO: 97183 - protein, 10 aa, synthetic construct
AVTRGDRSQT

SEQ ID NO: 97184 - protein, 10 aa, synthetic construct
AVTRGDLLLS

SEQ ID NO: 97185 - protein, 10 aa, synthetic construct
AVYRGDRGVV

SEQ ID NO: 97186 - protein, 10 aa, synthetic construct
AVNRGDRGVV

SEQ ID NO: 97187 - protein, 10 aa, synthetic construct
AVQRGDHGVL

SEQ ID NO: 97188 - protein, 10 aa, synthetic construct
AVQRGDRGQI

SEQ ID NO: 97189 - protein, 10 aa, synthetic construct
AVQRGDRQGI

SEQ ID NO: 97190 - protein, 10 aa, synthetic construct
AVQRGDRSVV

SEQ ID NO: 97191 - protein, 10 aa, synthetic construct
AVQRGDLTVT

SEQ ID NO: 97192 - protein, 10 aa, synthetic construct
AGLRGDHGVL

SEQ ID NO: 97193 - protein, 10 aa, synthetic construct
AVQRGDLIGR

SEQ ID NO: 97194 - protein, 10 aa, synthetic construct
AVQRGDRSQT

SEQ ID NO: 97195 - protein, 10 aa, synthetic construct
AVQRGDLLLS

SEQ ID NO: 97196 - protein, 10 aa, synthetic construct
AVDRGDHGVL

SEQ ID NO: 97197 - protein, 10 aa, synthetic construct
AVDRGDRGQI

SEQ ID NO: 97198 - protein, 10 aa, synthetic construct
AVDRGDRQGI

SEQ ID NO: 97199 - protein, 10 aa, synthetic construct
AVDRGDRSVV

SEQ ID NO: 97200 - protein, 10 aa, synthetic construct
AVDRGDLTVT

SEQ ID NO: 97201 - protein, 10 aa, synthetic construct
AVDRGDLIGR

SEQ ID NO: 97202 - protein, 10 aa, synthetic construct
AVDRGDRSQT

SEQ ID NO: 97203 - protein, 10 aa, synthetic construct
AGLRGDRGQI

SEQ ID NO: 97204 - protein, 10 aa, synthetic construct
AVDRGDLLLS

SEQ ID NO: 97205 - protein, 10 aa, synthetic construct
AVERGDHGVL

SEQ ID NO: 97206 - protein, 10 aa, synthetic construct
AVERGDRGQI

SEQ ID NO: 97207 - protein, 10 aa, synthetic construct
AVERGDRQGI

SEQ ID NO: 97208 - protein, 10 aa, synthetic construct
AVERGDRSVV

SEQ ID NO: 97209 - protein, 10 aa, synthetic construct
AVERGDLTVT

SEQ ID NO: 97210 - protein, 10 aa, synthetic construct
AVERGDLIGR

SEQ ID NO: 97211 - protein, 10 aa, synthetic construct
AVERGDRSQT

SEQ ID NO: 97212 - protein, 10 aa, synthetic construct
AVERGDLLLS

SEQ ID NO: 97213 - protein, 10 aa, synthetic construct
APGRGDHVNL

SEQ ID NO: 97214 - protein, 10 aa, synthetic construct
AGLRGDRQGI

SEQ ID NO: 97215 - protein, 10 aa, synthetic construct
APGRGDYSSV

SEQ ID NO: 97216 - protein, 10 aa, synthetic construct
APGRGDYTSV

SEQ ID NO: 97217 - protein, 10 aa, synthetic construct
APGRGDYTSM

SEQ ID NO: 97218 - protein, 10 aa, synthetic construct
APARGDHVNL

SEQ ID NO: 97219 - protein, 10 aa, synthetic construct
APARGDYSSV

SEQ ID NO: 97220 - protein, 10 aa, synthetic construct
APARGDYTSV

SEQ ID NO: 97221 - protein, 10 aa, synthetic construct
APARGDYTSM

SEQ ID NO: 97222 - protein, 10 aa, synthetic construct
APVRGDHVNL

SEQ ID NO: 97223 - protein, 10 aa, synthetic construct
APVRGDYSSV

SEQ ID NO: 97224 - protein, 10 aa, synthetic construct
APVRGDYTSV

SEQ ID NO: 97225 - protein, 10 aa, synthetic construct
AGLRGDRSVV

SEQ ID NO: 97226 - protein, 10 aa, synthetic construct
APVRGDYTSM

SEQ ID NO: 97227 - protein, 10 aa, synthetic construct
APLRGDHVNL

SEQ ID NO: 97228 - protein, 10 aa, synthetic construct
APLRGDYSSV

SEQ ID NO: 97229 - protein, 10 aa, synthetic construct
APLRGDYTSV

SEQ ID NO: 97230 - protein, 10 aa, synthetic construct
APLRGDYTSM

SEQ ID NO: 97231 - protein, 10 aa, synthetic construct
APIRGDHGVL

SEQ ID NO: 97232 - protein, 10 aa, synthetic construct
APIRGDRGQI

SEQ ID NO: 97233 - protein, 10 aa, synthetic construct
APIRGDRQGI

SEQ ID NO: 97234 - protein, 10 aa, synthetic construct
APIRGDRSVV

SEQ ID NO: 97235 - protein, 10 aa, synthetic construct
APIRGDLTVT

SEQ ID NO: 97236 - protein, 10 aa, synthetic construct
AGLRGDLTVT

SEQ ID NO: 97237 - protein, 10 aa, synthetic construct
APIRGDLIGR

SEQ ID NO: 97238 - protein, 10 aa, synthetic construct
APIRGDRSQT

SEQ ID NO: 97239 - protein, 10 aa, synthetic construct
APIRGDLLLS

SEQ ID NO: 97240 - protein, 10 aa, synthetic construct
APMRGDHGVL

SEQ ID NO: 97241 - protein, 10 aa, synthetic construct
APMRGDYVGL

SEQ ID NO: 97242 - protein, 10 aa, synthetic construct
APMRGDQSTL

SEQ ID NO: 97243 - protein, 10 aa, synthetic construct
APMRGDLLLS

SEQ ID NO: 97244 - protein, 10 aa, synthetic construct
APWRGDHVNL

SEQ ID NO: 97245 - protein, 10 aa, synthetic construct
APWRGDRDYL

SEQ ID NO: 97246 - protein, 10 aa, synthetic construct
APWRGDYSSV

SEQ ID NO: 97247 - protein, 10 aa, synthetic construct
AGLRGDLIGR

SEQ ID NO: 97248 - protein, 10 aa, synthetic construct
APWRGDLTVT

SEQ ID NO: 97249 - protein, 10 aa, synthetic construct
APWRGDLIGR

SEQ ID NO: 97250 - protein, 10 aa, synthetic construct
APFRGDHGVL

SEQ ID NO: 97251 - protein, 10 aa, synthetic construct
APFRGDRGQI

SEQ ID NO: 97252 - protein, 10 aa, synthetic construct
APFRGDRQGI

SEQ ID NO: 97253 - protein, 10 aa, synthetic construct
APFRGDRSVV

SEQ ID NO: 97254 - protein, 10 aa, synthetic construct
APFRGDLTVT

SEQ ID NO: 97255 - protein, 10 aa, synthetic construct
APFRGDLIGR

SEQ ID NO: 97256 - protein, 10 aa, synthetic construct
APFRGDRSQT

SEQ ID NO: 97257 - protein, 10 aa, synthetic construct
APFRGDLLLS

SEQ ID NO: 97258 - protein, 10 aa, synthetic construct
DKNRGDRQGI

SEQ ID NO: 97259 - protein, 10 aa, synthetic construct
AGLRGDRSQT

SEQ ID NO: 97260 - protein, 10 aa, synthetic construct
APKRGDHGVL

SEQ ID NO: 97261 - protein, 10 aa, synthetic construct
APKRGDRGQI

SEQ ID NO: 97262 - protein, 10 aa, synthetic construct
APKRGDRQGI

SEQ ID NO: 97263 - protein, 10 aa, synthetic construct
APKRGDRSVV

SEQ ID NO: 97264 - protein, 10 aa, synthetic construct
APKRGDLTVT

SEQ ID NO: 97265 - protein, 10 aa, synthetic construct
APKRGDLIGR

SEQ ID NO: 97266 - protein, 10 aa, synthetic construct
APKRGDRSQT

SEQ ID NO: 97267 - protein, 10 aa, synthetic construct
APKRGDLLLS

SEQ ID NO: 97268 - protein, 10 aa, synthetic construct
APRRGDHVNL

SEQ ID NO: 97269 - protein, 10 aa, synthetic construct
APRRGDYSSV

SEQ ID NO: 97270 - protein, 10 aa, synthetic construct
AGLRGDLLLS

SEQ ID NO: 97271 - protein, 10 aa, synthetic construct
APRRGDYTSV

SEQ ID NO: 97272 - protein, 10 aa, synthetic construct
APRRGDYTSM

SEQ ID NO: 97273 - protein, 10 aa, synthetic construct
APHRGDRDYL

SEQ ID NO: 97274 - protein, 10 aa, synthetic construct
APHRGDYVGL

SEQ ID NO: 97275 - protein, 10 aa, synthetic construct
APHRGDQSTL

SEQ ID NO: 97276 - protein, 10 aa, synthetic construct
APSRGDHVNL

SEQ ID NO: 97277 - protein, 10 aa, synthetic construct
APSRGDYSSV

SEQ ID NO: 97278 - protein, 10 aa, synthetic construct
APSRGDYTSV

SEQ ID NO: 97279 - protein, 10 aa, synthetic construct
APSRGDYTSM

SEQ ID NO: 97280 - protein, 10 aa, synthetic construct
APTRGDRDYL

SEQ ID NO: 97281 - protein, 10 aa, synthetic construct
AGWRGDRGQI

SEQ ID NO: 97282 - protein, 10 aa, synthetic construct
APTRGDYVGL

SEQ ID NO: 97283 - protein, 10 aa, synthetic construct
APTRGDQSTL

SEQ ID NO: 97284 - protein, 10 aa, synthetic construct
APYRGDHGVL

SEQ ID NO: 97285 - protein, 10 aa, synthetic construct
APYRGDRGQI

SEQ ID NO: 97286 - protein, 10 aa, synthetic construct
APYRGDRQGI

SEQ ID NO: 97287 - protein, 10 aa, synthetic construct
APYRGDRSVV

SEQ ID NO: 97288 - protein, 10 aa, synthetic construct
APYRGDLTVT

SEQ ID NO: 97289 - protein, 10 aa, synthetic construct
APYRGDLIGR

SEQ ID NO: 97290 - protein, 10 aa, synthetic construct
APYRGDRSQT

SEQ ID NO: 97291 - protein, 10 aa, synthetic construct
APYRGDLLLS

SEQ ID NO: 97292 - protein, 10 aa, synthetic construct
AGWRGDRQGI

SEQ ID NO: 97293 - protein, 10 aa, synthetic construct
APNRGDHGVL

SEQ ID NO: 97294 - protein, 10 aa, synthetic construct
APNRGDRGQI

SEQ ID NO: 97295 - protein, 10 aa, synthetic construct
APNRGDRQGI

SEQ ID NO: 97296 - protein, 10 aa, synthetic construct
APNRGDRSVV

SEQ ID NO: 97297 - protein, 10 aa, synthetic construct
APNRGDLTVT

SEQ ID NO: 97298 - protein, 10 aa, synthetic construct
APNRGDLIGR

SEQ ID NO: 97299 - protein, 10 aa, synthetic construct
APNRGDRSQT

SEQ ID NO: 97300 - protein, 10 aa, synthetic construct
APNRGDLLLS

SEQ ID NO: 97301 - protein, 10 aa, synthetic construct
APQRGDRDYL

SEQ ID NO: 97302 - protein, 10 aa, synthetic construct
APQRGDYVGL

SEQ ID NO: 97303 - protein, 10 aa, synthetic construct
AGWRGDRSVV

SEQ ID NO: 97304 - protein, 10 aa, synthetic construct
APQRGDQSTL

SEQ ID NO: 97305 - protein, 10 aa, synthetic construct
APDRGDRDYL

SEQ ID NO: 97306 - protein, 10 aa, synthetic construct
APDRGDYVGL

SEQ ID NO: 97307 - protein, 10 aa, synthetic construct
APDRGDQSTL

SEQ ID NO: 97308 - protein, 10 aa, synthetic construct
APERGDRDYL

SEQ ID NO: 97309 - protein, 10 aa, synthetic construct
APERGDYVGL

SEQ ID NO: 97310 - protein, 10 aa, synthetic construct
APERGDQSTL

SEQ ID NO: 97311 - protein, 10 aa, synthetic construct
ALGRGDRDYL

SEQ ID NO: 97312 - protein, 10 aa, synthetic construct
ALGRGDYVGL

SEQ ID NO: 97313 - protein, 10 aa, synthetic construct
ALGRGDQSTL

SEQ ID NO: 97314 - protein, 10 aa, synthetic construct
AGWRGDRGVV

SEQ ID NO: 97315 - protein, 10 aa, synthetic construct
ALARGDRDYL

SEQ ID NO: 97316 - protein, 10 aa, synthetic construct
ALARGDYVGL

SEQ ID NO: 97317 - protein, 10 aa, synthetic construct
ALARGDQSTL

SEQ ID NO: 97318 - protein, 10 aa, synthetic construct
ALVRGDRDYL

SEQ ID NO: 97319 - protein, 10 aa, synthetic construct
ALVRGDYVGL

SEQ ID NO: 97320 - protein, 10 aa, synthetic construct
ALVRGDQSTL

SEQ ID NO: 97321 - protein, 10 aa, synthetic construct
ALPRGDRDYL

SEQ ID NO: 97322 - protein, 10 aa, synthetic construct
ALPRGDYVGL

SEQ ID NO: 97323 - protein, 10 aa, synthetic construct
ALPRGDQSTL

SEQ ID NO: 97324 - protein, 10 aa, synthetic construct
ALLRGDRDYL

SEQ ID NO: 97325 - protein, 10 aa, synthetic construct
AGWRGDRSQT

SEQ ID NO: 97326 - protein, 10 aa, synthetic construct
ALLRGDYVGL

SEQ ID NO: 97327 - protein, 10 aa, synthetic construct
ALLRGDQSTL

SEQ ID NO: 97328 - protein, 10 aa, synthetic construct
ALIRGDRGVV

SEQ ID NO: 97329 - protein, 10 aa, synthetic construct
ALMRGDRGQI

SEQ ID NO: 97330 - protein, 10 aa, synthetic construct
ALMRGDRQGI

SEQ ID NO: 97331 - protein, 10 aa, synthetic construct
ALMRGDRSVV

SEQ ID NO: 97332 - protein, 10 aa, synthetic construct
ALMRGDRGVV

SEQ ID NO: 97333 - protein, 10 aa, synthetic construct
ALMRGDRSQT

SEQ ID NO: 97334 - protein, 10 aa, synthetic construct
ALWRGDHGVL

SEQ ID NO: 97335 - protein, 10 aa, synthetic construct
ALWRGDYVGL

SEQ ID NO: 97336 - protein, 10 aa, synthetic construct
AGRRGDHGVL

SEQ ID NO: 97337 - protein, 10 aa, synthetic construct
ALWRGDQSTL

SEQ ID NO: 97338 - protein, 10 aa, synthetic construct
ALWRGDLLLS

SEQ ID NO: 97339 - protein, 10 aa, synthetic construct
ALFRGDRGVV

SEQ ID NO: 97340 - protein, 10 aa, synthetic construct
ALKRGDRGVV

SEQ ID NO: 97341 - protein, 10 aa, synthetic construct
ALRRGDRDYL

SEQ ID NO: 97342 - protein, 10 aa, synthetic construct
ALRRGDYVGL

SEQ ID NO: 97343 - protein, 10 aa, synthetic construct
ALRRGDQSTL

SEQ ID NO: 97344 - protein, 10 aa, synthetic construct
ALHRGDHGVL

SEQ ID NO: 97345 - protein, 10 aa, synthetic construct
ALHRGDRGQI

SEQ ID NO: 97346 - protein, 10 aa, synthetic construct
ALHRGDRQGI

SEQ ID NO: 97347 - protein, 10 aa, synthetic construct
AGRRGDRGQI

SEQ ID NO: 97348 - protein, 10 aa, synthetic construct
ALHRGDRSVV

SEQ ID NO: 97349 - protein, 10 aa, synthetic construct
ALHRGDLTVT

SEQ ID NO: 97350 - protein, 10 aa, synthetic construct
ALHRGDLIGR

SEQ ID NO: 97351 - protein, 10 aa, synthetic construct
ALHRGDRSQT

SEQ ID NO: 97352 - protein, 10 aa, synthetic construct
ALHRGDLLLS

SEQ ID NO: 97353 - protein, 10 aa, synthetic construct
ALSRGDRDYL

SEQ ID NO: 97354 - protein, 10 aa, synthetic construct
ALSRGDYVGL

SEQ ID NO: 97355 - protein, 10 aa, synthetic construct
ALSRGDQSTL

SEQ ID NO: 97356 - protein, 10 aa, synthetic construct
ALTRGDHGVL

SEQ ID NO: 97357 - protein, 10 aa, synthetic construct
ALTRGDRGQI

SEQ ID NO: 97358 - protein, 10 aa, synthetic construct
AGRRGDRQGI

SEQ ID NO: 97359 - protein, 10 aa, synthetic construct
ALTRGDRQGI

SEQ ID NO: 97360 - protein, 10 aa, synthetic construct
ALTRGDRSVV

SEQ ID NO: 97361 - protein, 10 aa, synthetic construct
ALTRGDLTVT

SEQ ID NO: 97362 - protein, 10 aa, synthetic construct
ALTRGDLIGR

SEQ ID NO: 97363 - protein, 10 aa, synthetic construct
ALTRGDRSQT

SEQ ID NO: 97364 - protein, 10 aa, synthetic construct
ALTRGDLLLS

SEQ ID NO: 97365 - protein, 10 aa, synthetic construct
ALYRGDRGVV

SEQ ID NO: 97366 - protein, 10 aa, synthetic construct
ALNRGDRGVV

SEQ ID NO: 97367 - protein, 10 aa, synthetic construct
ALQRGDHGVL

SEQ ID NO: 97368 - protein, 10 aa, synthetic construct
ALQRGDRGQI

SEQ ID NO: 97369 - protein, 10 aa, synthetic construct
DKNRGDRGVV

SEQ ID NO: 97370 - protein, 10 aa, synthetic construct
AGRRGDRSVV

SEQ ID NO: 97371 - protein, 10 aa, synthetic construct
ALQRGDRQGI

SEQ ID NO: 97372 - protein, 10 aa, synthetic construct
ALQRGDRSVV

SEQ ID NO: 97373 - protein, 10 aa, synthetic construct
ALQRGDLTVT

SEQ ID NO: 97374 - protein, 10 aa, synthetic construct
ALQRGDLIGR

SEQ ID NO: 97375 - protein, 10 aa, synthetic construct
ALQRGDRSQT

SEQ ID NO: 97376 - protein, 10 aa, synthetic construct
ALQRGDLLLS

SEQ ID NO: 97377 - protein, 10 aa, synthetic construct
ALDRGDHGVL

SEQ ID NO: 97378 - protein, 10 aa, synthetic construct
ALDRGDRGQI

SEQ ID NO: 97379 - protein, 10 aa, synthetic construct
ALDRGDRQGI

SEQ ID NO: 97380 - protein, 10 aa, synthetic construct
ALDRGDRSVV

SEQ ID NO: 97381 - protein, 10 aa, synthetic construct
AGRRGDLTVT

SEQ ID NO: 97382 - protein, 10 aa, synthetic construct
ALDRGDLTVT

SEQ ID NO: 97383 - protein, 10 aa, synthetic construct
ALDRGDLIGR

SEQ ID NO: 97384 - protein, 10 aa, synthetic construct
ALDRGDRSQT

SEQ ID NO: 97385 - protein, 10 aa, synthetic construct
ALDRGDLLLS

SEQ ID NO: 97386 - protein, 10 aa, synthetic construct
ALERGDHGVL

SEQ ID NO: 97387 - protein, 10 aa, synthetic construct
ALERGDRGQI

SEQ ID NO: 97388 - protein, 10 aa, synthetic construct
ALERGDRQGI

SEQ ID NO: 97389 - protein, 10 aa, synthetic construct
ALERGDRSVV

SEQ ID NO: 97390 - protein, 10 aa, synthetic construct
ALERGDLTVT

SEQ ID NO: 97391 - protein, 10 aa, synthetic construct
ALERGDLIGR

SEQ ID NO: 97392 - protein, 10 aa, synthetic construct
AGRRGDLIGR

SEQ ID NO: 97393 - protein, 10 aa, synthetic construct
ALERGDRSQT

SEQ ID NO: 97394 - protein, 10 aa, synthetic construct
ALERGDLLLS

SEQ ID NO: 97395 - protein, 10 aa, synthetic construct
AIGRGDHGVL

SEQ ID NO: 97396 - protein, 10 aa, synthetic construct
AIGRGDRGQI

SEQ ID NO: 97397 - protein, 10 aa, synthetic construct
AIGRGDRQGI

SEQ ID NO: 97398 - protein, 10 aa, synthetic construct
AIGRGDRSVV

SEQ ID NO: 97399 - protein, 10 aa, synthetic construct
AIGRGDLTVT

SEQ ID NO: 97400 - protein, 10 aa, synthetic construct
AIGRGDLIGR

SEQ ID NO: 97401 - protein, 10 aa, synthetic construct
AIGRGDRSQT

SEQ ID NO: 97402 - protein, 10 aa, synthetic construct
AIGRGDLLLS

SEQ ID NO: 97403 - protein, 10 aa, synthetic construct
AGRRGDRSQT

SEQ ID NO: 97404 - protein, 10 aa, synthetic construct
AIARGDHGVL

SEQ ID NO: 97405 - protein, 10 aa, synthetic construct
AIARGDRGQI

SEQ ID NO: 97406 - protein, 10 aa, synthetic construct
AIARGDRQGI

SEQ ID NO: 97407 - protein, 10 aa, synthetic construct
AIARGDRSVV

SEQ ID NO: 97408 - protein, 10 aa, synthetic construct
AIARGDLTVT

SEQ ID NO: 97409 - protein, 10 aa, synthetic construct
AIARGDLIGR

SEQ ID NO: 97410 - protein, 10 aa, synthetic construct
AIARGDRSQT

SEQ ID NO: 97411 - protein, 10 aa, synthetic construct
AIARGDLLLS

SEQ ID NO: 97412 - protein, 10 aa, synthetic construct
AIVRGDHGVL

SEQ ID NO: 97413 - protein, 10 aa, synthetic construct
AIVRGDRGQI

SEQ ID NO: 97414 - protein, 10 aa, synthetic construct
AGRRGDLLLS

SEQ ID NO: 97415 - protein, 10 aa, synthetic construct
AIVRGDRQGI

SEQ ID NO: 97416 - protein, 10 aa, synthetic construct
AIVRGDRSVV

SEQ ID NO: 97417 - protein, 10 aa, synthetic construct
AIVRGDLTVT

SEQ ID NO: 97418 - protein, 10 aa, synthetic construct
AIVRGDLIGR

SEQ ID NO: 97419 - protein, 10 aa, synthetic construct
AIVRGDRSQT

SEQ ID NO: 97420 - protein, 10 aa, synthetic construct
AIVRGDLLLS

SEQ ID NO: 97421 - protein, 10 aa, synthetic construct
AIPRGDHGVL

SEQ ID NO: 97422 - protein, 10 aa, synthetic construct
AIPRGDRGQI

SEQ ID NO: 97423 - protein, 10 aa, synthetic construct
AIPRGDRQGI

SEQ ID NO: 97424 - protein, 10 aa, synthetic construct
AIPRGDRSVV

SEQ ID NO: 97425 - protein, 10 aa, synthetic construct
AGHRGDRGVV

SEQ ID NO: 97426 - protein, 10 aa, synthetic construct
AIPRGDLTVT

SEQ ID NO: 97427 - protein, 10 aa, synthetic construct
AIPRGDLIGR

SEQ ID NO: 97428 - protein, 10 aa, synthetic construct
AIPRGDRSQT

SEQ ID NO: 97429 - protein, 10 aa, synthetic construct
AIPRGDLLLS

SEQ ID NO: 97430 - protein, 10 aa, synthetic construct
AILRGDHGVL

SEQ ID NO: 97431 - protein, 10 aa, synthetic construct
AILRGDRGQI

SEQ ID NO: 97432 - protein, 10 aa, synthetic construct
AILRGDRQGI

SEQ ID NO: 97433 - protein, 10 aa, synthetic construct
AILRGDRSVV

SEQ ID NO: 97434 - protein, 10 aa, synthetic construct
AILRGDLTVT

SEQ ID NO: 97435 - protein, 10 aa, synthetic construct
AILRGDLIGR

SEQ ID NO: 97436 - protein, 10 aa, synthetic construct
AGSRGDHGVL

SEQ ID NO: 97437 - protein, 10 aa, synthetic construct
AILRGDRSQT

SEQ ID NO: 97438 - protein, 10 aa, synthetic construct
AILRGDLLLS

SEQ ID NO: 97439 - protein, 10 aa, synthetic construct
AIWRGDRGQI

SEQ ID NO: 97440 - protein, 10 aa, synthetic construct
AIWRGDRQGI

SEQ ID NO: 97441 - protein, 10 aa, synthetic construct
AIWRGDRSVV

SEQ ID NO: 97442 - protein, 10 aa, synthetic construct
AIWRGDRGVV

SEQ ID NO: 97443 - protein, 10 aa, synthetic construct
AIWRGDRSQT

SEQ ID NO: 97444 - protein, 10 aa, synthetic construct
AIRRGDHGVL

SEQ ID NO: 97445 - protein, 10 aa, synthetic construct
AIRRGDRGQI

SEQ ID NO: 97446 - protein, 10 aa, synthetic construct
AIRRGDRQGI

SEQ ID NO: 97447 - protein, 10 aa, synthetic construct
AGSRGDRGQI

SEQ ID NO: 97448 - protein, 10 aa, synthetic construct
AIRRGDRSVV

SEQ ID NO: 97449 - protein, 10 aa, synthetic construct
AIRRGDLTVT

SEQ ID NO: 97450 - protein, 10 aa, synthetic construct
AIRRGDLIGR

SEQ ID NO: 97451 - protein, 10 aa, synthetic construct
AIRRGDRSQT

SEQ ID NO: 97452 - protein, 10 aa, synthetic construct
AIRRGDLLLS

SEQ ID NO: 97453 - protein, 10 aa, synthetic construct
AIHRGDRGVV

SEQ ID NO: 97454 - protein, 10 aa, synthetic construct
AISRGDHGVL

SEQ ID NO: 97455 - protein, 10 aa, synthetic construct
AISRGDRGQI

SEQ ID NO: 97456 - protein, 10 aa, synthetic construct
AISRGDRQGI

SEQ ID NO: 97457 - protein, 10 aa, synthetic construct
AISRGDRSVV

SEQ ID NO: 97458 - protein, 10 aa, synthetic construct
AGSRGDRQGI

SEQ ID NO: 97459 - protein, 10 aa, synthetic construct
AISRGDLTVT

SEQ ID NO: 97460 - protein, 10 aa, synthetic construct
AISRGDLIGR

SEQ ID NO: 97461 - protein, 10 aa, synthetic construct
AISRGDRSQT

SEQ ID NO: 97462 - protein, 10 aa, synthetic construct
AISRGDLLLS

SEQ ID NO: 97463 - protein, 10 aa, synthetic construct
AITRGDRGVV

SEQ ID NO: 97464 - protein, 10 aa, synthetic construct
AIQRGDRGVV

SEQ ID NO: 97465 - protein, 10 aa, synthetic construct
AIDRGDRGVV

SEQ ID NO: 97466 - protein, 10 aa, synthetic construct
AIERGDRGVV

SEQ ID NO: 97467 - protein, 10 aa, synthetic construct
AMGRGDHGVL

SEQ ID NO: 97468 - protein, 10 aa, synthetic construct
AMGRGDRGQI

SEQ ID NO: 97469 - protein, 10 aa, synthetic construct
AGSRGDRSVV

SEQ ID NO: 97470 - protein, 10 aa, synthetic construct
AMGRGDRQGI

SEQ ID NO: 97471 - protein, 10 aa, synthetic construct
AMGRGDRSVV

SEQ ID NO: 97472 - protein, 10 aa, synthetic construct
AMGRGDLTVT

SEQ ID NO: 97473 - protein, 10 aa, synthetic construct
AMGRGDLIGR

SEQ ID NO: 97474 - protein, 10 aa, synthetic construct
AMGRGDRSQT

SEQ ID NO: 97475 - protein, 10 aa, synthetic construct
AMGRGDLLLS

SEQ ID NO: 97476 - protein, 10 aa, synthetic construct
AMARGDHGVL

SEQ ID NO: 97477 - protein, 10 aa, synthetic construct
AMARGDRGQI

SEQ ID NO: 97478 - protein, 10 aa, synthetic construct
AMARGDRQGI

SEQ ID NO: 97479 - protein, 10 aa, synthetic construct
AMARGDRSVV

SEQ ID NO: 97480 - protein, 10 aa, synthetic construct
DKNRGDYVGL

SEQ ID NO: 97481 - protein, 10 aa, synthetic construct
AGSRGDLTVT

SEQ ID NO: 97482 - protein, 10 aa, synthetic construct
AMARGDLTVT

SEQ ID NO: 97483 - protein, 10 aa, synthetic construct
AMARGDLIGR

SEQ ID NO: 97484 - protein, 10 aa, synthetic construct
AMARGDRSQT

SEQ ID NO: 97485 - protein, 10 aa, synthetic construct
AMARGDLLLS

SEQ ID NO: 97486 - protein, 10 aa, synthetic construct
AMVRGDHGVL

SEQ ID NO: 97487 - protein, 10 aa, synthetic construct
AMVRGDRGQI

SEQ ID NO: 97488 - protein, 10 aa, synthetic construct
AMVRGDRQGI

SEQ ID NO: 97489 - protein, 10 aa, synthetic construct
AMVRGDRSVV

SEQ ID NO: 97490 - protein, 10 aa, synthetic construct
AMVRGDLTVT

SEQ ID NO: 97491 - protein, 10 aa, synthetic construct
AMVRGDLIGR

SEQ ID NO: 97492 - protein, 10 aa, synthetic construct
AGSRGDLIGR

SEQ ID NO: 97493 - protein, 10 aa, synthetic construct
AMVRGDRSQT

SEQ ID NO: 97494 - protein, 10 aa, synthetic construct
AMVRGDLLLS

SEQ ID NO: 97495 - protein, 10 aa, synthetic construct
AMPRGDHGVL

SEQ ID NO: 97496 - protein, 10 aa, synthetic construct
AMPRGDRGQI

SEQ ID NO: 97497 - protein, 10 aa, synthetic construct
AMPRGDRQGI

SEQ ID NO: 97498 - protein, 10 aa, synthetic construct
AMPRGDRSVV

SEQ ID NO: 97499 - protein, 10 aa, synthetic construct
AMPRGDLTVT

SEQ ID NO: 97500 - protein, 10 aa, synthetic construct
AMPRGDLIGR

SEQ ID NO: 97501 - protein, 10 aa, synthetic construct
AMPRGDRSQT

SEQ ID NO: 97502 - protein, 10 aa, synthetic construct
AMPRGDLLLS

SEQ ID NO: 97503 - protein, 10 aa, synthetic construct
AGSRGDRSQT

SEQ ID NO: 97504 - protein, 10 aa, synthetic construct
AMLRGDHGVL

SEQ ID NO: 97505 - protein, 10 aa, synthetic construct
AMLRGDRGQI

SEQ ID NO: 97506 - protein, 10 aa, synthetic construct
AMLRGDRQGI

SEQ ID NO: 97507 - protein, 10 aa, synthetic construct
AMLRGDRSVV

SEQ ID NO: 97508 - protein, 10 aa, synthetic construct
AMLRGDLTVT

SEQ ID NO: 97509 - protein, 10 aa, synthetic construct
AMLRGDLIGR

SEQ ID NO: 97510 - protein, 10 aa, synthetic construct
AMLRGDRSQT

SEQ ID NO: 97511 - protein, 10 aa, synthetic construct
AMLRGDLLLS

SEQ ID NO: 97512 - protein, 10 aa, synthetic construct
AMWRGDRGQI

SEQ ID NO: 97513 - protein, 10 aa, synthetic construct
AMWRGDRQGI

SEQ ID NO: 97514 - protein, 10 aa, synthetic construct
AGSRGDLLLS

SEQ ID NO: 97515 - protein, 10 aa, synthetic construct
AMWRGDRSVV

SEQ ID NO: 97516 - protein, 10 aa, synthetic construct
AMWRGDRGVV

SEQ ID NO: 97517 - protein, 10 aa, synthetic construct
AMWRGDRSQT

SEQ ID NO: 97518 - protein, 10 aa, synthetic construct
AMRRGDHGVL

SEQ ID NO: 97519 - protein, 10 aa, synthetic construct
AMRRGDRGQI

SEQ ID NO: 97520 - protein, 10 aa, synthetic construct
AMRRGDRQGI

SEQ ID NO: 97521 - protein, 10 aa, synthetic construct
AMRRGDRSVV

SEQ ID NO: 97522 - protein, 10 aa, synthetic construct
AMRRGDLTVT

SEQ ID NO: 97523 - protein, 10 aa, synthetic construct
AMRRGDLIGR

SEQ ID NO: 97524 - protein, 10 aa, synthetic construct
AMRRGDRSQT

SEQ ID NO: 97525 - protein, 10 aa, synthetic construct
AGTRGDRGVV

SEQ ID NO: 97526 - protein, 10 aa, synthetic construct
AMRRGDLLLS

SEQ ID NO: 97527 - protein, 10 aa, synthetic construct
AMHRGDRGVV

SEQ ID NO: 97528 - protein, 10 aa, synthetic construct
AMSRGDHGVL

SEQ ID NO: 97529 - protein, 10 aa, synthetic construct
AMSRGDRGQI

SEQ ID NO: 97530 - protein, 10 aa, synthetic construct
AMSRGDRQGI

SEQ ID NO: 97531 - protein, 10 aa, synthetic construct
AMSRGDRSVV

SEQ ID NO: 97532 - protein, 10 aa, synthetic construct
AMSRGDLTVT

SEQ ID NO: 97533 - protein, 10 aa, synthetic construct
AMSRGDLIGR

SEQ ID NO: 97534 - protein, 10 aa, synthetic construct
AMSRGDRSQT

SEQ ID NO: 97535 - protein, 10 aa, synthetic construct
AMSRGDLLLS

SEQ ID NO: 97536 - protein, 10 aa, synthetic construct
AGQRGDRGVV

SEQ ID NO: 97537 - protein, 10 aa, synthetic construct
AMTRGDRGVV

SEQ ID NO: 97538 - protein, 10 aa, synthetic construct
AMQRGDRGVV

SEQ ID NO: 97539 - protein, 10 aa, synthetic construct
AMDRGDRGVV

SEQ ID NO: 97540 - protein, 10 aa, synthetic construct
AMERGDRGVV

SEQ ID NO: 97541 - protein, 10 aa, synthetic construct
AWGRGDRDYL

SEQ ID NO: 97542 - protein, 10 aa, synthetic construct
AWGRGDYVGL

SEQ ID NO: 97543 - protein, 10 aa, synthetic construct
AWGRGDQSTL

SEQ ID NO: 97544 - protein, 10 aa, synthetic construct
AWARGDRDYL

SEQ ID NO: 97545 - protein, 10 aa, synthetic construct
AWARGDYVGL

SEQ ID NO: 97546 - protein, 10 aa, synthetic construct
AWARGDQSTL

SEQ ID NO: 97547 - protein, 10 aa, synthetic construct
AGDRGDRGVV

SEQ ID NO: 97548 - protein, 10 aa, synthetic construct
AWVRGDRDYL

SEQ ID NO: 97549 - protein, 10 aa, synthetic construct
AWVRGDYVGL

SEQ ID NO: 97550 - protein, 10 aa, synthetic construct
AWVRGDQSTL

SEQ ID NO: 97551 - protein, 10 aa, synthetic construct
AWPRGDRDYL

SEQ ID NO: 97552 - protein, 10 aa, synthetic construct
AWPRGDYVGL

SEQ ID NO: 97553 - protein, 10 aa, synthetic construct
AWPRGDQSTL

SEQ ID NO: 97554 - protein, 10 aa, synthetic construct
AWLRGDRDYL

SEQ ID NO: 97555 - protein, 10 aa, synthetic construct
AWLRGDYVGL

SEQ ID NO: 97556 - protein, 10 aa, synthetic construct
AWLRGDQSTL

SEQ ID NO: 97557 - protein, 10 aa, synthetic construct
AWIRGDRGVV

SEQ ID NO: 97558 - protein, 10 aa, synthetic construct
AGERGDRGVV

SEQ ID NO: 97559 - protein, 10 aa, synthetic construct
AWMRGDRGQI

SEQ ID NO: 97560 - protein, 10 aa, synthetic construct
AWMRGDRQGI

SEQ ID NO: 97561 - protein, 10 aa, synthetic construct
AWMRGDRSVV

SEQ ID NO: 97562 - protein, 10 aa, synthetic construct
AWMRGDRGVV

SEQ ID NO: 97563 - protein, 10 aa, synthetic construct
AWMRGDRSQT

SEQ ID NO: 97564 - protein, 10 aa, synthetic construct
AWWRGDHGVL

SEQ ID NO: 97565 - protein, 10 aa, synthetic construct
AWWRGDYVGL

SEQ ID NO: 97566 - protein, 10 aa, synthetic construct
AWWRGDQSTL

SEQ ID NO: 97567 - protein, 10 aa, synthetic construct
AWWRGDLLLS

SEQ ID NO: 97568 - protein, 10 aa, synthetic construct
AWFRGDRGVV

SEQ ID NO: 97569 - protein, 10 aa, synthetic construct
AAGRGDHGVL

SEQ ID NO: 97570 - protein, 10 aa, synthetic construct
AWKRGDRGVV

SEQ ID NO: 97571 - protein, 10 aa, synthetic construct
AWRRGDRDYL

SEQ ID NO: 97572 - protein, 10 aa, synthetic construct
AWRRGDYVGL

SEQ ID NO: 97573 - protein, 10 aa, synthetic construct
AWRRGDQSTL

SEQ ID NO: 97574 - protein, 10 aa, synthetic construct
AWHRGDHGVL

SEQ ID NO: 97575 - protein, 10 aa, synthetic construct
AWHRGDRGQI

SEQ ID NO: 97576 - protein, 10 aa, synthetic construct
AWHRGDRQGI

SEQ ID NO: 97577 - protein, 10 aa, synthetic construct
AWHRGDRSVV

SEQ ID NO: 97578 - protein, 10 aa, synthetic construct
AWHRGDLTVT

SEQ ID NO: 97579 - protein, 10 aa, synthetic construct
AWHRGDLIGR

SEQ ID NO: 97580 - protein, 10 aa, synthetic construct
AAGRGDRGQI

SEQ ID NO: 97581 - protein, 10 aa, synthetic construct
AWHRGDRSQT

SEQ ID NO: 97582 - protein, 10 aa, synthetic construct
AWHRGDLLLS

SEQ ID NO: 97583 - protein, 10 aa, synthetic construct
AWSRGDRDYL

SEQ ID NO: 97584 - protein, 10 aa, synthetic construct
AWSRGDYVGL

SEQ ID NO: 97585 - protein, 10 aa, synthetic construct
AWSRGDQSTL

SEQ ID NO: 97586 - protein, 10 aa, synthetic construct
AWTRGDHGVL

SEQ ID NO: 97587 - protein, 10 aa, synthetic construct
AWTRGDRGQI

SEQ ID NO: 97588 - protein, 10 aa, synthetic construct
AWTRGDRQGI

SEQ ID NO: 97589 - protein, 10 aa, synthetic construct
AWTRGDRSVV

SEQ ID NO: 97590 - protein, 10 aa, synthetic construct
AWTRGDLTVT

SEQ ID NO: 97591 - protein, 10 aa, synthetic construct
DKNRGDLIGR

SEQ ID NO: 97592 - protein, 10 aa, synthetic construct
AAGRGDRQGI

SEQ ID NO: 97593 - protein, 10 aa, synthetic construct
AWTRGDLIGR

SEQ ID NO: 97594 - protein, 10 aa, synthetic construct
AWTRGDRSQT

SEQ ID NO: 97595 - protein, 10 aa, synthetic construct
AWTRGDLLLS

SEQ ID NO: 97596 - protein, 10 aa, synthetic construct
AWYRGDRGVV

SEQ ID NO: 97597 - protein, 10 aa, synthetic construct
AWNRGDRGVV

SEQ ID NO: 97598 - protein, 10 aa, synthetic construct
AWQRGDHGVL

SEQ ID NO: 97599 - protein, 10 aa, synthetic construct
AWQRGDRGQI

SEQ ID NO: 97600 - protein, 10 aa, synthetic construct
AWQRGDRQGI

SEQ ID NO: 97601 - protein, 10 aa, synthetic construct
AWQRGDRSVV

SEQ ID NO: 97602 - protein, 10 aa, synthetic construct
AWQRGDLTVT

SEQ ID NO: 97603 - protein, 10 aa, synthetic construct
AAGRGDRSVV

SEQ ID NO: 97604 - protein, 10 aa, synthetic construct
AWQRGDLIGR

SEQ ID NO: 97605 - protein, 10 aa, synthetic construct
AWQRGDRSQT

SEQ ID NO: 97606 - protein, 10 aa, synthetic construct
AWQRGDLLLS

SEQ ID NO: 97607 - protein, 10 aa, synthetic construct
AWDRGDHGVL

SEQ ID NO: 97608 - protein, 10 aa, synthetic construct
AWDRGDRGQI

SEQ ID NO: 97609 - protein, 10 aa, synthetic construct
AWDRGDRQGI

SEQ ID NO: 97610 - protein, 10 aa, synthetic construct
AWDRGDRSVV

SEQ ID NO: 97611 - protein, 10 aa, synthetic construct
AWDRGDLTVT

SEQ ID NO: 97612 - protein, 10 aa, synthetic construct
AWDRGDLIGR

SEQ ID NO: 97613 - protein, 10 aa, synthetic construct
AWDRGDRSQT

SEQ ID NO: 97614 - protein, 10 aa, synthetic construct
AAGRGDLTVT

SEQ ID NO: 97615 - protein, 10 aa, synthetic construct
AWDRGDLLLS

SEQ ID NO: 97616 - protein, 10 aa, synthetic construct
AWERGDHGVL

SEQ ID NO: 97617 - protein, 10 aa, synthetic construct
AWERGDRGQI

SEQ ID NO: 97618 - protein, 10 aa, synthetic construct
AWERGDRQGI

SEQ ID NO: 97619 - protein, 10 aa, synthetic construct
AWERGDRSVV

SEQ ID NO: 97620 - protein, 10 aa, synthetic construct
AWERGDLTVT

SEQ ID NO: 97621 - protein, 10 aa, synthetic construct
AWERGDLIGR

SEQ ID NO: 97622 - protein, 10 aa, synthetic construct
AWERGDRSQT

SEQ ID NO: 97623 - protein, 10 aa, synthetic construct
AWERGDLLLS

SEQ ID NO: 97624 - protein, 10 aa, synthetic construct
AFGRGDHGVL

SEQ ID NO: 97625 - protein, 10 aa, synthetic construct
AAGRGDLIGR

SEQ ID NO: 97626 - protein, 10 aa, synthetic construct
AFGRGDRGQI

SEQ ID NO: 97627 - protein, 10 aa, synthetic construct
AFGRGDRQGI

SEQ ID NO: 97628 - protein, 10 aa, synthetic construct
AFGRGDRSVV

SEQ ID NO: 97629 - protein, 10 aa, synthetic construct
AFGRGDLTVT

SEQ ID NO: 97630 - protein, 10 aa, synthetic construct
AFGRGDLIGR

SEQ ID NO: 97631 - protein, 10 aa, synthetic construct
AFGRGDRSQT

SEQ ID NO: 97632 - protein, 10 aa, synthetic construct
AFGRGDLLLS

SEQ ID NO: 97633 - protein, 10 aa, synthetic construct
AFARGDHGVL

SEQ ID NO: 97634 - protein, 10 aa, synthetic construct
AFARGDRGQI

SEQ ID NO: 97635 - protein, 10 aa, synthetic construct
AFARGDRQGI

SEQ ID NO: 97636 - protein, 10 aa, synthetic construct
AAGRGDRSQT

SEQ ID NO: 97637 - protein, 10 aa, synthetic construct
AFARGDRSVV

SEQ ID NO: 97638 - protein, 10 aa, synthetic construct
AFARGDLTVT

SEQ ID NO: 97639 - protein, 10 aa, synthetic construct
AFARGDLIGR

SEQ ID NO: 97640 - protein, 10 aa, synthetic construct
AFARGDRSQT

SEQ ID NO: 97641 - protein, 10 aa, synthetic construct
AFARGDLLLS

SEQ ID NO: 97642 - protein, 10 aa, synthetic construct
AFVRGDHGVL

SEQ ID NO: 97643 - protein, 10 aa, synthetic construct
AFVRGDRGQI

SEQ ID NO: 97644 - protein, 10 aa, synthetic construct
AFVRGDRQGI

SEQ ID NO: 97645 - protein, 10 aa, synthetic construct
AFVRGDRSVV

SEQ ID NO: 97646 - protein, 10 aa, synthetic construct
AFVRGDLTVT

SEQ ID NO: 97647 - protein, 10 aa, synthetic construct
AAGRGDLLLS

SEQ ID NO: 97648 - protein, 10 aa, synthetic construct
AFVRGDLIGR

SEQ ID NO: 97649 - protein, 10 aa, synthetic construct
AFVRGDRSQT

SEQ ID NO: 97650 - protein, 10 aa, synthetic construct
AFVRGDLLLS

SEQ ID NO: 97651 - protein, 10 aa, synthetic construct
AFPRGDHGVL

SEQ ID NO: 97652 - protein, 10 aa, synthetic construct
AFPRGDRGQI

SEQ ID NO: 97653 - protein, 10 aa, synthetic construct
AFPRGDRQGI

SEQ ID NO: 97654 - protein, 10 aa, synthetic construct
AFPRGDRSVV

SEQ ID NO: 97655 - protein, 10 aa, synthetic construct
AFPRGDLTVT

SEQ ID NO: 97656 - protein, 10 aa, synthetic construct
AFPRGDLIGR

SEQ ID NO: 97657 - protein, 10 aa, synthetic construct
AFPRGDRSQT

SEQ ID NO: 97658 - protein, 10 aa, synthetic construct
AAARGDHGVL

SEQ ID NO: 97659 - protein, 10 aa, synthetic construct
AFPRGDLLLS

SEQ ID NO: 97660 - protein, 10 aa, synthetic construct
AFLRGDHGVL

SEQ ID NO: 97661 - protein, 10 aa, synthetic construct
AFLRGDRGQI

SEQ ID NO: 97662 - protein, 10 aa, synthetic construct
AFLRGDRQGI

SEQ ID NO: 97663 - protein, 10 aa, synthetic construct
AFLRGDRSVV

SEQ ID NO: 97664 - protein, 10 aa, synthetic construct
AFLRGDLTVT

SEQ ID NO: 97665 - protein, 10 aa, synthetic construct
AFLRGDLIGR

SEQ ID NO: 97666 - protein, 10 aa, synthetic construct
AFLRGDRSQT

SEQ ID NO: 97667 - protein, 10 aa, synthetic construct
AFLRGDLLLS

SEQ ID NO: 97668 - protein, 10 aa, synthetic construct
AFWRGDRGQI

SEQ ID NO: 97669 - protein, 10 aa, synthetic construct
AAARGDRGQI

SEQ ID NO: 97670 - protein, 10 aa, synthetic construct
AFWRGDRQGI

SEQ ID NO: 97671 - protein, 10 aa, synthetic construct
AFWRGDRSVV

SEQ ID NO: 97672 - protein, 10 aa, synthetic construct
AFWRGDRGVV

SEQ ID NO: 97673 - protein, 10 aa, synthetic construct
AFWRGDRSQT

SEQ ID NO: 97674 - protein, 10 aa, synthetic construct
AFRRGDHGVL

SEQ ID NO: 97675 - protein, 10 aa, synthetic construct
AFRRGDRGQI

SEQ ID NO: 97676 - protein, 10 aa, synthetic construct
AFRRGDRQGI

SEQ ID NO: 97677 - protein, 10 aa, synthetic construct
AFRRGDRSVV

SEQ ID NO: 97678 - protein, 10 aa, synthetic construct
AFRRGDLTVT

SEQ ID NO: 97679 - protein, 10 aa, synthetic construct
AFRRGDLIGR

SEQ ID NO: 97680 - protein, 10 aa, synthetic construct
AAARGDRQGI

SEQ ID NO: 97681 - protein, 10 aa, synthetic construct
AFRRGDRSQT

SEQ ID NO: 97682 - protein, 10 aa, synthetic construct
AFRRGDLLLS

SEQ ID NO: 97683 - protein, 10 aa, synthetic construct
AFHRGDRGVV

SEQ ID NO: 97684 - protein, 10 aa, synthetic construct
AFSRGDHGVL

SEQ ID NO: 97685 - protein, 10 aa, synthetic construct
AFSRGDRGQI

SEQ ID NO: 97686 - protein, 10 aa, synthetic construct
AFSRGDRQGI

SEQ ID NO: 97687 - protein, 10 aa, synthetic construct
AFSRGDRSVV

SEQ ID NO: 97688 - protein, 10 aa, synthetic construct
AFSRGDLTVT

SEQ ID NO: 97689 - protein, 10 aa, synthetic construct
AFSRGDLIGR

SEQ ID NO: 97690 - protein, 10 aa, synthetic construct
AFSRGDRSQT

SEQ ID NO: 97691 - protein, 10 aa, synthetic construct
AAARGDRSVV

SEQ ID NO: 97692 - protein, 10 aa, synthetic construct
AFSRGDLLLS

SEQ ID NO: 97693 - protein, 10 aa, synthetic construct
AFTRGDRGVV

SEQ ID NO: 97694 - protein, 10 aa, synthetic construct
AFQRGDRGVV

SEQ ID NO: 97695 - protein, 10 aa, synthetic construct
AFDRGDRGVV

SEQ ID NO: 97696 - protein, 10 aa, synthetic construct
AFERGDRGVV

SEQ ID NO: 97697 - protein, 10 aa, synthetic construct
AKGRGDHGVL

SEQ ID NO: 97698 - protein, 10 aa, synthetic construct
AKGRGDRGQI

SEQ ID NO: 97699 - protein, 10 aa, synthetic construct
AKGRGDRQGI

SEQ ID NO: 97700 - protein, 10 aa, synthetic construct
AKGRGDRSVV

SEQ ID NO: 97701 - protein, 10 aa, synthetic construct
AKGRGDLTVT

SEQ ID NO: 97702 - protein, 10 aa, synthetic construct
DKNRGDQSTL

SEQ ID NO: 97703 - protein, 10 aa, synthetic construct
AAARGDLTVT

SEQ ID NO: 97704 - protein, 10 aa, synthetic construct
AKGRGDLIGR

SEQ ID NO: 97705 - protein, 10 aa, synthetic construct
AKGRGDRSQT

SEQ ID NO: 97706 - protein, 10 aa, synthetic construct
AKGRGDLLLS

SEQ ID NO: 97707 - protein, 10 aa, synthetic construct
AKARGDHGVL

SEQ ID NO: 97708 - protein, 10 aa, synthetic construct
AKARGDRGQI

SEQ ID NO: 97709 - protein, 10 aa, synthetic construct
AKARGDRQGI

SEQ ID NO: 97710 - protein, 10 aa, synthetic construct
AKARGDRSVV

SEQ ID NO: 97711 - protein, 10 aa, synthetic construct
AKARGDLTVT

SEQ ID NO: 97712 - protein, 10 aa, synthetic construct
AKARGDLIGR

SEQ ID NO: 97713 - protein, 10 aa, synthetic construct
AKARGDRSQT

SEQ ID NO: 97714 - protein, 10 aa, synthetic construct
AAARGDLIGR

SEQ ID NO: 97715 - protein, 10 aa, synthetic construct
AKARGDLLLS

SEQ ID NO: 97716 - protein, 10 aa, synthetic construct
AKVRGDHGVL

SEQ ID NO: 97717 - protein, 10 aa, synthetic construct
AKVRGDRGQI

SEQ ID NO: 97718 - protein, 10 aa, synthetic construct
AKVRGDRQGI

SEQ ID NO: 97719 - protein, 10 aa, synthetic construct
AKVRGDRSVV

SEQ ID NO: 97720 - protein, 10 aa, synthetic construct
AKVRGDLTVT

SEQ ID NO: 97721 - protein, 10 aa, synthetic construct
AKVRGDLIGR

SEQ ID NO: 97722 - protein, 10 aa, synthetic construct
AKVRGDRSQT

SEQ ID NO: 97723 - protein, 10 aa, synthetic construct
AKVRGDLLLS

SEQ ID NO: 97724 - protein, 10 aa, synthetic construct
AKPRGDHGVL

SEQ ID NO: 97725 - protein, 10 aa, synthetic construct
AAARGDRSQT

SEQ ID NO: 97726 - protein, 10 aa, synthetic construct
AKPRGDRGQI

SEQ ID NO: 97727 - protein, 10 aa, synthetic construct
AKPRGDRQGI

SEQ ID NO: 97728 - protein, 10 aa, synthetic construct
AKPRGDRSVV

SEQ ID NO: 97729 - protein, 10 aa, synthetic construct
AKPRGDLTVT

SEQ ID NO: 97730 - protein, 10 aa, synthetic construct
AKPRGDLIGR

SEQ ID NO: 97731 - protein, 10 aa, synthetic construct
AKPRGDRSQT

SEQ ID NO: 97732 - protein, 10 aa, synthetic construct
AKPRGDLLLS

SEQ ID NO: 97733 - protein, 10 aa, synthetic construct
AKLRGDHGVL

SEQ ID NO: 97734 - protein, 10 aa, synthetic construct
AKLRGDRGQI

SEQ ID NO: 97735 - protein, 10 aa, synthetic construct
AKLRGDRQGI

SEQ ID NO: 97736 - protein, 10 aa, synthetic construct
AAARGDLLLS

SEQ ID NO: 97737 - protein, 10 aa, synthetic construct
AKLRGDRSVV

SEQ ID NO: 97738 - protein, 10 aa, synthetic construct
AKLRGDLTVT

SEQ ID NO: 97739 - protein, 10 aa, synthetic construct
AKLRGDLIGR

SEQ ID NO: 97740 - protein, 10 aa, synthetic construct
AKLRGDRSQT

SEQ ID NO: 97741 - protein, 10 aa, synthetic construct
AKLRGDLLLS

SEQ ID NO: 97742 - protein, 10 aa, synthetic construct
AKWRGDRGQI

SEQ ID NO: 97743 - protein, 10 aa, synthetic construct
AKWRGDRQGI

SEQ ID NO: 97744 - protein, 10 aa, synthetic construct
AKWRGDRSVV

SEQ ID NO: 97745 - protein, 10 aa, synthetic construct
AKWRGDRGVV

SEQ ID NO: 97746 - protein, 10 aa, synthetic construct
AKWRGDRSQT

SEQ ID NO: 97747 - protein, 10 aa, synthetic construct
AAVRGDHGVL

SEQ ID NO: 97748 - protein, 10 aa, synthetic construct
AKRRGDHGVL

SEQ ID NO: 97749 - protein, 10 aa, synthetic construct
AKRRGDRGQI

SEQ ID NO: 97750 - protein, 10 aa, synthetic construct
AKRRGDRQGI

SEQ ID NO: 97751 - protein, 10 aa, synthetic construct
AKRRGDRSVV

SEQ ID NO: 97752 - protein, 10 aa, synthetic construct
AKRRGDLTVT

SEQ ID NO: 97753 - protein, 10 aa, synthetic construct
AKRRGDLIGR

SEQ ID NO: 97754 - protein, 10 aa, synthetic construct
AKRRGDRSQT

SEQ ID NO: 97755 - protein, 10 aa, synthetic construct
AKRRGDLLLS

SEQ ID NO: 97756 - protein, 10 aa, synthetic construct
AKHRGDRGVV

SEQ ID NO: 97757 - protein, 10 aa, synthetic construct
AKSRGDHGVL

SEQ ID NO: 97758 - protein, 10 aa, synthetic construct
AAVRGDRGQI

SEQ ID NO: 97759 - protein, 10 aa, synthetic construct
AKSRGDRGQI

SEQ ID NO: 97760 - protein, 10 aa, synthetic construct
AKSRGDRQGI

SEQ ID NO: 97761 - protein, 10 aa, synthetic construct
AKSRGDRSVV

SEQ ID NO: 97762 - protein, 10 aa, synthetic construct
AKSRGDLTVT

SEQ ID NO: 97763 - protein, 10 aa, synthetic construct
AKSRGDLIGR

SEQ ID NO: 97764 - protein, 10 aa, synthetic construct
AKSRGDRSQT

SEQ ID NO: 97765 - protein, 10 aa, synthetic construct
AKSRGDLLLS

SEQ ID NO: 97766 - protein, 10 aa, synthetic construct
AKTRGDRGVV

SEQ ID NO: 97767 - protein, 10 aa, synthetic construct
AKQRGDRGVV

SEQ ID NO: 97768 - protein, 10 aa, synthetic construct
AKDRGDRGVV

SEQ ID NO: 97769 - protein, 10 aa, synthetic construct
AAVRGDRQGI

SEQ ID NO: 97770 - protein, 10 aa, synthetic construct
AKERGDRGVV

SEQ ID NO: 97771 - protein, 10 aa, synthetic construct
ARGRGDHVNL

SEQ ID NO: 97772 - protein, 10 aa, synthetic construct
ARGRGDYSSV

SEQ ID NO: 97773 - protein, 10 aa, synthetic construct
ARGRGDYTSV

SEQ ID NO: 97774 - protein, 10 aa, synthetic construct
ARGRGDYTSM

SEQ ID NO: 97775 - protein, 10 aa, synthetic construct
ARARGDHVNL

SEQ ID NO: 97776 - protein, 10 aa, synthetic construct
ARARGDYSSV

SEQ ID NO: 97777 - protein, 10 aa, synthetic construct
ARARGDYTSV

SEQ ID NO: 97778 - protein, 10 aa, synthetic construct
ARARGDYTSM

SEQ ID NO: 97779 - protein, 10 aa, synthetic construct
ARVRGDHVNL

SEQ ID NO: 97780 - protein, 10 aa, synthetic construct
AAVRGDRSVV

SEQ ID NO: 97781 - protein, 10 aa, synthetic construct
ARVRGDYSSV

SEQ ID NO: 97782 - protein, 10 aa, synthetic construct
ARVRGDYTSV

SEQ ID NO: 97783 - protein, 10 aa, synthetic construct
ARVRGDYTSM

SEQ ID NO: 97784 - protein, 10 aa, synthetic construct
ARPRGDHVNL

SEQ ID NO: 97785 - protein, 10 aa, synthetic construct
ARPRGDYSSV

SEQ ID NO: 97786 - protein, 10 aa, synthetic construct
ARPRGDYTSV

SEQ ID NO: 97787 - protein, 10 aa, synthetic construct
ARPRGDYTSM

SEQ ID NO: 97788 - protein, 10 aa, synthetic construct
ARLRGDHVNL

SEQ ID NO: 97789 - protein, 10 aa, synthetic construct
ARLRGDYSSV

SEQ ID NO: 97790 - protein, 10 aa, synthetic construct
ARLRGDYTSV

SEQ ID NO: 97791 - protein, 10 aa, synthetic construct
AAVRGDLTVT

SEQ ID NO: 97792 - protein, 10 aa, synthetic construct
ARLRGDYTSM

SEQ ID NO: 97793 - protein, 10 aa, synthetic construct
ARIRGDHGVL

SEQ ID NO: 97794 - protein, 10 aa, synthetic construct
ARIRGDRGQI

SEQ ID NO: 97795 - protein, 10 aa, synthetic construct
ARIRGDRQGI

SEQ ID NO: 97796 - protein, 10 aa, synthetic construct
ARIRGDRSVV

SEQ ID NO: 97797 - protein, 10 aa, synthetic construct
ARIRGDLTVT

SEQ ID NO: 97798 - protein, 10 aa, synthetic construct
ARIRGDLIGR

SEQ ID NO: 97799 - protein, 10 aa, synthetic construct
ARIRGDRSQT

SEQ ID NO: 97800 - protein, 10 aa, synthetic construct
ARIRGDLLLS

SEQ ID NO: 97801 - protein, 10 aa, synthetic construct
ARMRGDHGVL

SEQ ID NO: 97802 - protein, 10 aa, synthetic construct
AAVRGDLIGR

SEQ ID NO: 97803 - protein, 10 aa, synthetic construct
ARMRGDYVGL

SEQ ID NO: 97804 - protein, 10 aa, synthetic construct
ARMRGDQSTL

SEQ ID NO: 97805 - protein, 10 aa, synthetic construct
ARMRGDLLLS

SEQ ID NO: 97806 - protein, 10 aa, synthetic construct
ARWRGDHVNL

SEQ ID NO: 97807 - protein, 10 aa, synthetic construct
ARWRGDRDYL

SEQ ID NO: 97808 - protein, 10 aa, synthetic construct
ARWRGDYSSV

SEQ ID NO: 97809 - protein, 10 aa, synthetic construct
ARWRGDLTVT

SEQ ID NO: 97810 - protein, 10 aa, synthetic construct
ARWRGDLIGR

SEQ ID NO: 97811 - protein, 10 aa, synthetic construct
ARFRGDHGVL

SEQ ID NO: 97812 - protein, 10 aa, synthetic construct
ARFRGDRGQI

SEQ ID NO: 97813 - protein, 10 aa, synthetic construct
EKKRGDRSVV

SEQ ID NO: 97814 - protein, 10 aa, synthetic construct
DKNRGDLLLS

SEQ ID NO: 97815 - protein, 10 aa, synthetic construct
AAVRGDRSQT

SEQ ID NO: 97816 - protein, 10 aa, synthetic construct
ARFRGDRQGI

SEQ ID NO: 97817 - protein, 10 aa, synthetic construct
ARFRGDRSVV

SEQ ID NO: 97818 - protein, 10 aa, synthetic construct
ARFRGDLTVT

SEQ ID NO: 97819 - protein, 10 aa, synthetic construct
ARFRGDLIGR

SEQ ID NO: 97820 - protein, 10 aa, synthetic construct
ARFRGDRSQT

SEQ ID NO: 97821 - protein, 10 aa, synthetic construct
ARFRGDLLLS

SEQ ID NO: 97822 - protein, 10 aa, synthetic construct
ARKRGDHGVL

SEQ ID NO: 97823 - protein, 10 aa, synthetic construct
ARKRGDRGQI

SEQ ID NO: 97824 - protein, 10 aa, synthetic construct
ARKRGDRQGI

SEQ ID NO: 97825 - protein, 10 aa, synthetic construct
ARKRGDRSVV

SEQ ID NO: 97826 - protein, 10 aa, synthetic construct
AAVRGDLLLS

SEQ ID NO: 97827 - protein, 10 aa, synthetic construct
ARKRGDLTVT

SEQ ID NO: 97828 - protein, 10 aa, synthetic construct
ARKRGDLIGR

SEQ ID NO: 97829 - protein, 10 aa, synthetic construct
ARKRGDRSQT

SEQ ID NO: 97830 - protein, 10 aa, synthetic construct
ARKRGDLLLS

SEQ ID NO: 97831 - protein, 10 aa, synthetic construct
ARRRGDHVNL

SEQ ID NO: 97832 - protein, 10 aa, synthetic construct
ARRRGDYSSV

SEQ ID NO: 97833 - protein, 10 aa, synthetic construct
ARRRGDYTSV

SEQ ID NO: 97834 - protein, 10 aa, synthetic construct
ARRRGDYTSM

SEQ ID NO: 97835 - protein, 10 aa, synthetic construct
ARHRGDRDYL

SEQ ID NO: 97836 - protein, 10 aa, synthetic construct
ARHRGDYVGL

SEQ ID NO: 97837 - protein, 10 aa, synthetic construct
AAPRGDHGVL

SEQ ID NO: 97838 - protein, 10 aa, synthetic construct
ARHRGDQSTL

SEQ ID NO: 97839 - protein, 10 aa, synthetic construct
ARSRGDHVNL

SEQ ID NO: 97840 - protein, 10 aa, synthetic construct
ARSRGDYSSV

SEQ ID NO: 97841 - protein, 10 aa, synthetic construct
ARSRGDYTSV

SEQ ID NO: 97842 - protein, 10 aa, synthetic construct
ARSRGDYTSM

SEQ ID NO: 97843 - protein, 10 aa, synthetic construct
ARTRGDRDYL

SEQ ID NO: 97844 - protein, 10 aa, synthetic construct
ARTRGDYVGL

SEQ ID NO: 97845 - protein, 10 aa, synthetic construct
ARTRGDQSTL

SEQ ID NO: 97846 - protein, 10 aa, synthetic construct
ARYRGDHGVL

SEQ ID NO: 97847 - protein, 10 aa, synthetic construct
ARYRGDRGQI

SEQ ID NO: 97848 - protein, 10 aa, synthetic construct
AAPRGDRGQI

SEQ ID NO: 97849 - protein, 10 aa, synthetic construct
ARYRGDRQGI

SEQ ID NO: 97850 - protein, 10 aa, synthetic construct
ARYRGDRSVV

SEQ ID NO: 97851 - protein, 10 aa, synthetic construct
ARYRGDLTVT

SEQ ID NO: 97852 - protein, 10 aa, synthetic construct
ARYRGDLIGR

SEQ ID NO: 97853 - protein, 10 aa, synthetic construct
ARYRGDRSQT

SEQ ID NO: 97854 - protein, 10 aa, synthetic construct
ARYRGDLLLS

SEQ ID NO: 97855 - protein, 10 aa, synthetic construct
ARNRGDHGVL

SEQ ID NO: 97856 - protein, 10 aa, synthetic construct
ARNRGDRGQI

SEQ ID NO: 97857 - protein, 10 aa, synthetic construct
ARNRGDRQGI

SEQ ID NO: 97858 - protein, 10 aa, synthetic construct
ARNRGDRSVV

SEQ ID NO: 97859 - protein, 10 aa, synthetic construct
AAPRGDRQGI

SEQ ID NO: 97860 - protein, 10 aa, synthetic construct
ARNRGDLTVT

SEQ ID NO: 97861 - protein, 10 aa, synthetic construct
ARNRGDLIGR

SEQ ID NO: 97862 - protein, 10 aa, synthetic construct
ARNRGDRSQT

SEQ ID NO: 97863 - protein, 10 aa, synthetic construct
ARNRGDLLLS

SEQ ID NO: 97864 - protein, 10 aa, synthetic construct
ARQRGDRDYL

SEQ ID NO: 97865 - protein, 10 aa, synthetic construct
ARQRGDYVGL

SEQ ID NO: 97866 - protein, 10 aa, synthetic construct
ARQRGDQSTL

SEQ ID NO: 97867 - protein, 10 aa, synthetic construct
ARDRGDRDYL

SEQ ID NO: 97868 - protein, 10 aa, synthetic construct
ARDRGDYVGL

SEQ ID NO: 97869 - protein, 10 aa, synthetic construct
ARDRGDQSTL

SEQ ID NO: 97870 - protein, 10 aa, synthetic construct
AAPRGDRSVV

SEQ ID NO: 97871 - protein, 10 aa, synthetic construct
ARERGDRDYL

SEQ ID NO: 97872 - protein, 10 aa, synthetic construct
ARERGDYVGL

SEQ ID NO: 97873 - protein, 10 aa, synthetic construct
ARERGDQSTL

SEQ ID NO: 97874 - protein, 10 aa, synthetic construct
AHGRGDRDYL

SEQ ID NO: 97875 - protein, 10 aa, synthetic construct
AHGRGDYVGL

SEQ ID NO: 97876 - protein, 10 aa, synthetic construct
AHGRGDQSTL

SEQ ID NO: 97877 - protein, 10 aa, synthetic construct
AHARGDRDYL

SEQ ID NO: 97878 - protein, 10 aa, synthetic construct
AHARGDYVGL

SEQ ID NO: 97879 - protein, 10 aa, synthetic construct
AHARGDQSTL

SEQ ID NO: 97880 - protein, 10 aa, synthetic construct
AHVRGDRDYL

SEQ ID NO: 97881 - protein, 10 aa, synthetic construct
AAPRGDLTVT

SEQ ID NO: 97882 - protein, 10 aa, synthetic construct
AHVRGDYVGL

SEQ ID NO: 97883 - protein, 10 aa, synthetic construct
AHVRGDQSTL

SEQ ID NO: 97884 - protein, 10 aa, synthetic construct
AHPRGDRDYL

SEQ ID NO: 97885 - protein, 10 aa, synthetic construct
AHPRGDYVGL

SEQ ID NO: 97886 - protein, 10 aa, synthetic construct
AHPRGDQSTL

SEQ ID NO: 97887 - protein, 10 aa, synthetic construct
AHLRGDRDYL

SEQ ID NO: 97888 - protein, 10 aa, synthetic construct
AHLRGDYVGL

SEQ ID NO: 97889 - protein, 10 aa, synthetic construct
AHLRGDQSTL

SEQ ID NO: 97890 - protein, 10 aa, synthetic construct
AHIRGDRGVV

SEQ ID NO: 97891 - protein, 10 aa, synthetic construct
AHMRGDRGQI

SEQ ID NO: 97892 - protein, 10 aa, synthetic construct
AAPRGDLIGR

SEQ ID NO: 97893 - protein, 10 aa, synthetic construct
AHMRGDRQGI

SEQ ID NO: 97894 - protein, 10 aa, synthetic construct
AHMRGDRSVV

SEQ ID NO: 97895 - protein, 10 aa, synthetic construct
AHMRGDRGVV

SEQ ID NO: 97896 - protein, 10 aa, synthetic construct
AHMRGDRSQT

SEQ ID NO: 97897 - protein, 10 aa, synthetic construct
AHWRGDHGVL

SEQ ID NO: 97898 - protein, 10 aa, synthetic construct
AHWRGDYVGL

SEQ ID NO: 97899 - protein, 10 aa, synthetic construct
AHWRGDQSTL

SEQ ID NO: 97900 - protein, 10 aa, synthetic construct
AHWRGDLLLS

SEQ ID NO: 97901 - protein, 10 aa, synthetic construct
AHFRGDRGVV

SEQ ID NO: 97902 - protein, 10 aa, synthetic construct
AHKRGDRGVV

SEQ ID NO: 97903 - protein, 10 aa, synthetic construct
AAPRGDRSQT

SEQ ID NO: 97904 - protein, 10 aa, synthetic construct
AHRRGDRDYL

SEQ ID NO: 97905 - protein, 10 aa, synthetic construct
AHRRGDYVGL

SEQ ID NO: 97906 - protein, 10 aa, synthetic construct
AHRRGDQSTL

SEQ ID NO: 97907 - protein, 10 aa, synthetic construct
AHHRGDHGVL

SEQ ID NO: 97908 - protein, 10 aa, synthetic construct
AHHRGDRGQI

SEQ ID NO: 97909 - protein, 10 aa, synthetic construct
AHHRGDRQGI

SEQ ID NO: 97910 - protein, 10 aa, synthetic construct
AHHRGDRSVV

SEQ ID NO: 97911 - protein, 10 aa, synthetic construct
AHHRGDLTVT

SEQ ID NO: 97912 - protein, 10 aa, synthetic construct
AHHRGDLIGR

SEQ ID NO: 97913 - protein, 10 aa, synthetic construct
AHHRGDRSQT

SEQ ID NO: 97914 - protein, 10 aa, synthetic construct
AAPRGDLLLS

SEQ ID NO: 97915 - protein, 10 aa, synthetic construct
AHHRGDLLLS

SEQ ID NO: 97916 - protein, 10 aa, synthetic construct
AHSRGDRDYL

SEQ ID NO: 97917 - protein, 10 aa, synthetic construct
AHSRGDYVGL

SEQ ID NO: 97918 - protein, 10 aa, synthetic construct
AHSRGDQSTL

SEQ ID NO: 97919 - protein, 10 aa, synthetic construct
AHTRGDHGVL

SEQ ID NO: 97920 - protein, 10 aa, synthetic construct
AHTRGDRGQI

SEQ ID NO: 97921 - protein, 10 aa, synthetic construct
AHTRGDRQGI

SEQ ID NO: 97922 - protein, 10 aa, synthetic construct
AHTRGDRSVV

SEQ ID NO: 97923 - protein, 10 aa, synthetic construct
AHTRGDLTVT

SEQ ID NO: 97924 - protein, 10 aa, synthetic construct
AHTRGDLIGR

SEQ ID NO: 97925 - protein, 10 aa, synthetic construct
QKKRGDHGVL

SEQ ID NO: 97926 - protein, 10 aa, synthetic construct
AALRGDHGVL

SEQ ID NO: 97927 - protein, 10 aa, synthetic construct
AHTRGDRSQT

SEQ ID NO: 97928 - protein, 10 aa, synthetic construct
AHTRGDLLLS

SEQ ID NO: 97929 - protein, 10 aa, synthetic construct
AHYRGDRGVV

SEQ ID NO: 97930 - protein, 10 aa, synthetic construct
AHNRGDRGVV

SEQ ID NO: 97931 - protein, 10 aa, synthetic construct
AHQRGDHGVL

SEQ ID NO: 97932 - protein, 10 aa, synthetic construct
AHQRGDRGQI

SEQ ID NO: 97933 - protein, 10 aa, synthetic construct
AHQRGDRQGI

SEQ ID NO: 97934 - protein, 10 aa, synthetic construct
AHQRGDRSVV

SEQ ID NO: 97935 - protein, 10 aa, synthetic construct
AHQRGDLTVT

SEQ ID NO: 97936 - protein, 10 aa, synthetic construct
AHQRGDLIGR

SEQ ID NO: 97937 - protein, 10 aa, synthetic construct
AALRGDRGQI

SEQ ID NO: 97938 - protein, 10 aa, synthetic construct
AHQRGDRSQT

SEQ ID NO: 97939 - protein, 10 aa, synthetic construct
AHQRGDLLLS

SEQ ID NO: 97940 - protein, 10 aa, synthetic construct
AHDRGDHGVL

SEQ ID NO: 97941 - protein, 10 aa, synthetic construct
AHDRGDRGQI

SEQ ID NO: 97942 - protein, 10 aa, synthetic construct
AHDRGDRQGI

SEQ ID NO: 97943 - protein, 10 aa, synthetic construct
AHDRGDRSVV

SEQ ID NO: 97944 - protein, 10 aa, synthetic construct
AHDRGDLTVT

SEQ ID NO: 97945 - protein, 10 aa, synthetic construct
AHDRGDLIGR

SEQ ID NO: 97946 - protein, 10 aa, synthetic construct
AHDRGDRSQT

SEQ ID NO: 97947 - protein, 10 aa, synthetic construct
AHDRGDLLLS

SEQ ID NO: 97948 - protein, 10 aa, synthetic construct
AALRGDRQGI

SEQ ID NO: 97949 - protein, 10 aa, synthetic construct
AHERGDHGVL

SEQ ID NO: 97950 - protein, 10 aa, synthetic construct
AHERGDRGQI

SEQ ID NO: 97951 - protein, 10 aa, synthetic construct
AHERGDRQGI

SEQ ID NO: 97952 - protein, 10 aa, synthetic construct
AHERGDRSVV

SEQ ID NO: 97953 - protein, 10 aa, synthetic construct
AHERGDLTVT

SEQ ID NO: 97954 - protein, 10 aa, synthetic construct
AHERGDLIGR

SEQ ID NO: 97955 - protein, 10 aa, synthetic construct
AHERGDRSQT

SEQ ID NO: 97956 - protein, 10 aa, synthetic construct
AHERGDLLLS

SEQ ID NO: 97957 - protein, 10 aa, synthetic construct
ASGRGDRDYL

SEQ ID NO: 97958 - protein, 10 aa, synthetic construct
ASGRGDYVGL

SEQ ID NO: 97959 - protein, 10 aa, synthetic construct
AALRGDRSVV

SEQ ID NO: 97960 - protein, 10 aa, synthetic construct
ASGRGDQSTL

SEQ ID NO: 97961 - protein, 10 aa, synthetic construct
ASARGDRDYL

SEQ ID NO: 97962 - protein, 10 aa, synthetic construct
ASARGDYVGL

SEQ ID NO: 97963 - protein, 10 aa, synthetic construct
ASARGDQSTL

SEQ ID NO: 97964 - protein, 10 aa, synthetic construct
ASVRGDRDYL

SEQ ID NO: 97965 - protein, 10 aa, synthetic construct
ASVRGDYVGL

SEQ ID NO: 97966 - protein, 10 aa, synthetic construct
ASVRGDQSTL

SEQ ID NO: 97967 - protein, 10 aa, synthetic construct
ASPRGDRDYL

SEQ ID NO: 97968 - protein, 10 aa, synthetic construct
ASPRGDYVGL

SEQ ID NO: 97969 - protein, 10 aa, synthetic construct
ASPRGDQSTL

SEQ ID NO: 97970 - protein, 10 aa, synthetic construct
AALRGDLTVT

SEQ ID NO: 97971 - protein, 10 aa, synthetic construct
ASLRGDRDYL

SEQ ID NO: 97972 - protein, 10 aa, synthetic construct
ASLRGDYVGL

SEQ ID NO: 97973 - protein, 10 aa, synthetic construct
ASLRGDQSTL

SEQ ID NO: 97974 - protein, 10 aa, synthetic construct
ASIRGDRGVV

SEQ ID NO: 97975 - protein, 10 aa, synthetic construct
ASMRGDRGQI

SEQ ID NO: 97976 - protein, 10 aa, synthetic construct
ASMRGDRQGI

SEQ ID NO: 97977 - protein, 10 aa, synthetic construct
ASMRGDRSVV

SEQ ID NO: 97978 - protein, 10 aa, synthetic construct
ASMRGDRGVV

SEQ ID NO: 97979 - protein, 10 aa, synthetic construct
ASMRGDRSQT

SEQ ID NO: 97980 - protein, 10 aa, synthetic construct
ASWRGDHGVL

SEQ ID NO: 97981 - protein, 10 aa, synthetic construct
AALRGDLIGR

SEQ ID NO: 97982 - protein, 10 aa, synthetic construct
ASWRGDYVGL

SEQ ID NO: 97983 - protein, 10 aa, synthetic construct
ASWRGDQSTL

SEQ ID NO: 97984 - protein, 10 aa, synthetic construct
ASWRGDLLLS

SEQ ID NO: 97985 - protein, 10 aa, synthetic construct
ASFRGDRGVV

SEQ ID NO: 97986 - protein, 10 aa, synthetic construct
ASKRGDRGVV

SEQ ID NO: 97987 - protein, 10 aa, synthetic construct
ASRRGDRDYL

SEQ ID NO: 97988 - protein, 10 aa, synthetic construct
ASRRGDYVGL

SEQ ID NO: 97989 - protein, 10 aa, synthetic construct
ASRRGDQSTL

SEQ ID NO: 97990 - protein, 10 aa, synthetic construct
ASHRGDHGVL

SEQ ID NO: 97991 - protein, 10 aa, synthetic construct
ASHRGDRGQI

SEQ ID NO: 97992 - protein, 10 aa, synthetic construct
AALRGDRSQT

SEQ ID NO: 97993 - protein, 10 aa, synthetic construct
ASHRGDRQGI

SEQ ID NO: 97994 - protein, 10 aa, synthetic construct
ASHRGDRSVV

SEQ ID NO: 97995 - protein, 10 aa, synthetic construct
ASHRGDLTVT

SEQ ID NO: 97996 - protein, 10 aa, synthetic construct
ASHRGDLIGR

SEQ ID NO: 97997 - protein, 10 aa, synthetic construct
ASHRGDRSQT

SEQ ID NO: 97998 - protein, 10 aa, synthetic construct
ASHRGDLLLS

SEQ ID NO: 97999 - protein, 10 aa, synthetic construct
ASSRGDRDYL

SEQ ID NO: 98000 - protein, 10 aa, synthetic construct
ASSRGDYVGL

SEQ ID NO: 98001 - protein, 10 aa, synthetic construct
ASSRGDQSTL

SEQ ID NO: 98002 - protein, 10 aa, synthetic construct
ASTRGDHGVL

SEQ ID NO: 98003 - protein, 10 aa, synthetic construct
AALRGDLLLS

SEQ ID NO: 98004 - protein, 10 aa, synthetic construct
ASTRGDRGQI

SEQ ID NO: 98005 - protein, 10 aa, synthetic construct
ASTRGDRQGI

SEQ ID NO: 98006 - protein, 10 aa, synthetic construct
ASTRGDRSVV

SEQ ID NO: 98007 - protein, 10 aa, synthetic construct
ASTRGDLTVT

SEQ ID NO: 98008 - protein, 10 aa, synthetic construct
ASTRGDLIGR

SEQ ID NO: 98009 - protein, 10 aa, synthetic construct
ASTRGDRSQT

SEQ ID NO: 98010 - protein, 10 aa, synthetic construct
ASTRGDLLLS

SEQ ID NO: 98011 - protein, 10 aa, synthetic construct
ASYRGDRGVV

SEQ ID NO: 98012 - protein, 10 aa, synthetic construct
ASNRGDRGVV

SEQ ID NO: 98013 - protein, 10 aa, synthetic construct
ASQRGDHGVL

SEQ ID NO: 98014 - protein, 10 aa, synthetic construct
AAWRGDRGQI

SEQ ID NO: 98015 - protein, 10 aa, synthetic construct
ASQRGDRGQI

SEQ ID NO: 98016 - protein, 10 aa, synthetic construct
ASQRGDRQGI

SEQ ID NO: 98017 - protein, 10 aa, synthetic construct
ASQRGDRSVV

SEQ ID NO: 98018 - protein, 10 aa, synthetic construct
ASQRGDLTVT

SEQ ID NO: 98019 - protein, 10 aa, synthetic construct
ASQRGDLIGR

SEQ ID NO: 98020 - protein, 10 aa, synthetic construct
ASQRGDRSQT

SEQ ID NO: 98021 - protein, 10 aa, synthetic construct
ASQRGDLLLS

SEQ ID NO: 98022 - protein, 10 aa, synthetic construct
ASDRGDHGVL

SEQ ID NO: 98023 - protein, 10 aa, synthetic construct
ASDRGDRGQI

SEQ ID NO: 98024 - protein, 10 aa, synthetic construct
ASDRGDRQGI

SEQ ID NO: 98025 - protein, 10 aa, synthetic construct
AAWRGDRQGI

SEQ ID NO: 98026 - protein, 10 aa, synthetic construct
ASDRGDRSVV

SEQ ID NO: 98027 - protein, 10 aa, synthetic construct
ASDRGDLTVT

SEQ ID NO: 98028 - protein, 10 aa, synthetic construct
ASDRGDLIGR

SEQ ID NO: 98029 - protein, 10 aa, synthetic construct
ASDRGDRSQT

SEQ ID NO: 98030 - protein, 10 aa, synthetic construct
ASDRGDLLLS

SEQ ID NO: 98031 - protein, 10 aa, synthetic construct
ASERGDHGVL

SEQ ID NO: 98032 - protein, 10 aa, synthetic construct
ASERGDRGQI

SEQ ID NO: 98033 - protein, 10 aa, synthetic construct
ASERGDRQGI

SEQ ID NO: 98034 - protein, 10 aa, synthetic construct
ASERGDRSVV

SEQ ID NO: 98035 - protein, 10 aa, synthetic construct
ASERGDLTVT

SEQ ID NO: 98036 - protein, 10 aa, synthetic construct
QKKRGDRGQI

SEQ ID NO: 98037 - protein, 10 aa, synthetic construct
AAWRGDRSVV

SEQ ID NO: 98038 - protein, 10 aa, synthetic construct
ASERGDLIGR

SEQ ID NO: 98039 - protein, 10 aa, synthetic construct
ASERGDRSQT

SEQ ID NO: 98040 - protein, 10 aa, synthetic construct
ASERGDLLLS

SEQ ID NO: 98041 - protein, 10 aa, synthetic construct
ATGRGDRDYL

SEQ ID NO: 98042 - protein, 10 aa, synthetic construct
ATGRGDYVGL

SEQ ID NO: 98043 - protein, 10 aa, synthetic construct
ATGRGDQSTL

SEQ ID NO: 98044 - protein, 10 aa, synthetic construct
ATARGDRDYL

SEQ ID NO: 98045 - protein, 10 aa, synthetic construct
ATARGDYVGL

SEQ ID NO: 98046 - protein, 10 aa, synthetic construct
ATARGDQSTL

SEQ ID NO: 98047 - protein, 10 aa, synthetic construct
ATVRGDRDYL

SEQ ID NO: 98048 - protein, 10 aa, synthetic construct
AAWRGDRGVV

SEQ ID NO: 98049 - protein, 10 aa, synthetic construct
ATVRGDYVGL

SEQ ID NO: 98050 - protein, 10 aa, synthetic construct
ATVRGDQSTL

SEQ ID NO: 98051 - protein, 10 aa, synthetic construct
ATPRGDRDYL

SEQ ID NO: 98052 - protein, 10 aa, synthetic construct
ATPRGDYVGL

SEQ ID NO: 98053 - protein, 10 aa, synthetic construct
ATPRGDQSTL

SEQ ID NO: 98054 - protein, 10 aa, synthetic construct
ATLRGDRDYL

SEQ ID NO: 98055 - protein, 10 aa, synthetic construct
ATLRGDYVGL

SEQ ID NO: 98056 - protein, 10 aa, synthetic construct
ATLRGDQSTL

SEQ ID NO: 98057 - protein, 10 aa, synthetic construct
ATIRGDRGVV

SEQ ID NO: 98058 - protein, 10 aa, synthetic construct
ATMRGDRGQI

SEQ ID NO: 98059 - protein, 10 aa, synthetic construct
AAWRGDRSQT

SEQ ID NO: 98060 - protein, 10 aa, synthetic construct
ATMRGDRQGI

SEQ ID NO: 98061 - protein, 10 aa, synthetic construct
ATMRGDRSVV

SEQ ID NO: 98062 - protein, 10 aa, synthetic construct
ATMRGDRGVV

SEQ ID NO: 98063 - protein, 10 aa, synthetic construct
ATMRGDRSQT

SEQ ID NO: 98064 - protein, 10 aa, synthetic construct
ATWRGDHGVL

SEQ ID NO: 98065 - protein, 10 aa, synthetic construct
ATWRGDYVGL

SEQ ID NO: 98066 - protein, 10 aa, synthetic construct
ATWRGDQSTL

SEQ ID NO: 98067 - protein, 10 aa, synthetic construct
ATWRGDLLLS

SEQ ID NO: 98068 - protein, 10 aa, synthetic construct
ATFRGDRGVV

SEQ ID NO: 98069 - protein, 10 aa, synthetic construct
ATKRGDRGVV

SEQ ID NO: 98070 - protein, 10 aa, synthetic construct
AARRGDHGVL

SEQ ID NO: 98071 - protein, 10 aa, synthetic construct
ATRRGDRDYL

SEQ ID NO: 98072 - protein, 10 aa, synthetic construct
ATRRGDYVGL

SEQ ID NO: 98073 - protein, 10 aa, synthetic construct
ATRRGDQSTL

SEQ ID NO: 98074 - protein, 10 aa, synthetic construct
ATHRGDHGVL

SEQ ID NO: 98075 - protein, 10 aa, synthetic construct
ATHRGDRGQI

SEQ ID NO: 98076 - protein, 10 aa, synthetic construct
ATHRGDRQGI

SEQ ID NO: 98077 - protein, 10 aa, synthetic construct
ATHRGDRSVV

SEQ ID NO: 98078 - protein, 10 aa, synthetic construct
ATHRGDLTVT

SEQ ID NO: 98079 - protein, 10 aa, synthetic construct
ATHRGDLIGR

SEQ ID NO: 98080 - protein, 10 aa, synthetic construct
ATHRGDRSQT

SEQ ID NO: 98081 - protein, 10 aa, synthetic construct
AARRGDRGQI

SEQ ID NO: 98082 - protein, 10 aa, synthetic construct
ATHRGDLLLS

SEQ ID NO: 98083 - protein, 10 aa, synthetic construct
ATSRGDRDYL

SEQ ID NO: 98084 - protein, 10 aa, synthetic construct
ATSRGDYVGL

SEQ ID NO: 98085 - protein, 10 aa, synthetic construct
ATSRGDQSTL

SEQ ID NO: 98086 - protein, 10 aa, synthetic construct
ATTRGDHGVL

SEQ ID NO: 98087 - protein, 10 aa, synthetic construct
ATTRGDRGQI

SEQ ID NO: 98088 - protein, 10 aa, synthetic construct
ATTRGDRQGI

SEQ ID NO: 98089 - protein, 10 aa, synthetic construct
ATTRGDRSVV

SEQ ID NO: 98090 - protein, 10 aa, synthetic construct
ATTRGDLTVT

SEQ ID NO: 98091 - protein, 10 aa, synthetic construct
ATTRGDLIGR

SEQ ID NO: 98092 - protein, 10 aa, synthetic construct
AARRGDRQGI

SEQ ID NO: 98093 - protein, 10 aa, synthetic construct
ATTRGDRSQT

SEQ ID NO: 98094 - protein, 10 aa, synthetic construct
ATTRGDLLLS

SEQ ID NO: 98095 - protein, 10 aa, synthetic construct
ATYRGDRGVV

SEQ ID NO: 98096 - protein, 10 aa, synthetic construct
ATNRGDRGVV

SEQ ID NO: 98097 - protein, 10 aa, synthetic construct
ATQRGDHGVL

SEQ ID NO: 98098 - protein, 10 aa, synthetic construct
ATQRGDRGQI

SEQ ID NO: 98099 - protein, 10 aa, synthetic construct
ATQRGDRQGI

SEQ ID NO: 98100 - protein, 10 aa, synthetic construct
ATQRGDRSVV

SEQ ID NO: 98101 - protein, 10 aa, synthetic construct
ATQRGDLTVT

SEQ ID NO: 98102 - protein, 10 aa, synthetic construct
ATQRGDLIGR

SEQ ID NO: 98103 - protein, 10 aa, synthetic construct
AARRGDRSVV

SEQ ID NO: 98104 - protein, 10 aa, synthetic construct
ATQRGDRSQT

SEQ ID NO: 98105 - protein, 10 aa, synthetic construct
ATQRGDLLLS

SEQ ID NO: 98106 - protein, 10 aa, synthetic construct
ATDRGDHGVL

SEQ ID NO: 98107 - protein, 10 aa, synthetic construct
ATDRGDRGQI

SEQ ID NO: 98108 - protein, 10 aa, synthetic construct
ATDRGDRQGI

SEQ ID NO: 98109 - protein, 10 aa, synthetic construct
ATDRGDRSVV

SEQ ID NO: 98110 - protein, 10 aa, synthetic construct
ATDRGDLTVT

SEQ ID NO: 98111 - protein, 10 aa, synthetic construct
ATDRGDLIGR

SEQ ID NO: 98112 - protein, 10 aa, synthetic construct
ATDRGDRSQT

SEQ ID NO: 98113 - protein, 10 aa, synthetic construct
ATDRGDLLLS

SEQ ID NO: 98114 - protein, 10 aa, synthetic construct
AARRGDLTVT

SEQ ID NO: 98115 - protein, 10 aa, synthetic construct
ATERGDHGVL

SEQ ID NO: 98116 - protein, 10 aa, synthetic construct
ATERGDRGQI

SEQ ID NO: 98117 - protein, 10 aa, synthetic construct
ATERGDRQGI

SEQ ID NO: 98118 - protein, 10 aa, synthetic construct
ATERGDRSVV

SEQ ID NO: 98119 - protein, 10 aa, synthetic construct
ATERGDLTVT

SEQ ID NO: 98120 - protein, 10 aa, synthetic construct
ATERGDLIGR

SEQ ID NO: 98121 - protein, 10 aa, synthetic construct
ATERGDRSQT

SEQ ID NO: 98122 - protein, 10 aa, synthetic construct
ATERGDLLLS

SEQ ID NO: 98123 - protein, 10 aa, synthetic construct
AYGRGDHGVL

SEQ ID NO: 98124 - protein, 10 aa, synthetic construct
AYGRGDRGQI

SEQ ID NO: 98125 - protein, 10 aa, synthetic construct
AARRGDLIGR

SEQ ID NO: 98126 - protein, 10 aa, synthetic construct
AYGRGDRQGI

SEQ ID NO: 98127 - protein, 10 aa, synthetic construct
AYGRGDRSVV

SEQ ID NO: 98128 - protein, 10 aa, synthetic construct
AYGRGDLTVT

SEQ ID NO: 98129 - protein, 10 aa, synthetic construct
AYGRGDLIGR

SEQ ID NO: 98130 - protein, 10 aa, synthetic construct
AYGRGDRSQT

SEQ ID NO: 98131 - protein, 10 aa, synthetic construct
AYGRGDLLLS

SEQ ID NO: 98132 - protein, 10 aa, synthetic construct
AYARGDHGVL

SEQ ID NO: 98133 - protein, 10 aa, synthetic construct
AYARGDRGQI

SEQ ID NO: 98134 - protein, 10 aa, synthetic construct
AYARGDRQGI

SEQ ID NO: 98135 - protein, 10 aa, synthetic construct
AYARGDRSVV

SEQ ID NO: 98136 - protein, 10 aa, synthetic construct
AARRGDRSQT

SEQ ID NO: 98137 - protein, 10 aa, synthetic construct
AYARGDLTVT

SEQ ID NO: 98138 - protein, 10 aa, synthetic construct
AYARGDLIGR

SEQ ID NO: 98139 - protein, 10 aa, synthetic construct
AYARGDRSQT

SEQ ID NO: 98140 - protein, 10 aa, synthetic construct
AYARGDLLLS

SEQ ID NO: 98141 - protein, 10 aa, synthetic construct
AYVRGDHGVL

SEQ ID NO: 98142 - protein, 10 aa, synthetic construct
AYVRGDRGQI

SEQ ID NO: 98143 - protein, 10 aa, synthetic construct
AYVRGDRQGI

SEQ ID NO: 98144 - protein, 10 aa, synthetic construct
AYVRGDRSVV

SEQ ID NO: 98145 - protein, 10 aa, synthetic construct
AYVRGDLTVT

SEQ ID NO: 98146 - protein, 10 aa, synthetic construct
AYVRGDLIGR

SEQ ID NO: 98147 - protein, 10 aa, synthetic construct
QKKRGDRQGI

SEQ ID NO: 98148 - protein, 10 aa, synthetic construct
AARRGDLLLS

SEQ ID NO: 98149 - protein, 10 aa, synthetic construct
AYVRGDRSQT

SEQ ID NO: 98150 - protein, 10 aa, synthetic construct
AYVRGDLLLS

SEQ ID NO: 98151 - protein, 10 aa, synthetic construct
AYPRGDHGVL

SEQ ID NO: 98152 - protein, 10 aa, synthetic construct
AYPRGDRGQI

SEQ ID NO: 98153 - protein, 10 aa, synthetic construct
AYPRGDRQGI

SEQ ID NO: 98154 - protein, 10 aa, synthetic construct
AYPRGDRSVV

SEQ ID NO: 98155 - protein, 10 aa, synthetic construct
AYPRGDLTVT

SEQ ID NO: 98156 - protein, 10 aa, synthetic construct
AYPRGDLIGR

SEQ ID NO: 98157 - protein, 10 aa, synthetic construct
AYPRGDRSQT

SEQ ID NO: 98158 - protein, 10 aa, synthetic construct
AYPRGDLLLS

SEQ ID NO: 98159 - protein, 10 aa, synthetic construct
AAHRGDRGVV

SEQ ID NO: 98160 - protein, 10 aa, synthetic construct
AYLRGDHGVL

SEQ ID NO: 98161 - protein, 10 aa, synthetic construct
AYLRGDRGQI

SEQ ID NO: 98162 - protein, 10 aa, synthetic construct
AYLRGDRQGI

SEQ ID NO: 98163 - protein, 10 aa, synthetic construct
AYLRGDRSVV

SEQ ID NO: 98164 - protein, 10 aa, synthetic construct
AYLRGDLTVT

SEQ ID NO: 98165 - protein, 10 aa, synthetic construct
AYLRGDLIGR

SEQ ID NO: 98166 - protein, 10 aa, synthetic construct
AYLRGDRSQT

SEQ ID NO: 98167 - protein, 10 aa, synthetic construct
AYLRGDLLLS

SEQ ID NO: 98168 - protein, 10 aa, synthetic construct
AYWRGDRGQI

SEQ ID NO: 98169 - protein, 10 aa, synthetic construct
AYWRGDRQGI

SEQ ID NO: 98170 - protein, 10 aa, synthetic construct
AASRGDHGVL

SEQ ID NO: 98171 - protein, 10 aa, synthetic construct
AYWRGDRSVV

SEQ ID NO: 98172 - protein, 10 aa, synthetic construct
AYWRGDRGVV

SEQ ID NO: 98173 - protein, 10 aa, synthetic construct
AYWRGDRSQT

SEQ ID NO: 98174 - protein, 10 aa, synthetic construct
AYRRGDHGVL

SEQ ID NO: 98175 - protein, 10 aa, synthetic construct
AYRRGDRGQI

SEQ ID NO: 98176 - protein, 10 aa, synthetic construct
AYRRGDRQGI

SEQ ID NO: 98177 - protein, 10 aa, synthetic construct
AYRRGDRSVV

SEQ ID NO: 98178 - protein, 10 aa, synthetic construct
AYRRGDLTVT

SEQ ID NO: 98179 - protein, 10 aa, synthetic construct
AYRRGDLIGR

SEQ ID NO: 98180 - protein, 10 aa, synthetic construct
AYRRGDRSQT

SEQ ID NO: 98181 - protein, 10 aa, synthetic construct
AASRGDRGQI

SEQ ID NO: 98182 - protein, 10 aa, synthetic construct
AYRRGDLLLS

SEQ ID NO: 98183 - protein, 10 aa, synthetic construct
AYHRGDRGVV

SEQ ID NO: 98184 - protein, 10 aa, synthetic construct
AYSRGDHGVL

SEQ ID NO: 98185 - protein, 10 aa, synthetic construct
AYSRGDRGQI

SEQ ID NO: 98186 - protein, 10 aa, synthetic construct
AYSRGDRQGI

SEQ ID NO: 98187 - protein, 10 aa, synthetic construct
AYSRGDRSVV

SEQ ID NO: 98188 - protein, 10 aa, synthetic construct
AYSRGDLTVT

SEQ ID NO: 98189 - protein, 10 aa, synthetic construct
AYSRGDLIGR

SEQ ID NO: 98190 - protein, 10 aa, synthetic construct
AYSRGDRSQT

SEQ ID NO: 98191 - protein, 10 aa, synthetic construct
AYSRGDLLLS

SEQ ID NO: 98192 - protein, 10 aa, synthetic construct
AASRGDRQGI

SEQ ID NO: 98193 - protein, 10 aa, synthetic construct
AYTRGDRGVV

SEQ ID NO: 98194 - protein, 10 aa, synthetic construct
AYQRGDRGVV

SEQ ID NO: 98195 - protein, 10 aa, synthetic construct
AYDRGDRGVV

SEQ ID NO: 98196 - protein, 10 aa, synthetic construct
AYERGDRGVV

SEQ ID NO: 98197 - protein, 10 aa, synthetic construct
ANGRGDHGVL

SEQ ID NO: 98198 - protein, 10 aa, synthetic construct
ANGRGDRGQI

SEQ ID NO: 98199 - protein, 10 aa, synthetic construct
ANGRGDRQGI

SEQ ID NO: 98200 - protein, 10 aa, synthetic construct
ANGRGDRSVV

SEQ ID NO: 98201 - protein, 10 aa, synthetic construct
ANGRGDLTVT

SEQ ID NO: 98202 - protein, 10 aa, synthetic construct
ANGRGDLIGR

SEQ ID NO: 98203 - protein, 10 aa, synthetic construct
AASRGDRSVV

SEQ ID NO: 98204 - protein, 10 aa, synthetic construct
ANGRGDRSQT

SEQ ID NO: 98205 - protein, 10 aa, synthetic construct
ANGRGDLLLS

SEQ ID NO: 98206 - protein, 10 aa, synthetic construct
ANARGDHGVL

SEQ ID NO: 98207 - protein, 10 aa, synthetic construct
ANARGDRGQI

SEQ ID NO: 98208 - protein, 10 aa, synthetic construct
ANARGDRQGI

SEQ ID NO: 98209 - protein, 10 aa, synthetic construct
ANARGDRSVV

SEQ ID NO: 98210 - protein, 10 aa, synthetic construct
ANARGDLTVT

SEQ ID NO: 98211 - protein, 10 aa, synthetic construct
ANARGDLIGR

SEQ ID NO: 98212 - protein, 10 aa, synthetic construct
ANARGDRSQT

SEQ ID NO: 98213 - protein, 10 aa, synthetic construct
ANARGDLLLS

SEQ ID NO: 98214 - protein, 10 aa, synthetic construct
AASRGDLTVT

SEQ ID NO: 98215 - protein, 10 aa, synthetic construct
ANVRGDHGVL

SEQ ID NO: 98216 - protein, 10 aa, synthetic construct
ANVRGDRGQI

SEQ ID NO: 98217 - protein, 10 aa, synthetic construct
ANVRGDRQGI

SEQ ID NO: 98218 - protein, 10 aa, synthetic construct
ANVRGDRSVV

SEQ ID NO: 98219 - protein, 10 aa, synthetic construct
ANVRGDLTVT

SEQ ID NO: 98220 - protein, 10 aa, synthetic construct
ANVRGDLIGR

SEQ ID NO: 98221 - protein, 10 aa, synthetic construct
ANVRGDRSQT

SEQ ID NO: 98222 - protein, 10 aa, synthetic construct
ANVRGDLLLS

SEQ ID NO: 98223 - protein, 10 aa, synthetic construct
ANPRGDHGVL

SEQ ID NO: 98224 - protein, 10 aa, synthetic construct
ANPRGDRGQI

SEQ ID NO: 98225 - protein, 10 aa, synthetic construct
AASRGDLIGR

SEQ ID NO: 98226 - protein, 10 aa, synthetic construct
ANPRGDRQGI

SEQ ID NO: 98227 - protein, 10 aa, synthetic construct
ANPRGDRSVV

SEQ ID NO: 98228 - protein, 10 aa, synthetic construct
ANPRGDLTVT

SEQ ID NO: 98229 - protein, 10 aa, synthetic construct
ANPRGDLIGR

SEQ ID NO: 98230 - protein, 10 aa, synthetic construct
ANPRGDRSQT

SEQ ID NO: 98231 - protein, 10 aa, synthetic construct
ANPRGDLLLS

SEQ ID NO: 98232 - protein, 10 aa, synthetic construct
ANLRGDHGVL

SEQ ID NO: 98233 - protein, 10 aa, synthetic construct
ANLRGDRGQI

SEQ ID NO: 98234 - protein, 10 aa, synthetic construct
ANLRGDRQGI

SEQ ID NO: 98235 - protein, 10 aa, synthetic construct
ANLRGDRSVV

SEQ ID NO: 98236 - protein, 10 aa, synthetic construct
AASRGDRSQT

SEQ ID NO: 98237 - protein, 10 aa, synthetic construct
ANLRGDLTVT

SEQ ID NO: 98238 - protein, 10 aa, synthetic construct
ANLRGDLIGR

SEQ ID NO: 98239 - protein, 10 aa, synthetic construct
ANLRGDRSQT

SEQ ID NO: 98240 - protein, 10 aa, synthetic construct
ANLRGDLLLS

SEQ ID NO: 98241 - protein, 10 aa, synthetic construct
ANWRGDRGQI

SEQ ID NO: 98242 - protein, 10 aa, synthetic construct
ANWRGDRQGI

SEQ ID NO: 98243 - protein, 10 aa, synthetic construct
ANWRGDRSVV

SEQ ID NO: 98244 - protein, 10 aa, synthetic construct
ANWRGDRGVV

SEQ ID NO: 98245 - protein, 10 aa, synthetic construct
ANWRGDRSQT

SEQ ID NO: 98246 - protein, 10 aa, synthetic construct
ANRRGDHGVL

SEQ ID NO: 98247 - protein, 10 aa, synthetic construct
AASRGDLLLS

SEQ ID NO: 98248 - protein, 10 aa, synthetic construct
ANRRGDRGQI

SEQ ID NO: 98249 - protein, 10 aa, synthetic construct
ANRRGDRQGI

SEQ ID NO: 98250 - protein, 10 aa, synthetic construct
ANRRGDRSVV

SEQ ID NO: 98251 - protein, 10 aa, synthetic construct
ANRRGDLTVT

SEQ ID NO: 98252 - protein, 10 aa, synthetic construct
ANRRGDLIGR

SEQ ID NO: 98253 - protein, 10 aa, synthetic construct
ANRRGDRSQT

SEQ ID NO: 98254 - protein, 10 aa, synthetic construct
ANRRGDLLLS

SEQ ID NO: 98255 - protein, 10 aa, synthetic construct
ANHRGDRGVV

SEQ ID NO: 98256 - protein, 10 aa, synthetic construct
ANSRGDHGVL

SEQ ID NO: 98257 - protein, 10 aa, synthetic construct
ANSRGDRGQI

SEQ ID NO: 98258 - protein, 10 aa, synthetic construct
QKKRGDRGVV

SEQ ID NO: 98259 - protein, 10 aa, synthetic construct
AATRGDRGVV

SEQ ID NO: 98260 - protein, 10 aa, synthetic construct
ANSRGDRQGI

SEQ ID NO: 98261 - protein, 10 aa, synthetic construct
ANSRGDRSVV

SEQ ID NO: 98262 - protein, 10 aa, synthetic construct
ANSRGDLTVT

SEQ ID NO: 98263 - protein, 10 aa, synthetic construct
ANSRGDLIGR

SEQ ID NO: 98264 - protein, 10 aa, synthetic construct
ANSRGDRSQT

SEQ ID NO: 98265 - protein, 10 aa, synthetic construct
ANSRGDLLLS

SEQ ID NO: 98266 - protein, 10 aa, synthetic construct
ANTRGDRGVV

SEQ ID NO: 98267 - protein, 10 aa, synthetic construct
ANQRGDRGVV

SEQ ID NO: 98268 - protein, 10 aa, synthetic construct
ANDRGDRGVV

SEQ ID NO: 98269 - protein, 10 aa, synthetic construct
ANERGDRGVV

SEQ ID NO: 98270 - protein, 10 aa, synthetic construct
AAQRGDRGVV

SEQ ID NO: 98271 - protein, 10 aa, synthetic construct
AQGRGDRDYL

SEQ ID NO: 98272 - protein, 10 aa, synthetic construct
AQGRGDYVGL

SEQ ID NO: 98273 - protein, 10 aa, synthetic construct
AQGRGDQSTL

SEQ ID NO: 98274 - protein, 10 aa, synthetic construct
AQARGDRDYL

SEQ ID NO: 98275 - protein, 10 aa, synthetic construct
AQARGDYVGL

SEQ ID NO: 98276 - protein, 10 aa, synthetic construct
AQARGDQSTL

SEQ ID NO: 98277 - protein, 10 aa, synthetic construct
AQVRGDRDYL

SEQ ID NO: 98278 - protein, 10 aa, synthetic construct
AQVRGDYVGL

SEQ ID NO: 98279 - protein, 10 aa, synthetic construct
AQVRGDQSTL

SEQ ID NO: 98280 - protein, 10 aa, synthetic construct
AQPRGDRDYL

SEQ ID NO: 98281 - protein, 10 aa, synthetic construct
AADRGDRGVV

SEQ ID NO: 98282 - protein, 10 aa, synthetic construct
AQPRGDYVGL

SEQ ID NO: 98283 - protein, 10 aa, synthetic construct
AQPRGDQSTL

SEQ ID NO: 98284 - protein, 10 aa, synthetic construct
AQLRGDRDYL

SEQ ID NO: 98285 - protein, 10 aa, synthetic construct
AQLRGDYVGL

SEQ ID NO: 98286 - protein, 10 aa, synthetic construct
AQLRGDQSTL

SEQ ID NO: 98287 - protein, 10 aa, synthetic construct
AQIRGDRGVV

SEQ ID NO: 98288 - protein, 10 aa, synthetic construct
AQMRGDRGQI

SEQ ID NO: 98289 - protein, 10 aa, synthetic construct
AQMRGDRQGI

SEQ ID NO: 98290 - protein, 10 aa, synthetic construct
AQMRGDRSVV

SEQ ID NO: 98291 - protein, 10 aa, synthetic construct
AQMRGDRGVV

SEQ ID NO: 98292 - protein, 10 aa, synthetic construct
AAERGDRGVV

SEQ ID NO: 98293 - protein, 10 aa, synthetic construct
AQMRGDRSQT

SEQ ID NO: 98294 - protein, 10 aa, synthetic construct
AQWRGDHGVL

SEQ ID NO: 98295 - protein, 10 aa, synthetic construct
AQWRGDYVGL

SEQ ID NO: 98296 - protein, 10 aa, synthetic construct
AQWRGDQSTL

SEQ ID NO: 98297 - protein, 10 aa, synthetic construct
AQWRGDLLLS

SEQ ID NO: 98298 - protein, 10 aa, synthetic construct
AQFRGDRGVV

SEQ ID NO: 98299 - protein, 10 aa, synthetic construct
AQKRGDRGVV

SEQ ID NO: 98300 - protein, 10 aa, synthetic construct
AQRRGDRDYL

SEQ ID NO: 98301 - protein, 10 aa, synthetic construct
AQRRGDYVGL

SEQ ID NO: 98302 - protein, 10 aa, synthetic construct
AQRRGDQSTL

SEQ ID NO: 98303 - protein, 10 aa, synthetic construct
AVGRGDRGVV

SEQ ID NO: 98304 - protein, 10 aa, synthetic construct
AQHRGDHGVL

SEQ ID NO: 98305 - protein, 10 aa, synthetic construct
AQHRGDRGQI

SEQ ID NO: 98306 - protein, 10 aa, synthetic construct
AQHRGDRQGI

SEQ ID NO: 98307 - protein, 10 aa, synthetic construct
AQHRGDRSVV

SEQ ID NO: 98308 - protein, 10 aa, synthetic construct
AQHRGDLTVT

SEQ ID NO: 98309 - protein, 10 aa, synthetic construct
AQHRGDLIGR

SEQ ID NO: 98310 - protein, 10 aa, synthetic construct
AQHRGDRSQT

SEQ ID NO: 98311 - protein, 10 aa, synthetic construct
AQHRGDLLLS

SEQ ID NO: 98312 - protein, 10 aa, synthetic construct
AQSRGDRDYL

SEQ ID NO: 98313 - protein, 10 aa, synthetic construct
AQSRGDYVGL

SEQ ID NO: 98314 - protein, 10 aa, synthetic construct
AVARGDRGVV

SEQ ID NO: 98315 - protein, 10 aa, synthetic construct
AQSRGDQSTL

SEQ ID NO: 98316 - protein, 10 aa, synthetic construct
AQTRGDHGVL

SEQ ID NO: 98317 - protein, 10 aa, synthetic construct
AQTRGDRGQI

SEQ ID NO: 98318 - protein, 10 aa, synthetic construct
AQTRGDRQGI

SEQ ID NO: 98319 - protein, 10 aa, synthetic construct
AQTRGDRSVV

SEQ ID NO: 98320 - protein, 10 aa, synthetic construct
AQTRGDLTVT

SEQ ID NO: 98321 - protein, 10 aa, synthetic construct
AQTRGDLIGR

SEQ ID NO: 98322 - protein, 10 aa, synthetic construct
AQTRGDRSQT

SEQ ID NO: 98323 - protein, 10 aa, synthetic construct
AQTRGDLLLS

SEQ ID NO: 98324 - protein, 10 aa, synthetic construct
AQYRGDRGVV

SEQ ID NO: 98325 - protein, 10 aa, synthetic construct
AVVRGDRGVV

SEQ ID NO: 98326 - protein, 10 aa, synthetic construct
AQNRGDRGVV

SEQ ID NO: 98327 - protein, 10 aa, synthetic construct
AQQRGDHGVL

SEQ ID NO: 98328 - protein, 10 aa, synthetic construct
AQQRGDRGQI

SEQ ID NO: 98329 - protein, 10 aa, synthetic construct
AQQRGDRQGI

SEQ ID NO: 98330 - protein, 10 aa, synthetic construct
AQQRGDRSVV

SEQ ID NO: 98331 - protein, 10 aa, synthetic construct
AQQRGDLTVT

SEQ ID NO: 98332 - protein, 10 aa, synthetic construct
AQQRGDLIGR

SEQ ID NO: 98333 - protein, 10 aa, synthetic construct
AQQRGDRSQT

SEQ ID NO: 98334 - protein, 10 aa, synthetic construct
AQQRGDLLLS

SEQ ID NO: 98335 - protein, 10 aa, synthetic construct
AQDRGDHGVL

SEQ ID NO: 98336 - protein, 10 aa, synthetic construct
AVPRGDRGVV

SEQ ID NO: 98337 - protein, 10 aa, synthetic construct
AQDRGDRGQI

SEQ ID NO: 98338 - protein, 10 aa, synthetic construct
AQDRGDRQGI

SEQ ID NO: 98339 - protein, 10 aa, synthetic construct
AQDRGDRSVV

SEQ ID NO: 98340 - protein, 10 aa, synthetic construct
AQDRGDLTVT

SEQ ID NO: 98341 - protein, 10 aa, synthetic construct
AQDRGDLIGR

SEQ ID NO: 98342 - protein, 10 aa, synthetic construct
AQDRGDRSQT

SEQ ID NO: 98343 - protein, 10 aa, synthetic construct
AQDRGDLLLS

SEQ ID NO: 98344 - protein, 10 aa, synthetic construct
AQERGDHGVL

SEQ ID NO: 98345 - protein, 10 aa, synthetic construct
AQERGDRGQI

SEQ ID NO: 98346 - protein, 10 aa, synthetic construct
AQERGDRQGI

SEQ ID NO: 98347 - protein, 10 aa, synthetic construct
AVLRGDRGVV

SEQ ID NO: 98348 - protein, 10 aa, synthetic construct
AQERGDRSVV

SEQ ID NO: 98349 - protein, 10 aa, synthetic construct
AQERGDLTVT

SEQ ID NO: 98350 - protein, 10 aa, synthetic construct
AQERGDLIGR

SEQ ID NO: 98351 - protein, 10 aa, synthetic construct
AQERGDRSQT

SEQ ID NO: 98352 - protein, 10 aa, synthetic construct
AQERGDLLLS

SEQ ID NO: 98353 - protein, 10 aa, synthetic construct
ADGRGDRDYL

SEQ ID NO: 98354 - protein, 10 aa, synthetic construct
ADGRGDYVGL

SEQ ID NO: 98355 - protein, 10 aa, synthetic construct
ADGRGDQSTL

SEQ ID NO: 98356 - protein, 10 aa, synthetic construct
ADARGDRDYL

SEQ ID NO: 98357 - protein, 10 aa, synthetic construct
ADARGDYVGL

SEQ ID NO: 98358 - protein, 10 aa, synthetic construct
AVRRGDRGVV

SEQ ID NO: 98359 - protein, 10 aa, synthetic construct
ADARGDQSTL

SEQ ID NO: 98360 - protein, 10 aa, synthetic construct
ADVRGDRDYL

SEQ ID NO: 98361 - protein, 10 aa, synthetic construct
ADVRGDYVGL

SEQ ID NO: 98362 - protein, 10 aa, synthetic construct
ADVRGDQSTL

SEQ ID NO: 98363 - protein, 10 aa, synthetic construct
ADPRGDRDYL

SEQ ID NO: 98364 - protein, 10 aa, synthetic construct
ADPRGDYVGL

SEQ ID NO: 98365 - protein, 10 aa, synthetic construct
ADPRGDQSTL

SEQ ID NO: 98366 - protein, 10 aa, synthetic construct
ADLRGDRDYL

SEQ ID NO: 98367 - protein, 10 aa, synthetic construct
ADLRGDYVGL

SEQ ID NO: 98368 - protein, 10 aa, synthetic construct
ADLRGDQSTL

SEQ ID NO: 98369 - protein, 10 aa, synthetic construct
QKKRGDYVGL

SEQ ID NO: 98370 - protein, 10 aa, synthetic construct
AVSRGDRGVV

SEQ ID NO: 98371 - protein, 10 aa, synthetic construct
ADIRGDRGVV

SEQ ID NO: 98372 - protein, 10 aa, synthetic construct
ADMRGDRGQI

SEQ ID NO: 98373 - protein, 10 aa, synthetic construct
ADMRGDRQGI

SEQ ID NO: 98374 - protein, 10 aa, synthetic construct
ADMRGDRSVV

SEQ ID NO: 98375 - protein, 10 aa, synthetic construct
ADMRGDRGVV

SEQ ID NO: 98376 - protein, 10 aa, synthetic construct
ADMRGDRSQT

SEQ ID NO: 98377 - protein, 10 aa, synthetic construct
ADWRGDHGVL

SEQ ID NO: 98378 - protein, 10 aa, synthetic construct
ADWRGDYVGL

SEQ ID NO: 98379 - protein, 10 aa, synthetic construct
ADWRGDQSTL

SEQ ID NO: 98380 - protein, 10 aa, synthetic construct
ADWRGDLLLS

SEQ ID NO: 98381 - protein, 10 aa, synthetic construct
APGRGDHGVL

SEQ ID NO: 98382 - protein, 10 aa, synthetic construct
ADFRGDRGVV

SEQ ID NO: 98383 - protein, 10 aa, synthetic construct
ADKRGDRGVV

SEQ ID NO: 98384 - protein, 10 aa, synthetic construct
ADRRGDRDYL

SEQ ID NO: 98385 - protein, 10 aa, synthetic construct
ADRRGDYVGL

SEQ ID NO: 98386 - protein, 10 aa, synthetic construct
ADRRGDQSTL

SEQ ID NO: 98387 - protein, 10 aa, synthetic construct
ADHRGDHGVL

SEQ ID NO: 98388 - protein, 10 aa, synthetic construct
ADHRGDRGQI

SEQ ID NO: 98389 - protein, 10 aa, synthetic construct
ADHRGDRQGI

SEQ ID NO: 98390 - protein, 10 aa, synthetic construct
ADHRGDRSVV

SEQ ID NO: 98391 - protein, 10 aa, synthetic construct
ADHRGDLTVT

SEQ ID NO: 98392 - protein, 10 aa, synthetic construct
APGRGDRGQI

SEQ ID NO: 98393 - protein, 10 aa, synthetic construct
ADHRGDLIGR

SEQ ID NO: 98394 - protein, 10 aa, synthetic construct
ADHRGDRSQT

SEQ ID NO: 98395 - protein, 10 aa, synthetic construct
ADHRGDLLLS

SEQ ID NO: 98396 - protein, 10 aa, synthetic construct
ADSRGDRDYL

SEQ ID NO: 98397 - protein, 10 aa, synthetic construct
ADSRGDYVGL

SEQ ID NO: 98398 - protein, 10 aa, synthetic construct
ADSRGDQSTL

SEQ ID NO: 98399 - protein, 10 aa, synthetic construct
ADTRGDHGVL

SEQ ID NO: 98400 - protein, 10 aa, synthetic construct
ADTRGDRGQI

SEQ ID NO: 98401 - protein, 10 aa, synthetic construct
ADTRGDRQGI

SEQ ID NO: 98402 - protein, 10 aa, synthetic construct
ADTRGDRSVV

SEQ ID NO: 98403 - protein, 10 aa, synthetic construct
APGRGDRQGI

SEQ ID NO: 98404 - protein, 10 aa, synthetic construct
ADTRGDLTVT

SEQ ID NO: 98405 - protein, 10 aa, synthetic construct
ADTRGDLIGR

SEQ ID NO: 98406 - protein, 10 aa, synthetic construct
ADTRGDRSQT

SEQ ID NO: 98407 - protein, 10 aa, synthetic construct
ADTRGDLLLS

SEQ ID NO: 98408 - protein, 10 aa, synthetic construct
ADYRGDRGVV

SEQ ID NO: 98409 - protein, 10 aa, synthetic construct
ADNRGDRGVV

SEQ ID NO: 98410 - protein, 10 aa, synthetic construct
ADQRGDHGVL

SEQ ID NO: 98411 - protein, 10 aa, synthetic construct
ADQRGDRGQI

SEQ ID NO: 98412 - protein, 10 aa, synthetic construct
ADQRGDRQGI

SEQ ID NO: 98413 - protein, 10 aa, synthetic construct
ADQRGDRSVV

SEQ ID NO: 98414 - protein, 10 aa, synthetic construct
APGRGDRSVV

SEQ ID NO: 98415 - protein, 10 aa, synthetic construct
ADQRGDLTVT

SEQ ID NO: 98416 - protein, 10 aa, synthetic construct
ADQRGDLIGR

SEQ ID NO: 98417 - protein, 10 aa, synthetic construct
ADQRGDRSQT

SEQ ID NO: 98418 - protein, 10 aa, synthetic construct
ADQRGDLLLS

SEQ ID NO: 98419 - protein, 10 aa, synthetic construct
ADDRGDHGVL

SEQ ID NO: 98420 - protein, 10 aa, synthetic construct
ADDRGDRGQI

SEQ ID NO: 98421 - protein, 10 aa, synthetic construct
ADDRGDRQGI

SEQ ID NO: 98422 - protein, 10 aa, synthetic construct
ADDRGDRSVV

SEQ ID NO: 98423 - protein, 10 aa, synthetic construct
ADDRGDLTVT

SEQ ID NO: 98424 - protein, 10 aa, synthetic construct
ADDRGDLIGR

SEQ ID NO: 98425 - protein, 10 aa, synthetic construct
APGRGDLTVT

SEQ ID NO: 98426 - protein, 10 aa, synthetic construct
ADDRGDRSQT

SEQ ID NO: 98427 - protein, 10 aa, synthetic construct
ADDRGDLLLS

SEQ ID NO: 98428 - protein, 10 aa, synthetic construct
ADERGDHGVL

SEQ ID NO: 98429 - protein, 10 aa, synthetic construct
ADERGDRGQI

SEQ ID NO: 98430 - protein, 10 aa, synthetic construct
ADERGDRQGI

SEQ ID NO: 98431 - protein, 10 aa, synthetic construct
ADERGDRSVV

SEQ ID NO: 98432 - protein, 10 aa, synthetic construct
ADERGDLTVT

SEQ ID NO: 98433 - protein, 10 aa, synthetic construct
ADERGDLIGR

SEQ ID NO: 98434 - protein, 10 aa, synthetic construct
ADERGDRSQT

SEQ ID NO: 98435 - protein, 10 aa, synthetic construct
ADERGDLLLS

SEQ ID NO: 98436 - protein, 10 aa, synthetic construct
APGRGDLIGR

SEQ ID NO: 98437 - protein, 10 aa, synthetic construct
AEGRGDRDYL

SEQ ID NO: 98438 - protein, 10 aa, synthetic construct
AEGRGDYVGL

SEQ ID NO: 98439 - protein, 10 aa, synthetic construct
AEGRGDQSTL

SEQ ID NO: 98440 - protein, 10 aa, synthetic construct
AEARGDRDYL

SEQ ID NO: 98441 - protein, 10 aa, synthetic construct
AEARGDYVGL

SEQ ID NO: 98442 - protein, 10 aa, synthetic construct
AEARGDQSTL

SEQ ID NO: 98443 - protein, 10 aa, synthetic construct
AEVRGDRDYL

SEQ ID NO: 98444 - protein, 10 aa, synthetic construct
AEVRGDYVGL

SEQ ID NO: 98445 - protein, 10 aa, synthetic construct
AEVRGDQSTL

SEQ ID NO: 98446 - protein, 10 aa, synthetic construct
AEPRGDRDYL

SEQ ID NO: 98447 - protein, 10 aa, synthetic construct
APGRGDRSQT

SEQ ID NO: 98448 - protein, 10 aa, synthetic construct
AEPRGDYVGL

SEQ ID NO: 98449 - protein, 10 aa, synthetic construct
AEPRGDQSTL

SEQ ID NO: 98450 - protein, 10 aa, synthetic construct
AELRGDRDYL

SEQ ID NO: 98451 - protein, 10 aa, synthetic construct
AELRGDYVGL

SEQ ID NO: 98452 - protein, 10 aa, synthetic construct
AELRGDQSTL

SEQ ID NO: 98453 - protein, 10 aa, synthetic construct
AEIRGDRGVV

SEQ ID NO: 98454 - protein, 10 aa, synthetic construct
AEMRGDRGQI

SEQ ID NO: 98455 - protein, 10 aa, synthetic construct
AEMRGDRQGI

SEQ ID NO: 98456 - protein, 10 aa, synthetic construct
AEMRGDRSVV

SEQ ID NO: 98457 - protein, 10 aa, synthetic construct
AEMRGDRGVV

SEQ ID NO: 98458 - protein, 10 aa, synthetic construct
APGRGDLLLS

SEQ ID NO: 98459 - protein, 10 aa, synthetic construct
AEMRGDRSQT

SEQ ID NO: 98460 - protein, 10 aa, synthetic construct
AEWRGDHGVL

SEQ ID NO: 98461 - protein, 10 aa, synthetic construct
AEWRGDYVGL

SEQ ID NO: 98462 - protein, 10 aa, synthetic construct
AEWRGDQSTL

SEQ ID NO: 98463 - protein, 10 aa, synthetic construct
AEWRGDLLLS

SEQ ID NO: 98464 - protein, 10 aa, synthetic construct
AEFRGDRGVV

SEQ ID NO: 98465 - protein, 10 aa, synthetic construct
AEKRGDRGVV

SEQ ID NO: 98466 - protein, 10 aa, synthetic construct
AERRGDRDYL

SEQ ID NO: 98467 - protein, 10 aa, synthetic construct
AERRGDYVGL

SEQ ID NO: 98468 - protein, 10 aa, synthetic construct
AERRGDQSTL

SEQ ID NO: 98469 - protein, 10 aa, synthetic construct
APARGDHGVL

SEQ ID NO: 98470 - protein, 10 aa, synthetic construct
AEHRGDHGVL

SEQ ID NO: 98471 - protein, 10 aa, synthetic construct
AEHRGDRGQI

SEQ ID NO: 98472 - protein, 10 aa, synthetic construct
AEHRGDRQGI

SEQ ID NO: 98473 - protein, 10 aa, synthetic construct
AEHRGDRSVV

SEQ ID NO: 98474 - protein, 10 aa, synthetic construct
AEHRGDLTVT

SEQ ID NO: 98475 - protein, 10 aa, synthetic construct
AEHRGDLIGR

SEQ ID NO: 98476 - protein, 10 aa, synthetic construct
AEHRGDRSQT

SEQ ID NO: 98477 - protein, 10 aa, synthetic construct
AEHRGDLLLS

SEQ ID NO: 98478 - protein, 10 aa, synthetic construct
AESRGDRDYL

SEQ ID NO: 98479 - protein, 10 aa, synthetic construct
AESRGDYVGL

SEQ ID NO: 98480 - protein, 10 aa, synthetic construct
QKKRGDLIGR

SEQ ID NO: 98481 - protein, 10 aa, synthetic construct
APARGDRGQI

SEQ ID NO: 98482 - protein, 10 aa, synthetic construct
AESRGDQSTL

SEQ ID NO: 98483 - protein, 10 aa, synthetic construct
AETRGDHGVL

SEQ ID NO: 98484 - protein, 10 aa, synthetic construct
AETRGDRGQI

SEQ ID NO: 98485 - protein, 10 aa, synthetic construct
AETRGDRQGI

SEQ ID NO: 98486 - protein, 10 aa, synthetic construct
AETRGDRSVV

SEQ ID NO: 98487 - protein, 10 aa, synthetic construct
AETRGDLTVT

SEQ ID NO: 98488 - protein, 10 aa, synthetic construct
AETRGDLIGR

SEQ ID NO: 98489 - protein, 10 aa, synthetic construct
AETRGDRSQT

SEQ ID NO: 98490 - protein, 10 aa, synthetic construct
AETRGDLLLS

SEQ ID NO: 98491 - protein, 10 aa, synthetic construct
AEYRGDRGVV

SEQ ID NO: 98492 - protein, 10 aa, synthetic construct
APARGDRQGI

SEQ ID NO: 98493 - protein, 10 aa, synthetic construct
AENRGDRGVV

SEQ ID NO: 98494 - protein, 10 aa, synthetic construct
AEQRGDHGVL

SEQ ID NO: 98495 - protein, 10 aa, synthetic construct
AEQRGDRGQI

SEQ ID NO: 98496 - protein, 10 aa, synthetic construct
AEQRGDRQGI

SEQ ID NO: 98497 - protein, 10 aa, synthetic construct
AEQRGDRSVV

SEQ ID NO: 98498 - protein, 10 aa, synthetic construct
AEQRGDLTVT

SEQ ID NO: 98499 - protein, 10 aa, synthetic construct
AEQRGDLIGR

SEQ ID NO: 98500 - protein, 10 aa, synthetic construct
AEQRGDRSQT

SEQ ID NO: 98501 - protein, 10 aa, synthetic construct
AEQRGDLLLS

SEQ ID NO: 98502 - protein, 10 aa, synthetic construct
AEDRGDHGVL

SEQ ID NO: 98503 - protein, 10 aa, synthetic construct
APARGDRSVV

SEQ ID NO: 98504 - protein, 10 aa, synthetic construct
AEDRGDRGQI

SEQ ID NO: 98505 - protein, 10 aa, synthetic construct
AEDRGDRQGI

SEQ ID NO: 98506 - protein, 10 aa, synthetic construct
AEDRGDRSVV

SEQ ID NO: 98507 - protein, 10 aa, synthetic construct
AEDRGDLTVT

SEQ ID NO: 98508 - protein, 10 aa, synthetic construct
AEDRGDLIGR

SEQ ID NO: 98509 - protein, 10 aa, synthetic construct
AEDRGDRSQT

SEQ ID NO: 98510 - protein, 10 aa, synthetic construct
AEDRGDLLLS

SEQ ID NO: 98511 - protein, 10 aa, synthetic construct
AEERGDHGVL

SEQ ID NO: 98512 - protein, 10 aa, synthetic construct
AEERGDRGQI

SEQ ID NO: 98513 - protein, 10 aa, synthetic construct
AEERGDRQGI

SEQ ID NO: 98514 - protein, 10 aa, synthetic construct
APARGDLTVT

SEQ ID NO: 98515 - protein, 10 aa, synthetic construct
AEERGDRSVV

SEQ ID NO: 98516 - protein, 10 aa, synthetic construct
AEERGDLTVT

SEQ ID NO: 98517 - protein, 10 aa, synthetic construct
AEERGDLIGR

SEQ ID NO: 98518 - protein, 10 aa, synthetic construct
AEERGDRSQT

SEQ ID NO: 98519 - protein, 10 aa, synthetic construct
AEERGDLLLS

SEQ ID NO: 98520 - protein, 10 aa, synthetic construct
EGGRGDHVNL

SEQ ID NO: 98521 - protein, 10 aa, synthetic construct
EGGRGDRDYL

SEQ ID NO: 98522 - protein, 10 aa, synthetic construct
EGGRGDYSSV

SEQ ID NO: 98523 - protein, 10 aa, synthetic construct
EGGRGDLTVT

SEQ ID NO: 98524 - protein, 10 aa, synthetic construct
EGGRGDLIGR

SEQ ID NO: 98525 - protein, 10 aa, synthetic construct
APARGDLIGR

SEQ ID NO: 98526 - protein, 10 aa, synthetic construct
EGARGDHVNL

SEQ ID NO: 98527 - protein, 10 aa, synthetic construct
EGARGDRDYL

SEQ ID NO: 98528 - protein, 10 aa, synthetic construct
EGARGDYSSV

SEQ ID NO: 98529 - protein, 10 aa, synthetic construct
EGARGDLTVT

SEQ ID NO: 98530 - protein, 10 aa, synthetic construct
EGARGDLIGR

SEQ ID NO: 98531 - protein, 10 aa, synthetic construct
EGVRGDHGVL

SEQ ID NO: 98532 - protein, 10 aa, synthetic construct
EGVRGDYVGL

SEQ ID NO: 98533 - protein, 10 aa, synthetic construct
EGVRGDQSTL

SEQ ID NO: 98534 - protein, 10 aa, synthetic construct
EGVRGDLLLS

SEQ ID NO: 98535 - protein, 10 aa, synthetic construct
EGPRGDHVNL

SEQ ID NO: 98536 - protein, 10 aa, synthetic construct
APARGDRSQT

SEQ ID NO: 98537 - protein, 10 aa, synthetic construct
EGPRGDRDYL

SEQ ID NO: 98538 - protein, 10 aa, synthetic construct
EGPRGDYSSV

SEQ ID NO: 98539 - protein, 10 aa, synthetic construct
EGPRGDLTVT

SEQ ID NO: 98540 - protein, 10 aa, synthetic construct
EGPRGDLIGR

SEQ ID NO: 98541 - protein, 10 aa, synthetic construct
EGLRGDHGVL

SEQ ID NO: 98542 - protein, 10 aa, synthetic construct
EGLRGDYVGL

SEQ ID NO: 98543 - protein, 10 aa, synthetic construct
EGLRGDQSTL

SEQ ID NO: 98544 - protein, 10 aa, synthetic construct
EGLRGDLLLS

SEQ ID NO: 98545 - protein, 10 aa, synthetic construct
EGIRGDRGQI

SEQ ID NO: 98546 - protein, 10 aa, synthetic construct
EGIRGDRQGI

SEQ ID NO: 98547 - protein, 10 aa, synthetic construct
APARGDLLLS

SEQ ID NO: 98548 - protein, 10 aa, synthetic construct
EGIRGDRSVV

SEQ ID NO: 98549 - protein, 10 aa, synthetic construct
EGIRGDRGVV

SEQ ID NO: 98550 - protein, 10 aa, synthetic construct
EGIRGDRSQT

SEQ ID NO: 98551 - protein, 10 aa, synthetic construct
EGMRGDRGQI

SEQ ID NO: 98552 - protein, 10 aa, synthetic construct
EGMRGDRQGI

SEQ ID NO: 98553 - protein, 10 aa, synthetic construct
EGMRGDRSVV

SEQ ID NO: 98554 - protein, 10 aa, synthetic construct
EGMRGDRGVV

SEQ ID NO: 98555 - protein, 10 aa, synthetic construct
EGMRGDRSQT

SEQ ID NO: 98556 - protein, 10 aa, synthetic construct
EGWRGDHGVL

SEQ ID NO: 98557 - protein, 10 aa, synthetic construct
EGWRGDYVGL

SEQ ID NO: 98558 - protein, 10 aa, synthetic construct
APVRGDHGVL

SEQ ID NO: 98559 - protein, 10 aa, synthetic construct
EGWRGDQSTL

SEQ ID NO: 98560 - protein, 10 aa, synthetic construct
EGWRGDLLLS

SEQ ID NO: 98561 - protein, 10 aa, synthetic construct
EGFRGDRGQI

SEQ ID NO: 98562 - protein, 10 aa, synthetic construct
EGFRGDRQGI

SEQ ID NO: 98563 - protein, 10 aa, synthetic construct
EGFRGDRSVV

SEQ ID NO: 98564 - protein, 10 aa, synthetic construct
EGFRGDRGVV

SEQ ID NO: 98565 - protein, 10 aa, synthetic construct
EGFRGDRSQT

SEQ ID NO: 98566 - protein, 10 aa, synthetic construct
EGKRGDRGQI

SEQ ID NO: 98567 - protein, 10 aa, synthetic construct
EGKRGDRQGI

SEQ ID NO: 98568 - protein, 10 aa, synthetic construct
EGKRGDRSVV

SEQ ID NO: 98569 - protein, 10 aa, synthetic construct
APVRGDRGQI

SEQ ID NO: 98570 - protein, 10 aa, synthetic construct
EGKRGDRGVV

SEQ ID NO: 98571 - protein, 10 aa, synthetic construct
EGKRGDRSQT

SEQ ID NO: 98572 - protein, 10 aa, synthetic construct
EGRRGDHVNL

SEQ ID NO: 98573 - protein, 10 aa, synthetic construct
EGRRGDRDYL

SEQ ID NO: 98574 - protein, 10 aa, synthetic construct
EGRRGDYSSV

SEQ ID NO: 98575 - protein, 10 aa, synthetic construct
EGRRGDLTVT

SEQ ID NO: 98576 - protein, 10 aa, synthetic construct
EGRRGDLIGR

SEQ ID NO: 98577 - protein, 10 aa, synthetic construct
EGHRGDHGVL

SEQ ID NO: 98578 - protein, 10 aa, synthetic construct
EGHRGDYVGL

SEQ ID NO: 98579 - protein, 10 aa, synthetic construct
EGHRGDQSTL

SEQ ID NO: 98580 - protein, 10 aa, synthetic construct
APVRGDRQGI

SEQ ID NO: 98581 - protein, 10 aa, synthetic construct
EGHRGDLLLS

SEQ ID NO: 98582 - protein, 10 aa, synthetic construct
EGSRGDHGVL

SEQ ID NO: 98583 - protein, 10 aa, synthetic construct
EGSRGDYVGL

SEQ ID NO: 98584 - protein, 10 aa, synthetic construct
EGSRGDQSTL

SEQ ID NO: 98585 - protein, 10 aa, synthetic construct
EGSRGDLLLS

SEQ ID NO: 98586 - protein, 10 aa, synthetic construct
EGTRGDHGVL

SEQ ID NO: 98587 - protein, 10 aa, synthetic construct
EGTRGDYVGL

SEQ ID NO: 98588 - protein, 10 aa, synthetic construct
EGTRGDQSTL

SEQ ID NO: 98589 - protein, 10 aa, synthetic construct
EGTRGDLLLS

SEQ ID NO: 98590 - protein, 10 aa, synthetic construct
EGYRGDRGQI

SEQ ID NO: 98591 - protein, 10 aa, synthetic construct
QKKRGDQSTL

SEQ ID NO: 98592 - protein, 10 aa, synthetic construct
APVRGDRSVV

SEQ ID NO: 98593 - protein, 10 aa, synthetic construct
EGYRGDRQGI

SEQ ID NO: 98594 - protein, 10 aa, synthetic construct
EGYRGDRSVV

SEQ ID NO: 98595 - protein, 10 aa, synthetic construct
EGYRGDRGVV

SEQ ID NO: 98596 - protein, 10 aa, synthetic construct
EGYRGDRSQT

SEQ ID NO: 98597 - protein, 10 aa, synthetic construct
EGNRGDRGQI

SEQ ID NO: 98598 - protein, 10 aa, synthetic construct
EGNRGDRQGI

SEQ ID NO: 98599 - protein, 10 aa, synthetic construct
EGNRGDRSVV

SEQ ID NO: 98600 - protein, 10 aa, synthetic construct
EGNRGDRGVV

SEQ ID NO: 98601 - protein, 10 aa, synthetic construct
EGNRGDRSQT

SEQ ID NO: 98602 - protein, 10 aa, synthetic construct
EGQRGDHGVL

SEQ ID NO: 98603 - protein, 10 aa, synthetic construct
APVRGDLTVT

SEQ ID NO: 98604 - protein, 10 aa, synthetic construct
EGQRGDYVGL

SEQ ID NO: 98605 - protein, 10 aa, synthetic construct
EGQRGDQSTL

SEQ ID NO: 98606 - protein, 10 aa, synthetic construct
EGQRGDLLLS

SEQ ID NO: 98607 - protein, 10 aa, synthetic construct
EGDRGDHGVL

SEQ ID NO: 98608 - protein, 10 aa, synthetic construct
EGDRGDYVGL

SEQ ID NO: 98609 - protein, 10 aa, synthetic construct
EGDRGDQSTL

SEQ ID NO: 98610 - protein, 10 aa, synthetic construct
EGDRGDLLLS

SEQ ID NO: 98611 - protein, 10 aa, synthetic construct
EGERGDHGVL

SEQ ID NO: 98612 - protein, 10 aa, synthetic construct
EGERGDYVGL

SEQ ID NO: 98613 - protein, 10 aa, synthetic construct
EGERGDQSTL

SEQ ID NO: 98614 - protein, 10 aa, synthetic construct
APVRGDLIGR

SEQ ID NO: 98615 - protein, 10 aa, synthetic construct
EGERGDLLLS

SEQ ID NO: 98616 - protein, 10 aa, synthetic construct
EAGRGDHVNL

SEQ ID NO: 98617 - protein, 10 aa, synthetic construct
EAGRGDRDYL

SEQ ID NO: 98618 - protein, 10 aa, synthetic construct
EAGRGDYSSV

SEQ ID NO: 98619 - protein, 10 aa, synthetic construct
EAGRGDLTVT

SEQ ID NO: 98620 - protein, 10 aa, synthetic construct
EAGRGDLIGR

SEQ ID NO: 98621 - protein, 10 aa, synthetic construct
EAARGDHVNL

SEQ ID NO: 98622 - protein, 10 aa, synthetic construct
EAARGDRDYL

SEQ ID NO: 98623 - protein, 10 aa, synthetic construct
EAARGDYSSV

SEQ ID NO: 98624 - protein, 10 aa, synthetic construct
EAARGDLTVT

SEQ ID NO: 98625 - protein, 10 aa, synthetic construct
APVRGDRSQT

SEQ ID NO: 98626 - protein, 10 aa, synthetic construct
EAARGDLIGR

SEQ ID NO: 98627 - protein, 10 aa, synthetic construct
EAVRGDHGVL

SEQ ID NO: 98628 - protein, 10 aa, synthetic construct
EAVRGDYVGL

SEQ ID NO: 98629 - protein, 10 aa, synthetic construct
EAVRGDQSTL

SEQ ID NO: 98630 - protein, 10 aa, synthetic construct
EAVRGDLLLS

SEQ ID NO: 98631 - protein, 10 aa, synthetic construct
EAPRGDHVNL

SEQ ID NO: 98632 - protein, 10 aa, synthetic construct
EAPRGDRDYL

SEQ ID NO: 98633 - protein, 10 aa, synthetic construct
EAPRGDYSSV

SEQ ID NO: 98634 - protein, 10 aa, synthetic construct
EAPRGDLTVT

SEQ ID NO: 98635 - protein, 10 aa, synthetic construct
EAPRGDLIGR

SEQ ID NO: 98636 - protein, 10 aa, synthetic construct
APVRGDLLLS

SEQ ID NO: 98637 - protein, 10 aa, synthetic construct
EALRGDHGVL

SEQ ID NO: 98638 - protein, 10 aa, synthetic construct
EALRGDYVGL

SEQ ID NO: 98639 - protein, 10 aa, synthetic construct
EALRGDQSTL

SEQ ID NO: 98640 - protein, 10 aa, synthetic construct
EALRGDLLLS

SEQ ID NO: 98641 - protein, 10 aa, synthetic construct
EAIRGDRGQI

SEQ ID NO: 98642 - protein, 10 aa, synthetic construct
EAIRGDRQGI

SEQ ID NO: 98643 - protein, 10 aa, synthetic construct
EAIRGDRSVV

SEQ ID NO: 98644 - protein, 10 aa, synthetic construct
EAIRGDRGVV

SEQ ID NO: 98645 - protein, 10 aa, synthetic construct
EAIRGDRSQT

SEQ ID NO: 98646 - protein, 10 aa, synthetic construct
EAMRGDRGQI

SEQ ID NO: 98647 - protein, 10 aa, synthetic construct
APLRGDHGVL

SEQ ID NO: 98648 - protein, 10 aa, synthetic construct
EAMRGDRQGI

SEQ ID NO: 98649 - protein, 10 aa, synthetic construct
EAMRGDRSVV

SEQ ID NO: 98650 - protein, 10 aa, synthetic construct
EAMRGDRGVV

SEQ ID NO: 98651 - protein, 10 aa, synthetic construct
EAMRGDRSQT

SEQ ID NO: 98652 - protein, 10 aa, synthetic construct
EAWRGDHGVL

SEQ ID NO: 98653 - protein, 10 aa, synthetic construct
EAWRGDYVGL

SEQ ID NO: 98654 - protein, 10 aa, synthetic construct
EAWRGDQSTL

SEQ ID NO: 98655 - protein, 10 aa, synthetic construct
EAWRGDLLLS

SEQ ID NO: 98656 - protein, 10 aa, synthetic construct
EAFRGDRGQI

SEQ ID NO: 98657 - protein, 10 aa, synthetic construct
EAFRGDRQGI

SEQ ID NO: 98658 - protein, 10 aa, synthetic construct
APLRGDRGQI

SEQ ID NO: 98659 - protein, 10 aa, synthetic construct
EAFRGDRSVV

SEQ ID NO: 98660 - protein, 10 aa, synthetic construct
EAFRGDRGVV

SEQ ID NO: 98661 - protein, 10 aa, synthetic construct
EAFRGDRSQT

SEQ ID NO: 98662 - protein, 10 aa, synthetic construct
EAKRGDRGQI

SEQ ID NO: 98663 - protein, 10 aa, synthetic construct
EAKRGDRQGI

SEQ ID NO: 98664 - protein, 10 aa, synthetic construct
EAKRGDRSVV

SEQ ID NO: 98665 - protein, 10 aa, synthetic construct
EAKRGDRGVV

SEQ ID NO: 98666 - protein, 10 aa, synthetic construct
EAKRGDRSQT

SEQ ID NO: 98667 - protein, 10 aa, synthetic construct
EARRGDHVNL

SEQ ID NO: 98668 - protein, 10 aa, synthetic construct
EARRGDRDYL

SEQ ID NO: 98669 - protein, 10 aa, synthetic construct
APLRGDRQGI

SEQ ID NO: 98670 - protein, 10 aa, synthetic construct
EARRGDYSSV

SEQ ID NO: 98671 - protein, 10 aa, synthetic construct
EARRGDLTVT

SEQ ID NO: 98672 - protein, 10 aa, synthetic construct
EARRGDLIGR

SEQ ID NO: 98673 - protein, 10 aa, synthetic construct
EAHRGDHGVL

SEQ ID NO: 98674 - protein, 10 aa, synthetic construct
EAHRGDYVGL

SEQ ID NO: 98675 - protein, 10 aa, synthetic construct
EAHRGDQSTL

SEQ ID NO: 98676 - protein, 10 aa, synthetic construct
EAHRGDLLLS

SEQ ID NO: 98677 - protein, 10 aa, synthetic construct
EASRGDHGVL

SEQ ID NO: 98678 - protein, 10 aa, synthetic construct
EASRGDYVGL

SEQ ID NO: 98679 - protein, 10 aa, synthetic construct
EASRGDQSTL

SEQ ID NO: 98680 - protein, 10 aa, synthetic construct
APLRGDRSVV

SEQ ID NO: 98681 - protein, 10 aa, synthetic construct
EASRGDLLLS

SEQ ID NO: 98682 - protein, 10 aa, synthetic construct
EATRGDHGVL

SEQ ID NO: 98683 - protein, 10 aa, synthetic construct
EATRGDYVGL

SEQ ID NO: 98684 - protein, 10 aa, synthetic construct
EATRGDQSTL

SEQ ID NO: 98685 - protein, 10 aa, synthetic construct
EATRGDLLLS

SEQ ID NO: 98686 - protein, 10 aa, synthetic construct
EAYRGDRGQI

SEQ ID NO: 98687 - protein, 10 aa, synthetic construct
EAYRGDRQGI

SEQ ID NO: 98688 - protein, 10 aa, synthetic construct
EAYRGDRSVV

SEQ ID NO: 98689 - protein, 10 aa, synthetic construct
EAYRGDRGVV

SEQ ID NO: 98690 - protein, 10 aa, synthetic construct
EAYRGDRSQT

SEQ ID NO: 98691 - protein, 10 aa, synthetic construct
APLRGDLTVT

SEQ ID NO: 98692 - protein, 10 aa, synthetic construct
EANRGDRGQI

SEQ ID NO: 98693 - protein, 10 aa, synthetic construct
EANRGDRQGI

SEQ ID NO: 98694 - protein, 10 aa, synthetic construct
EANRGDRSVV

SEQ ID NO: 98695 - protein, 10 aa, synthetic construct
EANRGDRGVV

SEQ ID NO: 98696 - protein, 10 aa, synthetic construct
EANRGDRSQT

SEQ ID NO: 98697 - protein, 10 aa, synthetic construct
EAQRGDHGVL

SEQ ID NO: 98698 - protein, 10 aa, synthetic construct
EAQRGDYVGL

SEQ ID NO: 98699 - protein, 10 aa, synthetic construct
EAQRGDQSTL

SEQ ID NO: 98700 - protein, 10 aa, synthetic construct
EAQRGDLLLS

SEQ ID NO: 98701 - protein, 10 aa, synthetic construct
EADRGDHGVL

SEQ ID NO: 98702 - protein, 10 aa, synthetic construct
QKKRGDLLLS

SEQ ID NO: 98703 - protein, 10 aa, synthetic construct
APLRGDLIGR

SEQ ID NO: 98704 - protein, 10 aa, synthetic construct
EADRGDYVGL

SEQ ID NO: 98705 - protein, 10 aa, synthetic construct
EADRGDQSTL

SEQ ID NO: 98706 - protein, 10 aa, synthetic construct
EADRGDLLLS

SEQ ID NO: 98707 - protein, 10 aa, synthetic construct
EAERGDHGVL

SEQ ID NO: 98708 - protein, 10 aa, synthetic construct
EAERGDYVGL

SEQ ID NO: 98709 - protein, 10 aa, synthetic construct
EAERGDQSTL

SEQ ID NO: 98710 - protein, 10 aa, synthetic construct
EAERGDLLLS

SEQ ID NO: 98711 - protein, 10 aa, synthetic construct
EVGRGDHVNL

SEQ ID NO: 98712 - protein, 10 aa, synthetic construct
EVGRGDRDYL

SEQ ID NO: 98713 - protein, 10 aa, synthetic construct
EVGRGDYSSV

SEQ ID NO: 98714 - protein, 10 aa, synthetic construct
APLRGDRSQT

SEQ ID NO: 98715 - protein, 10 aa, synthetic construct
EVGRGDLTVT

SEQ ID NO: 98716 - protein, 10 aa, synthetic construct
EVGRGDLIGR

SEQ ID NO: 98717 - protein, 10 aa, synthetic construct
EVARGDHVNL

SEQ ID NO: 98718 - protein, 10 aa, synthetic construct
EVARGDRDYL

SEQ ID NO: 98719 - protein, 10 aa, synthetic construct
EVARGDYSSV

SEQ ID NO: 98720 - protein, 10 aa, synthetic construct
EVARGDLTVT

SEQ ID NO: 98721 - protein, 10 aa, synthetic construct
EVARGDLIGR

SEQ ID NO: 98722 - protein, 10 aa, synthetic construct
EVVRGDHGVL

SEQ ID NO: 98723 - protein, 10 aa, synthetic construct
EVVRGDHVNL

SEQ ID NO: 98724 - protein, 10 aa, synthetic construct
EVVRGDYVGL

SEQ ID NO: 98725 - protein, 10 aa, synthetic construct
APLRGDLLLS

SEQ ID NO: 98726 - protein, 10 aa, synthetic construct
EVVRGDYSSV

SEQ ID NO: 98727 - protein, 10 aa, synthetic construct
EVVRGDQSTL

SEQ ID NO: 98728 - protein, 10 aa, synthetic construct
EVVRGDLLLS

SEQ ID NO: 98729 - protein, 10 aa, synthetic construct
EVPRGDHVNL

SEQ ID NO: 98730 - protein, 10 aa, synthetic construct
EVPRGDRDYL

SEQ ID NO: 98731 - protein, 10 aa, synthetic construct
EVPRGDYSSV

SEQ ID NO: 98732 - protein, 10 aa, synthetic construct
EVPRGDLTVT

SEQ ID NO: 98733 - protein, 10 aa, synthetic construct
EVPRGDLIGR

SEQ ID NO: 98734 - protein, 10 aa, synthetic construct
EVLRGDHGVL

SEQ ID NO: 98735 - protein, 10 aa, synthetic construct
EVLRGDHVNL

SEQ ID NO: 98736 - protein, 10 aa, synthetic construct
APWRGDRGQI

SEQ ID NO: 98737 - protein, 10 aa, synthetic construct
EVLRGDYVGL

SEQ ID NO: 98738 - protein, 10 aa, synthetic construct
EVLRGDYSSV

SEQ ID NO: 98739 - protein, 10 aa, synthetic construct
EVLRGDQSTL

SEQ ID NO: 98740 - protein, 10 aa, synthetic construct
EVLRGDLLLS

SEQ ID NO: 98741 - protein, 10 aa, synthetic construct
EVIRGDRGQI

SEQ ID NO: 98742 - protein, 10 aa, synthetic construct
EVIRGDRQGI

SEQ ID NO: 98743 - protein, 10 aa, synthetic construct
EVIRGDRSVV

SEQ ID NO: 98744 - protein, 10 aa, synthetic construct
EVIRGDRGVV

SEQ ID NO: 98745 - protein, 10 aa, synthetic construct
EVIRGDYVGL

SEQ ID NO: 98746 - protein, 10 aa, synthetic construct
EVIRGDQSTL

SEQ ID NO: 98747 - protein, 10 aa, synthetic construct
APWRGDRQGI

SEQ ID NO: 98748 - protein, 10 aa, synthetic construct
EVIRGDRSQT

SEQ ID NO: 98749 - protein, 10 aa, synthetic construct
EVIRGDLLLS

SEQ ID NO: 98750 - protein, 10 aa, synthetic construct
EVMRGDRGQI

SEQ ID NO: 98751 - protein, 10 aa, synthetic construct
EVMRGDRQGI

SEQ ID NO: 98752 - protein, 10 aa, synthetic construct
EVMRGDRSVV

SEQ ID NO: 98753 - protein, 10 aa, synthetic construct
EVMRGDRGVV

SEQ ID NO: 98754 - protein, 10 aa, synthetic construct
EVMRGDYVGL

SEQ ID NO: 98755 - protein, 10 aa, synthetic construct
EVMRGDQSTL

SEQ ID NO: 98756 - protein, 10 aa, synthetic construct
EVMRGDRSQT

SEQ ID NO: 98757 - protein, 10 aa, synthetic construct
EVMRGDLLLS

SEQ ID NO: 98758 - protein, 10 aa, synthetic construct
APWRGDRSVV

SEQ ID NO: 98759 - protein, 10 aa, synthetic construct
EVWRGDHGVL

SEQ ID NO: 98760 - protein, 10 aa, synthetic construct
EVWRGDHVNL

SEQ ID NO: 98761 - protein, 10 aa, synthetic construct
EVWRGDYVGL

SEQ ID NO: 98762 - protein, 10 aa, synthetic construct
EVWRGDYSSV

SEQ ID NO: 98763 - protein, 10 aa, synthetic construct
EVWRGDQSTL

SEQ ID NO: 98764 - protein, 10 aa, synthetic construct
EVWRGDLLLS

SEQ ID NO: 98765 - protein, 10 aa, synthetic construct
EVFRGDRGQI

SEQ ID NO: 98766 - protein, 10 aa, synthetic construct
EVFRGDRQGI

SEQ ID NO: 98767 - protein, 10 aa, synthetic construct
EVFRGDRSVV

SEQ ID NO: 98768 - protein, 10 aa, synthetic construct
EVFRGDRGVV

SEQ ID NO: 98769 - protein, 10 aa, synthetic construct
APWRGDRGVV

SEQ ID NO: 98770 - protein, 10 aa, synthetic construct
EVFRGDYVGL

SEQ ID NO: 98771 - protein, 10 aa, synthetic construct
EVFRGDQSTL

SEQ ID NO: 98772 - protein, 10 aa, synthetic construct
EVFRGDRSQT

SEQ ID NO: 98773 - protein, 10 aa, synthetic construct
EVFRGDLLLS

SEQ ID NO: 98774 - protein, 10 aa, synthetic construct
EVKRGDRGQI

SEQ ID NO: 98775 - protein, 10 aa, synthetic construct
EVKRGDRQGI

SEQ ID NO: 98776 - protein, 10 aa, synthetic construct
EVKRGDRSVV

SEQ ID NO: 98777 - protein, 10 aa, synthetic construct
EVKRGDRGVV

SEQ ID NO: 98778 - protein, 10 aa, synthetic construct
EVKRGDYVGL

SEQ ID NO: 98779 - protein, 10 aa, synthetic construct
EVKRGDQSTL

SEQ ID NO: 98780 - protein, 10 aa, synthetic construct
APWRGDRSQT

SEQ ID NO: 98781 - protein, 10 aa, synthetic construct
EVKRGDRSQT

SEQ ID NO: 98782 - protein, 10 aa, synthetic construct
EVKRGDLLLS

SEQ ID NO: 98783 - protein, 10 aa, synthetic construct
EVRRGDHVNL

SEQ ID NO: 98784 - protein, 10 aa, synthetic construct
EVRRGDRDYL

SEQ ID NO: 98785 - protein, 10 aa, synthetic construct
EVRRGDYSSV

SEQ ID NO: 98786 - protein, 10 aa, synthetic construct
EVRRGDLTVT

SEQ ID NO: 98787 - protein, 10 aa, synthetic construct
EVRRGDLIGR

SEQ ID NO: 98788 - protein, 10 aa, synthetic construct
EVHRGDHGVL

SEQ ID NO: 98789 - protein, 10 aa, synthetic construct
EVHRGDHVNL

SEQ ID NO: 98790 - protein, 10 aa, synthetic construct
EVHRGDYVGL

SEQ ID NO: 98791 - protein, 10 aa, synthetic construct
APRRGDHGVL

SEQ ID NO: 98792 - protein, 10 aa, synthetic construct
EVHRGDYSSV

SEQ ID NO: 98793 - protein, 10 aa, synthetic construct
EVHRGDQSTL

SEQ ID NO: 98794 - protein, 10 aa, synthetic construct
EVHRGDLLLS

SEQ ID NO: 98795 - protein, 10 aa, synthetic construct
EVSRGDHGVL

SEQ ID NO: 98796 - protein, 10 aa, synthetic construct
EVSRGDHVNL

SEQ ID NO: 98797 - protein, 10 aa, synthetic construct
EVSRGDYVGL

SEQ ID NO: 98798 - protein, 10 aa, synthetic construct
EVSRGDYSSV

SEQ ID NO: 98799 - protein, 10 aa, synthetic construct
EVSRGDQSTL

SEQ ID NO: 98800 - protein, 10 aa, synthetic construct
EVSRGDLLLS

SEQ ID NO: 98801 - protein, 10 aa, synthetic construct
EVTRGDHGVL

SEQ ID NO: 98802 - protein, 10 aa, synthetic construct
APRRGDRGQI

SEQ ID NO: 98803 - protein, 10 aa, synthetic construct
EVTRGDHVNL

SEQ ID NO: 98804 - protein, 10 aa, synthetic construct
EVTRGDYVGL

SEQ ID NO: 98805 - protein, 10 aa, synthetic construct
EVTRGDYSSV

SEQ ID NO: 98806 - protein, 10 aa, synthetic construct
EVTRGDQSTL

SEQ ID NO: 98807 - protein, 10 aa, synthetic construct
EVTRGDLLLS

SEQ ID NO: 98808 - protein, 10 aa, synthetic construct
EVYRGDRGQI

SEQ ID NO: 98809 - protein, 10 aa, synthetic construct
EVYRGDRQGI

SEQ ID NO: 98810 - protein, 10 aa, synthetic construct
EVYRGDRSVV

SEQ ID NO: 98811 - protein, 10 aa, synthetic construct
EVYRGDRGVV

SEQ ID NO: 98812 - protein, 10 aa, synthetic construct
EVYRGDYVGL

SEQ ID NO: 98813 - protein, 10 aa, synthetic construct
QKNRGDHGVL

SEQ ID NO: 98814 - protein, 10 aa, synthetic construct
APRRGDRQGI

SEQ ID NO: 98815 - protein, 10 aa, synthetic construct
EVYRGDQSTL

SEQ ID NO: 98816 - protein, 10 aa, synthetic construct
EVYRGDRSQT

SEQ ID NO: 98817 - protein, 10 aa, synthetic construct
EVYRGDLLLS

SEQ ID NO: 98818 - protein, 10 aa, synthetic construct
EVNRGDRGQI

SEQ ID NO: 98819 - protein, 10 aa, synthetic construct
EVNRGDRQGI

SEQ ID NO: 98820 - protein, 10 aa, synthetic construct
EVNRGDRSVV

SEQ ID NO: 98821 - protein, 10 aa, synthetic construct
EVNRGDRGVV

SEQ ID NO: 98822 - protein, 10 aa, synthetic construct
EVNRGDYVGL

SEQ ID NO: 98823 - protein, 10 aa, synthetic construct
EVNRGDQSTL

SEQ ID NO: 98824 - protein, 10 aa, synthetic construct
EVNRGDRSQT

SEQ ID NO: 98825 - protein, 10 aa, synthetic construct
APRRGDRSVV

SEQ ID NO: 98826 - protein, 10 aa, synthetic construct
EVNRGDLLLS

SEQ ID NO: 98827 - protein, 10 aa, synthetic construct
EVQRGDHGVL

SEQ ID NO: 98828 - protein, 10 aa, synthetic construct
EVQRGDHVNL

SEQ ID NO: 98829 - protein, 10 aa, synthetic construct
EVQRGDYVGL

SEQ ID NO: 98830 - protein, 10 aa, synthetic construct
EVQRGDYSSV

SEQ ID NO: 98831 - protein, 10 aa, synthetic construct
EVQRGDQSTL

SEQ ID NO: 98832 - protein, 10 aa, synthetic construct
EVQRGDLLLS

SEQ ID NO: 98833 - protein, 10 aa, synthetic construct
EVDRGDHGVL

SEQ ID NO: 98834 - protein, 10 aa, synthetic construct
EVDRGDHVNL

SEQ ID NO: 98835 - protein, 10 aa, synthetic construct
EVDRGDYVGL

SEQ ID NO: 98836 - protein, 10 aa, synthetic construct
APRRGDLTVT

SEQ ID NO: 98837 - protein, 10 aa, synthetic construct
EVDRGDYSSV

SEQ ID NO: 98838 - protein, 10 aa, synthetic construct
EVDRGDQSTL

SEQ ID NO: 98839 - protein, 10 aa, synthetic construct
EVDRGDLLLS

SEQ ID NO: 98840 - protein, 10 aa, synthetic construct
EVERGDHGVL

SEQ ID NO: 98841 - protein, 10 aa, synthetic construct
EVERGDHVNL

SEQ ID NO: 98842 - protein, 10 aa, synthetic construct
EVERGDYVGL

SEQ ID NO: 98843 - protein, 10 aa, synthetic construct
EVERGDYSSV

SEQ ID NO: 98844 - protein, 10 aa, synthetic construct
EVERGDQSTL

SEQ ID NO: 98845 - protein, 10 aa, synthetic construct
EVERGDLLLS

SEQ ID NO: 98846 - protein, 10 aa, synthetic construct
EPGRGDHVNL

SEQ ID NO: 98847 - protein, 10 aa, synthetic construct
APRRGDLIGR

SEQ ID NO: 98848 - protein, 10 aa, synthetic construct
EPGRGDRDYL

SEQ ID NO: 98849 - protein, 10 aa, synthetic construct
EPGRGDYSSV

SEQ ID NO: 98850 - protein, 10 aa, synthetic construct
EPGRGDLTVT

SEQ ID NO: 98851 - protein, 10 aa, synthetic construct
EPGRGDLIGR

SEQ ID NO: 98852 - protein, 10 aa, synthetic construct
EPARGDHVNL

SEQ ID NO: 98853 - protein, 10 aa, synthetic construct
EPARGDRDYL

SEQ ID NO: 98854 - protein, 10 aa, synthetic construct
EPARGDYSSV

SEQ ID NO: 98855 - protein, 10 aa, synthetic construct
EPARGDLTVT

SEQ ID NO: 98856 - protein, 10 aa, synthetic construct
EPARGDLIGR

SEQ ID NO: 98857 - protein, 10 aa, synthetic construct
EPVRGDHGVL

SEQ ID NO: 98858 - protein, 10 aa, synthetic construct
APRRGDRSQT

SEQ ID NO: 98859 - protein, 10 aa, synthetic construct
EPVRGDYVGL

SEQ ID NO: 98860 - protein, 10 aa, synthetic construct
EPVRGDQSTL

SEQ ID NO: 98861 - protein, 10 aa, synthetic construct
EPVRGDLLLS

SEQ ID NO: 98862 - protein, 10 aa, synthetic construct
EPPRGDHVNL

SEQ ID NO: 98863 - protein, 10 aa, synthetic construct
EPPRGDRDYL

SEQ ID NO: 98864 - protein, 10 aa, synthetic construct
EPPRGDYSSV

SEQ ID NO: 98865 - protein, 10 aa, synthetic construct
EPPRGDLTVT

SEQ ID NO: 98866 - protein, 10 aa, synthetic construct
EPPRGDLIGR

SEQ ID NO: 98867 - protein, 10 aa, synthetic construct
EPLRGDHGVL

SEQ ID NO: 98868 - protein, 10 aa, synthetic construct
EPLRGDYVGL

SEQ ID NO: 98869 - protein, 10 aa, synthetic construct
APRRGDLLLS

SEQ ID NO: 98870 - protein, 10 aa, synthetic construct
EPLRGDQSTL

SEQ ID NO: 98871 - protein, 10 aa, synthetic construct
EPLRGDLLLS

SEQ ID NO: 98872 - protein, 10 aa, synthetic construct
EPIRGDRGQI

SEQ ID NO: 98873 - protein, 10 aa, synthetic construct
EPIRGDRQGI

SEQ ID NO: 98874 - protein, 10 aa, synthetic construct
EPIRGDRSVV

SEQ ID NO: 98875 - protein, 10 aa, synthetic construct
EPIRGDRGVV

SEQ ID NO: 98876 - protein, 10 aa, synthetic construct
EPIRGDRSQT

SEQ ID NO: 98877 - protein, 10 aa, synthetic construct
EPMRGDRGQI

SEQ ID NO: 98878 - protein, 10 aa, synthetic construct
EPMRGDRQGI

SEQ ID NO: 98879 - protein, 10 aa, synthetic construct
EPMRGDRSVV

SEQ ID NO: 98880 - protein, 10 aa, synthetic construct
APHRGDRGVV

SEQ ID NO: 98881 - protein, 10 aa, synthetic construct
EPMRGDRGVV

SEQ ID NO: 98882 - protein, 10 aa, synthetic construct
EPMRGDRSQT

SEQ ID NO: 98883 - protein, 10 aa, synthetic construct
EPWRGDHGVL

SEQ ID NO: 98884 - protein, 10 aa, synthetic construct
EPWRGDYVGL

SEQ ID NO: 98885 - protein, 10 aa, synthetic construct
EPWRGDQSTL

SEQ ID NO: 98886 - protein, 10 aa, synthetic construct
EPWRGDLLLS

SEQ ID NO: 98887 - protein, 10 aa, synthetic construct
EPFRGDRGQI

SEQ ID NO: 98888 - protein, 10 aa, synthetic construct
EPFRGDRQGI

SEQ ID NO: 98889 - protein, 10 aa, synthetic construct
EPFRGDRSVV

SEQ ID NO: 98890 - protein, 10 aa, synthetic construct
EPFRGDRGVV

SEQ ID NO: 98891 - protein, 10 aa, synthetic construct
APSRGDHGVL

SEQ ID NO: 98892 - protein, 10 aa, synthetic construct
EPFRGDRSQT

SEQ ID NO: 98893 - protein, 10 aa, synthetic construct
EPKRGDRGQI

SEQ ID NO: 98894 - protein, 10 aa, synthetic construct
EPKRGDRQGI

SEQ ID NO: 98895 - protein, 10 aa, synthetic construct
EPKRGDRSVV

SEQ ID NO: 98896 - protein, 10 aa, synthetic construct
EPKRGDRGVV

SEQ ID NO: 98897 - protein, 10 aa, synthetic construct
EPKRGDRSQT

SEQ ID NO: 98898 - protein, 10 aa, synthetic construct
EPRRGDHVNL

SEQ ID NO: 98899 - protein, 10 aa, synthetic construct
EPRRGDRDYL

SEQ ID NO: 98900 - protein, 10 aa, synthetic construct
EPRRGDYSSV

SEQ ID NO: 98901 - protein, 10 aa, synthetic construct
EPRRGDLTVT

SEQ ID NO: 98902 - protein, 10 aa, synthetic construct
APSRGDRGQI

SEQ ID NO: 98903 - protein, 10 aa, synthetic construct
EPRRGDLIGR

SEQ ID NO: 98904 - protein, 10 aa, synthetic construct
EPHRGDHGVL

SEQ ID NO: 98905 - protein, 10 aa, synthetic construct
EPHRGDYVGL

SEQ ID NO: 98906 - protein, 10 aa, synthetic construct
EPHRGDQSTL

SEQ ID NO: 98907 - protein, 10 aa, synthetic construct
EPHRGDLLLS

SEQ ID NO: 98908 - protein, 10 aa, synthetic construct
EPSRGDHGVL

SEQ ID NO: 98909 - protein, 10 aa, synthetic construct
EPSRGDYVGL

SEQ ID NO: 98910 - protein, 10 aa, synthetic construct
EPSRGDQSTL

SEQ ID NO: 98911 - protein, 10 aa, synthetic construct
EPSRGDLLLS

SEQ ID NO: 98912 - protein, 10 aa, synthetic construct
EPTRGDHGVL

SEQ ID NO: 98913 - protein, 10 aa, synthetic construct
APSRGDRQGI

SEQ ID NO: 98914 - protein, 10 aa, synthetic construct
EPTRGDYVGL

SEQ ID NO: 98915 - protein, 10 aa, synthetic construct
EPTRGDQSTL

SEQ ID NO: 98916 - protein, 10 aa, synthetic construct
EPTRGDLLLS

SEQ ID NO: 98917 - protein, 10 aa, synthetic construct
EPYRGDRGQI

SEQ ID NO: 98918 - protein, 10 aa, synthetic construct
EPYRGDRQGI

SEQ ID NO: 98919 - protein, 10 aa, synthetic construct
EPYRGDRSVV

SEQ ID NO: 98920 - protein, 10 aa, synthetic construct
EPYRGDRGVV

SEQ ID NO: 98921 - protein, 10 aa, synthetic construct
EPYRGDRSQT

SEQ ID NO: 98922 - protein, 10 aa, synthetic construct
EPNRGDRGQI

SEQ ID NO: 98923 - protein, 10 aa, synthetic construct
EPNRGDRQGI

SEQ ID NO: 98924 - protein, 10 aa, synthetic construct
  VARIANT 1: note = Any amino acid
  VARIANT 2: note = Any amino acid
  VARIANT 3: note = Any amino acid
XXXRGDHVNL

SEQ ID NO: 98925 - protein, 10 aa, synthetic construct
  VARIANT 1: note = Any amino acid
  VARIANT 2: note = Any amino acid
  VARIANT 3: note = Any amino acid
XXXRGDLIGR

SEQ ID NO: 98926 - protein, 10 aa, synthetic construct
  VARIANT 1: note = Any amino acid
  VARIANT 2: note = Any amino acid
  VARIANT 3: note = Any amino acid
XXXRGDQSTL

SEQ ID NO: 98927 - protein, 10 aa, synthetic construct
  VARIANT 1: note = Any amino acid
  VARIANT 2: note = Any amino acid
  VARIANT 3: note = Any amino acid
XXXRGDRGQI

SEQ ID NO: 98928 - protein, 10 aa, synthetic construct
  VARIANT 1: note = Any amino acid
  VARIANT 2: note = Any amino acid
  VARIANT 3: note = Any amino acid
XXXRGDRGVV

SEQ ID NO: 98929 - protein, 10 aa, synthetic construct
  VARIANT 1: note = Any amino acid
  VARIANT 2: note = Any amino acid
  VARIANT 3: note = Any amino acid
XXXRGDRQGI

SEQ ID NO: 98930 - protein, 10 aa, synthetic construct
  VARIANT 1: note = Any amino acid
  VARIANT 2: note = Any amino acid
  VARIANT 3: note = Any amino acid
XXXRGDRSQT

SEQ ID NO: 98931 - protein, 10 aa, synthetic construct
  VARIANT 1: note = Any amino acid
  VARIANT 2: note = Any amino acid
  VARIANT 3: note = Any amino acid
XXXRGDRSVV

SEQ ID NO: 98932 - protein, 10 aa, synthetic construct
  VARIANT 1: note = Any amino acid
  VARIANT 2: note = Any amino acid
  VARIANT 3: note = Any amino acid
XXXRGDLLLS

SEQ ID NO: 98933 - protein, 10 aa, synthetic construct
  VARIANT 1: note = Any amino acid
  VARIANT 2: note = Any amino acid
  VARIANT 3: note = Any amino acid
XXXRGDFNNL

SEQ ID NO: 98934 - protein, 10 aa, synthetic construct
  VARIANT 1: note = Any amino acid
  VARIANT 2: note = Any amino acid
  VARIANT 3: note = Any amino acid
XXXRGDFQNT

SEQ ID NO: 98935 - protein, 10 aa, synthetic construct
  VARIANT 1: note = Any amino acid
  VARIANT 2: note = Any amino acid
  VARIANT 3: note = Any amino acid
XXXRGDLTVT

SEQ ID NO: 98936 - protein, 10 aa, synthetic construct
  VARIANT 1: note = Any amino acid
  VARIANT 2: note = Any amino acid
  VARIANT 3: note = Any amino acid
XXXRGDYVGL

SEQ ID NO: 98937 - protein, 10 aa, synthetic construct
  VARIANT 1: note = Any amino acid
  VARIANT 2: note = Any amino acid
  VARIANT 3: note = Any amino acid
XXXRGDYSSV

SEQ ID NO: 98938 - protein, 10 aa, synthetic construct
  VARIANT 1: note = Any amino acid
  VARIANT 2: note = Any amino acid
  VARIANT 3: note = Any amino acid
XXXRGDHGVL

SEQ ID NO: 98939 - protein, 10 aa, synthetic construct
  VARIANT 1: note = Any amino acid
  VARIANT 2: note = Any amino acid
  VARIANT 3: note = Any amino acid
XXXRGDRDYL

SEQ ID NO: 98940 - protein, 10 aa, synthetic construct
  VARIANT 1: note = Any amino acid
  VARIANT 2: note = Any amino acid
  VARIANT 3: note = Any amino acid
XXXRGDYNSL

SEQ ID NO: 98941 - protein, 10 aa, synthetic construct
  VARIANT 1: note = Any amino acid
  VARIANT 2: note = Any amino acid
  VARIANT 3: note = Any amino acid
XXXRGDYTSV

SEQ ID NO: 98942 - protein, 10 aa, synthetic construct
  VARIANT 1: note = Any amino acid
  VARIANT 2: note = Any amino acid
  VARIANT 3: note = Any amino acid
XXXRGDYTSM

SEQ ID NO: 98943 - protein, 10 aa, synthetic construct
  VARIANT 1: note = Any amino acid
  VARIANT 2: note = Any amino acid
  VARIANT 3: note = Any amino acid
XXXRGDFNNT

SEQ ID NO: 98944 - protein, 10 aa, synthetic construct
SGGRGDARTL

SEQ ID NO: 98945 - protein, 10 aa, synthetic construct
SGARGDARTL

SEQ ID NO: 98946 - protein, 10 aa, synthetic construct
SGVRGDARTL

SEQ ID NO: 98947 - protein, 10 aa, synthetic construct
SGPRGDARTL

SEQ ID NO: 98948 - protein, 10 aa, synthetic construct
SGLRGDARTL

SEQ ID NO: 98949 - protein, 10 aa, synthetic construct
SGIRGDARTL

SEQ ID NO: 98950 - protein, 10 aa, synthetic construct
SGMRGDARTL

SEQ ID NO: 98951 - protein, 10 aa, synthetic construct
SGWRGDARTL

SEQ ID NO: 98952 - protein, 10 aa, synthetic construct
SGFRGDARTL

SEQ ID NO: 98953 - protein, 10 aa, synthetic construct
SGKRGDARTL

SEQ ID NO: 98954 - protein, 10 aa, synthetic construct
SGRRGDARTL

SEQ ID NO: 98955 - protein, 10 aa, synthetic construct
SGHRGDARTL

SEQ ID NO: 98956 - protein, 10 aa, synthetic construct
SGSRGDARTL

SEQ ID NO: 98957 - protein, 10 aa, synthetic construct
SGTRGDARTL

SEQ ID NO: 98958 - protein, 10 aa, synthetic construct
SGYRGDARTL

SEQ ID NO: 98959 - protein, 10 aa, synthetic construct
SGNRGDARTL

SEQ ID NO: 98960 - protein, 10 aa, synthetic construct
SGQRGDARTL

SEQ ID NO: 98961 - protein, 10 aa, synthetic construct
SGDRGDARTL

SEQ ID NO: 98962 - protein, 10 aa, synthetic construct
SGERGDARTL

SEQ ID NO: 98963 - protein, 10 aa, synthetic construct
SAGRGDARTL

SEQ ID NO: 98964 - protein, 10 aa, synthetic construct
SAARGDARTL

SEQ ID NO: 98965 - protein, 10 aa, synthetic construct
SAVRGDARTL

SEQ ID NO: 98966 - protein, 10 aa, synthetic construct
SAPRGDARTL

SEQ ID NO: 98967 - protein, 10 aa, synthetic construct
SALRGDARTL

SEQ ID NO: 98968 - protein, 10 aa, synthetic construct
SAIRGDARTL

SEQ ID NO: 98969 - protein, 10 aa, synthetic construct
SAMRGDARTL

SEQ ID NO: 98970 - protein, 10 aa, synthetic construct
SAWRGDARTL

SEQ ID NO: 98971 - protein, 10 aa, synthetic construct
SAFRGDARTL

SEQ ID NO: 98972 - protein, 10 aa, synthetic construct
SAKRGDARTL

SEQ ID NO: 98973 - protein, 10 aa, synthetic construct
SARRGDARTL

SEQ ID NO: 98974 - protein, 10 aa, synthetic construct
SAHRGDARTL

SEQ ID NO: 98975 - protein, 10 aa, synthetic construct
SASRGDARTL

SEQ ID NO: 98976 - protein, 10 aa, synthetic construct
SATRGDARTL

SEQ ID NO: 98977 - protein, 10 aa, synthetic construct
SAYRGDARTL

SEQ ID NO: 98978 - protein, 10 aa, synthetic construct
SANRGDARTL

SEQ ID NO: 98979 - protein, 10 aa, synthetic construct
SAQRGDARTL

SEQ ID NO: 98980 - protein, 10 aa, synthetic construct
SADRGDARTL

SEQ ID NO: 98981 - protein, 10 aa, synthetic construct
SAERGDARTL

SEQ ID NO: 98982 - protein, 10 aa, synthetic construct
SVGRGDARTL

SEQ ID NO: 98983 - protein, 10 aa, synthetic construct
SVARGDARTL

SEQ ID NO: 98984 - protein, 10 aa, synthetic construct
SVVRGDARTL

SEQ ID NO: 98985 - protein, 10 aa, synthetic construct
SVPRGDARTL

SEQ ID NO: 98986 - protein, 10 aa, synthetic construct
SVLRGDARTL

SEQ ID NO: 98987 - protein, 10 aa, synthetic construct
SVIRGDARTL

SEQ ID NO: 98988 - protein, 10 aa, synthetic construct
SVMRGDARTL

SEQ ID NO: 98989 - protein, 10 aa, synthetic construct
SVWRGDARTL

SEQ ID NO: 98990 - protein, 10 aa, synthetic construct
SVFRGDARTL

SEQ ID NO: 98991 - protein, 10 aa, synthetic construct
SVKRGDARTL

SEQ ID NO: 98992 - protein, 10 aa, synthetic construct
SVRRGDARTL

SEQ ID NO: 98993 - protein, 10 aa, synthetic construct
SVHRGDARTL

SEQ ID NO: 98994 - protein, 10 aa, synthetic construct
SVSRGDARTL

SEQ ID NO: 98995 - protein, 10 aa, synthetic construct
SVTRGDARTL

SEQ ID NO: 98996 - protein, 10 aa, synthetic construct
SVYRGDARTL

SEQ ID NO: 98997 - protein, 10 aa, synthetic construct
SVNRGDARTL

SEQ ID NO: 98998 - protein, 10 aa, synthetic construct
SVQRGDARTL

SEQ ID NO: 98999 - protein, 10 aa, synthetic construct
SVDRGDARTL

SEQ ID NO: 99000 - protein, 10 aa, synthetic construct
SVERGDARTL

SEQ ID NO: 99001 - protein, 10 aa, synthetic construct
SPGRGDARTL

SEQ ID NO: 99002 - protein, 10 aa, synthetic construct
SPARGDARTL

SEQ ID NO: 99003 - protein, 10 aa, synthetic construct
SPVRGDARTL

SEQ ID NO: 99004 - protein, 10 aa, synthetic construct
SPPRGDARTL

SEQ ID NO: 99005 - protein, 10 aa, synthetic construct
SPLRGDARTL

SEQ ID NO: 99006 - protein, 10 aa, synthetic construct
SPIRGDARTL

SEQ ID NO: 99007 - protein, 10 aa, synthetic construct
SPMRGDARTL

SEQ ID NO: 99008 - protein, 10 aa, synthetic construct
SPWRGDARTL

SEQ ID NO: 99009 - protein, 10 aa, synthetic construct
SPFRGDARTL

SEQ ID NO: 99010 - protein, 10 aa, synthetic construct
SPKRGDARTL

SEQ ID NO: 99011 - protein, 10 aa, synthetic construct
SPRRGDARTL

SEQ ID NO: 99012 - protein, 10 aa, synthetic construct
SPHRGDARTL

SEQ ID NO: 99013 - protein, 10 aa, synthetic construct
SPSRGDARTL

SEQ ID NO: 99014 - protein, 10 aa, synthetic construct
SPTRGDARTL

SEQ ID NO: 99015 - protein, 10 aa, synthetic construct
SPYRGDARTL

SEQ ID NO: 99016 - protein, 10 aa, synthetic construct
SPNRGDARTL

SEQ ID NO: 99017 - protein, 10 aa, synthetic construct
SPQRGDARTL

SEQ ID NO: 99018 - protein, 10 aa, synthetic construct
SPDRGDARTL

SEQ ID NO: 99019 - protein, 10 aa, synthetic construct
SPERGDARTL

SEQ ID NO: 99020 - protein, 10 aa, synthetic construct
SLGRGDARTL

SEQ ID NO: 99021 - protein, 10 aa, synthetic construct
SLARGDARTL

SEQ ID NO: 99022 - protein, 10 aa, synthetic construct
SLVRGDARTL

SEQ ID NO: 99023 - protein, 10 aa, synthetic construct
SLPRGDARTL

SEQ ID NO: 99024 - protein, 10 aa, synthetic construct
SLLRGDARTL

SEQ ID NO: 99025 - protein, 10 aa, synthetic construct
SLIRGDARTL

SEQ ID NO: 99026 - protein, 10 aa, synthetic construct
SLMRGDARTL

SEQ ID NO: 99027 - protein, 10 aa, synthetic construct
SLWRGDARTL

SEQ ID NO: 99028 - protein, 10 aa, synthetic construct
SLFRGDARTL

SEQ ID NO: 99029 - protein, 10 aa, synthetic construct
SLKRGDARTL

SEQ ID NO: 99030 - protein, 10 aa, synthetic construct
SLRRGDARTL

SEQ ID NO: 99031 - protein, 10 aa, synthetic construct
SLHRGDARTL

SEQ ID NO: 99032 - protein, 10 aa, synthetic construct
SLSRGDARTL

SEQ ID NO: 99033 - protein, 10 aa, synthetic construct
SLTRGDARTL

SEQ ID NO: 99034 - protein, 10 aa, synthetic construct
SLYRGDARTL

SEQ ID NO: 99035 - protein, 10 aa, synthetic construct
SLNRGDARTL

SEQ ID NO: 99036 - protein, 10 aa, synthetic construct
SLQRGDARTL

SEQ ID NO: 99037 - protein, 10 aa, synthetic construct
SLDRGDARTL

SEQ ID NO: 99038 - protein, 10 aa, synthetic construct
SLERGDARTL

SEQ ID NO: 99039 - protein, 10 aa, synthetic construct
SIGRGDARTL

SEQ ID NO: 99040 - protein, 10 aa, synthetic construct
SIARGDARTL

SEQ ID NO: 99041 - protein, 10 aa, synthetic construct
SIVRGDARTL

SEQ ID NO: 99042 - protein, 10 aa, synthetic construct
SIPRGDARTL

SEQ ID NO: 99043 - protein, 10 aa, synthetic construct
SILRGDARTL

SEQ ID NO: 99044 - protein, 10 aa, synthetic construct
SIIRGDARTL

SEQ ID NO: 99045 - protein, 10 aa, synthetic construct
SIMRGDARTL

SEQ ID NO: 99046 - protein, 10 aa, synthetic construct
SIWRGDARTL

SEQ ID NO: 99047 - protein, 10 aa, synthetic construct
SIFRGDARTL

SEQ ID NO: 99048 - protein, 10 aa, synthetic construct
SIKRGDARTL

SEQ ID NO: 99049 - protein, 10 aa, synthetic construct
SIRRGDARTL

SEQ ID NO: 99050 - protein, 10 aa, synthetic construct
SIHRGDARTL

SEQ ID NO: 99051 - protein, 10 aa, synthetic construct
SISRGDARTL

SEQ ID NO: 99052 - protein, 10 aa, synthetic construct
SITRGDARTL

SEQ ID NO: 99053 - protein, 10 aa, synthetic construct
SIYRGDARTL

SEQ ID NO: 99054 - protein, 10 aa, synthetic construct
SINRGDARTL

SEQ ID NO: 99055 - protein, 10 aa, synthetic construct
SIQRGDARTL

SEQ ID NO: 99056 - protein, 10 aa, synthetic construct
SIDRGDARTL

SEQ ID NO: 99057 - protein, 10 aa, synthetic construct
SIERGDARTL

SEQ ID NO: 99058 - protein, 10 aa, synthetic construct
SMGRGDARTL

SEQ ID NO: 99059 - protein, 10 aa, synthetic construct
SMARGDARTL

SEQ ID NO: 99060 - protein, 10 aa, synthetic construct
SMVRGDARTL

SEQ ID NO: 99061 - protein, 10 aa, synthetic construct
SMPRGDARTL

SEQ ID NO: 99062 - protein, 10 aa, synthetic construct
SMLRGDARTL

SEQ ID NO: 99063 - protein, 10 aa, synthetic construct
SMIRGDARTL

SEQ ID NO: 99064 - protein, 10 aa, synthetic construct
SMMRGDARTL

SEQ ID NO: 99065 - protein, 10 aa, synthetic construct
SMWRGDARTL

SEQ ID NO: 99066 - protein, 10 aa, synthetic construct
SMFRGDARTL

SEQ ID NO: 99067 - protein, 10 aa, synthetic construct
SMKRGDARTL

SEQ ID NO: 99068 - protein, 10 aa, synthetic construct
SMRRGDARTL

SEQ ID NO: 99069 - protein, 10 aa, synthetic construct
SMHRGDARTL

SEQ ID NO: 99070 - protein, 10 aa, synthetic construct
SMSRGDARTL

SEQ ID NO: 99071 - protein, 10 aa, synthetic construct
SMTRGDARTL

SEQ ID NO: 99072 - protein, 10 aa, synthetic construct
SMYRGDARTL

SEQ ID NO: 99073 - protein, 10 aa, synthetic construct
SMNRGDARTL

SEQ ID NO: 99074 - protein, 10 aa, synthetic construct
SMQRGDARTL

SEQ ID NO: 99075 - protein, 10 aa, synthetic construct
SMDRGDARTL

SEQ ID NO: 99076 - protein, 10 aa, synthetic construct
SMERGDARTL

SEQ ID NO: 99077 - protein, 10 aa, synthetic construct
SWGRGDARTL

SEQ ID NO: 99078 - protein, 10 aa, synthetic construct
SWARGDARTL

SEQ ID NO: 99079 - protein, 10 aa, synthetic construct
SWVRGDARTL

SEQ ID NO: 99080 - protein, 10 aa, synthetic construct
SWPRGDARTL

SEQ ID NO: 99081 - protein, 10 aa, synthetic construct
SWLRGDARTL

SEQ ID NO: 99082 - protein, 10 aa, synthetic construct
SWIRGDARTL

SEQ ID NO: 99083 - protein, 10 aa, synthetic construct
SWMRGDARTL

SEQ ID NO: 99084 - protein, 10 aa, synthetic construct
SWWRGDARTL

SEQ ID NO: 99085 - protein, 10 aa, synthetic construct
SWFRGDARTL

SEQ ID NO: 99086 - protein, 10 aa, synthetic construct
SWKRGDARTL

SEQ ID NO: 99087 - protein, 10 aa, synthetic construct
SWRRGDARTL

SEQ ID NO: 99088 - protein, 10 aa, synthetic construct
SWHRGDARTL

SEQ ID NO: 99089 - protein, 10 aa, synthetic construct
SWSRGDARTL

SEQ ID NO: 99090 - protein, 10 aa, synthetic construct
SWTRGDARTL

SEQ ID NO: 99091 - protein, 10 aa, synthetic construct
SWYRGDARTL

SEQ ID NO: 99092 - protein, 10 aa, synthetic construct
SWNRGDARTL

SEQ ID NO: 99093 - protein, 10 aa, synthetic construct
SWQRGDARTL

SEQ ID NO: 99094 - protein, 10 aa, synthetic construct
SWDRGDARTL

SEQ ID NO: 99095 - protein, 10 aa, synthetic construct
SWERGDARTL

SEQ ID NO: 99096 - protein, 10 aa, synthetic construct
SFGRGDARTL

SEQ ID NO: 99097 - protein, 10 aa, synthetic construct
SFARGDARTL

SEQ ID NO: 99098 - protein, 10 aa, synthetic construct
SFVRGDARTL

SEQ ID NO: 99099 - protein, 10 aa, synthetic construct
SFPRGDARTL

SEQ ID NO: 99100 - protein, 10 aa, synthetic construct
SFLRGDARTL

SEQ ID NO: 99101 - protein, 10 aa, synthetic construct
SFIRGDARTL

SEQ ID NO: 99102 - protein, 10 aa, synthetic construct
SFMRGDARTL

SEQ ID NO: 99103 - protein, 10 aa, synthetic construct
SFWRGDARTL

SEQ ID NO: 99104 - protein, 10 aa, synthetic construct
SFFRGDARTL

SEQ ID NO: 99105 - protein, 10 aa, synthetic construct
SFKRGDARTL

SEQ ID NO: 99106 - protein, 10 aa, synthetic construct
SFRRGDARTL

SEQ ID NO: 99107 - protein, 10 aa, synthetic construct
SFHRGDARTL

SEQ ID NO: 99108 - protein, 10 aa, synthetic construct
SFSRGDARTL

SEQ ID NO: 99109 - protein, 10 aa, synthetic construct
SFTRGDARTL

SEQ ID NO: 99110 - protein, 10 aa, synthetic construct
SFYRGDARTL

SEQ ID NO: 99111 - protein, 10 aa, synthetic construct
SFNRGDARTL

SEQ ID NO: 99112 - protein, 10 aa, synthetic construct
SFQRGDARTL

SEQ ID NO: 99113 - protein, 10 aa, synthetic construct
SFDRGDARTL

SEQ ID NO: 99114 - protein, 10 aa, synthetic construct
SFERGDARTL

SEQ ID NO: 99115 - protein, 10 aa, synthetic construct
SKGRGDARTL

SEQ ID NO: 99116 - protein, 10 aa, synthetic construct
SKARGDARTL

SEQ ID NO: 99117 - protein, 10 aa, synthetic construct
SKVRGDARTL

SEQ ID NO: 99118 - protein, 10 aa, synthetic construct
SKPRGDARTL

SEQ ID NO: 99119 - protein, 10 aa, synthetic construct
SKLRGDARTL

SEQ ID NO: 99120 - protein, 10 aa, synthetic construct
SKIRGDARTL

SEQ ID NO: 99121 - protein, 10 aa, synthetic construct
SKMRGDARTL

SEQ ID NO: 99122 - protein, 10 aa, synthetic construct
SKWRGDARTL

SEQ ID NO: 99123 - protein, 10 aa, synthetic construct
SKFRGDARTL

SEQ ID NO: 99124 - protein, 10 aa, synthetic construct
SKKRGDARTL

SEQ ID NO: 99125 - protein, 10 aa, synthetic construct
SKRRGDARTL

SEQ ID NO: 99126 - protein, 10 aa, synthetic construct
SKHRGDARTL

SEQ ID NO: 99127 - protein, 10 aa, synthetic construct
SKSRGDARTL

SEQ ID NO: 99128 - protein, 10 aa, synthetic construct
SKTRGDARTL

SEQ ID NO: 99129 - protein, 10 aa, synthetic construct
SKYRGDARTL

SEQ ID NO: 99130 - protein, 10 aa, synthetic construct
SKNRGDARTL

SEQ ID NO: 99131 - protein, 10 aa, synthetic construct
SKQRGDARTL

SEQ ID NO: 99132 - protein, 10 aa, synthetic construct
SKDRGDARTL

SEQ ID NO: 99133 - protein, 10 aa, synthetic construct
SKERGDARTL

SEQ ID NO: 99134 - protein, 10 aa, synthetic construct
SRGRGDARTL

SEQ ID NO: 99135 - protein, 10 aa, synthetic construct
SRARGDARTL

SEQ ID NO: 99136 - protein, 10 aa, synthetic construct
SRVRGDARTL

SEQ ID NO: 99137 - protein, 10 aa, synthetic construct
SRPRGDARTL

SEQ ID NO: 99138 - protein, 10 aa, synthetic construct
SRLRGDARTL

SEQ ID NO: 99139 - protein, 10 aa, synthetic construct
SRIRGDARTL

SEQ ID NO: 99140 - protein, 10 aa, synthetic construct
SRMRGDARTL

SEQ ID NO: 99141 - protein, 10 aa, synthetic construct
SRWRGDARTL

SEQ ID NO: 99142 - protein, 10 aa, synthetic construct
SRFRGDARTL

SEQ ID NO: 99143 - protein, 10 aa, synthetic construct
SRKRGDARTL

SEQ ID NO: 99144 - protein, 10 aa, synthetic construct
SRRRGDARTL

SEQ ID NO: 99145 - protein, 10 aa, synthetic construct
SRHRGDARTL

SEQ ID NO: 99146 - protein, 10 aa, synthetic construct
SRSRGDARTL

SEQ ID NO: 99147 - protein, 10 aa, synthetic construct
SRTRGDARTL

SEQ ID NO: 99148 - protein, 10 aa, synthetic construct
SRYRGDARTL

SEQ ID NO: 99149 - protein, 10 aa, synthetic construct
SRNRGDARTL

SEQ ID NO: 99150 - protein, 10 aa, synthetic construct
SRQRGDARTL

SEQ ID NO: 99151 - protein, 10 aa, synthetic construct
SRDRGDARTL

SEQ ID NO: 99152 - protein, 10 aa, synthetic construct
SRERGDARTL

SEQ ID NO: 99153 - protein, 10 aa, synthetic construct
SHGRGDARTL

SEQ ID NO: 99154 - protein, 10 aa, synthetic construct
SHARGDARTL

SEQ ID NO: 99155 - protein, 10 aa, synthetic construct
SHVRGDARTL

SEQ ID NO: 99156 - protein, 10 aa, synthetic construct
SHPRGDARTL

SEQ ID NO: 99157 - protein, 10 aa, synthetic construct
SHLRGDARTL

SEQ ID NO: 99158 - protein, 10 aa, synthetic construct
SHIRGDARTL

SEQ ID NO: 99159 - protein, 10 aa, synthetic construct
SHMRGDARTL

SEQ ID NO: 99160 - protein, 10 aa, synthetic construct
SHWRGDARTL

SEQ ID NO: 99161 - protein, 10 aa, synthetic construct
SHFRGDARTL

SEQ ID NO: 99162 - protein, 10 aa, synthetic construct
SHKRGDARTL

SEQ ID NO: 99163 - protein, 10 aa, synthetic construct
SHRRGDARTL

SEQ ID NO: 99164 - protein, 10 aa, synthetic construct
SHHRGDARTL

SEQ ID NO: 99165 - protein, 10 aa, synthetic construct
SHSRGDARTL

SEQ ID NO: 99166 - protein, 10 aa, synthetic construct
SHTRGDARTL

SEQ ID NO: 99167 - protein, 10 aa, synthetic construct
SHYRGDARTL

SEQ ID NO: 99168 - protein, 10 aa, synthetic construct
SHNRGDARTL

SEQ ID NO: 99169 - protein, 10 aa, synthetic construct
SHQRGDARTL

SEQ ID NO: 99170 - protein, 10 aa, synthetic construct
SHDRGDARTL

SEQ ID NO: 99171 - protein, 10 aa, synthetic construct
SHERGDARTL

SEQ ID NO: 99172 - protein, 10 aa, synthetic construct
SSGRGDARTL

SEQ ID NO: 99173 - protein, 10 aa, synthetic construct
SSARGDARTL

SEQ ID NO: 99174 - protein, 10 aa, synthetic construct
SSVRGDARTL

SEQ ID NO: 99175 - protein, 10 aa, synthetic construct
SSPRGDARTL

SEQ ID NO: 99176 - protein, 10 aa, synthetic construct
SSLRGDARTL

SEQ ID NO: 99177 - protein, 10 aa, synthetic construct
SSIRGDARTL

SEQ ID NO: 99178 - protein, 10 aa, synthetic construct
SSMRGDARTL

SEQ ID NO: 99179 - protein, 10 aa, synthetic construct
SSWRGDARTL

SEQ ID NO: 99180 - protein, 10 aa, synthetic construct
SSFRGDARTL

SEQ ID NO: 99181 - protein, 10 aa, synthetic construct
SSKRGDARTL

SEQ ID NO: 99182 - protein, 10 aa, synthetic construct
SSRRGDARTL

SEQ ID NO: 99183 - protein, 10 aa, synthetic construct
SSHRGDARTL

SEQ ID NO: 99184 - protein, 10 aa, synthetic construct
SSSRGDARTL

SEQ ID NO: 99185 - protein, 10 aa, synthetic construct
SSTRGDARTL

SEQ ID NO: 99186 - protein, 10 aa, synthetic construct
SSYRGDARTL

SEQ ID NO: 99187 - protein, 10 aa, synthetic construct
SSNRGDARTL

SEQ ID NO: 99188 - protein, 10 aa, synthetic construct
SSQRGDARTL

SEQ ID NO: 99189 - protein, 10 aa, synthetic construct
SSDRGDARTL

SEQ ID NO: 99190 - protein, 10 aa, synthetic construct
SSERGDARTL

SEQ ID NO: 99191 - protein, 10 aa, synthetic construct
STGRGDARTL

SEQ ID NO: 99192 - protein, 10 aa, synthetic construct
STARGDARTL

SEQ ID NO: 99193 - protein, 10 aa, synthetic construct
STVRGDARTL

SEQ ID NO: 99194 - protein, 10 aa, synthetic construct
STPRGDARTL

SEQ ID NO: 99195 - protein, 10 aa, synthetic construct
STLRGDARTL

SEQ ID NO: 99196 - protein, 10 aa, synthetic construct
STIRGDARTL

SEQ ID NO: 99197 - protein, 10 aa, synthetic construct
STMRGDARTL

SEQ ID NO: 99198 - protein, 10 aa, synthetic construct
STWRGDARTL

SEQ ID NO: 99199 - protein, 10 aa, synthetic construct
STFRGDARTL

SEQ ID NO: 99200 - protein, 10 aa, synthetic construct
STKRGDARTL

SEQ ID NO: 99201 - protein, 10 aa, synthetic construct
STRRGDARTL

SEQ ID NO: 99202 - protein, 10 aa, synthetic construct
STHRGDARTL

SEQ ID NO: 99203 - protein, 10 aa, synthetic construct
STSRGDARTL

SEQ ID NO: 99204 - protein, 10 aa, synthetic construct
STTRGDARTL

SEQ ID NO: 99205 - protein, 10 aa, synthetic construct
STYRGDARTL

SEQ ID NO: 99206 - protein, 10 aa, synthetic construct
STNRGDARTL

SEQ ID NO: 99207 - protein, 10 aa, synthetic construct
STQRGDARTL

SEQ ID NO: 99208 - protein, 10 aa, synthetic construct
STDRGDARTL

SEQ ID NO: 99209 - protein, 10 aa, synthetic construct
STERGDARTL

SEQ ID NO: 99210 - protein, 10 aa, synthetic construct
SYGRGDARTL

SEQ ID NO: 99211 - protein, 10 aa, synthetic construct
SYARGDARTL

SEQ ID NO: 99212 - protein, 10 aa, synthetic construct
SYVRGDARTL

SEQ ID NO: 99213 - protein, 10 aa, synthetic construct
SYPRGDARTL

SEQ ID NO: 99214 - protein, 10 aa, synthetic construct
SYLRGDARTL

SEQ ID NO: 99215 - protein, 10 aa, synthetic construct
SYIRGDARTL

SEQ ID NO: 99216 - protein, 10 aa, synthetic construct
SYMRGDARTL

SEQ ID NO: 99217 - protein, 10 aa, synthetic construct
SYWRGDARTL

SEQ ID NO: 99218 - protein, 10 aa, synthetic construct
SYFRGDARTL

SEQ ID NO: 99219 - protein, 10 aa, synthetic construct
SYKRGDARTL

SEQ ID NO: 99220 - protein, 10 aa, synthetic construct
SYRRGDARTL

SEQ ID NO: 99221 - protein, 10 aa, synthetic construct
SYHRGDARTL

SEQ ID NO: 99222 - protein, 10 aa, synthetic construct
SYSRGDARTL

SEQ ID NO: 99223 - protein, 10 aa, synthetic construct
SYTRGDARTL

SEQ ID NO: 99224 - protein, 10 aa, synthetic construct
SYYRGDARTL

SEQ ID NO: 99225 - protein, 10 aa, synthetic construct
SYNRGDARTL

SEQ ID NO: 99226 - protein, 10 aa, synthetic construct
SYQRGDARTL

SEQ ID NO: 99227 - protein, 10 aa, synthetic construct
SYDRGDARTL

SEQ ID NO: 99228 - protein, 10 aa, synthetic construct
SYERGDARTL

SEQ ID NO: 99229 - protein, 10 aa, synthetic construct
SNGRGDARTL

SEQ ID NO: 99230 - protein, 10 aa, synthetic construct
SNARGDARTL

SEQ ID NO: 99231 - protein, 10 aa, synthetic construct
SNVRGDARTL

SEQ ID NO: 99232 - protein, 10 aa, synthetic construct
SNPRGDARTL

SEQ ID NO: 99233 - protein, 10 aa, synthetic construct
SNLRGDARTL

SEQ ID NO: 99234 - protein, 10 aa, synthetic construct
SNIRGDARTL

SEQ ID NO: 99235 - protein, 10 aa, synthetic construct
SNMRGDARTL

SEQ ID NO: 99236 - protein, 10 aa, synthetic construct
SNWRGDARTL

SEQ ID NO: 99237 - protein, 10 aa, synthetic construct
SNFRGDARTL

SEQ ID NO: 99238 - protein, 10 aa, synthetic construct
SNKRGDARTL

SEQ ID NO: 99239 - protein, 10 aa, synthetic construct
SNRRGDARTL

SEQ ID NO: 99240 - protein, 10 aa, synthetic construct
SNHRGDARTL

SEQ ID NO: 99241 - protein, 10 aa, synthetic construct
SNSRGDARTL

SEQ ID NO: 99242 - protein, 10 aa, synthetic construct
SNTRGDARTL

SEQ ID NO: 99243 - protein, 10 aa, synthetic construct
SNYRGDARTL

SEQ ID NO: 99244 - protein, 10 aa, synthetic construct
SNNRGDARTL

SEQ ID NO: 99245 - protein, 10 aa, synthetic construct
SNQRGDARTL

SEQ ID NO: 99246 - protein, 10 aa, synthetic construct
SNDRGDARTL

SEQ ID NO: 99247 - protein, 10 aa, synthetic construct
SNERGDARTL

SEQ ID NO: 99248 - protein, 10 aa, synthetic construct
SQGRGDARTL

SEQ ID NO: 99249 - protein, 10 aa, synthetic construct
SQARGDARTL

SEQ ID NO: 99250 - protein, 10 aa, synthetic construct
SQVRGDARTL

SEQ ID NO: 99251 - protein, 10 aa, synthetic construct
SQPRGDARTL

SEQ ID NO: 99252 - protein, 10 aa, synthetic construct
SQLRGDARTL

SEQ ID NO: 99253 - protein, 10 aa, synthetic construct
SQIRGDARTL

SEQ ID NO: 99254 - protein, 10 aa, synthetic construct
SQMRGDARTL

SEQ ID NO: 99255 - protein, 10 aa, synthetic construct
SQWRGDARTL

SEQ ID NO: 99256 - protein, 10 aa, synthetic construct
SQFRGDARTL

SEQ ID NO: 99257 - protein, 10 aa, synthetic construct
SQKRGDARTL

SEQ ID NO: 99258 - protein, 10 aa, synthetic construct
SQRRGDARTL

SEQ ID NO: 99259 - protein, 10 aa, synthetic construct
SQHRGDARTL

SEQ ID NO: 99260 - protein, 10 aa, synthetic construct
SQSRGDARTL

SEQ ID NO: 99261 - protein, 10 aa, synthetic construct
SQTRGDARTL

SEQ ID NO: 99262 - protein, 10 aa, synthetic construct
SQYRGDARTL

SEQ ID NO: 99263 - protein, 10 aa, synthetic construct
SQNRGDARTL

SEQ ID NO: 99264 - protein, 10 aa, synthetic construct
SQQRGDARTL

SEQ ID NO: 99265 - protein, 10 aa, synthetic construct
SQDRGDARTL

SEQ ID NO: 99266 - protein, 10 aa, synthetic construct
SQERGDARTL

SEQ ID NO: 99267 - protein, 10 aa, synthetic construct
SDGRGDARTL

SEQ ID NO: 99268 - protein, 10 aa, synthetic construct
SDARGDARTL

SEQ ID NO: 99269 - protein, 10 aa, synthetic construct
SDVRGDARTL

SEQ ID NO: 99270 - protein, 10 aa, synthetic construct
SDPRGDARTL

SEQ ID NO: 99271 - protein, 10 aa, synthetic construct
SDLRGDARTL

SEQ ID NO: 99272 - protein, 10 aa, synthetic construct
SDIRGDARTL

SEQ ID NO: 99273 - protein, 10 aa, synthetic construct
SDMRGDARTL

SEQ ID NO: 99274 - protein, 10 aa, synthetic construct
SDWRGDARTL

SEQ ID NO: 99275 - protein, 10 aa, synthetic construct
SDFRGDARTL

SEQ ID NO: 99276 - protein, 10 aa, synthetic construct
SDKRGDARTL

SEQ ID NO: 99277 - protein, 10 aa, synthetic construct
SDRRGDARTL

SEQ ID NO: 99278 - protein, 10 aa, synthetic construct
SDHRGDARTL

SEQ ID NO: 99279 - protein, 10 aa, synthetic construct
SDSRGDARTL

SEQ ID NO: 99280 - protein, 10 aa, synthetic construct
SDTRGDARTL

SEQ ID NO: 99281 - protein, 10 aa, synthetic construct
SDYRGDARTL

SEQ ID NO: 99282 - protein, 10 aa, synthetic construct
SDNRGDARTL

SEQ ID NO: 99283 - protein, 10 aa, synthetic construct
SDQRGDARTL

SEQ ID NO: 99284 - protein, 10 aa, synthetic construct
SDDRGDARTL

SEQ ID NO: 99285 - protein, 10 aa, synthetic construct
SDERGDARTL

SEQ ID NO: 99286 - protein, 10 aa, synthetic construct
SEGRGDARTL

SEQ ID NO: 99287 - protein, 10 aa, synthetic construct
SEARGDARTL

SEQ ID NO: 99288 - protein, 10 aa, synthetic construct
SEVRGDARTL

SEQ ID NO: 99289 - protein, 10 aa, synthetic construct
SEPRGDARTL

SEQ ID NO: 99290 - protein, 10 aa, synthetic construct
SELRGDARTL

SEQ ID NO: 99291 - protein, 10 aa, synthetic construct
SEIRGDARTL

SEQ ID NO: 99292 - protein, 10 aa, synthetic construct
SEMRGDARTL

SEQ ID NO: 99293 - protein, 10 aa, synthetic construct
SEWRGDARTL

SEQ ID NO: 99294 - protein, 10 aa, synthetic construct
SEFRGDARTL

SEQ ID NO: 99295 - protein, 10 aa, synthetic construct
SEKRGDARTL

SEQ ID NO: 99296 - protein, 10 aa, synthetic construct
SERRGDARTL

SEQ ID NO: 99297 - protein, 10 aa, synthetic construct
SEHRGDARTL

SEQ ID NO: 99298 - protein, 10 aa, synthetic construct
SESRGDARTL

SEQ ID NO: 99299 - protein, 10 aa, synthetic construct
SETRGDARTL

SEQ ID NO: 99300 - protein, 10 aa, synthetic construct
SEYRGDARTL

SEQ ID NO: 99301 - protein, 10 aa, synthetic construct
SENRGDARTL

SEQ ID NO: 99302 - protein, 10 aa, synthetic construct
SEQRGDARTL

SEQ ID NO: 99303 - protein, 10 aa, synthetic construct
SEDRGDARTL

SEQ ID NO: 99304 - protein, 10 aa, synthetic construct
SEERGDARTL

SEQ ID NO: 99305 - protein, 10 aa, synthetic construct
TGGRGDARTL

SEQ ID NO: 99306 - protein, 10 aa, synthetic construct
TGARGDARTL

SEQ ID NO: 99307 - protein, 10 aa, synthetic construct
TGVRGDARTL

SEQ ID NO: 99308 - protein, 10 aa, synthetic construct
TGPRGDARTL

SEQ ID NO: 99309 - protein, 10 aa, synthetic construct
TGLRGDARTL

SEQ ID NO: 99310 - protein, 10 aa, synthetic construct
TGIRGDARTL

SEQ ID NO: 99311 - protein, 10 aa, synthetic construct
TGMRGDARTL

SEQ ID NO: 99312 - protein, 10 aa, synthetic construct
TGWRGDARTL

SEQ ID NO: 99313 - protein, 10 aa, synthetic construct
TGFRGDARTL

SEQ ID NO: 99314 - protein, 10 aa, synthetic construct
TGKRGDARTL

SEQ ID NO: 99315 - protein, 10 aa, synthetic construct
TGRRGDARTL

SEQ ID NO: 99316 - protein, 10 aa, synthetic construct
TGHRGDARTL

SEQ ID NO: 99317 - protein, 10 aa, synthetic construct
TGSRGDARTL

SEQ ID NO: 99318 - protein, 10 aa, synthetic construct
TGTRGDARTL

SEQ ID NO: 99319 - protein, 10 aa, synthetic construct
TGYRGDARTL

SEQ ID NO: 99320 - protein, 10 aa, synthetic construct
TGNRGDARTL

SEQ ID NO: 99321 - protein, 10 aa, synthetic construct
TGQRGDARTL

SEQ ID NO: 99322 - protein, 10 aa, synthetic construct
TGDRGDARTL

SEQ ID NO: 99323 - protein, 10 aa, synthetic construct
TGERGDARTL

SEQ ID NO: 99324 - protein, 10 aa, synthetic construct
TAGRGDARTL

SEQ ID NO: 99325 - protein, 10 aa, synthetic construct
TAARGDARTL

SEQ ID NO: 99326 - protein, 10 aa, synthetic construct
TAVRGDARTL

SEQ ID NO: 99327 - protein, 10 aa, synthetic construct
TAPRGDARTL

SEQ ID NO: 99328 - protein, 10 aa, synthetic construct
TALRGDARTL

SEQ ID NO: 99329 - protein, 10 aa, synthetic construct
TAIRGDARTL

SEQ ID NO: 99330 - protein, 10 aa, synthetic construct
TAMRGDARTL

SEQ ID NO: 99331 - protein, 10 aa, synthetic construct
TAWRGDARTL

SEQ ID NO: 99332 - protein, 10 aa, synthetic construct
TAFRGDARTL

SEQ ID NO: 99333 - protein, 10 aa, synthetic construct
TAKRGDARTL

SEQ ID NO: 99334 - protein, 10 aa, synthetic construct
TARRGDARTL

SEQ ID NO: 99335 - protein, 10 aa, synthetic construct
TAHRGDARTL

SEQ ID NO: 99336 - protein, 10 aa, synthetic construct
TASRGDARTL

SEQ ID NO: 99337 - protein, 10 aa, synthetic construct
TATRGDARTL

SEQ ID NO: 99338 - protein, 10 aa, synthetic construct
TAYRGDARTL

SEQ ID NO: 99339 - protein, 10 aa, synthetic construct
TANRGDARTL

SEQ ID NO: 99340 - protein, 10 aa, synthetic construct
TAQRGDARTL

SEQ ID NO: 99341 - protein, 10 aa, synthetic construct
TADRGDARTL

SEQ ID NO: 99342 - protein, 10 aa, synthetic construct
TAERGDARTL

SEQ ID NO: 99343 - protein, 10 aa, synthetic construct
TVGRGDARTL

SEQ ID NO: 99344 - protein, 10 aa, synthetic construct
TVARGDARTL

SEQ ID NO: 99345 - protein, 10 aa, synthetic construct
TVVRGDARTL

SEQ ID NO: 99346 - protein, 10 aa, synthetic construct
TVPRGDARTL

SEQ ID NO: 99347 - protein, 10 aa, synthetic construct
TVLRGDARTL

SEQ ID NO: 99348 - protein, 10 aa, synthetic construct
TVIRGDARTL

SEQ ID NO: 99349 - protein, 10 aa, synthetic construct
TVMRGDARTL

SEQ ID NO: 99350 - protein, 10 aa, synthetic construct
TVWRGDARTL

SEQ ID NO: 99351 - protein, 10 aa, synthetic construct
TVFRGDARTL

SEQ ID NO: 99352 - protein, 10 aa, synthetic construct
TVKRGDARTL

SEQ ID NO: 99353 - protein, 10 aa, synthetic construct
TVRRGDARTL

SEQ ID NO: 99354 - protein, 10 aa, synthetic construct
TVHRGDARTL

SEQ ID NO: 99355 - protein, 10 aa, synthetic construct
TVSRGDARTL

SEQ ID NO: 99356 - protein, 10 aa, synthetic construct
TVTRGDARTL

SEQ ID NO: 99357 - protein, 10 aa, synthetic construct
TVYRGDARTL

SEQ ID NO: 99358 - protein, 10 aa, synthetic construct
TVNRGDARTL

SEQ ID NO: 99359 - protein, 10 aa, synthetic construct
TVQRGDARTL

SEQ ID NO: 99360 - protein, 10 aa, synthetic construct
TVDRGDARTL

SEQ ID NO: 99361 - protein, 10 aa, synthetic construct
TVERGDARTL

SEQ ID NO: 99362 - protein, 10 aa, synthetic construct
TPGRGDARTL

SEQ ID NO: 99363 - protein, 10 aa, synthetic construct
TPARGDARTL

SEQ ID NO: 99364 - protein, 10 aa, synthetic construct
TPVRGDARTL

SEQ ID NO: 99365 - protein, 10 aa, synthetic construct
TPPRGDARTL

SEQ ID NO: 99366 - protein, 10 aa, synthetic construct
TPLRGDARTL

SEQ ID NO: 99367 - protein, 10 aa, synthetic construct
TPIRGDARTL

SEQ ID NO: 99368 - protein, 10 aa, synthetic construct
TPMRGDARTL

SEQ ID NO: 99369 - protein, 10 aa, synthetic construct
TPWRGDARTL

SEQ ID NO: 99370 - protein, 10 aa, synthetic construct
TPFRGDARTL

SEQ ID NO: 99371 - protein, 10 aa, synthetic construct
TPKRGDARTL

SEQ ID NO: 99372 - protein, 10 aa, synthetic construct
TPRRGDARTL

SEQ ID NO: 99373 - protein, 10 aa, synthetic construct
TPHRGDARTL

SEQ ID NO: 99374 - protein, 10 aa, synthetic construct
TPSRGDARTL

SEQ ID NO: 99375 - protein, 10 aa, synthetic construct
TPTRGDARTL

SEQ ID NO: 99376 - protein, 10 aa, synthetic construct
TPYRGDARTL

SEQ ID NO: 99377 - protein, 10 aa, synthetic construct
TPNRGDARTL

SEQ ID NO: 99378 - protein, 10 aa, synthetic construct
TPQRGDARTL

SEQ ID NO: 99379 - protein, 10 aa, synthetic construct
TPDRGDARTL

SEQ ID NO: 99380 - protein, 10 aa, synthetic construct
TPERGDARTL

SEQ ID NO: 99381 - protein, 10 aa, synthetic construct
TLGRGDARTL

SEQ ID NO: 99382 - protein, 10 aa, synthetic construct
TLARGDARTL

SEQ ID NO: 99383 - protein, 10 aa, synthetic construct
TLVRGDARTL

SEQ ID NO: 99384 - protein, 10 aa, synthetic construct
TLPRGDARTL

SEQ ID NO: 99385 - protein, 10 aa, synthetic construct
TLLRGDARTL

SEQ ID NO: 99386 - protein, 10 aa, synthetic construct
TLIRGDARTL

SEQ ID NO: 99387 - protein, 10 aa, synthetic construct
TLMRGDARTL

SEQ ID NO: 99388 - protein, 10 aa, synthetic construct
TLWRGDARTL

SEQ ID NO: 99389 - protein, 10 aa, synthetic construct
TLFRGDARTL

SEQ ID NO: 99390 - protein, 10 aa, synthetic construct
TLKRGDARTL

SEQ ID NO: 99391 - protein, 10 aa, synthetic construct
TLRRGDARTL

SEQ ID NO: 99392 - protein, 10 aa, synthetic construct
TLHRGDARTL

SEQ ID NO: 99393 - protein, 10 aa, synthetic construct
TLSRGDARTL

SEQ ID NO: 99394 - protein, 10 aa, synthetic construct
TLTRGDARTL

SEQ ID NO: 99395 - protein, 10 aa, synthetic construct
TLYRGDARTL

SEQ ID NO: 99396 - protein, 10 aa, synthetic construct
TLNRGDARTL

SEQ ID NO: 99397 - protein, 10 aa, synthetic construct
TLQRGDARTL

SEQ ID NO: 99398 - protein, 10 aa, synthetic construct
TLDRGDARTL

SEQ ID NO: 99399 - protein, 10 aa, synthetic construct
TLERGDARTL

SEQ ID NO: 99400 - protein, 10 aa, synthetic construct
TIGRGDARTL

SEQ ID NO: 99401 - protein, 10 aa, synthetic construct
TIARGDARTL

SEQ ID NO: 99402 - protein, 10 aa, synthetic construct
TIVRGDARTL

SEQ ID NO: 99403 - protein, 10 aa, synthetic construct
TIPRGDARTL

SEQ ID NO: 99404 - protein, 10 aa, synthetic construct
TILRGDARTL

SEQ ID NO: 99405 - protein, 10 aa, synthetic construct
TIIRGDARTL

SEQ ID NO: 99406 - protein, 10 aa, synthetic construct
TIMRGDARTL

SEQ ID NO: 99407 - protein, 10 aa, synthetic construct
TIWRGDARTL

SEQ ID NO: 99408 - protein, 10 aa, synthetic construct
TIFRGDARTL

SEQ ID NO: 99409 - protein, 10 aa, synthetic construct
TIKRGDARTL

SEQ ID NO: 99410 - protein, 10 aa, synthetic construct
TIRRGDARTL

SEQ ID NO: 99411 - protein, 10 aa, synthetic construct
TIHRGDARTL

SEQ ID NO: 99412 - protein, 10 aa, synthetic construct
TISRGDARTL

SEQ ID NO: 99413 - protein, 10 aa, synthetic construct
TITRGDARTL

SEQ ID NO: 99414 - protein, 10 aa, synthetic construct
TIYRGDARTL

SEQ ID NO: 99415 - protein, 10 aa, synthetic construct
TINRGDARTL

SEQ ID NO: 99416 - protein, 10 aa, synthetic construct
TIQRGDARTL

SEQ ID NO: 99417 - protein, 10 aa, synthetic construct
TIDRGDARTL

SEQ ID NO: 99418 - protein, 10 aa, synthetic construct
TIERGDARTL

SEQ ID NO: 99419 - protein, 10 aa, synthetic construct
TMGRGDARTL

SEQ ID NO: 99420 - protein, 10 aa, synthetic construct
TMARGDARTL

SEQ ID NO: 99421 - protein, 10 aa, synthetic construct
TMVRGDARTL

SEQ ID NO: 99422 - protein, 10 aa, synthetic construct
TMPRGDARTL

SEQ ID NO: 99423 - protein, 10 aa, synthetic construct
TMLRGDARTL

SEQ ID NO: 99424 - protein, 10 aa, synthetic construct
TMIRGDARTL

SEQ ID NO: 99425 - protein, 10 aa, synthetic construct
TMMRGDARTL

SEQ ID NO: 99426 - protein, 10 aa, synthetic construct
TMWRGDARTL

SEQ ID NO: 99427 - protein, 10 aa, synthetic construct
TMFRGDARTL

SEQ ID NO: 99428 - protein, 10 aa, synthetic construct
TMKRGDARTL

SEQ ID NO: 99429 - protein, 10 aa, synthetic construct
TMRRGDARTL

SEQ ID NO: 99430 - protein, 10 aa, synthetic construct
TMHRGDARTL

SEQ ID NO: 99431 - protein, 10 aa, synthetic construct
TMSRGDARTL

SEQ ID NO: 99432 - protein, 10 aa, synthetic construct
TMTRGDARTL

SEQ ID NO: 99433 - protein, 10 aa, synthetic construct
TMYRGDARTL

SEQ ID NO: 99434 - protein, 10 aa, synthetic construct
TMNRGDARTL

SEQ ID NO: 99435 - protein, 10 aa, synthetic construct
TMQRGDARTL

SEQ ID NO: 99436 - protein, 10 aa, synthetic construct
TMDRGDARTL

SEQ ID NO: 99437 - protein, 10 aa, synthetic construct
TMERGDARTL

SEQ ID NO: 99438 - protein, 10 aa, synthetic construct
TWGRGDARTL

SEQ ID NO: 99439 - protein, 10 aa, synthetic construct
TWARGDARTL

SEQ ID NO: 99440 - protein, 10 aa, synthetic construct
TWVRGDARTL

SEQ ID NO: 99441 - protein, 10 aa, synthetic construct
TWPRGDARTL

SEQ ID NO: 99442 - protein, 10 aa, synthetic construct
TWLRGDARTL

SEQ ID NO: 99443 - protein, 10 aa, synthetic construct
TWIRGDARTL

SEQ ID NO: 99444 - protein, 10 aa, synthetic construct
TWMRGDARTL

SEQ ID NO: 99445 - protein, 10 aa, synthetic construct
TWWRGDARTL

SEQ ID NO: 99446 - protein, 10 aa, synthetic construct
TWFRGDARTL

SEQ ID NO: 99447 - protein, 10 aa, synthetic construct
TWKRGDARTL

SEQ ID NO: 99448 - protein, 10 aa, synthetic construct
TWRRGDARTL

SEQ ID NO: 99449 - protein, 10 aa, synthetic construct
TWHRGDARTL

SEQ ID NO: 99450 - protein, 10 aa, synthetic construct
TWSRGDARTL

SEQ ID NO: 99451 - protein, 10 aa, synthetic construct
TWTRGDARTL

SEQ ID NO: 99452 - protein, 10 aa, synthetic construct
TWYRGDARTL

SEQ ID NO: 99453 - protein, 10 aa, synthetic construct
TWNRGDARTL

SEQ ID NO: 99454 - protein, 10 aa, synthetic construct
TWQRGDARTL

SEQ ID NO: 99455 - protein, 10 aa, synthetic construct
TWDRGDARTL

SEQ ID NO: 99456 - protein, 10 aa, synthetic construct
TWERGDARTL

SEQ ID NO: 99457 - protein, 10 aa, synthetic construct
TFGRGDARTL

SEQ ID NO: 99458 - protein, 10 aa, synthetic construct
TFARGDARTL

SEQ ID NO: 99459 - protein, 10 aa, synthetic construct
TFVRGDARTL

SEQ ID NO: 99460 - protein, 10 aa, synthetic construct
TFPRGDARTL

SEQ ID NO: 99461 - protein, 10 aa, synthetic construct
TFLRGDARTL

SEQ ID NO: 99462 - protein, 10 aa, synthetic construct
TFIRGDARTL

SEQ ID NO: 99463 - protein, 10 aa, synthetic construct
TFMRGDARTL

SEQ ID NO: 99464 - protein, 10 aa, synthetic construct
TFWRGDARTL

SEQ ID NO: 99465 - protein, 10 aa, synthetic construct
TFFRGDARTL

SEQ ID NO: 99466 - protein, 10 aa, synthetic construct
TFKRGDARTL

SEQ ID NO: 99467 - protein, 10 aa, synthetic construct
TFRRGDARTL

SEQ ID NO: 99468 - protein, 10 aa, synthetic construct
TFHRGDARTL

SEQ ID NO: 99469 - protein, 10 aa, synthetic construct
TFSRGDARTL

SEQ ID NO: 99470 - protein, 10 aa, synthetic construct
TFTRGDARTL

SEQ ID NO: 99471 - protein, 10 aa, synthetic construct
TFYRGDARTL

SEQ ID NO: 99472 - protein, 10 aa, synthetic construct
TFNRGDARTL

SEQ ID NO: 99473 - protein, 10 aa, synthetic construct
TFQRGDARTL

SEQ ID NO: 99474 - protein, 10 aa, synthetic construct
TFDRGDARTL

SEQ ID NO: 99475 - protein, 10 aa, synthetic construct
TFERGDARTL

SEQ ID NO: 99476 - protein, 10 aa, synthetic construct
TKGRGDARTL

SEQ ID NO: 99477 - protein, 10 aa, synthetic construct
TKARGDARTL

SEQ ID NO: 99478 - protein, 10 aa, synthetic construct
TKVRGDARTL

SEQ ID NO: 99479 - protein, 10 aa, synthetic construct
TKPRGDARTL

SEQ ID NO: 99480 - protein, 10 aa, synthetic construct
TKLRGDARTL

SEQ ID NO: 99481 - protein, 10 aa, synthetic construct
TKIRGDARTL

SEQ ID NO: 99482 - protein, 10 aa, synthetic construct
TKMRGDARTL

SEQ ID NO: 99483 - protein, 10 aa, synthetic construct
TKWRGDARTL

SEQ ID NO: 99484 - protein, 10 aa, synthetic construct
TKFRGDARTL

SEQ ID NO: 99485 - protein, 10 aa, synthetic construct
TKKRGDARTL

SEQ ID NO: 99486 - protein, 10 aa, synthetic construct
TKRRGDARTL

SEQ ID NO: 99487 - protein, 10 aa, synthetic construct
TKHRGDARTL

SEQ ID NO: 99488 - protein, 10 aa, synthetic construct
TKSRGDARTL

SEQ ID NO: 99489 - protein, 10 aa, synthetic construct
TKTRGDARTL

SEQ ID NO: 99490 - protein, 10 aa, synthetic construct
TKYRGDARTL

SEQ ID NO: 99491 - protein, 10 aa, synthetic construct
TKNRGDARTL

SEQ ID NO: 99492 - protein, 10 aa, synthetic construct
TKQRGDARTL

SEQ ID NO: 99493 - protein, 10 aa, synthetic construct
TKDRGDARTL

SEQ ID NO: 99494 - protein, 10 aa, synthetic construct
TKERGDARTL

SEQ ID NO: 99495 - protein, 10 aa, synthetic construct
TRGRGDARTL

SEQ ID NO: 99496 - protein, 10 aa, synthetic construct
TRARGDARTL

SEQ ID NO: 99497 - protein, 10 aa, synthetic construct
TRVRGDARTL

SEQ ID NO: 99498 - protein, 10 aa, synthetic construct
TRPRGDARTL

SEQ ID NO: 99499 - protein, 10 aa, synthetic construct
TRLRGDARTL

SEQ ID NO: 99500 - protein, 10 aa, synthetic construct
TRIRGDARTL

SEQ ID NO: 99501 - protein, 10 aa, synthetic construct
TRMRGDARTL

SEQ ID NO: 99502 - protein, 10 aa, synthetic construct
TRWRGDARTL

SEQ ID NO: 99503 - protein, 10 aa, synthetic construct
TRFRGDARTL

SEQ ID NO: 99504 - protein, 10 aa, synthetic construct
TRKRGDARTL

SEQ ID NO: 99505 - protein, 10 aa, synthetic construct
TRRRGDARTL

SEQ ID NO: 99506 - protein, 10 aa, synthetic construct
TRHRGDARTL

SEQ ID NO: 99507 - protein, 10 aa, synthetic construct
TRSRGDARTL

SEQ ID NO: 99508 - protein, 10 aa, synthetic construct
TRTRGDARTL

SEQ ID NO: 99509 - protein, 10 aa, synthetic construct
TRYRGDARTL

SEQ ID NO: 99510 - protein, 10 aa, synthetic construct
TRNRGDARTL

SEQ ID NO: 99511 - protein, 10 aa, synthetic construct
TRQRGDARTL

SEQ ID NO: 99512 - protein, 10 aa, synthetic construct
TRDRGDARTL

SEQ ID NO: 99513 - protein, 10 aa, synthetic construct
TRERGDARTL

SEQ ID NO: 99514 - protein, 10 aa, synthetic construct
THGRGDARTL

SEQ ID NO: 99515 - protein, 10 aa, synthetic construct
THARGDARTL

SEQ ID NO: 99516 - protein, 10 aa, synthetic construct
THVRGDARTL

SEQ ID NO: 99517 - protein, 10 aa, synthetic construct
THPRGDARTL

SEQ ID NO: 99518 - protein, 10 aa, synthetic construct
THLRGDARTL

SEQ ID NO: 99519 - protein, 10 aa, synthetic construct
THIRGDARTL

SEQ ID NO: 99520 - protein, 10 aa, synthetic construct
THMRGDARTL

SEQ ID NO: 99521 - protein, 10 aa, synthetic construct
THWRGDARTL

SEQ ID NO: 99522 - protein, 10 aa, synthetic construct
THFRGDARTL

SEQ ID NO: 99523 - protein, 10 aa, synthetic construct
THKRGDARTL

SEQ ID NO: 99524 - protein, 10 aa, synthetic construct
THRRGDARTL

SEQ ID NO: 99525 - protein, 10 aa, synthetic construct
THHRGDARTL

SEQ ID NO: 99526 - protein, 10 aa, synthetic construct
THSRGDARTL

SEQ ID NO: 99527 - protein, 10 aa, synthetic construct
THTRGDARTL

SEQ ID NO: 99528 - protein, 10 aa, synthetic construct
THYRGDARTL

SEQ ID NO: 99529 - protein, 10 aa, synthetic construct
THNRGDARTL

SEQ ID NO: 99530 - protein, 10 aa, synthetic construct
THQRGDARTL

SEQ ID NO: 99531 - protein, 10 aa, synthetic construct
THDRGDARTL

SEQ ID NO: 99532 - protein, 10 aa, synthetic construct
THERGDARTL

SEQ ID NO: 99533 - protein, 10 aa, synthetic construct
TSGRGDARTL

SEQ ID NO: 99534 - protein, 10 aa, synthetic construct
TSARGDARTL

SEQ ID NO: 99535 - protein, 10 aa, synthetic construct
TSVRGDARTL

SEQ ID NO: 99536 - protein, 10 aa, synthetic construct
TSPRGDARTL

SEQ ID NO: 99537 - protein, 10 aa, synthetic construct
TSLRGDARTL

SEQ ID NO: 99538 - protein, 10 aa, synthetic construct
TSIRGDARTL

SEQ ID NO: 99539 - protein, 10 aa, synthetic construct
TSMRGDARTL

SEQ ID NO: 99540 - protein, 10 aa, synthetic construct
TSWRGDARTL

SEQ ID NO: 99541 - protein, 10 aa, synthetic construct
TSFRGDARTL

SEQ ID NO: 99542 - protein, 10 aa, synthetic construct
TSKRGDARTL

SEQ ID NO: 99543 - protein, 10 aa, synthetic construct
TSRRGDARTL

SEQ ID NO: 99544 - protein, 10 aa, synthetic construct
TSHRGDARTL

SEQ ID NO: 99545 - protein, 10 aa, synthetic construct
TSSRGDARTL

SEQ ID NO: 99546 - protein, 10 aa, synthetic construct
TSTRGDARTL

SEQ ID NO: 99547 - protein, 10 aa, synthetic construct
TSYRGDARTL

SEQ ID NO: 99548 - protein, 10 aa, synthetic construct
TSNRGDARTL

SEQ ID NO: 99549 - protein, 10 aa, synthetic construct
TSQRGDARTL

SEQ ID NO: 99550 - protein, 10 aa, synthetic construct
TSDRGDARTL

SEQ ID NO: 99551 - protein, 10 aa, synthetic construct
TSERGDARTL

SEQ ID NO: 99552 - protein, 10 aa, synthetic construct
TTGRGDARTL

SEQ ID NO: 99553 - protein, 10 aa, synthetic construct
TTARGDARTL

SEQ ID NO: 99554 - protein, 10 aa, synthetic construct
TTVRGDARTL

SEQ ID NO: 99555 - protein, 10 aa, synthetic construct
TTPRGDARTL

SEQ ID NO: 99556 - protein, 10 aa, synthetic construct
TTLRGDARTL

SEQ ID NO: 99557 - protein, 10 aa, synthetic construct
TTIRGDARTL

SEQ ID NO: 99558 - protein, 10 aa, synthetic construct
TTMRGDARTL

SEQ ID NO: 99559 - protein, 10 aa, synthetic construct
TTWRGDARTL

SEQ ID NO: 99560 - protein, 10 aa, synthetic construct
TTFRGDARTL

SEQ ID NO: 99561 - protein, 10 aa, synthetic construct
TTKRGDARTL

SEQ ID NO: 99562 - protein, 10 aa, synthetic construct
TTRRGDARTL

SEQ ID NO: 99563 - protein, 10 aa, synthetic construct
TTHRGDARTL

SEQ ID NO: 99564 - protein, 10 aa, synthetic construct
TTSRGDARTL

SEQ ID NO: 99565 - protein, 10 aa, synthetic construct
TTTRGDARTL

SEQ ID NO: 99566 - protein, 10 aa, synthetic construct
TTYRGDARTL

SEQ ID NO: 99567 - protein, 10 aa, synthetic construct
TTNRGDARTL

SEQ ID NO: 99568 - protein, 10 aa, synthetic construct
TTQRGDARTL

SEQ ID NO: 99569 - protein, 10 aa, synthetic construct
TTDRGDARTL

SEQ ID NO: 99570 - protein, 10 aa, synthetic construct
TTERGDARTL

SEQ ID NO: 99571 - protein, 10 aa, synthetic construct
TYGRGDARTL

SEQ ID NO: 99572 - protein, 10 aa, synthetic construct
TYARGDARTL

SEQ ID NO: 99573 - protein, 10 aa, synthetic construct
TYVRGDARTL

SEQ ID NO: 99574 - protein, 10 aa, synthetic construct
TYPRGDARTL

SEQ ID NO: 99575 - protein, 10 aa, synthetic construct
TYLRGDARTL

SEQ ID NO: 99576 - protein, 10 aa, synthetic construct
TYIRGDARTL

SEQ ID NO: 99577 - protein, 10 aa, synthetic construct
TYMRGDARTL

SEQ ID NO: 99578 - protein, 10 aa, synthetic construct
TYWRGDARTL

SEQ ID NO: 99579 - protein, 10 aa, synthetic construct
TYFRGDARTL

SEQ ID NO: 99580 - protein, 10 aa, synthetic construct
TYKRGDARTL

SEQ ID NO: 99581 - protein, 10 aa, synthetic construct
TYRRGDARTL

SEQ ID NO: 99582 - protein, 10 aa, synthetic construct
TYHRGDARTL

SEQ ID NO: 99583 - protein, 10 aa, synthetic construct
TYSRGDARTL

SEQ ID NO: 99584 - protein, 10 aa, synthetic construct
TYTRGDARTL

SEQ ID NO: 99585 - protein, 10 aa, synthetic construct
TYYRGDARTL

SEQ ID NO: 99586 - protein, 10 aa, synthetic construct
TYNRGDARTL

SEQ ID NO: 99587 - protein, 10 aa, synthetic construct
TYQRGDARTL

SEQ ID NO: 99588 - protein, 10 aa, synthetic construct
TYDRGDARTL

SEQ ID NO: 99589 - protein, 10 aa, synthetic construct
TYERGDARTL

SEQ ID NO: 99590 - protein, 10 aa, synthetic construct
TNGRGDARTL

SEQ ID NO: 99591 - protein, 10 aa, synthetic construct
TNARGDARTL

SEQ ID NO: 99592 - protein, 10 aa, synthetic construct
TNVRGDARTL

SEQ ID NO: 99593 - protein, 10 aa, synthetic construct
TNPRGDARTL

SEQ ID NO: 99594 - protein, 10 aa, synthetic construct
TNLRGDARTL

SEQ ID NO: 99595 - protein, 10 aa, synthetic construct
TNIRGDARTL

SEQ ID NO: 99596 - protein, 10 aa, synthetic construct
TNMRGDARTL

SEQ ID NO: 99597 - protein, 10 aa, synthetic construct
TNWRGDARTL

SEQ ID NO: 99598 - protein, 10 aa, synthetic construct
TNFRGDARTL

SEQ ID NO: 99599 - protein, 10 aa, synthetic construct
TNKRGDARTL

SEQ ID NO: 99600 - protein, 10 aa, synthetic construct
TNRRGDARTL

SEQ ID NO: 99601 - protein, 10 aa, synthetic construct
TNHRGDARTL

SEQ ID NO: 99602 - protein, 10 aa, synthetic construct
TNSRGDARTL

SEQ ID NO: 99603 - protein, 10 aa, synthetic construct
TNTRGDARTL

SEQ ID NO: 99604 - protein, 10 aa, synthetic construct
TNYRGDARTL

SEQ ID NO: 99605 - protein, 10 aa, synthetic construct
TNNRGDARTL

SEQ ID NO: 99606 - protein, 10 aa, synthetic construct
TNQRGDARTL

SEQ ID NO: 99607 - protein, 10 aa, synthetic construct
TNDRGDARTL

SEQ ID NO: 99608 - protein, 10 aa, synthetic construct
TNERGDARTL

SEQ ID NO: 99609 - protein, 10 aa, synthetic construct
TQGRGDARTL

SEQ ID NO: 99610 - protein, 10 aa, synthetic construct
TQARGDARTL

SEQ ID NO: 99611 - protein, 10 aa, synthetic construct
TQVRGDARTL

SEQ ID NO: 99612 - protein, 10 aa, synthetic construct
TQPRGDARTL

SEQ ID NO: 99613 - protein, 10 aa, synthetic construct
TQLRGDARTL

SEQ ID NO: 99614 - protein, 10 aa, synthetic construct
TQIRGDARTL

SEQ ID NO: 99615 - protein, 10 aa, synthetic construct
TQMRGDARTL

SEQ ID NO: 99616 - protein, 10 aa, synthetic construct
TQWRGDARTL

SEQ ID NO: 99617 - protein, 10 aa, synthetic construct
TQFRGDARTL

SEQ ID NO: 99618 - protein, 10 aa, synthetic construct
TQKRGDARTL

SEQ ID NO: 99619 - protein, 10 aa, synthetic construct
TQRRGDARTL

SEQ ID NO: 99620 - protein, 10 aa, synthetic construct
TQHRGDARTL

SEQ ID NO: 99621 - protein, 10 aa, synthetic construct
TQSRGDARTL

SEQ ID NO: 99622 - protein, 10 aa, synthetic construct
TQTRGDARTL

SEQ ID NO: 99623 - protein, 10 aa, synthetic construct
TQYRGDARTL

SEQ ID NO: 99624 - protein, 10 aa, synthetic construct
TQNRGDARTL

SEQ ID NO: 99625 - protein, 10 aa, synthetic construct
TQQRGDARTL

SEQ ID NO: 99626 - protein, 10 aa, synthetic construct
TQDRGDARTL

SEQ ID NO: 99627 - protein, 10 aa, synthetic construct
TQERGDARTL

SEQ ID NO: 99628 - protein, 10 aa, synthetic construct
TDGRGDARTL

SEQ ID NO: 99629 - protein, 10 aa, synthetic construct
TDARGDARTL

SEQ ID NO: 99630 - protein, 10 aa, synthetic construct
TDVRGDARTL

SEQ ID NO: 99631 - protein, 10 aa, synthetic construct
TDPRGDARTL

SEQ ID NO: 99632 - protein, 10 aa, synthetic construct
TDLRGDARTL

SEQ ID NO: 99633 - protein, 10 aa, synthetic construct
TDIRGDARTL

SEQ ID NO: 99634 - protein, 10 aa, synthetic construct
TDMRGDARTL

SEQ ID NO: 99635 - protein, 10 aa, synthetic construct
TDWRGDARTL

SEQ ID NO: 99636 - protein, 10 aa, synthetic construct
TDFRGDARTL

SEQ ID NO: 99637 - protein, 10 aa, synthetic construct
TDKRGDARTL

SEQ ID NO: 99638 - protein, 10 aa, synthetic construct
TDRRGDARTL

SEQ ID NO: 99639 - protein, 10 aa, synthetic construct
TDHRGDARTL

SEQ ID NO: 99640 - protein, 10 aa, synthetic construct
TDSRGDARTL

SEQ ID NO: 99641 - protein, 10 aa, synthetic construct
TDTRGDARTL

SEQ ID NO: 99642 - protein, 10 aa, synthetic construct
TDYRGDARTL

SEQ ID NO: 99643 - protein, 10 aa, synthetic construct
TDNRGDARTL

SEQ ID NO: 99644 - protein, 10 aa, synthetic construct
TDQRGDARTL

SEQ ID NO: 99645 - protein, 10 aa, synthetic construct
TDDRGDARTL

SEQ ID NO: 99646 - protein, 10 aa, synthetic construct
TDERGDARTL

SEQ ID NO: 99647 - protein, 10 aa, synthetic construct
TEGRGDARTL

SEQ ID NO: 99648 - protein, 10 aa, synthetic construct
TEARGDARTL

SEQ ID NO: 99649 - protein, 10 aa, synthetic construct
TEVRGDARTL

SEQ ID NO: 99650 - protein, 10 aa, synthetic construct
TEPRGDARTL

SEQ ID NO: 99651 - protein, 10 aa, synthetic construct
TELRGDARTL

SEQ ID NO: 99652 - protein, 10 aa, synthetic construct
TEIRGDARTL

SEQ ID NO: 99653 - protein, 10 aa, synthetic construct
TEMRGDARTL

SEQ ID NO: 99654 - protein, 10 aa, synthetic construct
TEWRGDARTL

SEQ ID NO: 99655 - protein, 10 aa, synthetic construct
TEFRGDARTL

SEQ ID NO: 99656 - protein, 10 aa, synthetic construct
TEKRGDARTL

SEQ ID NO: 99657 - protein, 10 aa, synthetic construct
TERRGDARTL

SEQ ID NO: 99658 - protein, 10 aa, synthetic construct
TEHRGDARTL

SEQ ID NO: 99659 - protein, 10 aa, synthetic construct
TESRGDARTL

SEQ ID NO: 99660 - protein, 10 aa, synthetic construct
TETRGDARTL

SEQ ID NO: 99661 - protein, 10 aa, synthetic construct
TEYRGDARTL

SEQ ID NO: 99662 - protein, 10 aa, synthetic construct
TENRGDARTL

SEQ ID NO: 99663 - protein, 10 aa, synthetic construct
TEQRGDARTL

SEQ ID NO: 99664 - protein, 10 aa, synthetic construct
TEDRGDARTL

SEQ ID NO: 99665 - protein, 10 aa, synthetic construct
TEERGDARTL

SEQ ID NO: 99666 - protein, 10 aa, synthetic construct
AGGRGDARTL

SEQ ID NO: 99667 - protein, 10 aa, synthetic construct
AGARGDARTL

SEQ ID NO: 99668 - protein, 10 aa, synthetic construct
AGVRGDARTL

SEQ ID NO: 99669 - protein, 10 aa, synthetic construct
AGPRGDARTL

SEQ ID NO: 99670 - protein, 10 aa, synthetic construct
AGLRGDARTL

SEQ ID NO: 99671 - protein, 10 aa, synthetic construct
AGIRGDARTL

SEQ ID NO: 99672 - protein, 10 aa, synthetic construct
AGMRGDARTL

SEQ ID NO: 99673 - protein, 10 aa, synthetic construct
AGWRGDARTL

SEQ ID NO: 99674 - protein, 10 aa, synthetic construct
AGFRGDARTL

SEQ ID NO: 99675 - protein, 10 aa, synthetic construct
AGKRGDARTL

SEQ ID NO: 99676 - protein, 10 aa, synthetic construct
AGRRGDARTL

SEQ ID NO: 99677 - protein, 10 aa, synthetic construct
AGHRGDARTL

SEQ ID NO: 99678 - protein, 10 aa, synthetic construct
AGSRGDARTL

SEQ ID NO: 99679 - protein, 10 aa, synthetic construct
AGTRGDARTL

SEQ ID NO: 99680 - protein, 10 aa, synthetic construct
AGYRGDARTL

SEQ ID NO: 99681 - protein, 10 aa, synthetic construct
AGNRGDARTL

SEQ ID NO: 99682 - protein, 10 aa, synthetic construct
AGQRGDARTL

SEQ ID NO: 99683 - protein, 10 aa, synthetic construct
AGDRGDARTL

SEQ ID NO: 99684 - protein, 10 aa, synthetic construct
AGERGDARTL

SEQ ID NO: 99685 - protein, 10 aa, synthetic construct
AAGRGDARTL

SEQ ID NO: 99686 - protein, 10 aa, synthetic construct
AAARGDARTL

SEQ ID NO: 99687 - protein, 10 aa, synthetic construct
AAVRGDARTL

SEQ ID NO: 99688 - protein, 10 aa, synthetic construct
AAPRGDARTL

SEQ ID NO: 99689 - protein, 10 aa, synthetic construct
AALRGDARTL

SEQ ID NO: 99690 - protein, 10 aa, synthetic construct
AAIRGDARTL

SEQ ID NO: 99691 - protein, 10 aa, synthetic construct
AAMRGDARTL

SEQ ID NO: 99692 - protein, 10 aa, synthetic construct
AAWRGDARTL

SEQ ID NO: 99693 - protein, 10 aa, synthetic construct
AAFRGDARTL

SEQ ID NO: 99694 - protein, 10 aa, synthetic construct
AAKRGDARTL

SEQ ID NO: 99695 - protein, 10 aa, synthetic construct
AARRGDARTL

SEQ ID NO: 99696 - protein, 10 aa, synthetic construct
AAHRGDARTL

SEQ ID NO: 99697 - protein, 10 aa, synthetic construct
AASRGDARTL

SEQ ID NO: 99698 - protein, 10 aa, synthetic construct
AATRGDARTL

SEQ ID NO: 99699 - protein, 10 aa, synthetic construct
AAYRGDARTL

SEQ ID NO: 99700 - protein, 10 aa, synthetic construct
AANRGDARTL

SEQ ID NO: 99701 - protein, 10 aa, synthetic construct
AAQRGDARTL

SEQ ID NO: 99702 - protein, 10 aa, synthetic construct
AADRGDARTL

SEQ ID NO: 99703 - protein, 10 aa, synthetic construct
AAERGDARTL

SEQ ID NO: 99704 - protein, 10 aa, synthetic construct
AVGRGDARTL

SEQ ID NO: 99705 - protein, 10 aa, synthetic construct
AVARGDARTL

SEQ ID NO: 99706 - protein, 10 aa, synthetic construct
AVVRGDARTL

SEQ ID NO: 99707 - protein, 10 aa, synthetic construct
AVPRGDARTL

SEQ ID NO: 99708 - protein, 10 aa, synthetic construct
AVLRGDARTL

SEQ ID NO: 99709 - protein, 10 aa, synthetic construct
AVIRGDARTL

SEQ ID NO: 99710 - protein, 10 aa, synthetic construct
AVMRGDARTL

SEQ ID NO: 99711 - protein, 10 aa, synthetic construct
AVWRGDARTL

SEQ ID NO: 99712 - protein, 10 aa, synthetic construct
AVFRGDARTL

SEQ ID NO: 99713 - protein, 10 aa, synthetic construct
AVKRGDARTL

SEQ ID NO: 99714 - protein, 10 aa, synthetic construct
AVRRGDARTL

SEQ ID NO: 99715 - protein, 10 aa, synthetic construct
AVHRGDARTL

SEQ ID NO: 99716 - protein, 10 aa, synthetic construct
AVSRGDARTL

SEQ ID NO: 99717 - protein, 10 aa, synthetic construct
AVTRGDARTL

SEQ ID NO: 99718 - protein, 10 aa, synthetic construct
AVYRGDARTL

SEQ ID NO: 99719 - protein, 10 aa, synthetic construct
AVNRGDARTL

SEQ ID NO: 99720 - protein, 10 aa, synthetic construct
AVQRGDARTL

SEQ ID NO: 99721 - protein, 10 aa, synthetic construct
AVDRGDARTL

SEQ ID NO: 99722 - protein, 10 aa, synthetic construct
AVERGDARTL

SEQ ID NO: 99723 - protein, 10 aa, synthetic construct
APGRGDARTL

SEQ ID NO: 99724 - protein, 10 aa, synthetic construct
APARGDARTL

SEQ ID NO: 99725 - protein, 10 aa, synthetic construct
APVRGDARTL

SEQ ID NO: 99726 - protein, 10 aa, synthetic construct
APPRGDARTL

SEQ ID NO: 99727 - protein, 10 aa, synthetic construct
APLRGDARTL

SEQ ID NO: 99728 - protein, 10 aa, synthetic construct
APIRGDARTL

SEQ ID NO: 99729 - protein, 10 aa, synthetic construct
APMRGDARTL

SEQ ID NO: 99730 - protein, 10 aa, synthetic construct
APWRGDARTL

SEQ ID NO: 99731 - protein, 10 aa, synthetic construct
APFRGDARTL

SEQ ID NO: 99732 - protein, 10 aa, synthetic construct
APKRGDARTL

SEQ ID NO: 99733 - protein, 10 aa, synthetic construct
APRRGDARTL

SEQ ID NO: 99734 - protein, 10 aa, synthetic construct
APHRGDARTL

SEQ ID NO: 99735 - protein, 10 aa, synthetic construct
APSRGDARTL

SEQ ID NO: 99736 - protein, 10 aa, synthetic construct
APTRGDARTL

SEQ ID NO: 99737 - protein, 10 aa, synthetic construct
APYRGDARTL

SEQ ID NO: 99738 - protein, 10 aa, synthetic construct
APNRGDARTL

SEQ ID NO: 99739 - protein, 10 aa, synthetic construct
APQRGDARTL

SEQ ID NO: 99740 - protein, 10 aa, synthetic construct
APDRGDARTL

SEQ ID NO: 99741 - protein, 10 aa, synthetic construct
APERGDARTL

SEQ ID NO: 99742 - protein, 10 aa, synthetic construct
ALGRGDARTL

SEQ ID NO: 99743 - protein, 10 aa, synthetic construct
ALARGDARTL

SEQ ID NO: 99744 - protein, 10 aa, synthetic construct
ALVRGDARTL

SEQ ID NO: 99745 - protein, 10 aa, synthetic construct
ALPRGDARTL

SEQ ID NO: 99746 - protein, 10 aa, synthetic construct
ALLRGDARTL

SEQ ID NO: 99747 - protein, 10 aa, synthetic construct
ALIRGDARTL

SEQ ID NO: 99748 - protein, 10 aa, synthetic construct
ALMRGDARTL

SEQ ID NO: 99749 - protein, 10 aa, synthetic construct
ALWRGDARTL

SEQ ID NO: 99750 - protein, 10 aa, synthetic construct
ALFRGDARTL

SEQ ID NO: 99751 - protein, 10 aa, synthetic construct
ALKRGDARTL

SEQ ID NO: 99752 - protein, 10 aa, synthetic construct
ALRRGDARTL

SEQ ID NO: 99753 - protein, 10 aa, synthetic construct
ALHRGDARTL

SEQ ID NO: 99754 - protein, 10 aa, synthetic construct
ALSRGDARTL

SEQ ID NO: 99755 - protein, 10 aa, synthetic construct
ALTRGDARTL

SEQ ID NO: 99756 - protein, 10 aa, synthetic construct
ALYRGDARTL

SEQ ID NO: 99757 - protein, 10 aa, synthetic construct
ALNRGDARTL

SEQ ID NO: 99758 - protein, 10 aa, synthetic construct
ALQRGDARTL

SEQ ID NO: 99759 - protein, 10 aa, synthetic construct
ALDRGDARTL

SEQ ID NO: 99760 - protein, 10 aa, synthetic construct
ALERGDARTL

SEQ ID NO: 99761 - protein, 10 aa, synthetic construct
AIGRGDARTL

SEQ ID NO: 99762 - protein, 10 aa, synthetic construct
AIARGDARTL

SEQ ID NO: 99763 - protein, 10 aa, synthetic construct
AIVRGDARTL

SEQ ID NO: 99764 - protein, 10 aa, synthetic construct
AIPRGDARTL

SEQ ID NO: 99765 - protein, 10 aa, synthetic construct
AILRGDARTL

SEQ ID NO: 99766 - protein, 10 aa, synthetic construct
AIIRGDARTL

SEQ ID NO: 99767 - protein, 10 aa, synthetic construct
AIMRGDARTL

SEQ ID NO: 99768 - protein, 10 aa, synthetic construct
AIWRGDARTL

SEQ ID NO: 99769 - protein, 10 aa, synthetic construct
AIFRGDARTL

SEQ ID NO: 99770 - protein, 10 aa, synthetic construct
AIKRGDARTL

SEQ ID NO: 99771 - protein, 10 aa, synthetic construct
AIRRGDARTL

SEQ ID NO: 99772 - protein, 10 aa, synthetic construct
AIHRGDARTL

SEQ ID NO: 99773 - protein, 10 aa, synthetic construct
AISRGDARTL

SEQ ID NO: 99774 - protein, 10 aa, synthetic construct
AITRGDARTL

SEQ ID NO: 99775 - protein, 10 aa, synthetic construct
AIYRGDARTL

SEQ ID NO: 99776 - protein, 10 aa, synthetic construct
AINRGDARTL

SEQ ID NO: 99777 - protein, 10 aa, synthetic construct
AIQRGDARTL

SEQ ID NO: 99778 - protein, 10 aa, synthetic construct
AIDRGDARTL

SEQ ID NO: 99779 - protein, 10 aa, synthetic construct
AIERGDARTL

SEQ ID NO: 99780 - protein, 10 aa, synthetic construct
AMGRGDARTL

SEQ ID NO: 99781 - protein, 10 aa, synthetic construct
AMARGDARTL

SEQ ID NO: 99782 - protein, 10 aa, synthetic construct
AMVRGDARTL

SEQ ID NO: 99783 - protein, 10 aa, synthetic construct
AMPRGDARTL

SEQ ID NO: 99784 - protein, 10 aa, synthetic construct
AMLRGDARTL

SEQ ID NO: 99785 - protein, 10 aa, synthetic construct
AMIRGDARTL

SEQ ID NO: 99786 - protein, 10 aa, synthetic construct
AMMRGDARTL

SEQ ID NO: 99787 - protein, 10 aa, synthetic construct
AMWRGDARTL

SEQ ID NO: 99788 - protein, 10 aa, synthetic construct
AMFRGDARTL

SEQ ID NO: 99789 - protein, 10 aa, synthetic construct
AMKRGDARTL

SEQ ID NO: 99790 - protein, 10 aa, synthetic construct
AMRRGDARTL

SEQ ID NO: 99791 - protein, 10 aa, synthetic construct
AMHRGDARTL

SEQ ID NO: 99792 - protein, 10 aa, synthetic construct
AMSRGDARTL

SEQ ID NO: 99793 - protein, 10 aa, synthetic construct
AMTRGDARTL

SEQ ID NO: 99794 - protein, 10 aa, synthetic construct
AMYRGDARTL

SEQ ID NO: 99795 - protein, 10 aa, synthetic construct
AMNRGDARTL

SEQ ID NO: 99796 - protein, 10 aa, synthetic construct
AMQRGDARTL

SEQ ID NO: 99797 - protein, 10 aa, synthetic construct
AMDRGDARTL

SEQ ID NO: 99798 - protein, 10 aa, synthetic construct
AMERGDARTL

SEQ ID NO: 99799 - protein, 10 aa, synthetic construct
AWGRGDARTL

SEQ ID NO: 99800 - protein, 10 aa, synthetic construct
AWARGDARTL

SEQ ID NO: 99801 - protein, 10 aa, synthetic construct
AWVRGDARTL

SEQ ID NO: 99802 - protein, 10 aa, synthetic construct
AWPRGDARTL

SEQ ID NO: 99803 - protein, 10 aa, synthetic construct
AWLRGDARTL

SEQ ID NO: 99804 - protein, 10 aa, synthetic construct
AWIRGDARTL

SEQ ID NO: 99805 - protein, 10 aa, synthetic construct
AWMRGDARTL

SEQ ID NO: 99806 - protein, 10 aa, synthetic construct
AWWRGDARTL

SEQ ID NO: 99807 - protein, 10 aa, synthetic construct
AWFRGDARTL

SEQ ID NO: 99808 - protein, 10 aa, synthetic construct
AWKRGDARTL

SEQ ID NO: 99809 - protein, 10 aa, synthetic construct
AWRRGDARTL

SEQ ID NO: 99810 - protein, 10 aa, synthetic construct
AWHRGDARTL

SEQ ID NO: 99811 - protein, 10 aa, synthetic construct
AWSRGDARTL

SEQ ID NO: 99812 - protein, 10 aa, synthetic construct
AWTRGDARTL

SEQ ID NO: 99813 - protein, 10 aa, synthetic construct
AWYRGDARTL

SEQ ID NO: 99814 - protein, 10 aa, synthetic construct
AWNRGDARTL

SEQ ID NO: 99815 - protein, 10 aa, synthetic construct
AWQRGDARTL

SEQ ID NO: 99816 - protein, 10 aa, synthetic construct
AWDRGDARTL

SEQ ID NO: 99817 - protein, 10 aa, synthetic construct
AWERGDARTL

SEQ ID NO: 99818 - protein, 10 aa, synthetic construct
AFGRGDARTL

SEQ ID NO: 99819 - protein, 10 aa, synthetic construct
AFARGDARTL

SEQ ID NO: 99820 - protein, 10 aa, synthetic construct
AFVRGDARTL

SEQ ID NO: 99821 - protein, 10 aa, synthetic construct
AFPRGDARTL

SEQ ID NO: 99822 - protein, 10 aa, synthetic construct
AFLRGDARTL

SEQ ID NO: 99823 - protein, 10 aa, synthetic construct
AFIRGDARTL

SEQ ID NO: 99824 - protein, 10 aa, synthetic construct
AFMRGDARTL

SEQ ID NO: 99825 - protein, 10 aa, synthetic construct
AFWRGDARTL

SEQ ID NO: 99826 - protein, 10 aa, synthetic construct
AFFRGDARTL

SEQ ID NO: 99827 - protein, 10 aa, synthetic construct
AFKRGDARTL

SEQ ID NO: 99828 - protein, 10 aa, synthetic construct
AFRRGDARTL

SEQ ID NO: 99829 - protein, 10 aa, synthetic construct
AFHRGDARTL

SEQ ID NO: 99830 - protein, 10 aa, synthetic construct
AFSRGDARTL

SEQ ID NO: 99831 - protein, 10 aa, synthetic construct
AFTRGDARTL

SEQ ID NO: 99832 - protein, 10 aa, synthetic construct
AFYRGDARTL

SEQ ID NO: 99833 - protein, 10 aa, synthetic construct
AFNRGDARTL

SEQ ID NO: 99834 - protein, 10 aa, synthetic construct
AFQRGDARTL

SEQ ID NO: 99835 - protein, 10 aa, synthetic construct
AFDRGDARTL

SEQ ID NO: 99836 - protein, 10 aa, synthetic construct
AFERGDARTL

SEQ ID NO: 99837 - protein, 10 aa, synthetic construct
AKGRGDARTL

SEQ ID NO: 99838 - protein, 10 aa, synthetic construct
AKARGDARTL

SEQ ID NO: 99839 - protein, 10 aa, synthetic construct
AKVRGDARTL

SEQ ID NO: 99840 - protein, 10 aa, synthetic construct
AKPRGDARTL

SEQ ID NO: 99841 - protein, 10 aa, synthetic construct
AKLRGDARTL

SEQ ID NO: 99842 - protein, 10 aa, synthetic construct
AKIRGDARTL

SEQ ID NO: 99843 - protein, 10 aa, synthetic construct
AKMRGDARTL

SEQ ID NO: 99844 - protein, 10 aa, synthetic construct
AKWRGDARTL

SEQ ID NO: 99845 - protein, 10 aa, synthetic construct
AKFRGDARTL

SEQ ID NO: 99846 - protein, 10 aa, synthetic construct
AKKRGDARTL

SEQ ID NO: 99847 - protein, 10 aa, synthetic construct
AKRRGDARTL

SEQ ID NO: 99848 - protein, 10 aa, synthetic construct
AKHRGDARTL

SEQ ID NO: 99849 - protein, 10 aa, synthetic construct
AKSRGDARTL

SEQ ID NO: 99850 - protein, 10 aa, synthetic construct
AKTRGDARTL

SEQ ID NO: 99851 - protein, 10 aa, synthetic construct
AKYRGDARTL

SEQ ID NO: 99852 - protein, 10 aa, synthetic construct
AKNRGDARTL

SEQ ID NO: 99853 - protein, 10 aa, synthetic construct
AKQRGDARTL

SEQ ID NO: 99854 - protein, 10 aa, synthetic construct
AKDRGDARTL

SEQ ID NO: 99855 - protein, 10 aa, synthetic construct
AKERGDARTL

SEQ ID NO: 99856 - protein, 10 aa, synthetic construct
ARGRGDARTL

SEQ ID NO: 99857 - protein, 10 aa, synthetic construct
ARARGDARTL

SEQ ID NO: 99858 - protein, 10 aa, synthetic construct
ARVRGDARTL

SEQ ID NO: 99859 - protein, 10 aa, synthetic construct
ARPRGDARTL

SEQ ID NO: 99860 - protein, 10 aa, synthetic construct
ARLRGDARTL

SEQ ID NO: 99861 - protein, 10 aa, synthetic construct
ARIRGDARTL

SEQ ID NO: 99862 - protein, 10 aa, synthetic construct
ARMRGDARTL

SEQ ID NO: 99863 - protein, 10 aa, synthetic construct
ARWRGDARTL

SEQ ID NO: 99864 - protein, 10 aa, synthetic construct
ARFRGDARTL

SEQ ID NO: 99865 - protein, 10 aa, synthetic construct
ARKRGDARTL

SEQ ID NO: 99866 - protein, 10 aa, synthetic construct
ARRRGDARTL

SEQ ID NO: 99867 - protein, 10 aa, synthetic construct
ARHRGDARTL

SEQ ID NO: 99868 - protein, 10 aa, synthetic construct
ARSRGDARTL

SEQ ID NO: 99869 - protein, 10 aa, synthetic construct
ARTRGDARTL

SEQ ID NO: 99870 - protein, 10 aa, synthetic construct
ARYRGDARTL

SEQ ID NO: 99871 - protein, 10 aa, synthetic construct
ARNRGDARTL

SEQ ID NO: 99872 - protein, 10 aa, synthetic construct
ARQRGDARTL

SEQ ID NO: 99873 - protein, 10 aa, synthetic construct
ARDRGDARTL

SEQ ID NO: 99874 - protein, 10 aa, synthetic construct
ARERGDARTL

SEQ ID NO: 99875 - protein, 10 aa, synthetic construct
AHGRGDARTL

SEQ ID NO: 99876 - protein, 10 aa, synthetic construct
AHARGDARTL

SEQ ID NO: 99877 - protein, 10 aa, synthetic construct
AHVRGDARTL

SEQ ID NO: 99878 - protein, 10 aa, synthetic construct
AHPRGDARTL

SEQ ID NO: 99879 - protein, 10 aa, synthetic construct
AHLRGDARTL

SEQ ID NO: 99880 - protein, 10 aa, synthetic construct
AHIRGDARTL

SEQ ID NO: 99881 - protein, 10 aa, synthetic construct
AHMRGDARTL

SEQ ID NO: 99882 - protein, 10 aa, synthetic construct
AHWRGDARTL

SEQ ID NO: 99883 - protein, 10 aa, synthetic construct
AHFRGDARTL

SEQ ID NO: 99884 - protein, 10 aa, synthetic construct
AHKRGDARTL

SEQ ID NO: 99885 - protein, 10 aa, synthetic construct
AHRRGDARTL

SEQ ID NO: 99886 - protein, 10 aa, synthetic construct
AHHRGDARTL

SEQ ID NO: 99887 - protein, 10 aa, synthetic construct
AHSRGDARTL

SEQ ID NO: 99888 - protein, 10 aa, synthetic construct
AHTRGDARTL

SEQ ID NO: 99889 - protein, 10 aa, synthetic construct
AHYRGDARTL

SEQ ID NO: 99890 - protein, 10 aa, synthetic construct
AHNRGDARTL

SEQ ID NO: 99891 - protein, 10 aa, synthetic construct
AHQRGDARTL

SEQ ID NO: 99892 - protein, 10 aa, synthetic construct
AHDRGDARTL

SEQ ID NO: 99893 - protein, 10 aa, synthetic construct
AHERGDARTL

SEQ ID NO: 99894 - protein, 10 aa, synthetic construct
ASGRGDARTL

SEQ ID NO: 99895 - protein, 10 aa, synthetic construct
ASARGDARTL

SEQ ID NO: 99896 - protein, 10 aa, synthetic construct
ASVRGDARTL

SEQ ID NO: 99897 - protein, 10 aa, synthetic construct
ASPRGDARTL

SEQ ID NO: 99898 - protein, 10 aa, synthetic construct
ASLRGDARTL

SEQ ID NO: 99899 - protein, 10 aa, synthetic construct
ASIRGDARTL

SEQ ID NO: 99900 - protein, 10 aa, synthetic construct
ASMRGDARTL

SEQ ID NO: 99901 - protein, 10 aa, synthetic construct
ASWRGDARTL

SEQ ID NO: 99902 - protein, 10 aa, synthetic construct
ASFRGDARTL

SEQ ID NO: 99903 - protein, 10 aa, synthetic construct
ASKRGDARTL

SEQ ID NO: 99904 - protein, 10 aa, synthetic construct
ASRRGDARTL

SEQ ID NO: 99905 - protein, 10 aa, synthetic construct
ASHRGDARTL

SEQ ID NO: 99906 - protein, 10 aa, synthetic construct
ASSRGDARTL

SEQ ID NO: 99907 - protein, 10 aa, synthetic construct
ASTRGDARTL

SEQ ID NO: 99908 - protein, 10 aa, synthetic construct
ASYRGDARTL

SEQ ID NO: 99909 - protein, 10 aa, synthetic construct
ASNRGDARTL

SEQ ID NO: 99910 - protein, 10 aa, synthetic construct
ASQRGDARTL

SEQ ID NO: 99911 - protein, 10 aa, synthetic construct
ASDRGDARTL

SEQ ID NO: 99912 - protein, 10 aa, synthetic construct
ASERGDARTL

SEQ ID NO: 99913 - protein, 10 aa, synthetic construct
ATGRGDARTL

SEQ ID NO: 99914 - protein, 10 aa, synthetic construct
ATARGDARTL

SEQ ID NO: 99915 - protein, 10 aa, synthetic construct
ATVRGDARTL

SEQ ID NO: 99916 - protein, 10 aa, synthetic construct
ATPRGDARTL

SEQ ID NO: 99917 - protein, 10 aa, synthetic construct
ATLRGDARTL

SEQ ID NO: 99918 - protein, 10 aa, synthetic construct
ATIRGDARTL

SEQ ID NO: 99919 - protein, 10 aa, synthetic construct
ATMRGDARTL

SEQ ID NO: 99920 - protein, 10 aa, synthetic construct
ATWRGDARTL

SEQ ID NO: 99921 - protein, 10 aa, synthetic construct
ATFRGDARTL

SEQ ID NO: 99922 - protein, 10 aa, synthetic construct
ATKRGDARTL

SEQ ID NO: 99923 - protein, 10 aa, synthetic construct
ATRRGDARTL

SEQ ID NO: 99924 - protein, 10 aa, synthetic construct
ATHRGDARTL

SEQ ID NO: 99925 - protein, 10 aa, synthetic construct
ATSRGDARTL

SEQ ID NO: 99926 - protein, 10 aa, synthetic construct
ATTRGDARTL

SEQ ID NO: 99927 - protein, 10 aa, synthetic construct
ATYRGDARTL

SEQ ID NO: 99928 - protein, 10 aa, synthetic construct
ATNRGDARTL

SEQ ID NO: 99929 - protein, 10 aa, synthetic construct
ATQRGDARTL

SEQ ID NO: 99930 - protein, 10 aa, synthetic construct
ATDRGDARTL

SEQ ID NO: 99931 - protein, 10 aa, synthetic construct
ATERGDARTL

SEQ ID NO: 99932 - protein, 10 aa, synthetic construct
AYGRGDARTL

SEQ ID NO: 99933 - protein, 10 aa, synthetic construct
AYARGDARTL

SEQ ID NO: 99934 - protein, 10 aa, synthetic construct
AYVRGDARTL

SEQ ID NO: 99935 - protein, 10 aa, synthetic construct
AYPRGDARTL

SEQ ID NO: 99936 - protein, 10 aa, synthetic construct
AYLRGDARTL

SEQ ID NO: 99937 - protein, 10 aa, synthetic construct
AYIRGDARTL

SEQ ID NO: 99938 - protein, 10 aa, synthetic construct
AYMRGDARTL

SEQ ID NO: 99939 - protein, 10 aa, synthetic construct
AYWRGDARTL

SEQ ID NO: 99940 - protein, 10 aa, synthetic construct
AYFRGDARTL

SEQ ID NO: 99941 - protein, 10 aa, synthetic construct
AYKRGDARTL

SEQ ID NO: 99942 - protein, 10 aa, synthetic construct
AYRRGDARTL

SEQ ID NO: 99943 - protein, 10 aa, synthetic construct
AYHRGDARTL

SEQ ID NO: 99944 - protein, 10 aa, synthetic construct
AYSRGDARTL

SEQ ID NO: 99945 - protein, 10 aa, synthetic construct
AYTRGDARTL

SEQ ID NO: 99946 - protein, 10 aa, synthetic construct
AYYRGDARTL

SEQ ID NO: 99947 - protein, 10 aa, synthetic construct
AYNRGDARTL

SEQ ID NO: 99948 - protein, 10 aa, synthetic construct
AYQRGDARTL

SEQ ID NO: 99949 - protein, 10 aa, synthetic construct
AYDRGDARTL

SEQ ID NO: 99950 - protein, 10 aa, synthetic construct
AYERGDARTL

SEQ ID NO: 99951 - protein, 10 aa, synthetic construct
ANGRGDARTL

SEQ ID NO: 99952 - protein, 10 aa, synthetic construct
ANARGDARTL

SEQ ID NO: 99953 - protein, 10 aa, synthetic construct
ANVRGDARTL

SEQ ID NO: 99954 - protein, 10 aa, synthetic construct
ANPRGDARTL

SEQ ID NO: 99955 - protein, 10 aa, synthetic construct
ANLRGDARTL

SEQ ID NO: 99956 - protein, 10 aa, synthetic construct
ANIRGDARTL

SEQ ID NO: 99957 - protein, 10 aa, synthetic construct
ANMRGDARTL

SEQ ID NO: 99958 - protein, 10 aa, synthetic construct
ANWRGDARTL

SEQ ID NO: 99959 - protein, 10 aa, synthetic construct
ANFRGDARTL

SEQ ID NO: 99960 - protein, 10 aa, synthetic construct
ANKRGDARTL

SEQ ID NO: 99961 - protein, 10 aa, synthetic construct
ANRRGDARTL

SEQ ID NO: 99962 - protein, 10 aa, synthetic construct
ANHRGDARTL

SEQ ID NO: 99963 - protein, 10 aa, synthetic construct
ANSRGDARTL

SEQ ID NO: 99964 - protein, 10 aa, synthetic construct
ANTRGDARTL

SEQ ID NO: 99965 - protein, 10 aa, synthetic construct
ANYRGDARTL

SEQ ID NO: 99966 - protein, 10 aa, synthetic construct
ANNRGDARTL

SEQ ID NO: 99967 - protein, 10 aa, synthetic construct
ANQRGDARTL

SEQ ID NO: 99968 - protein, 10 aa, synthetic construct
ANDRGDARTL

SEQ ID NO: 99969 - protein, 10 aa, synthetic construct
ANERGDARTL

SEQ ID NO: 99970 - protein, 10 aa, synthetic construct
AQGRGDARTL

SEQ ID NO: 99971 - protein, 10 aa, synthetic construct
AQARGDARTL

SEQ ID NO: 99972 - protein, 10 aa, synthetic construct
AQVRGDARTL

SEQ ID NO: 99973 - protein, 10 aa, synthetic construct
AQPRGDARTL

SEQ ID NO: 99974 - protein, 10 aa, synthetic construct
AQLRGDARTL

SEQ ID NO: 99975 - protein, 10 aa, synthetic construct
AQIRGDARTL

SEQ ID NO: 99976 - protein, 10 aa, synthetic construct
AQMRGDARTL

SEQ ID NO: 99977 - protein, 10 aa, synthetic construct
AQWRGDARTL

SEQ ID NO: 99978 - protein, 10 aa, synthetic construct
AQFRGDARTL

SEQ ID NO: 99979 - protein, 10 aa, synthetic construct
AQKRGDARTL

SEQ ID NO: 99980 - protein, 10 aa, synthetic construct
AQRRGDARTL

SEQ ID NO: 99981 - protein, 10 aa, synthetic construct
AQHRGDARTL

SEQ ID NO: 99982 - protein, 10 aa, synthetic construct
AQSRGDARTL

SEQ ID NO: 99983 - protein, 10 aa, synthetic construct
AQTRGDARTL

SEQ ID NO: 99984 - protein, 10 aa, synthetic construct
AQYRGDARTL

SEQ ID NO: 99985 - protein, 10 aa, synthetic construct
AQNRGDARTL

SEQ ID NO: 99986 - protein, 10 aa, synthetic construct
AQQRGDARTL

SEQ ID NO: 99987 - protein, 10 aa, synthetic construct
AQDRGDARTL

SEQ ID NO: 99988 - protein, 10 aa, synthetic construct
AQERGDARTL

SEQ ID NO: 99989 - protein, 10 aa, synthetic construct
ADGRGDARTL

SEQ ID NO: 99990 - protein, 10 aa, synthetic construct
ADARGDARTL

SEQ ID NO: 99991 - protein, 10 aa, synthetic construct
ADVRGDARTL

SEQ ID NO: 99992 - protein, 10 aa, synthetic construct
ADPRGDARTL

SEQ ID NO: 99993 - protein, 10 aa, synthetic construct
ADLRGDARTL

SEQ ID NO: 99994 - protein, 10 aa, synthetic construct
ADIRGDARTL

SEQ ID NO: 99995 - protein, 10 aa, synthetic construct
ADMRGDARTL

SEQ ID NO: 99996 - protein, 10 aa, synthetic construct
ADWRGDARTL

SEQ ID NO: 99997 - protein, 10 aa, synthetic construct
ADFRGDARTL

SEQ ID NO: 99998 - protein, 10 aa, synthetic construct
ADKRGDARTL

SEQ ID NO: 99999 - protein, 10 aa, synthetic construct
ADRRGDARTL

SEQ ID NO: 100000 - protein, 10 aa, synthetic construct
ADHRGDARTL

SEQ ID NO: 100001 - protein, 10 aa, synthetic construct
ADSRGDARTL

SEQ ID NO: 100002 - protein, 10 aa, synthetic construct
ADTRGDARTL

SEQ ID NO: 100003 - protein, 10 aa, synthetic construct
ADYRGDARTL

SEQ ID NO: 100004 - protein, 10 aa, synthetic construct
ADNRGDARTL

SEQ ID NO: 100005 - protein, 10 aa, synthetic construct
ADQRGDARTL

SEQ ID NO: 100006 - protein, 10 aa, synthetic construct
ADDRGDARTL

SEQ ID NO: 100007 - protein, 10 aa, synthetic construct
ADERGDARTL

SEQ ID NO: 100008 - protein, 10 aa, synthetic construct
AEGRGDARTL

SEQ ID NO: 100009 - protein, 10 aa, synthetic construct
AEARGDARTL

SEQ ID NO: 100010 - protein, 10 aa, synthetic construct
AEVRGDARTL

SEQ ID NO: 100011 - protein, 10 aa, synthetic construct
AEPRGDARTL

SEQ ID NO: 100012 - protein, 10 aa, synthetic construct
AELRGDARTL

SEQ ID NO: 100013 - protein, 10 aa, synthetic construct
AEIRGDARTL

SEQ ID NO: 100014 - protein, 10 aa, synthetic construct
AEMRGDARTL

SEQ ID NO: 100015 - protein, 10 aa, synthetic construct
AEWRGDARTL

SEQ ID NO: 100016 - protein, 10 aa, synthetic construct
AEFRGDARTL

SEQ ID NO: 100017 - protein, 10 aa, synthetic construct
AEKRGDARTL

SEQ ID NO: 100018 - protein, 10 aa, synthetic construct
AERRGDARTL

SEQ ID NO: 100019 - protein, 10 aa, synthetic construct
AEHRGDARTL

SEQ ID NO: 100020 - protein, 10 aa, synthetic construct
AESRGDARTL

SEQ ID NO: 100021 - protein, 10 aa, synthetic construct
AETRGDARTL

SEQ ID NO: 100022 - protein, 10 aa, synthetic construct
AEYRGDARTL

SEQ ID NO: 100023 - protein, 10 aa, synthetic construct
AENRGDARTL

SEQ ID NO: 100024 - protein, 10 aa, synthetic construct
AEQRGDARTL

SEQ ID NO: 100025 - protein, 10 aa, synthetic construct
AEDRGDARTL

SEQ ID NO: 100026 - protein, 10 aa, synthetic construct
AEERGDARTL

SEQ ID NO: 100027 - protein, 10 aa, synthetic construct
EGGRGDARTL

SEQ ID NO: 100028 - protein, 10 aa, synthetic construct
EGARGDARTL

SEQ ID NO: 100029 - protein, 10 aa, synthetic construct
EGVRGDARTL

SEQ ID NO: 100030 - protein, 10 aa, synthetic construct
EGPRGDARTL

SEQ ID NO: 100031 - protein, 10 aa, synthetic construct
EGLRGDARTL

SEQ ID NO: 100032 - protein, 10 aa, synthetic construct
EGIRGDARTL

SEQ ID NO: 100033 - protein, 10 aa, synthetic construct
EGMRGDARTL

SEQ ID NO: 100034 - protein, 10 aa, synthetic construct
EGWRGDARTL

SEQ ID NO: 100035 - protein, 10 aa, synthetic construct
EGFRGDARTL

SEQ ID NO: 100036 - protein, 10 aa, synthetic construct
EGKRGDARTL

SEQ ID NO: 100037 - protein, 10 aa, synthetic construct
EGRRGDARTL

SEQ ID NO: 100038 - protein, 10 aa, synthetic construct
EGHRGDARTL

SEQ ID NO: 100039 - protein, 10 aa, synthetic construct
EGSRGDARTL

SEQ ID NO: 100040 - protein, 10 aa, synthetic construct
EGTRGDARTL

SEQ ID NO: 100041 - protein, 10 aa, synthetic construct
EGYRGDARTL

SEQ ID NO: 100042 - protein, 10 aa, synthetic construct
EGNRGDARTL

SEQ ID NO: 100043 - protein, 10 aa, synthetic construct
EGQRGDARTL

SEQ ID NO: 100044 - protein, 10 aa, synthetic construct
EGDRGDARTL

SEQ ID NO: 100045 - protein, 10 aa, synthetic construct
EGERGDARTL

SEQ ID NO: 100046 - protein, 10 aa, synthetic construct
EAGRGDARTL

SEQ ID NO: 100047 - protein, 10 aa, synthetic construct
EAARGDARTL

SEQ ID NO: 100048 - protein, 10 aa, synthetic construct
EAVRGDARTL

SEQ ID NO: 100049 - protein, 10 aa, synthetic construct
EAPRGDARTL

SEQ ID NO: 100050 - protein, 10 aa, synthetic construct
EALRGDARTL

SEQ ID NO: 100051 - protein, 10 aa, synthetic construct
EAIRGDARTL

SEQ ID NO: 100052 - protein, 10 aa, synthetic construct
EAMRGDARTL

SEQ ID NO: 100053 - protein, 10 aa, synthetic construct
EAWRGDARTL

SEQ ID NO: 100054 - protein, 10 aa, synthetic construct
EAFRGDARTL

SEQ ID NO: 100055 - protein, 10 aa, synthetic construct
EAKRGDARTL

SEQ ID NO: 100056 - protein, 10 aa, synthetic construct
EARRGDARTL

SEQ ID NO: 100057 - protein, 10 aa, synthetic construct
EAHRGDARTL

SEQ ID NO: 100058 - protein, 10 aa, synthetic construct
EASRGDARTL

SEQ ID NO: 100059 - protein, 10 aa, synthetic construct
EATRGDARTL

SEQ ID NO: 100060 - protein, 10 aa, synthetic construct
EAYRGDARTL

SEQ ID NO: 100061 - protein, 10 aa, synthetic construct
EANRGDARTL

SEQ ID NO: 100062 - protein, 10 aa, synthetic construct
EAQRGDARTL

SEQ ID NO: 100063 - protein, 10 aa, synthetic construct
EADRGDARTL

SEQ ID NO: 100064 - protein, 10 aa, synthetic construct
EAERGDARTL

SEQ ID NO: 100065 - protein, 10 aa, synthetic construct
EVGRGDARTL

SEQ ID NO: 100066 - protein, 10 aa, synthetic construct
EVARGDARTL

SEQ ID NO: 100067 - protein, 10 aa, synthetic construct
EVVRGDARTL

SEQ ID NO: 100068 - protein, 10 aa, synthetic construct
EVPRGDARTL

SEQ ID NO: 100069 - protein, 10 aa, synthetic construct
EVLRGDARTL

SEQ ID NO: 100070 - protein, 10 aa, synthetic construct
EVIRGDARTL

SEQ ID NO: 100071 - protein, 10 aa, synthetic construct
EVMRGDARTL

SEQ ID NO: 100072 - protein, 10 aa, synthetic construct
EVWRGDARTL

SEQ ID NO: 100073 - protein, 10 aa, synthetic construct
EVFRGDARTL

SEQ ID NO: 100074 - protein, 10 aa, synthetic construct
EVKRGDARTL

SEQ ID NO: 100075 - protein, 10 aa, synthetic construct
EVRRGDARTL

SEQ ID NO: 100076 - protein, 10 aa, synthetic construct
EVHRGDARTL

SEQ ID NO: 100077 - protein, 10 aa, synthetic construct
EVSRGDARTL

SEQ ID NO: 100078 - protein, 10 aa, synthetic construct
EVTRGDARTL

SEQ ID NO: 100079 - protein, 10 aa, synthetic construct
EVYRGDARTL

SEQ ID NO: 100080 - protein, 10 aa, synthetic construct
EVNRGDARTL

SEQ ID NO: 100081 - protein, 10 aa, synthetic construct
EVQRGDARTL

SEQ ID NO: 100082 - protein, 10 aa, synthetic construct
EVDRGDARTL

SEQ ID NO: 100083 - protein, 10 aa, synthetic construct
EVERGDARTL

SEQ ID NO: 100084 - protein, 10 aa, synthetic construct
EPGRGDARTL

SEQ ID NO: 100085 - protein, 10 aa, synthetic construct
EPARGDARTL

SEQ ID NO: 100086 - protein, 10 aa, synthetic construct
EPVRGDARTL

SEQ ID NO: 100087 - protein, 10 aa, synthetic construct
EPPRGDARTL

SEQ ID NO: 100088 - protein, 10 aa, synthetic construct
EPLRGDARTL

SEQ ID NO: 100089 - protein, 10 aa, synthetic construct
EPIRGDARTL

SEQ ID NO: 100090 - protein, 10 aa, synthetic construct
EPMRGDARTL

SEQ ID NO: 100091 - protein, 10 aa, synthetic construct
EPWRGDARTL

SEQ ID NO: 100092 - protein, 10 aa, synthetic construct
EPFRGDARTL

SEQ ID NO: 100093 - protein, 10 aa, synthetic construct
EPKRGDARTL

SEQ ID NO: 100094 - protein, 10 aa, synthetic construct
EPRRGDARTL

SEQ ID NO: 100095 - protein, 10 aa, synthetic construct
EPHRGDARTL

SEQ ID NO: 100096 - protein, 10 aa, synthetic construct
EPSRGDARTL

SEQ ID NO: 100097 - protein, 10 aa, synthetic construct
EPTRGDARTL

SEQ ID NO: 100098 - protein, 10 aa, synthetic construct
EPYRGDARTL

SEQ ID NO: 100099 - protein, 10 aa, synthetic construct
EPNRGDARTL

SEQ ID NO: 100100 - protein, 10 aa, synthetic construct
EPQRGDARTL

SEQ ID NO: 100101 - protein, 10 aa, synthetic construct
EPDRGDARTL

SEQ ID NO: 100102 - protein, 10 aa, synthetic construct
EPERGDARTL

SEQ ID NO: 100103 - protein, 10 aa, synthetic construct
ELGRGDARTL

SEQ ID NO: 100104 - protein, 10 aa, synthetic construct
ELARGDARTL

SEQ ID NO: 100105 - protein, 10 aa, synthetic construct
ELVRGDARTL

SEQ ID NO: 100106 - protein, 10 aa, synthetic construct
ELPRGDARTL

SEQ ID NO: 100107 - protein, 10 aa, synthetic construct
ELLRGDARTL

SEQ ID NO: 100108 - protein, 10 aa, synthetic construct
ELIRGDARTL

SEQ ID NO: 100109 - protein, 10 aa, synthetic construct
ELMRGDARTL

SEQ ID NO: 100110 - protein, 10 aa, synthetic construct
ELWRGDARTL

SEQ ID NO: 100111 - protein, 10 aa, synthetic construct
ELFRGDARTL

SEQ ID NO: 100112 - protein, 10 aa, synthetic construct
ELKRGDARTL

SEQ ID NO: 100113 - protein, 10 aa, synthetic construct
ELRRGDARTL

SEQ ID NO: 100114 - protein, 10 aa, synthetic construct
ELHRGDARTL

SEQ ID NO: 100115 - protein, 10 aa, synthetic construct
ELSRGDARTL

SEQ ID NO: 100116 - protein, 10 aa, synthetic construct
ELTRGDARTL

SEQ ID NO: 100117 - protein, 10 aa, synthetic construct
ELYRGDARTL

SEQ ID NO: 100118 - protein, 10 aa, synthetic construct
ELNRGDARTL

SEQ ID NO: 100119 - protein, 10 aa, synthetic construct
ELQRGDARTL

SEQ ID NO: 100120 - protein, 10 aa, synthetic construct
ELDRGDARTL

SEQ ID NO: 100121 - protein, 10 aa, synthetic construct
ELERGDARTL

SEQ ID NO: 100122 - protein, 10 aa, synthetic construct
EIGRGDARTL

SEQ ID NO: 100123 - protein, 10 aa, synthetic construct
EIARGDARTL

SEQ ID NO: 100124 - protein, 10 aa, synthetic construct
EIVRGDARTL

SEQ ID NO: 100125 - protein, 10 aa, synthetic construct
EIPRGDARTL

SEQ ID NO: 100126 - protein, 10 aa, synthetic construct
EILRGDARTL

SEQ ID NO: 100127 - protein, 10 aa, synthetic construct
EIIRGDARTL

SEQ ID NO: 100128 - protein, 10 aa, synthetic construct
EIMRGDARTL

SEQ ID NO: 100129 - protein, 10 aa, synthetic construct
EIWRGDARTL

SEQ ID NO: 100130 - protein, 10 aa, synthetic construct
EIFRGDARTL

SEQ ID NO: 100131 - protein, 10 aa, synthetic construct
EIKRGDARTL

SEQ ID NO: 100132 - protein, 10 aa, synthetic construct
EIRRGDARTL

SEQ ID NO: 100133 - protein, 10 aa, synthetic construct
EIHRGDARTL

SEQ ID NO: 100134 - protein, 10 aa, synthetic construct
EISRGDARTL

SEQ ID NO: 100135 - protein, 10 aa, synthetic construct
EITRGDARTL

SEQ ID NO: 100136 - protein, 10 aa, synthetic construct
EIYRGDARTL

SEQ ID NO: 100137 - protein, 10 aa, synthetic construct
EINRGDARTL

SEQ ID NO: 100138 - protein, 10 aa, synthetic construct
EIQRGDARTL

SEQ ID NO: 100139 - protein, 10 aa, synthetic construct
EIDRGDARTL

SEQ ID NO: 100140 - protein, 10 aa, synthetic construct
EIERGDARTL

SEQ ID NO: 100141 - protein, 10 aa, synthetic construct
EMGRGDARTL

SEQ ID NO: 100142 - protein, 10 aa, synthetic construct
EMARGDARTL

SEQ ID NO: 100143 - protein, 10 aa, synthetic construct
EMVRGDARTL

SEQ ID NO: 100144 - protein, 10 aa, synthetic construct
EMPRGDARTL

SEQ ID NO: 100145 - protein, 10 aa, synthetic construct
EMLRGDARTL

SEQ ID NO: 100146 - protein, 10 aa, synthetic construct
EMIRGDARTL

SEQ ID NO: 100147 - protein, 10 aa, synthetic construct
EMMRGDARTL

SEQ ID NO: 100148 - protein, 10 aa, synthetic construct
EMWRGDARTL

SEQ ID NO: 100149 - protein, 10 aa, synthetic construct
EMFRGDARTL

SEQ ID NO: 100150 - protein, 10 aa, synthetic construct
EMKRGDARTL

SEQ ID NO: 100151 - protein, 10 aa, synthetic construct
EMRRGDARTL

SEQ ID NO: 100152 - protein, 10 aa, synthetic construct
EMHRGDARTL

SEQ ID NO: 100153 - protein, 10 aa, synthetic construct
EMSRGDARTL

SEQ ID NO: 100154 - protein, 10 aa, synthetic construct
EMTRGDARTL

SEQ ID NO: 100155 - protein, 10 aa, synthetic construct
EMYRGDARTL

SEQ ID NO: 100156 - protein, 10 aa, synthetic construct
EMNRGDARTL

SEQ ID NO: 100157 - protein, 10 aa, synthetic construct
EMQRGDARTL

SEQ ID NO: 100158 - protein, 10 aa, synthetic construct
EMDRGDARTL

SEQ ID NO: 100159 - protein, 10 aa, synthetic construct
EMERGDARTL

SEQ ID NO: 100160 - protein, 10 aa, synthetic construct
EWGRGDARTL

SEQ ID NO: 100161 - protein, 10 aa, synthetic construct
EWARGDARTL

SEQ ID NO: 100162 - protein, 10 aa, synthetic construct
EWVRGDARTL

SEQ ID NO: 100163 - protein, 10 aa, synthetic construct
EWPRGDARTL

SEQ ID NO: 100164 - protein, 10 aa, synthetic construct
EWLRGDARTL

SEQ ID NO: 100165 - protein, 10 aa, synthetic construct
EWIRGDARTL

SEQ ID NO: 100166 - protein, 10 aa, synthetic construct
EWMRGDARTL

SEQ ID NO: 100167 - protein, 10 aa, synthetic construct
EWWRGDARTL

SEQ ID NO: 100168 - protein, 10 aa, synthetic construct
EWFRGDARTL

SEQ ID NO: 100169 - protein, 10 aa, synthetic construct
EWKRGDARTL

SEQ ID NO: 100170 - protein, 10 aa, synthetic construct
EWRRGDARTL

SEQ ID NO: 100171 - protein, 10 aa, synthetic construct
EWHRGDARTL

SEQ ID NO: 100172 - protein, 10 aa, synthetic construct
EWSRGDARTL

SEQ ID NO: 100173 - protein, 10 aa, synthetic construct
EWTRGDARTL

SEQ ID NO: 100174 - protein, 10 aa, synthetic construct
EWYRGDARTL

SEQ ID NO: 100175 - protein, 10 aa, synthetic construct
EWNRGDARTL

SEQ ID NO: 100176 - protein, 10 aa, synthetic construct
EWQRGDARTL

SEQ ID NO: 100177 - protein, 10 aa, synthetic construct
EWDRGDARTL

SEQ ID NO: 100178 - protein, 10 aa, synthetic construct
EWERGDARTL

SEQ ID NO: 100179 - protein, 10 aa, synthetic construct
EFGRGDARTL

SEQ ID NO: 100180 - protein, 10 aa, synthetic construct
EFARGDARTL

SEQ ID NO: 100181 - protein, 10 aa, synthetic construct
EFVRGDARTL

SEQ ID NO: 100182 - protein, 10 aa, synthetic construct
EFPRGDARTL

SEQ ID NO: 100183 - protein, 10 aa, synthetic construct
EFLRGDARTL

SEQ ID NO: 100184 - protein, 10 aa, synthetic construct
EFIRGDARTL

SEQ ID NO: 100185 - protein, 10 aa, synthetic construct
EFMRGDARTL

SEQ ID NO: 100186 - protein, 10 aa, synthetic construct
EFWRGDARTL

SEQ ID NO: 100187 - protein, 10 aa, synthetic construct
EFFRGDARTL

SEQ ID NO: 100188 - protein, 10 aa, synthetic construct
EFKRGDARTL

SEQ ID NO: 100189 - protein, 10 aa, synthetic construct
EFRRGDARTL

SEQ ID NO: 100190 - protein, 10 aa, synthetic construct
EFHRGDARTL

SEQ ID NO: 100191 - protein, 10 aa, synthetic construct
EFSRGDARTL

SEQ ID NO: 100192 - protein, 10 aa, synthetic construct
EFTRGDARTL

SEQ ID NO: 100193 - protein, 10 aa, synthetic construct
EFYRGDARTL

SEQ ID NO: 100194 - protein, 10 aa, synthetic construct
EFNRGDARTL

SEQ ID NO: 100195 - protein, 10 aa, synthetic construct
EFQRGDARTL

SEQ ID NO: 100196 - protein, 10 aa, synthetic construct
EFDRGDARTL

SEQ ID NO: 100197 - protein, 10 aa, synthetic construct
EFERGDARTL

SEQ ID NO: 100198 - protein, 10 aa, synthetic construct
EKGRGDARTL

SEQ ID NO: 100199 - protein, 10 aa, synthetic construct
EKARGDARTL

SEQ ID NO: 100200 - protein, 10 aa, synthetic construct
EKVRGDARTL

SEQ ID NO: 100201 - protein, 10 aa, synthetic construct
EKPRGDARTL

SEQ ID NO: 100202 - protein, 10 aa, synthetic construct
EKLRGDARTL

SEQ ID NO: 100203 - protein, 10 aa, synthetic construct
EKIRGDARTL

SEQ ID NO: 100204 - protein, 10 aa, synthetic construct
EKMRGDARTL

SEQ ID NO: 100205 - protein, 10 aa, synthetic construct
EKWRGDARTL

SEQ ID NO: 100206 - protein, 10 aa, synthetic construct
EKFRGDARTL

SEQ ID NO: 100207 - protein, 10 aa, synthetic construct
EKKRGDARTL

SEQ ID NO: 100208 - protein, 10 aa, synthetic construct
EKRRGDARTL

SEQ ID NO: 100209 - protein, 10 aa, synthetic construct
EKHRGDARTL

SEQ ID NO: 100210 - protein, 10 aa, synthetic construct
EKSRGDARTL

SEQ ID NO: 100211 - protein, 10 aa, synthetic construct
EKTRGDARTL

SEQ ID NO: 100212 - protein, 10 aa, synthetic construct
EKYRGDARTL

SEQ ID NO: 100213 - protein, 10 aa, synthetic construct
EKNRGDARTL

SEQ ID NO: 100214 - protein, 10 aa, synthetic construct
EKQRGDARTL

SEQ ID NO: 100215 - protein, 10 aa, synthetic construct
EKDRGDARTL

SEQ ID NO: 100216 - protein, 10 aa, synthetic construct
EKERGDARTL

SEQ ID NO: 100217 - protein, 10 aa, synthetic construct
ERGRGDARTL

SEQ ID NO: 100218 - protein, 10 aa, synthetic construct
ERARGDARTL

SEQ ID NO: 100219 - protein, 10 aa, synthetic construct
ERVRGDARTL

SEQ ID NO: 100220 - protein, 10 aa, synthetic construct
ERPRGDARTL

SEQ ID NO: 100221 - protein, 10 aa, synthetic construct
ERLRGDARTL

SEQ ID NO: 100222 - protein, 10 aa, synthetic construct
ERIRGDARTL

SEQ ID NO: 100223 - protein, 10 aa, synthetic construct
ERMRGDARTL

SEQ ID NO: 100224 - protein, 10 aa, synthetic construct
ERWRGDARTL

SEQ ID NO: 100225 - protein, 10 aa, synthetic construct
ERFRGDARTL

SEQ ID NO: 100226 - protein, 10 aa, synthetic construct
ERKRGDARTL

SEQ ID NO: 100227 - protein, 10 aa, synthetic construct
ERRRGDARTL

SEQ ID NO: 100228 - protein, 10 aa, synthetic construct
ERHRGDARTL

SEQ ID NO: 100229 - protein, 10 aa, synthetic construct
ERSRGDARTL

SEQ ID NO: 100230 - protein, 10 aa, synthetic construct
ERTRGDARTL

SEQ ID NO: 100231 - protein, 10 aa, synthetic construct
ERYRGDARTL

SEQ ID NO: 100232 - protein, 10 aa, synthetic construct
ERNRGDARTL

SEQ ID NO: 100233 - protein, 10 aa, synthetic construct
ERQRGDARTL

SEQ ID NO: 100234 - protein, 10 aa, synthetic construct
ERDRGDARTL

SEQ ID NO: 100235 - protein, 10 aa, synthetic construct
ERERGDARTL

SEQ ID NO: 100236 - protein, 10 aa, synthetic construct
EHGRGDARTL

SEQ ID NO: 100237 - protein, 10 aa, synthetic construct
EHARGDARTL

SEQ ID NO: 100238 - protein, 10 aa, synthetic construct
EHVRGDARTL

SEQ ID NO: 100239 - protein, 10 aa, synthetic construct
EHPRGDARTL

SEQ ID NO: 100240 - protein, 10 aa, synthetic construct
EHLRGDARTL

SEQ ID NO: 100241 - protein, 10 aa, synthetic construct
EHIRGDARTL

SEQ ID NO: 100242 - protein, 10 aa, synthetic construct
EHMRGDARTL

SEQ ID NO: 100243 - protein, 10 aa, synthetic construct
EHWRGDARTL

SEQ ID NO: 100244 - protein, 10 aa, synthetic construct
EHFRGDARTL

SEQ ID NO: 100245 - protein, 10 aa, synthetic construct
EHKRGDARTL

SEQ ID NO: 100246 - protein, 10 aa, synthetic construct
EHRRGDARTL

SEQ ID NO: 100247 - protein, 10 aa, synthetic construct
EHHRGDARTL

SEQ ID NO: 100248 - protein, 10 aa, synthetic construct
EHSRGDARTL

SEQ ID NO: 100249 - protein, 10 aa, synthetic construct
EHTRGDARTL

SEQ ID NO: 100250 - protein, 10 aa, synthetic construct
EHYRGDARTL

SEQ ID NO: 100251 - protein, 10 aa, synthetic construct
EHNRGDARTL

SEQ ID NO: 100252 - protein, 10 aa, synthetic construct
EHQRGDARTL

SEQ ID NO: 100253 - protein, 10 aa, synthetic construct
EHDRGDARTL

SEQ ID NO: 100254 - protein, 10 aa, synthetic construct
EHERGDARTL

SEQ ID NO: 100255 - protein, 10 aa, synthetic construct
ESGRGDARTL

SEQ ID NO: 100256 - protein, 10 aa, synthetic construct
ESARGDARTL

SEQ ID NO: 100257 - protein, 10 aa, synthetic construct
ESVRGDARTL

SEQ ID NO: 100258 - protein, 10 aa, synthetic construct
ESPRGDARTL

SEQ ID NO: 100259 - protein, 10 aa, synthetic construct
ESLRGDARTL

SEQ ID NO: 100260 - protein, 10 aa, synthetic construct
ESIRGDARTL

SEQ ID NO: 100261 - protein, 10 aa, synthetic construct
ESMRGDARTL

SEQ ID NO: 100262 - protein, 10 aa, synthetic construct
ESWRGDARTL

SEQ ID NO: 100263 - protein, 10 aa, synthetic construct
ESFRGDARTL

SEQ ID NO: 100264 - protein, 10 aa, synthetic construct
ESKRGDARTL

SEQ ID NO: 100265 - protein, 10 aa, synthetic construct
ESRRGDARTL

SEQ ID NO: 100266 - protein, 10 aa, synthetic construct
ESHRGDARTL

SEQ ID NO: 100267 - protein, 10 aa, synthetic construct
ESSRGDARTL

SEQ ID NO: 100268 - protein, 10 aa, synthetic construct
ESTRGDARTL

SEQ ID NO: 100269 - protein, 10 aa, synthetic construct
ESYRGDARTL

SEQ ID NO: 100270 - protein, 10 aa, synthetic construct
ESNRGDARTL

SEQ ID NO: 100271 - protein, 10 aa, synthetic construct
ESQRGDARTL

SEQ ID NO: 100272 - protein, 10 aa, synthetic construct
ESDRGDARTL

SEQ ID NO: 100273 - protein, 10 aa, synthetic construct
ESERGDARTL

SEQ ID NO: 100274 - protein, 10 aa, synthetic construct
ETGRGDARTL

SEQ ID NO: 100275 - protein, 10 aa, synthetic construct
ETARGDARTL

SEQ ID NO: 100276 - protein, 10 aa, synthetic construct
ETVRGDARTL

SEQ ID NO: 100277 - protein, 10 aa, synthetic construct
ETPRGDARTL

SEQ ID NO: 100278 - protein, 10 aa, synthetic construct
ETLRGDARTL

SEQ ID NO: 100279 - protein, 10 aa, synthetic construct
ETIRGDARTL

SEQ ID NO: 100280 - protein, 10 aa, synthetic construct
ETMRGDARTL

SEQ ID NO: 100281 - protein, 10 aa, synthetic construct
ETWRGDARTL

SEQ ID NO: 100282 - protein, 10 aa, synthetic construct
ETFRGDARTL

SEQ ID NO: 100283 - protein, 10 aa, synthetic construct
ETKRGDARTL

SEQ ID NO: 100284 - protein, 10 aa, synthetic construct
ETRRGDARTL

SEQ ID NO: 100285 - protein, 10 aa, synthetic construct
ETHRGDARTL

SEQ ID NO: 100286 - protein, 10 aa, synthetic construct
ETSRGDARTL

SEQ ID NO: 100287 - protein, 10 aa, synthetic construct
ETTRGDARTL

SEQ ID NO: 100288 - protein, 10 aa, synthetic construct
ETYRGDARTL

SEQ ID NO: 100289 - protein, 10 aa, synthetic construct
ETNRGDARTL

SEQ ID NO: 100290 - protein, 10 aa, synthetic construct
ETQRGDARTL

SEQ ID NO: 100291 - protein, 10 aa, synthetic construct
ETDRGDARTL

SEQ ID NO: 100292 - protein, 10 aa, synthetic construct
ETERGDARTL

SEQ ID NO: 100293 - protein, 10 aa, synthetic construct
EYGRGDARTL

SEQ ID NO: 100294 - protein, 10 aa, synthetic construct
EYARGDARTL

SEQ ID NO: 100295 - protein, 10 aa, synthetic construct
EYVRGDARTL

SEQ ID NO: 100296 - protein, 10 aa, synthetic construct
EYPRGDARTL

SEQ ID NO: 100297 - protein, 10 aa, synthetic construct
EYLRGDARTL

SEQ ID NO: 100298 - protein, 10 aa, synthetic construct
EYIRGDARTL

SEQ ID NO: 100299 - protein, 10 aa, synthetic construct
EYMRGDARTL

SEQ ID NO: 100300 - protein, 10 aa, synthetic construct
EYWRGDARTL

SEQ ID NO: 100301 - protein, 10 aa, synthetic construct
EYFRGDARTL

SEQ ID NO: 100302 - protein, 10 aa, synthetic construct
EYKRGDARTL

SEQ ID NO: 100303 - protein, 10 aa, synthetic construct
EYRRGDARTL

SEQ ID NO: 100304 - protein, 10 aa, synthetic construct
EYHRGDARTL

SEQ ID NO: 100305 - protein, 10 aa, synthetic construct
EYSRGDARTL

SEQ ID NO: 100306 - protein, 10 aa, synthetic construct
EYTRGDARTL

SEQ ID NO: 100307 - protein, 10 aa, synthetic construct
EYYRGDARTL

SEQ ID NO: 100308 - protein, 10 aa, synthetic construct
EYNRGDARTL

SEQ ID NO: 100309 - protein, 10 aa, synthetic construct
EYQRGDARTL

SEQ ID NO: 100310 - protein, 10 aa, synthetic construct
EYDRGDARTL

SEQ ID NO: 100311 - protein, 10 aa, synthetic construct
EYERGDARTL

SEQ ID NO: 100312 - protein, 10 aa, synthetic construct
ENGRGDARTL

SEQ ID NO: 100313 - protein, 10 aa, synthetic construct
ENARGDARTL

SEQ ID NO: 100314 - protein, 10 aa, synthetic construct
ENVRGDARTL

SEQ ID NO: 100315 - protein, 10 aa, synthetic construct
ENPRGDARTL

SEQ ID NO: 100316 - protein, 10 aa, synthetic construct
ENLRGDARTL

SEQ ID NO: 100317 - protein, 10 aa, synthetic construct
ENIRGDARTL

SEQ ID NO: 100318 - protein, 10 aa, synthetic construct
ENMRGDARTL

SEQ ID NO: 100319 - protein, 10 aa, synthetic construct
ENWRGDARTL

SEQ ID NO: 100320 - protein, 10 aa, synthetic construct
ENFRGDARTL

SEQ ID NO: 100321 - protein, 10 aa, synthetic construct
ENKRGDARTL

SEQ ID NO: 100322 - protein, 10 aa, synthetic construct
ENRRGDARTL

SEQ ID NO: 100323 - protein, 10 aa, synthetic construct
ENHRGDARTL

SEQ ID NO: 100324 - protein, 10 aa, synthetic construct
ENSRGDARTL

SEQ ID NO: 100325 - protein, 10 aa, synthetic construct
ENTRGDARTL

SEQ ID NO: 100326 - protein, 10 aa, synthetic construct
ENYRGDARTL

SEQ ID NO: 100327 - protein, 10 aa, synthetic construct
ENNRGDARTL

SEQ ID NO: 100328 - protein, 10 aa, synthetic construct
ENQRGDARTL

SEQ ID NO: 100329 - protein, 10 aa, synthetic construct
ENDRGDARTL

SEQ ID NO: 100330 - protein, 10 aa, synthetic construct
ENERGDARTL

SEQ ID NO: 100331 - protein, 10 aa, synthetic construct
EQGRGDARTL

SEQ ID NO: 100332 - protein, 10 aa, synthetic construct
EQARGDARTL

SEQ ID NO: 100333 - protein, 10 aa, synthetic construct
EQVRGDARTL

SEQ ID NO: 100334 - protein, 10 aa, synthetic construct
EQPRGDARTL

SEQ ID NO: 100335 - protein, 10 aa, synthetic construct
EQLRGDARTL

SEQ ID NO: 100336 - protein, 10 aa, synthetic construct
EQIRGDARTL

SEQ ID NO: 100337 - protein, 10 aa, synthetic construct
EQMRGDARTL

SEQ ID NO: 100338 - protein, 10 aa, synthetic construct
EQWRGDARTL

SEQ ID NO: 100339 - protein, 10 aa, synthetic construct
EQFRGDARTL

SEQ ID NO: 100340 - protein, 10 aa, synthetic construct
EQKRGDARTL

SEQ ID NO: 100341 - protein, 10 aa, synthetic construct
EQRRGDARTL

SEQ ID NO: 100342 - protein, 10 aa, synthetic construct
EQHRGDARTL

SEQ ID NO: 100343 - protein, 10 aa, synthetic construct
EQSRGDARTL

SEQ ID NO: 100344 - protein, 10 aa, synthetic construct
EQTRGDARTL

SEQ ID NO: 100345 - protein, 10 aa, synthetic construct
EQYRGDARTL

SEQ ID NO: 100346 - protein, 10 aa, synthetic construct
EQNRGDARTL

SEQ ID NO: 100347 - protein, 10 aa, synthetic construct
EQQRGDARTL

SEQ ID NO: 100348 - protein, 10 aa, synthetic construct
EQDRGDARTL

SEQ ID NO: 100349 - protein, 10 aa, synthetic construct
EQERGDARTL

SEQ ID NO: 100350 - protein, 10 aa, synthetic construct
EDGRGDARTL

SEQ ID NO: 100351 - protein, 10 aa, synthetic construct
EDARGDARTL

SEQ ID NO: 100352 - protein, 10 aa, synthetic construct
EDVRGDARTL

SEQ ID NO: 100353 - protein, 10 aa, synthetic construct
EDPRGDARTL

SEQ ID NO: 100354 - protein, 10 aa, synthetic construct
EDLRGDARTL

SEQ ID NO: 100355 - protein, 10 aa, synthetic construct
EDIRGDARTL

SEQ ID NO: 100356 - protein, 10 aa, synthetic construct
EDMRGDARTL

SEQ ID NO: 100357 - protein, 10 aa, synthetic construct
EDWRGDARTL

SEQ ID NO: 100358 - protein, 10 aa, synthetic construct
EDFRGDARTL

SEQ ID NO: 100359 - protein, 10 aa, synthetic construct
EDKRGDARTL

SEQ ID NO: 100360 - protein, 10 aa, synthetic construct
EDRRGDARTL

SEQ ID NO: 100361 - protein, 10 aa, synthetic construct
EDHRGDARTL

SEQ ID NO: 100362 - protein, 10 aa, synthetic construct
EDSRGDARTL

SEQ ID NO: 100363 - protein, 10 aa, synthetic construct
EDTRGDARTL

SEQ ID NO: 100364 - protein, 10 aa, synthetic construct
EDYRGDARTL

SEQ ID NO: 100365 - protein, 10 aa, synthetic construct
EDNRGDARTL

SEQ ID NO: 100366 - protein, 10 aa, synthetic construct
EDQRGDARTL

SEQ ID NO: 100367 - protein, 10 aa, synthetic construct
EDDRGDARTL

SEQ ID NO: 100368 - protein, 10 aa, synthetic construct
EDERGDARTL

SEQ ID NO: 100369 - protein, 10 aa, synthetic construct
EEGRGDARTL

SEQ ID NO: 100370 - protein, 10 aa, synthetic construct
EEARGDARTL

SEQ ID NO: 100371 - protein, 10 aa, synthetic construct
EEVRGDARTL

SEQ ID NO: 100372 - protein, 10 aa, synthetic construct
EEPRGDARTL

SEQ ID NO: 100373 - protein, 10 aa, synthetic construct
EELRGDARTL

SEQ ID NO: 100374 - protein, 10 aa, synthetic construct
EEIRGDARTL

SEQ ID NO: 100375 - protein, 10 aa, synthetic construct
EEMRGDARTL

SEQ ID NO: 100376 - protein, 10 aa, synthetic construct
EEWRGDARTL

SEQ ID NO: 100377 - protein, 10 aa, synthetic construct
EEFRGDARTL

SEQ ID NO: 100378 - protein, 10 aa, synthetic construct
EEKRGDARTL

SEQ ID NO: 100379 - protein, 10 aa, synthetic construct
EERRGDARTL

SEQ ID NO: 100380 - protein, 10 aa, synthetic construct
EEHRGDARTL

SEQ ID NO: 100381 - protein, 10 aa, synthetic construct
EESRGDARTL

SEQ ID NO: 100382 - protein, 10 aa, synthetic construct
EETRGDARTL

SEQ ID NO: 100383 - protein, 10 aa, synthetic construct
EEYRGDARTL

SEQ ID NO: 100384 - protein, 10 aa, synthetic construct
EENRGDARTL

SEQ ID NO: 100385 - protein, 10 aa, synthetic construct
EEQRGDARTL

SEQ ID NO: 100386 - protein, 10 aa, synthetic construct
EEDRGDARTL

SEQ ID NO: 100387 - protein, 10 aa, synthetic construct
EEERGDARTL

SEQ ID NO: 100388 - protein, 10 aa, synthetic construct
NGGRGDARTL

SEQ ID NO: 100389 - protein, 10 aa, synthetic construct
NGARGDARTL

SEQ ID NO: 100390 - protein, 10 aa, synthetic construct
NGVRGDARTL

SEQ ID NO: 100391 - protein, 10 aa, synthetic construct
NGPRGDARTL

SEQ ID NO: 100392 - protein, 10 aa, synthetic construct
NGLRGDARTL

SEQ ID NO: 100393 - protein, 10 aa, synthetic construct
NGIRGDARTL

SEQ ID NO: 100394 - protein, 10 aa, synthetic construct
NGMRGDARTL

SEQ ID NO: 100395 - protein, 10 aa, synthetic construct
NGWRGDARTL

SEQ ID NO: 100396 - protein, 10 aa, synthetic construct
NGFRGDARTL

SEQ ID NO: 100397 - protein, 10 aa, synthetic construct
NGKRGDARTL

SEQ ID NO: 100398 - protein, 10 aa, synthetic construct
NGRRGDARTL

SEQ ID NO: 100399 - protein, 10 aa, synthetic construct
NGHRGDARTL

SEQ ID NO: 100400 - protein, 10 aa, synthetic construct
NGSRGDARTL

SEQ ID NO: 100401 - protein, 10 aa, synthetic construct
NGTRGDARTL

SEQ ID NO: 100402 - protein, 10 aa, synthetic construct
NGYRGDARTL

SEQ ID NO: 100403 - protein, 10 aa, synthetic construct
NGNRGDARTL

SEQ ID NO: 100404 - protein, 10 aa, synthetic construct
NGQRGDARTL

SEQ ID NO: 100405 - protein, 10 aa, synthetic construct
NGDRGDARTL

SEQ ID NO: 100406 - protein, 10 aa, synthetic construct
NGERGDARTL

SEQ ID NO: 100407 - protein, 10 aa, synthetic construct
NAGRGDARTL

SEQ ID NO: 100408 - protein, 10 aa, synthetic construct
NAARGDARTL

SEQ ID NO: 100409 - protein, 10 aa, synthetic construct
NAVRGDARTL

SEQ ID NO: 100410 - protein, 10 aa, synthetic construct
NAPRGDARTL

SEQ ID NO: 100411 - protein, 10 aa, synthetic construct
NALRGDARTL

SEQ ID NO: 100412 - protein, 10 aa, synthetic construct
NAIRGDARTL

SEQ ID NO: 100413 - protein, 10 aa, synthetic construct
NAMRGDARTL

SEQ ID NO: 100414 - protein, 10 aa, synthetic construct
NAWRGDARTL

SEQ ID NO: 100415 - protein, 10 aa, synthetic construct
NAFRGDARTL

SEQ ID NO: 100416 - protein, 10 aa, synthetic construct
NAKRGDARTL

SEQ ID NO: 100417 - protein, 10 aa, synthetic construct
NARRGDARTL

SEQ ID NO: 100418 - protein, 10 aa, synthetic construct
NAHRGDARTL

SEQ ID NO: 100419 - protein, 10 aa, synthetic construct
NASRGDARTL

SEQ ID NO: 100420 - protein, 10 aa, synthetic construct
NATRGDARTL

SEQ ID NO: 100421 - protein, 10 aa, synthetic construct
NAYRGDARTL

SEQ ID NO: 100422 - protein, 10 aa, synthetic construct
NANRGDARTL

SEQ ID NO: 100423 - protein, 10 aa, synthetic construct
NAQRGDARTL

SEQ ID NO: 100424 - protein, 10 aa, synthetic construct
NADRGDARTL

SEQ ID NO: 100425 - protein, 10 aa, synthetic construct
NAERGDARTL

SEQ ID NO: 100426 - protein, 10 aa, synthetic construct
NVGRGDARTL

SEQ ID NO: 100427 - protein, 10 aa, synthetic construct
NVARGDARTL

SEQ ID NO: 100428 - protein, 10 aa, synthetic construct
NVVRGDARTL

SEQ ID NO: 100429 - protein, 10 aa, synthetic construct
NVPRGDARTL

SEQ ID NO: 100430 - protein, 10 aa, synthetic construct
NVLRGDARTL

SEQ ID NO: 100431 - protein, 10 aa, synthetic construct
NVIRGDARTL

SEQ ID NO: 100432 - protein, 10 aa, synthetic construct
NVMRGDARTL

SEQ ID NO: 100433 - protein, 10 aa, synthetic construct
NVWRGDARTL

SEQ ID NO: 100434 - protein, 10 aa, synthetic construct
NVFRGDARTL

SEQ ID NO: 100435 - protein, 10 aa, synthetic construct
NVKRGDARTL

SEQ ID NO: 100436 - protein, 10 aa, synthetic construct
NVRRGDARTL

SEQ ID NO: 100437 - protein, 10 aa, synthetic construct
NVHRGDARTL

SEQ ID NO: 100438 - protein, 10 aa, synthetic construct
NVSRGDARTL

SEQ ID NO: 100439 - protein, 10 aa, synthetic construct
NVTRGDARTL

SEQ ID NO: 100440 - protein, 10 aa, synthetic construct
NVYRGDARTL

SEQ ID NO: 100441 - protein, 10 aa, synthetic construct
NVNRGDARTL

SEQ ID NO: 100442 - protein, 10 aa, synthetic construct
NVQRGDARTL

SEQ ID NO: 100443 - protein, 10 aa, synthetic construct
NVDRGDARTL

SEQ ID NO: 100444 - protein, 10 aa, synthetic construct
NVERGDARTL

SEQ ID NO: 100445 - protein, 10 aa, synthetic construct
NPGRGDARTL

SEQ ID NO: 100446 - protein, 10 aa, synthetic construct
NPARGDARTL

SEQ ID NO: 100447 - protein, 10 aa, synthetic construct
NPVRGDARTL

SEQ ID NO: 100448 - protein, 10 aa, synthetic construct
NPPRGDARTL

SEQ ID NO: 100449 - protein, 10 aa, synthetic construct
NPLRGDARTL

SEQ ID NO: 100450 - protein, 10 aa, synthetic construct
NPIRGDARTL

SEQ ID NO: 100451 - protein, 10 aa, synthetic construct
NPMRGDARTL

SEQ ID NO: 100452 - protein, 10 aa, synthetic construct
NPWRGDARTL

SEQ ID NO: 100453 - protein, 10 aa, synthetic construct
NPFRGDARTL

SEQ ID NO: 100454 - protein, 10 aa, synthetic construct
NPKRGDARTL

SEQ ID NO: 100455 - protein, 10 aa, synthetic construct
NPRRGDARTL

SEQ ID NO: 100456 - protein, 10 aa, synthetic construct
NPHRGDARTL

SEQ ID NO: 100457 - protein, 10 aa, synthetic construct
NPSRGDARTL

SEQ ID NO: 100458 - protein, 10 aa, synthetic construct
NPTRGDARTL

SEQ ID NO: 100459 - protein, 10 aa, synthetic construct
NPYRGDARTL

SEQ ID NO: 100460 - protein, 10 aa, synthetic construct
NPNRGDARTL

SEQ ID NO: 100461 - protein, 10 aa, synthetic construct
NPQRGDARTL

SEQ ID NO: 100462 - protein, 10 aa, synthetic construct
NPDRGDARTL

SEQ ID NO: 100463 - protein, 10 aa, synthetic construct
NPERGDARTL

SEQ ID NO: 100464 - protein, 10 aa, synthetic construct
NLGRGDARTL

SEQ ID NO: 100465 - protein, 10 aa, synthetic construct
NLARGDARTL

SEQ ID NO: 100466 - protein, 10 aa, synthetic construct
NLVRGDARTL

SEQ ID NO: 100467 - protein, 10 aa, synthetic construct
NLPRGDARTL

SEQ ID NO: 100468 - protein, 10 aa, synthetic construct
NLLRGDARTL

SEQ ID NO: 100469 - protein, 10 aa, synthetic construct
NLIRGDARTL

SEQ ID NO: 100470 - protein, 10 aa, synthetic construct
NLMRGDARTL

SEQ ID NO: 100471 - protein, 10 aa, synthetic construct
NLWRGDARTL

SEQ ID NO: 100472 - protein, 10 aa, synthetic construct
NLFRGDARTL

SEQ ID NO: 100473 - protein, 10 aa, synthetic construct
NLKRGDARTL

SEQ ID NO: 100474 - protein, 10 aa, synthetic construct
NLRRGDARTL

SEQ ID NO: 100475 - protein, 10 aa, synthetic construct
NLHRGDARTL

SEQ ID NO: 100476 - protein, 10 aa, synthetic construct
NLSRGDARTL

SEQ ID NO: 100477 - protein, 10 aa, synthetic construct
NLTRGDARTL

SEQ ID NO: 100478 - protein, 10 aa, synthetic construct
NLYRGDARTL

SEQ ID NO: 100479 - protein, 10 aa, synthetic construct
NLNRGDARTL

SEQ ID NO: 100480 - protein, 10 aa, synthetic construct
NLQRGDARTL

SEQ ID NO: 100481 - protein, 10 aa, synthetic construct
NLDRGDARTL

SEQ ID NO: 100482 - protein, 10 aa, synthetic construct
NLERGDARTL

SEQ ID NO: 100483 - protein, 10 aa, synthetic construct
NIGRGDARTL

SEQ ID NO: 100484 - protein, 10 aa, synthetic construct
NIARGDARTL

SEQ ID NO: 100485 - protein, 10 aa, synthetic construct
NIVRGDARTL

SEQ ID NO: 100486 - protein, 10 aa, synthetic construct
NIPRGDARTL

SEQ ID NO: 100487 - protein, 10 aa, synthetic construct
NILRGDARTL

SEQ ID NO: 100488 - protein, 10 aa, synthetic construct
NIIRGDARTL

SEQ ID NO: 100489 - protein, 10 aa, synthetic construct
NIMRGDARTL

SEQ ID NO: 100490 - protein, 10 aa, synthetic construct
NIWRGDARTL

SEQ ID NO: 100491 - protein, 10 aa, synthetic construct
NIFRGDARTL

SEQ ID NO: 100492 - protein, 10 aa, synthetic construct
NIKRGDARTL

SEQ ID NO: 100493 - protein, 10 aa, synthetic construct
NIRRGDARTL

SEQ ID NO: 100494 - protein, 10 aa, synthetic construct
NIHRGDARTL

SEQ ID NO: 100495 - protein, 10 aa, synthetic construct
NISRGDARTL

SEQ ID NO: 100496 - protein, 10 aa, synthetic construct
NITRGDARTL

SEQ ID NO: 100497 - protein, 10 aa, synthetic construct
NIYRGDARTL

SEQ ID NO: 100498 - protein, 10 aa, synthetic construct
NINRGDARTL

SEQ ID NO: 100499 - protein, 10 aa, synthetic construct
NIQRGDARTL

SEQ ID NO: 100500 - protein, 10 aa, synthetic construct
NIDRGDARTL

SEQ ID NO: 100501 - protein, 10 aa, synthetic construct
NIERGDARTL

SEQ ID NO: 100502 - protein, 10 aa, synthetic construct
NMGRGDARTL

SEQ ID NO: 100503 - protein, 10 aa, synthetic construct
NMARGDARTL

SEQ ID NO: 100504 - protein, 10 aa, synthetic construct
NMVRGDARTL

SEQ ID NO: 100505 - protein, 10 aa, synthetic construct
NMPRGDARTL

SEQ ID NO: 100506 - protein, 10 aa, synthetic construct
NMLRGDARTL

SEQ ID NO: 100507 - protein, 10 aa, synthetic construct
NMIRGDARTL

SEQ ID NO: 100508 - protein, 10 aa, synthetic construct
NMMRGDARTL

SEQ ID NO: 100509 - protein, 10 aa, synthetic construct
NMWRGDARTL

SEQ ID NO: 100510 - protein, 10 aa, synthetic construct
NMFRGDARTL

SEQ ID NO: 100511 - protein, 10 aa, synthetic construct
NMKRGDARTL

SEQ ID NO: 100512 - protein, 10 aa, synthetic construct
NMRRGDARTL

SEQ ID NO: 100513 - protein, 10 aa, synthetic construct
NMHRGDARTL

SEQ ID NO: 100514 - protein, 10 aa, synthetic construct
NMSRGDARTL

SEQ ID NO: 100515 - protein, 10 aa, synthetic construct
NMTRGDARTL

SEQ ID NO: 100516 - protein, 10 aa, synthetic construct
NMYRGDARTL

SEQ ID NO: 100517 - protein, 10 aa, synthetic construct
NMNRGDARTL

SEQ ID NO: 100518 - protein, 10 aa, synthetic construct
NMQRGDARTL

SEQ ID NO: 100519 - protein, 10 aa, synthetic construct
NMDRGDARTL

SEQ ID NO: 100520 - protein, 10 aa, synthetic construct
NMERGDARTL

SEQ ID NO: 100521 - protein, 10 aa, synthetic construct
NWGRGDARTL

SEQ ID NO: 100522 - protein, 10 aa, synthetic construct
NWARGDARTL

SEQ ID NO: 100523 - protein, 10 aa, synthetic construct
NWVRGDARTL

SEQ ID NO: 100524 - protein, 10 aa, synthetic construct
NWPRGDARTL

SEQ ID NO: 100525 - protein, 10 aa, synthetic construct
NWLRGDARTL

SEQ ID NO: 100526 - protein, 10 aa, synthetic construct
NWIRGDARTL

SEQ ID NO: 100527 - protein, 10 aa, synthetic construct
NWMRGDARTL

SEQ ID NO: 100528 - protein, 10 aa, synthetic construct
NWWRGDARTL

SEQ ID NO: 100529 - protein, 10 aa, synthetic construct
NWFRGDARTL

SEQ ID NO: 100530 - protein, 10 aa, synthetic construct
NWKRGDARTL

SEQ ID NO: 100531 - protein, 10 aa, synthetic construct
NWRRGDARTL

SEQ ID NO: 100532 - protein, 10 aa, synthetic construct
NWHRGDARTL

SEQ ID NO: 100533 - protein, 10 aa, synthetic construct
NWSRGDARTL

SEQ ID NO: 100534 - protein, 10 aa, synthetic construct
NWTRGDARTL

SEQ ID NO: 100535 - protein, 10 aa, synthetic construct
NWYRGDARTL

SEQ ID NO: 100536 - protein, 10 aa, synthetic construct
NWNRGDARTL

SEQ ID NO: 100537 - protein, 10 aa, synthetic construct
NWQRGDARTL

SEQ ID NO: 100538 - protein, 10 aa, synthetic construct
NWDRGDARTL

SEQ ID NO: 100539 - protein, 10 aa, synthetic construct
NWERGDARTL

SEQ ID NO: 100540 - protein, 10 aa, synthetic construct
NFGRGDARTL

SEQ ID NO: 100541 - protein, 10 aa, synthetic construct
NFARGDARTL

SEQ ID NO: 100542 - protein, 10 aa, synthetic construct
NFVRGDARTL

SEQ ID NO: 100543 - protein, 10 aa, synthetic construct
NFPRGDARTL

SEQ ID NO: 100544 - protein, 10 aa, synthetic construct
NFLRGDARTL

SEQ ID NO: 100545 - protein, 10 aa, synthetic construct
NFIRGDARTL

SEQ ID NO: 100546 - protein, 10 aa, synthetic construct
NFMRGDARTL

SEQ ID NO: 100547 - protein, 10 aa, synthetic construct
NFWRGDARTL

SEQ ID NO: 100548 - protein, 10 aa, synthetic construct
NFFRGDARTL

SEQ ID NO: 100549 - protein, 10 aa, synthetic construct
NFKRGDARTL

SEQ ID NO: 100550 - protein, 10 aa, synthetic construct
NFRRGDARTL

SEQ ID NO: 100551 - protein, 10 aa, synthetic construct
NFHRGDARTL

SEQ ID NO: 100552 - protein, 10 aa, synthetic construct
NFSRGDARTL

SEQ ID NO: 100553 - protein, 10 aa, synthetic construct
NFTRGDARTL

SEQ ID NO: 100554 - protein, 10 aa, synthetic construct
NFYRGDARTL

SEQ ID NO: 100555 - protein, 10 aa, synthetic construct
NFNRGDARTL

SEQ ID NO: 100556 - protein, 10 aa, synthetic construct
NFQRGDARTL

SEQ ID NO: 100557 - protein, 10 aa, synthetic construct
NFDRGDARTL

SEQ ID NO: 100558 - protein, 10 aa, synthetic construct
NFERGDARTL

SEQ ID NO: 100559 - protein, 10 aa, synthetic construct
NKGRGDARTL

SEQ ID NO: 100560 - protein, 10 aa, synthetic construct
NKARGDARTL

SEQ ID NO: 100561 - protein, 10 aa, synthetic construct
NKVRGDARTL

SEQ ID NO: 100562 - protein, 10 aa, synthetic construct
NKPRGDARTL

SEQ ID NO: 100563 - protein, 10 aa, synthetic construct
NKLRGDARTL

SEQ ID NO: 100564 - protein, 10 aa, synthetic construct
NKIRGDARTL

SEQ ID NO: 100565 - protein, 10 aa, synthetic construct
NKMRGDARTL

SEQ ID NO: 100566 - protein, 10 aa, synthetic construct
NKWRGDARTL

SEQ ID NO: 100567 - protein, 10 aa, synthetic construct
NKFRGDARTL

SEQ ID NO: 100568 - protein, 10 aa, synthetic construct
NKKRGDARTL

SEQ ID NO: 100569 - protein, 10 aa, synthetic construct
NKRRGDARTL

SEQ ID NO: 100570 - protein, 10 aa, synthetic construct
NKHRGDARTL

SEQ ID NO: 100571 - protein, 10 aa, synthetic construct
NKSRGDARTL

SEQ ID NO: 100572 - protein, 10 aa, synthetic construct
NKTRGDARTL

SEQ ID NO: 100573 - protein, 10 aa, synthetic construct
NKYRGDARTL

SEQ ID NO: 100574 - protein, 10 aa, synthetic construct
NKNRGDARTL

SEQ ID NO: 100575 - protein, 10 aa, synthetic construct
NKQRGDARTL

SEQ ID NO: 100576 - protein, 10 aa, synthetic construct
NKDRGDARTL

SEQ ID NO: 100577 - protein, 10 aa, synthetic construct
NKERGDARTL

SEQ ID NO: 100578 - protein, 10 aa, synthetic construct
NRGRGDARTL

SEQ ID NO: 100579 - protein, 10 aa, synthetic construct
NRARGDARTL

SEQ ID NO: 100580 - protein, 10 aa, synthetic construct
NRVRGDARTL

SEQ ID NO: 100581 - protein, 10 aa, synthetic construct
NRPRGDARTL

SEQ ID NO: 100582 - protein, 10 aa, synthetic construct
NRLRGDARTL

SEQ ID NO: 100583 - protein, 10 aa, synthetic construct
NRIRGDARTL

SEQ ID NO: 100584 - protein, 10 aa, synthetic construct
NRMRGDARTL

SEQ ID NO: 100585 - protein, 10 aa, synthetic construct
NRWRGDARTL

SEQ ID NO: 100586 - protein, 10 aa, synthetic construct
NRFRGDARTL

SEQ ID NO: 100587 - protein, 10 aa, synthetic construct
NRKRGDARTL

SEQ ID NO: 100588 - protein, 10 aa, synthetic construct
NRRRGDARTL

SEQ ID NO: 100589 - protein, 10 aa, synthetic construct
NRHRGDARTL

SEQ ID NO: 100590 - protein, 10 aa, synthetic construct
NRSRGDARTL

SEQ ID NO: 100591 - protein, 10 aa, synthetic construct
NRTRGDARTL

SEQ ID NO: 100592 - protein, 10 aa, synthetic construct
NRYRGDARTL

SEQ ID NO: 100593 - protein, 10 aa, synthetic construct
NRNRGDARTL

SEQ ID NO: 100594 - protein, 10 aa, synthetic construct
NRQRGDARTL

SEQ ID NO: 100595 - protein, 10 aa, synthetic construct
NRDRGDARTL

SEQ ID NO: 100596 - protein, 10 aa, synthetic construct
NRERGDARTL

SEQ ID NO: 100597 - protein, 10 aa, synthetic construct
NHGRGDARTL

SEQ ID NO: 100598 - protein, 10 aa, synthetic construct
NHARGDARTL

SEQ ID NO: 100599 - protein, 10 aa, synthetic construct
NHVRGDARTL

SEQ ID NO: 100600 - protein, 10 aa, synthetic construct
NHPRGDARTL

SEQ ID NO: 100601 - protein, 10 aa, synthetic construct
NHLRGDARTL

SEQ ID NO: 100602 - protein, 10 aa, synthetic construct
NHIRGDARTL

SEQ ID NO: 100603 - protein, 10 aa, synthetic construct
NHMRGDARTL

SEQ ID NO: 100604 - protein, 10 aa, synthetic construct
NHWRGDARTL

SEQ ID NO: 100605 - protein, 10 aa, synthetic construct
NHFRGDARTL

SEQ ID NO: 100606 - protein, 10 aa, synthetic construct
NHKRGDARTL

SEQ ID NO: 100607 - protein, 10 aa, synthetic construct
NHRRGDARTL

SEQ ID NO: 100608 - protein, 10 aa, synthetic construct
NHHRGDARTL

SEQ ID NO: 100609 - protein, 10 aa, synthetic construct
NHSRGDARTL

SEQ ID NO: 100610 - protein, 10 aa, synthetic construct
NHTRGDARTL

SEQ ID NO: 100611 - protein, 10 aa, synthetic construct
NHYRGDARTL

SEQ ID NO: 100612 - protein, 10 aa, synthetic construct
NHNRGDARTL

SEQ ID NO: 100613 - protein, 10 aa, synthetic construct
NHQRGDARTL

SEQ ID NO: 100614 - protein, 10 aa, synthetic construct
NHDRGDARTL

SEQ ID NO: 100615 - protein, 10 aa, synthetic construct
NHERGDARTL

SEQ ID NO: 100616 - protein, 10 aa, synthetic construct
NSGRGDARTL

SEQ ID NO: 100617 - protein, 10 aa, synthetic construct
NSARGDARTL

SEQ ID NO: 100618 - protein, 10 aa, synthetic construct
NSVRGDARTL

SEQ ID NO: 100619 - protein, 10 aa, synthetic construct
NSPRGDARTL

SEQ ID NO: 100620 - protein, 10 aa, synthetic construct
NSLRGDARTL

SEQ ID NO: 100621 - protein, 10 aa, synthetic construct
NSIRGDARTL

SEQ ID NO: 100622 - protein, 10 aa, synthetic construct
NSMRGDARTL

SEQ ID NO: 100623 - protein, 10 aa, synthetic construct
NSWRGDARTL

SEQ ID NO: 100624 - protein, 10 aa, synthetic construct
NSFRGDARTL

SEQ ID NO: 100625 - protein, 10 aa, synthetic construct
NSKRGDARTL

SEQ ID NO: 100626 - protein, 10 aa, synthetic construct
NSRRGDARTL

SEQ ID NO: 100627 - protein, 10 aa, synthetic construct
NSHRGDARTL

SEQ ID NO: 100628 - protein, 10 aa, synthetic construct
NSSRGDARTL

SEQ ID NO: 100629 - protein, 10 aa, synthetic construct
NSTRGDARTL

SEQ ID NO: 100630 - protein, 10 aa, synthetic construct
NSYRGDARTL

SEQ ID NO: 100631 - protein, 10 aa, synthetic construct
NSNRGDARTL

SEQ ID NO: 100632 - protein, 10 aa, synthetic construct
NSQRGDARTL

SEQ ID NO: 100633 - protein, 10 aa, synthetic construct
NSDRGDARTL

SEQ ID NO: 100634 - protein, 10 aa, synthetic construct
NSERGDARTL

SEQ ID NO: 100635 - protein, 10 aa, synthetic construct
NTGRGDARTL

SEQ ID NO: 100636 - protein, 10 aa, synthetic construct
NTARGDARTL

SEQ ID NO: 100637 - protein, 10 aa, synthetic construct
NTVRGDARTL

SEQ ID NO: 100638 - protein, 10 aa, synthetic construct
NTPRGDARTL

SEQ ID NO: 100639 - protein, 10 aa, synthetic construct
NTLRGDARTL

SEQ ID NO: 100640 - protein, 10 aa, synthetic construct
NTIRGDARTL

SEQ ID NO: 100641 - protein, 10 aa, synthetic construct
NTMRGDARTL

SEQ ID NO: 100642 - protein, 10 aa, synthetic construct
NTWRGDARTL

SEQ ID NO: 100643 - protein, 10 aa, synthetic construct
NTFRGDARTL

SEQ ID NO: 100644 - protein, 10 aa, synthetic construct
NTKRGDARTL

SEQ ID NO: 100645 - protein, 10 aa, synthetic construct
NTRRGDARTL

SEQ ID NO: 100646 - protein, 10 aa, synthetic construct
NTHRGDARTL

SEQ ID NO: 100647 - protein, 10 aa, synthetic construct
NTSRGDARTL

SEQ ID NO: 100648 - protein, 10 aa, synthetic construct
NTTRGDARTL

SEQ ID NO: 100649 - protein, 10 aa, synthetic construct
NTYRGDARTL

SEQ ID NO: 100650 - protein, 10 aa, synthetic construct
NTNRGDARTL

SEQ ID NO: 100651 - protein, 10 aa, synthetic construct
NTQRGDARTL

SEQ ID NO: 100652 - protein, 10 aa, synthetic construct
NTDRGDARTL

SEQ ID NO: 100653 - protein, 10 aa, synthetic construct
NTERGDARTL

SEQ ID NO: 100654 - protein, 10 aa, synthetic construct
NYGRGDARTL

SEQ ID NO: 100655 - protein, 10 aa, synthetic construct
NYARGDARTL

SEQ ID NO: 100656 - protein, 10 aa, synthetic construct
NYVRGDARTL

SEQ ID NO: 100657 - protein, 10 aa, synthetic construct
NYPRGDARTL

SEQ ID NO: 100658 - protein, 10 aa, synthetic construct
NYLRGDARTL

SEQ ID NO: 100659 - protein, 10 aa, synthetic construct
NYIRGDARTL

SEQ ID NO: 100660 - protein, 10 aa, synthetic construct
NYMRGDARTL

SEQ ID NO: 100661 - protein, 10 aa, synthetic construct
NYWRGDARTL

SEQ ID NO: 100662 - protein, 10 aa, synthetic construct
NYFRGDARTL

SEQ ID NO: 100663 - protein, 10 aa, synthetic construct
NYKRGDARTL

SEQ ID NO: 100664 - protein, 10 aa, synthetic construct
NYRRGDARTL

SEQ ID NO: 100665 - protein, 10 aa, synthetic construct
NYHRGDARTL

SEQ ID NO: 100666 - protein, 10 aa, synthetic construct
NYSRGDARTL

SEQ ID NO: 100667 - protein, 10 aa, synthetic construct
NYTRGDARTL

SEQ ID NO: 100668 - protein, 10 aa, synthetic construct
NYYRGDARTL

SEQ ID NO: 100669 - protein, 10 aa, synthetic construct
NYNRGDARTL

SEQ ID NO: 100670 - protein, 10 aa, synthetic construct
NYQRGDARTL

SEQ ID NO: 100671 - protein, 10 aa, synthetic construct
NYDRGDARTL

SEQ ID NO: 100672 - protein, 10 aa, synthetic construct
NYERGDARTL

SEQ ID NO: 100673 - protein, 10 aa, synthetic construct
NNGRGDARTL

SEQ ID NO: 100674 - protein, 10 aa, synthetic construct
NNARGDARTL

SEQ ID NO: 100675 - protein, 10 aa, synthetic construct
NNVRGDARTL

SEQ ID NO: 100676 - protein, 10 aa, synthetic construct
NNPRGDARTL

SEQ ID NO: 100677 - protein, 10 aa, synthetic construct
NNLRGDARTL

SEQ ID NO: 100678 - protein, 10 aa, synthetic construct
NNIRGDARTL

SEQ ID NO: 100679 - protein, 10 aa, synthetic construct
NNMRGDARTL

SEQ ID NO: 100680 - protein, 10 aa, synthetic construct
NNWRGDARTL

SEQ ID NO: 100681 - protein, 10 aa, synthetic construct
NNFRGDARTL

SEQ ID NO: 100682 - protein, 10 aa, synthetic construct
NNKRGDARTL

SEQ ID NO: 100683 - protein, 10 aa, synthetic construct
NNRRGDARTL

SEQ ID NO: 100684 - protein, 10 aa, synthetic construct
NNHRGDARTL

SEQ ID NO: 100685 - protein, 10 aa, synthetic construct
NNSRGDARTL

SEQ ID NO: 100686 - protein, 10 aa, synthetic construct
NNTRGDARTL

SEQ ID NO: 100687 - protein, 10 aa, synthetic construct
NNYRGDARTL

SEQ ID NO: 100688 - protein, 10 aa, synthetic construct
NNNRGDARTL

SEQ ID NO: 100689 - protein, 10 aa, synthetic construct
NNQRGDARTL

SEQ ID NO: 100690 - protein, 10 aa, synthetic construct
NNDRGDARTL

SEQ ID NO: 100691 - protein, 10 aa, synthetic construct
NNERGDARTL

SEQ ID NO: 100692 - protein, 10 aa, synthetic construct
NQGRGDARTL

SEQ ID NO: 100693 - protein, 10 aa, synthetic construct
NQARGDARTL

SEQ ID NO: 100694 - protein, 10 aa, synthetic construct
NQVRGDARTL

SEQ ID NO: 100695 - protein, 10 aa, synthetic construct
NQPRGDARTL

SEQ ID NO: 100696 - protein, 10 aa, synthetic construct
NQLRGDARTL

SEQ ID NO: 100697 - protein, 10 aa, synthetic construct
NQIRGDARTL

SEQ ID NO: 100698 - protein, 10 aa, synthetic construct
NQMRGDARTL

SEQ ID NO: 100699 - protein, 10 aa, synthetic construct
NQWRGDARTL

SEQ ID NO: 100700 - protein, 10 aa, synthetic construct
NQFRGDARTL

SEQ ID NO: 100701 - protein, 10 aa, synthetic construct
NQKRGDARTL

SEQ ID NO: 100702 - protein, 10 aa, synthetic construct
NQRRGDARTL

SEQ ID NO: 100703 - protein, 10 aa, synthetic construct
NQHRGDARTL

SEQ ID NO: 100704 - protein, 10 aa, synthetic construct
NQSRGDARTL

SEQ ID NO: 100705 - protein, 10 aa, synthetic construct
NQTRGDARTL

SEQ ID NO: 100706 - protein, 10 aa, synthetic construct
NQYRGDARTL

SEQ ID NO: 100707 - protein, 10 aa, synthetic construct
NQNRGDARTL

SEQ ID NO: 100708 - protein, 10 aa, synthetic construct
NQQRGDARTL

SEQ ID NO: 100709 - protein, 10 aa, synthetic construct
NQDRGDARTL

SEQ ID NO: 100710 - protein, 10 aa, synthetic construct
NQERGDARTL

SEQ ID NO: 100711 - protein, 10 aa, synthetic construct
NDGRGDARTL

SEQ ID NO: 100712 - protein, 10 aa, synthetic construct
NDARGDARTL

SEQ ID NO: 100713 - protein, 10 aa, synthetic construct
NDVRGDARTL

SEQ ID NO: 100714 - protein, 10 aa, synthetic construct
NDPRGDARTL

SEQ ID NO: 100715 - protein, 10 aa, synthetic construct
NDLRGDARTL

SEQ ID NO: 100716 - protein, 10 aa, synthetic construct
NDIRGDARTL

SEQ ID NO: 100717 - protein, 10 aa, synthetic construct
NDMRGDARTL

SEQ ID NO: 100718 - protein, 10 aa, synthetic construct
NDWRGDARTL

SEQ ID NO: 100719 - protein, 10 aa, synthetic construct
NDFRGDARTL

SEQ ID NO: 100720 - protein, 10 aa, synthetic construct
NDKRGDARTL

SEQ ID NO: 100721 - protein, 10 aa, synthetic construct
NDRRGDARTL

SEQ ID NO: 100722 - protein, 10 aa, synthetic construct
NDHRGDARTL

SEQ ID NO: 100723 - protein, 10 aa, synthetic construct
NDSRGDARTL

SEQ ID NO: 100724 - protein, 10 aa, synthetic construct
NDTRGDARTL

SEQ ID NO: 100725 - protein, 10 aa, synthetic construct
NDYRGDARTL

SEQ ID NO: 100726 - protein, 10 aa, synthetic construct
NDNRGDARTL

SEQ ID NO: 100727 - protein, 10 aa, synthetic construct
NDQRGDARTL

SEQ ID NO: 100728 - protein, 10 aa, synthetic construct
NDDRGDARTL

SEQ ID NO: 100729 - protein, 10 aa, synthetic construct
NDERGDARTL

SEQ ID NO: 100730 - protein, 10 aa, synthetic construct
NEGRGDARTL

SEQ ID NO: 100731 - protein, 10 aa, synthetic construct
NEARGDARTL

SEQ ID NO: 100732 - protein, 10 aa, synthetic construct
NEVRGDARTL

SEQ ID NO: 100733 - protein, 10 aa, synthetic construct
NEPRGDARTL

SEQ ID NO: 100734 - protein, 10 aa, synthetic construct
NELRGDARTL

SEQ ID NO: 100735 - protein, 10 aa, synthetic construct
NEIRGDARTL

SEQ ID NO: 100736 - protein, 10 aa, synthetic construct
NEMRGDARTL

SEQ ID NO: 100737 - protein, 10 aa, synthetic construct
NEWRGDARTL

SEQ ID NO: 100738 - protein, 10 aa, synthetic construct
NEFRGDARTL

SEQ ID NO: 100739 - protein, 10 aa, synthetic construct
NEKRGDARTL

SEQ ID NO: 100740 - protein, 10 aa, synthetic construct
NERRGDARTL

SEQ ID NO: 100741 - protein, 10 aa, synthetic construct
NEHRGDARTL

SEQ ID NO: 100742 - protein, 10 aa, synthetic construct
NESRGDARTL

SEQ ID NO: 100743 - protein, 10 aa, synthetic construct
NETRGDARTL

SEQ ID NO: 100744 - protein, 10 aa, synthetic construct
NEYRGDARTL

SEQ ID NO: 100745 - protein, 10 aa, synthetic construct
NENRGDARTL

SEQ ID NO: 100746 - protein, 10 aa, synthetic construct
NEQRGDARTL

SEQ ID NO: 100747 - protein, 10 aa, synthetic construct
NEDRGDARTL

SEQ ID NO: 100748 - protein, 10 aa, synthetic construct
NEERGDARTL

SEQ ID NO: 100749 - protein, 10 aa, synthetic construct
DGGRGDARTL

SEQ ID NO: 100750 - protein, 10 aa, synthetic construct
DGARGDARTL

SEQ ID NO: 100751 - protein, 10 aa, synthetic construct
DGVRGDARTL

SEQ ID NO: 100752 - protein, 10 aa, synthetic construct
DGPRGDARTL

SEQ ID NO: 100753 - protein, 10 aa, synthetic construct
DGLRGDARTL

SEQ ID NO: 100754 - protein, 10 aa, synthetic construct
DGIRGDARTL

SEQ ID NO: 100755 - protein, 10 aa, synthetic construct
DGMRGDARTL

SEQ ID NO: 100756 - protein, 10 aa, synthetic construct
DGWRGDARTL

SEQ ID NO: 100757 - protein, 10 aa, synthetic construct
DGFRGDARTL

SEQ ID NO: 100758 - protein, 10 aa, synthetic construct
DGKRGDARTL

SEQ ID NO: 100759 - protein, 10 aa, synthetic construct
DGRRGDARTL

SEQ ID NO: 100760 - protein, 10 aa, synthetic construct
DGHRGDARTL

SEQ ID NO: 100761 - protein, 10 aa, synthetic construct
DGSRGDARTL

SEQ ID NO: 100762 - protein, 10 aa, synthetic construct
DGTRGDARTL

SEQ ID NO: 100763 - protein, 10 aa, synthetic construct
DGYRGDARTL

SEQ ID NO: 100764 - protein, 10 aa, synthetic construct
DGNRGDARTL

SEQ ID NO: 100765 - protein, 10 aa, synthetic construct
DGQRGDARTL

SEQ ID NO: 100766 - protein, 10 aa, synthetic construct
DGDRGDARTL

SEQ ID NO: 100767 - protein, 10 aa, synthetic construct
DGERGDARTL

SEQ ID NO: 100768 - protein, 10 aa, synthetic construct
DAGRGDARTL

SEQ ID NO: 100769 - protein, 10 aa, synthetic construct
DAARGDARTL

SEQ ID NO: 100770 - protein, 10 aa, synthetic construct
DAVRGDARTL

SEQ ID NO: 100771 - protein, 10 aa, synthetic construct
DAPRGDARTL

SEQ ID NO: 100772 - protein, 10 aa, synthetic construct
DALRGDARTL

SEQ ID NO: 100773 - protein, 10 aa, synthetic construct
DAIRGDARTL

SEQ ID NO: 100774 - protein, 10 aa, synthetic construct
DAMRGDARTL

SEQ ID NO: 100775 - protein, 10 aa, synthetic construct
DAWRGDARTL

SEQ ID NO: 100776 - protein, 10 aa, synthetic construct
DAFRGDARTL

SEQ ID NO: 100777 - protein, 10 aa, synthetic construct
DAKRGDARTL

SEQ ID NO: 100778 - protein, 10 aa, synthetic construct
DARRGDARTL

SEQ ID NO: 100779 - protein, 10 aa, synthetic construct
DAHRGDARTL

SEQ ID NO: 100780 - protein, 10 aa, synthetic construct
DASRGDARTL

SEQ ID NO: 100781 - protein, 10 aa, synthetic construct
DATRGDARTL

SEQ ID NO: 100782 - protein, 10 aa, synthetic construct
DAYRGDARTL

SEQ ID NO: 100783 - protein, 10 aa, synthetic construct
DANRGDARTL

SEQ ID NO: 100784 - protein, 10 aa, synthetic construct
DAQRGDARTL

SEQ ID NO: 100785 - protein, 10 aa, synthetic construct
DADRGDARTL

SEQ ID NO: 100786 - protein, 10 aa, synthetic construct
DAERGDARTL

SEQ ID NO: 100787 - protein, 10 aa, synthetic construct
DVGRGDARTL

SEQ ID NO: 100788 - protein, 10 aa, synthetic construct
DVARGDARTL

SEQ ID NO: 100789 - protein, 10 aa, synthetic construct
DVVRGDARTL

SEQ ID NO: 100790 - protein, 10 aa, synthetic construct
DVPRGDARTL

SEQ ID NO: 100791 - protein, 10 aa, synthetic construct
DVLRGDARTL

SEQ ID NO: 100792 - protein, 10 aa, synthetic construct
DVIRGDARTL

SEQ ID NO: 100793 - protein, 10 aa, synthetic construct
DVMRGDARTL

SEQ ID NO: 100794 - protein, 10 aa, synthetic construct
DVWRGDARTL

SEQ ID NO: 100795 - protein, 10 aa, synthetic construct
DVFRGDARTL

SEQ ID NO: 100796 - protein, 10 aa, synthetic construct
DVKRGDARTL

SEQ ID NO: 100797 - protein, 10 aa, synthetic construct
DVRRGDARTL

SEQ ID NO: 100798 - protein, 10 aa, synthetic construct
DVHRGDARTL

SEQ ID NO: 100799 - protein, 10 aa, synthetic construct
DVSRGDARTL

SEQ ID NO: 100800 - protein, 10 aa, synthetic construct
DVTRGDARTL

SEQ ID NO: 100801 - protein, 10 aa, synthetic construct
DVYRGDARTL

SEQ ID NO: 100802 - protein, 10 aa, synthetic construct
DVNRGDARTL

SEQ ID NO: 100803 - protein, 10 aa, synthetic construct
DVQRGDARTL

SEQ ID NO: 100804 - protein, 10 aa, synthetic construct
DVDRGDARTL

SEQ ID NO: 100805 - protein, 10 aa, synthetic construct
DVERGDARTL

SEQ ID NO: 100806 - protein, 10 aa, synthetic construct
DPGRGDARTL

SEQ ID NO: 100807 - protein, 10 aa, synthetic construct
DPARGDARTL

SEQ ID NO: 100808 - protein, 10 aa, synthetic construct
DPVRGDARTL

SEQ ID NO: 100809 - protein, 10 aa, synthetic construct
DPPRGDARTL

SEQ ID NO: 100810 - protein, 10 aa, synthetic construct
DPLRGDARTL

SEQ ID NO: 100811 - protein, 10 aa, synthetic construct
DPIRGDARTL

SEQ ID NO: 100812 - protein, 10 aa, synthetic construct
DPMRGDARTL

SEQ ID NO: 100813 - protein, 10 aa, synthetic construct
DPWRGDARTL

SEQ ID NO: 100814 - protein, 10 aa, synthetic construct
DPFRGDARTL

SEQ ID NO: 100815 - protein, 10 aa, synthetic construct
DPKRGDARTL

SEQ ID NO: 100816 - protein, 10 aa, synthetic construct
DPRRGDARTL

SEQ ID NO: 100817 - protein, 10 aa, synthetic construct
DPHRGDARTL

SEQ ID NO: 100818 - protein, 10 aa, synthetic construct
DPSRGDARTL

SEQ ID NO: 100819 - protein, 10 aa, synthetic construct
DPTRGDARTL

SEQ ID NO: 100820 - protein, 10 aa, synthetic construct
DPYRGDARTL

SEQ ID NO: 100821 - protein, 10 aa, synthetic construct
DPNRGDARTL

SEQ ID NO: 100822 - protein, 10 aa, synthetic construct
DPQRGDARTL

SEQ ID NO: 100823 - protein, 10 aa, synthetic construct
DPDRGDARTL

SEQ ID NO: 100824 - protein, 10 aa, synthetic construct
DPERGDARTL

SEQ ID NO: 100825 - protein, 10 aa, synthetic construct
DLGRGDARTL

SEQ ID NO: 100826 - protein, 10 aa, synthetic construct
DLARGDARTL

SEQ ID NO: 100827 - protein, 10 aa, synthetic construct
DLVRGDARTL

SEQ ID NO: 100828 - protein, 10 aa, synthetic construct
DLPRGDARTL

SEQ ID NO: 100829 - protein, 10 aa, synthetic construct
DLLRGDARTL

SEQ ID NO: 100830 - protein, 10 aa, synthetic construct
DLIRGDARTL

SEQ ID NO: 100831 - protein, 10 aa, synthetic construct
DLMRGDARTL

SEQ ID NO: 100832 - protein, 10 aa, synthetic construct
DLWRGDARTL

SEQ ID NO: 100833 - protein, 10 aa, synthetic construct
DLFRGDARTL

SEQ ID NO: 100834 - protein, 10 aa, synthetic construct
DLKRGDARTL

SEQ ID NO: 100835 - protein, 10 aa, synthetic construct
DLRRGDARTL

SEQ ID NO: 100836 - protein, 10 aa, synthetic construct
DLHRGDARTL

SEQ ID NO: 100837 - protein, 10 aa, synthetic construct
DLSRGDARTL

SEQ ID NO: 100838 - protein, 10 aa, synthetic construct
DLTRGDARTL

SEQ ID NO: 100839 - protein, 10 aa, synthetic construct
DLYRGDARTL

SEQ ID NO: 100840 - protein, 10 aa, synthetic construct
DLNRGDARTL

SEQ ID NO: 100841 - protein, 10 aa, synthetic construct
DLQRGDARTL

SEQ ID NO: 100842 - protein, 10 aa, synthetic construct
DLDRGDARTL

SEQ ID NO: 100843 - protein, 10 aa, synthetic construct
DLERGDARTL

SEQ ID NO: 100844 - protein, 10 aa, synthetic construct
DIGRGDARTL

SEQ ID NO: 100845 - protein, 10 aa, synthetic construct
DIARGDARTL

SEQ ID NO: 100846 - protein, 10 aa, synthetic construct
DIVRGDARTL

SEQ ID NO: 100847 - protein, 10 aa, synthetic construct
DIPRGDARTL

SEQ ID NO: 100848 - protein, 10 aa, synthetic construct
DILRGDARTL

SEQ ID NO: 100849 - protein, 10 aa, synthetic construct
DIIRGDARTL

SEQ ID NO: 100850 - protein, 10 aa, synthetic construct
DIMRGDARTL

SEQ ID NO: 100851 - protein, 10 aa, synthetic construct
DIWRGDARTL

SEQ ID NO: 100852 - protein, 10 aa, synthetic construct
DIFRGDARTL

SEQ ID NO: 100853 - protein, 10 aa, synthetic construct
DIKRGDARTL

SEQ ID NO: 100854 - protein, 10 aa, synthetic construct
DIRRGDARTL

SEQ ID NO: 100855 - protein, 10 aa, synthetic construct
DIHRGDARTL

SEQ ID NO: 100856 - protein, 10 aa, synthetic construct
DISRGDARTL

SEQ ID NO: 100857 - protein, 10 aa, synthetic construct
DITRGDARTL

SEQ ID NO: 100858 - protein, 10 aa, synthetic construct
DIYRGDARTL

SEQ ID NO: 100859 - protein, 10 aa, synthetic construct
DINRGDARTL

SEQ ID NO: 100860 - protein, 10 aa, synthetic construct
DIQRGDARTL

SEQ ID NO: 100861 - protein, 10 aa, synthetic construct
DIDRGDARTL

SEQ ID NO: 100862 - protein, 10 aa, synthetic construct
DIERGDARTL

SEQ ID NO: 100863 - protein, 10 aa, synthetic construct
DMGRGDARTL

SEQ ID NO: 100864 - protein, 10 aa, synthetic construct
DMARGDARTL

SEQ ID NO: 100865 - protein, 10 aa, synthetic construct
DMVRGDARTL

SEQ ID NO: 100866 - protein, 10 aa, synthetic construct
DMPRGDARTL

SEQ ID NO: 100867 - protein, 10 aa, synthetic construct
DMLRGDARTL

SEQ ID NO: 100868 - protein, 10 aa, synthetic construct
DMIRGDARTL

SEQ ID NO: 100869 - protein, 10 aa, synthetic construct
DMMRGDARTL

SEQ ID NO: 100870 - protein, 10 aa, synthetic construct
DMWRGDARTL

SEQ ID NO: 100871 - protein, 10 aa, synthetic construct
DMFRGDARTL

SEQ ID NO: 100872 - protein, 10 aa, synthetic construct
DMKRGDARTL

SEQ ID NO: 100873 - protein, 10 aa, synthetic construct
DMRRGDARTL

SEQ ID NO: 100874 - protein, 10 aa, synthetic construct
DMHRGDARTL

SEQ ID NO: 100875 - protein, 10 aa, synthetic construct
DMSRGDARTL

SEQ ID NO: 100876 - protein, 10 aa, synthetic construct
DMTRGDARTL

SEQ ID NO: 100877 - protein, 10 aa, synthetic construct
DMYRGDARTL

SEQ ID NO: 100878 - protein, 10 aa, synthetic construct
DMNRGDARTL

SEQ ID NO: 100879 - protein, 10 aa, synthetic construct
DMQRGDARTL

SEQ ID NO: 100880 - protein, 10 aa, synthetic construct
DMDRGDARTL

SEQ ID NO: 100881 - protein, 10 aa, synthetic construct
DMERGDARTL

SEQ ID NO: 100882 - protein, 10 aa, synthetic construct
DWGRGDARTL

SEQ ID NO: 100883 - protein, 10 aa, synthetic construct
DWARGDARTL

SEQ ID NO: 100884 - protein, 10 aa, synthetic construct
DWVRGDARTL

SEQ ID NO: 100885 - protein, 10 aa, synthetic construct
DWPRGDARTL

SEQ ID NO: 100886 - protein, 10 aa, synthetic construct
DWLRGDARTL

SEQ ID NO: 100887 - protein, 10 aa, synthetic construct
DWIRGDARTL

SEQ ID NO: 100888 - protein, 10 aa, synthetic construct
DWMRGDARTL

SEQ ID NO: 100889 - protein, 10 aa, synthetic construct
DWWRGDARTL

SEQ ID NO: 100890 - protein, 10 aa, synthetic construct
DWFRGDARTL

SEQ ID NO: 100891 - protein, 10 aa, synthetic construct
DWKRGDARTL

SEQ ID NO: 100892 - protein, 10 aa, synthetic construct
DWRRGDARTL

SEQ ID NO: 100893 - protein, 10 aa, synthetic construct
DWHRGDARTL

SEQ ID NO: 100894 - protein, 10 aa, synthetic construct
DWSRGDARTL

SEQ ID NO: 100895 - protein, 10 aa, synthetic construct
DWTRGDARTL

SEQ ID NO: 100896 - protein, 10 aa, synthetic construct
DWYRGDARTL

SEQ ID NO: 100897 - protein, 10 aa, synthetic construct
DWNRGDARTL

SEQ ID NO: 100898 - protein, 10 aa, synthetic construct
DWQRGDARTL

SEQ ID NO: 100899 - protein, 10 aa, synthetic construct
DWDRGDARTL

SEQ ID NO: 100900 - protein, 10 aa, synthetic construct
DWERGDARTL

SEQ ID NO: 100901 - protein, 10 aa, synthetic construct
DFGRGDARTL

SEQ ID NO: 100902 - protein, 10 aa, synthetic construct
DFARGDARTL

SEQ ID NO: 100903 - protein, 10 aa, synthetic construct
DFVRGDARTL

SEQ ID NO: 100904 - protein, 10 aa, synthetic construct
DFPRGDARTL

SEQ ID NO: 100905 - protein, 10 aa, synthetic construct
DFLRGDARTL

SEQ ID NO: 100906 - protein, 10 aa, synthetic construct
DFIRGDARTL

SEQ ID NO: 100907 - protein, 10 aa, synthetic construct
DFMRGDARTL

SEQ ID NO: 100908 - protein, 10 aa, synthetic construct
DFWRGDARTL

SEQ ID NO: 100909 - protein, 10 aa, synthetic construct
DFFRGDARTL

SEQ ID NO: 100910 - protein, 10 aa, synthetic construct
DFKRGDARTL

SEQ ID NO: 100911 - protein, 10 aa, synthetic construct
DFRRGDARTL

SEQ ID NO: 100912 - protein, 10 aa, synthetic construct
DFHRGDARTL

SEQ ID NO: 100913 - protein, 10 aa, synthetic construct
DFSRGDARTL

SEQ ID NO: 100914 - protein, 10 aa, synthetic construct
DFTRGDARTL

SEQ ID NO: 100915 - protein, 10 aa, synthetic construct
DFYRGDARTL

SEQ ID NO: 100916 - protein, 10 aa, synthetic construct
DFNRGDARTL

SEQ ID NO: 100917 - protein, 10 aa, synthetic construct
DFQRGDARTL

SEQ ID NO: 100918 - protein, 10 aa, synthetic construct
DFDRGDARTL

SEQ ID NO: 100919 - protein, 10 aa, synthetic construct
DFERGDARTL

SEQ ID NO: 100920 - protein, 10 aa, synthetic construct
DKGRGDARTL

SEQ ID NO: 100921 - protein, 10 aa, synthetic construct
DKARGDARTL

SEQ ID NO: 100922 - protein, 10 aa, synthetic construct
DKVRGDARTL

SEQ ID NO: 100923 - protein, 10 aa, synthetic construct
DKPRGDARTL

SEQ ID NO: 100924 - protein, 10 aa, synthetic construct
DKLRGDARTL

SEQ ID NO: 100925 - protein, 10 aa, synthetic construct
DKIRGDARTL

SEQ ID NO: 100926 - protein, 10 aa, synthetic construct
DKMRGDARTL

SEQ ID NO: 100927 - protein, 10 aa, synthetic construct
DKWRGDARTL

SEQ ID NO: 100928 - protein, 10 aa, synthetic construct
DKFRGDARTL

SEQ ID NO: 100929 - protein, 10 aa, synthetic construct
DKKRGDARTL

SEQ ID NO: 100930 - protein, 10 aa, synthetic construct
DKRRGDARTL

SEQ ID NO: 100931 - protein, 10 aa, synthetic construct
DKHRGDARTL

SEQ ID NO: 100932 - protein, 10 aa, synthetic construct
DKSRGDARTL

SEQ ID NO: 100933 - protein, 10 aa, synthetic construct
DKTRGDARTL

SEQ ID NO: 100934 - protein, 10 aa, synthetic construct
DKYRGDARTL

SEQ ID NO: 100935 - protein, 10 aa, synthetic construct
DKNRGDARTL

SEQ ID NO: 100936 - protein, 10 aa, synthetic construct
DKQRGDARTL

SEQ ID NO: 100937 - protein, 10 aa, synthetic construct
DKDRGDARTL

SEQ ID NO: 100938 - protein, 10 aa, synthetic construct
DKERGDARTL

SEQ ID NO: 100939 - protein, 10 aa, synthetic construct
DRGRGDARTL

SEQ ID NO: 100940 - protein, 10 aa, synthetic construct
DRARGDARTL

SEQ ID NO: 100941 - protein, 10 aa, synthetic construct
DRVRGDARTL

SEQ ID NO: 100942 - protein, 10 aa, synthetic construct
DRPRGDARTL

SEQ ID NO: 100943 - protein, 10 aa, synthetic construct
DRLRGDARTL

SEQ ID NO: 100944 - protein, 10 aa, synthetic construct
DRIRGDARTL

SEQ ID NO: 100945 - protein, 10 aa, synthetic construct
DRMRGDARTL

SEQ ID NO: 100946 - protein, 10 aa, synthetic construct
DRWRGDARTL

SEQ ID NO: 100947 - protein, 10 aa, synthetic construct
DRFRGDARTL

SEQ ID NO: 100948 - protein, 10 aa, synthetic construct
DRKRGDARTL

SEQ ID NO: 100949 - protein, 10 aa, synthetic construct
DRRRGDARTL

SEQ ID NO: 100950 - protein, 10 aa, synthetic construct
DRHRGDARTL

SEQ ID NO: 100951 - protein, 10 aa, synthetic construct
DRSRGDARTL

SEQ ID NO: 100952 - protein, 10 aa, synthetic construct
DRTRGDARTL

SEQ ID NO: 100953 - protein, 10 aa, synthetic construct
DRYRGDARTL

SEQ ID NO: 100954 - protein, 10 aa, synthetic construct
DRNRGDARTL

SEQ ID NO: 100955 - protein, 10 aa, synthetic construct
DRQRGDARTL

SEQ ID NO: 100956 - protein, 10 aa, synthetic construct
DRDRGDARTL

SEQ ID NO: 100957 - protein, 10 aa, synthetic construct
DRERGDARTL

SEQ ID NO: 100958 - protein, 10 aa, synthetic construct
DHGRGDARTL

SEQ ID NO: 100959 - protein, 10 aa, synthetic construct
DHARGDARTL

SEQ ID NO: 100960 - protein, 10 aa, synthetic construct
DHVRGDARTL

SEQ ID NO: 100961 - protein, 10 aa, synthetic construct
DHPRGDARTL

SEQ ID NO: 100962 - protein, 10 aa, synthetic construct
DHLRGDARTL

SEQ ID NO: 100963 - protein, 10 aa, synthetic construct
DHIRGDARTL

SEQ ID NO: 100964 - protein, 10 aa, synthetic construct
DHMRGDARTL

SEQ ID NO: 100965 - protein, 10 aa, synthetic construct
DHWRGDARTL

SEQ ID NO: 100966 - protein, 10 aa, synthetic construct
DHFRGDARTL

SEQ ID NO: 100967 - protein, 10 aa, synthetic construct
DHKRGDARTL

SEQ ID NO: 100968 - protein, 10 aa, synthetic construct
DHRRGDARTL

SEQ ID NO: 100969 - protein, 10 aa, synthetic construct
DHHRGDARTL

SEQ ID NO: 100970 - protein, 10 aa, synthetic construct
DHSRGDARTL

SEQ ID NO: 100971 - protein, 10 aa, synthetic construct
DHTRGDARTL

SEQ ID NO: 100972 - protein, 10 aa, synthetic construct
DHYRGDARTL

SEQ ID NO: 100973 - protein, 10 aa, synthetic construct
DHNRGDARTL

SEQ ID NO: 100974 - protein, 10 aa, synthetic construct
DHQRGDARTL

SEQ ID NO: 100975 - protein, 10 aa, synthetic construct
DHDRGDARTL

SEQ ID NO: 100976 - protein, 10 aa, synthetic construct
DHERGDARTL

SEQ ID NO: 100977 - protein, 10 aa, synthetic construct
DSGRGDARTL

SEQ ID NO: 100978 - protein, 10 aa, synthetic construct
DSARGDARTL

SEQ ID NO: 100979 - protein, 10 aa, synthetic construct
DSVRGDARTL

SEQ ID NO: 100980 - protein, 10 aa, synthetic construct
DSPRGDARTL

SEQ ID NO: 100981 - protein, 10 aa, synthetic construct
DSLRGDARTL

SEQ ID NO: 100982 - protein, 10 aa, synthetic construct
DSIRGDARTL

SEQ ID NO: 100983 - protein, 10 aa, synthetic construct
DSMRGDARTL

SEQ ID NO: 100984 - protein, 10 aa, synthetic construct
DSWRGDARTL

SEQ ID NO: 100985 - protein, 10 aa, synthetic construct
DSFRGDARTL

SEQ ID NO: 100986 - protein, 10 aa, synthetic construct
DSKRGDARTL

SEQ ID NO: 100987 - protein, 10 aa, synthetic construct
DSRRGDARTL

SEQ ID NO: 100988 - protein, 10 aa, synthetic construct
DSHRGDARTL

SEQ ID NO: 100989 - protein, 10 aa, synthetic construct
DSSRGDARTL

SEQ ID NO: 100990 - protein, 10 aa, synthetic construct
DSTRGDARTL

SEQ ID NO: 100991 - protein, 10 aa, synthetic construct
DSYRGDARTL

SEQ ID NO: 100992 - protein, 10 aa, synthetic construct
DSNRGDARTL

SEQ ID NO: 100993 - protein, 10 aa, synthetic construct
DSQRGDARTL

SEQ ID NO: 100994 - protein, 10 aa, synthetic construct
DSDRGDARTL

SEQ ID NO: 100995 - protein, 10 aa, synthetic construct
DSERGDARTL

SEQ ID NO: 100996 - protein, 10 aa, synthetic construct
DTGRGDARTL

SEQ ID NO: 100997 - protein, 10 aa, synthetic construct
DTARGDARTL

SEQ ID NO: 100998 - protein, 10 aa, synthetic construct
DTVRGDARTL

SEQ ID NO: 100999 - protein, 10 aa, synthetic construct
DTPRGDARTL

SEQ ID NO: 101000 - protein, 10 aa, synthetic construct
DTLRGDARTL

SEQ ID NO: 101001 - protein, 10 aa, synthetic construct
DTIRGDARTL

SEQ ID NO: 101002 - protein, 10 aa, synthetic construct
DTMRGDARTL

SEQ ID NO: 101003 - protein, 10 aa, synthetic construct
DTWRGDARTL

SEQ ID NO: 101004 - protein, 10 aa, synthetic construct
DTFRGDARTL

SEQ ID NO: 101005 - protein, 10 aa, synthetic construct
DTKRGDARTL

SEQ ID NO: 101006 - protein, 10 aa, synthetic construct
DTRRGDARTL

SEQ ID NO: 101007 - protein, 10 aa, synthetic construct
DTHRGDARTL

SEQ ID NO: 101008 - protein, 10 aa, synthetic construct
DTSRGDARTL

SEQ ID NO: 101009 - protein, 10 aa, synthetic construct
DTTRGDARTL

SEQ ID NO: 101010 - protein, 10 aa, synthetic construct
DTYRGDARTL

SEQ ID NO: 101011 - protein, 10 aa, synthetic construct
DTNRGDARTL

SEQ ID NO: 101012 - protein, 10 aa, synthetic construct
DTQRGDARTL

SEQ ID NO: 101013 - protein, 10 aa, synthetic construct
DTDRGDARTL

SEQ ID NO: 101014 - protein, 10 aa, synthetic construct
DTERGDARTL

SEQ ID NO: 101015 - protein, 10 aa, synthetic construct
DYGRGDARTL

SEQ ID NO: 101016 - protein, 10 aa, synthetic construct
DYARGDARTL

SEQ ID NO: 101017 - protein, 10 aa, synthetic construct
DYVRGDARTL

SEQ ID NO: 101018 - protein, 10 aa, synthetic construct
DYPRGDARTL

SEQ ID NO: 101019 - protein, 10 aa, synthetic construct
DYLRGDARTL

SEQ ID NO: 101020 - protein, 10 aa, synthetic construct
DYIRGDARTL

SEQ ID NO: 101021 - protein, 10 aa, synthetic construct
DYMRGDARTL

SEQ ID NO: 101022 - protein, 10 aa, synthetic construct
DYWRGDARTL

SEQ ID NO: 101023 - protein, 10 aa, synthetic construct
DYFRGDARTL

SEQ ID NO: 101024 - protein, 10 aa, synthetic construct
DYKRGDARTL

SEQ ID NO: 101025 - protein, 10 aa, synthetic construct
DYRRGDARTL

SEQ ID NO: 101026 - protein, 10 aa, synthetic construct
DYHRGDARTL

SEQ ID NO: 101027 - protein, 10 aa, synthetic construct
DYSRGDARTL

SEQ ID NO: 101028 - protein, 10 aa, synthetic construct
DYTRGDARTL

SEQ ID NO: 101029 - protein, 10 aa, synthetic construct
DYYRGDARTL

SEQ ID NO: 101030 - protein, 10 aa, synthetic construct
DYNRGDARTL

SEQ ID NO: 101031 - protein, 10 aa, synthetic construct
DYQRGDARTL

SEQ ID NO: 101032 - protein, 10 aa, synthetic construct
DYDRGDARTL

SEQ ID NO: 101033 - protein, 10 aa, synthetic construct
DYERGDARTL

SEQ ID NO: 101034 - protein, 10 aa, synthetic construct
DNGRGDARTL

SEQ ID NO: 101035 - protein, 10 aa, synthetic construct
DNARGDARTL

SEQ ID NO: 101036 - protein, 10 aa, synthetic construct
DNVRGDARTL

SEQ ID NO: 101037 - protein, 10 aa, synthetic construct
DNPRGDARTL

SEQ ID NO: 101038 - protein, 10 aa, synthetic construct
DNLRGDARTL

SEQ ID NO: 101039 - protein, 10 aa, synthetic construct
DNIRGDARTL

SEQ ID NO: 101040 - protein, 10 aa, synthetic construct
DNMRGDARTL

SEQ ID NO: 101041 - protein, 10 aa, synthetic construct
DNWRGDARTL

SEQ ID NO: 101042 - protein, 10 aa, synthetic construct
DNFRGDARTL

SEQ ID NO: 101043 - protein, 10 aa, synthetic construct
DNKRGDARTL

SEQ ID NO: 101044 - protein, 10 aa, synthetic construct
DNRRGDARTL

SEQ ID NO: 101045 - protein, 10 aa, synthetic construct
DNHRGDARTL

SEQ ID NO: 101046 - protein, 10 aa, synthetic construct
DNSRGDARTL

SEQ ID NO: 101047 - protein, 10 aa, synthetic construct
DNTRGDARTL

SEQ ID NO: 101048 - protein, 10 aa, synthetic construct
DNYRGDARTL

SEQ ID NO: 101049 - protein, 10 aa, synthetic construct
DNNRGDARTL

SEQ ID NO: 101050 - protein, 10 aa, synthetic construct
DNQRGDARTL

SEQ ID NO: 101051 - protein, 10 aa, synthetic construct
DNDRGDARTL

SEQ ID NO: 101052 - protein, 10 aa, synthetic construct
DNERGDARTL

SEQ ID NO: 101053 - protein, 10 aa, synthetic construct
DQGRGDARTL

SEQ ID NO: 101054 - protein, 10 aa, synthetic construct
DQARGDARTL

SEQ ID NO: 101055 - protein, 10 aa, synthetic construct
DQVRGDARTL

SEQ ID NO: 101056 - protein, 10 aa, synthetic construct
DQPRGDARTL

SEQ ID NO: 101057 - protein, 10 aa, synthetic construct
DQLRGDARTL

SEQ ID NO: 101058 - protein, 10 aa, synthetic construct
DQIRGDARTL

SEQ ID NO: 101059 - protein, 10 aa, synthetic construct
DQMRGDARTL

SEQ ID NO: 101060 - protein, 10 aa, synthetic construct
DQWRGDARTL

SEQ ID NO: 101061 - protein, 10 aa, synthetic construct
DQFRGDARTL

SEQ ID NO: 101062 - protein, 10 aa, synthetic construct
DQKRGDARTL

SEQ ID NO: 101063 - protein, 10 aa, synthetic construct
DQRRGDARTL

SEQ ID NO: 101064 - protein, 10 aa, synthetic construct
DQHRGDARTL

SEQ ID NO: 101065 - protein, 10 aa, synthetic construct
DQSRGDARTL

SEQ ID NO: 101066 - protein, 10 aa, synthetic construct
DQTRGDARTL

SEQ ID NO: 101067 - protein, 10 aa, synthetic construct
DQYRGDARTL

SEQ ID NO: 101068 - protein, 10 aa, synthetic construct
DQNRGDARTL

SEQ ID NO: 101069 - protein, 10 aa, synthetic construct
DQQRGDARTL

SEQ ID NO: 101070 - protein, 10 aa, synthetic construct
DQDRGDARTL

SEQ ID NO: 101071 - protein, 10 aa, synthetic construct
DQERGDARTL

SEQ ID NO: 101072 - protein, 10 aa, synthetic construct
DDGRGDARTL

SEQ ID NO: 101073 - protein, 10 aa, synthetic construct
DDARGDARTL

SEQ ID NO: 101074 - protein, 10 aa, synthetic construct
DDVRGDARTL

SEQ ID NO: 101075 - protein, 10 aa, synthetic construct
DDPRGDARTL

SEQ ID NO: 101076 - protein, 10 aa, synthetic construct
DDLRGDARTL

SEQ ID NO: 101077 - protein, 10 aa, synthetic construct
DDIRGDARTL

SEQ ID NO: 101078 - protein, 10 aa, synthetic construct
DDMRGDARTL

SEQ ID NO: 101079 - protein, 10 aa, synthetic construct
DDWRGDARTL

SEQ ID NO: 101080 - protein, 10 aa, synthetic construct
DDFRGDARTL

SEQ ID NO: 101081 - protein, 10 aa, synthetic construct
DDKRGDARTL

SEQ ID NO: 101082 - protein, 10 aa, synthetic construct
DDRRGDARTL

SEQ ID NO: 101083 - protein, 10 aa, synthetic construct
DDHRGDARTL

SEQ ID NO: 101084 - protein, 10 aa, synthetic construct
DDSRGDARTL

SEQ ID NO: 101085 - protein, 10 aa, synthetic construct
DDTRGDARTL

SEQ ID NO: 101086 - protein, 10 aa, synthetic construct
DDYRGDARTL

SEQ ID NO: 101087 - protein, 10 aa, synthetic construct
DDNRGDARTL

SEQ ID NO: 101088 - protein, 10 aa, synthetic construct
DDQRGDARTL

SEQ ID NO: 101089 - protein, 10 aa, synthetic construct
DDDRGDARTL

SEQ ID NO: 101090 - protein, 10 aa, synthetic construct
DDERGDARTL

SEQ ID NO: 101091 - protein, 10 aa, synthetic construct
DEGRGDARTL

SEQ ID NO: 101092 - protein, 10 aa, synthetic construct
DEARGDARTL

SEQ ID NO: 101093 - protein, 10 aa, synthetic construct
DEVRGDARTL

SEQ ID NO: 101094 - protein, 10 aa, synthetic construct
DEPRGDARTL

SEQ ID NO: 101095 - protein, 10 aa, synthetic construct
DELRGDARTL

SEQ ID NO: 101096 - protein, 10 aa, synthetic construct
DEIRGDARTL

SEQ ID NO: 101097 - protein, 10 aa, synthetic construct
DEMRGDARTL

SEQ ID NO: 101098 - protein, 10 aa, synthetic construct
DEWRGDARTL

SEQ ID NO: 101099 - protein, 10 aa, synthetic construct
DEFRGDARTL

SEQ ID NO: 101100 - protein, 10 aa, synthetic construct
DEKRGDARTL

SEQ ID NO: 101101 - protein, 10 aa, synthetic construct
DERRGDARTL

SEQ ID NO: 101102 - protein, 10 aa, synthetic construct
DEHRGDARTL

SEQ ID NO: 101103 - protein, 10 aa, synthetic construct
DESRGDARTL

SEQ ID NO: 101104 - protein, 10 aa, synthetic construct
DETRGDARTL

SEQ ID NO: 101105 - protein, 10 aa, synthetic construct
DEYRGDARTL

SEQ ID NO: 101106 - protein, 10 aa, synthetic construct
DENRGDARTL

SEQ ID NO: 101107 - protein, 10 aa, synthetic construct
DEQRGDARTL

SEQ ID NO: 101108 - protein, 10 aa, synthetic construct
DEDRGDARTL

SEQ ID NO: 101109 - protein, 10 aa, synthetic construct
DEERGDARTL

SEQ ID NO: 101110 - protein, 10 aa, synthetic construct
QGGRGDARTL

SEQ ID NO: 101111 - protein, 10 aa, synthetic construct
QGARGDARTL

SEQ ID NO: 101112 - protein, 10 aa, synthetic construct
QGVRGDARTL

SEQ ID NO: 101113 - protein, 10 aa, synthetic construct
QGPRGDARTL

SEQ ID NO: 101114 - protein, 10 aa, synthetic construct
QGLRGDARTL

SEQ ID NO: 101115 - protein, 10 aa, synthetic construct
QGIRGDARTL

SEQ ID NO: 101116 - protein, 10 aa, synthetic construct
QGMRGDARTL

SEQ ID NO: 101117 - protein, 10 aa, synthetic construct
QGWRGDARTL

SEQ ID NO: 101118 - protein, 10 aa, synthetic construct
QGFRGDARTL

SEQ ID NO: 101119 - protein, 10 aa, synthetic construct
QGKRGDARTL

SEQ ID NO: 101120 - protein, 10 aa, synthetic construct
QGRRGDARTL

SEQ ID NO: 101121 - protein, 10 aa, synthetic construct
QGHRGDARTL

SEQ ID NO: 101122 - protein, 10 aa, synthetic construct
QGSRGDARTL

SEQ ID NO: 101123 - protein, 10 aa, synthetic construct
QGTRGDARTL

SEQ ID NO: 101124 - protein, 10 aa, synthetic construct
QGYRGDARTL

SEQ ID NO: 101125 - protein, 10 aa, synthetic construct
QGNRGDARTL

SEQ ID NO: 101126 - protein, 10 aa, synthetic construct
QGQRGDARTL

SEQ ID NO: 101127 - protein, 10 aa, synthetic construct
QGDRGDARTL

SEQ ID NO: 101128 - protein, 10 aa, synthetic construct
QGERGDARTL

SEQ ID NO: 101129 - protein, 10 aa, synthetic construct
QAGRGDARTL

SEQ ID NO: 101130 - protein, 10 aa, synthetic construct
QAARGDARTL

SEQ ID NO: 101131 - protein, 10 aa, synthetic construct
QAVRGDARTL

SEQ ID NO: 101132 - protein, 10 aa, synthetic construct
QAPRGDARTL

SEQ ID NO: 101133 - protein, 10 aa, synthetic construct
QALRGDARTL

SEQ ID NO: 101134 - protein, 10 aa, synthetic construct
QAIRGDARTL

SEQ ID NO: 101135 - protein, 10 aa, synthetic construct
QAMRGDARTL

SEQ ID NO: 101136 - protein, 10 aa, synthetic construct
QAWRGDARTL

SEQ ID NO: 101137 - protein, 10 aa, synthetic construct
QAFRGDARTL

SEQ ID NO: 101138 - protein, 10 aa, synthetic construct
QAKRGDARTL

SEQ ID NO: 101139 - protein, 10 aa, synthetic construct
QARRGDARTL

SEQ ID NO: 101140 - protein, 10 aa, synthetic construct
QAHRGDARTL

SEQ ID NO: 101141 - protein, 10 aa, synthetic construct
QASRGDARTL

SEQ ID NO: 101142 - protein, 10 aa, synthetic construct
QATRGDARTL

SEQ ID NO: 101143 - protein, 10 aa, synthetic construct
QAYRGDARTL

SEQ ID NO: 101144 - protein, 10 aa, synthetic construct
QANRGDARTL

SEQ ID NO: 101145 - protein, 10 aa, synthetic construct
QAQRGDARTL

SEQ ID NO: 101146 - protein, 10 aa, synthetic construct
QADRGDARTL

SEQ ID NO: 101147 - protein, 10 aa, synthetic construct
QAERGDARTL

SEQ ID NO: 101148 - protein, 10 aa, synthetic construct
QVGRGDARTL

SEQ ID NO: 101149 - protein, 10 aa, synthetic construct
QVARGDARTL

SEQ ID NO: 101150 - protein, 10 aa, synthetic construct
QVVRGDARTL

SEQ ID NO: 101151 - protein, 10 aa, synthetic construct
QVPRGDARTL

SEQ ID NO: 101152 - protein, 10 aa, synthetic construct
QVLRGDARTL

SEQ ID NO: 101153 - protein, 10 aa, synthetic construct
QVIRGDARTL

SEQ ID NO: 101154 - protein, 10 aa, synthetic construct
QVMRGDARTL

SEQ ID NO: 101155 - protein, 10 aa, synthetic construct
QVWRGDARTL

SEQ ID NO: 101156 - protein, 10 aa, synthetic construct
QVFRGDARTL

SEQ ID NO: 101157 - protein, 10 aa, synthetic construct
QVKRGDARTL

SEQ ID NO: 101158 - protein, 10 aa, synthetic construct
QVRRGDARTL

SEQ ID NO: 101159 - protein, 10 aa, synthetic construct
QVHRGDARTL

SEQ ID NO: 101160 - protein, 10 aa, synthetic construct
QVSRGDARTL

SEQ ID NO: 101161 - protein, 10 aa, synthetic construct
QVTRGDARTL

SEQ ID NO: 101162 - protein, 10 aa, synthetic construct
QVYRGDARTL

SEQ ID NO: 101163 - protein, 10 aa, synthetic construct
QVNRGDARTL

SEQ ID NO: 101164 - protein, 10 aa, synthetic construct
QVQRGDARTL

SEQ ID NO: 101165 - protein, 10 aa, synthetic construct
QVDRGDARTL

SEQ ID NO: 101166 - protein, 10 aa, synthetic construct
QVERGDARTL

SEQ ID NO: 101167 - protein, 10 aa, synthetic construct
QPGRGDARTL

SEQ ID NO: 101168 - protein, 10 aa, synthetic construct
QPARGDARTL

SEQ ID NO: 101169 - protein, 10 aa, synthetic construct
QPVRGDARTL

SEQ ID NO: 101170 - protein, 10 aa, synthetic construct
QPPRGDARTL

SEQ ID NO: 101171 - protein, 10 aa, synthetic construct
QPLRGDARTL

SEQ ID NO: 101172 - protein, 10 aa, synthetic construct
QPIRGDARTL

SEQ ID NO: 101173 - protein, 10 aa, synthetic construct
QPMRGDARTL

SEQ ID NO: 101174 - protein, 10 aa, synthetic construct
QPWRGDARTL

SEQ ID NO: 101175 - protein, 10 aa, synthetic construct
QPFRGDARTL

SEQ ID NO: 101176 - protein, 10 aa, synthetic construct
QPKRGDARTL

SEQ ID NO: 101177 - protein, 10 aa, synthetic construct
QPRRGDARTL

SEQ ID NO: 101178 - protein, 10 aa, synthetic construct
QPHRGDARTL

SEQ ID NO: 101179 - protein, 10 aa, synthetic construct
QPSRGDARTL

SEQ ID NO: 101180 - protein, 10 aa, synthetic construct
QPTRGDARTL

SEQ ID NO: 101181 - protein, 10 aa, synthetic construct
QPYRGDARTL

SEQ ID NO: 101182 - protein, 10 aa, synthetic construct
QPNRGDARTL

SEQ ID NO: 101183 - protein, 10 aa, synthetic construct
QPQRGDARTL

SEQ ID NO: 101184 - protein, 10 aa, synthetic construct
QPDRGDARTL

SEQ ID NO: 101185 - protein, 10 aa, synthetic construct
QPERGDARTL

SEQ ID NO: 101186 - protein, 10 aa, synthetic construct
QLGRGDARTL

SEQ ID NO: 101187 - protein, 10 aa, synthetic construct
QLARGDARTL

SEQ ID NO: 101188 - protein, 10 aa, synthetic construct
QLVRGDARTL

SEQ ID NO: 101189 - protein, 10 aa, synthetic construct
QLPRGDARTL

SEQ ID NO: 101190 - protein, 10 aa, synthetic construct
QLLRGDARTL

SEQ ID NO: 101191 - protein, 10 aa, synthetic construct
QLIRGDARTL

SEQ ID NO: 101192 - protein, 10 aa, synthetic construct
QLMRGDARTL

SEQ ID NO: 101193 - protein, 10 aa, synthetic construct
QLWRGDARTL

SEQ ID NO: 101194 - protein, 10 aa, synthetic construct
QLFRGDARTL

SEQ ID NO: 101195 - protein, 10 aa, synthetic construct
QLKRGDARTL

SEQ ID NO: 101196 - protein, 10 aa, synthetic construct
QLRRGDARTL

SEQ ID NO: 101197 - protein, 10 aa, synthetic construct
QLHRGDARTL

SEQ ID NO: 101198 - protein, 10 aa, synthetic construct
QLSRGDARTL

SEQ ID NO: 101199 - protein, 10 aa, synthetic construct
QLTRGDARTL

SEQ ID NO: 101200 - protein, 10 aa, synthetic construct
QLYRGDARTL

SEQ ID NO: 101201 - protein, 10 aa, synthetic construct
QLNRGDARTL

SEQ ID NO: 101202 - protein, 10 aa, synthetic construct
QLQRGDARTL

SEQ ID NO: 101203 - protein, 10 aa, synthetic construct
QLDRGDARTL

SEQ ID NO: 101204 - protein, 10 aa, synthetic construct
QLERGDARTL

SEQ ID NO: 101205 - protein, 10 aa, synthetic construct
QIGRGDARTL

SEQ ID NO: 101206 - protein, 10 aa, synthetic construct
QIARGDARTL

SEQ ID NO: 101207 - protein, 10 aa, synthetic construct
QIVRGDARTL

SEQ ID NO: 101208 - protein, 10 aa, synthetic construct
QIPRGDARTL

SEQ ID NO: 101209 - protein, 10 aa, synthetic construct
QILRGDARTL

SEQ ID NO: 101210 - protein, 10 aa, synthetic construct
QIIRGDARTL

SEQ ID NO: 101211 - protein, 10 aa, synthetic construct
QIMRGDARTL

SEQ ID NO: 101212 - protein, 10 aa, synthetic construct
QIWRGDARTL

SEQ ID NO: 101213 - protein, 10 aa, synthetic construct
QIFRGDARTL

SEQ ID NO: 101214 - protein, 10 aa, synthetic construct
QIKRGDARTL

SEQ ID NO: 101215 - protein, 10 aa, synthetic construct
QIRRGDARTL

SEQ ID NO: 101216 - protein, 10 aa, synthetic construct
QIHRGDARTL

SEQ ID NO: 101217 - protein, 10 aa, synthetic construct
QISRGDARTL

SEQ ID NO: 101218 - protein, 10 aa, synthetic construct
QITRGDARTL

SEQ ID NO: 101219 - protein, 10 aa, synthetic construct
QIYRGDARTL

SEQ ID NO: 101220 - protein, 10 aa, synthetic construct
QINRGDARTL

SEQ ID NO: 101221 - protein, 10 aa, synthetic construct
QIQRGDARTL

SEQ ID NO: 101222 - protein, 10 aa, synthetic construct
QIDRGDARTL

SEQ ID NO: 101223 - protein, 10 aa, synthetic construct
QIERGDARTL

SEQ ID NO: 101224 - protein, 10 aa, synthetic construct
QMGRGDARTL

SEQ ID NO: 101225 - protein, 10 aa, synthetic construct
QMARGDARTL

SEQ ID NO: 101226 - protein, 10 aa, synthetic construct
QMVRGDARTL

SEQ ID NO: 101227 - protein, 10 aa, synthetic construct
QMPRGDARTL

SEQ ID NO: 101228 - protein, 10 aa, synthetic construct
QMLRGDARTL

SEQ ID NO: 101229 - protein, 10 aa, synthetic construct
QMIRGDARTL

SEQ ID NO: 101230 - protein, 10 aa, synthetic construct
QMMRGDARTL

SEQ ID NO: 101231 - protein, 10 aa, synthetic construct
QMWRGDARTL

SEQ ID NO: 101232 - protein, 10 aa, synthetic construct
QMFRGDARTL

SEQ ID NO: 101233 - protein, 10 aa, synthetic construct
QMKRGDARTL

SEQ ID NO: 101234 - protein, 10 aa, synthetic construct
QMRRGDARTL

SEQ ID NO: 101235 - protein, 10 aa, synthetic construct
QMHRGDARTL

SEQ ID NO: 101236 - protein, 10 aa, synthetic construct
QMSRGDARTL

SEQ ID NO: 101237 - protein, 10 aa, synthetic construct
QMTRGDARTL

SEQ ID NO: 101238 - protein, 10 aa, synthetic construct
QMYRGDARTL

SEQ ID NO: 101239 - protein, 10 aa, synthetic construct
QMNRGDARTL

SEQ ID NO: 101240 - protein, 10 aa, synthetic construct
QMQRGDARTL

SEQ ID NO: 101241 - protein, 10 aa, synthetic construct
QMDRGDARTL

SEQ ID NO: 101242 - protein, 10 aa, synthetic construct
QMERGDARTL

SEQ ID NO: 101243 - protein, 10 aa, synthetic construct
QWGRGDARTL

SEQ ID NO: 101244 - protein, 10 aa, synthetic construct
QWARGDARTL

SEQ ID NO: 101245 - protein, 10 aa, synthetic construct
QWVRGDARTL

SEQ ID NO: 101246 - protein, 10 aa, synthetic construct
QWPRGDARTL

SEQ ID NO: 101247 - protein, 10 aa, synthetic construct
QWLRGDARTL

SEQ ID NO: 101248 - protein, 10 aa, synthetic construct
QWIRGDARTL

SEQ ID NO: 101249 - protein, 10 aa, synthetic construct
QWMRGDARTL

SEQ ID NO: 101250 - protein, 10 aa, synthetic construct
QWWRGDARTL

SEQ ID NO: 101251 - protein, 10 aa, synthetic construct
QWFRGDARTL

SEQ ID NO: 101252 - protein, 10 aa, synthetic construct
QWKRGDARTL

SEQ ID NO: 101253 - protein, 10 aa, synthetic construct
QWRRGDARTL

SEQ ID NO: 101254 - protein, 10 aa, synthetic construct
QWHRGDARTL

SEQ ID NO: 101255 - protein, 10 aa, synthetic construct
QWSRGDARTL

SEQ ID NO: 101256 - protein, 10 aa, synthetic construct
QWTRGDARTL

SEQ ID NO: 101257 - protein, 10 aa, synthetic construct
QWYRGDARTL

SEQ ID NO: 101258 - protein, 10 aa, synthetic construct
QWNRGDARTL

SEQ ID NO: 101259 - protein, 10 aa, synthetic construct
QWQRGDARTL

SEQ ID NO: 101260 - protein, 10 aa, synthetic construct
QWDRGDARTL

SEQ ID NO: 101261 - protein, 10 aa, synthetic construct
QWERGDARTL

SEQ ID NO: 101262 - protein, 10 aa, synthetic construct
QFGRGDARTL

SEQ ID NO: 101263 - protein, 10 aa, synthetic construct
QFARGDARTL

SEQ ID NO: 101264 - protein, 10 aa, synthetic construct
QFVRGDARTL

SEQ ID NO: 101265 - protein, 10 aa, synthetic construct
QFPRGDARTL

SEQ ID NO: 101266 - protein, 10 aa, synthetic construct
QFLRGDARTL

SEQ ID NO: 101267 - protein, 10 aa, synthetic construct
QFIRGDARTL

SEQ ID NO: 101268 - protein, 10 aa, synthetic construct
QFMRGDARTL

SEQ ID NO: 101269 - protein, 10 aa, synthetic construct
QFWRGDARTL

SEQ ID NO: 101270 - protein, 10 aa, synthetic construct
QFFRGDARTL

SEQ ID NO: 101271 - protein, 10 aa, synthetic construct
QFKRGDARTL

SEQ ID NO: 101272 - protein, 10 aa, synthetic construct
QFRRGDARTL

SEQ ID NO: 101273 - protein, 10 aa, synthetic construct
QFHRGDARTL

SEQ ID NO: 101274 - protein, 10 aa, synthetic construct
QFSRGDARTL

SEQ ID NO: 101275 - protein, 10 aa, synthetic construct
QFTRGDARTL

SEQ ID NO: 101276 - protein, 10 aa, synthetic construct
QFYRGDARTL

SEQ ID NO: 101277 - protein, 10 aa, synthetic construct
QFNRGDARTL

SEQ ID NO: 101278 - protein, 10 aa, synthetic construct
QFQRGDARTL

SEQ ID NO: 101279 - protein, 10 aa, synthetic construct
QFDRGDARTL

SEQ ID NO: 101280 - protein, 10 aa, synthetic construct
QFERGDARTL

SEQ ID NO: 101281 - protein, 10 aa, synthetic construct
QKGRGDARTL

SEQ ID NO: 101282 - protein, 10 aa, synthetic construct
QKARGDARTL

SEQ ID NO: 101283 - protein, 10 aa, synthetic construct
QKVRGDARTL

SEQ ID NO: 101284 - protein, 10 aa, synthetic construct
QKPRGDARTL

SEQ ID NO: 101285 - protein, 10 aa, synthetic construct
QKLRGDARTL

SEQ ID NO: 101286 - protein, 10 aa, synthetic construct
QKIRGDARTL

SEQ ID NO: 101287 - protein, 10 aa, synthetic construct
QKMRGDARTL

SEQ ID NO: 101288 - protein, 10 aa, synthetic construct
QKWRGDARTL

SEQ ID NO: 101289 - protein, 10 aa, synthetic construct
QKFRGDARTL

SEQ ID NO: 101290 - protein, 10 aa, synthetic construct
QKKRGDARTL

SEQ ID NO: 101291 - protein, 10 aa, synthetic construct
QKRRGDARTL

SEQ ID NO: 101292 - protein, 10 aa, synthetic construct
QKHRGDARTL

SEQ ID NO: 101293 - protein, 10 aa, synthetic construct
QKSRGDARTL

SEQ ID NO: 101294 - protein, 10 aa, synthetic construct
QKTRGDARTL

SEQ ID NO: 101295 - protein, 10 aa, synthetic construct
QKYRGDARTL

SEQ ID NO: 101296 - protein, 10 aa, synthetic construct
QKNRGDARTL

SEQ ID NO: 101297 - protein, 10 aa, synthetic construct
QKQRGDARTL

SEQ ID NO: 101298 - protein, 10 aa, synthetic construct
QKDRGDARTL

SEQ ID NO: 101299 - protein, 10 aa, synthetic construct
QKERGDARTL

SEQ ID NO: 101300 - protein, 10 aa, synthetic construct
QRGRGDARTL

SEQ ID NO: 101301 - protein, 10 aa, synthetic construct
QRARGDARTL

SEQ ID NO: 101302 - protein, 10 aa, synthetic construct
QRVRGDARTL

SEQ ID NO: 101303 - protein, 10 aa, synthetic construct
QRPRGDARTL

SEQ ID NO: 101304 - protein, 10 aa, synthetic construct
QRLRGDARTL

SEQ ID NO: 101305 - protein, 10 aa, synthetic construct
QRIRGDARTL

SEQ ID NO: 101306 - protein, 10 aa, synthetic construct
QRMRGDARTL

SEQ ID NO: 101307 - protein, 10 aa, synthetic construct
QRWRGDARTL

SEQ ID NO: 101308 - protein, 10 aa, synthetic construct
QRFRGDARTL

SEQ ID NO: 101309 - protein, 10 aa, synthetic construct
QRKRGDARTL

SEQ ID NO: 101310 - protein, 10 aa, synthetic construct
QRRRGDARTL

SEQ ID NO: 101311 - protein, 10 aa, synthetic construct
QRHRGDARTL

SEQ ID NO: 101312 - protein, 10 aa, synthetic construct
QRSRGDARTL

SEQ ID NO: 101313 - protein, 10 aa, synthetic construct
QRTRGDARTL

SEQ ID NO: 101314 - protein, 10 aa, synthetic construct
QRYRGDARTL

SEQ ID NO: 101315 - protein, 10 aa, synthetic construct
QRNRGDARTL

SEQ ID NO: 101316 - protein, 10 aa, synthetic construct
QRQRGDARTL

SEQ ID NO: 101317 - protein, 10 aa, synthetic construct
QRDRGDARTL

SEQ ID NO: 101318 - protein, 10 aa, synthetic construct
QRERGDARTL

SEQ ID NO: 101319 - protein, 10 aa, synthetic construct
QHGRGDARTL

SEQ ID NO: 101320 - protein, 10 aa, synthetic construct
QHARGDARTL

SEQ ID NO: 101321 - protein, 10 aa, synthetic construct
QHVRGDARTL

SEQ ID NO: 101322 - protein, 10 aa, synthetic construct
QHPRGDARTL

SEQ ID NO: 101323 - protein, 10 aa, synthetic construct
QHLRGDARTL

SEQ ID NO: 101324 - protein, 10 aa, synthetic construct
QHIRGDARTL

SEQ ID NO: 101325 - protein, 10 aa, synthetic construct
QHMRGDARTL

SEQ ID NO: 101326 - protein, 10 aa, synthetic construct
QHWRGDARTL

SEQ ID NO: 101327 - protein, 10 aa, synthetic construct
QHFRGDARTL

SEQ ID NO: 101328 - protein, 10 aa, synthetic construct
QHKRGDARTL

SEQ ID NO: 101329 - protein, 10 aa, synthetic construct
QHRRGDARTL

SEQ ID NO: 101330 - protein, 10 aa, synthetic construct
QHHRGDARTL

SEQ ID NO: 101331 - protein, 10 aa, synthetic construct
QHSRGDARTL

SEQ ID NO: 101332 - protein, 10 aa, synthetic construct
QHTRGDARTL

SEQ ID NO: 101333 - protein, 10 aa, synthetic construct
QHYRGDARTL

SEQ ID NO: 101334 - protein, 10 aa, synthetic construct
QHNRGDARTL

SEQ ID NO: 101335 - protein, 10 aa, synthetic construct
QHQRGDARTL

SEQ ID NO: 101336 - protein, 10 aa, synthetic construct
QHDRGDARTL

SEQ ID NO: 101337 - protein, 10 aa, synthetic construct
QHERGDARTL

SEQ ID NO: 101338 - protein, 10 aa, synthetic construct
QSGRGDARTL

SEQ ID NO: 101339 - protein, 10 aa, synthetic construct
QSARGDARTL

SEQ ID NO: 101340 - protein, 10 aa, synthetic construct
QSVRGDARTL

SEQ ID NO: 101341 - protein, 10 aa, synthetic construct
QSPRGDARTL

SEQ ID NO: 101342 - protein, 10 aa, synthetic construct
QSLRGDARTL

SEQ ID NO: 101343 - protein, 10 aa, synthetic construct
QSIRGDARTL

SEQ ID NO: 101344 - protein, 10 aa, synthetic construct
QSMRGDARTL

SEQ ID NO: 101345 - protein, 10 aa, synthetic construct
QSWRGDARTL

SEQ ID NO: 101346 - protein, 10 aa, synthetic construct
QSFRGDARTL

SEQ ID NO: 101347 - protein, 10 aa, synthetic construct
QSKRGDARTL

SEQ ID NO: 101348 - protein, 10 aa, synthetic construct
QSRRGDARTL

SEQ ID NO: 101349 - protein, 10 aa, synthetic construct
QSHRGDARTL

SEQ ID NO: 101350 - protein, 10 aa, synthetic construct
QSSRGDARTL

SEQ ID NO: 101351 - protein, 10 aa, synthetic construct
QSTRGDARTL

SEQ ID NO: 101352 - protein, 10 aa, synthetic construct
QSYRGDARTL

SEQ ID NO: 101353 - protein, 10 aa, synthetic construct
QSNRGDARTL

SEQ ID NO: 101354 - protein, 10 aa, synthetic construct
QSQRGDARTL

SEQ ID NO: 101355 - protein, 10 aa, synthetic construct
QSDRGDARTL

SEQ ID NO: 101356 - protein, 10 aa, synthetic construct
QSERGDARTL

SEQ ID NO: 101357 - protein, 10 aa, synthetic construct
QTGRGDARTL

SEQ ID NO: 101358 - protein, 10 aa, synthetic construct
QTARGDARTL

SEQ ID NO: 101359 - protein, 10 aa, synthetic construct
QTVRGDARTL

SEQ ID NO: 101360 - protein, 10 aa, synthetic construct
QTPRGDARTL

SEQ ID NO: 101361 - protein, 10 aa, synthetic construct
QTLRGDARTL

SEQ ID NO: 101362 - protein, 10 aa, synthetic construct
QTIRGDARTL

SEQ ID NO: 101363 - protein, 10 aa, synthetic construct
QTMRGDARTL

SEQ ID NO: 101364 - protein, 10 aa, synthetic construct
QTWRGDARTL

SEQ ID NO: 101365 - protein, 10 aa, synthetic construct
QTFRGDARTL

SEQ ID NO: 101366 - protein, 10 aa, synthetic construct
QTKRGDARTL

SEQ ID NO: 101367 - protein, 10 aa, synthetic construct
QTRRGDARTL

SEQ ID NO: 101368 - protein, 10 aa, synthetic construct
QTHRGDARTL

SEQ ID NO: 101369 - protein, 10 aa, synthetic construct
QTSRGDARTL

SEQ ID NO: 101370 - protein, 10 aa, synthetic construct
QTTRGDARTL

SEQ ID NO: 101371 - protein, 10 aa, synthetic construct
QTYRGDARTL

SEQ ID NO: 101372 - protein, 10 aa, synthetic construct
QTNRGDARTL

SEQ ID NO: 101373 - protein, 10 aa, synthetic construct
QTQRGDARTL

SEQ ID NO: 101374 - protein, 10 aa, synthetic construct
QTDRGDARTL

SEQ ID NO: 101375 - protein, 10 aa, synthetic construct
QTERGDARTL

SEQ ID NO: 101376 - protein, 10 aa, synthetic construct
QYGRGDARTL

SEQ ID NO: 101377 - protein, 10 aa, synthetic construct
QYARGDARTL

SEQ ID NO: 101378 - protein, 10 aa, synthetic construct
QYVRGDARTL

SEQ ID NO: 101379 - protein, 10 aa, synthetic construct
QYPRGDARTL

SEQ ID NO: 101380 - protein, 10 aa, synthetic construct
QYLRGDARTL

SEQ ID NO: 101381 - protein, 10 aa, synthetic construct
QYIRGDARTL

SEQ ID NO: 101382 - protein, 10 aa, synthetic construct
QYMRGDARTL

SEQ ID NO: 101383 - protein, 10 aa, synthetic construct
QYWRGDARTL

SEQ ID NO: 101384 - protein, 10 aa, synthetic construct
QYFRGDARTL

SEQ ID NO: 101385 - protein, 10 aa, synthetic construct
QYKRGDARTL

SEQ ID NO: 101386 - protein, 10 aa, synthetic construct
QYRRGDARTL

SEQ ID NO: 101387 - protein, 10 aa, synthetic construct
QYHRGDARTL

SEQ ID NO: 101388 - protein, 10 aa, synthetic construct
QYSRGDARTL

SEQ ID NO: 101389 - protein, 10 aa, synthetic construct
QYTRGDARTL

SEQ ID NO: 101390 - protein, 10 aa, synthetic construct
QYYRGDARTL

SEQ ID NO: 101391 - protein, 10 aa, synthetic construct
QYNRGDARTL

SEQ ID NO: 101392 - protein, 10 aa, synthetic construct
QYQRGDARTL

SEQ ID NO: 101393 - protein, 10 aa, synthetic construct
QYDRGDARTL

SEQ ID NO: 101394 - protein, 10 aa, synthetic construct
QYERGDARTL

SEQ ID NO: 101395 - protein, 10 aa, synthetic construct
QNGRGDARTL

SEQ ID NO: 101396 - protein, 10 aa, synthetic construct
QNARGDARTL

SEQ ID NO: 101397 - protein, 10 aa, synthetic construct
QNVRGDARTL

SEQ ID NO: 101398 - protein, 10 aa, synthetic construct
QNPRGDARTL

SEQ ID NO: 101399 - protein, 10 aa, synthetic construct
QNLRGDARTL

SEQ ID NO: 101400 - protein, 10 aa, synthetic construct
QNIRGDARTL

SEQ ID NO: 101401 - protein, 10 aa, synthetic construct
QNMRGDARTL

SEQ ID NO: 101402 - protein, 10 aa, synthetic construct
QNWRGDARTL

SEQ ID NO: 101403 - protein, 10 aa, synthetic construct
QNFRGDARTL

SEQ ID NO: 101404 - protein, 10 aa, synthetic construct
QNKRGDARTL

SEQ ID NO: 101405 - protein, 10 aa, synthetic construct
QNRRGDARTL

SEQ ID NO: 101406 - protein, 10 aa, synthetic construct
QNHRGDARTL

SEQ ID NO: 101407 - protein, 10 aa, synthetic construct
QNSRGDARTL

SEQ ID NO: 101408 - protein, 10 aa, synthetic construct
QNTRGDARTL

SEQ ID NO: 101409 - protein, 10 aa, synthetic construct
QNYRGDARTL

SEQ ID NO: 101410 - protein, 10 aa, synthetic construct
QNNRGDARTL

SEQ ID NO: 101411 - protein, 10 aa, synthetic construct
QNQRGDARTL

SEQ ID NO: 101412 - protein, 10 aa, synthetic construct
QNDRGDARTL

SEQ ID NO: 101413 - protein, 10 aa, synthetic construct
QNERGDARTL

SEQ ID NO: 101414 - protein, 10 aa, synthetic construct
QQGRGDARTL

SEQ ID NO: 101415 - protein, 10 aa, synthetic construct
QQARGDARTL

SEQ ID NO: 101416 - protein, 10 aa, synthetic construct
QQVRGDARTL

SEQ ID NO: 101417 - protein, 10 aa, synthetic construct
QQPRGDARTL

SEQ ID NO: 101418 - protein, 10 aa, synthetic construct
QQLRGDARTL

SEQ ID NO: 101419 - protein, 10 aa, synthetic construct
QQIRGDARTL

SEQ ID NO: 101420 - protein, 10 aa, synthetic construct
QQMRGDARTL

SEQ ID NO: 101421 - protein, 10 aa, synthetic construct
QQWRGDARTL

SEQ ID NO: 101422 - protein, 10 aa, synthetic construct
QQFRGDARTL

SEQ ID NO: 101423 - protein, 10 aa, synthetic construct
QQKRGDARTL

SEQ ID NO: 101424 - protein, 10 aa, synthetic construct
QQRRGDARTL

SEQ ID NO: 101425 - protein, 10 aa, synthetic construct
QQHRGDARTL

SEQ ID NO: 101426 - protein, 10 aa, synthetic construct
QQSRGDARTL

SEQ ID NO: 101427 - protein, 10 aa, synthetic construct
QQTRGDARTL

SEQ ID NO: 101428 - protein, 10 aa, synthetic construct
QQYRGDARTL

SEQ ID NO: 101429 - protein, 10 aa, synthetic construct
QQNRGDARTL

SEQ ID NO: 101430 - protein, 10 aa, synthetic construct
QQQRGDARTL

SEQ ID NO: 101431 - protein, 10 aa, synthetic construct
QQDRGDARTL

SEQ ID NO: 101432 - protein, 10 aa, synthetic construct
QQERGDARTL

SEQ ID NO: 101433 - protein, 10 aa, synthetic construct
QDGRGDARTL

SEQ ID NO: 101434 - protein, 10 aa, synthetic construct
QDARGDARTL

SEQ ID NO: 101435 - protein, 10 aa, synthetic construct
QDVRGDARTL

SEQ ID NO: 101436 - protein, 10 aa, synthetic construct
QDPRGDARTL

SEQ ID NO: 101437 - protein, 10 aa, synthetic construct
QDLRGDARTL

SEQ ID NO: 101438 - protein, 10 aa, synthetic construct
QDIRGDARTL

SEQ ID NO: 101439 - protein, 10 aa, synthetic construct
QDMRGDARTL

SEQ ID NO: 101440 - protein, 10 aa, synthetic construct
QDWRGDARTL

SEQ ID NO: 101441 - protein, 10 aa, synthetic construct
QDFRGDARTL

SEQ ID NO: 101442 - protein, 10 aa, synthetic construct
QDKRGDARTL

SEQ ID NO: 101443 - protein, 10 aa, synthetic construct
QDRRGDARTL

SEQ ID NO: 101444 - protein, 10 aa, synthetic construct
QDHRGDARTL

SEQ ID NO: 101445 - protein, 10 aa, synthetic construct
QDSRGDARTL

SEQ ID NO: 101446 - protein, 10 aa, synthetic construct
QDTRGDARTL

SEQ ID NO: 101447 - protein, 10 aa, synthetic construct
QDYRGDARTL

SEQ ID NO: 101448 - protein, 10 aa, synthetic construct
QDNRGDARTL

SEQ ID NO: 101449 - protein, 10 aa, synthetic construct
QDQRGDARTL

SEQ ID NO: 101450 - protein, 10 aa, synthetic construct
QDDRGDARTL

SEQ ID NO: 101451 - protein, 10 aa, synthetic construct
QDERGDARTL

SEQ ID NO: 101452 - protein, 10 aa, synthetic construct
QEGRGDARTL

SEQ ID NO: 101453 - protein, 10 aa, synthetic construct
QEARGDARTL

SEQ ID NO: 101454 - protein, 10 aa, synthetic construct
QEVRGDARTL

SEQ ID NO: 101455 - protein, 10 aa, synthetic construct
QEPRGDARTL

SEQ ID NO: 101456 - protein, 10 aa, synthetic construct
QELRGDARTL

SEQ ID NO: 101457 - protein, 10 aa, synthetic construct
QEIRGDARTL

SEQ ID NO: 101458 - protein, 10 aa, synthetic construct
QEMRGDARTL

SEQ ID NO: 101459 - protein, 10 aa, synthetic construct
QEWRGDARTL

SEQ ID NO: 101460 - protein, 10 aa, synthetic construct
QEFRGDARTL

SEQ ID NO: 101461 - protein, 10 aa, synthetic construct
QEKRGDARTL

SEQ ID NO: 101462 - protein, 10 aa, synthetic construct
QERRGDARTL

SEQ ID NO: 101463 - protein, 10 aa, synthetic construct
QEHRGDARTL

SEQ ID NO: 101464 - protein, 10 aa, synthetic construct
QESRGDARTL

SEQ ID NO: 101465 - protein, 10 aa, synthetic construct
QETRGDARTL

SEQ ID NO: 101466 - protein, 10 aa, synthetic construct
QEYRGDARTL

SEQ ID NO: 101467 - protein, 10 aa, synthetic construct
QENRGDARTL

SEQ ID NO: 101468 - protein, 10 aa, synthetic construct
QEQRGDARTL

SEQ ID NO: 101469 - protein, 10 aa, synthetic construct
QEDRGDARTL

SEQ ID NO: 101470 - protein, 10 aa, synthetic construct
QEERGDARTL

SEQ ID NO: 101471 - protein, 10 aa, synthetic construct
SGGRGDFVQR

SEQ ID NO: 101472 - protein, 10 aa, synthetic construct
SGARGDFVQR

SEQ ID NO: 101473 - protein, 10 aa, synthetic construct
SGVRGDFVQR

SEQ ID NO: 101474 - protein, 10 aa, synthetic construct
SGPRGDFVQR

SEQ ID NO: 101475 - protein, 10 aa, synthetic construct
SGLRGDFVQR

SEQ ID NO: 101476 - protein, 10 aa, synthetic construct
SGIRGDFVQR

SEQ ID NO: 101477 - protein, 10 aa, synthetic construct
SGMRGDFVQR

SEQ ID NO: 101478 - protein, 10 aa, synthetic construct
SGWRGDFVQR

SEQ ID NO: 101479 - protein, 10 aa, synthetic construct
SGFRGDFVQR

SEQ ID NO: 101480 - protein, 10 aa, synthetic construct
SGKRGDFVQR

SEQ ID NO: 101481 - protein, 10 aa, synthetic construct
SGRRGDFVQR

SEQ ID NO: 101482 - protein, 10 aa, synthetic construct
SGHRGDFVQR

SEQ ID NO: 101483 - protein, 10 aa, synthetic construct
SGSRGDFVQR

SEQ ID NO: 101484 - protein, 10 aa, synthetic construct
SGTRGDFVQR

SEQ ID NO: 101485 - protein, 10 aa, synthetic construct
SGYRGDFVQR

SEQ ID NO: 101486 - protein, 10 aa, synthetic construct
SGNRGDFVQR

SEQ ID NO: 101487 - protein, 10 aa, synthetic construct
SGQRGDFVQR

SEQ ID NO: 101488 - protein, 10 aa, synthetic construct
SGDRGDFVQR

SEQ ID NO: 101489 - protein, 10 aa, synthetic construct
SGERGDFVQR

SEQ ID NO: 101490 - protein, 10 aa, synthetic construct
SAGRGDFVQR

SEQ ID NO: 101491 - protein, 10 aa, synthetic construct
SAARGDFVQR

SEQ ID NO: 101492 - protein, 10 aa, synthetic construct
SAVRGDFVQR

SEQ ID NO: 101493 - protein, 10 aa, synthetic construct
SAPRGDFVQR

SEQ ID NO: 101494 - protein, 10 aa, synthetic construct
SALRGDFVQR

SEQ ID NO: 101495 - protein, 10 aa, synthetic construct
SAIRGDFVQR

SEQ ID NO: 101496 - protein, 10 aa, synthetic construct
SAMRGDFVQR

SEQ ID NO: 101497 - protein, 10 aa, synthetic construct
SAWRGDFVQR

SEQ ID NO: 101498 - protein, 10 aa, synthetic construct
SAFRGDFVQR

SEQ ID NO: 101499 - protein, 10 aa, synthetic construct
SAKRGDFVQR

SEQ ID NO: 101500 - protein, 10 aa, synthetic construct
SARRGDFVQR

SEQ ID NO: 101501 - protein, 10 aa, synthetic construct
SAHRGDFVQR

SEQ ID NO: 101502 - protein, 10 aa, synthetic construct
SASRGDFVQR

SEQ ID NO: 101503 - protein, 10 aa, synthetic construct
SATRGDFVQR

SEQ ID NO: 101504 - protein, 10 aa, synthetic construct
SAYRGDFVQR

SEQ ID NO: 101505 - protein, 10 aa, synthetic construct
SANRGDFVQR

SEQ ID NO: 101506 - protein, 10 aa, synthetic construct
SAQRGDFVQR

SEQ ID NO: 101507 - protein, 10 aa, synthetic construct
SADRGDFVQR

SEQ ID NO: 101508 - protein, 10 aa, synthetic construct
SAERGDFVQR

SEQ ID NO: 101509 - protein, 10 aa, synthetic construct
SVGRGDFVQR

SEQ ID NO: 101510 - protein, 10 aa, synthetic construct
SVARGDFVQR

SEQ ID NO: 101511 - protein, 10 aa, synthetic construct
SVVRGDFVQR

SEQ ID NO: 101512 - protein, 10 aa, synthetic construct
SVPRGDFVQR

SEQ ID NO: 101513 - protein, 10 aa, synthetic construct
SVLRGDFVQR

SEQ ID NO: 101514 - protein, 10 aa, synthetic construct
SVIRGDFVQR

SEQ ID NO: 101515 - protein, 10 aa, synthetic construct
SVMRGDFVQR

SEQ ID NO: 101516 - protein, 10 aa, synthetic construct
SVWRGDFVQR

SEQ ID NO: 101517 - protein, 10 aa, synthetic construct
SVFRGDFVQR

SEQ ID NO: 101518 - protein, 10 aa, synthetic construct
SVKRGDFVQR

SEQ ID NO: 101519 - protein, 10 aa, synthetic construct
SVRRGDFVQR

SEQ ID NO: 101520 - protein, 10 aa, synthetic construct
SVHRGDFVQR

SEQ ID NO: 101521 - protein, 10 aa, synthetic construct
SVSRGDFVQR

SEQ ID NO: 101522 - protein, 10 aa, synthetic construct
SVTRGDFVQR

SEQ ID NO: 101523 - protein, 10 aa, synthetic construct
SVYRGDFVQR

SEQ ID NO: 101524 - protein, 10 aa, synthetic construct
SVNRGDFVQR

SEQ ID NO: 101525 - protein, 10 aa, synthetic construct
SVQRGDFVQR

SEQ ID NO: 101526 - protein, 10 aa, synthetic construct
SVDRGDFVQR

SEQ ID NO: 101527 - protein, 10 aa, synthetic construct
SVERGDFVQR

SEQ ID NO: 101528 - protein, 10 aa, synthetic construct
SPGRGDFVQR

SEQ ID NO: 101529 - protein, 10 aa, synthetic construct
SPARGDFVQR

SEQ ID NO: 101530 - protein, 10 aa, synthetic construct
SPVRGDFVQR

SEQ ID NO: 101531 - protein, 10 aa, synthetic construct
SPPRGDFVQR

SEQ ID NO: 101532 - protein, 10 aa, synthetic construct
SPLRGDFVQR

SEQ ID NO: 101533 - protein, 10 aa, synthetic construct
SPIRGDFVQR

SEQ ID NO: 101534 - protein, 10 aa, synthetic construct
SPMRGDFVQR

SEQ ID NO: 101535 - protein, 10 aa, synthetic construct
SPWRGDFVQR

SEQ ID NO: 101536 - protein, 10 aa, synthetic construct
SPFRGDFVQR

SEQ ID NO: 101537 - protein, 10 aa, synthetic construct
SPKRGDFVQR

SEQ ID NO: 101538 - protein, 10 aa, synthetic construct
SPRRGDFVQR

SEQ ID NO: 101539 - protein, 10 aa, synthetic construct
SPHRGDFVQR

SEQ ID NO: 101540 - protein, 10 aa, synthetic construct
SPSRGDFVQR

SEQ ID NO: 101541 - protein, 10 aa, synthetic construct
SPTRGDFVQR

SEQ ID NO: 101542 - protein, 10 aa, synthetic construct
SPYRGDFVQR

SEQ ID NO: 101543 - protein, 10 aa, synthetic construct
SPNRGDFVQR

SEQ ID NO: 101544 - protein, 10 aa, synthetic construct
SPQRGDFVQR

SEQ ID NO: 101545 - protein, 10 aa, synthetic construct
SPDRGDFVQR

SEQ ID NO: 101546 - protein, 10 aa, synthetic construct
SPERGDFVQR

SEQ ID NO: 101547 - protein, 10 aa, synthetic construct
SLGRGDFVQR

SEQ ID NO: 101548 - protein, 10 aa, synthetic construct
SLARGDFVQR

SEQ ID NO: 101549 - protein, 10 aa, synthetic construct
SLVRGDFVQR

SEQ ID NO: 101550 - protein, 10 aa, synthetic construct
SLPRGDFVQR

SEQ ID NO: 101551 - protein, 10 aa, synthetic construct
SLLRGDFVQR

SEQ ID NO: 101552 - protein, 10 aa, synthetic construct
SLIRGDFVQR

SEQ ID NO: 101553 - protein, 10 aa, synthetic construct
SLMRGDFVQR

SEQ ID NO: 101554 - protein, 10 aa, synthetic construct
SLWRGDFVQR

SEQ ID NO: 101555 - protein, 10 aa, synthetic construct
SLFRGDFVQR

SEQ ID NO: 101556 - protein, 10 aa, synthetic construct
SLKRGDFVQR

SEQ ID NO: 101557 - protein, 10 aa, synthetic construct
SLRRGDFVQR

SEQ ID NO: 101558 - protein, 10 aa, synthetic construct
SLHRGDFVQR

SEQ ID NO: 101559 - protein, 10 aa, synthetic construct
SLSRGDFVQR

SEQ ID NO: 101560 - protein, 10 aa, synthetic construct
SLTRGDFVQR

SEQ ID NO: 101561 - protein, 10 aa, synthetic construct
SLYRGDFVQR

SEQ ID NO: 101562 - protein, 10 aa, synthetic construct
SLNRGDFVQR

SEQ ID NO: 101563 - protein, 10 aa, synthetic construct
SLQRGDFVQR

SEQ ID NO: 101564 - protein, 10 aa, synthetic construct
SLDRGDFVQR

SEQ ID NO: 101565 - protein, 10 aa, synthetic construct
SLERGDFVQR

SEQ ID NO: 101566 - protein, 10 aa, synthetic construct
SIGRGDFVQR

SEQ ID NO: 101567 - protein, 10 aa, synthetic construct
SIARGDFVQR

SEQ ID NO: 101568 - protein, 10 aa, synthetic construct
SIVRGDFVQR

SEQ ID NO: 101569 - protein, 10 aa, synthetic construct
SIPRGDFVQR

SEQ ID NO: 101570 - protein, 10 aa, synthetic construct
SILRGDFVQR

SEQ ID NO: 101571 - protein, 10 aa, synthetic construct
SIIRGDFVQR

SEQ ID NO: 101572 - protein, 10 aa, synthetic construct
SIMRGDFVQR

SEQ ID NO: 101573 - protein, 10 aa, synthetic construct
SIWRGDFVQR

SEQ ID NO: 101574 - protein, 10 aa, synthetic construct
SIFRGDFVQR

SEQ ID NO: 101575 - protein, 10 aa, synthetic construct
SIKRGDFVQR

SEQ ID NO: 101576 - protein, 10 aa, synthetic construct
SIRRGDFVQR

SEQ ID NO: 101577 - protein, 10 aa, synthetic construct
SIHRGDFVQR

SEQ ID NO: 101578 - protein, 10 aa, synthetic construct
SISRGDFVQR

SEQ ID NO: 101579 - protein, 10 aa, synthetic construct
SITRGDFVQR

SEQ ID NO: 101580 - protein, 10 aa, synthetic construct
SIYRGDFVQR

SEQ ID NO: 101581 - protein, 10 aa, synthetic construct
SINRGDFVQR

SEQ ID NO: 101582 - protein, 10 aa, synthetic construct
SIQRGDFVQR

SEQ ID NO: 101583 - protein, 10 aa, synthetic construct
SIDRGDFVQR

SEQ ID NO: 101584 - protein, 10 aa, synthetic construct
SIERGDFVQR

SEQ ID NO: 101585 - protein, 10 aa, synthetic construct
SMGRGDFVQR

SEQ ID NO: 101586 - protein, 10 aa, synthetic construct
SMARGDFVQR

SEQ ID NO: 101587 - protein, 10 aa, synthetic construct
SMVRGDFVQR

SEQ ID NO: 101588 - protein, 10 aa, synthetic construct
SMPRGDFVQR

SEQ ID NO: 101589 - protein, 10 aa, synthetic construct
SMLRGDFVQR

SEQ ID NO: 101590 - protein, 10 aa, synthetic construct
SMIRGDFVQR

SEQ ID NO: 101591 - protein, 10 aa, synthetic construct
SMMRGDFVQR

SEQ ID NO: 101592 - protein, 10 aa, synthetic construct
SMWRGDFVQR

SEQ ID NO: 101593 - protein, 10 aa, synthetic construct
SMFRGDFVQR

SEQ ID NO: 101594 - protein, 10 aa, synthetic construct
SMKRGDFVQR

SEQ ID NO: 101595 - protein, 10 aa, synthetic construct
SMRRGDFVQR

SEQ ID NO: 101596 - protein, 10 aa, synthetic construct
SMHRGDFVQR

SEQ ID NO: 101597 - protein, 10 aa, synthetic construct
SMSRGDFVQR

SEQ ID NO: 101598 - protein, 10 aa, synthetic construct
SMTRGDFVQR

SEQ ID NO: 101599 - protein, 10 aa, synthetic construct
SMYRGDFVQR

SEQ ID NO: 101600 - protein, 10 aa, synthetic construct
SMNRGDFVQR

SEQ ID NO: 101601 - protein, 10 aa, synthetic construct
SMQRGDFVQR

SEQ ID NO: 101602 - protein, 10 aa, synthetic construct
SMDRGDFVQR

SEQ ID NO: 101603 - protein, 10 aa, synthetic construct
SMERGDFVQR

SEQ ID NO: 101604 - protein, 10 aa, synthetic construct
SWGRGDFVQR

SEQ ID NO: 101605 - protein, 10 aa, synthetic construct
SWARGDFVQR

SEQ ID NO: 101606 - protein, 10 aa, synthetic construct
SWVRGDFVQR

SEQ ID NO: 101607 - protein, 10 aa, synthetic construct
SWPRGDFVQR

SEQ ID NO: 101608 - protein, 10 aa, synthetic construct
SWLRGDFVQR

SEQ ID NO: 101609 - protein, 10 aa, synthetic construct
SWIRGDFVQR

SEQ ID NO: 101610 - protein, 10 aa, synthetic construct
SWMRGDFVQR

SEQ ID NO: 101611 - protein, 10 aa, synthetic construct
SWWRGDFVQR

SEQ ID NO: 101612 - protein, 10 aa, synthetic construct
SWFRGDFVQR

SEQ ID NO: 101613 - protein, 10 aa, synthetic construct
SWKRGDFVQR

SEQ ID NO: 101614 - protein, 10 aa, synthetic construct
SWRRGDFVQR

SEQ ID NO: 101615 - protein, 10 aa, synthetic construct
SWHRGDFVQR

SEQ ID NO: 101616 - protein, 10 aa, synthetic construct
SWSRGDFVQR

SEQ ID NO: 101617 - protein, 10 aa, synthetic construct
SWTRGDFVQR

SEQ ID NO: 101618 - protein, 10 aa, synthetic construct
SWYRGDFVQR

SEQ ID NO: 101619 - protein, 10 aa, synthetic construct
SWNRGDFVQR

SEQ ID NO: 101620 - protein, 10 aa, synthetic construct
SWQRGDFVQR

SEQ ID NO: 101621 - protein, 10 aa, synthetic construct
SWDRGDFVQR

SEQ ID NO: 101622 - protein, 10 aa, synthetic construct
SWERGDFVQR

SEQ ID NO: 101623 - protein, 10 aa, synthetic construct
SFGRGDFVQR

SEQ ID NO: 101624 - protein, 10 aa, synthetic construct
SFARGDFVQR

SEQ ID NO: 101625 - protein, 10 aa, synthetic construct
SFVRGDFVQR

SEQ ID NO: 101626 - protein, 10 aa, synthetic construct
SFPRGDFVQR

SEQ ID NO: 101627 - protein, 10 aa, synthetic construct
SFLRGDFVQR

SEQ ID NO: 101628 - protein, 10 aa, synthetic construct
SFIRGDFVQR

SEQ ID NO: 101629 - protein, 10 aa, synthetic construct
SFMRGDFVQR

SEQ ID NO: 101630 - protein, 10 aa, synthetic construct
SFWRGDFVQR

SEQ ID NO: 101631 - protein, 10 aa, synthetic construct
SFFRGDFVQR

SEQ ID NO: 101632 - protein, 10 aa, synthetic construct
SFKRGDFVQR

SEQ ID NO: 101633 - protein, 10 aa, synthetic construct
SFRRGDFVQR

SEQ ID NO: 101634 - protein, 10 aa, synthetic construct
SFHRGDFVQR

SEQ ID NO: 101635 - protein, 10 aa, synthetic construct
SFSRGDFVQR

SEQ ID NO: 101636 - protein, 10 aa, synthetic construct
SFTRGDFVQR

SEQ ID NO: 101637 - protein, 10 aa, synthetic construct
SFYRGDFVQR

SEQ ID NO: 101638 - protein, 10 aa, synthetic construct
SFNRGDFVQR

SEQ ID NO: 101639 - protein, 10 aa, synthetic construct
SFQRGDFVQR

SEQ ID NO: 101640 - protein, 10 aa, synthetic construct
SFDRGDFVQR

SEQ ID NO: 101641 - protein, 10 aa, synthetic construct
SFERGDFVQR

SEQ ID NO: 101642 - protein, 10 aa, synthetic construct
SKGRGDFVQR

SEQ ID NO: 101643 - protein, 10 aa, synthetic construct
SKARGDFVQR

SEQ ID NO: 101644 - protein, 10 aa, synthetic construct
SKVRGDFVQR

SEQ ID NO: 101645 - protein, 10 aa, synthetic construct
SKPRGDFVQR

SEQ ID NO: 101646 - protein, 10 aa, synthetic construct
SKLRGDFVQR

SEQ ID NO: 101647 - protein, 10 aa, synthetic construct
SKIRGDFVQR

SEQ ID NO: 101648 - protein, 10 aa, synthetic construct
SKMRGDFVQR

SEQ ID NO: 101649 - protein, 10 aa, synthetic construct
SKWRGDFVQR

SEQ ID NO: 101650 - protein, 10 aa, synthetic construct
SKFRGDFVQR

SEQ ID NO: 101651 - protein, 10 aa, synthetic construct
SKKRGDFVQR

SEQ ID NO: 101652 - protein, 10 aa, synthetic construct
SKRRGDFVQR

SEQ ID NO: 101653 - protein, 10 aa, synthetic construct
SKHRGDFVQR

SEQ ID NO: 101654 - protein, 10 aa, synthetic construct
SKSRGDFVQR

SEQ ID NO: 101655 - protein, 10 aa, synthetic construct
SKTRGDFVQR

SEQ ID NO: 101656 - protein, 10 aa, synthetic construct
SKYRGDFVQR

SEQ ID NO: 101657 - protein, 10 aa, synthetic construct
SKNRGDFVQR

SEQ ID NO: 101658 - protein, 10 aa, synthetic construct
SKQRGDFVQR

SEQ ID NO: 101659 - protein, 10 aa, synthetic construct
SKDRGDFVQR

SEQ ID NO: 101660 - protein, 10 aa, synthetic construct
SKERGDFVQR

SEQ ID NO: 101661 - protein, 10 aa, synthetic construct
SRGRGDFVQR

SEQ ID NO: 101662 - protein, 10 aa, synthetic construct
SRARGDFVQR

SEQ ID NO: 101663 - protein, 10 aa, synthetic construct
SRVRGDFVQR

SEQ ID NO: 101664 - protein, 10 aa, synthetic construct
SRPRGDFVQR

SEQ ID NO: 101665 - protein, 10 aa, synthetic construct
SRLRGDFVQR

SEQ ID NO: 101666 - protein, 10 aa, synthetic construct
SRIRGDFVQR

SEQ ID NO: 101667 - protein, 10 aa, synthetic construct
SRMRGDFVQR

SEQ ID NO: 101668 - protein, 10 aa, synthetic construct
SRWRGDFVQR

SEQ ID NO: 101669 - protein, 10 aa, synthetic construct
SRFRGDFVQR

SEQ ID NO: 101670 - protein, 10 aa, synthetic construct
SRKRGDFVQR

SEQ ID NO: 101671 - protein, 10 aa, synthetic construct
SRRRGDFVQR

SEQ ID NO: 101672 - protein, 10 aa, synthetic construct
SRHRGDFVQR

SEQ ID NO: 101673 - protein, 10 aa, synthetic construct
SRSRGDFVQR

SEQ ID NO: 101674 - protein, 10 aa, synthetic construct
SRTRGDFVQR

SEQ ID NO: 101675 - protein, 10 aa, synthetic construct
SRYRGDFVQR

SEQ ID NO: 101676 - protein, 10 aa, synthetic construct
SRNRGDFVQR

SEQ ID NO: 101677 - protein, 10 aa, synthetic construct
SRQRGDFVQR

SEQ ID NO: 101678 - protein, 10 aa, synthetic construct
SRDRGDFVQR

SEQ ID NO: 101679 - protein, 10 aa, synthetic construct
SRERGDFVQR

SEQ ID NO: 101680 - protein, 10 aa, synthetic construct
SHGRGDFVQR

SEQ ID NO: 101681 - protein, 10 aa, synthetic construct
SHARGDFVQR

SEQ ID NO: 101682 - protein, 10 aa, synthetic construct
SHVRGDFVQR

SEQ ID NO: 101683 - protein, 10 aa, synthetic construct
SHPRGDFVQR

SEQ ID NO: 101684 - protein, 10 aa, synthetic construct
SHLRGDFVQR

SEQ ID NO: 101685 - protein, 10 aa, synthetic construct
SHIRGDFVQR

SEQ ID NO: 101686 - protein, 10 aa, synthetic construct
SHMRGDFVQR

SEQ ID NO: 101687 - protein, 10 aa, synthetic construct
SHWRGDFVQR

SEQ ID NO: 101688 - protein, 10 aa, synthetic construct
SHFRGDFVQR

SEQ ID NO: 101689 - protein, 10 aa, synthetic construct
SHKRGDFVQR

SEQ ID NO: 101690 - protein, 10 aa, synthetic construct
SHRRGDFVQR

SEQ ID NO: 101691 - protein, 10 aa, synthetic construct
SHHRGDFVQR

SEQ ID NO: 101692 - protein, 10 aa, synthetic construct
SHSRGDFVQR

SEQ ID NO: 101693 - protein, 10 aa, synthetic construct
SHTRGDFVQR

SEQ ID NO: 101694 - protein, 10 aa, synthetic construct
SHYRGDFVQR

SEQ ID NO: 101695 - protein, 10 aa, synthetic construct
SHNRGDFVQR

SEQ ID NO: 101696 - protein, 10 aa, synthetic construct
SHQRGDFVQR

SEQ ID NO: 101697 - protein, 10 aa, synthetic construct
SHDRGDFVQR

SEQ ID NO: 101698 - protein, 10 aa, synthetic construct
SHERGDFVQR

SEQ ID NO: 101699 - protein, 10 aa, synthetic construct
SSGRGDFVQR

SEQ ID NO: 101700 - protein, 10 aa, synthetic construct
SSARGDFVQR

SEQ ID NO: 101701 - protein, 10 aa, synthetic construct
SSVRGDFVQR

SEQ ID NO: 101702 - protein, 10 aa, synthetic construct
SSPRGDFVQR

SEQ ID NO: 101703 - protein, 10 aa, synthetic construct
SSLRGDFVQR

SEQ ID NO: 101704 - protein, 10 aa, synthetic construct
SSIRGDFVQR

SEQ ID NO: 101705 - protein, 10 aa, synthetic construct
SSMRGDFVQR

SEQ ID NO: 101706 - protein, 10 aa, synthetic construct
SSWRGDFVQR

SEQ ID NO: 101707 - protein, 10 aa, synthetic construct
SSFRGDFVQR

SEQ ID NO: 101708 - protein, 10 aa, synthetic construct
SSKRGDFVQR

SEQ ID NO: 101709 - protein, 10 aa, synthetic construct
SSRRGDFVQR

SEQ ID NO: 101710 - protein, 10 aa, synthetic construct
SSHRGDFVQR

SEQ ID NO: 101711 - protein, 10 aa, synthetic construct
SSSRGDFVQR

SEQ ID NO: 101712 - protein, 10 aa, synthetic construct
SSTRGDFVQR

SEQ ID NO: 101713 - protein, 10 aa, synthetic construct
SSYRGDFVQR

SEQ ID NO: 101714 - protein, 10 aa, synthetic construct
SSNRGDFVQR

SEQ ID NO: 101715 - protein, 10 aa, synthetic construct
SSQRGDFVQR

SEQ ID NO: 101716 - protein, 10 aa, synthetic construct
SSDRGDFVQR

SEQ ID NO: 101717 - protein, 10 aa, synthetic construct
SSERGDFVQR

SEQ ID NO: 101718 - protein, 10 aa, synthetic construct
STGRGDFVQR

SEQ ID NO: 101719 - protein, 10 aa, synthetic construct
STARGDFVQR

SEQ ID NO: 101720 - protein, 10 aa, synthetic construct
STVRGDFVQR

SEQ ID NO: 101721 - protein, 10 aa, synthetic construct
STPRGDFVQR

SEQ ID NO: 101722 - protein, 10 aa, synthetic construct
STLRGDFVQR

SEQ ID NO: 101723 - protein, 10 aa, synthetic construct
STIRGDFVQR

SEQ ID NO: 101724 - protein, 10 aa, synthetic construct
STMRGDFVQR

SEQ ID NO: 101725 - protein, 10 aa, synthetic construct
STWRGDFVQR

SEQ ID NO: 101726 - protein, 10 aa, synthetic construct
STFRGDFVQR

SEQ ID NO: 101727 - protein, 10 aa, synthetic construct
STKRGDFVQR

SEQ ID NO: 101728 - protein, 10 aa, synthetic construct
STRRGDFVQR

SEQ ID NO: 101729 - protein, 10 aa, synthetic construct
STHRGDFVQR

SEQ ID NO: 101730 - protein, 10 aa, synthetic construct
STSRGDFVQR

SEQ ID NO: 101731 - protein, 10 aa, synthetic construct
STTRGDFVQR

SEQ ID NO: 101732 - protein, 10 aa, synthetic construct
STYRGDFVQR

SEQ ID NO: 101733 - protein, 10 aa, synthetic construct
STNRGDFVQR

SEQ ID NO: 101734 - protein, 10 aa, synthetic construct
STQRGDFVQR

SEQ ID NO: 101735 - protein, 10 aa, synthetic construct
STDRGDFVQR

SEQ ID NO: 101736 - protein, 10 aa, synthetic construct
STERGDFVQR

SEQ ID NO: 101737 - protein, 10 aa, synthetic construct
SYGRGDFVQR

SEQ ID NO: 101738 - protein, 10 aa, synthetic construct
SYARGDFVQR

SEQ ID NO: 101739 - protein, 10 aa, synthetic construct
SYVRGDFVQR

SEQ ID NO: 101740 - protein, 10 aa, synthetic construct
SYPRGDFVQR

SEQ ID NO: 101741 - protein, 10 aa, synthetic construct
SYLRGDFVQR

SEQ ID NO: 101742 - protein, 10 aa, synthetic construct
SYIRGDFVQR

SEQ ID NO: 101743 - protein, 10 aa, synthetic construct
SYMRGDFVQR

SEQ ID NO: 101744 - protein, 10 aa, synthetic construct
SYWRGDFVQR

SEQ ID NO: 101745 - protein, 10 aa, synthetic construct
SYFRGDFVQR

SEQ ID NO: 101746 - protein, 10 aa, synthetic construct
SYKRGDFVQR

SEQ ID NO: 101747 - protein, 10 aa, synthetic construct
SYRRGDFVQR

SEQ ID NO: 101748 - protein, 10 aa, synthetic construct
SYHRGDFVQR

SEQ ID NO: 101749 - protein, 10 aa, synthetic construct
SYSRGDFVQR

SEQ ID NO: 101750 - protein, 10 aa, synthetic construct
SYTRGDFVQR

SEQ ID NO: 101751 - protein, 10 aa, synthetic construct
SYYRGDFVQR

SEQ ID NO: 101752 - protein, 10 aa, synthetic construct
SYNRGDFVQR

SEQ ID NO: 101753 - protein, 10 aa, synthetic construct
SYQRGDFVQR

SEQ ID NO: 101754 - protein, 10 aa, synthetic construct
SYDRGDFVQR

SEQ ID NO: 101755 - protein, 10 aa, synthetic construct
SYERGDFVQR

SEQ ID NO: 101756 - protein, 10 aa, synthetic construct
SNGRGDFVQR

SEQ ID NO: 101757 - protein, 10 aa, synthetic construct
SNARGDFVQR

SEQ ID NO: 101758 - protein, 10 aa, synthetic construct
SNVRGDFVQR

SEQ ID NO: 101759 - protein, 10 aa, synthetic construct
SNPRGDFVQR

SEQ ID NO: 101760 - protein, 10 aa, synthetic construct
SNLRGDFVQR

SEQ ID NO: 101761 - protein, 10 aa, synthetic construct
SNIRGDFVQR

SEQ ID NO: 101762 - protein, 10 aa, synthetic construct
SNMRGDFVQR

SEQ ID NO: 101763 - protein, 10 aa, synthetic construct
SNWRGDFVQR

SEQ ID NO: 101764 - protein, 10 aa, synthetic construct
SNFRGDFVQR

SEQ ID NO: 101765 - protein, 10 aa, synthetic construct
SNKRGDFVQR

SEQ ID NO: 101766 - protein, 10 aa, synthetic construct
SNRRGDFVQR

SEQ ID NO: 101767 - protein, 10 aa, synthetic construct
SNHRGDFVQR

SEQ ID NO: 101768 - protein, 10 aa, synthetic construct
SNSRGDFVQR

SEQ ID NO: 101769 - protein, 10 aa, synthetic construct
SNTRGDFVQR

SEQ ID NO: 101770 - protein, 10 aa, synthetic construct
SNYRGDFVQR

SEQ ID NO: 101771 - protein, 10 aa, synthetic construct
SNNRGDFVQR

SEQ ID NO: 101772 - protein, 10 aa, synthetic construct
SNQRGDFVQR

SEQ ID NO: 101773 - protein, 10 aa, synthetic construct
SNDRGDFVQR

SEQ ID NO: 101774 - protein, 10 aa, synthetic construct
SNERGDFVQR

SEQ ID NO: 101775 - protein, 10 aa, synthetic construct
SQGRGDFVQR

SEQ ID NO: 101776 - protein, 10 aa, synthetic construct
SQARGDFVQR

SEQ ID NO: 101777 - protein, 10 aa, synthetic construct
SQVRGDFVQR

SEQ ID NO: 101778 - protein, 10 aa, synthetic construct
SQPRGDFVQR

SEQ ID NO: 101779 - protein, 10 aa, synthetic construct
SQLRGDFVQR

SEQ ID NO: 101780 - protein, 10 aa, synthetic construct
SQIRGDFVQR

SEQ ID NO: 101781 - protein, 10 aa, synthetic construct
SQMRGDFVQR

SEQ ID NO: 101782 - protein, 10 aa, synthetic construct
SQWRGDFVQR

SEQ ID NO: 101783 - protein, 10 aa, synthetic construct
SQFRGDFVQR

SEQ ID NO: 101784 - protein, 10 aa, synthetic construct
SQKRGDFVQR

SEQ ID NO: 101785 - protein, 10 aa, synthetic construct
SQRRGDFVQR

SEQ ID NO: 101786 - protein, 10 aa, synthetic construct
SQHRGDFVQR

SEQ ID NO: 101787 - protein, 10 aa, synthetic construct
SQSRGDFVQR

SEQ ID NO: 101788 - protein, 10 aa, synthetic construct
SQTRGDFVQR

SEQ ID NO: 101789 - protein, 10 aa, synthetic construct
SQYRGDFVQR

SEQ ID NO: 101790 - protein, 10 aa, synthetic construct
SQNRGDFVQR

SEQ ID NO: 101791 - protein, 10 aa, synthetic construct
SQQRGDFVQR

SEQ ID NO: 101792 - protein, 10 aa, synthetic construct
SQDRGDFVQR

SEQ ID NO: 101793 - protein, 10 aa, synthetic construct
SQERGDFVQR

SEQ ID NO: 101794 - protein, 10 aa, synthetic construct
SDGRGDFVQR

SEQ ID NO: 101795 - protein, 10 aa, synthetic construct
SDARGDFVQR

SEQ ID NO: 101796 - protein, 10 aa, synthetic construct
SDVRGDFVQR

SEQ ID NO: 101797 - protein, 10 aa, synthetic construct
SDPRGDFVQR

SEQ ID NO: 101798 - protein, 10 aa, synthetic construct
SDLRGDFVQR

SEQ ID NO: 101799 - protein, 10 aa, synthetic construct
SDIRGDFVQR

SEQ ID NO: 101800 - protein, 10 aa, synthetic construct
SDMRGDFVQR

SEQ ID NO: 101801 - protein, 10 aa, synthetic construct
SDWRGDFVQR

SEQ ID NO: 101802 - protein, 10 aa, synthetic construct
SDFRGDFVQR

SEQ ID NO: 101803 - protein, 10 aa, synthetic construct
SDKRGDFVQR

SEQ ID NO: 101804 - protein, 10 aa, synthetic construct
SDRRGDFVQR

SEQ ID NO: 101805 - protein, 10 aa, synthetic construct
SDHRGDFVQR

SEQ ID NO: 101806 - protein, 10 aa, synthetic construct
SDSRGDFVQR

SEQ ID NO: 101807 - protein, 10 aa, synthetic construct
SDTRGDFVQR

SEQ ID NO: 101808 - protein, 10 aa, synthetic construct
SDYRGDFVQR

SEQ ID NO: 101809 - protein, 10 aa, synthetic construct
SDNRGDFVQR

SEQ ID NO: 101810 - protein, 10 aa, synthetic construct
SDQRGDFVQR

SEQ ID NO: 101811 - protein, 10 aa, synthetic construct
SDDRGDFVQR

SEQ ID NO: 101812 - protein, 10 aa, synthetic construct
SDERGDFVQR

SEQ ID NO: 101813 - protein, 10 aa, synthetic construct
SEGRGDFVQR

SEQ ID NO: 101814 - protein, 10 aa, synthetic construct
SEARGDFVQR

SEQ ID NO: 101815 - protein, 10 aa, synthetic construct
SEVRGDFVQR

SEQ ID NO: 101816 - protein, 10 aa, synthetic construct
SEPRGDFVQR

SEQ ID NO: 101817 - protein, 10 aa, synthetic construct
SELRGDFVQR

SEQ ID NO: 101818 - protein, 10 aa, synthetic construct
SEIRGDFVQR

SEQ ID NO: 101819 - protein, 10 aa, synthetic construct
SEMRGDFVQR

SEQ ID NO: 101820 - protein, 10 aa, synthetic construct
SEWRGDFVQR

SEQ ID NO: 101821 - protein, 10 aa, synthetic construct
SEFRGDFVQR

SEQ ID NO: 101822 - protein, 10 aa, synthetic construct
SEKRGDFVQR

SEQ ID NO: 101823 - protein, 10 aa, synthetic construct
SERRGDFVQR

SEQ ID NO: 101824 - protein, 10 aa, synthetic construct
SEHRGDFVQR

SEQ ID NO: 101825 - protein, 10 aa, synthetic construct
SESRGDFVQR

SEQ ID NO: 101826 - protein, 10 aa, synthetic construct
SETRGDFVQR

SEQ ID NO: 101827 - protein, 10 aa, synthetic construct
SEYRGDFVQR

SEQ ID NO: 101828 - protein, 10 aa, synthetic construct
SENRGDFVQR

SEQ ID NO: 101829 - protein, 10 aa, synthetic construct
SEQRGDFVQR

SEQ ID NO: 101830 - protein, 10 aa, synthetic construct
SEDRGDFVQR

SEQ ID NO: 101831 - protein, 10 aa, synthetic construct
SEERGDFVQR

SEQ ID NO: 101832 - protein, 10 aa, synthetic construct
TGGRGDFVQR

SEQ ID NO: 101833 - protein, 10 aa, synthetic construct
TGARGDFVQR

SEQ ID NO: 101834 - protein, 10 aa, synthetic construct
TGVRGDFVQR

SEQ ID NO: 101835 - protein, 10 aa, synthetic construct
TGPRGDFVQR

SEQ ID NO: 101836 - protein, 10 aa, synthetic construct
TGLRGDFVQR

SEQ ID NO: 101837 - protein, 10 aa, synthetic construct
TGIRGDFVQR

SEQ ID NO: 101838 - protein, 10 aa, synthetic construct
TGMRGDFVQR

SEQ ID NO: 101839 - protein, 10 aa, synthetic construct
TGWRGDFVQR

SEQ ID NO: 101840 - protein, 10 aa, synthetic construct
TGFRGDFVQR

SEQ ID NO: 101841 - protein, 10 aa, synthetic construct
TGKRGDFVQR

SEQ ID NO: 101842 - protein, 10 aa, synthetic construct
TGRRGDFVQR

SEQ ID NO: 101843 - protein, 10 aa, synthetic construct
TGHRGDFVQR

SEQ ID NO: 101844 - protein, 10 aa, synthetic construct
TGSRGDFVQR

SEQ ID NO: 101845 - protein, 10 aa, synthetic construct
TGTRGDFVQR

SEQ ID NO: 101846 - protein, 10 aa, synthetic construct
TGYRGDFVQR

SEQ ID NO: 101847 - protein, 10 aa, synthetic construct
TGNRGDFVQR

SEQ ID NO: 101848 - protein, 10 aa, synthetic construct
TGQRGDFVQR

SEQ ID NO: 101849 - protein, 10 aa, synthetic construct
TGDRGDFVQR

SEQ ID NO: 101850 - protein, 10 aa, synthetic construct
TGERGDFVQR

SEQ ID NO: 101851 - protein, 10 aa, synthetic construct
TAGRGDFVQR

SEQ ID NO: 101852 - protein, 10 aa, synthetic construct
TAARGDFVQR

SEQ ID NO: 101853 - protein, 10 aa, synthetic construct
TAVRGDFVQR

SEQ ID NO: 101854 - protein, 10 aa, synthetic construct
TAPRGDFVQR

SEQ ID NO: 101855 - protein, 10 aa, synthetic construct
TALRGDFVQR

SEQ ID NO: 101856 - protein, 10 aa, synthetic construct
TAIRGDFVQR

SEQ ID NO: 101857 - protein, 10 aa, synthetic construct
TAMRGDFVQR

SEQ ID NO: 101858 - protein, 10 aa, synthetic construct
TAWRGDFVQR

SEQ ID NO: 101859 - protein, 10 aa, synthetic construct
TAFRGDFVQR

SEQ ID NO: 101860 - protein, 10 aa, synthetic construct
TAKRGDFVQR

SEQ ID NO: 101861 - protein, 10 aa, synthetic construct
TARRGDFVQR

SEQ ID NO: 101862 - protein, 10 aa, synthetic construct
TAHRGDFVQR

SEQ ID NO: 101863 - protein, 10 aa, synthetic construct
TASRGDFVQR

SEQ ID NO: 101864 - protein, 10 aa, synthetic construct
TATRGDFVQR

SEQ ID NO: 101865 - protein, 10 aa, synthetic construct
TAYRGDFVQR

SEQ ID NO: 101866 - protein, 10 aa, synthetic construct
TANRGDFVQR

SEQ ID NO: 101867 - protein, 10 aa, synthetic construct
TAQRGDFVQR

SEQ ID NO: 101868 - protein, 10 aa, synthetic construct
TADRGDFVQR

SEQ ID NO: 101869 - protein, 10 aa, synthetic construct
TAERGDFVQR

SEQ ID NO: 101870 - protein, 10 aa, synthetic construct
TVGRGDFVQR

SEQ ID NO: 101871 - protein, 10 aa, synthetic construct
TVARGDFVQR

SEQ ID NO: 101872 - protein, 10 aa, synthetic construct
TVVRGDFVQR

SEQ ID NO: 101873 - protein, 10 aa, synthetic construct
TVPRGDFVQR

SEQ ID NO: 101874 - protein, 10 aa, synthetic construct
TVLRGDFVQR

SEQ ID NO: 101875 - protein, 10 aa, synthetic construct
TVIRGDFVQR

SEQ ID NO: 101876 - protein, 10 aa, synthetic construct
TVMRGDFVQR

SEQ ID NO: 101877 - protein, 10 aa, synthetic construct
TVWRGDFVQR

SEQ ID NO: 101878 - protein, 10 aa, synthetic construct
TVFRGDFVQR

SEQ ID NO: 101879 - protein, 10 aa, synthetic construct
TVKRGDFVQR

SEQ ID NO: 101880 - protein, 10 aa, synthetic construct
TVRRGDFVQR

SEQ ID NO: 101881 - protein, 10 aa, synthetic construct
TVHRGDFVQR

SEQ ID NO: 101882 - protein, 10 aa, synthetic construct
TVSRGDFVQR

SEQ ID NO: 101883 - protein, 10 aa, synthetic construct
TVTRGDFVQR

SEQ ID NO: 101884 - protein, 10 aa, synthetic construct
TVYRGDFVQR

SEQ ID NO: 101885 - protein, 10 aa, synthetic construct
TVNRGDFVQR

SEQ ID NO: 101886 - protein, 10 aa, synthetic construct
TVQRGDFVQR

SEQ ID NO: 101887 - protein, 10 aa, synthetic construct
TVDRGDFVQR

SEQ ID NO: 101888 - protein, 10 aa, synthetic construct
TVERGDFVQR

SEQ ID NO: 101889 - protein, 10 aa, synthetic construct
TPGRGDFVQR

SEQ ID NO: 101890 - protein, 10 aa, synthetic construct
TPARGDFVQR

SEQ ID NO: 101891 - protein, 10 aa, synthetic construct
TPVRGDFVQR

SEQ ID NO: 101892 - protein, 10 aa, synthetic construct
TPPRGDFVQR

SEQ ID NO: 101893 - protein, 10 aa, synthetic construct
TPLRGDFVQR

SEQ ID NO: 101894 - protein, 10 aa, synthetic construct
TPIRGDFVQR

SEQ ID NO: 101895 - protein, 10 aa, synthetic construct
TPMRGDFVQR

SEQ ID NO: 101896 - protein, 10 aa, synthetic construct
TPWRGDFVQR

SEQ ID NO: 101897 - protein, 10 aa, synthetic construct
TPFRGDFVQR

SEQ ID NO: 101898 - protein, 10 aa, synthetic construct
TPKRGDFVQR

SEQ ID NO: 101899 - protein, 10 aa, synthetic construct
TPRRGDFVQR

SEQ ID NO: 101900 - protein, 10 aa, synthetic construct
TPHRGDFVQR

SEQ ID NO: 101901 - protein, 10 aa, synthetic construct
TPSRGDFVQR

SEQ ID NO: 101902 - protein, 10 aa, synthetic construct
TPTRGDFVQR

SEQ ID NO: 101903 - protein, 10 aa, synthetic construct
TPYRGDFVQR

SEQ ID NO: 101904 - protein, 10 aa, synthetic construct
TPNRGDFVQR

SEQ ID NO: 101905 - protein, 10 aa, synthetic construct
TPQRGDFVQR

SEQ ID NO: 101906 - protein, 10 aa, synthetic construct
TPDRGDFVQR

SEQ ID NO: 101907 - protein, 10 aa, synthetic construct
TPERGDFVQR

SEQ ID NO: 101908 - protein, 10 aa, synthetic construct
TLGRGDFVQR

SEQ ID NO: 101909 - protein, 10 aa, synthetic construct
TLARGDFVQR

SEQ ID NO: 101910 - protein, 10 aa, synthetic construct
TLVRGDFVQR

SEQ ID NO: 101911 - protein, 10 aa, synthetic construct
TLPRGDFVQR

SEQ ID NO: 101912 - protein, 10 aa, synthetic construct
TLLRGDFVQR

SEQ ID NO: 101913 - protein, 10 aa, synthetic construct
TLIRGDFVQR

SEQ ID NO: 101914 - protein, 10 aa, synthetic construct
TLMRGDFVQR

SEQ ID NO: 101915 - protein, 10 aa, synthetic construct
TLWRGDFVQR

SEQ ID NO: 101916 - protein, 10 aa, synthetic construct
TLFRGDFVQR

SEQ ID NO: 101917 - protein, 10 aa, synthetic construct
TLKRGDFVQR

SEQ ID NO: 101918 - protein, 10 aa, synthetic construct
TLRRGDFVQR

SEQ ID NO: 101919 - protein, 10 aa, synthetic construct
TLHRGDFVQR

SEQ ID NO: 101920 - protein, 10 aa, synthetic construct
TLSRGDFVQR

SEQ ID NO: 101921 - protein, 10 aa, synthetic construct
TLTRGDFVQR

SEQ ID NO: 101922 - protein, 10 aa, synthetic construct
TLYRGDFVQR

SEQ ID NO: 101923 - protein, 10 aa, synthetic construct
TLNRGDFVQR

SEQ ID NO: 101924 - protein, 10 aa, synthetic construct
TLQRGDFVQR

SEQ ID NO: 101925 - protein, 10 aa, synthetic construct
TLDRGDFVQR

SEQ ID NO: 101926 - protein, 10 aa, synthetic construct
TLERGDFVQR

SEQ ID NO: 101927 - protein, 10 aa, synthetic construct
TIGRGDFVQR

SEQ ID NO: 101928 - protein, 10 aa, synthetic construct
TIARGDFVQR

SEQ ID NO: 101929 - protein, 10 aa, synthetic construct
TIVRGDFVQR

SEQ ID NO: 101930 - protein, 10 aa, synthetic construct
TIPRGDFVQR

SEQ ID NO: 101931 - protein, 10 aa, synthetic construct
TILRGDFVQR

SEQ ID NO: 101932 - protein, 10 aa, synthetic construct
TIIRGDFVQR

SEQ ID NO: 101933 - protein, 10 aa, synthetic construct
TIMRGDFVQR

SEQ ID NO: 101934 - protein, 10 aa, synthetic construct
TIWRGDFVQR

SEQ ID NO: 101935 - protein, 10 aa, synthetic construct
TIFRGDFVQR

SEQ ID NO: 101936 - protein, 10 aa, synthetic construct
TIKRGDFVQR

SEQ ID NO: 101937 - protein, 10 aa, synthetic construct
TIRRGDFVQR

SEQ ID NO: 101938 - protein, 10 aa, synthetic construct
TIHRGDFVQR

SEQ ID NO: 101939 - protein, 10 aa, synthetic construct
TISRGDFVQR

SEQ ID NO: 101940 - protein, 10 aa, synthetic construct
TITRGDFVQR

SEQ ID NO: 101941 - protein, 10 aa, synthetic construct
TIYRGDFVQR

SEQ ID NO: 101942 - protein, 10 aa, synthetic construct
TINRGDFVQR

SEQ ID NO: 101943 - protein, 10 aa, synthetic construct
TIQRGDFVQR

SEQ ID NO: 101944 - protein, 10 aa, synthetic construct
TIDRGDFVQR

SEQ ID NO: 101945 - protein, 10 aa, synthetic construct
TIERGDFVQR

SEQ ID NO: 101946 - protein, 10 aa, synthetic construct
TMGRGDFVQR

SEQ ID NO: 101947 - protein, 10 aa, synthetic construct
TMARGDFVQR

SEQ ID NO: 101948 - protein, 10 aa, synthetic construct
TMVRGDFVQR

SEQ ID NO: 101949 - protein, 10 aa, synthetic construct
TMPRGDFVQR

SEQ ID NO: 101950 - protein, 10 aa, synthetic construct
TMLRGDFVQR

SEQ ID NO: 101951 - protein, 10 aa, synthetic construct
TMIRGDFVQR

SEQ ID NO: 101952 - protein, 10 aa, synthetic construct
TMMRGDFVQR

SEQ ID NO: 101953 - protein, 10 aa, synthetic construct
TMWRGDFVQR

SEQ ID NO: 101954 - protein, 10 aa, synthetic construct
TMFRGDFVQR

SEQ ID NO: 101955 - protein, 10 aa, synthetic construct
TMKRGDFVQR

SEQ ID NO: 101956 - protein, 10 aa, synthetic construct
TMRRGDFVQR

SEQ ID NO: 101957 - protein, 10 aa, synthetic construct
TMHRGDFVQR

SEQ ID NO: 101958 - protein, 10 aa, synthetic construct
TMSRGDFVQR

SEQ ID NO: 101959 - protein, 10 aa, synthetic construct
TMTRGDFVQR

SEQ ID NO: 101960 - protein, 10 aa, synthetic construct
TMYRGDFVQR

SEQ ID NO: 101961 - protein, 10 aa, synthetic construct
TMNRGDFVQR

SEQ ID NO: 101962 - protein, 10 aa, synthetic construct
TMQRGDFVQR

SEQ ID NO: 101963 - protein, 10 aa, synthetic construct
TMDRGDFVQR

SEQ ID NO: 101964 - protein, 10 aa, synthetic construct
TMERGDFVQR

SEQ ID NO: 101965 - protein, 10 aa, synthetic construct
TWGRGDFVQR

SEQ ID NO: 101966 - protein, 10 aa, synthetic construct
TWARGDFVQR

SEQ ID NO: 101967 - protein, 10 aa, synthetic construct
TWVRGDFVQR

SEQ ID NO: 101968 - protein, 10 aa, synthetic construct
TWPRGDFVQR

SEQ ID NO: 101969 - protein, 10 aa, synthetic construct
TWLRGDFVQR

SEQ ID NO: 101970 - protein, 10 aa, synthetic construct
TWIRGDFVQR

SEQ ID NO: 101971 - protein, 10 aa, synthetic construct
TWMRGDFVQR

SEQ ID NO: 101972 - protein, 10 aa, synthetic construct
TWWRGDFVQR

SEQ ID NO: 101973 - protein, 10 aa, synthetic construct
TWFRGDFVQR

SEQ ID NO: 101974 - protein, 10 aa, synthetic construct
TWKRGDFVQR

SEQ ID NO: 101975 - protein, 10 aa, synthetic construct
TWRRGDFVQR

SEQ ID NO: 101976 - protein, 10 aa, synthetic construct
TWHRGDFVQR

SEQ ID NO: 101977 - protein, 10 aa, synthetic construct
TWSRGDFVQR

SEQ ID NO: 101978 - protein, 10 aa, synthetic construct
TWTRGDFVQR

SEQ ID NO: 101979 - protein, 10 aa, synthetic construct
TWYRGDFVQR

SEQ ID NO: 101980 - protein, 10 aa, synthetic construct
TWNRGDFVQR

SEQ ID NO: 101981 - protein, 10 aa, synthetic construct
TWQRGDFVQR

SEQ ID NO: 101982 - protein, 10 aa, synthetic construct
TWDRGDFVQR

SEQ ID NO: 101983 - protein, 10 aa, synthetic construct
TWERGDFVQR

SEQ ID NO: 101984 - protein, 10 aa, synthetic construct
TFGRGDFVQR

SEQ ID NO: 101985 - protein, 10 aa, synthetic construct
TFARGDFVQR

SEQ ID NO: 101986 - protein, 10 aa, synthetic construct
TFVRGDFVQR

SEQ ID NO: 101987 - protein, 10 aa, synthetic construct
TFPRGDFVQR

SEQ ID NO: 101988 - protein, 10 aa, synthetic construct
TFLRGDFVQR

SEQ ID NO: 101989 - protein, 10 aa, synthetic construct
TFIRGDFVQR

SEQ ID NO: 101990 - protein, 10 aa, synthetic construct
TFMRGDFVQR

SEQ ID NO: 101991 - protein, 10 aa, synthetic construct
TFWRGDFVQR

SEQ ID NO: 101992 - protein, 10 aa, synthetic construct
TFFRGDFVQR

SEQ ID NO: 101993 - protein, 10 aa, synthetic construct
TFKRGDFVQR

SEQ ID NO: 101994 - protein, 10 aa, synthetic construct
TFRRGDFVQR

SEQ ID NO: 101995 - protein, 10 aa, synthetic construct
TFHRGDFVQR

SEQ ID NO: 101996 - protein, 10 aa, synthetic construct
TFSRGDFVQR

SEQ ID NO: 101997 - protein, 10 aa, synthetic construct
TFTRGDFVQR

SEQ ID NO: 101998 - protein, 10 aa, synthetic construct
TFYRGDFVQR

SEQ ID NO: 101999 - protein, 10 aa, synthetic construct
TFNRGDFVQR

SEQ ID NO: 102000 - protein, 10 aa, synthetic construct
TFQRGDFVQR

SEQ ID NO: 102001 - protein, 10 aa, synthetic construct
TFDRGDFVQR

SEQ ID NO: 102002 - protein, 10 aa, synthetic construct
TFERGDFVQR

SEQ ID NO: 102003 - protein, 10 aa, synthetic construct
TKGRGDFVQR

SEQ ID NO: 102004 - protein, 10 aa, synthetic construct
TKARGDFVQR

SEQ ID NO: 102005 - protein, 10 aa, synthetic construct
TKVRGDFVQR

SEQ ID NO: 102006 - protein, 10 aa, synthetic construct
TKPRGDFVQR

SEQ ID NO: 102007 - protein, 10 aa, synthetic construct
TKLRGDFVQR

SEQ ID NO: 102008 - protein, 10 aa, synthetic construct
TKIRGDFVQR

SEQ ID NO: 102009 - protein, 10 aa, synthetic construct
TKMRGDFVQR

SEQ ID NO: 102010 - protein, 10 aa, synthetic construct
TKWRGDFVQR

SEQ ID NO: 102011 - protein, 10 aa, synthetic construct
TKFRGDFVQR

SEQ ID NO: 102012 - protein, 10 aa, synthetic construct
TKKRGDFVQR

SEQ ID NO: 102013 - protein, 10 aa, synthetic construct
TKRRGDFVQR

SEQ ID NO: 102014 - protein, 10 aa, synthetic construct
TKHRGDFVQR

SEQ ID NO: 102015 - protein, 10 aa, synthetic construct
TKSRGDFVQR

SEQ ID NO: 102016 - protein, 10 aa, synthetic construct
TKTRGDFVQR

SEQ ID NO: 102017 - protein, 10 aa, synthetic construct
TKYRGDFVQR

SEQ ID NO: 102018 - protein, 10 aa, synthetic construct
TKNRGDFVQR

SEQ ID NO: 102019 - protein, 10 aa, synthetic construct
TKQRGDFVQR

SEQ ID NO: 102020 - protein, 10 aa, synthetic construct
TKDRGDFVQR

SEQ ID NO: 102021 - protein, 10 aa, synthetic construct
TKERGDFVQR

SEQ ID NO: 102022 - protein, 10 aa, synthetic construct
TRGRGDFVQR

SEQ ID NO: 102023 - protein, 10 aa, synthetic construct
TRARGDFVQR

SEQ ID NO: 102024 - protein, 10 aa, synthetic construct
TRVRGDFVQR

SEQ ID NO: 102025 - protein, 10 aa, synthetic construct
TRPRGDFVQR

SEQ ID NO: 102026 - protein, 10 aa, synthetic construct
TRLRGDFVQR

SEQ ID NO: 102027 - protein, 10 aa, synthetic construct
TRIRGDFVQR

SEQ ID NO: 102028 - protein, 10 aa, synthetic construct
TRMRGDFVQR

SEQ ID NO: 102029 - protein, 10 aa, synthetic construct
TRWRGDFVQR

SEQ ID NO: 102030 - protein, 10 aa, synthetic construct
TRFRGDFVQR

SEQ ID NO: 102031 - protein, 10 aa, synthetic construct
TRKRGDFVQR

SEQ ID NO: 102032 - protein, 10 aa, synthetic construct
TRRRGDFVQR

SEQ ID NO: 102033 - protein, 10 aa, synthetic construct
TRHRGDFVQR

SEQ ID NO: 102034 - protein, 10 aa, synthetic construct
TRSRGDFVQR

SEQ ID NO: 102035 - protein, 10 aa, synthetic construct
TRTRGDFVQR

SEQ ID NO: 102036 - protein, 10 aa, synthetic construct
TRYRGDFVQR

SEQ ID NO: 102037 - protein, 10 aa, synthetic construct
TRNRGDFVQR

SEQ ID NO: 102038 - protein, 10 aa, synthetic construct
TRQRGDFVQR

SEQ ID NO: 102039 - protein, 10 aa, synthetic construct
TRDRGDFVQR

SEQ ID NO: 102040 - protein, 10 aa, synthetic construct
TRERGDFVQR

SEQ ID NO: 102041 - protein, 10 aa, synthetic construct
THGRGDFVQR

SEQ ID NO: 102042 - protein, 10 aa, synthetic construct
THARGDFVQR

SEQ ID NO: 102043 - protein, 10 aa, synthetic construct
THVRGDFVQR

SEQ ID NO: 102044 - protein, 10 aa, synthetic construct
THPRGDFVQR

SEQ ID NO: 102045 - protein, 10 aa, synthetic construct
THLRGDFVQR

SEQ ID NO: 102046 - protein, 10 aa, synthetic construct
THIRGDFVQR

SEQ ID NO: 102047 - protein, 10 aa, synthetic construct
THMRGDFVQR

SEQ ID NO: 102048 - protein, 10 aa, synthetic construct
THWRGDFVQR

SEQ ID NO: 102049 - protein, 10 aa, synthetic construct
THFRGDFVQR

SEQ ID NO: 102050 - protein, 10 aa, synthetic construct
THKRGDFVQR

SEQ ID NO: 102051 - protein, 10 aa, synthetic construct
THRRGDFVQR

SEQ ID NO: 102052 - protein, 10 aa, synthetic construct
THHRGDFVQR

SEQ ID NO: 102053 - protein, 10 aa, synthetic construct
THSRGDFVQR

SEQ ID NO: 102054 - protein, 10 aa, synthetic construct
THTRGDFVQR

SEQ ID NO: 102055 - protein, 10 aa, synthetic construct
THYRGDFVQR

SEQ ID NO: 102056 - protein, 10 aa, synthetic construct
THNRGDFVQR

SEQ ID NO: 102057 - protein, 10 aa, synthetic construct
THQRGDFVQR

SEQ ID NO: 102058 - protein, 10 aa, synthetic construct
THDRGDFVQR

SEQ ID NO: 102059 - protein, 10 aa, synthetic construct
THERGDFVQR

SEQ ID NO: 102060 - protein, 10 aa, synthetic construct
TSGRGDFVQR

SEQ ID NO: 102061 - protein, 10 aa, synthetic construct
TSARGDFVQR

SEQ ID NO: 102062 - protein, 10 aa, synthetic construct
TSVRGDFVQR

SEQ ID NO: 102063 - protein, 10 aa, synthetic construct
TSPRGDFVQR

SEQ ID NO: 102064 - protein, 10 aa, synthetic construct
TSLRGDFVQR

SEQ ID NO: 102065 - protein, 10 aa, synthetic construct
TSIRGDFVQR

SEQ ID NO: 102066 - protein, 10 aa, synthetic construct
TSMRGDFVQR

SEQ ID NO: 102067 - protein, 10 aa, synthetic construct
TSWRGDFVQR

SEQ ID NO: 102068 - protein, 10 aa, synthetic construct
TSFRGDFVQR

SEQ ID NO: 102069 - protein, 10 aa, synthetic construct
TSKRGDFVQR

SEQ ID NO: 102070 - protein, 10 aa, synthetic construct
TSRRGDFVQR

SEQ ID NO: 102071 - protein, 10 aa, synthetic construct
TSHRGDFVQR

SEQ ID NO: 102072 - protein, 10 aa, synthetic construct
TSSRGDFVQR

SEQ ID NO: 102073 - protein, 10 aa, synthetic construct
TSTRGDFVQR

SEQ ID NO: 102074 - protein, 10 aa, synthetic construct
TSYRGDFVQR

SEQ ID NO: 102075 - protein, 10 aa, synthetic construct
TSNRGDFVQR

SEQ ID NO: 102076 - protein, 10 aa, synthetic construct
TSQRGDFVQR

SEQ ID NO: 102077 - protein, 10 aa, synthetic construct
TSDRGDFVQR

SEQ ID NO: 102078 - protein, 10 aa, synthetic construct
TSERGDFVQR

SEQ ID NO: 102079 - protein, 10 aa, synthetic construct
TTGRGDFVQR

SEQ ID NO: 102080 - protein, 10 aa, synthetic construct
TTARGDFVQR

SEQ ID NO: 102081 - protein, 10 aa, synthetic construct
TTVRGDFVQR

SEQ ID NO: 102082 - protein, 10 aa, synthetic construct
TTPRGDFVQR

SEQ ID NO: 102083 - protein, 10 aa, synthetic construct
TTLRGDFVQR

SEQ ID NO: 102084 - protein, 10 aa, synthetic construct
TTIRGDFVQR

SEQ ID NO: 102085 - protein, 10 aa, synthetic construct
TTMRGDFVQR

SEQ ID NO: 102086 - protein, 10 aa, synthetic construct
TTWRGDFVQR

SEQ ID NO: 102087 - protein, 10 aa, synthetic construct
TTFRGDFVQR

SEQ ID NO: 102088 - protein, 10 aa, synthetic construct
TTKRGDFVQR

SEQ ID NO: 102089 - protein, 10 aa, synthetic construct
TTRRGDFVQR

SEQ ID NO: 102090 - protein, 10 aa, synthetic construct
TTHRGDFVQR

SEQ ID NO: 102091 - protein, 10 aa, synthetic construct
TTSRGDFVQR

SEQ ID NO: 102092 - protein, 10 aa, synthetic construct
TTTRGDFVQR

SEQ ID NO: 102093 - protein, 10 aa, synthetic construct
TTYRGDFVQR

SEQ ID NO: 102094 - protein, 10 aa, synthetic construct
TTNRGDFVQR

SEQ ID NO: 102095 - protein, 10 aa, synthetic construct
TTQRGDFVQR

SEQ ID NO: 102096 - protein, 10 aa, synthetic construct
TTDRGDFVQR

SEQ ID NO: 102097 - protein, 10 aa, synthetic construct
TTERGDFVQR

SEQ ID NO: 102098 - protein, 10 aa, synthetic construct
TYGRGDFVQR

SEQ ID NO: 102099 - protein, 10 aa, synthetic construct
TYARGDFVQR

SEQ ID NO: 102100 - protein, 10 aa, synthetic construct
TYVRGDFVQR

SEQ ID NO: 102101 - protein, 10 aa, synthetic construct
TYPRGDFVQR

SEQ ID NO: 102102 - protein, 10 aa, synthetic construct
TYLRGDFVQR

SEQ ID NO: 102103 - protein, 10 aa, synthetic construct
TYIRGDFVQR

SEQ ID NO: 102104 - protein, 10 aa, synthetic construct
TYMRGDFVQR

SEQ ID NO: 102105 - protein, 10 aa, synthetic construct
TYWRGDFVQR

SEQ ID NO: 102106 - protein, 10 aa, synthetic construct
TYFRGDFVQR

SEQ ID NO: 102107 - protein, 10 aa, synthetic construct
TYKRGDFVQR

SEQ ID NO: 102108 - protein, 10 aa, synthetic construct
TYRRGDFVQR

SEQ ID NO: 102109 - protein, 10 aa, synthetic construct
TYHRGDFVQR

SEQ ID NO: 102110 - protein, 10 aa, synthetic construct
TYSRGDFVQR

SEQ ID NO: 102111 - protein, 10 aa, synthetic construct
TYTRGDFVQR

SEQ ID NO: 102112 - protein, 10 aa, synthetic construct
TYYRGDFVQR

SEQ ID NO: 102113 - protein, 10 aa, synthetic construct
TYNRGDFVQR

SEQ ID NO: 102114 - protein, 10 aa, synthetic construct
TYQRGDFVQR

SEQ ID NO: 102115 - protein, 10 aa, synthetic construct
TYDRGDFVQR

SEQ ID NO: 102116 - protein, 10 aa, synthetic construct
TYERGDFVQR

SEQ ID NO: 102117 - protein, 10 aa, synthetic construct
TNGRGDFVQR

SEQ ID NO: 102118 - protein, 10 aa, synthetic construct
TNARGDFVQR

SEQ ID NO: 102119 - protein, 10 aa, synthetic construct
TNVRGDFVQR

SEQ ID NO: 102120 - protein, 10 aa, synthetic construct
TNPRGDFVQR

SEQ ID NO: 102121 - protein, 10 aa, synthetic construct
TNLRGDFVQR

SEQ ID NO: 102122 - protein, 10 aa, synthetic construct
TNIRGDFVQR

SEQ ID NO: 102123 - protein, 10 aa, synthetic construct
TNMRGDFVQR

SEQ ID NO: 102124 - protein, 10 aa, synthetic construct
TNWRGDFVQR

SEQ ID NO: 102125 - protein, 10 aa, synthetic construct
TNFRGDFVQR

SEQ ID NO: 102126 - protein, 10 aa, synthetic construct
TNKRGDFVQR

SEQ ID NO: 102127 - protein, 10 aa, synthetic construct
TNRRGDFVQR

SEQ ID NO: 102128 - protein, 10 aa, synthetic construct
TNHRGDFVQR

SEQ ID NO: 102129 - protein, 10 aa, synthetic construct
TNSRGDFVQR

SEQ ID NO: 102130 - protein, 10 aa, synthetic construct
TNTRGDFVQR

SEQ ID NO: 102131 - protein, 10 aa, synthetic construct
TNYRGDFVQR

SEQ ID NO: 102132 - protein, 10 aa, synthetic construct
TNNRGDFVQR

SEQ ID NO: 102133 - protein, 10 aa, synthetic construct
TNQRGDFVQR

SEQ ID NO: 102134 - protein, 10 aa, synthetic construct
TNDRGDFVQR

SEQ ID NO: 102135 - protein, 10 aa, synthetic construct
TNERGDFVQR

SEQ ID NO: 102136 - protein, 10 aa, synthetic construct
TQGRGDFVQR

SEQ ID NO: 102137 - protein, 10 aa, synthetic construct
TQARGDFVQR

SEQ ID NO: 102138 - protein, 10 aa, synthetic construct
TQVRGDFVQR

SEQ ID NO: 102139 - protein, 10 aa, synthetic construct
TQPRGDFVQR

SEQ ID NO: 102140 - protein, 10 aa, synthetic construct
TQLRGDFVQR

SEQ ID NO: 102141 - protein, 10 aa, synthetic construct
TQIRGDFVQR

SEQ ID NO: 102142 - protein, 10 aa, synthetic construct
TQMRGDFVQR

SEQ ID NO: 102143 - protein, 10 aa, synthetic construct
TQWRGDFVQR

SEQ ID NO: 102144 - protein, 10 aa, synthetic construct
TQFRGDFVQR

SEQ ID NO: 102145 - protein, 10 aa, synthetic construct
TQKRGDFVQR

SEQ ID NO: 102146 - protein, 10 aa, synthetic construct
TQRRGDFVQR

SEQ ID NO: 102147 - protein, 10 aa, synthetic construct
TQHRGDFVQR

SEQ ID NO: 102148 - protein, 10 aa, synthetic construct
TQSRGDFVQR

SEQ ID NO: 102149 - protein, 10 aa, synthetic construct
TQTRGDFVQR

SEQ ID NO: 102150 - protein, 10 aa, synthetic construct
TQYRGDFVQR

SEQ ID NO: 102151 - protein, 10 aa, synthetic construct
TQNRGDFVQR

SEQ ID NO: 102152 - protein, 10 aa, synthetic construct
TQQRGDFVQR

SEQ ID NO: 102153 - protein, 10 aa, synthetic construct
TQDRGDFVQR

SEQ ID NO: 102154 - protein, 10 aa, synthetic construct
TQERGDFVQR

SEQ ID NO: 102155 - protein, 10 aa, synthetic construct
TDGRGDFVQR

SEQ ID NO: 102156 - protein, 10 aa, synthetic construct
TDARGDFVQR

SEQ ID NO: 102157 - protein, 10 aa, synthetic construct
TDVRGDFVQR

SEQ ID NO: 102158 - protein, 10 aa, synthetic construct
TDPRGDFVQR

SEQ ID NO: 102159 - protein, 10 aa, synthetic construct
TDLRGDFVQR

SEQ ID NO: 102160 - protein, 10 aa, synthetic construct
TDIRGDFVQR

SEQ ID NO: 102161 - protein, 10 aa, synthetic construct
TDMRGDFVQR

SEQ ID NO: 102162 - protein, 10 aa, synthetic construct
TDWRGDFVQR

SEQ ID NO: 102163 - protein, 10 aa, synthetic construct
TDFRGDFVQR

SEQ ID NO: 102164 - protein, 10 aa, synthetic construct
TDKRGDFVQR

SEQ ID NO: 102165 - protein, 10 aa, synthetic construct
TDRRGDFVQR

SEQ ID NO: 102166 - protein, 10 aa, synthetic construct
TDHRGDFVQR

SEQ ID NO: 102167 - protein, 10 aa, synthetic construct
TDSRGDFVQR

SEQ ID NO: 102168 - protein, 10 aa, synthetic construct
TDTRGDFVQR

SEQ ID NO: 102169 - protein, 10 aa, synthetic construct
TDYRGDFVQR

SEQ ID NO: 102170 - protein, 10 aa, synthetic construct
TDNRGDFVQR

SEQ ID NO: 102171 - protein, 10 aa, synthetic construct
TDQRGDFVQR

SEQ ID NO: 102172 - protein, 10 aa, synthetic construct
TDDRGDFVQR

SEQ ID NO: 102173 - protein, 10 aa, synthetic construct
TDERGDFVQR

SEQ ID NO: 102174 - protein, 10 aa, synthetic construct
TEGRGDFVQR

SEQ ID NO: 102175 - protein, 10 aa, synthetic construct
TEARGDFVQR

SEQ ID NO: 102176 - protein, 10 aa, synthetic construct
TEVRGDFVQR

SEQ ID NO: 102177 - protein, 10 aa, synthetic construct
TEPRGDFVQR

SEQ ID NO: 102178 - protein, 10 aa, synthetic construct
TELRGDFVQR

SEQ ID NO: 102179 - protein, 10 aa, synthetic construct
TEIRGDFVQR

SEQ ID NO: 102180 - protein, 10 aa, synthetic construct
TEMRGDFVQR

SEQ ID NO: 102181 - protein, 10 aa, synthetic construct
TEWRGDFVQR

SEQ ID NO: 102182 - protein, 10 aa, synthetic construct
TEFRGDFVQR

SEQ ID NO: 102183 - protein, 10 aa, synthetic construct
TEKRGDFVQR

SEQ ID NO: 102184 - protein, 10 aa, synthetic construct
TERRGDFVQR

SEQ ID NO: 102185 - protein, 10 aa, synthetic construct
TEHRGDFVQR

SEQ ID NO: 102186 - protein, 10 aa, synthetic construct
TESRGDFVQR

SEQ ID NO: 102187 - protein, 10 aa, synthetic construct
TETRGDFVQR

SEQ ID NO: 102188 - protein, 10 aa, synthetic construct
TEYRGDFVQR

SEQ ID NO: 102189 - protein, 10 aa, synthetic construct
TENRGDFVQR

SEQ ID NO: 102190 - protein, 10 aa, synthetic construct
TEQRGDFVQR

SEQ ID NO: 102191 - protein, 10 aa, synthetic construct
TEDRGDFVQR

SEQ ID NO: 102192 - protein, 10 aa, synthetic construct
TEERGDFVQR

SEQ ID NO: 102193 - protein, 10 aa, synthetic construct
AGGRGDFVQR

SEQ ID NO: 102194 - protein, 10 aa, synthetic construct
AGARGDFVQR

SEQ ID NO: 102195 - protein, 10 aa, synthetic construct
AGVRGDFVQR

SEQ ID NO: 102196 - protein, 10 aa, synthetic construct
AGPRGDFVQR

SEQ ID NO: 102197 - protein, 10 aa, synthetic construct
AGLRGDFVQR

SEQ ID NO: 102198 - protein, 10 aa, synthetic construct
AGIRGDFVQR

SEQ ID NO: 102199 - protein, 10 aa, synthetic construct
AGMRGDFVQR

SEQ ID NO: 102200 - protein, 10 aa, synthetic construct
AGWRGDFVQR

SEQ ID NO: 102201 - protein, 10 aa, synthetic construct
AGFRGDFVQR

SEQ ID NO: 102202 - protein, 10 aa, synthetic construct
AGKRGDFVQR

SEQ ID NO: 102203 - protein, 10 aa, synthetic construct
AGRRGDFVQR

SEQ ID NO: 102204 - protein, 10 aa, synthetic construct
AGHRGDFVQR

SEQ ID NO: 102205 - protein, 10 aa, synthetic construct
AGSRGDFVQR

SEQ ID NO: 102206 - protein, 10 aa, synthetic construct
AGTRGDFVQR

SEQ ID NO: 102207 - protein, 10 aa, synthetic construct
AGYRGDFVQR

SEQ ID NO: 102208 - protein, 10 aa, synthetic construct
AGNRGDFVQR

SEQ ID NO: 102209 - protein, 10 aa, synthetic construct
AGQRGDFVQR

SEQ ID NO: 102210 - protein, 10 aa, synthetic construct
AGDRGDFVQR

SEQ ID NO: 102211 - protein, 10 aa, synthetic construct
AGERGDFVQR

SEQ ID NO: 102212 - protein, 10 aa, synthetic construct
AAGRGDFVQR

SEQ ID NO: 102213 - protein, 10 aa, synthetic construct
AAARGDFVQR

SEQ ID NO: 102214 - protein, 10 aa, synthetic construct
AAVRGDFVQR

SEQ ID NO: 102215 - protein, 10 aa, synthetic construct
AAPRGDFVQR

SEQ ID NO: 102216 - protein, 10 aa, synthetic construct
AALRGDFVQR

SEQ ID NO: 102217 - protein, 10 aa, synthetic construct
AAIRGDFVQR

SEQ ID NO: 102218 - protein, 10 aa, synthetic construct
AAMRGDFVQR

SEQ ID NO: 102219 - protein, 10 aa, synthetic construct
AAWRGDFVQR

SEQ ID NO: 102220 - protein, 10 aa, synthetic construct
AAFRGDFVQR

SEQ ID NO: 102221 - protein, 10 aa, synthetic construct
AAKRGDFVQR

SEQ ID NO: 102222 - protein, 10 aa, synthetic construct
AARRGDFVQR

SEQ ID NO: 102223 - protein, 10 aa, synthetic construct
AAHRGDFVQR

SEQ ID NO: 102224 - protein, 10 aa, synthetic construct
AASRGDFVQR

SEQ ID NO: 102225 - protein, 10 aa, synthetic construct
AATRGDFVQR

SEQ ID NO: 102226 - protein, 10 aa, synthetic construct
AAYRGDFVQR

SEQ ID NO: 102227 - protein, 10 aa, synthetic construct
AANRGDFVQR

SEQ ID NO: 102228 - protein, 10 aa, synthetic construct
AAQRGDFVQR

SEQ ID NO: 102229 - protein, 10 aa, synthetic construct
AADRGDFVQR

SEQ ID NO: 102230 - protein, 10 aa, synthetic construct
AAERGDFVQR

SEQ ID NO: 102231 - protein, 10 aa, synthetic construct
AVGRGDFVQR

SEQ ID NO: 102232 - protein, 10 aa, synthetic construct
AVARGDFVQR

SEQ ID NO: 102233 - protein, 10 aa, synthetic construct
AVVRGDFVQR

SEQ ID NO: 102234 - protein, 10 aa, synthetic construct
AVPRGDFVQR

SEQ ID NO: 102235 - protein, 10 aa, synthetic construct
AVLRGDFVQR

SEQ ID NO: 102236 - protein, 10 aa, synthetic construct
AVIRGDFVQR

SEQ ID NO: 102237 - protein, 10 aa, synthetic construct
AVMRGDFVQR

SEQ ID NO: 102238 - protein, 10 aa, synthetic construct
AVWRGDFVQR

SEQ ID NO: 102239 - protein, 10 aa, synthetic construct
AVFRGDFVQR

SEQ ID NO: 102240 - protein, 10 aa, synthetic construct
AVKRGDFVQR

SEQ ID NO: 102241 - protein, 10 aa, synthetic construct
AVRRGDFVQR

SEQ ID NO: 102242 - protein, 10 aa, synthetic construct
AVHRGDFVQR

SEQ ID NO: 102243 - protein, 10 aa, synthetic construct
AVSRGDFVQR

SEQ ID NO: 102244 - protein, 10 aa, synthetic construct
AVTRGDFVQR

SEQ ID NO: 102245 - protein, 10 aa, synthetic construct
AVYRGDFVQR

SEQ ID NO: 102246 - protein, 10 aa, synthetic construct
AVNRGDFVQR

SEQ ID NO: 102247 - protein, 10 aa, synthetic construct
AVQRGDFVQR

SEQ ID NO: 102248 - protein, 10 aa, synthetic construct
AVDRGDFVQR

SEQ ID NO: 102249 - protein, 10 aa, synthetic construct
AVERGDFVQR

SEQ ID NO: 102250 - protein, 10 aa, synthetic construct
APGRGDFVQR

SEQ ID NO: 102251 - protein, 10 aa, synthetic construct
APARGDFVQR

SEQ ID NO: 102252 - protein, 10 aa, synthetic construct
APVRGDFVQR

SEQ ID NO: 102253 - protein, 10 aa, synthetic construct
APPRGDFVQR

SEQ ID NO: 102254 - protein, 10 aa, synthetic construct
APLRGDFVQR

SEQ ID NO: 102255 - protein, 10 aa, synthetic construct
APIRGDFVQR

SEQ ID NO: 102256 - protein, 10 aa, synthetic construct
APMRGDFVQR

SEQ ID NO: 102257 - protein, 10 aa, synthetic construct
APWRGDFVQR

SEQ ID NO: 102258 - protein, 10 aa, synthetic construct
APFRGDFVQR

SEQ ID NO: 102259 - protein, 10 aa, synthetic construct
APKRGDFVQR

SEQ ID NO: 102260 - protein, 10 aa, synthetic construct
APRRGDFVQR

SEQ ID NO: 102261 - protein, 10 aa, synthetic construct
APHRGDFVQR

SEQ ID NO: 102262 - protein, 10 aa, synthetic construct
APSRGDFVQR

SEQ ID NO: 102263 - protein, 10 aa, synthetic construct
APTRGDFVQR

SEQ ID NO: 102264 - protein, 10 aa, synthetic construct
APYRGDFVQR

SEQ ID NO: 102265 - protein, 10 aa, synthetic construct
APNRGDFVQR

SEQ ID NO: 102266 - protein, 10 aa, synthetic construct
APQRGDFVQR

SEQ ID NO: 102267 - protein, 10 aa, synthetic construct
APDRGDFVQR

SEQ ID NO: 102268 - protein, 10 aa, synthetic construct
APERGDFVQR

SEQ ID NO: 102269 - protein, 10 aa, synthetic construct
ALGRGDFVQR

SEQ ID NO: 102270 - protein, 10 aa, synthetic construct
ALARGDFVQR

SEQ ID NO: 102271 - protein, 10 aa, synthetic construct
ALVRGDFVQR

SEQ ID NO: 102272 - protein, 10 aa, synthetic construct
ALPRGDFVQR

SEQ ID NO: 102273 - protein, 10 aa, synthetic construct
ALLRGDFVQR

SEQ ID NO: 102274 - protein, 10 aa, synthetic construct
ALIRGDFVQR

SEQ ID NO: 102275 - protein, 10 aa, synthetic construct
ALMRGDFVQR

SEQ ID NO: 102276 - protein, 10 aa, synthetic construct
ALWRGDFVQR

SEQ ID NO: 102277 - protein, 10 aa, synthetic construct
ALFRGDFVQR

SEQ ID NO: 102278 - protein, 10 aa, synthetic construct
ALKRGDFVQR

SEQ ID NO: 102279 - protein, 10 aa, synthetic construct
ALRRGDFVQR

SEQ ID NO: 102280 - protein, 10 aa, synthetic construct
ALHRGDFVQR

SEQ ID NO: 102281 - protein, 10 aa, synthetic construct
ALSRGDFVQR

SEQ ID NO: 102282 - protein, 10 aa, synthetic construct
ALTRGDFVQR

SEQ ID NO: 102283 - protein, 10 aa, synthetic construct
ALYRGDFVQR

SEQ ID NO: 102284 - protein, 10 aa, synthetic construct
ALNRGDFVQR

SEQ ID NO: 102285 - protein, 10 aa, synthetic construct
ALQRGDFVQR

SEQ ID NO: 102286 - protein, 10 aa, synthetic construct
ALDRGDFVQR

SEQ ID NO: 102287 - protein, 10 aa, synthetic construct
ALERGDFVQR

SEQ ID NO: 102288 - protein, 10 aa, synthetic construct
AIGRGDFVQR

SEQ ID NO: 102289 - protein, 10 aa, synthetic construct
AIARGDFVQR

SEQ ID NO: 102290 - protein, 10 aa, synthetic construct
AIVRGDFVQR

SEQ ID NO: 102291 - protein, 10 aa, synthetic construct
AIPRGDFVQR

SEQ ID NO: 102292 - protein, 10 aa, synthetic construct
AILRGDFVQR

SEQ ID NO: 102293 - protein, 10 aa, synthetic construct
AIIRGDFVQR

SEQ ID NO: 102294 - protein, 10 aa, synthetic construct
AIMRGDFVQR

SEQ ID NO: 102295 - protein, 10 aa, synthetic construct
AIWRGDFVQR

SEQ ID NO: 102296 - protein, 10 aa, synthetic construct
AIFRGDFVQR

SEQ ID NO: 102297 - protein, 10 aa, synthetic construct
AIKRGDFVQR

SEQ ID NO: 102298 - protein, 10 aa, synthetic construct
AIRRGDFVQR

SEQ ID NO: 102299 - protein, 10 aa, synthetic construct
AIHRGDFVQR

SEQ ID NO: 102300 - protein, 10 aa, synthetic construct
AISRGDFVQR

SEQ ID NO: 102301 - protein, 10 aa, synthetic construct
AITRGDFVQR

SEQ ID NO: 102302 - protein, 10 aa, synthetic construct
AIYRGDFVQR

SEQ ID NO: 102303 - protein, 10 aa, synthetic construct
AINRGDFVQR

SEQ ID NO: 102304 - protein, 10 aa, synthetic construct
AIQRGDFVQR

SEQ ID NO: 102305 - protein, 10 aa, synthetic construct
AIDRGDFVQR

SEQ ID NO: 102306 - protein, 10 aa, synthetic construct
AIERGDFVQR

SEQ ID NO: 102307 - protein, 10 aa, synthetic construct
AMGRGDFVQR

SEQ ID NO: 102308 - protein, 10 aa, synthetic construct
AMARGDFVQR

SEQ ID NO: 102309 - protein, 10 aa, synthetic construct
AMVRGDFVQR

SEQ ID NO: 102310 - protein, 10 aa, synthetic construct
AMPRGDFVQR

SEQ ID NO: 102311 - protein, 10 aa, synthetic construct
AMLRGDFVQR

SEQ ID NO: 102312 - protein, 10 aa, synthetic construct
AMIRGDFVQR

SEQ ID NO: 102313 - protein, 10 aa, synthetic construct
AMMRGDFVQR

SEQ ID NO: 102314 - protein, 10 aa, synthetic construct
AMWRGDFVQR

SEQ ID NO: 102315 - protein, 10 aa, synthetic construct
AMFRGDFVQR

SEQ ID NO: 102316 - protein, 10 aa, synthetic construct
AMKRGDFVQR

SEQ ID NO: 102317 - protein, 10 aa, synthetic construct
AMRRGDFVQR

SEQ ID NO: 102318 - protein, 10 aa, synthetic construct
AMHRGDFVQR

SEQ ID NO: 102319 - protein, 10 aa, synthetic construct
AMSRGDFVQR

SEQ ID NO: 102320 - protein, 10 aa, synthetic construct
AMTRGDFVQR

SEQ ID NO: 102321 - protein, 10 aa, synthetic construct
AMYRGDFVQR

SEQ ID NO: 102322 - protein, 10 aa, synthetic construct
AMNRGDFVQR

SEQ ID NO: 102323 - protein, 10 aa, synthetic construct
AMQRGDFVQR

SEQ ID NO: 102324 - protein, 10 aa, synthetic construct
AMDRGDFVQR

SEQ ID NO: 102325 - protein, 10 aa, synthetic construct
AMERGDFVQR

SEQ ID NO: 102326 - protein, 10 aa, synthetic construct
AWGRGDFVQR

SEQ ID NO: 102327 - protein, 10 aa, synthetic construct
AWARGDFVQR

SEQ ID NO: 102328 - protein, 10 aa, synthetic construct
AWVRGDFVQR

SEQ ID NO: 102329 - protein, 10 aa, synthetic construct
AWPRGDFVQR

SEQ ID NO: 102330 - protein, 10 aa, synthetic construct
AWLRGDFVQR

SEQ ID NO: 102331 - protein, 10 aa, synthetic construct
AWIRGDFVQR

SEQ ID NO: 102332 - protein, 10 aa, synthetic construct
AWMRGDFVQR

SEQ ID NO: 102333 - protein, 10 aa, synthetic construct
AWWRGDFVQR

SEQ ID NO: 102334 - protein, 10 aa, synthetic construct
AWFRGDFVQR

SEQ ID NO: 102335 - protein, 10 aa, synthetic construct
AWKRGDFVQR

SEQ ID NO: 102336 - protein, 10 aa, synthetic construct
AWRRGDFVQR

SEQ ID NO: 102337 - protein, 10 aa, synthetic construct
AWHRGDFVQR

SEQ ID NO: 102338 - protein, 10 aa, synthetic construct
AWSRGDFVQR

SEQ ID NO: 102339 - protein, 10 aa, synthetic construct
AWTRGDFVQR

SEQ ID NO: 102340 - protein, 10 aa, synthetic construct
AWYRGDFVQR

SEQ ID NO: 102341 - protein, 10 aa, synthetic construct
AWNRGDFVQR

SEQ ID NO: 102342 - protein, 10 aa, synthetic construct
AWQRGDFVQR

SEQ ID NO: 102343 - protein, 10 aa, synthetic construct
AWDRGDFVQR

SEQ ID NO: 102344 - protein, 10 aa, synthetic construct
AWERGDFVQR

SEQ ID NO: 102345 - protein, 10 aa, synthetic construct
AFGRGDFVQR

SEQ ID NO: 102346 - protein, 10 aa, synthetic construct
AFARGDFVQR

SEQ ID NO: 102347 - protein, 10 aa, synthetic construct
AFVRGDFVQR

SEQ ID NO: 102348 - protein, 10 aa, synthetic construct
AFPRGDFVQR

SEQ ID NO: 102349 - protein, 10 aa, synthetic construct
AFLRGDFVQR

SEQ ID NO: 102350 - protein, 10 aa, synthetic construct
AFIRGDFVQR

SEQ ID NO: 102351 - protein, 10 aa, synthetic construct
AFMRGDFVQR

SEQ ID NO: 102352 - protein, 10 aa, synthetic construct
AFWRGDFVQR

SEQ ID NO: 102353 - protein, 10 aa, synthetic construct
AFFRGDFVQR

SEQ ID NO: 102354 - protein, 10 aa, synthetic construct
AFKRGDFVQR

SEQ ID NO: 102355 - protein, 10 aa, synthetic construct
AFRRGDFVQR

SEQ ID NO: 102356 - protein, 10 aa, synthetic construct
AFHRGDFVQR

SEQ ID NO: 102357 - protein, 10 aa, synthetic construct
AFSRGDFVQR

SEQ ID NO: 102358 - protein, 10 aa, synthetic construct
AFTRGDFVQR

SEQ ID NO: 102359 - protein, 10 aa, synthetic construct
AFYRGDFVQR

SEQ ID NO: 102360 - protein, 10 aa, synthetic construct
AFNRGDFVQR

SEQ ID NO: 102361 - protein, 10 aa, synthetic construct
AFQRGDFVQR

SEQ ID NO: 102362 - protein, 10 aa, synthetic construct
AFDRGDFVQR

SEQ ID NO: 102363 - protein, 10 aa, synthetic construct
AFERGDFVQR

SEQ ID NO: 102364 - protein, 10 aa, synthetic construct
AKGRGDFVQR

SEQ ID NO: 102365 - protein, 10 aa, synthetic construct
AKARGDFVQR

SEQ ID NO: 102366 - protein, 10 aa, synthetic construct
AKVRGDFVQR

SEQ ID NO: 102367 - protein, 10 aa, synthetic construct
AKPRGDFVQR

SEQ ID NO: 102368 - protein, 10 aa, synthetic construct
AKLRGDFVQR

SEQ ID NO: 102369 - protein, 10 aa, synthetic construct
AKIRGDFVQR

SEQ ID NO: 102370 - protein, 10 aa, synthetic construct
AKMRGDFVQR

SEQ ID NO: 102371 - protein, 10 aa, synthetic construct
AKWRGDFVQR

SEQ ID NO: 102372 - protein, 10 aa, synthetic construct
AKFRGDFVQR

SEQ ID NO: 102373 - protein, 10 aa, synthetic construct
AKKRGDFVQR

SEQ ID NO: 102374 - protein, 10 aa, synthetic construct
AKRRGDFVQR

SEQ ID NO: 102375 - protein, 10 aa, synthetic construct
AKHRGDFVQR

SEQ ID NO: 102376 - protein, 10 aa, synthetic construct
AKSRGDFVQR

SEQ ID NO: 102377 - protein, 10 aa, synthetic construct
AKTRGDFVQR

SEQ ID NO: 102378 - protein, 10 aa, synthetic construct
AKYRGDFVQR

SEQ ID NO: 102379 - protein, 10 aa, synthetic construct
AKNRGDFVQR

SEQ ID NO: 102380 - protein, 10 aa, synthetic construct
AKQRGDFVQR

SEQ ID NO: 102381 - protein, 10 aa, synthetic construct
AKDRGDFVQR

SEQ ID NO: 102382 - protein, 10 aa, synthetic construct
AKERGDFVQR

SEQ ID NO: 102383 - protein, 10 aa, synthetic construct
ARGRGDFVQR

SEQ ID NO: 102384 - protein, 10 aa, synthetic construct
ARARGDFVQR

SEQ ID NO: 102385 - protein, 10 aa, synthetic construct
ARVRGDFVQR

SEQ ID NO: 102386 - protein, 10 aa, synthetic construct
ARPRGDFVQR

SEQ ID NO: 102387 - protein, 10 aa, synthetic construct
ARLRGDFVQR

SEQ ID NO: 102388 - protein, 10 aa, synthetic construct
ARIRGDFVQR

SEQ ID NO: 102389 - protein, 10 aa, synthetic construct
ARMRGDFVQR

SEQ ID NO: 102390 - protein, 10 aa, synthetic construct
ARWRGDFVQR

SEQ ID NO: 102391 - protein, 10 aa, synthetic construct
ARFRGDFVQR

SEQ ID NO: 102392 - protein, 10 aa, synthetic construct
ARKRGDFVQR

SEQ ID NO: 102393 - protein, 10 aa, synthetic construct
ARRRGDFVQR

SEQ ID NO: 102394 - protein, 10 aa, synthetic construct
ARHRGDFVQR

SEQ ID NO: 102395 - protein, 10 aa, synthetic construct
ARSRGDFVQR

SEQ ID NO: 102396 - protein, 10 aa, synthetic construct
ARTRGDFVQR

SEQ ID NO: 102397 - protein, 10 aa, synthetic construct
ARYRGDFVQR

SEQ ID NO: 102398 - protein, 10 aa, synthetic construct
ARNRGDFVQR

SEQ ID NO: 102399 - protein, 10 aa, synthetic construct
ARQRGDFVQR

SEQ ID NO: 102400 - protein, 10 aa, synthetic construct
ARDRGDFVQR

SEQ ID NO: 102401 - protein, 10 aa, synthetic construct
ARERGDFVQR

SEQ ID NO: 102402 - protein, 10 aa, synthetic construct
AHGRGDFVQR

SEQ ID NO: 102403 - protein, 10 aa, synthetic construct
AHARGDFVQR

SEQ ID NO: 102404 - protein, 10 aa, synthetic construct
AHVRGDFVQR

SEQ ID NO: 102405 - protein, 10 aa, synthetic construct
AHPRGDFVQR

SEQ ID NO: 102406 - protein, 10 aa, synthetic construct
AHLRGDFVQR

SEQ ID NO: 102407 - protein, 10 aa, synthetic construct
AHIRGDFVQR

SEQ ID NO: 102408 - protein, 10 aa, synthetic construct
AHMRGDFVQR

SEQ ID NO: 102409 - protein, 10 aa, synthetic construct
AHWRGDFVQR

SEQ ID NO: 102410 - protein, 10 aa, synthetic construct
AHFRGDFVQR

SEQ ID NO: 102411 - protein, 10 aa, synthetic construct
AHKRGDFVQR

SEQ ID NO: 102412 - protein, 10 aa, synthetic construct
AHRRGDFVQR

SEQ ID NO: 102413 - protein, 10 aa, synthetic construct
AHHRGDFVQR

SEQ ID NO: 102414 - protein, 10 aa, synthetic construct
AHSRGDFVQR

SEQ ID NO: 102415 - protein, 10 aa, synthetic construct
AHTRGDFVQR

SEQ ID NO: 102416 - protein, 10 aa, synthetic construct
AHYRGDFVQR

SEQ ID NO: 102417 - protein, 10 aa, synthetic construct
AHNRGDFVQR

SEQ ID NO: 102418 - protein, 10 aa, synthetic construct
AHQRGDFVQR

SEQ ID NO: 102419 - protein, 10 aa, synthetic construct
AHDRGDFVQR

SEQ ID NO: 102420 - protein, 10 aa, synthetic construct
AHERGDFVQR

SEQ ID NO: 102421 - protein, 10 aa, synthetic construct
ASGRGDFVQR

SEQ ID NO: 102422 - protein, 10 aa, synthetic construct
ASARGDFVQR

SEQ ID NO: 102423 - protein, 10 aa, synthetic construct
ASVRGDFVQR

SEQ ID NO: 102424 - protein, 10 aa, synthetic construct
ASPRGDFVQR

SEQ ID NO: 102425 - protein, 10 aa, synthetic construct
ASLRGDFVQR

SEQ ID NO: 102426 - protein, 10 aa, synthetic construct
ASIRGDFVQR

SEQ ID NO: 102427 - protein, 10 aa, synthetic construct
ASMRGDFVQR

SEQ ID NO: 102428 - protein, 10 aa, synthetic construct
ASWRGDFVQR

SEQ ID NO: 102429 - protein, 10 aa, synthetic construct
ASFRGDFVQR

SEQ ID NO: 102430 - protein, 10 aa, synthetic construct
ASKRGDFVQR

SEQ ID NO: 102431 - protein, 10 aa, synthetic construct
ASRRGDFVQR

SEQ ID NO: 102432 - protein, 10 aa, synthetic construct
ASHRGDFVQR

SEQ ID NO: 102433 - protein, 10 aa, synthetic construct
ASSRGDFVQR

SEQ ID NO: 102434 - protein, 10 aa, synthetic construct
ASTRGDFVQR

SEQ ID NO: 102435 - protein, 10 aa, synthetic construct
ASYRGDFVQR

SEQ ID NO: 102436 - protein, 10 aa, synthetic construct
ASNRGDFVQR

SEQ ID NO: 102437 - protein, 10 aa, synthetic construct
ASQRGDFVQR

SEQ ID NO: 102438 - protein, 10 aa, synthetic construct
ASDRGDFVQR

SEQ ID NO: 102439 - protein, 10 aa, synthetic construct
ASERGDFVQR

SEQ ID NO: 102440 - protein, 10 aa, synthetic construct
ATGRGDFVQR

SEQ ID NO: 102441 - protein, 10 aa, synthetic construct
ATARGDFVQR

SEQ ID NO: 102442 - protein, 10 aa, synthetic construct
ATVRGDFVQR

SEQ ID NO: 102443 - protein, 10 aa, synthetic construct
ATPRGDFVQR

SEQ ID NO: 102444 - protein, 10 aa, synthetic construct
ATLRGDFVQR

SEQ ID NO: 102445 - protein, 10 aa, synthetic construct
ATIRGDFVQR

SEQ ID NO: 102446 - protein, 10 aa, synthetic construct
ATMRGDFVQR

SEQ ID NO: 102447 - protein, 10 aa, synthetic construct
ATWRGDFVQR

SEQ ID NO: 102448 - protein, 10 aa, synthetic construct
ATFRGDFVQR

SEQ ID NO: 102449 - protein, 10 aa, synthetic construct
ATKRGDFVQR

SEQ ID NO: 102450 - protein, 10 aa, synthetic construct
ATRRGDFVQR

SEQ ID NO: 102451 - protein, 10 aa, synthetic construct
ATHRGDFVQR

SEQ ID NO: 102452 - protein, 10 aa, synthetic construct
ATSRGDFVQR

SEQ ID NO: 102453 - protein, 10 aa, synthetic construct
ATTRGDFVQR

SEQ ID NO: 102454 - protein, 10 aa, synthetic construct
ATYRGDFVQR

SEQ ID NO: 102455 - protein, 10 aa, synthetic construct
ATNRGDFVQR

SEQ ID NO: 102456 - protein, 10 aa, synthetic construct
ATQRGDFVQR

SEQ ID NO: 102457 - protein, 10 aa, synthetic construct
ATDRGDFVQR

SEQ ID NO: 102458 - protein, 10 aa, synthetic construct
ATERGDFVQR

SEQ ID NO: 102459 - protein, 10 aa, synthetic construct
AYGRGDFVQR

SEQ ID NO: 102460 - protein, 10 aa, synthetic construct
AYARGDFVQR

SEQ ID NO: 102461 - protein, 10 aa, synthetic construct
AYVRGDFVQR

SEQ ID NO: 102462 - protein, 10 aa, synthetic construct
AYPRGDFVQR

SEQ ID NO: 102463 - protein, 10 aa, synthetic construct
AYLRGDFVQR

SEQ ID NO: 102464 - protein, 10 aa, synthetic construct
AYIRGDFVQR

SEQ ID NO: 102465 - protein, 10 aa, synthetic construct
AYMRGDFVQR

SEQ ID NO: 102466 - protein, 10 aa, synthetic construct
AYWRGDFVQR

SEQ ID NO: 102467 - protein, 10 aa, synthetic construct
AYFRGDFVQR

SEQ ID NO: 102468 - protein, 10 aa, synthetic construct
AYKRGDFVQR

SEQ ID NO: 102469 - protein, 10 aa, synthetic construct
AYRRGDFVQR

SEQ ID NO: 102470 - protein, 10 aa, synthetic construct
AYHRGDFVQR

SEQ ID NO: 102471 - protein, 10 aa, synthetic construct
AYSRGDFVQR

SEQ ID NO: 102472 - protein, 10 aa, synthetic construct
AYTRGDFVQR

SEQ ID NO: 102473 - protein, 10 aa, synthetic construct
AYYRGDFVQR

SEQ ID NO: 102474 - protein, 10 aa, synthetic construct
AYNRGDFVQR

SEQ ID NO: 102475 - protein, 10 aa, synthetic construct
AYQRGDFVQR

SEQ ID NO: 102476 - protein, 10 aa, synthetic construct
AYDRGDFVQR

SEQ ID NO: 102477 - protein, 10 aa, synthetic construct
AYERGDFVQR

SEQ ID NO: 102478 - protein, 10 aa, synthetic construct
ANGRGDFVQR

SEQ ID NO: 102479 - protein, 10 aa, synthetic construct
ANARGDFVQR

SEQ ID NO: 102480 - protein, 10 aa, synthetic construct
ANVRGDFVQR

SEQ ID NO: 102481 - protein, 10 aa, synthetic construct
ANPRGDFVQR

SEQ ID NO: 102482 - protein, 10 aa, synthetic construct
ANLRGDFVQR

SEQ ID NO: 102483 - protein, 10 aa, synthetic construct
ANIRGDFVQR

SEQ ID NO: 102484 - protein, 10 aa, synthetic construct
ANMRGDFVQR

SEQ ID NO: 102485 - protein, 10 aa, synthetic construct
ANWRGDFVQR

SEQ ID NO: 102486 - protein, 10 aa, synthetic construct
ANFRGDFVQR

SEQ ID NO: 102487 - protein, 10 aa, synthetic construct
ANKRGDFVQR

SEQ ID NO: 102488 - protein, 10 aa, synthetic construct
ANRRGDFVQR

SEQ ID NO: 102489 - protein, 10 aa, synthetic construct
ANHRGDFVQR

SEQ ID NO: 102490 - protein, 10 aa, synthetic construct
ANSRGDFVQR

SEQ ID NO: 102491 - protein, 10 aa, synthetic construct
ANTRGDFVQR

SEQ ID NO: 102492 - protein, 10 aa, synthetic construct
ANYRGDFVQR

SEQ ID NO: 102493 - protein, 10 aa, synthetic construct
ANNRGDFVQR

SEQ ID NO: 102494 - protein, 10 aa, synthetic construct
ANQRGDFVQR

SEQ ID NO: 102495 - protein, 10 aa, synthetic construct
ANDRGDFVQR

SEQ ID NO: 102496 - protein, 10 aa, synthetic construct
ANERGDFVQR

SEQ ID NO: 102497 - protein, 10 aa, synthetic construct
AQGRGDFVQR

SEQ ID NO: 102498 - protein, 10 aa, synthetic construct
AQARGDFVQR

SEQ ID NO: 102499 - protein, 10 aa, synthetic construct
AQVRGDFVQR

SEQ ID NO: 102500 - protein, 10 aa, synthetic construct
AQPRGDFVQR

SEQ ID NO: 102501 - protein, 10 aa, synthetic construct
AQLRGDFVQR

SEQ ID NO: 102502 - protein, 10 aa, synthetic construct
AQIRGDFVQR

SEQ ID NO: 102503 - protein, 10 aa, synthetic construct
AQMRGDFVQR

SEQ ID NO: 102504 - protein, 10 aa, synthetic construct
AQWRGDFVQR

SEQ ID NO: 102505 - protein, 10 aa, synthetic construct
AQFRGDFVQR

SEQ ID NO: 102506 - protein, 10 aa, synthetic construct
AQKRGDFVQR

SEQ ID NO: 102507 - protein, 10 aa, synthetic construct
AQRRGDFVQR

SEQ ID NO: 102508 - protein, 10 aa, synthetic construct
AQHRGDFVQR

SEQ ID NO: 102509 - protein, 10 aa, synthetic construct
AQSRGDFVQR

SEQ ID NO: 102510 - protein, 10 aa, synthetic construct
AQTRGDFVQR

SEQ ID NO: 102511 - protein, 10 aa, synthetic construct
AQYRGDFVQR

SEQ ID NO: 102512 - protein, 10 aa, synthetic construct
AQNRGDFVQR

SEQ ID NO: 102513 - protein, 10 aa, synthetic construct
AQQRGDFVQR

SEQ ID NO: 102514 - protein, 10 aa, synthetic construct
AQDRGDFVQR

SEQ ID NO: 102515 - protein, 10 aa, synthetic construct
AQERGDFVQR

SEQ ID NO: 102516 - protein, 10 aa, synthetic construct
ADGRGDFVQR

SEQ ID NO: 102517 - protein, 10 aa, synthetic construct
ADARGDFVQR

SEQ ID NO: 102518 - protein, 10 aa, synthetic construct
ADVRGDFVQR

SEQ ID NO: 102519 - protein, 10 aa, synthetic construct
ADPRGDFVQR

SEQ ID NO: 102520 - protein, 10 aa, synthetic construct
ADLRGDFVQR

SEQ ID NO: 102521 - protein, 10 aa, synthetic construct
ADIRGDFVQR

SEQ ID NO: 102522 - protein, 10 aa, synthetic construct
ADMRGDFVQR

SEQ ID NO: 102523 - protein, 10 aa, synthetic construct
ADWRGDFVQR

SEQ ID NO: 102524 - protein, 10 aa, synthetic construct
ADFRGDFVQR

SEQ ID NO: 102525 - protein, 10 aa, synthetic construct
ADKRGDFVQR

SEQ ID NO: 102526 - protein, 10 aa, synthetic construct
ADRRGDFVQR

SEQ ID NO: 102527 - protein, 10 aa, synthetic construct
ADHRGDFVQR

SEQ ID NO: 102528 - protein, 10 aa, synthetic construct
ADSRGDFVQR

SEQ ID NO: 102529 - protein, 10 aa, synthetic construct
ADTRGDFVQR

SEQ ID NO: 102530 - protein, 10 aa, synthetic construct
ADYRGDFVQR

SEQ ID NO: 102531 - protein, 10 aa, synthetic construct
ADNRGDFVQR

SEQ ID NO: 102532 - protein, 10 aa, synthetic construct
ADQRGDFVQR

SEQ ID NO: 102533 - protein, 10 aa, synthetic construct
ADDRGDFVQR

SEQ ID NO: 102534 - protein, 10 aa, synthetic construct
ADERGDFVQR

SEQ ID NO: 102535 - protein, 10 aa, synthetic construct
AEGRGDFVQR

SEQ ID NO: 102536 - protein, 10 aa, synthetic construct
AEARGDFVQR

SEQ ID NO: 102537 - protein, 10 aa, synthetic construct
AEVRGDFVQR

SEQ ID NO: 102538 - protein, 10 aa, synthetic construct
AEPRGDFVQR

SEQ ID NO: 102539 - protein, 10 aa, synthetic construct
AELRGDFVQR

SEQ ID NO: 102540 - protein, 10 aa, synthetic construct
AEIRGDFVQR

SEQ ID NO: 102541 - protein, 10 aa, synthetic construct
AEMRGDFVQR

SEQ ID NO: 102542 - protein, 10 aa, synthetic construct
AEWRGDFVQR

SEQ ID NO: 102543 - protein, 10 aa, synthetic construct
AEFRGDFVQR

SEQ ID NO: 102544 - protein, 10 aa, synthetic construct
AEKRGDFVQR

SEQ ID NO: 102545 - protein, 10 aa, synthetic construct
AERRGDFVQR

SEQ ID NO: 102546 - protein, 10 aa, synthetic construct
AEHRGDFVQR

SEQ ID NO: 102547 - protein, 10 aa, synthetic construct
AESRGDFVQR

SEQ ID NO: 102548 - protein, 10 aa, synthetic construct
AETRGDFVQR

SEQ ID NO: 102549 - protein, 10 aa, synthetic construct
AEYRGDFVQR

SEQ ID NO: 102550 - protein, 10 aa, synthetic construct
AENRGDFVQR

SEQ ID NO: 102551 - protein, 10 aa, synthetic construct
AEQRGDFVQR

SEQ ID NO: 102552 - protein, 10 aa, synthetic construct
AEDRGDFVQR

SEQ ID NO: 102553 - protein, 10 aa, synthetic construct
AEERGDFVQR

SEQ ID NO: 102554 - protein, 10 aa, synthetic construct
EGGRGDFVQR

SEQ ID NO: 102555 - protein, 10 aa, synthetic construct
EGARGDFVQR

SEQ ID NO: 102556 - protein, 10 aa, synthetic construct
EGVRGDFVQR

SEQ ID NO: 102557 - protein, 10 aa, synthetic construct
EGPRGDFVQR

SEQ ID NO: 102558 - protein, 10 aa, synthetic construct
EGLRGDFVQR

SEQ ID NO: 102559 - protein, 10 aa, synthetic construct
EGIRGDFVQR

SEQ ID NO: 102560 - protein, 10 aa, synthetic construct
EGMRGDFVQR

SEQ ID NO: 102561 - protein, 10 aa, synthetic construct
EGWRGDFVQR

SEQ ID NO: 102562 - protein, 10 aa, synthetic construct
EGFRGDFVQR

SEQ ID NO: 102563 - protein, 10 aa, synthetic construct
EGKRGDFVQR

SEQ ID NO: 102564 - protein, 10 aa, synthetic construct
EGRRGDFVQR

SEQ ID NO: 102565 - protein, 10 aa, synthetic construct
EGHRGDFVQR

SEQ ID NO: 102566 - protein, 10 aa, synthetic construct
EGSRGDFVQR

SEQ ID NO: 102567 - protein, 10 aa, synthetic construct
EGTRGDFVQR

SEQ ID NO: 102568 - protein, 10 aa, synthetic construct
EGYRGDFVQR

SEQ ID NO: 102569 - protein, 10 aa, synthetic construct
EGNRGDFVQR

SEQ ID NO: 102570 - protein, 10 aa, synthetic construct
EGQRGDFVQR

SEQ ID NO: 102571 - protein, 10 aa, synthetic construct
EGDRGDFVQR

SEQ ID NO: 102572 - protein, 10 aa, synthetic construct
EGERGDFVQR

SEQ ID NO: 102573 - protein, 10 aa, synthetic construct
EAGRGDFVQR

SEQ ID NO: 102574 - protein, 10 aa, synthetic construct
EAARGDFVQR

SEQ ID NO: 102575 - protein, 10 aa, synthetic construct
EAVRGDFVQR

SEQ ID NO: 102576 - protein, 10 aa, synthetic construct
EAPRGDFVQR

SEQ ID NO: 102577 - protein, 10 aa, synthetic construct
EALRGDFVQR

SEQ ID NO: 102578 - protein, 10 aa, synthetic construct
EAIRGDFVQR

SEQ ID NO: 102579 - protein, 10 aa, synthetic construct
EAMRGDFVQR

SEQ ID NO: 102580 - protein, 10 aa, synthetic construct
EAWRGDFVQR

SEQ ID NO: 102581 - protein, 10 aa, synthetic construct
EAFRGDFVQR

SEQ ID NO: 102582 - protein, 10 aa, synthetic construct
EAKRGDFVQR

SEQ ID NO: 102583 - protein, 10 aa, synthetic construct
EARRGDFVQR

SEQ ID NO: 102584 - protein, 10 aa, synthetic construct
EAHRGDFVQR

SEQ ID NO: 102585 - protein, 10 aa, synthetic construct
EASRGDFVQR

SEQ ID NO: 102586 - protein, 10 aa, synthetic construct
EATRGDFVQR

SEQ ID NO: 102587 - protein, 10 aa, synthetic construct
EAYRGDFVQR

SEQ ID NO: 102588 - protein, 10 aa, synthetic construct
EANRGDFVQR

SEQ ID NO: 102589 - protein, 10 aa, synthetic construct
EAQRGDFVQR

SEQ ID NO: 102590 - protein, 10 aa, synthetic construct
EADRGDFVQR

SEQ ID NO: 102591 - protein, 10 aa, synthetic construct
EAERGDFVQR

SEQ ID NO: 102592 - protein, 10 aa, synthetic construct
EVGRGDFVQR

SEQ ID NO: 102593 - protein, 10 aa, synthetic construct
EVARGDFVQR

SEQ ID NO: 102594 - protein, 10 aa, synthetic construct
EVVRGDFVQR

SEQ ID NO: 102595 - protein, 10 aa, synthetic construct
EVPRGDFVQR

SEQ ID NO: 102596 - protein, 10 aa, synthetic construct
EVLRGDFVQR

SEQ ID NO: 102597 - protein, 10 aa, synthetic construct
EVIRGDFVQR

SEQ ID NO: 102598 - protein, 10 aa, synthetic construct
EVMRGDFVQR

SEQ ID NO: 102599 - protein, 10 aa, synthetic construct
EVWRGDFVQR

SEQ ID NO: 102600 - protein, 10 aa, synthetic construct
EVFRGDFVQR

SEQ ID NO: 102601 - protein, 10 aa, synthetic construct
EVKRGDFVQR

SEQ ID NO: 102602 - protein, 10 aa, synthetic construct
EVRRGDFVQR

SEQ ID NO: 102603 - protein, 10 aa, synthetic construct
EVHRGDFVQR

SEQ ID NO: 102604 - protein, 10 aa, synthetic construct
EVSRGDFVQR

SEQ ID NO: 102605 - protein, 10 aa, synthetic construct
EVTRGDFVQR

SEQ ID NO: 102606 - protein, 10 aa, synthetic construct
EVYRGDFVQR

SEQ ID NO: 102607 - protein, 10 aa, synthetic construct
EVNRGDFVQR

SEQ ID NO: 102608 - protein, 10 aa, synthetic construct
EVQRGDFVQR

SEQ ID NO: 102609 - protein, 10 aa, synthetic construct
EVDRGDFVQR

SEQ ID NO: 102610 - protein, 10 aa, synthetic construct
EVERGDFVQR

SEQ ID NO: 102611 - protein, 10 aa, synthetic construct
EPGRGDFVQR

SEQ ID NO: 102612 - protein, 10 aa, synthetic construct
EPARGDFVQR

SEQ ID NO: 102613 - protein, 10 aa, synthetic construct
EPVRGDFVQR

SEQ ID NO: 102614 - protein, 10 aa, synthetic construct
EPPRGDFVQR

SEQ ID NO: 102615 - protein, 10 aa, synthetic construct
EPLRGDFVQR

SEQ ID NO: 102616 - protein, 10 aa, synthetic construct
EPIRGDFVQR

SEQ ID NO: 102617 - protein, 10 aa, synthetic construct
EPMRGDFVQR

SEQ ID NO: 102618 - protein, 10 aa, synthetic construct
EPWRGDFVQR

SEQ ID NO: 102619 - protein, 10 aa, synthetic construct
EPFRGDFVQR

SEQ ID NO: 102620 - protein, 10 aa, synthetic construct
EPKRGDFVQR

SEQ ID NO: 102621 - protein, 10 aa, synthetic construct
EPRRGDFVQR

SEQ ID NO: 102622 - protein, 10 aa, synthetic construct
EPHRGDFVQR

SEQ ID NO: 102623 - protein, 10 aa, synthetic construct
EPSRGDFVQR

SEQ ID NO: 102624 - protein, 10 aa, synthetic construct
EPTRGDFVQR

SEQ ID NO: 102625 - protein, 10 aa, synthetic construct
EPYRGDFVQR

SEQ ID NO: 102626 - protein, 10 aa, synthetic construct
EPNRGDFVQR

SEQ ID NO: 102627 - protein, 10 aa, synthetic construct
EPQRGDFVQR

SEQ ID NO: 102628 - protein, 10 aa, synthetic construct
EPDRGDFVQR

SEQ ID NO: 102629 - protein, 10 aa, synthetic construct
EPERGDFVQR

SEQ ID NO: 102630 - protein, 10 aa, synthetic construct
ELGRGDFVQR

SEQ ID NO: 102631 - protein, 10 aa, synthetic construct
ELARGDFVQR

SEQ ID NO: 102632 - protein, 10 aa, synthetic construct
ELVRGDFVQR

SEQ ID NO: 102633 - protein, 10 aa, synthetic construct
ELPRGDFVQR

SEQ ID NO: 102634 - protein, 10 aa, synthetic construct
ELLRGDFVQR

SEQ ID NO: 102635 - protein, 10 aa, synthetic construct
ELIRGDFVQR

SEQ ID NO: 102636 - protein, 10 aa, synthetic construct
ELMRGDFVQR

SEQ ID NO: 102637 - protein, 10 aa, synthetic construct
ELWRGDFVQR

SEQ ID NO: 102638 - protein, 10 aa, synthetic construct
ELFRGDFVQR

SEQ ID NO: 102639 - protein, 10 aa, synthetic construct
ELKRGDFVQR

SEQ ID NO: 102640 - protein, 10 aa, synthetic construct
ELRRGDFVQR

SEQ ID NO: 102641 - protein, 10 aa, synthetic construct
ELHRGDFVQR

SEQ ID NO: 102642 - protein, 10 aa, synthetic construct
ELSRGDFVQR

SEQ ID NO: 102643 - protein, 10 aa, synthetic construct
ELTRGDFVQR

SEQ ID NO: 102644 - protein, 10 aa, synthetic construct
ELYRGDFVQR

SEQ ID NO: 102645 - protein, 10 aa, synthetic construct
ELNRGDFVQR

SEQ ID NO: 102646 - protein, 10 aa, synthetic construct
ELQRGDFVQR

SEQ ID NO: 102647 - protein, 10 aa, synthetic construct
ELDRGDFVQR

SEQ ID NO: 102648 - protein, 10 aa, synthetic construct
ELERGDFVQR

SEQ ID NO: 102649 - protein, 10 aa, synthetic construct
EIGRGDFVQR

SEQ ID NO: 102650 - protein, 10 aa, synthetic construct
EIARGDFVQR

SEQ ID NO: 102651 - protein, 10 aa, synthetic construct
EIVRGDFVQR

SEQ ID NO: 102652 - protein, 10 aa, synthetic construct
EIPRGDFVQR

SEQ ID NO: 102653 - protein, 10 aa, synthetic construct
EILRGDFVQR

SEQ ID NO: 102654 - protein, 10 aa, synthetic construct
EIIRGDFVQR

SEQ ID NO: 102655 - protein, 10 aa, synthetic construct
EIMRGDFVQR

SEQ ID NO: 102656 - protein, 10 aa, synthetic construct
EIWRGDFVQR

SEQ ID NO: 102657 - protein, 10 aa, synthetic construct
EIFRGDFVQR

SEQ ID NO: 102658 - protein, 10 aa, synthetic construct
EIKRGDFVQR

SEQ ID NO: 102659 - protein, 10 aa, synthetic construct
EIRRGDFVQR

SEQ ID NO: 102660 - protein, 10 aa, synthetic construct
EIHRGDFVQR

SEQ ID NO: 102661 - protein, 10 aa, synthetic construct
EISRGDFVQR

SEQ ID NO: 102662 - protein, 10 aa, synthetic construct
EITRGDFVQR

SEQ ID NO: 102663 - protein, 10 aa, synthetic construct
EIYRGDFVQR

SEQ ID NO: 102664 - protein, 10 aa, synthetic construct
EINRGDFVQR

SEQ ID NO: 102665 - protein, 10 aa, synthetic construct
EIQRGDFVQR

SEQ ID NO: 102666 - protein, 10 aa, synthetic construct
EIDRGDFVQR

SEQ ID NO: 102667 - protein, 10 aa, synthetic construct
EIERGDFVQR

SEQ ID NO: 102668 - protein, 10 aa, synthetic construct
EMGRGDFVQR

SEQ ID NO: 102669 - protein, 10 aa, synthetic construct
EMARGDFVQR

SEQ ID NO: 102670 - protein, 10 aa, synthetic construct
EMVRGDFVQR

SEQ ID NO: 102671 - protein, 10 aa, synthetic construct
EMPRGDFVQR

SEQ ID NO: 102672 - protein, 10 aa, synthetic construct
EMLRGDFVQR

SEQ ID NO: 102673 - protein, 10 aa, synthetic construct
EMIRGDFVQR

SEQ ID NO: 102674 - protein, 10 aa, synthetic construct
EMMRGDFVQR

SEQ ID NO: 102675 - protein, 10 aa, synthetic construct
EMWRGDFVQR

SEQ ID NO: 102676 - protein, 10 aa, synthetic construct
EMFRGDFVQR

SEQ ID NO: 102677 - protein, 10 aa, synthetic construct
EMKRGDFVQR

SEQ ID NO: 102678 - protein, 10 aa, synthetic construct
EMRRGDFVQR

SEQ ID NO: 102679 - protein, 10 aa, synthetic construct
EMHRGDFVQR

SEQ ID NO: 102680 - protein, 10 aa, synthetic construct
EMSRGDFVQR

SEQ ID NO: 102681 - protein, 10 aa, synthetic construct
EMTRGDFVQR

SEQ ID NO: 102682 - protein, 10 aa, synthetic construct
EMYRGDFVQR

SEQ ID NO: 102683 - protein, 10 aa, synthetic construct
EMNRGDFVQR

SEQ ID NO: 102684 - protein, 10 aa, synthetic construct
EMQRGDFVQR

SEQ ID NO: 102685 - protein, 10 aa, synthetic construct
EMDRGDFVQR

SEQ ID NO: 102686 - protein, 10 aa, synthetic construct
EMERGDFVQR

SEQ ID NO: 102687 - protein, 10 aa, synthetic construct
EWGRGDFVQR

SEQ ID NO: 102688 - protein, 10 aa, synthetic construct
EWARGDFVQR

SEQ ID NO: 102689 - protein, 10 aa, synthetic construct
EWVRGDFVQR

SEQ ID NO: 102690 - protein, 10 aa, synthetic construct
EWPRGDFVQR

SEQ ID NO: 102691 - protein, 10 aa, synthetic construct
EWLRGDFVQR

SEQ ID NO: 102692 - protein, 10 aa, synthetic construct
EWIRGDFVQR

SEQ ID NO: 102693 - protein, 10 aa, synthetic construct
EWMRGDFVQR

SEQ ID NO: 102694 - protein, 10 aa, synthetic construct
EWWRGDFVQR

SEQ ID NO: 102695 - protein, 10 aa, synthetic construct
EWFRGDFVQR

SEQ ID NO: 102696 - protein, 10 aa, synthetic construct
EWKRGDFVQR

SEQ ID NO: 102697 - protein, 10 aa, synthetic construct
EWRRGDFVQR

SEQ ID NO: 102698 - protein, 10 aa, synthetic construct
EWHRGDFVQR

SEQ ID NO: 102699 - protein, 10 aa, synthetic construct
EWSRGDFVQR

SEQ ID NO: 102700 - protein, 10 aa, synthetic construct
EWTRGDFVQR

SEQ ID NO: 102701 - protein, 10 aa, synthetic construct
EWYRGDFVQR

SEQ ID NO: 102702 - protein, 10 aa, synthetic construct
EWNRGDFVQR

SEQ ID NO: 102703 - protein, 10 aa, synthetic construct
EWQRGDFVQR

SEQ ID NO: 102704 - protein, 10 aa, synthetic construct
EWDRGDFVQR

SEQ ID NO: 102705 - protein, 10 aa, synthetic construct
EWERGDFVQR

SEQ ID NO: 102706 - protein, 10 aa, synthetic construct
EFGRGDFVQR

SEQ ID NO: 102707 - protein, 10 aa, synthetic construct
EFARGDFVQR

SEQ ID NO: 102708 - protein, 10 aa, synthetic construct
EFVRGDFVQR

SEQ ID NO: 102709 - protein, 10 aa, synthetic construct
EFPRGDFVQR

SEQ ID NO: 102710 - protein, 10 aa, synthetic construct
EFLRGDFVQR

SEQ ID NO: 102711 - protein, 10 aa, synthetic construct
EFIRGDFVQR

SEQ ID NO: 102712 - protein, 10 aa, synthetic construct
EFMRGDFVQR

SEQ ID NO: 102713 - protein, 10 aa, synthetic construct
EFWRGDFVQR

SEQ ID NO: 102714 - protein, 10 aa, synthetic construct
EFFRGDFVQR

SEQ ID NO: 102715 - protein, 10 aa, synthetic construct
EFKRGDFVQR

SEQ ID NO: 102716 - protein, 10 aa, synthetic construct
EFRRGDFVQR

SEQ ID NO: 102717 - protein, 10 aa, synthetic construct
EFHRGDFVQR

SEQ ID NO: 102718 - protein, 10 aa, synthetic construct
EFSRGDFVQR

SEQ ID NO: 102719 - protein, 10 aa, synthetic construct
EFTRGDFVQR

SEQ ID NO: 102720 - protein, 10 aa, synthetic construct
EFYRGDFVQR

SEQ ID NO: 102721 - protein, 10 aa, synthetic construct
EFNRGDFVQR

SEQ ID NO: 102722 - protein, 10 aa, synthetic construct
EFQRGDFVQR

SEQ ID NO: 102723 - protein, 10 aa, synthetic construct
EFDRGDFVQR

SEQ ID NO: 102724 - protein, 10 aa, synthetic construct
EFERGDFVQR

SEQ ID NO: 102725 - protein, 10 aa, synthetic construct
EKGRGDFVQR

SEQ ID NO: 102726 - protein, 10 aa, synthetic construct
EKARGDFVQR

SEQ ID NO: 102727 - protein, 10 aa, synthetic construct
EKVRGDFVQR

SEQ ID NO: 102728 - protein, 10 aa, synthetic construct
EKPRGDFVQR

SEQ ID NO: 102729 - protein, 10 aa, synthetic construct
EKLRGDFVQR

SEQ ID NO: 102730 - protein, 10 aa, synthetic construct
EKIRGDFVQR

SEQ ID NO: 102731 - protein, 10 aa, synthetic construct
EKMRGDFVQR

SEQ ID NO: 102732 - protein, 10 aa, synthetic construct
EKWRGDFVQR

SEQ ID NO: 102733 - protein, 10 aa, synthetic construct
EKFRGDFVQR

SEQ ID NO: 102734 - protein, 10 aa, synthetic construct
EKKRGDFVQR

SEQ ID NO: 102735 - protein, 10 aa, synthetic construct
EKRRGDFVQR

SEQ ID NO: 102736 - protein, 10 aa, synthetic construct
EKHRGDFVQR

SEQ ID NO: 102737 - protein, 10 aa, synthetic construct
EKSRGDFVQR

SEQ ID NO: 102738 - protein, 10 aa, synthetic construct
EKTRGDFVQR

SEQ ID NO: 102739 - protein, 10 aa, synthetic construct
EKYRGDFVQR

SEQ ID NO: 102740 - protein, 10 aa, synthetic construct
EKNRGDFVQR

SEQ ID NO: 102741 - protein, 10 aa, synthetic construct
EKQRGDFVQR

SEQ ID NO: 102742 - protein, 10 aa, synthetic construct
EKDRGDFVQR

SEQ ID NO: 102743 - protein, 10 aa, synthetic construct
EKERGDFVQR

SEQ ID NO: 102744 - protein, 10 aa, synthetic construct
ERGRGDFVQR

SEQ ID NO: 102745 - protein, 10 aa, synthetic construct
ERARGDFVQR

SEQ ID NO: 102746 - protein, 10 aa, synthetic construct
ERVRGDFVQR

SEQ ID NO: 102747 - protein, 10 aa, synthetic construct
ERPRGDFVQR

SEQ ID NO: 102748 - protein, 10 aa, synthetic construct
ERLRGDFVQR

SEQ ID NO: 102749 - protein, 10 aa, synthetic construct
ERIRGDFVQR

SEQ ID NO: 102750 - protein, 10 aa, synthetic construct
ERMRGDFVQR

SEQ ID NO: 102751 - protein, 10 aa, synthetic construct
ERWRGDFVQR

SEQ ID NO: 102752 - protein, 10 aa, synthetic construct
ERFRGDFVQR

SEQ ID NO: 102753 - protein, 10 aa, synthetic construct
ERKRGDFVQR

SEQ ID NO: 102754 - protein, 10 aa, synthetic construct
ERRRGDFVQR

SEQ ID NO: 102755 - protein, 10 aa, synthetic construct
ERHRGDFVQR

SEQ ID NO: 102756 - protein, 10 aa, synthetic construct
ERSRGDFVQR

SEQ ID NO: 102757 - protein, 10 aa, synthetic construct
ERTRGDFVQR

SEQ ID NO: 102758 - protein, 10 aa, synthetic construct
ERYRGDFVQR

SEQ ID NO: 102759 - protein, 10 aa, synthetic construct
ERNRGDFVQR

SEQ ID NO: 102760 - protein, 10 aa, synthetic construct
ERQRGDFVQR

SEQ ID NO: 102761 - protein, 10 aa, synthetic construct
ERDRGDFVQR

SEQ ID NO: 102762 - protein, 10 aa, synthetic construct
ERERGDFVQR

SEQ ID NO: 102763 - protein, 10 aa, synthetic construct
EHGRGDFVQR

SEQ ID NO: 102764 - protein, 10 aa, synthetic construct
EHARGDFVQR

SEQ ID NO: 102765 - protein, 10 aa, synthetic construct
EHVRGDFVQR

SEQ ID NO: 102766 - protein, 10 aa, synthetic construct
EHPRGDFVQR

SEQ ID NO: 102767 - protein, 10 aa, synthetic construct
EHLRGDFVQR

SEQ ID NO: 102768 - protein, 10 aa, synthetic construct
EHIRGDFVQR

SEQ ID NO: 102769 - protein, 10 aa, synthetic construct
EHMRGDFVQR

SEQ ID NO: 102770 - protein, 10 aa, synthetic construct
EHWRGDFVQR

SEQ ID NO: 102771 - protein, 10 aa, synthetic construct
EHFRGDFVQR

SEQ ID NO: 102772 - protein, 10 aa, synthetic construct
EHKRGDFVQR

SEQ ID NO: 102773 - protein, 10 aa, synthetic construct
EHRRGDFVQR

SEQ ID NO: 102774 - protein, 10 aa, synthetic construct
EHHRGDFVQR

SEQ ID NO: 102775 - protein, 10 aa, synthetic construct
EHSRGDFVQR

SEQ ID NO: 102776 - protein, 10 aa, synthetic construct
EHTRGDFVQR

SEQ ID NO: 102777 - protein, 10 aa, synthetic construct
EHYRGDFVQR

SEQ ID NO: 102778 - protein, 10 aa, synthetic construct
EHNRGDFVQR

SEQ ID NO: 102779 - protein, 10 aa, synthetic construct
EHQRGDFVQR

SEQ ID NO: 102780 - protein, 10 aa, synthetic construct
EHDRGDFVQR

SEQ ID NO: 102781 - protein, 10 aa, synthetic construct
EHERGDFVQR

SEQ ID NO: 102782 - protein, 10 aa, synthetic construct
ESGRGDFVQR

SEQ ID NO: 102783 - protein, 10 aa, synthetic construct
ESARGDFVQR

SEQ ID NO: 102784 - protein, 10 aa, synthetic construct
ESVRGDFVQR

SEQ ID NO: 102785 - protein, 10 aa, synthetic construct
ESPRGDFVQR

SEQ ID NO: 102786 - protein, 10 aa, synthetic construct
ESLRGDFVQR

SEQ ID NO: 102787 - protein, 10 aa, synthetic construct
ESIRGDFVQR

SEQ ID NO: 102788 - protein, 10 aa, synthetic construct
ESMRGDFVQR

SEQ ID NO: 102789 - protein, 10 aa, synthetic construct
ESWRGDFVQR

SEQ ID NO: 102790 - protein, 10 aa, synthetic construct
ESFRGDFVQR

SEQ ID NO: 102791 - protein, 10 aa, synthetic construct
ESKRGDFVQR

SEQ ID NO: 102792 - protein, 10 aa, synthetic construct
ESRRGDFVQR

SEQ ID NO: 102793 - protein, 10 aa, synthetic construct
ESHRGDFVQR

SEQ ID NO: 102794 - protein, 10 aa, synthetic construct
ESSRGDFVQR

SEQ ID NO: 102795 - protein, 10 aa, synthetic construct
ESTRGDFVQR

SEQ ID NO: 102796 - protein, 10 aa, synthetic construct
ESYRGDFVQR

SEQ ID NO: 102797 - protein, 10 aa, synthetic construct
ESNRGDFVQR

SEQ ID NO: 102798 - protein, 10 aa, synthetic construct
ESQRGDFVQR

SEQ ID NO: 102799 - protein, 10 aa, synthetic construct
ESDRGDFVQR

SEQ ID NO: 102800 - protein, 10 aa, synthetic construct
ESERGDFVQR

SEQ ID NO: 102801 - protein, 10 aa, synthetic construct
ETGRGDFVQR

SEQ ID NO: 102802 - protein, 10 aa, synthetic construct
ETARGDFVQR

SEQ ID NO: 102803 - protein, 10 aa, synthetic construct
ETVRGDFVQR

SEQ ID NO: 102804 - protein, 10 aa, synthetic construct
ETPRGDFVQR

SEQ ID NO: 102805 - protein, 10 aa, synthetic construct
ETLRGDFVQR

SEQ ID NO: 102806 - protein, 10 aa, synthetic construct
ETIRGDFVQR

SEQ ID NO: 102807 - protein, 10 aa, synthetic construct
ETMRGDFVQR

SEQ ID NO: 102808 - protein, 10 aa, synthetic construct
ETWRGDFVQR

SEQ ID NO: 102809 - protein, 10 aa, synthetic construct
ETFRGDFVQR

SEQ ID NO: 102810 - protein, 10 aa, synthetic construct
ETKRGDFVQR

SEQ ID NO: 102811 - protein, 10 aa, synthetic construct
ETRRGDFVQR

SEQ ID NO: 102812 - protein, 10 aa, synthetic construct
ETHRGDFVQR

SEQ ID NO: 102813 - protein, 10 aa, synthetic construct
ETSRGDFVQR

SEQ ID NO: 102814 - protein, 10 aa, synthetic construct
ETTRGDFVQR

SEQ ID NO: 102815 - protein, 10 aa, synthetic construct
ETYRGDFVQR

SEQ ID NO: 102816 - protein, 10 aa, synthetic construct
ETNRGDFVQR

SEQ ID NO: 102817 - protein, 10 aa, synthetic construct
ETQRGDFVQR

SEQ ID NO: 102818 - protein, 10 aa, synthetic construct
ETDRGDFVQR

SEQ ID NO: 102819 - protein, 10 aa, synthetic construct
ETERGDFVQR

SEQ ID NO: 102820 - protein, 10 aa, synthetic construct
EYGRGDFVQR

SEQ ID NO: 102821 - protein, 10 aa, synthetic construct
EYARGDFVQR

SEQ ID NO: 102822 - protein, 10 aa, synthetic construct
EYVRGDFVQR

SEQ ID NO: 102823 - protein, 10 aa, synthetic construct
EYPRGDFVQR

SEQ ID NO: 102824 - protein, 10 aa, synthetic construct
EYLRGDFVQR

SEQ ID NO: 102825 - protein, 10 aa, synthetic construct
EYIRGDFVQR

SEQ ID NO: 102826 - protein, 10 aa, synthetic construct
EYMRGDFVQR

SEQ ID NO: 102827 - protein, 10 aa, synthetic construct
EYWRGDFVQR

SEQ ID NO: 102828 - protein, 10 aa, synthetic construct
EYFRGDFVQR

SEQ ID NO: 102829 - protein, 10 aa, synthetic construct
EYKRGDFVQR

SEQ ID NO: 102830 - protein, 10 aa, synthetic construct
EYRRGDFVQR

SEQ ID NO: 102831 - protein, 10 aa, synthetic construct
EYHRGDFVQR

SEQ ID NO: 102832 - protein, 10 aa, synthetic construct
EYSRGDFVQR

SEQ ID NO: 102833 - protein, 10 aa, synthetic construct
EYTRGDFVQR

SEQ ID NO: 102834 - protein, 10 aa, synthetic construct
EYYRGDFVQR

SEQ ID NO: 102835 - protein, 10 aa, synthetic construct
EYNRGDFVQR

SEQ ID NO: 102836 - protein, 10 aa, synthetic construct
EYQRGDFVQR

SEQ ID NO: 102837 - protein, 10 aa, synthetic construct
EYDRGDFVQR

SEQ ID NO: 102838 - protein, 10 aa, synthetic construct
EYERGDFVQR

SEQ ID NO: 102839 - protein, 10 aa, synthetic construct
ENGRGDFVQR

SEQ ID NO: 102840 - protein, 10 aa, synthetic construct
ENARGDFVQR

SEQ ID NO: 102841 - protein, 10 aa, synthetic construct
ENVRGDFVQR

SEQ ID NO: 102842 - protein, 10 aa, synthetic construct
ENPRGDFVQR

SEQ ID NO: 102843 - protein, 10 aa, synthetic construct
ENLRGDFVQR

SEQ ID NO: 102844 - protein, 10 aa, synthetic construct
ENIRGDFVQR

SEQ ID NO: 102845 - protein, 10 aa, synthetic construct
ENMRGDFVQR

SEQ ID NO: 102846 - protein, 10 aa, synthetic construct
ENWRGDFVQR

SEQ ID NO: 102847 - protein, 10 aa, synthetic construct
ENFRGDFVQR

SEQ ID NO: 102848 - protein, 10 aa, synthetic construct
ENKRGDFVQR

SEQ ID NO: 102849 - protein, 10 aa, synthetic construct
ENRRGDFVQR

SEQ ID NO: 102850 - protein, 10 aa, synthetic construct
ENHRGDFVQR

SEQ ID NO: 102851 - protein, 10 aa, synthetic construct
ENSRGDFVQR

SEQ ID NO: 102852 - protein, 10 aa, synthetic construct
ENTRGDFVQR

SEQ ID NO: 102853 - protein, 10 aa, synthetic construct
ENYRGDFVQR

SEQ ID NO: 102854 - protein, 10 aa, synthetic construct
ENNRGDFVQR

SEQ ID NO: 102855 - protein, 10 aa, synthetic construct
ENQRGDFVQR

SEQ ID NO: 102856 - protein, 10 aa, synthetic construct
ENDRGDFVQR

SEQ ID NO: 102857 - protein, 10 aa, synthetic construct
ENERGDFVQR

SEQ ID NO: 102858 - protein, 10 aa, synthetic construct
EQGRGDFVQR

SEQ ID NO: 102859 - protein, 10 aa, synthetic construct
EQARGDFVQR

SEQ ID NO: 102860 - protein, 10 aa, synthetic construct
EQVRGDFVQR

SEQ ID NO: 102861 - protein, 10 aa, synthetic construct
EQPRGDFVQR

SEQ ID NO: 102862 - protein, 10 aa, synthetic construct
EQLRGDFVQR

SEQ ID NO: 102863 - protein, 10 aa, synthetic construct
EQIRGDFVQR

SEQ ID NO: 102864 - protein, 10 aa, synthetic construct
EQMRGDFVQR

SEQ ID NO: 102865 - protein, 10 aa, synthetic construct
EQWRGDFVQR

SEQ ID NO: 102866 - protein, 10 aa, synthetic construct
EQFRGDFVQR

SEQ ID NO: 102867 - protein, 10 aa, synthetic construct
EQKRGDFVQR

SEQ ID NO: 102868 - protein, 10 aa, synthetic construct
EQRRGDFVQR

SEQ ID NO: 102869 - protein, 10 aa, synthetic construct
EQHRGDFVQR

SEQ ID NO: 102870 - protein, 10 aa, synthetic construct
EQSRGDFVQR

SEQ ID NO: 102871 - protein, 10 aa, synthetic construct
EQTRGDFVQR

SEQ ID NO: 102872 - protein, 10 aa, synthetic construct
EQYRGDFVQR

SEQ ID NO: 102873 - protein, 10 aa, synthetic construct
EQNRGDFVQR

SEQ ID NO: 102874 - protein, 10 aa, synthetic construct
EQQRGDFVQR

SEQ ID NO: 102875 - protein, 10 aa, synthetic construct
EQDRGDFVQR

SEQ ID NO: 102876 - protein, 10 aa, synthetic construct
EQERGDFVQR

SEQ ID NO: 102877 - protein, 10 aa, synthetic construct
EDGRGDFVQR

SEQ ID NO: 102878 - protein, 10 aa, synthetic construct
EDARGDFVQR

SEQ ID NO: 102879 - protein, 10 aa, synthetic construct
EDVRGDFVQR

SEQ ID NO: 102880 - protein, 10 aa, synthetic construct
EDPRGDFVQR

SEQ ID NO: 102881 - protein, 10 aa, synthetic construct
EDLRGDFVQR

SEQ ID NO: 102882 - protein, 10 aa, synthetic construct
EDIRGDFVQR

SEQ ID NO: 102883 - protein, 10 aa, synthetic construct
EDMRGDFVQR

SEQ ID NO: 102884 - protein, 10 aa, synthetic construct
EDWRGDFVQR

SEQ ID NO: 102885 - protein, 10 aa, synthetic construct
EDFRGDFVQR

SEQ ID NO: 102886 - protein, 10 aa, synthetic construct
EDKRGDFVQR

SEQ ID NO: 102887 - protein, 10 aa, synthetic construct
EDRRGDFVQR

SEQ ID NO: 102888 - protein, 10 aa, synthetic construct
EDHRGDFVQR

SEQ ID NO: 102889 - protein, 10 aa, synthetic construct
EDSRGDFVQR

SEQ ID NO: 102890 - protein, 10 aa, synthetic construct
EDTRGDFVQR

SEQ ID NO: 102891 - protein, 10 aa, synthetic construct
EDYRGDFVQR

SEQ ID NO: 102892 - protein, 10 aa, synthetic construct
EDNRGDFVQR

SEQ ID NO: 102893 - protein, 10 aa, synthetic construct
EDQRGDFVQR

SEQ ID NO: 102894 - protein, 10 aa, synthetic construct
EDDRGDFVQR

SEQ ID NO: 102895 - protein, 10 aa, synthetic construct
EDERGDFVQR

SEQ ID NO: 102896 - protein, 10 aa, synthetic construct
EEGRGDFVQR

SEQ ID NO: 102897 - protein, 10 aa, synthetic construct
EEARGDFVQR

SEQ ID NO: 102898 - protein, 10 aa, synthetic construct
EEVRGDFVQR

SEQ ID NO: 102899 - protein, 10 aa, synthetic construct
EEPRGDFVQR

SEQ ID NO: 102900 - protein, 10 aa, synthetic construct
EELRGDFVQR

SEQ ID NO: 102901 - protein, 10 aa, synthetic construct
EEIRGDFVQR

SEQ ID NO: 102902 - protein, 10 aa, synthetic construct
EEMRGDFVQR

SEQ ID NO: 102903 - protein, 10 aa, synthetic construct
EEWRGDFVQR

SEQ ID NO: 102904 - protein, 10 aa, synthetic construct
EEFRGDFVQR

SEQ ID NO: 102905 - protein, 10 aa, synthetic construct
EEKRGDFVQR

SEQ ID NO: 102906 - protein, 10 aa, synthetic construct
EERRGDFVQR

SEQ ID NO: 102907 - protein, 10 aa, synthetic construct
EEHRGDFVQR

SEQ ID NO: 102908 - protein, 10 aa, synthetic construct
EESRGDFVQR

SEQ ID NO: 102909 - protein, 10 aa, synthetic construct
EETRGDFVQR

SEQ ID NO: 102910 - protein, 10 aa, synthetic construct
EEYRGDFVQR

SEQ ID NO: 102911 - protein, 10 aa, synthetic construct
EENRGDFVQR

SEQ ID NO: 102912 - protein, 10 aa, synthetic construct
EEQRGDFVQR

SEQ ID NO: 102913 - protein, 10 aa, synthetic construct
EEDRGDFVQR

SEQ ID NO: 102914 - protein, 10 aa, synthetic construct
EEERGDFVQR

SEQ ID NO: 102915 - protein, 10 aa, synthetic construct
NGGRGDFVQR

SEQ ID NO: 102916 - protein, 10 aa, synthetic construct
NGARGDFVQR

SEQ ID NO: 102917 - protein, 10 aa, synthetic construct
NGVRGDFVQR

SEQ ID NO: 102918 - protein, 10 aa, synthetic construct
NGPRGDFVQR

SEQ ID NO: 102919 - protein, 10 aa, synthetic construct
NGLRGDFVQR

SEQ ID NO: 102920 - protein, 10 aa, synthetic construct
NGIRGDFVQR

SEQ ID NO: 102921 - protein, 10 aa, synthetic construct
NGMRGDFVQR

SEQ ID NO: 102922 - protein, 10 aa, synthetic construct
NGWRGDFVQR

SEQ ID NO: 102923 - protein, 10 aa, synthetic construct
NGFRGDFVQR

SEQ ID NO: 102924 - protein, 10 aa, synthetic construct
NGKRGDFVQR

SEQ ID NO: 102925 - protein, 10 aa, synthetic construct
NGRRGDFVQR

SEQ ID NO: 102926 - protein, 10 aa, synthetic construct
NGHRGDFVQR

SEQ ID NO: 102927 - protein, 10 aa, synthetic construct
NGSRGDFVQR

SEQ ID NO: 102928 - protein, 10 aa, synthetic construct
NGTRGDFVQR

SEQ ID NO: 102929 - protein, 10 aa, synthetic construct
NGYRGDFVQR

SEQ ID NO: 102930 - protein, 10 aa, synthetic construct
NGNRGDFVQR

SEQ ID NO: 102931 - protein, 10 aa, synthetic construct
NGQRGDFVQR

SEQ ID NO: 102932 - protein, 10 aa, synthetic construct
NGDRGDFVQR

SEQ ID NO: 102933 - protein, 10 aa, synthetic construct
NGERGDFVQR

SEQ ID NO: 102934 - protein, 10 aa, synthetic construct
NAGRGDFVQR

SEQ ID NO: 102935 - protein, 10 aa, synthetic construct
NAARGDFVQR

SEQ ID NO: 102936 - protein, 10 aa, synthetic construct
NAVRGDFVQR

SEQ ID NO: 102937 - protein, 10 aa, synthetic construct
NAPRGDFVQR

SEQ ID NO: 102938 - protein, 10 aa, synthetic construct
NALRGDFVQR

SEQ ID NO: 102939 - protein, 10 aa, synthetic construct
NAIRGDFVQR

SEQ ID NO: 102940 - protein, 10 aa, synthetic construct
NAMRGDFVQR

SEQ ID NO: 102941 - protein, 10 aa, synthetic construct
NAWRGDFVQR

SEQ ID NO: 102942 - protein, 10 aa, synthetic construct
NAFRGDFVQR

SEQ ID NO: 102943 - protein, 10 aa, synthetic construct
NAKRGDFVQR

SEQ ID NO: 102944 - protein, 10 aa, synthetic construct
NARRGDFVQR

SEQ ID NO: 102945 - protein, 10 aa, synthetic construct
NAHRGDFVQR

SEQ ID NO: 102946 - protein, 10 aa, synthetic construct
NASRGDFVQR

SEQ ID NO: 102947 - protein, 10 aa, synthetic construct
NATRGDFVQR

SEQ ID NO: 102948 - protein, 10 aa, synthetic construct
NAYRGDFVQR

SEQ ID NO: 102949 - protein, 10 aa, synthetic construct
NANRGDFVQR

SEQ ID NO: 102950 - protein, 10 aa, synthetic construct
NAQRGDFVQR

SEQ ID NO: 102951 - protein, 10 aa, synthetic construct
NADRGDFVQR

SEQ ID NO: 102952 - protein, 10 aa, synthetic construct
NAERGDFVQR

SEQ ID NO: 102953 - protein, 10 aa, synthetic construct
NVGRGDFVQR

SEQ ID NO: 102954 - protein, 10 aa, synthetic construct
NVARGDFVQR

SEQ ID NO: 102955 - protein, 10 aa, synthetic construct
NVVRGDFVQR

SEQ ID NO: 102956 - protein, 10 aa, synthetic construct
NVPRGDFVQR

SEQ ID NO: 102957 - protein, 10 aa, synthetic construct
NVLRGDFVQR

SEQ ID NO: 102958 - protein, 10 aa, synthetic construct
NVIRGDFVQR

SEQ ID NO: 102959 - protein, 10 aa, synthetic construct
NVMRGDFVQR

SEQ ID NO: 102960 - protein, 10 aa, synthetic construct
NVWRGDFVQR

SEQ ID NO: 102961 - protein, 10 aa, synthetic construct
NVFRGDFVQR

SEQ ID NO: 102962 - protein, 10 aa, synthetic construct
NVKRGDFVQR

SEQ ID NO: 102963 - protein, 10 aa, synthetic construct
NVRRGDFVQR

SEQ ID NO: 102964 - protein, 10 aa, synthetic construct
NVHRGDFVQR

SEQ ID NO: 102965 - protein, 10 aa, synthetic construct
NVSRGDFVQR

SEQ ID NO: 102966 - protein, 10 aa, synthetic construct
NVTRGDFVQR

SEQ ID NO: 102967 - protein, 10 aa, synthetic construct
NVYRGDFVQR

SEQ ID NO: 102968 - protein, 10 aa, synthetic construct
NVNRGDFVQR

SEQ ID NO: 102969 - protein, 10 aa, synthetic construct
NVQRGDFVQR

SEQ ID NO: 102970 - protein, 10 aa, synthetic construct
NVDRGDFVQR

SEQ ID NO: 102971 - protein, 10 aa, synthetic construct
NVERGDFVQR

SEQ ID NO: 102972 - protein, 10 aa, synthetic construct
NPGRGDFVQR

SEQ ID NO: 102973 - protein, 10 aa, synthetic construct
NPARGDFVQR

SEQ ID NO: 102974 - protein, 10 aa, synthetic construct
NPVRGDFVQR

SEQ ID NO: 102975 - protein, 10 aa, synthetic construct
NPPRGDFVQR

SEQ ID NO: 102976 - protein, 10 aa, synthetic construct
NPLRGDFVQR

SEQ ID NO: 102977 - protein, 10 aa, synthetic construct
NPIRGDFVQR

SEQ ID NO: 102978 - protein, 10 aa, synthetic construct
NPMRGDFVQR

SEQ ID NO: 102979 - protein, 10 aa, synthetic construct
NPWRGDFVQR

SEQ ID NO: 102980 - protein, 10 aa, synthetic construct
NPFRGDFVQR

SEQ ID NO: 102981 - protein, 10 aa, synthetic construct
NPKRGDFVQR

SEQ ID NO: 102982 - protein, 10 aa, synthetic construct
NPRRGDFVQR

SEQ ID NO: 102983 - protein, 10 aa, synthetic construct
NPHRGDFVQR

SEQ ID NO: 102984 - protein, 10 aa, synthetic construct
NPSRGDFVQR

SEQ ID NO: 102985 - protein, 10 aa, synthetic construct
NPTRGDFVQR

SEQ ID NO: 102986 - protein, 10 aa, synthetic construct
NPYRGDFVQR

SEQ ID NO: 102987 - protein, 10 aa, synthetic construct
NPNRGDFVQR

SEQ ID NO: 102988 - protein, 10 aa, synthetic construct
NPQRGDFVQR

SEQ ID NO: 102989 - protein, 10 aa, synthetic construct
NPDRGDFVQR

SEQ ID NO: 102990 - protein, 10 aa, synthetic construct
NPERGDFVQR

SEQ ID NO: 102991 - protein, 10 aa, synthetic construct
NLGRGDFVQR

SEQ ID NO: 102992 - protein, 10 aa, synthetic construct
NLARGDFVQR

SEQ ID NO: 102993 - protein, 10 aa, synthetic construct
NLVRGDFVQR

SEQ ID NO: 102994 - protein, 10 aa, synthetic construct
NLPRGDFVQR

SEQ ID NO: 102995 - protein, 10 aa, synthetic construct
NLLRGDFVQR

SEQ ID NO: 102996 - protein, 10 aa, synthetic construct
NLIRGDFVQR

SEQ ID NO: 102997 - protein, 10 aa, synthetic construct
NLMRGDFVQR

SEQ ID NO: 102998 - protein, 10 aa, synthetic construct
NLWRGDFVQR

SEQ ID NO: 102999 - protein, 10 aa, synthetic construct
NLFRGDFVQR

SEQ ID NO: 103000 - protein, 10 aa, synthetic construct
NLKRGDFVQR

SEQ ID NO: 103001 - protein, 10 aa, synthetic construct
NLRRGDFVQR

SEQ ID NO: 103002 - protein, 10 aa, synthetic construct
NLHRGDFVQR

SEQ ID NO: 103003 - protein, 10 aa, synthetic construct
NLSRGDFVQR

SEQ ID NO: 103004 - protein, 10 aa, synthetic construct
NLTRGDFVQR

SEQ ID NO: 103005 - protein, 10 aa, synthetic construct
NLYRGDFVQR

SEQ ID NO: 103006 - protein, 10 aa, synthetic construct
NLNRGDFVQR

SEQ ID NO: 103007 - protein, 10 aa, synthetic construct
NLQRGDFVQR

SEQ ID NO: 103008 - protein, 10 aa, synthetic construct
NLDRGDFVQR

SEQ ID NO: 103009 - protein, 10 aa, synthetic construct
NLERGDFVQR

SEQ ID NO: 103010 - protein, 10 aa, synthetic construct
NIGRGDFVQR

SEQ ID NO: 103011 - protein, 10 aa, synthetic construct
NIARGDFVQR

SEQ ID NO: 103012 - protein, 10 aa, synthetic construct
NIVRGDFVQR

SEQ ID NO: 103013 - protein, 10 aa, synthetic construct
NIPRGDFVQR

SEQ ID NO: 103014 - protein, 10 aa, synthetic construct
NILRGDFVQR

SEQ ID NO: 103015 - protein, 10 aa, synthetic construct
NIIRGDFVQR

SEQ ID NO: 103016 - protein, 10 aa, synthetic construct
NIMRGDFVQR

SEQ ID NO: 103017 - protein, 10 aa, synthetic construct
NIWRGDFVQR

SEQ ID NO: 103018 - protein, 10 aa, synthetic construct
NIFRGDFVQR

SEQ ID NO: 103019 - protein, 10 aa, synthetic construct
NIKRGDFVQR

SEQ ID NO: 103020 - protein, 10 aa, synthetic construct
NIRRGDFVQR

SEQ ID NO: 103021 - protein, 10 aa, synthetic construct
NIHRGDFVQR

SEQ ID NO: 103022 - protein, 10 aa, synthetic construct
NISRGDFVQR

SEQ ID NO: 103023 - protein, 10 aa, synthetic construct
NITRGDFVQR

SEQ ID NO: 103024 - protein, 10 aa, synthetic construct
NIYRGDFVQR

SEQ ID NO: 103025 - protein, 10 aa, synthetic construct
NINRGDFVQR

SEQ ID NO: 103026 - protein, 10 aa, synthetic construct
NIQRGDFVQR

SEQ ID NO: 103027 - protein, 10 aa, synthetic construct
NIDRGDFVQR

SEQ ID NO: 103028 - protein, 10 aa, synthetic construct
NIERGDFVQR

SEQ ID NO: 103029 - protein, 10 aa, synthetic construct
NMGRGDFVQR

SEQ ID NO: 103030 - protein, 10 aa, synthetic construct
NMARGDFVQR

SEQ ID NO: 103031 - protein, 10 aa, synthetic construct
NMVRGDFVQR

SEQ ID NO: 103032 - protein, 10 aa, synthetic construct
NMPRGDFVQR

SEQ ID NO: 103033 - protein, 10 aa, synthetic construct
NMLRGDFVQR

SEQ ID NO: 103034 - protein, 10 aa, synthetic construct
NMIRGDFVQR

SEQ ID NO: 103035 - protein, 10 aa, synthetic construct
NMMRGDFVQR

SEQ ID NO: 103036 - protein, 10 aa, synthetic construct
NMWRGDFVQR

SEQ ID NO: 103037 - protein, 10 aa, synthetic construct
NMFRGDFVQR

SEQ ID NO: 103038 - protein, 10 aa, synthetic construct
NMKRGDFVQR

SEQ ID NO: 103039 - protein, 10 aa, synthetic construct
NMRRGDFVQR

SEQ ID NO: 103040 - protein, 10 aa, synthetic construct
NMHRGDFVQR

SEQ ID NO: 103041 - protein, 10 aa, synthetic construct
NMSRGDFVQR

SEQ ID NO: 103042 - protein, 10 aa, synthetic construct
NMTRGDFVQR

SEQ ID NO: 103043 - protein, 10 aa, synthetic construct
NMYRGDFVQR

SEQ ID NO: 103044 - protein, 10 aa, synthetic construct
NMNRGDFVQR

SEQ ID NO: 103045 - protein, 10 aa, synthetic construct
NMQRGDFVQR

SEQ ID NO: 103046 - protein, 10 aa, synthetic construct
NMDRGDFVQR

SEQ ID NO: 103047 - protein, 10 aa, synthetic construct
NMERGDFVQR

SEQ ID NO: 103048 - protein, 10 aa, synthetic construct
NWGRGDFVQR

SEQ ID NO: 103049 - protein, 10 aa, synthetic construct
NWARGDFVQR

SEQ ID NO: 103050 - protein, 10 aa, synthetic construct
NWVRGDFVQR

SEQ ID NO: 103051 - protein, 10 aa, synthetic construct
NWPRGDFVQR

SEQ ID NO: 103052 - protein, 10 aa, synthetic construct
NWLRGDFVQR

SEQ ID NO: 103053 - protein, 10 aa, synthetic construct
NWIRGDFVQR

SEQ ID NO: 103054 - protein, 10 aa, synthetic construct
NWMRGDFVQR

SEQ ID NO: 103055 - protein, 10 aa, synthetic construct
NWWRGDFVQR

SEQ ID NO: 103056 - protein, 10 aa, synthetic construct
NWFRGDFVQR

SEQ ID NO: 103057 - protein, 10 aa, synthetic construct
NWKRGDFVQR

SEQ ID NO: 103058 - protein, 10 aa, synthetic construct
NWRRGDFVQR

SEQ ID NO: 103059 - protein, 10 aa, synthetic construct
NWHRGDFVQR

SEQ ID NO: 103060 - protein, 10 aa, synthetic construct
NWSRGDFVQR

SEQ ID NO: 103061 - protein, 10 aa, synthetic construct
NWTRGDFVQR

SEQ ID NO: 103062 - protein, 10 aa, synthetic construct
NWYRGDFVQR

SEQ ID NO: 103063 - protein, 10 aa, synthetic construct
NWNRGDFVQR

SEQ ID NO: 103064 - protein, 10 aa, synthetic construct
NWQRGDFVQR

SEQ ID NO: 103065 - protein, 10 aa, synthetic construct
NWDRGDFVQR

SEQ ID NO: 103066 - protein, 10 aa, synthetic construct
NWERGDFVQR

SEQ ID NO: 103067 - protein, 10 aa, synthetic construct
NFGRGDFVQR

SEQ ID NO: 103068 - protein, 10 aa, synthetic construct
NFARGDFVQR

SEQ ID NO: 103069 - protein, 10 aa, synthetic construct
NFVRGDFVQR

SEQ ID NO: 103070 - protein, 10 aa, synthetic construct
NFPRGDFVQR

SEQ ID NO: 103071 - protein, 10 aa, synthetic construct
NFLRGDFVQR

SEQ ID NO: 103072 - protein, 10 aa, synthetic construct
NFIRGDFVQR

SEQ ID NO: 103073 - protein, 10 aa, synthetic construct
NFMRGDFVQR

SEQ ID NO: 103074 - protein, 10 aa, synthetic construct
NFWRGDFVQR

SEQ ID NO: 103075 - protein, 10 aa, synthetic construct
NFFRGDFVQR

SEQ ID NO: 103076 - protein, 10 aa, synthetic construct
NFKRGDFVQR

SEQ ID NO: 103077 - protein, 10 aa, synthetic construct
NFRRGDFVQR

SEQ ID NO: 103078 - protein, 10 aa, synthetic construct
NFHRGDFVQR

SEQ ID NO: 103079 - protein, 10 aa, synthetic construct
NFSRGDFVQR

SEQ ID NO: 103080 - protein, 10 aa, synthetic construct
NFTRGDFVQR

SEQ ID NO: 103081 - protein, 10 aa, synthetic construct
NFYRGDFVQR

SEQ ID NO: 103082 - protein, 10 aa, synthetic construct
NFNRGDFVQR

SEQ ID NO: 103083 - protein, 10 aa, synthetic construct
NFQRGDFVQR

SEQ ID NO: 103084 - protein, 10 aa, synthetic construct
NFDRGDFVQR

SEQ ID NO: 103085 - protein, 10 aa, synthetic construct
NFERGDFVQR

SEQ ID NO: 103086 - protein, 10 aa, synthetic construct
NKGRGDFVQR

SEQ ID NO: 103087 - protein, 10 aa, synthetic construct
NKARGDFVQR

SEQ ID NO: 103088 - protein, 10 aa, synthetic construct
NKVRGDFVQR

SEQ ID NO: 103089 - protein, 10 aa, synthetic construct
NKPRGDFVQR

SEQ ID NO: 103090 - protein, 10 aa, synthetic construct
NKLRGDFVQR

SEQ ID NO: 103091 - protein, 10 aa, synthetic construct
NKIRGDFVQR

SEQ ID NO: 103092 - protein, 10 aa, synthetic construct
NKMRGDFVQR

SEQ ID NO: 103093 - protein, 10 aa, synthetic construct
NKWRGDFVQR

SEQ ID NO: 103094 - protein, 10 aa, synthetic construct
NKFRGDFVQR

SEQ ID NO: 103095 - protein, 10 aa, synthetic construct
NKKRGDFVQR

SEQ ID NO: 103096 - protein, 10 aa, synthetic construct
NKRRGDFVQR

SEQ ID NO: 103097 - protein, 10 aa, synthetic construct
NKHRGDFVQR

SEQ ID NO: 103098 - protein, 10 aa, synthetic construct
NKSRGDFVQR

SEQ ID NO: 103099 - protein, 10 aa, synthetic construct
NKTRGDFVQR

SEQ ID NO: 103100 - protein, 10 aa, synthetic construct
NKYRGDFVQR

SEQ ID NO: 103101 - protein, 10 aa, synthetic construct
NKNRGDFVQR

SEQ ID NO: 103102 - protein, 10 aa, synthetic construct
NKQRGDFVQR

SEQ ID NO: 103103 - protein, 10 aa, synthetic construct
NKDRGDFVQR

SEQ ID NO: 103104 - protein, 10 aa, synthetic construct
NKERGDFVQR

SEQ ID NO: 103105 - protein, 10 aa, synthetic construct
NRGRGDFVQR

SEQ ID NO: 103106 - protein, 10 aa, synthetic construct
NRARGDFVQR

SEQ ID NO: 103107 - protein, 10 aa, synthetic construct
NRVRGDFVQR

SEQ ID NO: 103108 - protein, 10 aa, synthetic construct
NRPRGDFVQR

SEQ ID NO: 103109 - protein, 10 aa, synthetic construct
NRLRGDFVQR

SEQ ID NO: 103110 - protein, 10 aa, synthetic construct
NRIRGDFVQR

SEQ ID NO: 103111 - protein, 10 aa, synthetic construct
NRMRGDFVQR

SEQ ID NO: 103112 - protein, 10 aa, synthetic construct
NRWRGDFVQR

SEQ ID NO: 103113 - protein, 10 aa, synthetic construct
NRFRGDFVQR

SEQ ID NO: 103114 - protein, 10 aa, synthetic construct
NRKRGDFVQR

SEQ ID NO: 103115 - protein, 10 aa, synthetic construct
NRRRGDFVQR

SEQ ID NO: 103116 - protein, 10 aa, synthetic construct
NRHRGDFVQR

SEQ ID NO: 103117 - protein, 10 aa, synthetic construct
NRSRGDFVQR

SEQ ID NO: 103118 - protein, 10 aa, synthetic construct
NRTRGDFVQR

SEQ ID NO: 103119 - protein, 10 aa, synthetic construct
NRYRGDFVQR

SEQ ID NO: 103120 - protein, 10 aa, synthetic construct
NRNRGDFVQR

SEQ ID NO: 103121 - protein, 10 aa, synthetic construct
NRQRGDFVQR

SEQ ID NO: 103122 - protein, 10 aa, synthetic construct
NRDRGDFVQR

SEQ ID NO: 103123 - protein, 10 aa, synthetic construct
NRERGDFVQR

SEQ ID NO: 103124 - protein, 10 aa, synthetic construct
NHGRGDFVQR

SEQ ID NO: 103125 - protein, 10 aa, synthetic construct
NHARGDFVQR

SEQ ID NO: 103126 - protein, 10 aa, synthetic construct
NHVRGDFVQR

SEQ ID NO: 103127 - protein, 10 aa, synthetic construct
NHPRGDFVQR

SEQ ID NO: 103128 - protein, 10 aa, synthetic construct
NHLRGDFVQR

SEQ ID NO: 103129 - protein, 10 aa, synthetic construct
NHIRGDFVQR

SEQ ID NO: 103130 - protein, 10 aa, synthetic construct
NHMRGDFVQR

SEQ ID NO: 103131 - protein, 10 aa, synthetic construct
NHWRGDFVQR

SEQ ID NO: 103132 - protein, 10 aa, synthetic construct
NHFRGDFVQR

SEQ ID NO: 103133 - protein, 10 aa, synthetic construct
NHKRGDFVQR

SEQ ID NO: 103134 - protein, 10 aa, synthetic construct
NHRRGDFVQR

SEQ ID NO: 103135 - protein, 10 aa, synthetic construct
NHHRGDFVQR

SEQ ID NO: 103136 - protein, 10 aa, synthetic construct
NHSRGDFVQR

SEQ ID NO: 103137 - protein, 10 aa, synthetic construct
NHTRGDFVQR

SEQ ID NO: 103138 - protein, 10 aa, synthetic construct
NHYRGDFVQR

SEQ ID NO: 103139 - protein, 10 aa, synthetic construct
NHNRGDFVQR

SEQ ID NO: 103140 - protein, 10 aa, synthetic construct
NHQRGDFVQR

SEQ ID NO: 103141 - protein, 10 aa, synthetic construct
NHDRGDFVQR

SEQ ID NO: 103142 - protein, 10 aa, synthetic construct
NHERGDFVQR

SEQ ID NO: 103143 - protein, 10 aa, synthetic construct
NSGRGDFVQR

SEQ ID NO: 103144 - protein, 10 aa, synthetic construct
NSARGDFVQR

SEQ ID NO: 103145 - protein, 10 aa, synthetic construct
NSVRGDFVQR

SEQ ID NO: 103146 - protein, 10 aa, synthetic construct
NSPRGDFVQR

SEQ ID NO: 103147 - protein, 10 aa, synthetic construct
NSLRGDFVQR

SEQ ID NO: 103148 - protein, 10 aa, synthetic construct
NSIRGDFVQR

SEQ ID NO: 103149 - protein, 10 aa, synthetic construct
NSMRGDFVQR

SEQ ID NO: 103150 - protein, 10 aa, synthetic construct
NSWRGDFVQR

SEQ ID NO: 103151 - protein, 10 aa, synthetic construct
NSFRGDFVQR

SEQ ID NO: 103152 - protein, 10 aa, synthetic construct
NSKRGDFVQR

SEQ ID NO: 103153 - protein, 10 aa, synthetic construct
NSRRGDFVQR

SEQ ID NO: 103154 - protein, 10 aa, synthetic construct
NSHRGDFVQR

SEQ ID NO: 103155 - protein, 10 aa, synthetic construct
NSSRGDFVQR

SEQ ID NO: 103156 - protein, 10 aa, synthetic construct
NSTRGDFVQR

SEQ ID NO: 103157 - protein, 10 aa, synthetic construct
NSYRGDFVQR

SEQ ID NO: 103158 - protein, 10 aa, synthetic construct
NSNRGDFVQR

SEQ ID NO: 103159 - protein, 10 aa, synthetic construct
NSQRGDFVQR

SEQ ID NO: 103160 - protein, 10 aa, synthetic construct
NSDRGDFVQR

SEQ ID NO: 103161 - protein, 10 aa, synthetic construct
NSERGDFVQR

SEQ ID NO: 103162 - protein, 10 aa, synthetic construct
NTGRGDFVQR

SEQ ID NO: 103163 - protein, 10 aa, synthetic construct
NTARGDFVQR

SEQ ID NO: 103164 - protein, 10 aa, synthetic construct
NTVRGDFVQR

SEQ ID NO: 103165 - protein, 10 aa, synthetic construct
NTPRGDFVQR

SEQ ID NO: 103166 - protein, 10 aa, synthetic construct
NTLRGDFVQR

SEQ ID NO: 103167 - protein, 10 aa, synthetic construct
NTIRGDFVQR

SEQ ID NO: 103168 - protein, 10 aa, synthetic construct
NTMRGDFVQR

SEQ ID NO: 103169 - protein, 10 aa, synthetic construct
NTWRGDFVQR

SEQ ID NO: 103170 - protein, 10 aa, synthetic construct
NTFRGDFVQR

SEQ ID NO: 103171 - protein, 10 aa, synthetic construct
NTKRGDFVQR

SEQ ID NO: 103172 - protein, 10 aa, synthetic construct
NTRRGDFVQR

SEQ ID NO: 103173 - protein, 10 aa, synthetic construct
NTHRGDFVQR

SEQ ID NO: 103174 - protein, 10 aa, synthetic construct
NTSRGDFVQR

SEQ ID NO: 103175 - protein, 10 aa, synthetic construct
NTTRGDFVQR

SEQ ID NO: 103176 - protein, 10 aa, synthetic construct
NTYRGDFVQR

SEQ ID NO: 103177 - protein, 10 aa, synthetic construct
NTNRGDFVQR

SEQ ID NO: 103178 - protein, 10 aa, synthetic construct
NTQRGDFVQR

SEQ ID NO: 103179 - protein, 10 aa, synthetic construct
NTDRGDFVQR

SEQ ID NO: 103180 - protein, 10 aa, synthetic construct
NTERGDFVQR

SEQ ID NO: 103181 - protein, 10 aa, synthetic construct
NYGRGDFVQR

SEQ ID NO: 103182 - protein, 10 aa, synthetic construct
NYARGDFVQR

SEQ ID NO: 103183 - protein, 10 aa, synthetic construct
NYVRGDFVQR

SEQ ID NO: 103184 - protein, 10 aa, synthetic construct
NYPRGDFVQR

SEQ ID NO: 103185 - protein, 10 aa, synthetic construct
NYLRGDFVQR

SEQ ID NO: 103186 - protein, 10 aa, synthetic construct
NYIRGDFVQR

SEQ ID NO: 103187 - protein, 10 aa, synthetic construct
NYMRGDFVQR

SEQ ID NO: 103188 - protein, 10 aa, synthetic construct
NYWRGDFVQR

SEQ ID NO: 103189 - protein, 10 aa, synthetic construct
NYFRGDFVQR

SEQ ID NO: 103190 - protein, 10 aa, synthetic construct
NYKRGDFVQR

SEQ ID NO: 103191 - protein, 10 aa, synthetic construct
NYRRGDFVQR

SEQ ID NO: 103192 - protein, 10 aa, synthetic construct
NYHRGDFVQR

SEQ ID NO: 103193 - protein, 10 aa, synthetic construct
NYSRGDFVQR

SEQ ID NO: 103194 - protein, 10 aa, synthetic construct
NYTRGDFVQR

SEQ ID NO: 103195 - protein, 10 aa, synthetic construct
NYYRGDFVQR

SEQ ID NO: 103196 - protein, 10 aa, synthetic construct
NYNRGDFVQR

SEQ ID NO: 103197 - protein, 10 aa, synthetic construct
NYQRGDFVQR

SEQ ID NO: 103198 - protein, 10 aa, synthetic construct
NYDRGDFVQR

SEQ ID NO: 103199 - protein, 10 aa, synthetic construct
NYERGDFVQR

SEQ ID NO: 103200 - protein, 10 aa, synthetic construct
NNGRGDFVQR

SEQ ID NO: 103201 - protein, 10 aa, synthetic construct
NNARGDFVQR

SEQ ID NO: 103202 - protein, 10 aa, synthetic construct
NNVRGDFVQR

SEQ ID NO: 103203 - protein, 10 aa, synthetic construct
NNPRGDFVQR

SEQ ID NO: 103204 - protein, 10 aa, synthetic construct
NNLRGDFVQR

SEQ ID NO: 103205 - protein, 10 aa, synthetic construct
NNIRGDFVQR

SEQ ID NO: 103206 - protein, 10 aa, synthetic construct
NNMRGDFVQR

SEQ ID NO: 103207 - protein, 10 aa, synthetic construct
NNWRGDFVQR

SEQ ID NO: 103208 - protein, 10 aa, synthetic construct
NNFRGDFVQR

SEQ ID NO: 103209 - protein, 10 aa, synthetic construct
NNKRGDFVQR

SEQ ID NO: 103210 - protein, 10 aa, synthetic construct
NNRRGDFVQR

SEQ ID NO: 103211 - protein, 10 aa, synthetic construct
NNHRGDFVQR

SEQ ID NO: 103212 - protein, 10 aa, synthetic construct
NNSRGDFVQR

SEQ ID NO: 103213 - protein, 10 aa, synthetic construct
NNTRGDFVQR

SEQ ID NO: 103214 - protein, 10 aa, synthetic construct
NNYRGDFVQR

SEQ ID NO: 103215 - protein, 10 aa, synthetic construct
NNNRGDFVQR

SEQ ID NO: 103216 - protein, 10 aa, synthetic construct
NNQRGDFVQR

SEQ ID NO: 103217 - protein, 10 aa, synthetic construct
NNDRGDFVQR

SEQ ID NO: 103218 - protein, 10 aa, synthetic construct
NNERGDFVQR

SEQ ID NO: 103219 - protein, 10 aa, synthetic construct
NQGRGDFVQR

SEQ ID NO: 103220 - protein, 10 aa, synthetic construct
NQARGDFVQR

SEQ ID NO: 103221 - protein, 10 aa, synthetic construct
NQVRGDFVQR

SEQ ID NO: 103222 - protein, 10 aa, synthetic construct
NQPRGDFVQR

SEQ ID NO: 103223 - protein, 10 aa, synthetic construct
NQLRGDFVQR

SEQ ID NO: 103224 - protein, 10 aa, synthetic construct
NQIRGDFVQR

SEQ ID NO: 103225 - protein, 10 aa, synthetic construct
NQMRGDFVQR

SEQ ID NO: 103226 - protein, 10 aa, synthetic construct
NQWRGDFVQR

SEQ ID NO: 103227 - protein, 10 aa, synthetic construct
NQFRGDFVQR

SEQ ID NO: 103228 - protein, 10 aa, synthetic construct
NQKRGDFVQR

SEQ ID NO: 103229 - protein, 10 aa, synthetic construct
NQRRGDFVQR

SEQ ID NO: 103230 - protein, 10 aa, synthetic construct
NQHRGDFVQR

SEQ ID NO: 103231 - protein, 10 aa, synthetic construct
NQSRGDFVQR

SEQ ID NO: 103232 - protein, 10 aa, synthetic construct
NQTRGDFVQR

SEQ ID NO: 103233 - protein, 10 aa, synthetic construct
NQYRGDFVQR

SEQ ID NO: 103234 - protein, 10 aa, synthetic construct
NQNRGDFVQR

SEQ ID NO: 103235 - protein, 10 aa, synthetic construct
NQQRGDFVQR

SEQ ID NO: 103236 - protein, 10 aa, synthetic construct
NQDRGDFVQR

SEQ ID NO: 103237 - protein, 10 aa, synthetic construct
NQERGDFVQR

SEQ ID NO: 103238 - protein, 10 aa, synthetic construct
NDGRGDFVQR

SEQ ID NO: 103239 - protein, 10 aa, synthetic construct
NDARGDFVQR

SEQ ID NO: 103240 - protein, 10 aa, synthetic construct
NDVRGDFVQR

SEQ ID NO: 103241 - protein, 10 aa, synthetic construct
NDPRGDFVQR

SEQ ID NO: 103242 - protein, 10 aa, synthetic construct
NDLRGDFVQR

SEQ ID NO: 103243 - protein, 10 aa, synthetic construct
NDIRGDFVQR

SEQ ID NO: 103244 - protein, 10 aa, synthetic construct
NDMRGDFVQR

SEQ ID NO: 103245 - protein, 10 aa, synthetic construct
NDWRGDFVQR

SEQ ID NO: 103246 - protein, 10 aa, synthetic construct
NDFRGDFVQR

SEQ ID NO: 103247 - protein, 10 aa, synthetic construct
NDKRGDFVQR

SEQ ID NO: 103248 - protein, 10 aa, synthetic construct
NDRRGDFVQR

SEQ ID NO: 103249 - protein, 10 aa, synthetic construct
NDHRGDFVQR

SEQ ID NO: 103250 - protein, 10 aa, synthetic construct
NDSRGDFVQR

SEQ ID NO: 103251 - protein, 10 aa, synthetic construct
NDTRGDFVQR

SEQ ID NO: 103252 - protein, 10 aa, synthetic construct
NDYRGDFVQR

SEQ ID NO: 103253 - protein, 10 aa, synthetic construct
NDNRGDFVQR

SEQ ID NO: 103254 - protein, 10 aa, synthetic construct
NDQRGDFVQR

SEQ ID NO: 103255 - protein, 10 aa, synthetic construct
NDDRGDFVQR

SEQ ID NO: 103256 - protein, 10 aa, synthetic construct
NDERGDFVQR

SEQ ID NO: 103257 - protein, 10 aa, synthetic construct
NEGRGDFVQR

SEQ ID NO: 103258 - protein, 10 aa, synthetic construct
NEARGDFVQR

SEQ ID NO: 103259 - protein, 10 aa, synthetic construct
NEVRGDFVQR

SEQ ID NO: 103260 - protein, 10 aa, synthetic construct
NEPRGDFVQR

SEQ ID NO: 103261 - protein, 10 aa, synthetic construct
NELRGDFVQR

SEQ ID NO: 103262 - protein, 10 aa, synthetic construct
NEIRGDFVQR

SEQ ID NO: 103263 - protein, 10 aa, synthetic construct
NEMRGDFVQR

SEQ ID NO: 103264 - protein, 10 aa, synthetic construct
NEWRGDFVQR

SEQ ID NO: 103265 - protein, 10 aa, synthetic construct
NEFRGDFVQR

SEQ ID NO: 103266 - protein, 10 aa, synthetic construct
NEKRGDFVQR

SEQ ID NO: 103267 - protein, 10 aa, synthetic construct
NERRGDFVQR

SEQ ID NO: 103268 - protein, 10 aa, synthetic construct
NEHRGDFVQR

SEQ ID NO: 103269 - protein, 10 aa, synthetic construct
NESRGDFVQR

SEQ ID NO: 103270 - protein, 10 aa, synthetic construct
NETRGDFVQR

SEQ ID NO: 103271 - protein, 10 aa, synthetic construct
NEYRGDFVQR

SEQ ID NO: 103272 - protein, 10 aa, synthetic construct
NENRGDFVQR

SEQ ID NO: 103273 - protein, 10 aa, synthetic construct
NEQRGDFVQR

SEQ ID NO: 103274 - protein, 10 aa, synthetic construct
NEDRGDFVQR

SEQ ID NO: 103275 - protein, 10 aa, synthetic construct
NEERGDFVQR

SEQ ID NO: 103276 - protein, 10 aa, synthetic construct
DGGRGDFVQR

SEQ ID NO: 103277 - protein, 10 aa, synthetic construct
DGARGDFVQR

SEQ ID NO: 103278 - protein, 10 aa, synthetic construct
DGVRGDFVQR

SEQ ID NO: 103279 - protein, 10 aa, synthetic construct
DGPRGDFVQR

SEQ ID NO: 103280 - protein, 10 aa, synthetic construct
DGLRGDFVQR

SEQ ID NO: 103281 - protein, 10 aa, synthetic construct
DGIRGDFVQR

SEQ ID NO: 103282 - protein, 10 aa, synthetic construct
DGMRGDFVQR

SEQ ID NO: 103283 - protein, 10 aa, synthetic construct
DGWRGDFVQR

SEQ ID NO: 103284 - protein, 10 aa, synthetic construct
DGFRGDFVQR

SEQ ID NO: 103285 - protein, 10 aa, synthetic construct
DGKRGDFVQR

SEQ ID NO: 103286 - protein, 10 aa, synthetic construct
DGRRGDFVQR

SEQ ID NO: 103287 - protein, 10 aa, synthetic construct
DGHRGDFVQR

SEQ ID NO: 103288 - protein, 10 aa, synthetic construct
DGSRGDFVQR

SEQ ID NO: 103289 - protein, 10 aa, synthetic construct
DGTRGDFVQR

SEQ ID NO: 103290 - protein, 10 aa, synthetic construct
DGYRGDFVQR

SEQ ID NO: 103291 - protein, 10 aa, synthetic construct
DGNRGDFVQR

SEQ ID NO: 103292 - protein, 10 aa, synthetic construct
DGQRGDFVQR

SEQ ID NO: 103293 - protein, 10 aa, synthetic construct
DGDRGDFVQR

SEQ ID NO: 103294 - protein, 10 aa, synthetic construct
DGERGDFVQR

SEQ ID NO: 103295 - protein, 10 aa, synthetic construct
DAGRGDFVQR

SEQ ID NO: 103296 - protein, 10 aa, synthetic construct
DAARGDFVQR

SEQ ID NO: 103297 - protein, 10 aa, synthetic construct
DAVRGDFVQR

SEQ ID NO: 103298 - protein, 10 aa, synthetic construct
DAPRGDFVQR

SEQ ID NO: 103299 - protein, 10 aa, synthetic construct
DALRGDFVQR

SEQ ID NO: 103300 - protein, 10 aa, synthetic construct
DAIRGDFVQR

SEQ ID NO: 103301 - protein, 10 aa, synthetic construct
DAMRGDFVQR

SEQ ID NO: 103302 - protein, 10 aa, synthetic construct
DAWRGDFVQR

SEQ ID NO: 103303 - protein, 10 aa, synthetic construct
DAFRGDFVQR

SEQ ID NO: 103304 - protein, 10 aa, synthetic construct
DAKRGDFVQR

SEQ ID NO: 103305 - protein, 10 aa, synthetic construct
DARRGDFVQR

SEQ ID NO: 103306 - protein, 10 aa, synthetic construct
DAHRGDFVQR

SEQ ID NO: 103307 - protein, 10 aa, synthetic construct
DASRGDFVQR

SEQ ID NO: 103308 - protein, 10 aa, synthetic construct
DATRGDFVQR

SEQ ID NO: 103309 - protein, 10 aa, synthetic construct
DAYRGDFVQR

SEQ ID NO: 103310 - protein, 10 aa, synthetic construct
DANRGDFVQR

SEQ ID NO: 103311 - protein, 10 aa, synthetic construct
DAQRGDFVQR

SEQ ID NO: 103312 - protein, 10 aa, synthetic construct
DADRGDFVQR

SEQ ID NO: 103313 - protein, 10 aa, synthetic construct
DAERGDFVQR

SEQ ID NO: 103314 - protein, 10 aa, synthetic construct
DVGRGDFVQR

SEQ ID NO: 103315 - protein, 10 aa, synthetic construct
DVARGDFVQR

SEQ ID NO: 103316 - protein, 10 aa, synthetic construct
DVVRGDFVQR

SEQ ID NO: 103317 - protein, 10 aa, synthetic construct
DVPRGDFVQR

SEQ ID NO: 103318 - protein, 10 aa, synthetic construct
DVLRGDFVQR

SEQ ID NO: 103319 - protein, 10 aa, synthetic construct
DVIRGDFVQR

SEQ ID NO: 103320 - protein, 10 aa, synthetic construct
DVMRGDFVQR

SEQ ID NO: 103321 - protein, 10 aa, synthetic construct
DVWRGDFVQR

SEQ ID NO: 103322 - protein, 10 aa, synthetic construct
DVFRGDFVQR

SEQ ID NO: 103323 - protein, 10 aa, synthetic construct
DVKRGDFVQR

SEQ ID NO: 103324 - protein, 10 aa, synthetic construct
DVRRGDFVQR

SEQ ID NO: 103325 - protein, 10 aa, synthetic construct
DVHRGDFVQR

SEQ ID NO: 103326 - protein, 10 aa, synthetic construct
DVSRGDFVQR

SEQ ID NO: 103327 - protein, 10 aa, synthetic construct
DVTRGDFVQR

SEQ ID NO: 103328 - protein, 10 aa, synthetic construct
DVYRGDFVQR

SEQ ID NO: 103329 - protein, 10 aa, synthetic construct
DVNRGDFVQR

SEQ ID NO: 103330 - protein, 10 aa, synthetic construct
DVQRGDFVQR

SEQ ID NO: 103331 - protein, 10 aa, synthetic construct
DVDRGDFVQR

SEQ ID NO: 103332 - protein, 10 aa, synthetic construct
DVERGDFVQR

SEQ ID NO: 103333 - protein, 10 aa, synthetic construct
DPGRGDFVQR

SEQ ID NO: 103334 - protein, 10 aa, synthetic construct
DPARGDFVQR

SEQ ID NO: 103335 - protein, 10 aa, synthetic construct
DPVRGDFVQR

SEQ ID NO: 103336 - protein, 10 aa, synthetic construct
DPPRGDFVQR

SEQ ID NO: 103337 - protein, 10 aa, synthetic construct
DPLRGDFVQR

SEQ ID NO: 103338 - protein, 10 aa, synthetic construct
DPIRGDFVQR

SEQ ID NO: 103339 - protein, 10 aa, synthetic construct
DPMRGDFVQR

SEQ ID NO: 103340 - protein, 10 aa, synthetic construct
DPWRGDFVQR

SEQ ID NO: 103341 - protein, 10 aa, synthetic construct
DPFRGDFVQR

SEQ ID NO: 103342 - protein, 10 aa, synthetic construct
DPKRGDFVQR

SEQ ID NO: 103343 - protein, 10 aa, synthetic construct
DPRRGDFVQR

SEQ ID NO: 103344 - protein, 10 aa, synthetic construct
DPHRGDFVQR

SEQ ID NO: 103345 - protein, 10 aa, synthetic construct
DPSRGDFVQR

SEQ ID NO: 103346 - protein, 10 aa, synthetic construct
DPTRGDFVQR

SEQ ID NO: 103347 - protein, 10 aa, synthetic construct
DPYRGDFVQR

SEQ ID NO: 103348 - protein, 10 aa, synthetic construct
DPNRGDFVQR

SEQ ID NO: 103349 - protein, 10 aa, synthetic construct
DPQRGDFVQR

SEQ ID NO: 103350 - protein, 10 aa, synthetic construct
DPDRGDFVQR

SEQ ID NO: 103351 - protein, 10 aa, synthetic construct
DPERGDFVQR

SEQ ID NO: 103352 - protein, 10 aa, synthetic construct
DLGRGDFVQR

SEQ ID NO: 103353 - protein, 10 aa, synthetic construct
DLARGDFVQR

SEQ ID NO: 103354 - protein, 10 aa, synthetic construct
DLVRGDFVQR

SEQ ID NO: 103355 - protein, 10 aa, synthetic construct
DLPRGDFVQR

SEQ ID NO: 103356 - protein, 10 aa, synthetic construct
DLLRGDFVQR

SEQ ID NO: 103357 - protein, 10 aa, synthetic construct
DLIRGDFVQR

SEQ ID NO: 103358 - protein, 10 aa, synthetic construct
DLMRGDFVQR

SEQ ID NO: 103359 - protein, 10 aa, synthetic construct
DLWRGDFVQR

SEQ ID NO: 103360 - protein, 10 aa, synthetic construct
DLFRGDFVQR

SEQ ID NO: 103361 - protein, 10 aa, synthetic construct
DLKRGDFVQR

SEQ ID NO: 103362 - protein, 10 aa, synthetic construct
DLRRGDFVQR

SEQ ID NO: 103363 - protein, 10 aa, synthetic construct
DLHRGDFVQR

SEQ ID NO: 103364 - protein, 10 aa, synthetic construct
DLSRGDFVQR

SEQ ID NO: 103365 - protein, 10 aa, synthetic construct
DLTRGDFVQR

SEQ ID NO: 103366 - protein, 10 aa, synthetic construct
DLYRGDFVQR

SEQ ID NO: 103367 - protein, 10 aa, synthetic construct
DLNRGDFVQR

SEQ ID NO: 103368 - protein, 10 aa, synthetic construct
DLQRGDFVQR

SEQ ID NO: 103369 - protein, 10 aa, synthetic construct
DLDRGDFVQR

SEQ ID NO: 103370 - protein, 10 aa, synthetic construct
DLERGDFVQR

SEQ ID NO: 103371 - protein, 10 aa, synthetic construct
DIGRGDFVQR

SEQ ID NO: 103372 - protein, 10 aa, synthetic construct
DIARGDFVQR

SEQ ID NO: 103373 - protein, 10 aa, synthetic construct
DIVRGDFVQR

SEQ ID NO: 103374 - protein, 10 aa, synthetic construct
DIPRGDFVQR

SEQ ID NO: 103375 - protein, 10 aa, synthetic construct
DILRGDFVQR

SEQ ID NO: 103376 - protein, 10 aa, synthetic construct
DIIRGDFVQR

SEQ ID NO: 103377 - protein, 10 aa, synthetic construct
DIMRGDFVQR

SEQ ID NO: 103378 - protein, 10 aa, synthetic construct
DIWRGDFVQR

SEQ ID NO: 103379 - protein, 10 aa, synthetic construct
DIFRGDFVQR

SEQ ID NO: 103380 - protein, 10 aa, synthetic construct
DIKRGDFVQR

SEQ ID NO: 103381 - protein, 10 aa, synthetic construct
DIRRGDFVQR

SEQ ID NO: 103382 - protein, 10 aa, synthetic construct
DIHRGDFVQR

SEQ ID NO: 103383 - protein, 10 aa, synthetic construct
DISRGDFVQR

SEQ ID NO: 103384 - protein, 10 aa, synthetic construct
DITRGDFVQR

SEQ ID NO: 103385 - protein, 10 aa, synthetic construct
DIYRGDFVQR

SEQ ID NO: 103386 - protein, 10 aa, synthetic construct
DINRGDFVQR

SEQ ID NO: 103387 - protein, 10 aa, synthetic construct
DIQRGDFVQR

SEQ ID NO: 103388 - protein, 10 aa, synthetic construct
DIDRGDFVQR

SEQ ID NO: 103389 - protein, 10 aa, synthetic construct
DIERGDFVQR

SEQ ID NO: 103390 - protein, 10 aa, synthetic construct
DMGRGDFVQR

SEQ ID NO: 103391 - protein, 10 aa, synthetic construct
DMARGDFVQR

SEQ ID NO: 103392 - protein, 10 aa, synthetic construct
DMVRGDFVQR

SEQ ID NO: 103393 - protein, 10 aa, synthetic construct
DMPRGDFVQR

SEQ ID NO: 103394 - protein, 10 aa, synthetic construct
DMLRGDFVQR

SEQ ID NO: 103395 - protein, 10 aa, synthetic construct
DMIRGDFVQR

SEQ ID NO: 103396 - protein, 10 aa, synthetic construct
DMMRGDFVQR

SEQ ID NO: 103397 - protein, 10 aa, synthetic construct
DMWRGDFVQR

SEQ ID NO: 103398 - protein, 10 aa, synthetic construct
DMFRGDFVQR

SEQ ID NO: 103399 - protein, 10 aa, synthetic construct
DMKRGDFVQR

SEQ ID NO: 103400 - protein, 10 aa, synthetic construct
DMRRGDFVQR

SEQ ID NO: 103401 - protein, 10 aa, synthetic construct
DMHRGDFVQR

SEQ ID NO: 103402 - protein, 10 aa, synthetic construct
DMSRGDFVQR

SEQ ID NO: 103403 - protein, 10 aa, synthetic construct
DMTRGDFVQR

SEQ ID NO: 103404 - protein, 10 aa, synthetic construct
DMYRGDFVQR

SEQ ID NO: 103405 - protein, 10 aa, synthetic construct
DMNRGDFVQR

SEQ ID NO: 103406 - protein, 10 aa, synthetic construct
DMQRGDFVQR

SEQ ID NO: 103407 - protein, 10 aa, synthetic construct
DMDRGDFVQR

SEQ ID NO: 103408 - protein, 10 aa, synthetic construct
DMERGDFVQR

SEQ ID NO: 103409 - protein, 10 aa, synthetic construct
DWGRGDFVQR

SEQ ID NO: 103410 - protein, 10 aa, synthetic construct
DWARGDFVQR

SEQ ID NO: 103411 - protein, 10 aa, synthetic construct
DWVRGDFVQR

SEQ ID NO: 103412 - protein, 10 aa, synthetic construct
DWPRGDFVQR

SEQ ID NO: 103413 - protein, 10 aa, synthetic construct
DWLRGDFVQR

SEQ ID NO: 103414 - protein, 10 aa, synthetic construct
DWIRGDFVQR

SEQ ID NO: 103415 - protein, 10 aa, synthetic construct
DWMRGDFVQR

SEQ ID NO: 103416 - protein, 10 aa, synthetic construct
DWWRGDFVQR

SEQ ID NO: 103417 - protein, 10 aa, synthetic construct
DWFRGDFVQR

SEQ ID NO: 103418 - protein, 10 aa, synthetic construct
DWKRGDFVQR

SEQ ID NO: 103419 - protein, 10 aa, synthetic construct
DWRRGDFVQR

SEQ ID NO: 103420 - protein, 10 aa, synthetic construct
DWHRGDFVQR

SEQ ID NO: 103421 - protein, 10 aa, synthetic construct
DWSRGDFVQR

SEQ ID NO: 103422 - protein, 10 aa, synthetic construct
DWTRGDFVQR

SEQ ID NO: 103423 - protein, 10 aa, synthetic construct
DWYRGDFVQR

SEQ ID NO: 103424 - protein, 10 aa, synthetic construct
DWNRGDFVQR

SEQ ID NO: 103425 - protein, 10 aa, synthetic construct
DWQRGDFVQR

SEQ ID NO: 103426 - protein, 10 aa, synthetic construct
DWDRGDFVQR

SEQ ID NO: 103427 - protein, 10 aa, synthetic construct
DWERGDFVQR

SEQ ID NO: 103428 - protein, 10 aa, synthetic construct
DFGRGDFVQR

SEQ ID NO: 103429 - protein, 10 aa, synthetic construct
DFARGDFVQR

SEQ ID NO: 103430 - protein, 10 aa, synthetic construct
DFVRGDFVQR

SEQ ID NO: 103431 - protein, 10 aa, synthetic construct
DFPRGDFVQR

SEQ ID NO: 103432 - protein, 10 aa, synthetic construct
DFLRGDFVQR

SEQ ID NO: 103433 - protein, 10 aa, synthetic construct
DFIRGDFVQR

SEQ ID NO: 103434 - protein, 10 aa, synthetic construct
DFMRGDFVQR

SEQ ID NO: 103435 - protein, 10 aa, synthetic construct
DFWRGDFVQR

SEQ ID NO: 103436 - protein, 10 aa, synthetic construct
DFFRGDFVQR

SEQ ID NO: 103437 - protein, 10 aa, synthetic construct
DFKRGDFVQR

SEQ ID NO: 103438 - protein, 10 aa, synthetic construct
DFRRGDFVQR

SEQ ID NO: 103439 - protein, 10 aa, synthetic construct
DFHRGDFVQR

SEQ ID NO: 103440 - protein, 10 aa, synthetic construct
DFSRGDFVQR

SEQ ID NO: 103441 - protein, 10 aa, synthetic construct
DFTRGDFVQR

SEQ ID NO: 103442 - protein, 10 aa, synthetic construct
DFYRGDFVQR

SEQ ID NO: 103443 - protein, 10 aa, synthetic construct
DFNRGDFVQR

SEQ ID NO: 103444 - protein, 10 aa, synthetic construct
DFQRGDFVQR

SEQ ID NO: 103445 - protein, 10 aa, synthetic construct
DFDRGDFVQR

SEQ ID NO: 103446 - protein, 10 aa, synthetic construct
DFERGDFVQR

SEQ ID NO: 103447 - protein, 10 aa, synthetic construct
DKGRGDFVQR

SEQ ID NO: 103448 - protein, 10 aa, synthetic construct
DKARGDFVQR

SEQ ID NO: 103449 - protein, 10 aa, synthetic construct
DKVRGDFVQR

SEQ ID NO: 103450 - protein, 10 aa, synthetic construct
DKPRGDFVQR

SEQ ID NO: 103451 - protein, 10 aa, synthetic construct
DKLRGDFVQR

SEQ ID NO: 103452 - protein, 10 aa, synthetic construct
DKIRGDFVQR

SEQ ID NO: 103453 - protein, 10 aa, synthetic construct
DKMRGDFVQR

SEQ ID NO: 103454 - protein, 10 aa, synthetic construct
DKWRGDFVQR

SEQ ID NO: 103455 - protein, 10 aa, synthetic construct
DKFRGDFVQR

SEQ ID NO: 103456 - protein, 10 aa, synthetic construct
DKKRGDFVQR

SEQ ID NO: 103457 - protein, 10 aa, synthetic construct
DKRRGDFVQR

SEQ ID NO: 103458 - protein, 10 aa, synthetic construct
DKHRGDFVQR

SEQ ID NO: 103459 - protein, 10 aa, synthetic construct
DKSRGDFVQR

SEQ ID NO: 103460 - protein, 10 aa, synthetic construct
DKTRGDFVQR

SEQ ID NO: 103461 - protein, 10 aa, synthetic construct
DKYRGDFVQR

SEQ ID NO: 103462 - protein, 10 aa, synthetic construct
DKNRGDFVQR

SEQ ID NO: 103463 - protein, 10 aa, synthetic construct
DKQRGDFVQR

SEQ ID NO: 103464 - protein, 10 aa, synthetic construct
DKDRGDFVQR

SEQ ID NO: 103465 - protein, 10 aa, synthetic construct
DKERGDFVQR

SEQ ID NO: 103466 - protein, 10 aa, synthetic construct
DRGRGDFVQR

SEQ ID NO: 103467 - protein, 10 aa, synthetic construct
DRARGDFVQR

SEQ ID NO: 103468 - protein, 10 aa, synthetic construct
DRVRGDFVQR

SEQ ID NO: 103469 - protein, 10 aa, synthetic construct
DRPRGDFVQR

SEQ ID NO: 103470 - protein, 10 aa, synthetic construct
DRLRGDFVQR

SEQ ID NO: 103471 - protein, 10 aa, synthetic construct
DRIRGDFVQR

SEQ ID NO: 103472 - protein, 10 aa, synthetic construct
DRMRGDFVQR

SEQ ID NO: 103473 - protein, 10 aa, synthetic construct
DRWRGDFVQR

SEQ ID NO: 103474 - protein, 10 aa, synthetic construct
DRFRGDFVQR

SEQ ID NO: 103475 - protein, 10 aa, synthetic construct
DRKRGDFVQR

SEQ ID NO: 103476 - protein, 10 aa, synthetic construct
DRRRGDFVQR

SEQ ID NO: 103477 - protein, 10 aa, synthetic construct
DRHRGDFVQR

SEQ ID NO: 103478 - protein, 10 aa, synthetic construct
DRSRGDFVQR

SEQ ID NO: 103479 - protein, 10 aa, synthetic construct
DRTRGDFVQR

SEQ ID NO: 103480 - protein, 10 aa, synthetic construct
DRYRGDFVQR

SEQ ID NO: 103481 - protein, 10 aa, synthetic construct
DRNRGDFVQR

SEQ ID NO: 103482 - protein, 10 aa, synthetic construct
DRQRGDFVQR

SEQ ID NO: 103483 - protein, 10 aa, synthetic construct
DRDRGDFVQR

SEQ ID NO: 103484 - protein, 10 aa, synthetic construct
DRERGDFVQR

SEQ ID NO: 103485 - protein, 10 aa, synthetic construct
DHGRGDFVQR

SEQ ID NO: 103486 - protein, 10 aa, synthetic construct
DHARGDFVQR

SEQ ID NO: 103487 - protein, 10 aa, synthetic construct
DHVRGDFVQR

SEQ ID NO: 103488 - protein, 10 aa, synthetic construct
DHPRGDFVQR

SEQ ID NO: 103489 - protein, 10 aa, synthetic construct
DHLRGDFVQR

SEQ ID NO: 103490 - protein, 10 aa, synthetic construct
DHIRGDFVQR

SEQ ID NO: 103491 - protein, 10 aa, synthetic construct
DHMRGDFVQR

SEQ ID NO: 103492 - protein, 10 aa, synthetic construct
DHWRGDFVQR

SEQ ID NO: 103493 - protein, 10 aa, synthetic construct
DHFRGDFVQR

SEQ ID NO: 103494 - protein, 10 aa, synthetic construct
DHKRGDFVQR

SEQ ID NO: 103495 - protein, 10 aa, synthetic construct
DHRRGDFVQR

SEQ ID NO: 103496 - protein, 10 aa, synthetic construct
DHHRGDFVQR

SEQ ID NO: 103497 - protein, 10 aa, synthetic construct
DHSRGDFVQR

SEQ ID NO: 103498 - protein, 10 aa, synthetic construct
DHTRGDFVQR

SEQ ID NO: 103499 - protein, 10 aa, synthetic construct
DHYRGDFVQR

SEQ ID NO: 103500 - protein, 10 aa, synthetic construct
DHNRGDFVQR

SEQ ID NO: 103501 - protein, 10 aa, synthetic construct
DHQRGDFVQR

SEQ ID NO: 103502 - protein, 10 aa, synthetic construct
DHDRGDFVQR

SEQ ID NO: 103503 - protein, 10 aa, synthetic construct
DHERGDFVQR

SEQ ID NO: 103504 - protein, 10 aa, synthetic construct
DSGRGDFVQR

SEQ ID NO: 103505 - protein, 10 aa, synthetic construct
DSARGDFVQR

SEQ ID NO: 103506 - protein, 10 aa, synthetic construct
DSVRGDFVQR

SEQ ID NO: 103507 - protein, 10 aa, synthetic construct
DSPRGDFVQR

SEQ ID NO: 103508 - protein, 10 aa, synthetic construct
DSLRGDFVQR

SEQ ID NO: 103509 - protein, 10 aa, synthetic construct
DSIRGDFVQR

SEQ ID NO: 103510 - protein, 10 aa, synthetic construct
DSMRGDFVQR

SEQ ID NO: 103511 - protein, 10 aa, synthetic construct
DSWRGDFVQR

SEQ ID NO: 103512 - protein, 10 aa, synthetic construct
DSFRGDFVQR

SEQ ID NO: 103513 - protein, 10 aa, synthetic construct
DSKRGDFVQR

SEQ ID NO: 103514 - protein, 10 aa, synthetic construct
DSRRGDFVQR

SEQ ID NO: 103515 - protein, 10 aa, synthetic construct
DSHRGDFVQR

SEQ ID NO: 103516 - protein, 10 aa, synthetic construct
DSSRGDFVQR

SEQ ID NO: 103517 - protein, 10 aa, synthetic construct
DSTRGDFVQR

SEQ ID NO: 103518 - protein, 10 aa, synthetic construct
DSYRGDFVQR

SEQ ID NO: 103519 - protein, 10 aa, synthetic construct
DSNRGDFVQR

SEQ ID NO: 103520 - protein, 10 aa, synthetic construct
DSQRGDFVQR

SEQ ID NO: 103521 - protein, 10 aa, synthetic construct
DSDRGDFVQR

SEQ ID NO: 103522 - protein, 10 aa, synthetic construct
DSERGDFVQR

SEQ ID NO: 103523 - protein, 10 aa, synthetic construct
DTGRGDFVQR

SEQ ID NO: 103524 - protein, 10 aa, synthetic construct
DTARGDFVQR

SEQ ID NO: 103525 - protein, 10 aa, synthetic construct
DTVRGDFVQR

SEQ ID NO: 103526 - protein, 10 aa, synthetic construct
DTPRGDFVQR

SEQ ID NO: 103527 - protein, 10 aa, synthetic construct
DTLRGDFVQR

SEQ ID NO: 103528 - protein, 10 aa, synthetic construct
DTIRGDFVQR

SEQ ID NO: 103529 - protein, 10 aa, synthetic construct
DTMRGDFVQR

SEQ ID NO: 103530 - protein, 10 aa, synthetic construct
DTWRGDFVQR

SEQ ID NO: 103531 - protein, 10 aa, synthetic construct
DTFRGDFVQR

SEQ ID NO: 103532 - protein, 10 aa, synthetic construct
DTKRGDFVQR

SEQ ID NO: 103533 - protein, 10 aa, synthetic construct
DTRRGDFVQR

SEQ ID NO: 103534 - protein, 10 aa, synthetic construct
DTHRGDFVQR

SEQ ID NO: 103535 - protein, 10 aa, synthetic construct
DTSRGDFVQR

SEQ ID NO: 103536 - protein, 10 aa, synthetic construct
DTTRGDFVQR

SEQ ID NO: 103537 - protein, 10 aa, synthetic construct
DTYRGDFVQR

SEQ ID NO: 103538 - protein, 10 aa, synthetic construct
DTNRGDFVQR

SEQ ID NO: 103539 - protein, 10 aa, synthetic construct
DTQRGDFVQR

SEQ ID NO: 103540 - protein, 10 aa, synthetic construct
DTDRGDFVQR

SEQ ID NO: 103541 - protein, 10 aa, synthetic construct
DTERGDFVQR

SEQ ID NO: 103542 - protein, 10 aa, synthetic construct
DYGRGDFVQR

SEQ ID NO: 103543 - protein, 10 aa, synthetic construct
DYARGDFVQR

SEQ ID NO: 103544 - protein, 10 aa, synthetic construct
DYVRGDFVQR

SEQ ID NO: 103545 - protein, 10 aa, synthetic construct
DYPRGDFVQR

SEQ ID NO: 103546 - protein, 10 aa, synthetic construct
DYLRGDFVQR

SEQ ID NO: 103547 - protein, 10 aa, synthetic construct
DYIRGDFVQR

SEQ ID NO: 103548 - protein, 10 aa, synthetic construct
DYMRGDFVQR

SEQ ID NO: 103549 - protein, 10 aa, synthetic construct
DYWRGDFVQR

SEQ ID NO: 103550 - protein, 10 aa, synthetic construct
DYFRGDFVQR

SEQ ID NO: 103551 - protein, 10 aa, synthetic construct
DYKRGDFVQR

SEQ ID NO: 103552 - protein, 10 aa, synthetic construct
DYRRGDFVQR

SEQ ID NO: 103553 - protein, 10 aa, synthetic construct
DYHRGDFVQR

SEQ ID NO: 103554 - protein, 10 aa, synthetic construct
DYSRGDFVQR

SEQ ID NO: 103555 - protein, 10 aa, synthetic construct
DYTRGDFVQR

SEQ ID NO: 103556 - protein, 10 aa, synthetic construct
DYYRGDFVQR

SEQ ID NO: 103557 - protein, 10 aa, synthetic construct
DYNRGDFVQR

SEQ ID NO: 103558 - protein, 10 aa, synthetic construct
DYQRGDFVQR

SEQ ID NO: 103559 - protein, 10 aa, synthetic construct
DYDRGDFVQR

SEQ ID NO: 103560 - protein, 10 aa, synthetic construct
DYERGDFVQR

SEQ ID NO: 103561 - protein, 10 aa, synthetic construct
DNGRGDFVQR

SEQ ID NO: 103562 - protein, 10 aa, synthetic construct
DNARGDFVQR

SEQ ID NO: 103563 - protein, 10 aa, synthetic construct
DNVRGDFVQR

SEQ ID NO: 103564 - protein, 10 aa, synthetic construct
DNPRGDFVQR

SEQ ID NO: 103565 - protein, 10 aa, synthetic construct
DNLRGDFVQR

SEQ ID NO: 103566 - protein, 10 aa, synthetic construct
DNIRGDFVQR

SEQ ID NO: 103567 - protein, 10 aa, synthetic construct
DNMRGDFVQR

SEQ ID NO: 103568 - protein, 10 aa, synthetic construct
DNWRGDFVQR

SEQ ID NO: 103569 - protein, 10 aa, synthetic construct
DNFRGDFVQR

SEQ ID NO: 103570 - protein, 10 aa, synthetic construct
DNKRGDFVQR

SEQ ID NO: 103571 - protein, 10 aa, synthetic construct
DNRRGDFVQR

SEQ ID NO: 103572 - protein, 10 aa, synthetic construct
DNHRGDFVQR

SEQ ID NO: 103573 - protein, 10 aa, synthetic construct
DNSRGDFVQR

SEQ ID NO: 103574 - protein, 10 aa, synthetic construct
DNTRGDFVQR

SEQ ID NO: 103575 - protein, 10 aa, synthetic construct
DNYRGDFVQR

SEQ ID NO: 103576 - protein, 10 aa, synthetic construct
DNNRGDFVQR

SEQ ID NO: 103577 - protein, 10 aa, synthetic construct
DNQRGDFVQR

SEQ ID NO: 103578 - protein, 10 aa, synthetic construct
DNDRGDFVQR

SEQ ID NO: 103579 - protein, 10 aa, synthetic construct
DNERGDFVQR

SEQ ID NO: 103580 - protein, 10 aa, synthetic construct
DQGRGDFVQR

SEQ ID NO: 103581 - protein, 10 aa, synthetic construct
DQARGDFVQR

SEQ ID NO: 103582 - protein, 10 aa, synthetic construct
DQVRGDFVQR

SEQ ID NO: 103583 - protein, 10 aa, synthetic construct
DQPRGDFVQR

SEQ ID NO: 103584 - protein, 10 aa, synthetic construct
DQLRGDFVQR

SEQ ID NO: 103585 - protein, 10 aa, synthetic construct
DQIRGDFVQR

SEQ ID NO: 103586 - protein, 10 aa, synthetic construct
DQMRGDFVQR

SEQ ID NO: 103587 - protein, 10 aa, synthetic construct
DQWRGDFVQR

SEQ ID NO: 103588 - protein, 10 aa, synthetic construct
DQFRGDFVQR

SEQ ID NO: 103589 - protein, 10 aa, synthetic construct
DQKRGDFVQR

SEQ ID NO: 103590 - protein, 10 aa, synthetic construct
DQRRGDFVQR

SEQ ID NO: 103591 - protein, 10 aa, synthetic construct
DQHRGDFVQR

SEQ ID NO: 103592 - protein, 10 aa, synthetic construct
DQSRGDFVQR

SEQ ID NO: 103593 - protein, 10 aa, synthetic construct
DQTRGDFVQR

SEQ ID NO: 103594 - protein, 10 aa, synthetic construct
DQYRGDFVQR

SEQ ID NO: 103595 - protein, 10 aa, synthetic construct
DQNRGDFVQR

SEQ ID NO: 103596 - protein, 10 aa, synthetic construct
DQQRGDFVQR

SEQ ID NO: 103597 - protein, 10 aa, synthetic construct
DQDRGDFVQR

SEQ ID NO: 103598 - protein, 10 aa, synthetic construct
DQERGDFVQR

SEQ ID NO: 103599 - protein, 10 aa, synthetic construct
DDGRGDFVQR

SEQ ID NO: 103600 - protein, 10 aa, synthetic construct
DDARGDFVQR

SEQ ID NO: 103601 - protein, 10 aa, synthetic construct
DDVRGDFVQR

SEQ ID NO: 103602 - protein, 10 aa, synthetic construct
DDPRGDFVQR

SEQ ID NO: 103603 - protein, 10 aa, synthetic construct
DDLRGDFVQR

SEQ ID NO: 103604 - protein, 10 aa, synthetic construct
DDIRGDFVQR

SEQ ID NO: 103605 - protein, 10 aa, synthetic construct
DDMRGDFVQR

SEQ ID NO: 103606 - protein, 10 aa, synthetic construct
DDWRGDFVQR

SEQ ID NO: 103607 - protein, 10 aa, synthetic construct
DDFRGDFVQR

SEQ ID NO: 103608 - protein, 10 aa, synthetic construct
DDKRGDFVQR

SEQ ID NO: 103609 - protein, 10 aa, synthetic construct
DDRRGDFVQR

SEQ ID NO: 103610 - protein, 10 aa, synthetic construct
DDHRGDFVQR

SEQ ID NO: 103611 - protein, 10 aa, synthetic construct
DDSRGDFVQR

SEQ ID NO: 103612 - protein, 10 aa, synthetic construct
DDTRGDFVQR

SEQ ID NO: 103613 - protein, 10 aa, synthetic construct
DDYRGDFVQR

SEQ ID NO: 103614 - protein, 10 aa, synthetic construct
DDNRGDFVQR

SEQ ID NO: 103615 - protein, 10 aa, synthetic construct
DDQRGDFVQR

SEQ ID NO: 103616 - protein, 10 aa, synthetic construct
DDDRGDFVQR

SEQ ID NO: 103617 - protein, 10 aa, synthetic construct
DDERGDFVQR

SEQ ID NO: 103618 - protein, 10 aa, synthetic construct
DEGRGDFVQR

SEQ ID NO: 103619 - protein, 10 aa, synthetic construct
DEARGDFVQR

SEQ ID NO: 103620 - protein, 10 aa, synthetic construct
DEVRGDFVQR

SEQ ID NO: 103621 - protein, 10 aa, synthetic construct
DEPRGDFVQR

SEQ ID NO: 103622 - protein, 10 aa, synthetic construct
DELRGDFVQR

SEQ ID NO: 103623 - protein, 10 aa, synthetic construct
DEIRGDFVQR

SEQ ID NO: 103624 - protein, 10 aa, synthetic construct
DEMRGDFVQR

SEQ ID NO: 103625 - protein, 10 aa, synthetic construct
DEWRGDFVQR

SEQ ID NO: 103626 - protein, 10 aa, synthetic construct
DEFRGDFVQR

SEQ ID NO: 103627 - protein, 10 aa, synthetic construct
DEKRGDFVQR

SEQ ID NO: 103628 - protein, 10 aa, synthetic construct
DERRGDFVQR

SEQ ID NO: 103629 - protein, 10 aa, synthetic construct
DEHRGDFVQR

SEQ ID NO: 103630 - protein, 10 aa, synthetic construct
DESRGDFVQR

SEQ ID NO: 103631 - protein, 10 aa, synthetic construct
DETRGDFVQR

SEQ ID NO: 103632 - protein, 10 aa, synthetic construct
DEYRGDFVQR

SEQ ID NO: 103633 - protein, 10 aa, synthetic construct
DENRGDFVQR

SEQ ID NO: 103634 - protein, 10 aa, synthetic construct
DEQRGDFVQR

SEQ ID NO: 103635 - protein, 10 aa, synthetic construct
DEDRGDFVQR

SEQ ID NO: 103636 - protein, 10 aa, synthetic construct
DEERGDFVQR

SEQ ID NO: 103637 - protein, 10 aa, synthetic construct
QGGRGDFVQR

SEQ ID NO: 103638 - protein, 10 aa, synthetic construct
QGARGDFVQR

SEQ ID NO: 103639 - protein, 10 aa, synthetic construct
QGVRGDFVQR

SEQ ID NO: 103640 - protein, 10 aa, synthetic construct
QGPRGDFVQR

SEQ ID NO: 103641 - protein, 10 aa, synthetic construct
QGLRGDFVQR

SEQ ID NO: 103642 - protein, 10 aa, synthetic construct
QGIRGDFVQR

SEQ ID NO: 103643 - protein, 10 aa, synthetic construct
QGMRGDFVQR

SEQ ID NO: 103644 - protein, 10 aa, synthetic construct
QGWRGDFVQR

SEQ ID NO: 103645 - protein, 10 aa, synthetic construct
QGFRGDFVQR

SEQ ID NO: 103646 - protein, 10 aa, synthetic construct
QGKRGDFVQR

SEQ ID NO: 103647 - protein, 10 aa, synthetic construct
QGRRGDFVQR

SEQ ID NO: 103648 - protein, 10 aa, synthetic construct
QGHRGDFVQR

SEQ ID NO: 103649 - protein, 10 aa, synthetic construct
QGSRGDFVQR

SEQ ID NO: 103650 - protein, 10 aa, synthetic construct
QGTRGDFVQR

SEQ ID NO: 103651 - protein, 10 aa, synthetic construct
QGYRGDFVQR

SEQ ID NO: 103652 - protein, 10 aa, synthetic construct
QGNRGDFVQR

SEQ ID NO: 103653 - protein, 10 aa, synthetic construct
QGQRGDFVQR

SEQ ID NO: 103654 - protein, 10 aa, synthetic construct
QGDRGDFVQR

SEQ ID NO: 103655 - protein, 10 aa, synthetic construct
QGERGDFVQR

SEQ ID NO: 103656 - protein, 10 aa, synthetic construct
QAGRGDFVQR

SEQ ID NO: 103657 - protein, 10 aa, synthetic construct
QAARGDFVQR

SEQ ID NO: 103658 - protein, 10 aa, synthetic construct
QAVRGDFVQR

SEQ ID NO: 103659 - protein, 10 aa, synthetic construct
QAPRGDFVQR

SEQ ID NO: 103660 - protein, 10 aa, synthetic construct
QALRGDFVQR

SEQ ID NO: 103661 - protein, 10 aa, synthetic construct
QAIRGDFVQR

SEQ ID NO: 103662 - protein, 10 aa, synthetic construct
QAMRGDFVQR

SEQ ID NO: 103663 - protein, 10 aa, synthetic construct
QAWRGDFVQR

SEQ ID NO: 103664 - protein, 10 aa, synthetic construct
QAFRGDFVQR

SEQ ID NO: 103665 - protein, 10 aa, synthetic construct
QAKRGDFVQR

SEQ ID NO: 103666 - protein, 10 aa, synthetic construct
QARRGDFVQR

SEQ ID NO: 103667 - protein, 10 aa, synthetic construct
QAHRGDFVQR

SEQ ID NO: 103668 - protein, 10 aa, synthetic construct
QASRGDFVQR

SEQ ID NO: 103669 - protein, 10 aa, synthetic construct
QATRGDFVQR

SEQ ID NO: 103670 - protein, 10 aa, synthetic construct
QAYRGDFVQR

SEQ ID NO: 103671 - protein, 10 aa, synthetic construct
QANRGDFVQR

SEQ ID NO: 103672 - protein, 10 aa, synthetic construct
QAQRGDFVQR

SEQ ID NO: 103673 - protein, 10 aa, synthetic construct
QADRGDFVQR

SEQ ID NO: 103674 - protein, 10 aa, synthetic construct
QAERGDFVQR

SEQ ID NO: 103675 - protein, 10 aa, synthetic construct
QVGRGDFVQR

SEQ ID NO: 103676 - protein, 10 aa, synthetic construct
QVARGDFVQR

SEQ ID NO: 103677 - protein, 10 aa, synthetic construct
QVVRGDFVQR

SEQ ID NO: 103678 - protein, 10 aa, synthetic construct
QVPRGDFVQR

SEQ ID NO: 103679 - protein, 10 aa, synthetic construct
QVLRGDFVQR

SEQ ID NO: 103680 - protein, 10 aa, synthetic construct
QVIRGDFVQR

SEQ ID NO: 103681 - protein, 10 aa, synthetic construct
QVMRGDFVQR

SEQ ID NO: 103682 - protein, 10 aa, synthetic construct
QVWRGDFVQR

SEQ ID NO: 103683 - protein, 10 aa, synthetic construct
QVFRGDFVQR

SEQ ID NO: 103684 - protein, 10 aa, synthetic construct
QVKRGDFVQR

SEQ ID NO: 103685 - protein, 10 aa, synthetic construct
QVRRGDFVQR

SEQ ID NO: 103686 - protein, 10 aa, synthetic construct
QVHRGDFVQR

SEQ ID NO: 103687 - protein, 10 aa, synthetic construct
QVSRGDFVQR

SEQ ID NO: 103688 - protein, 10 aa, synthetic construct
QVTRGDFVQR

SEQ ID NO: 103689 - protein, 10 aa, synthetic construct
QVYRGDFVQR

SEQ ID NO: 103690 - protein, 10 aa, synthetic construct
QVNRGDFVQR

SEQ ID NO: 103691 - protein, 10 aa, synthetic construct
QVQRGDFVQR

SEQ ID NO: 103692 - protein, 10 aa, synthetic construct
QVDRGDFVQR

SEQ ID NO: 103693 - protein, 10 aa, synthetic construct
QVERGDFVQR

SEQ ID NO: 103694 - protein, 10 aa, synthetic construct
QPGRGDFVQR

SEQ ID NO: 103695 - protein, 10 aa, synthetic construct
QPARGDFVQR

SEQ ID NO: 103696 - protein, 10 aa, synthetic construct
QPVRGDFVQR

SEQ ID NO: 103697 - protein, 10 aa, synthetic construct
QPPRGDFVQR

SEQ ID NO: 103698 - protein, 10 aa, synthetic construct
QPLRGDFVQR

SEQ ID NO: 103699 - protein, 10 aa, synthetic construct
QPIRGDFVQR

SEQ ID NO: 103700 - protein, 10 aa, synthetic construct
QPMRGDFVQR

SEQ ID NO: 103701 - protein, 10 aa, synthetic construct
QPWRGDFVQR

SEQ ID NO: 103702 - protein, 10 aa, synthetic construct
QPFRGDFVQR

SEQ ID NO: 103703 - protein, 10 aa, synthetic construct
QPKRGDFVQR

SEQ ID NO: 103704 - protein, 10 aa, synthetic construct
QPRRGDFVQR

SEQ ID NO: 103705 - protein, 10 aa, synthetic construct
QPHRGDFVQR

SEQ ID NO: 103706 - protein, 10 aa, synthetic construct
QPSRGDFVQR

SEQ ID NO: 103707 - protein, 10 aa, synthetic construct
QPTRGDFVQR

SEQ ID NO: 103708 - protein, 10 aa, synthetic construct
QPYRGDFVQR

SEQ ID NO: 103709 - protein, 10 aa, synthetic construct
QPNRGDFVQR

SEQ ID NO: 103710 - protein, 10 aa, synthetic construct
QPQRGDFVQR

SEQ ID NO: 103711 - protein, 10 aa, synthetic construct
QPDRGDFVQR

SEQ ID NO: 103712 - protein, 10 aa, synthetic construct
QPERGDFVQR

SEQ ID NO: 103713 - protein, 10 aa, synthetic construct
QLGRGDFVQR

SEQ ID NO: 103714 - protein, 10 aa, synthetic construct
QLARGDFVQR

SEQ ID NO: 103715 - protein, 10 aa, synthetic construct
QLVRGDFVQR

SEQ ID NO: 103716 - protein, 10 aa, synthetic construct
QLPRGDFVQR

SEQ ID NO: 103717 - protein, 10 aa, synthetic construct
QLLRGDFVQR

SEQ ID NO: 103718 - protein, 10 aa, synthetic construct
QLIRGDFVQR

SEQ ID NO: 103719 - protein, 10 aa, synthetic construct
QLMRGDFVQR

SEQ ID NO: 103720 - protein, 10 aa, synthetic construct
QLWRGDFVQR

SEQ ID NO: 103721 - protein, 10 aa, synthetic construct
QLFRGDFVQR

SEQ ID NO: 103722 - protein, 10 aa, synthetic construct
QLKRGDFVQR

SEQ ID NO: 103723 - protein, 10 aa, synthetic construct
QLRRGDFVQR

SEQ ID NO: 103724 - protein, 10 aa, synthetic construct
QLHRGDFVQR

SEQ ID NO: 103725 - protein, 10 aa, synthetic construct
QLSRGDFVQR

SEQ ID NO: 103726 - protein, 10 aa, synthetic construct
QLTRGDFVQR

SEQ ID NO: 103727 - protein, 10 aa, synthetic construct
QLYRGDFVQR

SEQ ID NO: 103728 - protein, 10 aa, synthetic construct
QLNRGDFVQR

SEQ ID NO: 103729 - protein, 10 aa, synthetic construct
QLQRGDFVQR

SEQ ID NO: 103730 - protein, 10 aa, synthetic construct
QLDRGDFVQR

SEQ ID NO: 103731 - protein, 10 aa, synthetic construct
QLERGDFVQR

SEQ ID NO: 103732 - protein, 10 aa, synthetic construct
QIGRGDFVQR

SEQ ID NO: 103733 - protein, 10 aa, synthetic construct
QIARGDFVQR

SEQ ID NO: 103734 - protein, 10 aa, synthetic construct
QIVRGDFVQR

SEQ ID NO: 103735 - protein, 10 aa, synthetic construct
QIPRGDFVQR

SEQ ID NO: 103736 - protein, 10 aa, synthetic construct
QILRGDFVQR

SEQ ID NO: 103737 - protein, 10 aa, synthetic construct
QIIRGDFVQR

SEQ ID NO: 103738 - protein, 10 aa, synthetic construct
QIMRGDFVQR

SEQ ID NO: 103739 - protein, 10 aa, synthetic construct
QIWRGDFVQR

SEQ ID NO: 103740 - protein, 10 aa, synthetic construct
QIFRGDFVQR

SEQ ID NO: 103741 - protein, 10 aa, synthetic construct
QIKRGDFVQR

SEQ ID NO: 103742 - protein, 10 aa, synthetic construct
QIRRGDFVQR

SEQ ID NO: 103743 - protein, 10 aa, synthetic construct
QIHRGDFVQR

SEQ ID NO: 103744 - protein, 10 aa, synthetic construct
QISRGDFVQR

SEQ ID NO: 103745 - protein, 10 aa, synthetic construct
QITRGDFVQR

SEQ ID NO: 103746 - protein, 10 aa, synthetic construct
QIYRGDFVQR

SEQ ID NO: 103747 - protein, 10 aa, synthetic construct
QINRGDFVQR

SEQ ID NO: 103748 - protein, 10 aa, synthetic construct
QIQRGDFVQR

SEQ ID NO: 103749 - protein, 10 aa, synthetic construct
QIDRGDFVQR

SEQ ID NO: 103750 - protein, 10 aa, synthetic construct
QIERGDFVQR

SEQ ID NO: 103751 - protein, 10 aa, synthetic construct
QMGRGDFVQR

SEQ ID NO: 103752 - protein, 10 aa, synthetic construct
QMARGDFVQR

SEQ ID NO: 103753 - protein, 10 aa, synthetic construct
QMVRGDFVQR

SEQ ID NO: 103754 - protein, 10 aa, synthetic construct
QMPRGDFVQR

SEQ ID NO: 103755 - protein, 10 aa, synthetic construct
QMLRGDFVQR

SEQ ID NO: 103756 - protein, 10 aa, synthetic construct
QMIRGDFVQR

SEQ ID NO: 103757 - protein, 10 aa, synthetic construct
QMMRGDFVQR

SEQ ID NO: 103758 - protein, 10 aa, synthetic construct
QMWRGDFVQR

SEQ ID NO: 103759 - protein, 10 aa, synthetic construct
QMFRGDFVQR

SEQ ID NO: 103760 - protein, 10 aa, synthetic construct
QMKRGDFVQR

SEQ ID NO: 103761 - protein, 10 aa, synthetic construct
QMRRGDFVQR

SEQ ID NO: 103762 - protein, 10 aa, synthetic construct
QMHRGDFVQR

SEQ ID NO: 103763 - protein, 10 aa, synthetic construct
QMSRGDFVQR

SEQ ID NO: 103764 - protein, 10 aa, synthetic construct
QMTRGDFVQR

SEQ ID NO: 103765 - protein, 10 aa, synthetic construct
QMYRGDFVQR

SEQ ID NO: 103766 - protein, 10 aa, synthetic construct
QMNRGDFVQR

SEQ ID NO: 103767 - protein, 10 aa, synthetic construct
QMQRGDFVQR

SEQ ID NO: 103768 - protein, 10 aa, synthetic construct
QMDRGDFVQR

SEQ ID NO: 103769 - protein, 10 aa, synthetic construct
QMERGDFVQR

SEQ ID NO: 103770 - protein, 10 aa, synthetic construct
QWGRGDFVQR

SEQ ID NO: 103771 - protein, 10 aa, synthetic construct
QWARGDFVQR

SEQ ID NO: 103772 - protein, 10 aa, synthetic construct
QWVRGDFVQR

SEQ ID NO: 103773 - protein, 10 aa, synthetic construct
QWPRGDFVQR

SEQ ID NO: 103774 - protein, 10 aa, synthetic construct
QWLRGDFVQR

SEQ ID NO: 103775 - protein, 10 aa, synthetic construct
QWIRGDFVQR

SEQ ID NO: 103776 - protein, 10 aa, synthetic construct
QWMRGDFVQR

SEQ ID NO: 103777 - protein, 10 aa, synthetic construct
QWWRGDFVQR

SEQ ID NO: 103778 - protein, 10 aa, synthetic construct
QWFRGDFVQR

SEQ ID NO: 103779 - protein, 10 aa, synthetic construct
QWKRGDFVQR

SEQ ID NO: 103780 - protein, 10 aa, synthetic construct
QWRRGDFVQR

SEQ ID NO: 103781 - protein, 10 aa, synthetic construct
QWHRGDFVQR

SEQ ID NO: 103782 - protein, 10 aa, synthetic construct
QWSRGDFVQR

SEQ ID NO: 103783 - protein, 10 aa, synthetic construct
QWTRGDFVQR

SEQ ID NO: 103784 - protein, 10 aa, synthetic construct
QWYRGDFVQR

SEQ ID NO: 103785 - protein, 10 aa, synthetic construct
QWNRGDFVQR

SEQ ID NO: 103786 - protein, 10 aa, synthetic construct
QWQRGDFVQR

SEQ ID NO: 103787 - protein, 10 aa, synthetic construct
QWDRGDFVQR

SEQ ID NO: 103788 - protein, 10 aa, synthetic construct
QWERGDFVQR

SEQ ID NO: 103789 - protein, 10 aa, synthetic construct
QFGRGDFVQR

SEQ ID NO: 103790 - protein, 10 aa, synthetic construct
QFARGDFVQR

SEQ ID NO: 103791 - protein, 10 aa, synthetic construct
QFVRGDFVQR

SEQ ID NO: 103792 - protein, 10 aa, synthetic construct
QFPRGDFVQR

SEQ ID NO: 103793 - protein, 10 aa, synthetic construct
QFLRGDFVQR

SEQ ID NO: 103794 - protein, 10 aa, synthetic construct
QFIRGDFVQR

SEQ ID NO: 103795 - protein, 10 aa, synthetic construct
QFMRGDFVQR

SEQ ID NO: 103796 - protein, 10 aa, synthetic construct
QFWRGDFVQR

SEQ ID NO: 103797 - protein, 10 aa, synthetic construct
QFFRGDFVQR

SEQ ID NO: 103798 - protein, 10 aa, synthetic construct
QFKRGDFVQR

SEQ ID NO: 103799 - protein, 10 aa, synthetic construct
QFRRGDFVQR

SEQ ID NO: 103800 - protein, 10 aa, synthetic construct
QFHRGDFVQR

SEQ ID NO: 103801 - protein, 10 aa, synthetic construct
QFSRGDFVQR

SEQ ID NO: 103802 - protein, 10 aa, synthetic construct
QFTRGDFVQR

SEQ ID NO: 103803 - protein, 10 aa, synthetic construct
QFYRGDFVQR

SEQ ID NO: 103804 - protein, 10 aa, synthetic construct
QFNRGDFVQR

SEQ ID NO: 103805 - protein, 10 aa, synthetic construct
QFQRGDFVQR

SEQ ID NO: 103806 - protein, 10 aa, synthetic construct
QFDRGDFVQR

SEQ ID NO: 103807 - protein, 10 aa, synthetic construct
QFERGDFVQR

SEQ ID NO: 103808 - protein, 10 aa, synthetic construct
QKGRGDFVQR

SEQ ID NO: 103809 - protein, 10 aa, synthetic construct
QKARGDFVQR

SEQ ID NO: 103810 - protein, 10 aa, synthetic construct
QKVRGDFVQR

SEQ ID NO: 103811 - protein, 10 aa, synthetic construct
QKPRGDFVQR

SEQ ID NO: 103812 - protein, 10 aa, synthetic construct
QKLRGDFVQR

SEQ ID NO: 103813 - protein, 10 aa, synthetic construct
QKIRGDFVQR

SEQ ID NO: 103814 - protein, 10 aa, synthetic construct
QKMRGDFVQR

SEQ ID NO: 103815 - protein, 10 aa, synthetic construct
QKWRGDFVQR

SEQ ID NO: 103816 - protein, 10 aa, synthetic construct
QKFRGDFVQR

SEQ ID NO: 103817 - protein, 10 aa, synthetic construct
QKKRGDFVQR

SEQ ID NO: 103818 - protein, 10 aa, synthetic construct
QKRRGDFVQR

SEQ ID NO: 103819 - protein, 10 aa, synthetic construct
QKHRGDFVQR

SEQ ID NO: 103820 - protein, 10 aa, synthetic construct
QKSRGDFVQR

SEQ ID NO: 103821 - protein, 10 aa, synthetic construct
QKTRGDFVQR

SEQ ID NO: 103822 - protein, 10 aa, synthetic construct
QKYRGDFVQR

SEQ ID NO: 103823 - protein, 10 aa, synthetic construct
QKNRGDFVQR

SEQ ID NO: 103824 - protein, 10 aa, synthetic construct
QKQRGDFVQR

SEQ ID NO: 103825 - protein, 10 aa, synthetic construct
QKDRGDFVQR

SEQ ID NO: 103826 - protein, 10 aa, synthetic construct
QKERGDFVQR

SEQ ID NO: 103827 - protein, 10 aa, synthetic construct
QRGRGDFVQR

SEQ ID NO: 103828 - protein, 10 aa, synthetic construct
QRARGDFVQR

SEQ ID NO: 103829 - protein, 10 aa, synthetic construct
QRVRGDFVQR

SEQ ID NO: 103830 - protein, 10 aa, synthetic construct
QRPRGDFVQR

SEQ ID NO: 103831 - protein, 10 aa, synthetic construct
QRLRGDFVQR

SEQ ID NO: 103832 - protein, 10 aa, synthetic construct
QRIRGDFVQR

SEQ ID NO: 103833 - protein, 10 aa, synthetic construct
QRMRGDFVQR

SEQ ID NO: 103834 - protein, 10 aa, synthetic construct
QRWRGDFVQR

SEQ ID NO: 103835 - protein, 10 aa, synthetic construct
QRFRGDFVQR

SEQ ID NO: 103836 - protein, 10 aa, synthetic construct
QRKRGDFVQR

SEQ ID NO: 103837 - protein, 10 aa, synthetic construct
QRRRGDFVQR

SEQ ID NO: 103838 - protein, 10 aa, synthetic construct
QRHRGDFVQR

SEQ ID NO: 103839 - protein, 10 aa, synthetic construct
QRSRGDFVQR

SEQ ID NO: 103840 - protein, 10 aa, synthetic construct
QRTRGDFVQR

SEQ ID NO: 103841 - protein, 10 aa, synthetic construct
QRYRGDFVQR

SEQ ID NO: 103842 - protein, 10 aa, synthetic construct
QRNRGDFVQR

SEQ ID NO: 103843 - protein, 10 aa, synthetic construct
QRQRGDFVQR

SEQ ID NO: 103844 - protein, 10 aa, synthetic construct
QRDRGDFVQR

SEQ ID NO: 103845 - protein, 10 aa, synthetic construct
QRERGDFVQR

SEQ ID NO: 103846 - protein, 10 aa, synthetic construct
QHGRGDFVQR

SEQ ID NO: 103847 - protein, 10 aa, synthetic construct
QHARGDFVQR

SEQ ID NO: 103848 - protein, 10 aa, synthetic construct
QHVRGDFVQR

SEQ ID NO: 103849 - protein, 10 aa, synthetic construct
QHPRGDFVQR

SEQ ID NO: 103850 - protein, 10 aa, synthetic construct
QHLRGDFVQR

SEQ ID NO: 103851 - protein, 10 aa, synthetic construct
QHIRGDFVQR

SEQ ID NO: 103852 - protein, 10 aa, synthetic construct
QHMRGDFVQR

SEQ ID NO: 103853 - protein, 10 aa, synthetic construct
QHWRGDFVQR

SEQ ID NO: 103854 - protein, 10 aa, synthetic construct
QHFRGDFVQR

SEQ ID NO: 103855 - protein, 10 aa, synthetic construct
QHKRGDFVQR

SEQ ID NO: 103856 - protein, 10 aa, synthetic construct
QHRRGDFVQR

SEQ ID NO: 103857 - protein, 10 aa, synthetic construct
QHHRGDFVQR

SEQ ID NO: 103858 - protein, 10 aa, synthetic construct
QHSRGDFVQR

SEQ ID NO: 103859 - protein, 10 aa, synthetic construct
QHTRGDFVQR

SEQ ID NO: 103860 - protein, 10 aa, synthetic construct
QHYRGDFVQR

SEQ ID NO: 103861 - protein, 10 aa, synthetic construct
QHNRGDFVQR

SEQ ID NO: 103862 - protein, 10 aa, synthetic construct
QHQRGDFVQR

SEQ ID NO: 103863 - protein, 10 aa, synthetic construct
QHDRGDFVQR

SEQ ID NO: 103864 - protein, 10 aa, synthetic construct
QHERGDFVQR

SEQ ID NO: 103865 - protein, 10 aa, synthetic construct
QSGRGDFVQR

SEQ ID NO: 103866 - protein, 10 aa, synthetic construct
QSARGDFVQR

SEQ ID NO: 103867 - protein, 10 aa, synthetic construct
QSVRGDFVQR

SEQ ID NO: 103868 - protein, 10 aa, synthetic construct
QSPRGDFVQR

SEQ ID NO: 103869 - protein, 10 aa, synthetic construct
QSLRGDFVQR

SEQ ID NO: 103870 - protein, 10 aa, synthetic construct
QSIRGDFVQR

SEQ ID NO: 103871 - protein, 10 aa, synthetic construct
QSMRGDFVQR

SEQ ID NO: 103872 - protein, 10 aa, synthetic construct
QSWRGDFVQR

SEQ ID NO: 103873 - protein, 10 aa, synthetic construct
QSFRGDFVQR

SEQ ID NO: 103874 - protein, 10 aa, synthetic construct
QSKRGDFVQR

SEQ ID NO: 103875 - protein, 10 aa, synthetic construct
QSRRGDFVQR

SEQ ID NO: 103876 - protein, 10 aa, synthetic construct
QSHRGDFVQR

SEQ ID NO: 103877 - protein, 10 aa, synthetic construct
QSSRGDFVQR

SEQ ID NO: 103878 - protein, 10 aa, synthetic construct
QSTRGDFVQR

SEQ ID NO: 103879 - protein, 10 aa, synthetic construct
QSYRGDFVQR

SEQ ID NO: 103880 - protein, 10 aa, synthetic construct
QSNRGDFVQR

SEQ ID NO: 103881 - protein, 10 aa, synthetic construct
QSQRGDFVQR

SEQ ID NO: 103882 - protein, 10 aa, synthetic construct
QSDRGDFVQR

SEQ ID NO: 103883 - protein, 10 aa, synthetic construct
QSERGDFVQR

SEQ ID NO: 103884 - protein, 10 aa, synthetic construct
QTGRGDFVQR

SEQ ID NO: 103885 - protein, 10 aa, synthetic construct
QTARGDFVQR

SEQ ID NO: 103886 - protein, 10 aa, synthetic construct
QTVRGDFVQR

SEQ ID NO: 103887 - protein, 10 aa, synthetic construct
QTPRGDFVQR

SEQ ID NO: 103888 - protein, 10 aa, synthetic construct
QTLRGDFVQR

SEQ ID NO: 103889 - protein, 10 aa, synthetic construct
QTIRGDFVQR

SEQ ID NO: 103890 - protein, 10 aa, synthetic construct
QTMRGDFVQR

SEQ ID NO: 103891 - protein, 10 aa, synthetic construct
QTWRGDFVQR

SEQ ID NO: 103892 - protein, 10 aa, synthetic construct
QTFRGDFVQR

SEQ ID NO: 103893 - protein, 10 aa, synthetic construct
QTKRGDFVQR

SEQ ID NO: 103894 - protein, 10 aa, synthetic construct
QTRRGDFVQR

SEQ ID NO: 103895 - protein, 10 aa, synthetic construct
QTHRGDFVQR

SEQ ID NO: 103896 - protein, 10 aa, synthetic construct
QTSRGDFVQR

SEQ ID NO: 103897 - protein, 10 aa, synthetic construct
QTTRGDFVQR

SEQ ID NO: 103898 - protein, 10 aa, synthetic construct
QTYRGDFVQR

SEQ ID NO: 103899 - protein, 10 aa, synthetic construct
QTNRGDFVQR

SEQ ID NO: 103900 - protein, 10 aa, synthetic construct
QTQRGDFVQR

SEQ ID NO: 103901 - protein, 10 aa, synthetic construct
QTDRGDFVQR

SEQ ID NO: 103902 - protein, 10 aa, synthetic construct
QTERGDFVQR

SEQ ID NO: 103903 - protein, 10 aa, synthetic construct
QYGRGDFVQR

SEQ ID NO: 103904 - protein, 10 aa, synthetic construct
QYARGDFVQR

SEQ ID NO: 103905 - protein, 10 aa, synthetic construct
QYVRGDFVQR

SEQ ID NO: 103906 - protein, 10 aa, synthetic construct
QYPRGDFVQR

SEQ ID NO: 103907 - protein, 10 aa, synthetic construct
QYLRGDFVQR

SEQ ID NO: 103908 - protein, 10 aa, synthetic construct
QYIRGDFVQR

SEQ ID NO: 103909 - protein, 10 aa, synthetic construct
QYMRGDFVQR

SEQ ID NO: 103910 - protein, 10 aa, synthetic construct
QYWRGDFVQR

SEQ ID NO: 103911 - protein, 10 aa, synthetic construct
QYFRGDFVQR

SEQ ID NO: 103912 - protein, 10 aa, synthetic construct
QYKRGDFVQR

SEQ ID NO: 103913 - protein, 10 aa, synthetic construct
QYRRGDFVQR

SEQ ID NO: 103914 - protein, 10 aa, synthetic construct
QYHRGDFVQR

SEQ ID NO: 103915 - protein, 10 aa, synthetic construct
QYSRGDFVQR

SEQ ID NO: 103916 - protein, 10 aa, synthetic construct
QYTRGDFVQR

SEQ ID NO: 103917 - protein, 10 aa, synthetic construct
QYYRGDFVQR

SEQ ID NO: 103918 - protein, 10 aa, synthetic construct
QYNRGDFVQR

SEQ ID NO: 103919 - protein, 10 aa, synthetic construct
QYQRGDFVQR

SEQ ID NO: 103920 - protein, 10 aa, synthetic construct
QYDRGDFVQR

SEQ ID NO: 103921 - protein, 10 aa, synthetic construct
QYERGDFVQR

SEQ ID NO: 103922 - protein, 10 aa, synthetic construct
QNGRGDFVQR

SEQ ID NO: 103923 - protein, 10 aa, synthetic construct
QNARGDFVQR

SEQ ID NO: 103924 - protein, 10 aa, synthetic construct
QNVRGDFVQR

SEQ ID NO: 103925 - protein, 10 aa, synthetic construct
QNPRGDFVQR

SEQ ID NO: 103926 - protein, 10 aa, synthetic construct
QNLRGDFVQR

SEQ ID NO: 103927 - protein, 10 aa, synthetic construct
QNIRGDFVQR

SEQ ID NO: 103928 - protein, 10 aa, synthetic construct
QNMRGDFVQR

SEQ ID NO: 103929 - protein, 10 aa, synthetic construct
QNWRGDFVQR

SEQ ID NO: 103930 - protein, 10 aa, synthetic construct
QNFRGDFVQR

SEQ ID NO: 103931 - protein, 10 aa, synthetic construct
QNKRGDFVQR

SEQ ID NO: 103932 - protein, 10 aa, synthetic construct
QNRRGDFVQR

SEQ ID NO: 103933 - protein, 10 aa, synthetic construct
QNHRGDFVQR

SEQ ID NO: 103934 - protein, 10 aa, synthetic construct
QNSRGDFVQR

SEQ ID NO: 103935 - protein, 10 aa, synthetic construct
QNTRGDFVQR

SEQ ID NO: 103936 - protein, 10 aa, synthetic construct
QNYRGDFVQR

SEQ ID NO: 103937 - protein, 10 aa, synthetic construct
QNNRGDFVQR

SEQ ID NO: 103938 - protein, 10 aa, synthetic construct
QNQRGDFVQR

SEQ ID NO: 103939 - protein, 10 aa, synthetic construct
QNDRGDFVQR

SEQ ID NO: 103940 - protein, 10 aa, synthetic construct
QNERGDFVQR

SEQ ID NO: 103941 - protein, 10 aa, synthetic construct
QQGRGDFVQR

SEQ ID NO: 103942 - protein, 10 aa, synthetic construct
QQARGDFVQR

SEQ ID NO: 103943 - protein, 10 aa, synthetic construct
QQVRGDFVQR

SEQ ID NO: 103944 - protein, 10 aa, synthetic construct
QQPRGDFVQR

SEQ ID NO: 103945 - protein, 10 aa, synthetic construct
QQLRGDFVQR

SEQ ID NO: 103946 - protein, 10 aa, synthetic construct
QQIRGDFVQR

SEQ ID NO: 103947 - protein, 10 aa, synthetic construct
QQMRGDFVQR

SEQ ID NO: 103948 - protein, 10 aa, synthetic construct
QQWRGDFVQR

SEQ ID NO: 103949 - protein, 10 aa, synthetic construct
QQFRGDFVQR

SEQ ID NO: 103950 - protein, 10 aa, synthetic construct
QQKRGDFVQR

SEQ ID NO: 103951 - protein, 10 aa, synthetic construct
QQRRGDFVQR

SEQ ID NO: 103952 - protein, 10 aa, synthetic construct
QQHRGDFVQR

SEQ ID NO: 103953 - protein, 10 aa, synthetic construct
QQSRGDFVQR

SEQ ID NO: 103954 - protein, 10 aa, synthetic construct
QQTRGDFVQR

SEQ ID NO: 103955 - protein, 10 aa, synthetic construct
QQYRGDFVQR

SEQ ID NO: 103956 - protein, 10 aa, synthetic construct
QQNRGDFVQR

SEQ ID NO: 103957 - protein, 10 aa, synthetic construct
QQQRGDFVQR

SEQ ID NO: 103958 - protein, 10 aa, synthetic construct
QQDRGDFVQR

SEQ ID NO: 103959 - protein, 10 aa, synthetic construct
QQERGDFVQR

SEQ ID NO: 103960 - protein, 10 aa, synthetic construct
QDGRGDFVQR

SEQ ID NO: 103961 - protein, 10 aa, synthetic construct
QDARGDFVQR

SEQ ID NO: 103962 - protein, 10 aa, synthetic construct
QDVRGDFVQR

SEQ ID NO: 103963 - protein, 10 aa, synthetic construct
QDPRGDFVQR

SEQ ID NO: 103964 - protein, 10 aa, synthetic construct
QDLRGDFVQR

SEQ ID NO: 103965 - protein, 10 aa, synthetic construct
QDIRGDFVQR

SEQ ID NO: 103966 - protein, 10 aa, synthetic construct
QDMRGDFVQR

SEQ ID NO: 103967 - protein, 10 aa, synthetic construct
QDWRGDFVQR

SEQ ID NO: 103968 - protein, 10 aa, synthetic construct
QDFRGDFVQR

SEQ ID NO: 103969 - protein, 10 aa, synthetic construct
QDKRGDFVQR

SEQ ID NO: 103970 - protein, 10 aa, synthetic construct
QDRRGDFVQR

SEQ ID NO: 103971 - protein, 10 aa, synthetic construct
QDHRGDFVQR

SEQ ID NO: 103972 - protein, 10 aa, synthetic construct
QDSRGDFVQR

SEQ ID NO: 103973 - protein, 10 aa, synthetic construct
QDTRGDFVQR

SEQ ID NO: 103974 - protein, 10 aa, synthetic construct
QDYRGDFVQR

SEQ ID NO: 103975 - protein, 10 aa, synthetic construct
QDNRGDFVQR

SEQ ID NO: 103976 - protein, 10 aa, synthetic construct
QDQRGDFVQR

SEQ ID NO: 103977 - protein, 10 aa, synthetic construct
QDDRGDFVQR

SEQ ID NO: 103978 - protein, 10 aa, synthetic construct
QDERGDFVQR

SEQ ID NO: 103979 - protein, 10 aa, synthetic construct
QEGRGDFVQR

SEQ ID NO: 103980 - protein, 10 aa, synthetic construct
QEARGDFVQR

SEQ ID NO: 103981 - protein, 10 aa, synthetic construct
QEVRGDFVQR

SEQ ID NO: 103982 - protein, 10 aa, synthetic construct
QEPRGDFVQR

SEQ ID NO: 103983 - protein, 10 aa, synthetic construct
QELRGDFVQR

SEQ ID NO: 103984 - protein, 10 aa, synthetic construct
QEIRGDFVQR

SEQ ID NO: 103985 - protein, 10 aa, synthetic construct
QEMRGDFVQR

SEQ ID NO: 103986 - protein, 10 aa, synthetic construct
QEWRGDFVQR

SEQ ID NO: 103987 - protein, 10 aa, synthetic construct
QEFRGDFVQR

SEQ ID NO: 103988 - protein, 10 aa, synthetic construct
QEKRGDFVQR

SEQ ID NO: 103989 - protein, 10 aa, synthetic construct
QERRGDFVQR

SEQ ID NO: 103990 - protein, 10 aa, synthetic construct
QEHRGDFVQR

SEQ ID NO: 103991 - protein, 10 aa, synthetic construct
QESRGDFVQR

SEQ ID NO: 103992 - protein, 10 aa, synthetic construct
QETRGDFVQR

SEQ ID NO: 103993 - protein, 10 aa, synthetic construct
QEYRGDFVQR

SEQ ID NO: 103994 - protein, 10 aa, synthetic construct
QENRGDFVQR

SEQ ID NO: 103995 - protein, 10 aa, synthetic construct
QEQRGDFVQR

SEQ ID NO: 103996 - protein, 10 aa, synthetic construct
QEDRGDFVQR

SEQ ID NO: 103997 - protein, 10 aa, synthetic construct
QEERGDFVQR

SEQ ID NO: 103998 - protein, 10 aa, synthetic construct
SGGRGDHVNL

SEQ ID NO: 103999 - protein, 10 aa, synthetic construct
SGARGDHVNL

SEQ ID NO: 104000 - protein, 10 aa, synthetic construct
SGVRGDHVNL

SEQ ID NO: 104001 - protein, 10 aa, synthetic construct
SGPRGDHVNL

SEQ ID NO: 104002 - protein, 10 aa, synthetic construct
SGLRGDHVNL

SEQ ID NO: 104003 - protein, 10 aa, synthetic construct
SGIRGDHVNL

SEQ ID NO: 104004 - protein, 10 aa, synthetic construct
SGMRGDHVNL

SEQ ID NO: 104005 - protein, 10 aa, synthetic construct
SGWRGDHVNL

SEQ ID NO: 104006 - protein, 10 aa, synthetic construct
SGFRGDHVNL

SEQ ID NO: 104007 - protein, 10 aa, synthetic construct
SGKRGDHVNL

SEQ ID NO: 104008 - protein, 10 aa, synthetic construct
SGRRGDHVNL

SEQ ID NO: 104009 - protein, 10 aa, synthetic construct
SGHRGDHVNL

SEQ ID NO: 104010 - protein, 10 aa, synthetic construct
SGSRGDHVNL

SEQ ID NO: 104011 - protein, 10 aa, synthetic construct
SGTRGDHVNL

SEQ ID NO: 104012 - protein, 10 aa, synthetic construct
SGYRGDHVNL

SEQ ID NO: 104013 - protein, 10 aa, synthetic construct
SGNRGDHVNL

SEQ ID NO: 104014 - protein, 10 aa, synthetic construct
SGQRGDHVNL

SEQ ID NO: 104015 - protein, 10 aa, synthetic construct
SGDRGDHVNL

SEQ ID NO: 104016 - protein, 10 aa, synthetic construct
SGERGDHVNL

SEQ ID NO: 104017 - protein, 10 aa, synthetic construct
SAGRGDHVNL

SEQ ID NO: 104018 - protein, 10 aa, synthetic construct
SAARGDHVNL

SEQ ID NO: 104019 - protein, 10 aa, synthetic construct
SAVRGDHVNL

SEQ ID NO: 104020 - protein, 10 aa, synthetic construct
SAPRGDHVNL

SEQ ID NO: 104021 - protein, 10 aa, synthetic construct
SALRGDHVNL

SEQ ID NO: 104022 - protein, 10 aa, synthetic construct
SAIRGDHVNL

SEQ ID NO: 104023 - protein, 10 aa, synthetic construct
SAMRGDHVNL

SEQ ID NO: 104024 - protein, 10 aa, synthetic construct
SAWRGDHVNL

SEQ ID NO: 104025 - protein, 10 aa, synthetic construct
SAFRGDHVNL

SEQ ID NO: 104026 - protein, 10 aa, synthetic construct
SAKRGDHVNL

SEQ ID NO: 104027 - protein, 10 aa, synthetic construct
SARRGDHVNL

SEQ ID NO: 104028 - protein, 10 aa, synthetic construct
SAHRGDHVNL

SEQ ID NO: 104029 - protein, 10 aa, synthetic construct
SASRGDHVNL

SEQ ID NO: 104030 - protein, 10 aa, synthetic construct
SATRGDHVNL

SEQ ID NO: 104031 - protein, 10 aa, synthetic construct
SAYRGDHVNL

SEQ ID NO: 104032 - protein, 10 aa, synthetic construct
SANRGDHVNL

SEQ ID NO: 104033 - protein, 10 aa, synthetic construct
SAQRGDHVNL

SEQ ID NO: 104034 - protein, 10 aa, synthetic construct
SADRGDHVNL

SEQ ID NO: 104035 - protein, 10 aa, synthetic construct
SAERGDHVNL

SEQ ID NO: 104036 - protein, 10 aa, synthetic construct
SVGRGDHVNL

SEQ ID NO: 104037 - protein, 10 aa, synthetic construct
SVARGDHVNL

SEQ ID NO: 104038 - protein, 10 aa, synthetic construct
SVVRGDHVNL

SEQ ID NO: 104039 - protein, 10 aa, synthetic construct
SVPRGDHVNL

SEQ ID NO: 104040 - protein, 10 aa, synthetic construct
SVLRGDHVNL

SEQ ID NO: 104041 - protein, 10 aa, synthetic construct
SVIRGDHVNL

SEQ ID NO: 104042 - protein, 10 aa, synthetic construct
SVMRGDHVNL

SEQ ID NO: 104043 - protein, 10 aa, synthetic construct
SVWRGDHVNL

SEQ ID NO: 104044 - protein, 10 aa, synthetic construct
SVFRGDHVNL

SEQ ID NO: 104045 - protein, 10 aa, synthetic construct
SVKRGDHVNL

SEQ ID NO: 104046 - protein, 10 aa, synthetic construct
SVRRGDHVNL

SEQ ID NO: 104047 - protein, 10 aa, synthetic construct
SVHRGDHVNL

SEQ ID NO: 104048 - protein, 10 aa, synthetic construct
SVSRGDHVNL

SEQ ID NO: 104049 - protein, 10 aa, synthetic construct
SVTRGDHVNL

SEQ ID NO: 104050 - protein, 10 aa, synthetic construct
SVYRGDHVNL

SEQ ID NO: 104051 - protein, 10 aa, synthetic construct
SVNRGDHVNL

SEQ ID NO: 104052 - protein, 10 aa, synthetic construct
SVQRGDHVNL

SEQ ID NO: 104053 - protein, 10 aa, synthetic construct
SVDRGDHVNL

SEQ ID NO: 104054 - protein, 10 aa, synthetic construct
SVERGDHVNL

SEQ ID NO: 104055 - protein, 10 aa, synthetic construct
SPGRGDHVNL

SEQ ID NO: 104056 - protein, 10 aa, synthetic construct
SPARGDHVNL

SEQ ID NO: 104057 - protein, 10 aa, synthetic construct
SPVRGDHVNL

SEQ ID NO: 104058 - protein, 10 aa, synthetic construct
SPPRGDHVNL

SEQ ID NO: 104059 - protein, 10 aa, synthetic construct
SPLRGDHVNL

SEQ ID NO: 104060 - protein, 10 aa, synthetic construct
SPIRGDHVNL

SEQ ID NO: 104061 - protein, 10 aa, synthetic construct
SPMRGDHVNL

SEQ ID NO: 104062 - protein, 10 aa, synthetic construct
SPWRGDHVNL

SEQ ID NO: 104063 - protein, 10 aa, synthetic construct
SPFRGDHVNL

SEQ ID NO: 104064 - protein, 10 aa, synthetic construct
SPKRGDHVNL

SEQ ID NO: 104065 - protein, 10 aa, synthetic construct
SPRRGDHVNL

SEQ ID NO: 104066 - protein, 10 aa, synthetic construct
SPHRGDHVNL

SEQ ID NO: 104067 - protein, 10 aa, synthetic construct
SPSRGDHVNL

SEQ ID NO: 104068 - protein, 10 aa, synthetic construct
SPTRGDHVNL

SEQ ID NO: 104069 - protein, 10 aa, synthetic construct
SPYRGDHVNL

SEQ ID NO: 104070 - protein, 10 aa, synthetic construct
SPNRGDHVNL

SEQ ID NO: 104071 - protein, 10 aa, synthetic construct
SPQRGDHVNL

SEQ ID NO: 104072 - protein, 10 aa, synthetic construct
SPDRGDHVNL

SEQ ID NO: 104073 - protein, 10 aa, synthetic construct
SPERGDHVNL

SEQ ID NO: 104074 - protein, 10 aa, synthetic construct
SLGRGDHVNL

SEQ ID NO: 104075 - protein, 10 aa, synthetic construct
SLARGDHVNL

SEQ ID NO: 104076 - protein, 10 aa, synthetic construct
SLVRGDHVNL

SEQ ID NO: 104077 - protein, 10 aa, synthetic construct
SLPRGDHVNL

SEQ ID NO: 104078 - protein, 10 aa, synthetic construct
SLLRGDHVNL

SEQ ID NO: 104079 - protein, 10 aa, synthetic construct
SLIRGDHVNL

SEQ ID NO: 104080 - protein, 10 aa, synthetic construct
SLMRGDHVNL

SEQ ID NO: 104081 - protein, 10 aa, synthetic construct
SLWRGDHVNL

SEQ ID NO: 104082 - protein, 10 aa, synthetic construct
SLFRGDHVNL

SEQ ID NO: 104083 - protein, 10 aa, synthetic construct
SLKRGDHVNL

SEQ ID NO: 104084 - protein, 10 aa, synthetic construct
SLRRGDHVNL

SEQ ID NO: 104085 - protein, 10 aa, synthetic construct
SLHRGDHVNL

SEQ ID NO: 104086 - protein, 10 aa, synthetic construct
SLSRGDHVNL

SEQ ID NO: 104087 - protein, 10 aa, synthetic construct
SLTRGDHVNL

SEQ ID NO: 104088 - protein, 10 aa, synthetic construct
SLYRGDHVNL

SEQ ID NO: 104089 - protein, 10 aa, synthetic construct
SLNRGDHVNL

SEQ ID NO: 104090 - protein, 10 aa, synthetic construct
SLQRGDHVNL

SEQ ID NO: 104091 - protein, 10 aa, synthetic construct
SLDRGDHVNL

SEQ ID NO: 104092 - protein, 10 aa, synthetic construct
SLERGDHVNL

SEQ ID NO: 104093 - protein, 10 aa, synthetic construct
SIGRGDHVNL

SEQ ID NO: 104094 - protein, 10 aa, synthetic construct
SIARGDHVNL

SEQ ID NO: 104095 - protein, 10 aa, synthetic construct
SIVRGDHVNL

SEQ ID NO: 104096 - protein, 10 aa, synthetic construct
SIPRGDHVNL

SEQ ID NO: 104097 - protein, 10 aa, synthetic construct
SILRGDHVNL

SEQ ID NO: 104098 - protein, 10 aa, synthetic construct
SIIRGDHVNL

SEQ ID NO: 104099 - protein, 10 aa, synthetic construct
SIMRGDHVNL

SEQ ID NO: 104100 - protein, 10 aa, synthetic construct
SIWRGDHVNL

SEQ ID NO: 104101 - protein, 10 aa, synthetic construct
SIFRGDHVNL

SEQ ID NO: 104102 - protein, 10 aa, synthetic construct
SIKRGDHVNL

SEQ ID NO: 104103 - protein, 10 aa, synthetic construct
SIRRGDHVNL

SEQ ID NO: 104104 - protein, 10 aa, synthetic construct
SIHRGDHVNL

SEQ ID NO: 104105 - protein, 10 aa, synthetic construct
SISRGDHVNL

SEQ ID NO: 104106 - protein, 10 aa, synthetic construct
SITRGDHVNL

SEQ ID NO: 104107 - protein, 10 aa, synthetic construct
SIYRGDHVNL

SEQ ID NO: 104108 - protein, 10 aa, synthetic construct
SINRGDHVNL

SEQ ID NO: 104109 - protein, 10 aa, synthetic construct
SIQRGDHVNL

SEQ ID NO: 104110 - protein, 10 aa, synthetic construct
SIDRGDHVNL

SEQ ID NO: 104111 - protein, 10 aa, synthetic construct
SIERGDHVNL

SEQ ID NO: 104112 - protein, 10 aa, synthetic construct
SMGRGDHVNL

SEQ ID NO: 104113 - protein, 10 aa, synthetic construct
SMARGDHVNL

SEQ ID NO: 104114 - protein, 10 aa, synthetic construct
SMVRGDHVNL

SEQ ID NO: 104115 - protein, 10 aa, synthetic construct
SMPRGDHVNL

SEQ ID NO: 104116 - protein, 10 aa, synthetic construct
SMLRGDHVNL

SEQ ID NO: 104117 - protein, 10 aa, synthetic construct
SMIRGDHVNL

SEQ ID NO: 104118 - protein, 10 aa, synthetic construct
SMMRGDHVNL

SEQ ID NO: 104119 - protein, 10 aa, synthetic construct
SMWRGDHVNL

SEQ ID NO: 104120 - protein, 10 aa, synthetic construct
SMFRGDHVNL

SEQ ID NO: 104121 - protein, 10 aa, synthetic construct
SMKRGDHVNL

SEQ ID NO: 104122 - protein, 10 aa, synthetic construct
SMRRGDHVNL

SEQ ID NO: 104123 - protein, 10 aa, synthetic construct
SMHRGDHVNL

SEQ ID NO: 104124 - protein, 10 aa, synthetic construct
SMSRGDHVNL

SEQ ID NO: 104125 - protein, 10 aa, synthetic construct
SMTRGDHVNL

SEQ ID NO: 104126 - protein, 10 aa, synthetic construct
SMYRGDHVNL

SEQ ID NO: 104127 - protein, 10 aa, synthetic construct
SMNRGDHVNL

SEQ ID NO: 104128 - protein, 10 aa, synthetic construct
SMQRGDHVNL

SEQ ID NO: 104129 - protein, 10 aa, synthetic construct
SMDRGDHVNL

SEQ ID NO: 104130 - protein, 10 aa, synthetic construct
SMERGDHVNL

SEQ ID NO: 104131 - protein, 10 aa, synthetic construct
SWGRGDHVNL

SEQ ID NO: 104132 - protein, 10 aa, synthetic construct
SWARGDHVNL

SEQ ID NO: 104133 - protein, 10 aa, synthetic construct
SWVRGDHVNL

SEQ ID NO: 104134 - protein, 10 aa, synthetic construct
SWPRGDHVNL

SEQ ID NO: 104135 - protein, 10 aa, synthetic construct
SWLRGDHVNL

SEQ ID NO: 104136 - protein, 10 aa, synthetic construct
SWIRGDHVNL

SEQ ID NO: 104137 - protein, 10 aa, synthetic construct
SWMRGDHVNL

SEQ ID NO: 104138 - protein, 10 aa, synthetic construct
SWWRGDHVNL

SEQ ID NO: 104139 - protein, 10 aa, synthetic construct
SWFRGDHVNL

SEQ ID NO: 104140 - protein, 10 aa, synthetic construct
SWKRGDHVNL

SEQ ID NO: 104141 - protein, 10 aa, synthetic construct
SWRRGDHVNL

SEQ ID NO: 104142 - protein, 10 aa, synthetic construct
SWHRGDHVNL

SEQ ID NO: 104143 - protein, 10 aa, synthetic construct
SWSRGDHVNL

SEQ ID NO: 104144 - protein, 10 aa, synthetic construct
SWTRGDHVNL

SEQ ID NO: 104145 - protein, 10 aa, synthetic construct
SWYRGDHVNL

SEQ ID NO: 104146 - protein, 10 aa, synthetic construct
SWNRGDHVNL

SEQ ID NO: 104147 - protein, 10 aa, synthetic construct
SWQRGDHVNL

SEQ ID NO: 104148 - protein, 10 aa, synthetic construct
SWDRGDHVNL

SEQ ID NO: 104149 - protein, 10 aa, synthetic construct
SWERGDHVNL

SEQ ID NO: 104150 - protein, 10 aa, synthetic construct
SFGRGDHVNL

SEQ ID NO: 104151 - protein, 10 aa, synthetic construct
SFARGDHVNL

SEQ ID NO: 104152 - protein, 10 aa, synthetic construct
SFVRGDHVNL

SEQ ID NO: 104153 - protein, 10 aa, synthetic construct
SFPRGDHVNL

SEQ ID NO: 104154 - protein, 10 aa, synthetic construct
SFLRGDHVNL

SEQ ID NO: 104155 - protein, 10 aa, synthetic construct
SFIRGDHVNL

SEQ ID NO: 104156 - protein, 10 aa, synthetic construct
SFMRGDHVNL

SEQ ID NO: 104157 - protein, 10 aa, synthetic construct
SFWRGDHVNL

SEQ ID NO: 104158 - protein, 10 aa, synthetic construct
SFFRGDHVNL

SEQ ID NO: 104159 - protein, 10 aa, synthetic construct
SFKRGDHVNL

SEQ ID NO: 104160 - protein, 10 aa, synthetic construct
SFRRGDHVNL

SEQ ID NO: 104161 - protein, 10 aa, synthetic construct
SFHRGDHVNL

SEQ ID NO: 104162 - protein, 10 aa, synthetic construct
SFSRGDHVNL

SEQ ID NO: 104163 - protein, 10 aa, synthetic construct
SFTRGDHVNL

SEQ ID NO: 104164 - protein, 10 aa, synthetic construct
SFYRGDHVNL

SEQ ID NO: 104165 - protein, 10 aa, synthetic construct
SFNRGDHVNL

SEQ ID NO: 104166 - protein, 10 aa, synthetic construct
SFQRGDHVNL

SEQ ID NO: 104167 - protein, 10 aa, synthetic construct
SFDRGDHVNL

SEQ ID NO: 104168 - protein, 10 aa, synthetic construct
SFERGDHVNL

SEQ ID NO: 104169 - protein, 10 aa, synthetic construct
SKGRGDHVNL

SEQ ID NO: 104170 - protein, 10 aa, synthetic construct
SKARGDHVNL

SEQ ID NO: 104171 - protein, 10 aa, synthetic construct
SKVRGDHVNL

SEQ ID NO: 104172 - protein, 10 aa, synthetic construct
SKPRGDHVNL

SEQ ID NO: 104173 - protein, 10 aa, synthetic construct
SKLRGDHVNL

SEQ ID NO: 104174 - protein, 10 aa, synthetic construct
SKIRGDHVNL

SEQ ID NO: 104175 - protein, 10 aa, synthetic construct
SKMRGDHVNL

SEQ ID NO: 104176 - protein, 10 aa, synthetic construct
SKWRGDHVNL

SEQ ID NO: 104177 - protein, 10 aa, synthetic construct
SKFRGDHVNL

SEQ ID NO: 104178 - protein, 10 aa, synthetic construct
SKKRGDHVNL

SEQ ID NO: 104179 - protein, 10 aa, synthetic construct
SKRRGDHVNL

SEQ ID NO: 104180 - protein, 10 aa, synthetic construct
SKHRGDHVNL

SEQ ID NO: 104181 - protein, 10 aa, synthetic construct
SKSRGDHVNL

SEQ ID NO: 104182 - protein, 10 aa, synthetic construct
SKTRGDHVNL

SEQ ID NO: 104183 - protein, 10 aa, synthetic construct
SKYRGDHVNL

SEQ ID NO: 104184 - protein, 10 aa, synthetic construct
SKNRGDHVNL

SEQ ID NO: 104185 - protein, 10 aa, synthetic construct
SKQRGDHVNL

SEQ ID NO: 104186 - protein, 10 aa, synthetic construct
SKDRGDHVNL

SEQ ID NO: 104187 - protein, 10 aa, synthetic construct
SKERGDHVNL

SEQ ID NO: 104188 - protein, 10 aa, synthetic construct
SRGRGDHVNL

SEQ ID NO: 104189 - protein, 10 aa, synthetic construct
SRARGDHVNL

SEQ ID NO: 104190 - protein, 10 aa, synthetic construct
SRVRGDHVNL

SEQ ID NO: 104191 - protein, 10 aa, synthetic construct
SRPRGDHVNL

SEQ ID NO: 104192 - protein, 10 aa, synthetic construct
SRLRGDHVNL

SEQ ID NO: 104193 - protein, 10 aa, synthetic construct
SRIRGDHVNL

SEQ ID NO: 104194 - protein, 10 aa, synthetic construct
SRMRGDHVNL

SEQ ID NO: 104195 - protein, 10 aa, synthetic construct
SRWRGDHVNL

SEQ ID NO: 104196 - protein, 10 aa, synthetic construct
SRFRGDHVNL

SEQ ID NO: 104197 - protein, 10 aa, synthetic construct
SRKRGDHVNL

SEQ ID NO: 104198 - protein, 10 aa, synthetic construct
SRRRGDHVNL

SEQ ID NO: 104199 - protein, 10 aa, synthetic construct
SRHRGDHVNL

SEQ ID NO: 104200 - protein, 10 aa, synthetic construct
SRSRGDHVNL

SEQ ID NO: 104201 - protein, 10 aa, synthetic construct
SRTRGDHVNL

SEQ ID NO: 104202 - protein, 10 aa, synthetic construct
SRYRGDHVNL

SEQ ID NO: 104203 - protein, 10 aa, synthetic construct
SRNRGDHVNL

SEQ ID NO: 104204 - protein, 10 aa, synthetic construct
SRQRGDHVNL

SEQ ID NO: 104205 - protein, 10 aa, synthetic construct
SRDRGDHVNL

SEQ ID NO: 104206 - protein, 10 aa, synthetic construct
SRERGDHVNL

SEQ ID NO: 104207 - protein, 10 aa, synthetic construct
SHGRGDHVNL

SEQ ID NO: 104208 - protein, 10 aa, synthetic construct
SHARGDHVNL

SEQ ID NO: 104209 - protein, 10 aa, synthetic construct
SHVRGDHVNL

SEQ ID NO: 104210 - protein, 10 aa, synthetic construct
SHPRGDHVNL

SEQ ID NO: 104211 - protein, 10 aa, synthetic construct
SHLRGDHVNL

SEQ ID NO: 104212 - protein, 10 aa, synthetic construct
SHIRGDHVNL

SEQ ID NO: 104213 - protein, 10 aa, synthetic construct
SHMRGDHVNL

SEQ ID NO: 104214 - protein, 10 aa, synthetic construct
SHWRGDHVNL

SEQ ID NO: 104215 - protein, 10 aa, synthetic construct
SHFRGDHVNL

SEQ ID NO: 104216 - protein, 10 aa, synthetic construct
SHKRGDHVNL

SEQ ID NO: 104217 - protein, 10 aa, synthetic construct
SHRRGDHVNL

SEQ ID NO: 104218 - protein, 10 aa, synthetic construct
SHHRGDHVNL

SEQ ID NO: 104219 - protein, 10 aa, synthetic construct
SHSRGDHVNL

SEQ ID NO: 104220 - protein, 10 aa, synthetic construct
SHTRGDHVNL

SEQ ID NO: 104221 - protein, 10 aa, synthetic construct
SHYRGDHVNL

SEQ ID NO: 104222 - protein, 10 aa, synthetic construct
SHNRGDHVNL

SEQ ID NO: 104223 - protein, 10 aa, synthetic construct
SHQRGDHVNL

SEQ ID NO: 104224 - protein, 10 aa, synthetic construct
SHDRGDHVNL

SEQ ID NO: 104225 - protein, 10 aa, synthetic construct
SHERGDHVNL

SEQ ID NO: 104226 - protein, 10 aa, synthetic construct
SSGRGDHVNL

SEQ ID NO: 104227 - protein, 10 aa, synthetic construct
SSARGDHVNL

SEQ ID NO: 104228 - protein, 10 aa, synthetic construct
SSVRGDHVNL

SEQ ID NO: 104229 - protein, 10 aa, synthetic construct
SSPRGDHVNL

SEQ ID NO: 104230 - protein, 10 aa, synthetic construct
SSLRGDHVNL

SEQ ID NO: 104231 - protein, 10 aa, synthetic construct
SSIRGDHVNL

SEQ ID NO: 104232 - protein, 10 aa, synthetic construct
SSMRGDHVNL

SEQ ID NO: 104233 - protein, 10 aa, synthetic construct
SSWRGDHVNL

SEQ ID NO: 104234 - protein, 10 aa, synthetic construct
SSFRGDHVNL

SEQ ID NO: 104235 - protein, 10 aa, synthetic construct
SSKRGDHVNL

SEQ ID NO: 104236 - protein, 10 aa, synthetic construct
SSRRGDHVNL

SEQ ID NO: 104237 - protein, 10 aa, synthetic construct
SSHRGDHVNL

SEQ ID NO: 104238 - protein, 10 aa, synthetic construct
SSSRGDHVNL

SEQ ID NO: 104239 - protein, 10 aa, synthetic construct
SSTRGDHVNL

SEQ ID NO: 104240 - protein, 10 aa, synthetic construct
SSYRGDHVNL

SEQ ID NO: 104241 - protein, 10 aa, synthetic construct
SSNRGDHVNL

SEQ ID NO: 104242 - protein, 10 aa, synthetic construct
SSQRGDHVNL

SEQ ID NO: 104243 - protein, 10 aa, synthetic construct
SSDRGDHVNL

SEQ ID NO: 104244 - protein, 10 aa, synthetic construct
SSERGDHVNL

SEQ ID NO: 104245 - protein, 10 aa, synthetic construct
STGRGDHVNL

SEQ ID NO: 104246 - protein, 10 aa, synthetic construct
STARGDHVNL

SEQ ID NO: 104247 - protein, 10 aa, synthetic construct
STVRGDHVNL

SEQ ID NO: 104248 - protein, 10 aa, synthetic construct
STPRGDHVNL

SEQ ID NO: 104249 - protein, 10 aa, synthetic construct
STLRGDHVNL

SEQ ID NO: 104250 - protein, 10 aa, synthetic construct
STIRGDHVNL

SEQ ID NO: 104251 - protein, 10 aa, synthetic construct
STMRGDHVNL

SEQ ID NO: 104252 - protein, 10 aa, synthetic construct
STWRGDHVNL

SEQ ID NO: 104253 - protein, 10 aa, synthetic construct
STFRGDHVNL

SEQ ID NO: 104254 - protein, 10 aa, synthetic construct
STKRGDHVNL

SEQ ID NO: 104255 - protein, 10 aa, synthetic construct
STRRGDHVNL

SEQ ID NO: 104256 - protein, 10 aa, synthetic construct
STHRGDHVNL

SEQ ID NO: 104257 - protein, 10 aa, synthetic construct
STSRGDHVNL

SEQ ID NO: 104258 - protein, 10 aa, synthetic construct
STTRGDHVNL

SEQ ID NO: 104259 - protein, 10 aa, synthetic construct
STYRGDHVNL

SEQ ID NO: 104260 - protein, 10 aa, synthetic construct
STNRGDHVNL

SEQ ID NO: 104261 - protein, 10 aa, synthetic construct
STQRGDHVNL

SEQ ID NO: 104262 - protein, 10 aa, synthetic construct
STDRGDHVNL

SEQ ID NO: 104263 - protein, 10 aa, synthetic construct
STERGDHVNL

SEQ ID NO: 104264 - protein, 10 aa, synthetic construct
SYGRGDHVNL

SEQ ID NO: 104265 - protein, 10 aa, synthetic construct
SYARGDHVNL

SEQ ID NO: 104266 - protein, 10 aa, synthetic construct
SYVRGDHVNL

SEQ ID NO: 104267 - protein, 10 aa, synthetic construct
SYPRGDHVNL

SEQ ID NO: 104268 - protein, 10 aa, synthetic construct
SYLRGDHVNL

SEQ ID NO: 104269 - protein, 10 aa, synthetic construct
SYIRGDHVNL

SEQ ID NO: 104270 - protein, 10 aa, synthetic construct
SYMRGDHVNL

SEQ ID NO: 104271 - protein, 10 aa, synthetic construct
SYWRGDHVNL

SEQ ID NO: 104272 - protein, 10 aa, synthetic construct
SYFRGDHVNL

SEQ ID NO: 104273 - protein, 10 aa, synthetic construct
SYKRGDHVNL

SEQ ID NO: 104274 - protein, 10 aa, synthetic construct
SYRRGDHVNL

SEQ ID NO: 104275 - protein, 10 aa, synthetic construct
SYHRGDHVNL

SEQ ID NO: 104276 - protein, 10 aa, synthetic construct
SYSRGDHVNL

SEQ ID NO: 104277 - protein, 10 aa, synthetic construct
SYTRGDHVNL

SEQ ID NO: 104278 - protein, 10 aa, synthetic construct
SYYRGDHVNL

SEQ ID NO: 104279 - protein, 10 aa, synthetic construct
SYNRGDHVNL

SEQ ID NO: 104280 - protein, 10 aa, synthetic construct
SYQRGDHVNL

SEQ ID NO: 104281 - protein, 10 aa, synthetic construct
SYDRGDHVNL

SEQ ID NO: 104282 - protein, 10 aa, synthetic construct
SYERGDHVNL

SEQ ID NO: 104283 - protein, 10 aa, synthetic construct
SNGRGDHVNL

SEQ ID NO: 104284 - protein, 10 aa, synthetic construct
SNARGDHVNL

SEQ ID NO: 104285 - protein, 10 aa, synthetic construct
SNVRGDHVNL

SEQ ID NO: 104286 - protein, 10 aa, synthetic construct
SNPRGDHVNL

SEQ ID NO: 104287 - protein, 10 aa, synthetic construct
SNLRGDHVNL

SEQ ID NO: 104288 - protein, 10 aa, synthetic construct
SNIRGDHVNL

SEQ ID NO: 104289 - protein, 10 aa, synthetic construct
SNMRGDHVNL

SEQ ID NO: 104290 - protein, 10 aa, synthetic construct
SNWRGDHVNL

SEQ ID NO: 104291 - protein, 10 aa, synthetic construct
SNFRGDHVNL

SEQ ID NO: 104292 - protein, 10 aa, synthetic construct
SNKRGDHVNL

SEQ ID NO: 104293 - protein, 10 aa, synthetic construct
SNRRGDHVNL

SEQ ID NO: 104294 - protein, 10 aa, synthetic construct
SNHRGDHVNL

SEQ ID NO: 104295 - protein, 10 aa, synthetic construct
SNSRGDHVNL

SEQ ID NO: 104296 - protein, 10 aa, synthetic construct
SNTRGDHVNL

SEQ ID NO: 104297 - protein, 10 aa, synthetic construct
SNYRGDHVNL

SEQ ID NO: 104298 - protein, 10 aa, synthetic construct
SNNRGDHVNL

SEQ ID NO: 104299 - protein, 10 aa, synthetic construct
SNQRGDHVNL

SEQ ID NO: 104300 - protein, 10 aa, synthetic construct
SNDRGDHVNL

SEQ ID NO: 104301 - protein, 10 aa, synthetic construct
SNERGDHVNL

SEQ ID NO: 104302 - protein, 10 aa, synthetic construct
SQGRGDHVNL

SEQ ID NO: 104303 - protein, 10 aa, synthetic construct
SQARGDHVNL

SEQ ID NO: 104304 - protein, 10 aa, synthetic construct
SQVRGDHVNL

SEQ ID NO: 104305 - protein, 10 aa, synthetic construct
SQPRGDHVNL

SEQ ID NO: 104306 - protein, 10 aa, synthetic construct
SQLRGDHVNL

SEQ ID NO: 104307 - protein, 10 aa, synthetic construct
SQIRGDHVNL

SEQ ID NO: 104308 - protein, 10 aa, synthetic construct
SQMRGDHVNL

SEQ ID NO: 104309 - protein, 10 aa, synthetic construct
SQWRGDHVNL

SEQ ID NO: 104310 - protein, 10 aa, synthetic construct
SQFRGDHVNL

SEQ ID NO: 104311 - protein, 10 aa, synthetic construct
SQKRGDHVNL

SEQ ID NO: 104312 - protein, 10 aa, synthetic construct
SQRRGDHVNL

SEQ ID NO: 104313 - protein, 10 aa, synthetic construct
SQHRGDHVNL

SEQ ID NO: 104314 - protein, 10 aa, synthetic construct
SQSRGDHVNL

SEQ ID NO: 104315 - protein, 10 aa, synthetic construct
SQTRGDHVNL

SEQ ID NO: 104316 - protein, 10 aa, synthetic construct
SQYRGDHVNL

SEQ ID NO: 104317 - protein, 10 aa, synthetic construct
SQNRGDHVNL

SEQ ID NO: 104318 - protein, 10 aa, synthetic construct
SQQRGDHVNL

SEQ ID NO: 104319 - protein, 10 aa, synthetic construct
SQDRGDHVNL

SEQ ID NO: 104320 - protein, 10 aa, synthetic construct
SQERGDHVNL

SEQ ID NO: 104321 - protein, 10 aa, synthetic construct
SDGRGDHVNL

SEQ ID NO: 104322 - protein, 10 aa, synthetic construct
SDARGDHVNL

SEQ ID NO: 104323 - protein, 10 aa, synthetic construct
SDVRGDHVNL

SEQ ID NO: 104324 - protein, 10 aa, synthetic construct
SDPRGDHVNL

SEQ ID NO: 104325 - protein, 10 aa, synthetic construct
SDLRGDHVNL

SEQ ID NO: 104326 - protein, 10 aa, synthetic construct
SDIRGDHVNL

SEQ ID NO: 104327 - protein, 10 aa, synthetic construct
SDMRGDHVNL

SEQ ID NO: 104328 - protein, 10 aa, synthetic construct
SDWRGDHVNL

SEQ ID NO: 104329 - protein, 10 aa, synthetic construct
SDFRGDHVNL

SEQ ID NO: 104330 - protein, 10 aa, synthetic construct
SDKRGDHVNL

SEQ ID NO: 104331 - protein, 10 aa, synthetic construct
SDRRGDHVNL

SEQ ID NO: 104332 - protein, 10 aa, synthetic construct
SDHRGDHVNL

SEQ ID NO: 104333 - protein, 10 aa, synthetic construct
SDSRGDHVNL

SEQ ID NO: 104334 - protein, 10 aa, synthetic construct
SDTRGDHVNL

SEQ ID NO: 104335 - protein, 10 aa, synthetic construct
SDYRGDHVNL

SEQ ID NO: 104336 - protein, 10 aa, synthetic construct
SDNRGDHVNL

SEQ ID NO: 104337 - protein, 10 aa, synthetic construct
SDQRGDHVNL

SEQ ID NO: 104338 - protein, 10 aa, synthetic construct
SDDRGDHVNL

SEQ ID NO: 104339 - protein, 10 aa, synthetic construct
SDERGDHVNL

SEQ ID NO: 104340 - protein, 10 aa, synthetic construct
SEGRGDHVNL

SEQ ID NO: 104341 - protein, 10 aa, synthetic construct
SEARGDHVNL

SEQ ID NO: 104342 - protein, 10 aa, synthetic construct
SEVRGDHVNL

SEQ ID NO: 104343 - protein, 10 aa, synthetic construct
SEPRGDHVNL

SEQ ID NO: 104344 - protein, 10 aa, synthetic construct
SELRGDHVNL

SEQ ID NO: 104345 - protein, 10 aa, synthetic construct
SEIRGDHVNL

SEQ ID NO: 104346 - protein, 10 aa, synthetic construct
SEMRGDHVNL

SEQ ID NO: 104347 - protein, 10 aa, synthetic construct
SEWRGDHVNL

SEQ ID NO: 104348 - protein, 10 aa, synthetic construct
SEFRGDHVNL

SEQ ID NO: 104349 - protein, 10 aa, synthetic construct
SEKRGDHVNL

SEQ ID NO: 104350 - protein, 10 aa, synthetic construct
SERRGDHVNL

SEQ ID NO: 104351 - protein, 10 aa, synthetic construct
SEHRGDHVNL

SEQ ID NO: 104352 - protein, 10 aa, synthetic construct
SESRGDHVNL

SEQ ID NO: 104353 - protein, 10 aa, synthetic construct
SETRGDHVNL

SEQ ID NO: 104354 - protein, 10 aa, synthetic construct
SEYRGDHVNL

SEQ ID NO: 104355 - protein, 10 aa, synthetic construct
SENRGDHVNL

SEQ ID NO: 104356 - protein, 10 aa, synthetic construct
SEQRGDHVNL

SEQ ID NO: 104357 - protein, 10 aa, synthetic construct
SEDRGDHVNL

SEQ ID NO: 104358 - protein, 10 aa, synthetic construct
SEERGDHVNL

SEQ ID NO: 104359 - protein, 10 aa, synthetic construct
TGGRGDHVNL

SEQ ID NO: 104360 - protein, 10 aa, synthetic construct
TGARGDHVNL

SEQ ID NO: 104361 - protein, 10 aa, synthetic construct
TGVRGDHVNL

SEQ ID NO: 104362 - protein, 10 aa, synthetic construct
TGPRGDHVNL

SEQ ID NO: 104363 - protein, 10 aa, synthetic construct
TGLRGDHVNL

SEQ ID NO: 104364 - protein, 10 aa, synthetic construct
TGIRGDHVNL

SEQ ID NO: 104365 - protein, 10 aa, synthetic construct
TGMRGDHVNL

SEQ ID NO: 104366 - protein, 10 aa, synthetic construct
TGWRGDHVNL

SEQ ID NO: 104367 - protein, 10 aa, synthetic construct
TGFRGDHVNL

SEQ ID NO: 104368 - protein, 10 aa, synthetic construct
TGKRGDHVNL

SEQ ID NO: 104369 - protein, 10 aa, synthetic construct
TGRRGDHVNL

SEQ ID NO: 104370 - protein, 10 aa, synthetic construct
TGHRGDHVNL

SEQ ID NO: 104371 - protein, 10 aa, synthetic construct
TGSRGDHVNL

SEQ ID NO: 104372 - protein, 10 aa, synthetic construct
TGTRGDHVNL

SEQ ID NO: 104373 - protein, 10 aa, synthetic construct
TGYRGDHVNL

SEQ ID NO: 104374 - protein, 10 aa, synthetic construct
TGNRGDHVNL

SEQ ID NO: 104375 - protein, 10 aa, synthetic construct
TGQRGDHVNL

SEQ ID NO: 104376 - protein, 10 aa, synthetic construct
TGDRGDHVNL

SEQ ID NO: 104377 - protein, 10 aa, synthetic construct
TGERGDHVNL

SEQ ID NO: 104378 - protein, 10 aa, synthetic construct
TAGRGDHVNL

SEQ ID NO: 104379 - protein, 10 aa, synthetic construct
TAARGDHVNL

SEQ ID NO: 104380 - protein, 10 aa, synthetic construct
TAVRGDHVNL

SEQ ID NO: 104381 - protein, 10 aa, synthetic construct
TAPRGDHVNL

SEQ ID NO: 104382 - protein, 10 aa, synthetic construct
TALRGDHVNL

SEQ ID NO: 104383 - protein, 10 aa, synthetic construct
TAIRGDHVNL

SEQ ID NO: 104384 - protein, 10 aa, synthetic construct
TAMRGDHVNL

SEQ ID NO: 104385 - protein, 10 aa, synthetic construct
TAWRGDHVNL

SEQ ID NO: 104386 - protein, 10 aa, synthetic construct
TAFRGDHVNL

SEQ ID NO: 104387 - protein, 10 aa, synthetic construct
TAKRGDHVNL

SEQ ID NO: 104388 - protein, 10 aa, synthetic construct
TARRGDHVNL

SEQ ID NO: 104389 - protein, 10 aa, synthetic construct
TAHRGDHVNL

SEQ ID NO: 104390 - protein, 10 aa, synthetic construct
TASRGDHVNL

SEQ ID NO: 104391 - protein, 10 aa, synthetic construct
TATRGDHVNL

SEQ ID NO: 104392 - protein, 10 aa, synthetic construct
TAYRGDHVNL

SEQ ID NO: 104393 - protein, 10 aa, synthetic construct
TANRGDHVNL

SEQ ID NO: 104394 - protein, 10 aa, synthetic construct
TAQRGDHVNL

SEQ ID NO: 104395 - protein, 10 aa, synthetic construct
TADRGDHVNL

SEQ ID NO: 104396 - protein, 10 aa, synthetic construct
TAERGDHVNL

SEQ ID NO: 104397 - protein, 10 aa, synthetic construct
TVGRGDHVNL

SEQ ID NO: 104398 - protein, 10 aa, synthetic construct
TVARGDHVNL

SEQ ID NO: 104399 - protein, 10 aa, synthetic construct
TVVRGDHVNL

SEQ ID NO: 104400 - protein, 10 aa, synthetic construct
TVPRGDHVNL

SEQ ID NO: 104401 - protein, 10 aa, synthetic construct
TVLRGDHVNL

SEQ ID NO: 104402 - protein, 10 aa, synthetic construct
TVIRGDHVNL

SEQ ID NO: 104403 - protein, 10 aa, synthetic construct
TVMRGDHVNL

SEQ ID NO: 104404 - protein, 10 aa, synthetic construct
TVWRGDHVNL

SEQ ID NO: 104405 - protein, 10 aa, synthetic construct
TVFRGDHVNL

SEQ ID NO: 104406 - protein, 10 aa, synthetic construct
TVKRGDHVNL

SEQ ID NO: 104407 - protein, 10 aa, synthetic construct
TVRRGDHVNL

SEQ ID NO: 104408 - protein, 10 aa, synthetic construct
TVHRGDHVNL

SEQ ID NO: 104409 - protein, 10 aa, synthetic construct
TVSRGDHVNL

SEQ ID NO: 104410 - protein, 10 aa, synthetic construct
TVTRGDHVNL

SEQ ID NO: 104411 - protein, 10 aa, synthetic construct
TVYRGDHVNL

SEQ ID NO: 104412 - protein, 10 aa, synthetic construct
TVNRGDHVNL

SEQ ID NO: 104413 - protein, 10 aa, synthetic construct
TVQRGDHVNL

SEQ ID NO: 104414 - protein, 10 aa, synthetic construct
TVDRGDHVNL

SEQ ID NO: 104415 - protein, 10 aa, synthetic construct
TVERGDHVNL

SEQ ID NO: 104416 - protein, 10 aa, synthetic construct
TPGRGDHVNL

SEQ ID NO: 104417 - protein, 10 aa, synthetic construct
TPARGDHVNL

SEQ ID NO: 104418 - protein, 10 aa, synthetic construct
TPVRGDHVNL

SEQ ID NO: 104419 - protein, 10 aa, synthetic construct
TPPRGDHVNL

SEQ ID NO: 104420 - protein, 10 aa, synthetic construct
TPLRGDHVNL

SEQ ID NO: 104421 - protein, 10 aa, synthetic construct
TPIRGDHVNL

SEQ ID NO: 104422 - protein, 10 aa, synthetic construct
TPMRGDHVNL

SEQ ID NO: 104423 - protein, 10 aa, synthetic construct
TPWRGDHVNL

SEQ ID NO: 104424 - protein, 10 aa, synthetic construct
TPFRGDHVNL

SEQ ID NO: 104425 - protein, 10 aa, synthetic construct
TPKRGDHVNL

SEQ ID NO: 104426 - protein, 10 aa, synthetic construct
TPRRGDHVNL

SEQ ID NO: 104427 - protein, 10 aa, synthetic construct
TPHRGDHVNL

SEQ ID NO: 104428 - protein, 10 aa, synthetic construct
TPSRGDHVNL

SEQ ID NO: 104429 - protein, 10 aa, synthetic construct
TPTRGDHVNL

SEQ ID NO: 104430 - protein, 10 aa, synthetic construct
TPYRGDHVNL

SEQ ID NO: 104431 - protein, 10 aa, synthetic construct
TPNRGDHVNL

SEQ ID NO: 104432 - protein, 10 aa, synthetic construct
TPQRGDHVNL

SEQ ID NO: 104433 - protein, 10 aa, synthetic construct
TPDRGDHVNL

SEQ ID NO: 104434 - protein, 10 aa, synthetic construct
TPERGDHVNL

SEQ ID NO: 104435 - protein, 10 aa, synthetic construct
TLGRGDHVNL

SEQ ID NO: 104436 - protein, 10 aa, synthetic construct
TLARGDHVNL

SEQ ID NO: 104437 - protein, 10 aa, synthetic construct
TLVRGDHVNL

SEQ ID NO: 104438 - protein, 10 aa, synthetic construct
TLPRGDHVNL

SEQ ID NO: 104439 - protein, 10 aa, synthetic construct
TLLRGDHVNL

SEQ ID NO: 104440 - protein, 10 aa, synthetic construct
TLIRGDHVNL

SEQ ID NO: 104441 - protein, 10 aa, synthetic construct
TLMRGDHVNL

SEQ ID NO: 104442 - protein, 10 aa, synthetic construct
TLWRGDHVNL

SEQ ID NO: 104443 - protein, 10 aa, synthetic construct
TLFRGDHVNL

SEQ ID NO: 104444 - protein, 10 aa, synthetic construct
TLKRGDHVNL

SEQ ID NO: 104445 - protein, 10 aa, synthetic construct
TLRRGDHVNL

SEQ ID NO: 104446 - protein, 10 aa, synthetic construct
TLHRGDHVNL

SEQ ID NO: 104447 - protein, 10 aa, synthetic construct
TLSRGDHVNL

SEQ ID NO: 104448 - protein, 10 aa, synthetic construct
TLTRGDHVNL

SEQ ID NO: 104449 - protein, 10 aa, synthetic construct
TLYRGDHVNL

SEQ ID NO: 104450 - protein, 10 aa, synthetic construct
TLNRGDHVNL

SEQ ID NO: 104451 - protein, 10 aa, synthetic construct
TLQRGDHVNL

SEQ ID NO: 104452 - protein, 10 aa, synthetic construct
TLDRGDHVNL

SEQ ID NO: 104453 - protein, 10 aa, synthetic construct
TLERGDHVNL

SEQ ID NO: 104454 - protein, 10 aa, synthetic construct
TIGRGDHVNL

SEQ ID NO: 104455 - protein, 10 aa, synthetic construct
TIARGDHVNL

SEQ ID NO: 104456 - protein, 10 aa, synthetic construct
TIVRGDHVNL

SEQ ID NO: 104457 - protein, 10 aa, synthetic construct
TIPRGDHVNL

SEQ ID NO: 104458 - protein, 10 aa, synthetic construct
TILRGDHVNL

SEQ ID NO: 104459 - protein, 10 aa, synthetic construct
TIIRGDHVNL

SEQ ID NO: 104460 - protein, 10 aa, synthetic construct
TIMRGDHVNL

SEQ ID NO: 104461 - protein, 10 aa, synthetic construct
TIWRGDHVNL

SEQ ID NO: 104462 - protein, 10 aa, synthetic construct
TIFRGDHVNL

SEQ ID NO: 104463 - protein, 10 aa, synthetic construct
TIKRGDHVNL

SEQ ID NO: 104464 - protein, 10 aa, synthetic construct
TIRRGDHVNL

SEQ ID NO: 104465 - protein, 10 aa, synthetic construct
TIHRGDHVNL

SEQ ID NO: 104466 - protein, 10 aa, synthetic construct
TISRGDHVNL

SEQ ID NO: 104467 - protein, 10 aa, synthetic construct
TITRGDHVNL

SEQ ID NO: 104468 - protein, 10 aa, synthetic construct
TIYRGDHVNL

SEQ ID NO: 104469 - protein, 10 aa, synthetic construct
TINRGDHVNL

SEQ ID NO: 104470 - protein, 10 aa, synthetic construct
TIQRGDHVNL

SEQ ID NO: 104471 - protein, 10 aa, synthetic construct
TIDRGDHVNL

SEQ ID NO: 104472 - protein, 10 aa, synthetic construct
TIERGDHVNL

SEQ ID NO: 104473 - protein, 10 aa, synthetic construct
TMGRGDHVNL

SEQ ID NO: 104474 - protein, 10 aa, synthetic construct
TMARGDHVNL

SEQ ID NO: 104475 - protein, 10 aa, synthetic construct
TMVRGDHVNL

SEQ ID NO: 104476 - protein, 10 aa, synthetic construct
TMPRGDHVNL

SEQ ID NO: 104477 - protein, 10 aa, synthetic construct
TMLRGDHVNL

SEQ ID NO: 104478 - protein, 10 aa, synthetic construct
TMIRGDHVNL

SEQ ID NO: 104479 - protein, 10 aa, synthetic construct
TMMRGDHVNL

SEQ ID NO: 104480 - protein, 10 aa, synthetic construct
TMWRGDHVNL

SEQ ID NO: 104481 - protein, 10 aa, synthetic construct
TMFRGDHVNL

SEQ ID NO: 104482 - protein, 10 aa, synthetic construct
TMKRGDHVNL

SEQ ID NO: 104483 - protein, 10 aa, synthetic construct
TMRRGDHVNL

SEQ ID NO: 104484 - protein, 10 aa, synthetic construct
TMHRGDHVNL

SEQ ID NO: 104485 - protein, 10 aa, synthetic construct
TMSRGDHVNL

SEQ ID NO: 104486 - protein, 10 aa, synthetic construct
TMTRGDHVNL

SEQ ID NO: 104487 - protein, 10 aa, synthetic construct
TMYRGDHVNL

SEQ ID NO: 104488 - protein, 10 aa, synthetic construct
TMNRGDHVNL

SEQ ID NO: 104489 - protein, 10 aa, synthetic construct
TMQRGDHVNL

SEQ ID NO: 104490 - protein, 10 aa, synthetic construct
TMDRGDHVNL

SEQ ID NO: 104491 - protein, 10 aa, synthetic construct
TMERGDHVNL

SEQ ID NO: 104492 - protein, 10 aa, synthetic construct
TWGRGDHVNL

SEQ ID NO: 104493 - protein, 10 aa, synthetic construct
TWARGDHVNL

SEQ ID NO: 104494 - protein, 10 aa, synthetic construct
TWVRGDHVNL

SEQ ID NO: 104495 - protein, 10 aa, synthetic construct
TWPRGDHVNL

SEQ ID NO: 104496 - protein, 10 aa, synthetic construct
TWLRGDHVNL

SEQ ID NO: 104497 - protein, 10 aa, synthetic construct
TWIRGDHVNL

SEQ ID NO: 104498 - protein, 10 aa, synthetic construct
TWMRGDHVNL

SEQ ID NO: 104499 - protein, 10 aa, synthetic construct
TWWRGDHVNL

SEQ ID NO: 104500 - protein, 10 aa, synthetic construct
TWFRGDHVNL

SEQ ID NO: 104501 - protein, 10 aa, synthetic construct
TWKRGDHVNL

SEQ ID NO: 104502 - protein, 10 aa, synthetic construct
TWRRGDHVNL

SEQ ID NO: 104503 - protein, 10 aa, synthetic construct
TWHRGDHVNL

SEQ ID NO: 104504 - protein, 10 aa, synthetic construct
TWSRGDHVNL

SEQ ID NO: 104505 - protein, 10 aa, synthetic construct
TWTRGDHVNL

SEQ ID NO: 104506 - protein, 10 aa, synthetic construct
TWYRGDHVNL

SEQ ID NO: 104507 - protein, 10 aa, synthetic construct
TWNRGDHVNL

SEQ ID NO: 104508 - protein, 10 aa, synthetic construct
TWQRGDHVNL

SEQ ID NO: 104509 - protein, 10 aa, synthetic construct
TWDRGDHVNL

SEQ ID NO: 104510 - protein, 10 aa, synthetic construct
TWERGDHVNL

SEQ ID NO: 104511 - protein, 10 aa, synthetic construct
TFGRGDHVNL

SEQ ID NO: 104512 - protein, 10 aa, synthetic construct
TFARGDHVNL

SEQ ID NO: 104513 - protein, 10 aa, synthetic construct
TFVRGDHVNL

SEQ ID NO: 104514 - protein, 10 aa, synthetic construct
TFPRGDHVNL

SEQ ID NO: 104515 - protein, 10 aa, synthetic construct
TFLRGDHVNL

SEQ ID NO: 104516 - protein, 10 aa, synthetic construct
TFIRGDHVNL

SEQ ID NO: 104517 - protein, 10 aa, synthetic construct
TFMRGDHVNL

SEQ ID NO: 104518 - protein, 10 aa, synthetic construct
TFWRGDHVNL

SEQ ID NO: 104519 - protein, 10 aa, synthetic construct
TFFRGDHVNL

SEQ ID NO: 104520 - protein, 10 aa, synthetic construct
TFKRGDHVNL

SEQ ID NO: 104521 - protein, 10 aa, synthetic construct
TFRRGDHVNL

SEQ ID NO: 104522 - protein, 10 aa, synthetic construct
TFHRGDHVNL

SEQ ID NO: 104523 - protein, 10 aa, synthetic construct
TFSRGDHVNL

SEQ ID NO: 104524 - protein, 10 aa, synthetic construct
TFTRGDHVNL

SEQ ID NO: 104525 - protein, 10 aa, synthetic construct
TFYRGDHVNL

SEQ ID NO: 104526 - protein, 10 aa, synthetic construct
TFNRGDHVNL

SEQ ID NO: 104527 - protein, 10 aa, synthetic construct
TFQRGDHVNL

SEQ ID NO: 104528 - protein, 10 aa, synthetic construct
TFDRGDHVNL

SEQ ID NO: 104529 - protein, 10 aa, synthetic construct
TFERGDHVNL

SEQ ID NO: 104530 - protein, 10 aa, synthetic construct
TKGRGDHVNL

SEQ ID NO: 104531 - protein, 10 aa, synthetic construct
TKARGDHVNL

SEQ ID NO: 104532 - protein, 10 aa, synthetic construct
TKVRGDHVNL

SEQ ID NO: 104533 - protein, 10 aa, synthetic construct
TKPRGDHVNL

SEQ ID NO: 104534 - protein, 10 aa, synthetic construct
TKLRGDHVNL

SEQ ID NO: 104535 - protein, 10 aa, synthetic construct
TKIRGDHVNL

SEQ ID NO: 104536 - protein, 10 aa, synthetic construct
TKMRGDHVNL

SEQ ID NO: 104537 - protein, 10 aa, synthetic construct
TKWRGDHVNL

SEQ ID NO: 104538 - protein, 10 aa, synthetic construct
TKFRGDHVNL

SEQ ID NO: 104539 - protein, 10 aa, synthetic construct
TKKRGDHVNL

SEQ ID NO: 104540 - protein, 10 aa, synthetic construct
TKRRGDHVNL

SEQ ID NO: 104541 - protein, 10 aa, synthetic construct
TKHRGDHVNL

SEQ ID NO: 104542 - protein, 10 aa, synthetic construct
TKSRGDHVNL

SEQ ID NO: 104543 - protein, 10 aa, synthetic construct
TKTRGDHVNL

SEQ ID NO: 104544 - protein, 10 aa, synthetic construct
TKYRGDHVNL

SEQ ID NO: 104545 - protein, 10 aa, synthetic construct
TKNRGDHVNL

SEQ ID NO: 104546 - protein, 10 aa, synthetic construct
TKQRGDHVNL

SEQ ID NO: 104547 - protein, 10 aa, synthetic construct
TKDRGDHVNL

SEQ ID NO: 104548 - protein, 10 aa, synthetic construct
TKERGDHVNL

SEQ ID NO: 104549 - protein, 10 aa, synthetic construct
TRGRGDHVNL

SEQ ID NO: 104550 - protein, 10 aa, synthetic construct
TRARGDHVNL

SEQ ID NO: 104551 - protein, 10 aa, synthetic construct
TRVRGDHVNL

SEQ ID NO: 104552 - protein, 10 aa, synthetic construct
TRPRGDHVNL

SEQ ID NO: 104553 - protein, 10 aa, synthetic construct
TRLRGDHVNL

SEQ ID NO: 104554 - protein, 10 aa, synthetic construct
TRIRGDHVNL

SEQ ID NO: 104555 - protein, 10 aa, synthetic construct
TRMRGDHVNL

SEQ ID NO: 104556 - protein, 10 aa, synthetic construct
TRWRGDHVNL

SEQ ID NO: 104557 - protein, 10 aa, synthetic construct
TRFRGDHVNL

SEQ ID NO: 104558 - protein, 10 aa, synthetic construct
TRKRGDHVNL

SEQ ID NO: 104559 - protein, 10 aa, synthetic construct
TRRRGDHVNL

SEQ ID NO: 104560 - protein, 10 aa, synthetic construct
TRHRGDHVNL

SEQ ID NO: 104561 - protein, 10 aa, synthetic construct
TRSRGDHVNL

SEQ ID NO: 104562 - protein, 10 aa, synthetic construct
TRTRGDHVNL

SEQ ID NO: 104563 - protein, 10 aa, synthetic construct
TRYRGDHVNL

SEQ ID NO: 104564 - protein, 10 aa, synthetic construct
TRNRGDHVNL

SEQ ID NO: 104565 - protein, 10 aa, synthetic construct
TRQRGDHVNL

SEQ ID NO: 104566 - protein, 10 aa, synthetic construct
TRDRGDHVNL

SEQ ID NO: 104567 - protein, 10 aa, synthetic construct
TRERGDHVNL

SEQ ID NO: 104568 - protein, 10 aa, synthetic construct
THGRGDHVNL

SEQ ID NO: 104569 - protein, 10 aa, synthetic construct
THARGDHVNL

SEQ ID NO: 104570 - protein, 10 aa, synthetic construct
THVRGDHVNL

SEQ ID NO: 104571 - protein, 10 aa, synthetic construct
THPRGDHVNL

SEQ ID NO: 104572 - protein, 10 aa, synthetic construct
THLRGDHVNL

SEQ ID NO: 104573 - protein, 10 aa, synthetic construct
THIRGDHVNL

SEQ ID NO: 104574 - protein, 10 aa, synthetic construct
THMRGDHVNL

SEQ ID NO: 104575 - protein, 10 aa, synthetic construct
THWRGDHVNL

SEQ ID NO: 104576 - protein, 10 aa, synthetic construct
THFRGDHVNL

SEQ ID NO: 104577 - protein, 10 aa, synthetic construct
THKRGDHVNL

SEQ ID NO: 104578 - protein, 10 aa, synthetic construct
THRRGDHVNL

SEQ ID NO: 104579 - protein, 10 aa, synthetic construct
THHRGDHVNL

SEQ ID NO: 104580 - protein, 10 aa, synthetic construct
THSRGDHVNL

SEQ ID NO: 104581 - protein, 10 aa, synthetic construct
THTRGDHVNL

SEQ ID NO: 104582 - protein, 10 aa, synthetic construct
THYRGDHVNL

SEQ ID NO: 104583 - protein, 10 aa, synthetic construct
THNRGDHVNL

SEQ ID NO: 104584 - protein, 10 aa, synthetic construct
THQRGDHVNL

SEQ ID NO: 104585 - protein, 10 aa, synthetic construct
THDRGDHVNL

SEQ ID NO: 104586 - protein, 10 aa, synthetic construct
THERGDHVNL

SEQ ID NO: 104587 - protein, 10 aa, synthetic construct
TSGRGDHVNL

SEQ ID NO: 104588 - protein, 10 aa, synthetic construct
TSARGDHVNL

SEQ ID NO: 104589 - protein, 10 aa, synthetic construct
TSVRGDHVNL

SEQ ID NO: 104590 - protein, 10 aa, synthetic construct
TSPRGDHVNL

SEQ ID NO: 104591 - protein, 10 aa, synthetic construct
TSLRGDHVNL

SEQ ID NO: 104592 - protein, 10 aa, synthetic construct
TSIRGDHVNL

SEQ ID NO: 104593 - protein, 10 aa, synthetic construct
TSMRGDHVNL

SEQ ID NO: 104594 - protein, 10 aa, synthetic construct
TSWRGDHVNL

SEQ ID NO: 104595 - protein, 10 aa, synthetic construct
TSFRGDHVNL

SEQ ID NO: 104596 - protein, 10 aa, synthetic construct
TSKRGDHVNL

SEQ ID NO: 104597 - protein, 10 aa, synthetic construct
TSRRGDHVNL

SEQ ID NO: 104598 - protein, 10 aa, synthetic construct
TSHRGDHVNL

SEQ ID NO: 104599 - protein, 10 aa, synthetic construct
TSSRGDHVNL

SEQ ID NO: 104600 - protein, 10 aa, synthetic construct
TSTRGDHVNL

SEQ ID NO: 104601 - protein, 10 aa, synthetic construct
TSYRGDHVNL

SEQ ID NO: 104602 - protein, 10 aa, synthetic construct
TSNRGDHVNL

SEQ ID NO: 104603 - protein, 10 aa, synthetic construct
TSQRGDHVNL

SEQ ID NO: 104604 - protein, 10 aa, synthetic construct
TSDRGDHVNL

SEQ ID NO: 104605 - protein, 10 aa, synthetic construct
TSERGDHVNL

SEQ ID NO: 104606 - protein, 10 aa, synthetic construct
TTGRGDHVNL

SEQ ID NO: 104607 - protein, 10 aa, synthetic construct
TTARGDHVNL

SEQ ID NO: 104608 - protein, 10 aa, synthetic construct
TTVRGDHVNL

SEQ ID NO: 104609 - protein, 10 aa, synthetic construct
TTPRGDHVNL

SEQ ID NO: 104610 - protein, 10 aa, synthetic construct
TTLRGDHVNL

SEQ ID NO: 104611 - protein, 10 aa, synthetic construct
TTIRGDHVNL

SEQ ID NO: 104612 - protein, 10 aa, synthetic construct
TTMRGDHVNL

SEQ ID NO: 104613 - protein, 10 aa, synthetic construct
TTWRGDHVNL

SEQ ID NO: 104614 - protein, 10 aa, synthetic construct
TTFRGDHVNL

SEQ ID NO: 104615 - protein, 10 aa, synthetic construct
TTKRGDHVNL

SEQ ID NO: 104616 - protein, 10 aa, synthetic construct
TTRRGDHVNL

SEQ ID NO: 104617 - protein, 10 aa, synthetic construct
TTHRGDHVNL

SEQ ID NO: 104618 - protein, 10 aa, synthetic construct
TTSRGDHVNL

SEQ ID NO: 104619 - protein, 10 aa, synthetic construct
TTTRGDHVNL

SEQ ID NO: 104620 - protein, 10 aa, synthetic construct
TTYRGDHVNL

SEQ ID NO: 104621 - protein, 10 aa, synthetic construct
TTNRGDHVNL

SEQ ID NO: 104622 - protein, 10 aa, synthetic construct
TTQRGDHVNL

SEQ ID NO: 104623 - protein, 10 aa, synthetic construct
TTDRGDHVNL

SEQ ID NO: 104624 - protein, 10 aa, synthetic construct
TTERGDHVNL

SEQ ID NO: 104625 - protein, 10 aa, synthetic construct
TYGRGDHVNL

SEQ ID NO: 104626 - protein, 10 aa, synthetic construct
TYARGDHVNL

SEQ ID NO: 104627 - protein, 10 aa, synthetic construct
TYVRGDHVNL

SEQ ID NO: 104628 - protein, 10 aa, synthetic construct
TYPRGDHVNL

SEQ ID NO: 104629 - protein, 10 aa, synthetic construct
TYLRGDHVNL

SEQ ID NO: 104630 - protein, 10 aa, synthetic construct
TYIRGDHVNL

SEQ ID NO: 104631 - protein, 10 aa, synthetic construct
TYMRGDHVNL

SEQ ID NO: 104632 - protein, 10 aa, synthetic construct
TYWRGDHVNL

SEQ ID NO: 104633 - protein, 10 aa, synthetic construct
TYFRGDHVNL

SEQ ID NO: 104634 - protein, 10 aa, synthetic construct
TYKRGDHVNL

SEQ ID NO: 104635 - protein, 10 aa, synthetic construct
TYRRGDHVNL

SEQ ID NO: 104636 - protein, 10 aa, synthetic construct
TYHRGDHVNL

SEQ ID NO: 104637 - protein, 10 aa, synthetic construct
TYSRGDHVNL

SEQ ID NO: 104638 - protein, 10 aa, synthetic construct
TYTRGDHVNL

SEQ ID NO: 104639 - protein, 10 aa, synthetic construct
TYYRGDHVNL

SEQ ID NO: 104640 - protein, 10 aa, synthetic construct
TYNRGDHVNL

SEQ ID NO: 104641 - protein, 10 aa, synthetic construct
TYQRGDHVNL

SEQ ID NO: 104642 - protein, 10 aa, synthetic construct
TYDRGDHVNL

SEQ ID NO: 104643 - protein, 10 aa, synthetic construct
TYERGDHVNL

SEQ ID NO: 104644 - protein, 10 aa, synthetic construct
TNGRGDHVNL

SEQ ID NO: 104645 - protein, 10 aa, synthetic construct
TNARGDHVNL

SEQ ID NO: 104646 - protein, 10 aa, synthetic construct
TNVRGDHVNL

SEQ ID NO: 104647 - protein, 10 aa, synthetic construct
TNPRGDHVNL

SEQ ID NO: 104648 - protein, 10 aa, synthetic construct
TNLRGDHVNL

SEQ ID NO: 104649 - protein, 10 aa, synthetic construct
TNIRGDHVNL

SEQ ID NO: 104650 - protein, 10 aa, synthetic construct
TNMRGDHVNL

SEQ ID NO: 104651 - protein, 10 aa, synthetic construct
TNWRGDHVNL

SEQ ID NO: 104652 - protein, 10 aa, synthetic construct
TNFRGDHVNL

SEQ ID NO: 104653 - protein, 10 aa, synthetic construct
TNKRGDHVNL

SEQ ID NO: 104654 - protein, 10 aa, synthetic construct
TNRRGDHVNL

SEQ ID NO: 104655 - protein, 10 aa, synthetic construct
TNHRGDHVNL

SEQ ID NO: 104656 - protein, 10 aa, synthetic construct
TNSRGDHVNL

SEQ ID NO: 104657 - protein, 10 aa, synthetic construct
TNTRGDHVNL

SEQ ID NO: 104658 - protein, 10 aa, synthetic construct
TNYRGDHVNL

SEQ ID NO: 104659 - protein, 10 aa, synthetic construct
TNNRGDHVNL

SEQ ID NO: 104660 - protein, 10 aa, synthetic construct
TNQRGDHVNL

SEQ ID NO: 104661 - protein, 10 aa, synthetic construct
TNDRGDHVNL

SEQ ID NO: 104662 - protein, 10 aa, synthetic construct
TNERGDHVNL

SEQ ID NO: 104663 - protein, 10 aa, synthetic construct
TQGRGDHVNL

SEQ ID NO: 104664 - protein, 10 aa, synthetic construct
TQARGDHVNL

SEQ ID NO: 104665 - protein, 10 aa, synthetic construct
TQVRGDHVNL

SEQ ID NO: 104666 - protein, 10 aa, synthetic construct
TQPRGDHVNL

SEQ ID NO: 104667 - protein, 10 aa, synthetic construct
TQLRGDHVNL

SEQ ID NO: 104668 - protein, 10 aa, synthetic construct
TQIRGDHVNL

SEQ ID NO: 104669 - protein, 10 aa, synthetic construct
TQMRGDHVNL

SEQ ID NO: 104670 - protein, 10 aa, synthetic construct
TQWRGDHVNL

SEQ ID NO: 104671 - protein, 10 aa, synthetic construct
TQFRGDHVNL

SEQ ID NO: 104672 - protein, 10 aa, synthetic construct
TQKRGDHVNL

SEQ ID NO: 104673 - protein, 10 aa, synthetic construct
TQRRGDHVNL

SEQ ID NO: 104674 - protein, 10 aa, synthetic construct
TQHRGDHVNL

SEQ ID NO: 104675 - protein, 10 aa, synthetic construct
TQSRGDHVNL

SEQ ID NO: 104676 - protein, 10 aa, synthetic construct
TQTRGDHVNL

SEQ ID NO: 104677 - protein, 10 aa, synthetic construct
TQYRGDHVNL

SEQ ID NO: 104678 - protein, 10 aa, synthetic construct
TQNRGDHVNL

SEQ ID NO: 104679 - protein, 10 aa, synthetic construct
TQQRGDHVNL

SEQ ID NO: 104680 - protein, 10 aa, synthetic construct
TQDRGDHVNL

SEQ ID NO: 104681 - protein, 10 aa, synthetic construct
TQERGDHVNL

SEQ ID NO: 104682 - protein, 10 aa, synthetic construct
TDGRGDHVNL

SEQ ID NO: 104683 - protein, 10 aa, synthetic construct
TDARGDHVNL

SEQ ID NO: 104684 - protein, 10 aa, synthetic construct
TDVRGDHVNL

SEQ ID NO: 104685 - protein, 10 aa, synthetic construct
TDPRGDHVNL

SEQ ID NO: 104686 - protein, 10 aa, synthetic construct
TDLRGDHVNL

SEQ ID NO: 104687 - protein, 10 aa, synthetic construct
TDIRGDHVNL

SEQ ID NO: 104688 - protein, 10 aa, synthetic construct
TDMRGDHVNL

SEQ ID NO: 104689 - protein, 10 aa, synthetic construct
TDWRGDHVNL

SEQ ID NO: 104690 - protein, 10 aa, synthetic construct
TDFRGDHVNL

SEQ ID NO: 104691 - protein, 10 aa, synthetic construct
TDKRGDHVNL

SEQ ID NO: 104692 - protein, 10 aa, synthetic construct
TDRRGDHVNL

SEQ ID NO: 104693 - protein, 10 aa, synthetic construct
TDHRGDHVNL

SEQ ID NO: 104694 - protein, 10 aa, synthetic construct
TDSRGDHVNL

SEQ ID NO: 104695 - protein, 10 aa, synthetic construct
TDTRGDHVNL

SEQ ID NO: 104696 - protein, 10 aa, synthetic construct
TDYRGDHVNL

SEQ ID NO: 104697 - protein, 10 aa, synthetic construct
TDNRGDHVNL

SEQ ID NO: 104698 - protein, 10 aa, synthetic construct
TDQRGDHVNL

SEQ ID NO: 104699 - protein, 10 aa, synthetic construct
TDDRGDHVNL

SEQ ID NO: 104700 - protein, 10 aa, synthetic construct
TDERGDHVNL

SEQ ID NO: 104701 - protein, 10 aa, synthetic construct
TEGRGDHVNL

SEQ ID NO: 104702 - protein, 10 aa, synthetic construct
TEARGDHVNL

SEQ ID NO: 104703 - protein, 10 aa, synthetic construct
TEVRGDHVNL

SEQ ID NO: 104704 - protein, 10 aa, synthetic construct
TEPRGDHVNL

SEQ ID NO: 104705 - protein, 10 aa, synthetic construct
TELRGDHVNL

SEQ ID NO: 104706 - protein, 10 aa, synthetic construct
TEIRGDHVNL

SEQ ID NO: 104707 - protein, 10 aa, synthetic construct
TEMRGDHVNL

SEQ ID NO: 104708 - protein, 10 aa, synthetic construct
TEWRGDHVNL

SEQ ID NO: 104709 - protein, 10 aa, synthetic construct
TEFRGDHVNL

SEQ ID NO: 104710 - protein, 10 aa, synthetic construct
TEKRGDHVNL

SEQ ID NO: 104711 - protein, 10 aa, synthetic construct
TERRGDHVNL

SEQ ID NO: 104712 - protein, 10 aa, synthetic construct
TEHRGDHVNL

SEQ ID NO: 104713 - protein, 10 aa, synthetic construct
TESRGDHVNL

SEQ ID NO: 104714 - protein, 10 aa, synthetic construct
TETRGDHVNL

SEQ ID NO: 104715 - protein, 10 aa, synthetic construct
TEYRGDHVNL

SEQ ID NO: 104716 - protein, 10 aa, synthetic construct
TENRGDHVNL

SEQ ID NO: 104717 - protein, 10 aa, synthetic construct
TEQRGDHVNL

SEQ ID NO: 104718 - protein, 10 aa, synthetic construct
TEDRGDHVNL

SEQ ID NO: 104719 - protein, 10 aa, synthetic construct
TEERGDHVNL

SEQ ID NO: 104720 - protein, 10 aa, synthetic construct
AGGRGDHVNL

SEQ ID NO: 104721 - protein, 10 aa, synthetic construct
AGARGDHVNL

SEQ ID NO: 104722 - protein, 10 aa, synthetic construct
AGVRGDHVNL

SEQ ID NO: 104723 - protein, 10 aa, synthetic construct
AGPRGDHVNL

SEQ ID NO: 104724 - protein, 10 aa, synthetic construct
AGLRGDHVNL

SEQ ID NO: 104725 - protein, 10 aa, synthetic construct
AGIRGDHVNL

SEQ ID NO: 104726 - protein, 10 aa, synthetic construct
AGMRGDHVNL

SEQ ID NO: 104727 - protein, 10 aa, synthetic construct
AGWRGDHVNL

SEQ ID NO: 104728 - protein, 10 aa, synthetic construct
AGFRGDHVNL

SEQ ID NO: 104729 - protein, 10 aa, synthetic construct
AGKRGDHVNL

SEQ ID NO: 104730 - protein, 10 aa, synthetic construct
AGRRGDHVNL

SEQ ID NO: 104731 - protein, 10 aa, synthetic construct
AGHRGDHVNL

SEQ ID NO: 104732 - protein, 10 aa, synthetic construct
AGSRGDHVNL

SEQ ID NO: 104733 - protein, 10 aa, synthetic construct
AGTRGDHVNL

SEQ ID NO: 104734 - protein, 10 aa, synthetic construct
AGYRGDHVNL

SEQ ID NO: 104735 - protein, 10 aa, synthetic construct
AGNRGDHVNL

SEQ ID NO: 104736 - protein, 10 aa, synthetic construct
AGQRGDHVNL

SEQ ID NO: 104737 - protein, 10 aa, synthetic construct
AGDRGDHVNL

SEQ ID NO: 104738 - protein, 10 aa, synthetic construct
AGERGDHVNL

SEQ ID NO: 104739 - protein, 10 aa, synthetic construct
AAGRGDHVNL

SEQ ID NO: 104740 - protein, 10 aa, synthetic construct
AAARGDHVNL

SEQ ID NO: 104741 - protein, 10 aa, synthetic construct
AAVRGDHVNL

SEQ ID NO: 104742 - protein, 10 aa, synthetic construct
AAPRGDHVNL

SEQ ID NO: 104743 - protein, 10 aa, synthetic construct
AALRGDHVNL

SEQ ID NO: 104744 - protein, 10 aa, synthetic construct
AAIRGDHVNL

SEQ ID NO: 104745 - protein, 10 aa, synthetic construct
AAMRGDHVNL

SEQ ID NO: 104746 - protein, 10 aa, synthetic construct
AAWRGDHVNL

SEQ ID NO: 104747 - protein, 10 aa, synthetic construct
AAFRGDHVNL

SEQ ID NO: 104748 - protein, 10 aa, synthetic construct
AAKRGDHVNL

SEQ ID NO: 104749 - protein, 10 aa, synthetic construct
AARRGDHVNL

SEQ ID NO: 104750 - protein, 10 aa, synthetic construct
AAHRGDHVNL

SEQ ID NO: 104751 - protein, 10 aa, synthetic construct
AASRGDHVNL

SEQ ID NO: 104752 - protein, 10 aa, synthetic construct
AATRGDHVNL

SEQ ID NO: 104753 - protein, 10 aa, synthetic construct
AAYRGDHVNL

SEQ ID NO: 104754 - protein, 10 aa, synthetic construct
AANRGDHVNL

SEQ ID NO: 104755 - protein, 10 aa, synthetic construct
AAQRGDHVNL

SEQ ID NO: 104756 - protein, 10 aa, synthetic construct
AADRGDHVNL

SEQ ID NO: 104757 - protein, 10 aa, synthetic construct
AAERGDHVNL

SEQ ID NO: 104758 - protein, 10 aa, synthetic construct
AVGRGDHVNL

SEQ ID NO: 104759 - protein, 10 aa, synthetic construct
AVARGDHVNL

SEQ ID NO: 104760 - protein, 10 aa, synthetic construct
AVVRGDHVNL

SEQ ID NO: 104761 - protein, 10 aa, synthetic construct
AVPRGDHVNL

SEQ ID NO: 104762 - protein, 10 aa, synthetic construct
AVLRGDHVNL

SEQ ID NO: 104763 - protein, 10 aa, synthetic construct
AVIRGDHVNL

SEQ ID NO: 104764 - protein, 10 aa, synthetic construct
AVMRGDHVNL

SEQ ID NO: 104765 - protein, 10 aa, synthetic construct
AVWRGDHVNL

SEQ ID NO: 104766 - protein, 10 aa, synthetic construct
AVFRGDHVNL

SEQ ID NO: 104767 - protein, 10 aa, synthetic construct
AVKRGDHVNL

SEQ ID NO: 104768 - protein, 10 aa, synthetic construct
AVRRGDHVNL

SEQ ID NO: 104769 - protein, 10 aa, synthetic construct
AVHRGDHVNL

SEQ ID NO: 104770 - protein, 10 aa, synthetic construct
AVSRGDHVNL

SEQ ID NO: 104771 - protein, 10 aa, synthetic construct
AVTRGDHVNL

SEQ ID NO: 104772 - protein, 10 aa, synthetic construct
AVYRGDHVNL

SEQ ID NO: 104773 - protein, 10 aa, synthetic construct
AVNRGDHVNL

SEQ ID NO: 104774 - protein, 10 aa, synthetic construct
AVQRGDHVNL

SEQ ID NO: 104775 - protein, 10 aa, synthetic construct
AVDRGDHVNL

SEQ ID NO: 104776 - protein, 10 aa, synthetic construct
AVERGDHVNL

SEQ ID NO: 104777 - protein, 10 aa, synthetic construct
APGRGDHVNL

SEQ ID NO: 104778 - protein, 10 aa, synthetic construct
APARGDHVNL

SEQ ID NO: 104779 - protein, 10 aa, synthetic construct
APVRGDHVNL

SEQ ID NO: 104780 - protein, 10 aa, synthetic construct
APPRGDHVNL

SEQ ID NO: 104781 - protein, 10 aa, synthetic construct
APLRGDHVNL

SEQ ID NO: 104782 - protein, 10 aa, synthetic construct
APIRGDHVNL

SEQ ID NO: 104783 - protein, 10 aa, synthetic construct
APMRGDHVNL

SEQ ID NO: 104784 - protein, 10 aa, synthetic construct
APWRGDHVNL

SEQ ID NO: 104785 - protein, 10 aa, synthetic construct
APFRGDHVNL

SEQ ID NO: 104786 - protein, 10 aa, synthetic construct
APKRGDHVNL

SEQ ID NO: 104787 - protein, 10 aa, synthetic construct
APRRGDHVNL

SEQ ID NO: 104788 - protein, 10 aa, synthetic construct
APHRGDHVNL

SEQ ID NO: 104789 - protein, 10 aa, synthetic construct
APSRGDHVNL

SEQ ID NO: 104790 - protein, 10 aa, synthetic construct
APTRGDHVNL

SEQ ID NO: 104791 - protein, 10 aa, synthetic construct
APYRGDHVNL

SEQ ID NO: 104792 - protein, 10 aa, synthetic construct
APNRGDHVNL

SEQ ID NO: 104793 - protein, 10 aa, synthetic construct
APQRGDHVNL

SEQ ID NO: 104794 - protein, 10 aa, synthetic construct
APDRGDHVNL

SEQ ID NO: 104795 - protein, 10 aa, synthetic construct
APERGDHVNL

SEQ ID NO: 104796 - protein, 10 aa, synthetic construct
ALGRGDHVNL

SEQ ID NO: 104797 - protein, 10 aa, synthetic construct
ALARGDHVNL

SEQ ID NO: 104798 - protein, 10 aa, synthetic construct
ALVRGDHVNL

SEQ ID NO: 104799 - protein, 10 aa, synthetic construct
ALPRGDHVNL

SEQ ID NO: 104800 - protein, 10 aa, synthetic construct
ALLRGDHVNL

SEQ ID NO: 104801 - protein, 10 aa, synthetic construct
ALIRGDHVNL

SEQ ID NO: 104802 - protein, 10 aa, synthetic construct
ALMRGDHVNL

SEQ ID NO: 104803 - protein, 10 aa, synthetic construct
ALWRGDHVNL

SEQ ID NO: 104804 - protein, 10 aa, synthetic construct
ALFRGDHVNL

SEQ ID NO: 104805 - protein, 10 aa, synthetic construct
ALKRGDHVNL

SEQ ID NO: 104806 - protein, 10 aa, synthetic construct
ALRRGDHVNL

SEQ ID NO: 104807 - protein, 10 aa, synthetic construct
ALHRGDHVNL

SEQ ID NO: 104808 - protein, 10 aa, synthetic construct
ALSRGDHVNL

SEQ ID NO: 104809 - protein, 10 aa, synthetic construct
ALTRGDHVNL

SEQ ID NO: 104810 - protein, 10 aa, synthetic construct
ALYRGDHVNL

SEQ ID NO: 104811 - protein, 10 aa, synthetic construct
ALNRGDHVNL

SEQ ID NO: 104812 - protein, 10 aa, synthetic construct
ALQRGDHVNL

SEQ ID NO: 104813 - protein, 10 aa, synthetic construct
ALDRGDHVNL

SEQ ID NO: 104814 - protein, 10 aa, synthetic construct
ALERGDHVNL

SEQ ID NO: 104815 - protein, 10 aa, synthetic construct
AIGRGDHVNL

SEQ ID NO: 104816 - protein, 10 aa, synthetic construct
AIARGDHVNL

SEQ ID NO: 104817 - protein, 10 aa, synthetic construct
AIVRGDHVNL

SEQ ID NO: 104818 - protein, 10 aa, synthetic construct
AIPRGDHVNL

SEQ ID NO: 104819 - protein, 10 aa, synthetic construct
AILRGDHVNL

SEQ ID NO: 104820 - protein, 10 aa, synthetic construct
AIIRGDHVNL

SEQ ID NO: 104821 - protein, 10 aa, synthetic construct
AIMRGDHVNL

SEQ ID NO: 104822 - protein, 10 aa, synthetic construct
AIWRGDHVNL

SEQ ID NO: 104823 - protein, 10 aa, synthetic construct
AIFRGDHVNL

SEQ ID NO: 104824 - protein, 10 aa, synthetic construct
AIKRGDHVNL

SEQ ID NO: 104825 - protein, 10 aa, synthetic construct
AIRRGDHVNL

SEQ ID NO: 104826 - protein, 10 aa, synthetic construct
AIHRGDHVNL

SEQ ID NO: 104827 - protein, 10 aa, synthetic construct
AISRGDHVNL

SEQ ID NO: 104828 - protein, 10 aa, synthetic construct
AITRGDHVNL

SEQ ID NO: 104829 - protein, 10 aa, synthetic construct
AIYRGDHVNL

SEQ ID NO: 104830 - protein, 10 aa, synthetic construct
AINRGDHVNL

SEQ ID NO: 104831 - protein, 10 aa, synthetic construct
AIQRGDHVNL

SEQ ID NO: 104832 - protein, 10 aa, synthetic construct
AIDRGDHVNL

SEQ ID NO: 104833 - protein, 10 aa, synthetic construct
AIERGDHVNL

SEQ ID NO: 104834 - protein, 10 aa, synthetic construct
AMGRGDHVNL

SEQ ID NO: 104835 - protein, 10 aa, synthetic construct
AMARGDHVNL

SEQ ID NO: 104836 - protein, 10 aa, synthetic construct
AMVRGDHVNL

SEQ ID NO: 104837 - protein, 10 aa, synthetic construct
AMPRGDHVNL

SEQ ID NO: 104838 - protein, 10 aa, synthetic construct
AMLRGDHVNL

SEQ ID NO: 104839 - protein, 10 aa, synthetic construct
AMIRGDHVNL

SEQ ID NO: 104840 - protein, 10 aa, synthetic construct
AMMRGDHVNL

SEQ ID NO: 104841 - protein, 10 aa, synthetic construct
AMWRGDHVNL

SEQ ID NO: 104842 - protein, 10 aa, synthetic construct
AMFRGDHVNL

SEQ ID NO: 104843 - protein, 10 aa, synthetic construct
AMKRGDHVNL

SEQ ID NO: 104844 - protein, 10 aa, synthetic construct
AMRRGDHVNL

SEQ ID NO: 104845 - protein, 10 aa, synthetic construct
AMHRGDHVNL

SEQ ID NO: 104846 - protein, 10 aa, synthetic construct
AMSRGDHVNL

SEQ ID NO: 104847 - protein, 10 aa, synthetic construct
AMTRGDHVNL

SEQ ID NO: 104848 - protein, 10 aa, synthetic construct
AMYRGDHVNL

SEQ ID NO: 104849 - protein, 10 aa, synthetic construct
AMNRGDHVNL

SEQ ID NO: 104850 - protein, 10 aa, synthetic construct
AMQRGDHVNL

SEQ ID NO: 104851 - protein, 10 aa, synthetic construct
AMDRGDHVNL

SEQ ID NO: 104852 - protein, 10 aa, synthetic construct
AMERGDHVNL

SEQ ID NO: 104853 - protein, 10 aa, synthetic construct
AWGRGDHVNL

SEQ ID NO: 104854 - protein, 10 aa, synthetic construct
AWARGDHVNL

SEQ ID NO: 104855 - protein, 10 aa, synthetic construct
AWVRGDHVNL

SEQ ID NO: 104856 - protein, 10 aa, synthetic construct
AWPRGDHVNL

SEQ ID NO: 104857 - protein, 10 aa, synthetic construct
AWLRGDHVNL

SEQ ID NO: 104858 - protein, 10 aa, synthetic construct
AWIRGDHVNL

SEQ ID NO: 104859 - protein, 10 aa, synthetic construct
AWMRGDHVNL

SEQ ID NO: 104860 - protein, 10 aa, synthetic construct
AWWRGDHVNL

SEQ ID NO: 104861 - protein, 10 aa, synthetic construct
AWFRGDHVNL

SEQ ID NO: 104862 - protein, 10 aa, synthetic construct
AWKRGDHVNL

SEQ ID NO: 104863 - protein, 10 aa, synthetic construct
AWRRGDHVNL

SEQ ID NO: 104864 - protein, 10 aa, synthetic construct
AWHRGDHVNL

SEQ ID NO: 104865 - protein, 10 aa, synthetic construct
AWSRGDHVNL

SEQ ID NO: 104866 - protein, 10 aa, synthetic construct
AWTRGDHVNL

SEQ ID NO: 104867 - protein, 10 aa, synthetic construct
AWYRGDHVNL

SEQ ID NO: 104868 - protein, 10 aa, synthetic construct
AWNRGDHVNL

SEQ ID NO: 104869 - protein, 10 aa, synthetic construct
AWQRGDHVNL

SEQ ID NO: 104870 - protein, 10 aa, synthetic construct
AWDRGDHVNL

SEQ ID NO: 104871 - protein, 10 aa, synthetic construct
AWERGDHVNL

SEQ ID NO: 104872 - protein, 10 aa, synthetic construct
AFGRGDHVNL

SEQ ID NO: 104873 - protein, 10 aa, synthetic construct
AFARGDHVNL

SEQ ID NO: 104874 - protein, 10 aa, synthetic construct
AFVRGDHVNL

SEQ ID NO: 104875 - protein, 10 aa, synthetic construct
AFPRGDHVNL

SEQ ID NO: 104876 - protein, 10 aa, synthetic construct
AFLRGDHVNL

SEQ ID NO: 104877 - protein, 10 aa, synthetic construct
AFIRGDHVNL

SEQ ID NO: 104878 - protein, 10 aa, synthetic construct
AFMRGDHVNL

SEQ ID NO: 104879 - protein, 10 aa, synthetic construct
AFWRGDHVNL

SEQ ID NO: 104880 - protein, 10 aa, synthetic construct
AFFRGDHVNL

SEQ ID NO: 104881 - protein, 10 aa, synthetic construct
AFKRGDHVNL

SEQ ID NO: 104882 - protein, 10 aa, synthetic construct
AFRRGDHVNL

SEQ ID NO: 104883 - protein, 10 aa, synthetic construct
AFHRGDHVNL

SEQ ID NO: 104884 - protein, 10 aa, synthetic construct
AFSRGDHVNL

SEQ ID NO: 104885 - protein, 10 aa, synthetic construct
AFTRGDHVNL

SEQ ID NO: 104886 - protein, 10 aa, synthetic construct
AFYRGDHVNL

SEQ ID NO: 104887 - protein, 10 aa, synthetic construct
AFNRGDHVNL

SEQ ID NO: 104888 - protein, 10 aa, synthetic construct
AFQRGDHVNL

SEQ ID NO: 104889 - protein, 10 aa, synthetic construct
AFDRGDHVNL

SEQ ID NO: 104890 - protein, 10 aa, synthetic construct
AFERGDHVNL

SEQ ID NO: 104891 - protein, 10 aa, synthetic construct
AKGRGDHVNL

SEQ ID NO: 104892 - protein, 10 aa, synthetic construct
AKARGDHVNL

SEQ ID NO: 104893 - protein, 10 aa, synthetic construct
AKVRGDHVNL

SEQ ID NO: 104894 - protein, 10 aa, synthetic construct
AKPRGDHVNL

SEQ ID NO: 104895 - protein, 10 aa, synthetic construct
AKLRGDHVNL

SEQ ID NO: 104896 - protein, 10 aa, synthetic construct
AKIRGDHVNL

SEQ ID NO: 104897 - protein, 10 aa, synthetic construct
AKMRGDHVNL

SEQ ID NO: 104898 - protein, 10 aa, synthetic construct
AKWRGDHVNL

SEQ ID NO: 104899 - protein, 10 aa, synthetic construct
AKFRGDHVNL

SEQ ID NO: 104900 - protein, 10 aa, synthetic construct
AKKRGDHVNL

SEQ ID NO: 104901 - protein, 10 aa, synthetic construct
AKRRGDHVNL

SEQ ID NO: 104902 - protein, 10 aa, synthetic construct
AKHRGDHVNL

SEQ ID NO: 104903 - protein, 10 aa, synthetic construct
AKSRGDHVNL

SEQ ID NO: 104904 - protein, 10 aa, synthetic construct
AKTRGDHVNL

SEQ ID NO: 104905 - protein, 10 aa, synthetic construct
AKYRGDHVNL

SEQ ID NO: 104906 - protein, 10 aa, synthetic construct
AKNRGDHVNL

SEQ ID NO: 104907 - protein, 10 aa, synthetic construct
AKQRGDHVNL

SEQ ID NO: 104908 - protein, 10 aa, synthetic construct
AKDRGDHVNL

SEQ ID NO: 104909 - protein, 10 aa, synthetic construct
AKERGDHVNL

SEQ ID NO: 104910 - protein, 10 aa, synthetic construct
ARGRGDHVNL

SEQ ID NO: 104911 - protein, 10 aa, synthetic construct
ARARGDHVNL

SEQ ID NO: 104912 - protein, 10 aa, synthetic construct
ARVRGDHVNL

SEQ ID NO: 104913 - protein, 10 aa, synthetic construct
ARPRGDHVNL

SEQ ID NO: 104914 - protein, 10 aa, synthetic construct
ARLRGDHVNL

SEQ ID NO: 104915 - protein, 10 aa, synthetic construct
ARIRGDHVNL

SEQ ID NO: 104916 - protein, 10 aa, synthetic construct
ARMRGDHVNL

SEQ ID NO: 104917 - protein, 10 aa, synthetic construct
ARWRGDHVNL

SEQ ID NO: 104918 - protein, 10 aa, synthetic construct
ARFRGDHVNL

SEQ ID NO: 104919 - protein, 10 aa, synthetic construct
ARKRGDHVNL

SEQ ID NO: 104920 - protein, 10 aa, synthetic construct
ARRRGDHVNL

SEQ ID NO: 104921 - protein, 10 aa, synthetic construct
ARHRGDHVNL

SEQ ID NO: 104922 - protein, 10 aa, synthetic construct
ARSRGDHVNL

SEQ ID NO: 104923 - protein, 10 aa, synthetic construct
ARTRGDHVNL

SEQ ID NO: 104924 - protein, 10 aa, synthetic construct
ARYRGDHVNL

SEQ ID NO: 104925 - protein, 10 aa, synthetic construct
ARNRGDHVNL

SEQ ID NO: 104926 - protein, 10 aa, synthetic construct
ARQRGDHVNL

SEQ ID NO: 104927 - protein, 10 aa, synthetic construct
ARDRGDHVNL

SEQ ID NO: 104928 - protein, 10 aa, synthetic construct
ARERGDHVNL

SEQ ID NO: 104929 - protein, 10 aa, synthetic construct
AHGRGDHVNL

SEQ ID NO: 104930 - protein, 10 aa, synthetic construct
AHARGDHVNL

SEQ ID NO: 104931 - protein, 10 aa, synthetic construct
AHVRGDHVNL

SEQ ID NO: 104932 - protein, 10 aa, synthetic construct
AHPRGDHVNL

SEQ ID NO: 104933 - protein, 10 aa, synthetic construct
AHLRGDHVNL

SEQ ID NO: 104934 - protein, 10 aa, synthetic construct
AHIRGDHVNL

SEQ ID NO: 104935 - protein, 10 aa, synthetic construct
AHMRGDHVNL

SEQ ID NO: 104936 - protein, 10 aa, synthetic construct
AHWRGDHVNL

SEQ ID NO: 104937 - protein, 10 aa, synthetic construct
AHFRGDHVNL

SEQ ID NO: 104938 - protein, 10 aa, synthetic construct
AHKRGDHVNL

SEQ ID NO: 104939 - protein, 10 aa, synthetic construct
AHRRGDHVNL

SEQ ID NO: 104940 - protein, 10 aa, synthetic construct
AHHRGDHVNL

SEQ ID NO: 104941 - protein, 10 aa, synthetic construct
AHSRGDHVNL

SEQ ID NO: 104942 - protein, 10 aa, synthetic construct
AHTRGDHVNL

SEQ ID NO: 104943 - protein, 10 aa, synthetic construct
AHYRGDHVNL

SEQ ID NO: 104944 - protein, 10 aa, synthetic construct
AHNRGDHVNL

SEQ ID NO: 104945 - protein, 10 aa, synthetic construct
AHQRGDHVNL

SEQ ID NO: 104946 - protein, 10 aa, synthetic construct
AHDRGDHVNL

SEQ ID NO: 104947 - protein, 10 aa, synthetic construct
AHERGDHVNL

SEQ ID NO: 104948 - protein, 10 aa, synthetic construct
ASGRGDHVNL

SEQ ID NO: 104949 - protein, 10 aa, synthetic construct
ASARGDHVNL

SEQ ID NO: 104950 - protein, 10 aa, synthetic construct
ASVRGDHVNL

SEQ ID NO: 104951 - protein, 10 aa, synthetic construct
ASPRGDHVNL

SEQ ID NO: 104952 - protein, 10 aa, synthetic construct
ASLRGDHVNL

SEQ ID NO: 104953 - protein, 10 aa, synthetic construct
ASIRGDHVNL

SEQ ID NO: 104954 - protein, 10 aa, synthetic construct
ASMRGDHVNL

SEQ ID NO: 104955 - protein, 10 aa, synthetic construct
ASWRGDHVNL

SEQ ID NO: 104956 - protein, 10 aa, synthetic construct
ASFRGDHVNL

SEQ ID NO: 104957 - protein, 10 aa, synthetic construct
ASKRGDHVNL

SEQ ID NO: 104958 - protein, 10 aa, synthetic construct
ASRRGDHVNL

SEQ ID NO: 104959 - protein, 10 aa, synthetic construct
ASHRGDHVNL

SEQ ID NO: 104960 - protein, 10 aa, synthetic construct
ASSRGDHVNL

SEQ ID NO: 104961 - protein, 10 aa, synthetic construct
ASTRGDHVNL

SEQ ID NO: 104962 - protein, 10 aa, synthetic construct
ASYRGDHVNL

SEQ ID NO: 104963 - protein, 10 aa, synthetic construct
ASNRGDHVNL

SEQ ID NO: 104964 - protein, 10 aa, synthetic construct
ASQRGDHVNL

SEQ ID NO: 104965 - protein, 10 aa, synthetic construct
ASDRGDHVNL

SEQ ID NO: 104966 - protein, 10 aa, synthetic construct
ASERGDHVNL

SEQ ID NO: 104967 - protein, 10 aa, synthetic construct
ATGRGDHVNL

SEQ ID NO: 104968 - protein, 10 aa, synthetic construct
ATARGDHVNL

SEQ ID NO: 104969 - protein, 10 aa, synthetic construct
ATVRGDHVNL

SEQ ID NO: 104970 - protein, 10 aa, synthetic construct
ATPRGDHVNL

SEQ ID NO: 104971 - protein, 10 aa, synthetic construct
ATLRGDHVNL

SEQ ID NO: 104972 - protein, 10 aa, synthetic construct
ATIRGDHVNL

SEQ ID NO: 104973 - protein, 10 aa, synthetic construct
ATMRGDHVNL

SEQ ID NO: 104974 - protein, 10 aa, synthetic construct
ATWRGDHVNL

SEQ ID NO: 104975 - protein, 10 aa, synthetic construct
ATFRGDHVNL

SEQ ID NO: 104976 - protein, 10 aa, synthetic construct
ATKRGDHVNL

SEQ ID NO: 104977 - protein, 10 aa, synthetic construct
ATRRGDHVNL

SEQ ID NO: 104978 - protein, 10 aa, synthetic construct
ATHRGDHVNL

SEQ ID NO: 104979 - protein, 10 aa, synthetic construct
ATSRGDHVNL

SEQ ID NO: 104980 - protein, 10 aa, synthetic construct
ATTRGDHVNL

SEQ ID NO: 104981 - protein, 10 aa, synthetic construct
ATYRGDHVNL

SEQ ID NO: 104982 - protein, 10 aa, synthetic construct
ATNRGDHVNL

SEQ ID NO: 104983 - protein, 10 aa, synthetic construct
ATQRGDHVNL

SEQ ID NO: 104984 - protein, 10 aa, synthetic construct
ATDRGDHVNL

SEQ ID NO: 104985 - protein, 10 aa, synthetic construct
ATERGDHVNL

SEQ ID NO: 104986 - protein, 10 aa, synthetic construct
AYGRGDHVNL

SEQ ID NO: 104987 - protein, 10 aa, synthetic construct
AYARGDHVNL

SEQ ID NO: 104988 - protein, 10 aa, synthetic construct
AYVRGDHVNL

SEQ ID NO: 104989 - protein, 10 aa, synthetic construct
AYPRGDHVNL

SEQ ID NO: 104990 - protein, 10 aa, synthetic construct
AYLRGDHVNL

SEQ ID NO: 104991 - protein, 10 aa, synthetic construct
AYIRGDHVNL

SEQ ID NO: 104992 - protein, 10 aa, synthetic construct
AYMRGDHVNL

SEQ ID NO: 104993 - protein, 10 aa, synthetic construct
AYWRGDHVNL

SEQ ID NO: 104994 - protein, 10 aa, synthetic construct
AYFRGDHVNL

SEQ ID NO: 104995 - protein, 10 aa, synthetic construct
AYKRGDHVNL

SEQ ID NO: 104996 - protein, 10 aa, synthetic construct
AYRRGDHVNL

SEQ ID NO: 104997 - protein, 10 aa, synthetic construct
AYHRGDHVNL

SEQ ID NO: 104998 - protein, 10 aa, synthetic construct
AYSRGDHVNL

SEQ ID NO: 104999 - protein, 10 aa, synthetic construct
AYTRGDHVNL

SEQ ID NO: 105000 - protein, 10 aa, synthetic construct
AYYRGDHVNL

SEQ ID NO: 105001 - protein, 10 aa, synthetic construct
AYNRGDHVNL

SEQ ID NO: 105002 - protein, 10 aa, synthetic construct
AYQRGDHVNL

SEQ ID NO: 105003 - protein, 10 aa, synthetic construct
AYDRGDHVNL

SEQ ID NO: 105004 - protein, 10 aa, synthetic construct
AYERGDHVNL

SEQ ID NO: 105005 - protein, 10 aa, synthetic construct
ANGRGDHVNL

SEQ ID NO: 105006 - protein, 10 aa, synthetic construct
ANARGDHVNL

SEQ ID NO: 105007 - protein, 10 aa, synthetic construct
ANVRGDHVNL

SEQ ID NO: 105008 - protein, 10 aa, synthetic construct
ANPRGDHVNL

SEQ ID NO: 105009 - protein, 10 aa, synthetic construct
ANLRGDHVNL

SEQ ID NO: 105010 - protein, 10 aa, synthetic construct
ANIRGDHVNL

SEQ ID NO: 105011 - protein, 10 aa, synthetic construct
ANMRGDHVNL

SEQ ID NO: 105012 - protein, 10 aa, synthetic construct
ANWRGDHVNL

SEQ ID NO: 105013 - protein, 10 aa, synthetic construct
ANFRGDHVNL

SEQ ID NO: 105014 - protein, 10 aa, synthetic construct
ANKRGDHVNL

SEQ ID NO: 105015 - protein, 10 aa, synthetic construct
ANRRGDHVNL

SEQ ID NO: 105016 - protein, 10 aa, synthetic construct
ANHRGDHVNL

SEQ ID NO: 105017 - protein, 10 aa, synthetic construct
ANSRGDHVNL

SEQ ID NO: 105018 - protein, 10 aa, synthetic construct
ANTRGDHVNL

SEQ ID NO: 105019 - protein, 10 aa, synthetic construct
ANYRGDHVNL

SEQ ID NO: 105020 - protein, 10 aa, synthetic construct
ANNRGDHVNL

SEQ ID NO: 105021 - protein, 10 aa, synthetic construct
ANQRGDHVNL

SEQ ID NO: 105022 - protein, 10 aa, synthetic construct
ANDRGDHVNL

SEQ ID NO: 105023 - protein, 10 aa, synthetic construct
ANERGDHVNL

SEQ ID NO: 105024 - protein, 10 aa, synthetic construct
AQGRGDHVNL

SEQ ID NO: 105025 - protein, 10 aa, synthetic construct
AQARGDHVNL

SEQ ID NO: 105026 - protein, 10 aa, synthetic construct
AQVRGDHVNL

SEQ ID NO: 105027 - protein, 10 aa, synthetic construct
AQPRGDHVNL

SEQ ID NO: 105028 - protein, 10 aa, synthetic construct
AQLRGDHVNL

SEQ ID NO: 105029 - protein, 10 aa, synthetic construct
AQIRGDHVNL

SEQ ID NO: 105030 - protein, 10 aa, synthetic construct
AQMRGDHVNL

SEQ ID NO: 105031 - protein, 10 aa, synthetic construct
AQWRGDHVNL

SEQ ID NO: 105032 - protein, 10 aa, synthetic construct
AQFRGDHVNL

SEQ ID NO: 105033 - protein, 10 aa, synthetic construct
AQKRGDHVNL

SEQ ID NO: 105034 - protein, 10 aa, synthetic construct
AQRRGDHVNL

SEQ ID NO: 105035 - protein, 10 aa, synthetic construct
AQHRGDHVNL

SEQ ID NO: 105036 - protein, 10 aa, synthetic construct
AQSRGDHVNL

SEQ ID NO: 105037 - protein, 10 aa, synthetic construct
AQTRGDHVNL

SEQ ID NO: 105038 - protein, 10 aa, synthetic construct
AQYRGDHVNL

SEQ ID NO: 105039 - protein, 10 aa, synthetic construct
AQNRGDHVNL

SEQ ID NO: 105040 - protein, 10 aa, synthetic construct
AQQRGDHVNL

SEQ ID NO: 105041 - protein, 10 aa, synthetic construct
AQDRGDHVNL

SEQ ID NO: 105042 - protein, 10 aa, synthetic construct
AQERGDHVNL

SEQ ID NO: 105043 - protein, 10 aa, synthetic construct
ADGRGDHVNL

SEQ ID NO: 105044 - protein, 10 aa, synthetic construct
ADARGDHVNL

SEQ ID NO: 105045 - protein, 10 aa, synthetic construct
ADVRGDHVNL

SEQ ID NO: 105046 - protein, 10 aa, synthetic construct
ADPRGDHVNL

SEQ ID NO: 105047 - protein, 10 aa, synthetic construct
ADLRGDHVNL

SEQ ID NO: 105048 - protein, 10 aa, synthetic construct
ADIRGDHVNL

SEQ ID NO: 105049 - protein, 10 aa, synthetic construct
ADMRGDHVNL

SEQ ID NO: 105050 - protein, 10 aa, synthetic construct
ADWRGDHVNL

SEQ ID NO: 105051 - protein, 10 aa, synthetic construct
ADFRGDHVNL

SEQ ID NO: 105052 - protein, 10 aa, synthetic construct
ADKRGDHVNL

SEQ ID NO: 105053 - protein, 10 aa, synthetic construct
ADRRGDHVNL

SEQ ID NO: 105054 - protein, 10 aa, synthetic construct
ADHRGDHVNL

SEQ ID NO: 105055 - protein, 10 aa, synthetic construct
ADSRGDHVNL

SEQ ID NO: 105056 - protein, 10 aa, synthetic construct
ADTRGDHVNL

SEQ ID NO: 105057 - protein, 10 aa, synthetic construct
ADYRGDHVNL

SEQ ID NO: 105058 - protein, 10 aa, synthetic construct
ADNRGDHVNL

SEQ ID NO: 105059 - protein, 10 aa, synthetic construct
ADQRGDHVNL

SEQ ID NO: 105060 - protein, 10 aa, synthetic construct
ADDRGDHVNL

SEQ ID NO: 105061 - protein, 10 aa, synthetic construct
ADERGDHVNL

SEQ ID NO: 105062 - protein, 10 aa, synthetic construct
AEGRGDHVNL

SEQ ID NO: 105063 - protein, 10 aa, synthetic construct
AEARGDHVNL

SEQ ID NO: 105064 - protein, 10 aa, synthetic construct
AEVRGDHVNL

SEQ ID NO: 105065 - protein, 10 aa, synthetic construct
AEPRGDHVNL

SEQ ID NO: 105066 - protein, 10 aa, synthetic construct
AELRGDHVNL

SEQ ID NO: 105067 - protein, 10 aa, synthetic construct
AEIRGDHVNL

SEQ ID NO: 105068 - protein, 10 aa, synthetic construct
AEMRGDHVNL

SEQ ID NO: 105069 - protein, 10 aa, synthetic construct
AEWRGDHVNL

SEQ ID NO: 105070 - protein, 10 aa, synthetic construct
AEFRGDHVNL

SEQ ID NO: 105071 - protein, 10 aa, synthetic construct
AEKRGDHVNL

SEQ ID NO: 105072 - protein, 10 aa, synthetic construct
AERRGDHVNL

SEQ ID NO: 105073 - protein, 10 aa, synthetic construct
AEHRGDHVNL

SEQ ID NO: 105074 - protein, 10 aa, synthetic construct
AESRGDHVNL

SEQ ID NO: 105075 - protein, 10 aa, synthetic construct
AETRGDHVNL

SEQ ID NO: 105076 - protein, 10 aa, synthetic construct
AEYRGDHVNL

SEQ ID NO: 105077 - protein, 10 aa, synthetic construct
AENRGDHVNL

SEQ ID NO: 105078 - protein, 10 aa, synthetic construct
AEQRGDHVNL

SEQ ID NO: 105079 - protein, 10 aa, synthetic construct
AEDRGDHVNL

SEQ ID NO: 105080 - protein, 10 aa, synthetic construct
AEERGDHVNL

SEQ ID NO: 105081 - protein, 10 aa, synthetic construct
EGGRGDHVNL

SEQ ID NO: 105082 - protein, 10 aa, synthetic construct
EGARGDHVNL

SEQ ID NO: 105083 - protein, 10 aa, synthetic construct
EGVRGDHVNL

SEQ ID NO: 105084 - protein, 10 aa, synthetic construct
EGPRGDHVNL

SEQ ID NO: 105085 - protein, 10 aa, synthetic construct
EGLRGDHVNL

SEQ ID NO: 105086 - protein, 10 aa, synthetic construct
EGIRGDHVNL

SEQ ID NO: 105087 - protein, 10 aa, synthetic construct
EGMRGDHVNL

SEQ ID NO: 105088 - protein, 10 aa, synthetic construct
EGWRGDHVNL

SEQ ID NO: 105089 - protein, 10 aa, synthetic construct
EGFRGDHVNL

SEQ ID NO: 105090 - protein, 10 aa, synthetic construct
EGKRGDHVNL

SEQ ID NO: 105091 - protein, 10 aa, synthetic construct
EGRRGDHVNL

SEQ ID NO: 105092 - protein, 10 aa, synthetic construct
EGHRGDHVNL

SEQ ID NO: 105093 - protein, 10 aa, synthetic construct
EGSRGDHVNL

SEQ ID NO: 105094 - protein, 10 aa, synthetic construct
EGTRGDHVNL

SEQ ID NO: 105095 - protein, 10 aa, synthetic construct
EGYRGDHVNL

SEQ ID NO: 105096 - protein, 10 aa, synthetic construct
EGNRGDHVNL

SEQ ID NO: 105097 - protein, 10 aa, synthetic construct
EGQRGDHVNL

SEQ ID NO: 105098 - protein, 10 aa, synthetic construct
EGDRGDHVNL

SEQ ID NO: 105099 - protein, 10 aa, synthetic construct
EGERGDHVNL

SEQ ID NO: 105100 - protein, 10 aa, synthetic construct
EAGRGDHVNL

SEQ ID NO: 105101 - protein, 10 aa, synthetic construct
EAARGDHVNL

SEQ ID NO: 105102 - protein, 10 aa, synthetic construct
EAVRGDHVNL

SEQ ID NO: 105103 - protein, 10 aa, synthetic construct
EAPRGDHVNL

SEQ ID NO: 105104 - protein, 10 aa, synthetic construct
EALRGDHVNL

SEQ ID NO: 105105 - protein, 10 aa, synthetic construct
EAIRGDHVNL

SEQ ID NO: 105106 - protein, 10 aa, synthetic construct
EAMRGDHVNL

SEQ ID NO: 105107 - protein, 10 aa, synthetic construct
EAWRGDHVNL

SEQ ID NO: 105108 - protein, 10 aa, synthetic construct
EAFRGDHVNL

SEQ ID NO: 105109 - protein, 10 aa, synthetic construct
EAKRGDHVNL

SEQ ID NO: 105110 - protein, 10 aa, synthetic construct
EARRGDHVNL

SEQ ID NO: 105111 - protein, 10 aa, synthetic construct
EAHRGDHVNL

SEQ ID NO: 105112 - protein, 10 aa, synthetic construct
EASRGDHVNL

SEQ ID NO: 105113 - protein, 10 aa, synthetic construct
EATRGDHVNL

SEQ ID NO: 105114 - protein, 10 aa, synthetic construct
EAYRGDHVNL

SEQ ID NO: 105115 - protein, 10 aa, synthetic construct
EANRGDHVNL

SEQ ID NO: 105116 - protein, 10 aa, synthetic construct
EAQRGDHVNL

SEQ ID NO: 105117 - protein, 10 aa, synthetic construct
EADRGDHVNL

SEQ ID NO: 105118 - protein, 10 aa, synthetic construct
EAERGDHVNL

SEQ ID NO: 105119 - protein, 10 aa, synthetic construct
EVGRGDHVNL

SEQ ID NO: 105120 - protein, 10 aa, synthetic construct
EVARGDHVNL

SEQ ID NO: 105121 - protein, 10 aa, synthetic construct
EVVRGDHVNL

SEQ ID NO: 105122 - protein, 10 aa, synthetic construct
EVPRGDHVNL

SEQ ID NO: 105123 - protein, 10 aa, synthetic construct
EVLRGDHVNL

SEQ ID NO: 105124 - protein, 10 aa, synthetic construct
EVIRGDHVNL

SEQ ID NO: 105125 - protein, 10 aa, synthetic construct
EVMRGDHVNL

SEQ ID NO: 105126 - protein, 10 aa, synthetic construct
EVWRGDHVNL

SEQ ID NO: 105127 - protein, 10 aa, synthetic construct
EVFRGDHVNL

SEQ ID NO: 105128 - protein, 10 aa, synthetic construct
EVKRGDHVNL

SEQ ID NO: 105129 - protein, 10 aa, synthetic construct
EVRRGDHVNL

SEQ ID NO: 105130 - protein, 10 aa, synthetic construct
EVHRGDHVNL

SEQ ID NO: 105131 - protein, 10 aa, synthetic construct
EVSRGDHVNL

SEQ ID NO: 105132 - protein, 10 aa, synthetic construct
EVTRGDHVNL

SEQ ID NO: 105133 - protein, 10 aa, synthetic construct
EVYRGDHVNL

SEQ ID NO: 105134 - protein, 10 aa, synthetic construct
EVNRGDHVNL

SEQ ID NO: 105135 - protein, 10 aa, synthetic construct
EVQRGDHVNL

SEQ ID NO: 105136 - protein, 10 aa, synthetic construct
EVDRGDHVNL

SEQ ID NO: 105137 - protein, 10 aa, synthetic construct
EVERGDHVNL

SEQ ID NO: 105138 - protein, 10 aa, synthetic construct
EPGRGDHVNL

SEQ ID NO: 105139 - protein, 10 aa, synthetic construct
EPARGDHVNL

SEQ ID NO: 105140 - protein, 10 aa, synthetic construct
EPVRGDHVNL

SEQ ID NO: 105141 - protein, 10 aa, synthetic construct
EPPRGDHVNL

SEQ ID NO: 105142 - protein, 10 aa, synthetic construct
EPLRGDHVNL

SEQ ID NO: 105143 - protein, 10 aa, synthetic construct
EPIRGDHVNL

SEQ ID NO: 105144 - protein, 10 aa, synthetic construct
EPMRGDHVNL

SEQ ID NO: 105145 - protein, 10 aa, synthetic construct
EPWRGDHVNL

SEQ ID NO: 105146 - protein, 10 aa, synthetic construct
EPFRGDHVNL

SEQ ID NO: 105147 - protein, 10 aa, synthetic construct
EPKRGDHVNL

SEQ ID NO: 105148 - protein, 10 aa, synthetic construct
EPRRGDHVNL

SEQ ID NO: 105149 - protein, 10 aa, synthetic construct
EPHRGDHVNL

SEQ ID NO: 105150 - protein, 10 aa, synthetic construct
EPSRGDHVNL

SEQ ID NO: 105151 - protein, 10 aa, synthetic construct
EPTRGDHVNL

SEQ ID NO: 105152 - protein, 10 aa, synthetic construct
EPYRGDHVNL

SEQ ID NO: 105153 - protein, 10 aa, synthetic construct
EPNRGDHVNL

SEQ ID NO: 105154 - protein, 10 aa, synthetic construct
EPQRGDHVNL

SEQ ID NO: 105155 - protein, 10 aa, synthetic construct
EPDRGDHVNL

SEQ ID NO: 105156 - protein, 10 aa, synthetic construct
EPERGDHVNL

SEQ ID NO: 105157 - protein, 10 aa, synthetic construct
ELGRGDHVNL

SEQ ID NO: 105158 - protein, 10 aa, synthetic construct
ELARGDHVNL

SEQ ID NO: 105159 - protein, 10 aa, synthetic construct
ELVRGDHVNL

SEQ ID NO: 105160 - protein, 10 aa, synthetic construct
ELPRGDHVNL

SEQ ID NO: 105161 - protein, 10 aa, synthetic construct
ELLRGDHVNL

SEQ ID NO: 105162 - protein, 10 aa, synthetic construct
ELIRGDHVNL

SEQ ID NO: 105163 - protein, 10 aa, synthetic construct
ELMRGDHVNL

SEQ ID NO: 105164 - protein, 10 aa, synthetic construct
ELWRGDHVNL

SEQ ID NO: 105165 - protein, 10 aa, synthetic construct
ELFRGDHVNL

SEQ ID NO: 105166 - protein, 10 aa, synthetic construct
ELKRGDHVNL

SEQ ID NO: 105167 - protein, 10 aa, synthetic construct
ELRRGDHVNL

SEQ ID NO: 105168 - protein, 10 aa, synthetic construct
ELHRGDHVNL

SEQ ID NO: 105169 - protein, 10 aa, synthetic construct
ELSRGDHVNL

SEQ ID NO: 105170 - protein, 10 aa, synthetic construct
ELTRGDHVNL

SEQ ID NO: 105171 - protein, 10 aa, synthetic construct
ELYRGDHVNL

SEQ ID NO: 105172 - protein, 10 aa, synthetic construct
ELNRGDHVNL

SEQ ID NO: 105173 - protein, 10 aa, synthetic construct
ELQRGDHVNL

SEQ ID NO: 105174 - protein, 10 aa, synthetic construct
ELDRGDHVNL

SEQ ID NO: 105175 - protein, 10 aa, synthetic construct
ELERGDHVNL

SEQ ID NO: 105176 - protein, 10 aa, synthetic construct
EIGRGDHVNL

SEQ ID NO: 105177 - protein, 10 aa, synthetic construct
EIARGDHVNL

SEQ ID NO: 105178 - protein, 10 aa, synthetic construct
EIVRGDHVNL

SEQ ID NO: 105179 - protein, 10 aa, synthetic construct
EIPRGDHVNL

SEQ ID NO: 105180 - protein, 10 aa, synthetic construct
EILRGDHVNL

SEQ ID NO: 105181 - protein, 10 aa, synthetic construct
EIIRGDHVNL

SEQ ID NO: 105182 - protein, 10 aa, synthetic construct
EIMRGDHVNL

SEQ ID NO: 105183 - protein, 10 aa, synthetic construct
EIWRGDHVNL

SEQ ID NO: 105184 - protein, 10 aa, synthetic construct
EIFRGDHVNL

SEQ ID NO: 105185 - protein, 10 aa, synthetic construct
EIKRGDHVNL

SEQ ID NO: 105186 - protein, 10 aa, synthetic construct
EIRRGDHVNL

SEQ ID NO: 105187 - protein, 10 aa, synthetic construct
EIHRGDHVNL

SEQ ID NO: 105188 - protein, 10 aa, synthetic construct
EISRGDHVNL

SEQ ID NO: 105189 - protein, 10 aa, synthetic construct
EITRGDHVNL

SEQ ID NO: 105190 - protein, 10 aa, synthetic construct
EIYRGDHVNL

SEQ ID NO: 105191 - protein, 10 aa, synthetic construct
EINRGDHVNL

SEQ ID NO: 105192 - protein, 10 aa, synthetic construct
EIQRGDHVNL

SEQ ID NO: 105193 - protein, 10 aa, synthetic construct
EIDRGDHVNL

SEQ ID NO: 105194 - protein, 10 aa, synthetic construct
EIERGDHVNL

SEQ ID NO: 105195 - protein, 10 aa, synthetic construct
EMGRGDHVNL

SEQ ID NO: 105196 - protein, 10 aa, synthetic construct
EMARGDHVNL

SEQ ID NO: 105197 - protein, 10 aa, synthetic construct
EMVRGDHVNL

SEQ ID NO: 105198 - protein, 10 aa, synthetic construct
EMPRGDHVNL

SEQ ID NO: 105199 - protein, 10 aa, synthetic construct
EMLRGDHVNL

SEQ ID NO: 105200 - protein, 10 aa, synthetic construct
EMIRGDHVNL

SEQ ID NO: 105201 - protein, 10 aa, synthetic construct
EMMRGDHVNL

SEQ ID NO: 105202 - protein, 10 aa, synthetic construct
EMWRGDHVNL

SEQ ID NO: 105203 - protein, 10 aa, synthetic construct
EMFRGDHVNL

SEQ ID NO: 105204 - protein, 10 aa, synthetic construct
EMKRGDHVNL

SEQ ID NO: 105205 - protein, 10 aa, synthetic construct
EMRRGDHVNL

SEQ ID NO: 105206 - protein, 10 aa, synthetic construct
EMHRGDHVNL

SEQ ID NO: 105207 - protein, 10 aa, synthetic construct
EMSRGDHVNL

SEQ ID NO: 105208 - protein, 10 aa, synthetic construct
EMTRGDHVNL

SEQ ID NO: 105209 - protein, 10 aa, synthetic construct
EMYRGDHVNL

SEQ ID NO: 105210 - protein, 10 aa, synthetic construct
EMNRGDHVNL

SEQ ID NO: 105211 - protein, 10 aa, synthetic construct
EMQRGDHVNL

SEQ ID NO: 105212 - protein, 10 aa, synthetic construct
EMDRGDHVNL

SEQ ID NO: 105213 - protein, 10 aa, synthetic construct
EMERGDHVNL

SEQ ID NO: 105214 - protein, 10 aa, synthetic construct
EWGRGDHVNL

SEQ ID NO: 105215 - protein, 10 aa, synthetic construct
EWARGDHVNL

SEQ ID NO: 105216 - protein, 10 aa, synthetic construct
EWVRGDHVNL

SEQ ID NO: 105217 - protein, 10 aa, synthetic construct
EWPRGDHVNL

SEQ ID NO: 105218 - protein, 10 aa, synthetic construct
EWLRGDHVNL

SEQ ID NO: 105219 - protein, 10 aa, synthetic construct
EWIRGDHVNL

SEQ ID NO: 105220 - protein, 10 aa, synthetic construct
EWMRGDHVNL

SEQ ID NO: 105221 - protein, 10 aa, synthetic construct
EWWRGDHVNL

SEQ ID NO: 105222 - protein, 10 aa, synthetic construct
EWFRGDHVNL

SEQ ID NO: 105223 - protein, 10 aa, synthetic construct
EWKRGDHVNL

SEQ ID NO: 105224 - protein, 10 aa, synthetic construct
EWRRGDHVNL

SEQ ID NO: 105225 - protein, 10 aa, synthetic construct
EWHRGDHVNL

SEQ ID NO: 105226 - protein, 10 aa, synthetic construct
EWSRGDHVNL

SEQ ID NO: 105227 - protein, 10 aa, synthetic construct
EWTRGDHVNL

SEQ ID NO: 105228 - protein, 10 aa, synthetic construct
EWYRGDHVNL

SEQ ID NO: 105229 - protein, 10 aa, synthetic construct
EWNRGDHVNL

SEQ ID NO: 105230 - protein, 10 aa, synthetic construct
EWQRGDHVNL

SEQ ID NO: 105231 - protein, 10 aa, synthetic construct
EWDRGDHVNL

SEQ ID NO: 105232 - protein, 10 aa, synthetic construct
EWERGDHVNL

SEQ ID NO: 105233 - protein, 10 aa, synthetic construct
EFGRGDHVNL

SEQ ID NO: 105234 - protein, 10 aa, synthetic construct
EFARGDHVNL

SEQ ID NO: 105235 - protein, 10 aa, synthetic construct
EFVRGDHVNL

SEQ ID NO: 105236 - protein, 10 aa, synthetic construct
EFPRGDHVNL

SEQ ID NO: 105237 - protein, 10 aa, synthetic construct
EFLRGDHVNL

SEQ ID NO: 105238 - protein, 10 aa, synthetic construct
EFIRGDHVNL

SEQ ID NO: 105239 - protein, 10 aa, synthetic construct
EFMRGDHVNL

SEQ ID NO: 105240 - protein, 10 aa, synthetic construct
EFWRGDHVNL

SEQ ID NO: 105241 - protein, 10 aa, synthetic construct
EFFRGDHVNL

SEQ ID NO: 105242 - protein, 10 aa, synthetic construct
EFKRGDHVNL

SEQ ID NO: 105243 - protein, 10 aa, synthetic construct
EFRRGDHVNL

SEQ ID NO: 105244 - protein, 10 aa, synthetic construct
EFHRGDHVNL

SEQ ID NO: 105245 - protein, 10 aa, synthetic construct
EFSRGDHVNL

SEQ ID NO: 105246 - protein, 10 aa, synthetic construct
EFTRGDHVNL

SEQ ID NO: 105247 - protein, 10 aa, synthetic construct
EFYRGDHVNL

SEQ ID NO: 105248 - protein, 10 aa, synthetic construct
EFNRGDHVNL

SEQ ID NO: 105249 - protein, 10 aa, synthetic construct
EFQRGDHVNL

SEQ ID NO: 105250 - protein, 10 aa, synthetic construct
EFDRGDHVNL

SEQ ID NO: 105251 - protein, 10 aa, synthetic construct
EFERGDHVNL

SEQ ID NO: 105252 - protein, 10 aa, synthetic construct
EKGRGDHVNL

SEQ ID NO: 105253 - protein, 10 aa, synthetic construct
EKARGDHVNL

SEQ ID NO: 105254 - protein, 10 aa, synthetic construct
EKVRGDHVNL

SEQ ID NO: 105255 - protein, 10 aa, synthetic construct
EKPRGDHVNL

SEQ ID NO: 105256 - protein, 10 aa, synthetic construct
EKLRGDHVNL

SEQ ID NO: 105257 - protein, 10 aa, synthetic construct
EKIRGDHVNL

SEQ ID NO: 105258 - protein, 10 aa, synthetic construct
EKMRGDHVNL

SEQ ID NO: 105259 - protein, 10 aa, synthetic construct
EKWRGDHVNL

SEQ ID NO: 105260 - protein, 10 aa, synthetic construct
EKFRGDHVNL

SEQ ID NO: 105261 - protein, 10 aa, synthetic construct
EKKRGDHVNL

SEQ ID NO: 105262 - protein, 10 aa, synthetic construct
EKRRGDHVNL

SEQ ID NO: 105263 - protein, 10 aa, synthetic construct
EKHRGDHVNL

SEQ ID NO: 105264 - protein, 10 aa, synthetic construct
EKSRGDHVNL

SEQ ID NO: 105265 - protein, 10 aa, synthetic construct
EKTRGDHVNL

SEQ ID NO: 105266 - protein, 10 aa, synthetic construct
EKYRGDHVNL

SEQ ID NO: 105267 - protein, 10 aa, synthetic construct
EKNRGDHVNL

SEQ ID NO: 105268 - protein, 10 aa, synthetic construct
EKQRGDHVNL

SEQ ID NO: 105269 - protein, 10 aa, synthetic construct
EKDRGDHVNL

SEQ ID NO: 105270 - protein, 10 aa, synthetic construct
EKERGDHVNL

SEQ ID NO: 105271 - protein, 10 aa, synthetic construct
ERGRGDHVNL

SEQ ID NO: 105272 - protein, 10 aa, synthetic construct
ERARGDHVNL

SEQ ID NO: 105273 - protein, 10 aa, synthetic construct
ERVRGDHVNL

SEQ ID NO: 105274 - protein, 10 aa, synthetic construct
ERPRGDHVNL

SEQ ID NO: 105275 - protein, 10 aa, synthetic construct
ERLRGDHVNL

SEQ ID NO: 105276 - protein, 10 aa, synthetic construct
ERIRGDHVNL

SEQ ID NO: 105277 - protein, 10 aa, synthetic construct
ERMRGDHVNL

SEQ ID NO: 105278 - protein, 10 aa, synthetic construct
ERWRGDHVNL

SEQ ID NO: 105279 - protein, 10 aa, synthetic construct
ERFRGDHVNL

SEQ ID NO: 105280 - protein, 10 aa, synthetic construct
ERKRGDHVNL

SEQ ID NO: 105281 - protein, 10 aa, synthetic construct
ERRRGDHVNL

SEQ ID NO: 105282 - protein, 10 aa, synthetic construct
ERHRGDHVNL

SEQ ID NO: 105283 - protein, 10 aa, synthetic construct
ERSRGDHVNL

SEQ ID NO: 105284 - protein, 10 aa, synthetic construct
ERTRGDHVNL

SEQ ID NO: 105285 - protein, 10 aa, synthetic construct
ERYRGDHVNL

SEQ ID NO: 105286 - protein, 10 aa, synthetic construct
ERNRGDHVNL

SEQ ID NO: 105287 - protein, 10 aa, synthetic construct
ERQRGDHVNL

SEQ ID NO: 105288 - protein, 10 aa, synthetic construct
ERDRGDHVNL

SEQ ID NO: 105289 - protein, 10 aa, synthetic construct
ERERGDHVNL

SEQ ID NO: 105290 - protein, 10 aa, synthetic construct
EHGRGDHVNL

SEQ ID NO: 105291 - protein, 10 aa, synthetic construct
EHARGDHVNL

SEQ ID NO: 105292 - protein, 10 aa, synthetic construct
EHVRGDHVNL

SEQ ID NO: 105293 - protein, 10 aa, synthetic construct
EHPRGDHVNL

SEQ ID NO: 105294 - protein, 10 aa, synthetic construct
EHLRGDHVNL

SEQ ID NO: 105295 - protein, 10 aa, synthetic construct
EHIRGDHVNL

SEQ ID NO: 105296 - protein, 10 aa, synthetic construct
EHMRGDHVNL

SEQ ID NO: 105297 - protein, 10 aa, synthetic construct
EHWRGDHVNL

SEQ ID NO: 105298 - protein, 10 aa, synthetic construct
EHFRGDHVNL

SEQ ID NO: 105299 - protein, 10 aa, synthetic construct
EHKRGDHVNL

SEQ ID NO: 105300 - protein, 10 aa, synthetic construct
EHRRGDHVNL

SEQ ID NO: 105301 - protein, 10 aa, synthetic construct
EHHRGDHVNL

SEQ ID NO: 105302 - protein, 10 aa, synthetic construct
EHSRGDHVNL

SEQ ID NO: 105303 - protein, 10 aa, synthetic construct
EHTRGDHVNL

SEQ ID NO: 105304 - protein, 10 aa, synthetic construct
EHYRGDHVNL

SEQ ID NO: 105305 - protein, 10 aa, synthetic construct
EHNRGDHVNL

SEQ ID NO: 105306 - protein, 10 aa, synthetic construct
EHQRGDHVNL

SEQ ID NO: 105307 - protein, 10 aa, synthetic construct
EHDRGDHVNL

SEQ ID NO: 105308 - protein, 10 aa, synthetic construct
EHERGDHVNL

SEQ ID NO: 105309 - protein, 10 aa, synthetic construct
ESGRGDHVNL

SEQ ID NO: 105310 - protein, 10 aa, synthetic construct
ESARGDHVNL

SEQ ID NO: 105311 - protein, 10 aa, synthetic construct
ESVRGDHVNL

SEQ ID NO: 105312 - protein, 10 aa, synthetic construct
ESPRGDHVNL

SEQ ID NO: 105313 - protein, 10 aa, synthetic construct
ESLRGDHVNL

SEQ ID NO: 105314 - protein, 10 aa, synthetic construct
ESIRGDHVNL

SEQ ID NO: 105315 - protein, 10 aa, synthetic construct
ESMRGDHVNL

SEQ ID NO: 105316 - protein, 10 aa, synthetic construct
ESWRGDHVNL

SEQ ID NO: 105317 - protein, 10 aa, synthetic construct
ESFRGDHVNL

SEQ ID NO: 105318 - protein, 10 aa, synthetic construct
ESKRGDHVNL

SEQ ID NO: 105319 - protein, 10 aa, synthetic construct
ESRRGDHVNL

SEQ ID NO: 105320 - protein, 10 aa, synthetic construct
ESHRGDHVNL

SEQ ID NO: 105321 - protein, 10 aa, synthetic construct
ESSRGDHVNL

SEQ ID NO: 105322 - protein, 10 aa, synthetic construct
ESTRGDHVNL

SEQ ID NO: 105323 - protein, 10 aa, synthetic construct
ESYRGDHVNL

SEQ ID NO: 105324 - protein, 10 aa, synthetic construct
ESNRGDHVNL

SEQ ID NO: 105325 - protein, 10 aa, synthetic construct
ESQRGDHVNL

SEQ ID NO: 105326 - protein, 10 aa, synthetic construct
ESDRGDHVNL

SEQ ID NO: 105327 - protein, 10 aa, synthetic construct
ESERGDHVNL

SEQ ID NO: 105328 - protein, 10 aa, synthetic construct
ETGRGDHVNL

SEQ ID NO: 105329 - protein, 10 aa, synthetic construct
ETARGDHVNL

SEQ ID NO: 105330 - protein, 10 aa, synthetic construct
ETVRGDHVNL

SEQ ID NO: 105331 - protein, 10 aa, synthetic construct
ETPRGDHVNL

SEQ ID NO: 105332 - protein, 10 aa, synthetic construct
ETLRGDHVNL

SEQ ID NO: 105333 - protein, 10 aa, synthetic construct
ETIRGDHVNL

SEQ ID NO: 105334 - protein, 10 aa, synthetic construct
ETMRGDHVNL

SEQ ID NO: 105335 - protein, 10 aa, synthetic construct
ETWRGDHVNL

SEQ ID NO: 105336 - protein, 10 aa, synthetic construct
ETFRGDHVNL

SEQ ID NO: 105337 - protein, 10 aa, synthetic construct
ETKRGDHVNL

SEQ ID NO: 105338 - protein, 10 aa, synthetic construct
ETRRGDHVNL

SEQ ID NO: 105339 - protein, 10 aa, synthetic construct
ETHRGDHVNL

SEQ ID NO: 105340 - protein, 10 aa, synthetic construct
ETSRGDHVNL

SEQ ID NO: 105341 - protein, 10 aa, synthetic construct
ETTRGDHVNL

SEQ ID NO: 105342 - protein, 10 aa, synthetic construct
ETYRGDHVNL

SEQ ID NO: 105343 - protein, 10 aa, synthetic construct
ETNRGDHVNL

SEQ ID NO: 105344 - protein, 10 aa, synthetic construct
ETQRGDHVNL

SEQ ID NO: 105345 - protein, 10 aa, synthetic construct
ETDRGDHVNL

SEQ ID NO: 105346 - protein, 10 aa, synthetic construct
ETERGDHVNL

SEQ ID NO: 105347 - protein, 10 aa, synthetic construct
EYGRGDHVNL

SEQ ID NO: 105348 - protein, 10 aa, synthetic construct
EYARGDHVNL

SEQ ID NO: 105349 - protein, 10 aa, synthetic construct
EYVRGDHVNL

SEQ ID NO: 105350 - protein, 10 aa, synthetic construct
EYPRGDHVNL

SEQ ID NO: 105351 - protein, 10 aa, synthetic construct
EYLRGDHVNL

SEQ ID NO: 105352 - protein, 10 aa, synthetic construct
EYIRGDHVNL

SEQ ID NO: 105353 - protein, 10 aa, synthetic construct
EYMRGDHVNL

SEQ ID NO: 105354 - protein, 10 aa, synthetic construct
EYWRGDHVNL

SEQ ID NO: 105355 - protein, 10 aa, synthetic construct
EYFRGDHVNL

SEQ ID NO: 105356 - protein, 10 aa, synthetic construct
EYKRGDHVNL

SEQ ID NO: 105357 - protein, 10 aa, synthetic construct
EYRRGDHVNL

SEQ ID NO: 105358 - protein, 10 aa, synthetic construct
EYHRGDHVNL

SEQ ID NO: 105359 - protein, 10 aa, synthetic construct
EYSRGDHVNL

SEQ ID NO: 105360 - protein, 10 aa, synthetic construct
EYTRGDHVNL

SEQ ID NO: 105361 - protein, 10 aa, synthetic construct
EYYRGDHVNL

SEQ ID NO: 105362 - protein, 10 aa, synthetic construct
EYNRGDHVNL

SEQ ID NO: 105363 - protein, 10 aa, synthetic construct
EYQRGDHVNL

SEQ ID NO: 105364 - protein, 10 aa, synthetic construct
EYDRGDHVNL

SEQ ID NO: 105365 - protein, 10 aa, synthetic construct
EYERGDHVNL

SEQ ID NO: 105366 - protein, 10 aa, synthetic construct
ENGRGDHVNL

SEQ ID NO: 105367 - protein, 10 aa, synthetic construct
ENARGDHVNL

SEQ ID NO: 105368 - protein, 10 aa, synthetic construct
ENVRGDHVNL

SEQ ID NO: 105369 - protein, 10 aa, synthetic construct
ENPRGDHVNL

SEQ ID NO: 105370 - protein, 10 aa, synthetic construct
ENLRGDHVNL

SEQ ID NO: 105371 - protein, 10 aa, synthetic construct
ENIRGDHVNL

SEQ ID NO: 105372 - protein, 10 aa, synthetic construct
ENMRGDHVNL

SEQ ID NO: 105373 - protein, 10 aa, synthetic construct
ENWRGDHVNL

SEQ ID NO: 105374 - protein, 10 aa, synthetic construct
ENFRGDHVNL

SEQ ID NO: 105375 - protein, 10 aa, synthetic construct
ENKRGDHVNL

SEQ ID NO: 105376 - protein, 10 aa, synthetic construct
ENRRGDHVNL

SEQ ID NO: 105377 - protein, 10 aa, synthetic construct
ENHRGDHVNL

SEQ ID NO: 105378 - protein, 10 aa, synthetic construct
ENSRGDHVNL

SEQ ID NO: 105379 - protein, 10 aa, synthetic construct
ENTRGDHVNL

SEQ ID NO: 105380 - protein, 10 aa, synthetic construct
ENYRGDHVNL

SEQ ID NO: 105381 - protein, 10 aa, synthetic construct
ENNRGDHVNL

SEQ ID NO: 105382 - protein, 10 aa, synthetic construct
ENQRGDHVNL

SEQ ID NO: 105383 - protein, 10 aa, synthetic construct
ENDRGDHVNL

SEQ ID NO: 105384 - protein, 10 aa, synthetic construct
ENERGDHVNL

SEQ ID NO: 105385 - protein, 10 aa, synthetic construct
EQGRGDHVNL

SEQ ID NO: 105386 - protein, 10 aa, synthetic construct
EQARGDHVNL

SEQ ID NO: 105387 - protein, 10 aa, synthetic construct
EQVRGDHVNL

SEQ ID NO: 105388 - protein, 10 aa, synthetic construct
EQPRGDHVNL

SEQ ID NO: 105389 - protein, 10 aa, synthetic construct
EQLRGDHVNL

SEQ ID NO: 105390 - protein, 10 aa, synthetic construct
EQIRGDHVNL

SEQ ID NO: 105391 - protein, 10 aa, synthetic construct
EQMRGDHVNL

SEQ ID NO: 105392 - protein, 10 aa, synthetic construct
EQWRGDHVNL

SEQ ID NO: 105393 - protein, 10 aa, synthetic construct
EQFRGDHVNL

SEQ ID NO: 105394 - protein, 10 aa, synthetic construct
EQKRGDHVNL

SEQ ID NO: 105395 - protein, 10 aa, synthetic construct
EQRRGDHVNL

SEQ ID NO: 105396 - protein, 10 aa, synthetic construct
EQHRGDHVNL

SEQ ID NO: 105397 - protein, 10 aa, synthetic construct
EQSRGDHVNL

SEQ ID NO: 105398 - protein, 10 aa, synthetic construct
EQTRGDHVNL

SEQ ID NO: 105399 - protein, 10 aa, synthetic construct
EQYRGDHVNL

SEQ ID NO: 105400 - protein, 10 aa, synthetic construct
EQNRGDHVNL

SEQ ID NO: 105401 - protein, 10 aa, synthetic construct
EQQRGDHVNL

SEQ ID NO: 105402 - protein, 10 aa, synthetic construct
EQDRGDHVNL

SEQ ID NO: 105403 - protein, 10 aa, synthetic construct
EQERGDHVNL

SEQ ID NO: 105404 - protein, 10 aa, synthetic construct
EDGRGDHVNL

SEQ ID NO: 105405 - protein, 10 aa, synthetic construct
EDARGDHVNL

SEQ ID NO: 105406 - protein, 10 aa, synthetic construct
EDVRGDHVNL

SEQ ID NO: 105407 - protein, 10 aa, synthetic construct
EDPRGDHVNL

SEQ ID NO: 105408 - protein, 10 aa, synthetic construct
EDLRGDHVNL

SEQ ID NO: 105409 - protein, 10 aa, synthetic construct
EDIRGDHVNL

SEQ ID NO: 105410 - protein, 10 aa, synthetic construct
EDMRGDHVNL

SEQ ID NO: 105411 - protein, 10 aa, synthetic construct
EDWRGDHVNL

SEQ ID NO: 105412 - protein, 10 aa, synthetic construct
EDFRGDHVNL

SEQ ID NO: 105413 - protein, 10 aa, synthetic construct
EDKRGDHVNL

SEQ ID NO: 105414 - protein, 10 aa, synthetic construct
EDRRGDHVNL

SEQ ID NO: 105415 - protein, 10 aa, synthetic construct
EDHRGDHVNL

SEQ ID NO: 105416 - protein, 10 aa, synthetic construct
EDSRGDHVNL

SEQ ID NO: 105417 - protein, 10 aa, synthetic construct
EDTRGDHVNL

SEQ ID NO: 105418 - protein, 10 aa, synthetic construct
EDYRGDHVNL

SEQ ID NO: 105419 - protein, 10 aa, synthetic construct
EDNRGDHVNL

SEQ ID NO: 105420 - protein, 10 aa, synthetic construct
EDQRGDHVNL

SEQ ID NO: 105421 - protein, 10 aa, synthetic construct
EDDRGDHVNL

SEQ ID NO: 105422 - protein, 10 aa, synthetic construct
EDERGDHVNL

SEQ ID NO: 105423 - protein, 10 aa, synthetic construct
EEGRGDHVNL

SEQ ID NO: 105424 - protein, 10 aa, synthetic construct
EEARGDHVNL

SEQ ID NO: 105425 - protein, 10 aa, synthetic construct
EEVRGDHVNL

SEQ ID NO: 105426 - protein, 10 aa, synthetic construct
EEPRGDHVNL

SEQ ID NO: 105427 - protein, 10 aa, synthetic construct
EELRGDHVNL

SEQ ID NO: 105428 - protein, 10 aa, synthetic construct
EEIRGDHVNL

SEQ ID NO: 105429 - protein, 10 aa, synthetic construct
EEMRGDHVNL

SEQ ID NO: 105430 - protein, 10 aa, synthetic construct
EEWRGDHVNL

SEQ ID NO: 105431 - protein, 10 aa, synthetic construct
EEFRGDHVNL

SEQ ID NO: 105432 - protein, 10 aa, synthetic construct
EEKRGDHVNL

SEQ ID NO: 105433 - protein, 10 aa, synthetic construct
EERRGDHVNL

SEQ ID NO: 105434 - protein, 10 aa, synthetic construct
EEHRGDHVNL

SEQ ID NO: 105435 - protein, 10 aa, synthetic construct
EESRGDHVNL

SEQ ID NO: 105436 - protein, 10 aa, synthetic construct
EETRGDHVNL

SEQ ID NO: 105437 - protein, 10 aa, synthetic construct
EEYRGDHVNL

SEQ ID NO: 105438 - protein, 10 aa, synthetic construct
EENRGDHVNL

SEQ ID NO: 105439 - protein, 10 aa, synthetic construct
EEQRGDHVNL

SEQ ID NO: 105440 - protein, 10 aa, synthetic construct
EEDRGDHVNL

SEQ ID NO: 105441 - protein, 10 aa, synthetic construct
EEERGDHVNL

SEQ ID NO: 105442 - protein, 10 aa, synthetic construct
NGGRGDHVNL

SEQ ID NO: 105443 - protein, 10 aa, synthetic construct
NGARGDHVNL

SEQ ID NO: 105444 - protein, 10 aa, synthetic construct
NGVRGDHVNL

SEQ ID NO: 105445 - protein, 10 aa, synthetic construct
NGPRGDHVNL

SEQ ID NO: 105446 - protein, 10 aa, synthetic construct
NGLRGDHVNL

SEQ ID NO: 105447 - protein, 10 aa, synthetic construct
NGIRGDHVNL

SEQ ID NO: 105448 - protein, 10 aa, synthetic construct
NGMRGDHVNL

SEQ ID NO: 105449 - protein, 10 aa, synthetic construct
NGWRGDHVNL

SEQ ID NO: 105450 - protein, 10 aa, synthetic construct
NGFRGDHVNL

SEQ ID NO: 105451 - protein, 10 aa, synthetic construct
NGKRGDHVNL

SEQ ID NO: 105452 - protein, 10 aa, synthetic construct
NGRRGDHVNL

SEQ ID NO: 105453 - protein, 10 aa, synthetic construct
NGHRGDHVNL

SEQ ID NO: 105454 - protein, 10 aa, synthetic construct
NGSRGDHVNL

SEQ ID NO: 105455 - protein, 10 aa, synthetic construct
NGTRGDHVNL

SEQ ID NO: 105456 - protein, 10 aa, synthetic construct
NGYRGDHVNL

SEQ ID NO: 105457 - protein, 10 aa, synthetic construct
NGNRGDHVNL

SEQ ID NO: 105458 - protein, 10 aa, synthetic construct
NGQRGDHVNL

SEQ ID NO: 105459 - protein, 10 aa, synthetic construct
NGDRGDHVNL

SEQ ID NO: 105460 - protein, 10 aa, synthetic construct
NGERGDHVNL

SEQ ID NO: 105461 - protein, 10 aa, synthetic construct
NAGRGDHVNL

SEQ ID NO: 105462 - protein, 10 aa, synthetic construct
NAARGDHVNL

SEQ ID NO: 105463 - protein, 10 aa, synthetic construct
NAVRGDHVNL

SEQ ID NO: 105464 - protein, 10 aa, synthetic construct
NAPRGDHVNL

SEQ ID NO: 105465 - protein, 10 aa, synthetic construct
NALRGDHVNL

SEQ ID NO: 105466 - protein, 10 aa, synthetic construct
NAIRGDHVNL

SEQ ID NO: 105467 - protein, 10 aa, synthetic construct
NAMRGDHVNL

SEQ ID NO: 105468 - protein, 10 aa, synthetic construct
NAWRGDHVNL

SEQ ID NO: 105469 - protein, 10 aa, synthetic construct
NAFRGDHVNL

SEQ ID NO: 105470 - protein, 10 aa, synthetic construct
NAKRGDHVNL

SEQ ID NO: 105471 - protein, 10 aa, synthetic construct
NARRGDHVNL

SEQ ID NO: 105472 - protein, 10 aa, synthetic construct
NAHRGDHVNL

SEQ ID NO: 105473 - protein, 10 aa, synthetic construct
NASRGDHVNL

SEQ ID NO: 105474 - protein, 10 aa, synthetic construct
NATRGDHVNL

SEQ ID NO: 105475 - protein, 10 aa, synthetic construct
NAYRGDHVNL

SEQ ID NO: 105476 - protein, 10 aa, synthetic construct
NANRGDHVNL

SEQ ID NO: 105477 - protein, 10 aa, synthetic construct
NAQRGDHVNL

SEQ ID NO: 105478 - protein, 10 aa, synthetic construct
NADRGDHVNL

SEQ ID NO: 105479 - protein, 10 aa, synthetic construct
NAERGDHVNL

SEQ ID NO: 105480 - protein, 10 aa, synthetic construct
NVGRGDHVNL

SEQ ID NO: 105481 - protein, 10 aa, synthetic construct
NVARGDHVNL

SEQ ID NO: 105482 - protein, 10 aa, synthetic construct
NVVRGDHVNL

SEQ ID NO: 105483 - protein, 10 aa, synthetic construct
NVPRGDHVNL

SEQ ID NO: 105484 - protein, 10 aa, synthetic construct
NVLRGDHVNL

SEQ ID NO: 105485 - protein, 10 aa, synthetic construct
NVIRGDHVNL

SEQ ID NO: 105486 - protein, 10 aa, synthetic construct
NVMRGDHVNL

SEQ ID NO: 105487 - protein, 10 aa, synthetic construct
NVWRGDHVNL

SEQ ID NO: 105488 - protein, 10 aa, synthetic construct
NVFRGDHVNL

SEQ ID NO: 105489 - protein, 10 aa, synthetic construct
NVKRGDHVNL

SEQ ID NO: 105490 - protein, 10 aa, synthetic construct
NVRRGDHVNL

SEQ ID NO: 105491 - protein, 10 aa, synthetic construct
NVHRGDHVNL

SEQ ID NO: 105492 - protein, 10 aa, synthetic construct
NVSRGDHVNL

SEQ ID NO: 105493 - protein, 10 aa, synthetic construct
NVTRGDHVNL

SEQ ID NO: 105494 - protein, 10 aa, synthetic construct
NVYRGDHVNL

SEQ ID NO: 105495 - protein, 10 aa, synthetic construct
NVNRGDHVNL

SEQ ID NO: 105496 - protein, 10 aa, synthetic construct
NVQRGDHVNL

SEQ ID NO: 105497 - protein, 10 aa, synthetic construct
NVDRGDHVNL

SEQ ID NO: 105498 - protein, 10 aa, synthetic construct
NVERGDHVNL

SEQ ID NO: 105499 - protein, 10 aa, synthetic construct
NPGRGDHVNL

SEQ ID NO: 105500 - protein, 10 aa, synthetic construct
NPARGDHVNL

SEQ ID NO: 105501 - protein, 10 aa, synthetic construct
NPVRGDHVNL

SEQ ID NO: 105502 - protein, 10 aa, synthetic construct
NPPRGDHVNL

SEQ ID NO: 105503 - protein, 10 aa, synthetic construct
NPLRGDHVNL

SEQ ID NO: 105504 - protein, 10 aa, synthetic construct
NPIRGDHVNL

SEQ ID NO: 105505 - protein, 10 aa, synthetic construct
NPMRGDHVNL

SEQ ID NO: 105506 - protein, 10 aa, synthetic construct
NPWRGDHVNL

SEQ ID NO: 105507 - protein, 10 aa, synthetic construct
NPFRGDHVNL

SEQ ID NO: 105508 - protein, 10 aa, synthetic construct
NPKRGDHVNL

SEQ ID NO: 105509 - protein, 10 aa, synthetic construct
NPRRGDHVNL

SEQ ID NO: 105510 - protein, 10 aa, synthetic construct
NPHRGDHVNL

SEQ ID NO: 105511 - protein, 10 aa, synthetic construct
NPSRGDHVNL

SEQ ID NO: 105512 - protein, 10 aa, synthetic construct
NPTRGDHVNL

SEQ ID NO: 105513 - protein, 10 aa, synthetic construct
NPYRGDHVNL

SEQ ID NO: 105514 - protein, 10 aa, synthetic construct
NPNRGDHVNL

SEQ ID NO: 105515 - protein, 10 aa, synthetic construct
NPQRGDHVNL

SEQ ID NO: 105516 - protein, 10 aa, synthetic construct
NPDRGDHVNL

SEQ ID NO: 105517 - protein, 10 aa, synthetic construct
NPERGDHVNL

SEQ ID NO: 105518 - protein, 10 aa, synthetic construct
NLGRGDHVNL

SEQ ID NO: 105519 - protein, 10 aa, synthetic construct
NLARGDHVNL

SEQ ID NO: 105520 - protein, 10 aa, synthetic construct
NLVRGDHVNL

SEQ ID NO: 105521 - protein, 10 aa, synthetic construct
NLPRGDHVNL

SEQ ID NO: 105522 - protein, 10 aa, synthetic construct
NLLRGDHVNL

SEQ ID NO: 105523 - protein, 10 aa, synthetic construct
NLIRGDHVNL

SEQ ID NO: 105524 - protein, 10 aa, synthetic construct
NLMRGDHVNL

SEQ ID NO: 105525 - protein, 10 aa, synthetic construct
NLWRGDHVNL

SEQ ID NO: 105526 - protein, 10 aa, synthetic construct
NLFRGDHVNL

SEQ ID NO: 105527 - protein, 10 aa, synthetic construct
NLKRGDHVNL

SEQ ID NO: 105528 - protein, 10 aa, synthetic construct
NLRRGDHVNL

SEQ ID NO: 105529 - protein, 10 aa, synthetic construct
NLHRGDHVNL

SEQ ID NO: 105530 - protein, 10 aa, synthetic construct
NLSRGDHVNL

SEQ ID NO: 105531 - protein, 10 aa, synthetic construct
NLTRGDHVNL

SEQ ID NO: 105532 - protein, 10 aa, synthetic construct
NLYRGDHVNL

SEQ ID NO: 105533 - protein, 10 aa, synthetic construct
NLNRGDHVNL

SEQ ID NO: 105534 - protein, 10 aa, synthetic construct
NLQRGDHVNL

SEQ ID NO: 105535 - protein, 10 aa, synthetic construct
NLDRGDHVNL

SEQ ID NO: 105536 - protein, 10 aa, synthetic construct
NLERGDHVNL

SEQ ID NO: 105537 - protein, 10 aa, synthetic construct
NIGRGDHVNL

SEQ ID NO: 105538 - protein, 10 aa, synthetic construct
NIARGDHVNL

SEQ ID NO: 105539 - protein, 10 aa, synthetic construct
NIVRGDHVNL

SEQ ID NO: 105540 - protein, 10 aa, synthetic construct
NIPRGDHVNL

SEQ ID NO: 105541 - protein, 10 aa, synthetic construct
NILRGDHVNL

SEQ ID NO: 105542 - protein, 10 aa, synthetic construct
NIIRGDHVNL

SEQ ID NO: 105543 - protein, 10 aa, synthetic construct
NIMRGDHVNL

SEQ ID NO: 105544 - protein, 10 aa, synthetic construct
NIWRGDHVNL

SEQ ID NO: 105545 - protein, 10 aa, synthetic construct
NIFRGDHVNL

SEQ ID NO: 105546 - protein, 10 aa, synthetic construct
NIKRGDHVNL

SEQ ID NO: 105547 - protein, 10 aa, synthetic construct
NIRRGDHVNL

SEQ ID NO: 105548 - protein, 10 aa, synthetic construct
NIHRGDHVNL

SEQ ID NO: 105549 - protein, 10 aa, synthetic construct
NISRGDHVNL

SEQ ID NO: 105550 - protein, 10 aa, synthetic construct
NITRGDHVNL

SEQ ID NO: 105551 - protein, 10 aa, synthetic construct
NIYRGDHVNL

SEQ ID NO: 105552 - protein, 10 aa, synthetic construct
NINRGDHVNL

SEQ ID NO: 105553 - protein, 10 aa, synthetic construct
NIQRGDHVNL

SEQ ID NO: 105554 - protein, 10 aa, synthetic construct
NIDRGDHVNL

SEQ ID NO: 105555 - protein, 10 aa, synthetic construct
NIERGDHVNL

SEQ ID NO: 105556 - protein, 10 aa, synthetic construct
NMGRGDHVNL

SEQ ID NO: 105557 - protein, 10 aa, synthetic construct
NMARGDHVNL

SEQ ID NO: 105558 - protein, 10 aa, synthetic construct
NMVRGDHVNL

SEQ ID NO: 105559 - protein, 10 aa, synthetic construct
NMPRGDHVNL

SEQ ID NO: 105560 - protein, 10 aa, synthetic construct
NMLRGDHVNL

SEQ ID NO: 105561 - protein, 10 aa, synthetic construct
NMIRGDHVNL

SEQ ID NO: 105562 - protein, 10 aa, synthetic construct
NMMRGDHVNL

SEQ ID NO: 105563 - protein, 10 aa, synthetic construct
NMWRGDHVNL

SEQ ID NO: 105564 - protein, 10 aa, synthetic construct
NMFRGDHVNL

SEQ ID NO: 105565 - protein, 10 aa, synthetic construct
NMKRGDHVNL

SEQ ID NO: 105566 - protein, 10 aa, synthetic construct
NMRRGDHVNL

SEQ ID NO: 105567 - protein, 10 aa, synthetic construct
NMHRGDHVNL

SEQ ID NO: 105568 - protein, 10 aa, synthetic construct
NMSRGDHVNL

SEQ ID NO: 105569 - protein, 10 aa, synthetic construct
NMTRGDHVNL

SEQ ID NO: 105570 - protein, 10 aa, synthetic construct
NMYRGDHVNL

SEQ ID NO: 105571 - protein, 10 aa, synthetic construct
NMNRGDHVNL

SEQ ID NO: 105572 - protein, 10 aa, synthetic construct
NMQRGDHVNL

SEQ ID NO: 105573 - protein, 10 aa, synthetic construct
NMDRGDHVNL

SEQ ID NO: 105574 - protein, 10 aa, synthetic construct
NMERGDHVNL

SEQ ID NO: 105575 - protein, 10 aa, synthetic construct
NWGRGDHVNL

SEQ ID NO: 105576 - protein, 10 aa, synthetic construct
NWARGDHVNL

SEQ ID NO: 105577 - protein, 10 aa, synthetic construct
NWVRGDHVNL

SEQ ID NO: 105578 - protein, 10 aa, synthetic construct
NWPRGDHVNL

SEQ ID NO: 105579 - protein, 10 aa, synthetic construct
NWLRGDHVNL

SEQ ID NO: 105580 - protein, 10 aa, synthetic construct
NWIRGDHVNL

SEQ ID NO: 105581 - protein, 10 aa, synthetic construct
NWMRGDHVNL

SEQ ID NO: 105582 - protein, 10 aa, synthetic construct
NWWRGDHVNL

SEQ ID NO: 105583 - protein, 10 aa, synthetic construct
NWFRGDHVNL

SEQ ID NO: 105584 - protein, 10 aa, synthetic construct
NWKRGDHVNL

SEQ ID NO: 105585 - protein, 10 aa, synthetic construct
NWRRGDHVNL

SEQ ID NO: 105586 - protein, 10 aa, synthetic construct
NWHRGDHVNL

SEQ ID NO: 105587 - protein, 10 aa, synthetic construct
NWSRGDHVNL

SEQ ID NO: 105588 - protein, 10 aa, synthetic construct
NWTRGDHVNL

SEQ ID NO: 105589 - protein, 10 aa, synthetic construct
NWYRGDHVNL

SEQ ID NO: 105590 - protein, 10 aa, synthetic construct
NWNRGDHVNL

SEQ ID NO: 105591 - protein, 10 aa, synthetic construct
NWQRGDHVNL

SEQ ID NO: 105592 - protein, 10 aa, synthetic construct
NWDRGDHVNL

SEQ ID NO: 105593 - protein, 10 aa, synthetic construct
NWERGDHVNL

SEQ ID NO: 105594 - protein, 10 aa, synthetic construct
NFGRGDHVNL

SEQ ID NO: 105595 - protein, 10 aa, synthetic construct
NFARGDHVNL

SEQ ID NO: 105596 - protein, 10 aa, synthetic construct
NFVRGDHVNL

SEQ ID NO: 105597 - protein, 10 aa, synthetic construct
NFPRGDHVNL

SEQ ID NO: 105598 - protein, 10 aa, synthetic construct
NFLRGDHVNL

SEQ ID NO: 105599 - protein, 10 aa, synthetic construct
NFIRGDHVNL

SEQ ID NO: 105600 - protein, 10 aa, synthetic construct
NFMRGDHVNL

SEQ ID NO: 105601 - protein, 10 aa, synthetic construct
NFWRGDHVNL

SEQ ID NO: 105602 - protein, 10 aa, synthetic construct
NFFRGDHVNL

SEQ ID NO: 105603 - protein, 10 aa, synthetic construct
NFKRGDHVNL

SEQ ID NO: 105604 - protein, 10 aa, synthetic construct
NFRRGDHVNL

SEQ ID NO: 105605 - protein, 10 aa, synthetic construct
NFHRGDHVNL

SEQ ID NO: 105606 - protein, 10 aa, synthetic construct
NFSRGDHVNL

SEQ ID NO: 105607 - protein, 10 aa, synthetic construct
NFTRGDHVNL

SEQ ID NO: 105608 - protein, 10 aa, synthetic construct
NFYRGDHVNL

SEQ ID NO: 105609 - protein, 10 aa, synthetic construct
NFNRGDHVNL

SEQ ID NO: 105610 - protein, 10 aa, synthetic construct
NFQRGDHVNL

SEQ ID NO: 105611 - protein, 10 aa, synthetic construct
NFDRGDHVNL

SEQ ID NO: 105612 - protein, 10 aa, synthetic construct
NFERGDHVNL

SEQ ID NO: 105613 - protein, 10 aa, synthetic construct
NKGRGDHVNL

SEQ ID NO: 105614 - protein, 10 aa, synthetic construct
NKARGDHVNL

SEQ ID NO: 105615 - protein, 10 aa, synthetic construct
NKVRGDHVNL

SEQ ID NO: 105616 - protein, 10 aa, synthetic construct
NKPRGDHVNL

SEQ ID NO: 105617 - protein, 10 aa, synthetic construct
NKLRGDHVNL

SEQ ID NO: 105618 - protein, 10 aa, synthetic construct
NKIRGDHVNL

SEQ ID NO: 105619 - protein, 10 aa, synthetic construct
NKMRGDHVNL

SEQ ID NO: 105620 - protein, 10 aa, synthetic construct
NKWRGDHVNL

SEQ ID NO: 105621 - protein, 10 aa, synthetic construct
NKFRGDHVNL

SEQ ID NO: 105622 - protein, 10 aa, synthetic construct
NKKRGDHVNL

SEQ ID NO: 105623 - protein, 10 aa, synthetic construct
NKRRGDHVNL

SEQ ID NO: 105624 - protein, 10 aa, synthetic construct
NKHRGDHVNL

SEQ ID NO: 105625 - protein, 10 aa, synthetic construct
NKSRGDHVNL

SEQ ID NO: 105626 - protein, 10 aa, synthetic construct
NKTRGDHVNL

SEQ ID NO: 105627 - protein, 10 aa, synthetic construct
NKYRGDHVNL

SEQ ID NO: 105628 - protein, 10 aa, synthetic construct
NKNRGDHVNL

SEQ ID NO: 105629 - protein, 10 aa, synthetic construct
NKQRGDHVNL

SEQ ID NO: 105630 - protein, 10 aa, synthetic construct
NKDRGDHVNL

SEQ ID NO: 105631 - protein, 10 aa, synthetic construct
NKERGDHVNL

SEQ ID NO: 105632 - protein, 10 aa, synthetic construct
NRGRGDHVNL

SEQ ID NO: 105633 - protein, 10 aa, synthetic construct
NRARGDHVNL

SEQ ID NO: 105634 - protein, 10 aa, synthetic construct
NRVRGDHVNL

SEQ ID NO: 105635 - protein, 10 aa, synthetic construct
NRPRGDHVNL

SEQ ID NO: 105636 - protein, 10 aa, synthetic construct
NRLRGDHVNL

SEQ ID NO: 105637 - protein, 10 aa, synthetic construct
NRIRGDHVNL

SEQ ID NO: 105638 - protein, 10 aa, synthetic construct
NRMRGDHVNL

SEQ ID NO: 105639 - protein, 10 aa, synthetic construct
NRWRGDHVNL

SEQ ID NO: 105640 - protein, 10 aa, synthetic construct
NRFRGDHVNL

SEQ ID NO: 105641 - protein, 10 aa, synthetic construct
NRKRGDHVNL

SEQ ID NO: 105642 - protein, 10 aa, synthetic construct
NRRRGDHVNL

SEQ ID NO: 105643 - protein, 10 aa, synthetic construct
NRHRGDHVNL

SEQ ID NO: 105644 - protein, 10 aa, synthetic construct
NRSRGDHVNL

SEQ ID NO: 105645 - protein, 10 aa, synthetic construct
NRTRGDHVNL

SEQ ID NO: 105646 - protein, 10 aa, synthetic construct
NRYRGDHVNL

SEQ ID NO: 105647 - protein, 10 aa, synthetic construct
NRNRGDHVNL

SEQ ID NO: 105648 - protein, 10 aa, synthetic construct
NRQRGDHVNL

SEQ ID NO: 105649 - protein, 10 aa, synthetic construct
NRDRGDHVNL

SEQ ID NO: 105650 - protein, 10 aa, synthetic construct
NRERGDHVNL

SEQ ID NO: 105651 - protein, 10 aa, synthetic construct
NHGRGDHVNL

SEQ ID NO: 105652 - protein, 10 aa, synthetic construct
NHARGDHVNL

SEQ ID NO: 105653 - protein, 10 aa, synthetic construct
NHVRGDHVNL

SEQ ID NO: 105654 - protein, 10 aa, synthetic construct
NHPRGDHVNL

SEQ ID NO: 105655 - protein, 10 aa, synthetic construct
NHLRGDHVNL

SEQ ID NO: 105656 - protein, 10 aa, synthetic construct
NHIRGDHVNL

SEQ ID NO: 105657 - protein, 10 aa, synthetic construct
NHMRGDHVNL

SEQ ID NO: 105658 - protein, 10 aa, synthetic construct
NHWRGDHVNL

SEQ ID NO: 105659 - protein, 10 aa, synthetic construct
NHFRGDHVNL

SEQ ID NO: 105660 - protein, 10 aa, synthetic construct
NHKRGDHVNL

SEQ ID NO: 105661 - protein, 10 aa, synthetic construct
NHRRGDHVNL

SEQ ID NO: 105662 - protein, 10 aa, synthetic construct
NHHRGDHVNL

SEQ ID NO: 105663 - protein, 10 aa, synthetic construct
NHSRGDHVNL

SEQ ID NO: 105664 - protein, 10 aa, synthetic construct
NHTRGDHVNL

SEQ ID NO: 105665 - protein, 10 aa, synthetic construct
NHYRGDHVNL

SEQ ID NO: 105666 - protein, 10 aa, synthetic construct
NHNRGDHVNL

SEQ ID NO: 105667 - protein, 10 aa, synthetic construct
NHQRGDHVNL

SEQ ID NO: 105668 - protein, 10 aa, synthetic construct
NHDRGDHVNL

SEQ ID NO: 105669 - protein, 10 aa, synthetic construct
NHERGDHVNL

SEQ ID NO: 105670 - protein, 10 aa, synthetic construct
NSGRGDHVNL

SEQ ID NO: 105671 - protein, 10 aa, synthetic construct
NSARGDHVNL

SEQ ID NO: 105672 - protein, 10 aa, synthetic construct
NSVRGDHVNL

SEQ ID NO: 105673 - protein, 10 aa, synthetic construct
NSPRGDHVNL

SEQ ID NO: 105674 - protein, 10 aa, synthetic construct
NSLRGDHVNL

SEQ ID NO: 105675 - protein, 10 aa, synthetic construct
NSIRGDHVNL

SEQ ID NO: 105676 - protein, 10 aa, synthetic construct
NSMRGDHVNL

SEQ ID NO: 105677 - protein, 10 aa, synthetic construct
NSWRGDHVNL

SEQ ID NO: 105678 - protein, 10 aa, synthetic construct
NSFRGDHVNL

SEQ ID NO: 105679 - protein, 10 aa, synthetic construct
NSKRGDHVNL

SEQ ID NO: 105680 - protein, 10 aa, synthetic construct
NSRRGDHVNL

SEQ ID NO: 105681 - protein, 10 aa, synthetic construct
NSHRGDHVNL

SEQ ID NO: 105682 - protein, 10 aa, synthetic construct
NSSRGDHVNL

SEQ ID NO: 105683 - protein, 10 aa, synthetic construct
NSTRGDHVNL

SEQ ID NO: 105684 - protein, 10 aa, synthetic construct
NSYRGDHVNL

SEQ ID NO: 105685 - protein, 10 aa, synthetic construct
NSNRGDHVNL

SEQ ID NO: 105686 - protein, 10 aa, synthetic construct
NSQRGDHVNL

SEQ ID NO: 105687 - protein, 10 aa, synthetic construct
NSDRGDHVNL

SEQ ID NO: 105688 - protein, 10 aa, synthetic construct
NSERGDHVNL

SEQ ID NO: 105689 - protein, 10 aa, synthetic construct
NTGRGDHVNL

SEQ ID NO: 105690 - protein, 10 aa, synthetic construct
NTARGDHVNL

SEQ ID NO: 105691 - protein, 10 aa, synthetic construct
NTVRGDHVNL

SEQ ID NO: 105692 - protein, 10 aa, synthetic construct
NTPRGDHVNL

SEQ ID NO: 105693 - protein, 10 aa, synthetic construct
NTLRGDHVNL

SEQ ID NO: 105694 - protein, 10 aa, synthetic construct
NTIRGDHVNL

SEQ ID NO: 105695 - protein, 10 aa, synthetic construct
NTMRGDHVNL

SEQ ID NO: 105696 - protein, 10 aa, synthetic construct
NTWRGDHVNL

SEQ ID NO: 105697 - protein, 10 aa, synthetic construct
NTFRGDHVNL

SEQ ID NO: 105698 - protein, 10 aa, synthetic construct
NTKRGDHVNL

SEQ ID NO: 105699 - protein, 10 aa, synthetic construct
NTRRGDHVNL

SEQ ID NO: 105700 - protein, 10 aa, synthetic construct
NTHRGDHVNL

SEQ ID NO: 105701 - protein, 10 aa, synthetic construct
NTSRGDHVNL

SEQ ID NO: 105702 - protein, 10 aa, synthetic construct
NTTRGDHVNL

SEQ ID NO: 105703 - protein, 10 aa, synthetic construct
NTYRGDHVNL

SEQ ID NO: 105704 - protein, 10 aa, synthetic construct
NTNRGDHVNL

SEQ ID NO: 105705 - protein, 10 aa, synthetic construct
NTQRGDHVNL

SEQ ID NO: 105706 - protein, 10 aa, synthetic construct
NTDRGDHVNL

SEQ ID NO: 105707 - protein, 10 aa, synthetic construct
NTERGDHVNL

SEQ ID NO: 105708 - protein, 10 aa, synthetic construct
NYGRGDHVNL

SEQ ID NO: 105709 - protein, 10 aa, synthetic construct
NYARGDHVNL

SEQ ID NO: 105710 - protein, 10 aa, synthetic construct
NYVRGDHVNL

SEQ ID NO: 105711 - protein, 10 aa, synthetic construct
NYPRGDHVNL

SEQ ID NO: 105712 - protein, 10 aa, synthetic construct
NYLRGDHVNL

SEQ ID NO: 105713 - protein, 10 aa, synthetic construct
NYIRGDHVNL

SEQ ID NO: 105714 - protein, 10 aa, synthetic construct
NYMRGDHVNL

SEQ ID NO: 105715 - protein, 10 aa, synthetic construct
NYWRGDHVNL

SEQ ID NO: 105716 - protein, 10 aa, synthetic construct
NYFRGDHVNL

SEQ ID NO: 105717 - protein, 10 aa, synthetic construct
NYKRGDHVNL

SEQ ID NO: 105718 - protein, 10 aa, synthetic construct
NYRRGDHVNL

SEQ ID NO: 105719 - protein, 10 aa, synthetic construct
NYHRGDHVNL

SEQ ID NO: 105720 - protein, 10 aa, synthetic construct
NYSRGDHVNL

SEQ ID NO: 105721 - protein, 10 aa, synthetic construct
NYTRGDHVNL

SEQ ID NO: 105722 - protein, 10 aa, synthetic construct
NYYRGDHVNL

SEQ ID NO: 105723 - protein, 10 aa, synthetic construct
NYNRGDHVNL

SEQ ID NO: 105724 - protein, 10 aa, synthetic construct
NYQRGDHVNL

SEQ ID NO: 105725 - protein, 10 aa, synthetic construct
NYDRGDHVNL

SEQ ID NO: 105726 - protein, 10 aa, synthetic construct
NYERGDHVNL

SEQ ID NO: 105727 - protein, 10 aa, synthetic construct
NNGRGDHVNL

SEQ ID NO: 105728 - protein, 10 aa, synthetic construct
NNARGDHVNL

SEQ ID NO: 105729 - protein, 10 aa, synthetic construct
NNVRGDHVNL

SEQ ID NO: 105730 - protein, 10 aa, synthetic construct
NNPRGDHVNL

SEQ ID NO: 105731 - protein, 10 aa, synthetic construct
NNLRGDHVNL

SEQ ID NO: 105732 - protein, 10 aa, synthetic construct
NNIRGDHVNL

SEQ ID NO: 105733 - protein, 10 aa, synthetic construct
NNMRGDHVNL

SEQ ID NO: 105734 - protein, 10 aa, synthetic construct
NNWRGDHVNL

SEQ ID NO: 105735 - protein, 10 aa, synthetic construct
NNFRGDHVNL

SEQ ID NO: 105736 - protein, 10 aa, synthetic construct
NNKRGDHVNL

SEQ ID NO: 105737 - protein, 10 aa, synthetic construct
NNRRGDHVNL

SEQ ID NO: 105738 - protein, 10 aa, synthetic construct
NNHRGDHVNL

SEQ ID NO: 105739 - protein, 10 aa, synthetic construct
NNSRGDHVNL

SEQ ID NO: 105740 - protein, 10 aa, synthetic construct
NNTRGDHVNL

SEQ ID NO: 105741 - protein, 10 aa, synthetic construct
NNYRGDHVNL

SEQ ID NO: 105742 - protein, 10 aa, synthetic construct
NNNRGDHVNL

SEQ ID NO: 105743 - protein, 10 aa, synthetic construct
NNQRGDHVNL

SEQ ID NO: 105744 - protein, 10 aa, synthetic construct
NNDRGDHVNL

SEQ ID NO: 105745 - protein, 10 aa, synthetic construct
NNERGDHVNL

SEQ ID NO: 105746 - protein, 10 aa, synthetic construct
NQGRGDHVNL

SEQ ID NO: 105747 - protein, 10 aa, synthetic construct
NQARGDHVNL

SEQ ID NO: 105748 - protein, 10 aa, synthetic construct
NQVRGDHVNL

SEQ ID NO: 105749 - protein, 10 aa, synthetic construct
NQPRGDHVNL

SEQ ID NO: 105750 - protein, 10 aa, synthetic construct
NQLRGDHVNL

SEQ ID NO: 105751 - protein, 10 aa, synthetic construct
NQIRGDHVNL

SEQ ID NO: 105752 - protein, 10 aa, synthetic construct
NQMRGDHVNL

SEQ ID NO: 105753 - protein, 10 aa, synthetic construct
NQWRGDHVNL

SEQ ID NO: 105754 - protein, 10 aa, synthetic construct
NQFRGDHVNL

SEQ ID NO: 105755 - protein, 10 aa, synthetic construct
NQKRGDHVNL

SEQ ID NO: 105756 - protein, 10 aa, synthetic construct
NQRRGDHVNL

SEQ ID NO: 105757 - protein, 10 aa, synthetic construct
NQHRGDHVNL

SEQ ID NO: 105758 - protein, 10 aa, synthetic construct
NQSRGDHVNL

SEQ ID NO: 105759 - protein, 10 aa, synthetic construct
NQTRGDHVNL

SEQ ID NO: 105760 - protein, 10 aa, synthetic construct
NQYRGDHVNL

SEQ ID NO: 105761 - protein, 10 aa, synthetic construct
NQNRGDHVNL

SEQ ID NO: 105762 - protein, 10 aa, synthetic construct
NQQRGDHVNL

SEQ ID NO: 105763 - protein, 10 aa, synthetic construct
NQDRGDHVNL

SEQ ID NO: 105764 - protein, 10 aa, synthetic construct
NQERGDHVNL

SEQ ID NO: 105765 - protein, 10 aa, synthetic construct
NDGRGDHVNL

SEQ ID NO: 105766 - protein, 10 aa, synthetic construct
NDARGDHVNL

SEQ ID NO: 105767 - protein, 10 aa, synthetic construct
NDVRGDHVNL

SEQ ID NO: 105768 - protein, 10 aa, synthetic construct
NDPRGDHVNL

SEQ ID NO: 105769 - protein, 10 aa, synthetic construct
NDLRGDHVNL

SEQ ID NO: 105770 - protein, 10 aa, synthetic construct
NDIRGDHVNL

SEQ ID NO: 105771 - protein, 10 aa, synthetic construct
NDMRGDHVNL

SEQ ID NO: 105772 - protein, 10 aa, synthetic construct
NDWRGDHVNL

SEQ ID NO: 105773 - protein, 10 aa, synthetic construct
NDFRGDHVNL

SEQ ID NO: 105774 - protein, 10 aa, synthetic construct
NDKRGDHVNL

SEQ ID NO: 105775 - protein, 10 aa, synthetic construct
NDRRGDHVNL

SEQ ID NO: 105776 - protein, 10 aa, synthetic construct
NDHRGDHVNL

SEQ ID NO: 105777 - protein, 10 aa, synthetic construct
NDSRGDHVNL

SEQ ID NO: 105778 - protein, 10 aa, synthetic construct
NDTRGDHVNL

SEQ ID NO: 105779 - protein, 10 aa, synthetic construct
NDYRGDHVNL

SEQ ID NO: 105780 - protein, 10 aa, synthetic construct
NDNRGDHVNL

SEQ ID NO: 105781 - protein, 10 aa, synthetic construct
NDQRGDHVNL

SEQ ID NO: 105782 - protein, 10 aa, synthetic construct
NDDRGDHVNL

SEQ ID NO: 105783 - protein, 10 aa, synthetic construct
NDERGDHVNL

SEQ ID NO: 105784 - protein, 10 aa, synthetic construct
NEGRGDHVNL

SEQ ID NO: 105785 - protein, 10 aa, synthetic construct
NEARGDHVNL

SEQ ID NO: 105786 - protein, 10 aa, synthetic construct
NEVRGDHVNL

SEQ ID NO: 105787 - protein, 10 aa, synthetic construct
NEPRGDHVNL

SEQ ID NO: 105788 - protein, 10 aa, synthetic construct
NELRGDHVNL

SEQ ID NO: 105789 - protein, 10 aa, synthetic construct
NEIRGDHVNL

SEQ ID NO: 105790 - protein, 10 aa, synthetic construct
NEMRGDHVNL

SEQ ID NO: 105791 - protein, 10 aa, synthetic construct
NEWRGDHVNL

SEQ ID NO: 105792 - protein, 10 aa, synthetic construct
NEFRGDHVNL

SEQ ID NO: 105793 - protein, 10 aa, synthetic construct
NEKRGDHVNL

SEQ ID NO: 105794 - protein, 10 aa, synthetic construct
NERRGDHVNL

SEQ ID NO: 105795 - protein, 10 aa, synthetic construct
NEHRGDHVNL

SEQ ID NO: 105796 - protein, 10 aa, synthetic construct
NESRGDHVNL

SEQ ID NO: 105797 - protein, 10 aa, synthetic construct
NETRGDHVNL

SEQ ID NO: 105798 - protein, 10 aa, synthetic construct
NEYRGDHVNL

SEQ ID NO: 105799 - protein, 10 aa, synthetic construct
NENRGDHVNL

SEQ ID NO: 105800 - protein, 10 aa, synthetic construct
NEQRGDHVNL

SEQ ID NO: 105801 - protein, 10 aa, synthetic construct
NEDRGDHVNL

SEQ ID NO: 105802 - protein, 10 aa, synthetic construct
NEERGDHVNL

SEQ ID NO: 105803 - protein, 10 aa, synthetic construct
DGGRGDHVNL

SEQ ID NO: 105804 - protein, 10 aa, synthetic construct
DGARGDHVNL

SEQ ID NO: 105805 - protein, 10 aa, synthetic construct
DGVRGDHVNL

SEQ ID NO: 105806 - protein, 10 aa, synthetic construct
DGPRGDHVNL

SEQ ID NO: 105807 - protein, 10 aa, synthetic construct
DGLRGDHVNL

SEQ ID NO: 105808 - protein, 10 aa, synthetic construct
DGIRGDHVNL

SEQ ID NO: 105809 - protein, 10 aa, synthetic construct
DGMRGDHVNL

SEQ ID NO: 105810 - protein, 10 aa, synthetic construct
DGWRGDHVNL

SEQ ID NO: 105811 - protein, 10 aa, synthetic construct
DGFRGDHVNL

SEQ ID NO: 105812 - protein, 10 aa, synthetic construct
DGKRGDHVNL

SEQ ID NO: 105813 - protein, 10 aa, synthetic construct
DGRRGDHVNL

SEQ ID NO: 105814 - protein, 10 aa, synthetic construct
DGHRGDHVNL

SEQ ID NO: 105815 - protein, 10 aa, synthetic construct
DGSRGDHVNL

SEQ ID NO: 105816 - protein, 10 aa, synthetic construct
DGTRGDHVNL

SEQ ID NO: 105817 - protein, 10 aa, synthetic construct
DGYRGDHVNL

SEQ ID NO: 105818 - protein, 10 aa, synthetic construct
DGNRGDHVNL

SEQ ID NO: 105819 - protein, 10 aa, synthetic construct
DGQRGDHVNL

SEQ ID NO: 105820 - protein, 10 aa, synthetic construct
DGDRGDHVNL

SEQ ID NO: 105821 - protein, 10 aa, synthetic construct
DGERGDHVNL

SEQ ID NO: 105822 - protein, 10 aa, synthetic construct
DAGRGDHVNL

SEQ ID NO: 105823 - protein, 10 aa, synthetic construct
DAARGDHVNL

SEQ ID NO: 105824 - protein, 10 aa, synthetic construct
DAVRGDHVNL

SEQ ID NO: 105825 - protein, 10 aa, synthetic construct
DAPRGDHVNL

SEQ ID NO: 105826 - protein, 10 aa, synthetic construct
DALRGDHVNL

SEQ ID NO: 105827 - protein, 10 aa, synthetic construct
DAIRGDHVNL

SEQ ID NO: 105828 - protein, 10 aa, synthetic construct
DAMRGDHVNL

SEQ ID NO: 105829 - protein, 10 aa, synthetic construct
DAWRGDHVNL

SEQ ID NO: 105830 - protein, 10 aa, synthetic construct
DAFRGDHVNL

SEQ ID NO: 105831 - protein, 10 aa, synthetic construct
DAKRGDHVNL

SEQ ID NO: 105832 - protein, 10 aa, synthetic construct
DARRGDHVNL

SEQ ID NO: 105833 - protein, 10 aa, synthetic construct
DAHRGDHVNL

SEQ ID NO: 105834 - protein, 10 aa, synthetic construct
DASRGDHVNL

SEQ ID NO: 105835 - protein, 10 aa, synthetic construct
DATRGDHVNL

SEQ ID NO: 105836 - protein, 10 aa, synthetic construct
DAYRGDHVNL

SEQ ID NO: 105837 - protein, 10 aa, synthetic construct
DANRGDHVNL

SEQ ID NO: 105838 - protein, 10 aa, synthetic construct
DAQRGDHVNL

SEQ ID NO: 105839 - protein, 10 aa, synthetic construct
DADRGDHVNL

SEQ ID NO: 105840 - protein, 10 aa, synthetic construct
DAERGDHVNL

SEQ ID NO: 105841 - protein, 10 aa, synthetic construct
DVGRGDHVNL

SEQ ID NO: 105842 - protein, 10 aa, synthetic construct
DVARGDHVNL

SEQ ID NO: 105843 - protein, 10 aa, synthetic construct
DVVRGDHVNL

SEQ ID NO: 105844 - protein, 10 aa, synthetic construct
DVPRGDHVNL

SEQ ID NO: 105845 - protein, 10 aa, synthetic construct
DVLRGDHVNL

SEQ ID NO: 105846 - protein, 10 aa, synthetic construct
DVIRGDHVNL

SEQ ID NO: 105847 - protein, 10 aa, synthetic construct
DVMRGDHVNL

SEQ ID NO: 105848 - protein, 10 aa, synthetic construct
DVWRGDHVNL

SEQ ID NO: 105849 - protein, 10 aa, synthetic construct
DVFRGDHVNL

SEQ ID NO: 105850 - protein, 10 aa, synthetic construct
DVKRGDHVNL

SEQ ID NO: 105851 - protein, 10 aa, synthetic construct
DVRRGDHVNL

SEQ ID NO: 105852 - protein, 10 aa, synthetic construct
DVHRGDHVNL

SEQ ID NO: 105853 - protein, 10 aa, synthetic construct
DVSRGDHVNL

SEQ ID NO: 105854 - protein, 10 aa, synthetic construct
DVTRGDHVNL

SEQ ID NO: 105855 - protein, 10 aa, synthetic construct
DVYRGDHVNL

SEQ ID NO: 105856 - protein, 10 aa, synthetic construct
DVNRGDHVNL

SEQ ID NO: 105857 - protein, 10 aa, synthetic construct
DVQRGDHVNL

SEQ ID NO: 105858 - protein, 10 aa, synthetic construct
DVDRGDHVNL

SEQ ID NO: 105859 - protein, 10 aa, synthetic construct
DVERGDHVNL

SEQ ID NO: 105860 - protein, 10 aa, synthetic construct
DPGRGDHVNL

SEQ ID NO: 105861 - protein, 10 aa, synthetic construct
DPARGDHVNL

SEQ ID NO: 105862 - protein, 10 aa, synthetic construct
DPVRGDHVNL

SEQ ID NO: 105863 - protein, 10 aa, synthetic construct
DPPRGDHVNL

SEQ ID NO: 105864 - protein, 10 aa, synthetic construct
DPLRGDHVNL

SEQ ID NO: 105865 - protein, 10 aa, synthetic construct
DPIRGDHVNL

SEQ ID NO: 105866 - protein, 10 aa, synthetic construct
DPMRGDHVNL

SEQ ID NO: 105867 - protein, 10 aa, synthetic construct
DPWRGDHVNL

SEQ ID NO: 105868 - protein, 10 aa, synthetic construct
DPFRGDHVNL

SEQ ID NO: 105869 - protein, 10 aa, synthetic construct
DPKRGDHVNL

SEQ ID NO: 105870 - protein, 10 aa, synthetic construct
DPRRGDHVNL

SEQ ID NO: 105871 - protein, 10 aa, synthetic construct
DPHRGDHVNL

SEQ ID NO: 105872 - protein, 10 aa, synthetic construct
DPSRGDHVNL

SEQ ID NO: 105873 - protein, 10 aa, synthetic construct
DPTRGDHVNL

SEQ ID NO: 105874 - protein, 10 aa, synthetic construct
DPYRGDHVNL

SEQ ID NO: 105875 - protein, 10 aa, synthetic construct
DPNRGDHVNL

SEQ ID NO: 105876 - protein, 10 aa, synthetic construct
DPQRGDHVNL

SEQ ID NO: 105877 - protein, 10 aa, synthetic construct
DPDRGDHVNL

SEQ ID NO: 105878 - protein, 10 aa, synthetic construct
DPERGDHVNL

SEQ ID NO: 105879 - protein, 10 aa, synthetic construct
DLGRGDHVNL

SEQ ID NO: 105880 - protein, 10 aa, synthetic construct
DLARGDHVNL

SEQ ID NO: 105881 - protein, 10 aa, synthetic construct
DLVRGDHVNL

SEQ ID NO: 105882 - protein, 10 aa, synthetic construct
DLPRGDHVNL

SEQ ID NO: 105883 - protein, 10 aa, synthetic construct
DLLRGDHVNL

SEQ ID NO: 105884 - protein, 10 aa, synthetic construct
DLIRGDHVNL

SEQ ID NO: 105885 - protein, 10 aa, synthetic construct
DLMRGDHVNL

SEQ ID NO: 105886 - protein, 10 aa, synthetic construct
DLWRGDHVNL

SEQ ID NO: 105887 - protein, 10 aa, synthetic construct
DLFRGDHVNL

SEQ ID NO: 105888 - protein, 10 aa, synthetic construct
DLKRGDHVNL

SEQ ID NO: 105889 - protein, 10 aa, synthetic construct
DLRRGDHVNL

SEQ ID NO: 105890 - protein, 10 aa, synthetic construct
DLHRGDHVNL

SEQ ID NO: 105891 - protein, 10 aa, synthetic construct
DLSRGDHVNL

SEQ ID NO: 105892 - protein, 10 aa, synthetic construct
DLTRGDHVNL

SEQ ID NO: 105893 - protein, 10 aa, synthetic construct
DLYRGDHVNL

SEQ ID NO: 105894 - protein, 10 aa, synthetic construct
DLNRGDHVNL

SEQ ID NO: 105895 - protein, 10 aa, synthetic construct
DLQRGDHVNL

SEQ ID NO: 105896 - protein, 10 aa, synthetic construct
DLDRGDHVNL

SEQ ID NO: 105897 - protein, 10 aa, synthetic construct
DLERGDHVNL

SEQ ID NO: 105898 - protein, 10 aa, synthetic construct
DIGRGDHVNL

SEQ ID NO: 105899 - protein, 10 aa, synthetic construct
DIARGDHVNL

SEQ ID NO: 105900 - protein, 10 aa, synthetic construct
DIVRGDHVNL

SEQ ID NO: 105901 - protein, 10 aa, synthetic construct
DIPRGDHVNL

SEQ ID NO: 105902 - protein, 10 aa, synthetic construct
DILRGDHVNL

SEQ ID NO: 105903 - protein, 10 aa, synthetic construct
DIIRGDHVNL

SEQ ID NO: 105904 - protein, 10 aa, synthetic construct
DIMRGDHVNL

SEQ ID NO: 105905 - protein, 10 aa, synthetic construct
DIWRGDHVNL

SEQ ID NO: 105906 - protein, 10 aa, synthetic construct
DIFRGDHVNL

SEQ ID NO: 105907 - protein, 10 aa, synthetic construct
DIKRGDHVNL

SEQ ID NO: 105908 - protein, 10 aa, synthetic construct
DIRRGDHVNL

SEQ ID NO: 105909 - protein, 10 aa, synthetic construct
DIHRGDHVNL

SEQ ID NO: 105910 - protein, 10 aa, synthetic construct
DISRGDHVNL

SEQ ID NO: 105911 - protein, 10 aa, synthetic construct
DITRGDHVNL

SEQ ID NO: 105912 - protein, 10 aa, synthetic construct
DIYRGDHVNL

SEQ ID NO: 105913 - protein, 10 aa, synthetic construct
DINRGDHVNL

SEQ ID NO: 105914 - protein, 10 aa, synthetic construct
DIQRGDHVNL

SEQ ID NO: 105915 - protein, 10 aa, synthetic construct
DIDRGDHVNL

SEQ ID NO: 105916 - protein, 10 aa, synthetic construct
DIERGDHVNL

SEQ ID NO: 105917 - protein, 10 aa, synthetic construct
DMGRGDHVNL

SEQ ID NO: 105918 - protein, 10 aa, synthetic construct
DMARGDHVNL

SEQ ID NO: 105919 - protein, 10 aa, synthetic construct
DMVRGDHVNL

SEQ ID NO: 105920 - protein, 10 aa, synthetic construct
DMPRGDHVNL

SEQ ID NO: 105921 - protein, 10 aa, synthetic construct
DMLRGDHVNL

SEQ ID NO: 105922 - protein, 10 aa, synthetic construct
DMIRGDHVNL

SEQ ID NO: 105923 - protein, 10 aa, synthetic construct
DMMRGDHVNL

SEQ ID NO: 105924 - protein, 10 aa, synthetic construct
DMWRGDHVNL

SEQ ID NO: 105925 - protein, 10 aa, synthetic construct
DMFRGDHVNL

SEQ ID NO: 105926 - protein, 10 aa, synthetic construct
DMKRGDHVNL

SEQ ID NO: 105927 - protein, 10 aa, synthetic construct
DMRRGDHVNL

SEQ ID NO: 105928 - protein, 10 aa, synthetic construct
DMHRGDHVNL

SEQ ID NO: 105929 - protein, 10 aa, synthetic construct
DMSRGDHVNL

SEQ ID NO: 105930 - protein, 10 aa, synthetic construct
DMTRGDHVNL

SEQ ID NO: 105931 - protein, 10 aa, synthetic construct
DMYRGDHVNL

SEQ ID NO: 105932 - protein, 10 aa, synthetic construct
DMNRGDHVNL

SEQ ID NO: 105933 - protein, 10 aa, synthetic construct
DMQRGDHVNL

SEQ ID NO: 105934 - protein, 10 aa, synthetic construct
DMDRGDHVNL

SEQ ID NO: 105935 - protein, 10 aa, synthetic construct
DMERGDHVNL

SEQ ID NO: 105936 - protein, 10 aa, synthetic construct
DWGRGDHVNL

SEQ ID NO: 105937 - protein, 10 aa, synthetic construct
DWARGDHVNL

SEQ ID NO: 105938 - protein, 10 aa, synthetic construct
DWVRGDHVNL

SEQ ID NO: 105939 - protein, 10 aa, synthetic construct
DWPRGDHVNL

SEQ ID NO: 105940 - protein, 10 aa, synthetic construct
DWLRGDHVNL

SEQ ID NO: 105941 - protein, 10 aa, synthetic construct
DWIRGDHVNL

SEQ ID NO: 105942 - protein, 10 aa, synthetic construct
DWMRGDHVNL

SEQ ID NO: 105943 - protein, 10 aa, synthetic construct
DWWRGDHVNL

SEQ ID NO: 105944 - protein, 10 aa, synthetic construct
DWFRGDHVNL

SEQ ID NO: 105945 - protein, 10 aa, synthetic construct
DWKRGDHVNL

SEQ ID NO: 105946 - protein, 10 aa, synthetic construct
DWRRGDHVNL

SEQ ID NO: 105947 - protein, 10 aa, synthetic construct
DWHRGDHVNL

SEQ ID NO: 105948 - protein, 10 aa, synthetic construct
DWSRGDHVNL

SEQ ID NO: 105949 - protein, 10 aa, synthetic construct
DWTRGDHVNL

SEQ ID NO: 105950 - protein, 10 aa, synthetic construct
DWYRGDHVNL

SEQ ID NO: 105951 - protein, 10 aa, synthetic construct
DWNRGDHVNL

SEQ ID NO: 105952 - protein, 10 aa, synthetic construct
DWQRGDHVNL

SEQ ID NO: 105953 - protein, 10 aa, synthetic construct
DWDRGDHVNL

SEQ ID NO: 105954 - protein, 10 aa, synthetic construct
DWERGDHVNL

SEQ ID NO: 105955 - protein, 10 aa, synthetic construct
DFGRGDHVNL

SEQ ID NO: 105956 - protein, 10 aa, synthetic construct
DFARGDHVNL

SEQ ID NO: 105957 - protein, 10 aa, synthetic construct
DFVRGDHVNL

SEQ ID NO: 105958 - protein, 10 aa, synthetic construct
DFPRGDHVNL

SEQ ID NO: 105959 - protein, 10 aa, synthetic construct
DFLRGDHVNL

SEQ ID NO: 105960 - protein, 10 aa, synthetic construct
DFIRGDHVNL

SEQ ID NO: 105961 - protein, 10 aa, synthetic construct
DFMRGDHVNL

SEQ ID NO: 105962 - protein, 10 aa, synthetic construct
DFWRGDHVNL

SEQ ID NO: 105963 - protein, 10 aa, synthetic construct
DFFRGDHVNL

SEQ ID NO: 105964 - protein, 10 aa, synthetic construct
DFKRGDHVNL

SEQ ID NO: 105965 - protein, 10 aa, synthetic construct
DFRRGDHVNL

SEQ ID NO: 105966 - protein, 10 aa, synthetic construct
DFHRGDHVNL

SEQ ID NO: 105967 - protein, 10 aa, synthetic construct
DFSRGDHVNL

SEQ ID NO: 105968 - protein, 10 aa, synthetic construct
DFTRGDHVNL

SEQ ID NO: 105969 - protein, 10 aa, synthetic construct
DFYRGDHVNL

SEQ ID NO: 105970 - protein, 10 aa, synthetic construct
DFNRGDHVNL

SEQ ID NO: 105971 - protein, 10 aa, synthetic construct
DFQRGDHVNL

SEQ ID NO: 105972 - protein, 10 aa, synthetic construct
DFDRGDHVNL

SEQ ID NO: 105973 - protein, 10 aa, synthetic construct
DFERGDHVNL

SEQ ID NO: 105974 - protein, 10 aa, synthetic construct
DKGRGDHVNL

SEQ ID NO: 105975 - protein, 10 aa, synthetic construct
DKARGDHVNL

SEQ ID NO: 105976 - protein, 10 aa, synthetic construct
DKVRGDHVNL

SEQ ID NO: 105977 - protein, 10 aa, synthetic construct
DKPRGDHVNL

SEQ ID NO: 105978 - protein, 10 aa, synthetic construct
DKLRGDHVNL

SEQ ID NO: 105979 - protein, 10 aa, synthetic construct
DKIRGDHVNL

SEQ ID NO: 105980 - protein, 10 aa, synthetic construct
DKMRGDHVNL

SEQ ID NO: 105981 - protein, 10 aa, synthetic construct
DKWRGDHVNL

SEQ ID NO: 105982 - protein, 10 aa, synthetic construct
DKFRGDHVNL

SEQ ID NO: 105983 - protein, 10 aa, synthetic construct
DKKRGDHVNL

SEQ ID NO: 105984 - protein, 10 aa, synthetic construct
DKRRGDHVNL

SEQ ID NO: 105985 - protein, 10 aa, synthetic construct
DKHRGDHVNL

SEQ ID NO: 105986 - protein, 10 aa, synthetic construct
DKSRGDHVNL

SEQ ID NO: 105987 - protein, 10 aa, synthetic construct
DKTRGDHVNL

SEQ ID NO: 105988 - protein, 10 aa, synthetic construct
DKYRGDHVNL

SEQ ID NO: 105989 - protein, 10 aa, synthetic construct
DKNRGDHVNL

SEQ ID NO: 105990 - protein, 10 aa, synthetic construct
DKQRGDHVNL

SEQ ID NO: 105991 - protein, 10 aa, synthetic construct
DKDRGDHVNL

SEQ ID NO: 105992 - protein, 10 aa, synthetic construct
DKERGDHVNL

SEQ ID NO: 105993 - protein, 10 aa, synthetic construct
DRGRGDHVNL

SEQ ID NO: 105994 - protein, 10 aa, synthetic construct
DRARGDHVNL

SEQ ID NO: 105995 - protein, 10 aa, synthetic construct
DRVRGDHVNL

SEQ ID NO: 105996 - protein, 10 aa, synthetic construct
DRPRGDHVNL

SEQ ID NO: 105997 - protein, 10 aa, synthetic construct
DRLRGDHVNL

SEQ ID NO: 105998 - protein, 10 aa, synthetic construct
DRIRGDHVNL

SEQ ID NO: 105999 - protein, 10 aa, synthetic construct
DRMRGDHVNL

SEQ ID NO: 106000 - protein, 10 aa, synthetic construct
DRWRGDHVNL

SEQ ID NO: 106001 - protein, 10 aa, synthetic construct
DRFRGDHVNL

SEQ ID NO: 106002 - protein, 10 aa, synthetic construct
DRKRGDHVNL

SEQ ID NO: 106003 - protein, 10 aa, synthetic construct
DRRRGDHVNL

SEQ ID NO: 106004 - protein, 10 aa, synthetic construct
DRHRGDHVNL

SEQ ID NO: 106005 - protein, 10 aa, synthetic construct
DRSRGDHVNL

SEQ ID NO: 106006 - protein, 10 aa, synthetic construct
DRTRGDHVNL

SEQ ID NO: 106007 - protein, 10 aa, synthetic construct
DRYRGDHVNL

SEQ ID NO: 106008 - protein, 10 aa, synthetic construct
DRNRGDHVNL

SEQ ID NO: 106009 - protein, 10 aa, synthetic construct
DRQRGDHVNL

SEQ ID NO: 106010 - protein, 10 aa, synthetic construct
DRDRGDHVNL

SEQ ID NO: 106011 - protein, 10 aa, synthetic construct
DRERGDHVNL

SEQ ID NO: 106012 - protein, 10 aa, synthetic construct
DHGRGDHVNL

SEQ ID NO: 106013 - protein, 10 aa, synthetic construct
DHARGDHVNL

SEQ ID NO: 106014 - protein, 10 aa, synthetic construct
DHVRGDHVNL

SEQ ID NO: 106015 - protein, 10 aa, synthetic construct
DHPRGDHVNL

SEQ ID NO: 106016 - protein, 10 aa, synthetic construct
DHLRGDHVNL

SEQ ID NO: 106017 - protein, 10 aa, synthetic construct
DHIRGDHVNL

SEQ ID NO: 106018 - protein, 10 aa, synthetic construct
DHMRGDHVNL

SEQ ID NO: 106019 - protein, 10 aa, synthetic construct
DHWRGDHVNL

SEQ ID NO: 106020 - protein, 10 aa, synthetic construct
DHFRGDHVNL

SEQ ID NO: 106021 - protein, 10 aa, synthetic construct
DHKRGDHVNL

SEQ ID NO: 106022 - protein, 10 aa, synthetic construct
DHRRGDHVNL

SEQ ID NO: 106023 - protein, 10 aa, synthetic construct
DHHRGDHVNL

SEQ ID NO: 106024 - protein, 10 aa, synthetic construct
DHSRGDHVNL

SEQ ID NO: 106025 - protein, 10 aa, synthetic construct
DHTRGDHVNL

SEQ ID NO: 106026 - protein, 10 aa, synthetic construct
DHYRGDHVNL

SEQ ID NO: 106027 - protein, 10 aa, synthetic construct
DHNRGDHVNL

SEQ ID NO: 106028 - protein, 10 aa, synthetic construct
DHQRGDHVNL

SEQ ID NO: 106029 - protein, 10 aa, synthetic construct
DHDRGDHVNL

SEQ ID NO: 106030 - protein, 10 aa, synthetic construct
DHERGDHVNL

SEQ ID NO: 106031 - protein, 10 aa, synthetic construct
DSGRGDHVNL

SEQ ID NO: 106032 - protein, 10 aa, synthetic construct
DSARGDHVNL

SEQ ID NO: 106033 - protein, 10 aa, synthetic construct
DSVRGDHVNL

SEQ ID NO: 106034 - protein, 10 aa, synthetic construct
DSPRGDHVNL

SEQ ID NO: 106035 - protein, 10 aa, synthetic construct
DSLRGDHVNL

SEQ ID NO: 106036 - protein, 10 aa, synthetic construct
DSIRGDHVNL

SEQ ID NO: 106037 - protein, 10 aa, synthetic construct
DSMRGDHVNL

SEQ ID NO: 106038 - protein, 10 aa, synthetic construct
DSWRGDHVNL

SEQ ID NO: 106039 - protein, 10 aa, synthetic construct
DSFRGDHVNL

SEQ ID NO: 106040 - protein, 10 aa, synthetic construct
DSKRGDHVNL

SEQ ID NO: 106041 - protein, 10 aa, synthetic construct
DSRRGDHVNL

SEQ ID NO: 106042 - protein, 10 aa, synthetic construct
DSHRGDHVNL

SEQ ID NO: 106043 - protein, 10 aa, synthetic construct
DSSRGDHVNL

SEQ ID NO: 106044 - protein, 10 aa, synthetic construct
DSTRGDHVNL

SEQ ID NO: 106045 - protein, 10 aa, synthetic construct
DSYRGDHVNL

SEQ ID NO: 106046 - protein, 10 aa, synthetic construct
DSNRGDHVNL

SEQ ID NO: 106047 - protein, 10 aa, synthetic construct
DSQRGDHVNL

SEQ ID NO: 106048 - protein, 10 aa, synthetic construct
DSDRGDHVNL

SEQ ID NO: 106049 - protein, 10 aa, synthetic construct
DSERGDHVNL

SEQ ID NO: 106050 - protein, 10 aa, synthetic construct
DTGRGDHVNL

SEQ ID NO: 106051 - protein, 10 aa, synthetic construct
DTARGDHVNL

SEQ ID NO: 106052 - protein, 10 aa, synthetic construct
DTVRGDHVNL

SEQ ID NO: 106053 - protein, 10 aa, synthetic construct
DTPRGDHVNL

SEQ ID NO: 106054 - protein, 10 aa, synthetic construct
DTLRGDHVNL

SEQ ID NO: 106055 - protein, 10 aa, synthetic construct
DTIRGDHVNL

SEQ ID NO: 106056 - protein, 10 aa, synthetic construct
DTMRGDHVNL

SEQ ID NO: 106057 - protein, 10 aa, synthetic construct
DTWRGDHVNL

SEQ ID NO: 106058 - protein, 10 aa, synthetic construct
DTFRGDHVNL

SEQ ID NO: 106059 - protein, 10 aa, synthetic construct
DTKRGDHVNL

SEQ ID NO: 106060 - protein, 10 aa, synthetic construct
DTRRGDHVNL

SEQ ID NO: 106061 - protein, 10 aa, synthetic construct
DTHRGDHVNL

SEQ ID NO: 106062 - protein, 10 aa, synthetic construct
DTSRGDHVNL

SEQ ID NO: 106063 - protein, 10 aa, synthetic construct
DTTRGDHVNL

SEQ ID NO: 106064 - protein, 10 aa, synthetic construct
DTYRGDHVNL

SEQ ID NO: 106065 - protein, 10 aa, synthetic construct
DTNRGDHVNL

SEQ ID NO: 106066 - protein, 10 aa, synthetic construct
DTQRGDHVNL

SEQ ID NO: 106067 - protein, 10 aa, synthetic construct
DTDRGDHVNL

SEQ ID NO: 106068 - protein, 10 aa, synthetic construct
DTERGDHVNL

SEQ ID NO: 106069 - protein, 10 aa, synthetic construct
DYGRGDHVNL

SEQ ID NO: 106070 - protein, 10 aa, synthetic construct
DYARGDHVNL

SEQ ID NO: 106071 - protein, 10 aa, synthetic construct
DYVRGDHVNL

SEQ ID NO: 106072 - protein, 10 aa, synthetic construct
DYPRGDHVNL

SEQ ID NO: 106073 - protein, 10 aa, synthetic construct
DYLRGDHVNL

SEQ ID NO: 106074 - protein, 10 aa, synthetic construct
DYIRGDHVNL

SEQ ID NO: 106075 - protein, 10 aa, synthetic construct
DYMRGDHVNL

SEQ ID NO: 106076 - protein, 10 aa, synthetic construct
DYWRGDHVNL

SEQ ID NO: 106077 - protein, 10 aa, synthetic construct
DYFRGDHVNL

SEQ ID NO: 106078 - protein, 10 aa, synthetic construct
DYKRGDHVNL

SEQ ID NO: 106079 - protein, 10 aa, synthetic construct
DYRRGDHVNL

SEQ ID NO: 106080 - protein, 10 aa, synthetic construct
DYHRGDHVNL

SEQ ID NO: 106081 - protein, 10 aa, synthetic construct
DYSRGDHVNL

SEQ ID NO: 106082 - protein, 10 aa, synthetic construct
DYTRGDHVNL

SEQ ID NO: 106083 - protein, 10 aa, synthetic construct
DYYRGDHVNL

SEQ ID NO: 106084 - protein, 10 aa, synthetic construct
DYNRGDHVNL

SEQ ID NO: 106085 - protein, 10 aa, synthetic construct
DYQRGDHVNL

SEQ ID NO: 106086 - protein, 10 aa, synthetic construct
DYDRGDHVNL

SEQ ID NO: 106087 - protein, 10 aa, synthetic construct
DYERGDHVNL

SEQ ID NO: 106088 - protein, 10 aa, synthetic construct
DNGRGDHVNL

SEQ ID NO: 106089 - protein, 10 aa, synthetic construct
DNARGDHVNL

SEQ ID NO: 106090 - protein, 10 aa, synthetic construct
DNVRGDHVNL

SEQ ID NO: 106091 - protein, 10 aa, synthetic construct
DNPRGDHVNL

SEQ ID NO: 106092 - protein, 10 aa, synthetic construct
DNLRGDHVNL

SEQ ID NO: 106093 - protein, 10 aa, synthetic construct
DNIRGDHVNL

SEQ ID NO: 106094 - protein, 10 aa, synthetic construct
DNMRGDHVNL

SEQ ID NO: 106095 - protein, 10 aa, synthetic construct
DNWRGDHVNL

SEQ ID NO: 106096 - protein, 10 aa, synthetic construct
DNFRGDHVNL

SEQ ID NO: 106097 - protein, 10 aa, synthetic construct
DNKRGDHVNL

SEQ ID NO: 106098 - protein, 10 aa, synthetic construct
DNRRGDHVNL

SEQ ID NO: 106099 - protein, 10 aa, synthetic construct
DNHRGDHVNL

SEQ ID NO: 106100 - protein, 10 aa, synthetic construct
DNSRGDHVNL

SEQ ID NO: 106101 - protein, 10 aa, synthetic construct
DNTRGDHVNL

SEQ ID NO: 106102 - protein, 10 aa, synthetic construct
DNYRGDHVNL

SEQ ID NO: 106103 - protein, 10 aa, synthetic construct
DNNRGDHVNL

SEQ ID NO: 106104 - protein, 10 aa, synthetic construct
DNQRGDHVNL

SEQ ID NO: 106105 - protein, 10 aa, synthetic construct
DNDRGDHVNL

SEQ ID NO: 106106 - protein, 10 aa, synthetic construct
DNERGDHVNL

SEQ ID NO: 106107 - protein, 10 aa, synthetic construct
DQGRGDHVNL

SEQ ID NO: 106108 - protein, 10 aa, synthetic construct
DQARGDHVNL

SEQ ID NO: 106109 - protein, 10 aa, synthetic construct
DQVRGDHVNL

SEQ ID NO: 106110 - protein, 10 aa, synthetic construct
DQPRGDHVNL

SEQ ID NO: 106111 - protein, 10 aa, synthetic construct
DQLRGDHVNL

SEQ ID NO: 106112 - protein, 10 aa, synthetic construct
DQIRGDHVNL

SEQ ID NO: 106113 - protein, 10 aa, synthetic construct
DQMRGDHVNL

SEQ ID NO: 106114 - protein, 10 aa, synthetic construct
DQWRGDHVNL

SEQ ID NO: 106115 - protein, 10 aa, synthetic construct
DQFRGDHVNL

SEQ ID NO: 106116 - protein, 10 aa, synthetic construct
DQKRGDHVNL

SEQ ID NO: 106117 - protein, 10 aa, synthetic construct
DQRRGDHVNL

SEQ ID NO: 106118 - protein, 10 aa, synthetic construct
DQHRGDHVNL

SEQ ID NO: 106119 - protein, 10 aa, synthetic construct
DQSRGDHVNL

SEQ ID NO: 106120 - protein, 10 aa, synthetic construct
DQTRGDHVNL

SEQ ID NO: 106121 - protein, 10 aa, synthetic construct
DQYRGDHVNL

SEQ ID NO: 106122 - protein, 10 aa, synthetic construct
DQNRGDHVNL

SEQ ID NO: 106123 - protein, 10 aa, synthetic construct
DQQRGDHVNL

SEQ ID NO: 106124 - protein, 10 aa, synthetic construct
DQDRGDHVNL

SEQ ID NO: 106125 - protein, 10 aa, synthetic construct
DQERGDHVNL

SEQ ID NO: 106126 - protein, 10 aa, synthetic construct
DDGRGDHVNL

SEQ ID NO: 106127 - protein, 10 aa, synthetic construct
DDARGDHVNL

SEQ ID NO: 106128 - protein, 10 aa, synthetic construct
DDVRGDHVNL

SEQ ID NO: 106129 - protein, 10 aa, synthetic construct
DDPRGDHVNL

SEQ ID NO: 106130 - protein, 10 aa, synthetic construct
DDLRGDHVNL

SEQ ID NO: 106131 - protein, 10 aa, synthetic construct
DDIRGDHVNL

SEQ ID NO: 106132 - protein, 10 aa, synthetic construct
DDMRGDHVNL

SEQ ID NO: 106133 - protein, 10 aa, synthetic construct
DDWRGDHVNL

SEQ ID NO: 106134 - protein, 10 aa, synthetic construct
DDFRGDHVNL

SEQ ID NO: 106135 - protein, 10 aa, synthetic construct
DDKRGDHVNL

SEQ ID NO: 106136 - protein, 10 aa, synthetic construct
DDRRGDHVNL

SEQ ID NO: 106137 - protein, 10 aa, synthetic construct
DDHRGDHVNL

SEQ ID NO: 106138 - protein, 10 aa, synthetic construct
DDSRGDHVNL

SEQ ID NO: 106139 - protein, 10 aa, synthetic construct
DDTRGDHVNL

SEQ ID NO: 106140 - protein, 10 aa, synthetic construct
DDYRGDHVNL

SEQ ID NO: 106141 - protein, 10 aa, synthetic construct
DDNRGDHVNL

SEQ ID NO: 106142 - protein, 10 aa, synthetic construct
DDQRGDHVNL

SEQ ID NO: 106143 - protein, 10 aa, synthetic construct
DDDRGDHVNL

SEQ ID NO: 106144 - protein, 10 aa, synthetic construct
DDERGDHVNL

SEQ ID NO: 106145 - protein, 10 aa, synthetic construct
DEGRGDHVNL

SEQ ID NO: 106146 - protein, 10 aa, synthetic construct
DEARGDHVNL

SEQ ID NO: 106147 - protein, 10 aa, synthetic construct
DEVRGDHVNL

SEQ ID NO: 106148 - protein, 10 aa, synthetic construct
DEPRGDHVNL

SEQ ID NO: 106149 - protein, 10 aa, synthetic construct
DELRGDHVNL

SEQ ID NO: 106150 - protein, 10 aa, synthetic construct
DEIRGDHVNL

SEQ ID NO: 106151 - protein, 10 aa, synthetic construct
DEMRGDHVNL

SEQ ID NO: 106152 - protein, 10 aa, synthetic construct
DEWRGDHVNL

SEQ ID NO: 106153 - protein, 10 aa, synthetic construct
DEFRGDHVNL

SEQ ID NO: 106154 - protein, 10 aa, synthetic construct
DEKRGDHVNL

SEQ ID NO: 106155 - protein, 10 aa, synthetic construct
DERRGDHVNL

SEQ ID NO: 106156 - protein, 10 aa, synthetic construct
DEHRGDHVNL

SEQ ID NO: 106157 - protein, 10 aa, synthetic construct
DESRGDHVNL

SEQ ID NO: 106158 - protein, 10 aa, synthetic construct
DETRGDHVNL

SEQ ID NO: 106159 - protein, 10 aa, synthetic construct
DEYRGDHVNL

SEQ ID NO: 106160 - protein, 10 aa, synthetic construct
DENRGDHVNL

SEQ ID NO: 106161 - protein, 10 aa, synthetic construct
DEQRGDHVNL

SEQ ID NO: 106162 - protein, 10 aa, synthetic construct
DEDRGDHVNL

SEQ ID NO: 106163 - protein, 10 aa, synthetic construct
DEERGDHVNL

SEQ ID NO: 106164 - protein, 10 aa, synthetic construct
QGGRGDHVNL

SEQ ID NO: 106165 - protein, 10 aa, synthetic construct
QGARGDHVNL

SEQ ID NO: 106166 - protein, 10 aa, synthetic construct
QGVRGDHVNL

SEQ ID NO: 106167 - protein, 10 aa, synthetic construct
QGPRGDHVNL

SEQ ID NO: 106168 - protein, 10 aa, synthetic construct
QGLRGDHVNL

SEQ ID NO: 106169 - protein, 10 aa, synthetic construct
QGIRGDHVNL

SEQ ID NO: 106170 - protein, 10 aa, synthetic construct
QGMRGDHVNL

SEQ ID NO: 106171 - protein, 10 aa, synthetic construct
QGWRGDHVNL

SEQ ID NO: 106172 - protein, 10 aa, synthetic construct
QGFRGDHVNL

SEQ ID NO: 106173 - protein, 10 aa, synthetic construct
QGKRGDHVNL

SEQ ID NO: 106174 - protein, 10 aa, synthetic construct
QGRRGDHVNL

SEQ ID NO: 106175 - protein, 10 aa, synthetic construct
QGHRGDHVNL

SEQ ID NO: 106176 - protein, 10 aa, synthetic construct
QGSRGDHVNL

SEQ ID NO: 106177 - protein, 10 aa, synthetic construct
QGTRGDHVNL

SEQ ID NO: 106178 - protein, 10 aa, synthetic construct
QGYRGDHVNL

SEQ ID NO: 106179 - protein, 10 aa, synthetic construct
QGNRGDHVNL

SEQ ID NO: 106180 - protein, 10 aa, synthetic construct
QGQRGDHVNL

SEQ ID NO: 106181 - protein, 10 aa, synthetic construct
QGDRGDHVNL

SEQ ID NO: 106182 - protein, 10 aa, synthetic construct
QGERGDHVNL

SEQ ID NO: 106183 - protein, 10 aa, synthetic construct
QAGRGDHVNL

SEQ ID NO: 106184 - protein, 10 aa, synthetic construct
QAARGDHVNL

SEQ ID NO: 106185 - protein, 10 aa, synthetic construct
QAVRGDHVNL

SEQ ID NO: 106186 - protein, 10 aa, synthetic construct
QAPRGDHVNL

SEQ ID NO: 106187 - protein, 10 aa, synthetic construct
QALRGDHVNL

SEQ ID NO: 106188 - protein, 10 aa, synthetic construct
QAIRGDHVNL

SEQ ID NO: 106189 - protein, 10 aa, synthetic construct
QAMRGDHVNL

SEQ ID NO: 106190 - protein, 10 aa, synthetic construct
QAWRGDHVNL

SEQ ID NO: 106191 - protein, 10 aa, synthetic construct
QAFRGDHVNL

SEQ ID NO: 106192 - protein, 10 aa, synthetic construct
QAKRGDHVNL

SEQ ID NO: 106193 - protein, 10 aa, synthetic construct
QARRGDHVNL

SEQ ID NO: 106194 - protein, 10 aa, synthetic construct
QAHRGDHVNL

SEQ ID NO: 106195 - protein, 10 aa, synthetic construct
QASRGDHVNL

SEQ ID NO: 106196 - protein, 10 aa, synthetic construct
QATRGDHVNL

SEQ ID NO: 106197 - protein, 10 aa, synthetic construct
QAYRGDHVNL

SEQ ID NO: 106198 - protein, 10 aa, synthetic construct
QANRGDHVNL

SEQ ID NO: 106199 - protein, 10 aa, synthetic construct
QAQRGDHVNL

SEQ ID NO: 106200 - protein, 10 aa, synthetic construct
QADRGDHVNL

SEQ ID NO: 106201 - protein, 10 aa, synthetic construct
QAERGDHVNL

SEQ ID NO: 106202 - protein, 10 aa, synthetic construct
QVGRGDHVNL

SEQ ID NO: 106203 - protein, 10 aa, synthetic construct
QVARGDHVNL

SEQ ID NO: 106204 - protein, 10 aa, synthetic construct
QVVRGDHVNL

SEQ ID NO: 106205 - protein, 10 aa, synthetic construct
QVPRGDHVNL

SEQ ID NO: 106206 - protein, 10 aa, synthetic construct
QVLRGDHVNL

SEQ ID NO: 106207 - protein, 10 aa, synthetic construct
QVIRGDHVNL

SEQ ID NO: 106208 - protein, 10 aa, synthetic construct
QVMRGDHVNL

SEQ ID NO: 106209 - protein, 10 aa, synthetic construct
QVWRGDHVNL

SEQ ID NO: 106210 - protein, 10 aa, synthetic construct
QVFRGDHVNL

SEQ ID NO: 106211 - protein, 10 aa, synthetic construct
QVKRGDHVNL

SEQ ID NO: 106212 - protein, 10 aa, synthetic construct
QVRRGDHVNL

SEQ ID NO: 106213 - protein, 10 aa, synthetic construct
QVHRGDHVNL

SEQ ID NO: 106214 - protein, 10 aa, synthetic construct
QVSRGDHVNL

SEQ ID NO: 106215 - protein, 10 aa, synthetic construct
QVTRGDHVNL

SEQ ID NO: 106216 - protein, 10 aa, synthetic construct
QVYRGDHVNL

SEQ ID NO: 106217 - protein, 10 aa, synthetic construct
QVNRGDHVNL

SEQ ID NO: 106218 - protein, 10 aa, synthetic construct
QVQRGDHVNL

SEQ ID NO: 106219 - protein, 10 aa, synthetic construct
QVDRGDHVNL

SEQ ID NO: 106220 - protein, 10 aa, synthetic construct
QVERGDHVNL

SEQ ID NO: 106221 - protein, 10 aa, synthetic construct
QPGRGDHVNL

SEQ ID NO: 106222 - protein, 10 aa, synthetic construct
QPARGDHVNL

SEQ ID NO: 106223 - protein, 10 aa, synthetic construct
QPVRGDHVNL

SEQ ID NO: 106224 - protein, 10 aa, synthetic construct
QPPRGDHVNL

SEQ ID NO: 106225 - protein, 10 aa, synthetic construct
QPLRGDHVNL

SEQ ID NO: 106226 - protein, 10 aa, synthetic construct
QPIRGDHVNL

SEQ ID NO: 106227 - protein, 10 aa, synthetic construct
QPMRGDHVNL

SEQ ID NO: 106228 - protein, 10 aa, synthetic construct
QPWRGDHVNL

SEQ ID NO: 106229 - protein, 10 aa, synthetic construct
QPFRGDHVNL

SEQ ID NO: 106230 - protein, 10 aa, synthetic construct
QPKRGDHVNL

SEQ ID NO: 106231 - protein, 10 aa, synthetic construct
QPRRGDHVNL

SEQ ID NO: 106232 - protein, 10 aa, synthetic construct
QPHRGDHVNL

SEQ ID NO: 106233 - protein, 10 aa, synthetic construct
QPSRGDHVNL

SEQ ID NO: 106234 - protein, 10 aa, synthetic construct
QPTRGDHVNL

SEQ ID NO: 106235 - protein, 10 aa, synthetic construct
QPYRGDHVNL

SEQ ID NO: 106236 - protein, 10 aa, synthetic construct
QPNRGDHVNL

SEQ ID NO: 106237 - protein, 10 aa, synthetic construct
QPQRGDHVNL

SEQ ID NO: 106238 - protein, 10 aa, synthetic construct
QPDRGDHVNL

SEQ ID NO: 106239 - protein, 10 aa, synthetic construct
QPERGDHVNL

SEQ ID NO: 106240 - protein, 10 aa, synthetic construct
QLGRGDHVNL

SEQ ID NO: 106241 - protein, 10 aa, synthetic construct
QLARGDHVNL

SEQ ID NO: 106242 - protein, 10 aa, synthetic construct
QLVRGDHVNL

SEQ ID NO: 106243 - protein, 10 aa, synthetic construct
QLPRGDHVNL

SEQ ID NO: 106244 - protein, 10 aa, synthetic construct
QLLRGDHVNL

SEQ ID NO: 106245 - protein, 10 aa, synthetic construct
QLIRGDHVNL

SEQ ID NO: 106246 - protein, 10 aa, synthetic construct
QLMRGDHVNL

SEQ ID NO: 106247 - protein, 10 aa, synthetic construct
QLWRGDHVNL

SEQ ID NO: 106248 - protein, 10 aa, synthetic construct
QLFRGDHVNL

SEQ ID NO: 106249 - protein, 10 aa, synthetic construct
QLKRGDHVNL

SEQ ID NO: 106250 - protein, 10 aa, synthetic construct
QLRRGDHVNL

SEQ ID NO: 106251 - protein, 10 aa, synthetic construct
QLHRGDHVNL

SEQ ID NO: 106252 - protein, 10 aa, synthetic construct
QLSRGDHVNL

SEQ ID NO: 106253 - protein, 10 aa, synthetic construct
QLTRGDHVNL

SEQ ID NO: 106254 - protein, 10 aa, synthetic construct
QLYRGDHVNL

SEQ ID NO: 106255 - protein, 10 aa, synthetic construct
QLNRGDHVNL

SEQ ID NO: 106256 - protein, 10 aa, synthetic construct
QLQRGDHVNL

SEQ ID NO: 106257 - protein, 10 aa, synthetic construct
QLDRGDHVNL

SEQ ID NO: 106258 - protein, 10 aa, synthetic construct
QLERGDHVNL

SEQ ID NO: 106259 - protein, 10 aa, synthetic construct
QIGRGDHVNL

SEQ ID NO: 106260 - protein, 10 aa, synthetic construct
QIARGDHVNL

SEQ ID NO: 106261 - protein, 10 aa, synthetic construct
QIVRGDHVNL

SEQ ID NO: 106262 - protein, 10 aa, synthetic construct
QIPRGDHVNL

SEQ ID NO: 106263 - protein, 10 aa, synthetic construct
QILRGDHVNL

SEQ ID NO: 106264 - protein, 10 aa, synthetic construct
QIIRGDHVNL

SEQ ID NO: 106265 - protein, 10 aa, synthetic construct
QIMRGDHVNL

SEQ ID NO: 106266 - protein, 10 aa, synthetic construct
QIWRGDHVNL

SEQ ID NO: 106267 - protein, 10 aa, synthetic construct
QIFRGDHVNL

SEQ ID NO: 106268 - protein, 10 aa, synthetic construct
QIKRGDHVNL

SEQ ID NO: 106269 - protein, 10 aa, synthetic construct
QIRRGDHVNL

SEQ ID NO: 106270 - protein, 10 aa, synthetic construct
QIHRGDHVNL

SEQ ID NO: 106271 - protein, 10 aa, synthetic construct
QISRGDHVNL

SEQ ID NO: 106272 - protein, 10 aa, synthetic construct
QITRGDHVNL

SEQ ID NO: 106273 - protein, 10 aa, synthetic construct
QIYRGDHVNL

SEQ ID NO: 106274 - protein, 10 aa, synthetic construct
QINRGDHVNL

SEQ ID NO: 106275 - protein, 10 aa, synthetic construct
QIQRGDHVNL

SEQ ID NO: 106276 - protein, 10 aa, synthetic construct
QIDRGDHVNL

SEQ ID NO: 106277 - protein, 10 aa, synthetic construct
QIERGDHVNL

SEQ ID NO: 106278 - protein, 10 aa, synthetic construct
QMGRGDHVNL

SEQ ID NO: 106279 - protein, 10 aa, synthetic construct
QMARGDHVNL

SEQ ID NO: 106280 - protein, 10 aa, synthetic construct
QMVRGDHVNL

SEQ ID NO: 106281 - protein, 10 aa, synthetic construct
QMPRGDHVNL

SEQ ID NO: 106282 - protein, 10 aa, synthetic construct
QMLRGDHVNL

SEQ ID NO: 106283 - protein, 10 aa, synthetic construct
QMIRGDHVNL

SEQ ID NO: 106284 - protein, 10 aa, synthetic construct
QMMRGDHVNL

SEQ ID NO: 106285 - protein, 10 aa, synthetic construct
QMWRGDHVNL

SEQ ID NO: 106286 - protein, 10 aa, synthetic construct
QMFRGDHVNL

SEQ ID NO: 106287 - protein, 10 aa, synthetic construct
QMKRGDHVNL

SEQ ID NO: 106288 - protein, 10 aa, synthetic construct
QMRRGDHVNL

SEQ ID NO: 106289 - protein, 10 aa, synthetic construct
QMHRGDHVNL

SEQ ID NO: 106290 - protein, 10 aa, synthetic construct
QMSRGDHVNL

SEQ ID NO: 106291 - protein, 10 aa, synthetic construct
QMTRGDHVNL

SEQ ID NO: 106292 - protein, 10 aa, synthetic construct
QMYRGDHVNL

SEQ ID NO: 106293 - protein, 10 aa, synthetic construct
QMNRGDHVNL

SEQ ID NO: 106294 - protein, 10 aa, synthetic construct
QMQRGDHVNL

SEQ ID NO: 106295 - protein, 10 aa, synthetic construct
QMDRGDHVNL

SEQ ID NO: 106296 - protein, 10 aa, synthetic construct
QMERGDHVNL

SEQ ID NO: 106297 - protein, 10 aa, synthetic construct
QWGRGDHVNL

SEQ ID NO: 106298 - protein, 10 aa, synthetic construct
QWARGDHVNL

SEQ ID NO: 106299 - protein, 10 aa, synthetic construct
QWVRGDHVNL

SEQ ID NO: 106300 - protein, 10 aa, synthetic construct
QWPRGDHVNL

SEQ ID NO: 106301 - protein, 10 aa, synthetic construct
QWLRGDHVNL

SEQ ID NO: 106302 - protein, 10 aa, synthetic construct
QWIRGDHVNL

SEQ ID NO: 106303 - protein, 10 aa, synthetic construct
QWMRGDHVNL

SEQ ID NO: 106304 - protein, 10 aa, synthetic construct
QWWRGDHVNL

SEQ ID NO: 106305 - protein, 10 aa, synthetic construct
QWFRGDHVNL

SEQ ID NO: 106306 - protein, 10 aa, synthetic construct
QWKRGDHVNL

SEQ ID NO: 106307 - protein, 10 aa, synthetic construct
QWRRGDHVNL

SEQ ID NO: 106308 - protein, 10 aa, synthetic construct
QWHRGDHVNL

SEQ ID NO: 106309 - protein, 10 aa, synthetic construct
QWSRGDHVNL

SEQ ID NO: 106310 - protein, 10 aa, synthetic construct
QWTRGDHVNL

SEQ ID NO: 106311 - protein, 10 aa, synthetic construct
QWYRGDHVNL

SEQ ID NO: 106312 - protein, 10 aa, synthetic construct
QWNRGDHVNL

SEQ ID NO: 106313 - protein, 10 aa, synthetic construct
QWQRGDHVNL

SEQ ID NO: 106314 - protein, 10 aa, synthetic construct
QWDRGDHVNL

SEQ ID NO: 106315 - protein, 10 aa, synthetic construct
QWERGDHVNL

SEQ ID NO: 106316 - protein, 10 aa, synthetic construct
QFGRGDHVNL

SEQ ID NO: 106317 - protein, 10 aa, synthetic construct
QFARGDHVNL

SEQ ID NO: 106318 - protein, 10 aa, synthetic construct
QFVRGDHVNL

SEQ ID NO: 106319 - protein, 10 aa, synthetic construct
QFPRGDHVNL

SEQ ID NO: 106320 - protein, 10 aa, synthetic construct
QFLRGDHVNL

SEQ ID NO: 106321 - protein, 10 aa, synthetic construct
QFIRGDHVNL

SEQ ID NO: 106322 - protein, 10 aa, synthetic construct
QFMRGDHVNL

SEQ ID NO: 106323 - protein, 10 aa, synthetic construct
QFWRGDHVNL

SEQ ID NO: 106324 - protein, 10 aa, synthetic construct
QFFRGDHVNL

SEQ ID NO: 106325 - protein, 10 aa, synthetic construct
QFKRGDHVNL

SEQ ID NO: 106326 - protein, 10 aa, synthetic construct
QFRRGDHVNL

SEQ ID NO: 106327 - protein, 10 aa, synthetic construct
QFHRGDHVNL

SEQ ID NO: 106328 - protein, 10 aa, synthetic construct
QFSRGDHVNL

SEQ ID NO: 106329 - protein, 10 aa, synthetic construct
QFTRGDHVNL

SEQ ID NO: 106330 - protein, 10 aa, synthetic construct
QFYRGDHVNL

SEQ ID NO: 106331 - protein, 10 aa, synthetic construct
QFNRGDHVNL

SEQ ID NO: 106332 - protein, 10 aa, synthetic construct
QFQRGDHVNL

SEQ ID NO: 106333 - protein, 10 aa, synthetic construct
QFDRGDHVNL

SEQ ID NO: 106334 - protein, 10 aa, synthetic construct
QFERGDHVNL

SEQ ID NO: 106335 - protein, 10 aa, synthetic construct
QKGRGDHVNL

SEQ ID NO: 106336 - protein, 10 aa, synthetic construct
QKARGDHVNL

SEQ ID NO: 106337 - protein, 10 aa, synthetic construct
QKVRGDHVNL

SEQ ID NO: 106338 - protein, 10 aa, synthetic construct
QKPRGDHVNL

SEQ ID NO: 106339 - protein, 10 aa, synthetic construct
QKLRGDHVNL

SEQ ID NO: 106340 - protein, 10 aa, synthetic construct
QKIRGDHVNL

SEQ ID NO: 106341 - protein, 10 aa, synthetic construct
QKMRGDHVNL

SEQ ID NO: 106342 - protein, 10 aa, synthetic construct
QKWRGDHVNL

SEQ ID NO: 106343 - protein, 10 aa, synthetic construct
QKFRGDHVNL

SEQ ID NO: 106344 - protein, 10 aa, synthetic construct
QKKRGDHVNL

SEQ ID NO: 106345 - protein, 10 aa, synthetic construct
QKRRGDHVNL

SEQ ID NO: 106346 - protein, 10 aa, synthetic construct
QKHRGDHVNL

SEQ ID NO: 106347 - protein, 10 aa, synthetic construct
QKSRGDHVNL

SEQ ID NO: 106348 - protein, 10 aa, synthetic construct
QKTRGDHVNL

SEQ ID NO: 106349 - protein, 10 aa, synthetic construct
QKYRGDHVNL

SEQ ID NO: 106350 - protein, 10 aa, synthetic construct
QKNRGDHVNL

SEQ ID NO: 106351 - protein, 10 aa, synthetic construct
QKQRGDHVNL

SEQ ID NO: 106352 - protein, 10 aa, synthetic construct
QKDRGDHVNL

SEQ ID NO: 106353 - protein, 10 aa, synthetic construct
QKERGDHVNL

SEQ ID NO: 106354 - protein, 10 aa, synthetic construct
QRGRGDHVNL

SEQ ID NO: 106355 - protein, 10 aa, synthetic construct
QRARGDHVNL

SEQ ID NO: 106356 - protein, 10 aa, synthetic construct
QRVRGDHVNL

SEQ ID NO: 106357 - protein, 10 aa, synthetic construct
QRPRGDHVNL

SEQ ID NO: 106358 - protein, 10 aa, synthetic construct
QRLRGDHVNL

SEQ ID NO: 106359 - protein, 10 aa, synthetic construct
QRIRGDHVNL

SEQ ID NO: 106360 - protein, 10 aa, synthetic construct
QRMRGDHVNL

SEQ ID NO: 106361 - protein, 10 aa, synthetic construct
QRWRGDHVNL

SEQ ID NO: 106362 - protein, 10 aa, synthetic construct
QRFRGDHVNL

SEQ ID NO: 106363 - protein, 10 aa, synthetic construct
QRKRGDHVNL

SEQ ID NO: 106364 - protein, 10 aa, synthetic construct
QRRRGDHVNL

SEQ ID NO: 106365 - protein, 10 aa, synthetic construct
QRHRGDHVNL

SEQ ID NO: 106366 - protein, 10 aa, synthetic construct
QRSRGDHVNL

SEQ ID NO: 106367 - protein, 10 aa, synthetic construct
QRTRGDHVNL

SEQ ID NO: 106368 - protein, 10 aa, synthetic construct
QRYRGDHVNL

SEQ ID NO: 106369 - protein, 10 aa, synthetic construct
QRNRGDHVNL

SEQ ID NO: 106370 - protein, 10 aa, synthetic construct
QRQRGDHVNL

SEQ ID NO: 106371 - protein, 10 aa, synthetic construct
QRDRGDHVNL

SEQ ID NO: 106372 - protein, 10 aa, synthetic construct
QRERGDHVNL

SEQ ID NO: 106373 - protein, 10 aa, synthetic construct
QHGRGDHVNL

SEQ ID NO: 106374 - protein, 10 aa, synthetic construct
QHARGDHVNL

SEQ ID NO: 106375 - protein, 10 aa, synthetic construct
QHVRGDHVNL

SEQ ID NO: 106376 - protein, 10 aa, synthetic construct
QHPRGDHVNL

SEQ ID NO: 106377 - protein, 10 aa, synthetic construct
QHLRGDHVNL

SEQ ID NO: 106378 - protein, 10 aa, synthetic construct
QHIRGDHVNL

SEQ ID NO: 106379 - protein, 10 aa, synthetic construct
QHMRGDHVNL

SEQ ID NO: 106380 - protein, 10 aa, synthetic construct
QHWRGDHVNL

SEQ ID NO: 106381 - protein, 10 aa, synthetic construct
QHFRGDHVNL

SEQ ID NO: 106382 - protein, 10 aa, synthetic construct
QHKRGDHVNL

SEQ ID NO: 106383 - protein, 10 aa, synthetic construct
QHRRGDHVNL

SEQ ID NO: 106384 - protein, 10 aa, synthetic construct
QHHRGDHVNL

SEQ ID NO: 106385 - protein, 10 aa, synthetic construct
QHSRGDHVNL

SEQ ID NO: 106386 - protein, 10 aa, synthetic construct
QHTRGDHVNL

SEQ ID NO: 106387 - protein, 10 aa, synthetic construct
QHYRGDHVNL

SEQ ID NO: 106388 - protein, 10 aa, synthetic construct
QHNRGDHVNL

SEQ ID NO: 106389 - protein, 10 aa, synthetic construct
QHQRGDHVNL

SEQ ID NO: 106390 - protein, 10 aa, synthetic construct
QHDRGDHVNL

SEQ ID NO: 106391 - protein, 10 aa, synthetic construct
QHERGDHVNL

SEQ ID NO: 106392 - protein, 10 aa, synthetic construct
QSGRGDHVNL

SEQ ID NO: 106393 - protein, 10 aa, synthetic construct
QSARGDHVNL

SEQ ID NO: 106394 - protein, 10 aa, synthetic construct
QSVRGDHVNL

SEQ ID NO: 106395 - protein, 10 aa, synthetic construct
QSPRGDHVNL

SEQ ID NO: 106396 - protein, 10 aa, synthetic construct
QSLRGDHVNL

SEQ ID NO: 106397 - protein, 10 aa, synthetic construct
QSIRGDHVNL

SEQ ID NO: 106398 - protein, 10 aa, synthetic construct
QSMRGDHVNL

SEQ ID NO: 106399 - protein, 10 aa, synthetic construct
QSWRGDHVNL

SEQ ID NO: 106400 - protein, 10 aa, synthetic construct
QSFRGDHVNL

SEQ ID NO: 106401 - protein, 10 aa, synthetic construct
QSKRGDHVNL

SEQ ID NO: 106402 - protein, 10 aa, synthetic construct
QSRRGDHVNL

SEQ ID NO: 106403 - protein, 10 aa, synthetic construct
QSHRGDHVNL

SEQ ID NO: 106404 - protein, 10 aa, synthetic construct
QSSRGDHVNL

SEQ ID NO: 106405 - protein, 10 aa, synthetic construct
QSTRGDHVNL

SEQ ID NO: 106406 - protein, 10 aa, synthetic construct
QSYRGDHVNL

SEQ ID NO: 106407 - protein, 10 aa, synthetic construct
QSNRGDHVNL

SEQ ID NO: 106408 - protein, 10 aa, synthetic construct
QSQRGDHVNL

SEQ ID NO: 106409 - protein, 10 aa, synthetic construct
QSDRGDHVNL

SEQ ID NO: 106410 - protein, 10 aa, synthetic construct
QSERGDHVNL

SEQ ID NO: 106411 - protein, 10 aa, synthetic construct
QTGRGDHVNL

SEQ ID NO: 106412 - protein, 10 aa, synthetic construct
QTARGDHVNL

SEQ ID NO: 106413 - protein, 10 aa, synthetic construct
QTVRGDHVNL

SEQ ID NO: 106414 - protein, 10 aa, synthetic construct
QTPRGDHVNL

SEQ ID NO: 106415 - protein, 10 aa, synthetic construct
QTLRGDHVNL

SEQ ID NO: 106416 - protein, 10 aa, synthetic construct
QTIRGDHVNL

SEQ ID NO: 106417 - protein, 10 aa, synthetic construct
QTMRGDHVNL

SEQ ID NO: 106418 - protein, 10 aa, synthetic construct
QTWRGDHVNL

SEQ ID NO: 106419 - protein, 10 aa, synthetic construct
QTFRGDHVNL

SEQ ID NO: 106420 - protein, 10 aa, synthetic construct
QTKRGDHVNL

SEQ ID NO: 106421 - protein, 10 aa, synthetic construct
QTRRGDHVNL

SEQ ID NO: 106422 - protein, 10 aa, synthetic construct
QTHRGDHVNL

SEQ ID NO: 106423 - protein, 10 aa, synthetic construct
QTSRGDHVNL

SEQ ID NO: 106424 - protein, 10 aa, synthetic construct
QTTRGDHVNL

SEQ ID NO: 106425 - protein, 10 aa, synthetic construct
QTYRGDHVNL

SEQ ID NO: 106426 - protein, 10 aa, synthetic construct
QTNRGDHVNL

SEQ ID NO: 106427 - protein, 10 aa, synthetic construct
QTQRGDHVNL

SEQ ID NO: 106428 - protein, 10 aa, synthetic construct
QTDRGDHVNL

SEQ ID NO: 106429 - protein, 10 aa, synthetic construct
QTERGDHVNL

SEQ ID NO: 106430 - protein, 10 aa, synthetic construct
QYGRGDHVNL

SEQ ID NO: 106431 - protein, 10 aa, synthetic construct
QYARGDHVNL

SEQ ID NO: 106432 - protein, 10 aa, synthetic construct
QYVRGDHVNL

SEQ ID NO: 106433 - protein, 10 aa, synthetic construct
QYPRGDHVNL

SEQ ID NO: 106434 - protein, 10 aa, synthetic construct
QYLRGDHVNL

SEQ ID NO: 106435 - protein, 10 aa, synthetic construct
QYIRGDHVNL

SEQ ID NO: 106436 - protein, 10 aa, synthetic construct
QYMRGDHVNL

SEQ ID NO: 106437 - protein, 10 aa, synthetic construct
QYWRGDHVNL

SEQ ID NO: 106438 - protein, 10 aa, synthetic construct
QYFRGDHVNL

SEQ ID NO: 106439 - protein, 10 aa, synthetic construct
QYKRGDHVNL

SEQ ID NO: 106440 - protein, 10 aa, synthetic construct
QYRRGDHVNL

SEQ ID NO: 106441 - protein, 10 aa, synthetic construct
QYHRGDHVNL

SEQ ID NO: 106442 - protein, 10 aa, synthetic construct
QYSRGDHVNL

SEQ ID NO: 106443 - protein, 10 aa, synthetic construct
QYTRGDHVNL

SEQ ID NO: 106444 - protein, 10 aa, synthetic construct
QYYRGDHVNL

SEQ ID NO: 106445 - protein, 10 aa, synthetic construct
QYNRGDHVNL

SEQ ID NO: 106446 - protein, 10 aa, synthetic construct
QYQRGDHVNL

SEQ ID NO: 106447 - protein, 10 aa, synthetic construct
QYDRGDHVNL

SEQ ID NO: 106448 - protein, 10 aa, synthetic construct
QYERGDHVNL

SEQ ID NO: 106449 - protein, 10 aa, synthetic construct
QNGRGDHVNL

SEQ ID NO: 106450 - protein, 10 aa, synthetic construct
QNARGDHVNL

SEQ ID NO: 106451 - protein, 10 aa, synthetic construct
QNVRGDHVNL

SEQ ID NO: 106452 - protein, 10 aa, synthetic construct
QNPRGDHVNL

SEQ ID NO: 106453 - protein, 10 aa, synthetic construct
QNLRGDHVNL

SEQ ID NO: 106454 - protein, 10 aa, synthetic construct
QNIRGDHVNL

SEQ ID NO: 106455 - protein, 10 aa, synthetic construct
QNMRGDHVNL

SEQ ID NO: 106456 - protein, 10 aa, synthetic construct
QNWRGDHVNL

SEQ ID NO: 106457 - protein, 10 aa, synthetic construct
QNFRGDHVNL

SEQ ID NO: 106458 - protein, 10 aa, synthetic construct
QNKRGDHVNL

SEQ ID NO: 106459 - protein, 10 aa, synthetic construct
QNRRGDHVNL

SEQ ID NO: 106460 - protein, 10 aa, synthetic construct
QNHRGDHVNL

SEQ ID NO: 106461 - protein, 10 aa, synthetic construct
QNSRGDHVNL

SEQ ID NO: 106462 - protein, 10 aa, synthetic construct
QNTRGDHVNL

SEQ ID NO: 106463 - protein, 10 aa, synthetic construct
QNYRGDHVNL

SEQ ID NO: 106464 - protein, 10 aa, synthetic construct
QNNRGDHVNL

SEQ ID NO: 106465 - protein, 10 aa, synthetic construct
QNQRGDHVNL

SEQ ID NO: 106466 - protein, 10 aa, synthetic construct
QNDRGDHVNL

SEQ ID NO: 106467 - protein, 10 aa, synthetic construct
QNERGDHVNL

SEQ ID NO: 106468 - protein, 10 aa, synthetic construct
QQGRGDHVNL

SEQ ID NO: 106469 - protein, 10 aa, synthetic construct
QQARGDHVNL

SEQ ID NO: 106470 - protein, 10 aa, synthetic construct
QQVRGDHVNL

SEQ ID NO: 106471 - protein, 10 aa, synthetic construct
QQPRGDHVNL

SEQ ID NO: 106472 - protein, 10 aa, synthetic construct
QQLRGDHVNL

SEQ ID NO: 106473 - protein, 10 aa, synthetic construct
QQIRGDHVNL

SEQ ID NO: 106474 - protein, 10 aa, synthetic construct
QQMRGDHVNL

SEQ ID NO: 106475 - protein, 10 aa, synthetic construct
QQWRGDHVNL

SEQ ID NO: 106476 - protein, 10 aa, synthetic construct
QQFRGDHVNL

SEQ ID NO: 106477 - protein, 10 aa, synthetic construct
QQKRGDHVNL

SEQ ID NO: 106478 - protein, 10 aa, synthetic construct
QQRRGDHVNL

SEQ ID NO: 106479 - protein, 10 aa, synthetic construct
QQHRGDHVNL

SEQ ID NO: 106480 - protein, 10 aa, synthetic construct
QQSRGDHVNL

SEQ ID NO: 106481 - protein, 10 aa, synthetic construct
QQTRGDHVNL

SEQ ID NO: 106482 - protein, 10 aa, synthetic construct
QQYRGDHVNL

SEQ ID NO: 106483 - protein, 10 aa, synthetic construct
QQNRGDHVNL

SEQ ID NO: 106484 - protein, 10 aa, synthetic construct
QQQRGDHVNL

SEQ ID NO: 106485 - protein, 10 aa, synthetic construct
QQDRGDHVNL

SEQ ID NO: 106486 - protein, 10 aa, synthetic construct
QQERGDHVNL

SEQ ID NO: 106487 - protein, 10 aa, synthetic construct
QDGRGDHVNL

SEQ ID NO: 106488 - protein, 10 aa, synthetic construct
QDARGDHVNL

SEQ ID NO: 106489 - protein, 10 aa, synthetic construct
QDVRGDHVNL

SEQ ID NO: 106490 - protein, 10 aa, synthetic construct
QDPRGDHVNL

SEQ ID NO: 106491 - protein, 10 aa, synthetic construct
QDLRGDHVNL

SEQ ID NO: 106492 - protein, 10 aa, synthetic construct
QDIRGDHVNL

SEQ ID NO: 106493 - protein, 10 aa, synthetic construct
QDMRGDHVNL

SEQ ID NO: 106494 - protein, 10 aa, synthetic construct
QDWRGDHVNL

SEQ ID NO: 106495 - protein, 10 aa, synthetic construct
QDFRGDHVNL

SEQ ID NO: 106496 - protein, 10 aa, synthetic construct
QDKRGDHVNL

SEQ ID NO: 106497 - protein, 10 aa, synthetic construct
QDRRGDHVNL

SEQ ID NO: 106498 - protein, 10 aa, synthetic construct
QDHRGDHVNL

SEQ ID NO: 106499 - protein, 10 aa, synthetic construct
QDSRGDHVNL

SEQ ID NO: 106500 - protein, 10 aa, synthetic construct
QDTRGDHVNL

SEQ ID NO: 106501 - protein, 10 aa, synthetic construct
QDYRGDHVNL

SEQ ID NO: 106502 - protein, 10 aa, synthetic construct
QDNRGDHVNL

SEQ ID NO: 106503 - protein, 10 aa, synthetic construct
QDQRGDHVNL

SEQ ID NO: 106504 - protein, 10 aa, synthetic construct
QDDRGDHVNL

SEQ ID NO: 106505 - protein, 10 aa, synthetic construct
QDERGDHVNL

SEQ ID NO: 106506 - protein, 10 aa, synthetic construct
QEGRGDHVNL

SEQ ID NO: 106507 - protein, 10 aa, synthetic construct
QEARGDHVNL

SEQ ID NO: 106508 - protein, 10 aa, synthetic construct
QEVRGDHVNL

SEQ ID NO: 106509 - protein, 10 aa, synthetic construct
QEPRGDHVNL

SEQ ID NO: 106510 - protein, 10 aa, synthetic construct
QELRGDHVNL

SEQ ID NO: 106511 - protein, 10 aa, synthetic construct
QEIRGDHVNL

SEQ ID NO: 106512 - protein, 10 aa, synthetic construct
QEMRGDHVNL

SEQ ID NO: 106513 - protein, 10 aa, synthetic construct
QEWRGDHVNL

SEQ ID NO: 106514 - protein, 10 aa, synthetic construct
QEFRGDHVNL

SEQ ID NO: 106515 - protein, 10 aa, synthetic construct
QEKRGDHVNL

SEQ ID NO: 106516 - protein, 10 aa, synthetic construct
QERRGDHVNL

SEQ ID NO: 106517 - protein, 10 aa, synthetic construct
QEHRGDHVNL

SEQ ID NO: 106518 - protein, 10 aa, synthetic construct
QESRGDHVNL

SEQ ID NO: 106519 - protein, 10 aa, synthetic construct
QETRGDHVNL

SEQ ID NO: 106520 - protein, 10 aa, synthetic construct
QEYRGDHVNL

SEQ ID NO: 106521 - protein, 10 aa, synthetic construct
QENRGDHVNL

SEQ ID NO: 106522 - protein, 10 aa, synthetic construct
QEQRGDHVNL

SEQ ID NO: 106523 - protein, 10 aa, synthetic construct
QEDRGDHVNL

SEQ ID NO: 106524 - protein, 10 aa, synthetic construct
QEERGDHVNL

SEQ ID NO: 106525 - protein, 10 aa, synthetic construct
SGGRGDIHNL

SEQ ID NO: 106526 - protein, 10 aa, synthetic construct
SGARGDIHNL

SEQ ID NO: 106527 - protein, 10 aa, synthetic construct
SGVRGDIHNL

SEQ ID NO: 106528 - protein, 10 aa, synthetic construct
SGPRGDIHNL

SEQ ID NO: 106529 - protein, 10 aa, synthetic construct
SGLRGDIHNL

SEQ ID NO: 106530 - protein, 10 aa, synthetic construct
SGIRGDIHNL

SEQ ID NO: 106531 - protein, 10 aa, synthetic construct
SGMRGDIHNL

SEQ ID NO: 106532 - protein, 10 aa, synthetic construct
SGWRGDIHNL

SEQ ID NO: 106533 - protein, 10 aa, synthetic construct
SGFRGDIHNL

SEQ ID NO: 106534 - protein, 10 aa, synthetic construct
SGKRGDIHNL

SEQ ID NO: 106535 - protein, 10 aa, synthetic construct
SGRRGDIHNL

SEQ ID NO: 106536 - protein, 10 aa, synthetic construct
SGHRGDIHNL

SEQ ID NO: 106537 - protein, 10 aa, synthetic construct
SGSRGDIHNL

SEQ ID NO: 106538 - protein, 10 aa, synthetic construct
SGTRGDIHNL

SEQ ID NO: 106539 - protein, 10 aa, synthetic construct
SGYRGDIHNL

SEQ ID NO: 106540 - protein, 10 aa, synthetic construct
SGNRGDIHNL

SEQ ID NO: 106541 - protein, 10 aa, synthetic construct
SGQRGDIHNL

SEQ ID NO: 106542 - protein, 10 aa, synthetic construct
SGDRGDIHNL

SEQ ID NO: 106543 - protein, 10 aa, synthetic construct
SGERGDIHNL

SEQ ID NO: 106544 - protein, 10 aa, synthetic construct
SAGRGDIHNL

SEQ ID NO: 106545 - protein, 10 aa, synthetic construct
SAARGDIHNL

SEQ ID NO: 106546 - protein, 10 aa, synthetic construct
SAVRGDIHNL

SEQ ID NO: 106547 - protein, 10 aa, synthetic construct
SAPRGDIHNL

SEQ ID NO: 106548 - protein, 10 aa, synthetic construct
SALRGDIHNL

SEQ ID NO: 106549 - protein, 10 aa, synthetic construct
SAIRGDIHNL

SEQ ID NO: 106550 - protein, 10 aa, synthetic construct
SAMRGDIHNL

SEQ ID NO: 106551 - protein, 10 aa, synthetic construct
SAWRGDIHNL

SEQ ID NO: 106552 - protein, 10 aa, synthetic construct
SAFRGDIHNL

SEQ ID NO: 106553 - protein, 10 aa, synthetic construct
SAKRGDIHNL

SEQ ID NO: 106554 - protein, 10 aa, synthetic construct
SARRGDIHNL

SEQ ID NO: 106555 - protein, 10 aa, synthetic construct
SAHRGDIHNL

SEQ ID NO: 106556 - protein, 10 aa, synthetic construct
SASRGDIHNL

SEQ ID NO: 106557 - protein, 10 aa, synthetic construct
SATRGDIHNL

SEQ ID NO: 106558 - protein, 10 aa, synthetic construct
SAYRGDIHNL

SEQ ID NO: 106559 - protein, 10 aa, synthetic construct
SANRGDIHNL

SEQ ID NO: 106560 - protein, 10 aa, synthetic construct
SAQRGDIHNL

SEQ ID NO: 106561 - protein, 10 aa, synthetic construct
SADRGDIHNL

SEQ ID NO: 106562 - protein, 10 aa, synthetic construct
SAERGDIHNL

SEQ ID NO: 106563 - protein, 10 aa, synthetic construct
SVGRGDIHNL

SEQ ID NO: 106564 - protein, 10 aa, synthetic construct
SVARGDIHNL

SEQ ID NO: 106565 - protein, 10 aa, synthetic construct
SVVRGDIHNL

SEQ ID NO: 106566 - protein, 10 aa, synthetic construct
SVPRGDIHNL

SEQ ID NO: 106567 - protein, 10 aa, synthetic construct
SVLRGDIHNL

SEQ ID NO: 106568 - protein, 10 aa, synthetic construct
SVIRGDIHNL

SEQ ID NO: 106569 - protein, 10 aa, synthetic construct
SVMRGDIHNL

SEQ ID NO: 106570 - protein, 10 aa, synthetic construct
SVWRGDIHNL

SEQ ID NO: 106571 - protein, 10 aa, synthetic construct
SVFRGDIHNL

SEQ ID NO: 106572 - protein, 10 aa, synthetic construct
SVKRGDIHNL

SEQ ID NO: 106573 - protein, 10 aa, synthetic construct
SVRRGDIHNL

SEQ ID NO: 106574 - protein, 10 aa, synthetic construct
SVHRGDIHNL

SEQ ID NO: 106575 - protein, 10 aa, synthetic construct
SVSRGDIHNL

SEQ ID NO: 106576 - protein, 10 aa, synthetic construct
SVTRGDIHNL

SEQ ID NO: 106577 - protein, 10 aa, synthetic construct
SVYRGDIHNL

SEQ ID NO: 106578 - protein, 10 aa, synthetic construct
SVNRGDIHNL

SEQ ID NO: 106579 - protein, 10 aa, synthetic construct
SVQRGDIHNL

SEQ ID NO: 106580 - protein, 10 aa, synthetic construct
SVDRGDIHNL

SEQ ID NO: 106581 - protein, 10 aa, synthetic construct
SVERGDIHNL

SEQ ID NO: 106582 - protein, 10 aa, synthetic construct
SPGRGDIHNL

SEQ ID NO: 106583 - protein, 10 aa, synthetic construct
SPARGDIHNL

SEQ ID NO: 106584 - protein, 10 aa, synthetic construct
SPVRGDIHNL

SEQ ID NO: 106585 - protein, 10 aa, synthetic construct
SPPRGDIHNL

SEQ ID NO: 106586 - protein, 10 aa, synthetic construct
SPLRGDIHNL

SEQ ID NO: 106587 - protein, 10 aa, synthetic construct
SPIRGDIHNL

SEQ ID NO: 106588 - protein, 10 aa, synthetic construct
SPMRGDIHNL

SEQ ID NO: 106589 - protein, 10 aa, synthetic construct
SPWRGDIHNL

SEQ ID NO: 106590 - protein, 10 aa, synthetic construct
SPFRGDIHNL

SEQ ID NO: 106591 - protein, 10 aa, synthetic construct
SPKRGDIHNL

SEQ ID NO: 106592 - protein, 10 aa, synthetic construct
SPRRGDIHNL

SEQ ID NO: 106593 - protein, 10 aa, synthetic construct
SPHRGDIHNL

SEQ ID NO: 106594 - protein, 10 aa, synthetic construct
SPSRGDIHNL

SEQ ID NO: 106595 - protein, 10 aa, synthetic construct
SPTRGDIHNL

SEQ ID NO: 106596 - protein, 10 aa, synthetic construct
SPYRGDIHNL

SEQ ID NO: 106597 - protein, 10 aa, synthetic construct
SPNRGDIHNL

SEQ ID NO: 106598 - protein, 10 aa, synthetic construct
SPQRGDIHNL

SEQ ID NO: 106599 - protein, 10 aa, synthetic construct
SPDRGDIHNL

SEQ ID NO: 106600 - protein, 10 aa, synthetic construct
SPERGDIHNL

SEQ ID NO: 106601 - protein, 10 aa, synthetic construct
SLGRGDIHNL

SEQ ID NO: 106602 - protein, 10 aa, synthetic construct
SLARGDIHNL

SEQ ID NO: 106603 - protein, 10 aa, synthetic construct
SLVRGDIHNL

SEQ ID NO: 106604 - protein, 10 aa, synthetic construct
SLPRGDIHNL

SEQ ID NO: 106605 - protein, 10 aa, synthetic construct
SLLRGDIHNL

SEQ ID NO: 106606 - protein, 10 aa, synthetic construct
SLIRGDIHNL

SEQ ID NO: 106607 - protein, 10 aa, synthetic construct
SLMRGDIHNL

SEQ ID NO: 106608 - protein, 10 aa, synthetic construct
SLWRGDIHNL

SEQ ID NO: 106609 - protein, 10 aa, synthetic construct
SLFRGDIHNL

SEQ ID NO: 106610 - protein, 10 aa, synthetic construct
SLKRGDIHNL

SEQ ID NO: 106611 - protein, 10 aa, synthetic construct
SLRRGDIHNL

SEQ ID NO: 106612 - protein, 10 aa, synthetic construct
SLHRGDIHNL

SEQ ID NO: 106613 - protein, 10 aa, synthetic construct
SLSRGDIHNL

SEQ ID NO: 106614 - protein, 10 aa, synthetic construct
SLTRGDIHNL

SEQ ID NO: 106615 - protein, 10 aa, synthetic construct
SLYRGDIHNL

SEQ ID NO: 106616 - protein, 10 aa, synthetic construct
SLNRGDIHNL

SEQ ID NO: 106617 - protein, 10 aa, synthetic construct
SLQRGDIHNL

SEQ ID NO: 106618 - protein, 10 aa, synthetic construct
SLDRGDIHNL

SEQ ID NO: 106619 - protein, 10 aa, synthetic construct
SLERGDIHNL

SEQ ID NO: 106620 - protein, 10 aa, synthetic construct
SIGRGDIHNL

SEQ ID NO: 106621 - protein, 10 aa, synthetic construct
SIARGDIHNL

SEQ ID NO: 106622 - protein, 10 aa, synthetic construct
SIVRGDIHNL

SEQ ID NO: 106623 - protein, 10 aa, synthetic construct
SIPRGDIHNL

SEQ ID NO: 106624 - protein, 10 aa, synthetic construct
SILRGDIHNL

SEQ ID NO: 106625 - protein, 10 aa, synthetic construct
SIIRGDIHNL

SEQ ID NO: 106626 - protein, 10 aa, synthetic construct
SIMRGDIHNL

SEQ ID NO: 106627 - protein, 10 aa, synthetic construct
SIWRGDIHNL

SEQ ID NO: 106628 - protein, 10 aa, synthetic construct
SIFRGDIHNL

SEQ ID NO: 106629 - protein, 10 aa, synthetic construct
SIKRGDIHNL

SEQ ID NO: 106630 - protein, 10 aa, synthetic construct
SIRRGDIHNL

SEQ ID NO: 106631 - protein, 10 aa, synthetic construct
SIHRGDIHNL

SEQ ID NO: 106632 - protein, 10 aa, synthetic construct
SISRGDIHNL

SEQ ID NO: 106633 - protein, 10 aa, synthetic construct
SITRGDIHNL

SEQ ID NO: 106634 - protein, 10 aa, synthetic construct
SIYRGDIHNL

SEQ ID NO: 106635 - protein, 10 aa, synthetic construct
SINRGDIHNL

SEQ ID NO: 106636 - protein, 10 aa, synthetic construct
SIQRGDIHNL

SEQ ID NO: 106637 - protein, 10 aa, synthetic construct
SIDRGDIHNL

SEQ ID NO: 106638 - protein, 10 aa, synthetic construct
SIERGDIHNL

SEQ ID NO: 106639 - protein, 10 aa, synthetic construct
SMGRGDIHNL

SEQ ID NO: 106640 - protein, 10 aa, synthetic construct
SMARGDIHNL

SEQ ID NO: 106641 - protein, 10 aa, synthetic construct
SMVRGDIHNL

SEQ ID NO: 106642 - protein, 10 aa, synthetic construct
SMPRGDIHNL

SEQ ID NO: 106643 - protein, 10 aa, synthetic construct
SMLRGDIHNL

SEQ ID NO: 106644 - protein, 10 aa, synthetic construct
SMIRGDIHNL

SEQ ID NO: 106645 - protein, 10 aa, synthetic construct
SMMRGDIHNL

SEQ ID NO: 106646 - protein, 10 aa, synthetic construct
SMWRGDIHNL

SEQ ID NO: 106647 - protein, 10 aa, synthetic construct
SMFRGDIHNL

SEQ ID NO: 106648 - protein, 10 aa, synthetic construct
SMKRGDIHNL

SEQ ID NO: 106649 - protein, 10 aa, synthetic construct
SMRRGDIHNL

SEQ ID NO: 106650 - protein, 10 aa, synthetic construct
SMHRGDIHNL

SEQ ID NO: 106651 - protein, 10 aa, synthetic construct
SMSRGDIHNL

SEQ ID NO: 106652 - protein, 10 aa, synthetic construct
SMTRGDIHNL

SEQ ID NO: 106653 - protein, 10 aa, synthetic construct
SMYRGDIHNL

SEQ ID NO: 106654 - protein, 10 aa, synthetic construct
SMNRGDIHNL

SEQ ID NO: 106655 - protein, 10 aa, synthetic construct
SMQRGDIHNL

SEQ ID NO: 106656 - protein, 10 aa, synthetic construct
SMDRGDIHNL

SEQ ID NO: 106657 - protein, 10 aa, synthetic construct
SMERGDIHNL

SEQ ID NO: 106658 - protein, 10 aa, synthetic construct
SWGRGDIHNL

SEQ ID NO: 106659 - protein, 10 aa, synthetic construct
SWARGDIHNL

SEQ ID NO: 106660 - protein, 10 aa, synthetic construct
SWVRGDIHNL

SEQ ID NO: 106661 - protein, 10 aa, synthetic construct
SWPRGDIHNL

SEQ ID NO: 106662 - protein, 10 aa, synthetic construct
SWLRGDIHNL

SEQ ID NO: 106663 - protein, 10 aa, synthetic construct
SWIRGDIHNL

SEQ ID NO: 106664 - protein, 10 aa, synthetic construct
SWMRGDIHNL

SEQ ID NO: 106665 - protein, 10 aa, synthetic construct
SWWRGDIHNL

SEQ ID NO: 106666 - protein, 10 aa, synthetic construct
SWFRGDIHNL

SEQ ID NO: 106667 - protein, 10 aa, synthetic construct
SWKRGDIHNL

SEQ ID NO: 106668 - protein, 10 aa, synthetic construct
SWRRGDIHNL

SEQ ID NO: 106669 - protein, 10 aa, synthetic construct
SWHRGDIHNL

SEQ ID NO: 106670 - protein, 10 aa, synthetic construct
SWSRGDIHNL

SEQ ID NO: 106671 - protein, 10 aa, synthetic construct
SWTRGDIHNL

SEQ ID NO: 106672 - protein, 10 aa, synthetic construct
SWYRGDIHNL

SEQ ID NO: 106673 - protein, 10 aa, synthetic construct
SWNRGDIHNL

SEQ ID NO: 106674 - protein, 10 aa, synthetic construct
SWQRGDIHNL

SEQ ID NO: 106675 - protein, 10 aa, synthetic construct
SWDRGDIHNL

SEQ ID NO: 106676 - protein, 10 aa, synthetic construct
SWERGDIHNL

SEQ ID NO: 106677 - protein, 10 aa, synthetic construct
SFGRGDIHNL

SEQ ID NO: 106678 - protein, 10 aa, synthetic construct
SFARGDIHNL

SEQ ID NO: 106679 - protein, 10 aa, synthetic construct
SFVRGDIHNL

SEQ ID NO: 106680 - protein, 10 aa, synthetic construct
SFPRGDIHNL

SEQ ID NO: 106681 - protein, 10 aa, synthetic construct
SFLRGDIHNL

SEQ ID NO: 106682 - protein, 10 aa, synthetic construct
SFIRGDIHNL

SEQ ID NO: 106683 - protein, 10 aa, synthetic construct
SFMRGDIHNL

SEQ ID NO: 106684 - protein, 10 aa, synthetic construct
SFWRGDIHNL

SEQ ID NO: 106685 - protein, 10 aa, synthetic construct
SFFRGDIHNL

SEQ ID NO: 106686 - protein, 10 aa, synthetic construct
SFKRGDIHNL

SEQ ID NO: 106687 - protein, 10 aa, synthetic construct
SFRRGDIHNL

SEQ ID NO: 106688 - protein, 10 aa, synthetic construct
SFHRGDIHNL

SEQ ID NO: 106689 - protein, 10 aa, synthetic construct
SFSRGDIHNL

SEQ ID NO: 106690 - protein, 10 aa, synthetic construct
SFTRGDIHNL

SEQ ID NO: 106691 - protein, 10 aa, synthetic construct
SFYRGDIHNL

SEQ ID NO: 106692 - protein, 10 aa, synthetic construct
SFNRGDIHNL

SEQ ID NO: 106693 - protein, 10 aa, synthetic construct
SFQRGDIHNL

SEQ ID NO: 106694 - protein, 10 aa, synthetic construct
SFDRGDIHNL

SEQ ID NO: 106695 - protein, 10 aa, synthetic construct
SFERGDIHNL

SEQ ID NO: 106696 - protein, 10 aa, synthetic construct
SKGRGDIHNL

SEQ ID NO: 106697 - protein, 10 aa, synthetic construct
SKARGDIHNL

SEQ ID NO: 106698 - protein, 10 aa, synthetic construct
SKVRGDIHNL

SEQ ID NO: 106699 - protein, 10 aa, synthetic construct
SKPRGDIHNL

SEQ ID NO: 106700 - protein, 10 aa, synthetic construct
SKLRGDIHNL

SEQ ID NO: 106701 - protein, 10 aa, synthetic construct
SKIRGDIHNL

SEQ ID NO: 106702 - protein, 10 aa, synthetic construct
SKMRGDIHNL

SEQ ID NO: 106703 - protein, 10 aa, synthetic construct
SKWRGDIHNL

SEQ ID NO: 106704 - protein, 10 aa, synthetic construct
SKFRGDIHNL

SEQ ID NO: 106705 - protein, 10 aa, synthetic construct
SKKRGDIHNL

SEQ ID NO: 106706 - protein, 10 aa, synthetic construct
SKRRGDIHNL

SEQ ID NO: 106707 - protein, 10 aa, synthetic construct
SKHRGDIHNL

SEQ ID NO: 106708 - protein, 10 aa, synthetic construct
SKSRGDIHNL

SEQ ID NO: 106709 - protein, 10 aa, synthetic construct
SKTRGDIHNL

SEQ ID NO: 106710 - protein, 10 aa, synthetic construct
SKYRGDIHNL

SEQ ID NO: 106711 - protein, 10 aa, synthetic construct
SKNRGDIHNL

SEQ ID NO: 106712 - protein, 10 aa, synthetic construct
SKQRGDIHNL

SEQ ID NO: 106713 - protein, 10 aa, synthetic construct
SKDRGDIHNL

SEQ ID NO: 106714 - protein, 10 aa, synthetic construct
SKERGDIHNL

SEQ ID NO: 106715 - protein, 10 aa, synthetic construct
SRGRGDIHNL

SEQ ID NO: 106716 - protein, 10 aa, synthetic construct
SRARGDIHNL

SEQ ID NO: 106717 - protein, 10 aa, synthetic construct
SRVRGDIHNL

SEQ ID NO: 106718 - protein, 10 aa, synthetic construct
SRPRGDIHNL

SEQ ID NO: 106719 - protein, 10 aa, synthetic construct
SRLRGDIHNL

SEQ ID NO: 106720 - protein, 10 aa, synthetic construct
SRIRGDIHNL

SEQ ID NO: 106721 - protein, 10 aa, synthetic construct
SRMRGDIHNL

SEQ ID NO: 106722 - protein, 10 aa, synthetic construct
SRWRGDIHNL

SEQ ID NO: 106723 - protein, 10 aa, synthetic construct
SRFRGDIHNL

SEQ ID NO: 106724 - protein, 10 aa, synthetic construct
SRKRGDIHNL

SEQ ID NO: 106725 - protein, 10 aa, synthetic construct
SRRRGDIHNL

SEQ ID NO: 106726 - protein, 10 aa, synthetic construct
SRHRGDIHNL

SEQ ID NO: 106727 - protein, 10 aa, synthetic construct
SRSRGDIHNL

SEQ ID NO: 106728 - protein, 10 aa, synthetic construct
SRTRGDIHNL

SEQ ID NO: 106729 - protein, 10 aa, synthetic construct
SRYRGDIHNL

SEQ ID NO: 106730 - protein, 10 aa, synthetic construct
SRNRGDIHNL

SEQ ID NO: 106731 - protein, 10 aa, synthetic construct
SRQRGDIHNL

SEQ ID NO: 106732 - protein, 10 aa, synthetic construct
SRDRGDIHNL

SEQ ID NO: 106733 - protein, 10 aa, synthetic construct
SRERGDIHNL

SEQ ID NO: 106734 - protein, 10 aa, synthetic construct
SHGRGDIHNL

SEQ ID NO: 106735 - protein, 10 aa, synthetic construct
SHARGDIHNL

SEQ ID NO: 106736 - protein, 10 aa, synthetic construct
SHVRGDIHNL

SEQ ID NO: 106737 - protein, 10 aa, synthetic construct
SHPRGDIHNL

SEQ ID NO: 106738 - protein, 10 aa, synthetic construct
SHLRGDIHNL

SEQ ID NO: 106739 - protein, 10 aa, synthetic construct
SHIRGDIHNL

SEQ ID NO: 106740 - protein, 10 aa, synthetic construct
SHMRGDIHNL

SEQ ID NO: 106741 - protein, 10 aa, synthetic construct
SHWRGDIHNL

SEQ ID NO: 106742 - protein, 10 aa, synthetic construct
SHFRGDIHNL

SEQ ID NO: 106743 - protein, 10 aa, synthetic construct
SHKRGDIHNL

SEQ ID NO: 106744 - protein, 10 aa, synthetic construct
SHRRGDIHNL

SEQ ID NO: 106745 - protein, 10 aa, synthetic construct
SHHRGDIHNL

SEQ ID NO: 106746 - protein, 10 aa, synthetic construct
SHSRGDIHNL

SEQ ID NO: 106747 - protein, 10 aa, synthetic construct
SHTRGDIHNL

SEQ ID NO: 106748 - protein, 10 aa, synthetic construct
SHYRGDIHNL

SEQ ID NO: 106749 - protein, 10 aa, synthetic construct
SHNRGDIHNL

SEQ ID NO: 106750 - protein, 10 aa, synthetic construct
SHQRGDIHNL

SEQ ID NO: 106751 - protein, 10 aa, synthetic construct
SHDRGDIHNL

SEQ ID NO: 106752 - protein, 10 aa, synthetic construct
SHERGDIHNL

SEQ ID NO: 106753 - protein, 10 aa, synthetic construct
SSGRGDIHNL

SEQ ID NO: 106754 - protein, 10 aa, synthetic construct
SSARGDIHNL

SEQ ID NO: 106755 - protein, 10 aa, synthetic construct
SSVRGDIHNL

SEQ ID NO: 106756 - protein, 10 aa, synthetic construct
SSPRGDIHNL

SEQ ID NO: 106757 - protein, 10 aa, synthetic construct
SSLRGDIHNL

SEQ ID NO: 106758 - protein, 10 aa, synthetic construct
SSIRGDIHNL

SEQ ID NO: 106759 - protein, 10 aa, synthetic construct
SSMRGDIHNL

SEQ ID NO: 106760 - protein, 10 aa, synthetic construct
SSWRGDIHNL

SEQ ID NO: 106761 - protein, 10 aa, synthetic construct
SSFRGDIHNL

SEQ ID NO: 106762 - protein, 10 aa, synthetic construct
SSKRGDIHNL

SEQ ID NO: 106763 - protein, 10 aa, synthetic construct
SSRRGDIHNL

SEQ ID NO: 106764 - protein, 10 aa, synthetic construct
SSHRGDIHNL

SEQ ID NO: 106765 - protein, 10 aa, synthetic construct
SSSRGDIHNL

SEQ ID NO: 106766 - protein, 10 aa, synthetic construct
SSTRGDIHNL

SEQ ID NO: 106767 - protein, 10 aa, synthetic construct
SSYRGDIHNL

SEQ ID NO: 106768 - protein, 10 aa, synthetic construct
SSNRGDIHNL

SEQ ID NO: 106769 - protein, 10 aa, synthetic construct
SSQRGDIHNL

SEQ ID NO: 106770 - protein, 10 aa, synthetic construct
SSDRGDIHNL

SEQ ID NO: 106771 - protein, 10 aa, synthetic construct
SSERGDIHNL

SEQ ID NO: 106772 - protein, 10 aa, synthetic construct
STGRGDIHNL

SEQ ID NO: 106773 - protein, 10 aa, synthetic construct
STARGDIHNL

SEQ ID NO: 106774 - protein, 10 aa, synthetic construct
STVRGDIHNL

SEQ ID NO: 106775 - protein, 10 aa, synthetic construct
STPRGDIHNL

SEQ ID NO: 106776 - protein, 10 aa, synthetic construct
STLRGDIHNL

SEQ ID NO: 106777 - protein, 10 aa, synthetic construct
STIRGDIHNL

SEQ ID NO: 106778 - protein, 10 aa, synthetic construct
STMRGDIHNL

SEQ ID NO: 106779 - protein, 10 aa, synthetic construct
STWRGDIHNL

SEQ ID NO: 106780 - protein, 10 aa, synthetic construct
STFRGDIHNL

SEQ ID NO: 106781 - protein, 10 aa, synthetic construct
STKRGDIHNL

SEQ ID NO: 106782 - protein, 10 aa, synthetic construct
STRRGDIHNL

SEQ ID NO: 106783 - protein, 10 aa, synthetic construct
STHRGDIHNL

SEQ ID NO: 106784 - protein, 10 aa, synthetic construct
STSRGDIHNL

SEQ ID NO: 106785 - protein, 10 aa, synthetic construct
STTRGDIHNL

SEQ ID NO: 106786 - protein, 10 aa, synthetic construct
STYRGDIHNL

SEQ ID NO: 106787 - protein, 10 aa, synthetic construct
STNRGDIHNL

SEQ ID NO: 106788 - protein, 10 aa, synthetic construct
STQRGDIHNL

SEQ ID NO: 106789 - protein, 10 aa, synthetic construct
STDRGDIHNL

SEQ ID NO: 106790 - protein, 10 aa, synthetic construct
STERGDIHNL

SEQ ID NO: 106791 - protein, 10 aa, synthetic construct
SYGRGDIHNL

SEQ ID NO: 106792 - protein, 10 aa, synthetic construct
SYARGDIHNL

SEQ ID NO: 106793 - protein, 10 aa, synthetic construct
SYVRGDIHNL

SEQ ID NO: 106794 - protein, 10 aa, synthetic construct
SYPRGDIHNL

SEQ ID NO: 106795 - protein, 10 aa, synthetic construct
SYLRGDIHNL

SEQ ID NO: 106796 - protein, 10 aa, synthetic construct
SYIRGDIHNL

SEQ ID NO: 106797 - protein, 10 aa, synthetic construct
SYMRGDIHNL

SEQ ID NO: 106798 - protein, 10 aa, synthetic construct
SYWRGDIHNL

SEQ ID NO: 106799 - protein, 10 aa, synthetic construct
SYFRGDIHNL

SEQ ID NO: 106800 - protein, 10 aa, synthetic construct
SYKRGDIHNL

SEQ ID NO: 106801 - protein, 10 aa, synthetic construct
SYRRGDIHNL

SEQ ID NO: 106802 - protein, 10 aa, synthetic construct
SYHRGDIHNL

SEQ ID NO: 106803 - protein, 10 aa, synthetic construct
SYSRGDIHNL

SEQ ID NO: 106804 - protein, 10 aa, synthetic construct
SYTRGDIHNL

SEQ ID NO: 106805 - protein, 10 aa, synthetic construct
SYYRGDIHNL

SEQ ID NO: 106806 - protein, 10 aa, synthetic construct
SYNRGDIHNL

SEQ ID NO: 106807 - protein, 10 aa, synthetic construct
SYQRGDIHNL

SEQ ID NO: 106808 - protein, 10 aa, synthetic construct
SYDRGDIHNL

SEQ ID NO: 106809 - protein, 10 aa, synthetic construct
SYERGDIHNL

SEQ ID NO: 106810 - protein, 10 aa, synthetic construct
SNGRGDIHNL

SEQ ID NO: 106811 - protein, 10 aa, synthetic construct
SNARGDIHNL

SEQ ID NO: 106812 - protein, 10 aa, synthetic construct
SNVRGDIHNL

SEQ ID NO: 106813 - protein, 10 aa, synthetic construct
SNPRGDIHNL

SEQ ID NO: 106814 - protein, 10 aa, synthetic construct
SNLRGDIHNL

SEQ ID NO: 106815 - protein, 10 aa, synthetic construct
SNIRGDIHNL

SEQ ID NO: 106816 - protein, 10 aa, synthetic construct
SNMRGDIHNL

SEQ ID NO: 106817 - protein, 10 aa, synthetic construct
SNWRGDIHNL

SEQ ID NO: 106818 - protein, 10 aa, synthetic construct
SNFRGDIHNL

SEQ ID NO: 106819 - protein, 10 aa, synthetic construct
SNKRGDIHNL

SEQ ID NO: 106820 - protein, 10 aa, synthetic construct
SNRRGDIHNL

SEQ ID NO: 106821 - protein, 10 aa, synthetic construct
SNHRGDIHNL

SEQ ID NO: 106822 - protein, 10 aa, synthetic construct
SNSRGDIHNL

SEQ ID NO: 106823 - protein, 10 aa, synthetic construct
SNTRGDIHNL

SEQ ID NO: 106824 - protein, 10 aa, synthetic construct
SNYRGDIHNL

SEQ ID NO: 106825 - protein, 10 aa, synthetic construct
SNNRGDIHNL

SEQ ID NO: 106826 - protein, 10 aa, synthetic construct
SNQRGDIHNL

SEQ ID NO: 106827 - protein, 10 aa, synthetic construct
SNDRGDIHNL

SEQ ID NO: 106828 - protein, 10 aa, synthetic construct
SNERGDIHNL

SEQ ID NO: 106829 - protein, 10 aa, synthetic construct
SQGRGDIHNL

SEQ ID NO: 106830 - protein, 10 aa, synthetic construct
SQARGDIHNL

SEQ ID NO: 106831 - protein, 10 aa, synthetic construct
SQVRGDIHNL

SEQ ID NO: 106832 - protein, 10 aa, synthetic construct
SQPRGDIHNL

SEQ ID NO: 106833 - protein, 10 aa, synthetic construct
SQLRGDIHNL

SEQ ID NO: 106834 - protein, 10 aa, synthetic construct
SQIRGDIHNL

SEQ ID NO: 106835 - protein, 10 aa, synthetic construct
SQMRGDIHNL

SEQ ID NO: 106836 - protein, 10 aa, synthetic construct
SQWRGDIHNL

SEQ ID NO: 106837 - protein, 10 aa, synthetic construct
SQFRGDIHNL

SEQ ID NO: 106838 - protein, 10 aa, synthetic construct
SQKRGDIHNL

SEQ ID NO: 106839 - protein, 10 aa, synthetic construct
SQRRGDIHNL

SEQ ID NO: 106840 - protein, 10 aa, synthetic construct
SQHRGDIHNL

SEQ ID NO: 106841 - protein, 10 aa, synthetic construct
SQSRGDIHNL

SEQ ID NO: 106842 - protein, 10 aa, synthetic construct
SQTRGDIHNL

SEQ ID NO: 106843 - protein, 10 aa, synthetic construct
SQYRGDIHNL

SEQ ID NO: 106844 - protein, 10 aa, synthetic construct
SQNRGDIHNL

SEQ ID NO: 106845 - protein, 10 aa, synthetic construct
SQQRGDIHNL

SEQ ID NO: 106846 - protein, 10 aa, synthetic construct
SQDRGDIHNL

SEQ ID NO: 106847 - protein, 10 aa, synthetic construct
SQERGDIHNL

SEQ ID NO: 106848 - protein, 10 aa, synthetic construct
SDGRGDIHNL

SEQ ID NO: 106849 - protein, 10 aa, synthetic construct
SDARGDIHNL

SEQ ID NO: 106850 - protein, 10 aa, synthetic construct
SDVRGDIHNL

SEQ ID NO: 106851 - protein, 10 aa, synthetic construct
SDPRGDIHNL

SEQ ID NO: 106852 - protein, 10 aa, synthetic construct
SDLRGDIHNL

SEQ ID NO: 106853 - protein, 10 aa, synthetic construct
SDIRGDIHNL

SEQ ID NO: 106854 - protein, 10 aa, synthetic construct
SDMRGDIHNL

SEQ ID NO: 106855 - protein, 10 aa, synthetic construct
SDWRGDIHNL

SEQ ID NO: 106856 - protein, 10 aa, synthetic construct
SDFRGDIHNL

SEQ ID NO: 106857 - protein, 10 aa, synthetic construct
SDKRGDIHNL

SEQ ID NO: 106858 - protein, 10 aa, synthetic construct
SDRRGDIHNL

SEQ ID NO: 106859 - protein, 10 aa, synthetic construct
SDHRGDIHNL

SEQ ID NO: 106860 - protein, 10 aa, synthetic construct
SDSRGDIHNL

SEQ ID NO: 106861 - protein, 10 aa, synthetic construct
SDTRGDIHNL

SEQ ID NO: 106862 - protein, 10 aa, synthetic construct
SDYRGDIHNL

SEQ ID NO: 106863 - protein, 10 aa, synthetic construct
SDNRGDIHNL

SEQ ID NO: 106864 - protein, 10 aa, synthetic construct
SDQRGDIHNL

SEQ ID NO: 106865 - protein, 10 aa, synthetic construct
SDDRGDIHNL

SEQ ID NO: 106866 - protein, 10 aa, synthetic construct
SDERGDIHNL

SEQ ID NO: 106867 - protein, 10 aa, synthetic construct
SEGRGDIHNL

SEQ ID NO: 106868 - protein, 10 aa, synthetic construct
SEARGDIHNL

SEQ ID NO: 106869 - protein, 10 aa, synthetic construct
SEVRGDIHNL

SEQ ID NO: 106870 - protein, 10 aa, synthetic construct
SEPRGDIHNL

SEQ ID NO: 106871 - protein, 10 aa, synthetic construct
SELRGDIHNL

SEQ ID NO: 106872 - protein, 10 aa, synthetic construct
SEIRGDIHNL

SEQ ID NO: 106873 - protein, 10 aa, synthetic construct
SEMRGDIHNL

SEQ ID NO: 106874 - protein, 10 aa, synthetic construct
SEWRGDIHNL

SEQ ID NO: 106875 - protein, 10 aa, synthetic construct
SEFRGDIHNL

SEQ ID NO: 106876 - protein, 10 aa, synthetic construct
SEKRGDIHNL

SEQ ID NO: 106877 - protein, 10 aa, synthetic construct
SERRGDIHNL

SEQ ID NO: 106878 - protein, 10 aa, synthetic construct
SEHRGDIHNL

SEQ ID NO: 106879 - protein, 10 aa, synthetic construct
SESRGDIHNL

SEQ ID NO: 106880 - protein, 10 aa, synthetic construct
SETRGDIHNL

SEQ ID NO: 106881 - protein, 10 aa, synthetic construct
SEYRGDIHNL

SEQ ID NO: 106882 - protein, 10 aa, synthetic construct
SENRGDIHNL

SEQ ID NO: 106883 - protein, 10 aa, synthetic construct
SEQRGDIHNL

SEQ ID NO: 106884 - protein, 10 aa, synthetic construct
SEDRGDIHNL

SEQ ID NO: 106885 - protein, 10 aa, synthetic construct
SEERGDIHNL

SEQ ID NO: 106886 - protein, 10 aa, synthetic construct
TGGRGDIHNL

SEQ ID NO: 106887 - protein, 10 aa, synthetic construct
TGARGDIHNL

SEQ ID NO: 106888 - protein, 10 aa, synthetic construct
TGVRGDIHNL

SEQ ID NO: 106889 - protein, 10 aa, synthetic construct
TGPRGDIHNL

SEQ ID NO: 106890 - protein, 10 aa, synthetic construct
TGLRGDIHNL

SEQ ID NO: 106891 - protein, 10 aa, synthetic construct
TGIRGDIHNL

SEQ ID NO: 106892 - protein, 10 aa, synthetic construct
TGMRGDIHNL

SEQ ID NO: 106893 - protein, 10 aa, synthetic construct
TGWRGDIHNL

SEQ ID NO: 106894 - protein, 10 aa, synthetic construct
TGFRGDIHNL

SEQ ID NO: 106895 - protein, 10 aa, synthetic construct
TGKRGDIHNL

SEQ ID NO: 106896 - protein, 10 aa, synthetic construct
TGRRGDIHNL

SEQ ID NO: 106897 - protein, 10 aa, synthetic construct
TGHRGDIHNL

SEQ ID NO: 106898 - protein, 10 aa, synthetic construct
TGSRGDIHNL

SEQ ID NO: 106899 - protein, 10 aa, synthetic construct
TGTRGDIHNL

SEQ ID NO: 106900 - protein, 10 aa, synthetic construct
TGYRGDIHNL

SEQ ID NO: 106901 - protein, 10 aa, synthetic construct
TGNRGDIHNL

SEQ ID NO: 106902 - protein, 10 aa, synthetic construct
TGQRGDIHNL

SEQ ID NO: 106903 - protein, 10 aa, synthetic construct
TGDRGDIHNL

SEQ ID NO: 106904 - protein, 10 aa, synthetic construct
TGERGDIHNL

SEQ ID NO: 106905 - protein, 10 aa, synthetic construct
TAGRGDIHNL

SEQ ID NO: 106906 - protein, 10 aa, synthetic construct
TAARGDIHNL

SEQ ID NO: 106907 - protein, 10 aa, synthetic construct
TAVRGDIHNL

SEQ ID NO: 106908 - protein, 10 aa, synthetic construct
TAPRGDIHNL

SEQ ID NO: 106909 - protein, 10 aa, synthetic construct
TALRGDIHNL

SEQ ID NO: 106910 - protein, 10 aa, synthetic construct
TAIRGDIHNL

SEQ ID NO: 106911 - protein, 10 aa, synthetic construct
TAMRGDIHNL

SEQ ID NO: 106912 - protein, 10 aa, synthetic construct
TAWRGDIHNL

SEQ ID NO: 106913 - protein, 10 aa, synthetic construct
TAFRGDIHNL

SEQ ID NO: 106914 - protein, 10 aa, synthetic construct
TAKRGDIHNL

SEQ ID NO: 106915 - protein, 10 aa, synthetic construct
TARRGDIHNL

SEQ ID NO: 106916 - protein, 10 aa, synthetic construct
TAHRGDIHNL

SEQ ID NO: 106917 - protein, 10 aa, synthetic construct
TASRGDIHNL

SEQ ID NO: 106918 - protein, 10 aa, synthetic construct
TATRGDIHNL

SEQ ID NO: 106919 - protein, 10 aa, synthetic construct
TAYRGDIHNL

SEQ ID NO: 106920 - protein, 10 aa, synthetic construct
TANRGDIHNL

SEQ ID NO: 106921 - protein, 10 aa, synthetic construct
TAQRGDIHNL

SEQ ID NO: 106922 - protein, 10 aa, synthetic construct
TADRGDIHNL

SEQ ID NO: 106923 - protein, 10 aa, synthetic construct
TAERGDIHNL

SEQ ID NO: 106924 - protein, 10 aa, synthetic construct
TVGRGDIHNL

SEQ ID NO: 106925 - protein, 10 aa, synthetic construct
TVARGDIHNL

SEQ ID NO: 106926 - protein, 10 aa, synthetic construct
TVVRGDIHNL

SEQ ID NO: 106927 - protein, 10 aa, synthetic construct
TVPRGDIHNL

SEQ ID NO: 106928 - protein, 10 aa, synthetic construct
TVLRGDIHNL

SEQ ID NO: 106929 - protein, 10 aa, synthetic construct
TVIRGDIHNL

SEQ ID NO: 106930 - protein, 10 aa, synthetic construct
TVMRGDIHNL

SEQ ID NO: 106931 - protein, 10 aa, synthetic construct
TVWRGDIHNL

SEQ ID NO: 106932 - protein, 10 aa, synthetic construct
TVFRGDIHNL

SEQ ID NO: 106933 - protein, 10 aa, synthetic construct
TVKRGDIHNL

SEQ ID NO: 106934 - protein, 10 aa, synthetic construct
TVRRGDIHNL

SEQ ID NO: 106935 - protein, 10 aa, synthetic construct
TVHRGDIHNL

SEQ ID NO: 106936 - protein, 10 aa, synthetic construct
TVSRGDIHNL

SEQ ID NO: 106937 - protein, 10 aa, synthetic construct
TVTRGDIHNL

SEQ ID NO: 106938 - protein, 10 aa, synthetic construct
TVYRGDIHNL

SEQ ID NO: 106939 - protein, 10 aa, synthetic construct
TVNRGDIHNL

SEQ ID NO: 106940 - protein, 10 aa, synthetic construct
TVQRGDIHNL

SEQ ID NO: 106941 - protein, 10 aa, synthetic construct
TVDRGDIHNL

SEQ ID NO: 106942 - protein, 10 aa, synthetic construct
TVERGDIHNL

SEQ ID NO: 106943 - protein, 10 aa, synthetic construct
TPGRGDIHNL

SEQ ID NO: 106944 - protein, 10 aa, synthetic construct
TPARGDIHNL

SEQ ID NO: 106945 - protein, 10 aa, synthetic construct
TPVRGDIHNL

SEQ ID NO: 106946 - protein, 10 aa, synthetic construct
TPPRGDIHNL

SEQ ID NO: 106947 - protein, 10 aa, synthetic construct
TPLRGDIHNL

SEQ ID NO: 106948 - protein, 10 aa, synthetic construct
TPIRGDIHNL

SEQ ID NO: 106949 - protein, 10 aa, synthetic construct
TPMRGDIHNL

SEQ ID NO: 106950 - protein, 10 aa, synthetic construct
TPWRGDIHNL

SEQ ID NO: 106951 - protein, 10 aa, synthetic construct
TPFRGDIHNL

SEQ ID NO: 106952 - protein, 10 aa, synthetic construct
TPKRGDIHNL

SEQ ID NO: 106953 - protein, 10 aa, synthetic construct
TPRRGDIHNL

SEQ ID NO: 106954 - protein, 10 aa, synthetic construct
TPHRGDIHNL

SEQ ID NO: 106955 - protein, 10 aa, synthetic construct
TPSRGDIHNL

SEQ ID NO: 106956 - protein, 10 aa, synthetic construct
TPTRGDIHNL

SEQ ID NO: 106957 - protein, 10 aa, synthetic construct
TPYRGDIHNL

SEQ ID NO: 106958 - protein, 10 aa, synthetic construct
TPNRGDIHNL

SEQ ID NO: 106959 - protein, 10 aa, synthetic construct
TPQRGDIHNL

SEQ ID NO: 106960 - protein, 10 aa, synthetic construct
TPDRGDIHNL

SEQ ID NO: 106961 - protein, 10 aa, synthetic construct
TPERGDIHNL

SEQ ID NO: 106962 - protein, 10 aa, synthetic construct
TLGRGDIHNL

SEQ ID NO: 106963 - protein, 10 aa, synthetic construct
TLARGDIHNL

SEQ ID NO: 106964 - protein, 10 aa, synthetic construct
TLVRGDIHNL

SEQ ID NO: 106965 - protein, 10 aa, synthetic construct
TLPRGDIHNL

SEQ ID NO: 106966 - protein, 10 aa, synthetic construct
TLLRGDIHNL

SEQ ID NO: 106967 - protein, 10 aa, synthetic construct
TLIRGDIHNL

SEQ ID NO: 106968 - protein, 10 aa, synthetic construct
TLMRGDIHNL

SEQ ID NO: 106969 - protein, 10 aa, synthetic construct
TLWRGDIHNL

SEQ ID NO: 106970 - protein, 10 aa, synthetic construct
TLFRGDIHNL

SEQ ID NO: 106971 - protein, 10 aa, synthetic construct
TLKRGDIHNL

SEQ ID NO: 106972 - protein, 10 aa, synthetic construct
TLRRGDIHNL

SEQ ID NO: 106973 - protein, 10 aa, synthetic construct
TLHRGDIHNL

SEQ ID NO: 106974 - protein, 10 aa, synthetic construct
TLSRGDIHNL

SEQ ID NO: 106975 - protein, 10 aa, synthetic construct
TLTRGDIHNL

SEQ ID NO: 106976 - protein, 10 aa, synthetic construct
TLYRGDIHNL

SEQ ID NO: 106977 - protein, 10 aa, synthetic construct
TLNRGDIHNL

SEQ ID NO: 106978 - protein, 10 aa, synthetic construct
TLQRGDIHNL

SEQ ID NO: 106979 - protein, 10 aa, synthetic construct
TLDRGDIHNL

SEQ ID NO: 106980 - protein, 10 aa, synthetic construct
TLERGDIHNL

SEQ ID NO: 106981 - protein, 10 aa, synthetic construct
TIGRGDIHNL

SEQ ID NO: 106982 - protein, 10 aa, synthetic construct
TIARGDIHNL

SEQ ID NO: 106983 - protein, 10 aa, synthetic construct
TIVRGDIHNL

SEQ ID NO: 106984 - protein, 10 aa, synthetic construct
TIPRGDIHNL

SEQ ID NO: 106985 - protein, 10 aa, synthetic construct
TILRGDIHNL

SEQ ID NO: 106986 - protein, 10 aa, synthetic construct
TIIRGDIHNL

SEQ ID NO: 106987 - protein, 10 aa, synthetic construct
TIMRGDIHNL

SEQ ID NO: 106988 - protein, 10 aa, synthetic construct
TIWRGDIHNL

SEQ ID NO: 106989 - protein, 10 aa, synthetic construct
TIFRGDIHNL

SEQ ID NO: 106990 - protein, 10 aa, synthetic construct
TIKRGDIHNL

SEQ ID NO: 106991 - protein, 10 aa, synthetic construct
TIRRGDIHNL

SEQ ID NO: 106992 - protein, 10 aa, synthetic construct
TIHRGDIHNL

SEQ ID NO: 106993 - protein, 10 aa, synthetic construct
TISRGDIHNL

SEQ ID NO: 106994 - protein, 10 aa, synthetic construct
TITRGDIHNL

SEQ ID NO: 106995 - protein, 10 aa, synthetic construct
TIYRGDIHNL

SEQ ID NO: 106996 - protein, 10 aa, synthetic construct
TINRGDIHNL

SEQ ID NO: 106997 - protein, 10 aa, synthetic construct
TIQRGDIHNL

SEQ ID NO: 106998 - protein, 10 aa, synthetic construct
TIDRGDIHNL

SEQ ID NO: 106999 - protein, 10 aa, synthetic construct
TIERGDIHNL

SEQ ID NO: 107000 - protein, 10 aa, synthetic construct
TMGRGDIHNL

SEQ ID NO: 107001 - protein, 10 aa, synthetic construct
TMARGDIHNL

SEQ ID NO: 107002 - protein, 10 aa, synthetic construct
TMVRGDIHNL

SEQ ID NO: 107003 - protein, 10 aa, synthetic construct
TMPRGDIHNL

SEQ ID NO: 107004 - protein, 10 aa, synthetic construct
TMLRGDIHNL

SEQ ID NO: 107005 - protein, 10 aa, synthetic construct
TMIRGDIHNL

SEQ ID NO: 107006 - protein, 10 aa, synthetic construct
TMMRGDIHNL

SEQ ID NO: 107007 - protein, 10 aa, synthetic construct
TMWRGDIHNL

SEQ ID NO: 107008 - protein, 10 aa, synthetic construct
TMFRGDIHNL

SEQ ID NO: 107009 - protein, 10 aa, synthetic construct
TMKRGDIHNL

SEQ ID NO: 107010 - protein, 10 aa, synthetic construct
TMRRGDIHNL

SEQ ID NO: 107011 - protein, 10 aa, synthetic construct
TMHRGDIHNL

SEQ ID NO: 107012 - protein, 10 aa, synthetic construct
TMSRGDIHNL

SEQ ID NO: 107013 - protein, 10 aa, synthetic construct
TMTRGDIHNL

SEQ ID NO: 107014 - protein, 10 aa, synthetic construct
TMYRGDIHNL

SEQ ID NO: 107015 - protein, 10 aa, synthetic construct
TMNRGDIHNL

SEQ ID NO: 107016 - protein, 10 aa, synthetic construct
TMQRGDIHNL

SEQ ID NO: 107017 - protein, 10 aa, synthetic construct
TMDRGDIHNL

SEQ ID NO: 107018 - protein, 10 aa, synthetic construct
TMERGDIHNL

SEQ ID NO: 107019 - protein, 10 aa, synthetic construct
TWGRGDIHNL

SEQ ID NO: 107020 - protein, 10 aa, synthetic construct
TWARGDIHNL

SEQ ID NO: 107021 - protein, 10 aa, synthetic construct
TWVRGDIHNL

SEQ ID NO: 107022 - protein, 10 aa, synthetic construct
TWPRGDIHNL

SEQ ID NO: 107023 - protein, 10 aa, synthetic construct
TWLRGDIHNL

SEQ ID NO: 107024 - protein, 10 aa, synthetic construct
TWIRGDIHNL

SEQ ID NO: 107025 - protein, 10 aa, synthetic construct
TWMRGDIHNL

SEQ ID NO: 107026 - protein, 10 aa, synthetic construct
TWWRGDIHNL

SEQ ID NO: 107027 - protein, 10 aa, synthetic construct
TWFRGDIHNL

SEQ ID NO: 107028 - protein, 10 aa, synthetic construct
TWKRGDIHNL

SEQ ID NO: 107029 - protein, 10 aa, synthetic construct
TWRRGDIHNL

SEQ ID NO: 107030 - protein, 10 aa, synthetic construct
TWHRGDIHNL

SEQ ID NO: 107031 - protein, 10 aa, synthetic construct
TWSRGDIHNL

SEQ ID NO: 107032 - protein, 10 aa, synthetic construct
TWTRGDIHNL

SEQ ID NO: 107033 - protein, 10 aa, synthetic construct
TWYRGDIHNL

SEQ ID NO: 107034 - protein, 10 aa, synthetic construct
TWNRGDIHNL

SEQ ID NO: 107035 - protein, 10 aa, synthetic construct
TWQRGDIHNL

SEQ ID NO: 107036 - protein, 10 aa, synthetic construct
TWDRGDIHNL

SEQ ID NO: 107037 - protein, 10 aa, synthetic construct
TWERGDIHNL

SEQ ID NO: 107038 - protein, 10 aa, synthetic construct
TFGRGDIHNL

SEQ ID NO: 107039 - protein, 10 aa, synthetic construct
TFARGDIHNL

SEQ ID NO: 107040 - protein, 10 aa, synthetic construct
TFVRGDIHNL

SEQ ID NO: 107041 - protein, 10 aa, synthetic construct
TFPRGDIHNL

SEQ ID NO: 107042 - protein, 10 aa, synthetic construct
TFLRGDIHNL

SEQ ID NO: 107043 - protein, 10 aa, synthetic construct
TFIRGDIHNL

SEQ ID NO: 107044 - protein, 10 aa, synthetic construct
TFMRGDIHNL

SEQ ID NO: 107045 - protein, 10 aa, synthetic construct
TFWRGDIHNL

SEQ ID NO: 107046 - protein, 10 aa, synthetic construct
TFFRGDIHNL

SEQ ID NO: 107047 - protein, 10 aa, synthetic construct
TFKRGDIHNL

SEQ ID NO: 107048 - protein, 10 aa, synthetic construct
TFRRGDIHNL

SEQ ID NO: 107049 - protein, 10 aa, synthetic construct
TFHRGDIHNL

SEQ ID NO: 107050 - protein, 10 aa, synthetic construct
TFSRGDIHNL

SEQ ID NO: 107051 - protein, 10 aa, synthetic construct
TFTRGDIHNL

SEQ ID NO: 107052 - protein, 10 aa, synthetic construct
TFYRGDIHNL

SEQ ID NO: 107053 - protein, 10 aa, synthetic construct
TFNRGDIHNL

SEQ ID NO: 107054 - protein, 10 aa, synthetic construct
TFQRGDIHNL

SEQ ID NO: 107055 - protein, 10 aa, synthetic construct
TFDRGDIHNL

SEQ ID NO: 107056 - protein, 10 aa, synthetic construct
TFERGDIHNL

SEQ ID NO: 107057 - protein, 10 aa, synthetic construct
TKGRGDIHNL

SEQ ID NO: 107058 - protein, 10 aa, synthetic construct
TKARGDIHNL

SEQ ID NO: 107059 - protein, 10 aa, synthetic construct
TKVRGDIHNL

SEQ ID NO: 107060 - protein, 10 aa, synthetic construct
TKPRGDIHNL

SEQ ID NO: 107061 - protein, 10 aa, synthetic construct
TKLRGDIHNL

SEQ ID NO: 107062 - protein, 10 aa, synthetic construct
TKIRGDIHNL

SEQ ID NO: 107063 - protein, 10 aa, synthetic construct
TKMRGDIHNL

SEQ ID NO: 107064 - protein, 10 aa, synthetic construct
TKWRGDIHNL

SEQ ID NO: 107065 - protein, 10 aa, synthetic construct
TKFRGDIHNL

SEQ ID NO: 107066 - protein, 10 aa, synthetic construct
TKKRGDIHNL

SEQ ID NO: 107067 - protein, 10 aa, synthetic construct
TKRRGDIHNL

SEQ ID NO: 107068 - protein, 10 aa, synthetic construct
TKHRGDIHNL

SEQ ID NO: 107069 - protein, 10 aa, synthetic construct
TKSRGDIHNL

SEQ ID NO: 107070 - protein, 10 aa, synthetic construct
TKTRGDIHNL

SEQ ID NO: 107071 - protein, 10 aa, synthetic construct
TKYRGDIHNL

SEQ ID NO: 107072 - protein, 10 aa, synthetic construct
TKNRGDIHNL

SEQ ID NO: 107073 - protein, 10 aa, synthetic construct
TKQRGDIHNL

SEQ ID NO: 107074 - protein, 10 aa, synthetic construct
TKDRGDIHNL

SEQ ID NO: 107075 - protein, 10 aa, synthetic construct
TKERGDIHNL

SEQ ID NO: 107076 - protein, 10 aa, synthetic construct
TRGRGDIHNL

SEQ ID NO: 107077 - protein, 10 aa, synthetic construct
TRARGDIHNL

SEQ ID NO: 107078 - protein, 10 aa, synthetic construct
TRVRGDIHNL

SEQ ID NO: 107079 - protein, 10 aa, synthetic construct
TRPRGDIHNL

SEQ ID NO: 107080 - protein, 10 aa, synthetic construct
TRLRGDIHNL

SEQ ID NO: 107081 - protein, 10 aa, synthetic construct
TRIRGDIHNL

SEQ ID NO: 107082 - protein, 10 aa, synthetic construct
TRMRGDIHNL

SEQ ID NO: 107083 - protein, 10 aa, synthetic construct
TRWRGDIHNL

SEQ ID NO: 107084 - protein, 10 aa, synthetic construct
TRFRGDIHNL

SEQ ID NO: 107085 - protein, 10 aa, synthetic construct
TRKRGDIHNL

SEQ ID NO: 107086 - protein, 10 aa, synthetic construct
TRRRGDIHNL

SEQ ID NO: 107087 - protein, 10 aa, synthetic construct
TRHRGDIHNL

SEQ ID NO: 107088 - protein, 10 aa, synthetic construct
TRSRGDIHNL

SEQ ID NO: 107089 - protein, 10 aa, synthetic construct
TRTRGDIHNL

SEQ ID NO: 107090 - protein, 10 aa, synthetic construct
TRYRGDIHNL

SEQ ID NO: 107091 - protein, 10 aa, synthetic construct
TRNRGDIHNL

SEQ ID NO: 107092 - protein, 10 aa, synthetic construct
TRQRGDIHNL

SEQ ID NO: 107093 - protein, 10 aa, synthetic construct
TRDRGDIHNL

SEQ ID NO: 107094 - protein, 10 aa, synthetic construct
TRERGDIHNL

SEQ ID NO: 107095 - protein, 10 aa, synthetic construct
THGRGDIHNL

SEQ ID NO: 107096 - protein, 10 aa, synthetic construct
THARGDIHNL

SEQ ID NO: 107097 - protein, 10 aa, synthetic construct
THVRGDIHNL

SEQ ID NO: 107098 - protein, 10 aa, synthetic construct
THPRGDIHNL

SEQ ID NO: 107099 - protein, 10 aa, synthetic construct
THLRGDIHNL

SEQ ID NO: 107100 - protein, 10 aa, synthetic construct
THIRGDIHNL

SEQ ID NO: 107101 - protein, 10 aa, synthetic construct
THMRGDIHNL

SEQ ID NO: 107102 - protein, 10 aa, synthetic construct
THWRGDIHNL

SEQ ID NO: 107103 - protein, 10 aa, synthetic construct
THFRGDIHNL

SEQ ID NO: 107104 - protein, 10 aa, synthetic construct
THKRGDIHNL

SEQ ID NO: 107105 - protein, 10 aa, synthetic construct
THRRGDIHNL

SEQ ID NO: 107106 - protein, 10 aa, synthetic construct
THHRGDIHNL

SEQ ID NO: 107107 - protein, 10 aa, synthetic construct
THSRGDIHNL

SEQ ID NO: 107108 - protein, 10 aa, synthetic construct
THTRGDIHNL

SEQ ID NO: 107109 - protein, 10 aa, synthetic construct
THYRGDIHNL

SEQ ID NO: 107110 - protein, 10 aa, synthetic construct
THNRGDIHNL

SEQ ID NO: 107111 - protein, 10 aa, synthetic construct
THQRGDIHNL

SEQ ID NO: 107112 - protein, 10 aa, synthetic construct
THDRGDIHNL

SEQ ID NO: 107113 - protein, 10 aa, synthetic construct
THERGDIHNL

SEQ ID NO: 107114 - protein, 10 aa, synthetic construct
TSGRGDIHNL

SEQ ID NO: 107115 - protein, 10 aa, synthetic construct
TSARGDIHNL

SEQ ID NO: 107116 - protein, 10 aa, synthetic construct
TSVRGDIHNL

SEQ ID NO: 107117 - protein, 10 aa, synthetic construct
TSPRGDIHNL

SEQ ID NO: 107118 - protein, 10 aa, synthetic construct
TSLRGDIHNL

SEQ ID NO: 107119 - protein, 10 aa, synthetic construct
TSIRGDIHNL

SEQ ID NO: 107120 - protein, 10 aa, synthetic construct
TSMRGDIHNL

SEQ ID NO: 107121 - protein, 10 aa, synthetic construct
TSWRGDIHNL

SEQ ID NO: 107122 - protein, 10 aa, synthetic construct
TSFRGDIHNL

SEQ ID NO: 107123 - protein, 10 aa, synthetic construct
TSKRGDIHNL

SEQ ID NO: 107124 - protein, 10 aa, synthetic construct
TSRRGDIHNL

SEQ ID NO: 107125 - protein, 10 aa, synthetic construct
TSHRGDIHNL

SEQ ID NO: 107126 - protein, 10 aa, synthetic construct
TSSRGDIHNL

SEQ ID NO: 107127 - protein, 10 aa, synthetic construct
TSTRGDIHNL

SEQ ID NO: 107128 - protein, 10 aa, synthetic construct
TSYRGDIHNL

SEQ ID NO: 107129 - protein, 10 aa, synthetic construct
TSNRGDIHNL

SEQ ID NO: 107130 - protein, 10 aa, synthetic construct
TSQRGDIHNL

SEQ ID NO: 107131 - protein, 10 aa, synthetic construct
TSDRGDIHNL

SEQ ID NO: 107132 - protein, 10 aa, synthetic construct
TSERGDIHNL

SEQ ID NO: 107133 - protein, 10 aa, synthetic construct
TTGRGDIHNL

SEQ ID NO: 107134 - protein, 10 aa, synthetic construct
TTARGDIHNL

SEQ ID NO: 107135 - protein, 10 aa, synthetic construct
TTVRGDIHNL

SEQ ID NO: 107136 - protein, 10 aa, synthetic construct
TTPRGDIHNL

SEQ ID NO: 107137 - protein, 10 aa, synthetic construct
TTLRGDIHNL

SEQ ID NO: 107138 - protein, 10 aa, synthetic construct
TTIRGDIHNL

SEQ ID NO: 107139 - protein, 10 aa, synthetic construct
TTMRGDIHNL

SEQ ID NO: 107140 - protein, 10 aa, synthetic construct
TTWRGDIHNL

SEQ ID NO: 107141 - protein, 10 aa, synthetic construct
TTFRGDIHNL

SEQ ID NO: 107142 - protein, 10 aa, synthetic construct
TTKRGDIHNL

SEQ ID NO: 107143 - protein, 10 aa, synthetic construct
TTRRGDIHNL

SEQ ID NO: 107144 - protein, 10 aa, synthetic construct
TTHRGDIHNL

SEQ ID NO: 107145 - protein, 10 aa, synthetic construct
TTSRGDIHNL

SEQ ID NO: 107146 - protein, 10 aa, synthetic construct
TTTRGDIHNL

SEQ ID NO: 107147 - protein, 10 aa, synthetic construct
TTYRGDIHNL

SEQ ID NO: 107148 - protein, 10 aa, synthetic construct
TTNRGDIHNL

SEQ ID NO: 107149 - protein, 10 aa, synthetic construct
TTQRGDIHNL

SEQ ID NO: 107150 - protein, 10 aa, synthetic construct
TTDRGDIHNL

SEQ ID NO: 107151 - protein, 10 aa, synthetic construct
TTERGDIHNL

SEQ ID NO: 107152 - protein, 10 aa, synthetic construct
TYGRGDIHNL

SEQ ID NO: 107153 - protein, 10 aa, synthetic construct
TYARGDIHNL

SEQ ID NO: 107154 - protein, 10 aa, synthetic construct
TYVRGDIHNL

SEQ ID NO: 107155 - protein, 10 aa, synthetic construct
TYPRGDIHNL

SEQ ID NO: 107156 - protein, 10 aa, synthetic construct
TYLRGDIHNL

SEQ ID NO: 107157 - protein, 10 aa, synthetic construct
TYIRGDIHNL

SEQ ID NO: 107158 - protein, 10 aa, synthetic construct
TYMRGDIHNL

SEQ ID NO: 107159 - protein, 10 aa, synthetic construct
TYWRGDIHNL

SEQ ID NO: 107160 - protein, 10 aa, synthetic construct
TYFRGDIHNL

SEQ ID NO: 107161 - protein, 10 aa, synthetic construct
TYKRGDIHNL

SEQ ID NO: 107162 - protein, 10 aa, synthetic construct
TYRRGDIHNL

SEQ ID NO: 107163 - protein, 10 aa, synthetic construct
TYHRGDIHNL

SEQ ID NO: 107164 - protein, 10 aa, synthetic construct
TYSRGDIHNL

SEQ ID NO: 107165 - protein, 10 aa, synthetic construct
TYTRGDIHNL

SEQ ID NO: 107166 - protein, 10 aa, synthetic construct
TYYRGDIHNL

SEQ ID NO: 107167 - protein, 10 aa, synthetic construct
TYNRGDIHNL

SEQ ID NO: 107168 - protein, 10 aa, synthetic construct
TYQRGDIHNL

SEQ ID NO: 107169 - protein, 10 aa, synthetic construct
TYDRGDIHNL

SEQ ID NO: 107170 - protein, 10 aa, synthetic construct
TYERGDIHNL

SEQ ID NO: 107171 - protein, 10 aa, synthetic construct
TNGRGDIHNL

SEQ ID NO: 107172 - protein, 10 aa, synthetic construct
TNARGDIHNL

SEQ ID NO: 107173 - protein, 10 aa, synthetic construct
TNVRGDIHNL

SEQ ID NO: 107174 - protein, 10 aa, synthetic construct
TNPRGDIHNL

SEQ ID NO: 107175 - protein, 10 aa, synthetic construct
TNLRGDIHNL

SEQ ID NO: 107176 - protein, 10 aa, synthetic construct
TNIRGDIHNL

SEQ ID NO: 107177 - protein, 10 aa, synthetic construct
TNMRGDIHNL

SEQ ID NO: 107178 - protein, 10 aa, synthetic construct
TNWRGDIHNL

SEQ ID NO: 107179 - protein, 10 aa, synthetic construct
TNFRGDIHNL

SEQ ID NO: 107180 - protein, 10 aa, synthetic construct
TNKRGDIHNL

SEQ ID NO: 107181 - protein, 10 aa, synthetic construct
TNRRGDIHNL

SEQ ID NO: 107182 - protein, 10 aa, synthetic construct
TNHRGDIHNL

SEQ ID NO: 107183 - protein, 10 aa, synthetic construct
TNSRGDIHNL

SEQ ID NO: 107184 - protein, 10 aa, synthetic construct
TNTRGDIHNL

SEQ ID NO: 107185 - protein, 10 aa, synthetic construct
TNYRGDIHNL

SEQ ID NO: 107186 - protein, 10 aa, synthetic construct
TNNRGDIHNL

SEQ ID NO: 107187 - protein, 10 aa, synthetic construct
TNQRGDIHNL

SEQ ID NO: 107188 - protein, 10 aa, synthetic construct
TNDRGDIHNL

SEQ ID NO: 107189 - protein, 10 aa, synthetic construct
TNERGDIHNL

SEQ ID NO: 107190 - protein, 10 aa, synthetic construct
TQGRGDIHNL

SEQ ID NO: 107191 - protein, 10 aa, synthetic construct
TQARGDIHNL

SEQ ID NO: 107192 - protein, 10 aa, synthetic construct
TQVRGDIHNL

SEQ ID NO: 107193 - protein, 10 aa, synthetic construct
TQPRGDIHNL

SEQ ID NO: 107194 - protein, 10 aa, synthetic construct
TQLRGDIHNL

SEQ ID NO: 107195 - protein, 10 aa, synthetic construct
TQIRGDIHNL

SEQ ID NO: 107196 - protein, 10 aa, synthetic construct
TQMRGDIHNL

SEQ ID NO: 107197 - protein, 10 aa, synthetic construct
TQWRGDIHNL

SEQ ID NO: 107198 - protein, 10 aa, synthetic construct
TQFRGDIHNL

SEQ ID NO: 107199 - protein, 10 aa, synthetic construct
TQKRGDIHNL

SEQ ID NO: 107200 - protein, 10 aa, synthetic construct
TQRRGDIHNL

SEQ ID NO: 107201 - protein, 10 aa, synthetic construct
TQHRGDIHNL

SEQ ID NO: 107202 - protein, 10 aa, synthetic construct
TQSRGDIHNL

SEQ ID NO: 107203 - protein, 10 aa, synthetic construct
TQTRGDIHNL

SEQ ID NO: 107204 - protein, 10 aa, synthetic construct
TQYRGDIHNL

SEQ ID NO: 107205 - protein, 10 aa, synthetic construct
TQNRGDIHNL

SEQ ID NO: 107206 - protein, 10 aa, synthetic construct
TQQRGDIHNL

SEQ ID NO: 107207 - protein, 10 aa, synthetic construct
TQDRGDIHNL

SEQ ID NO: 107208 - protein, 10 aa, synthetic construct
TQERGDIHNL

SEQ ID NO: 107209 - protein, 10 aa, synthetic construct
TDGRGDIHNL

SEQ ID NO: 107210 - protein, 10 aa, synthetic construct
TDARGDIHNL

SEQ ID NO: 107211 - protein, 10 aa, synthetic construct
TDVRGDIHNL

SEQ ID NO: 107212 - protein, 10 aa, synthetic construct
TDPRGDIHNL

SEQ ID NO: 107213 - protein, 10 aa, synthetic construct
TDLRGDIHNL

SEQ ID NO: 107214 - protein, 10 aa, synthetic construct
TDIRGDIHNL

SEQ ID NO: 107215 - protein, 10 aa, synthetic construct
TDMRGDIHNL

SEQ ID NO: 107216 - protein, 10 aa, synthetic construct
TDWRGDIHNL

SEQ ID NO: 107217 - protein, 10 aa, synthetic construct
TDFRGDIHNL

SEQ ID NO: 107218 - protein, 10 aa, synthetic construct
TDKRGDIHNL

SEQ ID NO: 107219 - protein, 10 aa, synthetic construct
TDRRGDIHNL

SEQ ID NO: 107220 - protein, 10 aa, synthetic construct
TDHRGDIHNL

SEQ ID NO: 107221 - protein, 10 aa, synthetic construct
TDSRGDIHNL

SEQ ID NO: 107222 - protein, 10 aa, synthetic construct
TDTRGDIHNL

SEQ ID NO: 107223 - protein, 10 aa, synthetic construct
TDYRGDIHNL

SEQ ID NO: 107224 - protein, 10 aa, synthetic construct
TDNRGDIHNL

SEQ ID NO: 107225 - protein, 10 aa, synthetic construct
TDQRGDIHNL

SEQ ID NO: 107226 - protein, 10 aa, synthetic construct
TDDRGDIHNL

SEQ ID NO: 107227 - protein, 10 aa, synthetic construct
TDERGDIHNL

SEQ ID NO: 107228 - protein, 10 aa, synthetic construct
TEGRGDIHNL

SEQ ID NO: 107229 - protein, 10 aa, synthetic construct
TEARGDIHNL

SEQ ID NO: 107230 - protein, 10 aa, synthetic construct
TEVRGDIHNL

SEQ ID NO: 107231 - protein, 10 aa, synthetic construct
TEPRGDIHNL

SEQ ID NO: 107232 - protein, 10 aa, synthetic construct
TELRGDIHNL

SEQ ID NO: 107233 - protein, 10 aa, synthetic construct
TEIRGDIHNL

SEQ ID NO: 107234 - protein, 10 aa, synthetic construct
TEMRGDIHNL

SEQ ID NO: 107235 - protein, 10 aa, synthetic construct
TEWRGDIHNL

SEQ ID NO: 107236 - protein, 10 aa, synthetic construct
TEFRGDIHNL

SEQ ID NO: 107237 - protein, 10 aa, synthetic construct
TEKRGDIHNL

SEQ ID NO: 107238 - protein, 10 aa, synthetic construct
TERRGDIHNL

SEQ ID NO: 107239 - protein, 10 aa, synthetic construct
TEHRGDIHNL

SEQ ID NO: 107240 - protein, 10 aa, synthetic construct
TESRGDIHNL

SEQ ID NO: 107241 - protein, 10 aa, synthetic construct
TETRGDIHNL

SEQ ID NO: 107242 - protein, 10 aa, synthetic construct
TEYRGDIHNL

SEQ ID NO: 107243 - protein, 10 aa, synthetic construct
TENRGDIHNL

SEQ ID NO: 107244 - protein, 10 aa, synthetic construct
TEQRGDIHNL

SEQ ID NO: 107245 - protein, 10 aa, synthetic construct
TEDRGDIHNL

SEQ ID NO: 107246 - protein, 10 aa, synthetic construct
TEERGDIHNL

SEQ ID NO: 107247 - protein, 10 aa, synthetic construct
AGGRGDIHNL

SEQ ID NO: 107248 - protein, 10 aa, synthetic construct
AGARGDIHNL

SEQ ID NO: 107249 - protein, 10 aa, synthetic construct
AGVRGDIHNL

SEQ ID NO: 107250 - protein, 10 aa, synthetic construct
AGPRGDIHNL

SEQ ID NO: 107251 - protein, 10 aa, synthetic construct
AGLRGDIHNL

SEQ ID NO: 107252 - protein, 10 aa, synthetic construct
AGIRGDIHNL

SEQ ID NO: 107253 - protein, 10 aa, synthetic construct
AGMRGDIHNL

SEQ ID NO: 107254 - protein, 10 aa, synthetic construct
AGWRGDIHNL

SEQ ID NO: 107255 - protein, 10 aa, synthetic construct
AGFRGDIHNL

SEQ ID NO: 107256 - protein, 10 aa, synthetic construct
AGKRGDIHNL

SEQ ID NO: 107257 - protein, 10 aa, synthetic construct
AGRRGDIHNL

SEQ ID NO: 107258 - protein, 10 aa, synthetic construct
AGHRGDIHNL

SEQ ID NO: 107259 - protein, 10 aa, synthetic construct
AGSRGDIHNL

SEQ ID NO: 107260 - protein, 10 aa, synthetic construct
AGTRGDIHNL

SEQ ID NO: 107261 - protein, 10 aa, synthetic construct
AGYRGDIHNL

SEQ ID NO: 107262 - protein, 10 aa, synthetic construct
AGNRGDIHNL

SEQ ID NO: 107263 - protein, 10 aa, synthetic construct
AGQRGDIHNL

SEQ ID NO: 107264 - protein, 10 aa, synthetic construct
AGDRGDIHNL

SEQ ID NO: 107265 - protein, 10 aa, synthetic construct
AGERGDIHNL

SEQ ID NO: 107266 - protein, 10 aa, synthetic construct
AAGRGDIHNL

SEQ ID NO: 107267 - protein, 10 aa, synthetic construct
AAARGDIHNL

SEQ ID NO: 107268 - protein, 10 aa, synthetic construct
AAVRGDIHNL

SEQ ID NO: 107269 - protein, 10 aa, synthetic construct
AAPRGDIHNL

SEQ ID NO: 107270 - protein, 10 aa, synthetic construct
AALRGDIHNL

SEQ ID NO: 107271 - protein, 10 aa, synthetic construct
AAIRGDIHNL

SEQ ID NO: 107272 - protein, 10 aa, synthetic construct
AAMRGDIHNL

SEQ ID NO: 107273 - protein, 10 aa, synthetic construct
AAWRGDIHNL

SEQ ID NO: 107274 - protein, 10 aa, synthetic construct
AAFRGDIHNL

SEQ ID NO: 107275 - protein, 10 aa, synthetic construct
AAKRGDIHNL

SEQ ID NO: 107276 - protein, 10 aa, synthetic construct
AARRGDIHNL

SEQ ID NO: 107277 - protein, 10 aa, synthetic construct
AAHRGDIHNL

SEQ ID NO: 107278 - protein, 10 aa, synthetic construct
AASRGDIHNL

SEQ ID NO: 107279 - protein, 10 aa, synthetic construct
AATRGDIHNL

SEQ ID NO: 107280 - protein, 10 aa, synthetic construct
AAYRGDIHNL

SEQ ID NO: 107281 - protein, 10 aa, synthetic construct
AANRGDIHNL

SEQ ID NO: 107282 - protein, 10 aa, synthetic construct
AAQRGDIHNL

SEQ ID NO: 107283 - protein, 10 aa, synthetic construct
AADRGDIHNL

SEQ ID NO: 107284 - protein, 10 aa, synthetic construct
AAERGDIHNL

SEQ ID NO: 107285 - protein, 10 aa, synthetic construct
AVGRGDIHNL

SEQ ID NO: 107286 - protein, 10 aa, synthetic construct
AVARGDIHNL

SEQ ID NO: 107287 - protein, 10 aa, synthetic construct
AVVRGDIHNL

SEQ ID NO: 107288 - protein, 10 aa, synthetic construct
AVPRGDIHNL

SEQ ID NO: 107289 - protein, 10 aa, synthetic construct
AVLRGDIHNL

SEQ ID NO: 107290 - protein, 10 aa, synthetic construct
AVIRGDIHNL

SEQ ID NO: 107291 - protein, 10 aa, synthetic construct
AVMRGDIHNL

SEQ ID NO: 107292 - protein, 10 aa, synthetic construct
AVWRGDIHNL

SEQ ID NO: 107293 - protein, 10 aa, synthetic construct
AVFRGDIHNL

SEQ ID NO: 107294 - protein, 10 aa, synthetic construct
AVKRGDIHNL

SEQ ID NO: 107295 - protein, 10 aa, synthetic construct
AVRRGDIHNL

SEQ ID NO: 107296 - protein, 10 aa, synthetic construct
AVHRGDIHNL

SEQ ID NO: 107297 - protein, 10 aa, synthetic construct
AVSRGDIHNL

SEQ ID NO: 107298 - protein, 10 aa, synthetic construct
AVTRGDIHNL

SEQ ID NO: 107299 - protein, 10 aa, synthetic construct
AVYRGDIHNL

SEQ ID NO: 107300 - protein, 10 aa, synthetic construct
AVNRGDIHNL

SEQ ID NO: 107301 - protein, 10 aa, synthetic construct
AVQRGDIHNL

SEQ ID NO: 107302 - protein, 10 aa, synthetic construct
AVDRGDIHNL

SEQ ID NO: 107303 - protein, 10 aa, synthetic construct
AVERGDIHNL

SEQ ID NO: 107304 - protein, 10 aa, synthetic construct
APGRGDIHNL

SEQ ID NO: 107305 - protein, 10 aa, synthetic construct
APARGDIHNL

SEQ ID NO: 107306 - protein, 10 aa, synthetic construct
APVRGDIHNL

SEQ ID NO: 107307 - protein, 10 aa, synthetic construct
APPRGDIHNL

SEQ ID NO: 107308 - protein, 10 aa, synthetic construct
APLRGDIHNL

SEQ ID NO: 107309 - protein, 10 aa, synthetic construct
APIRGDIHNL

SEQ ID NO: 107310 - protein, 10 aa, synthetic construct
APMRGDIHNL

SEQ ID NO: 107311 - protein, 10 aa, synthetic construct
APWRGDIHNL

SEQ ID NO: 107312 - protein, 10 aa, synthetic construct
APFRGDIHNL

SEQ ID NO: 107313 - protein, 10 aa, synthetic construct
APKRGDIHNL

SEQ ID NO: 107314 - protein, 10 aa, synthetic construct
APRRGDIHNL

SEQ ID NO: 107315 - protein, 10 aa, synthetic construct
APHRGDIHNL

SEQ ID NO: 107316 - protein, 10 aa, synthetic construct
APSRGDIHNL

SEQ ID NO: 107317 - protein, 10 aa, synthetic construct
APTRGDIHNL

SEQ ID NO: 107318 - protein, 10 aa, synthetic construct
APYRGDIHNL

SEQ ID NO: 107319 - protein, 10 aa, synthetic construct
APNRGDIHNL

SEQ ID NO: 107320 - protein, 10 aa, synthetic construct
APQRGDIHNL

SEQ ID NO: 107321 - protein, 10 aa, synthetic construct
APDRGDIHNL

SEQ ID NO: 107322 - protein, 10 aa, synthetic construct
APERGDIHNL

SEQ ID NO: 107323 - protein, 10 aa, synthetic construct
ALGRGDIHNL

SEQ ID NO: 107324 - protein, 10 aa, synthetic construct
ALARGDIHNL

SEQ ID NO: 107325 - protein, 10 aa, synthetic construct
ALVRGDIHNL

SEQ ID NO: 107326 - protein, 10 aa, synthetic construct
ALPRGDIHNL

SEQ ID NO: 107327 - protein, 10 aa, synthetic construct
ALLRGDIHNL

SEQ ID NO: 107328 - protein, 10 aa, synthetic construct
ALIRGDIHNL

SEQ ID NO: 107329 - protein, 10 aa, synthetic construct
ALMRGDIHNL

SEQ ID NO: 107330 - protein, 10 aa, synthetic construct
ALWRGDIHNL

SEQ ID NO: 107331 - protein, 10 aa, synthetic construct
ALFRGDIHNL

SEQ ID NO: 107332 - protein, 10 aa, synthetic construct
ALKRGDIHNL

SEQ ID NO: 107333 - protein, 10 aa, synthetic construct
ALRRGDIHNL

SEQ ID NO: 107334 - protein, 10 aa, synthetic construct
ALHRGDIHNL

SEQ ID NO: 107335 - protein, 10 aa, synthetic construct
ALSRGDIHNL

SEQ ID NO: 107336 - protein, 10 aa, synthetic construct
ALTRGDIHNL

SEQ ID NO: 107337 - protein, 10 aa, synthetic construct
ALYRGDIHNL

SEQ ID NO: 107338 - protein, 10 aa, synthetic construct
ALNRGDIHNL

SEQ ID NO: 107339 - protein, 10 aa, synthetic construct
ALQRGDIHNL

SEQ ID NO: 107340 - protein, 10 aa, synthetic construct
ALDRGDIHNL

SEQ ID NO: 107341 - protein, 10 aa, synthetic construct
ALERGDIHNL

SEQ ID NO: 107342 - protein, 10 aa, synthetic construct
AIGRGDIHNL

SEQ ID NO: 107343 - protein, 10 aa, synthetic construct
AIARGDIHNL

SEQ ID NO: 107344 - protein, 10 aa, synthetic construct
AIVRGDIHNL

SEQ ID NO: 107345 - protein, 10 aa, synthetic construct
AIPRGDIHNL

SEQ ID NO: 107346 - protein, 10 aa, synthetic construct
AILRGDIHNL

SEQ ID NO: 107347 - protein, 10 aa, synthetic construct
AIIRGDIHNL

SEQ ID NO: 107348 - protein, 10 aa, synthetic construct
AIMRGDIHNL

SEQ ID NO: 107349 - protein, 10 aa, synthetic construct
AIWRGDIHNL

SEQ ID NO: 107350 - protein, 10 aa, synthetic construct
AIFRGDIHNL

SEQ ID NO: 107351 - protein, 10 aa, synthetic construct
AIKRGDIHNL

SEQ ID NO: 107352 - protein, 10 aa, synthetic construct
AIRRGDIHNL

SEQ ID NO: 107353 - protein, 10 aa, synthetic construct
AIHRGDIHNL

SEQ ID NO: 107354 - protein, 10 aa, synthetic construct
AISRGDIHNL

SEQ ID NO: 107355 - protein, 10 aa, synthetic construct
AITRGDIHNL

SEQ ID NO: 107356 - protein, 10 aa, synthetic construct
AIYRGDIHNL

SEQ ID NO: 107357 - protein, 10 aa, synthetic construct
AINRGDIHNL

SEQ ID NO: 107358 - protein, 10 aa, synthetic construct
AIQRGDIHNL

SEQ ID NO: 107359 - protein, 10 aa, synthetic construct
AIDRGDIHNL

SEQ ID NO: 107360 - protein, 10 aa, synthetic construct
AIERGDIHNL

SEQ ID NO: 107361 - protein, 10 aa, synthetic construct
AMGRGDIHNL

SEQ ID NO: 107362 - protein, 10 aa, synthetic construct
AMARGDIHNL

SEQ ID NO: 107363 - protein, 10 aa, synthetic construct
AMVRGDIHNL

SEQ ID NO: 107364 - protein, 10 aa, synthetic construct
AMPRGDIHNL

SEQ ID NO: 107365 - protein, 10 aa, synthetic construct
AMLRGDIHNL

SEQ ID NO: 107366 - protein, 10 aa, synthetic construct
AMIRGDIHNL

SEQ ID NO: 107367 - protein, 10 aa, synthetic construct
AMMRGDIHNL

SEQ ID NO: 107368 - protein, 10 aa, synthetic construct
AMWRGDIHNL

SEQ ID NO: 107369 - protein, 10 aa, synthetic construct
AMFRGDIHNL

SEQ ID NO: 107370 - protein, 10 aa, synthetic construct
AMKRGDIHNL

SEQ ID NO: 107371 - protein, 10 aa, synthetic construct
AMRRGDIHNL

SEQ ID NO: 107372 - protein, 10 aa, synthetic construct
AMHRGDIHNL

SEQ ID NO: 107373 - protein, 10 aa, synthetic construct
AMSRGDIHNL

SEQ ID NO: 107374 - protein, 10 aa, synthetic construct
AMTRGDIHNL

SEQ ID NO: 107375 - protein, 10 aa, synthetic construct
AMYRGDIHNL

SEQ ID NO: 107376 - protein, 10 aa, synthetic construct
AMNRGDIHNL

SEQ ID NO: 107377 - protein, 10 aa, synthetic construct
AMQRGDIHNL

SEQ ID NO: 107378 - protein, 10 aa, synthetic construct
AMDRGDIHNL

SEQ ID NO: 107379 - protein, 10 aa, synthetic construct
AMERGDIHNL

SEQ ID NO: 107380 - protein, 10 aa, synthetic construct
AWGRGDIHNL

SEQ ID NO: 107381 - protein, 10 aa, synthetic construct
AWARGDIHNL

SEQ ID NO: 107382 - protein, 10 aa, synthetic construct
AWVRGDIHNL

SEQ ID NO: 107383 - protein, 10 aa, synthetic construct
AWPRGDIHNL

SEQ ID NO: 107384 - protein, 10 aa, synthetic construct
AWLRGDIHNL

SEQ ID NO: 107385 - protein, 10 aa, synthetic construct
AWIRGDIHNL

SEQ ID NO: 107386 - protein, 10 aa, synthetic construct
AWMRGDIHNL

SEQ ID NO: 107387 - protein, 10 aa, synthetic construct
AWWRGDIHNL

SEQ ID NO: 107388 - protein, 10 aa, synthetic construct
AWFRGDIHNL

SEQ ID NO: 107389 - protein, 10 aa, synthetic construct
AWKRGDIHNL

SEQ ID NO: 107390 - protein, 10 aa, synthetic construct
AWRRGDIHNL

SEQ ID NO: 107391 - protein, 10 aa, synthetic construct
AWHRGDIHNL

SEQ ID NO: 107392 - protein, 10 aa, synthetic construct
AWSRGDIHNL

SEQ ID NO: 107393 - protein, 10 aa, synthetic construct
AWTRGDIHNL

SEQ ID NO: 107394 - protein, 10 aa, synthetic construct
AWYRGDIHNL

SEQ ID NO: 107395 - protein, 10 aa, synthetic construct
AWNRGDIHNL

SEQ ID NO: 107396 - protein, 10 aa, synthetic construct
AWQRGDIHNL

SEQ ID NO: 107397 - protein, 10 aa, synthetic construct
AWDRGDIHNL

SEQ ID NO: 107398 - protein, 10 aa, synthetic construct
AWERGDIHNL

SEQ ID NO: 107399 - protein, 10 aa, synthetic construct
AFGRGDIHNL

SEQ ID NO: 107400 - protein, 10 aa, synthetic construct
AFARGDIHNL

SEQ ID NO: 107401 - protein, 10 aa, synthetic construct
AFVRGDIHNL

SEQ ID NO: 107402 - protein, 10 aa, synthetic construct
AFPRGDIHNL

SEQ ID NO: 107403 - protein, 10 aa, synthetic construct
AFLRGDIHNL

SEQ ID NO: 107404 - protein, 10 aa, synthetic construct
AFIRGDIHNL

SEQ ID NO: 107405 - protein, 10 aa, synthetic construct
AFMRGDIHNL

SEQ ID NO: 107406 - protein, 10 aa, synthetic construct
AFWRGDIHNL

SEQ ID NO: 107407 - protein, 10 aa, synthetic construct
AFFRGDIHNL

SEQ ID NO: 107408 - protein, 10 aa, synthetic construct
AFKRGDIHNL

SEQ ID NO: 107409 - protein, 10 aa, synthetic construct
AFRRGDIHNL

SEQ ID NO: 107410 - protein, 10 aa, synthetic construct
AFHRGDIHNL

SEQ ID NO: 107411 - protein, 10 aa, synthetic construct
AFSRGDIHNL

SEQ ID NO: 107412 - protein, 10 aa, synthetic construct
AFTRGDIHNL

SEQ ID NO: 107413 - protein, 10 aa, synthetic construct
AFYRGDIHNL

SEQ ID NO: 107414 - protein, 10 aa, synthetic construct
AFNRGDIHNL

SEQ ID NO: 107415 - protein, 10 aa, synthetic construct
AFQRGDIHNL

SEQ ID NO: 107416 - protein, 10 aa, synthetic construct
AFDRGDIHNL

SEQ ID NO: 107417 - protein, 10 aa, synthetic construct
AFERGDIHNL

SEQ ID NO: 107418 - protein, 10 aa, synthetic construct
AKGRGDIHNL

SEQ ID NO: 107419 - protein, 10 aa, synthetic construct
AKARGDIHNL

SEQ ID NO: 107420 - protein, 10 aa, synthetic construct
AKVRGDIHNL

SEQ ID NO: 107421 - protein, 10 aa, synthetic construct
AKPRGDIHNL

SEQ ID NO: 107422 - protein, 10 aa, synthetic construct
AKLRGDIHNL

SEQ ID NO: 107423 - protein, 10 aa, synthetic construct
AKIRGDIHNL

SEQ ID NO: 107424 - protein, 10 aa, synthetic construct
AKMRGDIHNL

SEQ ID NO: 107425 - protein, 10 aa, synthetic construct
AKWRGDIHNL

SEQ ID NO: 107426 - protein, 10 aa, synthetic construct
AKFRGDIHNL

SEQ ID NO: 107427 - protein, 10 aa, synthetic construct
AKKRGDIHNL

SEQ ID NO: 107428 - protein, 10 aa, synthetic construct
AKRRGDIHNL

SEQ ID NO: 107429 - protein, 10 aa, synthetic construct
AKHRGDIHNL

SEQ ID NO: 107430 - protein, 10 aa, synthetic construct
AKSRGDIHNL

SEQ ID NO: 107431 - protein, 10 aa, synthetic construct
AKTRGDIHNL

SEQ ID NO: 107432 - protein, 10 aa, synthetic construct
AKYRGDIHNL

SEQ ID NO: 107433 - protein, 10 aa, synthetic construct
AKNRGDIHNL

SEQ ID NO: 107434 - protein, 10 aa, synthetic construct
AKQRGDIHNL

SEQ ID NO: 107435 - protein, 10 aa, synthetic construct
AKDRGDIHNL

SEQ ID NO: 107436 - protein, 10 aa, synthetic construct
AKERGDIHNL

SEQ ID NO: 107437 - protein, 10 aa, synthetic construct
ARGRGDIHNL

SEQ ID NO: 107438 - protein, 10 aa, synthetic construct
ARARGDIHNL

SEQ ID NO: 107439 - protein, 10 aa, synthetic construct
ARVRGDIHNL

SEQ ID NO: 107440 - protein, 10 aa, synthetic construct
ARPRGDIHNL

SEQ ID NO: 107441 - protein, 10 aa, synthetic construct
ARLRGDIHNL

SEQ ID NO: 107442 - protein, 10 aa, synthetic construct
ARIRGDIHNL

SEQ ID NO: 107443 - protein, 10 aa, synthetic construct
ARMRGDIHNL

SEQ ID NO: 107444 - protein, 10 aa, synthetic construct
ARWRGDIHNL

SEQ ID NO: 107445 - protein, 10 aa, synthetic construct
ARFRGDIHNL

SEQ ID NO: 107446 - protein, 10 aa, synthetic construct
ARKRGDIHNL

SEQ ID NO: 107447 - protein, 10 aa, synthetic construct
ARRRGDIHNL

SEQ ID NO: 107448 - protein, 10 aa, synthetic construct
ARHRGDIHNL

SEQ ID NO: 107449 - protein, 10 aa, synthetic construct
ARSRGDIHNL

SEQ ID NO: 107450 - protein, 10 aa, synthetic construct
ARTRGDIHNL

SEQ ID NO: 107451 - protein, 10 aa, synthetic construct
ARYRGDIHNL

SEQ ID NO: 107452 - protein, 10 aa, synthetic construct
ARNRGDIHNL

SEQ ID NO: 107453 - protein, 10 aa, synthetic construct
ARQRGDIHNL

SEQ ID NO: 107454 - protein, 10 aa, synthetic construct
ARDRGDIHNL

SEQ ID NO: 107455 - protein, 10 aa, synthetic construct
ARERGDIHNL

SEQ ID NO: 107456 - protein, 10 aa, synthetic construct
AHGRGDIHNL

SEQ ID NO: 107457 - protein, 10 aa, synthetic construct
AHARGDIHNL

SEQ ID NO: 107458 - protein, 10 aa, synthetic construct
AHVRGDIHNL

SEQ ID NO: 107459 - protein, 10 aa, synthetic construct
AHPRGDIHNL

SEQ ID NO: 107460 - protein, 10 aa, synthetic construct
AHLRGDIHNL

SEQ ID NO: 107461 - protein, 10 aa, synthetic construct
AHIRGDIHNL

SEQ ID NO: 107462 - protein, 10 aa, synthetic construct
AHMRGDIHNL

SEQ ID NO: 107463 - protein, 10 aa, synthetic construct
AHWRGDIHNL

SEQ ID NO: 107464 - protein, 10 aa, synthetic construct
AHFRGDIHNL

SEQ ID NO: 107465 - protein, 10 aa, synthetic construct
AHKRGDIHNL

SEQ ID NO: 107466 - protein, 10 aa, synthetic construct
AHRRGDIHNL

SEQ ID NO: 107467 - protein, 10 aa, synthetic construct
AHHRGDIHNL

SEQ ID NO: 107468 - protein, 10 aa, synthetic construct
AHSRGDIHNL

SEQ ID NO: 107469 - protein, 10 aa, synthetic construct
AHTRGDIHNL

SEQ ID NO: 107470 - protein, 10 aa, synthetic construct
AHYRGDIHNL

SEQ ID NO: 107471 - protein, 10 aa, synthetic construct
AHNRGDIHNL

SEQ ID NO: 107472 - protein, 10 aa, synthetic construct
AHQRGDIHNL

SEQ ID NO: 107473 - protein, 10 aa, synthetic construct
AHDRGDIHNL

SEQ ID NO: 107474 - protein, 10 aa, synthetic construct
AHERGDIHNL

SEQ ID NO: 107475 - protein, 10 aa, synthetic construct
ASGRGDIHNL

SEQ ID NO: 107476 - protein, 10 aa, synthetic construct
ASARGDIHNL

SEQ ID NO: 107477 - protein, 10 aa, synthetic construct
ASVRGDIHNL

SEQ ID NO: 107478 - protein, 10 aa, synthetic construct
ASPRGDIHNL

SEQ ID NO: 107479 - protein, 10 aa, synthetic construct
ASLRGDIHNL

SEQ ID NO: 107480 - protein, 10 aa, synthetic construct
ASIRGDIHNL

SEQ ID NO: 107481 - protein, 10 aa, synthetic construct
ASMRGDIHNL

SEQ ID NO: 107482 - protein, 10 aa, synthetic construct
ASWRGDIHNL

SEQ ID NO: 107483 - protein, 10 aa, synthetic construct
ASFRGDIHNL

SEQ ID NO: 107484 - protein, 10 aa, synthetic construct
ASKRGDIHNL

SEQ ID NO: 107485 - protein, 10 aa, synthetic construct
ASRRGDIHNL

SEQ ID NO: 107486 - protein, 10 aa, synthetic construct
ASHRGDIHNL

SEQ ID NO: 107487 - protein, 10 aa, synthetic construct
ASSRGDIHNL

SEQ ID NO: 107488 - protein, 10 aa, synthetic construct
ASTRGDIHNL

SEQ ID NO: 107489 - protein, 10 aa, synthetic construct
ASYRGDIHNL

SEQ ID NO: 107490 - protein, 10 aa, synthetic construct
ASNRGDIHNL

SEQ ID NO: 107491 - protein, 10 aa, synthetic construct
ASQRGDIHNL

SEQ ID NO: 107492 - protein, 10 aa, synthetic construct
ASDRGDIHNL

SEQ ID NO: 107493 - protein, 10 aa, synthetic construct
ASERGDIHNL

SEQ ID NO: 107494 - protein, 10 aa, synthetic construct
ATGRGDIHNL

SEQ ID NO: 107495 - protein, 10 aa, synthetic construct
ATARGDIHNL

SEQ ID NO: 107496 - protein, 10 aa, synthetic construct
ATVRGDIHNL

SEQ ID NO: 107497 - protein, 10 aa, synthetic construct
ATPRGDIHNL

SEQ ID NO: 107498 - protein, 10 aa, synthetic construct
ATLRGDIHNL

SEQ ID NO: 107499 - protein, 10 aa, synthetic construct
ATIRGDIHNL

SEQ ID NO: 107500 - protein, 10 aa, synthetic construct
ATMRGDIHNL

SEQ ID NO: 107501 - protein, 10 aa, synthetic construct
ATWRGDIHNL

SEQ ID NO: 107502 - protein, 10 aa, synthetic construct
ATFRGDIHNL

SEQ ID NO: 107503 - protein, 10 aa, synthetic construct
ATKRGDIHNL

SEQ ID NO: 107504 - protein, 10 aa, synthetic construct
ATRRGDIHNL

SEQ ID NO: 107505 - protein, 10 aa, synthetic construct
ATHRGDIHNL

SEQ ID NO: 107506 - protein, 10 aa, synthetic construct
ATSRGDIHNL

SEQ ID NO: 107507 - protein, 10 aa, synthetic construct
ATTRGDIHNL

SEQ ID NO: 107508 - protein, 10 aa, synthetic construct
ATYRGDIHNL

SEQ ID NO: 107509 - protein, 10 aa, synthetic construct
ATNRGDIHNL

SEQ ID NO: 107510 - protein, 10 aa, synthetic construct
ATQRGDIHNL

SEQ ID NO: 107511 - protein, 10 aa, synthetic construct
ATDRGDIHNL

SEQ ID NO: 107512 - protein, 10 aa, synthetic construct
ATERGDIHNL

SEQ ID NO: 107513 - protein, 10 aa, synthetic construct
AYGRGDIHNL

SEQ ID NO: 107514 - protein, 10 aa, synthetic construct
AYARGDIHNL

SEQ ID NO: 107515 - protein, 10 aa, synthetic construct
AYVRGDIHNL

SEQ ID NO: 107516 - protein, 10 aa, synthetic construct
AYPRGDIHNL

SEQ ID NO: 107517 - protein, 10 aa, synthetic construct
AYLRGDIHNL

SEQ ID NO: 107518 - protein, 10 aa, synthetic construct
AYIRGDIHNL

SEQ ID NO: 107519 - protein, 10 aa, synthetic construct
AYMRGDIHNL

SEQ ID NO: 107520 - protein, 10 aa, synthetic construct
AYWRGDIHNL

SEQ ID NO: 107521 - protein, 10 aa, synthetic construct
AYFRGDIHNL

SEQ ID NO: 107522 - protein, 10 aa, synthetic construct
AYKRGDIHNL

SEQ ID NO: 107523 - protein, 10 aa, synthetic construct
AYRRGDIHNL

SEQ ID NO: 107524 - protein, 10 aa, synthetic construct
AYHRGDIHNL

SEQ ID NO: 107525 - protein, 10 aa, synthetic construct
AYSRGDIHNL

SEQ ID NO: 107526 - protein, 10 aa, synthetic construct
AYTRGDIHNL

SEQ ID NO: 107527 - protein, 10 aa, synthetic construct
AYYRGDIHNL

SEQ ID NO: 107528 - protein, 10 aa, synthetic construct
AYNRGDIHNL

SEQ ID NO: 107529 - protein, 10 aa, synthetic construct
AYQRGDIHNL

SEQ ID NO: 107530 - protein, 10 aa, synthetic construct
AYDRGDIHNL

SEQ ID NO: 107531 - protein, 10 aa, synthetic construct
AYERGDIHNL

SEQ ID NO: 107532 - protein, 10 aa, synthetic construct
ANGRGDIHNL

SEQ ID NO: 107533 - protein, 10 aa, synthetic construct
ANARGDIHNL

SEQ ID NO: 107534 - protein, 10 aa, synthetic construct
ANVRGDIHNL

SEQ ID NO: 107535 - protein, 10 aa, synthetic construct
ANPRGDIHNL

SEQ ID NO: 107536 - protein, 10 aa, synthetic construct
ANLRGDIHNL

SEQ ID NO: 107537 - protein, 10 aa, synthetic construct
ANIRGDIHNL

SEQ ID NO: 107538 - protein, 10 aa, synthetic construct
ANMRGDIHNL

SEQ ID NO: 107539 - protein, 10 aa, synthetic construct
ANWRGDIHNL

SEQ ID NO: 107540 - protein, 10 aa, synthetic construct
ANFRGDIHNL

SEQ ID NO: 107541 - protein, 10 aa, synthetic construct
ANKRGDIHNL

SEQ ID NO: 107542 - protein, 10 aa, synthetic construct
ANRRGDIHNL

SEQ ID NO: 107543 - protein, 10 aa, synthetic construct
ANHRGDIHNL

SEQ ID NO: 107544 - protein, 10 aa, synthetic construct
ANSRGDIHNL

SEQ ID NO: 107545 - protein, 10 aa, synthetic construct
ANTRGDIHNL

SEQ ID NO: 107546 - protein, 10 aa, synthetic construct
ANYRGDIHNL

SEQ ID NO: 107547 - protein, 10 aa, synthetic construct
ANNRGDIHNL

SEQ ID NO: 107548 - protein, 10 aa, synthetic construct
ANQRGDIHNL

SEQ ID NO: 107549 - protein, 10 aa, synthetic construct
ANDRGDIHNL

SEQ ID NO: 107550 - protein, 10 aa, synthetic construct
ANERGDIHNL

SEQ ID NO: 107551 - protein, 10 aa, synthetic construct
AQGRGDIHNL

SEQ ID NO: 107552 - protein, 10 aa, synthetic construct
AQARGDIHNL

SEQ ID NO: 107553 - protein, 10 aa, synthetic construct
AQVRGDIHNL

SEQ ID NO: 107554 - protein, 10 aa, synthetic construct
AQPRGDIHNL

SEQ ID NO: 107555 - protein, 10 aa, synthetic construct
AQLRGDIHNL

SEQ ID NO: 107556 - protein, 10 aa, synthetic construct
AQIRGDIHNL

SEQ ID NO: 107557 - protein, 10 aa, synthetic construct
AQMRGDIHNL

SEQ ID NO: 107558 - protein, 10 aa, synthetic construct
AQWRGDIHNL

SEQ ID NO: 107559 - protein, 10 aa, synthetic construct
AQFRGDIHNL

SEQ ID NO: 107560 - protein, 10 aa, synthetic construct
AQKRGDIHNL

SEQ ID NO: 107561 - protein, 10 aa, synthetic construct
AQRRGDIHNL

SEQ ID NO: 107562 - protein, 10 aa, synthetic construct
AQHRGDIHNL

SEQ ID NO: 107563 - protein, 10 aa, synthetic construct
AQSRGDIHNL

SEQ ID NO: 107564 - protein, 10 aa, synthetic construct
AQTRGDIHNL

SEQ ID NO: 107565 - protein, 10 aa, synthetic construct
AQYRGDIHNL

SEQ ID NO: 107566 - protein, 10 aa, synthetic construct
AQNRGDIHNL

SEQ ID NO: 107567 - protein, 10 aa, synthetic construct
AQQRGDIHNL

SEQ ID NO: 107568 - protein, 10 aa, synthetic construct
AQDRGDIHNL

SEQ ID NO: 107569 - protein, 10 aa, synthetic construct
AQERGDIHNL

SEQ ID NO: 107570 - protein, 10 aa, synthetic construct
ADGRGDIHNL

SEQ ID NO: 107571 - protein, 10 aa, synthetic construct
ADARGDIHNL

SEQ ID NO: 107572 - protein, 10 aa, synthetic construct
ADVRGDIHNL

SEQ ID NO: 107573 - protein, 10 aa, synthetic construct
ADPRGDIHNL

SEQ ID NO: 107574 - protein, 10 aa, synthetic construct
ADLRGDIHNL

SEQ ID NO: 107575 - protein, 10 aa, synthetic construct
ADIRGDIHNL

SEQ ID NO: 107576 - protein, 10 aa, synthetic construct
ADMRGDIHNL

SEQ ID NO: 107577 - protein, 10 aa, synthetic construct
ADWRGDIHNL

SEQ ID NO: 107578 - protein, 10 aa, synthetic construct
ADFRGDIHNL

SEQ ID NO: 107579 - protein, 10 aa, synthetic construct
ADKRGDIHNL

SEQ ID NO: 107580 - protein, 10 aa, synthetic construct
ADRRGDIHNL

SEQ ID NO: 107581 - protein, 10 aa, synthetic construct
ADHRGDIHNL

SEQ ID NO: 107582 - protein, 10 aa, synthetic construct
ADSRGDIHNL

SEQ ID NO: 107583 - protein, 10 aa, synthetic construct
ADTRGDIHNL

SEQ ID NO: 107584 - protein, 10 aa, synthetic construct
ADYRGDIHNL

SEQ ID NO: 107585 - protein, 10 aa, synthetic construct
ADNRGDIHNL

SEQ ID NO: 107586 - protein, 10 aa, synthetic construct
ADQRGDIHNL

SEQ ID NO: 107587 - protein, 10 aa, synthetic construct
ADDRGDIHNL

SEQ ID NO: 107588 - protein, 10 aa, synthetic construct
ADERGDIHNL

SEQ ID NO: 107589 - protein, 10 aa, synthetic construct
AEGRGDIHNL

SEQ ID NO: 107590 - protein, 10 aa, synthetic construct
AEARGDIHNL

SEQ ID NO: 107591 - protein, 10 aa, synthetic construct
AEVRGDIHNL

SEQ ID NO: 107592 - protein, 10 aa, synthetic construct
AEPRGDIHNL

SEQ ID NO: 107593 - protein, 10 aa, synthetic construct
AELRGDIHNL

SEQ ID NO: 107594 - protein, 10 aa, synthetic construct
AEIRGDIHNL

SEQ ID NO: 107595 - protein, 10 aa, synthetic construct
AEMRGDIHNL

SEQ ID NO: 107596 - protein, 10 aa, synthetic construct
AEWRGDIHNL

SEQ ID NO: 107597 - protein, 10 aa, synthetic construct
AEFRGDIHNL

SEQ ID NO: 107598 - protein, 10 aa, synthetic construct
AEKRGDIHNL

SEQ ID NO: 107599 - protein, 10 aa, synthetic construct
AERRGDIHNL

SEQ ID NO: 107600 - protein, 10 aa, synthetic construct
AEHRGDIHNL

SEQ ID NO: 107601 - protein, 10 aa, synthetic construct
AESRGDIHNL

SEQ ID NO: 107602 - protein, 10 aa, synthetic construct
AETRGDIHNL

SEQ ID NO: 107603 - protein, 10 aa, synthetic construct
AEYRGDIHNL

SEQ ID NO: 107604 - protein, 10 aa, synthetic construct
AENRGDIHNL

SEQ ID NO: 107605 - protein, 10 aa, synthetic construct
AEQRGDIHNL

SEQ ID NO: 107606 - protein, 10 aa, synthetic construct
AEDRGDIHNL

SEQ ID NO: 107607 - protein, 10 aa, synthetic construct
AEERGDIHNL

SEQ ID NO: 107608 - protein, 10 aa, synthetic construct
EGGRGDIHNL

SEQ ID NO: 107609 - protein, 10 aa, synthetic construct
EGARGDIHNL

SEQ ID NO: 107610 - protein, 10 aa, synthetic construct
EGVRGDIHNL

SEQ ID NO: 107611 - protein, 10 aa, synthetic construct
EGPRGDIHNL

SEQ ID NO: 107612 - protein, 10 aa, synthetic construct
EGLRGDIHNL

SEQ ID NO: 107613 - protein, 10 aa, synthetic construct
EGIRGDIHNL

SEQ ID NO: 107614 - protein, 10 aa, synthetic construct
EGMRGDIHNL

SEQ ID NO: 107615 - protein, 10 aa, synthetic construct
EGWRGDIHNL

SEQ ID NO: 107616 - protein, 10 aa, synthetic construct
EGFRGDIHNL

SEQ ID NO: 107617 - protein, 10 aa, synthetic construct
EGKRGDIHNL

SEQ ID NO: 107618 - protein, 10 aa, synthetic construct
EGRRGDIHNL

SEQ ID NO: 107619 - protein, 10 aa, synthetic construct
EGHRGDIHNL

SEQ ID NO: 107620 - protein, 10 aa, synthetic construct
EGSRGDIHNL

SEQ ID NO: 107621 - protein, 10 aa, synthetic construct
EGTRGDIHNL

SEQ ID NO: 107622 - protein, 10 aa, synthetic construct
EGYRGDIHNL

SEQ ID NO: 107623 - protein, 10 aa, synthetic construct
EGNRGDIHNL

SEQ ID NO: 107624 - protein, 10 aa, synthetic construct
EGQRGDIHNL

SEQ ID NO: 107625 - protein, 10 aa, synthetic construct
EGDRGDIHNL

SEQ ID NO: 107626 - protein, 10 aa, synthetic construct
EGERGDIHNL

SEQ ID NO: 107627 - protein, 10 aa, synthetic construct
EAGRGDIHNL

SEQ ID NO: 107628 - protein, 10 aa, synthetic construct
EAARGDIHNL

SEQ ID NO: 107629 - protein, 10 aa, synthetic construct
EAVRGDIHNL

SEQ ID NO: 107630 - protein, 10 aa, synthetic construct
EAPRGDIHNL

SEQ ID NO: 107631 - protein, 10 aa, synthetic construct
EALRGDIHNL

SEQ ID NO: 107632 - protein, 10 aa, synthetic construct
EAIRGDIHNL

SEQ ID NO: 107633 - protein, 10 aa, synthetic construct
EAMRGDIHNL

SEQ ID NO: 107634 - protein, 10 aa, synthetic construct
EAWRGDIHNL

SEQ ID NO: 107635 - protein, 10 aa, synthetic construct
EAFRGDIHNL

SEQ ID NO: 107636 - protein, 10 aa, synthetic construct
EAKRGDIHNL

SEQ ID NO: 107637 - protein, 10 aa, synthetic construct
EARRGDIHNL

SEQ ID NO: 107638 - protein, 10 aa, synthetic construct
EAHRGDIHNL

SEQ ID NO: 107639 - protein, 10 aa, synthetic construct
EASRGDIHNL

SEQ ID NO: 107640 - protein, 10 aa, synthetic construct
EATRGDIHNL

SEQ ID NO: 107641 - protein, 10 aa, synthetic construct
EAYRGDIHNL

SEQ ID NO: 107642 - protein, 10 aa, synthetic construct
EANRGDIHNL

SEQ ID NO: 107643 - protein, 10 aa, synthetic construct
EAQRGDIHNL

SEQ ID NO: 107644 - protein, 10 aa, synthetic construct
EADRGDIHNL

SEQ ID NO: 107645 - protein, 10 aa, synthetic construct
EAERGDIHNL

SEQ ID NO: 107646 - protein, 10 aa, synthetic construct
EVGRGDIHNL

SEQ ID NO: 107647 - protein, 10 aa, synthetic construct
EVARGDIHNL

SEQ ID NO: 107648 - protein, 10 aa, synthetic construct
EVVRGDIHNL

SEQ ID NO: 107649 - protein, 10 aa, synthetic construct
EVPRGDIHNL

SEQ ID NO: 107650 - protein, 10 aa, synthetic construct
EVLRGDIHNL

SEQ ID NO: 107651 - protein, 10 aa, synthetic construct
EVIRGDIHNL

SEQ ID NO: 107652 - protein, 10 aa, synthetic construct
EVMRGDIHNL

SEQ ID NO: 107653 - protein, 10 aa, synthetic construct
EVWRGDIHNL

SEQ ID NO: 107654 - protein, 10 aa, synthetic construct
EVFRGDIHNL

SEQ ID NO: 107655 - protein, 10 aa, synthetic construct
EVKRGDIHNL

SEQ ID NO: 107656 - protein, 10 aa, synthetic construct
EVRRGDIHNL

SEQ ID NO: 107657 - protein, 10 aa, synthetic construct
EVHRGDIHNL

SEQ ID NO: 107658 - protein, 10 aa, synthetic construct
EVSRGDIHNL

SEQ ID NO: 107659 - protein, 10 aa, synthetic construct
EVTRGDIHNL

SEQ ID NO: 107660 - protein, 10 aa, synthetic construct
EVYRGDIHNL

SEQ ID NO: 107661 - protein, 10 aa, synthetic construct
EVNRGDIHNL

SEQ ID NO: 107662 - protein, 10 aa, synthetic construct
EVQRGDIHNL

SEQ ID NO: 107663 - protein, 10 aa, synthetic construct
EVDRGDIHNL

SEQ ID NO: 107664 - protein, 10 aa, synthetic construct
EVERGDIHNL

SEQ ID NO: 107665 - protein, 10 aa, synthetic construct
EPGRGDIHNL

SEQ ID NO: 107666 - protein, 10 aa, synthetic construct
EPARGDIHNL

SEQ ID NO: 107667 - protein, 10 aa, synthetic construct
EPVRGDIHNL

SEQ ID NO: 107668 - protein, 10 aa, synthetic construct
EPPRGDIHNL

SEQ ID NO: 107669 - protein, 10 aa, synthetic construct
EPLRGDIHNL

SEQ ID NO: 107670 - protein, 10 aa, synthetic construct
EPIRGDIHNL

SEQ ID NO: 107671 - protein, 10 aa, synthetic construct
EPMRGDIHNL

SEQ ID NO: 107672 - protein, 10 aa, synthetic construct
EPWRGDIHNL

SEQ ID NO: 107673 - protein, 10 aa, synthetic construct
EPFRGDIHNL

SEQ ID NO: 107674 - protein, 10 aa, synthetic construct
EPKRGDIHNL

SEQ ID NO: 107675 - protein, 10 aa, synthetic construct
EPRRGDIHNL

SEQ ID NO: 107676 - protein, 10 aa, synthetic construct
EPHRGDIHNL

SEQ ID NO: 107677 - protein, 10 aa, synthetic construct
EPSRGDIHNL

SEQ ID NO: 107678 - protein, 10 aa, synthetic construct
EPTRGDIHNL

SEQ ID NO: 107679 - protein, 10 aa, synthetic construct
EPYRGDIHNL

SEQ ID NO: 107680 - protein, 10 aa, synthetic construct
EPNRGDIHNL

SEQ ID NO: 107681 - protein, 10 aa, synthetic construct
EPQRGDIHNL

SEQ ID NO: 107682 - protein, 10 aa, synthetic construct
EPDRGDIHNL

SEQ ID NO: 107683 - protein, 10 aa, synthetic construct
EPERGDIHNL

SEQ ID NO: 107684 - protein, 10 aa, synthetic construct
ELGRGDIHNL

SEQ ID NO: 107685 - protein, 10 aa, synthetic construct
ELARGDIHNL

SEQ ID NO: 107686 - protein, 10 aa, synthetic construct
ELVRGDIHNL

SEQ ID NO: 107687 - protein, 10 aa, synthetic construct
ELPRGDIHNL

SEQ ID NO: 107688 - protein, 10 aa, synthetic construct
ELLRGDIHNL

SEQ ID NO: 107689 - protein, 10 aa, synthetic construct
ELIRGDIHNL

SEQ ID NO: 107690 - protein, 10 aa, synthetic construct
ELMRGDIHNL

SEQ ID NO: 107691 - protein, 10 aa, synthetic construct
ELWRGDIHNL

SEQ ID NO: 107692 - protein, 10 aa, synthetic construct
ELFRGDIHNL

SEQ ID NO: 107693 - protein, 10 aa, synthetic construct
ELKRGDIHNL

SEQ ID NO: 107694 - protein, 10 aa, synthetic construct
ELRRGDIHNL

SEQ ID NO: 107695 - protein, 10 aa, synthetic construct
ELHRGDIHNL

SEQ ID NO: 107696 - protein, 10 aa, synthetic construct
ELSRGDIHNL

SEQ ID NO: 107697 - protein, 10 aa, synthetic construct
ELTRGDIHNL

SEQ ID NO: 107698 - protein, 10 aa, synthetic construct
ELYRGDIHNL

SEQ ID NO: 107699 - protein, 10 aa, synthetic construct
ELNRGDIHNL

SEQ ID NO: 107700 - protein, 10 aa, synthetic construct
ELQRGDIHNL

SEQ ID NO: 107701 - protein, 10 aa, synthetic construct
ELDRGDIHNL

SEQ ID NO: 107702 - protein, 10 aa, synthetic construct
ELERGDIHNL

SEQ ID NO: 107703 - protein, 10 aa, synthetic construct
EIGRGDIHNL

SEQ ID NO: 107704 - protein, 10 aa, synthetic construct
EIARGDIHNL

SEQ ID NO: 107705 - protein, 10 aa, synthetic construct
EIVRGDIHNL

SEQ ID NO: 107706 - protein, 10 aa, synthetic construct
EIPRGDIHNL

SEQ ID NO: 107707 - protein, 10 aa, synthetic construct
EILRGDIHNL

SEQ ID NO: 107708 - protein, 10 aa, synthetic construct
EIIRGDIHNL

SEQ ID NO: 107709 - protein, 10 aa, synthetic construct
EIMRGDIHNL

SEQ ID NO: 107710 - protein, 10 aa, synthetic construct
EIWRGDIHNL

SEQ ID NO: 107711 - protein, 10 aa, synthetic construct
EIFRGDIHNL

SEQ ID NO: 107712 - protein, 10 aa, synthetic construct
EIKRGDIHNL

SEQ ID NO: 107713 - protein, 10 aa, synthetic construct
EIRRGDIHNL

SEQ ID NO: 107714 - protein, 10 aa, synthetic construct
EIHRGDIHNL

SEQ ID NO: 107715 - protein, 10 aa, synthetic construct
EISRGDIHNL

SEQ ID NO: 107716 - protein, 10 aa, synthetic construct
EITRGDIHNL

SEQ ID NO: 107717 - protein, 10 aa, synthetic construct
EIYRGDIHNL

SEQ ID NO: 107718 - protein, 10 aa, synthetic construct
EINRGDIHNL

SEQ ID NO: 107719 - protein, 10 aa, synthetic construct
EIQRGDIHNL

SEQ ID NO: 107720 - protein, 10 aa, synthetic construct
EIDRGDIHNL

SEQ ID NO: 107721 - protein, 10 aa, synthetic construct
EIERGDIHNL

SEQ ID NO: 107722 - protein, 10 aa, synthetic construct
EMGRGDIHNL

SEQ ID NO: 107723 - protein, 10 aa, synthetic construct
EMARGDIHNL

SEQ ID NO: 107724 - protein, 10 aa, synthetic construct
EMVRGDIHNL

SEQ ID NO: 107725 - protein, 10 aa, synthetic construct
EMPRGDIHNL

SEQ ID NO: 107726 - protein, 10 aa, synthetic construct
EMLRGDIHNL

SEQ ID NO: 107727 - protein, 10 aa, synthetic construct
EMIRGDIHNL

SEQ ID NO: 107728 - protein, 10 aa, synthetic construct
EMMRGDIHNL

SEQ ID NO: 107729 - protein, 10 aa, synthetic construct
EMWRGDIHNL

SEQ ID NO: 107730 - protein, 10 aa, synthetic construct
EMFRGDIHNL

SEQ ID NO: 107731 - protein, 10 aa, synthetic construct
EMKRGDIHNL

SEQ ID NO: 107732 - protein, 10 aa, synthetic construct
EMRRGDIHNL

SEQ ID NO: 107733 - protein, 10 aa, synthetic construct
EMHRGDIHNL

SEQ ID NO: 107734 - protein, 10 aa, synthetic construct
EMSRGDIHNL

SEQ ID NO: 107735 - protein, 10 aa, synthetic construct
EMTRGDIHNL

SEQ ID NO: 107736 - protein, 10 aa, synthetic construct
EMYRGDIHNL

SEQ ID NO: 107737 - protein, 10 aa, synthetic construct
EMNRGDIHNL

SEQ ID NO: 107738 - protein, 10 aa, synthetic construct
EMQRGDIHNL

SEQ ID NO: 107739 - protein, 10 aa, synthetic construct
EMDRGDIHNL

SEQ ID NO: 107740 - protein, 10 aa, synthetic construct
EMERGDIHNL

SEQ ID NO: 107741 - protein, 10 aa, synthetic construct
EWGRGDIHNL

SEQ ID NO: 107742 - protein, 10 aa, synthetic construct
EWARGDIHNL

SEQ ID NO: 107743 - protein, 10 aa, synthetic construct
EWVRGDIHNL

SEQ ID NO: 107744 - protein, 10 aa, synthetic construct
EWPRGDIHNL

SEQ ID NO: 107745 - protein, 10 aa, synthetic construct
EWLRGDIHNL

SEQ ID NO: 107746 - protein, 10 aa, synthetic construct
EWIRGDIHNL

SEQ ID NO: 107747 - protein, 10 aa, synthetic construct
EWMRGDIHNL

SEQ ID NO: 107748 - protein, 10 aa, synthetic construct
EWWRGDIHNL

SEQ ID NO: 107749 - protein, 10 aa, synthetic construct
EWFRGDIHNL

SEQ ID NO: 107750 - protein, 10 aa, synthetic construct
EWKRGDIHNL

SEQ ID NO: 107751 - protein, 10 aa, synthetic construct
EWRRGDIHNL

SEQ ID NO: 107752 - protein, 10 aa, synthetic construct
EWHRGDIHNL

SEQ ID NO: 107753 - protein, 10 aa, synthetic construct
EWSRGDIHNL

SEQ ID NO: 107754 - protein, 10 aa, synthetic construct
EWTRGDIHNL

SEQ ID NO: 107755 - protein, 10 aa, synthetic construct
EWYRGDIHNL

SEQ ID NO: 107756 - protein, 10 aa, synthetic construct
EWNRGDIHNL

SEQ ID NO: 107757 - protein, 10 aa, synthetic construct
EWQRGDIHNL

SEQ ID NO: 107758 - protein, 10 aa, synthetic construct
EWDRGDIHNL

SEQ ID NO: 107759 - protein, 10 aa, synthetic construct
EWERGDIHNL

SEQ ID NO: 107760 - protein, 10 aa, synthetic construct
EFGRGDIHNL

SEQ ID NO: 107761 - protein, 10 aa, synthetic construct
EFARGDIHNL

SEQ ID NO: 107762 - protein, 10 aa, synthetic construct
EFVRGDIHNL

SEQ ID NO: 107763 - protein, 10 aa, synthetic construct
EFPRGDIHNL

SEQ ID NO: 107764 - protein, 10 aa, synthetic construct
EFLRGDIHNL

SEQ ID NO: 107765 - protein, 10 aa, synthetic construct
EFIRGDIHNL

SEQ ID NO: 107766 - protein, 10 aa, synthetic construct
EFMRGDIHNL

SEQ ID NO: 107767 - protein, 10 aa, synthetic construct
EFWRGDIHNL

SEQ ID NO: 107768 - protein, 10 aa, synthetic construct
EFFRGDIHNL

SEQ ID NO: 107769 - protein, 10 aa, synthetic construct
EFKRGDIHNL

SEQ ID NO: 107770 - protein, 10 aa, synthetic construct
EFRRGDIHNL

SEQ ID NO: 107771 - protein, 10 aa, synthetic construct
EFHRGDIHNL

SEQ ID NO: 107772 - protein, 10 aa, synthetic construct
EFSRGDIHNL

SEQ ID NO: 107773 - protein, 10 aa, synthetic construct
EFTRGDIHNL

SEQ ID NO: 107774 - protein, 10 aa, synthetic construct
EFYRGDIHNL

SEQ ID NO: 107775 - protein, 10 aa, synthetic construct
EFNRGDIHNL

SEQ ID NO: 107776 - protein, 10 aa, synthetic construct
EFQRGDIHNL

SEQ ID NO: 107777 - protein, 10 aa, synthetic construct
EFDRGDIHNL

SEQ ID NO: 107778 - protein, 10 aa, synthetic construct
EFERGDIHNL

SEQ ID NO: 107779 - protein, 10 aa, synthetic construct
EKGRGDIHNL

SEQ ID NO: 107780 - protein, 10 aa, synthetic construct
EKARGDIHNL

SEQ ID NO: 107781 - protein, 10 aa, synthetic construct
EKVRGDIHNL

SEQ ID NO: 107782 - protein, 10 aa, synthetic construct
EKPRGDIHNL

SEQ ID NO: 107783 - protein, 10 aa, synthetic construct
EKLRGDIHNL

SEQ ID NO: 107784 - protein, 10 aa, synthetic construct
EKIRGDIHNL

SEQ ID NO: 107785 - protein, 10 aa, synthetic construct
EKMRGDIHNL

SEQ ID NO: 107786 - protein, 10 aa, synthetic construct
EKWRGDIHNL

SEQ ID NO: 107787 - protein, 10 aa, synthetic construct
EKFRGDIHNL

SEQ ID NO: 107788 - protein, 10 aa, synthetic construct
EKKRGDIHNL

SEQ ID NO: 107789 - protein, 10 aa, synthetic construct
EKRRGDIHNL

SEQ ID NO: 107790 - protein, 10 aa, synthetic construct
EKHRGDIHNL

SEQ ID NO: 107791 - protein, 10 aa, synthetic construct
EKSRGDIHNL

SEQ ID NO: 107792 - protein, 10 aa, synthetic construct
EKTRGDIHNL

SEQ ID NO: 107793 - protein, 10 aa, synthetic construct
EKYRGDIHNL

SEQ ID NO: 107794 - protein, 10 aa, synthetic construct
EKNRGDIHNL

SEQ ID NO: 107795 - protein, 10 aa, synthetic construct
EKQRGDIHNL

SEQ ID NO: 107796 - protein, 10 aa, synthetic construct
EKDRGDIHNL

SEQ ID NO: 107797 - protein, 10 aa, synthetic construct
EKERGDIHNL

SEQ ID NO: 107798 - protein, 10 aa, synthetic construct
ERGRGDIHNL

SEQ ID NO: 107799 - protein, 10 aa, synthetic construct
ERARGDIHNL

SEQ ID NO: 107800 - protein, 10 aa, synthetic construct
ERVRGDIHNL

SEQ ID NO: 107801 - protein, 10 aa, synthetic construct
ERPRGDIHNL

SEQ ID NO: 107802 - protein, 10 aa, synthetic construct
ERLRGDIHNL

SEQ ID NO: 107803 - protein, 10 aa, synthetic construct
ERIRGDIHNL

SEQ ID NO: 107804 - protein, 10 aa, synthetic construct
ERMRGDIHNL

SEQ ID NO: 107805 - protein, 10 aa, synthetic construct
ERWRGDIHNL

SEQ ID NO: 107806 - protein, 10 aa, synthetic construct
ERFRGDIHNL

SEQ ID NO: 107807 - protein, 10 aa, synthetic construct
ERKRGDIHNL

SEQ ID NO: 107808 - protein, 10 aa, synthetic construct
ERRRGDIHNL

SEQ ID NO: 107809 - protein, 10 aa, synthetic construct
ERHRGDIHNL

SEQ ID NO: 107810 - protein, 10 aa, synthetic construct
ERSRGDIHNL

SEQ ID NO: 107811 - protein, 10 aa, synthetic construct
ERTRGDIHNL

SEQ ID NO: 107812 - protein, 10 aa, synthetic construct
ERYRGDIHNL

SEQ ID NO: 107813 - protein, 10 aa, synthetic construct
ERNRGDIHNL

SEQ ID NO: 107814 - protein, 10 aa, synthetic construct
ERQRGDIHNL

SEQ ID NO: 107815 - protein, 10 aa, synthetic construct
ERDRGDIHNL

SEQ ID NO: 107816 - protein, 10 aa, synthetic construct
ERERGDIHNL

SEQ ID NO: 107817 - protein, 10 aa, synthetic construct
EHGRGDIHNL

SEQ ID NO: 107818 - protein, 10 aa, synthetic construct
EHARGDIHNL

SEQ ID NO: 107819 - protein, 10 aa, synthetic construct
EHVRGDIHNL

SEQ ID NO: 107820 - protein, 10 aa, synthetic construct
EHPRGDIHNL

SEQ ID NO: 107821 - protein, 10 aa, synthetic construct
EHLRGDIHNL

SEQ ID NO: 107822 - protein, 10 aa, synthetic construct
EHIRGDIHNL

SEQ ID NO: 107823 - protein, 10 aa, synthetic construct
EHMRGDIHNL

SEQ ID NO: 107824 - protein, 10 aa, synthetic construct
EHWRGDIHNL

SEQ ID NO: 107825 - protein, 10 aa, synthetic construct
EHFRGDIHNL

SEQ ID NO: 107826 - protein, 10 aa, synthetic construct
EHKRGDIHNL

SEQ ID NO: 107827 - protein, 10 aa, synthetic construct
EHRRGDIHNL

SEQ ID NO: 107828 - protein, 10 aa, synthetic construct
EHHRGDIHNL

SEQ ID NO: 107829 - protein, 10 aa, synthetic construct
EHSRGDIHNL

SEQ ID NO: 107830 - protein, 10 aa, synthetic construct
EHTRGDIHNL

SEQ ID NO: 107831 - protein, 10 aa, synthetic construct
EHYRGDIHNL

SEQ ID NO: 107832 - protein, 10 aa, synthetic construct
EHNRGDIHNL

SEQ ID NO: 107833 - protein, 10 aa, synthetic construct
EHQRGDIHNL

SEQ ID NO: 107834 - protein, 10 aa, synthetic construct
EHDRGDIHNL

SEQ ID NO: 107835 - protein, 10 aa, synthetic construct
EHERGDIHNL

SEQ ID NO: 107836 - protein, 10 aa, synthetic construct
ESGRGDIHNL

SEQ ID NO: 107837 - protein, 10 aa, synthetic construct
ESARGDIHNL

SEQ ID NO: 107838 - protein, 10 aa, synthetic construct
ESVRGDIHNL

SEQ ID NO: 107839 - protein, 10 aa, synthetic construct
ESPRGDIHNL

SEQ ID NO: 107840 - protein, 10 aa, synthetic construct
ESLRGDIHNL

SEQ ID NO: 107841 - protein, 10 aa, synthetic construct
ESIRGDIHNL

SEQ ID NO: 107842 - protein, 10 aa, synthetic construct
ESMRGDIHNL

SEQ ID NO: 107843 - protein, 10 aa, synthetic construct
ESWRGDIHNL

SEQ ID NO: 107844 - protein, 10 aa, synthetic construct
ESFRGDIHNL

SEQ ID NO: 107845 - protein, 10 aa, synthetic construct
ESKRGDIHNL

SEQ ID NO: 107846 - protein, 10 aa, synthetic construct
ESRRGDIHNL

SEQ ID NO: 107847 - protein, 10 aa, synthetic construct
ESHRGDIHNL

SEQ ID NO: 107848 - protein, 10 aa, synthetic construct
ESSRGDIHNL

SEQ ID NO: 107849 - protein, 10 aa, synthetic construct
ESTRGDIHNL

SEQ ID NO: 107850 - protein, 10 aa, synthetic construct
ESYRGDIHNL

SEQ ID NO: 107851 - protein, 10 aa, synthetic construct
ESNRGDIHNL

SEQ ID NO: 107852 - protein, 10 aa, synthetic construct
ESQRGDIHNL

SEQ ID NO: 107853 - protein, 10 aa, synthetic construct
ESDRGDIHNL

SEQ ID NO: 107854 - protein, 10 aa, synthetic construct
ESERGDIHNL

SEQ ID NO: 107855 - protein, 10 aa, synthetic construct
ETGRGDIHNL

SEQ ID NO: 107856 - protein, 10 aa, synthetic construct
ETARGDIHNL

SEQ ID NO: 107857 - protein, 10 aa, synthetic construct
ETVRGDIHNL

SEQ ID NO: 107858 - protein, 10 aa, synthetic construct
ETPRGDIHNL

SEQ ID NO: 107859 - protein, 10 aa, synthetic construct
ETLRGDIHNL

SEQ ID NO: 107860 - protein, 10 aa, synthetic construct
ETIRGDIHNL

SEQ ID NO: 107861 - protein, 10 aa, synthetic construct
ETMRGDIHNL

SEQ ID NO: 107862 - protein, 10 aa, synthetic construct
ETWRGDIHNL

SEQ ID NO: 107863 - protein, 10 aa, synthetic construct
ETFRGDIHNL

SEQ ID NO: 107864 - protein, 10 aa, synthetic construct
ETKRGDIHNL

SEQ ID NO: 107865 - protein, 10 aa, synthetic construct
ETRRGDIHNL

SEQ ID NO: 107866 - protein, 10 aa, synthetic construct
ETHRGDIHNL

SEQ ID NO: 107867 - protein, 10 aa, synthetic construct
ETSRGDIHNL

SEQ ID NO: 107868 - protein, 10 aa, synthetic construct
ETTRGDIHNL

SEQ ID NO: 107869 - protein, 10 aa, synthetic construct
ETYRGDIHNL

SEQ ID NO: 107870 - protein, 10 aa, synthetic construct
ETNRGDIHNL

SEQ ID NO: 107871 - protein, 10 aa, synthetic construct
ETQRGDIHNL

SEQ ID NO: 107872 - protein, 10 aa, synthetic construct
ETDRGDIHNL

SEQ ID NO: 107873 - protein, 10 aa, synthetic construct
ETERGDIHNL

SEQ ID NO: 107874 - protein, 10 aa, synthetic construct
EYGRGDIHNL

SEQ ID NO: 107875 - protein, 10 aa, synthetic construct
EYARGDIHNL

SEQ ID NO: 107876 - protein, 10 aa, synthetic construct
EYVRGDIHNL

SEQ ID NO: 107877 - protein, 10 aa, synthetic construct
EYPRGDIHNL

SEQ ID NO: 107878 - protein, 10 aa, synthetic construct
EYLRGDIHNL

SEQ ID NO: 107879 - protein, 10 aa, synthetic construct
EYIRGDIHNL

SEQ ID NO: 107880 - protein, 10 aa, synthetic construct
EYMRGDIHNL

SEQ ID NO: 107881 - protein, 10 aa, synthetic construct
EYWRGDIHNL

SEQ ID NO: 107882 - protein, 10 aa, synthetic construct
EYFRGDIHNL

SEQ ID NO: 107883 - protein, 10 aa, synthetic construct
EYKRGDIHNL

SEQ ID NO: 107884 - protein, 10 aa, synthetic construct
EYRRGDIHNL

SEQ ID NO: 107885 - protein, 10 aa, synthetic construct
EYHRGDIHNL

SEQ ID NO: 107886 - protein, 10 aa, synthetic construct
EYSRGDIHNL

SEQ ID NO: 107887 - protein, 10 aa, synthetic construct
EYTRGDIHNL

SEQ ID NO: 107888 - protein, 10 aa, synthetic construct
EYYRGDIHNL

SEQ ID NO: 107889 - protein, 10 aa, synthetic construct
EYNRGDIHNL

SEQ ID NO: 107890 - protein, 10 aa, synthetic construct
EYQRGDIHNL

SEQ ID NO: 107891 - protein, 10 aa, synthetic construct
EYDRGDIHNL

SEQ ID NO: 107892 - protein, 10 aa, synthetic construct
EYERGDIHNL

SEQ ID NO: 107893 - protein, 10 aa, synthetic construct
ENGRGDIHNL

SEQ ID NO: 107894 - protein, 10 aa, synthetic construct
ENARGDIHNL

SEQ ID NO: 107895 - protein, 10 aa, synthetic construct
ENVRGDIHNL

SEQ ID NO: 107896 - protein, 10 aa, synthetic construct
ENPRGDIHNL

SEQ ID NO: 107897 - protein, 10 aa, synthetic construct
ENLRGDIHNL

SEQ ID NO: 107898 - protein, 10 aa, synthetic construct
ENIRGDIHNL

SEQ ID NO: 107899 - protein, 10 aa, synthetic construct
ENMRGDIHNL

SEQ ID NO: 107900 - protein, 10 aa, synthetic construct
ENWRGDIHNL

SEQ ID NO: 107901 - protein, 10 aa, synthetic construct
ENFRGDIHNL

SEQ ID NO: 107902 - protein, 10 aa, synthetic construct
ENKRGDIHNL

SEQ ID NO: 107903 - protein, 10 aa, synthetic construct
ENRRGDIHNL

SEQ ID NO: 107904 - protein, 10 aa, synthetic construct
ENHRGDIHNL

SEQ ID NO: 107905 - protein, 10 aa, synthetic construct
ENSRGDIHNL

SEQ ID NO: 107906 - protein, 10 aa, synthetic construct
ENTRGDIHNL

SEQ ID NO: 107907 - protein, 10 aa, synthetic construct
ENYRGDIHNL

SEQ ID NO: 107908 - protein, 10 aa, synthetic construct
ENNRGDIHNL

SEQ ID NO: 107909 - protein, 10 aa, synthetic construct
ENQRGDIHNL

SEQ ID NO: 107910 - protein, 10 aa, synthetic construct
ENDRGDIHNL

SEQ ID NO: 107911 - protein, 10 aa, synthetic construct
ENERGDIHNL

SEQ ID NO: 107912 - protein, 10 aa, synthetic construct
EQGRGDIHNL

SEQ ID NO: 107913 - protein, 10 aa, synthetic construct
EQARGDIHNL

SEQ ID NO: 107914 - protein, 10 aa, synthetic construct
EQVRGDIHNL

SEQ ID NO: 107915 - protein, 10 aa, synthetic construct
EQPRGDIHNL

SEQ ID NO: 107916 - protein, 10 aa, synthetic construct
EQLRGDIHNL

SEQ ID NO: 107917 - protein, 10 aa, synthetic construct
EQIRGDIHNL

SEQ ID NO: 107918 - protein, 10 aa, synthetic construct
EQMRGDIHNL

SEQ ID NO: 107919 - protein, 10 aa, synthetic construct
EQWRGDIHNL

SEQ ID NO: 107920 - protein, 10 aa, synthetic construct
EQFRGDIHNL

SEQ ID NO: 107921 - protein, 10 aa, synthetic construct
EQKRGDIHNL

SEQ ID NO: 107922 - protein, 10 aa, synthetic construct
EQRRGDIHNL

SEQ ID NO: 107923 - protein, 10 aa, synthetic construct
EQHRGDIHNL

SEQ ID NO: 107924 - protein, 10 aa, synthetic construct
EQSRGDIHNL

SEQ ID NO: 107925 - protein, 10 aa, synthetic construct
EQTRGDIHNL

SEQ ID NO: 107926 - protein, 10 aa, synthetic construct
EQYRGDIHNL

SEQ ID NO: 107927 - protein, 10 aa, synthetic construct
EQNRGDIHNL

SEQ ID NO: 107928 - protein, 10 aa, synthetic construct
EQQRGDIHNL

SEQ ID NO: 107929 - protein, 10 aa, synthetic construct
EQDRGDIHNL

SEQ ID NO: 107930 - protein, 10 aa, synthetic construct
EQERGDIHNL

SEQ ID NO: 107931 - protein, 10 aa, synthetic construct
EDGRGDIHNL

SEQ ID NO: 107932 - protein, 10 aa, synthetic construct
EDARGDIHNL

SEQ ID NO: 107933 - protein, 10 aa, synthetic construct
EDVRGDIHNL

SEQ ID NO: 107934 - protein, 10 aa, synthetic construct
EDPRGDIHNL

SEQ ID NO: 107935 - protein, 10 aa, synthetic construct
EDLRGDIHNL

SEQ ID NO: 107936 - protein, 10 aa, synthetic construct
EDIRGDIHNL

SEQ ID NO: 107937 - protein, 10 aa, synthetic construct
EDMRGDIHNL

SEQ ID NO: 107938 - protein, 10 aa, synthetic construct
EDWRGDIHNL

SEQ ID NO: 107939 - protein, 10 aa, synthetic construct
EDFRGDIHNL

SEQ ID NO: 107940 - protein, 10 aa, synthetic construct
EDKRGDIHNL

SEQ ID NO: 107941 - protein, 10 aa, synthetic construct
EDRRGDIHNL

SEQ ID NO: 107942 - protein, 10 aa, synthetic construct
EDHRGDIHNL

SEQ ID NO: 107943 - protein, 10 aa, synthetic construct
EDSRGDIHNL

SEQ ID NO: 107944 - protein, 10 aa, synthetic construct
EDTRGDIHNL

SEQ ID NO: 107945 - protein, 10 aa, synthetic construct
EDYRGDIHNL

SEQ ID NO: 107946 - protein, 10 aa, synthetic construct
EDNRGDIHNL

SEQ ID NO: 107947 - protein, 10 aa, synthetic construct
EDQRGDIHNL

SEQ ID NO: 107948 - protein, 10 aa, synthetic construct
EDDRGDIHNL

SEQ ID NO: 107949 - protein, 10 aa, synthetic construct
EDERGDIHNL

SEQ ID NO: 107950 - protein, 10 aa, synthetic construct
EEGRGDIHNL

SEQ ID NO: 107951 - protein, 10 aa, synthetic construct
EEARGDIHNL

SEQ ID NO: 107952 - protein, 10 aa, synthetic construct
EEVRGDIHNL

SEQ ID NO: 107953 - protein, 10 aa, synthetic construct
EEPRGDIHNL

SEQ ID NO: 107954 - protein, 10 aa, synthetic construct
EELRGDIHNL

SEQ ID NO: 107955 - protein, 10 aa, synthetic construct
EEIRGDIHNL

SEQ ID NO: 107956 - protein, 10 aa, synthetic construct
EEMRGDIHNL

SEQ ID NO: 107957 - protein, 10 aa, synthetic construct
EEWRGDIHNL

SEQ ID NO: 107958 - protein, 10 aa, synthetic construct
EEFRGDIHNL

SEQ ID NO: 107959 - protein, 10 aa, synthetic construct
EEKRGDIHNL

SEQ ID NO: 107960 - protein, 10 aa, synthetic construct
EERRGDIHNL

SEQ ID NO: 107961 - protein, 10 aa, synthetic construct
EEHRGDIHNL

SEQ ID NO: 107962 - protein, 10 aa, synthetic construct
EESRGDIHNL

SEQ ID NO: 107963 - protein, 10 aa, synthetic construct
EETRGDIHNL

SEQ ID NO: 107964 - protein, 10 aa, synthetic construct
EEYRGDIHNL

SEQ ID NO: 107965 - protein, 10 aa, synthetic construct
EENRGDIHNL

SEQ ID NO: 107966 - protein, 10 aa, synthetic construct
EEQRGDIHNL

SEQ ID NO: 107967 - protein, 10 aa, synthetic construct
EEDRGDIHNL

SEQ ID NO: 107968 - protein, 10 aa, synthetic construct
EEERGDIHNL

SEQ ID NO: 107969 - protein, 10 aa, synthetic construct
NGGRGDIHNL

SEQ ID NO: 107970 - protein, 10 aa, synthetic construct
NGARGDIHNL

SEQ ID NO: 107971 - protein, 10 aa, synthetic construct
NGVRGDIHNL

SEQ ID NO: 107972 - protein, 10 aa, synthetic construct
NGPRGDIHNL

SEQ ID NO: 107973 - protein, 10 aa, synthetic construct
NGLRGDIHNL

SEQ ID NO: 107974 - protein, 10 aa, synthetic construct
NGIRGDIHNL

SEQ ID NO: 107975 - protein, 10 aa, synthetic construct
NGMRGDIHNL

SEQ ID NO: 107976 - protein, 10 aa, synthetic construct
NGWRGDIHNL

SEQ ID NO: 107977 - protein, 10 aa, synthetic construct
NGFRGDIHNL

SEQ ID NO: 107978 - protein, 10 aa, synthetic construct
NGKRGDIHNL

SEQ ID NO: 107979 - protein, 10 aa, synthetic construct
NGRRGDIHNL

SEQ ID NO: 107980 - protein, 10 aa, synthetic construct
NGHRGDIHNL

SEQ ID NO: 107981 - protein, 10 aa, synthetic construct
NGSRGDIHNL

SEQ ID NO: 107982 - protein, 10 aa, synthetic construct
NGTRGDIHNL

SEQ ID NO: 107983 - protein, 10 aa, synthetic construct
NGYRGDIHNL

SEQ ID NO: 107984 - protein, 10 aa, synthetic construct
NGNRGDIHNL

SEQ ID NO: 107985 - protein, 10 aa, synthetic construct
NGQRGDIHNL

SEQ ID NO: 107986 - protein, 10 aa, synthetic construct
NGDRGDIHNL

SEQ ID NO: 107987 - protein, 10 aa, synthetic construct
NGERGDIHNL

SEQ ID NO: 107988 - protein, 10 aa, synthetic construct
NAGRGDIHNL

SEQ ID NO: 107989 - protein, 10 aa, synthetic construct
NAARGDIHNL

SEQ ID NO: 107990 - protein, 10 aa, synthetic construct
NAVRGDIHNL

SEQ ID NO: 107991 - protein, 10 aa, synthetic construct
NAPRGDIHNL

SEQ ID NO: 107992 - protein, 10 aa, synthetic construct
NALRGDIHNL

SEQ ID NO: 107993 - protein, 10 aa, synthetic construct
NAIRGDIHNL

SEQ ID NO: 107994 - protein, 10 aa, synthetic construct
NAMRGDIHNL

SEQ ID NO: 107995 - protein, 10 aa, synthetic construct
NAWRGDIHNL

SEQ ID NO: 107996 - protein, 10 aa, synthetic construct
NAFRGDIHNL

SEQ ID NO: 107997 - protein, 10 aa, synthetic construct
NAKRGDIHNL

SEQ ID NO: 107998 - protein, 10 aa, synthetic construct
NARRGDIHNL

SEQ ID NO: 107999 - protein, 10 aa, synthetic construct
NAHRGDIHNL

SEQ ID NO: 108000 - protein, 10 aa, synthetic construct
NASRGDIHNL

SEQ ID NO: 108001 - protein, 10 aa, synthetic construct
NATRGDIHNL

SEQ ID NO: 108002 - protein, 10 aa, synthetic construct
NAYRGDIHNL

SEQ ID NO: 108003 - protein, 10 aa, synthetic construct
NANRGDIHNL

SEQ ID NO: 108004 - protein, 10 aa, synthetic construct
NAQRGDIHNL

SEQ ID NO: 108005 - protein, 10 aa, synthetic construct
NADRGDIHNL

SEQ ID NO: 108006 - protein, 10 aa, synthetic construct
NAERGDIHNL

SEQ ID NO: 108007 - protein, 10 aa, synthetic construct
NVGRGDIHNL

SEQ ID NO: 108008 - protein, 10 aa, synthetic construct
NVARGDIHNL

SEQ ID NO: 108009 - protein, 10 aa, synthetic construct
NVVRGDIHNL

SEQ ID NO: 108010 - protein, 10 aa, synthetic construct
NVPRGDIHNL

SEQ ID NO: 108011 - protein, 10 aa, synthetic construct
NVLRGDIHNL

SEQ ID NO: 108012 - protein, 10 aa, synthetic construct
NVIRGDIHNL

SEQ ID NO: 108013 - protein, 10 aa, synthetic construct
NVMRGDIHNL

SEQ ID NO: 108014 - protein, 10 aa, synthetic construct
NVWRGDIHNL

SEQ ID NO: 108015 - protein, 10 aa, synthetic construct
NVFRGDIHNL

SEQ ID NO: 108016 - protein, 10 aa, synthetic construct
NVKRGDIHNL

SEQ ID NO: 108017 - protein, 10 aa, synthetic construct
NVRRGDIHNL

SEQ ID NO: 108018 - protein, 10 aa, synthetic construct
NVHRGDIHNL

SEQ ID NO: 108019 - protein, 10 aa, synthetic construct
NVSRGDIHNL

SEQ ID NO: 108020 - protein, 10 aa, synthetic construct
NVTRGDIHNL

SEQ ID NO: 108021 - protein, 10 aa, synthetic construct
NVYRGDIHNL

SEQ ID NO: 108022 - protein, 10 aa, synthetic construct
NVNRGDIHNL

SEQ ID NO: 108023 - protein, 10 aa, synthetic construct
NVQRGDIHNL

SEQ ID NO: 108024 - protein, 10 aa, synthetic construct
NVDRGDIHNL

SEQ ID NO: 108025 - protein, 10 aa, synthetic construct
NVERGDIHNL

SEQ ID NO: 108026 - protein, 10 aa, synthetic construct
NPGRGDIHNL

SEQ ID NO: 108027 - protein, 10 aa, synthetic construct
NPARGDIHNL

SEQ ID NO: 108028 - protein, 10 aa, synthetic construct
NPVRGDIHNL

SEQ ID NO: 108029 - protein, 10 aa, synthetic construct
NPPRGDIHNL

SEQ ID NO: 108030 - protein, 10 aa, synthetic construct
NPLRGDIHNL

SEQ ID NO: 108031 - protein, 10 aa, synthetic construct
NPIRGDIHNL

SEQ ID NO: 108032 - protein, 10 aa, synthetic construct
NPMRGDIHNL

SEQ ID NO: 108033 - protein, 10 aa, synthetic construct
NPWRGDIHNL

SEQ ID NO: 108034 - protein, 10 aa, synthetic construct
NPFRGDIHNL

SEQ ID NO: 108035 - protein, 10 aa, synthetic construct
NPKRGDIHNL

SEQ ID NO: 108036 - protein, 10 aa, synthetic construct
NPRRGDIHNL

SEQ ID NO: 108037 - protein, 10 aa, synthetic construct
NPHRGDIHNL

SEQ ID NO: 108038 - protein, 10 aa, synthetic construct
NPSRGDIHNL

SEQ ID NO: 108039 - protein, 10 aa, synthetic construct
NPTRGDIHNL

SEQ ID NO: 108040 - protein, 10 aa, synthetic construct
NPYRGDIHNL

SEQ ID NO: 108041 - protein, 10 aa, synthetic construct
NPNRGDIHNL

SEQ ID NO: 108042 - protein, 10 aa, synthetic construct
NPQRGDIHNL

SEQ ID NO: 108043 - protein, 10 aa, synthetic construct
NPDRGDIHNL

SEQ ID NO: 108044 - protein, 10 aa, synthetic construct
NPERGDIHNL

SEQ ID NO: 108045 - protein, 10 aa, synthetic construct
NLGRGDIHNL

SEQ ID NO: 108046 - protein, 10 aa, synthetic construct
NLARGDIHNL

SEQ ID NO: 108047 - protein, 10 aa, synthetic construct
NLVRGDIHNL

SEQ ID NO: 108048 - protein, 10 aa, synthetic construct
NLPRGDIHNL

SEQ ID NO: 108049 - protein, 10 aa, synthetic construct
NLLRGDIHNL

SEQ ID NO: 108050 - protein, 10 aa, synthetic construct
NLIRGDIHNL

SEQ ID NO: 108051 - protein, 10 aa, synthetic construct
NLMRGDIHNL

SEQ ID NO: 108052 - protein, 10 aa, synthetic construct
NLWRGDIHNL

SEQ ID NO: 108053 - protein, 10 aa, synthetic construct
NLFRGDIHNL

SEQ ID NO: 108054 - protein, 10 aa, synthetic construct
NLKRGDIHNL

SEQ ID NO: 108055 - protein, 10 aa, synthetic construct
NLRRGDIHNL

SEQ ID NO: 108056 - protein, 10 aa, synthetic construct
NLHRGDIHNL

SEQ ID NO: 108057 - protein, 10 aa, synthetic construct
NLSRGDIHNL

SEQ ID NO: 108058 - protein, 10 aa, synthetic construct
NLTRGDIHNL

SEQ ID NO: 108059 - protein, 10 aa, synthetic construct
NLYRGDIHNL

SEQ ID NO: 108060 - protein, 10 aa, synthetic construct
NLNRGDIHNL

SEQ ID NO: 108061 - protein, 10 aa, synthetic construct
NLQRGDIHNL

SEQ ID NO: 108062 - protein, 10 aa, synthetic construct
NLDRGDIHNL

SEQ ID NO: 108063 - protein, 10 aa, synthetic construct
NLERGDIHNL

SEQ ID NO: 108064 - protein, 10 aa, synthetic construct
NIGRGDIHNL

SEQ ID NO: 108065 - protein, 10 aa, synthetic construct
NIARGDIHNL

SEQ ID NO: 108066 - protein, 10 aa, synthetic construct
NIVRGDIHNL

SEQ ID NO: 108067 - protein, 10 aa, synthetic construct
NIPRGDIHNL

SEQ ID NO: 108068 - protein, 10 aa, synthetic construct
NILRGDIHNL

SEQ ID NO: 108069 - protein, 10 aa, synthetic construct
NIIRGDIHNL

SEQ ID NO: 108070 - protein, 10 aa, synthetic construct
NIMRGDIHNL

SEQ ID NO: 108071 - protein, 10 aa, synthetic construct
NIWRGDIHNL

SEQ ID NO: 108072 - protein, 10 aa, synthetic construct
NIFRGDIHNL

SEQ ID NO: 108073 - protein, 10 aa, synthetic construct
NIKRGDIHNL

SEQ ID NO: 108074 - protein, 10 aa, synthetic construct
NIRRGDIHNL

SEQ ID NO: 108075 - protein, 10 aa, synthetic construct
NIHRGDIHNL

SEQ ID NO: 108076 - protein, 10 aa, synthetic construct
NISRGDIHNL

SEQ ID NO: 108077 - protein, 10 aa, synthetic construct
NITRGDIHNL

SEQ ID NO: 108078 - protein, 10 aa, synthetic construct
NIYRGDIHNL

SEQ ID NO: 108079 - protein, 10 aa, synthetic construct
NINRGDIHNL

SEQ ID NO: 108080 - protein, 10 aa, synthetic construct
NIQRGDIHNL

SEQ ID NO: 108081 - protein, 10 aa, synthetic construct
NIDRGDIHNL

SEQ ID NO: 108082 - protein, 10 aa, synthetic construct
NIERGDIHNL

SEQ ID NO: 108083 - protein, 10 aa, synthetic construct
NMGRGDIHNL

SEQ ID NO: 108084 - protein, 10 aa, synthetic construct
NMARGDIHNL

SEQ ID NO: 108085 - protein, 10 aa, synthetic construct
NMVRGDIHNL

SEQ ID NO: 108086 - protein, 10 aa, synthetic construct
NMPRGDIHNL

SEQ ID NO: 108087 - protein, 10 aa, synthetic construct
NMLRGDIHNL

SEQ ID NO: 108088 - protein, 10 aa, synthetic construct
NMIRGDIHNL

SEQ ID NO: 108089 - protein, 10 aa, synthetic construct
NMMRGDIHNL

SEQ ID NO: 108090 - protein, 10 aa, synthetic construct
NMWRGDIHNL

SEQ ID NO: 108091 - protein, 10 aa, synthetic construct
NMFRGDIHNL

SEQ ID NO: 108092 - protein, 10 aa, synthetic construct
NMKRGDIHNL

SEQ ID NO: 108093 - protein, 10 aa, synthetic construct
NMRRGDIHNL

SEQ ID NO: 108094 - protein, 10 aa, synthetic construct
NMHRGDIHNL

SEQ ID NO: 108095 - protein, 10 aa, synthetic construct
NMSRGDIHNL

SEQ ID NO: 108096 - protein, 10 aa, synthetic construct
NMTRGDIHNL

SEQ ID NO: 108097 - protein, 10 aa, synthetic construct
NMYRGDIHNL

SEQ ID NO: 108098 - protein, 10 aa, synthetic construct
NMNRGDIHNL

SEQ ID NO: 108099 - protein, 10 aa, synthetic construct
NMQRGDIHNL

SEQ ID NO: 108100 - protein, 10 aa, synthetic construct
NMDRGDIHNL

SEQ ID NO: 108101 - protein, 10 aa, synthetic construct
NMERGDIHNL

SEQ ID NO: 108102 - protein, 10 aa, synthetic construct
NWGRGDIHNL

SEQ ID NO: 108103 - protein, 10 aa, synthetic construct
NWARGDIHNL

SEQ ID NO: 108104 - protein, 10 aa, synthetic construct
NWVRGDIHNL

SEQ ID NO: 108105 - protein, 10 aa, synthetic construct
NWPRGDIHNL

SEQ ID NO: 108106 - protein, 10 aa, synthetic construct
NWLRGDIHNL

SEQ ID NO: 108107 - protein, 10 aa, synthetic construct
NWIRGDIHNL

SEQ ID NO: 108108 - protein, 10 aa, synthetic construct
NWMRGDIHNL

SEQ ID NO: 108109 - protein, 10 aa, synthetic construct
NWWRGDIHNL

SEQ ID NO: 108110 - protein, 10 aa, synthetic construct
NWFRGDIHNL

SEQ ID NO: 108111 - protein, 10 aa, synthetic construct
NWKRGDIHNL

SEQ ID NO: 108112 - protein, 10 aa, synthetic construct
NWRRGDIHNL

SEQ ID NO: 108113 - protein, 10 aa, synthetic construct
NWHRGDIHNL

SEQ ID NO: 108114 - protein, 10 aa, synthetic construct
NWSRGDIHNL

SEQ ID NO: 108115 - protein, 10 aa, synthetic construct
NWTRGDIHNL

SEQ ID NO: 108116 - protein, 10 aa, synthetic construct
NWYRGDIHNL

SEQ ID NO: 108117 - protein, 10 aa, synthetic construct
NWNRGDIHNL

SEQ ID NO: 108118 - protein, 10 aa, synthetic construct
NWQRGDIHNL

SEQ ID NO: 108119 - protein, 10 aa, synthetic construct
NWDRGDIHNL

SEQ ID NO: 108120 - protein, 10 aa, synthetic construct
NWERGDIHNL

SEQ ID NO: 108121 - protein, 10 aa, synthetic construct
NFGRGDIHNL

SEQ ID NO: 108122 - protein, 10 aa, synthetic construct
NFARGDIHNL

SEQ ID NO: 108123 - protein, 10 aa, synthetic construct
NFVRGDIHNL

SEQ ID NO: 108124 - protein, 10 aa, synthetic construct
NFPRGDIHNL

SEQ ID NO: 108125 - protein, 10 aa, synthetic construct
NFLRGDIHNL

SEQ ID NO: 108126 - protein, 10 aa, synthetic construct
NFIRGDIHNL

SEQ ID NO: 108127 - protein, 10 aa, synthetic construct
NFMRGDIHNL

SEQ ID NO: 108128 - protein, 10 aa, synthetic construct
NFWRGDIHNL

SEQ ID NO: 108129 - protein, 10 aa, synthetic construct
NFFRGDIHNL

SEQ ID NO: 108130 - protein, 10 aa, synthetic construct
NFKRGDIHNL

SEQ ID NO: 108131 - protein, 10 aa, synthetic construct
NFRRGDIHNL

SEQ ID NO: 108132 - protein, 10 aa, synthetic construct
NFHRGDIHNL

SEQ ID NO: 108133 - protein, 10 aa, synthetic construct
NFSRGDIHNL

SEQ ID NO: 108134 - protein, 10 aa, synthetic construct
NFTRGDIHNL

SEQ ID NO: 108135 - protein, 10 aa, synthetic construct
NFYRGDIHNL

SEQ ID NO: 108136 - protein, 10 aa, synthetic construct
NFNRGDIHNL

SEQ ID NO: 108137 - protein, 10 aa, synthetic construct
NFQRGDIHNL

SEQ ID NO: 108138 - protein, 10 aa, synthetic construct
NFDRGDIHNL

SEQ ID NO: 108139 - protein, 10 aa, synthetic construct
NFERGDIHNL

SEQ ID NO: 108140 - protein, 10 aa, synthetic construct
NKGRGDIHNL

SEQ ID NO: 108141 - protein, 10 aa, synthetic construct
NKARGDIHNL

SEQ ID NO: 108142 - protein, 10 aa, synthetic construct
NKVRGDIHNL

SEQ ID NO: 108143 - protein, 10 aa, synthetic construct
NKPRGDIHNL

SEQ ID NO: 108144 - protein, 10 aa, synthetic construct
NKLRGDIHNL

SEQ ID NO: 108145 - protein, 10 aa, synthetic construct
NKIRGDIHNL

SEQ ID NO: 108146 - protein, 10 aa, synthetic construct
NKMRGDIHNL

SEQ ID NO: 108147 - protein, 10 aa, synthetic construct
NKWRGDIHNL

SEQ ID NO: 108148 - protein, 10 aa, synthetic construct
NKFRGDIHNL

SEQ ID NO: 108149 - protein, 10 aa, synthetic construct
NKKRGDIHNL

SEQ ID NO: 108150 - protein, 10 aa, synthetic construct
NKRRGDIHNL

SEQ ID NO: 108151 - protein, 10 aa, synthetic construct
NKHRGDIHNL

SEQ ID NO: 108152 - protein, 10 aa, synthetic construct
NKSRGDIHNL

SEQ ID NO: 108153 - protein, 10 aa, synthetic construct
NKTRGDIHNL

SEQ ID NO: 108154 - protein, 10 aa, synthetic construct
NKYRGDIHNL

SEQ ID NO: 108155 - protein, 10 aa, synthetic construct
NKNRGDIHNL

SEQ ID NO: 108156 - protein, 10 aa, synthetic construct
NKQRGDIHNL

SEQ ID NO: 108157 - protein, 10 aa, synthetic construct
NKDRGDIHNL

SEQ ID NO: 108158 - protein, 10 aa, synthetic construct
NKERGDIHNL

SEQ ID NO: 108159 - protein, 10 aa, synthetic construct
NRGRGDIHNL

SEQ ID NO: 108160 - protein, 10 aa, synthetic construct
NRARGDIHNL

SEQ ID NO: 108161 - protein, 10 aa, synthetic construct
NRVRGDIHNL

SEQ ID NO: 108162 - protein, 10 aa, synthetic construct
NRPRGDIHNL

SEQ ID NO: 108163 - protein, 10 aa, synthetic construct
NRLRGDIHNL

SEQ ID NO: 108164 - protein, 10 aa, synthetic construct
NRIRGDIHNL

SEQ ID NO: 108165 - protein, 10 aa, synthetic construct
NRMRGDIHNL

SEQ ID NO: 108166 - protein, 10 aa, synthetic construct
NRWRGDIHNL

SEQ ID NO: 108167 - protein, 10 aa, synthetic construct
NRFRGDIHNL

SEQ ID NO: 108168 - protein, 10 aa, synthetic construct
NRKRGDIHNL

SEQ ID NO: 108169 - protein, 10 aa, synthetic construct
NRRRGDIHNL

SEQ ID NO: 108170 - protein, 10 aa, synthetic construct
NRHRGDIHNL

SEQ ID NO: 108171 - protein, 10 aa, synthetic construct
NRSRGDIHNL

SEQ ID NO: 108172 - protein, 10 aa, synthetic construct
NRTRGDIHNL

SEQ ID NO: 108173 - protein, 10 aa, synthetic construct
NRYRGDIHNL

SEQ ID NO: 108174 - protein, 10 aa, synthetic construct
NRNRGDIHNL

SEQ ID NO: 108175 - protein, 10 aa, synthetic construct
NRQRGDIHNL

SEQ ID NO: 108176 - protein, 10 aa, synthetic construct
NRDRGDIHNL

SEQ ID NO: 108177 - protein, 10 aa, synthetic construct
NRERGDIHNL

SEQ ID NO: 108178 - protein, 10 aa, synthetic construct
NHGRGDIHNL

SEQ ID NO: 108179 - protein, 10 aa, synthetic construct
NHARGDIHNL

SEQ ID NO: 108180 - protein, 10 aa, synthetic construct
NHVRGDIHNL

SEQ ID NO: 108181 - protein, 10 aa, synthetic construct
NHPRGDIHNL

SEQ ID NO: 108182 - protein, 10 aa, synthetic construct
NHLRGDIHNL

SEQ ID NO: 108183 - protein, 10 aa, synthetic construct
NHIRGDIHNL

SEQ ID NO: 108184 - protein, 10 aa, synthetic construct
NHMRGDIHNL

SEQ ID NO: 108185 - protein, 10 aa, synthetic construct
NHWRGDIHNL

SEQ ID NO: 108186 - protein, 10 aa, synthetic construct
NHFRGDIHNL

SEQ ID NO: 108187 - protein, 10 aa, synthetic construct
NHKRGDIHNL

SEQ ID NO: 108188 - protein, 10 aa, synthetic construct
NHRRGDIHNL

SEQ ID NO: 108189 - protein, 10 aa, synthetic construct
NHHRGDIHNL

SEQ ID NO: 108190 - protein, 10 aa, synthetic construct
NHSRGDIHNL

SEQ ID NO: 108191 - protein, 10 aa, synthetic construct
NHTRGDIHNL

SEQ ID NO: 108192 - protein, 10 aa, synthetic construct
NHYRGDIHNL

SEQ ID NO: 108193 - protein, 10 aa, synthetic construct
NHNRGDIHNL

SEQ ID NO: 108194 - protein, 10 aa, synthetic construct
NHQRGDIHNL

SEQ ID NO: 108195 - protein, 10 aa, synthetic construct
NHDRGDIHNL

SEQ ID NO: 108196 - protein, 10 aa, synthetic construct
NHERGDIHNL

SEQ ID NO: 108197 - protein, 10 aa, synthetic construct
NSGRGDIHNL

SEQ ID NO: 108198 - protein, 10 aa, synthetic construct
NSARGDIHNL

SEQ ID NO: 108199 - protein, 10 aa, synthetic construct
NSVRGDIHNL

SEQ ID NO: 108200 - protein, 10 aa, synthetic construct
NSPRGDIHNL

SEQ ID NO: 108201 - protein, 10 aa, synthetic construct
NSLRGDIHNL

SEQ ID NO: 108202 - protein, 10 aa, synthetic construct
NSIRGDIHNL

SEQ ID NO: 108203 - protein, 10 aa, synthetic construct
NSMRGDIHNL

SEQ ID NO: 108204 - protein, 10 aa, synthetic construct
NSWRGDIHNL

SEQ ID NO: 108205 - protein, 10 aa, synthetic construct
NSFRGDIHNL

SEQ ID NO: 108206 - protein, 10 aa, synthetic construct
NSKRGDIHNL

SEQ ID NO: 108207 - protein, 10 aa, synthetic construct
NSRRGDIHNL

SEQ ID NO: 108208 - protein, 10 aa, synthetic construct
NSHRGDIHNL

SEQ ID NO: 108209 - protein, 10 aa, synthetic construct
NSSRGDIHNL

SEQ ID NO: 108210 - protein, 10 aa, synthetic construct
NSTRGDIHNL

SEQ ID NO: 108211 - protein, 10 aa, synthetic construct
NSYRGDIHNL

SEQ ID NO: 108212 - protein, 10 aa, synthetic construct
NSNRGDIHNL

SEQ ID NO: 108213 - protein, 10 aa, synthetic construct
NSQRGDIHNL

SEQ ID NO: 108214 - protein, 10 aa, synthetic construct
NSDRGDIHNL

SEQ ID NO: 108215 - protein, 10 aa, synthetic construct
NSERGDIHNL

SEQ ID NO: 108216 - protein, 10 aa, synthetic construct
NTGRGDIHNL

SEQ ID NO: 108217 - protein, 10 aa, synthetic construct
NTARGDIHNL

SEQ ID NO: 108218 - protein, 10 aa, synthetic construct
NTVRGDIHNL

SEQ ID NO: 108219 - protein, 10 aa, synthetic construct
NTPRGDIHNL

SEQ ID NO: 108220 - protein, 10 aa, synthetic construct
NTLRGDIHNL

SEQ ID NO: 108221 - protein, 10 aa, synthetic construct
NTIRGDIHNL

SEQ ID NO: 108222 - protein, 10 aa, synthetic construct
NTMRGDIHNL

SEQ ID NO: 108223 - protein, 10 aa, synthetic construct
NTWRGDIHNL

SEQ ID NO: 108224 - protein, 10 aa, synthetic construct
NTFRGDIHNL

SEQ ID NO: 108225 - protein, 10 aa, synthetic construct
NTKRGDIHNL

SEQ ID NO: 108226 - protein, 10 aa, synthetic construct
NTRRGDIHNL

SEQ ID NO: 108227 - protein, 10 aa, synthetic construct
NTHRGDIHNL

SEQ ID NO: 108228 - protein, 10 aa, synthetic construct
NTSRGDIHNL

SEQ ID NO: 108229 - protein, 10 aa, synthetic construct
NTTRGDIHNL

SEQ ID NO: 108230 - protein, 10 aa, synthetic construct
NTYRGDIHNL

SEQ ID NO: 108231 - protein, 10 aa, synthetic construct
NTNRGDIHNL

SEQ ID NO: 108232 - protein, 10 aa, synthetic construct
NTQRGDIHNL

SEQ ID NO: 108233 - protein, 10 aa, synthetic construct
NTDRGDIHNL

SEQ ID NO: 108234 - protein, 10 aa, synthetic construct
NTERGDIHNL

SEQ ID NO: 108235 - protein, 10 aa, synthetic construct
NYGRGDIHNL

SEQ ID NO: 108236 - protein, 10 aa, synthetic construct
NYARGDIHNL

SEQ ID NO: 108237 - protein, 10 aa, synthetic construct
NYVRGDIHNL

SEQ ID NO: 108238 - protein, 10 aa, synthetic construct
NYPRGDIHNL

SEQ ID NO: 108239 - protein, 10 aa, synthetic construct
NYLRGDIHNL

SEQ ID NO: 108240 - protein, 10 aa, synthetic construct
NYIRGDIHNL

SEQ ID NO: 108241 - protein, 10 aa, synthetic construct
NYMRGDIHNL

SEQ ID NO: 108242 - protein, 10 aa, synthetic construct
NYWRGDIHNL

SEQ ID NO: 108243 - protein, 10 aa, synthetic construct
NYFRGDIHNL

SEQ ID NO: 108244 - protein, 10 aa, synthetic construct
NYKRGDIHNL

SEQ ID NO: 108245 - protein, 10 aa, synthetic construct
NYRRGDIHNL

SEQ ID NO: 108246 - protein, 10 aa, synthetic construct
NYHRGDIHNL

SEQ ID NO: 108247 - protein, 10 aa, synthetic construct
NYSRGDIHNL

SEQ ID NO: 108248 - protein, 10 aa, synthetic construct
NYTRGDIHNL

SEQ ID NO: 108249 - protein, 10 aa, synthetic construct
NYYRGDIHNL

SEQ ID NO: 108250 - protein, 10 aa, synthetic construct
NYNRGDIHNL

SEQ ID NO: 108251 - protein, 10 aa, synthetic construct
NYQRGDIHNL

SEQ ID NO: 108252 - protein, 10 aa, synthetic construct
NYDRGDIHNL

SEQ ID NO: 108253 - protein, 10 aa, synthetic construct
NYERGDIHNL

SEQ ID NO: 108254 - protein, 10 aa, synthetic construct
NNGRGDIHNL

SEQ ID NO: 108255 - protein, 10 aa, synthetic construct
NNARGDIHNL

SEQ ID NO: 108256 - protein, 10 aa, synthetic construct
NNVRGDIHNL

SEQ ID NO: 108257 - protein, 10 aa, synthetic construct
NNPRGDIHNL

SEQ ID NO: 108258 - protein, 10 aa, synthetic construct
NNLRGDIHNL

SEQ ID NO: 108259 - protein, 10 aa, synthetic construct
NNIRGDIHNL

SEQ ID NO: 108260 - protein, 10 aa, synthetic construct
NNMRGDIHNL

SEQ ID NO: 108261 - protein, 10 aa, synthetic construct
NNWRGDIHNL

SEQ ID NO: 108262 - protein, 10 aa, synthetic construct
NNFRGDIHNL

SEQ ID NO: 108263 - protein, 10 aa, synthetic construct
NNKRGDIHNL

SEQ ID NO: 108264 - protein, 10 aa, synthetic construct
NNRRGDIHNL

SEQ ID NO: 108265 - protein, 10 aa, synthetic construct
NNHRGDIHNL

SEQ ID NO: 108266 - protein, 10 aa, synthetic construct
NNSRGDIHNL

SEQ ID NO: 108267 - protein, 10 aa, synthetic construct
NNTRGDIHNL

SEQ ID NO: 108268 - protein, 10 aa, synthetic construct
NNYRGDIHNL

SEQ ID NO: 108269 - protein, 10 aa, synthetic construct
NNNRGDIHNL

SEQ ID NO: 108270 - protein, 10 aa, synthetic construct
NNQRGDIHNL

SEQ ID NO: 108271 - protein, 10 aa, synthetic construct
NNDRGDIHNL

SEQ ID NO: 108272 - protein, 10 aa, synthetic construct
NNERGDIHNL

SEQ ID NO: 108273 - protein, 10 aa, synthetic construct
NQGRGDIHNL

SEQ ID NO: 108274 - protein, 10 aa, synthetic construct
NQARGDIHNL

SEQ ID NO: 108275 - protein, 10 aa, synthetic construct
NQVRGDIHNL

SEQ ID NO: 108276 - protein, 10 aa, synthetic construct
NQPRGDIHNL

SEQ ID NO: 108277 - protein, 10 aa, synthetic construct
NQLRGDIHNL

SEQ ID NO: 108278 - protein, 10 aa, synthetic construct
NQIRGDIHNL

SEQ ID NO: 108279 - protein, 10 aa, synthetic construct
NQMRGDIHNL

SEQ ID NO: 108280 - protein, 10 aa, synthetic construct
NQWRGDIHNL

SEQ ID NO: 108281 - protein, 10 aa, synthetic construct
NQFRGDIHNL

SEQ ID NO: 108282 - protein, 10 aa, synthetic construct
NQKRGDIHNL

SEQ ID NO: 108283 - protein, 10 aa, synthetic construct
NQRRGDIHNL

SEQ ID NO: 108284 - protein, 10 aa, synthetic construct
NQHRGDIHNL

SEQ ID NO: 108285 - protein, 10 aa, synthetic construct
NQSRGDIHNL

SEQ ID NO: 108286 - protein, 10 aa, synthetic construct
NQTRGDIHNL

SEQ ID NO: 108287 - protein, 10 aa, synthetic construct
NQYRGDIHNL

SEQ ID NO: 108288 - protein, 10 aa, synthetic construct
NQNRGDIHNL

SEQ ID NO: 108289 - protein, 10 aa, synthetic construct
NQQRGDIHNL

SEQ ID NO: 108290 - protein, 10 aa, synthetic construct
NQDRGDIHNL

SEQ ID NO: 108291 - protein, 10 aa, synthetic construct
NQERGDIHNL

SEQ ID NO: 108292 - protein, 10 aa, synthetic construct
NDGRGDIHNL

SEQ ID NO: 108293 - protein, 10 aa, synthetic construct
NDARGDIHNL

SEQ ID NO: 108294 - protein, 10 aa, synthetic construct
NDVRGDIHNL

SEQ ID NO: 108295 - protein, 10 aa, synthetic construct
NDPRGDIHNL

SEQ ID NO: 108296 - protein, 10 aa, synthetic construct
NDLRGDIHNL

SEQ ID NO: 108297 - protein, 10 aa, synthetic construct
NDIRGDIHNL

SEQ ID NO: 108298 - protein, 10 aa, synthetic construct
NDMRGDIHNL

SEQ ID NO: 108299 - protein, 10 aa, synthetic construct
NDWRGDIHNL

SEQ ID NO: 108300 - protein, 10 aa, synthetic construct
NDFRGDIHNL

SEQ ID NO: 108301 - protein, 10 aa, synthetic construct
NDKRGDIHNL

SEQ ID NO: 108302 - protein, 10 aa, synthetic construct
NDRRGDIHNL

SEQ ID NO: 108303 - protein, 10 aa, synthetic construct
NDHRGDIHNL

SEQ ID NO: 108304 - protein, 10 aa, synthetic construct
NDSRGDIHNL

SEQ ID NO: 108305 - protein, 10 aa, synthetic construct
NDTRGDIHNL

SEQ ID NO: 108306 - protein, 10 aa, synthetic construct
NDYRGDIHNL

SEQ ID NO: 108307 - protein, 10 aa, synthetic construct
NDNRGDIHNL

SEQ ID NO: 108308 - protein, 10 aa, synthetic construct
NDQRGDIHNL

SEQ ID NO: 108309 - protein, 10 aa, synthetic construct
NDDRGDIHNL

SEQ ID NO: 108310 - protein, 10 aa, synthetic construct
NDERGDIHNL

SEQ ID NO: 108311 - protein, 10 aa, synthetic construct
NEGRGDIHNL

SEQ ID NO: 108312 - protein, 10 aa, synthetic construct
NEARGDIHNL

SEQ ID NO: 108313 - protein, 10 aa, synthetic construct
NEVRGDIHNL

SEQ ID NO: 108314 - protein, 10 aa, synthetic construct
NEPRGDIHNL

SEQ ID NO: 108315 - protein, 10 aa, synthetic construct
NELRGDIHNL

SEQ ID NO: 108316 - protein, 10 aa, synthetic construct
NEIRGDIHNL

SEQ ID NO: 108317 - protein, 10 aa, synthetic construct
NEMRGDIHNL

SEQ ID NO: 108318 - protein, 10 aa, synthetic construct
NEWRGDIHNL

SEQ ID NO: 108319 - protein, 10 aa, synthetic construct
NEFRGDIHNL

SEQ ID NO: 108320 - protein, 10 aa, synthetic construct
NEKRGDIHNL

SEQ ID NO: 108321 - protein, 10 aa, synthetic construct
NERRGDIHNL

SEQ ID NO: 108322 - protein, 10 aa, synthetic construct
NEHRGDIHNL

SEQ ID NO: 108323 - protein, 10 aa, synthetic construct
NESRGDIHNL

SEQ ID NO: 108324 - protein, 10 aa, synthetic construct
NETRGDIHNL

SEQ ID NO: 108325 - protein, 10 aa, synthetic construct
NEYRGDIHNL

SEQ ID NO: 108326 - protein, 10 aa, synthetic construct
NENRGDIHNL

SEQ ID NO: 108327 - protein, 10 aa, synthetic construct
NEQRGDIHNL

SEQ ID NO: 108328 - protein, 10 aa, synthetic construct
NEDRGDIHNL

SEQ ID NO: 108329 - protein, 10 aa, synthetic construct
NEERGDIHNL

SEQ ID NO: 108330 - protein, 10 aa, synthetic construct
DGGRGDIHNL

SEQ ID NO: 108331 - protein, 10 aa, synthetic construct
DGARGDIHNL

SEQ ID NO: 108332 - protein, 10 aa, synthetic construct
DGVRGDIHNL

SEQ ID NO: 108333 - protein, 10 aa, synthetic construct
DGPRGDIHNL

SEQ ID NO: 108334 - protein, 10 aa, synthetic construct
DGLRGDIHNL

SEQ ID NO: 108335 - protein, 10 aa, synthetic construct
DGIRGDIHNL

SEQ ID NO: 108336 - protein, 10 aa, synthetic construct
DGMRGDIHNL

SEQ ID NO: 108337 - protein, 10 aa, synthetic construct
DGWRGDIHNL

SEQ ID NO: 108338 - protein, 10 aa, synthetic construct
DGFRGDIHNL

SEQ ID NO: 108339 - protein, 10 aa, synthetic construct
DGKRGDIHNL

SEQ ID NO: 108340 - protein, 10 aa, synthetic construct
DGRRGDIHNL

SEQ ID NO: 108341 - protein, 10 aa, synthetic construct
DGHRGDIHNL

SEQ ID NO: 108342 - protein, 10 aa, synthetic construct
DGSRGDIHNL

SEQ ID NO: 108343 - protein, 10 aa, synthetic construct
DGTRGDIHNL

SEQ ID NO: 108344 - protein, 10 aa, synthetic construct
DGYRGDIHNL

SEQ ID NO: 108345 - protein, 10 aa, synthetic construct
DGNRGDIHNL

SEQ ID NO: 108346 - protein, 10 aa, synthetic construct
DGQRGDIHNL

SEQ ID NO: 108347 - protein, 10 aa, synthetic construct
DGDRGDIHNL

SEQ ID NO: 108348 - protein, 10 aa, synthetic construct
DGERGDIHNL

SEQ ID NO: 108349 - protein, 10 aa, synthetic construct
DAGRGDIHNL

SEQ ID NO: 108350 - protein, 10 aa, synthetic construct
DAARGDIHNL

SEQ ID NO: 108351 - protein, 10 aa, synthetic construct
DAVRGDIHNL

SEQ ID NO: 108352 - protein, 10 aa, synthetic construct
DAPRGDIHNL

SEQ ID NO: 108353 - protein, 10 aa, synthetic construct
DALRGDIHNL

SEQ ID NO: 108354 - protein, 10 aa, synthetic construct
DAIRGDIHNL

SEQ ID NO: 108355 - protein, 10 aa, synthetic construct
DAMRGDIHNL

SEQ ID NO: 108356 - protein, 10 aa, synthetic construct
DAWRGDIHNL

SEQ ID NO: 108357 - protein, 10 aa, synthetic construct
DAFRGDIHNL

SEQ ID NO: 108358 - protein, 10 aa, synthetic construct
DAKRGDIHNL

SEQ ID NO: 108359 - protein, 10 aa, synthetic construct
DARRGDIHNL

SEQ ID NO: 108360 - protein, 10 aa, synthetic construct
DAHRGDIHNL

SEQ ID NO: 108361 - protein, 10 aa, synthetic construct
DASRGDIHNL

SEQ ID NO: 108362 - protein, 10 aa, synthetic construct
DATRGDIHNL

SEQ ID NO: 108363 - protein, 10 aa, synthetic construct
DAYRGDIHNL

SEQ ID NO: 108364 - protein, 10 aa, synthetic construct
DANRGDIHNL

SEQ ID NO: 108365 - protein, 10 aa, synthetic construct
DAQRGDIHNL

SEQ ID NO: 108366 - protein, 10 aa, synthetic construct
DADRGDIHNL

SEQ ID NO: 108367 - protein, 10 aa, synthetic construct
DAERGDIHNL

SEQ ID NO: 108368 - protein, 10 aa, synthetic construct
DVGRGDIHNL

SEQ ID NO: 108369 - protein, 10 aa, synthetic construct
DVARGDIHNL

SEQ ID NO: 108370 - protein, 10 aa, synthetic construct
DVVRGDIHNL

SEQ ID NO: 108371 - protein, 10 aa, synthetic construct
DVPRGDIHNL

SEQ ID NO: 108372 - protein, 10 aa, synthetic construct
DVLRGDIHNL

SEQ ID NO: 108373 - protein, 10 aa, synthetic construct
DVIRGDIHNL

SEQ ID NO: 108374 - protein, 10 aa, synthetic construct
DVMRGDIHNL

SEQ ID NO: 108375 - protein, 10 aa, synthetic construct
DVWRGDIHNL

SEQ ID NO: 108376 - protein, 10 aa, synthetic construct
DVFRGDIHNL

SEQ ID NO: 108377 - protein, 10 aa, synthetic construct
DVKRGDIHNL

SEQ ID NO: 108378 - protein, 10 aa, synthetic construct
DVRRGDIHNL

SEQ ID NO: 108379 - protein, 10 aa, synthetic construct
DVHRGDIHNL

SEQ ID NO: 108380 - protein, 10 aa, synthetic construct
DVSRGDIHNL

SEQ ID NO: 108381 - protein, 10 aa, synthetic construct
DVTRGDIHNL

SEQ ID NO: 108382 - protein, 10 aa, synthetic construct
DVYRGDIHNL

SEQ ID NO: 108383 - protein, 10 aa, synthetic construct
DVNRGDIHNL

SEQ ID NO: 108384 - protein, 10 aa, synthetic construct
DVQRGDIHNL

SEQ ID NO: 108385 - protein, 10 aa, synthetic construct
DVDRGDIHNL

SEQ ID NO: 108386 - protein, 10 aa, synthetic construct
DVERGDIHNL

SEQ ID NO: 108387 - protein, 10 aa, synthetic construct
DPGRGDIHNL

SEQ ID NO: 108388 - protein, 10 aa, synthetic construct
DPARGDIHNL

SEQ ID NO: 108389 - protein, 10 aa, synthetic construct
DPVRGDIHNL

SEQ ID NO: 108390 - protein, 10 aa, synthetic construct
DPPRGDIHNL

SEQ ID NO: 108391 - protein, 10 aa, synthetic construct
DPLRGDIHNL

SEQ ID NO: 108392 - protein, 10 aa, synthetic construct
DPIRGDIHNL

SEQ ID NO: 108393 - protein, 10 aa, synthetic construct
DPMRGDIHNL

SEQ ID NO: 108394 - protein, 10 aa, synthetic construct
DPWRGDIHNL

SEQ ID NO: 108395 - protein, 10 aa, synthetic construct
DPFRGDIHNL

SEQ ID NO: 108396 - protein, 10 aa, synthetic construct
DPKRGDIHNL

SEQ ID NO: 108397 - protein, 10 aa, synthetic construct
DPRRGDIHNL

SEQ ID NO: 108398 - protein, 10 aa, synthetic construct
DPHRGDIHNL

SEQ ID NO: 108399 - protein, 10 aa, synthetic construct
DPSRGDIHNL

SEQ ID NO: 108400 - protein, 10 aa, synthetic construct
DPTRGDIHNL

SEQ ID NO: 108401 - protein, 10 aa, synthetic construct
DPYRGDIHNL

SEQ ID NO: 108402 - protein, 10 aa, synthetic construct
DPNRGDIHNL

SEQ ID NO: 108403 - protein, 10 aa, synthetic construct
DPQRGDIHNL

SEQ ID NO: 108404 - protein, 10 aa, synthetic construct
DPDRGDIHNL

SEQ ID NO: 108405 - protein, 10 aa, synthetic construct
DPERGDIHNL

SEQ ID NO: 108406 - protein, 10 aa, synthetic construct
DLGRGDIHNL

SEQ ID NO: 108407 - protein, 10 aa, synthetic construct
DLARGDIHNL

SEQ ID NO: 108408 - protein, 10 aa, synthetic construct
DLVRGDIHNL

SEQ ID NO: 108409 - protein, 10 aa, synthetic construct
DLPRGDIHNL

SEQ ID NO: 108410 - protein, 10 aa, synthetic construct
DLLRGDIHNL

SEQ ID NO: 108411 - protein, 10 aa, synthetic construct
DLIRGDIHNL

SEQ ID NO: 108412 - protein, 10 aa, synthetic construct
DLMRGDIHNL

SEQ ID NO: 108413 - protein, 10 aa, synthetic construct
DLWRGDIHNL

SEQ ID NO: 108414 - protein, 10 aa, synthetic construct
DLFRGDIHNL

SEQ ID NO: 108415 - protein, 10 aa, synthetic construct
DLKRGDIHNL

SEQ ID NO: 108416 - protein, 10 aa, synthetic construct
DLRRGDIHNL

SEQ ID NO: 108417 - protein, 10 aa, synthetic construct
DLHRGDIHNL

SEQ ID NO: 108418 - protein, 10 aa, synthetic construct
DLSRGDIHNL

SEQ ID NO: 108419 - protein, 10 aa, synthetic construct
DLTRGDIHNL

SEQ ID NO: 108420 - protein, 10 aa, synthetic construct
DLYRGDIHNL

SEQ ID NO: 108421 - protein, 10 aa, synthetic construct
DLNRGDIHNL

SEQ ID NO: 108422 - protein, 10 aa, synthetic construct
DLQRGDIHNL

SEQ ID NO: 108423 - protein, 10 aa, synthetic construct
DLDRGDIHNL

SEQ ID NO: 108424 - protein, 10 aa, synthetic construct
DLERGDIHNL

SEQ ID NO: 108425 - protein, 10 aa, synthetic construct
DIGRGDIHNL

SEQ ID NO: 108426 - protein, 10 aa, synthetic construct
DIARGDIHNL

SEQ ID NO: 108427 - protein, 10 aa, synthetic construct
DIVRGDIHNL

SEQ ID NO: 108428 - protein, 10 aa, synthetic construct
DIPRGDIHNL

SEQ ID NO: 108429 - protein, 10 aa, synthetic construct
DILRGDIHNL

SEQ ID NO: 108430 - protein, 10 aa, synthetic construct
DIIRGDIHNL

SEQ ID NO: 108431 - protein, 10 aa, synthetic construct
DIMRGDIHNL

SEQ ID NO: 108432 - protein, 10 aa, synthetic construct
DIWRGDIHNL

SEQ ID NO: 108433 - protein, 10 aa, synthetic construct
DIFRGDIHNL

SEQ ID NO: 108434 - protein, 10 aa, synthetic construct
DIKRGDIHNL

SEQ ID NO: 108435 - protein, 10 aa, synthetic construct
DIRRGDIHNL

SEQ ID NO: 108436 - protein, 10 aa, synthetic construct
DIHRGDIHNL

SEQ ID NO: 108437 - protein, 10 aa, synthetic construct
DISRGDIHNL

SEQ ID NO: 108438 - protein, 10 aa, synthetic construct
DITRGDIHNL

SEQ ID NO: 108439 - protein, 10 aa, synthetic construct
DIYRGDIHNL

SEQ ID NO: 108440 - protein, 10 aa, synthetic construct
DINRGDIHNL

SEQ ID NO: 108441 - protein, 10 aa, synthetic construct
DIQRGDIHNL

SEQ ID NO: 108442 - protein, 10 aa, synthetic construct
DIDRGDIHNL

SEQ ID NO: 108443 - protein, 10 aa, synthetic construct
DIERGDIHNL

SEQ ID NO: 108444 - protein, 10 aa, synthetic construct
DMGRGDIHNL

SEQ ID NO: 108445 - protein, 10 aa, synthetic construct
DMARGDIHNL

SEQ ID NO: 108446 - protein, 10 aa, synthetic construct
DMVRGDIHNL

SEQ ID NO: 108447 - protein, 10 aa, synthetic construct
DMPRGDIHNL

SEQ ID NO: 108448 - protein, 10 aa, synthetic construct
DMLRGDIHNL

SEQ ID NO: 108449 - protein, 10 aa, synthetic construct
DMIRGDIHNL

SEQ ID NO: 108450 - protein, 10 aa, synthetic construct
DMMRGDIHNL

SEQ ID NO: 108451 - protein, 10 aa, synthetic construct
DMWRGDIHNL

SEQ ID NO: 108452 - protein, 10 aa, synthetic construct
DMFRGDIHNL

SEQ ID NO: 108453 - protein, 10 aa, synthetic construct
DMKRGDIHNL

SEQ ID NO: 108454 - protein, 10 aa, synthetic construct
DMRRGDIHNL

SEQ ID NO: 108455 - protein, 10 aa, synthetic construct
DMHRGDIHNL

SEQ ID NO: 108456 - protein, 10 aa, synthetic construct
DMSRGDIHNL

SEQ ID NO: 108457 - protein, 10 aa, synthetic construct
DMTRGDIHNL

SEQ ID NO: 108458 - protein, 10 aa, synthetic construct
DMYRGDIHNL

SEQ ID NO: 108459 - protein, 10 aa, synthetic construct
DMNRGDIHNL

SEQ ID NO: 108460 - protein, 10 aa, synthetic construct
DMQRGDIHNL

SEQ ID NO: 108461 - protein, 10 aa, synthetic construct
DMDRGDIHNL

SEQ ID NO: 108462 - protein, 10 aa, synthetic construct
DMERGDIHNL

SEQ ID NO: 108463 - protein, 10 aa, synthetic construct
DWGRGDIHNL

SEQ ID NO: 108464 - protein, 10 aa, synthetic construct
DWARGDIHNL

SEQ ID NO: 108465 - protein, 10 aa, synthetic construct
DWVRGDIHNL

SEQ ID NO: 108466 - protein, 10 aa, synthetic construct
DWPRGDIHNL

SEQ ID NO: 108467 - protein, 10 aa, synthetic construct
DWLRGDIHNL

SEQ ID NO: 108468 - protein, 10 aa, synthetic construct
DWIRGDIHNL

SEQ ID NO: 108469 - protein, 10 aa, synthetic construct
DWMRGDIHNL

SEQ ID NO: 108470 - protein, 10 aa, synthetic construct
DWWRGDIHNL

SEQ ID NO: 108471 - protein, 10 aa, synthetic construct
DWFRGDIHNL

SEQ ID NO: 108472 - protein, 10 aa, synthetic construct
DWKRGDIHNL

SEQ ID NO: 108473 - protein, 10 aa, synthetic construct
DWRRGDIHNL

SEQ ID NO: 108474 - protein, 10 aa, synthetic construct
DWHRGDIHNL

SEQ ID NO: 108475 - protein, 10 aa, synthetic construct
DWSRGDIHNL

SEQ ID NO: 108476 - protein, 10 aa, synthetic construct
DWTRGDIHNL

SEQ ID NO: 108477 - protein, 10 aa, synthetic construct
DWYRGDIHNL

SEQ ID NO: 108478 - protein, 10 aa, synthetic construct
DWNRGDIHNL

SEQ ID NO: 108479 - protein, 10 aa, synthetic construct
DWQRGDIHNL

SEQ ID NO: 108480 - protein, 10 aa, synthetic construct
DWDRGDIHNL

SEQ ID NO: 108481 - protein, 10 aa, synthetic construct
DWERGDIHNL

SEQ ID NO: 108482 - protein, 10 aa, synthetic construct
DFGRGDIHNL

SEQ ID NO: 108483 - protein, 10 aa, synthetic construct
DFARGDIHNL

SEQ ID NO: 108484 - protein, 10 aa, synthetic construct
DFVRGDIHNL

SEQ ID NO: 108485 - protein, 10 aa, synthetic construct
DFPRGDIHNL

SEQ ID NO: 108486 - protein, 10 aa, synthetic construct
DFLRGDIHNL

SEQ ID NO: 108487 - protein, 10 aa, synthetic construct
DFIRGDIHNL

SEQ ID NO: 108488 - protein, 10 aa, synthetic construct
DFMRGDIHNL

SEQ ID NO: 108489 - protein, 10 aa, synthetic construct
DFWRGDIHNL

SEQ ID NO: 108490 - protein, 10 aa, synthetic construct
DFFRGDIHNL

SEQ ID NO: 108491 - protein, 10 aa, synthetic construct
DFKRGDIHNL

SEQ ID NO: 108492 - protein, 10 aa, synthetic construct
DFRRGDIHNL

SEQ ID NO: 108493 - protein, 10 aa, synthetic construct
DFHRGDIHNL

SEQ ID NO: 108494 - protein, 10 aa, synthetic construct
DFSRGDIHNL

SEQ ID NO: 108495 - protein, 10 aa, synthetic construct
DFTRGDIHNL

SEQ ID NO: 108496 - protein, 10 aa, synthetic construct
DFYRGDIHNL

SEQ ID NO: 108497 - protein, 10 aa, synthetic construct
DFNRGDIHNL

SEQ ID NO: 108498 - protein, 10 aa, synthetic construct
DFQRGDIHNL

SEQ ID NO: 108499 - protein, 10 aa, synthetic construct
DFDRGDIHNL

SEQ ID NO: 108500 - protein, 10 aa, synthetic construct
DFERGDIHNL

SEQ ID NO: 108501 - protein, 10 aa, synthetic construct
DKGRGDIHNL

SEQ ID NO: 108502 - protein, 10 aa, synthetic construct
DKARGDIHNL

SEQ ID NO: 108503 - protein, 10 aa, synthetic construct
DKVRGDIHNL

SEQ ID NO: 108504 - protein, 10 aa, synthetic construct
DKPRGDIHNL

SEQ ID NO: 108505 - protein, 10 aa, synthetic construct
DKLRGDIHNL

SEQ ID NO: 108506 - protein, 10 aa, synthetic construct
DKIRGDIHNL

SEQ ID NO: 108507 - protein, 10 aa, synthetic construct
DKMRGDIHNL

SEQ ID NO: 108508 - protein, 10 aa, synthetic construct
DKWRGDIHNL

SEQ ID NO: 108509 - protein, 10 aa, synthetic construct
DKFRGDIHNL

SEQ ID NO: 108510 - protein, 10 aa, synthetic construct
DKKRGDIHNL

SEQ ID NO: 108511 - protein, 10 aa, synthetic construct
DKRRGDIHNL

SEQ ID NO: 108512 - protein, 10 aa, synthetic construct
DKHRGDIHNL

SEQ ID NO: 108513 - protein, 10 aa, synthetic construct
DKSRGDIHNL

SEQ ID NO: 108514 - protein, 10 aa, synthetic construct
DKTRGDIHNL

SEQ ID NO: 108515 - protein, 10 aa, synthetic construct
DKYRGDIHNL

SEQ ID NO: 108516 - protein, 10 aa, synthetic construct
DKNRGDIHNL

SEQ ID NO: 108517 - protein, 10 aa, synthetic construct
DKQRGDIHNL

SEQ ID NO: 108518 - protein, 10 aa, synthetic construct
DKDRGDIHNL

SEQ ID NO: 108519 - protein, 10 aa, synthetic construct
DKERGDIHNL

SEQ ID NO: 108520 - protein, 10 aa, synthetic construct
DRGRGDIHNL

SEQ ID NO: 108521 - protein, 10 aa, synthetic construct
DRARGDIHNL

SEQ ID NO: 108522 - protein, 10 aa, synthetic construct
DRVRGDIHNL

SEQ ID NO: 108523 - protein, 10 aa, synthetic construct
DRPRGDIHNL

SEQ ID NO: 108524 - protein, 10 aa, synthetic construct
DRLRGDIHNL

SEQ ID NO: 108525 - protein, 10 aa, synthetic construct
DRIRGDIHNL

SEQ ID NO: 108526 - protein, 10 aa, synthetic construct
DRMRGDIHNL

SEQ ID NO: 108527 - protein, 10 aa, synthetic construct
DRWRGDIHNL

SEQ ID NO: 108528 - protein, 10 aa, synthetic construct
DRFRGDIHNL

SEQ ID NO: 108529 - protein, 10 aa, synthetic construct
DRKRGDIHNL

SEQ ID NO: 108530 - protein, 10 aa, synthetic construct
DRRRGDIHNL

SEQ ID NO: 108531 - protein, 10 aa, synthetic construct
DRHRGDIHNL

SEQ ID NO: 108532 - protein, 10 aa, synthetic construct
DRSRGDIHNL

SEQ ID NO: 108533 - protein, 10 aa, synthetic construct
DRTRGDIHNL

SEQ ID NO: 108534 - protein, 10 aa, synthetic construct
DRYRGDIHNL

SEQ ID NO: 108535 - protein, 10 aa, synthetic construct
DRNRGDIHNL

SEQ ID NO: 108536 - protein, 10 aa, synthetic construct
DRQRGDIHNL

SEQ ID NO: 108537 - protein, 10 aa, synthetic construct
DRDRGDIHNL

SEQ ID NO: 108538 - protein, 10 aa, synthetic construct
DRERGDIHNL

SEQ ID NO: 108539 - protein, 10 aa, synthetic construct
DHGRGDIHNL

SEQ ID NO: 108540 - protein, 10 aa, synthetic construct
DHARGDIHNL

SEQ ID NO: 108541 - protein, 10 aa, synthetic construct
DHVRGDIHNL

SEQ ID NO: 108542 - protein, 10 aa, synthetic construct
DHPRGDIHNL

SEQ ID NO: 108543 - protein, 10 aa, synthetic construct
DHLRGDIHNL

SEQ ID NO: 108544 - protein, 10 aa, synthetic construct
DHIRGDIHNL

SEQ ID NO: 108545 - protein, 10 aa, synthetic construct
DHMRGDIHNL

SEQ ID NO: 108546 - protein, 10 aa, synthetic construct
DHWRGDIHNL

SEQ ID NO: 108547 - protein, 10 aa, synthetic construct
DHFRGDIHNL

SEQ ID NO: 108548 - protein, 10 aa, synthetic construct
DHKRGDIHNL

SEQ ID NO: 108549 - protein, 10 aa, synthetic construct
DHRRGDIHNL

SEQ ID NO: 108550 - protein, 10 aa, synthetic construct
DHHRGDIHNL

SEQ ID NO: 108551 - protein, 10 aa, synthetic construct
DHSRGDIHNL

SEQ ID NO: 108552 - protein, 10 aa, synthetic construct
DHTRGDIHNL

SEQ ID NO: 108553 - protein, 10 aa, synthetic construct
DHYRGDIHNL

SEQ ID NO: 108554 - protein, 10 aa, synthetic construct
DHNRGDIHNL

SEQ ID NO: 108555 - protein, 10 aa, synthetic construct
DHQRGDIHNL

SEQ ID NO: 108556 - protein, 10 aa, synthetic construct
DHDRGDIHNL

SEQ ID NO: 108557 - protein, 10 aa, synthetic construct
DHERGDIHNL

SEQ ID NO: 108558 - protein, 10 aa, synthetic construct
DSGRGDIHNL

SEQ ID NO: 108559 - protein, 10 aa, synthetic construct
DSARGDIHNL

SEQ ID NO: 108560 - protein, 10 aa, synthetic construct
DSVRGDIHNL

SEQ ID NO: 108561 - protein, 10 aa, synthetic construct
DSPRGDIHNL

SEQ ID NO: 108562 - protein, 10 aa, synthetic construct
DSLRGDIHNL

SEQ ID NO: 108563 - protein, 10 aa, synthetic construct
DSIRGDIHNL

SEQ ID NO: 108564 - protein, 10 aa, synthetic construct
DSMRGDIHNL

SEQ ID NO: 108565 - protein, 10 aa, synthetic construct
DSWRGDIHNL

SEQ ID NO: 108566 - protein, 10 aa, synthetic construct
DSFRGDIHNL

SEQ ID NO: 108567 - protein, 10 aa, synthetic construct
DSKRGDIHNL

SEQ ID NO: 108568 - protein, 10 aa, synthetic construct
DSRRGDIHNL

SEQ ID NO: 108569 - protein, 10 aa, synthetic construct
DSHRGDIHNL

SEQ ID NO: 108570 - protein, 10 aa, synthetic construct
DSSRGDIHNL

SEQ ID NO: 108571 - protein, 10 aa, synthetic construct
DSTRGDIHNL

SEQ ID NO: 108572 - protein, 10 aa, synthetic construct
DSYRGDIHNL

SEQ ID NO: 108573 - protein, 10 aa, synthetic construct
DSNRGDIHNL

SEQ ID NO: 108574 - protein, 10 aa, synthetic construct
DSQRGDIHNL

SEQ ID NO: 108575 - protein, 10 aa, synthetic construct
DSDRGDIHNL

SEQ ID NO: 108576 - protein, 10 aa, synthetic construct
DSERGDIHNL

SEQ ID NO: 108577 - protein, 10 aa, synthetic construct
DTGRGDIHNL

SEQ ID NO: 108578 - protein, 10 aa, synthetic construct
DTARGDIHNL

SEQ ID NO: 108579 - protein, 10 aa, synthetic construct
DTVRGDIHNL

SEQ ID NO: 108580 - protein, 10 aa, synthetic construct
DTPRGDIHNL

SEQ ID NO: 108581 - protein, 10 aa, synthetic construct
DTLRGDIHNL

SEQ ID NO: 108582 - protein, 10 aa, synthetic construct
DTIRGDIHNL

SEQ ID NO: 108583 - protein, 10 aa, synthetic construct
DTMRGDIHNL

SEQ ID NO: 108584 - protein, 10 aa, synthetic construct
DTWRGDIHNL

SEQ ID NO: 108585 - protein, 10 aa, synthetic construct
DTFRGDIHNL

SEQ ID NO: 108586 - protein, 10 aa, synthetic construct
DTKRGDIHNL

SEQ ID NO: 108587 - protein, 10 aa, synthetic construct
DTRRGDIHNL

SEQ ID NO: 108588 - protein, 10 aa, synthetic construct
DTHRGDIHNL

SEQ ID NO: 108589 - protein, 10 aa, synthetic construct
DTSRGDIHNL

SEQ ID NO: 108590 - protein, 10 aa, synthetic construct
DTTRGDIHNL

SEQ ID NO: 108591 - protein, 10 aa, synthetic construct
DTYRGDIHNL

SEQ ID NO: 108592 - protein, 10 aa, synthetic construct
DTNRGDIHNL

SEQ ID NO: 108593 - protein, 10 aa, synthetic construct
DTQRGDIHNL

SEQ ID NO: 108594 - protein, 10 aa, synthetic construct
DTDRGDIHNL

SEQ ID NO: 108595 - protein, 10 aa, synthetic construct
DTERGDIHNL

SEQ ID NO: 108596 - protein, 10 aa, synthetic construct
DYGRGDIHNL

SEQ ID NO: 108597 - protein, 10 aa, synthetic construct
DYARGDIHNL

SEQ ID NO: 108598 - protein, 10 aa, synthetic construct
DYVRGDIHNL

SEQ ID NO: 108599 - protein, 10 aa, synthetic construct
DYPRGDIHNL

SEQ ID NO: 108600 - protein, 10 aa, synthetic construct
DYLRGDIHNL

SEQ ID NO: 108601 - protein, 10 aa, synthetic construct
DYIRGDIHNL

SEQ ID NO: 108602 - protein, 10 aa, synthetic construct
DYMRGDIHNL

SEQ ID NO: 108603 - protein, 10 aa, synthetic construct
DYWRGDIHNL

SEQ ID NO: 108604 - protein, 10 aa, synthetic construct
DYFRGDIHNL

SEQ ID NO: 108605 - protein, 10 aa, synthetic construct
DYKRGDIHNL

SEQ ID NO: 108606 - protein, 10 aa, synthetic construct
DYRRGDIHNL

SEQ ID NO: 108607 - protein, 10 aa, synthetic construct
DYHRGDIHNL

SEQ ID NO: 108608 - protein, 10 aa, synthetic construct
DYSRGDIHNL

SEQ ID NO: 108609 - protein, 10 aa, synthetic construct
DYTRGDIHNL

SEQ ID NO: 108610 - protein, 10 aa, synthetic construct
DYYRGDIHNL

SEQ ID NO: 108611 - protein, 10 aa, synthetic construct
DYNRGDIHNL

SEQ ID NO: 108612 - protein, 10 aa, synthetic construct
DYQRGDIHNL

SEQ ID NO: 108613 - protein, 10 aa, synthetic construct
DYDRGDIHNL

SEQ ID NO: 108614 - protein, 10 aa, synthetic construct
DYERGDIHNL

SEQ ID NO: 108615 - protein, 10 aa, synthetic construct
DNGRGDIHNL

SEQ ID NO: 108616 - protein, 10 aa, synthetic construct
DNARGDIHNL

SEQ ID NO: 108617 - protein, 10 aa, synthetic construct
DNVRGDIHNL

SEQ ID NO: 108618 - protein, 10 aa, synthetic construct
DNPRGDIHNL

SEQ ID NO: 108619 - protein, 10 aa, synthetic construct
DNLRGDIHNL

SEQ ID NO: 108620 - protein, 10 aa, synthetic construct
DNIRGDIHNL

SEQ ID NO: 108621 - protein, 10 aa, synthetic construct
DNMRGDIHNL

SEQ ID NO: 108622 - protein, 10 aa, synthetic construct
DNWRGDIHNL

SEQ ID NO: 108623 - protein, 10 aa, synthetic construct
DNFRGDIHNL

SEQ ID NO: 108624 - protein, 10 aa, synthetic construct
DNKRGDIHNL

SEQ ID NO: 108625 - protein, 10 aa, synthetic construct
DNRRGDIHNL

SEQ ID NO: 108626 - protein, 10 aa, synthetic construct
DNHRGDIHNL

SEQ ID NO: 108627 - protein, 10 aa, synthetic construct
DNSRGDIHNL

SEQ ID NO: 108628 - protein, 10 aa, synthetic construct
DNTRGDIHNL

SEQ ID NO: 108629 - protein, 10 aa, synthetic construct
DNYRGDIHNL

SEQ ID NO: 108630 - protein, 10 aa, synthetic construct
DNNRGDIHNL

SEQ ID NO: 108631 - protein, 10 aa, synthetic construct
DNQRGDIHNL

SEQ ID NO: 108632 - protein, 10 aa, synthetic construct
DNDRGDIHNL

SEQ ID NO: 108633 - protein, 10 aa, synthetic construct
DNERGDIHNL

SEQ ID NO: 108634 - protein, 10 aa, synthetic construct
DQGRGDIHNL

SEQ ID NO: 108635 - protein, 10 aa, synthetic construct
DQARGDIHNL

SEQ ID NO: 108636 - protein, 10 aa, synthetic construct
DQVRGDIHNL

SEQ ID NO: 108637 - protein, 10 aa, synthetic construct
DQPRGDIHNL

SEQ ID NO: 108638 - protein, 10 aa, synthetic construct
DQLRGDIHNL

SEQ ID NO: 108639 - protein, 10 aa, synthetic construct
DQIRGDIHNL

SEQ ID NO: 108640 - protein, 10 aa, synthetic construct
DQMRGDIHNL

SEQ ID NO: 108641 - protein, 10 aa, synthetic construct
DQWRGDIHNL

SEQ ID NO: 108642 - protein, 10 aa, synthetic construct
DQFRGDIHNL

SEQ ID NO: 108643 - protein, 10 aa, synthetic construct
DQKRGDIHNL

SEQ ID NO: 108644 - protein, 10 aa, synthetic construct
DQRRGDIHNL

SEQ ID NO: 108645 - protein, 10 aa, synthetic construct
DQHRGDIHNL

SEQ ID NO: 108646 - protein, 10 aa, synthetic construct
DQSRGDIHNL

SEQ ID NO: 108647 - protein, 10 aa, synthetic construct
DQTRGDIHNL

SEQ ID NO: 108648 - protein, 10 aa, synthetic construct
DQYRGDIHNL

SEQ ID NO: 108649 - protein, 10 aa, synthetic construct
DQNRGDIHNL

SEQ ID NO: 108650 - protein, 10 aa, synthetic construct
DQQRGDIHNL

SEQ ID NO: 108651 - protein, 10 aa, synthetic construct
DQDRGDIHNL

SEQ ID NO: 108652 - protein, 10 aa, synthetic construct
DQERGDIHNL

SEQ ID NO: 108653 - protein, 10 aa, synthetic construct
DDGRGDIHNL

SEQ ID NO: 108654 - protein, 10 aa, synthetic construct
DDARGDIHNL

SEQ ID NO: 108655 - protein, 10 aa, synthetic construct
DDVRGDIHNL

SEQ ID NO: 108656 - protein, 10 aa, synthetic construct
DDPRGDIHNL

SEQ ID NO: 108657 - protein, 10 aa, synthetic construct
DDLRGDIHNL

SEQ ID NO: 108658 - protein, 10 aa, synthetic construct
DDIRGDIHNL

SEQ ID NO: 108659 - protein, 10 aa, synthetic construct
DDMRGDIHNL

SEQ ID NO: 108660 - protein, 10 aa, synthetic construct
DDWRGDIHNL

SEQ ID NO: 108661 - protein, 10 aa, synthetic construct
DDFRGDIHNL

SEQ ID NO: 108662 - protein, 10 aa, synthetic construct
DDKRGDIHNL

SEQ ID NO: 108663 - protein, 10 aa, synthetic construct
DDRRGDIHNL

SEQ ID NO: 108664 - protein, 10 aa, synthetic construct
DDHRGDIHNL

SEQ ID NO: 108665 - protein, 10 aa, synthetic construct
DDSRGDIHNL

SEQ ID NO: 108666 - protein, 10 aa, synthetic construct
DDTRGDIHNL

SEQ ID NO: 108667 - protein, 10 aa, synthetic construct
DDYRGDIHNL

SEQ ID NO: 108668 - protein, 10 aa, synthetic construct
DDNRGDIHNL

SEQ ID NO: 108669 - protein, 10 aa, synthetic construct
DDQRGDIHNL

SEQ ID NO: 108670 - protein, 10 aa, synthetic construct
DDDRGDIHNL

SEQ ID NO: 108671 - protein, 10 aa, synthetic construct
DDERGDIHNL

SEQ ID NO: 108672 - protein, 10 aa, synthetic construct
DEGRGDIHNL

SEQ ID NO: 108673 - protein, 10 aa, synthetic construct
DEARGDIHNL

SEQ ID NO: 108674 - protein, 10 aa, synthetic construct
DEVRGDIHNL

SEQ ID NO: 108675 - protein, 10 aa, synthetic construct
DEPRGDIHNL

SEQ ID NO: 108676 - protein, 10 aa, synthetic construct
DELRGDIHNL

SEQ ID NO: 108677 - protein, 10 aa, synthetic construct
DEIRGDIHNL

SEQ ID NO: 108678 - protein, 10 aa, synthetic construct
DEMRGDIHNL

SEQ ID NO: 108679 - protein, 10 aa, synthetic construct
DEWRGDIHNL

SEQ ID NO: 108680 - protein, 10 aa, synthetic construct
DEFRGDIHNL

SEQ ID NO: 108681 - protein, 10 aa, synthetic construct
DEKRGDIHNL

SEQ ID NO: 108682 - protein, 10 aa, synthetic construct
DERRGDIHNL

SEQ ID NO: 108683 - protein, 10 aa, synthetic construct
DEHRGDIHNL

SEQ ID NO: 108684 - protein, 10 aa, synthetic construct
DESRGDIHNL

SEQ ID NO: 108685 - protein, 10 aa, synthetic construct
DETRGDIHNL

SEQ ID NO: 108686 - protein, 10 aa, synthetic construct
DEYRGDIHNL

SEQ ID NO: 108687 - protein, 10 aa, synthetic construct
DENRGDIHNL

SEQ ID NO: 108688 - protein, 10 aa, synthetic construct
DEQRGDIHNL

SEQ ID NO: 108689 - protein, 10 aa, synthetic construct
DEDRGDIHNL

SEQ ID NO: 108690 - protein, 10 aa, synthetic construct
DEERGDIHNL

SEQ ID NO: 108691 - protein, 10 aa, synthetic construct
QGGRGDIHNL

SEQ ID NO: 108692 - protein, 10 aa, synthetic construct
QGARGDIHNL

SEQ ID NO: 108693 - protein, 10 aa, synthetic construct
QGVRGDIHNL

SEQ ID NO: 108694 - protein, 10 aa, synthetic construct
QGPRGDIHNL

SEQ ID NO: 108695 - protein, 10 aa, synthetic construct
QGLRGDIHNL

SEQ ID NO: 108696 - protein, 10 aa, synthetic construct
QGIRGDIHNL

SEQ ID NO: 108697 - protein, 10 aa, synthetic construct
QGMRGDIHNL

SEQ ID NO: 108698 - protein, 10 aa, synthetic construct
QGWRGDIHNL

SEQ ID NO: 108699 - protein, 10 aa, synthetic construct
QGFRGDIHNL

SEQ ID NO: 108700 - protein, 10 aa, synthetic construct
QGKRGDIHNL

SEQ ID NO: 108701 - protein, 10 aa, synthetic construct
QGRRGDIHNL

SEQ ID NO: 108702 - protein, 10 aa, synthetic construct
QGHRGDIHNL

SEQ ID NO: 108703 - protein, 10 aa, synthetic construct
QGSRGDIHNL

SEQ ID NO: 108704 - protein, 10 aa, synthetic construct
QGTRGDIHNL

SEQ ID NO: 108705 - protein, 10 aa, synthetic construct
QGYRGDIHNL

SEQ ID NO: 108706 - protein, 10 aa, synthetic construct
QGNRGDIHNL

SEQ ID NO: 108707 - protein, 10 aa, synthetic construct
QGQRGDIHNL

SEQ ID NO: 108708 - protein, 10 aa, synthetic construct
QGDRGDIHNL

SEQ ID NO: 108709 - protein, 10 aa, synthetic construct
QGERGDIHNL

SEQ ID NO: 108710 - protein, 10 aa, synthetic construct
QAGRGDIHNL

SEQ ID NO: 108711 - protein, 10 aa, synthetic construct
QAARGDIHNL

SEQ ID NO: 108712 - protein, 10 aa, synthetic construct
QAVRGDIHNL

SEQ ID NO: 108713 - protein, 10 aa, synthetic construct
QAPRGDIHNL

SEQ ID NO: 108714 - protein, 10 aa, synthetic construct
QALRGDIHNL

SEQ ID NO: 108715 - protein, 10 aa, synthetic construct
QAIRGDIHNL

SEQ ID NO: 108716 - protein, 10 aa, synthetic construct
QAMRGDIHNL

SEQ ID NO: 108717 - protein, 10 aa, synthetic construct
QAWRGDIHNL

SEQ ID NO: 108718 - protein, 10 aa, synthetic construct
QAFRGDIHNL

SEQ ID NO: 108719 - protein, 10 aa, synthetic construct
QAKRGDIHNL

SEQ ID NO: 108720 - protein, 10 aa, synthetic construct
QARRGDIHNL

SEQ ID NO: 108721 - protein, 10 aa, synthetic construct
QAHRGDIHNL

SEQ ID NO: 108722 - protein, 10 aa, synthetic construct
QASRGDIHNL

SEQ ID NO: 108723 - protein, 10 aa, synthetic construct
QATRGDIHNL

SEQ ID NO: 108724 - protein, 10 aa, synthetic construct
QAYRGDIHNL

SEQ ID NO: 108725 - protein, 10 aa, synthetic construct
QANRGDIHNL

SEQ ID NO: 108726 - protein, 10 aa, synthetic construct
QAQRGDIHNL

SEQ ID NO: 108727 - protein, 10 aa, synthetic construct
QADRGDIHNL

SEQ ID NO: 108728 - protein, 10 aa, synthetic construct
QAERGDIHNL

SEQ ID NO: 108729 - protein, 10 aa, synthetic construct
QVGRGDIHNL

SEQ ID NO: 108730 - protein, 10 aa, synthetic construct
QVARGDIHNL

SEQ ID NO: 108731 - protein, 10 aa, synthetic construct
QVVRGDIHNL

SEQ ID NO: 108732 - protein, 10 aa, synthetic construct
QVPRGDIHNL

SEQ ID NO: 108733 - protein, 10 aa, synthetic construct
QVLRGDIHNL

SEQ ID NO: 108734 - protein, 10 aa, synthetic construct
QVIRGDIHNL

SEQ ID NO: 108735 - protein, 10 aa, synthetic construct
QVMRGDIHNL

SEQ ID NO: 108736 - protein, 10 aa, synthetic construct
QVWRGDIHNL

SEQ ID NO: 108737 - protein, 10 aa, synthetic construct
QVFRGDIHNL

SEQ ID NO: 108738 - protein, 10 aa, synthetic construct
QVKRGDIHNL

SEQ ID NO: 108739 - protein, 10 aa, synthetic construct
QVRRGDIHNL

SEQ ID NO: 108740 - protein, 10 aa, synthetic construct
QVHRGDIHNL

SEQ ID NO: 108741 - protein, 10 aa, synthetic construct
QVSRGDIHNL

SEQ ID NO: 108742 - protein, 10 aa, synthetic construct
QVTRGDIHNL

SEQ ID NO: 108743 - protein, 10 aa, synthetic construct
QVYRGDIHNL

SEQ ID NO: 108744 - protein, 10 aa, synthetic construct
QVNRGDIHNL

SEQ ID NO: 108745 - protein, 10 aa, synthetic construct
QVQRGDIHNL

SEQ ID NO: 108746 - protein, 10 aa, synthetic construct
QVDRGDIHNL

SEQ ID NO: 108747 - protein, 10 aa, synthetic construct
QVERGDIHNL

SEQ ID NO: 108748 - protein, 10 aa, synthetic construct
QPGRGDIHNL

SEQ ID NO: 108749 - protein, 10 aa, synthetic construct
QPARGDIHNL

SEQ ID NO: 108750 - protein, 10 aa, synthetic construct
QPVRGDIHNL

SEQ ID NO: 108751 - protein, 10 aa, synthetic construct
QPPRGDIHNL

SEQ ID NO: 108752 - protein, 10 aa, synthetic construct
QPLRGDIHNL

SEQ ID NO: 108753 - protein, 10 aa, synthetic construct
QPIRGDIHNL

SEQ ID NO: 108754 - protein, 10 aa, synthetic construct
QPMRGDIHNL

SEQ ID NO: 108755 - protein, 10 aa, synthetic construct
QPWRGDIHNL

SEQ ID NO: 108756 - protein, 10 aa, synthetic construct
QPFRGDIHNL

SEQ ID NO: 108757 - protein, 10 aa, synthetic construct
QPKRGDIHNL

SEQ ID NO: 108758 - protein, 10 aa, synthetic construct
QPRRGDIHNL

SEQ ID NO: 108759 - protein, 10 aa, synthetic construct
QPHRGDIHNL

SEQ ID NO: 108760 - protein, 10 aa, synthetic construct
QPSRGDIHNL

SEQ ID NO: 108761 - protein, 10 aa, synthetic construct
QPTRGDIHNL

SEQ ID NO: 108762 - protein, 10 aa, synthetic construct
QPYRGDIHNL

SEQ ID NO: 108763 - protein, 10 aa, synthetic construct
QPNRGDIHNL

SEQ ID NO: 108764 - protein, 10 aa, synthetic construct
QPQRGDIHNL

SEQ ID NO: 108765 - protein, 10 aa, synthetic construct
QPDRGDIHNL

SEQ ID NO: 108766 - protein, 10 aa, synthetic construct
QPERGDIHNL

SEQ ID NO: 108767 - protein, 10 aa, synthetic construct
QLGRGDIHNL

SEQ ID NO: 108768 - protein, 10 aa, synthetic construct
QLARGDIHNL

SEQ ID NO: 108769 - protein, 10 aa, synthetic construct
QLVRGDIHNL

SEQ ID NO: 108770 - protein, 10 aa, synthetic construct
QLPRGDIHNL

SEQ ID NO: 108771 - protein, 10 aa, synthetic construct
QLLRGDIHNL

SEQ ID NO: 108772 - protein, 10 aa, synthetic construct
QLIRGDIHNL

SEQ ID NO: 108773 - protein, 10 aa, synthetic construct
QLMRGDIHNL

SEQ ID NO: 108774 - protein, 10 aa, synthetic construct
QLWRGDIHNL

SEQ ID NO: 108775 - protein, 10 aa, synthetic construct
QLFRGDIHNL

SEQ ID NO: 108776 - protein, 10 aa, synthetic construct
QLKRGDIHNL

SEQ ID NO: 108777 - protein, 10 aa, synthetic construct
QLRRGDIHNL

SEQ ID NO: 108778 - protein, 10 aa, synthetic construct
QLHRGDIHNL

SEQ ID NO: 108779 - protein, 10 aa, synthetic construct
QLSRGDIHNL

SEQ ID NO: 108780 - protein, 10 aa, synthetic construct
QLTRGDIHNL

SEQ ID NO: 108781 - protein, 10 aa, synthetic construct
QLYRGDIHNL

SEQ ID NO: 108782 - protein, 10 aa, synthetic construct
QLNRGDIHNL

SEQ ID NO: 108783 - protein, 10 aa, synthetic construct
QLQRGDIHNL

SEQ ID NO: 108784 - protein, 10 aa, synthetic construct
QLDRGDIHNL

SEQ ID NO: 108785 - protein, 10 aa, synthetic construct
QLERGDIHNL

SEQ ID NO: 108786 - protein, 10 aa, synthetic construct
QIGRGDIHNL

SEQ ID NO: 108787 - protein, 10 aa, synthetic construct
QIARGDIHNL

SEQ ID NO: 108788 - protein, 10 aa, synthetic construct
QIVRGDIHNL

SEQ ID NO: 108789 - protein, 10 aa, synthetic construct
QIPRGDIHNL

SEQ ID NO: 108790 - protein, 10 aa, synthetic construct
QILRGDIHNL

SEQ ID NO: 108791 - protein, 10 aa, synthetic construct
QIIRGDIHNL

SEQ ID NO: 108792 - protein, 10 aa, synthetic construct
QIMRGDIHNL

SEQ ID NO: 108793 - protein, 10 aa, synthetic construct
QIWRGDIHNL

SEQ ID NO: 108794 - protein, 10 aa, synthetic construct
QIFRGDIHNL

SEQ ID NO: 108795 - protein, 10 aa, synthetic construct
QIKRGDIHNL

SEQ ID NO: 108796 - protein, 10 aa, synthetic construct
QIRRGDIHNL

SEQ ID NO: 108797 - protein, 10 aa, synthetic construct
QIHRGDIHNL

SEQ ID NO: 108798 - protein, 10 aa, synthetic construct
QISRGDIHNL

SEQ ID NO: 108799 - protein, 10 aa, synthetic construct
QITRGDIHNL

SEQ ID NO: 108800 - protein, 10 aa, synthetic construct
QIYRGDIHNL

SEQ ID NO: 108801 - protein, 10 aa, synthetic construct
QINRGDIHNL

SEQ ID NO: 108802 - protein, 10 aa, synthetic construct
QIQRGDIHNL

SEQ ID NO: 108803 - protein, 10 aa, synthetic construct
QIDRGDIHNL

SEQ ID NO: 108804 - protein, 10 aa, synthetic construct
QIERGDIHNL

SEQ ID NO: 108805 - protein, 10 aa, synthetic construct
QMGRGDIHNL

SEQ ID NO: 108806 - protein, 10 aa, synthetic construct
QMARGDIHNL

SEQ ID NO: 108807 - protein, 10 aa, synthetic construct
QMVRGDIHNL

SEQ ID NO: 108808 - protein, 10 aa, synthetic construct
QMPRGDIHNL

SEQ ID NO: 108809 - protein, 10 aa, synthetic construct
QMLRGDIHNL

SEQ ID NO: 108810 - protein, 10 aa, synthetic construct
QMIRGDIHNL

SEQ ID NO: 108811 - protein, 10 aa, synthetic construct
QMMRGDIHNL

SEQ ID NO: 108812 - protein, 10 aa, synthetic construct
QMWRGDIHNL

SEQ ID NO: 108813 - protein, 10 aa, synthetic construct
QMFRGDIHNL

SEQ ID NO: 108814 - protein, 10 aa, synthetic construct
QMKRGDIHNL

SEQ ID NO: 108815 - protein, 10 aa, synthetic construct
QMRRGDIHNL

SEQ ID NO: 108816 - protein, 10 aa, synthetic construct
QMHRGDIHNL

SEQ ID NO: 108817 - protein, 10 aa, synthetic construct
QMSRGDIHNL

SEQ ID NO: 108818 - protein, 10 aa, synthetic construct
QMTRGDIHNL

SEQ ID NO: 108819 - protein, 10 aa, synthetic construct
QMYRGDIHNL

SEQ ID NO: 108820 - protein, 10 aa, synthetic construct
QMNRGDIHNL

SEQ ID NO: 108821 - protein, 10 aa, synthetic construct
QMQRGDIHNL

SEQ ID NO: 108822 - protein, 10 aa, synthetic construct
QMDRGDIHNL

SEQ ID NO: 108823 - protein, 10 aa, synthetic construct
QMERGDIHNL

SEQ ID NO: 108824 - protein, 10 aa, synthetic construct
QWGRGDIHNL

SEQ ID NO: 108825 - protein, 10 aa, synthetic construct
QWARGDIHNL

SEQ ID NO: 108826 - protein, 10 aa, synthetic construct
QWVRGDIHNL

SEQ ID NO: 108827 - protein, 10 aa, synthetic construct
QWPRGDIHNL

SEQ ID NO: 108828 - protein, 10 aa, synthetic construct
QWLRGDIHNL

SEQ ID NO: 108829 - protein, 10 aa, synthetic construct
QWIRGDIHNL

SEQ ID NO: 108830 - protein, 10 aa, synthetic construct
QWMRGDIHNL

SEQ ID NO: 108831 - protein, 10 aa, synthetic construct
QWWRGDIHNL

SEQ ID NO: 108832 - protein, 10 aa, synthetic construct
QWFRGDIHNL

SEQ ID NO: 108833 - protein, 10 aa, synthetic construct
QWKRGDIHNL

SEQ ID NO: 108834 - protein, 10 aa, synthetic construct
QWRRGDIHNL

SEQ ID NO: 108835 - protein, 10 aa, synthetic construct
QWHRGDIHNL

SEQ ID NO: 108836 - protein, 10 aa, synthetic construct
QWSRGDIHNL

SEQ ID NO: 108837 - protein, 10 aa, synthetic construct
QWTRGDIHNL

SEQ ID NO: 108838 - protein, 10 aa, synthetic construct
QWYRGDIHNL

SEQ ID NO: 108839 - protein, 10 aa, synthetic construct
QWNRGDIHNL

SEQ ID NO: 108840 - protein, 10 aa, synthetic construct
QWQRGDIHNL

SEQ ID NO: 108841 - protein, 10 aa, synthetic construct
QWDRGDIHNL

SEQ ID NO: 108842 - protein, 10 aa, synthetic construct
QWERGDIHNL

SEQ ID NO: 108843 - protein, 10 aa, synthetic construct
QFGRGDIHNL

SEQ ID NO: 108844 - protein, 10 aa, synthetic construct
QFARGDIHNL

SEQ ID NO: 108845 - protein, 10 aa, synthetic construct
QFVRGDIHNL

SEQ ID NO: 108846 - protein, 10 aa, synthetic construct
QFPRGDIHNL

SEQ ID NO: 108847 - protein, 10 aa, synthetic construct
QFLRGDIHNL

SEQ ID NO: 108848 - protein, 10 aa, synthetic construct
QFIRGDIHNL

SEQ ID NO: 108849 - protein, 10 aa, synthetic construct
QFMRGDIHNL

SEQ ID NO: 108850 - protein, 10 aa, synthetic construct
QFWRGDIHNL

SEQ ID NO: 108851 - protein, 10 aa, synthetic construct
QFFRGDIHNL

SEQ ID NO: 108852 - protein, 10 aa, synthetic construct
QFKRGDIHNL

SEQ ID NO: 108853 - protein, 10 aa, synthetic construct
QFRRGDIHNL

SEQ ID NO: 108854 - protein, 10 aa, synthetic construct
QFHRGDIHNL

SEQ ID NO: 108855 - protein, 10 aa, synthetic construct
QFSRGDIHNL

SEQ ID NO: 108856 - protein, 10 aa, synthetic construct
QFTRGDIHNL

SEQ ID NO: 108857 - protein, 10 aa, synthetic construct
QFYRGDIHNL

SEQ ID NO: 108858 - protein, 10 aa, synthetic construct
QFNRGDIHNL

SEQ ID NO: 108859 - protein, 10 aa, synthetic construct
QFQRGDIHNL

SEQ ID NO: 108860 - protein, 10 aa, synthetic construct
QFDRGDIHNL

SEQ ID NO: 108861 - protein, 10 aa, synthetic construct
QFERGDIHNL

SEQ ID NO: 108862 - protein, 10 aa, synthetic construct
QKGRGDIHNL

SEQ ID NO: 108863 - protein, 10 aa, synthetic construct
QKARGDIHNL

SEQ ID NO: 108864 - protein, 10 aa, synthetic construct
QKVRGDIHNL

SEQ ID NO: 108865 - protein, 10 aa, synthetic construct
QKPRGDIHNL

SEQ ID NO: 108866 - protein, 10 aa, synthetic construct
QKLRGDIHNL

SEQ ID NO: 108867 - protein, 10 aa, synthetic construct
QKIRGDIHNL

SEQ ID NO: 108868 - protein, 10 aa, synthetic construct
QKMRGDIHNL

SEQ ID NO: 108869 - protein, 10 aa, synthetic construct
QKWRGDIHNL

SEQ ID NO: 108870 - protein, 10 aa, synthetic construct
QKFRGDIHNL

SEQ ID NO: 108871 - protein, 10 aa, synthetic construct
QKKRGDIHNL

SEQ ID NO: 108872 - protein, 10 aa, synthetic construct
QKRRGDIHNL

SEQ ID NO: 108873 - protein, 10 aa, synthetic construct
QKHRGDIHNL

SEQ ID NO: 108874 - protein, 10 aa, synthetic construct
QKSRGDIHNL

SEQ ID NO: 108875 - protein, 10 aa, synthetic construct
QKTRGDIHNL

SEQ ID NO: 108876 - protein, 10 aa, synthetic construct
QKYRGDIHNL

SEQ ID NO: 108877 - protein, 10 aa, synthetic construct
QKNRGDIHNL

SEQ ID NO: 108878 - protein, 10 aa, synthetic construct
QKQRGDIHNL

SEQ ID NO: 108879 - protein, 10 aa, synthetic construct
QKDRGDIHNL

SEQ ID NO: 108880 - protein, 10 aa, synthetic construct
QKERGDIHNL

SEQ ID NO: 108881 - protein, 10 aa, synthetic construct
QRGRGDIHNL

SEQ ID NO: 108882 - protein, 10 aa, synthetic construct
QRARGDIHNL

SEQ ID NO: 108883 - protein, 10 aa, synthetic construct
QRVRGDIHNL

SEQ ID NO: 108884 - protein, 10 aa, synthetic construct
QRPRGDIHNL

SEQ ID NO: 108885 - protein, 10 aa, synthetic construct
QRLRGDIHNL

SEQ ID NO: 108886 - protein, 10 aa, synthetic construct
QRIRGDIHNL

SEQ ID NO: 108887 - protein, 10 aa, synthetic construct
QRMRGDIHNL

SEQ ID NO: 108888 - protein, 10 aa, synthetic construct
QRWRGDIHNL

SEQ ID NO: 108889 - protein, 10 aa, synthetic construct
QRFRGDIHNL

SEQ ID NO: 108890 - protein, 10 aa, synthetic construct
QRKRGDIHNL

SEQ ID NO: 108891 - protein, 10 aa, synthetic construct
QRRRGDIHNL

SEQ ID NO: 108892 - protein, 10 aa, synthetic construct
QRHRGDIHNL

SEQ ID NO: 108893 - protein, 10 aa, synthetic construct
QRSRGDIHNL

SEQ ID NO: 108894 - protein, 10 aa, synthetic construct
QRTRGDIHNL

SEQ ID NO: 108895 - protein, 10 aa, synthetic construct
QRYRGDIHNL

SEQ ID NO: 108896 - protein, 10 aa, synthetic construct
QRNRGDIHNL

SEQ ID NO: 108897 - protein, 10 aa, synthetic construct
QRQRGDIHNL

SEQ ID NO: 108898 - protein, 10 aa, synthetic construct
QRDRGDIHNL

SEQ ID NO: 108899 - protein, 10 aa, synthetic construct
QRERGDIHNL

SEQ ID NO: 108900 - protein, 10 aa, synthetic construct
QHGRGDIHNL

SEQ ID NO: 108901 - protein, 10 aa, synthetic construct
QHARGDIHNL

SEQ ID NO: 108902 - protein, 10 aa, synthetic construct
QHVRGDIHNL

SEQ ID NO: 108903 - protein, 10 aa, synthetic construct
QHPRGDIHNL

SEQ ID NO: 108904 - protein, 10 aa, synthetic construct
QHLRGDIHNL

SEQ ID NO: 108905 - protein, 10 aa, synthetic construct
QHIRGDIHNL

SEQ ID NO: 108906 - protein, 10 aa, synthetic construct
QHMRGDIHNL

SEQ ID NO: 108907 - protein, 10 aa, synthetic construct
QHWRGDIHNL

SEQ ID NO: 108908 - protein, 10 aa, synthetic construct
QHFRGDIHNL

SEQ ID NO: 108909 - protein, 10 aa, synthetic construct
QHKRGDIHNL

SEQ ID NO: 108910 - protein, 10 aa, synthetic construct
QHRRGDIHNL

SEQ ID NO: 108911 - protein, 10 aa, synthetic construct
QHHRGDIHNL

SEQ ID NO: 108912 - protein, 10 aa, synthetic construct
QHSRGDIHNL

SEQ ID NO: 108913 - protein, 10 aa, synthetic construct
QHTRGDIHNL

SEQ ID NO: 108914 - protein, 10 aa, synthetic construct
QHYRGDIHNL

SEQ ID NO: 108915 - protein, 10 aa, synthetic construct
QHNRGDIHNL

SEQ ID NO: 108916 - protein, 10 aa, synthetic construct
QHQRGDIHNL

SEQ ID NO: 108917 - protein, 10 aa, synthetic construct
QHDRGDIHNL

SEQ ID NO: 108918 - protein, 10 aa, synthetic construct
QHERGDIHNL

SEQ ID NO: 108919 - protein, 10 aa, synthetic construct
QSGRGDIHNL

SEQ ID NO: 108920 - protein, 10 aa, synthetic construct
QSARGDIHNL

SEQ ID NO: 108921 - protein, 10 aa, synthetic construct
QSVRGDIHNL

SEQ ID NO: 108922 - protein, 10 aa, synthetic construct
QSPRGDIHNL

SEQ ID NO: 108923 - protein, 10 aa, synthetic construct
QSLRGDIHNL

SEQ ID NO: 108924 - protein, 10 aa, synthetic construct
QSIRGDIHNL

SEQ ID NO: 108925 - protein, 10 aa, synthetic construct
QSMRGDIHNL

SEQ ID NO: 108926 - protein, 10 aa, synthetic construct
QSWRGDIHNL

SEQ ID NO: 108927 - protein, 10 aa, synthetic construct
QSFRGDIHNL

SEQ ID NO: 108928 - protein, 10 aa, synthetic construct
QSKRGDIHNL

SEQ ID NO: 108929 - protein, 10 aa, synthetic construct
QSRRGDIHNL

SEQ ID NO: 108930 - protein, 10 aa, synthetic construct
QSHRGDIHNL

SEQ ID NO: 108931 - protein, 10 aa, synthetic construct
QSSRGDIHNL

SEQ ID NO: 108932 - protein, 10 aa, synthetic construct
QSTRGDIHNL

SEQ ID NO: 108933 - protein, 10 aa, synthetic construct
QSYRGDIHNL

SEQ ID NO: 108934 - protein, 10 aa, synthetic construct
QSNRGDIHNL

SEQ ID NO: 108935 - protein, 10 aa, synthetic construct
QSQRGDIHNL

SEQ ID NO: 108936 - protein, 10 aa, synthetic construct
QSDRGDIHNL

SEQ ID NO: 108937 - protein, 10 aa, synthetic construct
QSERGDIHNL

SEQ ID NO: 108938 - protein, 10 aa, synthetic construct
QTGRGDIHNL

SEQ ID NO: 108939 - protein, 10 aa, synthetic construct
QTARGDIHNL

SEQ ID NO: 108940 - protein, 10 aa, synthetic construct
QTVRGDIHNL

SEQ ID NO: 108941 - protein, 10 aa, synthetic construct
QTPRGDIHNL

SEQ ID NO: 108942 - protein, 10 aa, synthetic construct
QTLRGDIHNL

SEQ ID NO: 108943 - protein, 10 aa, synthetic construct
QTIRGDIHNL

SEQ ID NO: 108944 - protein, 10 aa, synthetic construct
QTMRGDIHNL

SEQ ID NO: 108945 - protein, 10 aa, synthetic construct
QTWRGDIHNL

SEQ ID NO: 108946 - protein, 10 aa, synthetic construct
QTFRGDIHNL

SEQ ID NO: 108947 - protein, 10 aa, synthetic construct
QTKRGDIHNL

SEQ ID NO: 108948 - protein, 10 aa, synthetic construct
QTRRGDIHNL

SEQ ID NO: 108949 - protein, 10 aa, synthetic construct
QTHRGDIHNL

SEQ ID NO: 108950 - protein, 10 aa, synthetic construct
QTSRGDIHNL

SEQ ID NO: 108951 - protein, 10 aa, synthetic construct
QTTRGDIHNL

SEQ ID NO: 108952 - protein, 10 aa, synthetic construct
QTYRGDIHNL

SEQ ID NO: 108953 - protein, 10 aa, synthetic construct
QTNRGDIHNL

SEQ ID NO: 108954 - protein, 10 aa, synthetic construct
QTQRGDIHNL

SEQ ID NO: 108955 - protein, 10 aa, synthetic construct
QTDRGDIHNL

SEQ ID NO: 108956 - protein, 10 aa, synthetic construct
QTERGDIHNL

SEQ ID NO: 108957 - protein, 10 aa, synthetic construct
QYGRGDIHNL

SEQ ID NO: 108958 - protein, 10 aa, synthetic construct
QYARGDIHNL

SEQ ID NO: 108959 - protein, 10 aa, synthetic construct
QYVRGDIHNL

SEQ ID NO: 108960 - protein, 10 aa, synthetic construct
QYPRGDIHNL

SEQ ID NO: 108961 - protein, 10 aa, synthetic construct
QYLRGDIHNL

SEQ ID NO: 108962 - protein, 10 aa, synthetic construct
QYIRGDIHNL

SEQ ID NO: 108963 - protein, 10 aa, synthetic construct
QYMRGDIHNL

SEQ ID NO: 108964 - protein, 10 aa, synthetic construct
QYWRGDIHNL

SEQ ID NO: 108965 - protein, 10 aa, synthetic construct
QYFRGDIHNL

SEQ ID NO: 108966 - protein, 10 aa, synthetic construct
QYKRGDIHNL

SEQ ID NO: 108967 - protein, 10 aa, synthetic construct
QYRRGDIHNL

SEQ ID NO: 108968 - protein, 10 aa, synthetic construct
QYHRGDIHNL

SEQ ID NO: 108969 - protein, 10 aa, synthetic construct
QYSRGDIHNL

SEQ ID NO: 108970 - protein, 10 aa, synthetic construct
QYTRGDIHNL

SEQ ID NO: 108971 - protein, 10 aa, synthetic construct
QYYRGDIHNL

SEQ ID NO: 108972 - protein, 10 aa, synthetic construct
QYNRGDIHNL

SEQ ID NO: 108973 - protein, 10 aa, synthetic construct
QYQRGDIHNL

SEQ ID NO: 108974 - protein, 10 aa, synthetic construct
QYDRGDIHNL

SEQ ID NO: 108975 - protein, 10 aa, synthetic construct
QYERGDIHNL

SEQ ID NO: 108976 - protein, 10 aa, synthetic construct
QNGRGDIHNL

SEQ ID NO: 108977 - protein, 10 aa, synthetic construct
QNARGDIHNL

SEQ ID NO: 108978 - protein, 10 aa, synthetic construct
QNVRGDIHNL

SEQ ID NO: 108979 - protein, 10 aa, synthetic construct
QNPRGDIHNL

SEQ ID NO: 108980 - protein, 10 aa, synthetic construct
QNLRGDIHNL

SEQ ID NO: 108981 - protein, 10 aa, synthetic construct
QNIRGDIHNL

SEQ ID NO: 108982 - protein, 10 aa, synthetic construct
QNMRGDIHNL

SEQ ID NO: 108983 - protein, 10 aa, synthetic construct
QNWRGDIHNL

SEQ ID NO: 108984 - protein, 10 aa, synthetic construct
QNFRGDIHNL

SEQ ID NO: 108985 - protein, 10 aa, synthetic construct
QNKRGDIHNL

SEQ ID NO: 108986 - protein, 10 aa, synthetic construct
QNRRGDIHNL

SEQ ID NO: 108987 - protein, 10 aa, synthetic construct
QNHRGDIHNL

SEQ ID NO: 108988 - protein, 10 aa, synthetic construct
QNSRGDIHNL

SEQ ID NO: 108989 - protein, 10 aa, synthetic construct
QNTRGDIHNL

SEQ ID NO: 108990 - protein, 10 aa, synthetic construct
QNYRGDIHNL

SEQ ID NO: 108991 - protein, 10 aa, synthetic construct
QNNRGDIHNL

SEQ ID NO: 108992 - protein, 10 aa, synthetic construct
QNQRGDIHNL

SEQ ID NO: 108993 - protein, 10 aa, synthetic construct
QNDRGDIHNL

SEQ ID NO: 108994 - protein, 10 aa, synthetic construct
QNERGDIHNL

SEQ ID NO: 108995 - protein, 10 aa, synthetic construct
QQGRGDIHNL

SEQ ID NO: 108996 - protein, 10 aa, synthetic construct
QQARGDIHNL

SEQ ID NO: 108997 - protein, 10 aa, synthetic construct
QQVRGDIHNL

SEQ ID NO: 108998 - protein, 10 aa, synthetic construct
QQPRGDIHNL

SEQ ID NO: 108999 - protein, 10 aa, synthetic construct
QQLRGDIHNL

SEQ ID NO: 109000 - protein, 10 aa, synthetic construct
QQIRGDIHNL

SEQ ID NO: 109001 - protein, 10 aa, synthetic construct
QQMRGDIHNL

SEQ ID NO: 109002 - protein, 10 aa, synthetic construct
QQWRGDIHNL

SEQ ID NO: 109003 - protein, 10 aa, synthetic construct
QQFRGDIHNL

SEQ ID NO: 109004 - protein, 10 aa, synthetic construct
QQKRGDIHNL

SEQ ID NO: 109005 - protein, 10 aa, synthetic construct
QQRRGDIHNL

SEQ ID NO: 109006 - protein, 10 aa, synthetic construct
QQHRGDIHNL

SEQ ID NO: 109007 - protein, 10 aa, synthetic construct
QQSRGDIHNL

SEQ ID NO: 109008 - protein, 10 aa, synthetic construct
QQTRGDIHNL

SEQ ID NO: 109009 - protein, 10 aa, synthetic construct
QQYRGDIHNL

SEQ ID NO: 109010 - protein, 10 aa, synthetic construct
QQNRGDIHNL

SEQ ID NO: 109011 - protein, 10 aa, synthetic construct
QQQRGDIHNL

SEQ ID NO: 109012 - protein, 10 aa, synthetic construct
QQDRGDIHNL

SEQ ID NO: 109013 - protein, 10 aa, synthetic construct
QQERGDIHNL

SEQ ID NO: 109014 - protein, 10 aa, synthetic construct
QDGRGDIHNL

SEQ ID NO: 109015 - protein, 10 aa, synthetic construct
QDARGDIHNL

SEQ ID NO: 109016 - protein, 10 aa, synthetic construct
QDVRGDIHNL

SEQ ID NO: 109017 - protein, 10 aa, synthetic construct
QDPRGDIHNL

SEQ ID NO: 109018 - protein, 10 aa, synthetic construct
QDLRGDIHNL

SEQ ID NO: 109019 - protein, 10 aa, synthetic construct
QDIRGDIHNL

SEQ ID NO: 109020 - protein, 10 aa, synthetic construct
QDMRGDIHNL

SEQ ID NO: 109021 - protein, 10 aa, synthetic construct
QDWRGDIHNL

SEQ ID NO: 109022 - protein, 10 aa, synthetic construct
QDFRGDIHNL

SEQ ID NO: 109023 - protein, 10 aa, synthetic construct
QDKRGDIHNL

SEQ ID NO: 109024 - protein, 10 aa, synthetic construct
QDRRGDIHNL

SEQ ID NO: 109025 - protein, 10 aa, synthetic construct
QDHRGDIHNL

SEQ ID NO: 109026 - protein, 10 aa, synthetic construct
QDSRGDIHNL

SEQ ID NO: 109027 - protein, 10 aa, synthetic construct
QDTRGDIHNL

SEQ ID NO: 109028 - protein, 10 aa, synthetic construct
QDYRGDIHNL

SEQ ID NO: 109029 - protein, 10 aa, synthetic construct
QDNRGDIHNL

SEQ ID NO: 109030 - protein, 10 aa, synthetic construct
QDQRGDIHNL

SEQ ID NO: 109031 - protein, 10 aa, synthetic construct
QDDRGDIHNL

SEQ ID NO: 109032 - protein, 10 aa, synthetic construct
QDERGDIHNL

SEQ ID NO: 109033 - protein, 10 aa, synthetic construct
QEGRGDIHNL

SEQ ID NO: 109034 - protein, 10 aa, synthetic construct
QEARGDIHNL

SEQ ID NO: 109035 - protein, 10 aa, synthetic construct
QEVRGDIHNL

SEQ ID NO: 109036 - protein, 10 aa, synthetic construct
QEPRGDIHNL

SEQ ID NO: 109037 - protein, 10 aa, synthetic construct
QELRGDIHNL

SEQ ID NO: 109038 - protein, 10 aa, synthetic construct
QEIRGDIHNL

SEQ ID NO: 109039 - protein, 10 aa, synthetic construct
QEMRGDIHNL

SEQ ID NO: 109040 - protein, 10 aa, synthetic construct
QEWRGDIHNL

SEQ ID NO: 109041 - protein, 10 aa, synthetic construct
QEFRGDIHNL

SEQ ID NO: 109042 - protein, 10 aa, synthetic construct
QEKRGDIHNL

SEQ ID NO: 109043 - protein, 10 aa, synthetic construct
QERRGDIHNL

SEQ ID NO: 109044 - protein, 10 aa, synthetic construct
QEHRGDIHNL

SEQ ID NO: 109045 - protein, 10 aa, synthetic construct
QESRGDIHNL

SEQ ID NO: 109046 - protein, 10 aa, synthetic construct
QETRGDIHNL

SEQ ID NO: 109047 - protein, 10 aa, synthetic construct
QEYRGDIHNL

SEQ ID NO: 109048 - protein, 10 aa, synthetic construct
QENRGDIHNL

SEQ ID NO: 109049 - protein, 10 aa, synthetic construct
QEQRGDIHNL

SEQ ID NO: 109050 - protein, 10 aa, synthetic construct
QEDRGDIHNL

SEQ ID NO: 109051 - protein, 10 aa, synthetic construct
QEERGDIHNL

SEQ ID NO: 109052 - protein, 10 aa, synthetic construct
SGGRGDISRT

SEQ ID NO: 109053 - protein, 10 aa, synthetic construct
SGARGDISRT

SEQ ID NO: 109054 - protein, 10 aa, synthetic construct
SGVRGDISRT

SEQ ID NO: 109055 - protein, 10 aa, synthetic construct
SGPRGDISRT

SEQ ID NO: 109056 - protein, 10 aa, synthetic construct
SGLRGDISRT

SEQ ID NO: 109057 - protein, 10 aa, synthetic construct
SGIRGDISRT

SEQ ID NO: 109058 - protein, 10 aa, synthetic construct
SGMRGDISRT

SEQ ID NO: 109059 - protein, 10 aa, synthetic construct
SGWRGDISRT

SEQ ID NO: 109060 - protein, 10 aa, synthetic construct
SGFRGDISRT

SEQ ID NO: 109061 - protein, 10 aa, synthetic construct
SGKRGDISRT

SEQ ID NO: 109062 - protein, 10 aa, synthetic construct
SGRRGDISRT

SEQ ID NO: 109063 - protein, 10 aa, synthetic construct
SGHRGDISRT

SEQ ID NO: 109064 - protein, 10 aa, synthetic construct
SGSRGDISRT

SEQ ID NO: 109065 - protein, 10 aa, synthetic construct
SGTRGDISRT

SEQ ID NO: 109066 - protein, 10 aa, synthetic construct
SGYRGDISRT

SEQ ID NO: 109067 - protein, 10 aa, synthetic construct
SGNRGDISRT

SEQ ID NO: 109068 - protein, 10 aa, synthetic construct
SGQRGDISRT

SEQ ID NO: 109069 - protein, 10 aa, synthetic construct
SGDRGDISRT

SEQ ID NO: 109070 - protein, 10 aa, synthetic construct
SGERGDISRT

SEQ ID NO: 109071 - protein, 10 aa, synthetic construct
SAGRGDISRT

SEQ ID NO: 109072 - protein, 10 aa, synthetic construct
SAARGDISRT

SEQ ID NO: 109073 - protein, 10 aa, synthetic construct
SAVRGDISRT

SEQ ID NO: 109074 - protein, 10 aa, synthetic construct
SAPRGDISRT

SEQ ID NO: 109075 - protein, 10 aa, synthetic construct
SALRGDISRT

SEQ ID NO: 109076 - protein, 10 aa, synthetic construct
SAIRGDISRT

SEQ ID NO: 109077 - protein, 10 aa, synthetic construct
SAMRGDISRT

SEQ ID NO: 109078 - protein, 10 aa, synthetic construct
SAWRGDISRT

SEQ ID NO: 109079 - protein, 10 aa, synthetic construct
SAFRGDISRT

SEQ ID NO: 109080 - protein, 10 aa, synthetic construct
SAKRGDISRT

SEQ ID NO: 109081 - protein, 10 aa, synthetic construct
SARRGDISRT

SEQ ID NO: 109082 - protein, 10 aa, synthetic construct
SAHRGDISRT

SEQ ID NO: 109083 - protein, 10 aa, synthetic construct
SASRGDISRT

SEQ ID NO: 109084 - protein, 10 aa, synthetic construct
SATRGDISRT

SEQ ID NO: 109085 - protein, 10 aa, synthetic construct
SAYRGDISRT

SEQ ID NO: 109086 - protein, 10 aa, synthetic construct
SANRGDISRT

SEQ ID NO: 109087 - protein, 10 aa, synthetic construct
SAQRGDISRT

SEQ ID NO: 109088 - protein, 10 aa, synthetic construct
SADRGDISRT

SEQ ID NO: 109089 - protein, 10 aa, synthetic construct
SAERGDISRT

SEQ ID NO: 109090 - protein, 10 aa, synthetic construct
SVGRGDISRT

SEQ ID NO: 109091 - protein, 10 aa, synthetic construct
SVARGDISRT

SEQ ID NO: 109092 - protein, 10 aa, synthetic construct
SVVRGDISRT

SEQ ID NO: 109093 - protein, 10 aa, synthetic construct
SVPRGDISRT

SEQ ID NO: 109094 - protein, 10 aa, synthetic construct
SVLRGDISRT

SEQ ID NO: 109095 - protein, 10 aa, synthetic construct
SVIRGDISRT

SEQ ID NO: 109096 - protein, 10 aa, synthetic construct
SVMRGDISRT

SEQ ID NO: 109097 - protein, 10 aa, synthetic construct
SVWRGDISRT

SEQ ID NO: 109098 - protein, 10 aa, synthetic construct
SVFRGDISRT

SEQ ID NO: 109099 - protein, 10 aa, synthetic construct
SVKRGDISRT

SEQ ID NO: 109100 - protein, 10 aa, synthetic construct
SVRRGDISRT

SEQ ID NO: 109101 - protein, 10 aa, synthetic construct
SVHRGDISRT

SEQ ID NO: 109102 - protein, 10 aa, synthetic construct
SVSRGDISRT

SEQ ID NO: 109103 - protein, 10 aa, synthetic construct
SVTRGDISRT

SEQ ID NO: 109104 - protein, 10 aa, synthetic construct
SVYRGDISRT

SEQ ID NO: 109105 - protein, 10 aa, synthetic construct
SVNRGDISRT

SEQ ID NO: 109106 - protein, 10 aa, synthetic construct
SVQRGDISRT

SEQ ID NO: 109107 - protein, 10 aa, synthetic construct
SVDRGDISRT

SEQ ID NO: 109108 - protein, 10 aa, synthetic construct
SVERGDISRT

SEQ ID NO: 109109 - protein, 10 aa, synthetic construct
SPGRGDISRT

SEQ ID NO: 109110 - protein, 10 aa, synthetic construct
SPARGDISRT

SEQ ID NO: 109111 - protein, 10 aa, synthetic construct
SPVRGDISRT

SEQ ID NO: 109112 - protein, 10 aa, synthetic construct
SPPRGDISRT

SEQ ID NO: 109113 - protein, 10 aa, synthetic construct
SPLRGDISRT

SEQ ID NO: 109114 - protein, 10 aa, synthetic construct
SPIRGDISRT

SEQ ID NO: 109115 - protein, 10 aa, synthetic construct
SPMRGDISRT

SEQ ID NO: 109116 - protein, 10 aa, synthetic construct
SPWRGDISRT

SEQ ID NO: 109117 - protein, 10 aa, synthetic construct
SPFRGDISRT

SEQ ID NO: 109118 - protein, 10 aa, synthetic construct
SPKRGDISRT

SEQ ID NO: 109119 - protein, 10 aa, synthetic construct
SPRRGDISRT

SEQ ID NO: 109120 - protein, 10 aa, synthetic construct
SPHRGDISRT

SEQ ID NO: 109121 - protein, 10 aa, synthetic construct
SPSRGDISRT

SEQ ID NO: 109122 - protein, 10 aa, synthetic construct
SPTRGDISRT

SEQ ID NO: 109123 - protein, 10 aa, synthetic construct
SPYRGDISRT

SEQ ID NO: 109124 - protein, 10 aa, synthetic construct
SPNRGDISRT

SEQ ID NO: 109125 - protein, 10 aa, synthetic construct
SPQRGDISRT

SEQ ID NO: 109126 - protein, 10 aa, synthetic construct
SPDRGDISRT

SEQ ID NO: 109127 - protein, 10 aa, synthetic construct
SPERGDISRT

SEQ ID NO: 109128 - protein, 10 aa, synthetic construct
SLGRGDISRT

SEQ ID NO: 109129 - protein, 10 aa, synthetic construct
SLARGDISRT

SEQ ID NO: 109130 - protein, 10 aa, synthetic construct
SLVRGDISRT

SEQ ID NO: 109131 - protein, 10 aa, synthetic construct
SLPRGDISRT

SEQ ID NO: 109132 - protein, 10 aa, synthetic construct
SLLRGDISRT

SEQ ID NO: 109133 - protein, 10 aa, synthetic construct
SLIRGDISRT

SEQ ID NO: 109134 - protein, 10 aa, synthetic construct
SLMRGDISRT

SEQ ID NO: 109135 - protein, 10 aa, synthetic construct
SLWRGDISRT

SEQ ID NO: 109136 - protein, 10 aa, synthetic construct
SLFRGDISRT

SEQ ID NO: 109137 - protein, 10 aa, synthetic construct
SLKRGDISRT

SEQ ID NO: 109138 - protein, 10 aa, synthetic construct
SLRRGDISRT

SEQ ID NO: 109139 - protein, 10 aa, synthetic construct
SLHRGDISRT

SEQ ID NO: 109140 - protein, 10 aa, synthetic construct
SLSRGDISRT

SEQ ID NO: 109141 - protein, 10 aa, synthetic construct
SLTRGDISRT

SEQ ID NO: 109142 - protein, 10 aa, synthetic construct
SLYRGDISRT

SEQ ID NO: 109143 - protein, 10 aa, synthetic construct
SLNRGDISRT

SEQ ID NO: 109144 - protein, 10 aa, synthetic construct
SLQRGDISRT

SEQ ID NO: 109145 - protein, 10 aa, synthetic construct
SLDRGDISRT

SEQ ID NO: 109146 - protein, 10 aa, synthetic construct
SLERGDISRT

SEQ ID NO: 109147 - protein, 10 aa, synthetic construct
SIGRGDISRT

SEQ ID NO: 109148 - protein, 10 aa, synthetic construct
SIARGDISRT

SEQ ID NO: 109149 - protein, 10 aa, synthetic construct
SIVRGDISRT

SEQ ID NO: 109150 - protein, 10 aa, synthetic construct
SIPRGDISRT

SEQ ID NO: 109151 - protein, 10 aa, synthetic construct
SILRGDISRT

SEQ ID NO: 109152 - protein, 10 aa, synthetic construct
SIIRGDISRT

SEQ ID NO: 109153 - protein, 10 aa, synthetic construct
SIMRGDISRT

SEQ ID NO: 109154 - protein, 10 aa, synthetic construct
SIWRGDISRT

SEQ ID NO: 109155 - protein, 10 aa, synthetic construct
SIFRGDISRT

SEQ ID NO: 109156 - protein, 10 aa, synthetic construct
SIKRGDISRT

SEQ ID NO: 109157 - protein, 10 aa, synthetic construct
SIRRGDISRT

SEQ ID NO: 109158 - protein, 10 aa, synthetic construct
SIHRGDISRT

SEQ ID NO: 109159 - protein, 10 aa, synthetic construct
SISRGDISRT

SEQ ID NO: 109160 - protein, 10 aa, synthetic construct
SITRGDISRT

SEQ ID NO: 109161 - protein, 10 aa, synthetic construct
SIYRGDISRT

SEQ ID NO: 109162 - protein, 10 aa, synthetic construct
SINRGDISRT

SEQ ID NO: 109163 - protein, 10 aa, synthetic construct
SIQRGDISRT

SEQ ID NO: 109164 - protein, 10 aa, synthetic construct
SIDRGDISRT

SEQ ID NO: 109165 - protein, 10 aa, synthetic construct
SIERGDISRT

SEQ ID NO: 109166 - protein, 10 aa, synthetic construct
SMGRGDISRT

SEQ ID NO: 109167 - protein, 10 aa, synthetic construct
SMARGDISRT

SEQ ID NO: 109168 - protein, 10 aa, synthetic construct
SMVRGDISRT

SEQ ID NO: 109169 - protein, 10 aa, synthetic construct
SMPRGDISRT

SEQ ID NO: 109170 - protein, 10 aa, synthetic construct
SMLRGDISRT

SEQ ID NO: 109171 - protein, 10 aa, synthetic construct
SMIRGDISRT

SEQ ID NO: 109172 - protein, 10 aa, synthetic construct
SMMRGDISRT

SEQ ID NO: 109173 - protein, 10 aa, synthetic construct
SMWRGDISRT

SEQ ID NO: 109174 - protein, 10 aa, synthetic construct
SMFRGDISRT

SEQ ID NO: 109175 - protein, 10 aa, synthetic construct
SMKRGDISRT

SEQ ID NO: 109176 - protein, 10 aa, synthetic construct
SMRRGDISRT

SEQ ID NO: 109177 - protein, 10 aa, synthetic construct
SMHRGDISRT

SEQ ID NO: 109178 - protein, 10 aa, synthetic construct
SMSRGDISRT

SEQ ID NO: 109179 - protein, 10 aa, synthetic construct
SMTRGDISRT

SEQ ID NO: 109180 - protein, 10 aa, synthetic construct
SMYRGDISRT

SEQ ID NO: 109181 - protein, 10 aa, synthetic construct
SMNRGDISRT

SEQ ID NO: 109182 - protein, 10 aa, synthetic construct
SMQRGDISRT

SEQ ID NO: 109183 - protein, 10 aa, synthetic construct
SMDRGDISRT

SEQ ID NO: 109184 - protein, 10 aa, synthetic construct
SMERGDISRT

SEQ ID NO: 109185 - protein, 10 aa, synthetic construct
SWGRGDISRT

SEQ ID NO: 109186 - protein, 10 aa, synthetic construct
SWARGDISRT

SEQ ID NO: 109187 - protein, 10 aa, synthetic construct
SWVRGDISRT

SEQ ID NO: 109188 - protein, 10 aa, synthetic construct
SWPRGDISRT

SEQ ID NO: 109189 - protein, 10 aa, synthetic construct
SWLRGDISRT

SEQ ID NO: 109190 - protein, 10 aa, synthetic construct
SWIRGDISRT

SEQ ID NO: 109191 - protein, 10 aa, synthetic construct
SWMRGDISRT

SEQ ID NO: 109192 - protein, 10 aa, synthetic construct
SWWRGDISRT

SEQ ID NO: 109193 - protein, 10 aa, synthetic construct
SWFRGDISRT

SEQ ID NO: 109194 - protein, 10 aa, synthetic construct
SWKRGDISRT

SEQ ID NO: 109195 - protein, 10 aa, synthetic construct
SWRRGDISRT

SEQ ID NO: 109196 - protein, 10 aa, synthetic construct
SWHRGDISRT

SEQ ID NO: 109197 - protein, 10 aa, synthetic construct
SWSRGDISRT

SEQ ID NO: 109198 - protein, 10 aa, synthetic construct
SWTRGDISRT

SEQ ID NO: 109199 - protein, 10 aa, synthetic construct
SWYRGDISRT

SEQ ID NO: 109200 - protein, 10 aa, synthetic construct
SWNRGDISRT

SEQ ID NO: 109201 - protein, 10 aa, synthetic construct
SWQRGDISRT

SEQ ID NO: 109202 - protein, 10 aa, synthetic construct
SWDRGDISRT

SEQ ID NO: 109203 - protein, 10 aa, synthetic construct
SWERGDISRT

SEQ ID NO: 109204 - protein, 10 aa, synthetic construct
SFGRGDISRT

SEQ ID NO: 109205 - protein, 10 aa, synthetic construct
SFARGDISRT

SEQ ID NO: 109206 - protein, 10 aa, synthetic construct
SFVRGDISRT

SEQ ID NO: 109207 - protein, 10 aa, synthetic construct
SFPRGDISRT

SEQ ID NO: 109208 - protein, 10 aa, synthetic construct
SFLRGDISRT

SEQ ID NO: 109209 - protein, 10 aa, synthetic construct
SFIRGDISRT

SEQ ID NO: 109210 - protein, 10 aa, synthetic construct
SFMRGDISRT

SEQ ID NO: 109211 - protein, 10 aa, synthetic construct
SFWRGDISRT

SEQ ID NO: 109212 - protein, 10 aa, synthetic construct
SFFRGDISRT

SEQ ID NO: 109213 - protein, 10 aa, synthetic construct
SFKRGDISRT

SEQ ID NO: 109214 - protein, 10 aa, synthetic construct
SFRRGDISRT

SEQ ID NO: 109215 - protein, 10 aa, synthetic construct
SFHRGDISRT

SEQ ID NO: 109216 - protein, 10 aa, synthetic construct
SFSRGDISRT

SEQ ID NO: 109217 - protein, 10 aa, synthetic construct
SFTRGDISRT

SEQ ID NO: 109218 - protein, 10 aa, synthetic construct
SFYRGDISRT

SEQ ID NO: 109219 - protein, 10 aa, synthetic construct
SFNRGDISRT

SEQ ID NO: 109220 - protein, 10 aa, synthetic construct
SFQRGDISRT

SEQ ID NO: 109221 - protein, 10 aa, synthetic construct
SFDRGDISRT

SEQ ID NO: 109222 - protein, 10 aa, synthetic construct
SFERGDISRT

SEQ ID NO: 109223 - protein, 10 aa, synthetic construct
SKGRGDISRT

SEQ ID NO: 109224 - protein, 10 aa, synthetic construct
SKARGDISRT

SEQ ID NO: 109225 - protein, 10 aa, synthetic construct
SKVRGDISRT

SEQ ID NO: 109226 - protein, 10 aa, synthetic construct
SKPRGDISRT

SEQ ID NO: 109227 - protein, 10 aa, synthetic construct
SKLRGDISRT

SEQ ID NO: 109228 - protein, 10 aa, synthetic construct
SKIRGDISRT

SEQ ID NO: 109229 - protein, 10 aa, synthetic construct
SKMRGDISRT

SEQ ID NO: 109230 - protein, 10 aa, synthetic construct
SKWRGDISRT

SEQ ID NO: 109231 - protein, 10 aa, synthetic construct
SKFRGDISRT

SEQ ID NO: 109232 - protein, 10 aa, synthetic construct
SKKRGDISRT

SEQ ID NO: 109233 - protein, 10 aa, synthetic construct
SKRRGDISRT

SEQ ID NO: 109234 - protein, 10 aa, synthetic construct
SKHRGDISRT

SEQ ID NO: 109235 - protein, 10 aa, synthetic construct
SKSRGDISRT

SEQ ID NO: 109236 - protein, 10 aa, synthetic construct
SKTRGDISRT

SEQ ID NO: 109237 - protein, 10 aa, synthetic construct
SKYRGDISRT

SEQ ID NO: 109238 - protein, 10 aa, synthetic construct
SKNRGDISRT

SEQ ID NO: 109239 - protein, 10 aa, synthetic construct
SKQRGDISRT

SEQ ID NO: 109240 - protein, 10 aa, synthetic construct
SKDRGDISRT

SEQ ID NO: 109241 - protein, 10 aa, synthetic construct
SKERGDISRT

SEQ ID NO: 109242 - protein, 10 aa, synthetic construct
SRGRGDISRT

SEQ ID NO: 109243 - protein, 10 aa, synthetic construct
SRARGDISRT

SEQ ID NO: 109244 - protein, 10 aa, synthetic construct
SRVRGDISRT

SEQ ID NO: 109245 - protein, 10 aa, synthetic construct
SRPRGDISRT

SEQ ID NO: 109246 - protein, 10 aa, synthetic construct
SRLRGDISRT

SEQ ID NO: 109247 - protein, 10 aa, synthetic construct
SRIRGDISRT

SEQ ID NO: 109248 - protein, 10 aa, synthetic construct
SRMRGDISRT

SEQ ID NO: 109249 - protein, 10 aa, synthetic construct
SRWRGDISRT

SEQ ID NO: 109250 - protein, 10 aa, synthetic construct
SRFRGDISRT

SEQ ID NO: 109251 - protein, 10 aa, synthetic construct
SRKRGDISRT

SEQ ID NO: 109252 - protein, 10 aa, synthetic construct
SRRRGDISRT

SEQ ID NO: 109253 - protein, 10 aa, synthetic construct
SRHRGDISRT

SEQ ID NO: 109254 - protein, 10 aa, synthetic construct
SRSRGDISRT

SEQ ID NO: 109255 - protein, 10 aa, synthetic construct
SRTRGDISRT

SEQ ID NO: 109256 - protein, 10 aa, synthetic construct
SRYRGDISRT

SEQ ID NO: 109257 - protein, 10 aa, synthetic construct
SRNRGDISRT

SEQ ID NO: 109258 - protein, 10 aa, synthetic construct
SRQRGDISRT

SEQ ID NO: 109259 - protein, 10 aa, synthetic construct
SRDRGDISRT

SEQ ID NO: 109260 - protein, 10 aa, synthetic construct
SRERGDISRT

SEQ ID NO: 109261 - protein, 10 aa, synthetic construct
SHGRGDISRT

SEQ ID NO: 109262 - protein, 10 aa, synthetic construct
SHARGDISRT

SEQ ID NO: 109263 - protein, 10 aa, synthetic construct
SHVRGDISRT

SEQ ID NO: 109264 - protein, 10 aa, synthetic construct
SHPRGDISRT

SEQ ID NO: 109265 - protein, 10 aa, synthetic construct
SHLRGDISRT

SEQ ID NO: 109266 - protein, 10 aa, synthetic construct
SHIRGDISRT

SEQ ID NO: 109267 - protein, 10 aa, synthetic construct
SHMRGDISRT

SEQ ID NO: 109268 - protein, 10 aa, synthetic construct
SHWRGDISRT

SEQ ID NO: 109269 - protein, 10 aa, synthetic construct
SHFRGDISRT

SEQ ID NO: 109270 - protein, 10 aa, synthetic construct
SHKRGDISRT

SEQ ID NO: 109271 - protein, 10 aa, synthetic construct
SHRRGDISRT

SEQ ID NO: 109272 - protein, 10 aa, synthetic construct
SHHRGDISRT

SEQ ID NO: 109273 - protein, 10 aa, synthetic construct
SHSRGDISRT

SEQ ID NO: 109274 - protein, 10 aa, synthetic construct
SHTRGDISRT

SEQ ID NO: 109275 - protein, 10 aa, synthetic construct
SHYRGDISRT

SEQ ID NO: 109276 - protein, 10 aa, synthetic construct
SHNRGDISRT

SEQ ID NO: 109277 - protein, 10 aa, synthetic construct
SHQRGDISRT

SEQ ID NO: 109278 - protein, 10 aa, synthetic construct
SHDRGDISRT

SEQ ID NO: 109279 - protein, 10 aa, synthetic construct
SHERGDISRT

SEQ ID NO: 109280 - protein, 10 aa, synthetic construct
SSGRGDISRT

SEQ ID NO: 109281 - protein, 10 aa, synthetic construct
SSARGDISRT

SEQ ID NO: 109282 - protein, 10 aa, synthetic construct
SSVRGDISRT

SEQ ID NO: 109283 - protein, 10 aa, synthetic construct
SSPRGDISRT

SEQ ID NO: 109284 - protein, 10 aa, synthetic construct
SSLRGDISRT

SEQ ID NO: 109285 - protein, 10 aa, synthetic construct
SSIRGDISRT

SEQ ID NO: 109286 - protein, 10 aa, synthetic construct
SSMRGDISRT

SEQ ID NO: 109287 - protein, 10 aa, synthetic construct
SSWRGDISRT

SEQ ID NO: 109288 - protein, 10 aa, synthetic construct
SSFRGDISRT

SEQ ID NO: 109289 - protein, 10 aa, synthetic construct
SSKRGDISRT

SEQ ID NO: 109290 - protein, 10 aa, synthetic construct
SSRRGDISRT

SEQ ID NO: 109291 - protein, 10 aa, synthetic construct
SSHRGDISRT

SEQ ID NO: 109292 - protein, 10 aa, synthetic construct
SSSRGDISRT

SEQ ID NO: 109293 - protein, 10 aa, synthetic construct
SSTRGDISRT

SEQ ID NO: 109294 - protein, 10 aa, synthetic construct
SSYRGDISRT

SEQ ID NO: 109295 - protein, 10 aa, synthetic construct
SSNRGDISRT

SEQ ID NO: 109296 - protein, 10 aa, synthetic construct
SSQRGDISRT

SEQ ID NO: 109297 - protein, 10 aa, synthetic construct
SSDRGDISRT

SEQ ID NO: 109298 - protein, 10 aa, synthetic construct
SSERGDISRT

SEQ ID NO: 109299 - protein, 10 aa, synthetic construct
STGRGDISRT

SEQ ID NO: 109300 - protein, 10 aa, synthetic construct
STARGDISRT

SEQ ID NO: 109301 - protein, 10 aa, synthetic construct
STVRGDISRT

SEQ ID NO: 109302 - protein, 10 aa, synthetic construct
STPRGDISRT

SEQ ID NO: 109303 - protein, 10 aa, synthetic construct
STLRGDISRT

SEQ ID NO: 109304 - protein, 10 aa, synthetic construct
STIRGDISRT

SEQ ID NO: 109305 - protein, 10 aa, synthetic construct
STMRGDISRT

SEQ ID NO: 109306 - protein, 10 aa, synthetic construct
STWRGDISRT

SEQ ID NO: 109307 - protein, 10 aa, synthetic construct
STFRGDISRT

SEQ ID NO: 109308 - protein, 10 aa, synthetic construct
STKRGDISRT

SEQ ID NO: 109309 - protein, 10 aa, synthetic construct
STRRGDISRT

SEQ ID NO: 109310 - protein, 10 aa, synthetic construct
STHRGDISRT

SEQ ID NO: 109311 - protein, 10 aa, synthetic construct
STSRGDISRT

SEQ ID NO: 109312 - protein, 10 aa, synthetic construct
STTRGDISRT

SEQ ID NO: 109313 - protein, 10 aa, synthetic construct
STYRGDISRT

SEQ ID NO: 109314 - protein, 10 aa, synthetic construct
STNRGDISRT

SEQ ID NO: 109315 - protein, 10 aa, synthetic construct
STQRGDISRT

SEQ ID NO: 109316 - protein, 10 aa, synthetic construct
STDRGDISRT

SEQ ID NO: 109317 - protein, 10 aa, synthetic construct
STERGDISRT

SEQ ID NO: 109318 - protein, 10 aa, synthetic construct
SYGRGDISRT

SEQ ID NO: 109319 - protein, 10 aa, synthetic construct
SYARGDISRT

SEQ ID NO: 109320 - protein, 10 aa, synthetic construct
SYVRGDISRT

SEQ ID NO: 109321 - protein, 10 aa, synthetic construct
SYPRGDISRT

SEQ ID NO: 109322 - protein, 10 aa, synthetic construct
SYLRGDISRT

SEQ ID NO: 109323 - protein, 10 aa, synthetic construct
SYIRGDISRT

SEQ ID NO: 109324 - protein, 10 aa, synthetic construct
SYMRGDISRT

SEQ ID NO: 109325 - protein, 10 aa, synthetic construct
SYWRGDISRT

SEQ ID NO: 109326 - protein, 10 aa, synthetic construct
SYFRGDISRT

SEQ ID NO: 109327 - protein, 10 aa, synthetic construct
SYKRGDISRT

SEQ ID NO: 109328 - protein, 10 aa, synthetic construct
SYRRGDISRT

SEQ ID NO: 109329 - protein, 10 aa, synthetic construct
SYHRGDISRT

SEQ ID NO: 109330 - protein, 10 aa, synthetic construct
SYSRGDISRT

SEQ ID NO: 109331 - protein, 10 aa, synthetic construct
SYTRGDISRT

SEQ ID NO: 109332 - protein, 10 aa, synthetic construct
SYYRGDISRT

SEQ ID NO: 109333 - protein, 10 aa, synthetic construct
SYNRGDISRT

SEQ ID NO: 109334 - protein, 10 aa, synthetic construct
SYQRGDISRT

SEQ ID NO: 109335 - protein, 10 aa, synthetic construct
SYDRGDISRT

SEQ ID NO: 109336 - protein, 10 aa, synthetic construct
SYERGDISRT

SEQ ID NO: 109337 - protein, 10 aa, synthetic construct
SNGRGDISRT

SEQ ID NO: 109338 - protein, 10 aa, synthetic construct
SNARGDISRT

SEQ ID NO: 109339 - protein, 10 aa, synthetic construct
SNVRGDISRT

SEQ ID NO: 109340 - protein, 10 aa, synthetic construct
SNPRGDISRT

SEQ ID NO: 109341 - protein, 10 aa, synthetic construct
SNLRGDISRT

SEQ ID NO: 109342 - protein, 10 aa, synthetic construct
SNIRGDISRT

SEQ ID NO: 109343 - protein, 10 aa, synthetic construct
SNMRGDISRT

SEQ ID NO: 109344 - protein, 10 aa, synthetic construct
SNWRGDISRT

SEQ ID NO: 109345 - protein, 10 aa, synthetic construct
SNFRGDISRT

SEQ ID NO: 109346 - protein, 10 aa, synthetic construct
SNKRGDISRT

SEQ ID NO: 109347 - protein, 10 aa, synthetic construct
SNRRGDISRT

SEQ ID NO: 109348 - protein, 10 aa, synthetic construct
SNHRGDISRT

SEQ ID NO: 109349 - protein, 10 aa, synthetic construct
SNSRGDISRT

SEQ ID NO: 109350 - protein, 10 aa, synthetic construct
SNTRGDISRT

SEQ ID NO: 109351 - protein, 10 aa, synthetic construct
SNYRGDISRT

SEQ ID NO: 109352 - protein, 10 aa, synthetic construct
SNNRGDISRT

SEQ ID NO: 109353 - protein, 10 aa, synthetic construct
SNQRGDISRT

SEQ ID NO: 109354 - protein, 10 aa, synthetic construct
SNDRGDISRT

SEQ ID NO: 109355 - protein, 10 aa, synthetic construct
SNERGDISRT

SEQ ID NO: 109356 - protein, 10 aa, synthetic construct
SQGRGDISRT

SEQ ID NO: 109357 - protein, 10 aa, synthetic construct
SQARGDISRT

SEQ ID NO: 109358 - protein, 10 aa, synthetic construct
SQVRGDISRT

SEQ ID NO: 109359 - protein, 10 aa, synthetic construct
SQPRGDISRT

SEQ ID NO: 109360 - protein, 10 aa, synthetic construct
SQLRGDISRT

SEQ ID NO: 109361 - protein, 10 aa, synthetic construct
SQIRGDISRT

SEQ ID NO: 109362 - protein, 10 aa, synthetic construct
SQMRGDISRT

SEQ ID NO: 109363 - protein, 10 aa, synthetic construct
SQWRGDISRT

SEQ ID NO: 109364 - protein, 10 aa, synthetic construct
SQFRGDISRT

SEQ ID NO: 109365 - protein, 10 aa, synthetic construct
SQKRGDISRT

SEQ ID NO: 109366 - protein, 10 aa, synthetic construct
SQRRGDISRT

SEQ ID NO: 109367 - protein, 10 aa, synthetic construct
SQHRGDISRT

SEQ ID NO: 109368 - protein, 10 aa, synthetic construct
SQSRGDISRT

SEQ ID NO: 109369 - protein, 10 aa, synthetic construct
SQTRGDISRT

SEQ ID NO: 109370 - protein, 10 aa, synthetic construct
SQYRGDISRT

SEQ ID NO: 109371 - protein, 10 aa, synthetic construct
SQNRGDISRT

SEQ ID NO: 109372 - protein, 10 aa, synthetic construct
SQQRGDISRT

SEQ ID NO: 109373 - protein, 10 aa, synthetic construct
SQDRGDISRT

SEQ ID NO: 109374 - protein, 10 aa, synthetic construct
SQERGDISRT

SEQ ID NO: 109375 - protein, 10 aa, synthetic construct
SDGRGDISRT

SEQ ID NO: 109376 - protein, 10 aa, synthetic construct
SDARGDISRT

SEQ ID NO: 109377 - protein, 10 aa, synthetic construct
SDVRGDISRT

SEQ ID NO: 109378 - protein, 10 aa, synthetic construct
SDPRGDISRT

SEQ ID NO: 109379 - protein, 10 aa, synthetic construct
SDLRGDISRT

SEQ ID NO: 109380 - protein, 10 aa, synthetic construct
SDIRGDISRT

SEQ ID NO: 109381 - protein, 10 aa, synthetic construct
SDMRGDISRT

SEQ ID NO: 109382 - protein, 10 aa, synthetic construct
SDWRGDISRT

SEQ ID NO: 109383 - protein, 10 aa, synthetic construct
SDFRGDISRT

SEQ ID NO: 109384 - protein, 10 aa, synthetic construct
SDKRGDISRT

SEQ ID NO: 109385 - protein, 10 aa, synthetic construct
SDRRGDISRT

SEQ ID NO: 109386 - protein, 10 aa, synthetic construct
SDHRGDISRT

SEQ ID NO: 109387 - protein, 10 aa, synthetic construct
SDSRGDISRT

SEQ ID NO: 109388 - protein, 10 aa, synthetic construct
SDTRGDISRT

SEQ ID NO: 109389 - protein, 10 aa, synthetic construct
SDYRGDISRT

SEQ ID NO: 109390 - protein, 10 aa, synthetic construct
SDNRGDISRT

SEQ ID NO: 109391 - protein, 10 aa, synthetic construct
SDQRGDISRT

SEQ ID NO: 109392 - protein, 10 aa, synthetic construct
SDDRGDISRT

SEQ ID NO: 109393 - protein, 10 aa, synthetic construct
SDERGDISRT

SEQ ID NO: 109394 - protein, 10 aa, synthetic construct
SEGRGDISRT

SEQ ID NO: 109395 - protein, 10 aa, synthetic construct
SEARGDISRT

SEQ ID NO: 109396 - protein, 10 aa, synthetic construct
SEVRGDISRT

SEQ ID NO: 109397 - protein, 10 aa, synthetic construct
SEPRGDISRT

SEQ ID NO: 109398 - protein, 10 aa, synthetic construct
SELRGDISRT

SEQ ID NO: 109399 - protein, 10 aa, synthetic construct
SEIRGDISRT

SEQ ID NO: 109400 - protein, 10 aa, synthetic construct
SEMRGDISRT

SEQ ID NO: 109401 - protein, 10 aa, synthetic construct
SEWRGDISRT

SEQ ID NO: 109402 - protein, 10 aa, synthetic construct
SEFRGDISRT

SEQ ID NO: 109403 - protein, 10 aa, synthetic construct
SEKRGDISRT

SEQ ID NO: 109404 - protein, 10 aa, synthetic construct
SERRGDISRT

SEQ ID NO: 109405 - protein, 10 aa, synthetic construct
SEHRGDISRT

SEQ ID NO: 109406 - protein, 10 aa, synthetic construct
SESRGDISRT

SEQ ID NO: 109407 - protein, 10 aa, synthetic construct
SETRGDISRT

SEQ ID NO: 109408 - protein, 10 aa, synthetic construct
SEYRGDISRT

SEQ ID NO: 109409 - protein, 10 aa, synthetic construct
SENRGDISRT

SEQ ID NO: 109410 - protein, 10 aa, synthetic construct
SEQRGDISRT

SEQ ID NO: 109411 - protein, 10 aa, synthetic construct
SEDRGDISRT

SEQ ID NO: 109412 - protein, 10 aa, synthetic construct
SEERGDISRT

SEQ ID NO: 109413 - protein, 10 aa, synthetic construct
TGGRGDISRT

SEQ ID NO: 109414 - protein, 10 aa, synthetic construct
TGARGDISRT

SEQ ID NO: 109415 - protein, 10 aa, synthetic construct
TGVRGDISRT

SEQ ID NO: 109416 - protein, 10 aa, synthetic construct
TGPRGDISRT

SEQ ID NO: 109417 - protein, 10 aa, synthetic construct
TGLRGDISRT

SEQ ID NO: 109418 - protein, 10 aa, synthetic construct
TGIRGDISRT

SEQ ID NO: 109419 - protein, 10 aa, synthetic construct
TGMRGDISRT

SEQ ID NO: 109420 - protein, 10 aa, synthetic construct
TGWRGDISRT

SEQ ID NO: 109421 - protein, 10 aa, synthetic construct
TGFRGDISRT

SEQ ID NO: 109422 - protein, 10 aa, synthetic construct
TGKRGDISRT

SEQ ID NO: 109423 - protein, 10 aa, synthetic construct
TGRRGDISRT

SEQ ID NO: 109424 - protein, 10 aa, synthetic construct
TGHRGDISRT

SEQ ID NO: 109425 - protein, 10 aa, synthetic construct
TGSRGDISRT

SEQ ID NO: 109426 - protein, 10 aa, synthetic construct
TGTRGDISRT

SEQ ID NO: 109427 - protein, 10 aa, synthetic construct
TGYRGDISRT

SEQ ID NO: 109428 - protein, 10 aa, synthetic construct
TGNRGDISRT

SEQ ID NO: 109429 - protein, 10 aa, synthetic construct
TGQRGDISRT

SEQ ID NO: 109430 - protein, 10 aa, synthetic construct
TGDRGDISRT

SEQ ID NO: 109431 - protein, 10 aa, synthetic construct
TGERGDISRT

SEQ ID NO: 109432 - protein, 10 aa, synthetic construct
TAGRGDISRT

SEQ ID NO: 109433 - protein, 10 aa, synthetic construct
TAARGDISRT

SEQ ID NO: 109434 - protein, 10 aa, synthetic construct
TAVRGDISRT

SEQ ID NO: 109435 - protein, 10 aa, synthetic construct
TAPRGDISRT

SEQ ID NO: 109436 - protein, 10 aa, synthetic construct
TALRGDISRT

SEQ ID NO: 109437 - protein, 10 aa, synthetic construct
TAIRGDISRT

SEQ ID NO: 109438 - protein, 10 aa, synthetic construct
TAMRGDISRT

SEQ ID NO: 109439 - protein, 10 aa, synthetic construct
TAWRGDISRT

SEQ ID NO: 109440 - protein, 10 aa, synthetic construct
TAFRGDISRT

SEQ ID NO: 109441 - protein, 10 aa, synthetic construct
TAKRGDISRT

SEQ ID NO: 109442 - protein, 10 aa, synthetic construct
TARRGDISRT

SEQ ID NO: 109443 - protein, 10 aa, synthetic construct
TAHRGDISRT

SEQ ID NO: 109444 - protein, 10 aa, synthetic construct
TASRGDISRT

SEQ ID NO: 109445 - protein, 10 aa, synthetic construct
TATRGDISRT

SEQ ID NO: 109446 - protein, 10 aa, synthetic construct
TAYRGDISRT

SEQ ID NO: 109447 - protein, 10 aa, synthetic construct
TANRGDISRT

SEQ ID NO: 109448 - protein, 10 aa, synthetic construct
TAQRGDISRT

SEQ ID NO: 109449 - protein, 10 aa, synthetic construct
TADRGDISRT

SEQ ID NO: 109450 - protein, 10 aa, synthetic construct
TAERGDISRT

SEQ ID NO: 109451 - protein, 10 aa, synthetic construct
TVGRGDISRT

SEQ ID NO: 109452 - protein, 10 aa, synthetic construct
TVARGDISRT

SEQ ID NO: 109453 - protein, 10 aa, synthetic construct
TVVRGDISRT

SEQ ID NO: 109454 - protein, 10 aa, synthetic construct
TVPRGDISRT

SEQ ID NO: 109455 - protein, 10 aa, synthetic construct
TVLRGDISRT

SEQ ID NO: 109456 - protein, 10 aa, synthetic construct
TVIRGDISRT

SEQ ID NO: 109457 - protein, 10 aa, synthetic construct
TVMRGDISRT

SEQ ID NO: 109458 - protein, 10 aa, synthetic construct
TVWRGDISRT

SEQ ID NO: 109459 - protein, 10 aa, synthetic construct
TVFRGDISRT

SEQ ID NO: 109460 - protein, 10 aa, synthetic construct
TVKRGDISRT

SEQ ID NO: 109461 - protein, 10 aa, synthetic construct
TVRRGDISRT

SEQ ID NO: 109462 - protein, 10 aa, synthetic construct
TVHRGDISRT

SEQ ID NO: 109463 - protein, 10 aa, synthetic construct
TVSRGDISRT

SEQ ID NO: 109464 - protein, 10 aa, synthetic construct
TVTRGDISRT

SEQ ID NO: 109465 - protein, 10 aa, synthetic construct
TVYRGDISRT

SEQ ID NO: 109466 - protein, 10 aa, synthetic construct
TVNRGDISRT

SEQ ID NO: 109467 - protein, 10 aa, synthetic construct
TVQRGDISRT

SEQ ID NO: 109468 - protein, 10 aa, synthetic construct
TVDRGDISRT

SEQ ID NO: 109469 - protein, 10 aa, synthetic construct
TVERGDISRT

SEQ ID NO: 109470 - protein, 10 aa, synthetic construct
TPGRGDISRT

SEQ ID NO: 109471 - protein, 10 aa, synthetic construct
TPARGDISRT

SEQ ID NO: 109472 - protein, 10 aa, synthetic construct
TPVRGDISRT

SEQ ID NO: 109473 - protein, 10 aa, synthetic construct
TPPRGDISRT

SEQ ID NO: 109474 - protein, 10 aa, synthetic construct
TPLRGDISRT

SEQ ID NO: 109475 - protein, 10 aa, synthetic construct
TPIRGDISRT

SEQ ID NO: 109476 - protein, 10 aa, synthetic construct
TPMRGDISRT

SEQ ID NO: 109477 - protein, 10 aa, synthetic construct
TPWRGDISRT

SEQ ID NO: 109478 - protein, 10 aa, synthetic construct
TPFRGDISRT

SEQ ID NO: 109479 - protein, 10 aa, synthetic construct
TPKRGDISRT

SEQ ID NO: 109480 - protein, 10 aa, synthetic construct
TPRRGDISRT

SEQ ID NO: 109481 - protein, 10 aa, synthetic construct
TPHRGDISRT

SEQ ID NO: 109482 - protein, 10 aa, synthetic construct
TPSRGDISRT

SEQ ID NO: 109483 - protein, 10 aa, synthetic construct
TPTRGDISRT

SEQ ID NO: 109484 - protein, 10 aa, synthetic construct
TPYRGDISRT

SEQ ID NO: 109485 - protein, 10 aa, synthetic construct
TPNRGDISRT

SEQ ID NO: 109486 - protein, 10 aa, synthetic construct
TPQRGDISRT

SEQ ID NO: 109487 - protein, 10 aa, synthetic construct
TPDRGDISRT

SEQ ID NO: 109488 - protein, 10 aa, synthetic construct
TPERGDISRT

SEQ ID NO: 109489 - protein, 10 aa, synthetic construct
TLGRGDISRT

SEQ ID NO: 109490 - protein, 10 aa, synthetic construct
TLARGDISRT

SEQ ID NO: 109491 - protein, 10 aa, synthetic construct
TLVRGDISRT

SEQ ID NO: 109492 - protein, 10 aa, synthetic construct
TLPRGDISRT

SEQ ID NO: 109493 - protein, 10 aa, synthetic construct
TLLRGDISRT

SEQ ID NO: 109494 - protein, 10 aa, synthetic construct
TLIRGDISRT

SEQ ID NO: 109495 - protein, 10 aa, synthetic construct
TLMRGDISRT

SEQ ID NO: 109496 - protein, 10 aa, synthetic construct
TLWRGDISRT

SEQ ID NO: 109497 - protein, 10 aa, synthetic construct
TLFRGDISRT

SEQ ID NO: 109498 - protein, 10 aa, synthetic construct
TLKRGDISRT

SEQ ID NO: 109499 - protein, 10 aa, synthetic construct
TLRRGDISRT

SEQ ID NO: 109500 - protein, 10 aa, synthetic construct
TLHRGDISRT

SEQ ID NO: 109501 - protein, 10 aa, synthetic construct
TLSRGDISRT

SEQ ID NO: 109502 - protein, 10 aa, synthetic construct
TLTRGDISRT

SEQ ID NO: 109503 - protein, 10 aa, synthetic construct
TLYRGDISRT

SEQ ID NO: 109504 - protein, 10 aa, synthetic construct
TLNRGDISRT

SEQ ID NO: 109505 - protein, 10 aa, synthetic construct
TLQRGDISRT

SEQ ID NO: 109506 - protein, 10 aa, synthetic construct
TLDRGDISRT

SEQ ID NO: 109507 - protein, 10 aa, synthetic construct
TLERGDISRT

SEQ ID NO: 109508 - protein, 10 aa, synthetic construct
TIGRGDISRT

SEQ ID NO: 109509 - protein, 10 aa, synthetic construct
TIARGDISRT

SEQ ID NO: 109510 - protein, 10 aa, synthetic construct
TIVRGDISRT

SEQ ID NO: 109511 - protein, 10 aa, synthetic construct
TIPRGDISRT

SEQ ID NO: 109512 - protein, 10 aa, synthetic construct
TILRGDISRT

SEQ ID NO: 109513 - protein, 10 aa, synthetic construct
TIIRGDISRT

SEQ ID NO: 109514 - protein, 10 aa, synthetic construct
TIMRGDISRT

SEQ ID NO: 109515 - protein, 10 aa, synthetic construct
TIWRGDISRT

SEQ ID NO: 109516 - protein, 10 aa, synthetic construct
TIFRGDISRT

SEQ ID NO: 109517 - protein, 10 aa, synthetic construct
TIKRGDISRT

SEQ ID NO: 109518 - protein, 10 aa, synthetic construct
TIRRGDISRT

SEQ ID NO: 109519 - protein, 10 aa, synthetic construct
TIHRGDISRT

SEQ ID NO: 109520 - protein, 10 aa, synthetic construct
TISRGDISRT

SEQ ID NO: 109521 - protein, 10 aa, synthetic construct
TITRGDISRT

SEQ ID NO: 109522 - protein, 10 aa, synthetic construct
TIYRGDISRT

SEQ ID NO: 109523 - protein, 10 aa, synthetic construct
TINRGDISRT

SEQ ID NO: 109524 - protein, 10 aa, synthetic construct
TIQRGDISRT

SEQ ID NO: 109525 - protein, 10 aa, synthetic construct
TIDRGDISRT

SEQ ID NO: 109526 - protein, 10 aa, synthetic construct
TIERGDISRT

SEQ ID NO: 109527 - protein, 10 aa, synthetic construct
TMGRGDISRT

SEQ ID NO: 109528 - protein, 10 aa, synthetic construct
TMARGDISRT

SEQ ID NO: 109529 - protein, 10 aa, synthetic construct
TMVRGDISRT

SEQ ID NO: 109530 - protein, 10 aa, synthetic construct
TMPRGDISRT

SEQ ID NO: 109531 - protein, 10 aa, synthetic construct
TMLRGDISRT

SEQ ID NO: 109532 - protein, 10 aa, synthetic construct
TMIRGDISRT

SEQ ID NO: 109533 - protein, 10 aa, synthetic construct
TMMRGDISRT

SEQ ID NO: 109534 - protein, 10 aa, synthetic construct
TMWRGDISRT

SEQ ID NO: 109535 - protein, 10 aa, synthetic construct
TMFRGDISRT

SEQ ID NO: 109536 - protein, 10 aa, synthetic construct
TMKRGDISRT

SEQ ID NO: 109537 - protein, 10 aa, synthetic construct
TMRRGDISRT

SEQ ID NO: 109538 - protein, 10 aa, synthetic construct
TMHRGDISRT

SEQ ID NO: 109539 - protein, 10 aa, synthetic construct
TMSRGDISRT

SEQ ID NO: 109540 - protein, 10 aa, synthetic construct
TMTRGDISRT

SEQ ID NO: 109541 - protein, 10 aa, synthetic construct
TMYRGDISRT

SEQ ID NO: 109542 - protein, 10 aa, synthetic construct
TMNRGDISRT

SEQ ID NO: 109543 - protein, 10 aa, synthetic construct
TMQRGDISRT

SEQ ID NO: 109544 - protein, 10 aa, synthetic construct
TMDRGDISRT

SEQ ID NO: 109545 - protein, 10 aa, synthetic construct
TMERGDISRT

SEQ ID NO: 109546 - protein, 10 aa, synthetic construct
TWGRGDISRT

SEQ ID NO: 109547 - protein, 10 aa, synthetic construct
TWARGDISRT

SEQ ID NO: 109548 - protein, 10 aa, synthetic construct
TWVRGDISRT

SEQ ID NO: 109549 - protein, 10 aa, synthetic construct
TWPRGDISRT

SEQ ID NO: 109550 - protein, 10 aa, synthetic construct
TWLRGDISRT

SEQ ID NO: 109551 - protein, 10 aa, synthetic construct
TWIRGDISRT

SEQ ID NO: 109552 - protein, 10 aa, synthetic construct
TWMRGDISRT

SEQ ID NO: 109553 - protein, 10 aa, synthetic construct
TWWRGDISRT

SEQ ID NO: 109554 - protein, 10 aa, synthetic construct
TWFRGDISRT

SEQ ID NO: 109555 - protein, 10 aa, synthetic construct
TWKRGDISRT

SEQ ID NO: 109556 - protein, 10 aa, synthetic construct
TWRRGDISRT

SEQ ID NO: 109557 - protein, 10 aa, synthetic construct
TWHRGDISRT

SEQ ID NO: 109558 - protein, 10 aa, synthetic construct
TWSRGDISRT

SEQ ID NO: 109559 - protein, 10 aa, synthetic construct
TWTRGDISRT

SEQ ID NO: 109560 - protein, 10 aa, synthetic construct
TWYRGDISRT

SEQ ID NO: 109561 - protein, 10 aa, synthetic construct
TWNRGDISRT

SEQ ID NO: 109562 - protein, 10 aa, synthetic construct
TWQRGDISRT

SEQ ID NO: 109563 - protein, 10 aa, synthetic construct
TWDRGDISRT

SEQ ID NO: 109564 - protein, 10 aa, synthetic construct
TWERGDISRT

SEQ ID NO: 109565 - protein, 10 aa, synthetic construct
TFGRGDISRT

SEQ ID NO: 109566 - protein, 10 aa, synthetic construct
TFARGDISRT

SEQ ID NO: 109567 - protein, 10 aa, synthetic construct
TFVRGDISRT

SEQ ID NO: 109568 - protein, 10 aa, synthetic construct
TFPRGDISRT

SEQ ID NO: 109569 - protein, 10 aa, synthetic construct
TFLRGDISRT

SEQ ID NO: 109570 - protein, 10 aa, synthetic construct
TFIRGDISRT

SEQ ID NO: 109571 - protein, 10 aa, synthetic construct
TFMRGDISRT

SEQ ID NO: 109572 - protein, 10 aa, synthetic construct
TFWRGDISRT

SEQ ID NO: 109573 - protein, 10 aa, synthetic construct
TFFRGDISRT

SEQ ID NO: 109574 - protein, 10 aa, synthetic construct
TFKRGDISRT

SEQ ID NO: 109575 - protein, 10 aa, synthetic construct
TFRRGDISRT

SEQ ID NO: 109576 - protein, 10 aa, synthetic construct
TFHRGDISRT

SEQ ID NO: 109577 - protein, 10 aa, synthetic construct
TFSRGDISRT

SEQ ID NO: 109578 - protein, 10 aa, synthetic construct
TFTRGDISRT

SEQ ID NO: 109579 - protein, 10 aa, synthetic construct
TFYRGDISRT

SEQ ID NO: 109580 - protein, 10 aa, synthetic construct
TFNRGDISRT

SEQ ID NO: 109581 - protein, 10 aa, synthetic construct
TFQRGDISRT

SEQ ID NO: 109582 - protein, 10 aa, synthetic construct
TFDRGDISRT

SEQ ID NO: 109583 - protein, 10 aa, synthetic construct
TFERGDISRT

SEQ ID NO: 109584 - protein, 10 aa, synthetic construct
TKGRGDISRT

SEQ ID NO: 109585 - protein, 10 aa, synthetic construct
TKARGDISRT

SEQ ID NO: 109586 - protein, 10 aa, synthetic construct
TKVRGDISRT

SEQ ID NO: 109587 - protein, 10 aa, synthetic construct
TKPRGDISRT

SEQ ID NO: 109588 - protein, 10 aa, synthetic construct
TKLRGDISRT

SEQ ID NO: 109589 - protein, 10 aa, synthetic construct
TKIRGDISRT

SEQ ID NO: 109590 - protein, 10 aa, synthetic construct
TKMRGDISRT

SEQ ID NO: 109591 - protein, 10 aa, synthetic construct
TKWRGDISRT

SEQ ID NO: 109592 - protein, 10 aa, synthetic construct
TKFRGDISRT

SEQ ID NO: 109593 - protein, 10 aa, synthetic construct
TKKRGDISRT

SEQ ID NO: 109594 - protein, 10 aa, synthetic construct
TKRRGDISRT

SEQ ID NO: 109595 - protein, 10 aa, synthetic construct
TKHRGDISRT

SEQ ID NO: 109596 - protein, 10 aa, synthetic construct
TKSRGDISRT

SEQ ID NO: 109597 - protein, 10 aa, synthetic construct
TKTRGDISRT

SEQ ID NO: 109598 - protein, 10 aa, synthetic construct
TKYRGDISRT

SEQ ID NO: 109599 - protein, 10 aa, synthetic construct
TKNRGDISRT

SEQ ID NO: 109600 - protein, 10 aa, synthetic construct
TKQRGDISRT

SEQ ID NO: 109601 - protein, 10 aa, synthetic construct
TKDRGDISRT

SEQ ID NO: 109602 - protein, 10 aa, synthetic construct
TKERGDISRT

SEQ ID NO: 109603 - protein, 10 aa, synthetic construct
TRGRGDISRT

SEQ ID NO: 109604 - protein, 10 aa, synthetic construct
TRARGDISRT

SEQ ID NO: 109605 - protein, 10 aa, synthetic construct
TRVRGDISRT

SEQ ID NO: 109606 - protein, 10 aa, synthetic construct
TRPRGDISRT

SEQ ID NO: 109607 - protein, 10 aa, synthetic construct
TRLRGDISRT

SEQ ID NO: 109608 - protein, 10 aa, synthetic construct
TRIRGDISRT

SEQ ID NO: 109609 - protein, 10 aa, synthetic construct
TRMRGDISRT

SEQ ID NO: 109610 - protein, 10 aa, synthetic construct
TRWRGDISRT

SEQ ID NO: 109611 - protein, 10 aa, synthetic construct
TRFRGDISRT

SEQ ID NO: 109612 - protein, 10 aa, synthetic construct
TRKRGDISRT

SEQ ID NO: 109613 - protein, 10 aa, synthetic construct
TRRRGDISRT

SEQ ID NO: 109614 - protein, 10 aa, synthetic construct
TRHRGDISRT

SEQ ID NO: 109615 - protein, 10 aa, synthetic construct
TRSRGDISRT

SEQ ID NO: 109616 - protein, 10 aa, synthetic construct
TRTRGDISRT

SEQ ID NO: 109617 - protein, 10 aa, synthetic construct
TRYRGDISRT

SEQ ID NO: 109618 - protein, 10 aa, synthetic construct
TRNRGDISRT

SEQ ID NO: 109619 - protein, 10 aa, synthetic construct
TRQRGDISRT

SEQ ID NO: 109620 - protein, 10 aa, synthetic construct
TRDRGDISRT

SEQ ID NO: 109621 - protein, 10 aa, synthetic construct
TRERGDISRT

SEQ ID NO: 109622 - protein, 10 aa, synthetic construct
THGRGDISRT

SEQ ID NO: 109623 - protein, 10 aa, synthetic construct
THARGDISRT

SEQ ID NO: 109624 - protein, 10 aa, synthetic construct
THVRGDISRT

SEQ ID NO: 109625 - protein, 10 aa, synthetic construct
THPRGDISRT

SEQ ID NO: 109626 - protein, 10 aa, synthetic construct
THLRGDISRT

SEQ ID NO: 109627 - protein, 10 aa, synthetic construct
THIRGDISRT

SEQ ID NO: 109628 - protein, 10 aa, synthetic construct
THMRGDISRT

SEQ ID NO: 109629 - protein, 10 aa, synthetic construct
THWRGDISRT

SEQ ID NO: 109630 - protein, 10 aa, synthetic construct
THFRGDISRT

SEQ ID NO: 109631 - protein, 10 aa, synthetic construct
THKRGDISRT

SEQ ID NO: 109632 - protein, 10 aa, synthetic construct
THRRGDISRT

SEQ ID NO: 109633 - protein, 10 aa, synthetic construct
THHRGDISRT

SEQ ID NO: 109634 - protein, 10 aa, synthetic construct
THSRGDISRT

SEQ ID NO: 109635 - protein, 10 aa, synthetic construct
THTRGDISRT

SEQ ID NO: 109636 - protein, 10 aa, synthetic construct
THYRGDISRT

SEQ ID NO: 109637 - protein, 10 aa, synthetic construct
THNRGDISRT

SEQ ID NO: 109638 - protein, 10 aa, synthetic construct
THQRGDISRT

SEQ ID NO: 109639 - protein, 10 aa, synthetic construct
THDRGDISRT

SEQ ID NO: 109640 - protein, 10 aa, synthetic construct
THERGDISRT

SEQ ID NO: 109641 - protein, 10 aa, synthetic construct
TSGRGDISRT

SEQ ID NO: 109642 - protein, 10 aa, synthetic construct
TSARGDISRT

SEQ ID NO: 109643 - protein, 10 aa, synthetic construct
TSVRGDISRT

SEQ ID NO: 109644 - protein, 10 aa, synthetic construct
TSPRGDISRT

SEQ ID NO: 109645 - protein, 10 aa, synthetic construct
TSLRGDISRT

SEQ ID NO: 109646 - protein, 10 aa, synthetic construct
TSIRGDISRT

SEQ ID NO: 109647 - protein, 10 aa, synthetic construct
TSMRGDISRT

SEQ ID NO: 109648 - protein, 10 aa, synthetic construct
TSWRGDISRT

SEQ ID NO: 109649 - protein, 10 aa, synthetic construct
TSFRGDISRT

SEQ ID NO: 109650 - protein, 10 aa, synthetic construct
TSKRGDISRT

SEQ ID NO: 109651 - protein, 10 aa, synthetic construct
TSRRGDISRT

SEQ ID NO: 109652 - protein, 10 aa, synthetic construct
TSHRGDISRT

SEQ ID NO: 109653 - protein, 10 aa, synthetic construct
TSSRGDISRT

SEQ ID NO: 109654 - protein, 10 aa, synthetic construct
TSTRGDISRT

SEQ ID NO: 109655 - protein, 10 aa, synthetic construct
TSYRGDISRT

SEQ ID NO: 109656 - protein, 10 aa, synthetic construct
TSNRGDISRT

SEQ ID NO: 109657 - protein, 10 aa, synthetic construct
TSQRGDISRT

SEQ ID NO: 109658 - protein, 10 aa, synthetic construct
TSDRGDISRT

SEQ ID NO: 109659 - protein, 10 aa, synthetic construct
TSERGDISRT

SEQ ID NO: 109660 - protein, 10 aa, synthetic construct
TTGRGDISRT

SEQ ID NO: 109661 - protein, 10 aa, synthetic construct
TTARGDISRT

SEQ ID NO: 109662 - protein, 10 aa, synthetic construct
TTVRGDISRT

SEQ ID NO: 109663 - protein, 10 aa, synthetic construct
TTPRGDISRT

SEQ ID NO: 109664 - protein, 10 aa, synthetic construct
TTLRGDISRT

SEQ ID NO: 109665 - protein, 10 aa, synthetic construct
TTIRGDISRT

SEQ ID NO: 109666 - protein, 10 aa, synthetic construct
TTMRGDISRT

SEQ ID NO: 109667 - protein, 10 aa, synthetic construct
TTWRGDISRT

SEQ ID NO: 109668 - protein, 10 aa, synthetic construct
TTFRGDISRT

SEQ ID NO: 109669 - protein, 10 aa, synthetic construct
TTKRGDISRT

SEQ ID NO: 109670 - protein, 10 aa, synthetic construct
TTRRGDISRT

SEQ ID NO: 109671 - protein, 10 aa, synthetic construct
TTHRGDISRT

SEQ ID NO: 109672 - protein, 10 aa, synthetic construct
TTSRGDISRT

SEQ ID NO: 109673 - protein, 10 aa, synthetic construct
TTTRGDISRT

SEQ ID NO: 109674 - protein, 10 aa, synthetic construct
TTYRGDISRT

SEQ ID NO: 109675 - protein, 10 aa, synthetic construct
TTNRGDISRT

SEQ ID NO: 109676 - protein, 10 aa, synthetic construct
TTQRGDISRT

SEQ ID NO: 109677 - protein, 10 aa, synthetic construct
TTDRGDISRT

SEQ ID NO: 109678 - protein, 10 aa, synthetic construct
TTERGDISRT

SEQ ID NO: 109679 - protein, 10 aa, synthetic construct
TYGRGDISRT

SEQ ID NO: 109680 - protein, 10 aa, synthetic construct
TYARGDISRT

SEQ ID NO: 109681 - protein, 10 aa, synthetic construct
TYVRGDISRT

SEQ ID NO: 109682 - protein, 10 aa, synthetic construct
TYPRGDISRT

SEQ ID NO: 109683 - protein, 10 aa, synthetic construct
TYLRGDISRT

SEQ ID NO: 109684 - protein, 10 aa, synthetic construct
TYIRGDISRT

SEQ ID NO: 109685 - protein, 10 aa, synthetic construct
TYMRGDISRT

SEQ ID NO: 109686 - protein, 10 aa, synthetic construct
TYWRGDISRT

SEQ ID NO: 109687 - protein, 10 aa, synthetic construct
TYFRGDISRT

SEQ ID NO: 109688 - protein, 10 aa, synthetic construct
TYKRGDISRT

SEQ ID NO: 109689 - protein, 10 aa, synthetic construct
TYRRGDISRT

SEQ ID NO: 109690 - protein, 10 aa, synthetic construct
TYHRGDISRT

SEQ ID NO: 109691 - protein, 10 aa, synthetic construct
TYSRGDISRT

SEQ ID NO: 109692 - protein, 10 aa, synthetic construct
TYTRGDISRT

SEQ ID NO: 109693 - protein, 10 aa, synthetic construct
TYYRGDISRT

SEQ ID NO: 109694 - protein, 10 aa, synthetic construct
TYNRGDISRT

SEQ ID NO: 109695 - protein, 10 aa, synthetic construct
TYQRGDISRT

SEQ ID NO: 109696 - protein, 10 aa, synthetic construct
TYDRGDISRT

SEQ ID NO: 109697 - protein, 10 aa, synthetic construct
TYERGDISRT

SEQ ID NO: 109698 - protein, 10 aa, synthetic construct
TNGRGDISRT

SEQ ID NO: 109699 - protein, 10 aa, synthetic construct
TNARGDISRT

SEQ ID NO: 109700 - protein, 10 aa, synthetic construct
TNVRGDISRT

SEQ ID NO: 109701 - protein, 10 aa, synthetic construct
TNPRGDISRT

SEQ ID NO: 109702 - protein, 10 aa, synthetic construct
TNLRGDISRT

SEQ ID NO: 109703 - protein, 10 aa, synthetic construct
TNIRGDISRT

SEQ ID NO: 109704 - protein, 10 aa, synthetic construct
TNMRGDISRT

SEQ ID NO: 109705 - protein, 10 aa, synthetic construct
TNWRGDISRT

SEQ ID NO: 109706 - protein, 10 aa, synthetic construct
TNFRGDISRT

SEQ ID NO: 109707 - protein, 10 aa, synthetic construct
TNKRGDISRT

SEQ ID NO: 109708 - protein, 10 aa, synthetic construct
TNRRGDISRT

SEQ ID NO: 109709 - protein, 10 aa, synthetic construct
TNHRGDISRT

SEQ ID NO: 109710 - protein, 10 aa, synthetic construct
TNSRGDISRT

SEQ ID NO: 109711 - protein, 10 aa, synthetic construct
TNTRGDISRT

SEQ ID NO: 109712 - protein, 10 aa, synthetic construct
TNYRGDISRT

SEQ ID NO: 109713 - protein, 10 aa, synthetic construct
TNNRGDISRT

SEQ ID NO: 109714 - protein, 10 aa, synthetic construct
TNQRGDISRT

SEQ ID NO: 109715 - protein, 10 aa, synthetic construct
TNDRGDISRT

SEQ ID NO: 109716 - protein, 10 aa, synthetic construct
TNERGDISRT

SEQ ID NO: 109717 - protein, 10 aa, synthetic construct
TQGRGDISRT

SEQ ID NO: 109718 - protein, 10 aa, synthetic construct
TQARGDISRT

SEQ ID NO: 109719 - protein, 10 aa, synthetic construct
TQVRGDISRT

SEQ ID NO: 109720 - protein, 10 aa, synthetic construct
TQPRGDISRT

SEQ ID NO: 109721 - protein, 10 aa, synthetic construct
TQLRGDISRT

SEQ ID NO: 109722 - protein, 10 aa, synthetic construct
TQIRGDISRT

SEQ ID NO: 109723 - protein, 10 aa, synthetic construct
TQMRGDISRT

SEQ ID NO: 109724 - protein, 10 aa, synthetic construct
TQWRGDISRT

SEQ ID NO: 109725 - protein, 10 aa, synthetic construct
TQFRGDISRT

SEQ ID NO: 109726 - protein, 10 aa, synthetic construct
TQKRGDISRT

SEQ ID NO: 109727 - protein, 10 aa, synthetic construct
TQRRGDISRT

SEQ ID NO: 109728 - protein, 10 aa, synthetic construct
TQHRGDISRT

SEQ ID NO: 109729 - protein, 10 aa, synthetic construct
TQSRGDISRT

SEQ ID NO: 109730 - protein, 10 aa, synthetic construct
TQTRGDISRT

SEQ ID NO: 109731 - protein, 10 aa, synthetic construct
TQYRGDISRT

SEQ ID NO: 109732 - protein, 10 aa, synthetic construct
TQNRGDISRT

SEQ ID NO: 109733 - protein, 10 aa, synthetic construct
TQQRGDISRT

SEQ ID NO: 109734 - protein, 10 aa, synthetic construct
TQDRGDISRT

SEQ ID NO: 109735 - protein, 10 aa, synthetic construct
TQERGDISRT

SEQ ID NO: 109736 - protein, 10 aa, synthetic construct
TDGRGDISRT

SEQ ID NO: 109737 - protein, 10 aa, synthetic construct
TDARGDISRT

SEQ ID NO: 109738 - protein, 10 aa, synthetic construct
TDVRGDISRT

SEQ ID NO: 109739 - protein, 10 aa, synthetic construct
TDPRGDISRT

SEQ ID NO: 109740 - protein, 10 aa, synthetic construct
TDLRGDISRT

SEQ ID NO: 109741 - protein, 10 aa, synthetic construct
TDIRGDISRT

SEQ ID NO: 109742 - protein, 10 aa, synthetic construct
TDMRGDISRT

SEQ ID NO: 109743 - protein, 10 aa, synthetic construct
TDWRGDISRT

SEQ ID NO: 109744 - protein, 10 aa, synthetic construct
TDFRGDISRT

SEQ ID NO: 109745 - protein, 10 aa, synthetic construct
TDKRGDISRT

SEQ ID NO: 109746 - protein, 10 aa, synthetic construct
TDRRGDISRT

SEQ ID NO: 109747 - protein, 10 aa, synthetic construct
TDHRGDISRT

SEQ ID NO: 109748 - protein, 10 aa, synthetic construct
TDSRGDISRT

SEQ ID NO: 109749 - protein, 10 aa, synthetic construct
TDTRGDISRT

SEQ ID NO: 109750 - protein, 10 aa, synthetic construct
TDYRGDISRT

SEQ ID NO: 109751 - protein, 10 aa, synthetic construct
TDNRGDISRT

SEQ ID NO: 109752 - protein, 10 aa, synthetic construct
TDQRGDISRT

SEQ ID NO: 109753 - protein, 10 aa, synthetic construct
TDDRGDISRT

SEQ ID NO: 109754 - protein, 10 aa, synthetic construct
TDERGDISRT

SEQ ID NO: 109755 - protein, 10 aa, synthetic construct
TEGRGDISRT

SEQ ID NO: 109756 - protein, 10 aa, synthetic construct
TEARGDISRT

SEQ ID NO: 109757 - protein, 10 aa, synthetic construct
TEVRGDISRT

SEQ ID NO: 109758 - protein, 10 aa, synthetic construct
TEPRGDISRT

SEQ ID NO: 109759 - protein, 10 aa, synthetic construct
TELRGDISRT

SEQ ID NO: 109760 - protein, 10 aa, synthetic construct
TEIRGDISRT

SEQ ID NO: 109761 - protein, 10 aa, synthetic construct
TEMRGDISRT

SEQ ID NO: 109762 - protein, 10 aa, synthetic construct
TEWRGDISRT

SEQ ID NO: 109763 - protein, 10 aa, synthetic construct
TEFRGDISRT

SEQ ID NO: 109764 - protein, 10 aa, synthetic construct
TEKRGDISRT

SEQ ID NO: 109765 - protein, 10 aa, synthetic construct
TERRGDISRT

SEQ ID NO: 109766 - protein, 10 aa, synthetic construct
TEHRGDISRT

SEQ ID NO: 109767 - protein, 10 aa, synthetic construct
TESRGDISRT

SEQ ID NO: 109768 - protein, 10 aa, synthetic construct
TETRGDISRT

SEQ ID NO: 109769 - protein, 10 aa, synthetic construct
TEYRGDISRT

SEQ ID NO: 109770 - protein, 10 aa, synthetic construct
TENRGDISRT

SEQ ID NO: 109771 - protein, 10 aa, synthetic construct
TEQRGDISRT

SEQ ID NO: 109772 - protein, 10 aa, synthetic construct
TEDRGDISRT

SEQ ID NO: 109773 - protein, 10 aa, synthetic construct
TEERGDISRT

SEQ ID NO: 109774 - protein, 10 aa, synthetic construct
AGGRGDISRT

SEQ ID NO: 109775 - protein, 10 aa, synthetic construct
AGARGDISRT

SEQ ID NO: 109776 - protein, 10 aa, synthetic construct
AGVRGDISRT

SEQ ID NO: 109777 - protein, 10 aa, synthetic construct
AGPRGDISRT

SEQ ID NO: 109778 - protein, 10 aa, synthetic construct
AGLRGDISRT

SEQ ID NO: 109779 - protein, 10 aa, synthetic construct
AGIRGDISRT

SEQ ID NO: 109780 - protein, 10 aa, synthetic construct
AGMRGDISRT

SEQ ID NO: 109781 - protein, 10 aa, synthetic construct
AGWRGDISRT

SEQ ID NO: 109782 - protein, 10 aa, synthetic construct
AGFRGDISRT

SEQ ID NO: 109783 - protein, 10 aa, synthetic construct
AGKRGDISRT

SEQ ID NO: 109784 - protein, 10 aa, synthetic construct
AGRRGDISRT

SEQ ID NO: 109785 - protein, 10 aa, synthetic construct
AGHRGDISRT

SEQ ID NO: 109786 - protein, 10 aa, synthetic construct
AGSRGDISRT

SEQ ID NO: 109787 - protein, 10 aa, synthetic construct
AGTRGDISRT

SEQ ID NO: 109788 - protein, 10 aa, synthetic construct
AGYRGDISRT

SEQ ID NO: 109789 - protein, 10 aa, synthetic construct
AGNRGDISRT

SEQ ID NO: 109790 - protein, 10 aa, synthetic construct
AGQRGDISRT

SEQ ID NO: 109791 - protein, 10 aa, synthetic construct
AGDRGDISRT

SEQ ID NO: 109792 - protein, 10 aa, synthetic construct
AGERGDISRT

SEQ ID NO: 109793 - protein, 10 aa, synthetic construct
AAGRGDISRT

SEQ ID NO: 109794 - protein, 10 aa, synthetic construct
AAARGDISRT

SEQ ID NO: 109795 - protein, 10 aa, synthetic construct
AAVRGDISRT

SEQ ID NO: 109796 - protein, 10 aa, synthetic construct
AAPRGDISRT

SEQ ID NO: 109797 - protein, 10 aa, synthetic construct
AALRGDISRT

SEQ ID NO: 109798 - protein, 10 aa, synthetic construct
AAIRGDISRT

SEQ ID NO: 109799 - protein, 10 aa, synthetic construct
AAMRGDISRT

SEQ ID NO: 109800 - protein, 10 aa, synthetic construct
AAWRGDISRT

SEQ ID NO: 109801 - protein, 10 aa, synthetic construct
AAFRGDISRT

SEQ ID NO: 109802 - protein, 10 aa, synthetic construct
AAKRGDISRT

SEQ ID NO: 109803 - protein, 10 aa, synthetic construct
AARRGDISRT

SEQ ID NO: 109804 - protein, 10 aa, synthetic construct
AAHRGDISRT

SEQ ID NO: 109805 - protein, 10 aa, synthetic construct
AASRGDISRT

SEQ ID NO: 109806 - protein, 10 aa, synthetic construct
AATRGDISRT

SEQ ID NO: 109807 - protein, 10 aa, synthetic construct
AAYRGDISRT

SEQ ID NO: 109808 - protein, 10 aa, synthetic construct
AANRGDISRT

SEQ ID NO: 109809 - protein, 10 aa, synthetic construct
AAQRGDISRT

SEQ ID NO: 109810 - protein, 10 aa, synthetic construct
AADRGDISRT

SEQ ID NO: 109811 - protein, 10 aa, synthetic construct
AAERGDISRT

SEQ ID NO: 109812 - protein, 10 aa, synthetic construct
AVGRGDISRT

SEQ ID NO: 109813 - protein, 10 aa, synthetic construct
AVARGDISRT

SEQ ID NO: 109814 - protein, 10 aa, synthetic construct
AVVRGDISRT

SEQ ID NO: 109815 - protein, 10 aa, synthetic construct
AVPRGDISRT

SEQ ID NO: 109816 - protein, 10 aa, synthetic construct
AVLRGDISRT

SEQ ID NO: 109817 - protein, 10 aa, synthetic construct
AVIRGDISRT

SEQ ID NO: 109818 - protein, 10 aa, synthetic construct
AVMRGDISRT

SEQ ID NO: 109819 - protein, 10 aa, synthetic construct
AVWRGDISRT

SEQ ID NO: 109820 - protein, 10 aa, synthetic construct
AVFRGDISRT

SEQ ID NO: 109821 - protein, 10 aa, synthetic construct
AVKRGDISRT

SEQ ID NO: 109822 - protein, 10 aa, synthetic construct
AVRRGDISRT

SEQ ID NO: 109823 - protein, 10 aa, synthetic construct
AVHRGDISRT

SEQ ID NO: 109824 - protein, 10 aa, synthetic construct
AVSRGDISRT

SEQ ID NO: 109825 - protein, 10 aa, synthetic construct
AVTRGDISRT

SEQ ID NO: 109826 - protein, 10 aa, synthetic construct
AVYRGDISRT

SEQ ID NO: 109827 - protein, 10 aa, synthetic construct
AVNRGDISRT

SEQ ID NO: 109828 - protein, 10 aa, synthetic construct
AVQRGDISRT

SEQ ID NO: 109829 - protein, 10 aa, synthetic construct
AVDRGDISRT

SEQ ID NO: 109830 - protein, 10 aa, synthetic construct
AVERGDISRT

SEQ ID NO: 109831 - protein, 10 aa, synthetic construct
APGRGDISRT

SEQ ID NO: 109832 - protein, 10 aa, synthetic construct
APARGDISRT

SEQ ID NO: 109833 - protein, 10 aa, synthetic construct
APVRGDISRT

SEQ ID NO: 109834 - protein, 10 aa, synthetic construct
APPRGDISRT

SEQ ID NO: 109835 - protein, 10 aa, synthetic construct
APLRGDISRT

SEQ ID NO: 109836 - protein, 10 aa, synthetic construct
APIRGDISRT

SEQ ID NO: 109837 - protein, 10 aa, synthetic construct
APMRGDISRT

SEQ ID NO: 109838 - protein, 10 aa, synthetic construct
APWRGDISRT

SEQ ID NO: 109839 - protein, 10 aa, synthetic construct
APFRGDISRT

SEQ ID NO: 109840 - protein, 10 aa, synthetic construct
APKRGDISRT

SEQ ID NO: 109841 - protein, 10 aa, synthetic construct
APRRGDISRT

SEQ ID NO: 109842 - protein, 10 aa, synthetic construct
APHRGDISRT

SEQ ID NO: 109843 - protein, 10 aa, synthetic construct
APSRGDISRT

SEQ ID NO: 109844 - protein, 10 aa, synthetic construct
APTRGDISRT

SEQ ID NO: 109845 - protein, 10 aa, synthetic construct
APYRGDISRT

SEQ ID NO: 109846 - protein, 10 aa, synthetic construct
APNRGDISRT

SEQ ID NO: 109847 - protein, 10 aa, synthetic construct
APQRGDISRT

SEQ ID NO: 109848 - protein, 10 aa, synthetic construct
APDRGDISRT

SEQ ID NO: 109849 - protein, 10 aa, synthetic construct
APERGDISRT

SEQ ID NO: 109850 - protein, 10 aa, synthetic construct
ALGRGDISRT

SEQ ID NO: 109851 - protein, 10 aa, synthetic construct
ALARGDISRT

SEQ ID NO: 109852 - protein, 10 aa, synthetic construct
ALVRGDISRT

SEQ ID NO: 109853 - protein, 10 aa, synthetic construct
ALPRGDISRT

SEQ ID NO: 109854 - protein, 10 aa, synthetic construct
ALLRGDISRT

SEQ ID NO: 109855 - protein, 10 aa, synthetic construct
ALIRGDISRT

SEQ ID NO: 109856 - protein, 10 aa, synthetic construct
ALMRGDISRT

SEQ ID NO: 109857 - protein, 10 aa, synthetic construct
ALWRGDISRT

SEQ ID NO: 109858 - protein, 10 aa, synthetic construct
ALFRGDISRT

SEQ ID NO: 109859 - protein, 10 aa, synthetic construct
ALKRGDISRT

SEQ ID NO: 109860 - protein, 10 aa, synthetic construct
ALRRGDISRT

SEQ ID NO: 109861 - protein, 10 aa, synthetic construct
ALHRGDISRT

SEQ ID NO: 109862 - protein, 10 aa, synthetic construct
ALSRGDISRT

SEQ ID NO: 109863 - protein, 10 aa, synthetic construct
ALTRGDISRT

SEQ ID NO: 109864 - protein, 10 aa, synthetic construct
ALYRGDISRT

SEQ ID NO: 109865 - protein, 10 aa, synthetic construct
ALNRGDISRT

SEQ ID NO: 109866 - protein, 10 aa, synthetic construct
ALQRGDISRT

SEQ ID NO: 109867 - protein, 10 aa, synthetic construct
ALDRGDISRT

SEQ ID NO: 109868 - protein, 10 aa, synthetic construct
ALERGDISRT

SEQ ID NO: 109869 - protein, 10 aa, synthetic construct
AIGRGDISRT

SEQ ID NO: 109870 - protein, 10 aa, synthetic construct
AIARGDISRT

SEQ ID NO: 109871 - protein, 10 aa, synthetic construct
AIVRGDISRT

SEQ ID NO: 109872 - protein, 10 aa, synthetic construct
AIPRGDISRT

SEQ ID NO: 109873 - protein, 10 aa, synthetic construct
AILRGDISRT

SEQ ID NO: 109874 - protein, 10 aa, synthetic construct
AIIRGDISRT

SEQ ID NO: 109875 - protein, 10 aa, synthetic construct
AIMRGDISRT

SEQ ID NO: 109876 - protein, 10 aa, synthetic construct
AIWRGDISRT

SEQ ID NO: 109877 - protein, 10 aa, synthetic construct
AIFRGDISRT

SEQ ID NO: 109878 - protein, 10 aa, synthetic construct
AIKRGDISRT

SEQ ID NO: 109879 - protein, 10 aa, synthetic construct
AIRRGDISRT

SEQ ID NO: 109880 - protein, 10 aa, synthetic construct
AIHRGDISRT

SEQ ID NO: 109881 - protein, 10 aa, synthetic construct
AISRGDISRT

SEQ ID NO: 109882 - protein, 10 aa, synthetic construct
AITRGDISRT

SEQ ID NO: 109883 - protein, 10 aa, synthetic construct
AIYRGDISRT

SEQ ID NO: 109884 - protein, 10 aa, synthetic construct
AINRGDISRT

SEQ ID NO: 109885 - protein, 10 aa, synthetic construct
AIQRGDISRT

SEQ ID NO: 109886 - protein, 10 aa, synthetic construct
AIDRGDISRT

SEQ ID NO: 109887 - protein, 10 aa, synthetic construct
AIERGDISRT

SEQ ID NO: 109888 - protein, 10 aa, synthetic construct
AMGRGDISRT

SEQ ID NO: 109889 - protein, 10 aa, synthetic construct
AMARGDISRT

SEQ ID NO: 109890 - protein, 10 aa, synthetic construct
AMVRGDISRT

SEQ ID NO: 109891 - protein, 10 aa, synthetic construct
AMPRGDISRT

SEQ ID NO: 109892 - protein, 10 aa, synthetic construct
AMLRGDISRT

SEQ ID NO: 109893 - protein, 10 aa, synthetic construct
AMIRGDISRT

SEQ ID NO: 109894 - protein, 10 aa, synthetic construct
AMMRGDISRT

SEQ ID NO: 109895 - protein, 10 aa, synthetic construct
AMWRGDISRT

SEQ ID NO: 109896 - protein, 10 aa, synthetic construct
AMFRGDISRT

SEQ ID NO: 109897 - protein, 10 aa, synthetic construct
AMKRGDISRT

SEQ ID NO: 109898 - protein, 10 aa, synthetic construct
AMRRGDISRT

SEQ ID NO: 109899 - protein, 10 aa, synthetic construct
AMHRGDISRT

SEQ ID NO: 109900 - protein, 10 aa, synthetic construct
AMSRGDISRT

SEQ ID NO: 109901 - protein, 10 aa, synthetic construct
AMTRGDISRT

SEQ ID NO: 109902 - protein, 10 aa, synthetic construct
AMYRGDISRT

SEQ ID NO: 109903 - protein, 10 aa, synthetic construct
AMNRGDISRT

SEQ ID NO: 109904 - protein, 10 aa, synthetic construct
AMQRGDISRT

SEQ ID NO: 109905 - protein, 10 aa, synthetic construct
AMDRGDISRT

SEQ ID NO: 109906 - protein, 10 aa, synthetic construct
AMERGDISRT

SEQ ID NO: 109907 - protein, 10 aa, synthetic construct
AWGRGDISRT

SEQ ID NO: 109908 - protein, 10 aa, synthetic construct
AWARGDISRT

SEQ ID NO: 109909 - protein, 10 aa, synthetic construct
AWVRGDISRT

SEQ ID NO: 109910 - protein, 10 aa, synthetic construct
AWPRGDISRT

SEQ ID NO: 109911 - protein, 10 aa, synthetic construct
AWLRGDISRT

SEQ ID NO: 109912 - protein, 10 aa, synthetic construct
AWIRGDISRT

SEQ ID NO: 109913 - protein, 10 aa, synthetic construct
AWMRGDISRT

SEQ ID NO: 109914 - protein, 10 aa, synthetic construct
AWWRGDISRT

SEQ ID NO: 109915 - protein, 10 aa, synthetic construct
AWFRGDISRT

SEQ ID NO: 109916 - protein, 10 aa, synthetic construct
AWKRGDISRT

SEQ ID NO: 109917 - protein, 10 aa, synthetic construct
AWRRGDISRT

SEQ ID NO: 109918 - protein, 10 aa, synthetic construct
AWHRGDISRT

SEQ ID NO: 109919 - protein, 10 aa, synthetic construct
AWSRGDISRT

SEQ ID NO: 109920 - protein, 10 aa, synthetic construct
AWTRGDISRT

SEQ ID NO: 109921 - protein, 10 aa, synthetic construct
AWYRGDISRT

SEQ ID NO: 109922 - protein, 10 aa, synthetic construct
AWNRGDISRT

SEQ ID NO: 109923 - protein, 10 aa, synthetic construct
AWQRGDISRT

SEQ ID NO: 109924 - protein, 10 aa, synthetic construct
AWDRGDISRT

SEQ ID NO: 109925 - protein, 10 aa, synthetic construct
AWERGDISRT

SEQ ID NO: 109926 - protein, 10 aa, synthetic construct
AFGRGDISRT

SEQ ID NO: 109927 - protein, 10 aa, synthetic construct
AFARGDISRT

SEQ ID NO: 109928 - protein, 10 aa, synthetic construct
AFVRGDISRT

SEQ ID NO: 109929 - protein, 10 aa, synthetic construct
AFPRGDISRT

SEQ ID NO: 109930 - protein, 10 aa, synthetic construct
AFLRGDISRT

SEQ ID NO: 109931 - protein, 10 aa, synthetic construct
AFIRGDISRT

SEQ ID NO: 109932 - protein, 10 aa, synthetic construct
AFMRGDISRT

SEQ ID NO: 109933 - protein, 10 aa, synthetic construct
AFWRGDISRT

SEQ ID NO: 109934 - protein, 10 aa, synthetic construct
AFFRGDISRT

SEQ ID NO: 109935 - protein, 10 aa, synthetic construct
AFKRGDISRT

SEQ ID NO: 109936 - protein, 10 aa, synthetic construct
AFRRGDISRT

SEQ ID NO: 109937 - protein, 10 aa, synthetic construct
AFHRGDISRT

SEQ ID NO: 109938 - protein, 10 aa, synthetic construct
AFSRGDISRT

SEQ ID NO: 109939 - protein, 10 aa, synthetic construct
AFTRGDISRT

SEQ ID NO: 109940 - protein, 10 aa, synthetic construct
AFYRGDISRT

SEQ ID NO: 109941 - protein, 10 aa, synthetic construct
AFNRGDISRT

SEQ ID NO: 109942 - protein, 10 aa, synthetic construct
AFQRGDISRT

SEQ ID NO: 109943 - protein, 10 aa, synthetic construct
AFDRGDISRT

SEQ ID NO: 109944 - protein, 10 aa, synthetic construct
AFERGDISRT

SEQ ID NO: 109945 - protein, 10 aa, synthetic construct
AKGRGDISRT

SEQ ID NO: 109946 - protein, 10 aa, synthetic construct
AKARGDISRT

SEQ ID NO: 109947 - protein, 10 aa, synthetic construct
AKVRGDISRT

SEQ ID NO: 109948 - protein, 10 aa, synthetic construct
AKPRGDISRT

SEQ ID NO: 109949 - protein, 10 aa, synthetic construct
AKLRGDISRT

SEQ ID NO: 109950 - protein, 10 aa, synthetic construct
AKIRGDISRT

SEQ ID NO: 109951 - protein, 10 aa, synthetic construct
AKMRGDISRT

SEQ ID NO: 109952 - protein, 10 aa, synthetic construct
AKWRGDISRT

SEQ ID NO: 109953 - protein, 10 aa, synthetic construct
AKFRGDISRT

SEQ ID NO: 109954 - protein, 10 aa, synthetic construct
AKKRGDISRT

SEQ ID NO: 109955 - protein, 10 aa, synthetic construct
AKRRGDISRT

SEQ ID NO: 109956 - protein, 10 aa, synthetic construct
AKHRGDISRT

SEQ ID NO: 109957 - protein, 10 aa, synthetic construct
AKSRGDISRT

SEQ ID NO: 109958 - protein, 10 aa, synthetic construct
AKTRGDISRT

SEQ ID NO: 109959 - protein, 10 aa, synthetic construct
AKYRGDISRT

SEQ ID NO: 109960 - protein, 10 aa, synthetic construct
AKNRGDISRT

SEQ ID NO: 109961 - protein, 10 aa, synthetic construct
AKQRGDISRT

SEQ ID NO: 109962 - protein, 10 aa, synthetic construct
AKDRGDISRT

SEQ ID NO: 109963 - protein, 10 aa, synthetic construct
AKERGDISRT

SEQ ID NO: 109964 - protein, 10 aa, synthetic construct
ARGRGDISRT

SEQ ID NO: 109965 - protein, 10 aa, synthetic construct
ARARGDISRT

SEQ ID NO: 109966 - protein, 10 aa, synthetic construct
ARVRGDISRT

SEQ ID NO: 109967 - protein, 10 aa, synthetic construct
ARPRGDISRT

SEQ ID NO: 109968 - protein, 10 aa, synthetic construct
ARLRGDISRT

SEQ ID NO: 109969 - protein, 10 aa, synthetic construct
ARIRGDISRT

SEQ ID NO: 109970 - protein, 10 aa, synthetic construct
ARMRGDISRT

SEQ ID NO: 109971 - protein, 10 aa, synthetic construct
ARWRGDISRT

SEQ ID NO: 109972 - protein, 10 aa, synthetic construct
ARFRGDISRT

SEQ ID NO: 109973 - protein, 10 aa, synthetic construct
ARKRGDISRT

SEQ ID NO: 109974 - protein, 10 aa, synthetic construct
ARRRGDISRT

SEQ ID NO: 109975 - protein, 10 aa, synthetic construct
ARHRGDISRT

SEQ ID NO: 109976 - protein, 10 aa, synthetic construct
ARSRGDISRT

SEQ ID NO: 109977 - protein, 10 aa, synthetic construct
ARTRGDISRT

SEQ ID NO: 109978 - protein, 10 aa, synthetic construct
ARYRGDISRT

SEQ ID NO: 109979 - protein, 10 aa, synthetic construct
ARNRGDISRT

SEQ ID NO: 109980 - protein, 10 aa, synthetic construct
ARQRGDISRT

SEQ ID NO: 109981 - protein, 10 aa, synthetic construct
ARDRGDISRT

SEQ ID NO: 109982 - protein, 10 aa, synthetic construct
ARERGDISRT

SEQ ID NO: 109983 - protein, 10 aa, synthetic construct
AHGRGDISRT

SEQ ID NO: 109984 - protein, 10 aa, synthetic construct
AHARGDISRT

SEQ ID NO: 109985 - protein, 10 aa, synthetic construct
AHVRGDISRT

SEQ ID NO: 109986 - protein, 10 aa, synthetic construct
AHPRGDISRT

SEQ ID NO: 109987 - protein, 10 aa, synthetic construct
AHLRGDISRT

SEQ ID NO: 109988 - protein, 10 aa, synthetic construct
AHIRGDISRT

SEQ ID NO: 109989 - protein, 10 aa, synthetic construct
AHMRGDISRT

SEQ ID NO: 109990 - protein, 10 aa, synthetic construct
AHWRGDISRT

SEQ ID NO: 109991 - protein, 10 aa, synthetic construct
AHFRGDISRT

SEQ ID NO: 109992 - protein, 10 aa, synthetic construct
AHKRGDISRT

SEQ ID NO: 109993 - protein, 10 aa, synthetic construct
AHRRGDISRT

SEQ ID NO: 109994 - protein, 10 aa, synthetic construct
AHHRGDISRT

SEQ ID NO: 109995 - protein, 10 aa, synthetic construct
AHSRGDISRT

SEQ ID NO: 109996 - protein, 10 aa, synthetic construct
AHTRGDISRT

SEQ ID NO: 109997 - protein, 10 aa, synthetic construct
AHYRGDISRT

SEQ ID NO: 109998 - protein, 10 aa, synthetic construct
AHNRGDISRT

SEQ ID NO: 109999 - protein, 10 aa, synthetic construct
AHQRGDISRT

SEQ ID NO: 110000 - protein, 10 aa, synthetic construct
AHDRGDISRT

SEQ ID NO: 110001 - protein, 10 aa, synthetic construct
AHERGDISRT

SEQ ID NO: 110002 - protein, 10 aa, synthetic construct
ASGRGDISRT

SEQ ID NO: 110003 - protein, 10 aa, synthetic construct
ASARGDISRT

SEQ ID NO: 110004 - protein, 10 aa, synthetic construct
ASVRGDISRT

SEQ ID NO: 110005 - protein, 10 aa, synthetic construct
ASPRGDISRT

SEQ ID NO: 110006 - protein, 10 aa, synthetic construct
ASLRGDISRT

SEQ ID NO: 110007 - protein, 10 aa, synthetic construct
ASIRGDISRT

SEQ ID NO: 110008 - protein, 10 aa, synthetic construct
ASMRGDISRT

SEQ ID NO: 110009 - protein, 10 aa, synthetic construct
ASWRGDISRT

SEQ ID NO: 110010 - protein, 10 aa, synthetic construct
ASFRGDISRT

SEQ ID NO: 110011 - protein, 10 aa, synthetic construct
ASKRGDISRT

SEQ ID NO: 110012 - protein, 10 aa, synthetic construct
ASRRGDISRT

SEQ ID NO: 110013 - protein, 10 aa, synthetic construct
ASHRGDISRT

SEQ ID NO: 110014 - protein, 10 aa, synthetic construct
ASSRGDISRT

SEQ ID NO: 110015 - protein, 10 aa, synthetic construct
ASTRGDISRT

SEQ ID NO: 110016 - protein, 10 aa, synthetic construct
ASYRGDISRT

SEQ ID NO: 110017 - protein, 10 aa, synthetic construct
ASNRGDISRT

SEQ ID NO: 110018 - protein, 10 aa, synthetic construct
ASQRGDISRT

SEQ ID NO: 110019 - protein, 10 aa, synthetic construct
ASDRGDISRT

SEQ ID NO: 110020 - protein, 10 aa, synthetic construct
ASERGDISRT

SEQ ID NO: 110021 - protein, 10 aa, synthetic construct
ATGRGDISRT

SEQ ID NO: 110022 - protein, 10 aa, synthetic construct
ATARGDISRT

SEQ ID NO: 110023 - protein, 10 aa, synthetic construct
ATVRGDISRT

SEQ ID NO: 110024 - protein, 10 aa, synthetic construct
ATPRGDISRT

SEQ ID NO: 110025 - protein, 10 aa, synthetic construct
ATLRGDISRT

SEQ ID NO: 110026 - protein, 10 aa, synthetic construct
ATIRGDISRT

SEQ ID NO: 110027 - protein, 10 aa, synthetic construct
ATMRGDISRT

SEQ ID NO: 110028 - protein, 10 aa, synthetic construct
ATWRGDISRT

SEQ ID NO: 110029 - protein, 10 aa, synthetic construct
ATFRGDISRT

SEQ ID NO: 110030 - protein, 10 aa, synthetic construct
ATKRGDISRT

SEQ ID NO: 110031 - protein, 10 aa, synthetic construct
ATRRGDISRT

SEQ ID NO: 110032 - protein, 10 aa, synthetic construct
ATHRGDISRT

SEQ ID NO: 110033 - protein, 10 aa, synthetic construct
ATSRGDISRT

SEQ ID NO: 110034 - protein, 10 aa, synthetic construct
ATTRGDISRT

SEQ ID NO: 110035 - protein, 10 aa, synthetic construct
ATYRGDISRT

SEQ ID NO: 110036 - protein, 10 aa, synthetic construct
ATNRGDISRT

SEQ ID NO: 110037 - protein, 10 aa, synthetic construct
ATQRGDISRT

SEQ ID NO: 110038 - protein, 10 aa, synthetic construct
ATDRGDISRT

SEQ ID NO: 110039 - protein, 10 aa, synthetic construct
ATERGDISRT

SEQ ID NO: 110040 - protein, 10 aa, synthetic construct
AYGRGDISRT

SEQ ID NO: 110041 - protein, 10 aa, synthetic construct
AYARGDISRT

SEQ ID NO: 110042 - protein, 10 aa, synthetic construct
AYVRGDISRT

SEQ ID NO: 110043 - protein, 10 aa, synthetic construct
AYPRGDISRT

SEQ ID NO: 110044 - protein, 10 aa, synthetic construct
AYLRGDISRT

SEQ ID NO: 110045 - protein, 10 aa, synthetic construct
AYIRGDISRT

SEQ ID NO: 110046 - protein, 10 aa, synthetic construct
AYMRGDISRT

SEQ ID NO: 110047 - protein, 10 aa, synthetic construct
AYWRGDISRT

SEQ ID NO: 110048 - protein, 10 aa, synthetic construct
AYFRGDISRT

SEQ ID NO: 110049 - protein, 10 aa, synthetic construct
AYKRGDISRT

SEQ ID NO: 110050 - protein, 10 aa, synthetic construct
AYRRGDISRT

SEQ ID NO: 110051 - protein, 10 aa, synthetic construct
AYHRGDISRT

SEQ ID NO: 110052 - protein, 10 aa, synthetic construct
AYSRGDISRT

SEQ ID NO: 110053 - protein, 10 aa, synthetic construct
AYTRGDISRT

SEQ ID NO: 110054 - protein, 10 aa, synthetic construct
AYYRGDISRT

SEQ ID NO: 110055 - protein, 10 aa, synthetic construct
AYNRGDISRT

SEQ ID NO: 110056 - protein, 10 aa, synthetic construct
AYQRGDISRT

SEQ ID NO: 110057 - protein, 10 aa, synthetic construct
AYDRGDISRT

SEQ ID NO: 110058 - protein, 10 aa, synthetic construct
AYERGDISRT

SEQ ID NO: 110059 - protein, 10 aa, synthetic construct
ANGRGDISRT

SEQ ID NO: 110060 - protein, 10 aa, synthetic construct
ANARGDISRT

SEQ ID NO: 110061 - protein, 10 aa, synthetic construct
ANVRGDISRT

SEQ ID NO: 110062 - protein, 10 aa, synthetic construct
ANPRGDISRT

SEQ ID NO: 110063 - protein, 10 aa, synthetic construct
ANLRGDISRT

SEQ ID NO: 110064 - protein, 10 aa, synthetic construct
ANIRGDISRT

SEQ ID NO: 110065 - protein, 10 aa, synthetic construct
ANMRGDISRT

SEQ ID NO: 110066 - protein, 10 aa, synthetic construct
ANWRGDISRT

SEQ ID NO: 110067 - protein, 10 aa, synthetic construct
ANFRGDISRT

SEQ ID NO: 110068 - protein, 10 aa, synthetic construct
ANKRGDISRT

SEQ ID NO: 110069 - protein, 10 aa, synthetic construct
ANRRGDISRT

SEQ ID NO: 110070 - protein, 10 aa, synthetic construct
ANHRGDISRT

SEQ ID NO: 110071 - protein, 10 aa, synthetic construct
ANSRGDISRT

SEQ ID NO: 110072 - protein, 10 aa, synthetic construct
ANTRGDISRT

SEQ ID NO: 110073 - protein, 10 aa, synthetic construct
ANYRGDISRT

SEQ ID NO: 110074 - protein, 10 aa, synthetic construct
ANNRGDISRT

SEQ ID NO: 110075 - protein, 10 aa, synthetic construct
ANQRGDISRT

SEQ ID NO: 110076 - protein, 10 aa, synthetic construct
ANDRGDISRT

SEQ ID NO: 110077 - protein, 10 aa, synthetic construct
ANERGDISRT

SEQ ID NO: 110078 - protein, 10 aa, synthetic construct
AQGRGDISRT

SEQ ID NO: 110079 - protein, 10 aa, synthetic construct
AQARGDISRT

SEQ ID NO: 110080 - protein, 10 aa, synthetic construct
AQVRGDISRT

SEQ ID NO: 110081 - protein, 10 aa, synthetic construct
AQPRGDISRT

SEQ ID NO: 110082 - protein, 10 aa, synthetic construct
AQLRGDISRT

SEQ ID NO: 110083 - protein, 10 aa, synthetic construct
AQIRGDISRT

SEQ ID NO: 110084 - protein, 10 aa, synthetic construct
AQMRGDISRT

SEQ ID NO: 110085 - protein, 10 aa, synthetic construct
AQWRGDISRT

SEQ ID NO: 110086 - protein, 10 aa, synthetic construct
AQFRGDISRT

SEQ ID NO: 110087 - protein, 10 aa, synthetic construct
AQKRGDISRT

SEQ ID NO: 110088 - protein, 10 aa, synthetic construct
AQRRGDISRT

SEQ ID NO: 110089 - protein, 10 aa, synthetic construct
AQHRGDISRT

SEQ ID NO: 110090 - protein, 10 aa, synthetic construct
AQSRGDISRT

SEQ ID NO: 110091 - protein, 10 aa, synthetic construct
AQTRGDISRT

SEQ ID NO: 110092 - protein, 10 aa, synthetic construct
AQYRGDISRT

SEQ ID NO: 110093 - protein, 10 aa, synthetic construct
AQNRGDISRT

SEQ ID NO: 110094 - protein, 10 aa, synthetic construct
AQQRGDISRT

SEQ ID NO: 110095 - protein, 10 aa, synthetic construct
AQDRGDISRT

SEQ ID NO: 110096 - protein, 10 aa, synthetic construct
AQERGDISRT

SEQ ID NO: 110097 - protein, 10 aa, synthetic construct
ADGRGDISRT

SEQ ID NO: 110098 - protein, 10 aa, synthetic construct
ADARGDISRT

SEQ ID NO: 110099 - protein, 10 aa, synthetic construct
ADVRGDISRT

SEQ ID NO: 110100 - protein, 10 aa, synthetic construct
ADPRGDISRT

SEQ ID NO: 110101 - protein, 10 aa, synthetic construct
ADLRGDISRT

SEQ ID NO: 110102 - protein, 10 aa, synthetic construct
ADIRGDISRT

SEQ ID NO: 110103 - protein, 10 aa, synthetic construct
ADMRGDISRT

SEQ ID NO: 110104 - protein, 10 aa, synthetic construct
ADWRGDISRT

SEQ ID NO: 110105 - protein, 10 aa, synthetic construct
ADFRGDISRT

SEQ ID NO: 110106 - protein, 10 aa, synthetic construct
ADKRGDISRT

SEQ ID NO: 110107 - protein, 10 aa, synthetic construct
ADRRGDISRT

SEQ ID NO: 110108 - protein, 10 aa, synthetic construct
ADHRGDISRT

SEQ ID NO: 110109 - protein, 10 aa, synthetic construct
ADSRGDISRT

SEQ ID NO: 110110 - protein, 10 aa, synthetic construct
ADTRGDISRT

SEQ ID NO: 110111 - protein, 10 aa, synthetic construct
ADYRGDISRT

SEQ ID NO: 110112 - protein, 10 aa, synthetic construct
ADNRGDISRT

SEQ ID NO: 110113 - protein, 10 aa, synthetic construct
ADQRGDISRT

SEQ ID NO: 110114 - protein, 10 aa, synthetic construct
ADDRGDISRT

SEQ ID NO: 110115 - protein, 10 aa, synthetic construct
ADERGDISRT

SEQ ID NO: 110116 - protein, 10 aa, synthetic construct
AEGRGDISRT

SEQ ID NO: 110117 - protein, 10 aa, synthetic construct
AEARGDISRT

SEQ ID NO: 110118 - protein, 10 aa, synthetic construct
AEVRGDISRT

SEQ ID NO: 110119 - protein, 10 aa, synthetic construct
AEPRGDISRT

SEQ ID NO: 110120 - protein, 10 aa, synthetic construct
AELRGDISRT

SEQ ID NO: 110121 - protein, 10 aa, synthetic construct
AEIRGDISRT

SEQ ID NO: 110122 - protein, 10 aa, synthetic construct
AEMRGDISRT

SEQ ID NO: 110123 - protein, 10 aa, synthetic construct
AEWRGDISRT

SEQ ID NO: 110124 - protein, 10 aa, synthetic construct
AEFRGDISRT

SEQ ID NO: 110125 - protein, 10 aa, synthetic construct
AEKRGDISRT

SEQ ID NO: 110126 - protein, 10 aa, synthetic construct
AERRGDISRT

SEQ ID NO: 110127 - protein, 10 aa, synthetic construct
AEHRGDISRT

SEQ ID NO: 110128 - protein, 10 aa, synthetic construct
AESRGDISRT

SEQ ID NO: 110129 - protein, 10 aa, synthetic construct
AETRGDISRT

SEQ ID NO: 110130 - protein, 10 aa, synthetic construct
AEYRGDISRT

SEQ ID NO: 110131 - protein, 10 aa, synthetic construct
AENRGDISRT

SEQ ID NO: 110132 - protein, 10 aa, synthetic construct
AEQRGDISRT

SEQ ID NO: 110133 - protein, 10 aa, synthetic construct
AEDRGDISRT

SEQ ID NO: 110134 - protein, 10 aa, synthetic construct
AEERGDISRT

SEQ ID NO: 110135 - protein, 10 aa, synthetic construct
EGGRGDISRT

SEQ ID NO: 110136 - protein, 10 aa, synthetic construct
EGARGDISRT

SEQ ID NO: 110137 - protein, 10 aa, synthetic construct
EGVRGDISRT

SEQ ID NO: 110138 - protein, 10 aa, synthetic construct
EGPRGDISRT

SEQ ID NO: 110139 - protein, 10 aa, synthetic construct
EGLRGDISRT

SEQ ID NO: 110140 - protein, 10 aa, synthetic construct
EGIRGDISRT

SEQ ID NO: 110141 - protein, 10 aa, synthetic construct
EGMRGDISRT

SEQ ID NO: 110142 - protein, 10 aa, synthetic construct
EGWRGDISRT

SEQ ID NO: 110143 - protein, 10 aa, synthetic construct
EGFRGDISRT

SEQ ID NO: 110144 - protein, 10 aa, synthetic construct
EGKRGDISRT

SEQ ID NO: 110145 - protein, 10 aa, synthetic construct
EGRRGDISRT

SEQ ID NO: 110146 - protein, 10 aa, synthetic construct
EGHRGDISRT

SEQ ID NO: 110147 - protein, 10 aa, synthetic construct
EGSRGDISRT

SEQ ID NO: 110148 - protein, 10 aa, synthetic construct
EGTRGDISRT

SEQ ID NO: 110149 - protein, 10 aa, synthetic construct
EGYRGDISRT

SEQ ID NO: 110150 - protein, 10 aa, synthetic construct
EGNRGDISRT

SEQ ID NO: 110151 - protein, 10 aa, synthetic construct
EGQRGDISRT

SEQ ID NO: 110152 - protein, 10 aa, synthetic construct
EGDRGDISRT

SEQ ID NO: 110153 - protein, 10 aa, synthetic construct
EGERGDISRT

SEQ ID NO: 110154 - protein, 10 aa, synthetic construct
EAGRGDISRT

SEQ ID NO: 110155 - protein, 10 aa, synthetic construct
EAARGDISRT

SEQ ID NO: 110156 - protein, 10 aa, synthetic construct
EAVRGDISRT

SEQ ID NO: 110157 - protein, 10 aa, synthetic construct
EAPRGDISRT

SEQ ID NO: 110158 - protein, 10 aa, synthetic construct
EALRGDISRT

SEQ ID NO: 110159 - protein, 10 aa, synthetic construct
EAIRGDISRT

SEQ ID NO: 110160 - protein, 10 aa, synthetic construct
EAMRGDISRT

SEQ ID NO: 110161 - protein, 10 aa, synthetic construct
EAWRGDISRT

SEQ ID NO: 110162 - protein, 10 aa, synthetic construct
EAFRGDISRT

SEQ ID NO: 110163 - protein, 10 aa, synthetic construct
EAKRGDISRT

SEQ ID NO: 110164 - protein, 10 aa, synthetic construct
EARRGDISRT

SEQ ID NO: 110165 - protein, 10 aa, synthetic construct
EAHRGDISRT

SEQ ID NO: 110166 - protein, 10 aa, synthetic construct
EASRGDISRT

SEQ ID NO: 110167 - protein, 10 aa, synthetic construct
EATRGDISRT

SEQ ID NO: 110168 - protein, 10 aa, synthetic construct
EAYRGDISRT

SEQ ID NO: 110169 - protein, 10 aa, synthetic construct
EANRGDISRT

SEQ ID NO: 110170 - protein, 10 aa, synthetic construct
EAQRGDISRT

SEQ ID NO: 110171 - protein, 10 aa, synthetic construct
EADRGDISRT

SEQ ID NO: 110172 - protein, 10 aa, synthetic construct
EAERGDISRT

SEQ ID NO: 110173 - protein, 10 aa, synthetic construct
EVGRGDISRT

SEQ ID NO: 110174 - protein, 10 aa, synthetic construct
EVARGDISRT

SEQ ID NO: 110175 - protein, 10 aa, synthetic construct
EVVRGDISRT

SEQ ID NO: 110176 - protein, 10 aa, synthetic construct
EVPRGDISRT

SEQ ID NO: 110177 - protein, 10 aa, synthetic construct
EVLRGDISRT

SEQ ID NO: 110178 - protein, 10 aa, synthetic construct
EVIRGDISRT

SEQ ID NO: 110179 - protein, 10 aa, synthetic construct
EVMRGDISRT

SEQ ID NO: 110180 - protein, 10 aa, synthetic construct
EVWRGDISRT

SEQ ID NO: 110181 - protein, 10 aa, synthetic construct
EVFRGDISRT

SEQ ID NO: 110182 - protein, 10 aa, synthetic construct
EVKRGDISRT

SEQ ID NO: 110183 - protein, 10 aa, synthetic construct
EVRRGDISRT

SEQ ID NO: 110184 - protein, 10 aa, synthetic construct
EVHRGDISRT

SEQ ID NO: 110185 - protein, 10 aa, synthetic construct
EVSRGDISRT

SEQ ID NO: 110186 - protein, 10 aa, synthetic construct
EVTRGDISRT

SEQ ID NO: 110187 - protein, 10 aa, synthetic construct
EVYRGDISRT

SEQ ID NO: 110188 - protein, 10 aa, synthetic construct
EVNRGDISRT

SEQ ID NO: 110189 - protein, 10 aa, synthetic construct
EVQRGDISRT

SEQ ID NO: 110190 - protein, 10 aa, synthetic construct
EVDRGDISRT

SEQ ID NO: 110191 - protein, 10 aa, synthetic construct
EVERGDISRT

SEQ ID NO: 110192 - protein, 10 aa, synthetic construct
EPGRGDISRT

SEQ ID NO: 110193 - protein, 10 aa, synthetic construct
EPARGDISRT

SEQ ID NO: 110194 - protein, 10 aa, synthetic construct
EPVRGDISRT

SEQ ID NO: 110195 - protein, 10 aa, synthetic construct
EPPRGDISRT

SEQ ID NO: 110196 - protein, 10 aa, synthetic construct
EPLRGDISRT

SEQ ID NO: 110197 - protein, 10 aa, synthetic construct
EPIRGDISRT

SEQ ID NO: 110198 - protein, 10 aa, synthetic construct
EPMRGDISRT

SEQ ID NO: 110199 - protein, 10 aa, synthetic construct
EPWRGDISRT

SEQ ID NO: 110200 - protein, 10 aa, synthetic construct
EPFRGDISRT

SEQ ID NO: 110201 - protein, 10 aa, synthetic construct
EPKRGDISRT

SEQ ID NO: 110202 - protein, 10 aa, synthetic construct
EPRRGDISRT

SEQ ID NO: 110203 - protein, 10 aa, synthetic construct
EPHRGDISRT

SEQ ID NO: 110204 - protein, 10 aa, synthetic construct
EPSRGDISRT

SEQ ID NO: 110205 - protein, 10 aa, synthetic construct
EPTRGDISRT

SEQ ID NO: 110206 - protein, 10 aa, synthetic construct
EPYRGDISRT

SEQ ID NO: 110207 - protein, 10 aa, synthetic construct
EPNRGDISRT

SEQ ID NO: 110208 - protein, 10 aa, synthetic construct
EPQRGDISRT

SEQ ID NO: 110209 - protein, 10 aa, synthetic construct
EPDRGDISRT

SEQ ID NO: 110210 - protein, 10 aa, synthetic construct
EPERGDISRT

SEQ ID NO: 110211 - protein, 10 aa, synthetic construct
ELGRGDISRT

SEQ ID NO: 110212 - protein, 10 aa, synthetic construct
ELARGDISRT

SEQ ID NO: 110213 - protein, 10 aa, synthetic construct
ELVRGDISRT

SEQ ID NO: 110214 - protein, 10 aa, synthetic construct
ELPRGDISRT

SEQ ID NO: 110215 - protein, 10 aa, synthetic construct
ELLRGDISRT

SEQ ID NO: 110216 - protein, 10 aa, synthetic construct
ELIRGDISRT

SEQ ID NO: 110217 - protein, 10 aa, synthetic construct
ELMRGDISRT

SEQ ID NO: 110218 - protein, 10 aa, synthetic construct
ELWRGDISRT

SEQ ID NO: 110219 - protein, 10 aa, synthetic construct
ELFRGDISRT

SEQ ID NO: 110220 - protein, 10 aa, synthetic construct
ELKRGDISRT

SEQ ID NO: 110221 - protein, 10 aa, synthetic construct
ELRRGDISRT

SEQ ID NO: 110222 - protein, 10 aa, synthetic construct
ELHRGDISRT

SEQ ID NO: 110223 - protein, 10 aa, synthetic construct
ELSRGDISRT

SEQ ID NO: 110224 - protein, 10 aa, synthetic construct
ELTRGDISRT

SEQ ID NO: 110225 - protein, 10 aa, synthetic construct
ELYRGDISRT

SEQ ID NO: 110226 - protein, 10 aa, synthetic construct
ELNRGDISRT

SEQ ID NO: 110227 - protein, 10 aa, synthetic construct
ELQRGDISRT

SEQ ID NO: 110228 - protein, 10 aa, synthetic construct
ELDRGDISRT

SEQ ID NO: 110229 - protein, 10 aa, synthetic construct
ELERGDISRT

SEQ ID NO: 110230 - protein, 10 aa, synthetic construct
EIGRGDISRT

SEQ ID NO: 110231 - protein, 10 aa, synthetic construct
EIARGDISRT

SEQ ID NO: 110232 - protein, 10 aa, synthetic construct
EIVRGDISRT

SEQ ID NO: 110233 - protein, 10 aa, synthetic construct
EIPRGDISRT

SEQ ID NO: 110234 - protein, 10 aa, synthetic construct
EILRGDISRT

SEQ ID NO: 110235 - protein, 10 aa, synthetic construct
EIIRGDISRT

SEQ ID NO: 110236 - protein, 10 aa, synthetic construct
EIMRGDISRT

SEQ ID NO: 110237 - protein, 10 aa, synthetic construct
EIWRGDISRT

SEQ ID NO: 110238 - protein, 10 aa, synthetic construct
EIFRGDISRT

SEQ ID NO: 110239 - protein, 10 aa, synthetic construct
EIKRGDISRT

SEQ ID NO: 110240 - protein, 10 aa, synthetic construct
EIRRGDISRT

SEQ ID NO: 110241 - protein, 10 aa, synthetic construct
EIHRGDISRT

SEQ ID NO: 110242 - protein, 10 aa, synthetic construct
EISRGDISRT

SEQ ID NO: 110243 - protein, 10 aa, synthetic construct
EITRGDISRT

SEQ ID NO: 110244 - protein, 10 aa, synthetic construct
EIYRGDISRT

SEQ ID NO: 110245 - protein, 10 aa, synthetic construct
EINRGDISRT

SEQ ID NO: 110246 - protein, 10 aa, synthetic construct
EIQRGDISRT

SEQ ID NO: 110247 - protein, 10 aa, synthetic construct
EIDRGDISRT

SEQ ID NO: 110248 - protein, 10 aa, synthetic construct
EIERGDISRT

SEQ ID NO: 110249 - protein, 10 aa, synthetic construct
EMGRGDISRT

SEQ ID NO: 110250 - protein, 10 aa, synthetic construct
EMARGDISRT

SEQ ID NO: 110251 - protein, 10 aa, synthetic construct
EMVRGDISRT

SEQ ID NO: 110252 - protein, 10 aa, synthetic construct
EMPRGDISRT

SEQ ID NO: 110253 - protein, 10 aa, synthetic construct
EMLRGDISRT

SEQ ID NO: 110254 - protein, 10 aa, synthetic construct
EMIRGDISRT

SEQ ID NO: 110255 - protein, 10 aa, synthetic construct
EMMRGDISRT

SEQ ID NO: 110256 - protein, 10 aa, synthetic construct
EMWRGDISRT

SEQ ID NO: 110257 - protein, 10 aa, synthetic construct
EMFRGDISRT

SEQ ID NO: 110258 - protein, 10 aa, synthetic construct
EMKRGDISRT

SEQ ID NO: 110259 - protein, 10 aa, synthetic construct
EMRRGDISRT

SEQ ID NO: 110260 - protein, 10 aa, synthetic construct
EMHRGDISRT

SEQ ID NO: 110261 - protein, 10 aa, synthetic construct
EMSRGDISRT

SEQ ID NO: 110262 - protein, 10 aa, synthetic construct
EMTRGDISRT

SEQ ID NO: 110263 - protein, 10 aa, synthetic construct
EMYRGDISRT

SEQ ID NO: 110264 - protein, 10 aa, synthetic construct
EMNRGDISRT

SEQ ID NO: 110265 - protein, 10 aa, synthetic construct
EMQRGDISRT

SEQ ID NO: 110266 - protein, 10 aa, synthetic construct
EMDRGDISRT

SEQ ID NO: 110267 - protein, 10 aa, synthetic construct
EMERGDISRT

SEQ ID NO: 110268 - protein, 10 aa, synthetic construct
EWGRGDISRT

SEQ ID NO: 110269 - protein, 10 aa, synthetic construct
EWARGDISRT

SEQ ID NO: 110270 - protein, 10 aa, synthetic construct
EWVRGDISRT

SEQ ID NO: 110271 - protein, 10 aa, synthetic construct
EWPRGDISRT

SEQ ID NO: 110272 - protein, 10 aa, synthetic construct
EWLRGDISRT

SEQ ID NO: 110273 - protein, 10 aa, synthetic construct
EWIRGDISRT

SEQ ID NO: 110274 - protein, 10 aa, synthetic construct
EWMRGDISRT

SEQ ID NO: 110275 - protein, 10 aa, synthetic construct
EWWRGDISRT

SEQ ID NO: 110276 - protein, 10 aa, synthetic construct
EWFRGDISRT

SEQ ID NO: 110277 - protein, 10 aa, synthetic construct
EWKRGDISRT

SEQ ID NO: 110278 - protein, 10 aa, synthetic construct
EWRRGDISRT

SEQ ID NO: 110279 - protein, 10 aa, synthetic construct
EWHRGDISRT

SEQ ID NO: 110280 - protein, 10 aa, synthetic construct
EWSRGDISRT

SEQ ID NO: 110281 - protein, 10 aa, synthetic construct
EWTRGDISRT

SEQ ID NO: 110282 - protein, 10 aa, synthetic construct
EWYRGDISRT

SEQ ID NO: 110283 - protein, 10 aa, synthetic construct
EWNRGDISRT

SEQ ID NO: 110284 - protein, 10 aa, synthetic construct
EWQRGDISRT

SEQ ID NO: 110285 - protein, 10 aa, synthetic construct
EWDRGDISRT

SEQ ID NO: 110286 - protein, 10 aa, synthetic construct
EWERGDISRT

SEQ ID NO: 110287 - protein, 10 aa, synthetic construct
EFGRGDISRT

SEQ ID NO: 110288 - protein, 10 aa, synthetic construct
EFARGDISRT

SEQ ID NO: 110289 - protein, 10 aa, synthetic construct
EFVRGDISRT

SEQ ID NO: 110290 - protein, 10 aa, synthetic construct
EFPRGDISRT

SEQ ID NO: 110291 - protein, 10 aa, synthetic construct
EFLRGDISRT

SEQ ID NO: 110292 - protein, 10 aa, synthetic construct
EFIRGDISRT

SEQ ID NO: 110293 - protein, 10 aa, synthetic construct
EFMRGDISRT

SEQ ID NO: 110294 - protein, 10 aa, synthetic construct
EFWRGDISRT

SEQ ID NO: 110295 - protein, 10 aa, synthetic construct
EFFRGDISRT

SEQ ID NO: 110296 - protein, 10 aa, synthetic construct
EFKRGDISRT

SEQ ID NO: 110297 - protein, 10 aa, synthetic construct
EFRRGDISRT

SEQ ID NO: 110298 - protein, 10 aa, synthetic construct
EFHRGDISRT

SEQ ID NO: 110299 - protein, 10 aa, synthetic construct
EFSRGDISRT

SEQ ID NO: 110300 - protein, 10 aa, synthetic construct
EFTRGDISRT

SEQ ID NO: 110301 - protein, 10 aa, synthetic construct
EFYRGDISRT

SEQ ID NO: 110302 - protein, 10 aa, synthetic construct
EFNRGDISRT

SEQ ID NO: 110303 - protein, 10 aa, synthetic construct
EFQRGDISRT

SEQ ID NO: 110304 - protein, 10 aa, synthetic construct
EFDRGDISRT

SEQ ID NO: 110305 - protein, 10 aa, synthetic construct
EFERGDISRT

SEQ ID NO: 110306 - protein, 10 aa, synthetic construct
EKGRGDISRT

SEQ ID NO: 110307 - protein, 10 aa, synthetic construct
EKARGDISRT

SEQ ID NO: 110308 - protein, 10 aa, synthetic construct
EKVRGDISRT

SEQ ID NO: 110309 - protein, 10 aa, synthetic construct
EKPRGDISRT

SEQ ID NO: 110310 - protein, 10 aa, synthetic construct
EKLRGDISRT

SEQ ID NO: 110311 - protein, 10 aa, synthetic construct
EKIRGDISRT

SEQ ID NO: 110312 - protein, 10 aa, synthetic construct
EKMRGDISRT

SEQ ID NO: 110313 - protein, 10 aa, synthetic construct
EKWRGDISRT

SEQ ID NO: 110314 - protein, 10 aa, synthetic construct
EKFRGDISRT

SEQ ID NO: 110315 - protein, 10 aa, synthetic construct
EKKRGDISRT

SEQ ID NO: 110316 - protein, 10 aa, synthetic construct
EKRRGDISRT

SEQ ID NO: 110317 - protein, 10 aa, synthetic construct
EKHRGDISRT

SEQ ID NO: 110318 - protein, 10 aa, synthetic construct
EKSRGDISRT

SEQ ID NO: 110319 - protein, 10 aa, synthetic construct
EKTRGDISRT

SEQ ID NO: 110320 - protein, 10 aa, synthetic construct
EKYRGDISRT

SEQ ID NO: 110321 - protein, 10 aa, synthetic construct
EKNRGDISRT

SEQ ID NO: 110322 - protein, 10 aa, synthetic construct
EKQRGDISRT

SEQ ID NO: 110323 - protein, 10 aa, synthetic construct
EKDRGDISRT

SEQ ID NO: 110324 - protein, 10 aa, synthetic construct
EKERGDISRT

SEQ ID NO: 110325 - protein, 10 aa, synthetic construct
ERGRGDISRT

SEQ ID NO: 110326 - protein, 10 aa, synthetic construct
ERARGDISRT

SEQ ID NO: 110327 - protein, 10 aa, synthetic construct
ERVRGDISRT

SEQ ID NO: 110328 - protein, 10 aa, synthetic construct
ERPRGDISRT

SEQ ID NO: 110329 - protein, 10 aa, synthetic construct
ERLRGDISRT

SEQ ID NO: 110330 - protein, 10 aa, synthetic construct
ERIRGDISRT

SEQ ID NO: 110331 - protein, 10 aa, synthetic construct
ERMRGDISRT

SEQ ID NO: 110332 - protein, 10 aa, synthetic construct
ERWRGDISRT

SEQ ID NO: 110333 - protein, 10 aa, synthetic construct
ERFRGDISRT

SEQ ID NO: 110334 - protein, 10 aa, synthetic construct
ERKRGDISRT

SEQ ID NO: 110335 - protein, 10 aa, synthetic construct
ERRRGDISRT

SEQ ID NO: 110336 - protein, 10 aa, synthetic construct
ERHRGDISRT

SEQ ID NO: 110337 - protein, 10 aa, synthetic construct
ERSRGDISRT

SEQ ID NO: 110338 - protein, 10 aa, synthetic construct
ERTRGDISRT

SEQ ID NO: 110339 - protein, 10 aa, synthetic construct
ERYRGDISRT

SEQ ID NO: 110340 - protein, 10 aa, synthetic construct
ERNRGDISRT

SEQ ID NO: 110341 - protein, 10 aa, synthetic construct
ERQRGDISRT

SEQ ID NO: 110342 - protein, 10 aa, synthetic construct
ERDRGDISRT

SEQ ID NO: 110343 - protein, 10 aa, synthetic construct
ERERGDISRT

SEQ ID NO: 110344 - protein, 10 aa, synthetic construct
EHGRGDISRT

SEQ ID NO: 110345 - protein, 10 aa, synthetic construct
EHARGDISRT

SEQ ID NO: 110346 - protein, 10 aa, synthetic construct
EHVRGDISRT

SEQ ID NO: 110347 - protein, 10 aa, synthetic construct
EHPRGDISRT

SEQ ID NO: 110348 - protein, 10 aa, synthetic construct
EHLRGDISRT

SEQ ID NO: 110349 - protein, 10 aa, synthetic construct
EHIRGDISRT

SEQ ID NO: 110350 - protein, 10 aa, synthetic construct
EHMRGDISRT

SEQ ID NO: 110351 - protein, 10 aa, synthetic construct
EHWRGDISRT

SEQ ID NO: 110352 - protein, 10 aa, synthetic construct
EHFRGDISRT

SEQ ID NO: 110353 - protein, 10 aa, synthetic construct
EHKRGDISRT

SEQ ID NO: 110354 - protein, 10 aa, synthetic construct
EHRRGDISRT

SEQ ID NO: 110355 - protein, 10 aa, synthetic construct
EHHRGDISRT

SEQ ID NO: 110356 - protein, 10 aa, synthetic construct
EHSRGDISRT

SEQ ID NO: 110357 - protein, 10 aa, synthetic construct
EHTRGDISRT

SEQ ID NO: 110358 - protein, 10 aa, synthetic construct
EHYRGDISRT

SEQ ID NO: 110359 - protein, 10 aa, synthetic construct
EHNRGDISRT

SEQ ID NO: 110360 - protein, 10 aa, synthetic construct
EHQRGDISRT

SEQ ID NO: 110361 - protein, 10 aa, synthetic construct
EHDRGDISRT

SEQ ID NO: 110362 - protein, 10 aa, synthetic construct
EHERGDISRT

SEQ ID NO: 110363 - protein, 10 aa, synthetic construct
ESGRGDISRT

SEQ ID NO: 110364 - protein, 10 aa, synthetic construct
ESARGDISRT

SEQ ID NO: 110365 - protein, 10 aa, synthetic construct
ESVRGDISRT

SEQ ID NO: 110366 - protein, 10 aa, synthetic construct
ESPRGDISRT

SEQ ID NO: 110367 - protein, 10 aa, synthetic construct
ESLRGDISRT

SEQ ID NO: 110368 - protein, 10 aa, synthetic construct
ESIRGDISRT

SEQ ID NO: 110369 - protein, 10 aa, synthetic construct
ESMRGDISRT

SEQ ID NO: 110370 - protein, 10 aa, synthetic construct
ESWRGDISRT

SEQ ID NO: 110371 - protein, 10 aa, synthetic construct
ESFRGDISRT

SEQ ID NO: 110372 - protein, 10 aa, synthetic construct
ESKRGDISRT

SEQ ID NO: 110373 - protein, 10 aa, synthetic construct
ESRRGDISRT

SEQ ID NO: 110374 - protein, 10 aa, synthetic construct
ESHRGDISRT

SEQ ID NO: 110375 - protein, 10 aa, synthetic construct
ESSRGDISRT

SEQ ID NO: 110376 - protein, 10 aa, synthetic construct
ESTRGDISRT

SEQ ID NO: 110377 - protein, 10 aa, synthetic construct
ESYRGDISRT

SEQ ID NO: 110378 - protein, 10 aa, synthetic construct
ESNRGDISRT

SEQ ID NO: 110379 - protein, 10 aa, synthetic construct
ESQRGDISRT

SEQ ID NO: 110380 - protein, 10 aa, synthetic construct
ESDRGDISRT

SEQ ID NO: 110381 - protein, 10 aa, synthetic construct
ESERGDISRT

SEQ ID NO: 110382 - protein, 10 aa, synthetic construct
ETGRGDISRT

SEQ ID NO: 110383 - protein, 10 aa, synthetic construct
ETARGDISRT

SEQ ID NO: 110384 - protein, 10 aa, synthetic construct
ETVRGDISRT

SEQ ID NO: 110385 - protein, 10 aa, synthetic construct
ETPRGDISRT

SEQ ID NO: 110386 - protein, 10 aa, synthetic construct
ETLRGDISRT

SEQ ID NO: 110387 - protein, 10 aa, synthetic construct
ETIRGDISRT

SEQ ID NO: 110388 - protein, 10 aa, synthetic construct
ETMRGDISRT

SEQ ID NO: 110389 - protein, 10 aa, synthetic construct
ETWRGDISRT

SEQ ID NO: 110390 - protein, 10 aa, synthetic construct
ETFRGDISRT

SEQ ID NO: 110391 - protein, 10 aa, synthetic construct
ETKRGDISRT

SEQ ID NO: 110392 - protein, 10 aa, synthetic construct
ETRRGDISRT

SEQ ID NO: 110393 - protein, 10 aa, synthetic construct
ETHRGDISRT

SEQ ID NO: 110394 - protein, 10 aa, synthetic construct
ETSRGDISRT

SEQ ID NO: 110395 - protein, 10 aa, synthetic construct
ETTRGDISRT

SEQ ID NO: 110396 - protein, 10 aa, synthetic construct
ETYRGDISRT

SEQ ID NO: 110397 - protein, 10 aa, synthetic construct
ETNRGDISRT

SEQ ID NO: 110398 - protein, 10 aa, synthetic construct
ETQRGDISRT

SEQ ID NO: 110399 - protein, 10 aa, synthetic construct
ETDRGDISRT

SEQ ID NO: 110400 - protein, 10 aa, synthetic construct
ETERGDISRT

SEQ ID NO: 110401 - protein, 10 aa, synthetic construct
EYGRGDISRT

SEQ ID NO: 110402 - protein, 10 aa, synthetic construct
EYARGDISRT

SEQ ID NO: 110403 - protein, 10 aa, synthetic construct
EYVRGDISRT

SEQ ID NO: 110404 - protein, 10 aa, synthetic construct
EYPRGDISRT

SEQ ID NO: 110405 - protein, 10 aa, synthetic construct
EYLRGDISRT

SEQ ID NO: 110406 - protein, 10 aa, synthetic construct
EYIRGDISRT

SEQ ID NO: 110407 - protein, 10 aa, synthetic construct
EYMRGDISRT

SEQ ID NO: 110408 - protein, 10 aa, synthetic construct
EYWRGDISRT

SEQ ID NO: 110409 - protein, 10 aa, synthetic construct
EYFRGDISRT

SEQ ID NO: 110410 - protein, 10 aa, synthetic construct
EYKRGDISRT

SEQ ID NO: 110411 - protein, 10 aa, synthetic construct
EYRRGDISRT

SEQ ID NO: 110412 - protein, 10 aa, synthetic construct
EYHRGDISRT

SEQ ID NO: 110413 - protein, 10 aa, synthetic construct
EYSRGDISRT

SEQ ID NO: 110414 - protein, 10 aa, synthetic construct
EYTRGDISRT

SEQ ID NO: 110415 - protein, 10 aa, synthetic construct
EYYRGDISRT

SEQ ID NO: 110416 - protein, 10 aa, synthetic construct
EYNRGDISRT

SEQ ID NO: 110417 - protein, 10 aa, synthetic construct
EYQRGDISRT

SEQ ID NO: 110418 - protein, 10 aa, synthetic construct
EYDRGDISRT

SEQ ID NO: 110419 - protein, 10 aa, synthetic construct
EYERGDISRT

SEQ ID NO: 110420 - protein, 10 aa, synthetic construct
ENGRGDISRT

SEQ ID NO: 110421 - protein, 10 aa, synthetic construct
ENARGDISRT

SEQ ID NO: 110422 - protein, 10 aa, synthetic construct
ENVRGDISRT

SEQ ID NO: 110423 - protein, 10 aa, synthetic construct
ENPRGDISRT

SEQ ID NO: 110424 - protein, 10 aa, synthetic construct
ENLRGDISRT

SEQ ID NO: 110425 - protein, 10 aa, synthetic construct
ENIRGDISRT

SEQ ID NO: 110426 - protein, 10 aa, synthetic construct
ENMRGDISRT

SEQ ID NO: 110427 - protein, 10 aa, synthetic construct
ENWRGDISRT

SEQ ID NO: 110428 - protein, 10 aa, synthetic construct
ENFRGDISRT

SEQ ID NO: 110429 - protein, 10 aa, synthetic construct
ENKRGDISRT

SEQ ID NO: 110430 - protein, 10 aa, synthetic construct
ENRRGDISRT

SEQ ID NO: 110431 - protein, 10 aa, synthetic construct
ENHRGDISRT

SEQ ID NO: 110432 - protein, 10 aa, synthetic construct
ENSRGDISRT

SEQ ID NO: 110433 - protein, 10 aa, synthetic construct
ENTRGDISRT

SEQ ID NO: 110434 - protein, 10 aa, synthetic construct
ENYRGDISRT

SEQ ID NO: 110435 - protein, 10 aa, synthetic construct
ENNRGDISRT

SEQ ID NO: 110436 - protein, 10 aa, synthetic construct
ENQRGDISRT

SEQ ID NO: 110437 - protein, 10 aa, synthetic construct
ENDRGDISRT

SEQ ID NO: 110438 - protein, 10 aa, synthetic construct
ENERGDISRT

SEQ ID NO: 110439 - protein, 10 aa, synthetic construct
EQGRGDISRT

SEQ ID NO: 110440 - protein, 10 aa, synthetic construct
EQARGDISRT

SEQ ID NO: 110441 - protein, 10 aa, synthetic construct
EQVRGDISRT

SEQ ID NO: 110442 - protein, 10 aa, synthetic construct
EQPRGDISRT

SEQ ID NO: 110443 - protein, 10 aa, synthetic construct
EQLRGDISRT

SEQ ID NO: 110444 - protein, 10 aa, synthetic construct
EQIRGDISRT

SEQ ID NO: 110445 - protein, 10 aa, synthetic construct
EQMRGDISRT

SEQ ID NO: 110446 - protein, 10 aa, synthetic construct
EQWRGDISRT

SEQ ID NO: 110447 - protein, 10 aa, synthetic construct
EQFRGDISRT

SEQ ID NO: 110448 - protein, 10 aa, synthetic construct
EQKRGDISRT

SEQ ID NO: 110449 - protein, 10 aa, synthetic construct
EQRRGDISRT

SEQ ID NO: 110450 - protein, 10 aa, synthetic construct
EQHRGDISRT

SEQ ID NO: 110451 - protein, 10 aa, synthetic construct
EQSRGDISRT

SEQ ID NO: 110452 - protein, 10 aa, synthetic construct
EQTRGDISRT

SEQ ID NO: 110453 - protein, 10 aa, synthetic construct
EQYRGDISRT

SEQ ID NO: 110454 - protein, 10 aa, synthetic construct
EQNRGDISRT

SEQ ID NO: 110455 - protein, 10 aa, synthetic construct
EQQRGDISRT

SEQ ID NO: 110456 - protein, 10 aa, synthetic construct
EQDRGDISRT

SEQ ID NO: 110457 - protein, 10 aa, synthetic construct
EQERGDISRT

SEQ ID NO: 110458 - protein, 10 aa, synthetic construct
EDGRGDISRT

SEQ ID NO: 110459 - protein, 10 aa, synthetic construct
EDARGDISRT

SEQ ID NO: 110460 - protein, 10 aa, synthetic construct
EDVRGDISRT

SEQ ID NO: 110461 - protein, 10 aa, synthetic construct
EDPRGDISRT

SEQ ID NO: 110462 - protein, 10 aa, synthetic construct
EDLRGDISRT

SEQ ID NO: 110463 - protein, 10 aa, synthetic construct
EDIRGDISRT

SEQ ID NO: 110464 - protein, 10 aa, synthetic construct
EDMRGDISRT

SEQ ID NO: 110465 - protein, 10 aa, synthetic construct
EDWRGDISRT

SEQ ID NO: 110466 - protein, 10 aa, synthetic construct
EDFRGDISRT

SEQ ID NO: 110467 - protein, 10 aa, synthetic construct
EDKRGDISRT

SEQ ID NO: 110468 - protein, 10 aa, synthetic construct
EDRRGDISRT

SEQ ID NO: 110469 - protein, 10 aa, synthetic construct
EDHRGDISRT

SEQ ID NO: 110470 - protein, 10 aa, synthetic construct
EDSRGDISRT

SEQ ID NO: 110471 - protein, 10 aa, synthetic construct
EDTRGDISRT

SEQ ID NO: 110472 - protein, 10 aa, synthetic construct
EDYRGDISRT

SEQ ID NO: 110473 - protein, 10 aa, synthetic construct
EDNRGDISRT

SEQ ID NO: 110474 - protein, 10 aa, synthetic construct
EDQRGDISRT

SEQ ID NO: 110475 - protein, 10 aa, synthetic construct
EDDRGDISRT

SEQ ID NO: 110476 - protein, 10 aa, synthetic construct
EDERGDISRT

SEQ ID NO: 110477 - protein, 10 aa, synthetic construct
EEGRGDISRT

SEQ ID NO: 110478 - protein, 10 aa, synthetic construct
EEARGDISRT

SEQ ID NO: 110479 - protein, 10 aa, synthetic construct
EEVRGDISRT

SEQ ID NO: 110480 - protein, 10 aa, synthetic construct
EEPRGDISRT

SEQ ID NO: 110481 - protein, 10 aa, synthetic construct
EELRGDISRT

SEQ ID NO: 110482 - protein, 10 aa, synthetic construct
EEIRGDISRT

SEQ ID NO: 110483 - protein, 10 aa, synthetic construct
EEMRGDISRT

SEQ ID NO: 110484 - protein, 10 aa, synthetic construct
EEWRGDISRT

SEQ ID NO: 110485 - protein, 10 aa, synthetic construct
EEFRGDISRT

SEQ ID NO: 110486 - protein, 10 aa, synthetic construct
EEKRGDISRT

SEQ ID NO: 110487 - protein, 10 aa, synthetic construct
EERRGDISRT

SEQ ID NO: 110488 - protein, 10 aa, synthetic construct
EEHRGDISRT

SEQ ID NO: 110489 - protein, 10 aa, synthetic construct
EESRGDISRT

SEQ ID NO: 110490 - protein, 10 aa, synthetic construct
EETRGDISRT

SEQ ID NO: 110491 - protein, 10 aa, synthetic construct
EEYRGDISRT

SEQ ID NO: 110492 - protein, 10 aa, synthetic construct
EENRGDISRT

SEQ ID NO: 110493 - protein, 10 aa, synthetic construct
EEQRGDISRT

SEQ ID NO: 110494 - protein, 10 aa, synthetic construct
EEDRGDISRT

SEQ ID NO: 110495 - protein, 10 aa, synthetic construct
EEERGDISRT

SEQ ID NO: 110496 - protein, 10 aa, synthetic construct
NGGRGDISRT

SEQ ID NO: 110497 - protein, 10 aa, synthetic construct
NGARGDISRT

SEQ ID NO: 110498 - protein, 10 aa, synthetic construct
NGVRGDISRT

SEQ ID NO: 110499 - protein, 10 aa, synthetic construct
NGPRGDISRT

SEQ ID NO: 110500 - protein, 10 aa, synthetic construct
NGLRGDISRT

SEQ ID NO: 110501 - protein, 10 aa, synthetic construct
NGIRGDISRT

SEQ ID NO: 110502 - protein, 10 aa, synthetic construct
NGMRGDISRT

SEQ ID NO: 110503 - protein, 10 aa, synthetic construct
NGWRGDISRT

SEQ ID NO: 110504 - protein, 10 aa, synthetic construct
NGFRGDISRT

SEQ ID NO: 110505 - protein, 10 aa, synthetic construct
NGKRGDISRT

SEQ ID NO: 110506 - protein, 10 aa, synthetic construct
NGRRGDISRT

SEQ ID NO: 110507 - protein, 10 aa, synthetic construct
NGHRGDISRT

SEQ ID NO: 110508 - protein, 10 aa, synthetic construct
NGSRGDISRT

SEQ ID NO: 110509 - protein, 10 aa, synthetic construct
NGTRGDISRT

SEQ ID NO: 110510 - protein, 10 aa, synthetic construct
NGYRGDISRT

SEQ ID NO: 110511 - protein, 10 aa, synthetic construct
NGNRGDISRT

SEQ ID NO: 110512 - protein, 10 aa, synthetic construct
NGQRGDISRT

SEQ ID NO: 110513 - protein, 10 aa, synthetic construct
NGDRGDISRT

SEQ ID NO: 110514 - protein, 10 aa, synthetic construct
NGERGDISRT

SEQ ID NO: 110515 - protein, 10 aa, synthetic construct
NAGRGDISRT

SEQ ID NO: 110516 - protein, 10 aa, synthetic construct
NAARGDISRT

SEQ ID NO: 110517 - protein, 10 aa, synthetic construct
NAVRGDISRT

SEQ ID NO: 110518 - protein, 10 aa, synthetic construct
NAPRGDISRT

SEQ ID NO: 110519 - protein, 10 aa, synthetic construct
NALRGDISRT

SEQ ID NO: 110520 - protein, 10 aa, synthetic construct
NAIRGDISRT

SEQ ID NO: 110521 - protein, 10 aa, synthetic construct
NAMRGDISRT

SEQ ID NO: 110522 - protein, 10 aa, synthetic construct
NAWRGDISRT

SEQ ID NO: 110523 - protein, 10 aa, synthetic construct
NAFRGDISRT

SEQ ID NO: 110524 - protein, 10 aa, synthetic construct
NAKRGDISRT

SEQ ID NO: 110525 - protein, 10 aa, synthetic construct
NARRGDISRT

SEQ ID NO: 110526 - protein, 10 aa, synthetic construct
NAHRGDISRT

SEQ ID NO: 110527 - protein, 10 aa, synthetic construct
NASRGDISRT

SEQ ID NO: 110528 - protein, 10 aa, synthetic construct
NATRGDISRT

SEQ ID NO: 110529 - protein, 10 aa, synthetic construct
NAYRGDISRT

SEQ ID NO: 110530 - protein, 10 aa, synthetic construct
NANRGDISRT

SEQ ID NO: 110531 - protein, 10 aa, synthetic construct
NAQRGDISRT

SEQ ID NO: 110532 - protein, 10 aa, synthetic construct
NADRGDISRT

SEQ ID NO: 110533 - protein, 10 aa, synthetic construct
NAERGDISRT

SEQ ID NO: 110534 - protein, 10 aa, synthetic construct
NVGRGDISRT

SEQ ID NO: 110535 - protein, 10 aa, synthetic construct
NVARGDISRT

SEQ ID NO: 110536 - protein, 10 aa, synthetic construct
NVVRGDISRT

SEQ ID NO: 110537 - protein, 10 aa, synthetic construct
NVPRGDISRT

SEQ ID NO: 110538 - protein, 10 aa, synthetic construct
NVLRGDISRT

SEQ ID NO: 110539 - protein, 10 aa, synthetic construct
NVIRGDISRT

SEQ ID NO: 110540 - protein, 10 aa, synthetic construct
NVMRGDISRT

SEQ ID NO: 110541 - protein, 10 aa, synthetic construct
NVWRGDISRT

SEQ ID NO: 110542 - protein, 10 aa, synthetic construct
NVFRGDISRT

SEQ ID NO: 110543 - protein, 10 aa, synthetic construct
NVKRGDISRT

SEQ ID NO: 110544 - protein, 10 aa, synthetic construct
NVRRGDISRT

SEQ ID NO: 110545 - protein, 10 aa, synthetic construct
NVHRGDISRT

SEQ ID NO: 110546 - protein, 10 aa, synthetic construct
NVSRGDISRT

SEQ ID NO: 110547 - protein, 10 aa, synthetic construct
NVTRGDISRT

SEQ ID NO: 110548 - protein, 10 aa, synthetic construct
NVYRGDISRT

SEQ ID NO: 110549 - protein, 10 aa, synthetic construct
NVNRGDISRT

SEQ ID NO: 110550 - protein, 10 aa, synthetic construct
NVQRGDISRT

SEQ ID NO: 110551 - protein, 10 aa, synthetic construct
NVDRGDISRT

SEQ ID NO: 110552 - protein, 10 aa, synthetic construct
NVERGDISRT

SEQ ID NO: 110553 - protein, 10 aa, synthetic construct
NPGRGDISRT

SEQ ID NO: 110554 - protein, 10 aa, synthetic construct
NPARGDISRT

SEQ ID NO: 110555 - protein, 10 aa, synthetic construct
NPVRGDISRT

SEQ ID NO: 110556 - protein, 10 aa, synthetic construct
NPPRGDISRT

SEQ ID NO: 110557 - protein, 10 aa, synthetic construct
NPLRGDISRT

SEQ ID NO: 110558 - protein, 10 aa, synthetic construct
NPIRGDISRT

SEQ ID NO: 110559 - protein, 10 aa, synthetic construct
NPMRGDISRT

SEQ ID NO: 110560 - protein, 10 aa, synthetic construct
NPWRGDISRT

SEQ ID NO: 110561 - protein, 10 aa, synthetic construct
NPFRGDISRT

SEQ ID NO: 110562 - protein, 10 aa, synthetic construct
NPKRGDISRT

SEQ ID NO: 110563 - protein, 10 aa, synthetic construct
NPRRGDISRT

SEQ ID NO: 110564 - protein, 10 aa, synthetic construct
NPHRGDISRT

SEQ ID NO: 110565 - protein, 10 aa, synthetic construct
NPSRGDISRT

SEQ ID NO: 110566 - protein, 10 aa, synthetic construct
NPTRGDISRT

SEQ ID NO: 110567 - protein, 10 aa, synthetic construct
NPYRGDISRT

SEQ ID NO: 110568 - protein, 10 aa, synthetic construct
NPNRGDISRT

SEQ ID NO: 110569 - protein, 10 aa, synthetic construct
NPQRGDISRT

SEQ ID NO: 110570 - protein, 10 aa, synthetic construct
NPDRGDISRT

SEQ ID NO: 110571 - protein, 10 aa, synthetic construct
NPERGDISRT

SEQ ID NO: 110572 - protein, 10 aa, synthetic construct
NLGRGDISRT

SEQ ID NO: 110573 - protein, 10 aa, synthetic construct
NLARGDISRT

SEQ ID NO: 110574 - protein, 10 aa, synthetic construct
NLVRGDISRT

SEQ ID NO: 110575 - protein, 10 aa, synthetic construct
NLPRGDISRT

SEQ ID NO: 110576 - protein, 10 aa, synthetic construct
NLLRGDISRT

SEQ ID NO: 110577 - protein, 10 aa, synthetic construct
NLIRGDISRT

SEQ ID NO: 110578 - protein, 10 aa, synthetic construct
NLMRGDISRT

SEQ ID NO: 110579 - protein, 10 aa, synthetic construct
NLWRGDISRT

SEQ ID NO: 110580 - protein, 10 aa, synthetic construct
NLFRGDISRT

SEQ ID NO: 110581 - protein, 10 aa, synthetic construct
NLKRGDISRT

SEQ ID NO: 110582 - protein, 10 aa, synthetic construct
NLRRGDISRT

SEQ ID NO: 110583 - protein, 10 aa, synthetic construct
NLHRGDISRT

SEQ ID NO: 110584 - protein, 10 aa, synthetic construct
NLSRGDISRT

SEQ ID NO: 110585 - protein, 10 aa, synthetic construct
NLTRGDISRT

SEQ ID NO: 110586 - protein, 10 aa, synthetic construct
NLYRGDISRT

SEQ ID NO: 110587 - protein, 10 aa, synthetic construct
NLNRGDISRT

SEQ ID NO: 110588 - protein, 10 aa, synthetic construct
NLQRGDISRT

SEQ ID NO: 110589 - protein, 10 aa, synthetic construct
NLDRGDISRT

SEQ ID NO: 110590 - protein, 10 aa, synthetic construct
NLERGDISRT

SEQ ID NO: 110591 - protein, 10 aa, synthetic construct
NIGRGDISRT

SEQ ID NO: 110592 - protein, 10 aa, synthetic construct
NIARGDISRT

SEQ ID NO: 110593 - protein, 10 aa, synthetic construct
NIVRGDISRT

SEQ ID NO: 110594 - protein, 10 aa, synthetic construct
NIPRGDISRT

SEQ ID NO: 110595 - protein, 10 aa, synthetic construct
NILRGDISRT

SEQ ID NO: 110596 - protein, 10 aa, synthetic construct
NIIRGDISRT

SEQ ID NO: 110597 - protein, 10 aa, synthetic construct
NIMRGDISRT

SEQ ID NO: 110598 - protein, 10 aa, synthetic construct
NIWRGDISRT

SEQ ID NO: 110599 - protein, 10 aa, synthetic construct
NIFRGDISRT

SEQ ID NO: 110600 - protein, 10 aa, synthetic construct
NIKRGDISRT

SEQ ID NO: 110601 - protein, 10 aa, synthetic construct
NIRRGDISRT

SEQ ID NO: 110602 - protein, 10 aa, synthetic construct
NIHRGDISRT

SEQ ID NO: 110603 - protein, 10 aa, synthetic construct
NISRGDISRT

SEQ ID NO: 110604 - protein, 10 aa, synthetic construct
NITRGDISRT

SEQ ID NO: 110605 - protein, 10 aa, synthetic construct
NIYRGDISRT

SEQ ID NO: 110606 - protein, 10 aa, synthetic construct
NINRGDISRT

SEQ ID NO: 110607 - protein, 10 aa, synthetic construct
NIQRGDISRT

SEQ ID NO: 110608 - protein, 10 aa, synthetic construct
NIDRGDISRT

SEQ ID NO: 110609 - protein, 10 aa, synthetic construct
NIERGDISRT

SEQ ID NO: 110610 - protein, 10 aa, synthetic construct
NMGRGDISRT

SEQ ID NO: 110611 - protein, 10 aa, synthetic construct
NMARGDISRT

SEQ ID NO: 110612 - protein, 10 aa, synthetic construct
NMVRGDISRT

SEQ ID NO: 110613 - protein, 10 aa, synthetic construct
NMPRGDISRT

SEQ ID NO: 110614 - protein, 10 aa, synthetic construct
NMLRGDISRT

SEQ ID NO: 110615 - protein, 10 aa, synthetic construct
NMIRGDISRT

SEQ ID NO: 110616 - protein, 10 aa, synthetic construct
NMMRGDISRT

SEQ ID NO: 110617 - protein, 10 aa, synthetic construct
NMWRGDISRT

SEQ ID NO: 110618 - protein, 10 aa, synthetic construct
NMFRGDISRT

SEQ ID NO: 110619 - protein, 10 aa, synthetic construct
NMKRGDISRT

SEQ ID NO: 110620 - protein, 10 aa, synthetic construct
NMRRGDISRT

SEQ ID NO: 110621 - protein, 10 aa, synthetic construct
NMHRGDISRT

SEQ ID NO: 110622 - protein, 10 aa, synthetic construct
NMSRGDISRT

SEQ ID NO: 110623 - protein, 10 aa, synthetic construct
NMTRGDISRT

SEQ ID NO: 110624 - protein, 10 aa, synthetic construct
NMYRGDISRT

SEQ ID NO: 110625 - protein, 10 aa, synthetic construct
NMNRGDISRT

SEQ ID NO: 110626 - protein, 10 aa, synthetic construct
NMQRGDISRT

SEQ ID NO: 110627 - protein, 10 aa, synthetic construct
NMDRGDISRT

SEQ ID NO: 110628 - protein, 10 aa, synthetic construct
NMERGDISRT

SEQ ID NO: 110629 - protein, 10 aa, synthetic construct
NWGRGDISRT

SEQ ID NO: 110630 - protein, 10 aa, synthetic construct
NWARGDISRT

SEQ ID NO: 110631 - protein, 10 aa, synthetic construct
NWVRGDISRT

SEQ ID NO: 110632 - protein, 10 aa, synthetic construct
NWPRGDISRT

SEQ ID NO: 110633 - protein, 10 aa, synthetic construct
NWLRGDISRT

SEQ ID NO: 110634 - protein, 10 aa, synthetic construct
NWIRGDISRT

SEQ ID NO: 110635 - protein, 10 aa, synthetic construct
NWMRGDISRT

SEQ ID NO: 110636 - protein, 10 aa, synthetic construct
NWWRGDISRT

SEQ ID NO: 110637 - protein, 10 aa, synthetic construct
NWFRGDISRT

SEQ ID NO: 110638 - protein, 10 aa, synthetic construct
NWKRGDISRT

SEQ ID NO: 110639 - protein, 10 aa, synthetic construct
NWRRGDISRT

SEQ ID NO: 110640 - protein, 10 aa, synthetic construct
NWHRGDISRT

SEQ ID NO: 110641 - protein, 10 aa, synthetic construct
NWSRGDISRT

SEQ ID NO: 110642 - protein, 10 aa, synthetic construct
NWTRGDISRT

SEQ ID NO: 110643 - protein, 10 aa, synthetic construct
NWYRGDISRT

SEQ ID NO: 110644 - protein, 10 aa, synthetic construct
NWNRGDISRT

SEQ ID NO: 110645 - protein, 10 aa, synthetic construct
NWQRGDISRT

SEQ ID NO: 110646 - protein, 10 aa, synthetic construct
NWDRGDISRT

SEQ ID NO: 110647 - protein, 10 aa, synthetic construct
NWERGDISRT

SEQ ID NO: 110648 - protein, 10 aa, synthetic construct
NFGRGDISRT

SEQ ID NO: 110649 - protein, 10 aa, synthetic construct
NFARGDISRT

SEQ ID NO: 110650 - protein, 10 aa, synthetic construct
NFVRGDISRT

SEQ ID NO: 110651 - protein, 10 aa, synthetic construct
NFPRGDISRT

SEQ ID NO: 110652 - protein, 10 aa, synthetic construct
NFLRGDISRT

SEQ ID NO: 110653 - protein, 10 aa, synthetic construct
NFIRGDISRT

SEQ ID NO: 110654 - protein, 10 aa, synthetic construct
NFMRGDISRT

SEQ ID NO: 110655 - protein, 10 aa, synthetic construct
NFWRGDISRT

SEQ ID NO: 110656 - protein, 10 aa, synthetic construct
NFFRGDISRT

SEQ ID NO: 110657 - protein, 10 aa, synthetic construct
NFKRGDISRT

SEQ ID NO: 110658 - protein, 10 aa, synthetic construct
NFRRGDISRT

SEQ ID NO: 110659 - protein, 10 aa, synthetic construct
NFHRGDISRT

SEQ ID NO: 110660 - protein, 10 aa, synthetic construct
NFSRGDISRT

SEQ ID NO: 110661 - protein, 10 aa, synthetic construct
NFTRGDISRT

SEQ ID NO: 110662 - protein, 10 aa, synthetic construct
NFYRGDISRT

SEQ ID NO: 110663 - protein, 10 aa, synthetic construct
NFNRGDISRT

SEQ ID NO: 110664 - protein, 10 aa, synthetic construct
NFQRGDISRT

SEQ ID NO: 110665 - protein, 10 aa, synthetic construct
NFDRGDISRT

SEQ ID NO: 110666 - protein, 10 aa, synthetic construct
NFERGDISRT

SEQ ID NO: 110667 - protein, 10 aa, synthetic construct
NKGRGDISRT

SEQ ID NO: 110668 - protein, 10 aa, synthetic construct
NKARGDISRT

SEQ ID NO: 110669 - protein, 10 aa, synthetic construct
NKVRGDISRT

SEQ ID NO: 110670 - protein, 10 aa, synthetic construct
NKPRGDISRT

SEQ ID NO: 110671 - protein, 10 aa, synthetic construct
NKLRGDISRT

SEQ ID NO: 110672 - protein, 10 aa, synthetic construct
NKIRGDISRT

SEQ ID NO: 110673 - protein, 10 aa, synthetic construct
NKMRGDISRT

SEQ ID NO: 110674 - protein, 10 aa, synthetic construct
NKWRGDISRT

SEQ ID NO: 110675 - protein, 10 aa, synthetic construct
NKFRGDISRT

SEQ ID NO: 110676 - protein, 10 aa, synthetic construct
NKKRGDISRT

SEQ ID NO: 110677 - protein, 10 aa, synthetic construct
NKRRGDISRT

SEQ ID NO: 110678 - protein, 10 aa, synthetic construct
NKHRGDISRT

SEQ ID NO: 110679 - protein, 10 aa, synthetic construct
NKSRGDISRT

SEQ ID NO: 110680 - protein, 10 aa, synthetic construct
NKTRGDISRT

SEQ ID NO: 110681 - protein, 10 aa, synthetic construct
NKYRGDISRT

SEQ ID NO: 110682 - protein, 10 aa, synthetic construct
NKNRGDISRT

SEQ ID NO: 110683 - protein, 10 aa, synthetic construct
NKQRGDISRT

SEQ ID NO: 110684 - protein, 10 aa, synthetic construct
NKDRGDISRT

SEQ ID NO: 110685 - protein, 10 aa, synthetic construct
NKERGDISRT

SEQ ID NO: 110686 - protein, 10 aa, synthetic construct
NRGRGDISRT

SEQ ID NO: 110687 - protein, 10 aa, synthetic construct
NRARGDISRT

SEQ ID NO: 110688 - protein, 10 aa, synthetic construct
NRVRGDISRT

SEQ ID NO: 110689 - protein, 10 aa, synthetic construct
NRPRGDISRT

SEQ ID NO: 110690 - protein, 10 aa, synthetic construct
NRLRGDISRT

SEQ ID NO: 110691 - protein, 10 aa, synthetic construct
NRIRGDISRT

SEQ ID NO: 110692 - protein, 10 aa, synthetic construct
NRMRGDISRT

SEQ ID NO: 110693 - protein, 10 aa, synthetic construct
NRWRGDISRT

SEQ ID NO: 110694 - protein, 10 aa, synthetic construct
NRFRGDISRT

SEQ ID NO: 110695 - protein, 10 aa, synthetic construct
NRKRGDISRT

SEQ ID NO: 110696 - protein, 10 aa, synthetic construct
NRRRGDISRT

SEQ ID NO: 110697 - protein, 10 aa, synthetic construct
NRHRGDISRT

SEQ ID NO: 110698 - protein, 10 aa, synthetic construct
NRSRGDISRT

SEQ ID NO: 110699 - protein, 10 aa, synthetic construct
NRTRGDISRT

SEQ ID NO: 110700 - protein, 10 aa, synthetic construct
NRYRGDISRT

SEQ ID NO: 110701 - protein, 10 aa, synthetic construct
NRNRGDISRT

SEQ ID NO: 110702 - protein, 10 aa, synthetic construct
NRQRGDISRT

SEQ ID NO: 110703 - protein, 10 aa, synthetic construct
NRDRGDISRT

SEQ ID NO: 110704 - protein, 10 aa, synthetic construct
NRERGDISRT

SEQ ID NO: 110705 - protein, 10 aa, synthetic construct
NHGRGDISRT

SEQ ID NO: 110706 - protein, 10 aa, synthetic construct
NHARGDISRT

SEQ ID NO: 110707 - protein, 10 aa, synthetic construct
NHVRGDISRT

SEQ ID NO: 110708 - protein, 10 aa, synthetic construct
NHPRGDISRT

SEQ ID NO: 110709 - protein, 10 aa, synthetic construct
NHLRGDISRT

SEQ ID NO: 110710 - protein, 10 aa, synthetic construct
NHIRGDISRT

SEQ ID NO: 110711 - protein, 10 aa, synthetic construct
NHMRGDISRT

SEQ ID NO: 110712 - protein, 10 aa, synthetic construct
NHWRGDISRT

SEQ ID NO: 110713 - protein, 10 aa, synthetic construct
NHFRGDISRT

SEQ ID NO: 110714 - protein, 10 aa, synthetic construct
NHKRGDISRT

SEQ ID NO: 110715 - protein, 10 aa, synthetic construct
NHRRGDISRT

SEQ ID NO: 110716 - protein, 10 aa, synthetic construct
NHHRGDISRT

SEQ ID NO: 110717 - protein, 10 aa, synthetic construct
NHSRGDISRT

SEQ ID NO: 110718 - protein, 10 aa, synthetic construct
NHTRGDISRT

SEQ ID NO: 110719 - protein, 10 aa, synthetic construct
NHYRGDISRT

SEQ ID NO: 110720 - protein, 10 aa, synthetic construct
NHNRGDISRT

SEQ ID NO: 110721 - protein, 10 aa, synthetic construct
NHQRGDISRT

SEQ ID NO: 110722 - protein, 10 aa, synthetic construct
NHDRGDISRT

SEQ ID NO: 110723 - protein, 10 aa, synthetic construct
NHERGDISRT

SEQ ID NO: 110724 - protein, 10 aa, synthetic construct
NSGRGDISRT

SEQ ID NO: 110725 - protein, 10 aa, synthetic construct
NSARGDISRT

SEQ ID NO: 110726 - protein, 10 aa, synthetic construct
NSVRGDISRT

SEQ ID NO: 110727 - protein, 10 aa, synthetic construct
NSPRGDISRT

SEQ ID NO: 110728 - protein, 10 aa, synthetic construct
NSLRGDISRT

SEQ ID NO: 110729 - protein, 10 aa, synthetic construct
NSIRGDISRT

SEQ ID NO: 110730 - protein, 10 aa, synthetic construct
NSMRGDISRT

SEQ ID NO: 110731 - protein, 10 aa, synthetic construct
NSWRGDISRT

SEQ ID NO: 110732 - protein, 10 aa, synthetic construct
NSFRGDISRT

SEQ ID NO: 110733 - protein, 10 aa, synthetic construct
NSKRGDISRT

SEQ ID NO: 110734 - protein, 10 aa, synthetic construct
NSRRGDISRT

SEQ ID NO: 110735 - protein, 10 aa, synthetic construct
NSHRGDISRT

SEQ ID NO: 110736 - protein, 10 aa, synthetic construct
NSSRGDISRT

SEQ ID NO: 110737 - protein, 10 aa, synthetic construct
NSTRGDISRT

SEQ ID NO: 110738 - protein, 10 aa, synthetic construct
NSYRGDISRT

SEQ ID NO: 110739 - protein, 10 aa, synthetic construct
NSNRGDISRT

SEQ ID NO: 110740 - protein, 10 aa, synthetic construct
NSQRGDISRT

SEQ ID NO: 110741 - protein, 10 aa, synthetic construct
NSDRGDISRT

SEQ ID NO: 110742 - protein, 10 aa, synthetic construct
NSERGDISRT

SEQ ID NO: 110743 - protein, 10 aa, synthetic construct
NTGRGDISRT

SEQ ID NO: 110744 - protein, 10 aa, synthetic construct
NTARGDISRT

SEQ ID NO: 110745 - protein, 10 aa, synthetic construct
NTVRGDISRT

SEQ ID NO: 110746 - protein, 10 aa, synthetic construct
NTPRGDISRT

SEQ ID NO: 110747 - protein, 10 aa, synthetic construct
NTLRGDISRT

SEQ ID NO: 110748 - protein, 10 aa, synthetic construct
NTIRGDISRT

SEQ ID NO: 110749 - protein, 10 aa, synthetic construct
NTMRGDISRT

SEQ ID NO: 110750 - protein, 10 aa, synthetic construct
NTWRGDISRT

SEQ ID NO: 110751 - protein, 10 aa, synthetic construct
NTFRGDISRT

SEQ ID NO: 110752 - protein, 10 aa, synthetic construct
NTKRGDISRT

SEQ ID NO: 110753 - protein, 10 aa, synthetic construct
NTRRGDISRT

SEQ ID NO: 110754 - protein, 10 aa, synthetic construct
NTHRGDISRT

SEQ ID NO: 110755 - protein, 10 aa, synthetic construct
NTSRGDISRT

SEQ ID NO: 110756 - protein, 10 aa, synthetic construct
NTTRGDISRT

SEQ ID NO: 110757 - protein, 10 aa, synthetic construct
NTYRGDISRT

SEQ ID NO: 110758 - protein, 10 aa, synthetic construct
NTNRGDISRT

SEQ ID NO: 110759 - protein, 10 aa, synthetic construct
NTQRGDISRT

SEQ ID NO: 110760 - protein, 10 aa, synthetic construct
NTDRGDISRT

SEQ ID NO: 110761 - protein, 10 aa, synthetic construct
NTERGDISRT

SEQ ID NO: 110762 - protein, 10 aa, synthetic construct
NYGRGDISRT

SEQ ID NO: 110763 - protein, 10 aa, synthetic construct
NYARGDISRT

SEQ ID NO: 110764 - protein, 10 aa, synthetic construct
NYVRGDISRT

SEQ ID NO: 110765 - protein, 10 aa, synthetic construct
NYPRGDISRT

SEQ ID NO: 110766 - protein, 10 aa, synthetic construct
NYLRGDISRT

SEQ ID NO: 110767 - protein, 10 aa, synthetic construct
NYIRGDISRT

SEQ ID NO: 110768 - protein, 10 aa, synthetic construct
NYMRGDISRT

SEQ ID NO: 110769 - protein, 10 aa, synthetic construct
NYWRGDISRT

SEQ ID NO: 110770 - protein, 10 aa, synthetic construct
NYFRGDISRT

SEQ ID NO: 110771 - protein, 10 aa, synthetic construct
NYKRGDISRT

SEQ ID NO: 110772 - protein, 10 aa, synthetic construct
NYRRGDISRT

SEQ ID NO: 110773 - protein, 10 aa, synthetic construct
NYHRGDISRT

SEQ ID NO: 110774 - protein, 10 aa, synthetic construct
NYSRGDISRT

SEQ ID NO: 110775 - protein, 10 aa, synthetic construct
NYTRGDISRT

SEQ ID NO: 110776 - protein, 10 aa, synthetic construct
NYYRGDISRT

SEQ ID NO: 110777 - protein, 10 aa, synthetic construct
NYNRGDISRT

SEQ ID NO: 110778 - protein, 10 aa, synthetic construct
NYQRGDISRT

SEQ ID NO: 110779 - protein, 10 aa, synthetic construct
NYDRGDISRT

SEQ ID NO: 110780 - protein, 10 aa, synthetic construct
NYERGDISRT

SEQ ID NO: 110781 - protein, 10 aa, synthetic construct
NNGRGDISRT

SEQ ID NO: 110782 - protein, 10 aa, synthetic construct
NNARGDISRT

SEQ ID NO: 110783 - protein, 10 aa, synthetic construct
NNVRGDISRT

SEQ ID NO: 110784 - protein, 10 aa, synthetic construct
NNPRGDISRT

SEQ ID NO: 110785 - protein, 10 aa, synthetic construct
NNLRGDISRT

SEQ ID NO: 110786 - protein, 10 aa, synthetic construct
NNIRGDISRT

SEQ ID NO: 110787 - protein, 10 aa, synthetic construct
NNMRGDISRT

SEQ ID NO: 110788 - protein, 10 aa, synthetic construct
NNWRGDISRT

SEQ ID NO: 110789 - protein, 10 aa, synthetic construct
NNFRGDISRT

SEQ ID NO: 110790 - protein, 10 aa, synthetic construct
NNKRGDISRT

SEQ ID NO: 110791 - protein, 10 aa, synthetic construct
NNRRGDISRT

SEQ ID NO: 110792 - protein, 10 aa, synthetic construct
NNHRGDISRT

SEQ ID NO: 110793 - protein, 10 aa, synthetic construct
NNSRGDISRT

SEQ ID NO: 110794 - protein, 10 aa, synthetic construct
NNTRGDISRT

SEQ ID NO: 110795 - protein, 10 aa, synthetic construct
NNYRGDISRT

SEQ ID NO: 110796 - protein, 10 aa, synthetic construct
NNNRGDISRT

SEQ ID NO: 110797 - protein, 10 aa, synthetic construct
NNQRGDISRT

SEQ ID NO: 110798 - protein, 10 aa, synthetic construct
NNDRGDISRT

SEQ ID NO: 110799 - protein, 10 aa, synthetic construct
NNERGDISRT

SEQ ID NO: 110800 - protein, 10 aa, synthetic construct
NQGRGDISRT

SEQ ID NO: 110801 - protein, 10 aa, synthetic construct
NQARGDISRT

SEQ ID NO: 110802 - protein, 10 aa, synthetic construct
NQVRGDISRT

SEQ ID NO: 110803 - protein, 10 aa, synthetic construct
NQPRGDISRT

SEQ ID NO: 110804 - protein, 10 aa, synthetic construct
NQLRGDISRT

SEQ ID NO: 110805 - protein, 10 aa, synthetic construct
NQIRGDISRT

SEQ ID NO: 110806 - protein, 10 aa, synthetic construct
NQMRGDISRT

SEQ ID NO: 110807 - protein, 10 aa, synthetic construct
NQWRGDISRT

SEQ ID NO: 110808 - protein, 10 aa, synthetic construct
NQFRGDISRT

SEQ ID NO: 110809 - protein, 10 aa, synthetic construct
NQKRGDISRT

SEQ ID NO: 110810 - protein, 10 aa, synthetic construct
NQRRGDISRT

SEQ ID NO: 110811 - protein, 10 aa, synthetic construct
NQHRGDISRT

SEQ ID NO: 110812 - protein, 10 aa, synthetic construct
NQSRGDISRT

SEQ ID NO: 110813 - protein, 10 aa, synthetic construct
NQTRGDISRT

SEQ ID NO: 110814 - protein, 10 aa, synthetic construct
NQYRGDISRT

SEQ ID NO: 110815 - protein, 10 aa, synthetic construct
NQNRGDISRT

SEQ ID NO: 110816 - protein, 10 aa, synthetic construct
NQQRGDISRT

SEQ ID NO: 110817 - protein, 10 aa, synthetic construct
NQDRGDISRT

SEQ ID NO: 110818 - protein, 10 aa, synthetic construct
NQERGDISRT

SEQ ID NO: 110819 - protein, 10 aa, synthetic construct
NDGRGDISRT

SEQ ID NO: 110820 - protein, 10 aa, synthetic construct
NDARGDISRT

SEQ ID NO: 110821 - protein, 10 aa, synthetic construct
NDVRGDISRT

SEQ ID NO: 110822 - protein, 10 aa, synthetic construct
NDPRGDISRT

SEQ ID NO: 110823 - protein, 10 aa, synthetic construct
NDLRGDISRT

SEQ ID NO: 110824 - protein, 10 aa, synthetic construct
NDIRGDISRT

SEQ ID NO: 110825 - protein, 10 aa, synthetic construct
NDMRGDISRT

SEQ ID NO: 110826 - protein, 10 aa, synthetic construct
NDWRGDISRT

SEQ ID NO: 110827 - protein, 10 aa, synthetic construct
NDFRGDISRT

SEQ ID NO: 110828 - protein, 10 aa, synthetic construct
NDKRGDISRT

SEQ ID NO: 110829 - protein, 10 aa, synthetic construct
NDRRGDISRT

SEQ ID NO: 110830 - protein, 10 aa, synthetic construct
NDHRGDISRT

SEQ ID NO: 110831 - protein, 10 aa, synthetic construct
NDSRGDISRT

SEQ ID NO: 110832 - protein, 10 aa, synthetic construct
NDTRGDISRT

SEQ ID NO: 110833 - protein, 10 aa, synthetic construct
NDYRGDISRT

SEQ ID NO: 110834 - protein, 10 aa, synthetic construct
NDNRGDISRT

SEQ ID NO: 110835 - protein, 10 aa, synthetic construct
NDQRGDISRT

SEQ ID NO: 110836 - protein, 10 aa, synthetic construct
NDDRGDISRT

SEQ ID NO: 110837 - protein, 10 aa, synthetic construct
NDERGDISRT

SEQ ID NO: 110838 - protein, 10 aa, synthetic construct
NEGRGDISRT

SEQ ID NO: 110839 - protein, 10 aa, synthetic construct
NEARGDISRT

SEQ ID NO: 110840 - protein, 10 aa, synthetic construct
NEVRGDISRT

SEQ ID NO: 110841 - protein, 10 aa, synthetic construct
NEPRGDISRT

SEQ ID NO: 110842 - protein, 10 aa, synthetic construct
NELRGDISRT

SEQ ID NO: 110843 - protein, 10 aa, synthetic construct
NEIRGDISRT

SEQ ID NO: 110844 - protein, 10 aa, synthetic construct
NEMRGDISRT

SEQ ID NO: 110845 - protein, 10 aa, synthetic construct
NEWRGDISRT

SEQ ID NO: 110846 - protein, 10 aa, synthetic construct
NEFRGDISRT

SEQ ID NO: 110847 - protein, 10 aa, synthetic construct
NEKRGDISRT

SEQ ID NO: 110848 - protein, 10 aa, synthetic construct
NERRGDISRT

SEQ ID NO: 110849 - protein, 10 aa, synthetic construct
NEHRGDISRT

SEQ ID NO: 110850 - protein, 10 aa, synthetic construct
NESRGDISRT

SEQ ID NO: 110851 - protein, 10 aa, synthetic construct
NETRGDISRT

SEQ ID NO: 110852 - protein, 10 aa, synthetic construct
NEYRGDISRT

SEQ ID NO: 110853 - protein, 10 aa, synthetic construct
NENRGDISRT

SEQ ID NO: 110854 - protein, 10 aa, synthetic construct
NEQRGDISRT

SEQ ID NO: 110855 - protein, 10 aa, synthetic construct
NEDRGDISRT

SEQ ID NO: 110856 - protein, 10 aa, synthetic construct
NEERGDISRT

SEQ ID NO: 110857 - protein, 10 aa, synthetic construct
DGGRGDISRT

SEQ ID NO: 110858 - protein, 10 aa, synthetic construct
DGARGDISRT

SEQ ID NO: 110859 - protein, 10 aa, synthetic construct
DGVRGDISRT

SEQ ID NO: 110860 - protein, 10 aa, synthetic construct
DGPRGDISRT

SEQ ID NO: 110861 - protein, 10 aa, synthetic construct
DGLRGDISRT

SEQ ID NO: 110862 - protein, 10 aa, synthetic construct
DGIRGDISRT

SEQ ID NO: 110863 - protein, 10 aa, synthetic construct
DGMRGDISRT

SEQ ID NO: 110864 - protein, 10 aa, synthetic construct
DGWRGDISRT

SEQ ID NO: 110865 - protein, 10 aa, synthetic construct
DGFRGDISRT

SEQ ID NO: 110866 - protein, 10 aa, synthetic construct
DGKRGDISRT

SEQ ID NO: 110867 - protein, 10 aa, synthetic construct
DGRRGDISRT

SEQ ID NO: 110868 - protein, 10 aa, synthetic construct
DGHRGDISRT

SEQ ID NO: 110869 - protein, 10 aa, synthetic construct
DGSRGDISRT

SEQ ID NO: 110870 - protein, 10 aa, synthetic construct
DGTRGDISRT

SEQ ID NO: 110871 - protein, 10 aa, synthetic construct
DGYRGDISRT

SEQ ID NO: 110872 - protein, 10 aa, synthetic construct
DGNRGDISRT

SEQ ID NO: 110873 - protein, 10 aa, synthetic construct
DGQRGDISRT

SEQ ID NO: 110874 - protein, 10 aa, synthetic construct
DGDRGDISRT

SEQ ID NO: 110875 - protein, 10 aa, synthetic construct
DGERGDISRT

SEQ ID NO: 110876 - protein, 10 aa, synthetic construct
DAGRGDISRT

SEQ ID NO: 110877 - protein, 10 aa, synthetic construct
DAARGDISRT

SEQ ID NO: 110878 - protein, 10 aa, synthetic construct
DAVRGDISRT

SEQ ID NO: 110879 - protein, 10 aa, synthetic construct
DAPRGDISRT

SEQ ID NO: 110880 - protein, 10 aa, synthetic construct
DALRGDISRT

SEQ ID NO: 110881 - protein, 10 aa, synthetic construct
DAIRGDISRT

SEQ ID NO: 110882 - protein, 10 aa, synthetic construct
DAMRGDISRT

SEQ ID NO: 110883 - protein, 10 aa, synthetic construct
DAWRGDISRT

SEQ ID NO: 110884 - protein, 10 aa, synthetic construct
DAFRGDISRT

SEQ ID NO: 110885 - protein, 10 aa, synthetic construct
DAKRGDISRT

SEQ ID NO: 110886 - protein, 10 aa, synthetic construct
DARRGDISRT

SEQ ID NO: 110887 - protein, 10 aa, synthetic construct
DAHRGDISRT

SEQ ID NO: 110888 - protein, 10 aa, synthetic construct
DASRGDISRT

SEQ ID NO: 110889 - protein, 10 aa, synthetic construct
DATRGDISRT

SEQ ID NO: 110890 - protein, 10 aa, synthetic construct
DAYRGDISRT

SEQ ID NO: 110891 - protein, 10 aa, synthetic construct
DANRGDISRT

SEQ ID NO: 110892 - protein, 10 aa, synthetic construct
DAQRGDISRT

SEQ ID NO: 110893 - protein, 10 aa, synthetic construct
DADRGDISRT

SEQ ID NO: 110894 - protein, 10 aa, synthetic construct
DAERGDISRT

SEQ ID NO: 110895 - protein, 10 aa, synthetic construct
DVGRGDISRT

SEQ ID NO: 110896 - protein, 10 aa, synthetic construct
DVARGDISRT

SEQ ID NO: 110897 - protein, 10 aa, synthetic construct
DVVRGDISRT

SEQ ID NO: 110898 - protein, 10 aa, synthetic construct
DVPRGDISRT

SEQ ID NO: 110899 - protein, 10 aa, synthetic construct
DVLRGDISRT

SEQ ID NO: 110900 - protein, 10 aa, synthetic construct
DVIRGDISRT

SEQ ID NO: 110901 - protein, 10 aa, synthetic construct
DVMRGDISRT

SEQ ID NO: 110902 - protein, 10 aa, synthetic construct
DVWRGDISRT

SEQ ID NO: 110903 - protein, 10 aa, synthetic construct
DVFRGDISRT

SEQ ID NO: 110904 - protein, 10 aa, synthetic construct
DVKRGDISRT

SEQ ID NO: 110905 - protein, 10 aa, synthetic construct
DVRRGDISRT

SEQ ID NO: 110906 - protein, 10 aa, synthetic construct
DVHRGDISRT

SEQ ID NO: 110907 - protein, 10 aa, synthetic construct
DVSRGDISRT

SEQ ID NO: 110908 - protein, 10 aa, synthetic construct
DVTRGDISRT

SEQ ID NO: 110909 - protein, 10 aa, synthetic construct
DVYRGDISRT

SEQ ID NO: 110910 - protein, 10 aa, synthetic construct
DVNRGDISRT

SEQ ID NO: 110911 - protein, 10 aa, synthetic construct
DVQRGDISRT

SEQ ID NO: 110912 - protein, 10 aa, synthetic construct
DVDRGDISRT

SEQ ID NO: 110913 - protein, 10 aa, synthetic construct
DVERGDISRT

SEQ ID NO: 110914 - protein, 10 aa, synthetic construct
DPGRGDISRT

SEQ ID NO: 110915 - protein, 10 aa, synthetic construct
DPARGDISRT

SEQ ID NO: 110916 - protein, 10 aa, synthetic construct
DPVRGDISRT

SEQ ID NO: 110917 - protein, 10 aa, synthetic construct
DPPRGDISRT

SEQ ID NO: 110918 - protein, 10 aa, synthetic construct
DPLRGDISRT

SEQ ID NO: 110919 - protein, 10 aa, synthetic construct
DPIRGDISRT

SEQ ID NO: 110920 - protein, 10 aa, synthetic construct
DPMRGDISRT

SEQ ID NO: 110921 - protein, 10 aa, synthetic construct
DPWRGDISRT

SEQ ID NO: 110922 - protein, 10 aa, synthetic construct
DPFRGDISRT

SEQ ID NO: 110923 - protein, 10 aa, synthetic construct
DPKRGDISRT

SEQ ID NO: 110924 - protein, 10 aa, synthetic construct
DPRRGDISRT

SEQ ID NO: 110925 - protein, 10 aa, synthetic construct
DPHRGDISRT

SEQ ID NO: 110926 - protein, 10 aa, synthetic construct
DPSRGDISRT

SEQ ID NO: 110927 - protein, 10 aa, synthetic construct
DPTRGDISRT

SEQ ID NO: 110928 - protein, 10 aa, synthetic construct
DPYRGDISRT

SEQ ID NO: 110929 - protein, 10 aa, synthetic construct
DPNRGDISRT

SEQ ID NO: 110930 - protein, 10 aa, synthetic construct
DPQRGDISRT

SEQ ID NO: 110931 - protein, 10 aa, synthetic construct
DPDRGDISRT

SEQ ID NO: 110932 - protein, 10 aa, synthetic construct
DPERGDISRT

SEQ ID NO: 110933 - protein, 10 aa, synthetic construct
DLGRGDISRT

SEQ ID NO: 110934 - protein, 10 aa, synthetic construct
DLARGDISRT

SEQ ID NO: 110935 - protein, 10 aa, synthetic construct
DLVRGDISRT

SEQ ID NO: 110936 - protein, 10 aa, synthetic construct
DLPRGDISRT

SEQ ID NO: 110937 - protein, 10 aa, synthetic construct
DLLRGDISRT

SEQ ID NO: 110938 - protein, 10 aa, synthetic construct
DLIRGDISRT

SEQ ID NO: 110939 - protein, 10 aa, synthetic construct
DLMRGDISRT

SEQ ID NO: 110940 - protein, 10 aa, synthetic construct
DLWRGDISRT

SEQ ID NO: 110941 - protein, 10 aa, synthetic construct
DLFRGDISRT

SEQ ID NO: 110942 - protein, 10 aa, synthetic construct
DLKRGDISRT

SEQ ID NO: 110943 - protein, 10 aa, synthetic construct
DLRRGDISRT

SEQ ID NO: 110944 - protein, 10 aa, synthetic construct
DLHRGDISRT

SEQ ID NO: 110945 - protein, 10 aa, synthetic construct
DLSRGDISRT

SEQ ID NO: 110946 - protein, 10 aa, synthetic construct
DLTRGDISRT

SEQ ID NO: 110947 - protein, 10 aa, synthetic construct
DLYRGDISRT

SEQ ID NO: 110948 - protein, 10 aa, synthetic construct
DLNRGDISRT

SEQ ID NO: 110949 - protein, 10 aa, synthetic construct
DLQRGDISRT

SEQ ID NO: 110950 - protein, 10 aa, synthetic construct
DLDRGDISRT

SEQ ID NO: 110951 - protein, 10 aa, synthetic construct
DLERGDISRT

SEQ ID NO: 110952 - protein, 10 aa, synthetic construct
DIGRGDISRT

SEQ ID NO: 110953 - protein, 10 aa, synthetic construct
DIARGDISRT

SEQ ID NO: 110954 - protein, 10 aa, synthetic construct
DIVRGDISRT

SEQ ID NO: 110955 - protein, 10 aa, synthetic construct
DIPRGDISRT

SEQ ID NO: 110956 - protein, 10 aa, synthetic construct
DILRGDISRT

SEQ ID NO: 110957 - protein, 10 aa, synthetic construct
DIIRGDISRT

SEQ ID NO: 110958 - protein, 10 aa, synthetic construct
DIMRGDISRT

SEQ ID NO: 110959 - protein, 10 aa, synthetic construct
DIWRGDISRT

SEQ ID NO: 110960 - protein, 10 aa, synthetic construct
DIFRGDISRT

SEQ ID NO: 110961 - protein, 10 aa, synthetic construct
DIKRGDISRT

SEQ ID NO: 110962 - protein, 10 aa, synthetic construct
DIRRGDISRT

SEQ ID NO: 110963 - protein, 10 aa, synthetic construct
DIHRGDISRT

SEQ ID NO: 110964 - protein, 10 aa, synthetic construct
DISRGDISRT

SEQ ID NO: 110965 - protein, 10 aa, synthetic construct
DITRGDISRT

SEQ ID NO: 110966 - protein, 10 aa, synthetic construct
DIYRGDISRT

SEQ ID NO: 110967 - protein, 10 aa, synthetic construct
DINRGDISRT

SEQ ID NO: 110968 - protein, 10 aa, synthetic construct
DIQRGDISRT

SEQ ID NO: 110969 - protein, 10 aa, synthetic construct
DIDRGDISRT

SEQ ID NO: 110970 - protein, 10 aa, synthetic construct
DIERGDISRT

SEQ ID NO: 110971 - protein, 10 aa, synthetic construct
DMGRGDISRT

SEQ ID NO: 110972 - protein, 10 aa, synthetic construct
DMARGDISRT

SEQ ID NO: 110973 - protein, 10 aa, synthetic construct
DMVRGDISRT

SEQ ID NO: 110974 - protein, 10 aa, synthetic construct
DMPRGDISRT

SEQ ID NO: 110975 - protein, 10 aa, synthetic construct
DMLRGDISRT

SEQ ID NO: 110976 - protein, 10 aa, synthetic construct
DMIRGDISRT

SEQ ID NO: 110977 - protein, 10 aa, synthetic construct
DMMRGDISRT

SEQ ID NO: 110978 - protein, 10 aa, synthetic construct
DMWRGDISRT

SEQ ID NO: 110979 - protein, 10 aa, synthetic construct
DMFRGDISRT

SEQ ID NO: 110980 - protein, 10 aa, synthetic construct
DMKRGDISRT

SEQ ID NO: 110981 - protein, 10 aa, synthetic construct
DMRRGDISRT

SEQ ID NO: 110982 - protein, 10 aa, synthetic construct
DMHRGDISRT

SEQ ID NO: 110983 - protein, 10 aa, synthetic construct
DMSRGDISRT

SEQ ID NO: 110984 - protein, 10 aa, synthetic construct
DMTRGDISRT

SEQ ID NO: 110985 - protein, 10 aa, synthetic construct
DMYRGDISRT

SEQ ID NO: 110986 - protein, 10 aa, synthetic construct
DMNRGDISRT

SEQ ID NO: 110987 - protein, 10 aa, synthetic construct
DMQRGDISRT

SEQ ID NO: 110988 - protein, 10 aa, synthetic construct
DMDRGDISRT

SEQ ID NO: 110989 - protein, 10 aa, synthetic construct
DMERGDISRT

SEQ ID NO: 110990 - protein, 10 aa, synthetic construct
DWGRGDISRT

SEQ ID NO: 110991 - protein, 10 aa, synthetic construct
DWARGDISRT

SEQ ID NO: 110992 - protein, 10 aa, synthetic construct
DWVRGDISRT

SEQ ID NO: 110993 - protein, 10 aa, synthetic construct
DWPRGDISRT

SEQ ID NO: 110994 - protein, 10 aa, synthetic construct
DWLRGDISRT

SEQ ID NO: 110995 - protein, 10 aa, synthetic construct
DWIRGDISRT

SEQ ID NO: 110996 - protein, 10 aa, synthetic construct
DWMRGDISRT

SEQ ID NO: 110997 - protein, 10 aa, synthetic construct
DWWRGDISRT

SEQ ID NO: 110998 - protein, 10 aa, synthetic construct
DWFRGDISRT

SEQ ID NO: 110999 - protein, 10 aa, synthetic construct
DWKRGDISRT

SEQ ID NO: 111000 - protein, 10 aa, synthetic construct
DWRRGDISRT

SEQ ID NO: 111001 - protein, 10 aa, synthetic construct
DWHRGDISRT

SEQ ID NO: 111002 - protein, 10 aa, synthetic construct
DWSRGDISRT

SEQ ID NO: 111003 - protein, 10 aa, synthetic construct
DWTRGDISRT

SEQ ID NO: 111004 - protein, 10 aa, synthetic construct
DWYRGDISRT

SEQ ID NO: 111005 - protein, 10 aa, synthetic construct
DWNRGDISRT

SEQ ID NO: 111006 - protein, 10 aa, synthetic construct
DWQRGDISRT

SEQ ID NO: 111007 - protein, 10 aa, synthetic construct
DWDRGDISRT

SEQ ID NO: 111008 - protein, 10 aa, synthetic construct
DWERGDISRT

SEQ ID NO: 111009 - protein, 10 aa, synthetic construct
DFGRGDISRT

SEQ ID NO: 111010 - protein, 10 aa, synthetic construct
DFARGDISRT

SEQ ID NO: 111011 - protein, 10 aa, synthetic construct
DFVRGDISRT

SEQ ID NO: 111012 - protein, 10 aa, synthetic construct
DFPRGDISRT

SEQ ID NO: 111013 - protein, 10 aa, synthetic construct
DFLRGDISRT

SEQ ID NO: 111014 - protein, 10 aa, synthetic construct
DFIRGDISRT

SEQ ID NO: 111015 - protein, 10 aa, synthetic construct
DFMRGDISRT

SEQ ID NO: 111016 - protein, 10 aa, synthetic construct
DFWRGDISRT

SEQ ID NO: 111017 - protein, 10 aa, synthetic construct
DFFRGDISRT

SEQ ID NO: 111018 - protein, 10 aa, synthetic construct
DFKRGDISRT

SEQ ID NO: 111019 - protein, 10 aa, synthetic construct
DFRRGDISRT

SEQ ID NO: 111020 - protein, 10 aa, synthetic construct
DFHRGDISRT

SEQ ID NO: 111021 - protein, 10 aa, synthetic construct
DFSRGDISRT

SEQ ID NO: 111022 - protein, 10 aa, synthetic construct
DFTRGDISRT

SEQ ID NO: 111023 - protein, 10 aa, synthetic construct
DFYRGDISRT

SEQ ID NO: 111024 - protein, 10 aa, synthetic construct
DFNRGDISRT

SEQ ID NO: 111025 - protein, 10 aa, synthetic construct
DFQRGDISRT

SEQ ID NO: 111026 - protein, 10 aa, synthetic construct
DFDRGDISRT

SEQ ID NO: 111027 - protein, 10 aa, synthetic construct
DFERGDISRT

SEQ ID NO: 111028 - protein, 10 aa, synthetic construct
DKGRGDISRT

SEQ ID NO: 111029 - protein, 10 aa, synthetic construct
DKARGDISRT

SEQ ID NO: 111030 - protein, 10 aa, synthetic construct
DKVRGDISRT

SEQ ID NO: 111031 - protein, 10 aa, synthetic construct
DKPRGDISRT

SEQ ID NO: 111032 - protein, 10 aa, synthetic construct
DKLRGDISRT

SEQ ID NO: 111033 - protein, 10 aa, synthetic construct
DKIRGDISRT

SEQ ID NO: 111034 - protein, 10 aa, synthetic construct
DKMRGDISRT

SEQ ID NO: 111035 - protein, 10 aa, synthetic construct
DKWRGDISRT

SEQ ID NO: 111036 - protein, 10 aa, synthetic construct
DKFRGDISRT

SEQ ID NO: 111037 - protein, 10 aa, synthetic construct
DKKRGDISRT

SEQ ID NO: 111038 - protein, 10 aa, synthetic construct
DKRRGDISRT

SEQ ID NO: 111039 - protein, 10 aa, synthetic construct
DKHRGDISRT

SEQ ID NO: 111040 - protein, 10 aa, synthetic construct
DKSRGDISRT

SEQ ID NO: 111041 - protein, 10 aa, synthetic construct
DKTRGDISRT

SEQ ID NO: 111042 - protein, 10 aa, synthetic construct
DKYRGDISRT

SEQ ID NO: 111043 - protein, 10 aa, synthetic construct
DKNRGDISRT

SEQ ID NO: 111044 - protein, 10 aa, synthetic construct
DKQRGDISRT

SEQ ID NO: 111045 - protein, 10 aa, synthetic construct
DKDRGDISRT

SEQ ID NO: 111046 - protein, 10 aa, synthetic construct
DKERGDISRT

SEQ ID NO: 111047 - protein, 10 aa, synthetic construct
DRGRGDISRT

SEQ ID NO: 111048 - protein, 10 aa, synthetic construct
DRARGDISRT

SEQ ID NO: 111049 - protein, 10 aa, synthetic construct
DRVRGDISRT

SEQ ID NO: 111050 - protein, 10 aa, synthetic construct
DRPRGDISRT

SEQ ID NO: 111051 - protein, 10 aa, synthetic construct
DRLRGDISRT

SEQ ID NO: 111052 - protein, 10 aa, synthetic construct
DRIRGDISRT

SEQ ID NO: 111053 - protein, 10 aa, synthetic construct
DRMRGDISRT

SEQ ID NO: 111054 - protein, 10 aa, synthetic construct
DRWRGDISRT

SEQ ID NO: 111055 - protein, 10 aa, synthetic construct
DRFRGDISRT

SEQ ID NO: 111056 - protein, 10 aa, synthetic construct
DRKRGDISRT

SEQ ID NO: 111057 - protein, 10 aa, synthetic construct
DRRRGDISRT

SEQ ID NO: 111058 - protein, 10 aa, synthetic construct
DRHRGDISRT

SEQ ID NO: 111059 - protein, 10 aa, synthetic construct
DRSRGDISRT

SEQ ID NO: 111060 - protein, 10 aa, synthetic construct
DRTRGDISRT

SEQ ID NO: 111061 - protein, 10 aa, synthetic construct
DRYRGDISRT

SEQ ID NO: 111062 - protein, 10 aa, synthetic construct
DRNRGDISRT

SEQ ID NO: 111063 - protein, 10 aa, synthetic construct
DRQRGDISRT

SEQ ID NO: 111064 - protein, 10 aa, synthetic construct
DRDRGDISRT

SEQ ID NO: 111065 - protein, 10 aa, synthetic construct
DRERGDISRT

SEQ ID NO: 111066 - protein, 10 aa, synthetic construct
DHGRGDISRT

SEQ ID NO: 111067 - protein, 10 aa, synthetic construct
DHARGDISRT

SEQ ID NO: 111068 - protein, 10 aa, synthetic construct
DHVRGDISRT

SEQ ID NO: 111069 - protein, 10 aa, synthetic construct
DHPRGDISRT

SEQ ID NO: 111070 - protein, 10 aa, synthetic construct
DHLRGDISRT

SEQ ID NO: 111071 - protein, 10 aa, synthetic construct
DHIRGDISRT

SEQ ID NO: 111072 - protein, 10 aa, synthetic construct
DHMRGDISRT

SEQ ID NO: 111073 - protein, 10 aa, synthetic construct
DHWRGDISRT

SEQ ID NO: 111074 - protein, 10 aa, synthetic construct
DHFRGDISRT

SEQ ID NO: 111075 - protein, 10 aa, synthetic construct
DHKRGDISRT

SEQ ID NO: 111076 - protein, 10 aa, synthetic construct
DHRRGDISRT

SEQ ID NO: 111077 - protein, 10 aa, synthetic construct
DHHRGDISRT

SEQ ID NO: 111078 - protein, 10 aa, synthetic construct
DHSRGDISRT

SEQ ID NO: 111079 - protein, 10 aa, synthetic construct
DHTRGDISRT

SEQ ID NO: 111080 - protein, 10 aa, synthetic construct
DHYRGDISRT

SEQ ID NO: 111081 - protein, 10 aa, synthetic construct
DHNRGDISRT

SEQ ID NO: 111082 - protein, 10 aa, synthetic construct
DHQRGDISRT

SEQ ID NO: 111083 - protein, 10 aa, synthetic construct
DHDRGDISRT

SEQ ID NO: 111084 - protein, 10 aa, synthetic construct
DHERGDISRT

SEQ ID NO: 111085 - protein, 10 aa, synthetic construct
DSGRGDISRT

SEQ ID NO: 111086 - protein, 10 aa, synthetic construct
DSARGDISRT

SEQ ID NO: 111087 - protein, 10 aa, synthetic construct
DSVRGDISRT

SEQ ID NO: 111088 - protein, 10 aa, synthetic construct
DSPRGDISRT

SEQ ID NO: 111089 - protein, 10 aa, synthetic construct
DSLRGDISRT

SEQ ID NO: 111090 - protein, 10 aa, synthetic construct
DSIRGDISRT

SEQ ID NO: 111091 - protein, 10 aa, synthetic construct
DSMRGDISRT

SEQ ID NO: 111092 - protein, 10 aa, synthetic construct
DSWRGDISRT

SEQ ID NO: 111093 - protein, 10 aa, synthetic construct
DSFRGDISRT

SEQ ID NO: 111094 - protein, 10 aa, synthetic construct
DSKRGDISRT

SEQ ID NO: 111095 - protein, 10 aa, synthetic construct
DSRRGDISRT

SEQ ID NO: 111096 - protein, 10 aa, synthetic construct
DSHRGDISRT

SEQ ID NO: 111097 - protein, 10 aa, synthetic construct
DSSRGDISRT

SEQ ID NO: 111098 - protein, 10 aa, synthetic construct
DSTRGDISRT

SEQ ID NO: 111099 - protein, 10 aa, synthetic construct
DSYRGDISRT

SEQ ID NO: 111100 - protein, 10 aa, synthetic construct
DSNRGDISRT

SEQ ID NO: 111101 - protein, 10 aa, synthetic construct
DSQRGDISRT

SEQ ID NO: 111102 - protein, 10 aa, synthetic construct
DSDRGDISRT

SEQ ID NO: 111103 - protein, 10 aa, synthetic construct
DSERGDISRT

SEQ ID NO: 111104 - protein, 10 aa, synthetic construct
DTGRGDISRT

SEQ ID NO: 111105 - protein, 10 aa, synthetic construct
DTARGDISRT

SEQ ID NO: 111106 - protein, 10 aa, synthetic construct
DTVRGDISRT

SEQ ID NO: 111107 - protein, 10 aa, synthetic construct
DTPRGDISRT

SEQ ID NO: 111108 - protein, 10 aa, synthetic construct
DTLRGDISRT

SEQ ID NO: 111109 - protein, 10 aa, synthetic construct
DTIRGDISRT

SEQ ID NO: 111110 - protein, 10 aa, synthetic construct
DTMRGDISRT

SEQ ID NO: 111111 - protein, 10 aa, synthetic construct
DTWRGDISRT

SEQ ID NO: 111112 - protein, 10 aa, synthetic construct
DTFRGDISRT

SEQ ID NO: 111113 - protein, 10 aa, synthetic construct
DTKRGDISRT

SEQ ID NO: 111114 - protein, 10 aa, synthetic construct
DTRRGDISRT

SEQ ID NO: 111115 - protein, 10 aa, synthetic construct
DTHRGDISRT

SEQ ID NO: 111116 - protein, 10 aa, synthetic construct
DTSRGDISRT

SEQ ID NO: 111117 - protein, 10 aa, synthetic construct
DTTRGDISRT

SEQ ID NO: 111118 - protein, 10 aa, synthetic construct
DTYRGDISRT

SEQ ID NO: 111119 - protein, 10 aa, synthetic construct
DTNRGDISRT

SEQ ID NO: 111120 - protein, 10 aa, synthetic construct
DTQRGDISRT

SEQ ID NO: 111121 - protein, 10 aa, synthetic construct
DTDRGDISRT

SEQ ID NO: 111122 - protein, 10 aa, synthetic construct
DTERGDISRT

SEQ ID NO: 111123 - protein, 10 aa, synthetic construct
DYGRGDISRT

SEQ ID NO: 111124 - protein, 10 aa, synthetic construct
DYARGDISRT

SEQ ID NO: 111125 - protein, 10 aa, synthetic construct
DYVRGDISRT

SEQ ID NO: 111126 - protein, 10 aa, synthetic construct
DYPRGDISRT

SEQ ID NO: 111127 - protein, 10 aa, synthetic construct
DYLRGDISRT

SEQ ID NO: 111128 - protein, 10 aa, synthetic construct
DYIRGDISRT

SEQ ID NO: 111129 - protein, 10 aa, synthetic construct
DYMRGDISRT

SEQ ID NO: 111130 - protein, 10 aa, synthetic construct
DYWRGDISRT

SEQ ID NO: 111131 - protein, 10 aa, synthetic construct
DYFRGDISRT

SEQ ID NO: 111132 - protein, 10 aa, synthetic construct
DYKRGDISRT

SEQ ID NO: 111133 - protein, 10 aa, synthetic construct
DYRRGDISRT

SEQ ID NO: 111134 - protein, 10 aa, synthetic construct
DYHRGDISRT

SEQ ID NO: 111135 - protein, 10 aa, synthetic construct
DYSRGDISRT

SEQ ID NO: 111136 - protein, 10 aa, synthetic construct
DYTRGDISRT

SEQ ID NO: 111137 - protein, 10 aa, synthetic construct
DYYRGDISRT

SEQ ID NO: 111138 - protein, 10 aa, synthetic construct
DYNRGDISRT

SEQ ID NO: 111139 - protein, 10 aa, synthetic construct
DYQRGDISRT

SEQ ID NO: 111140 - protein, 10 aa, synthetic construct
DYDRGDISRT

SEQ ID NO: 111141 - protein, 10 aa, synthetic construct
DYERGDISRT

SEQ ID NO: 111142 - protein, 10 aa, synthetic construct
DNGRGDISRT

SEQ ID NO: 111143 - protein, 10 aa, synthetic construct
DNARGDISRT

SEQ ID NO: 111144 - protein, 10 aa, synthetic construct
DNVRGDISRT

SEQ ID NO: 111145 - protein, 10 aa, synthetic construct
DNPRGDISRT

SEQ ID NO: 111146 - protein, 10 aa, synthetic construct
DNLRGDISRT

SEQ ID NO: 111147 - protein, 10 aa, synthetic construct
DNIRGDISRT

SEQ ID NO: 111148 - protein, 10 aa, synthetic construct
DNMRGDISRT

SEQ ID NO: 111149 - protein, 10 aa, synthetic construct
DNWRGDISRT

SEQ ID NO: 111150 - protein, 10 aa, synthetic construct
DNFRGDISRT

SEQ ID NO: 111151 - protein, 10 aa, synthetic construct
DNKRGDISRT

SEQ ID NO: 111152 - protein, 10 aa, synthetic construct
DNRRGDISRT

SEQ ID NO: 111153 - protein, 10 aa, synthetic construct
DNHRGDISRT

SEQ ID NO: 111154 - protein, 10 aa, synthetic construct
DNSRGDISRT

SEQ ID NO: 111155 - protein, 10 aa, synthetic construct
DNTRGDISRT

SEQ ID NO: 111156 - protein, 10 aa, synthetic construct
DNYRGDISRT

SEQ ID NO: 111157 - protein, 10 aa, synthetic construct
DNNRGDISRT

SEQ ID NO: 111158 - protein, 10 aa, synthetic construct
DNQRGDISRT

SEQ ID NO: 111159 - protein, 10 aa, synthetic construct
DNDRGDISRT

SEQ ID NO: 111160 - protein, 10 aa, synthetic construct
DNERGDISRT

SEQ ID NO: 111161 - protein, 10 aa, synthetic construct
DQGRGDISRT

SEQ ID NO: 111162 - protein, 10 aa, synthetic construct
DQARGDISRT

SEQ ID NO: 111163 - protein, 10 aa, synthetic construct
DQVRGDISRT

SEQ ID NO: 111164 - protein, 10 aa, synthetic construct
DQPRGDISRT

SEQ ID NO: 111165 - protein, 10 aa, synthetic construct
DQLRGDISRT

SEQ ID NO: 111166 - protein, 10 aa, synthetic construct
DQIRGDISRT

SEQ ID NO: 111167 - protein, 10 aa, synthetic construct
DQMRGDISRT

SEQ ID NO: 111168 - protein, 10 aa, synthetic construct
DQWRGDISRT

SEQ ID NO: 111169 - protein, 10 aa, synthetic construct
DQFRGDISRT

SEQ ID NO: 111170 - protein, 10 aa, synthetic construct
DQKRGDISRT

SEQ ID NO: 111171 - protein, 10 aa, synthetic construct
DQRRGDISRT

SEQ ID NO: 111172 - protein, 10 aa, synthetic construct
DQHRGDISRT

SEQ ID NO: 111173 - protein, 10 aa, synthetic construct
DQSRGDISRT

SEQ ID NO: 111174 - protein, 10 aa, synthetic construct
DQTRGDISRT

SEQ ID NO: 111175 - protein, 10 aa, synthetic construct
DQYRGDISRT

SEQ ID NO: 111176 - protein, 10 aa, synthetic construct
DQNRGDISRT

SEQ ID NO: 111177 - protein, 10 aa, synthetic construct
DQQRGDISRT

SEQ ID NO: 111178 - protein, 10 aa, synthetic construct
DQDRGDISRT

SEQ ID NO: 111179 - protein, 10 aa, synthetic construct
DQERGDISRT

SEQ ID NO: 111180 - protein, 10 aa, synthetic construct
DDGRGDISRT

SEQ ID NO: 111181 - protein, 10 aa, synthetic construct
DDARGDISRT

SEQ ID NO: 111182 - protein, 10 aa, synthetic construct
DDVRGDISRT

SEQ ID NO: 111183 - protein, 10 aa, synthetic construct
DDPRGDISRT

SEQ ID NO: 111184 - protein, 10 aa, synthetic construct
DDLRGDISRT

SEQ ID NO: 111185 - protein, 10 aa, synthetic construct
DDIRGDISRT

SEQ ID NO: 111186 - protein, 10 aa, synthetic construct
DDMRGDISRT

SEQ ID NO: 111187 - protein, 10 aa, synthetic construct
DDWRGDISRT

SEQ ID NO: 111188 - protein, 10 aa, synthetic construct
DDFRGDISRT

SEQ ID NO: 111189 - protein, 10 aa, synthetic construct
DDKRGDISRT

SEQ ID NO: 111190 - protein, 10 aa, synthetic construct
DDRRGDISRT

SEQ ID NO: 111191 - protein, 10 aa, synthetic construct
DDHRGDISRT

SEQ ID NO: 111192 - protein, 10 aa, synthetic construct
DDSRGDISRT

SEQ ID NO: 111193 - protein, 10 aa, synthetic construct
DDTRGDISRT

SEQ ID NO: 111194 - protein, 10 aa, synthetic construct
DDYRGDISRT

SEQ ID NO: 111195 - protein, 10 aa, synthetic construct
DDNRGDISRT

SEQ ID NO: 111196 - protein, 10 aa, synthetic construct
DDQRGDISRT

SEQ ID NO: 111197 - protein, 10 aa, synthetic construct
DDDRGDISRT

SEQ ID NO: 111198 - protein, 10 aa, synthetic construct
DDERGDISRT

SEQ ID NO: 111199 - protein, 10 aa, synthetic construct
DEGRGDISRT

SEQ ID NO: 111200 - protein, 10 aa, synthetic construct
DEARGDISRT

SEQ ID NO: 111201 - protein, 10 aa, synthetic construct
DEVRGDISRT

SEQ ID NO: 111202 - protein, 10 aa, synthetic construct
DEPRGDISRT

SEQ ID NO: 111203 - protein, 10 aa, synthetic construct
DELRGDISRT

SEQ ID NO: 111204 - protein, 10 aa, synthetic construct
DEIRGDISRT

SEQ ID NO: 111205 - protein, 10 aa, synthetic construct
DEMRGDISRT

SEQ ID NO: 111206 - protein, 10 aa, synthetic construct
DEWRGDISRT

SEQ ID NO: 111207 - protein, 10 aa, synthetic construct
DEFRGDISRT

SEQ ID NO: 111208 - protein, 10 aa, synthetic construct
DEKRGDISRT

SEQ ID NO: 111209 - protein, 10 aa, synthetic construct
DERRGDISRT

SEQ ID NO: 111210 - protein, 10 aa, synthetic construct
DEHRGDISRT

SEQ ID NO: 111211 - protein, 10 aa, synthetic construct
DESRGDISRT

SEQ ID NO: 111212 - protein, 10 aa, synthetic construct
DETRGDISRT

SEQ ID NO: 111213 - protein, 10 aa, synthetic construct
DEYRGDISRT

SEQ ID NO: 111214 - protein, 10 aa, synthetic construct
DENRGDISRT

SEQ ID NO: 111215 - protein, 10 aa, synthetic construct
DEQRGDISRT

SEQ ID NO: 111216 - protein, 10 aa, synthetic construct
DEDRGDISRT

SEQ ID NO: 111217 - protein, 10 aa, synthetic construct
DEERGDISRT

SEQ ID NO: 111218 - protein, 10 aa, synthetic construct
QGGRGDISRT

SEQ ID NO: 111219 - protein, 10 aa, synthetic construct
QGARGDISRT

SEQ ID NO: 111220 - protein, 10 aa, synthetic construct
QGVRGDISRT

SEQ ID NO: 111221 - protein, 10 aa, synthetic construct
QGPRGDISRT

SEQ ID NO: 111222 - protein, 10 aa, synthetic construct
QGLRGDISRT

SEQ ID NO: 111223 - protein, 10 aa, synthetic construct
QGIRGDISRT

SEQ ID NO: 111224 - protein, 10 aa, synthetic construct
QGMRGDISRT

SEQ ID NO: 111225 - protein, 10 aa, synthetic construct
QGWRGDISRT

SEQ ID NO: 111226 - protein, 10 aa, synthetic construct
QGFRGDISRT

SEQ ID NO: 111227 - protein, 10 aa, synthetic construct
QGKRGDISRT

SEQ ID NO: 111228 - protein, 10 aa, synthetic construct
QGRRGDISRT

SEQ ID NO: 111229 - protein, 10 aa, synthetic construct
QGHRGDISRT

SEQ ID NO: 111230 - protein, 10 aa, synthetic construct
QGSRGDISRT

SEQ ID NO: 111231 - protein, 10 aa, synthetic construct
QGTRGDISRT

SEQ ID NO: 111232 - protein, 10 aa, synthetic construct
QGYRGDISRT

SEQ ID NO: 111233 - protein, 10 aa, synthetic construct
QGNRGDISRT

SEQ ID NO: 111234 - protein, 10 aa, synthetic construct
QGQRGDISRT

SEQ ID NO: 111235 - protein, 10 aa, synthetic construct
QGDRGDISRT

SEQ ID NO: 111236 - protein, 10 aa, synthetic construct
QGERGDISRT

SEQ ID NO: 111237 - protein, 10 aa, synthetic construct
QAGRGDISRT

SEQ ID NO: 111238 - protein, 10 aa, synthetic construct
QAARGDISRT

SEQ ID NO: 111239 - protein, 10 aa, synthetic construct
QAVRGDISRT

SEQ ID NO: 111240 - protein, 10 aa, synthetic construct
QAPRGDISRT

SEQ ID NO: 111241 - protein, 10 aa, synthetic construct
QALRGDISRT

SEQ ID NO: 111242 - protein, 10 aa, synthetic construct
QAIRGDISRT

SEQ ID NO: 111243 - protein, 10 aa, synthetic construct
QAMRGDISRT

SEQ ID NO: 111244 - protein, 10 aa, synthetic construct
QAWRGDISRT

SEQ ID NO: 111245 - protein, 10 aa, synthetic construct
QAFRGDISRT

SEQ ID NO: 111246 - protein, 10 aa, synthetic construct
QAKRGDISRT

SEQ ID NO: 111247 - protein, 10 aa, synthetic construct
QARRGDISRT

SEQ ID NO: 111248 - protein, 10 aa, synthetic construct
QAHRGDISRT

SEQ ID NO: 111249 - protein, 10 aa, synthetic construct
QASRGDISRT

SEQ ID NO: 111250 - protein, 10 aa, synthetic construct
QATRGDISRT

SEQ ID NO: 111251 - protein, 10 aa, synthetic construct
QAYRGDISRT

SEQ ID NO: 111252 - protein, 10 aa, synthetic construct
QANRGDISRT

SEQ ID NO: 111253 - protein, 10 aa, synthetic construct
QAQRGDISRT

SEQ ID NO: 111254 - protein, 10 aa, synthetic construct
QADRGDISRT

SEQ ID NO: 111255 - protein, 10 aa, synthetic construct
QAERGDISRT

SEQ ID NO: 111256 - protein, 10 aa, synthetic construct
QVGRGDISRT

SEQ ID NO: 111257 - protein, 10 aa, synthetic construct
QVARGDISRT

SEQ ID NO: 111258 - protein, 10 aa, synthetic construct
QVVRGDISRT

SEQ ID NO: 111259 - protein, 10 aa, synthetic construct
QVPRGDISRT

SEQ ID NO: 111260 - protein, 10 aa, synthetic construct
QVLRGDISRT

SEQ ID NO: 111261 - protein, 10 aa, synthetic construct
QVIRGDISRT

SEQ ID NO: 111262 - protein, 10 aa, synthetic construct
QVMRGDISRT

SEQ ID NO: 111263 - protein, 10 aa, synthetic construct
QVWRGDISRT

SEQ ID NO: 111264 - protein, 10 aa, synthetic construct
QVFRGDISRT

SEQ ID NO: 111265 - protein, 10 aa, synthetic construct
QVKRGDISRT

SEQ ID NO: 111266 - protein, 10 aa, synthetic construct
QVRRGDISRT

SEQ ID NO: 111267 - protein, 10 aa, synthetic construct
QVHRGDISRT

SEQ ID NO: 111268 - protein, 10 aa, synthetic construct
QVSRGDISRT

SEQ ID NO: 111269 - protein, 10 aa, synthetic construct
QVTRGDISRT

SEQ ID NO: 111270 - protein, 10 aa, synthetic construct
QVYRGDISRT

SEQ ID NO: 111271 - protein, 10 aa, synthetic construct
QVNRGDISRT

SEQ ID NO: 111272 - protein, 10 aa, synthetic construct
QVQRGDISRT

SEQ ID NO: 111273 - protein, 10 aa, synthetic construct
QVDRGDISRT

SEQ ID NO: 111274 - protein, 10 aa, synthetic construct
QVERGDISRT

SEQ ID NO: 111275 - protein, 10 aa, synthetic construct
QPGRGDISRT

SEQ ID NO: 111276 - protein, 10 aa, synthetic construct
QPARGDISRT

SEQ ID NO: 111277 - protein, 10 aa, synthetic construct
QPVRGDISRT

SEQ ID NO: 111278 - protein, 10 aa, synthetic construct
QPPRGDISRT

SEQ ID NO: 111279 - protein, 10 aa, synthetic construct
QPLRGDISRT

SEQ ID NO: 111280 - protein, 10 aa, synthetic construct
QPIRGDISRT

SEQ ID NO: 111281 - protein, 10 aa, synthetic construct
QPMRGDISRT

SEQ ID NO: 111282 - protein, 10 aa, synthetic construct
QPWRGDISRT

SEQ ID NO: 111283 - protein, 10 aa, synthetic construct
QPFRGDISRT

SEQ ID NO: 111284 - protein, 10 aa, synthetic construct
QPKRGDISRT

SEQ ID NO: 111285 - protein, 10 aa, synthetic construct
QPRRGDISRT

SEQ ID NO: 111286 - protein, 10 aa, synthetic construct
QPHRGDISRT

SEQ ID NO: 111287 - protein, 10 aa, synthetic construct
QPSRGDISRT

SEQ ID NO: 111288 - protein, 10 aa, synthetic construct
QPTRGDISRT

SEQ ID NO: 111289 - protein, 10 aa, synthetic construct
QPYRGDISRT

SEQ ID NO: 111290 - protein, 10 aa, synthetic construct
QPNRGDISRT

SEQ ID NO: 111291 - protein, 10 aa, synthetic construct
QPQRGDISRT

SEQ ID NO: 111292 - protein, 10 aa, synthetic construct
QPDRGDISRT

SEQ ID NO: 111293 - protein, 10 aa, synthetic construct
QPERGDISRT

SEQ ID NO: 111294 - protein, 10 aa, synthetic construct
QLGRGDISRT

SEQ ID NO: 111295 - protein, 10 aa, synthetic construct
QLARGDISRT

SEQ ID NO: 111296 - protein, 10 aa, synthetic construct
QLVRGDISRT

SEQ ID NO: 111297 - protein, 10 aa, synthetic construct
QLPRGDISRT

SEQ ID NO: 111298 - protein, 10 aa, synthetic construct
QLLRGDISRT

SEQ ID NO: 111299 - protein, 10 aa, synthetic construct
QLIRGDISRT

SEQ ID NO: 111300 - protein, 10 aa, synthetic construct
QLMRGDISRT

SEQ ID NO: 111301 - protein, 10 aa, synthetic construct
QLWRGDISRT

SEQ ID NO: 111302 - protein, 10 aa, synthetic construct
QLFRGDISRT

SEQ ID NO: 111303 - protein, 10 aa, synthetic construct
QLKRGDISRT

SEQ ID NO: 111304 - protein, 10 aa, synthetic construct
QLRRGDISRT

SEQ ID NO: 111305 - protein, 10 aa, synthetic construct
QLHRGDISRT

SEQ ID NO: 111306 - protein, 10 aa, synthetic construct
QLSRGDISRT

SEQ ID NO: 111307 - protein, 10 aa, synthetic construct
QLTRGDISRT

SEQ ID NO: 111308 - protein, 10 aa, synthetic construct
QLYRGDISRT

SEQ ID NO: 111309 - protein, 10 aa, synthetic construct
QLNRGDISRT

SEQ ID NO: 111310 - protein, 10 aa, synthetic construct
QLQRGDISRT

SEQ ID NO: 111311 - protein, 10 aa, synthetic construct
QLDRGDISRT

SEQ ID NO: 111312 - protein, 10 aa, synthetic construct
QLERGDISRT

SEQ ID NO: 111313 - protein, 10 aa, synthetic construct
QIGRGDISRT

SEQ ID NO: 111314 - protein, 10 aa, synthetic construct
QIARGDISRT

SEQ ID NO: 111315 - protein, 10 aa, synthetic construct
QIVRGDISRT

SEQ ID NO: 111316 - protein, 10 aa, synthetic construct
QIPRGDISRT

SEQ ID NO: 111317 - protein, 10 aa, synthetic construct
QILRGDISRT

SEQ ID NO: 111318 - protein, 10 aa, synthetic construct
QIIRGDISRT

SEQ ID NO: 111319 - protein, 10 aa, synthetic construct
QIMRGDISRT

SEQ ID NO: 111320 - protein, 10 aa, synthetic construct
QIWRGDISRT

SEQ ID NO: 111321 - protein, 10 aa, synthetic construct
QIFRGDISRT

SEQ ID NO: 111322 - protein, 10 aa, synthetic construct
QIKRGDISRT

SEQ ID NO: 111323 - protein, 10 aa, synthetic construct
QIRRGDISRT

SEQ ID NO: 111324 - protein, 10 aa, synthetic construct
QIHRGDISRT

SEQ ID NO: 111325 - protein, 10 aa, synthetic construct
QISRGDISRT

SEQ ID NO: 111326 - protein, 10 aa, synthetic construct
QITRGDISRT

SEQ ID NO: 111327 - protein, 10 aa, synthetic construct
QIYRGDISRT

SEQ ID NO: 111328 - protein, 10 aa, synthetic construct
QINRGDISRT

SEQ ID NO: 111329 - protein, 10 aa, synthetic construct
QIQRGDISRT

SEQ ID NO: 111330 - protein, 10 aa, synthetic construct
QIDRGDISRT

SEQ ID NO: 111331 - protein, 10 aa, synthetic construct
QIERGDISRT

SEQ ID NO: 111332 - protein, 10 aa, synthetic construct
QMGRGDISRT

SEQ ID NO: 111333 - protein, 10 aa, synthetic construct
QMARGDISRT

SEQ ID NO: 111334 - protein, 10 aa, synthetic construct
QMVRGDISRT

SEQ ID NO: 111335 - protein, 10 aa, synthetic construct
QMPRGDISRT

SEQ ID NO: 111336 - protein, 10 aa, synthetic construct
QMLRGDISRT

SEQ ID NO: 111337 - protein, 10 aa, synthetic construct
QMIRGDISRT

SEQ ID NO: 111338 - protein, 10 aa, synthetic construct
QMMRGDISRT

SEQ ID NO: 111339 - protein, 10 aa, synthetic construct
QMWRGDISRT

SEQ ID NO: 111340 - protein, 10 aa, synthetic construct
QMFRGDISRT

SEQ ID NO: 111341 - protein, 10 aa, synthetic construct
QMKRGDISRT

SEQ ID NO: 111342 - protein, 10 aa, synthetic construct
QMRRGDISRT

SEQ ID NO: 111343 - protein, 10 aa, synthetic construct
QMHRGDISRT

SEQ ID NO: 111344 - protein, 10 aa, synthetic construct
QMSRGDISRT

SEQ ID NO: 111345 - protein, 10 aa, synthetic construct
QMTRGDISRT

SEQ ID NO: 111346 - protein, 10 aa, synthetic construct
QMYRGDISRT

SEQ ID NO: 111347 - protein, 10 aa, synthetic construct
QMNRGDISRT

SEQ ID NO: 111348 - protein, 10 aa, synthetic construct
QMQRGDISRT

SEQ ID NO: 111349 - protein, 10 aa, synthetic construct
QMDRGDISRT

SEQ ID NO: 111350 - protein, 10 aa, synthetic construct
QMERGDISRT

SEQ ID NO: 111351 - protein, 10 aa, synthetic construct
QWGRGDISRT

SEQ ID NO: 111352 - protein, 10 aa, synthetic construct
QWARGDISRT

SEQ ID NO: 111353 - protein, 10 aa, synthetic construct
QWVRGDISRT

SEQ ID NO: 111354 - protein, 10 aa, synthetic construct
QWPRGDISRT

SEQ ID NO: 111355 - protein, 10 aa, synthetic construct
QWLRGDISRT

SEQ ID NO: 111356 - protein, 10 aa, synthetic construct
QWIRGDISRT

SEQ ID NO: 111357 - protein, 10 aa, synthetic construct
QWMRGDISRT

SEQ ID NO: 111358 - protein, 10 aa, synthetic construct
QWWRGDISRT

SEQ ID NO: 111359 - protein, 10 aa, synthetic construct
QWFRGDISRT

SEQ ID NO: 111360 - protein, 10 aa, synthetic construct
QWKRGDISRT

SEQ ID NO: 111361 - protein, 10 aa, synthetic construct
QWRRGDISRT

SEQ ID NO: 111362 - protein, 10 aa, synthetic construct
QWHRGDISRT

SEQ ID NO: 111363 - protein, 10 aa, synthetic construct
QWSRGDISRT

SEQ ID NO: 111364 - protein, 10 aa, synthetic construct
QWTRGDISRT

SEQ ID NO: 111365 - protein, 10 aa, synthetic construct
QWYRGDISRT

SEQ ID NO: 111366 - protein, 10 aa, synthetic construct
QWNRGDISRT

SEQ ID NO: 111367 - protein, 10 aa, synthetic construct
QWQRGDISRT

SEQ ID NO: 111368 - protein, 10 aa, synthetic construct
QWDRGDISRT

SEQ ID NO: 111369 - protein, 10 aa, synthetic construct
QWERGDISRT

SEQ ID NO: 111370 - protein, 10 aa, synthetic construct
QFGRGDISRT

SEQ ID NO: 111371 - protein, 10 aa, synthetic construct
QFARGDISRT

SEQ ID NO: 111372 - protein, 10 aa, synthetic construct
QFVRGDISRT

SEQ ID NO: 111373 - protein, 10 aa, synthetic construct
QFPRGDISRT

SEQ ID NO: 111374 - protein, 10 aa, synthetic construct
QFLRGDISRT

SEQ ID NO: 111375 - protein, 10 aa, synthetic construct
QFIRGDISRT

SEQ ID NO: 111376 - protein, 10 aa, synthetic construct
QFMRGDISRT

SEQ ID NO: 111377 - protein, 10 aa, synthetic construct
QFWRGDISRT

SEQ ID NO: 111378 - protein, 10 aa, synthetic construct
QFFRGDISRT

SEQ ID NO: 111379 - protein, 10 aa, synthetic construct
QFKRGDISRT

SEQ ID NO: 111380 - protein, 10 aa, synthetic construct
QFRRGDISRT

SEQ ID NO: 111381 - protein, 10 aa, synthetic construct
QFHRGDISRT

SEQ ID NO: 111382 - protein, 10 aa, synthetic construct
QFSRGDISRT

SEQ ID NO: 111383 - protein, 10 aa, synthetic construct
QFTRGDISRT

SEQ ID NO: 111384 - protein, 10 aa, synthetic construct
QFYRGDISRT

SEQ ID NO: 111385 - protein, 10 aa, synthetic construct
QFNRGDISRT

SEQ ID NO: 111386 - protein, 10 aa, synthetic construct
QFQRGDISRT

SEQ ID NO: 111387 - protein, 10 aa, synthetic construct
QFDRGDISRT

SEQ ID NO: 111388 - protein, 10 aa, synthetic construct
QFERGDISRT

SEQ ID NO: 111389 - protein, 10 aa, synthetic construct
QKGRGDISRT

SEQ ID NO: 111390 - protein, 10 aa, synthetic construct
QKARGDISRT

SEQ ID NO: 111391 - protein, 10 aa, synthetic construct
QKVRGDISRT

SEQ ID NO: 111392 - protein, 10 aa, synthetic construct
QKPRGDISRT

SEQ ID NO: 111393 - protein, 10 aa, synthetic construct
QKLRGDISRT

SEQ ID NO: 111394 - protein, 10 aa, synthetic construct
QKIRGDISRT

SEQ ID NO: 111395 - protein, 10 aa, synthetic construct
QKMRGDISRT

SEQ ID NO: 111396 - protein, 10 aa, synthetic construct
QKWRGDISRT

SEQ ID NO: 111397 - protein, 10 aa, synthetic construct
QKFRGDISRT

SEQ ID NO: 111398 - protein, 10 aa, synthetic construct
QKKRGDISRT

SEQ ID NO: 111399 - protein, 10 aa, synthetic construct
QKRRGDISRT

SEQ ID NO: 111400 - protein, 10 aa, synthetic construct
QKHRGDISRT

SEQ ID NO: 111401 - protein, 10 aa, synthetic construct
QKSRGDISRT

SEQ ID NO: 111402 - protein, 10 aa, synthetic construct
QKTRGDISRT

SEQ ID NO: 111403 - protein, 10 aa, synthetic construct
QKYRGDISRT

SEQ ID NO: 111404 - protein, 10 aa, synthetic construct
QKNRGDISRT

SEQ ID NO: 111405 - protein, 10 aa, synthetic construct
QKQRGDISRT

SEQ ID NO: 111406 - protein, 10 aa, synthetic construct
QKDRGDISRT

SEQ ID NO: 111407 - protein, 10 aa, synthetic construct
QKERGDISRT

SEQ ID NO: 111408 - protein, 10 aa, synthetic construct
QRGRGDISRT

SEQ ID NO: 111409 - protein, 10 aa, synthetic construct
QRARGDISRT

SEQ ID NO: 111410 - protein, 10 aa, synthetic construct
QRVRGDISRT

SEQ ID NO: 111411 - protein, 10 aa, synthetic construct
QRPRGDISRT

SEQ ID NO: 111412 - protein, 10 aa, synthetic construct
QRLRGDISRT

SEQ ID NO: 111413 - protein, 10 aa, synthetic construct
QRIRGDISRT

SEQ ID NO: 111414 - protein, 10 aa, synthetic construct
QRMRGDISRT

SEQ ID NO: 111415 - protein, 10 aa, synthetic construct
QRWRGDISRT

SEQ ID NO: 111416 - protein, 10 aa, synthetic construct
QRFRGDISRT

SEQ ID NO: 111417 - protein, 10 aa, synthetic construct
QRKRGDISRT

SEQ ID NO: 111418 - protein, 10 aa, synthetic construct
QRRRGDISRT

SEQ ID NO: 111419 - protein, 10 aa, synthetic construct
QRHRGDISRT

SEQ ID NO: 111420 - protein, 10 aa, synthetic construct
QRSRGDISRT

SEQ ID NO: 111421 - protein, 10 aa, synthetic construct
QRTRGDISRT

SEQ ID NO: 111422 - protein, 10 aa, synthetic construct
QRYRGDISRT

SEQ ID NO: 111423 - protein, 10 aa, synthetic construct
QRNRGDISRT

SEQ ID NO: 111424 - protein, 10 aa, synthetic construct
QRQRGDISRT

SEQ ID NO: 111425 - protein, 10 aa, synthetic construct
QRDRGDISRT

SEQ ID NO: 111426 - protein, 10 aa, synthetic construct
QRERGDISRT

SEQ ID NO: 111427 - protein, 10 aa, synthetic construct
QHGRGDISRT

SEQ ID NO: 111428 - protein, 10 aa, synthetic construct
QHARGDISRT

SEQ ID NO: 111429 - protein, 10 aa, synthetic construct
QHVRGDISRT

SEQ ID NO: 111430 - protein, 10 aa, synthetic construct
QHPRGDISRT

SEQ ID NO: 111431 - protein, 10 aa, synthetic construct
QHLRGDISRT

SEQ ID NO: 111432 - protein, 10 aa, synthetic construct
QHIRGDISRT

SEQ ID NO: 111433 - protein, 10 aa, synthetic construct
QHMRGDISRT

SEQ ID NO: 111434 - protein, 10 aa, synthetic construct
QHWRGDISRT

SEQ ID NO: 111435 - protein, 10 aa, synthetic construct
QHFRGDISRT

SEQ ID NO: 111436 - protein, 10 aa, synthetic construct
QHKRGDISRT

SEQ ID NO: 111437 - protein, 10 aa, synthetic construct
QHRRGDISRT

SEQ ID NO: 111438 - protein, 10 aa, synthetic construct
QHHRGDISRT

SEQ ID NO: 111439 - protein, 10 aa, synthetic construct
QHSRGDISRT

SEQ ID NO: 111440 - protein, 10 aa, synthetic construct
QHTRGDISRT

SEQ ID NO: 111441 - protein, 10 aa, synthetic construct
QHYRGDISRT

SEQ ID NO: 111442 - protein, 10 aa, synthetic construct
QHNRGDISRT

SEQ ID NO: 111443 - protein, 10 aa, synthetic construct
QHQRGDISRT

SEQ ID NO: 111444 - protein, 10 aa, synthetic construct
QHDRGDISRT

SEQ ID NO: 111445 - protein, 10 aa, synthetic construct
QHERGDISRT

SEQ ID NO: 111446 - protein, 10 aa, synthetic construct
QSGRGDISRT

SEQ ID NO: 111447 - protein, 10 aa, synthetic construct
QSARGDISRT

SEQ ID NO: 111448 - protein, 10 aa, synthetic construct
QSVRGDISRT

SEQ ID NO: 111449 - protein, 10 aa, synthetic construct
QSPRGDISRT

SEQ ID NO: 111450 - protein, 10 aa, synthetic construct
QSLRGDISRT

SEQ ID NO: 111451 - protein, 10 aa, synthetic construct
QSIRGDISRT

SEQ ID NO: 111452 - protein, 10 aa, synthetic construct
QSMRGDISRT

SEQ ID NO: 111453 - protein, 10 aa, synthetic construct
QSWRGDISRT

SEQ ID NO: 111454 - protein, 10 aa, synthetic construct
QSFRGDISRT

SEQ ID NO: 111455 - protein, 10 aa, synthetic construct
QSKRGDISRT

SEQ ID NO: 111456 - protein, 10 aa, synthetic construct
QSRRGDISRT

SEQ ID NO: 111457 - protein, 10 aa, synthetic construct
QSHRGDISRT

SEQ ID NO: 111458 - protein, 10 aa, synthetic construct
QSSRGDISRT

SEQ ID NO: 111459 - protein, 10 aa, synthetic construct
QSTRGDISRT

SEQ ID NO: 111460 - protein, 10 aa, synthetic construct
QSYRGDISRT

SEQ ID NO: 111461 - protein, 10 aa, synthetic construct
QSNRGDISRT

SEQ ID NO: 111462 - protein, 10 aa, synthetic construct
QSQRGDISRT

SEQ ID NO: 111463 - protein, 10 aa, synthetic construct
QSDRGDISRT

SEQ ID NO: 111464 - protein, 10 aa, synthetic construct
QSERGDISRT

SEQ ID NO: 111465 - protein, 10 aa, synthetic construct
QTGRGDISRT

SEQ ID NO: 111466 - protein, 10 aa, synthetic construct
QTARGDISRT

SEQ ID NO: 111467 - protein, 10 aa, synthetic construct
QTVRGDISRT

SEQ ID NO: 111468 - protein, 10 aa, synthetic construct
QTPRGDISRT

SEQ ID NO: 111469 - protein, 10 aa, synthetic construct
QTLRGDISRT

SEQ ID NO: 111470 - protein, 10 aa, synthetic construct
QTIRGDISRT

SEQ ID NO: 111471 - protein, 10 aa, synthetic construct
QTMRGDISRT

SEQ ID NO: 111472 - protein, 10 aa, synthetic construct
QTWRGDISRT

SEQ ID NO: 111473 - protein, 10 aa, synthetic construct
QTFRGDISRT

SEQ ID NO: 111474 - protein, 10 aa, synthetic construct
QTKRGDISRT

SEQ ID NO: 111475 - protein, 10 aa, synthetic construct
QTRRGDISRT

SEQ ID NO: 111476 - protein, 10 aa, synthetic construct
QTHRGDISRT

SEQ ID NO: 111477 - protein, 10 aa, synthetic construct
QTSRGDISRT

SEQ ID NO: 111478 - protein, 10 aa, synthetic construct
QTTRGDISRT

SEQ ID NO: 111479 - protein, 10 aa, synthetic construct
QTYRGDISRT

SEQ ID NO: 111480 - protein, 10 aa, synthetic construct
QTNRGDISRT

SEQ ID NO: 111481 - protein, 10 aa, synthetic construct
QTQRGDISRT

SEQ ID NO: 111482 - protein, 10 aa, synthetic construct
QTDRGDISRT

SEQ ID NO: 111483 - protein, 10 aa, synthetic construct
QTERGDISRT

SEQ ID NO: 111484 - protein, 10 aa, synthetic construct
QYGRGDISRT

SEQ ID NO: 111485 - protein, 10 aa, synthetic construct
QYARGDISRT

SEQ ID NO: 111486 - protein, 10 aa, synthetic construct
QYVRGDISRT

SEQ ID NO: 111487 - protein, 10 aa, synthetic construct
QYPRGDISRT

SEQ ID NO: 111488 - protein, 10 aa, synthetic construct
QYLRGDISRT

SEQ ID NO: 111489 - protein, 10 aa, synthetic construct
QYIRGDISRT

SEQ ID NO: 111490 - protein, 10 aa, synthetic construct
QYMRGDISRT

SEQ ID NO: 111491 - protein, 10 aa, synthetic construct
QYWRGDISRT

SEQ ID NO: 111492 - protein, 10 aa, synthetic construct
QYFRGDISRT

SEQ ID NO: 111493 - protein, 10 aa, synthetic construct
QYKRGDISRT

SEQ ID NO: 111494 - protein, 10 aa, synthetic construct
QYRRGDISRT

SEQ ID NO: 111495 - protein, 10 aa, synthetic construct
QYHRGDISRT

SEQ ID NO: 111496 - protein, 10 aa, synthetic construct
QYSRGDISRT

SEQ ID NO: 111497 - protein, 10 aa, synthetic construct
QYTRGDISRT

SEQ ID NO: 111498 - protein, 10 aa, synthetic construct
QYYRGDISRT

SEQ ID NO: 111499 - protein, 10 aa, synthetic construct
QYNRGDISRT

SEQ ID NO: 111500 - protein, 10 aa, synthetic construct
QYQRGDISRT

SEQ ID NO: 111501 - protein, 10 aa, synthetic construct
QYDRGDISRT

SEQ ID NO: 111502 - protein, 10 aa, synthetic construct
QYERGDISRT

SEQ ID NO: 111503 - protein, 10 aa, synthetic construct
QNGRGDISRT

SEQ ID NO: 111504 - protein, 10 aa, synthetic construct
QNARGDISRT

SEQ ID NO: 111505 - protein, 10 aa, synthetic construct
QNVRGDISRT

SEQ ID NO: 111506 - protein, 10 aa, synthetic construct
QNPRGDISRT

SEQ ID NO: 111507 - protein, 10 aa, synthetic construct
QNLRGDISRT

SEQ ID NO: 111508 - protein, 10 aa, synthetic construct
QNIRGDISRT

SEQ ID NO: 111509 - protein, 10 aa, synthetic construct
QNMRGDISRT

SEQ ID NO: 111510 - protein, 10 aa, synthetic construct
QNWRGDISRT

SEQ ID NO: 111511 - protein, 10 aa, synthetic construct
QNFRGDISRT

SEQ ID NO: 111512 - protein, 10 aa, synthetic construct
QNKRGDISRT

SEQ ID NO: 111513 - protein, 10 aa, synthetic construct
QNRRGDISRT

SEQ ID NO: 111514 - protein, 10 aa, synthetic construct
QNHRGDISRT

SEQ ID NO: 111515 - protein, 10 aa, synthetic construct
QNSRGDISRT

SEQ ID NO: 111516 - protein, 10 aa, synthetic construct
QNTRGDISRT

SEQ ID NO: 111517 - protein, 10 aa, synthetic construct
QNYRGDISRT

SEQ ID NO: 111518 - protein, 10 aa, synthetic construct
QNNRGDISRT

SEQ ID NO: 111519 - protein, 10 aa, synthetic construct
QNQRGDISRT

SEQ ID NO: 111520 - protein, 10 aa, synthetic construct
QNDRGDISRT

SEQ ID NO: 111521 - protein, 10 aa, synthetic construct
QNERGDISRT

SEQ ID NO: 111522 - protein, 10 aa, synthetic construct
QQGRGDISRT

SEQ ID NO: 111523 - protein, 10 aa, synthetic construct
QQARGDISRT

SEQ ID NO: 111524 - protein, 10 aa, synthetic construct
QQVRGDISRT

SEQ ID NO: 111525 - protein, 10 aa, synthetic construct
QQPRGDISRT

SEQ ID NO: 111526 - protein, 10 aa, synthetic construct
QQLRGDISRT

SEQ ID NO: 111527 - protein, 10 aa, synthetic construct
QQIRGDISRT

SEQ ID NO: 111528 - protein, 10 aa, synthetic construct
QQMRGDISRT

SEQ ID NO: 111529 - protein, 10 aa, synthetic construct
QQWRGDISRT

SEQ ID NO: 111530 - protein, 10 aa, synthetic construct
QQFRGDISRT

SEQ ID NO: 111531 - protein, 10 aa, synthetic construct
QQKRGDISRT

SEQ ID NO: 111532 - protein, 10 aa, synthetic construct
QQRRGDISRT

SEQ ID NO: 111533 - protein, 10 aa, synthetic construct
QQHRGDISRT

SEQ ID NO: 111534 - protein, 10 aa, synthetic construct
QQSRGDISRT

SEQ ID NO: 111535 - protein, 10 aa, synthetic construct
QQTRGDISRT

SEQ ID NO: 111536 - protein, 10 aa, synthetic construct
QQYRGDISRT

SEQ ID NO: 111537 - protein, 10 aa, synthetic construct
QQNRGDISRT

SEQ ID NO: 111538 - protein, 10 aa, synthetic construct
QQQRGDISRT

SEQ ID NO: 111539 - protein, 10 aa, synthetic construct
QQDRGDISRT

SEQ ID NO: 111540 - protein, 10 aa, synthetic construct
QQERGDISRT

SEQ ID NO: 111541 - protein, 10 aa, synthetic construct
QDGRGDISRT

SEQ ID NO: 111542 - protein, 10 aa, synthetic construct
QDARGDISRT

SEQ ID NO: 111543 - protein, 10 aa, synthetic construct
QDVRGDISRT

SEQ ID NO: 111544 - protein, 10 aa, synthetic construct
QDPRGDISRT

SEQ ID NO: 111545 - protein, 10 aa, synthetic construct
QDLRGDISRT

SEQ ID NO: 111546 - protein, 10 aa, synthetic construct
QDIRGDISRT

SEQ ID NO: 111547 - protein, 10 aa, synthetic construct
QDMRGDISRT

SEQ ID NO: 111548 - protein, 10 aa, synthetic construct
QDWRGDISRT

SEQ ID NO: 111549 - protein, 10 aa, synthetic construct
QDFRGDISRT

SEQ ID NO: 111550 - protein, 10 aa, synthetic construct
QDKRGDISRT

SEQ ID NO: 111551 - protein, 10 aa, synthetic construct
QDRRGDISRT

SEQ ID NO: 111552 - protein, 10 aa, synthetic construct
QDHRGDISRT

SEQ ID NO: 111553 - protein, 10 aa, synthetic construct
QDSRGDISRT

SEQ ID NO: 111554 - protein, 10 aa, synthetic construct
QDTRGDISRT

SEQ ID NO: 111555 - protein, 10 aa, synthetic construct
QDYRGDISRT

SEQ ID NO: 111556 - protein, 10 aa, synthetic construct
QDNRGDISRT

SEQ ID NO: 111557 - protein, 10 aa, synthetic construct
QDQRGDISRT

SEQ ID NO: 111558 - protein, 10 aa, synthetic construct
QDDRGDISRT

SEQ ID NO: 111559 - protein, 10 aa, synthetic construct
QDERGDISRT

SEQ ID NO: 111560 - protein, 10 aa, synthetic construct
QEGRGDISRT

SEQ ID NO: 111561 - protein, 10 aa, synthetic construct
QEARGDISRT

SEQ ID NO: 111562 - protein, 10 aa, synthetic construct
QEVRGDISRT

SEQ ID NO: 111563 - protein, 10 aa, synthetic construct
QEPRGDISRT

SEQ ID NO: 111564 - protein, 10 aa, synthetic construct
QELRGDISRT

SEQ ID NO: 111565 - protein, 10 aa, synthetic construct
QEIRGDISRT

SEQ ID NO: 111566 - protein, 10 aa, synthetic construct
QEMRGDISRT

SEQ ID NO: 111567 - protein, 10 aa, synthetic construct
QEWRGDISRT

SEQ ID NO: 111568 - protein, 10 aa, synthetic construct
QEFRGDISRT

SEQ ID NO: 111569 - protein, 10 aa, synthetic construct
QEKRGDISRT

SEQ ID NO: 111570 - protein, 10 aa, synthetic construct
QERRGDISRT

SEQ ID NO: 111571 - protein, 10 aa, synthetic construct
QEHRGDISRT

SEQ ID NO: 111572 - protein, 10 aa, synthetic construct
QESRGDISRT

SEQ ID NO: 111573 - protein, 10 aa, synthetic construct
QETRGDISRT

SEQ ID NO: 111574 - protein, 10 aa, synthetic construct
QEYRGDISRT

SEQ ID NO: 111575 - protein, 10 aa, synthetic construct
QENRGDISRT

SEQ ID NO: 111576 - protein, 10 aa, synthetic construct
QEQRGDISRT

SEQ ID NO: 111577 - protein, 10 aa, synthetic construct
QEDRGDISRT

SEQ ID NO: 111578 - protein, 10 aa, synthetic construct
QEERGDISRT

SEQ ID NO: 111579 - protein, 10 aa, synthetic construct
SGGRGDKERF

SEQ ID NO: 111580 - protein, 10 aa, synthetic construct
SGARGDKERF

SEQ ID NO: 111581 - protein, 10 aa, synthetic construct
SGVRGDKERF

SEQ ID NO: 111582 - protein, 10 aa, synthetic construct
SGPRGDKERF

SEQ ID NO: 111583 - protein, 10 aa, synthetic construct
SGLRGDKERF

SEQ ID NO: 111584 - protein, 10 aa, synthetic construct
SGIRGDKERF

SEQ ID NO: 111585 - protein, 10 aa, synthetic construct
SGMRGDKERF

SEQ ID NO: 111586 - protein, 10 aa, synthetic construct
SGWRGDKERF

SEQ ID NO: 111587 - protein, 10 aa, synthetic construct
SGFRGDKERF

SEQ ID NO: 111588 - protein, 10 aa, synthetic construct
SGKRGDKERF

SEQ ID NO: 111589 - protein, 10 aa, synthetic construct
SGRRGDKERF

SEQ ID NO: 111590 - protein, 10 aa, synthetic construct
SGHRGDKERF

SEQ ID NO: 111591 - protein, 10 aa, synthetic construct
SGSRGDKERF

SEQ ID NO: 111592 - protein, 10 aa, synthetic construct
SGTRGDKERF

SEQ ID NO: 111593 - protein, 10 aa, synthetic construct
SGYRGDKERF

SEQ ID NO: 111594 - protein, 10 aa, synthetic construct
SGNRGDKERF

SEQ ID NO: 111595 - protein, 10 aa, synthetic construct
SGQRGDKERF

SEQ ID NO: 111596 - protein, 10 aa, synthetic construct
SGDRGDKERF

SEQ ID NO: 111597 - protein, 10 aa, synthetic construct
SGERGDKERF

SEQ ID NO: 111598 - protein, 10 aa, synthetic construct
SAGRGDKERF

SEQ ID NO: 111599 - protein, 10 aa, synthetic construct
SAARGDKERF

SEQ ID NO: 111600 - protein, 10 aa, synthetic construct
SAVRGDKERF

SEQ ID NO: 111601 - protein, 10 aa, synthetic construct
SAPRGDKERF

SEQ ID NO: 111602 - protein, 10 aa, synthetic construct
SALRGDKERF

SEQ ID NO: 111603 - protein, 10 aa, synthetic construct
SAIRGDKERF

SEQ ID NO: 111604 - protein, 10 aa, synthetic construct
SAMRGDKERF

SEQ ID NO: 111605 - protein, 10 aa, synthetic construct
SAWRGDKERF

SEQ ID NO: 111606 - protein, 10 aa, synthetic construct
SAFRGDKERF

SEQ ID NO: 111607 - protein, 10 aa, synthetic construct
SAKRGDKERF

SEQ ID NO: 111608 - protein, 10 aa, synthetic construct
SARRGDKERF

SEQ ID NO: 111609 - protein, 10 aa, synthetic construct
SAHRGDKERF

SEQ ID NO: 111610 - protein, 10 aa, synthetic construct
SASRGDKERF

SEQ ID NO: 111611 - protein, 10 aa, synthetic construct
SATRGDKERF

SEQ ID NO: 111612 - protein, 10 aa, synthetic construct
SAYRGDKERF

SEQ ID NO: 111613 - protein, 10 aa, synthetic construct
SANRGDKERF

SEQ ID NO: 111614 - protein, 10 aa, synthetic construct
SAQRGDKERF

SEQ ID NO: 111615 - protein, 10 aa, synthetic construct
SADRGDKERF

SEQ ID NO: 111616 - protein, 10 aa, synthetic construct
SAERGDKERF

SEQ ID NO: 111617 - protein, 10 aa, synthetic construct
SVGRGDKERF

SEQ ID NO: 111618 - protein, 10 aa, synthetic construct
SVARGDKERF

SEQ ID NO: 111619 - protein, 10 aa, synthetic construct
SVVRGDKERF

SEQ ID NO: 111620 - protein, 10 aa, synthetic construct
SVPRGDKERF

SEQ ID NO: 111621 - protein, 10 aa, synthetic construct
SVLRGDKERF

SEQ ID NO: 111622 - protein, 10 aa, synthetic construct
SVIRGDKERF

SEQ ID NO: 111623 - protein, 10 aa, synthetic construct
SVMRGDKERF

SEQ ID NO: 111624 - protein, 10 aa, synthetic construct
SVWRGDKERF

SEQ ID NO: 111625 - protein, 10 aa, synthetic construct
SVFRGDKERF

SEQ ID NO: 111626 - protein, 10 aa, synthetic construct
SVKRGDKERF

SEQ ID NO: 111627 - protein, 10 aa, synthetic construct
SVRRGDKERF

SEQ ID NO: 111628 - protein, 10 aa, synthetic construct
SVHRGDKERF

SEQ ID NO: 111629 - protein, 10 aa, synthetic construct
SVSRGDKERF

SEQ ID NO: 111630 - protein, 10 aa, synthetic construct
SVTRGDKERF

SEQ ID NO: 111631 - protein, 10 aa, synthetic construct
SVYRGDKERF

SEQ ID NO: 111632 - protein, 10 aa, synthetic construct
SVNRGDKERF

SEQ ID NO: 111633 - protein, 10 aa, synthetic construct
SVQRGDKERF

SEQ ID NO: 111634 - protein, 10 aa, synthetic construct
SVDRGDKERF

SEQ ID NO: 111635 - protein, 10 aa, synthetic construct
SVERGDKERF

SEQ ID NO: 111636 - protein, 10 aa, synthetic construct
SPGRGDKERF

SEQ ID NO: 111637 - protein, 10 aa, synthetic construct
SPARGDKERF

SEQ ID NO: 111638 - protein, 10 aa, synthetic construct
SPVRGDKERF

SEQ ID NO: 111639 - protein, 10 aa, synthetic construct
SPPRGDKERF

SEQ ID NO: 111640 - protein, 10 aa, synthetic construct
SPLRGDKERF

SEQ ID NO: 111641 - protein, 10 aa, synthetic construct
SPIRGDKERF

SEQ ID NO: 111642 - protein, 10 aa, synthetic construct
SPMRGDKERF

SEQ ID NO: 111643 - protein, 10 aa, synthetic construct
SPWRGDKERF

SEQ ID NO: 111644 - protein, 10 aa, synthetic construct
SPFRGDKERF

SEQ ID NO: 111645 - protein, 10 aa, synthetic construct
SPKRGDKERF

SEQ ID NO: 111646 - protein, 10 aa, synthetic construct
SPRRGDKERF

SEQ ID NO: 111647 - protein, 10 aa, synthetic construct
SPHRGDKERF

SEQ ID NO: 111648 - protein, 10 aa, synthetic construct
SPSRGDKERF

SEQ ID NO: 111649 - protein, 10 aa, synthetic construct
SPTRGDKERF

SEQ ID NO: 111650 - protein, 10 aa, synthetic construct
SPYRGDKERF

SEQ ID NO: 111651 - protein, 10 aa, synthetic construct
SPNRGDKERF

SEQ ID NO: 111652 - protein, 10 aa, synthetic construct
SPQRGDKERF

SEQ ID NO: 111653 - protein, 10 aa, synthetic construct
SPDRGDKERF

SEQ ID NO: 111654 - protein, 10 aa, synthetic construct
SPERGDKERF

SEQ ID NO: 111655 - protein, 10 aa, synthetic construct
SLGRGDKERF

SEQ ID NO: 111656 - protein, 10 aa, synthetic construct
SLARGDKERF

SEQ ID NO: 111657 - protein, 10 aa, synthetic construct
SLVRGDKERF

SEQ ID NO: 111658 - protein, 10 aa, synthetic construct
SLPRGDKERF

SEQ ID NO: 111659 - protein, 10 aa, synthetic construct
SLLRGDKERF

SEQ ID NO: 111660 - protein, 10 aa, synthetic construct
SLIRGDKERF

SEQ ID NO: 111661 - protein, 10 aa, synthetic construct
SLMRGDKERF

SEQ ID NO: 111662 - protein, 10 aa, synthetic construct
SLWRGDKERF

SEQ ID NO: 111663 - protein, 10 aa, synthetic construct
SLFRGDKERF

SEQ ID NO: 111664 - protein, 10 aa, synthetic construct
SLKRGDKERF

SEQ ID NO: 111665 - protein, 10 aa, synthetic construct
SLRRGDKERF

SEQ ID NO: 111666 - protein, 10 aa, synthetic construct
SLHRGDKERF

SEQ ID NO: 111667 - protein, 10 aa, synthetic construct
SLSRGDKERF

SEQ ID NO: 111668 - protein, 10 aa, synthetic construct
SLTRGDKERF

SEQ ID NO: 111669 - protein, 10 aa, synthetic construct
SLYRGDKERF

SEQ ID NO: 111670 - protein, 10 aa, synthetic construct
SLNRGDKERF

SEQ ID NO: 111671 - protein, 10 aa, synthetic construct
SLQRGDKERF

SEQ ID NO: 111672 - protein, 10 aa, synthetic construct
SLDRGDKERF

SEQ ID NO: 111673 - protein, 10 aa, synthetic construct
SLERGDKERF

SEQ ID NO: 111674 - protein, 10 aa, synthetic construct
SIGRGDKERF

SEQ ID NO: 111675 - protein, 10 aa, synthetic construct
SIARGDKERF

SEQ ID NO: 111676 - protein, 10 aa, synthetic construct
SIVRGDKERF

SEQ ID NO: 111677 - protein, 10 aa, synthetic construct
SIPRGDKERF

SEQ ID NO: 111678 - protein, 10 aa, synthetic construct
SILRGDKERF

SEQ ID NO: 111679 - protein, 10 aa, synthetic construct
SIIRGDKERF

SEQ ID NO: 111680 - protein, 10 aa, synthetic construct
SIMRGDKERF

SEQ ID NO: 111681 - protein, 10 aa, synthetic construct
SIWRGDKERF

SEQ ID NO: 111682 - protein, 10 aa, synthetic construct
SIFRGDKERF

SEQ ID NO: 111683 - protein, 10 aa, synthetic construct
SIKRGDKERF

SEQ ID NO: 111684 - protein, 10 aa, synthetic construct
SIRRGDKERF

SEQ ID NO: 111685 - protein, 10 aa, synthetic construct
SIHRGDKERF

SEQ ID NO: 111686 - protein, 10 aa, synthetic construct
SISRGDKERF

SEQ ID NO: 111687 - protein, 10 aa, synthetic construct
SITRGDKERF

SEQ ID NO: 111688 - protein, 10 aa, synthetic construct
SIYRGDKERF

SEQ ID NO: 111689 - protein, 10 aa, synthetic construct
SINRGDKERF

SEQ ID NO: 111690 - protein, 10 aa, synthetic construct
SIQRGDKERF

SEQ ID NO: 111691 - protein, 10 aa, synthetic construct
SIDRGDKERF

SEQ ID NO: 111692 - protein, 10 aa, synthetic construct
SIERGDKERF

SEQ ID NO: 111693 - protein, 10 aa, synthetic construct
SMGRGDKERF

SEQ ID NO: 111694 - protein, 10 aa, synthetic construct
SMARGDKERF

SEQ ID NO: 111695 - protein, 10 aa, synthetic construct
SMVRGDKERF

SEQ ID NO: 111696 - protein, 10 aa, synthetic construct
SMPRGDKERF

SEQ ID NO: 111697 - protein, 10 aa, synthetic construct
SMLRGDKERF

SEQ ID NO: 111698 - protein, 10 aa, synthetic construct
SMIRGDKERF

SEQ ID NO: 111699 - protein, 10 aa, synthetic construct
SMMRGDKERF

SEQ ID NO: 111700 - protein, 10 aa, synthetic construct
SMWRGDKERF

SEQ ID NO: 111701 - protein, 10 aa, synthetic construct
SMFRGDKERF

SEQ ID NO: 111702 - protein, 10 aa, synthetic construct
SMKRGDKERF

SEQ ID NO: 111703 - protein, 10 aa, synthetic construct
SMRRGDKERF

SEQ ID NO: 111704 - protein, 10 aa, synthetic construct
SMHRGDKERF

SEQ ID NO: 111705 - protein, 10 aa, synthetic construct
SMSRGDKERF

SEQ ID NO: 111706 - protein, 10 aa, synthetic construct
SMTRGDKERF

SEQ ID NO: 111707 - protein, 10 aa, synthetic construct
SMYRGDKERF

SEQ ID NO: 111708 - protein, 10 aa, synthetic construct
SMNRGDKERF

SEQ ID NO: 111709 - protein, 10 aa, synthetic construct
SMQRGDKERF

SEQ ID NO: 111710 - protein, 10 aa, synthetic construct
SMDRGDKERF

SEQ ID NO: 111711 - protein, 10 aa, synthetic construct
SMERGDKERF

SEQ ID NO: 111712 - protein, 10 aa, synthetic construct
SWGRGDKERF

SEQ ID NO: 111713 - protein, 10 aa, synthetic construct
SWARGDKERF

SEQ ID NO: 111714 - protein, 10 aa, synthetic construct
SWVRGDKERF

SEQ ID NO: 111715 - protein, 10 aa, synthetic construct
SWPRGDKERF

SEQ ID NO: 111716 - protein, 10 aa, synthetic construct
SWLRGDKERF

SEQ ID NO: 111717 - protein, 10 aa, synthetic construct
SWIRGDKERF

SEQ ID NO: 111718 - protein, 10 aa, synthetic construct
SWMRGDKERF

SEQ ID NO: 111719 - protein, 10 aa, synthetic construct
SWWRGDKERF

SEQ ID NO: 111720 - protein, 10 aa, synthetic construct
SWFRGDKERF

SEQ ID NO: 111721 - protein, 10 aa, synthetic construct
SWKRGDKERF

SEQ ID NO: 111722 - protein, 10 aa, synthetic construct
SWRRGDKERF

SEQ ID NO: 111723 - protein, 10 aa, synthetic construct
SWHRGDKERF

SEQ ID NO: 111724 - protein, 10 aa, synthetic construct
SWSRGDKERF

SEQ ID NO: 111725 - protein, 10 aa, synthetic construct
SWTRGDKERF

SEQ ID NO: 111726 - protein, 10 aa, synthetic construct
SWYRGDKERF

SEQ ID NO: 111727 - protein, 10 aa, synthetic construct
SWNRGDKERF

SEQ ID NO: 111728 - protein, 10 aa, synthetic construct
SWQRGDKERF

SEQ ID NO: 111729 - protein, 10 aa, synthetic construct
SWDRGDKERF

SEQ ID NO: 111730 - protein, 10 aa, synthetic construct
SWERGDKERF

SEQ ID NO: 111731 - protein, 10 aa, synthetic construct
SFGRGDKERF

SEQ ID NO: 111732 - protein, 10 aa, synthetic construct
SFARGDKERF

SEQ ID NO: 111733 - protein, 10 aa, synthetic construct
SFVRGDKERF

SEQ ID NO: 111734 - protein, 10 aa, synthetic construct
SFPRGDKERF

SEQ ID NO: 111735 - protein, 10 aa, synthetic construct
SFLRGDKERF

SEQ ID NO: 111736 - protein, 10 aa, synthetic construct
SFIRGDKERF

SEQ ID NO: 111737 - protein, 10 aa, synthetic construct
SFMRGDKERF

SEQ ID NO: 111738 - protein, 10 aa, synthetic construct
SFWRGDKERF

SEQ ID NO: 111739 - protein, 10 aa, synthetic construct
SFFRGDKERF

SEQ ID NO: 111740 - protein, 10 aa, synthetic construct
SFKRGDKERF

SEQ ID NO: 111741 - protein, 10 aa, synthetic construct
SFRRGDKERF

SEQ ID NO: 111742 - protein, 10 aa, synthetic construct
SFHRGDKERF

SEQ ID NO: 111743 - protein, 10 aa, synthetic construct
SFSRGDKERF

SEQ ID NO: 111744 - protein, 10 aa, synthetic construct
SFTRGDKERF

SEQ ID NO: 111745 - protein, 10 aa, synthetic construct
SFYRGDKERF

SEQ ID NO: 111746 - protein, 10 aa, synthetic construct
SFNRGDKERF

SEQ ID NO: 111747 - protein, 10 aa, synthetic construct
SFQRGDKERF

SEQ ID NO: 111748 - protein, 10 aa, synthetic construct
SFDRGDKERF

SEQ ID NO: 111749 - protein, 10 aa, synthetic construct
SFERGDKERF

SEQ ID NO: 111750 - protein, 10 aa, synthetic construct
SKGRGDKERF

SEQ ID NO: 111751 - protein, 10 aa, synthetic construct
SKARGDKERF

SEQ ID NO: 111752 - protein, 10 aa, synthetic construct
SKVRGDKERF

SEQ ID NO: 111753 - protein, 10 aa, synthetic construct
SKPRGDKERF

SEQ ID NO: 111754 - protein, 10 aa, synthetic construct
SKLRGDKERF

SEQ ID NO: 111755 - protein, 10 aa, synthetic construct
SKIRGDKERF

SEQ ID NO: 111756 - protein, 10 aa, synthetic construct
SKMRGDKERF

SEQ ID NO: 111757 - protein, 10 aa, synthetic construct
SKWRGDKERF

SEQ ID NO: 111758 - protein, 10 aa, synthetic construct
SKFRGDKERF

SEQ ID NO: 111759 - protein, 10 aa, synthetic construct
SKKRGDKERF

SEQ ID NO: 111760 - protein, 10 aa, synthetic construct
SKRRGDKERF

SEQ ID NO: 111761 - protein, 10 aa, synthetic construct
SKHRGDKERF

SEQ ID NO: 111762 - protein, 10 aa, synthetic construct
SKSRGDKERF

SEQ ID NO: 111763 - protein, 10 aa, synthetic construct
SKTRGDKERF

SEQ ID NO: 111764 - protein, 10 aa, synthetic construct
SKYRGDKERF

SEQ ID NO: 111765 - protein, 10 aa, synthetic construct
SKNRGDKERF

SEQ ID NO: 111766 - protein, 10 aa, synthetic construct
SKQRGDKERF

SEQ ID NO: 111767 - protein, 10 aa, synthetic construct
SKDRGDKERF

SEQ ID NO: 111768 - protein, 10 aa, synthetic construct
SKERGDKERF

SEQ ID NO: 111769 - protein, 10 aa, synthetic construct
SRGRGDKERF

SEQ ID NO: 111770 - protein, 10 aa, synthetic construct
SRARGDKERF

SEQ ID NO: 111771 - protein, 10 aa, synthetic construct
SRVRGDKERF

SEQ ID NO: 111772 - protein, 10 aa, synthetic construct
SRPRGDKERF

SEQ ID NO: 111773 - protein, 10 aa, synthetic construct
SRLRGDKERF

SEQ ID NO: 111774 - protein, 10 aa, synthetic construct
SRIRGDKERF

SEQ ID NO: 111775 - protein, 10 aa, synthetic construct
SRMRGDKERF

SEQ ID NO: 111776 - protein, 10 aa, synthetic construct
SRWRGDKERF

SEQ ID NO: 111777 - protein, 10 aa, synthetic construct
SRFRGDKERF

SEQ ID NO: 111778 - protein, 10 aa, synthetic construct
SRKRGDKERF

SEQ ID NO: 111779 - protein, 10 aa, synthetic construct
SRRRGDKERF

SEQ ID NO: 111780 - protein, 10 aa, synthetic construct
SRHRGDKERF

SEQ ID NO: 111781 - protein, 10 aa, synthetic construct
SRSRGDKERF

SEQ ID NO: 111782 - protein, 10 aa, synthetic construct
SRTRGDKERF

SEQ ID NO: 111783 - protein, 10 aa, synthetic construct
SRYRGDKERF

SEQ ID NO: 111784 - protein, 10 aa, synthetic construct
SRNRGDKERF

SEQ ID NO: 111785 - protein, 10 aa, synthetic construct
SRQRGDKERF

SEQ ID NO: 111786 - protein, 10 aa, synthetic construct
SRDRGDKERF

SEQ ID NO: 111787 - protein, 10 aa, synthetic construct
SRERGDKERF

SEQ ID NO: 111788 - protein, 10 aa, synthetic construct
SHGRGDKERF

SEQ ID NO: 111789 - protein, 10 aa, synthetic construct
SHARGDKERF

SEQ ID NO: 111790 - protein, 10 aa, synthetic construct
SHVRGDKERF

SEQ ID NO: 111791 - protein, 10 aa, synthetic construct
SHPRGDKERF

SEQ ID NO: 111792 - protein, 10 aa, synthetic construct
SHLRGDKERF

SEQ ID NO: 111793 - protein, 10 aa, synthetic construct
SHIRGDKERF

SEQ ID NO: 111794 - protein, 10 aa, synthetic construct
SHMRGDKERF

SEQ ID NO: 111795 - protein, 10 aa, synthetic construct
SHWRGDKERF

SEQ ID NO: 111796 - protein, 10 aa, synthetic construct
SHFRGDKERF

SEQ ID NO: 111797 - protein, 10 aa, synthetic construct
SHKRGDKERF

SEQ ID NO: 111798 - protein, 10 aa, synthetic construct
SHRRGDKERF

SEQ ID NO: 111799 - protein, 10 aa, synthetic construct
SHHRGDKERF

SEQ ID NO: 111800 - protein, 10 aa, synthetic construct
SHSRGDKERF

SEQ ID NO: 111801 - protein, 10 aa, synthetic construct
SHTRGDKERF

SEQ ID NO: 111802 - protein, 10 aa, synthetic construct
SHYRGDKERF

SEQ ID NO: 111803 - protein, 10 aa, synthetic construct
SHNRGDKERF

SEQ ID NO: 111804 - protein, 10 aa, synthetic construct
SHQRGDKERF

SEQ ID NO: 111805 - protein, 10 aa, synthetic construct
SHDRGDKERF

SEQ ID NO: 111806 - protein, 10 aa, synthetic construct
SHERGDKERF

SEQ ID NO: 111807 - protein, 10 aa, synthetic construct
SSGRGDKERF

SEQ ID NO: 111808 - protein, 10 aa, synthetic construct
SSARGDKERF

SEQ ID NO: 111809 - protein, 10 aa, synthetic construct
SSVRGDKERF

SEQ ID NO: 111810 - protein, 10 aa, synthetic construct
SSPRGDKERF

SEQ ID NO: 111811 - protein, 10 aa, synthetic construct
SSLRGDKERF

SEQ ID NO: 111812 - protein, 10 aa, synthetic construct
SSIRGDKERF

SEQ ID NO: 111813 - protein, 10 aa, synthetic construct
SSMRGDKERF

SEQ ID NO: 111814 - protein, 10 aa, synthetic construct
SSWRGDKERF

SEQ ID NO: 111815 - protein, 10 aa, synthetic construct
SSFRGDKERF

SEQ ID NO: 111816 - protein, 10 aa, synthetic construct
SSKRGDKERF

SEQ ID NO: 111817 - protein, 10 aa, synthetic construct
SSRRGDKERF

SEQ ID NO: 111818 - protein, 10 aa, synthetic construct
SSHRGDKERF

SEQ ID NO: 111819 - protein, 10 aa, synthetic construct
SSSRGDKERF

SEQ ID NO: 111820 - protein, 10 aa, synthetic construct
SSTRGDKERF

SEQ ID NO: 111821 - protein, 10 aa, synthetic construct
SSYRGDKERF

SEQ ID NO: 111822 - protein, 10 aa, synthetic construct
SSNRGDKERF

SEQ ID NO: 111823 - protein, 10 aa, synthetic construct
SSQRGDKERF

SEQ ID NO: 111824 - protein, 10 aa, synthetic construct
SSDRGDKERF

SEQ ID NO: 111825 - protein, 10 aa, synthetic construct
SSERGDKERF

SEQ ID NO: 111826 - protein, 10 aa, synthetic construct
STGRGDKERF

SEQ ID NO: 111827 - protein, 10 aa, synthetic construct
STARGDKERF

SEQ ID NO: 111828 - protein, 10 aa, synthetic construct
STVRGDKERF

SEQ ID NO: 111829 - protein, 10 aa, synthetic construct
STPRGDKERF

SEQ ID NO: 111830 - protein, 10 aa, synthetic construct
STLRGDKERF

SEQ ID NO: 111831 - protein, 10 aa, synthetic construct
STIRGDKERF

SEQ ID NO: 111832 - protein, 10 aa, synthetic construct
STMRGDKERF

SEQ ID NO: 111833 - protein, 10 aa, synthetic construct
STWRGDKERF

SEQ ID NO: 111834 - protein, 10 aa, synthetic construct
STFRGDKERF

SEQ ID NO: 111835 - protein, 10 aa, synthetic construct
STKRGDKERF

SEQ ID NO: 111836 - protein, 10 aa, synthetic construct
STRRGDKERF

SEQ ID NO: 111837 - protein, 10 aa, synthetic construct
STHRGDKERF

SEQ ID NO: 111838 - protein, 10 aa, synthetic construct
STSRGDKERF

SEQ ID NO: 111839 - protein, 10 aa, synthetic construct
STTRGDKERF

SEQ ID NO: 111840 - protein, 10 aa, synthetic construct
STYRGDKERF

SEQ ID NO: 111841 - protein, 10 aa, synthetic construct
STNRGDKERF

SEQ ID NO: 111842 - protein, 10 aa, synthetic construct
STQRGDKERF

SEQ ID NO: 111843 - protein, 10 aa, synthetic construct
STDRGDKERF

SEQ ID NO: 111844 - protein, 10 aa, synthetic construct
STERGDKERF

SEQ ID NO: 111845 - protein, 10 aa, synthetic construct
SYGRGDKERF

SEQ ID NO: 111846 - protein, 10 aa, synthetic construct
SYARGDKERF

SEQ ID NO: 111847 - protein, 10 aa, synthetic construct
SYVRGDKERF

SEQ ID NO: 111848 - protein, 10 aa, synthetic construct
SYPRGDKERF

SEQ ID NO: 111849 - protein, 10 aa, synthetic construct
SYLRGDKERF

SEQ ID NO: 111850 - protein, 10 aa, synthetic construct
SYIRGDKERF

SEQ ID NO: 111851 - protein, 10 aa, synthetic construct
SYMRGDKERF

SEQ ID NO: 111852 - protein, 10 aa, synthetic construct
SYWRGDKERF

SEQ ID NO: 111853 - protein, 10 aa, synthetic construct
SYFRGDKERF

SEQ ID NO: 111854 - protein, 10 aa, synthetic construct
SYKRGDKERF

SEQ ID NO: 111855 - protein, 10 aa, synthetic construct
SYRRGDKERF

SEQ ID NO: 111856 - protein, 10 aa, synthetic construct
SYHRGDKERF

SEQ ID NO: 111857 - protein, 10 aa, synthetic construct
SYSRGDKERF

SEQ ID NO: 111858 - protein, 10 aa, synthetic construct
SYTRGDKERF

SEQ ID NO: 111859 - protein, 10 aa, synthetic construct
SYYRGDKERF

SEQ ID NO: 111860 - protein, 10 aa, synthetic construct
SYNRGDKERF

SEQ ID NO: 111861 - protein, 10 aa, synthetic construct
SYQRGDKERF

SEQ ID NO: 111862 - protein, 10 aa, synthetic construct
SYDRGDKERF

SEQ ID NO: 111863 - protein, 10 aa, synthetic construct
SYERGDKERF

SEQ ID NO: 111864 - protein, 10 aa, synthetic construct
SNGRGDKERF

SEQ ID NO: 111865 - protein, 10 aa, synthetic construct
SNARGDKERF

SEQ ID NO: 111866 - protein, 10 aa, synthetic construct
SNVRGDKERF

SEQ ID NO: 111867 - protein, 10 aa, synthetic construct
SNPRGDKERF

SEQ ID NO: 111868 - protein, 10 aa, synthetic construct
SNLRGDKERF

SEQ ID NO: 111869 - protein, 10 aa, synthetic construct
SNIRGDKERF

SEQ ID NO: 111870 - protein, 10 aa, synthetic construct
SNMRGDKERF

SEQ ID NO: 111871 - protein, 10 aa, synthetic construct
SNWRGDKERF

SEQ ID NO: 111872 - protein, 10 aa, synthetic construct
SNFRGDKERF

SEQ ID NO: 111873 - protein, 10 aa, synthetic construct
SNKRGDKERF

SEQ ID NO: 111874 - protein, 10 aa, synthetic construct
SNRRGDKERF

SEQ ID NO: 111875 - protein, 10 aa, synthetic construct
SNHRGDKERF

SEQ ID NO: 111876 - protein, 10 aa, synthetic construct
SNSRGDKERF

SEQ ID NO: 111877 - protein, 10 aa, synthetic construct
SNTRGDKERF

SEQ ID NO: 111878 - protein, 10 aa, synthetic construct
SNYRGDKERF

SEQ ID NO: 111879 - protein, 10 aa, synthetic construct
SNNRGDKERF

SEQ ID NO: 111880 - protein, 10 aa, synthetic construct
SNQRGDKERF

SEQ ID NO: 111881 - protein, 10 aa, synthetic construct
SNDRGDKERF

SEQ ID NO: 111882 - protein, 10 aa, synthetic construct
SNERGDKERF

SEQ ID NO: 111883 - protein, 10 aa, synthetic construct
SQGRGDKERF

SEQ ID NO: 111884 - protein, 10 aa, synthetic construct
SQARGDKERF

SEQ ID NO: 111885 - protein, 10 aa, synthetic construct
SQVRGDKERF

SEQ ID NO: 111886 - protein, 10 aa, synthetic construct
SQPRGDKERF

SEQ ID NO: 111887 - protein, 10 aa, synthetic construct
SQLRGDKERF

SEQ ID NO: 111888 - protein, 10 aa, synthetic construct
SQIRGDKERF

SEQ ID NO: 111889 - protein, 10 aa, synthetic construct
SQMRGDKERF

SEQ ID NO: 111890 - protein, 10 aa, synthetic construct
SQWRGDKERF

SEQ ID NO: 111891 - protein, 10 aa, synthetic construct
SQFRGDKERF

SEQ ID NO: 111892 - protein, 10 aa, synthetic construct
SQKRGDKERF

SEQ ID NO: 111893 - protein, 10 aa, synthetic construct
SQRRGDKERF

SEQ ID NO: 111894 - protein, 10 aa, synthetic construct
SQHRGDKERF

SEQ ID NO: 111895 - protein, 10 aa, synthetic construct
SQSRGDKERF

SEQ ID NO: 111896 - protein, 10 aa, synthetic construct
SQTRGDKERF

SEQ ID NO: 111897 - protein, 10 aa, synthetic construct
SQYRGDKERF

SEQ ID NO: 111898 - protein, 10 aa, synthetic construct
SQNRGDKERF

SEQ ID NO: 111899 - protein, 10 aa, synthetic construct
SQQRGDKERF

SEQ ID NO: 111900 - protein, 10 aa, synthetic construct
SQDRGDKERF

SEQ ID NO: 111901 - protein, 10 aa, synthetic construct
SQERGDKERF

SEQ ID NO: 111902 - protein, 10 aa, synthetic construct
SDGRGDKERF

SEQ ID NO: 111903 - protein, 10 aa, synthetic construct
SDARGDKERF

SEQ ID NO: 111904 - protein, 10 aa, synthetic construct
SDVRGDKERF

SEQ ID NO: 111905 - protein, 10 aa, synthetic construct
SDPRGDKERF

SEQ ID NO: 111906 - protein, 10 aa, synthetic construct
SDLRGDKERF

SEQ ID NO: 111907 - protein, 10 aa, synthetic construct
SDIRGDKERF

SEQ ID NO: 111908 - protein, 10 aa, synthetic construct
SDMRGDKERF

SEQ ID NO: 111909 - protein, 10 aa, synthetic construct
SDWRGDKERF

SEQ ID NO: 111910 - protein, 10 aa, synthetic construct
SDFRGDKERF

SEQ ID NO: 111911 - protein, 10 aa, synthetic construct
SDKRGDKERF

SEQ ID NO: 111912 - protein, 10 aa, synthetic construct
SDRRGDKERF

SEQ ID NO: 111913 - protein, 10 aa, synthetic construct
SDHRGDKERF

SEQ ID NO: 111914 - protein, 10 aa, synthetic construct
SDSRGDKERF

SEQ ID NO: 111915 - protein, 10 aa, synthetic construct
SDTRGDKERF

SEQ ID NO: 111916 - protein, 10 aa, synthetic construct
SDYRGDKERF

SEQ ID NO: 111917 - protein, 10 aa, synthetic construct
SDNRGDKERF

SEQ ID NO: 111918 - protein, 10 aa, synthetic construct
SDQRGDKERF

SEQ ID NO: 111919 - protein, 10 aa, synthetic construct
SDDRGDKERF

SEQ ID NO: 111920 - protein, 10 aa, synthetic construct
SDERGDKERF

SEQ ID NO: 111921 - protein, 10 aa, synthetic construct
SEGRGDKERF

SEQ ID NO: 111922 - protein, 10 aa, synthetic construct
SEARGDKERF

SEQ ID NO: 111923 - protein, 10 aa, synthetic construct
SEVRGDKERF

SEQ ID NO: 111924 - protein, 10 aa, synthetic construct
SEPRGDKERF

SEQ ID NO: 111925 - protein, 10 aa, synthetic construct
SELRGDKERF

SEQ ID NO: 111926 - protein, 10 aa, synthetic construct
SEIRGDKERF

SEQ ID NO: 111927 - protein, 10 aa, synthetic construct
SEMRGDKERF

SEQ ID NO: 111928 - protein, 10 aa, synthetic construct
SEWRGDKERF

SEQ ID NO: 111929 - protein, 10 aa, synthetic construct
SEFRGDKERF

SEQ ID NO: 111930 - protein, 10 aa, synthetic construct
SEKRGDKERF

SEQ ID NO: 111931 - protein, 10 aa, synthetic construct
SERRGDKERF

SEQ ID NO: 111932 - protein, 10 aa, synthetic construct
SEHRGDKERF

SEQ ID NO: 111933 - protein, 10 aa, synthetic construct
SESRGDKERF

SEQ ID NO: 111934 - protein, 10 aa, synthetic construct
SETRGDKERF

SEQ ID NO: 111935 - protein, 10 aa, synthetic construct
SEYRGDKERF

SEQ ID NO: 111936 - protein, 10 aa, synthetic construct
SENRGDKERF

SEQ ID NO: 111937 - protein, 10 aa, synthetic construct
SEQRGDKERF

SEQ ID NO: 111938 - protein, 10 aa, synthetic construct
SEDRGDKERF

SEQ ID NO: 111939 - protein, 10 aa, synthetic construct
SEERGDKERF

SEQ ID NO: 111940 - protein, 10 aa, synthetic construct
TGGRGDKERF

SEQ ID NO: 111941 - protein, 10 aa, synthetic construct
TGARGDKERF

SEQ ID NO: 111942 - protein, 10 aa, synthetic construct
TGVRGDKERF

SEQ ID NO: 111943 - protein, 10 aa, synthetic construct
TGPRGDKERF

SEQ ID NO: 111944 - protein, 10 aa, synthetic construct
TGLRGDKERF

SEQ ID NO: 111945 - protein, 10 aa, synthetic construct
TGIRGDKERF

SEQ ID NO: 111946 - protein, 10 aa, synthetic construct
TGMRGDKERF

SEQ ID NO: 111947 - protein, 10 aa, synthetic construct
TGWRGDKERF

SEQ ID NO: 111948 - protein, 10 aa, synthetic construct
TGFRGDKERF

SEQ ID NO: 111949 - protein, 10 aa, synthetic construct
TGKRGDKERF

SEQ ID NO: 111950 - protein, 10 aa, synthetic construct
TGRRGDKERF

SEQ ID NO: 111951 - protein, 10 aa, synthetic construct
TGHRGDKERF

SEQ ID NO: 111952 - protein, 10 aa, synthetic construct
TGSRGDKERF

SEQ ID NO: 111953 - protein, 10 aa, synthetic construct
TGTRGDKERF

SEQ ID NO: 111954 - protein, 10 aa, synthetic construct
TGYRGDKERF

SEQ ID NO: 111955 - protein, 10 aa, synthetic construct
TGNRGDKERF

SEQ ID NO: 111956 - protein, 10 aa, synthetic construct
TGQRGDKERF

SEQ ID NO: 111957 - protein, 10 aa, synthetic construct
TGDRGDKERF

SEQ ID NO: 111958 - protein, 10 aa, synthetic construct
TGERGDKERF

SEQ ID NO: 111959 - protein, 10 aa, synthetic construct
TAGRGDKERF

SEQ ID NO: 111960 - protein, 10 aa, synthetic construct
TAARGDKERF

SEQ ID NO: 111961 - protein, 10 aa, synthetic construct
TAVRGDKERF

SEQ ID NO: 111962 - protein, 10 aa, synthetic construct
TAPRGDKERF

SEQ ID NO: 111963 - protein, 10 aa, synthetic construct
TALRGDKERF

SEQ ID NO: 111964 - protein, 10 aa, synthetic construct
TAIRGDKERF

SEQ ID NO: 111965 - protein, 10 aa, synthetic construct
TAMRGDKERF

SEQ ID NO: 111966 - protein, 10 aa, synthetic construct
TAWRGDKERF

SEQ ID NO: 111967 - protein, 10 aa, synthetic construct
TAFRGDKERF

SEQ ID NO: 111968 - protein, 10 aa, synthetic construct
TAKRGDKERF

SEQ ID NO: 111969 - protein, 10 aa, synthetic construct
TARRGDKERF

SEQ ID NO: 111970 - protein, 10 aa, synthetic construct
TAHRGDKERF

SEQ ID NO: 111971 - protein, 10 aa, synthetic construct
TASRGDKERF

SEQ ID NO: 111972 - protein, 10 aa, synthetic construct
TATRGDKERF

SEQ ID NO: 111973 - protein, 10 aa, synthetic construct
TAYRGDKERF

SEQ ID NO: 111974 - protein, 10 aa, synthetic construct
TANRGDKERF

SEQ ID NO: 111975 - protein, 10 aa, synthetic construct
TAQRGDKERF

SEQ ID NO: 111976 - protein, 10 aa, synthetic construct
TADRGDKERF

SEQ ID NO: 111977 - protein, 10 aa, synthetic construct
TAERGDKERF

SEQ ID NO: 111978 - protein, 10 aa, synthetic construct
TVGRGDKERF

SEQ ID NO: 111979 - protein, 10 aa, synthetic construct
TVARGDKERF

SEQ ID NO: 111980 - protein, 10 aa, synthetic construct
TVVRGDKERF

SEQ ID NO: 111981 - protein, 10 aa, synthetic construct
TVPRGDKERF

SEQ ID NO: 111982 - protein, 10 aa, synthetic construct
TVLRGDKERF

SEQ ID NO: 111983 - protein, 10 aa, synthetic construct
TVIRGDKERF

SEQ ID NO: 111984 - protein, 10 aa, synthetic construct
TVMRGDKERF

SEQ ID NO: 111985 - protein, 10 aa, synthetic construct
TVWRGDKERF

SEQ ID NO: 111986 - protein, 10 aa, synthetic construct
TVFRGDKERF

SEQ ID NO: 111987 - protein, 10 aa, synthetic construct
TVKRGDKERF

SEQ ID NO: 111988 - protein, 10 aa, synthetic construct
TVRRGDKERF

SEQ ID NO: 111989 - protein, 10 aa, synthetic construct
TVHRGDKERF

SEQ ID NO: 111990 - protein, 10 aa, synthetic construct
TVSRGDKERF

SEQ ID NO: 111991 - protein, 10 aa, synthetic construct
TVTRGDKERF

SEQ ID NO: 111992 - protein, 10 aa, synthetic construct
TVYRGDKERF

SEQ ID NO: 111993 - protein, 10 aa, synthetic construct
TVNRGDKERF

SEQ ID NO: 111994 - protein, 10 aa, synthetic construct
TVQRGDKERF

SEQ ID NO: 111995 - protein, 10 aa, synthetic construct
TVDRGDKERF

SEQ ID NO: 111996 - protein, 10 aa, synthetic construct
TVERGDKERF

SEQ ID NO: 111997 - protein, 10 aa, synthetic construct
TPGRGDKERF

SEQ ID NO: 111998 - protein, 10 aa, synthetic construct
TPARGDKERF

SEQ ID NO: 111999 - protein, 10 aa, synthetic construct
TPVRGDKERF

SEQ ID NO: 112000 - protein, 10 aa, synthetic construct
TPPRGDKERF

SEQ ID NO: 112001 - protein, 10 aa, synthetic construct
TPLRGDKERF

SEQ ID NO: 112002 - protein, 10 aa, synthetic construct
TPIRGDKERF

SEQ ID NO: 112003 - protein, 10 aa, synthetic construct
TPMRGDKERF

SEQ ID NO: 112004 - protein, 10 aa, synthetic construct
TPWRGDKERF

SEQ ID NO: 112005 - protein, 10 aa, synthetic construct
TPFRGDKERF

SEQ ID NO: 112006 - protein, 10 aa, synthetic construct
TPKRGDKERF

SEQ ID NO: 112007 - protein, 10 aa, synthetic construct
TPRRGDKERF

SEQ ID NO: 112008 - protein, 10 aa, synthetic construct
TPHRGDKERF

SEQ ID NO: 112009 - protein, 10 aa, synthetic construct
TPSRGDKERF

SEQ ID NO: 112010 - protein, 10 aa, synthetic construct
TPTRGDKERF

SEQ ID NO: 112011 - protein, 10 aa, synthetic construct
TPYRGDKERF

SEQ ID NO: 112012 - protein, 10 aa, synthetic construct
TPNRGDKERF

SEQ ID NO: 112013 - protein, 10 aa, synthetic construct
TPQRGDKERF

SEQ ID NO: 112014 - protein, 10 aa, synthetic construct
TPDRGDKERF

SEQ ID NO: 112015 - protein, 10 aa, synthetic construct
TPERGDKERF

SEQ ID NO: 112016 - protein, 10 aa, synthetic construct
TLGRGDKERF

SEQ ID NO: 112017 - protein, 10 aa, synthetic construct
TLARGDKERF

SEQ ID NO: 112018 - protein, 10 aa, synthetic construct
TLVRGDKERF

SEQ ID NO: 112019 - protein, 10 aa, synthetic construct
TLPRGDKERF

SEQ ID NO: 112020 - protein, 10 aa, synthetic construct
TLLRGDKERF

SEQ ID NO: 112021 - protein, 10 aa, synthetic construct
TLIRGDKERF

SEQ ID NO: 112022 - protein, 10 aa, synthetic construct
TLMRGDKERF

SEQ ID NO: 112023 - protein, 10 aa, synthetic construct
TLWRGDKERF

SEQ ID NO: 112024 - protein, 10 aa, synthetic construct
TLFRGDKERF

SEQ ID NO: 112025 - protein, 10 aa, synthetic construct
TLKRGDKERF

SEQ ID NO: 112026 - protein, 10 aa, synthetic construct
TLRRGDKERF

SEQ ID NO: 112027 - protein, 10 aa, synthetic construct
TLHRGDKERF

SEQ ID NO: 112028 - protein, 10 aa, synthetic construct
TLSRGDKERF

SEQ ID NO: 112029 - protein, 10 aa, synthetic construct
TLTRGDKERF

SEQ ID NO: 112030 - protein, 10 aa, synthetic construct
TLYRGDKERF

SEQ ID NO: 112031 - protein, 10 aa, synthetic construct
TLNRGDKERF

SEQ ID NO: 112032 - protein, 10 aa, synthetic construct
TLQRGDKERF

SEQ ID NO: 112033 - protein, 10 aa, synthetic construct
TLDRGDKERF

SEQ ID NO: 112034 - protein, 10 aa, synthetic construct
TLERGDKERF

SEQ ID NO: 112035 - protein, 10 aa, synthetic construct
TIGRGDKERF

SEQ ID NO: 112036 - protein, 10 aa, synthetic construct
TIARGDKERF

SEQ ID NO: 112037 - protein, 10 aa, synthetic construct
TIVRGDKERF

SEQ ID NO: 112038 - protein, 10 aa, synthetic construct
TIPRGDKERF

SEQ ID NO: 112039 - protein, 10 aa, synthetic construct
TILRGDKERF

SEQ ID NO: 112040 - protein, 10 aa, synthetic construct
TIIRGDKERF

SEQ ID NO: 112041 - protein, 10 aa, synthetic construct
TIMRGDKERF

SEQ ID NO: 112042 - protein, 10 aa, synthetic construct
TIWRGDKERF

SEQ ID NO: 112043 - protein, 10 aa, synthetic construct
TIFRGDKERF

SEQ ID NO: 112044 - protein, 10 aa, synthetic construct
TIKRGDKERF

SEQ ID NO: 112045 - protein, 10 aa, synthetic construct
TIRRGDKERF

SEQ ID NO: 112046 - protein, 10 aa, synthetic construct
TIHRGDKERF

SEQ ID NO: 112047 - protein, 10 aa, synthetic construct
TISRGDKERF

SEQ ID NO: 112048 - protein, 10 aa, synthetic construct
TITRGDKERF

SEQ ID NO: 112049 - protein, 10 aa, synthetic construct
TIYRGDKERF

SEQ ID NO: 112050 - protein, 10 aa, synthetic construct
TINRGDKERF

SEQ ID NO: 112051 - protein, 10 aa, synthetic construct
TIQRGDKERF

SEQ ID NO: 112052 - protein, 10 aa, synthetic construct
TIDRGDKERF

SEQ ID NO: 112053 - protein, 10 aa, synthetic construct
TIERGDKERF

SEQ ID NO: 112054 - protein, 10 aa, synthetic construct
TMGRGDKERF

SEQ ID NO: 112055 - protein, 10 aa, synthetic construct
TMARGDKERF

SEQ ID NO: 112056 - protein, 10 aa, synthetic construct
TMVRGDKERF

SEQ ID NO: 112057 - protein, 10 aa, synthetic construct
TMPRGDKERF

SEQ ID NO: 112058 - protein, 10 aa, synthetic construct
TMLRGDKERF

SEQ ID NO: 112059 - protein, 10 aa, synthetic construct
TMIRGDKERF

SEQ ID NO: 112060 - protein, 10 aa, synthetic construct
TMMRGDKERF

SEQ ID NO: 112061 - protein, 10 aa, synthetic construct
TMWRGDKERF

SEQ ID NO: 112062 - protein, 10 aa, synthetic construct
TMFRGDKERF

SEQ ID NO: 112063 - protein, 10 aa, synthetic construct
TMKRGDKERF

SEQ ID NO: 112064 - protein, 10 aa, synthetic construct
TMRRGDKERF

SEQ ID NO: 112065 - protein, 10 aa, synthetic construct
TMHRGDKERF

SEQ ID NO: 112066 - protein, 10 aa, synthetic construct
TMSRGDKERF

SEQ ID NO: 112067 - protein, 10 aa, synthetic construct
TMTRGDKERF

SEQ ID NO: 112068 - protein, 10 aa, synthetic construct
TMYRGDKERF

SEQ ID NO: 112069 - protein, 10 aa, synthetic construct
TMNRGDKERF

SEQ ID NO: 112070 - protein, 10 aa, synthetic construct
TMQRGDKERF

SEQ ID NO: 112071 - protein, 10 aa, synthetic construct
TMDRGDKERF

SEQ ID NO: 112072 - protein, 10 aa, synthetic construct
TMERGDKERF

SEQ ID NO: 112073 - protein, 10 aa, synthetic construct
TWGRGDKERF

SEQ ID NO: 112074 - protein, 10 aa, synthetic construct
TWARGDKERF

SEQ ID NO: 112075 - protein, 10 aa, synthetic construct
TWVRGDKERF

SEQ ID NO: 112076 - protein, 10 aa, synthetic construct
TWPRGDKERF

SEQ ID NO: 112077 - protein, 10 aa, synthetic construct
TWLRGDKERF

SEQ ID NO: 112078 - protein, 10 aa, synthetic construct
TWIRGDKERF

SEQ ID NO: 112079 - protein, 10 aa, synthetic construct
TWMRGDKERF

SEQ ID NO: 112080 - protein, 10 aa, synthetic construct
TWWRGDKERF

SEQ ID NO: 112081 - protein, 10 aa, synthetic construct
TWFRGDKERF

SEQ ID NO: 112082 - protein, 10 aa, synthetic construct
TWKRGDKERF

SEQ ID NO: 112083 - protein, 10 aa, synthetic construct
TWRRGDKERF

SEQ ID NO: 112084 - protein, 10 aa, synthetic construct
TWHRGDKERF

SEQ ID NO: 112085 - protein, 10 aa, synthetic construct
TWSRGDKERF

SEQ ID NO: 112086 - protein, 10 aa, synthetic construct
TWTRGDKERF

SEQ ID NO: 112087 - protein, 10 aa, synthetic construct
TWYRGDKERF

SEQ ID NO: 112088 - protein, 10 aa, synthetic construct
TWNRGDKERF

SEQ ID NO: 112089 - protein, 10 aa, synthetic construct
TWQRGDKERF

SEQ ID NO: 112090 - protein, 10 aa, synthetic construct
TWDRGDKERF

SEQ ID NO: 112091 - protein, 10 aa, synthetic construct
TWERGDKERF

SEQ ID NO: 112092 - protein, 10 aa, synthetic construct
TFGRGDKERF

SEQ ID NO: 112093 - protein, 10 aa, synthetic construct
TFARGDKERF

SEQ ID NO: 112094 - protein, 10 aa, synthetic construct
TFVRGDKERF

SEQ ID NO: 112095 - protein, 10 aa, synthetic construct
TFPRGDKERF

SEQ ID NO: 112096 - protein, 10 aa, synthetic construct
TFLRGDKERF

SEQ ID NO: 112097 - protein, 10 aa, synthetic construct
TFIRGDKERF

SEQ ID NO: 112098 - protein, 10 aa, synthetic construct
TFMRGDKERF

SEQ ID NO: 112099 - protein, 10 aa, synthetic construct
TFWRGDKERF

SEQ ID NO: 112100 - protein, 10 aa, synthetic construct
TFFRGDKERF

SEQ ID NO: 112101 - protein, 10 aa, synthetic construct
TFKRGDKERF

SEQ ID NO: 112102 - protein, 10 aa, synthetic construct
TFRRGDKERF

SEQ ID NO: 112103 - protein, 10 aa, synthetic construct
TFHRGDKERF

SEQ ID NO: 112104 - protein, 10 aa, synthetic construct
TFSRGDKERF

SEQ ID NO: 112105 - protein, 10 aa, synthetic construct
TFTRGDKERF

SEQ ID NO: 112106 - protein, 10 aa, synthetic construct
TFYRGDKERF

SEQ ID NO: 112107 - protein, 10 aa, synthetic construct
TFNRGDKERF

SEQ ID NO: 112108 - protein, 10 aa, synthetic construct
TFQRGDKERF

SEQ ID NO: 112109 - protein, 10 aa, synthetic construct
TFDRGDKERF

SEQ ID NO: 112110 - protein, 10 aa, synthetic construct
TFERGDKERF

SEQ ID NO: 112111 - protein, 10 aa, synthetic construct
TKGRGDKERF

SEQ ID NO: 112112 - protein, 10 aa, synthetic construct
TKARGDKERF

SEQ ID NO: 112113 - protein, 10 aa, synthetic construct
TKVRGDKERF

SEQ ID NO: 112114 - protein, 10 aa, synthetic construct
TKPRGDKERF

SEQ ID NO: 112115 - protein, 10 aa, synthetic construct
TKLRGDKERF

SEQ ID NO: 112116 - protein, 10 aa, synthetic construct
TKIRGDKERF

SEQ ID NO: 112117 - protein, 10 aa, synthetic construct
TKMRGDKERF

SEQ ID NO: 112118 - protein, 10 aa, synthetic construct
TKWRGDKERF

SEQ ID NO: 112119 - protein, 10 aa, synthetic construct
TKFRGDKERF

SEQ ID NO: 112120 - protein, 10 aa, synthetic construct
TKKRGDKERF

SEQ ID NO: 112121 - protein, 10 aa, synthetic construct
TKRRGDKERF

SEQ ID NO: 112122 - protein, 10 aa, synthetic construct
TKHRGDKERF

SEQ ID NO: 112123 - protein, 10 aa, synthetic construct
TKSRGDKERF

SEQ ID NO: 112124 - protein, 10 aa, synthetic construct
TKTRGDKERF

SEQ ID NO: 112125 - protein, 10 aa, synthetic construct
TKYRGDKERF

SEQ ID NO: 112126 - protein, 10 aa, synthetic construct
TKNRGDKERF

SEQ ID NO: 112127 - protein, 10 aa, synthetic construct
TKQRGDKERF

SEQ ID NO: 112128 - protein, 10 aa, synthetic construct
TKDRGDKERF

SEQ ID NO: 112129 - protein, 10 aa, synthetic construct
TKERGDKERF

SEQ ID NO: 112130 - protein, 10 aa, synthetic construct
TRGRGDKERF

SEQ ID NO: 112131 - protein, 10 aa, synthetic construct
TRARGDKERF

SEQ ID NO: 112132 - protein, 10 aa, synthetic construct
TRVRGDKERF

SEQ ID NO: 112133 - protein, 10 aa, synthetic construct
TRPRGDKERF

SEQ ID NO: 112134 - protein, 10 aa, synthetic construct
TRLRGDKERF

SEQ ID NO: 112135 - protein, 10 aa, synthetic construct
TRIRGDKERF

SEQ ID NO: 112136 - protein, 10 aa, synthetic construct
TRMRGDKERF

SEQ ID NO: 112137 - protein, 10 aa, synthetic construct
TRWRGDKERF

SEQ ID NO: 112138 - protein, 10 aa, synthetic construct
TRFRGDKERF

SEQ ID NO: 112139 - protein, 10 aa, synthetic construct
TRKRGDKERF

SEQ ID NO: 112140 - protein, 10 aa, synthetic construct
TRRRGDKERF

SEQ ID NO: 112141 - protein, 10 aa, synthetic construct
TRHRGDKERF

SEQ ID NO: 112142 - protein, 10 aa, synthetic construct
TRSRGDKERF

SEQ ID NO: 112143 - protein, 10 aa, synthetic construct
TRTRGDKERF

SEQ ID NO: 112144 - protein, 10 aa, synthetic construct
TRYRGDKERF

SEQ ID NO: 112145 - protein, 10 aa, synthetic construct
TRNRGDKERF

SEQ ID NO: 112146 - protein, 10 aa, synthetic construct
TRQRGDKERF

SEQ ID NO: 112147 - protein, 10 aa, synthetic construct
TRDRGDKERF

SEQ ID NO: 112148 - protein, 10 aa, synthetic construct
TRERGDKERF

SEQ ID NO: 112149 - protein, 10 aa, synthetic construct
THGRGDKERF

SEQ ID NO: 112150 - protein, 10 aa, synthetic construct
THARGDKERF

SEQ ID NO: 112151 - protein, 10 aa, synthetic construct
THVRGDKERF

SEQ ID NO: 112152 - protein, 10 aa, synthetic construct
THPRGDKERF

SEQ ID NO: 112153 - protein, 10 aa, synthetic construct
THLRGDKERF

SEQ ID NO: 112154 - protein, 10 aa, synthetic construct
THIRGDKERF

SEQ ID NO: 112155 - protein, 10 aa, synthetic construct
THMRGDKERF

SEQ ID NO: 112156 - protein, 10 aa, synthetic construct
THWRGDKERF

SEQ ID NO: 112157 - protein, 10 aa, synthetic construct
THFRGDKERF

SEQ ID NO: 112158 - protein, 10 aa, synthetic construct
THKRGDKERF

SEQ ID NO: 112159 - protein, 10 aa, synthetic construct
THRRGDKERF

SEQ ID NO: 112160 - protein, 10 aa, synthetic construct
THHRGDKERF

SEQ ID NO: 112161 - protein, 10 aa, synthetic construct
THSRGDKERF

SEQ ID NO: 112162 - protein, 10 aa, synthetic construct
THTRGDKERF

SEQ ID NO: 112163 - protein, 10 aa, synthetic construct
THYRGDKERF

SEQ ID NO: 112164 - protein, 10 aa, synthetic construct
THNRGDKERF

SEQ ID NO: 112165 - protein, 10 aa, synthetic construct
THQRGDKERF

SEQ ID NO: 112166 - protein, 10 aa, synthetic construct
THDRGDKERF

SEQ ID NO: 112167 - protein, 10 aa, synthetic construct
THERGDKERF

SEQ ID NO: 112168 - protein, 10 aa, synthetic construct
TSGRGDKERF

SEQ ID NO: 112169 - protein, 10 aa, synthetic construct
TSARGDKERF

SEQ ID NO: 112170 - protein, 10 aa, synthetic construct
TSVRGDKERF

SEQ ID NO: 112171 - protein, 10 aa, synthetic construct
TSPRGDKERF

SEQ ID NO: 112172 - protein, 10 aa, synthetic construct
TSLRGDKERF

SEQ ID NO: 112173 - protein, 10 aa, synthetic construct
TSIRGDKERF

SEQ ID NO: 112174 - protein, 10 aa, synthetic construct
TSMRGDKERF

SEQ ID NO: 112175 - protein, 10 aa, synthetic construct
TSWRGDKERF

SEQ ID NO: 112176 - protein, 10 aa, synthetic construct
TSFRGDKERF

SEQ ID NO: 112177 - protein, 10 aa, synthetic construct
TSKRGDKERF

SEQ ID NO: 112178 - protein, 10 aa, synthetic construct
TSRRGDKERF

SEQ ID NO: 112179 - protein, 10 aa, synthetic construct
TSHRGDKERF

SEQ ID NO: 112180 - protein, 10 aa, synthetic construct
TSSRGDKERF

SEQ ID NO: 112181 - protein, 10 aa, synthetic construct
TSTRGDKERF

SEQ ID NO: 112182 - protein, 10 aa, synthetic construct
TSYRGDKERF

SEQ ID NO: 112183 - protein, 10 aa, synthetic construct
TSNRGDKERF

SEQ ID NO: 112184 - protein, 10 aa, synthetic construct
TSQRGDKERF

SEQ ID NO: 112185 - protein, 10 aa, synthetic construct
TSDRGDKERF

SEQ ID NO: 112186 - protein, 10 aa, synthetic construct
TSERGDKERF

SEQ ID NO: 112187 - protein, 10 aa, synthetic construct
TTGRGDKERF

SEQ ID NO: 112188 - protein, 10 aa, synthetic construct
TTARGDKERF

SEQ ID NO: 112189 - protein, 10 aa, synthetic construct
TTVRGDKERF

SEQ ID NO: 112190 - protein, 10 aa, synthetic construct
TTPRGDKERF

SEQ ID NO: 112191 - protein, 10 aa, synthetic construct
TTLRGDKERF

SEQ ID NO: 112192 - protein, 10 aa, synthetic construct
TTIRGDKERF

SEQ ID NO: 112193 - protein, 10 aa, synthetic construct
TTMRGDKERF

SEQ ID NO: 112194 - protein, 10 aa, synthetic construct
TTWRGDKERF

SEQ ID NO: 112195 - protein, 10 aa, synthetic construct
TTFRGDKERF

SEQ ID NO: 112196 - protein, 10 aa, synthetic construct
TTKRGDKERF

SEQ ID NO: 112197 - protein, 10 aa, synthetic construct
TTRRGDKERF

SEQ ID NO: 112198 - protein, 10 aa, synthetic construct
TTHRGDKERF

SEQ ID NO: 112199 - protein, 10 aa, synthetic construct
TTSRGDKERF

SEQ ID NO: 112200 - protein, 10 aa, synthetic construct
TTTRGDKERF

SEQ ID NO: 112201 - protein, 10 aa, synthetic construct
TTYRGDKERF

SEQ ID NO: 112202 - protein, 10 aa, synthetic construct
TTNRGDKERF

SEQ ID NO: 112203 - protein, 10 aa, synthetic construct
TTQRGDKERF

SEQ ID NO: 112204 - protein, 10 aa, synthetic construct
TTDRGDKERF

SEQ ID NO: 112205 - protein, 10 aa, synthetic construct
TTERGDKERF

SEQ ID NO: 112206 - protein, 10 aa, synthetic construct
TYGRGDKERF

SEQ ID NO: 112207 - protein, 10 aa, synthetic construct
TYARGDKERF

SEQ ID NO: 112208 - protein, 10 aa, synthetic construct
TYVRGDKERF

SEQ ID NO: 112209 - protein, 10 aa, synthetic construct
TYPRGDKERF

SEQ ID NO: 112210 - protein, 10 aa, synthetic construct
TYLRGDKERF

SEQ ID NO: 112211 - protein, 10 aa, synthetic construct
TYIRGDKERF

SEQ ID NO: 112212 - protein, 10 aa, synthetic construct
TYMRGDKERF

SEQ ID NO: 112213 - protein, 10 aa, synthetic construct
TYWRGDKERF

SEQ ID NO: 112214 - protein, 10 aa, synthetic construct
TYFRGDKERF

SEQ ID NO: 112215 - protein, 10 aa, synthetic construct
TYKRGDKERF

SEQ ID NO: 112216 - protein, 10 aa, synthetic construct
TYRRGDKERF

SEQ ID NO: 112217 - protein, 10 aa, synthetic construct
TYHRGDKERF

SEQ ID NO: 112218 - protein, 10 aa, synthetic construct
TYSRGDKERF

SEQ ID NO: 112219 - protein, 10 aa, synthetic construct
TYTRGDKERF

SEQ ID NO: 112220 - protein, 10 aa, synthetic construct
TYYRGDKERF

SEQ ID NO: 112221 - protein, 10 aa, synthetic construct
TYNRGDKERF

SEQ ID NO: 112222 - protein, 10 aa, synthetic construct
TYQRGDKERF

SEQ ID NO: 112223 - protein, 10 aa, synthetic construct
TYDRGDKERF

SEQ ID NO: 112224 - protein, 10 aa, synthetic construct
TYERGDKERF

SEQ ID NO: 112225 - protein, 10 aa, synthetic construct
TNGRGDKERF

SEQ ID NO: 112226 - protein, 10 aa, synthetic construct
TNARGDKERF

SEQ ID NO: 112227 - protein, 10 aa, synthetic construct
TNVRGDKERF

SEQ ID NO: 112228 - protein, 10 aa, synthetic construct
TNPRGDKERF

SEQ ID NO: 112229 - protein, 10 aa, synthetic construct
TNLRGDKERF

SEQ ID NO: 112230 - protein, 10 aa, synthetic construct
TNIRGDKERF

SEQ ID NO: 112231 - protein, 10 aa, synthetic construct
TNMRGDKERF

SEQ ID NO: 112232 - protein, 10 aa, synthetic construct
TNWRGDKERF

SEQ ID NO: 112233 - protein, 10 aa, synthetic construct
TNFRGDKERF

SEQ ID NO: 112234 - protein, 10 aa, synthetic construct
TNKRGDKERF

SEQ ID NO: 112235 - protein, 10 aa, synthetic construct
TNRRGDKERF

SEQ ID NO: 112236 - protein, 10 aa, synthetic construct
TNHRGDKERF

SEQ ID NO: 112237 - protein, 10 aa, synthetic construct
TNSRGDKERF

SEQ ID NO: 112238 - protein, 10 aa, synthetic construct
TNTRGDKERF

SEQ ID NO: 112239 - protein, 10 aa, synthetic construct
TNYRGDKERF

SEQ ID NO: 112240 - protein, 10 aa, synthetic construct
TNNRGDKERF

SEQ ID NO: 112241 - protein, 10 aa, synthetic construct
TNQRGDKERF

SEQ ID NO: 112242 - protein, 10 aa, synthetic construct
TNDRGDKERF

SEQ ID NO: 112243 - protein, 10 aa, synthetic construct
TNERGDKERF

SEQ ID NO: 112244 - protein, 10 aa, synthetic construct
TQGRGDKERF

SEQ ID NO: 112245 - protein, 10 aa, synthetic construct
TQARGDKERF

SEQ ID NO: 112246 - protein, 10 aa, synthetic construct
TQVRGDKERF

SEQ ID NO: 112247 - protein, 10 aa, synthetic construct
TQPRGDKERF

SEQ ID NO: 112248 - protein, 10 aa, synthetic construct
TQLRGDKERF

SEQ ID NO: 112249 - protein, 10 aa, synthetic construct
TQIRGDKERF

SEQ ID NO: 112250 - protein, 10 aa, synthetic construct
TQMRGDKERF

SEQ ID NO: 112251 - protein, 10 aa, synthetic construct
TQWRGDKERF

SEQ ID NO: 112252 - protein, 10 aa, synthetic construct
TQFRGDKERF

SEQ ID NO: 112253 - protein, 10 aa, synthetic construct
TQKRGDKERF

SEQ ID NO: 112254 - protein, 10 aa, synthetic construct
TQRRGDKERF

SEQ ID NO: 112255 - protein, 10 aa, synthetic construct
TQHRGDKERF

SEQ ID NO: 112256 - protein, 10 aa, synthetic construct
TQSRGDKERF

SEQ ID NO: 112257 - protein, 10 aa, synthetic construct
TQTRGDKERF

SEQ ID NO: 112258 - protein, 10 aa, synthetic construct
TQYRGDKERF

SEQ ID NO: 112259 - protein, 10 aa, synthetic construct
TQNRGDKERF

SEQ ID NO: 112260 - protein, 10 aa, synthetic construct
TQQRGDKERF

SEQ ID NO: 112261 - protein, 10 aa, synthetic construct
TQDRGDKERF

SEQ ID NO: 112262 - protein, 10 aa, synthetic construct
TQERGDKERF

SEQ ID NO: 112263 - protein, 10 aa, synthetic construct
TDGRGDKERF

SEQ ID NO: 112264 - protein, 10 aa, synthetic construct
TDARGDKERF

SEQ ID NO: 112265 - protein, 10 aa, synthetic construct
TDVRGDKERF

SEQ ID NO: 112266 - protein, 10 aa, synthetic construct
TDPRGDKERF

SEQ ID NO: 112267 - protein, 10 aa, synthetic construct
TDLRGDKERF

SEQ ID NO: 112268 - protein, 10 aa, synthetic construct
TDIRGDKERF

SEQ ID NO: 112269 - protein, 10 aa, synthetic construct
TDMRGDKERF

SEQ ID NO: 112270 - protein, 10 aa, synthetic construct
TDWRGDKERF

SEQ ID NO: 112271 - protein, 10 aa, synthetic construct
TDFRGDKERF

SEQ ID NO: 112272 - protein, 10 aa, synthetic construct
TDKRGDKERF

SEQ ID NO: 112273 - protein, 10 aa, synthetic construct
TDRRGDKERF

SEQ ID NO: 112274 - protein, 10 aa, synthetic construct
TDHRGDKERF

SEQ ID NO: 112275 - protein, 10 aa, synthetic construct
TDSRGDKERF

SEQ ID NO: 112276 - protein, 10 aa, synthetic construct
TDTRGDKERF

SEQ ID NO: 112277 - protein, 10 aa, synthetic construct
TDYRGDKERF

SEQ ID NO: 112278 - protein, 10 aa, synthetic construct
TDNRGDKERF

SEQ ID NO: 112279 - protein, 10 aa, synthetic construct
TDQRGDKERF

SEQ ID NO: 112280 - protein, 10 aa, synthetic construct
TDDRGDKERF

SEQ ID NO: 112281 - protein, 10 aa, synthetic construct
TDERGDKERF

SEQ ID NO: 112282 - protein, 10 aa, synthetic construct
TEGRGDKERF

SEQ ID NO: 112283 - protein, 10 aa, synthetic construct
TEARGDKERF

SEQ ID NO: 112284 - protein, 10 aa, synthetic construct
TEVRGDKERF

SEQ ID NO: 112285 - protein, 10 aa, synthetic construct
TEPRGDKERF

SEQ ID NO: 112286 - protein, 10 aa, synthetic construct
TELRGDKERF

SEQ ID NO: 112287 - protein, 10 aa, synthetic construct
TEIRGDKERF

SEQ ID NO: 112288 - protein, 10 aa, synthetic construct
TEMRGDKERF

SEQ ID NO: 112289 - protein, 10 aa, synthetic construct
TEWRGDKERF

SEQ ID NO: 112290 - protein, 10 aa, synthetic construct
TEFRGDKERF

SEQ ID NO: 112291 - protein, 10 aa, synthetic construct
TEKRGDKERF

SEQ ID NO: 112292 - protein, 10 aa, synthetic construct
TERRGDKERF

SEQ ID NO: 112293 - protein, 10 aa, synthetic construct
TEHRGDKERF

SEQ ID NO: 112294 - protein, 10 aa, synthetic construct
TESRGDKERF

SEQ ID NO: 112295 - protein, 10 aa, synthetic construct
TETRGDKERF

SEQ ID NO: 112296 - protein, 10 aa, synthetic construct
TEYRGDKERF

SEQ ID NO: 112297 - protein, 10 aa, synthetic construct
TENRGDKERF

SEQ ID NO: 112298 - protein, 10 aa, synthetic construct
TEQRGDKERF

SEQ ID NO: 112299 - protein, 10 aa, synthetic construct
TEDRGDKERF

SEQ ID NO: 112300 - protein, 10 aa, synthetic construct
TEERGDKERF

SEQ ID NO: 112301 - protein, 10 aa, synthetic construct
AGGRGDKERF

SEQ ID NO: 112302 - protein, 10 aa, synthetic construct
AGARGDKERF

SEQ ID NO: 112303 - protein, 10 aa, synthetic construct
AGVRGDKERF

SEQ ID NO: 112304 - protein, 10 aa, synthetic construct
AGPRGDKERF

SEQ ID NO: 112305 - protein, 10 aa, synthetic construct
AGLRGDKERF

SEQ ID NO: 112306 - protein, 10 aa, synthetic construct
AGIRGDKERF

SEQ ID NO: 112307 - protein, 10 aa, synthetic construct
AGMRGDKERF

SEQ ID NO: 112308 - protein, 10 aa, synthetic construct
AGWRGDKERF

SEQ ID NO: 112309 - protein, 10 aa, synthetic construct
AGFRGDKERF

SEQ ID NO: 112310 - protein, 10 aa, synthetic construct
AGKRGDKERF

SEQ ID NO: 112311 - protein, 10 aa, synthetic construct
AGRRGDKERF

SEQ ID NO: 112312 - protein, 10 aa, synthetic construct
AGHRGDKERF

SEQ ID NO: 112313 - protein, 10 aa, synthetic construct
AGSRGDKERF

SEQ ID NO: 112314 - protein, 10 aa, synthetic construct
AGTRGDKERF

SEQ ID NO: 112315 - protein, 10 aa, synthetic construct
AGYRGDKERF

SEQ ID NO: 112316 - protein, 10 aa, synthetic construct
AGNRGDKERF

SEQ ID NO: 112317 - protein, 10 aa, synthetic construct
AGQRGDKERF

SEQ ID NO: 112318 - protein, 10 aa, synthetic construct
AGDRGDKERF

SEQ ID NO: 112319 - protein, 10 aa, synthetic construct
AGERGDKERF

SEQ ID NO: 112320 - protein, 10 aa, synthetic construct
AAGRGDKERF

SEQ ID NO: 112321 - protein, 10 aa, synthetic construct
AAARGDKERF

SEQ ID NO: 112322 - protein, 10 aa, synthetic construct
AAVRGDKERF

SEQ ID NO: 112323 - protein, 10 aa, synthetic construct
AAPRGDKERF

SEQ ID NO: 112324 - protein, 10 aa, synthetic construct
AALRGDKERF

SEQ ID NO: 112325 - protein, 10 aa, synthetic construct
AAIRGDKERF

SEQ ID NO: 112326 - protein, 10 aa, synthetic construct
AAMRGDKERF

SEQ ID NO: 112327 - protein, 10 aa, synthetic construct
AAWRGDKERF

SEQ ID NO: 112328 - protein, 10 aa, synthetic construct
AAFRGDKERF

SEQ ID NO: 112329 - protein, 10 aa, synthetic construct
AAKRGDKERF

SEQ ID NO: 112330 - protein, 10 aa, synthetic construct
AARRGDKERF

SEQ ID NO: 112331 - protein, 10 aa, synthetic construct
AAHRGDKERF

SEQ ID NO: 112332 - protein, 10 aa, synthetic construct
AASRGDKERF

SEQ ID NO: 112333 - protein, 10 aa, synthetic construct
AATRGDKERF

SEQ ID NO: 112334 - protein, 10 aa, synthetic construct
AAYRGDKERF

SEQ ID NO: 112335 - protein, 10 aa, synthetic construct
AANRGDKERF

SEQ ID NO: 112336 - protein, 10 aa, synthetic construct
AAQRGDKERF

SEQ ID NO: 112337 - protein, 10 aa, synthetic construct
AADRGDKERF

SEQ ID NO: 112338 - protein, 10 aa, synthetic construct
AAERGDKERF

SEQ ID NO: 112339 - protein, 10 aa, synthetic construct
AVGRGDKERF

SEQ ID NO: 112340 - protein, 10 aa, synthetic construct
AVARGDKERF

SEQ ID NO: 112341 - protein, 10 aa, synthetic construct
AVVRGDKERF

SEQ ID NO: 112342 - protein, 10 aa, synthetic construct
AVPRGDKERF

SEQ ID NO: 112343 - protein, 10 aa, synthetic construct
AVLRGDKERF

SEQ ID NO: 112344 - protein, 10 aa, synthetic construct
AVIRGDKERF

SEQ ID NO: 112345 - protein, 10 aa, synthetic construct
AVMRGDKERF

SEQ ID NO: 112346 - protein, 10 aa, synthetic construct
AVWRGDKERF

SEQ ID NO: 112347 - protein, 10 aa, synthetic construct
AVFRGDKERF

SEQ ID NO: 112348 - protein, 10 aa, synthetic construct
AVKRGDKERF

SEQ ID NO: 112349 - protein, 10 aa, synthetic construct
AVRRGDKERF

SEQ ID NO: 112350 - protein, 10 aa, synthetic construct
AVHRGDKERF

SEQ ID NO: 112351 - protein, 10 aa, synthetic construct
AVSRGDKERF

SEQ ID NO: 112352 - protein, 10 aa, synthetic construct
AVTRGDKERF

SEQ ID NO: 112353 - protein, 10 aa, synthetic construct
AVYRGDKERF

SEQ ID NO: 112354 - protein, 10 aa, synthetic construct
AVNRGDKERF

SEQ ID NO: 112355 - protein, 10 aa, synthetic construct
AVQRGDKERF

SEQ ID NO: 112356 - protein, 10 aa, synthetic construct
AVDRGDKERF

SEQ ID NO: 112357 - protein, 10 aa, synthetic construct
AVERGDKERF

SEQ ID NO: 112358 - protein, 10 aa, synthetic construct
APGRGDKERF

SEQ ID NO: 112359 - protein, 10 aa, synthetic construct
APARGDKERF

SEQ ID NO: 112360 - protein, 10 aa, synthetic construct
APVRGDKERF

SEQ ID NO: 112361 - protein, 10 aa, synthetic construct
APPRGDKERF

SEQ ID NO: 112362 - protein, 10 aa, synthetic construct
APLRGDKERF

SEQ ID NO: 112363 - protein, 10 aa, synthetic construct
APIRGDKERF

SEQ ID NO: 112364 - protein, 10 aa, synthetic construct
APMRGDKERF

SEQ ID NO: 112365 - protein, 10 aa, synthetic construct
APWRGDKERF

SEQ ID NO: 112366 - protein, 10 aa, synthetic construct
APFRGDKERF

SEQ ID NO: 112367 - protein, 10 aa, synthetic construct
APKRGDKERF

SEQ ID NO: 112368 - protein, 10 aa, synthetic construct
APRRGDKERF

SEQ ID NO: 112369 - protein, 10 aa, synthetic construct
APHRGDKERF

SEQ ID NO: 112370 - protein, 10 aa, synthetic construct
APSRGDKERF

SEQ ID NO: 112371 - protein, 10 aa, synthetic construct
APTRGDKERF

SEQ ID NO: 112372 - protein, 10 aa, synthetic construct
APYRGDKERF

SEQ ID NO: 112373 - protein, 10 aa, synthetic construct
APNRGDKERF

SEQ ID NO: 112374 - protein, 10 aa, synthetic construct
APQRGDKERF

SEQ ID NO: 112375 - protein, 10 aa, synthetic construct
APDRGDKERF

SEQ ID NO: 112376 - protein, 10 aa, synthetic construct
APERGDKERF

SEQ ID NO: 112377 - protein, 10 aa, synthetic construct
ALGRGDKERF

SEQ ID NO: 112378 - protein, 10 aa, synthetic construct
ALARGDKERF

SEQ ID NO: 112379 - protein, 10 aa, synthetic construct
ALVRGDKERF

SEQ ID NO: 112380 - protein, 10 aa, synthetic construct
ALPRGDKERF

SEQ ID NO: 112381 - protein, 10 aa, synthetic construct
ALLRGDKERF

SEQ ID NO: 112382 - protein, 10 aa, synthetic construct
ALIRGDKERF

SEQ ID NO: 112383 - protein, 10 aa, synthetic construct
ALMRGDKERF

SEQ ID NO: 112384 - protein, 10 aa, synthetic construct
ALWRGDKERF

SEQ ID NO: 112385 - protein, 10 aa, synthetic construct
ALFRGDKERF

SEQ ID NO: 112386 - protein, 10 aa, synthetic construct
ALKRGDKERF

SEQ ID NO: 112387 - protein, 10 aa, synthetic construct
ALRRGDKERF

SEQ ID NO: 112388 - protein, 10 aa, synthetic construct
ALHRGDKERF

SEQ ID NO: 112389 - protein, 10 aa, synthetic construct
ALSRGDKERF

SEQ ID NO: 112390 - protein, 10 aa, synthetic construct
ALTRGDKERF

SEQ ID NO: 112391 - protein, 10 aa, synthetic construct
ALYRGDKERF

SEQ ID NO: 112392 - protein, 10 aa, synthetic construct
ALNRGDKERF

SEQ ID NO: 112393 - protein, 10 aa, synthetic construct
ALQRGDKERF

SEQ ID NO: 112394 - protein, 10 aa, synthetic construct
ALDRGDKERF

SEQ ID NO: 112395 - protein, 10 aa, synthetic construct
ALERGDKERF

SEQ ID NO: 112396 - protein, 10 aa, synthetic construct
AIGRGDKERF

SEQ ID NO: 112397 - protein, 10 aa, synthetic construct
AIARGDKERF

SEQ ID NO: 112398 - protein, 10 aa, synthetic construct
AIVRGDKERF

SEQ ID NO: 112399 - protein, 10 aa, synthetic construct
AIPRGDKERF

SEQ ID NO: 112400 - protein, 10 aa, synthetic construct
AILRGDKERF

SEQ ID NO: 112401 - protein, 10 aa, synthetic construct
AIIRGDKERF

SEQ ID NO: 112402 - protein, 10 aa, synthetic construct
AIMRGDKERF

SEQ ID NO: 112403 - protein, 10 aa, synthetic construct
AIWRGDKERF

SEQ ID NO: 112404 - protein, 10 aa, synthetic construct
AIFRGDKERF

SEQ ID NO: 112405 - protein, 10 aa, synthetic construct
AIKRGDKERF

SEQ ID NO: 112406 - protein, 10 aa, synthetic construct
AIRRGDKERF

SEQ ID NO: 112407 - protein, 10 aa, synthetic construct
AIHRGDKERF

SEQ ID NO: 112408 - protein, 10 aa, synthetic construct
AISRGDKERF

SEQ ID NO: 112409 - protein, 10 aa, synthetic construct
AITRGDKERF

SEQ ID NO: 112410 - protein, 10 aa, synthetic construct
AIYRGDKERF

SEQ ID NO: 112411 - protein, 10 aa, synthetic construct
AINRGDKERF

SEQ ID NO: 112412 - protein, 10 aa, synthetic construct
AIQRGDKERF

SEQ ID NO: 112413 - protein, 10 aa, synthetic construct
AIDRGDKERF

SEQ ID NO: 112414 - protein, 10 aa, synthetic construct
AIERGDKERF

SEQ ID NO: 112415 - protein, 10 aa, synthetic construct
AMGRGDKERF

SEQ ID NO: 112416 - protein, 10 aa, synthetic construct
AMARGDKERF

SEQ ID NO: 112417 - protein, 10 aa, synthetic construct
AMVRGDKERF

SEQ ID NO: 112418 - protein, 10 aa, synthetic construct
AMPRGDKERF

SEQ ID NO: 112419 - protein, 10 aa, synthetic construct
AMLRGDKERF

SEQ ID NO: 112420 - protein, 10 aa, synthetic construct
AMIRGDKERF

SEQ ID NO: 112421 - protein, 10 aa, synthetic construct
AMMRGDKERF

SEQ ID NO: 112422 - protein, 10 aa, synthetic construct
AMWRGDKERF

SEQ ID NO: 112423 - protein, 10 aa, synthetic construct
AMFRGDKERF

SEQ ID NO: 112424 - protein, 10 aa, synthetic construct
AMKRGDKERF

SEQ ID NO: 112425 - protein, 10 aa, synthetic construct
AMRRGDKERF

SEQ ID NO: 112426 - protein, 10 aa, synthetic construct
AMHRGDKERF

SEQ ID NO: 112427 - protein, 10 aa, synthetic construct
AMSRGDKERF

SEQ ID NO: 112428 - protein, 10 aa, synthetic construct
AMTRGDKERF

SEQ ID NO: 112429 - protein, 10 aa, synthetic construct
AMYRGDKERF

SEQ ID NO: 112430 - protein, 10 aa, synthetic construct
AMNRGDKERF

SEQ ID NO: 112431 - protein, 10 aa, synthetic construct
AMQRGDKERF

SEQ ID NO: 112432 - protein, 10 aa, synthetic construct
AMDRGDKERF

SEQ ID NO: 112433 - protein, 10 aa, synthetic construct
AMERGDKERF

SEQ ID NO: 112434 - protein, 10 aa, synthetic construct
AWGRGDKERF

SEQ ID NO: 112435 - protein, 10 aa, synthetic construct
AWARGDKERF

SEQ ID NO: 112436 - protein, 10 aa, synthetic construct
AWVRGDKERF

SEQ ID NO: 112437 - protein, 10 aa, synthetic construct
AWPRGDKERF

SEQ ID NO: 112438 - protein, 10 aa, synthetic construct
AWLRGDKERF

SEQ ID NO: 112439 - protein, 10 aa, synthetic construct
AWIRGDKERF

SEQ ID NO: 112440 - protein, 10 aa, synthetic construct
AWMRGDKERF

SEQ ID NO: 112441 - protein, 10 aa, synthetic construct
AWWRGDKERF

SEQ ID NO: 112442 - protein, 10 aa, synthetic construct
AWFRGDKERF

SEQ ID NO: 112443 - protein, 10 aa, synthetic construct
AWKRGDKERF

SEQ ID NO: 112444 - protein, 10 aa, synthetic construct
AWRRGDKERF

SEQ ID NO: 112445 - protein, 10 aa, synthetic construct
AWHRGDKERF

SEQ ID NO: 112446 - protein, 10 aa, synthetic construct
AWSRGDKERF

SEQ ID NO: 112447 - protein, 10 aa, synthetic construct
AWTRGDKERF

SEQ ID NO: 112448 - protein, 10 aa, synthetic construct
AWYRGDKERF

SEQ ID NO: 112449 - protein, 10 aa, synthetic construct
AWNRGDKERF

SEQ ID NO: 112450 - protein, 10 aa, synthetic construct
AWQRGDKERF

SEQ ID NO: 112451 - protein, 10 aa, synthetic construct
AWDRGDKERF

SEQ ID NO: 112452 - protein, 10 aa, synthetic construct
AWERGDKERF

SEQ ID NO: 112453 - protein, 10 aa, synthetic construct
AFGRGDKERF

SEQ ID NO: 112454 - protein, 10 aa, synthetic construct
AFARGDKERF

SEQ ID NO: 112455 - protein, 10 aa, synthetic construct
AFVRGDKERF

SEQ ID NO: 112456 - protein, 10 aa, synthetic construct
AFPRGDKERF

SEQ ID NO: 112457 - protein, 10 aa, synthetic construct
AFLRGDKERF

SEQ ID NO: 112458 - protein, 10 aa, synthetic construct
AFIRGDKERF

SEQ ID NO: 112459 - protein, 10 aa, synthetic construct
AFMRGDKERF

SEQ ID NO: 112460 - protein, 10 aa, synthetic construct
AFWRGDKERF

SEQ ID NO: 112461 - protein, 10 aa, synthetic construct
AFFRGDKERF

SEQ ID NO: 112462 - protein, 10 aa, synthetic construct
AFKRGDKERF

SEQ ID NO: 112463 - protein, 10 aa, synthetic construct
AFRRGDKERF

SEQ ID NO: 112464 - protein, 10 aa, synthetic construct
AFHRGDKERF

SEQ ID NO: 112465 - protein, 10 aa, synthetic construct
AFSRGDKERF

SEQ ID NO: 112466 - protein, 10 aa, synthetic construct
AFTRGDKERF

SEQ ID NO: 112467 - protein, 10 aa, synthetic construct
AFYRGDKERF

SEQ ID NO: 112468 - protein, 10 aa, synthetic construct
AFNRGDKERF

SEQ ID NO: 112469 - protein, 10 aa, synthetic construct
AFQRGDKERF

SEQ ID NO: 112470 - protein, 10 aa, synthetic construct
AFDRGDKERF

SEQ ID NO: 112471 - protein, 10 aa, synthetic construct
AFERGDKERF

SEQ ID NO: 112472 - protein, 10 aa, synthetic construct
AKGRGDKERF

SEQ ID NO: 112473 - protein, 10 aa, synthetic construct
AKARGDKERF

SEQ ID NO: 112474 - protein, 10 aa, synthetic construct
AKVRGDKERF

SEQ ID NO: 112475 - protein, 10 aa, synthetic construct
AKPRGDKERF

SEQ ID NO: 112476 - protein, 10 aa, synthetic construct
AKLRGDKERF

SEQ ID NO: 112477 - protein, 10 aa, synthetic construct
AKIRGDKERF

SEQ ID NO: 112478 - protein, 10 aa, synthetic construct
AKMRGDKERF

SEQ ID NO: 112479 - protein, 10 aa, synthetic construct
AKWRGDKERF

SEQ ID NO: 112480 - protein, 10 aa, synthetic construct
AKFRGDKERF

SEQ ID NO: 112481 - protein, 10 aa, synthetic construct
AKKRGDKERF

SEQ ID NO: 112482 - protein, 10 aa, synthetic construct
AKRRGDKERF

SEQ ID NO: 112483 - protein, 10 aa, synthetic construct
AKHRGDKERF

SEQ ID NO: 112484 - protein, 10 aa, synthetic construct
AKSRGDKERF

SEQ ID NO: 112485 - protein, 10 aa, synthetic construct
AKTRGDKERF

SEQ ID NO: 112486 - protein, 10 aa, synthetic construct
AKYRGDKERF

SEQ ID NO: 112487 - protein, 10 aa, synthetic construct
AKNRGDKERF

SEQ ID NO: 112488 - protein, 10 aa, synthetic construct
AKQRGDKERF

SEQ ID NO: 112489 - protein, 10 aa, synthetic construct
AKDRGDKERF

SEQ ID NO: 112490 - protein, 10 aa, synthetic construct
AKERGDKERF

SEQ ID NO: 112491 - protein, 10 aa, synthetic construct
ARGRGDKERF

SEQ ID NO: 112492 - protein, 10 aa, synthetic construct
ARARGDKERF

SEQ ID NO: 112493 - protein, 10 aa, synthetic construct
ARVRGDKERF

SEQ ID NO: 112494 - protein, 10 aa, synthetic construct
ARPRGDKERF

SEQ ID NO: 112495 - protein, 10 aa, synthetic construct
ARLRGDKERF

SEQ ID NO: 112496 - protein, 10 aa, synthetic construct
ARIRGDKERF

SEQ ID NO: 112497 - protein, 10 aa, synthetic construct
ARMRGDKERF

SEQ ID NO: 112498 - protein, 10 aa, synthetic construct
ARWRGDKERF

SEQ ID NO: 112499 - protein, 10 aa, synthetic construct
ARFRGDKERF

SEQ ID NO: 112500 - protein, 10 aa, synthetic construct
ARKRGDKERF

SEQ ID NO: 112501 - protein, 10 aa, synthetic construct
ARRRGDKERF

SEQ ID NO: 112502 - protein, 10 aa, synthetic construct
ARHRGDKERF

SEQ ID NO: 112503 - protein, 10 aa, synthetic construct
ARSRGDKERF

SEQ ID NO: 112504 - protein, 10 aa, synthetic construct
ARTRGDKERF

SEQ ID NO: 112505 - protein, 10 aa, synthetic construct
ARYRGDKERF

SEQ ID NO: 112506 - protein, 10 aa, synthetic construct
ARNRGDKERF

SEQ ID NO: 112507 - protein, 10 aa, synthetic construct
ARQRGDKERF

SEQ ID NO: 112508 - protein, 10 aa, synthetic construct
ARDRGDKERF

SEQ ID NO: 112509 - protein, 10 aa, synthetic construct
ARERGDKERF

SEQ ID NO: 112510 - protein, 10 aa, synthetic construct
AHGRGDKERF

SEQ ID NO: 112511 - protein, 10 aa, synthetic construct
AHARGDKERF

SEQ ID NO: 112512 - protein, 10 aa, synthetic construct
AHVRGDKERF

SEQ ID NO: 112513 - protein, 10 aa, synthetic construct
AHPRGDKERF

SEQ ID NO: 112514 - protein, 10 aa, synthetic construct
AHLRGDKERF

SEQ ID NO: 112515 - protein, 10 aa, synthetic construct
AHIRGDKERF

SEQ ID NO: 112516 - protein, 10 aa, synthetic construct
AHMRGDKERF

SEQ ID NO: 112517 - protein, 10 aa, synthetic construct
AHWRGDKERF

SEQ ID NO: 112518 - protein, 10 aa, synthetic construct
AHFRGDKERF

SEQ ID NO: 112519 - protein, 10 aa, synthetic construct
AHKRGDKERF

SEQ ID NO: 112520 - protein, 10 aa, synthetic construct
AHRRGDKERF

SEQ ID NO: 112521 - protein, 10 aa, synthetic construct
AHHRGDKERF

SEQ ID NO: 112522 - protein, 10 aa, synthetic construct
AHSRGDKERF

SEQ ID NO: 112523 - protein, 10 aa, synthetic construct
AHTRGDKERF

SEQ ID NO: 112524 - protein, 10 aa, synthetic construct
AHYRGDKERF

SEQ ID NO: 112525 - protein, 10 aa, synthetic construct
AHNRGDKERF

SEQ ID NO: 112526 - protein, 10 aa, synthetic construct
AHQRGDKERF

SEQ ID NO: 112527 - protein, 10 aa, synthetic construct
AHDRGDKERF

SEQ ID NO: 112528 - protein, 10 aa, synthetic construct
AHERGDKERF

SEQ ID NO: 112529 - protein, 10 aa, synthetic construct
ASGRGDKERF

SEQ ID NO: 112530 - protein, 10 aa, synthetic construct
ASARGDKERF

SEQ ID NO: 112531 - protein, 10 aa, synthetic construct
ASVRGDKERF

SEQ ID NO: 112532 - protein, 10 aa, synthetic construct
ASPRGDKERF

SEQ ID NO: 112533 - protein, 10 aa, synthetic construct
ASLRGDKERF

SEQ ID NO: 112534 - protein, 10 aa, synthetic construct
ASIRGDKERF

SEQ ID NO: 112535 - protein, 10 aa, synthetic construct
ASMRGDKERF

SEQ ID NO: 112536 - protein, 10 aa, synthetic construct
ASWRGDKERF

SEQ ID NO: 112537 - protein, 10 aa, synthetic construct
ASFRGDKERF

SEQ ID NO: 112538 - protein, 10 aa, synthetic construct
ASKRGDKERF

SEQ ID NO: 112539 - protein, 10 aa, synthetic construct
ASRRGDKERF

SEQ ID NO: 112540 - protein, 10 aa, synthetic construct
ASHRGDKERF

SEQ ID NO: 112541 - protein, 10 aa, synthetic construct
ASSRGDKERF

SEQ ID NO: 112542 - protein, 10 aa, synthetic construct
ASTRGDKERF

SEQ ID NO: 112543 - protein, 10 aa, synthetic construct
ASYRGDKERF

SEQ ID NO: 112544 - protein, 10 aa, synthetic construct
ASNRGDKERF

SEQ ID NO: 112545 - protein, 10 aa, synthetic construct
ASQRGDKERF

SEQ ID NO: 112546 - protein, 10 aa, synthetic construct
ASDRGDKERF

SEQ ID NO: 112547 - protein, 10 aa, synthetic construct
ASERGDKERF

SEQ ID NO: 112548 - protein, 10 aa, synthetic construct
ATGRGDKERF

SEQ ID NO: 112549 - protein, 10 aa, synthetic construct
ATARGDKERF

SEQ ID NO: 112550 - protein, 10 aa, synthetic construct
ATVRGDKERF

SEQ ID NO: 112551 - protein, 10 aa, synthetic construct
ATPRGDKERF

SEQ ID NO: 112552 - protein, 10 aa, synthetic construct
ATLRGDKERF

SEQ ID NO: 112553 - protein, 10 aa, synthetic construct
ATIRGDKERF

SEQ ID NO: 112554 - protein, 10 aa, synthetic construct
ATMRGDKERF

SEQ ID NO: 112555 - protein, 10 aa, synthetic construct
ATWRGDKERF

SEQ ID NO: 112556 - protein, 10 aa, synthetic construct
ATFRGDKERF

SEQ ID NO: 112557 - protein, 10 aa, synthetic construct
ATKRGDKERF

SEQ ID NO: 112558 - protein, 10 aa, synthetic construct
ATRRGDKERF

SEQ ID NO: 112559 - protein, 10 aa, synthetic construct
ATHRGDKERF

SEQ ID NO: 112560 - protein, 10 aa, synthetic construct
ATSRGDKERF

SEQ ID NO: 112561 - protein, 10 aa, synthetic construct
ATTRGDKERF

SEQ ID NO: 112562 - protein, 10 aa, synthetic construct
ATYRGDKERF

SEQ ID NO: 112563 - protein, 10 aa, synthetic construct
ATNRGDKERF

SEQ ID NO: 112564 - protein, 10 aa, synthetic construct
ATQRGDKERF

SEQ ID NO: 112565 - protein, 10 aa, synthetic construct
ATDRGDKERF

SEQ ID NO: 112566 - protein, 10 aa, synthetic construct
ATERGDKERF

SEQ ID NO: 112567 - protein, 10 aa, synthetic construct
AYGRGDKERF

SEQ ID NO: 112568 - protein, 10 aa, synthetic construct
AYARGDKERF

SEQ ID NO: 112569 - protein, 10 aa, synthetic construct
AYVRGDKERF

SEQ ID NO: 112570 - protein, 10 aa, synthetic construct
AYPRGDKERF

SEQ ID NO: 112571 - protein, 10 aa, synthetic construct
AYLRGDKERF

SEQ ID NO: 112572 - protein, 10 aa, synthetic construct
AYIRGDKERF

SEQ ID NO: 112573 - protein, 10 aa, synthetic construct
AYMRGDKERF

SEQ ID NO: 112574 - protein, 10 aa, synthetic construct
AYWRGDKERF

SEQ ID NO: 112575 - protein, 10 aa, synthetic construct
AYFRGDKERF

SEQ ID NO: 112576 - protein, 10 aa, synthetic construct
AYKRGDKERF

SEQ ID NO: 112577 - protein, 10 aa, synthetic construct
AYRRGDKERF

SEQ ID NO: 112578 - protein, 10 aa, synthetic construct
AYHRGDKERF

SEQ ID NO: 112579 - protein, 10 aa, synthetic construct
AYSRGDKERF

SEQ ID NO: 112580 - protein, 10 aa, synthetic construct
AYTRGDKERF

SEQ ID NO: 112581 - protein, 10 aa, synthetic construct
AYYRGDKERF

SEQ ID NO: 112582 - protein, 10 aa, synthetic construct
AYNRGDKERF

SEQ ID NO: 112583 - protein, 10 aa, synthetic construct
AYQRGDKERF

SEQ ID NO: 112584 - protein, 10 aa, synthetic construct
AYDRGDKERF

SEQ ID NO: 112585 - protein, 10 aa, synthetic construct
AYERGDKERF

SEQ ID NO: 112586 - protein, 10 aa, synthetic construct
ANGRGDKERF

SEQ ID NO: 112587 - protein, 10 aa, synthetic construct
ANARGDKERF

SEQ ID NO: 112588 - protein, 10 aa, synthetic construct
ANVRGDKERF

SEQ ID NO: 112589 - protein, 10 aa, synthetic construct
ANPRGDKERF

SEQ ID NO: 112590 - protein, 10 aa, synthetic construct
ANLRGDKERF

SEQ ID NO: 112591 - protein, 10 aa, synthetic construct
ANIRGDKERF

SEQ ID NO: 112592 - protein, 10 aa, synthetic construct
ANMRGDKERF

SEQ ID NO: 112593 - protein, 10 aa, synthetic construct
ANWRGDKERF

SEQ ID NO: 112594 - protein, 10 aa, synthetic construct
ANFRGDKERF

SEQ ID NO: 112595 - protein, 10 aa, synthetic construct
ANKRGDKERF

SEQ ID NO: 112596 - protein, 10 aa, synthetic construct
ANRRGDKERF

SEQ ID NO: 112597 - protein, 10 aa, synthetic construct
ANHRGDKERF

SEQ ID NO: 112598 - protein, 10 aa, synthetic construct
ANSRGDKERF

SEQ ID NO: 112599 - protein, 10 aa, synthetic construct
ANTRGDKERF

SEQ ID NO: 112600 - protein, 10 aa, synthetic construct
ANYRGDKERF

SEQ ID NO: 112601 - protein, 10 aa, synthetic construct
ANNRGDKERF

SEQ ID NO: 112602 - protein, 10 aa, synthetic construct
ANQRGDKERF

SEQ ID NO: 112603 - protein, 10 aa, synthetic construct
ANDRGDKERF

SEQ ID NO: 112604 - protein, 10 aa, synthetic construct
ANERGDKERF

SEQ ID NO: 112605 - protein, 10 aa, synthetic construct
AQGRGDKERF

SEQ ID NO: 112606 - protein, 10 aa, synthetic construct
AQARGDKERF

SEQ ID NO: 112607 - protein, 10 aa, synthetic construct
AQVRGDKERF

SEQ ID NO: 112608 - protein, 10 aa, synthetic construct
AQPRGDKERF

SEQ ID NO: 112609 - protein, 10 aa, synthetic construct
AQLRGDKERF

SEQ ID NO: 112610 - protein, 10 aa, synthetic construct
AQIRGDKERF

SEQ ID NO: 112611 - protein, 10 aa, synthetic construct
AQMRGDKERF

SEQ ID NO: 112612 - protein, 10 aa, synthetic construct
AQWRGDKERF

SEQ ID NO: 112613 - protein, 10 aa, synthetic construct
AQFRGDKERF

SEQ ID NO: 112614 - protein, 10 aa, synthetic construct
AQKRGDKERF

SEQ ID NO: 112615 - protein, 10 aa, synthetic construct
AQRRGDKERF

SEQ ID NO: 112616 - protein, 10 aa, synthetic construct
AQHRGDKERF

SEQ ID NO: 112617 - protein, 10 aa, synthetic construct
AQSRGDKERF

SEQ ID NO: 112618 - protein, 10 aa, synthetic construct
AQTRGDKERF

SEQ ID NO: 112619 - protein, 10 aa, synthetic construct
AQYRGDKERF

SEQ ID NO: 112620 - protein, 10 aa, synthetic construct
AQNRGDKERF

SEQ ID NO: 112621 - protein, 10 aa, synthetic construct
AQQRGDKERF

SEQ ID NO: 112622 - protein, 10 aa, synthetic construct
AQDRGDKERF

SEQ ID NO: 112623 - protein, 10 aa, synthetic construct
AQERGDKERF

SEQ ID NO: 112624 - protein, 10 aa, synthetic construct
ADGRGDKERF

SEQ ID NO: 112625 - protein, 10 aa, synthetic construct
ADARGDKERF

SEQ ID NO: 112626 - protein, 10 aa, synthetic construct
ADVRGDKERF

SEQ ID NO: 112627 - protein, 10 aa, synthetic construct
ADPRGDKERF

SEQ ID NO: 112628 - protein, 10 aa, synthetic construct
ADLRGDKERF

SEQ ID NO: 112629 - protein, 10 aa, synthetic construct
ADIRGDKERF

SEQ ID NO: 112630 - protein, 10 aa, synthetic construct
ADMRGDKERF

SEQ ID NO: 112631 - protein, 10 aa, synthetic construct
ADWRGDKERF

SEQ ID NO: 112632 - protein, 10 aa, synthetic construct
ADFRGDKERF

SEQ ID NO: 112633 - protein, 10 aa, synthetic construct
ADKRGDKERF

SEQ ID NO: 112634 - protein, 10 aa, synthetic construct
ADRRGDKERF

SEQ ID NO: 112635 - protein, 10 aa, synthetic construct
ADHRGDKERF

SEQ ID NO: 112636 - protein, 10 aa, synthetic construct
ADSRGDKERF

SEQ ID NO: 112637 - protein, 10 aa, synthetic construct
ADTRGDKERF

SEQ ID NO: 112638 - protein, 10 aa, synthetic construct
ADYRGDKERF

SEQ ID NO: 112639 - protein, 10 aa, synthetic construct
ADNRGDKERF

SEQ ID NO: 112640 - protein, 10 aa, synthetic construct
ADQRGDKERF

SEQ ID NO: 112641 - protein, 10 aa, synthetic construct
ADDRGDKERF

SEQ ID NO: 112642 - protein, 10 aa, synthetic construct
ADERGDKERF

SEQ ID NO: 112643 - protein, 10 aa, synthetic construct
AEGRGDKERF

SEQ ID NO: 112644 - protein, 10 aa, synthetic construct
AEARGDKERF

SEQ ID NO: 112645 - protein, 10 aa, synthetic construct
AEVRGDKERF

SEQ ID NO: 112646 - protein, 10 aa, synthetic construct
AEPRGDKERF

SEQ ID NO: 112647 - protein, 10 aa, synthetic construct
AELRGDKERF

SEQ ID NO: 112648 - protein, 10 aa, synthetic construct
AEIRGDKERF

SEQ ID NO: 112649 - protein, 10 aa, synthetic construct
AEMRGDKERF

SEQ ID NO: 112650 - protein, 10 aa, synthetic construct
AEWRGDKERF

SEQ ID NO: 112651 - protein, 10 aa, synthetic construct
AEFRGDKERF

SEQ ID NO: 112652 - protein, 10 aa, synthetic construct
AEKRGDKERF

SEQ ID NO: 112653 - protein, 10 aa, synthetic construct
AERRGDKERF

SEQ ID NO: 112654 - protein, 10 aa, synthetic construct
AEHRGDKERF

SEQ ID NO: 112655 - protein, 10 aa, synthetic construct
AESRGDKERF

SEQ ID NO: 112656 - protein, 10 aa, synthetic construct
AETRGDKERF

SEQ ID NO: 112657 - protein, 10 aa, synthetic construct
AEYRGDKERF

SEQ ID NO: 112658 - protein, 10 aa, synthetic construct
AENRGDKERF

SEQ ID NO: 112659 - protein, 10 aa, synthetic construct
AEQRGDKERF

SEQ ID NO: 112660 - protein, 10 aa, synthetic construct
AEDRGDKERF

SEQ ID NO: 112661 - protein, 10 aa, synthetic construct
AEERGDKERF

SEQ ID NO: 112662 - protein, 10 aa, synthetic construct
EGGRGDKERF

SEQ ID NO: 112663 - protein, 10 aa, synthetic construct
EGARGDKERF

SEQ ID NO: 112664 - protein, 10 aa, synthetic construct
EGVRGDKERF

SEQ ID NO: 112665 - protein, 10 aa, synthetic construct
EGPRGDKERF

SEQ ID NO: 112666 - protein, 10 aa, synthetic construct
EGLRGDKERF

SEQ ID NO: 112667 - protein, 10 aa, synthetic construct
EGIRGDKERF

SEQ ID NO: 112668 - protein, 10 aa, synthetic construct
EGMRGDKERF

SEQ ID NO: 112669 - protein, 10 aa, synthetic construct
EGWRGDKERF

SEQ ID NO: 112670 - protein, 10 aa, synthetic construct
EGFRGDKERF

SEQ ID NO: 112671 - protein, 10 aa, synthetic construct
EGKRGDKERF

SEQ ID NO: 112672 - protein, 10 aa, synthetic construct
EGRRGDKERF

SEQ ID NO: 112673 - protein, 10 aa, synthetic construct
EGHRGDKERF

SEQ ID NO: 112674 - protein, 10 aa, synthetic construct
EGSRGDKERF

SEQ ID NO: 112675 - protein, 10 aa, synthetic construct
EGTRGDKERF

SEQ ID NO: 112676 - protein, 10 aa, synthetic construct
EGYRGDKERF

SEQ ID NO: 112677 - protein, 10 aa, synthetic construct
EGNRGDKERF

SEQ ID NO: 112678 - protein, 10 aa, synthetic construct
EGQRGDKERF

SEQ ID NO: 112679 - protein, 10 aa, synthetic construct
EGDRGDKERF

SEQ ID NO: 112680 - protein, 10 aa, synthetic construct
EGERGDKERF

SEQ ID NO: 112681 - protein, 10 aa, synthetic construct
EAGRGDKERF

SEQ ID NO: 112682 - protein, 10 aa, synthetic construct
EAARGDKERF

SEQ ID NO: 112683 - protein, 10 aa, synthetic construct
EAVRGDKERF

SEQ ID NO: 112684 - protein, 10 aa, synthetic construct
EAPRGDKERF

SEQ ID NO: 112685 - protein, 10 aa, synthetic construct
EALRGDKERF

SEQ ID NO: 112686 - protein, 10 aa, synthetic construct
EAIRGDKERF

SEQ ID NO: 112687 - protein, 10 aa, synthetic construct
EAMRGDKERF

SEQ ID NO: 112688 - protein, 10 aa, synthetic construct
EAWRGDKERF

SEQ ID NO: 112689 - protein, 10 aa, synthetic construct
EAFRGDKERF

SEQ ID NO: 112690 - protein, 10 aa, synthetic construct
EAKRGDKERF

SEQ ID NO: 112691 - protein, 10 aa, synthetic construct
EARRGDKERF

SEQ ID NO: 112692 - protein, 10 aa, synthetic construct
EAHRGDKERF

SEQ ID NO: 112693 - protein, 10 aa, synthetic construct
EASRGDKERF

SEQ ID NO: 112694 - protein, 10 aa, synthetic construct
EATRGDKERF

SEQ ID NO: 112695 - protein, 10 aa, synthetic construct
EAYRGDKERF

SEQ ID NO: 112696 - protein, 10 aa, synthetic construct
EANRGDKERF

SEQ ID NO: 112697 - protein, 10 aa, synthetic construct
EAQRGDKERF

SEQ ID NO: 112698 - protein, 10 aa, synthetic construct
EADRGDKERF

SEQ ID NO: 112699 - protein, 10 aa, synthetic construct
EAERGDKERF

SEQ ID NO: 112700 - protein, 10 aa, synthetic construct
EVGRGDKERF

SEQ ID NO: 112701 - protein, 10 aa, synthetic construct
EVARGDKERF

SEQ ID NO: 112702 - protein, 10 aa, synthetic construct
EVVRGDKERF

SEQ ID NO: 112703 - protein, 10 aa, synthetic construct
EVPRGDKERF

SEQ ID NO: 112704 - protein, 10 aa, synthetic construct
EVLRGDKERF

SEQ ID NO: 112705 - protein, 10 aa, synthetic construct
EVIRGDKERF

SEQ ID NO: 112706 - protein, 10 aa, synthetic construct
EVMRGDKERF

SEQ ID NO: 112707 - protein, 10 aa, synthetic construct
EVWRGDKERF

SEQ ID NO: 112708 - protein, 10 aa, synthetic construct
EVFRGDKERF

SEQ ID NO: 112709 - protein, 10 aa, synthetic construct
EVKRGDKERF

SEQ ID NO: 112710 - protein, 10 aa, synthetic construct
EVRRGDKERF

SEQ ID NO: 112711 - protein, 10 aa, synthetic construct
EVHRGDKERF

SEQ ID NO: 112712 - protein, 10 aa, synthetic construct
EVSRGDKERF

SEQ ID NO: 112713 - protein, 10 aa, synthetic construct
EVTRGDKERF

SEQ ID NO: 112714 - protein, 10 aa, synthetic construct
EVYRGDKERF

SEQ ID NO: 112715 - protein, 10 aa, synthetic construct
EVNRGDKERF

SEQ ID NO: 112716 - protein, 10 aa, synthetic construct
EVQRGDKERF

SEQ ID NO: 112717 - protein, 10 aa, synthetic construct
EVDRGDKERF

SEQ ID NO: 112718 - protein, 10 aa, synthetic construct
EVERGDKERF

SEQ ID NO: 112719 - protein, 10 aa, synthetic construct
EPGRGDKERF

SEQ ID NO: 112720 - protein, 10 aa, synthetic construct
EPARGDKERF

SEQ ID NO: 112721 - protein, 10 aa, synthetic construct
EPVRGDKERF

SEQ ID NO: 112722 - protein, 10 aa, synthetic construct
EPPRGDKERF

SEQ ID NO: 112723 - protein, 10 aa, synthetic construct
EPLRGDKERF

SEQ ID NO: 112724 - protein, 10 aa, synthetic construct
EPIRGDKERF

SEQ ID NO: 112725 - protein, 10 aa, synthetic construct
EPMRGDKERF

SEQ ID NO: 112726 - protein, 10 aa, synthetic construct
EPWRGDKERF

SEQ ID NO: 112727 - protein, 10 aa, synthetic construct
EPFRGDKERF

SEQ ID NO: 112728 - protein, 10 aa, synthetic construct
EPKRGDKERF

SEQ ID NO: 112729 - protein, 10 aa, synthetic construct
EPRRGDKERF

SEQ ID NO: 112730 - protein, 10 aa, synthetic construct
EPHRGDKERF

SEQ ID NO: 112731 - protein, 10 aa, synthetic construct
EPSRGDKERF

SEQ ID NO: 112732 - protein, 10 aa, synthetic construct
EPTRGDKERF

SEQ ID NO: 112733 - protein, 10 aa, synthetic construct
EPYRGDKERF

SEQ ID NO: 112734 - protein, 10 aa, synthetic construct
EPNRGDKERF

SEQ ID NO: 112735 - protein, 10 aa, synthetic construct
EPQRGDKERF

SEQ ID NO: 112736 - protein, 10 aa, synthetic construct
EPDRGDKERF

SEQ ID NO: 112737 - protein, 10 aa, synthetic construct
EPERGDKERF

SEQ ID NO: 112738 - protein, 10 aa, synthetic construct
ELGRGDKERF

SEQ ID NO: 112739 - protein, 10 aa, synthetic construct
ELARGDKERF

SEQ ID NO: 112740 - protein, 10 aa, synthetic construct
ELVRGDKERF

SEQ ID NO: 112741 - protein, 10 aa, synthetic construct
ELPRGDKERF

SEQ ID NO: 112742 - protein, 10 aa, synthetic construct
ELLRGDKERF

SEQ ID NO: 112743 - protein, 10 aa, synthetic construct
ELIRGDKERF

SEQ ID NO: 112744 - protein, 10 aa, synthetic construct
ELMRGDKERF

SEQ ID NO: 112745 - protein, 10 aa, synthetic construct
ELWRGDKERF

SEQ ID NO: 112746 - protein, 10 aa, synthetic construct
ELFRGDKERF

SEQ ID NO: 112747 - protein, 10 aa, synthetic construct
ELKRGDKERF

SEQ ID NO: 112748 - protein, 10 aa, synthetic construct
ELRRGDKERF

SEQ ID NO: 112749 - protein, 10 aa, synthetic construct
ELHRGDKERF

SEQ ID NO: 112750 - protein, 10 aa, synthetic construct
ELSRGDKERF

SEQ ID NO: 112751 - protein, 10 aa, synthetic construct
ELTRGDKERF

SEQ ID NO: 112752 - protein, 10 aa, synthetic construct
ELYRGDKERF

SEQ ID NO: 112753 - protein, 10 aa, synthetic construct
ELNRGDKERF

SEQ ID NO: 112754 - protein, 10 aa, synthetic construct
ELQRGDKERF

SEQ ID NO: 112755 - protein, 10 aa, synthetic construct
ELDRGDKERF

SEQ ID NO: 112756 - protein, 10 aa, synthetic construct
ELERGDKERF

SEQ ID NO: 112757 - protein, 10 aa, synthetic construct
EIGRGDKERF

SEQ ID NO: 112758 - protein, 10 aa, synthetic construct
EIARGDKERF

SEQ ID NO: 112759 - protein, 10 aa, synthetic construct
EIVRGDKERF

SEQ ID NO: 112760 - protein, 10 aa, synthetic construct
EIPRGDKERF

SEQ ID NO: 112761 - protein, 10 aa, synthetic construct
EILRGDKERF

SEQ ID NO: 112762 - protein, 10 aa, synthetic construct
EIIRGDKERF

SEQ ID NO: 112763 - protein, 10 aa, synthetic construct
EIMRGDKERF

SEQ ID NO: 112764 - protein, 10 aa, synthetic construct
EIWRGDKERF

SEQ ID NO: 112765 - protein, 10 aa, synthetic construct
EIFRGDKERF

SEQ ID NO: 112766 - protein, 10 aa, synthetic construct
EIKRGDKERF

SEQ ID NO: 112767 - protein, 10 aa, synthetic construct
EIRRGDKERF

SEQ ID NO: 112768 - protein, 10 aa, synthetic construct
EIHRGDKERF

SEQ ID NO: 112769 - protein, 10 aa, synthetic construct
EISRGDKERF

SEQ ID NO: 112770 - protein, 10 aa, synthetic construct
EITRGDKERF

SEQ ID NO: 112771 - protein, 10 aa, synthetic construct
EIYRGDKERF

SEQ ID NO: 112772 - protein, 10 aa, synthetic construct
EINRGDKERF

SEQ ID NO: 112773 - protein, 10 aa, synthetic construct
EIQRGDKERF

SEQ ID NO: 112774 - protein, 10 aa, synthetic construct
EIDRGDKERF

SEQ ID NO: 112775 - protein, 10 aa, synthetic construct
EIERGDKERF

SEQ ID NO: 112776 - protein, 10 aa, synthetic construct
EMGRGDKERF

SEQ ID NO: 112777 - protein, 10 aa, synthetic construct
EMARGDKERF

SEQ ID NO: 112778 - protein, 10 aa, synthetic construct
EMVRGDKERF

SEQ ID NO: 112779 - protein, 10 aa, synthetic construct
EMPRGDKERF

SEQ ID NO: 112780 - protein, 10 aa, synthetic construct
EMLRGDKERF

SEQ ID NO: 112781 - protein, 10 aa, synthetic construct
EMIRGDKERF

SEQ ID NO: 112782 - protein, 10 aa, synthetic construct
EMMRGDKERF

SEQ ID NO: 112783 - protein, 10 aa, synthetic construct
EMWRGDKERF

SEQ ID NO: 112784 - protein, 10 aa, synthetic construct
EMFRGDKERF

SEQ ID NO: 112785 - protein, 10 aa, synthetic construct
EMKRGDKERF

SEQ ID NO: 112786 - protein, 10 aa, synthetic construct
EMRRGDKERF

SEQ ID NO: 112787 - protein, 10 aa, synthetic construct
EMHRGDKERF

SEQ ID NO: 112788 - protein, 10 aa, synthetic construct
EMSRGDKERF

SEQ ID NO: 112789 - protein, 10 aa, synthetic construct
EMTRGDKERF

SEQ ID NO: 112790 - protein, 10 aa, synthetic construct
EMYRGDKERF

SEQ ID NO: 112791 - protein, 10 aa, synthetic construct
EMNRGDKERF

SEQ ID NO: 112792 - protein, 10 aa, synthetic construct
EMQRGDKERF

SEQ ID NO: 112793 - protein, 10 aa, synthetic construct
EMDRGDKERF

SEQ ID NO: 112794 - protein, 10 aa, synthetic construct
EMERGDKERF

SEQ ID NO: 112795 - protein, 10 aa, synthetic construct
EWGRGDKERF

SEQ ID NO: 112796 - protein, 10 aa, synthetic construct
EWARGDKERF

SEQ ID NO: 112797 - protein, 10 aa, synthetic construct
EWVRGDKERF

SEQ ID NO: 112798 - protein, 10 aa, synthetic construct
EWPRGDKERF

SEQ ID NO: 112799 - protein, 10 aa, synthetic construct
EWLRGDKERF

SEQ ID NO: 112800 - protein, 10 aa, synthetic construct
EWIRGDKERF

SEQ ID NO: 112801 - protein, 10 aa, synthetic construct
EWMRGDKERF

SEQ ID NO: 112802 - protein, 10 aa, synthetic construct
EWWRGDKERF

SEQ ID NO: 112803 - protein, 10 aa, synthetic construct
EWFRGDKERF

SEQ ID NO: 112804 - protein, 10 aa, synthetic construct
EWKRGDKERF

SEQ ID NO: 112805 - protein, 10 aa, synthetic construct
EWRRGDKERF

SEQ ID NO: 112806 - protein, 10 aa, synthetic construct
EWHRGDKERF

SEQ ID NO: 112807 - protein, 10 aa, synthetic construct
EWSRGDKERF

SEQ ID NO: 112808 - protein, 10 aa, synthetic construct
EWTRGDKERF

SEQ ID NO: 112809 - protein, 10 aa, synthetic construct
EWYRGDKERF

SEQ ID NO: 112810 - protein, 10 aa, synthetic construct
EWNRGDKERF

SEQ ID NO: 112811 - protein, 10 aa, synthetic construct
EWQRGDKERF

SEQ ID NO: 112812 - protein, 10 aa, synthetic construct
EWDRGDKERF

SEQ ID NO: 112813 - protein, 10 aa, synthetic construct
EWERGDKERF

SEQ ID NO: 112814 - protein, 10 aa, synthetic construct
EFGRGDKERF

SEQ ID NO: 112815 - protein, 10 aa, synthetic construct
EFARGDKERF

SEQ ID NO: 112816 - protein, 10 aa, synthetic construct
EFVRGDKERF

SEQ ID NO: 112817 - protein, 10 aa, synthetic construct
EFPRGDKERF

SEQ ID NO: 112818 - protein, 10 aa, synthetic construct
EFLRGDKERF

SEQ ID NO: 112819 - protein, 10 aa, synthetic construct
EFIRGDKERF

SEQ ID NO: 112820 - protein, 10 aa, synthetic construct
EFMRGDKERF

SEQ ID NO: 112821 - protein, 10 aa, synthetic construct
EFWRGDKERF

SEQ ID NO: 112822 - protein, 10 aa, synthetic construct
EFFRGDKERF

SEQ ID NO: 112823 - protein, 10 aa, synthetic construct
EFKRGDKERF

SEQ ID NO: 112824 - protein, 10 aa, synthetic construct
EFRRGDKERF

SEQ ID NO: 112825 - protein, 10 aa, synthetic construct
EFHRGDKERF

SEQ ID NO: 112826 - protein, 10 aa, synthetic construct
EFSRGDKERF

SEQ ID NO: 112827 - protein, 10 aa, synthetic construct
EFTRGDKERF

SEQ ID NO: 112828 - protein, 10 aa, synthetic construct
EFYRGDKERF

SEQ ID NO: 112829 - protein, 10 aa, synthetic construct
EFNRGDKERF

SEQ ID NO: 112830 - protein, 10 aa, synthetic construct
EFQRGDKERF

SEQ ID NO: 112831 - protein, 10 aa, synthetic construct
EFDRGDKERF

SEQ ID NO: 112832 - protein, 10 aa, synthetic construct
EFERGDKERF

SEQ ID NO: 112833 - protein, 10 aa, synthetic construct
EKGRGDKERF

SEQ ID NO: 112834 - protein, 10 aa, synthetic construct
EKARGDKERF

SEQ ID NO: 112835 - protein, 10 aa, synthetic construct
EKVRGDKERF

SEQ ID NO: 112836 - protein, 10 aa, synthetic construct
EKPRGDKERF

SEQ ID NO: 112837 - protein, 10 aa, synthetic construct
EKLRGDKERF

SEQ ID NO: 112838 - protein, 10 aa, synthetic construct
EKIRGDKERF

SEQ ID NO: 112839 - protein, 10 aa, synthetic construct
EKMRGDKERF

SEQ ID NO: 112840 - protein, 10 aa, synthetic construct
EKWRGDKERF

SEQ ID NO: 112841 - protein, 10 aa, synthetic construct
EKFRGDKERF

SEQ ID NO: 112842 - protein, 10 aa, synthetic construct
EKKRGDKERF

SEQ ID NO: 112843 - protein, 10 aa, synthetic construct
EKRRGDKERF

SEQ ID NO: 112844 - protein, 10 aa, synthetic construct
EKHRGDKERF

SEQ ID NO: 112845 - protein, 10 aa, synthetic construct
EKSRGDKERF

SEQ ID NO: 112846 - protein, 10 aa, synthetic construct
EKTRGDKERF

SEQ ID NO: 112847 - protein, 10 aa, synthetic construct
EKYRGDKERF

SEQ ID NO: 112848 - protein, 10 aa, synthetic construct
EKNRGDKERF

SEQ ID NO: 112849 - protein, 10 aa, synthetic construct
EKQRGDKERF

SEQ ID NO: 112850 - protein, 10 aa, synthetic construct
EKDRGDKERF

SEQ ID NO: 112851 - protein, 10 aa, synthetic construct
EKERGDKERF

SEQ ID NO: 112852 - protein, 10 aa, synthetic construct
ERGRGDKERF

SEQ ID NO: 112853 - protein, 10 aa, synthetic construct
ERARGDKERF

SEQ ID NO: 112854 - protein, 10 aa, synthetic construct
ERVRGDKERF

SEQ ID NO: 112855 - protein, 10 aa, synthetic construct
ERPRGDKERF

SEQ ID NO: 112856 - protein, 10 aa, synthetic construct
ERLRGDKERF

SEQ ID NO: 112857 - protein, 10 aa, synthetic construct
ERIRGDKERF

SEQ ID NO: 112858 - protein, 10 aa, synthetic construct
ERMRGDKERF

SEQ ID NO: 112859 - protein, 10 aa, synthetic construct
ERWRGDKERF

SEQ ID NO: 112860 - protein, 10 aa, synthetic construct
ERFRGDKERF

SEQ ID NO: 112861 - protein, 10 aa, synthetic construct
ERKRGDKERF

SEQ ID NO: 112862 - protein, 10 aa, synthetic construct
ERRRGDKERF

SEQ ID NO: 112863 - protein, 10 aa, synthetic construct
ERHRGDKERF

SEQ ID NO: 112864 - protein, 10 aa, synthetic construct
ERSRGDKERF

SEQ ID NO: 112865 - protein, 10 aa, synthetic construct
ERTRGDKERF

SEQ ID NO: 112866 - protein, 10 aa, synthetic construct
ERYRGDKERF

SEQ ID NO: 112867 - protein, 10 aa, synthetic construct
ERNRGDKERF

SEQ ID NO: 112868 - protein, 10 aa, synthetic construct
ERQRGDKERF

SEQ ID NO: 112869 - protein, 10 aa, synthetic construct
ERDRGDKERF

SEQ ID NO: 112870 - protein, 10 aa, synthetic construct
ERERGDKERF

SEQ ID NO: 112871 - protein, 10 aa, synthetic construct
EHGRGDKERF

SEQ ID NO: 112872 - protein, 10 aa, synthetic construct
EHARGDKERF

SEQ ID NO: 112873 - protein, 10 aa, synthetic construct
EHVRGDKERF

SEQ ID NO: 112874 - protein, 10 aa, synthetic construct
EHPRGDKERF

SEQ ID NO: 112875 - protein, 10 aa, synthetic construct
EHLRGDKERF

SEQ ID NO: 112876 - protein, 10 aa, synthetic construct
EHIRGDKERF

SEQ ID NO: 112877 - protein, 10 aa, synthetic construct
EHMRGDKERF

SEQ ID NO: 112878 - protein, 10 aa, synthetic construct
EHWRGDKERF

SEQ ID NO: 112879 - protein, 10 aa, synthetic construct
EHFRGDKERF

SEQ ID NO: 112880 - protein, 10 aa, synthetic construct
EHKRGDKERF

SEQ ID NO: 112881 - protein, 10 aa, synthetic construct
EHRRGDKERF

SEQ ID NO: 112882 - protein, 10 aa, synthetic construct
EHHRGDKERF

SEQ ID NO: 112883 - protein, 10 aa, synthetic construct
EHSRGDKERF

SEQ ID NO: 112884 - protein, 10 aa, synthetic construct
EHTRGDKERF

SEQ ID NO: 112885 - protein, 10 aa, synthetic construct
EHYRGDKERF

SEQ ID NO: 112886 - protein, 10 aa, synthetic construct
EHNRGDKERF

SEQ ID NO: 112887 - protein, 10 aa, synthetic construct
EHQRGDKERF

SEQ ID NO: 112888 - protein, 10 aa, synthetic construct
EHDRGDKERF

SEQ ID NO: 112889 - protein, 10 aa, synthetic construct
EHERGDKERF

SEQ ID NO: 112890 - protein, 10 aa, synthetic construct
ESGRGDKERF

SEQ ID NO: 112891 - protein, 10 aa, synthetic construct
ESARGDKERF

SEQ ID NO: 112892 - protein, 10 aa, synthetic construct
ESVRGDKERF

SEQ ID NO: 112893 - protein, 10 aa, synthetic construct
ESPRGDKERF

SEQ ID NO: 112894 - protein, 10 aa, synthetic construct
ESLRGDKERF

SEQ ID NO: 112895 - protein, 10 aa, synthetic construct
ESIRGDKERF

SEQ ID NO: 112896 - protein, 10 aa, synthetic construct
ESMRGDKERF

SEQ ID NO: 112897 - protein, 10 aa, synthetic construct
ESWRGDKERF

SEQ ID NO: 112898 - protein, 10 aa, synthetic construct
ESFRGDKERF

SEQ ID NO: 112899 - protein, 10 aa, synthetic construct
ESKRGDKERF

SEQ ID NO: 112900 - protein, 10 aa, synthetic construct
ESRRGDKERF

SEQ ID NO: 112901 - protein, 10 aa, synthetic construct
ESHRGDKERF

SEQ ID NO: 112902 - protein, 10 aa, synthetic construct
ESSRGDKERF

SEQ ID NO: 112903 - protein, 10 aa, synthetic construct
ESTRGDKERF

SEQ ID NO: 112904 - protein, 10 aa, synthetic construct
ESYRGDKERF

SEQ ID NO: 112905 - protein, 10 aa, synthetic construct
ESNRGDKERF

SEQ ID NO: 112906 - protein, 10 aa, synthetic construct
ESQRGDKERF

SEQ ID NO: 112907 - protein, 10 aa, synthetic construct
ESDRGDKERF

SEQ ID NO: 112908 - protein, 10 aa, synthetic construct
ESERGDKERF

SEQ ID NO: 112909 - protein, 10 aa, synthetic construct
ETGRGDKERF

SEQ ID NO: 112910 - protein, 10 aa, synthetic construct
ETARGDKERF

SEQ ID NO: 112911 - protein, 10 aa, synthetic construct
ETVRGDKERF

SEQ ID NO: 112912 - protein, 10 aa, synthetic construct
ETPRGDKERF

SEQ ID NO: 112913 - protein, 10 aa, synthetic construct
ETLRGDKERF

SEQ ID NO: 112914 - protein, 10 aa, synthetic construct
ETIRGDKERF

SEQ ID NO: 112915 - protein, 10 aa, synthetic construct
ETMRGDKERF

SEQ ID NO: 112916 - protein, 10 aa, synthetic construct
ETWRGDKERF

SEQ ID NO: 112917 - protein, 10 aa, synthetic construct
ETFRGDKERF

SEQ ID NO: 112918 - protein, 10 aa, synthetic construct
ETKRGDKERF

SEQ ID NO: 112919 - protein, 10 aa, synthetic construct
ETRRGDKERF

SEQ ID NO: 112920 - protein, 10 aa, synthetic construct
ETHRGDKERF

SEQ ID NO: 112921 - protein, 10 aa, synthetic construct
ETSRGDKERF

SEQ ID NO: 112922 - protein, 10 aa, synthetic construct
ETTRGDKERF

SEQ ID NO: 112923 - protein, 10 aa, synthetic construct
ETYRGDKERF

SEQ ID NO: 112924 - protein, 10 aa, synthetic construct
ETNRGDKERF

SEQ ID NO: 112925 - protein, 10 aa, synthetic construct
ETQRGDKERF

SEQ ID NO: 112926 - protein, 10 aa, synthetic construct
ETDRGDKERF

SEQ ID NO: 112927 - protein, 10 aa, synthetic construct
ETERGDKERF

SEQ ID NO: 112928 - protein, 10 aa, synthetic construct
EYGRGDKERF

SEQ ID NO: 112929 - protein, 10 aa, synthetic construct
EYARGDKERF

SEQ ID NO: 112930 - protein, 10 aa, synthetic construct
EYVRGDKERF

SEQ ID NO: 112931 - protein, 10 aa, synthetic construct
EYPRGDKERF

SEQ ID NO: 112932 - protein, 10 aa, synthetic construct
EYLRGDKERF

SEQ ID NO: 112933 - protein, 10 aa, synthetic construct
EYIRGDKERF

SEQ ID NO: 112934 - protein, 10 aa, synthetic construct
EYMRGDKERF

SEQ ID NO: 112935 - protein, 10 aa, synthetic construct
EYWRGDKERF

SEQ ID NO: 112936 - protein, 10 aa, synthetic construct
EYFRGDKERF

SEQ ID NO: 112937 - protein, 10 aa, synthetic construct
EYKRGDKERF

SEQ ID NO: 112938 - protein, 10 aa, synthetic construct
EYRRGDKERF

SEQ ID NO: 112939 - protein, 10 aa, synthetic construct
EYHRGDKERF

SEQ ID NO: 112940 - protein, 10 aa, synthetic construct
EYSRGDKERF

SEQ ID NO: 112941 - protein, 10 aa, synthetic construct
EYTRGDKERF

SEQ ID NO: 112942 - protein, 10 aa, synthetic construct
EYYRGDKERF

SEQ ID NO: 112943 - protein, 10 aa, synthetic construct
EYNRGDKERF

SEQ ID NO: 112944 - protein, 10 aa, synthetic construct
EYQRGDKERF

SEQ ID NO: 112945 - protein, 10 aa, synthetic construct
EYDRGDKERF

SEQ ID NO: 112946 - protein, 10 aa, synthetic construct
EYERGDKERF

SEQ ID NO: 112947 - protein, 10 aa, synthetic construct
ENGRGDKERF

SEQ ID NO: 112948 - protein, 10 aa, synthetic construct
ENARGDKERF

SEQ ID NO: 112949 - protein, 10 aa, synthetic construct
ENVRGDKERF

SEQ ID NO: 112950 - protein, 10 aa, synthetic construct
ENPRGDKERF

SEQ ID NO: 112951 - protein, 10 aa, synthetic construct
ENLRGDKERF

SEQ ID NO: 112952 - protein, 10 aa, synthetic construct
ENIRGDKERF

SEQ ID NO: 112953 - protein, 10 aa, synthetic construct
ENMRGDKERF

SEQ ID NO: 112954 - protein, 10 aa, synthetic construct
ENWRGDKERF

SEQ ID NO: 112955 - protein, 10 aa, synthetic construct
ENFRGDKERF

SEQ ID NO: 112956 - protein, 10 aa, synthetic construct
ENKRGDKERF

SEQ ID NO: 112957 - protein, 10 aa, synthetic construct
ENRRGDKERF

SEQ ID NO: 112958 - protein, 10 aa, synthetic construct
ENHRGDKERF

SEQ ID NO: 112959 - protein, 10 aa, synthetic construct
ENSRGDKERF

SEQ ID NO: 112960 - protein, 10 aa, synthetic construct
ENTRGDKERF

SEQ ID NO: 112961 - protein, 10 aa, synthetic construct
ENYRGDKERF

SEQ ID NO: 112962 - protein, 10 aa, synthetic construct
ENNRGDKERF

SEQ ID NO: 112963 - protein, 10 aa, synthetic construct
ENQRGDKERF

SEQ ID NO: 112964 - protein, 10 aa, synthetic construct
ENDRGDKERF

SEQ ID NO: 112965 - protein, 10 aa, synthetic construct
ENERGDKERF

SEQ ID NO: 112966 - protein, 10 aa, synthetic construct
EQGRGDKERF

SEQ ID NO: 112967 - protein, 10 aa, synthetic construct
EQARGDKERF

SEQ ID NO: 112968 - protein, 10 aa, synthetic construct
EQVRGDKERF

SEQ ID NO: 112969 - protein, 10 aa, synthetic construct
EQPRGDKERF

SEQ ID NO: 112970 - protein, 10 aa, synthetic construct
EQLRGDKERF

SEQ ID NO: 112971 - protein, 10 aa, synthetic construct
EQIRGDKERF

SEQ ID NO: 112972 - protein, 10 aa, synthetic construct
EQMRGDKERF

SEQ ID NO: 112973 - protein, 10 aa, synthetic construct
EQWRGDKERF

SEQ ID NO: 112974 - protein, 10 aa, synthetic construct
EQFRGDKERF

SEQ ID NO: 112975 - protein, 10 aa, synthetic construct
EQKRGDKERF

SEQ ID NO: 112976 - protein, 10 aa, synthetic construct
EQRRGDKERF

SEQ ID NO: 112977 - protein, 10 aa, synthetic construct
EQHRGDKERF

SEQ ID NO: 112978 - protein, 10 aa, synthetic construct
EQSRGDKERF

SEQ ID NO: 112979 - protein, 10 aa, synthetic construct
EQTRGDKERF

SEQ ID NO: 112980 - protein, 10 aa, synthetic construct
EQYRGDKERF

SEQ ID NO: 112981 - protein, 10 aa, synthetic construct
EQNRGDKERF

SEQ ID NO: 112982 - protein, 10 aa, synthetic construct
EQQRGDKERF

SEQ ID NO: 112983 - protein, 10 aa, synthetic construct
EQDRGDKERF

SEQ ID NO: 112984 - protein, 10 aa, synthetic construct
EQERGDKERF

SEQ ID NO: 112985 - protein, 10 aa, synthetic construct
EDGRGDKERF

SEQ ID NO: 112986 - protein, 10 aa, synthetic construct
EDARGDKERF

SEQ ID NO: 112987 - protein, 10 aa, synthetic construct
EDVRGDKERF

SEQ ID NO: 112988 - protein, 10 aa, synthetic construct
EDPRGDKERF

SEQ ID NO: 112989 - protein, 10 aa, synthetic construct
EDLRGDKERF

SEQ ID NO: 112990 - protein, 10 aa, synthetic construct
EDIRGDKERF

SEQ ID NO: 112991 - protein, 10 aa, synthetic construct
EDMRGDKERF

SEQ ID NO: 112992 - protein, 10 aa, synthetic construct
EDWRGDKERF

SEQ ID NO: 112993 - protein, 10 aa, synthetic construct
EDFRGDKERF

SEQ ID NO: 112994 - protein, 10 aa, synthetic construct
EDKRGDKERF

SEQ ID NO: 112995 - protein, 10 aa, synthetic construct
EDRRGDKERF

SEQ ID NO: 112996 - protein, 10 aa, synthetic construct
EDHRGDKERF

SEQ ID NO: 112997 - protein, 10 aa, synthetic construct
EDSRGDKERF

SEQ ID NO: 112998 - protein, 10 aa, synthetic construct
EDTRGDKERF

SEQ ID NO: 112999 - protein, 10 aa, synthetic construct
EDYRGDKERF

SEQ ID NO: 113000 - protein, 10 aa, synthetic construct
EDNRGDKERF

SEQ ID NO: 113001 - protein, 10 aa, synthetic construct
EDQRGDKERF

SEQ ID NO: 113002 - protein, 10 aa, synthetic construct
EDDRGDKERF

SEQ ID NO: 113003 - protein, 10 aa, synthetic construct
EDERGDKERF

SEQ ID NO: 113004 - protein, 10 aa, synthetic construct
EEGRGDKERF

SEQ ID NO: 113005 - protein, 10 aa, synthetic construct
EEARGDKERF

SEQ ID NO: 113006 - protein, 10 aa, synthetic construct
EEVRGDKERF

SEQ ID NO: 113007 - protein, 10 aa, synthetic construct
EEPRGDKERF

SEQ ID NO: 113008 - protein, 10 aa, synthetic construct
EELRGDKERF

SEQ ID NO: 113009 - protein, 10 aa, synthetic construct
EEIRGDKERF

SEQ ID NO: 113010 - protein, 10 aa, synthetic construct
EEMRGDKERF

SEQ ID NO: 113011 - protein, 10 aa, synthetic construct
EEWRGDKERF

SEQ ID NO: 113012 - protein, 10 aa, synthetic construct
EEFRGDKERF

SEQ ID NO: 113013 - protein, 10 aa, synthetic construct
EEKRGDKERF

SEQ ID NO: 113014 - protein, 10 aa, synthetic construct
EERRGDKERF

SEQ ID NO: 113015 - protein, 10 aa, synthetic construct
EEHRGDKERF

SEQ ID NO: 113016 - protein, 10 aa, synthetic construct
EESRGDKERF

SEQ ID NO: 113017 - protein, 10 aa, synthetic construct
EETRGDKERF

SEQ ID NO: 113018 - protein, 10 aa, synthetic construct
EEYRGDKERF

SEQ ID NO: 113019 - protein, 10 aa, synthetic construct
EENRGDKERF

SEQ ID NO: 113020 - protein, 10 aa, synthetic construct
EEQRGDKERF

SEQ ID NO: 113021 - protein, 10 aa, synthetic construct
EEDRGDKERF

SEQ ID NO: 113022 - protein, 10 aa, synthetic construct
EEERGDKERF

SEQ ID NO: 113023 - protein, 10 aa, synthetic construct
NGGRGDKERF

SEQ ID NO: 113024 - protein, 10 aa, synthetic construct
NGARGDKERF

SEQ ID NO: 113025 - protein, 10 aa, synthetic construct
NGVRGDKERF

SEQ ID NO: 113026 - protein, 10 aa, synthetic construct
NGPRGDKERF

SEQ ID NO: 113027 - protein, 10 aa, synthetic construct
NGLRGDKERF

SEQ ID NO: 113028 - protein, 10 aa, synthetic construct
NGIRGDKERF

SEQ ID NO: 113029 - protein, 10 aa, synthetic construct
NGMRGDKERF

SEQ ID NO: 113030 - protein, 10 aa, synthetic construct
NGWRGDKERF

SEQ ID NO: 113031 - protein, 10 aa, synthetic construct
NGFRGDKERF

SEQ ID NO: 113032 - protein, 10 aa, synthetic construct
NGKRGDKERF

SEQ ID NO: 113033 - protein, 10 aa, synthetic construct
NGRRGDKERF

SEQ ID NO: 113034 - protein, 10 aa, synthetic construct
NGHRGDKERF

SEQ ID NO: 113035 - protein, 10 aa, synthetic construct
NGSRGDKERF

SEQ ID NO: 113036 - protein, 10 aa, synthetic construct
NGTRGDKERF

SEQ ID NO: 113037 - protein, 10 aa, synthetic construct
NGYRGDKERF

SEQ ID NO: 113038 - protein, 10 aa, synthetic construct
NGNRGDKERF

SEQ ID NO: 113039 - protein, 10 aa, synthetic construct
NGQRGDKERF

SEQ ID NO: 113040 - protein, 10 aa, synthetic construct
NGDRGDKERF

SEQ ID NO: 113041 - protein, 10 aa, synthetic construct
NGERGDKERF

SEQ ID NO: 113042 - protein, 10 aa, synthetic construct
NAGRGDKERF

SEQ ID NO: 113043 - protein, 10 aa, synthetic construct
NAARGDKERF

SEQ ID NO: 113044 - protein, 10 aa, synthetic construct
NAVRGDKERF

SEQ ID NO: 113045 - protein, 10 aa, synthetic construct
NAPRGDKERF

SEQ ID NO: 113046 - protein, 10 aa, synthetic construct
NALRGDKERF

SEQ ID NO: 113047 - protein, 10 aa, synthetic construct
NAIRGDKERF

SEQ ID NO: 113048 - protein, 10 aa, synthetic construct
NAMRGDKERF

SEQ ID NO: 113049 - protein, 10 aa, synthetic construct
NAWRGDKERF

SEQ ID NO: 113050 - protein, 10 aa, synthetic construct
NAFRGDKERF

SEQ ID NO: 113051 - protein, 10 aa, synthetic construct
NAKRGDKERF

SEQ ID NO: 113052 - protein, 10 aa, synthetic construct
NARRGDKERF

SEQ ID NO: 113053 - protein, 10 aa, synthetic construct
NAHRGDKERF

SEQ ID NO: 113054 - protein, 10 aa, synthetic construct
NASRGDKERF

SEQ ID NO: 113055 - protein, 10 aa, synthetic construct
NATRGDKERF

SEQ ID NO: 113056 - protein, 10 aa, synthetic construct
NAYRGDKERF

SEQ ID NO: 113057 - protein, 10 aa, synthetic construct
NANRGDKERF

SEQ ID NO: 113058 - protein, 10 aa, synthetic construct
NAQRGDKERF

SEQ ID NO: 113059 - protein, 10 aa, synthetic construct
NADRGDKERF

SEQ ID NO: 113060 - protein, 10 aa, synthetic construct
NAERGDKERF

SEQ ID NO: 113061 - protein, 10 aa, synthetic construct
NVGRGDKERF

SEQ ID NO: 113062 - protein, 10 aa, synthetic construct
NVARGDKERF

SEQ ID NO: 113063 - protein, 10 aa, synthetic construct
NVVRGDKERF

SEQ ID NO: 113064 - protein, 10 aa, synthetic construct
NVPRGDKERF

SEQ ID NO: 113065 - protein, 10 aa, synthetic construct
NVLRGDKERF

SEQ ID NO: 113066 - protein, 10 aa, synthetic construct
NVIRGDKERF

SEQ ID NO: 113067 - protein, 10 aa, synthetic construct
NVMRGDKERF

SEQ ID NO: 113068 - protein, 10 aa, synthetic construct
NVWRGDKERF

SEQ ID NO: 113069 - protein, 10 aa, synthetic construct
NVFRGDKERF

SEQ ID NO: 113070 - protein, 10 aa, synthetic construct
NVKRGDKERF

SEQ ID NO: 113071 - protein, 10 aa, synthetic construct
NVRRGDKERF

SEQ ID NO: 113072 - protein, 10 aa, synthetic construct
NVHRGDKERF

SEQ ID NO: 113073 - protein, 10 aa, synthetic construct
NVSRGDKERF

SEQ ID NO: 113074 - protein, 10 aa, synthetic construct
NVTRGDKERF

SEQ ID NO: 113075 - protein, 10 aa, synthetic construct
NVYRGDKERF

SEQ ID NO: 113076 - protein, 10 aa, synthetic construct
NVNRGDKERF

SEQ ID NO: 113077 - protein, 10 aa, synthetic construct
NVQRGDKERF

SEQ ID NO: 113078 - protein, 10 aa, synthetic construct
NVDRGDKERF

SEQ ID NO: 113079 - protein, 10 aa, synthetic construct
NVERGDKERF

SEQ ID NO: 113080 - protein, 10 aa, synthetic construct
NPGRGDKERF

SEQ ID NO: 113081 - protein, 10 aa, synthetic construct
NPARGDKERF

SEQ ID NO: 113082 - protein, 10 aa, synthetic construct
NPVRGDKERF

SEQ ID NO: 113083 - protein, 10 aa, synthetic construct
NPPRGDKERF

SEQ ID NO: 113084 - protein, 10 aa, synthetic construct
NPLRGDKERF

SEQ ID NO: 113085 - protein, 10 aa, synthetic construct
NPIRGDKERF

SEQ ID NO: 113086 - protein, 10 aa, synthetic construct
NPMRGDKERF

SEQ ID NO: 113087 - protein, 10 aa, synthetic construct
NPWRGDKERF

SEQ ID NO: 113088 - protein, 10 aa, synthetic construct
NPFRGDKERF

SEQ ID NO: 113089 - protein, 10 aa, synthetic construct
NPKRGDKERF

SEQ ID NO: 113090 - protein, 10 aa, synthetic construct
NPRRGDKERF

SEQ ID NO: 113091 - protein, 10 aa, synthetic construct
NPHRGDKERF

SEQ ID NO: 113092 - protein, 10 aa, synthetic construct
NPSRGDKERF

SEQ ID NO: 113093 - protein, 10 aa, synthetic construct
NPTRGDKERF

SEQ ID NO: 113094 - protein, 10 aa, synthetic construct
NPYRGDKERF

SEQ ID NO: 113095 - protein, 10 aa, synthetic construct
NPNRGDKERF

SEQ ID NO: 113096 - protein, 10 aa, synthetic construct
NPQRGDKERF

SEQ ID NO: 113097 - protein, 10 aa, synthetic construct
NPDRGDKERF

SEQ ID NO: 113098 - protein, 10 aa, synthetic construct
NPERGDKERF

SEQ ID NO: 113099 - protein, 10 aa, synthetic construct
NLGRGDKERF

SEQ ID NO: 113100 - protein, 10 aa, synthetic construct
NLARGDKERF

SEQ ID NO: 113101 - protein, 10 aa, synthetic construct
NLVRGDKERF

SEQ ID NO: 113102 - protein, 10 aa, synthetic construct
NLPRGDKERF

SEQ ID NO: 113103 - protein, 10 aa, synthetic construct
NLLRGDKERF

SEQ ID NO: 113104 - protein, 10 aa, synthetic construct
NLIRGDKERF

SEQ ID NO: 113105 - protein, 10 aa, synthetic construct
NLMRGDKERF

SEQ ID NO: 113106 - protein, 10 aa, synthetic construct
NLWRGDKERF

SEQ ID NO: 113107 - protein, 10 aa, synthetic construct
NLFRGDKERF

SEQ ID NO: 113108 - protein, 10 aa, synthetic construct
NLKRGDKERF

SEQ ID NO: 113109 - protein, 10 aa, synthetic construct
NLRRGDKERF

SEQ ID NO: 113110 - protein, 10 aa, synthetic construct
NLHRGDKERF

SEQ ID NO: 113111 - protein, 10 aa, synthetic construct
NLSRGDKERF

SEQ ID NO: 113112 - protein, 10 aa, synthetic construct
NLTRGDKERF

SEQ ID NO: 113113 - protein, 10 aa, synthetic construct
NLYRGDKERF

SEQ ID NO: 113114 - protein, 10 aa, synthetic construct
NLNRGDKERF

SEQ ID NO: 113115 - protein, 10 aa, synthetic construct
NLQRGDKERF

SEQ ID NO: 113116 - protein, 10 aa, synthetic construct
NLDRGDKERF

SEQ ID NO: 113117 - protein, 10 aa, synthetic construct
NLERGDKERF

SEQ ID NO: 113118 - protein, 10 aa, synthetic construct
NIGRGDKERF

SEQ ID NO: 113119 - protein, 10 aa, synthetic construct
NIARGDKERF

SEQ ID NO: 113120 - protein, 10 aa, synthetic construct
NIVRGDKERF

SEQ ID NO: 113121 - protein, 10 aa, synthetic construct
NIPRGDKERF

SEQ ID NO: 113122 - protein, 10 aa, synthetic construct
NILRGDKERF

SEQ ID NO: 113123 - protein, 10 aa, synthetic construct
NIIRGDKERF

SEQ ID NO: 113124 - protein, 10 aa, synthetic construct
NIMRGDKERF

SEQ ID NO: 113125 - protein, 10 aa, synthetic construct
NIWRGDKERF

SEQ ID NO: 113126 - protein, 10 aa, synthetic construct
NIFRGDKERF

SEQ ID NO: 113127 - protein, 10 aa, synthetic construct
NIKRGDKERF

SEQ ID NO: 113128 - protein, 10 aa, synthetic construct
NIRRGDKERF

SEQ ID NO: 113129 - protein, 10 aa, synthetic construct
NIHRGDKERF

SEQ ID NO: 113130 - protein, 10 aa, synthetic construct
NISRGDKERF

SEQ ID NO: 113131 - protein, 10 aa, synthetic construct
NITRGDKERF

SEQ ID NO: 113132 - protein, 10 aa, synthetic construct
NIYRGDKERF

SEQ ID NO: 113133 - protein, 10 aa, synthetic construct
NINRGDKERF

SEQ ID NO: 113134 - protein, 10 aa, synthetic construct
NIQRGDKERF

SEQ ID NO: 113135 - protein, 10 aa, synthetic construct
NIDRGDKERF

SEQ ID NO: 113136 - protein, 10 aa, synthetic construct
NIERGDKERF

SEQ ID NO: 113137 - protein, 10 aa, synthetic construct
NMGRGDKERF

SEQ ID NO: 113138 - protein, 10 aa, synthetic construct
NMARGDKERF

SEQ ID NO: 113139 - protein, 10 aa, synthetic construct
NMVRGDKERF

SEQ ID NO: 113140 - protein, 10 aa, synthetic construct
NMPRGDKERF

SEQ ID NO: 113141 - protein, 10 aa, synthetic construct
NMLRGDKERF

SEQ ID NO: 113142 - protein, 10 aa, synthetic construct
NMIRGDKERF

SEQ ID NO: 113143 - protein, 10 aa, synthetic construct
NMMRGDKERF

SEQ ID NO: 113144 - protein, 10 aa, synthetic construct
NMWRGDKERF

SEQ ID NO: 113145 - protein, 10 aa, synthetic construct
NMFRGDKERF

SEQ ID NO: 113146 - protein, 10 aa, synthetic construct
NMKRGDKERF

SEQ ID NO: 113147 - protein, 10 aa, synthetic construct
NMRRGDKERF

SEQ ID NO: 113148 - protein, 10 aa, synthetic construct
NMHRGDKERF

SEQ ID NO: 113149 - protein, 10 aa, synthetic construct
NMSRGDKERF

SEQ ID NO: 113150 - protein, 10 aa, synthetic construct
NMTRGDKERF

SEQ ID NO: 113151 - protein, 10 aa, synthetic construct
NMYRGDKERF

SEQ ID NO: 113152 - protein, 10 aa, synthetic construct
NMNRGDKERF

SEQ ID NO: 113153 - protein, 10 aa, synthetic construct
NMQRGDKERF

SEQ ID NO: 113154 - protein, 10 aa, synthetic construct
NMDRGDKERF

SEQ ID NO: 113155 - protein, 10 aa, synthetic construct
NMERGDKERF

SEQ ID NO: 113156 - protein, 10 aa, synthetic construct
NWGRGDKERF

SEQ ID NO: 113157 - protein, 10 aa, synthetic construct
NWARGDKERF

SEQ ID NO: 113158 - protein, 10 aa, synthetic construct
NWVRGDKERF

SEQ ID NO: 113159 - protein, 10 aa, synthetic construct
NWPRGDKERF

SEQ ID NO: 113160 - protein, 10 aa, synthetic construct
NWLRGDKERF

SEQ ID NO: 113161 - protein, 10 aa, synthetic construct
NWIRGDKERF

SEQ ID NO: 113162 - protein, 10 aa, synthetic construct
NWMRGDKERF

SEQ ID NO: 113163 - protein, 10 aa, synthetic construct
NWWRGDKERF

SEQ ID NO: 113164 - protein, 10 aa, synthetic construct
NWFRGDKERF

SEQ ID NO: 113165 - protein, 10 aa, synthetic construct
NWKRGDKERF

SEQ ID NO: 113166 - protein, 10 aa, synthetic construct
NWRRGDKERF

SEQ ID NO: 113167 - protein, 10 aa, synthetic construct
NWHRGDKERF

SEQ ID NO: 113168 - protein, 10 aa, synthetic construct
NWSRGDKERF

SEQ ID NO: 113169 - protein, 10 aa, synthetic construct
NWTRGDKERF

SEQ ID NO: 113170 - protein, 10 aa, synthetic construct
NWYRGDKERF

SEQ ID NO: 113171 - protein, 10 aa, synthetic construct
NWNRGDKERF

SEQ ID NO: 113172 - protein, 10 aa, synthetic construct
NWQRGDKERF

SEQ ID NO: 113173 - protein, 10 aa, synthetic construct
NWDRGDKERF

SEQ ID NO: 113174 - protein, 10 aa, synthetic construct
NWERGDKERF

SEQ ID NO: 113175 - protein, 10 aa, synthetic construct
NFGRGDKERF

SEQ ID NO: 113176 - protein, 10 aa, synthetic construct
NFARGDKERF

SEQ ID NO: 113177 - protein, 10 aa, synthetic construct
NFVRGDKERF

SEQ ID NO: 113178 - protein, 10 aa, synthetic construct
NFPRGDKERF

SEQ ID NO: 113179 - protein, 10 aa, synthetic construct
NFLRGDKERF

SEQ ID NO: 113180 - protein, 10 aa, synthetic construct
NFIRGDKERF

SEQ ID NO: 113181 - protein, 10 aa, synthetic construct
NFMRGDKERF

SEQ ID NO: 113182 - protein, 10 aa, synthetic construct
NFWRGDKERF

SEQ ID NO: 113183 - protein, 10 aa, synthetic construct
NFFRGDKERF

SEQ ID NO: 113184 - protein, 10 aa, synthetic construct
NFKRGDKERF

SEQ ID NO: 113185 - protein, 10 aa, synthetic construct
NFRRGDKERF

SEQ ID NO: 113186 - protein, 10 aa, synthetic construct
NFHRGDKERF

SEQ ID NO: 113187 - protein, 10 aa, synthetic construct
NFSRGDKERF

SEQ ID NO: 113188 - protein, 10 aa, synthetic construct
NFTRGDKERF

SEQ ID NO: 113189 - protein, 10 aa, synthetic construct
NFYRGDKERF

SEQ ID NO: 113190 - protein, 10 aa, synthetic construct
NFNRGDKERF

SEQ ID NO: 113191 - protein, 10 aa, synthetic construct
NFQRGDKERF

SEQ ID NO: 113192 - protein, 10 aa, synthetic construct
NFDRGDKERF

SEQ ID NO: 113193 - protein, 10 aa, synthetic construct
NFERGDKERF

SEQ ID NO: 113194 - protein, 10 aa, synthetic construct
NKGRGDKERF

SEQ ID NO: 113195 - protein, 10 aa, synthetic construct
NKARGDKERF

SEQ ID NO: 113196 - protein, 10 aa, synthetic construct
NKVRGDKERF

SEQ ID NO: 113197 - protein, 10 aa, synthetic construct
NKPRGDKERF

SEQ ID NO: 113198 - protein, 10 aa, synthetic construct
NKLRGDKERF

SEQ ID NO: 113199 - protein, 10 aa, synthetic construct
NKIRGDKERF

SEQ ID NO: 113200 - protein, 10 aa, synthetic construct
NKMRGDKERF

SEQ ID NO: 113201 - protein, 10 aa, synthetic construct
NKWRGDKERF

SEQ ID NO: 113202 - protein, 10 aa, synthetic construct
NKFRGDKERF

SEQ ID NO: 113203 - protein, 10 aa, synthetic construct
NKKRGDKERF

SEQ ID NO: 113204 - protein, 10 aa, synthetic construct
NKRRGDKERF

SEQ ID NO: 113205 - protein, 10 aa, synthetic construct
NKHRGDKERF

SEQ ID NO: 113206 - protein, 10 aa, synthetic construct
NKSRGDKERF

SEQ ID NO: 113207 - protein, 10 aa, synthetic construct
NKTRGDKERF

SEQ ID NO: 113208 - protein, 10 aa, synthetic construct
NKYRGDKERF

SEQ ID NO: 113209 - protein, 10 aa, synthetic construct
NKNRGDKERF

SEQ ID NO: 113210 - protein, 10 aa, synthetic construct
NKQRGDKERF

SEQ ID NO: 113211 - protein, 10 aa, synthetic construct
NKDRGDKERF

SEQ ID NO: 113212 - protein, 10 aa, synthetic construct
NKERGDKERF

SEQ ID NO: 113213 - protein, 10 aa, synthetic construct
NRGRGDKERF

SEQ ID NO: 113214 - protein, 10 aa, synthetic construct
NRARGDKERF

SEQ ID NO: 113215 - protein, 10 aa, synthetic construct
NRVRGDKERF

SEQ ID NO: 113216 - protein, 10 aa, synthetic construct
NRPRGDKERF

SEQ ID NO: 113217 - protein, 10 aa, synthetic construct
NRLRGDKERF

SEQ ID NO: 113218 - protein, 10 aa, synthetic construct
NRIRGDKERF

SEQ ID NO: 113219 - protein, 10 aa, synthetic construct
NRMRGDKERF

SEQ ID NO: 113220 - protein, 10 aa, synthetic construct
NRWRGDKERF

SEQ ID NO: 113221 - protein, 10 aa, synthetic construct
NRFRGDKERF

SEQ ID NO: 113222 - protein, 10 aa, synthetic construct
NRKRGDKERF

SEQ ID NO: 113223 - protein, 10 aa, synthetic construct
NRRRGDKERF

SEQ ID NO: 113224 - protein, 10 aa, synthetic construct
NRHRGDKERF

SEQ ID NO: 113225 - protein, 10 aa, synthetic construct
NRSRGDKERF

SEQ ID NO: 113226 - protein, 10 aa, synthetic construct
NRTRGDKERF

SEQ ID NO: 113227 - protein, 10 aa, synthetic construct
NRYRGDKERF

SEQ ID NO: 113228 - protein, 10 aa, synthetic construct
NRNRGDKERF

SEQ ID NO: 113229 - protein, 10 aa, synthetic construct
NRQRGDKERF

SEQ ID NO: 113230 - protein, 10 aa, synthetic construct
NRDRGDKERF

SEQ ID NO: 113231 - protein, 10 aa, synthetic construct
NRERGDKERF

SEQ ID NO: 113232 - protein, 10 aa, synthetic construct
NHGRGDKERF

SEQ ID NO: 113233 - protein, 10 aa, synthetic construct
NHARGDKERF

SEQ ID NO: 113234 - protein, 10 aa, synthetic construct
NHVRGDKERF

SEQ ID NO: 113235 - protein, 10 aa, synthetic construct
NHPRGDKERF

SEQ ID NO: 113236 - protein, 10 aa, synthetic construct
NHLRGDKERF

SEQ ID NO: 113237 - protein, 10 aa, synthetic construct
NHIRGDKERF

SEQ ID NO: 113238 - protein, 10 aa, synthetic construct
NHMRGDKERF

SEQ ID NO: 113239 - protein, 10 aa, synthetic construct
NHWRGDKERF

SEQ ID NO: 113240 - protein, 10 aa, synthetic construct
NHFRGDKERF

SEQ ID NO: 113241 - protein, 10 aa, synthetic construct
NHKRGDKERF

SEQ ID NO: 113242 - protein, 10 aa, synthetic construct
NHRRGDKERF

SEQ ID NO: 113243 - protein, 10 aa, synthetic construct
NHHRGDKERF

SEQ ID NO: 113244 - protein, 10 aa, synthetic construct
NHSRGDKERF

SEQ ID NO: 113245 - protein, 10 aa, synthetic construct
NHTRGDKERF

SEQ ID NO: 113246 - protein, 10 aa, synthetic construct
NHYRGDKERF

SEQ ID NO: 113247 - protein, 10 aa, synthetic construct
NHNRGDKERF

SEQ ID NO: 113248 - protein, 10 aa, synthetic construct
NHQRGDKERF

SEQ ID NO: 113249 - protein, 10 aa, synthetic construct
NHDRGDKERF

SEQ ID NO: 113250 - protein, 10 aa, synthetic construct
NHERGDKERF

SEQ ID NO: 113251 - protein, 10 aa, synthetic construct
NSGRGDKERF

SEQ ID NO: 113252 - protein, 10 aa, synthetic construct
NSARGDKERF

SEQ ID NO: 113253 - protein, 10 aa, synthetic construct
NSVRGDKERF

SEQ ID NO: 113254 - protein, 10 aa, synthetic construct
NSPRGDKERF

SEQ ID NO: 113255 - protein, 10 aa, synthetic construct
NSLRGDKERF

SEQ ID NO: 113256 - protein, 10 aa, synthetic construct
NSIRGDKERF

SEQ ID NO: 113257 - protein, 10 aa, synthetic construct
NSMRGDKERF

SEQ ID NO: 113258 - protein, 10 aa, synthetic construct
NSWRGDKERF

SEQ ID NO: 113259 - protein, 10 aa, synthetic construct
NSFRGDKERF

SEQ ID NO: 113260 - protein, 10 aa, synthetic construct
NSKRGDKERF

SEQ ID NO: 113261 - protein, 10 aa, synthetic construct
NSRRGDKERF

SEQ ID NO: 113262 - protein, 10 aa, synthetic construct
NSHRGDKERF

SEQ ID NO: 113263 - protein, 10 aa, synthetic construct
NSSRGDKERF

SEQ ID NO: 113264 - protein, 10 aa, synthetic construct
NSTRGDKERF

SEQ ID NO: 113265 - protein, 10 aa, synthetic construct
NSYRGDKERF

SEQ ID NO: 113266 - protein, 10 aa, synthetic construct
NSNRGDKERF

SEQ ID NO: 113267 - protein, 10 aa, synthetic construct
NSQRGDKERF

SEQ ID NO: 113268 - protein, 10 aa, synthetic construct
NSDRGDKERF

SEQ ID NO: 113269 - protein, 10 aa, synthetic construct
NSERGDKERF

SEQ ID NO: 113270 - protein, 10 aa, synthetic construct
NTGRGDKERF

SEQ ID NO: 113271 - protein, 10 aa, synthetic construct
NTARGDKERF

SEQ ID NO: 113272 - protein, 10 aa, synthetic construct
NTVRGDKERF

SEQ ID NO: 113273 - protein, 10 aa, synthetic construct
NTPRGDKERF

SEQ ID NO: 113274 - protein, 10 aa, synthetic construct
NTLRGDKERF

SEQ ID NO: 113275 - protein, 10 aa, synthetic construct
NTIRGDKERF

SEQ ID NO: 113276 - protein, 10 aa, synthetic construct
NTMRGDKERF

SEQ ID NO: 113277 - protein, 10 aa, synthetic construct
NTWRGDKERF

SEQ ID NO: 113278 - protein, 10 aa, synthetic construct
NTFRGDKERF

SEQ ID NO: 113279 - protein, 10 aa, synthetic construct
NTKRGDKERF

SEQ ID NO: 113280 - protein, 10 aa, synthetic construct
NTRRGDKERF

SEQ ID NO: 113281 - protein, 10 aa, synthetic construct
NTHRGDKERF

SEQ ID NO: 113282 - protein, 10 aa, synthetic construct
NTSRGDKERF

SEQ ID NO: 113283 - protein, 10 aa, synthetic construct
NTTRGDKERF

SEQ ID NO: 113284 - protein, 10 aa, synthetic construct
NTYRGDKERF

SEQ ID NO: 113285 - protein, 10 aa, synthetic construct
NTNRGDKERF

SEQ ID NO: 113286 - protein, 10 aa, synthetic construct
NTQRGDKERF

SEQ ID NO: 113287 - protein, 10 aa, synthetic construct
NTDRGDKERF

SEQ ID NO: 113288 - protein, 10 aa, synthetic construct
NTERGDKERF

SEQ ID NO: 113289 - protein, 10 aa, synthetic construct
NYGRGDKERF

SEQ ID NO: 113290 - protein, 10 aa, synthetic construct
NYARGDKERF

SEQ ID NO: 113291 - protein, 10 aa, synthetic construct
NYVRGDKERF

SEQ ID NO: 113292 - protein, 10 aa, synthetic construct
NYPRGDKERF

SEQ ID NO: 113293 - protein, 10 aa, synthetic construct
NYLRGDKERF

SEQ ID NO: 113294 - protein, 10 aa, synthetic construct
NYIRGDKERF

SEQ ID NO: 113295 - protein, 10 aa, synthetic construct
NYMRGDKERF

SEQ ID NO: 113296 - protein, 10 aa, synthetic construct
NYWRGDKERF

SEQ ID NO: 113297 - protein, 10 aa, synthetic construct
NYFRGDKERF

SEQ ID NO: 113298 - protein, 10 aa, synthetic construct
NYKRGDKERF

SEQ ID NO: 113299 - protein, 10 aa, synthetic construct
NYRRGDKERF

SEQ ID NO: 113300 - protein, 10 aa, synthetic construct
NYHRGDKERF

SEQ ID NO: 113301 - protein, 10 aa, synthetic construct
NYSRGDKERF

SEQ ID NO: 113302 - protein, 10 aa, synthetic construct
NYTRGDKERF

SEQ ID NO: 113303 - protein, 10 aa, synthetic construct
NYYRGDKERF

SEQ ID NO: 113304 - protein, 10 aa, synthetic construct
NYNRGDKERF

SEQ ID NO: 113305 - protein, 10 aa, synthetic construct
NYQRGDKERF

SEQ ID NO: 113306 - protein, 10 aa, synthetic construct
NYDRGDKERF

SEQ ID NO: 113307 - protein, 10 aa, synthetic construct
NYERGDKERF

SEQ ID NO: 113308 - protein, 10 aa, synthetic construct
NNGRGDKERF

SEQ ID NO: 113309 - protein, 10 aa, synthetic construct
NNARGDKERF

SEQ ID NO: 113310 - protein, 10 aa, synthetic construct
NNVRGDKERF

SEQ ID NO: 113311 - protein, 10 aa, synthetic construct
NNPRGDKERF

SEQ ID NO: 113312 - protein, 10 aa, synthetic construct
NNLRGDKERF

SEQ ID NO: 113313 - protein, 10 aa, synthetic construct
NNIRGDKERF

SEQ ID NO: 113314 - protein, 10 aa, synthetic construct
NNMRGDKERF

SEQ ID NO: 113315 - protein, 10 aa, synthetic construct
NNWRGDKERF

SEQ ID NO: 113316 - protein, 10 aa, synthetic construct
NNFRGDKERF

SEQ ID NO: 113317 - protein, 10 aa, synthetic construct
NNKRGDKERF

SEQ ID NO: 113318 - protein, 10 aa, synthetic construct
NNRRGDKERF

SEQ ID NO: 113319 - protein, 10 aa, synthetic construct
NNHRGDKERF

SEQ ID NO: 113320 - protein, 10 aa, synthetic construct
NNSRGDKERF

SEQ ID NO: 113321 - protein, 10 aa, synthetic construct
NNTRGDKERF

SEQ ID NO: 113322 - protein, 10 aa, synthetic construct
NNYRGDKERF

SEQ ID NO: 113323 - protein, 10 aa, synthetic construct
NNNRGDKERF

SEQ ID NO: 113324 - protein, 10 aa, synthetic construct
NNQRGDKERF

SEQ ID NO: 113325 - protein, 10 aa, synthetic construct
NNDRGDKERF

SEQ ID NO: 113326 - protein, 10 aa, synthetic construct
NNERGDKERF

SEQ ID NO: 113327 - protein, 10 aa, synthetic construct
NQGRGDKERF

SEQ ID NO: 113328 - protein, 10 aa, synthetic construct
NQARGDKERF

SEQ ID NO: 113329 - protein, 10 aa, synthetic construct
NQVRGDKERF

SEQ ID NO: 113330 - protein, 10 aa, synthetic construct
NQPRGDKERF

SEQ ID NO: 113331 - protein, 10 aa, synthetic construct
NQLRGDKERF

SEQ ID NO: 113332 - protein, 10 aa, synthetic construct
NQIRGDKERF

SEQ ID NO: 113333 - protein, 10 aa, synthetic construct
NQMRGDKERF

SEQ ID NO: 113334 - protein, 10 aa, synthetic construct
NQWRGDKERF

SEQ ID NO: 113335 - protein, 10 aa, synthetic construct
NQFRGDKERF

SEQ ID NO: 113336 - protein, 10 aa, synthetic construct
NQKRGDKERF

SEQ ID NO: 113337 - protein, 10 aa, synthetic construct
NQRRGDKERF

SEQ ID NO: 113338 - protein, 10 aa, synthetic construct
NQHRGDKERF

SEQ ID NO: 113339 - protein, 10 aa, synthetic construct
NQSRGDKERF

SEQ ID NO: 113340 - protein, 10 aa, synthetic construct
NQTRGDKERF

SEQ ID NO: 113341 - protein, 10 aa, synthetic construct
NQYRGDKERF

SEQ ID NO: 113342 - protein, 10 aa, synthetic construct
NQNRGDKERF

SEQ ID NO: 113343 - protein, 10 aa, synthetic construct
NQQRGDKERF

SEQ ID NO: 113344 - protein, 10 aa, synthetic construct
NQDRGDKERF

SEQ ID NO: 113345 - protein, 10 aa, synthetic construct
NQERGDKERF

SEQ ID NO: 113346 - protein, 10 aa, synthetic construct
NDGRGDKERF

SEQ ID NO: 113347 - protein, 10 aa, synthetic construct
NDARGDKERF

SEQ ID NO: 113348 - protein, 10 aa, synthetic construct
NDVRGDKERF

SEQ ID NO: 113349 - protein, 10 aa, synthetic construct
NDPRGDKERF

SEQ ID NO: 113350 - protein, 10 aa, synthetic construct
NDLRGDKERF

SEQ ID NO: 113351 - protein, 10 aa, synthetic construct
NDIRGDKERF

SEQ ID NO: 113352 - protein, 10 aa, synthetic construct
NDMRGDKERF

SEQ ID NO: 113353 - protein, 10 aa, synthetic construct
NDWRGDKERF

SEQ ID NO: 113354 - protein, 10 aa, synthetic construct
NDFRGDKERF

SEQ ID NO: 113355 - protein, 10 aa, synthetic construct
NDKRGDKERF

SEQ ID NO: 113356 - protein, 10 aa, synthetic construct
NDRRGDKERF

SEQ ID NO: 113357 - protein, 10 aa, synthetic construct
NDHRGDKERF

SEQ ID NO: 113358 - protein, 10 aa, synthetic construct
NDSRGDKERF

SEQ ID NO: 113359 - protein, 10 aa, synthetic construct
NDTRGDKERF

SEQ ID NO: 113360 - protein, 10 aa, synthetic construct
NDYRGDKERF

SEQ ID NO: 113361 - protein, 10 aa, synthetic construct
NDNRGDKERF

SEQ ID NO: 113362 - protein, 10 aa, synthetic construct
NDQRGDKERF

SEQ ID NO: 113363 - protein, 10 aa, synthetic construct
NDDRGDKERF

SEQ ID NO: 113364 - protein, 10 aa, synthetic construct
NDERGDKERF

SEQ ID NO: 113365 - protein, 10 aa, synthetic construct
NEGRGDKERF

SEQ ID NO: 113366 - protein, 10 aa, synthetic construct
NEARGDKERF

SEQ ID NO: 113367 - protein, 10 aa, synthetic construct
NEVRGDKERF

SEQ ID NO: 113368 - protein, 10 aa, synthetic construct
NEPRGDKERF

SEQ ID NO: 113369 - protein, 10 aa, synthetic construct
NELRGDKERF

SEQ ID NO: 113370 - protein, 10 aa, synthetic construct
NEIRGDKERF

SEQ ID NO: 113371 - protein, 10 aa, synthetic construct
NEMRGDKERF

SEQ ID NO: 113372 - protein, 10 aa, synthetic construct
NEWRGDKERF

SEQ ID NO: 113373 - protein, 10 aa, synthetic construct
NEFRGDKERF

SEQ ID NO: 113374 - protein, 10 aa, synthetic construct
NEKRGDKERF

SEQ ID NO: 113375 - protein, 10 aa, synthetic construct
NERRGDKERF

SEQ ID NO: 113376 - protein, 10 aa, synthetic construct
NEHRGDKERF

SEQ ID NO: 113377 - protein, 10 aa, synthetic construct
NESRGDKERF

SEQ ID NO: 113378 - protein, 10 aa, synthetic construct
NETRGDKERF

SEQ ID NO: 113379 - protein, 10 aa, synthetic construct
NEYRGDKERF

SEQ ID NO: 113380 - protein, 10 aa, synthetic construct
NENRGDKERF

SEQ ID NO: 113381 - protein, 10 aa, synthetic construct
NEQRGDKERF

SEQ ID NO: 113382 - protein, 10 aa, synthetic construct
NEDRGDKERF

SEQ ID NO: 113383 - protein, 10 aa, synthetic construct
NEERGDKERF

SEQ ID NO: 113384 - protein, 10 aa, synthetic construct
DGGRGDKERF

SEQ ID NO: 113385 - protein, 10 aa, synthetic construct
DGARGDKERF

SEQ ID NO: 113386 - protein, 10 aa, synthetic construct
DGVRGDKERF

SEQ ID NO: 113387 - protein, 10 aa, synthetic construct
DGPRGDKERF

SEQ ID NO: 113388 - protein, 10 aa, synthetic construct
DGLRGDKERF

SEQ ID NO: 113389 - protein, 10 aa, synthetic construct
DGIRGDKERF

SEQ ID NO: 113390 - protein, 10 aa, synthetic construct
DGMRGDKERF

SEQ ID NO: 113391 - protein, 10 aa, synthetic construct
DGWRGDKERF

SEQ ID NO: 113392 - protein, 10 aa, synthetic construct
DGFRGDKERF

SEQ ID NO: 113393 - protein, 10 aa, synthetic construct
DGKRGDKERF

SEQ ID NO: 113394 - protein, 10 aa, synthetic construct
DGRRGDKERF

SEQ ID NO: 113395 - protein, 10 aa, synthetic construct
DGHRGDKERF

SEQ ID NO: 113396 - protein, 10 aa, synthetic construct
DGSRGDKERF

SEQ ID NO: 113397 - protein, 10 aa, synthetic construct
DGTRGDKERF

SEQ ID NO: 113398 - protein, 10 aa, synthetic construct
DGYRGDKERF

SEQ ID NO: 113399 - protein, 10 aa, synthetic construct
DGNRGDKERF

SEQ ID NO: 113400 - protein, 10 aa, synthetic construct
DGQRGDKERF

SEQ ID NO: 113401 - protein, 10 aa, synthetic construct
DGDRGDKERF

SEQ ID NO: 113402 - protein, 10 aa, synthetic construct
DGERGDKERF

SEQ ID NO: 113403 - protein, 10 aa, synthetic construct
DAGRGDKERF

SEQ ID NO: 113404 - protein, 10 aa, synthetic construct
DAARGDKERF

SEQ ID NO: 113405 - protein, 10 aa, synthetic construct
DAVRGDKERF

SEQ ID NO: 113406 - protein, 10 aa, synthetic construct
DAPRGDKERF

SEQ ID NO: 113407 - protein, 10 aa, synthetic construct
DALRGDKERF

SEQ ID NO: 113408 - protein, 10 aa, synthetic construct
DAIRGDKERF

SEQ ID NO: 113409 - protein, 10 aa, synthetic construct
DAMRGDKERF

SEQ ID NO: 113410 - protein, 10 aa, synthetic construct
DAWRGDKERF

SEQ ID NO: 113411 - protein, 10 aa, synthetic construct
DAFRGDKERF

SEQ ID NO: 113412 - protein, 10 aa, synthetic construct
DAKRGDKERF

SEQ ID NO: 113413 - protein, 10 aa, synthetic construct
DARRGDKERF

SEQ ID NO: 113414 - protein, 10 aa, synthetic construct
DAHRGDKERF

SEQ ID NO: 113415 - protein, 10 aa, synthetic construct
DASRGDKERF

SEQ ID NO: 113416 - protein, 10 aa, synthetic construct
DATRGDKERF

SEQ ID NO: 113417 - protein, 10 aa, synthetic construct
DAYRGDKERF

SEQ ID NO: 113418 - protein, 10 aa, synthetic construct
DANRGDKERF

SEQ ID NO: 113419 - protein, 10 aa, synthetic construct
DAQRGDKERF

SEQ ID NO: 113420 - protein, 10 aa, synthetic construct
DADRGDKERF

SEQ ID NO: 113421 - protein, 10 aa, synthetic construct
DAERGDKERF

SEQ ID NO: 113422 - protein, 10 aa, synthetic construct
DVGRGDKERF

SEQ ID NO: 113423 - protein, 10 aa, synthetic construct
DVARGDKERF

SEQ ID NO: 113424 - protein, 10 aa, synthetic construct
DVVRGDKERF

SEQ ID NO: 113425 - protein, 10 aa, synthetic construct
DVPRGDKERF

SEQ ID NO: 113426 - protein, 10 aa, synthetic construct
DVLRGDKERF

SEQ ID NO: 113427 - protein, 10 aa, synthetic construct
DVIRGDKERF

SEQ ID NO: 113428 - protein, 10 aa, synthetic construct
DVMRGDKERF

SEQ ID NO: 113429 - protein, 10 aa, synthetic construct
DVWRGDKERF

SEQ ID NO: 113430 - protein, 10 aa, synthetic construct
DVFRGDKERF

SEQ ID NO: 113431 - protein, 10 aa, synthetic construct
DVKRGDKERF

SEQ ID NO: 113432 - protein, 10 aa, synthetic construct
DVRRGDKERF

SEQ ID NO: 113433 - protein, 10 aa, synthetic construct
DVHRGDKERF

SEQ ID NO: 113434 - protein, 10 aa, synthetic construct
DVSRGDKERF

SEQ ID NO: 113435 - protein, 10 aa, synthetic construct
DVTRGDKERF

SEQ ID NO: 113436 - protein, 10 aa, synthetic construct
DVYRGDKERF

SEQ ID NO: 113437 - protein, 10 aa, synthetic construct
DVNRGDKERF

SEQ ID NO: 113438 - protein, 10 aa, synthetic construct
DVQRGDKERF

SEQ ID NO: 113439 - protein, 10 aa, synthetic construct
DVDRGDKERF

SEQ ID NO: 113440 - protein, 10 aa, synthetic construct
DVERGDKERF

SEQ ID NO: 113441 - protein, 10 aa, synthetic construct
DPGRGDKERF

SEQ ID NO: 113442 - protein, 10 aa, synthetic construct
DPARGDKERF

SEQ ID NO: 113443 - protein, 10 aa, synthetic construct
DPVRGDKERF

SEQ ID NO: 113444 - protein, 10 aa, synthetic construct
DPPRGDKERF

SEQ ID NO: 113445 - protein, 10 aa, synthetic construct
DPLRGDKERF

SEQ ID NO: 113446 - protein, 10 aa, synthetic construct
DPIRGDKERF

SEQ ID NO: 113447 - protein, 10 aa, synthetic construct
DPMRGDKERF

SEQ ID NO: 113448 - protein, 10 aa, synthetic construct
DPWRGDKERF

SEQ ID NO: 113449 - protein, 10 aa, synthetic construct
DPFRGDKERF

SEQ ID NO: 113450 - protein, 10 aa, synthetic construct
DPKRGDKERF

SEQ ID NO: 113451 - protein, 10 aa, synthetic construct
DPRRGDKERF

SEQ ID NO: 113452 - protein, 10 aa, synthetic construct
DPHRGDKERF

SEQ ID NO: 113453 - protein, 10 aa, synthetic construct
DPSRGDKERF

SEQ ID NO: 113454 - protein, 10 aa, synthetic construct
DPTRGDKERF

SEQ ID NO: 113455 - protein, 10 aa, synthetic construct
DPYRGDKERF

SEQ ID NO: 113456 - protein, 10 aa, synthetic construct
DPNRGDKERF

SEQ ID NO: 113457 - protein, 10 aa, synthetic construct
DPQRGDKERF

SEQ ID NO: 113458 - protein, 10 aa, synthetic construct
DPDRGDKERF

SEQ ID NO: 113459 - protein, 10 aa, synthetic construct
DPERGDKERF

SEQ ID NO: 113460 - protein, 10 aa, synthetic construct
DLGRGDKERF

SEQ ID NO: 113461 - protein, 10 aa, synthetic construct
DLARGDKERF

SEQ ID NO: 113462 - protein, 10 aa, synthetic construct
DLVRGDKERF

SEQ ID NO: 113463 - protein, 10 aa, synthetic construct
DLPRGDKERF

SEQ ID NO: 113464 - protein, 10 aa, synthetic construct
DLLRGDKERF

SEQ ID NO: 113465 - protein, 10 aa, synthetic construct
DLIRGDKERF

SEQ ID NO: 113466 - protein, 10 aa, synthetic construct
DLMRGDKERF

SEQ ID NO: 113467 - protein, 10 aa, synthetic construct
DLWRGDKERF

SEQ ID NO: 113468 - protein, 10 aa, synthetic construct
DLFRGDKERF

SEQ ID NO: 113469 - protein, 10 aa, synthetic construct
DLKRGDKERF

SEQ ID NO: 113470 - protein, 10 aa, synthetic construct
DLRRGDKERF

SEQ ID NO: 113471 - protein, 10 aa, synthetic construct
DLHRGDKERF

SEQ ID NO: 113472 - protein, 10 aa, synthetic construct
DLSRGDKERF

SEQ ID NO: 113473 - protein, 10 aa, synthetic construct
DLTRGDKERF

SEQ ID NO: 113474 - protein, 10 aa, synthetic construct
DLYRGDKERF

SEQ ID NO: 113475 - protein, 10 aa, synthetic construct
DLNRGDKERF

SEQ ID NO: 113476 - protein, 10 aa, synthetic construct
DLQRGDKERF

SEQ ID NO: 113477 - protein, 10 aa, synthetic construct
DLDRGDKERF

SEQ ID NO: 113478 - protein, 10 aa, synthetic construct
DLERGDKERF

SEQ ID NO: 113479 - protein, 10 aa, synthetic construct
DIGRGDKERF

SEQ ID NO: 113480 - protein, 10 aa, synthetic construct
DIARGDKERF

SEQ ID NO: 113481 - protein, 10 aa, synthetic construct
DIVRGDKERF

SEQ ID NO: 113482 - protein, 10 aa, synthetic construct
DIPRGDKERF

SEQ ID NO: 113483 - protein, 10 aa, synthetic construct
DILRGDKERF

SEQ ID NO: 113484 - protein, 10 aa, synthetic construct
DIIRGDKERF

SEQ ID NO: 113485 - protein, 10 aa, synthetic construct
DIMRGDKERF

SEQ ID NO: 113486 - protein, 10 aa, synthetic construct
DIWRGDKERF

SEQ ID NO: 113487 - protein, 10 aa, synthetic construct
DIFRGDKERF

SEQ ID NO: 113488 - protein, 10 aa, synthetic construct
DIKRGDKERF

SEQ ID NO: 113489 - protein, 10 aa, synthetic construct
DIRRGDKERF

SEQ ID NO: 113490 - protein, 10 aa, synthetic construct
DIHRGDKERF

SEQ ID NO: 113491 - protein, 10 aa, synthetic construct
DISRGDKERF

SEQ ID NO: 113492 - protein, 10 aa, synthetic construct
DITRGDKERF

SEQ ID NO: 113493 - protein, 10 aa, synthetic construct
DIYRGDKERF

SEQ ID NO: 113494 - protein, 10 aa, synthetic construct
DINRGDKERF

SEQ ID NO: 113495 - protein, 10 aa, synthetic construct
DIQRGDKERF

SEQ ID NO: 113496 - protein, 10 aa, synthetic construct
DIDRGDKERF

SEQ ID NO: 113497 - protein, 10 aa, synthetic construct
DIERGDKERF

SEQ ID NO: 113498 - protein, 10 aa, synthetic construct
DMGRGDKERF

SEQ ID NO: 113499 - protein, 10 aa, synthetic construct
DMARGDKERF

SEQ ID NO: 113500 - protein, 10 aa, synthetic construct
DMVRGDKERF

SEQ ID NO: 113501 - protein, 10 aa, synthetic construct
DMPRGDKERF

SEQ ID NO: 113502 - protein, 10 aa, synthetic construct
DMLRGDKERF

SEQ ID NO: 113503 - protein, 10 aa, synthetic construct
DMIRGDKERF

SEQ ID NO: 113504 - protein, 10 aa, synthetic construct
DMMRGDKERF

SEQ ID NO: 113505 - protein, 10 aa, synthetic construct
DMWRGDKERF

SEQ ID NO: 113506 - protein, 10 aa, synthetic construct
DMFRGDKERF

SEQ ID NO: 113507 - protein, 10 aa, synthetic construct
DMKRGDKERF

SEQ ID NO: 113508 - protein, 10 aa, synthetic construct
DMRRGDKERF

SEQ ID NO: 113509 - protein, 10 aa, synthetic construct
DMHRGDKERF

SEQ ID NO: 113510 - protein, 10 aa, synthetic construct
DMSRGDKERF

SEQ ID NO: 113511 - protein, 10 aa, synthetic construct
DMTRGDKERF

SEQ ID NO: 113512 - protein, 10 aa, synthetic construct
DMYRGDKERF

SEQ ID NO: 113513 - protein, 10 aa, synthetic construct
DMNRGDKERF

SEQ ID NO: 113514 - protein, 10 aa, synthetic construct
DMQRGDKERF

SEQ ID NO: 113515 - protein, 10 aa, synthetic construct
DMDRGDKERF

SEQ ID NO: 113516 - protein, 10 aa, synthetic construct
DMERGDKERF

SEQ ID NO: 113517 - protein, 10 aa, synthetic construct
DWGRGDKERF

SEQ ID NO: 113518 - protein, 10 aa, synthetic construct
DWARGDKERF

SEQ ID NO: 113519 - protein, 10 aa, synthetic construct
DWVRGDKERF

SEQ ID NO: 113520 - protein, 10 aa, synthetic construct
DWPRGDKERF

SEQ ID NO: 113521 - protein, 10 aa, synthetic construct
DWLRGDKERF

SEQ ID NO: 113522 - protein, 10 aa, synthetic construct
DWIRGDKERF

SEQ ID NO: 113523 - protein, 10 aa, synthetic construct
DWMRGDKERF

SEQ ID NO: 113524 - protein, 10 aa, synthetic construct
DWWRGDKERF

SEQ ID NO: 113525 - protein, 10 aa, synthetic construct
DWFRGDKERF

SEQ ID NO: 113526 - protein, 10 aa, synthetic construct
DWKRGDKERF

SEQ ID NO: 113527 - protein, 10 aa, synthetic construct
DWRRGDKERF

SEQ ID NO: 113528 - protein, 10 aa, synthetic construct
DWHRGDKERF

SEQ ID NO: 113529 - protein, 10 aa, synthetic construct
DWSRGDKERF

SEQ ID NO: 113530 - protein, 10 aa, synthetic construct
DWTRGDKERF

SEQ ID NO: 113531 - protein, 10 aa, synthetic construct
DWYRGDKERF

SEQ ID NO: 113532 - protein, 10 aa, synthetic construct
DWNRGDKERF

SEQ ID NO: 113533 - protein, 10 aa, synthetic construct
DWQRGDKERF

SEQ ID NO: 113534 - protein, 10 aa, synthetic construct
DWDRGDKERF

SEQ ID NO: 113535 - protein, 10 aa, synthetic construct
DWERGDKERF

SEQ ID NO: 113536 - protein, 10 aa, synthetic construct
DFGRGDKERF

SEQ ID NO: 113537 - protein, 10 aa, synthetic construct
DFARGDKERF

SEQ ID NO: 113538 - protein, 10 aa, synthetic construct
DFVRGDKERF

SEQ ID NO: 113539 - protein, 10 aa, synthetic construct
DFPRGDKERF

SEQ ID NO: 113540 - protein, 10 aa, synthetic construct
DFLRGDKERF

SEQ ID NO: 113541 - protein, 10 aa, synthetic construct
DFIRGDKERF

SEQ ID NO: 113542 - protein, 10 aa, synthetic construct
DFMRGDKERF

SEQ ID NO: 113543 - protein, 10 aa, synthetic construct
DFWRGDKERF

SEQ ID NO: 113544 - protein, 10 aa, synthetic construct
DFFRGDKERF

SEQ ID NO: 113545 - protein, 10 aa, synthetic construct
DFKRGDKERF

SEQ ID NO: 113546 - protein, 10 aa, synthetic construct
DFRRGDKERF

SEQ ID NO: 113547 - protein, 10 aa, synthetic construct
DFHRGDKERF

SEQ ID NO: 113548 - protein, 10 aa, synthetic construct
DFSRGDKERF

SEQ ID NO: 113549 - protein, 10 aa, synthetic construct
DFTRGDKERF

SEQ ID NO: 113550 - protein, 10 aa, synthetic construct
DFYRGDKERF

SEQ ID NO: 113551 - protein, 10 aa, synthetic construct
DFNRGDKERF

SEQ ID NO: 113552 - protein, 10 aa, synthetic construct
DFQRGDKERF

SEQ ID NO: 113553 - protein, 10 aa, synthetic construct
DFDRGDKERF

SEQ ID NO: 113554 - protein, 10 aa, synthetic construct
DFERGDKERF

SEQ ID NO: 113555 - protein, 10 aa, synthetic construct
DKGRGDKERF

SEQ ID NO: 113556 - protein, 10 aa, synthetic construct
DKARGDKERF

SEQ ID NO: 113557 - protein, 10 aa, synthetic construct
DKVRGDKERF

SEQ ID NO: 113558 - protein, 10 aa, synthetic construct
DKPRGDKERF

SEQ ID NO: 113559 - protein, 10 aa, synthetic construct
DKLRGDKERF

SEQ ID NO: 113560 - protein, 10 aa, synthetic construct
DKIRGDKERF

SEQ ID NO: 113561 - protein, 10 aa, synthetic construct
DKMRGDKERF

SEQ ID NO: 113562 - protein, 10 aa, synthetic construct
DKWRGDKERF

SEQ ID NO: 113563 - protein, 10 aa, synthetic construct
DKFRGDKERF

SEQ ID NO: 113564 - protein, 10 aa, synthetic construct
DKKRGDKERF

SEQ ID NO: 113565 - protein, 10 aa, synthetic construct
DKRRGDKERF

SEQ ID NO: 113566 - protein, 10 aa, synthetic construct
DKHRGDKERF

SEQ ID NO: 113567 - protein, 10 aa, synthetic construct
DKSRGDKERF

SEQ ID NO: 113568 - protein, 10 aa, synthetic construct
DKTRGDKERF

SEQ ID NO: 113569 - protein, 10 aa, synthetic construct
DKYRGDKERF

SEQ ID NO: 113570 - protein, 10 aa, synthetic construct
DKNRGDKERF

SEQ ID NO: 113571 - protein, 10 aa, synthetic construct
DKQRGDKERF

SEQ ID NO: 113572 - protein, 10 aa, synthetic construct
DKDRGDKERF

SEQ ID NO: 113573 - protein, 10 aa, synthetic construct
DKERGDKERF

SEQ ID NO: 113574 - protein, 10 aa, synthetic construct
DRGRGDKERF

SEQ ID NO: 113575 - protein, 10 aa, synthetic construct
DRARGDKERF

SEQ ID NO: 113576 - protein, 10 aa, synthetic construct
DRVRGDKERF

SEQ ID NO: 113577 - protein, 10 aa, synthetic construct
DRPRGDKERF

SEQ ID NO: 113578 - protein, 10 aa, synthetic construct
DRLRGDKERF

SEQ ID NO: 113579 - protein, 10 aa, synthetic construct
DRIRGDKERF

SEQ ID NO: 113580 - protein, 10 aa, synthetic construct
DRMRGDKERF

SEQ ID NO: 113581 - protein, 10 aa, synthetic construct
DRWRGDKERF

SEQ ID NO: 113582 - protein, 10 aa, synthetic construct
DRFRGDKERF

SEQ ID NO: 113583 - protein, 10 aa, synthetic construct
DRKRGDKERF

SEQ ID NO: 113584 - protein, 10 aa, synthetic construct
DRRRGDKERF

SEQ ID NO: 113585 - protein, 10 aa, synthetic construct
DRHRGDKERF

SEQ ID NO: 113586 - protein, 10 aa, synthetic construct
DRSRGDKERF

SEQ ID NO: 113587 - protein, 10 aa, synthetic construct
DRTRGDKERF

SEQ ID NO: 113588 - protein, 10 aa, synthetic construct
DRYRGDKERF

SEQ ID NO: 113589 - protein, 10 aa, synthetic construct
DRNRGDKERF

SEQ ID NO: 113590 - protein, 10 aa, synthetic construct
DRQRGDKERF

SEQ ID NO: 113591 - protein, 10 aa, synthetic construct
DRDRGDKERF

SEQ ID NO: 113592 - protein, 10 aa, synthetic construct
DRERGDKERF

SEQ ID NO: 113593 - protein, 10 aa, synthetic construct
DHGRGDKERF

SEQ ID NO: 113594 - protein, 10 aa, synthetic construct
DHARGDKERF

SEQ ID NO: 113595 - protein, 10 aa, synthetic construct
DHVRGDKERF

SEQ ID NO: 113596 - protein, 10 aa, synthetic construct
DHPRGDKERF

SEQ ID NO: 113597 - protein, 10 aa, synthetic construct
DHLRGDKERF

SEQ ID NO: 113598 - protein, 10 aa, synthetic construct
DHIRGDKERF

SEQ ID NO: 113599 - protein, 10 aa, synthetic construct
DHMRGDKERF

SEQ ID NO: 113600 - protein, 10 aa, synthetic construct
DHWRGDKERF

SEQ ID NO: 113601 - protein, 10 aa, synthetic construct
DHFRGDKERF

SEQ ID NO: 113602 - protein, 10 aa, synthetic construct
DHKRGDKERF

SEQ ID NO: 113603 - protein, 10 aa, synthetic construct
DHRRGDKERF

SEQ ID NO: 113604 - protein, 10 aa, synthetic construct
DHHRGDKERF

SEQ ID NO: 113605 - protein, 10 aa, synthetic construct
DHSRGDKERF

SEQ ID NO: 113606 - protein, 10 aa, synthetic construct
DHTRGDKERF

SEQ ID NO: 113607 - protein, 10 aa, synthetic construct
DHYRGDKERF

SEQ ID NO: 113608 - protein, 10 aa, synthetic construct
DHNRGDKERF

SEQ ID NO: 113609 - protein, 10 aa, synthetic construct
DHQRGDKERF

SEQ ID NO: 113610 - protein, 10 aa, synthetic construct
DHDRGDKERF

SEQ ID NO: 113611 - protein, 10 aa, synthetic construct
DHERGDKERF

SEQ ID NO: 113612 - protein, 10 aa, synthetic construct
DSGRGDKERF

SEQ ID NO: 113613 - protein, 10 aa, synthetic construct
DSARGDKERF

SEQ ID NO: 113614 - protein, 10 aa, synthetic construct
DSVRGDKERF

SEQ ID NO: 113615 - protein, 10 aa, synthetic construct
DSPRGDKERF

SEQ ID NO: 113616 - protein, 10 aa, synthetic construct
DSLRGDKERF

SEQ ID NO: 113617 - protein, 10 aa, synthetic construct
DSIRGDKERF

SEQ ID NO: 113618 - protein, 10 aa, synthetic construct
DSMRGDKERF

SEQ ID NO: 113619 - protein, 10 aa, synthetic construct
DSWRGDKERF

SEQ ID NO: 113620 - protein, 10 aa, synthetic construct
DSFRGDKERF

SEQ ID NO: 113621 - protein, 10 aa, synthetic construct
DSKRGDKERF

SEQ ID NO: 113622 - protein, 10 aa, synthetic construct
DSRRGDKERF

SEQ ID NO: 113623 - protein, 10 aa, synthetic construct
DSHRGDKERF

SEQ ID NO: 113624 - protein, 10 aa, synthetic construct
DSSRGDKERF

SEQ ID NO: 113625 - protein, 10 aa, synthetic construct
DSTRGDKERF

SEQ ID NO: 113626 - protein, 10 aa, synthetic construct
DSYRGDKERF

SEQ ID NO: 113627 - protein, 10 aa, synthetic construct
DSNRGDKERF

SEQ ID NO: 113628 - protein, 10 aa, synthetic construct
DSQRGDKERF

SEQ ID NO: 113629 - protein, 10 aa, synthetic construct
DSDRGDKERF

SEQ ID NO: 113630 - protein, 10 aa, synthetic construct
DSERGDKERF

SEQ ID NO: 113631 - protein, 10 aa, synthetic construct
DTGRGDKERF

SEQ ID NO: 113632 - protein, 10 aa, synthetic construct
DTARGDKERF

SEQ ID NO: 113633 - protein, 10 aa, synthetic construct
DTVRGDKERF

SEQ ID NO: 113634 - protein, 10 aa, synthetic construct
DTPRGDKERF

SEQ ID NO: 113635 - protein, 10 aa, synthetic construct
DTLRGDKERF

SEQ ID NO: 113636 - protein, 10 aa, synthetic construct
DTIRGDKERF

SEQ ID NO: 113637 - protein, 10 aa, synthetic construct
DTMRGDKERF

SEQ ID NO: 113638 - protein, 10 aa, synthetic construct
DTWRGDKERF

SEQ ID NO: 113639 - protein, 10 aa, synthetic construct
DTFRGDKERF

SEQ ID NO: 113640 - protein, 10 aa, synthetic construct
DTKRGDKERF

SEQ ID NO: 113641 - protein, 10 aa, synthetic construct
DTRRGDKERF

SEQ ID NO: 113642 - protein, 10 aa, synthetic construct
DTHRGDKERF

SEQ ID NO: 113643 - protein, 10 aa, synthetic construct
DTSRGDKERF

SEQ ID NO: 113644 - protein, 10 aa, synthetic construct
DTTRGDKERF

SEQ ID NO: 113645 - protein, 10 aa, synthetic construct
DTYRGDKERF

SEQ ID NO: 113646 - protein, 10 aa, synthetic construct
DTNRGDKERF

SEQ ID NO: 113647 - protein, 10 aa, synthetic construct
DTQRGDKERF

SEQ ID NO: 113648 - protein, 10 aa, synthetic construct
DTDRGDKERF

SEQ ID NO: 113649 - protein, 10 aa, synthetic construct
DTERGDKERF

SEQ ID NO: 113650 - protein, 10 aa, synthetic construct
DYGRGDKERF

SEQ ID NO: 113651 - protein, 10 aa, synthetic construct
DYARGDKERF

SEQ ID NO: 113652 - protein, 10 aa, synthetic construct
DYVRGDKERF

SEQ ID NO: 113653 - protein, 10 aa, synthetic construct
DYPRGDKERF

SEQ ID NO: 113654 - protein, 10 aa, synthetic construct
DYLRGDKERF

SEQ ID NO: 113655 - protein, 10 aa, synthetic construct
DYIRGDKERF

SEQ ID NO: 113656 - protein, 10 aa, synthetic construct
DYMRGDKERF

SEQ ID NO: 113657 - protein, 10 aa, synthetic construct
DYWRGDKERF

SEQ ID NO: 113658 - protein, 10 aa, synthetic construct
DYFRGDKERF

SEQ ID NO: 113659 - protein, 10 aa, synthetic construct
DYKRGDKERF

SEQ ID NO: 113660 - protein, 10 aa, synthetic construct
DYRRGDKERF

SEQ ID NO: 113661 - protein, 10 aa, synthetic construct
DYHRGDKERF

SEQ ID NO: 113662 - protein, 10 aa, synthetic construct
DYSRGDKERF

SEQ ID NO: 113663 - protein, 10 aa, synthetic construct
DYTRGDKERF

SEQ ID NO: 113664 - protein, 10 aa, synthetic construct
DYYRGDKERF

SEQ ID NO: 113665 - protein, 10 aa, synthetic construct
DYNRGDKERF

SEQ ID NO: 113666 - protein, 10 aa, synthetic construct
DYQRGDKERF

SEQ ID NO: 113667 - protein, 10 aa, synthetic construct
DYDRGDKERF

SEQ ID NO: 113668 - protein, 10 aa, synthetic construct
DYERGDKERF

SEQ ID NO: 113669 - protein, 10 aa, synthetic construct
DNGRGDKERF

SEQ ID NO: 113670 - protein, 10 aa, synthetic construct
DNARGDKERF

SEQ ID NO: 113671 - protein, 10 aa, synthetic construct
DNVRGDKERF

SEQ ID NO: 113672 - protein, 10 aa, synthetic construct
DNPRGDKERF

SEQ ID NO: 113673 - protein, 10 aa, synthetic construct
DNLRGDKERF

SEQ ID NO: 113674 - protein, 10 aa, synthetic construct
DNIRGDKERF

SEQ ID NO: 113675 - protein, 10 aa, synthetic construct
DNMRGDKERF

SEQ ID NO: 113676 - protein, 10 aa, synthetic construct
DNWRGDKERF

SEQ ID NO: 113677 - protein, 10 aa, synthetic construct
DNFRGDKERF

SEQ ID NO: 113678 - protein, 10 aa, synthetic construct
DNKRGDKERF

SEQ ID NO: 113679 - protein, 10 aa, synthetic construct
DNRRGDKERF

SEQ ID NO: 113680 - protein, 10 aa, synthetic construct
DNHRGDKERF

SEQ ID NO: 113681 - protein, 10 aa, synthetic construct
DNSRGDKERF

SEQ ID NO: 113682 - protein, 10 aa, synthetic construct
DNTRGDKERF

SEQ ID NO: 113683 - protein, 10 aa, synthetic construct
DNYRGDKERF

SEQ ID NO: 113684 - protein, 10 aa, synthetic construct
DNNRGDKERF

SEQ ID NO: 113685 - protein, 10 aa, synthetic construct
DNQRGDKERF

SEQ ID NO: 113686 - protein, 10 aa, synthetic construct
DNDRGDKERF

SEQ ID NO: 113687 - protein, 10 aa, synthetic construct
DNERGDKERF

SEQ ID NO: 113688 - protein, 10 aa, synthetic construct
DQGRGDKERF

SEQ ID NO: 113689 - protein, 10 aa, synthetic construct
DQARGDKERF

SEQ ID NO: 113690 - protein, 10 aa, synthetic construct
DQVRGDKERF

SEQ ID NO: 113691 - protein, 10 aa, synthetic construct
DQPRGDKERF

SEQ ID NO: 113692 - protein, 10 aa, synthetic construct
DQLRGDKERF

SEQ ID NO: 113693 - protein, 10 aa, synthetic construct
DQIRGDKERF

SEQ ID NO: 113694 - protein, 10 aa, synthetic construct
DQMRGDKERF

SEQ ID NO: 113695 - protein, 10 aa, synthetic construct
DQWRGDKERF

SEQ ID NO: 113696 - protein, 10 aa, synthetic construct
DQFRGDKERF

SEQ ID NO: 113697 - protein, 10 aa, synthetic construct
DQKRGDKERF

SEQ ID NO: 113698 - protein, 10 aa, synthetic construct
DQRRGDKERF

SEQ ID NO: 113699 - protein, 10 aa, synthetic construct
DQHRGDKERF

SEQ ID NO: 113700 - protein, 10 aa, synthetic construct
DQSRGDKERF

SEQ ID NO: 113701 - protein, 10 aa, synthetic construct
DQTRGDKERF

SEQ ID NO: 113702 - protein, 10 aa, synthetic construct
DQYRGDKERF

SEQ ID NO: 113703 - protein, 10 aa, synthetic construct
DQNRGDKERF

SEQ ID NO: 113704 - protein, 10 aa, synthetic construct
DQQRGDKERF

SEQ ID NO: 113705 - protein, 10 aa, synthetic construct
DQDRGDKERF

SEQ ID NO: 113706 - protein, 10 aa, synthetic construct
DQERGDKERF

SEQ ID NO: 113707 - protein, 10 aa, synthetic construct
DDGRGDKERF

SEQ ID NO: 113708 - protein, 10 aa, synthetic construct
DDARGDKERF

SEQ ID NO: 113709 - protein, 10 aa, synthetic construct
DDVRGDKERF

SEQ ID NO: 113710 - protein, 10 aa, synthetic construct
DDPRGDKERF

SEQ ID NO: 113711 - protein, 10 aa, synthetic construct
DDLRGDKERF

SEQ ID NO: 113712 - protein, 10 aa, synthetic construct
DDIRGDKERF

SEQ ID NO: 113713 - protein, 10 aa, synthetic construct
DDMRGDKERF

SEQ ID NO: 113714 - protein, 10 aa, synthetic construct
DDWRGDKERF

SEQ ID NO: 113715 - protein, 10 aa, synthetic construct
DDFRGDKERF

SEQ ID NO: 113716 - protein, 10 aa, synthetic construct
DDKRGDKERF

SEQ ID NO: 113717 - protein, 10 aa, synthetic construct
DDRRGDKERF

SEQ ID NO: 113718 - protein, 10 aa, synthetic construct
DDHRGDKERF

SEQ ID NO: 113719 - protein, 10 aa, synthetic construct
DDSRGDKERF

SEQ ID NO: 113720 - protein, 10 aa, synthetic construct
DDTRGDKERF

SEQ ID NO: 113721 - protein, 10 aa, synthetic construct
DDYRGDKERF

SEQ ID NO: 113722 - protein, 10 aa, synthetic construct
DDNRGDKERF

SEQ ID NO: 113723 - protein, 10 aa, synthetic construct
DDQRGDKERF

SEQ ID NO: 113724 - protein, 10 aa, synthetic construct
DDDRGDKERF

SEQ ID NO: 113725 - protein, 10 aa, synthetic construct
DDERGDKERF

SEQ ID NO: 113726 - protein, 10 aa, synthetic construct
DEGRGDKERF

SEQ ID NO: 113727 - protein, 10 aa, synthetic construct
DEARGDKERF

SEQ ID NO: 113728 - protein, 10 aa, synthetic construct
DEVRGDKERF

SEQ ID NO: 113729 - protein, 10 aa, synthetic construct
DEPRGDKERF

SEQ ID NO: 113730 - protein, 10 aa, synthetic construct
DELRGDKERF

SEQ ID NO: 113731 - protein, 10 aa, synthetic construct
DEIRGDKERF

SEQ ID NO: 113732 - protein, 10 aa, synthetic construct
DEMRGDKERF

SEQ ID NO: 113733 - protein, 10 aa, synthetic construct
DEWRGDKERF

SEQ ID NO: 113734 - protein, 10 aa, synthetic construct
DEFRGDKERF

SEQ ID NO: 113735 - protein, 10 aa, synthetic construct
DEKRGDKERF

SEQ ID NO: 113736 - protein, 10 aa, synthetic construct
DERRGDKERF

SEQ ID NO: 113737 - protein, 10 aa, synthetic construct
DEHRGDKERF

SEQ ID NO: 113738 - protein, 10 aa, synthetic construct
DESRGDKERF

SEQ ID NO: 113739 - protein, 10 aa, synthetic construct
DETRGDKERF

SEQ ID NO: 113740 - protein, 10 aa, synthetic construct
DEYRGDKERF

SEQ ID NO: 113741 - protein, 10 aa, synthetic construct
DENRGDKERF

SEQ ID NO: 113742 - protein, 10 aa, synthetic construct
DEQRGDKERF

SEQ ID NO: 113743 - protein, 10 aa, synthetic construct
DEDRGDKERF

SEQ ID NO: 113744 - protein, 10 aa, synthetic construct
DEERGDKERF

SEQ ID NO: 113745 - protein, 10 aa, synthetic construct
QGGRGDKERF

SEQ ID NO: 113746 - protein, 10 aa, synthetic construct
QGARGDKERF

SEQ ID NO: 113747 - protein, 10 aa, synthetic construct
QGVRGDKERF

SEQ ID NO: 113748 - protein, 10 aa, synthetic construct
QGPRGDKERF

SEQ ID NO: 113749 - protein, 10 aa, synthetic construct
QGLRGDKERF

SEQ ID NO: 113750 - protein, 10 aa, synthetic construct
QGIRGDKERF

SEQ ID NO: 113751 - protein, 10 aa, synthetic construct
QGMRGDKERF

SEQ ID NO: 113752 - protein, 10 aa, synthetic construct
QGWRGDKERF

SEQ ID NO: 113753 - protein, 10 aa, synthetic construct
QGFRGDKERF

SEQ ID NO: 113754 - protein, 10 aa, synthetic construct
QGKRGDKERF

SEQ ID NO: 113755 - protein, 10 aa, synthetic construct
QGRRGDKERF

SEQ ID NO: 113756 - protein, 10 aa, synthetic construct
QGHRGDKERF

SEQ ID NO: 113757 - protein, 10 aa, synthetic construct
QGSRGDKERF

SEQ ID NO: 113758 - protein, 10 aa, synthetic construct
QGTRGDKERF

SEQ ID NO: 113759 - protein, 10 aa, synthetic construct
QGYRGDKERF

SEQ ID NO: 113760 - protein, 10 aa, synthetic construct
QGNRGDKERF

SEQ ID NO: 113761 - protein, 10 aa, synthetic construct
QGQRGDKERF

SEQ ID NO: 113762 - protein, 10 aa, synthetic construct
QGDRGDKERF

SEQ ID NO: 113763 - protein, 10 aa, synthetic construct
QGERGDKERF

SEQ ID NO: 113764 - protein, 10 aa, synthetic construct
QAGRGDKERF

SEQ ID NO: 113765 - protein, 10 aa, synthetic construct
QAARGDKERF

SEQ ID NO: 113766 - protein, 10 aa, synthetic construct
QAVRGDKERF

SEQ ID NO: 113767 - protein, 10 aa, synthetic construct
QAPRGDKERF

SEQ ID NO: 113768 - protein, 10 aa, synthetic construct
QALRGDKERF

SEQ ID NO: 113769 - protein, 10 aa, synthetic construct
QAIRGDKERF

SEQ ID NO: 113770 - protein, 10 aa, synthetic construct
QAMRGDKERF

SEQ ID NO: 113771 - protein, 10 aa, synthetic construct
QAWRGDKERF

SEQ ID NO: 113772 - protein, 10 aa, synthetic construct
QAFRGDKERF

SEQ ID NO: 113773 - protein, 10 aa, synthetic construct
QAKRGDKERF

SEQ ID NO: 113774 - protein, 10 aa, synthetic construct
QARRGDKERF

SEQ ID NO: 113775 - protein, 10 aa, synthetic construct
QAHRGDKERF

SEQ ID NO: 113776 - protein, 10 aa, synthetic construct
QASRGDKERF

SEQ ID NO: 113777 - protein, 10 aa, synthetic construct
QATRGDKERF

SEQ ID NO: 113778 - protein, 10 aa, synthetic construct
QAYRGDKERF

SEQ ID NO: 113779 - protein, 10 aa, synthetic construct
QANRGDKERF

SEQ ID NO: 113780 - protein, 10 aa, synthetic construct
QAQRGDKERF

SEQ ID NO: 113781 - protein, 10 aa, synthetic construct
QADRGDKERF

SEQ ID NO: 113782 - protein, 10 aa, synthetic construct
QAERGDKERF

SEQ ID NO: 113783 - protein, 10 aa, synthetic construct
QVGRGDKERF

SEQ ID NO: 113784 - protein, 10 aa, synthetic construct
QVARGDKERF

SEQ ID NO: 113785 - protein, 10 aa, synthetic construct
QVVRGDKERF

SEQ ID NO: 113786 - protein, 10 aa, synthetic construct
QVPRGDKERF

SEQ ID NO: 113787 - protein, 10 aa, synthetic construct
QVLRGDKERF

SEQ ID NO: 113788 - protein, 10 aa, synthetic construct
QVIRGDKERF

SEQ ID NO: 113789 - protein, 10 aa, synthetic construct
QVMRGDKERF

SEQ ID NO: 113790 - protein, 10 aa, synthetic construct
QVWRGDKERF

SEQ ID NO: 113791 - protein, 10 aa, synthetic construct
QVFRGDKERF

SEQ ID NO: 113792 - protein, 10 aa, synthetic construct
QVKRGDKERF

SEQ ID NO: 113793 - protein, 10 aa, synthetic construct
QVRRGDKERF

SEQ ID NO: 113794 - protein, 10 aa, synthetic construct
QVHRGDKERF

SEQ ID NO: 113795 - protein, 10 aa, synthetic construct
QVSRGDKERF

SEQ ID NO: 113796 - protein, 10 aa, synthetic construct
QVTRGDKERF

SEQ ID NO: 113797 - protein, 10 aa, synthetic construct
QVYRGDKERF

SEQ ID NO: 113798 - protein, 10 aa, synthetic construct
QVNRGDKERF

SEQ ID NO: 113799 - protein, 10 aa, synthetic construct
QVQRGDKERF

SEQ ID NO: 113800 - protein, 10 aa, synthetic construct
QVDRGDKERF

SEQ ID NO: 113801 - protein, 10 aa, synthetic construct
QVERGDKERF

SEQ ID NO: 113802 - protein, 10 aa, synthetic construct
QPGRGDKERF

SEQ ID NO: 113803 - protein, 10 aa, synthetic construct
QPARGDKERF

SEQ ID NO: 113804 - protein, 10 aa, synthetic construct
QPVRGDKERF

SEQ ID NO: 113805 - protein, 10 aa, synthetic construct
QPPRGDKERF

SEQ ID NO: 113806 - protein, 10 aa, synthetic construct
QPLRGDKERF

SEQ ID NO: 113807 - protein, 10 aa, synthetic construct
QPIRGDKERF

SEQ ID NO: 113808 - protein, 10 aa, synthetic construct
QPMRGDKERF

SEQ ID NO: 113809 - protein, 10 aa, synthetic construct
QPWRGDKERF

SEQ ID NO: 113810 - protein, 10 aa, synthetic construct
QPFRGDKERF

SEQ ID NO: 113811 - protein, 10 aa, synthetic construct
QPKRGDKERF

SEQ ID NO: 113812 - protein, 10 aa, synthetic construct
QPRRGDKERF

SEQ ID NO: 113813 - protein, 10 aa, synthetic construct
QPHRGDKERF

SEQ ID NO: 113814 - protein, 10 aa, synthetic construct
QPSRGDKERF

SEQ ID NO: 113815 - protein, 10 aa, synthetic construct
QPTRGDKERF

SEQ ID NO: 113816 - protein, 10 aa, synthetic construct
QPYRGDKERF

SEQ ID NO: 113817 - protein, 10 aa, synthetic construct
QPNRGDKERF

SEQ ID NO: 113818 - protein, 10 aa, synthetic construct
QPQRGDKERF

SEQ ID NO: 113819 - protein, 10 aa, synthetic construct
QPDRGDKERF

SEQ ID NO: 113820 - protein, 10 aa, synthetic construct
QPERGDKERF

SEQ ID NO: 113821 - protein, 10 aa, synthetic construct
QLGRGDKERF

SEQ ID NO: 113822 - protein, 10 aa, synthetic construct
QLARGDKERF

SEQ ID NO: 113823 - protein, 10 aa, synthetic construct
QLVRGDKERF

SEQ ID NO: 113824 - protein, 10 aa, synthetic construct
QLPRGDKERF

SEQ ID NO: 113825 - protein, 10 aa, synthetic construct
QLLRGDKERF

SEQ ID NO: 113826 - protein, 10 aa, synthetic construct
QLIRGDKERF

SEQ ID NO: 113827 - protein, 10 aa, synthetic construct
QLMRGDKERF

SEQ ID NO: 113828 - protein, 10 aa, synthetic construct
QLWRGDKERF

SEQ ID NO: 113829 - protein, 10 aa, synthetic construct
QLFRGDKERF

SEQ ID NO: 113830 - protein, 10 aa, synthetic construct
QLKRGDKERF

SEQ ID NO: 113831 - protein, 10 aa, synthetic construct
QLRRGDKERF

SEQ ID NO: 113832 - protein, 10 aa, synthetic construct
QLHRGDKERF

SEQ ID NO: 113833 - protein, 10 aa, synthetic construct
QLSRGDKERF

SEQ ID NO: 113834 - protein, 10 aa, synthetic construct
QLTRGDKERF

SEQ ID NO: 113835 - protein, 10 aa, synthetic construct
QLYRGDKERF

SEQ ID NO: 113836 - protein, 10 aa, synthetic construct
QLNRGDKERF

SEQ ID NO: 113837 - protein, 10 aa, synthetic construct
QLQRGDKERF

SEQ ID NO: 113838 - protein, 10 aa, synthetic construct
QLDRGDKERF

SEQ ID NO: 113839 - protein, 10 aa, synthetic construct
QLERGDKERF

SEQ ID NO: 113840 - protein, 10 aa, synthetic construct
QIGRGDKERF

SEQ ID NO: 113841 - protein, 10 aa, synthetic construct
QIARGDKERF

SEQ ID NO: 113842 - protein, 10 aa, synthetic construct
QIVRGDKERF

SEQ ID NO: 113843 - protein, 10 aa, synthetic construct
QIPRGDKERF

SEQ ID NO: 113844 - protein, 10 aa, synthetic construct
QILRGDKERF

SEQ ID NO: 113845 - protein, 10 aa, synthetic construct
QIIRGDKERF

SEQ ID NO: 113846 - protein, 10 aa, synthetic construct
QIMRGDKERF

SEQ ID NO: 113847 - protein, 10 aa, synthetic construct
QIWRGDKERF

SEQ ID NO: 113848 - protein, 10 aa, synthetic construct
QIFRGDKERF

SEQ ID NO: 113849 - protein, 10 aa, synthetic construct
QIKRGDKERF

SEQ ID NO: 113850 - protein, 10 aa, synthetic construct
QIRRGDKERF

SEQ ID NO: 113851 - protein, 10 aa, synthetic construct
QIHRGDKERF

SEQ ID NO: 113852 - protein, 10 aa, synthetic construct
QISRGDKERF

SEQ ID NO: 113853 - protein, 10 aa, synthetic construct
QITRGDKERF

SEQ ID NO: 113854 - protein, 10 aa, synthetic construct
QIYRGDKERF

SEQ ID NO: 113855 - protein, 10 aa, synthetic construct
QINRGDKERF

SEQ ID NO: 113856 - protein, 10 aa, synthetic construct
QIQRGDKERF

SEQ ID NO: 113857 - protein, 10 aa, synthetic construct
QIDRGDKERF

SEQ ID NO: 113858 - protein, 10 aa, synthetic construct
QIERGDKERF

SEQ ID NO: 113859 - protein, 10 aa, synthetic construct
QMGRGDKERF

SEQ ID NO: 113860 - protein, 10 aa, synthetic construct
QMARGDKERF

SEQ ID NO: 113861 - protein, 10 aa, synthetic construct
QMVRGDKERF

SEQ ID NO: 113862 - protein, 10 aa, synthetic construct
QMPRGDKERF

SEQ ID NO: 113863 - protein, 10 aa, synthetic construct
QMLRGDKERF

SEQ ID NO: 113864 - protein, 10 aa, synthetic construct
QMIRGDKERF

SEQ ID NO: 113865 - protein, 10 aa, synthetic construct
QMMRGDKERF

SEQ ID NO: 113866 - protein, 10 aa, synthetic construct
QMWRGDKERF

SEQ ID NO: 113867 - protein, 10 aa, synthetic construct
QMFRGDKERF

SEQ ID NO: 113868 - protein, 10 aa, synthetic construct
QMKRGDKERF

SEQ ID NO: 113869 - protein, 10 aa, synthetic construct
QMRRGDKERF

SEQ ID NO: 113870 - protein, 10 aa, synthetic construct
QMHRGDKERF

SEQ ID NO: 113871 - protein, 10 aa, synthetic construct
QMSRGDKERF

SEQ ID NO: 113872 - protein, 10 aa, synthetic construct
QMTRGDKERF

SEQ ID NO: 113873 - protein, 10 aa, synthetic construct
QMYRGDKERF

SEQ ID NO: 113874 - protein, 10 aa, synthetic construct
QMNRGDKERF

SEQ ID NO: 113875 - protein, 10 aa, synthetic construct
QMQRGDKERF

SEQ ID NO: 113876 - protein, 10 aa, synthetic construct
QMDRGDKERF

SEQ ID NO: 113877 - protein, 10 aa, synthetic construct
QMERGDKERF

SEQ ID NO: 113878 - protein, 10 aa, synthetic construct
QWGRGDKERF

SEQ ID NO: 113879 - protein, 10 aa, synthetic construct
QWARGDKERF

SEQ ID NO: 113880 - protein, 10 aa, synthetic construct
QWVRGDKERF

SEQ ID NO: 113881 - protein, 10 aa, synthetic construct
QWPRGDKERF

SEQ ID NO: 113882 - protein, 10 aa, synthetic construct
QWLRGDKERF

SEQ ID NO: 113883 - protein, 10 aa, synthetic construct
QWIRGDKERF

SEQ ID NO: 113884 - protein, 10 aa, synthetic construct
QWMRGDKERF

SEQ ID NO: 113885 - protein, 10 aa, synthetic construct
QWWRGDKERF

SEQ ID NO: 113886 - protein, 10 aa, synthetic construct
QWFRGDKERF

SEQ ID NO: 113887 - protein, 10 aa, synthetic construct
QWKRGDKERF

SEQ ID NO: 113888 - protein, 10 aa, synthetic construct
QWRRGDKERF

SEQ ID NO: 113889 - protein, 10 aa, synthetic construct
QWHRGDKERF

SEQ ID NO: 113890 - protein, 10 aa, synthetic construct
QWSRGDKERF

SEQ ID NO: 113891 - protein, 10 aa, synthetic construct
QWTRGDKERF

SEQ ID NO: 113892 - protein, 10 aa, synthetic construct
QWYRGDKERF

SEQ ID NO: 113893 - protein, 10 aa, synthetic construct
QWNRGDKERF

SEQ ID NO: 113894 - protein, 10 aa, synthetic construct
QWQRGDKERF

SEQ ID NO: 113895 - protein, 10 aa, synthetic construct
QWDRGDKERF

SEQ ID NO: 113896 - protein, 10 aa, synthetic construct
QWERGDKERF

SEQ ID NO: 113897 - protein, 10 aa, synthetic construct
QFGRGDKERF

SEQ ID NO: 113898 - protein, 10 aa, synthetic construct
QFARGDKERF

SEQ ID NO: 113899 - protein, 10 aa, synthetic construct
QFVRGDKERF

SEQ ID NO: 113900 - protein, 10 aa, synthetic construct
QFPRGDKERF

SEQ ID NO: 113901 - protein, 10 aa, synthetic construct
QFLRGDKERF

SEQ ID NO: 113902 - protein, 10 aa, synthetic construct
QFIRGDKERF

SEQ ID NO: 113903 - protein, 10 aa, synthetic construct
QFMRGDKERF

SEQ ID NO: 113904 - protein, 10 aa, synthetic construct
QFWRGDKERF

SEQ ID NO: 113905 - protein, 10 aa, synthetic construct
QFFRGDKERF

SEQ ID NO: 113906 - protein, 10 aa, synthetic construct
QFKRGDKERF

SEQ ID NO: 113907 - protein, 10 aa, synthetic construct
QFRRGDKERF

SEQ ID NO: 113908 - protein, 10 aa, synthetic construct
QFHRGDKERF

SEQ ID NO: 113909 - protein, 10 aa, synthetic construct
QFSRGDKERF

SEQ ID NO: 113910 - protein, 10 aa, synthetic construct
QFTRGDKERF

SEQ ID NO: 113911 - protein, 10 aa, synthetic construct
QFYRGDKERF

SEQ ID NO: 113912 - protein, 10 aa, synthetic construct
QFNRGDKERF

SEQ ID NO: 113913 - protein, 10 aa, synthetic construct
QFQRGDKERF

SEQ ID NO: 113914 - protein, 10 aa, synthetic construct
QFDRGDKERF

SEQ ID NO: 113915 - protein, 10 aa, synthetic construct
QFERGDKERF

SEQ ID NO: 113916 - protein, 10 aa, synthetic construct
QKGRGDKERF

SEQ ID NO: 113917 - protein, 10 aa, synthetic construct
QKARGDKERF

SEQ ID NO: 113918 - protein, 10 aa, synthetic construct
QKVRGDKERF

SEQ ID NO: 113919 - protein, 10 aa, synthetic construct
QKPRGDKERF

SEQ ID NO: 113920 - protein, 10 aa, synthetic construct
QKLRGDKERF

SEQ ID NO: 113921 - protein, 10 aa, synthetic construct
QKIRGDKERF

SEQ ID NO: 113922 - protein, 10 aa, synthetic construct
QKMRGDKERF

SEQ ID NO: 113923 - protein, 10 aa, synthetic construct
QKWRGDKERF

SEQ ID NO: 113924 - protein, 10 aa, synthetic construct
QKFRGDKERF

SEQ ID NO: 113925 - protein, 10 aa, synthetic construct
QKKRGDKERF

SEQ ID NO: 113926 - protein, 10 aa, synthetic construct
QKRRGDKERF

SEQ ID NO: 113927 - protein, 10 aa, synthetic construct
QKHRGDKERF

SEQ ID NO: 113928 - protein, 10 aa, synthetic construct
QKSRGDKERF

SEQ ID NO: 113929 - protein, 10 aa, synthetic construct
QKTRGDKERF

SEQ ID NO: 113930 - protein, 10 aa, synthetic construct
QKYRGDKERF

SEQ ID NO: 113931 - protein, 10 aa, synthetic construct
QKNRGDKERF

SEQ ID NO: 113932 - protein, 10 aa, synthetic construct
QKQRGDKERF

SEQ ID NO: 113933 - protein, 10 aa, synthetic construct
QKDRGDKERF

SEQ ID NO: 113934 - protein, 10 aa, synthetic construct
QKERGDKERF

SEQ ID NO: 113935 - protein, 10 aa, synthetic construct
QRGRGDKERF

SEQ ID NO: 113936 - protein, 10 aa, synthetic construct
QRARGDKERF

SEQ ID NO: 113937 - protein, 10 aa, synthetic construct
QRVRGDKERF

SEQ ID NO: 113938 - protein, 10 aa, synthetic construct
QRPRGDKERF

SEQ ID NO: 113939 - protein, 10 aa, synthetic construct
QRLRGDKERF

SEQ ID NO: 113940 - protein, 10 aa, synthetic construct
QRIRGDKERF

SEQ ID NO: 113941 - protein, 10 aa, synthetic construct
QRMRGDKERF

SEQ ID NO: 113942 - protein, 10 aa, synthetic construct
QRWRGDKERF

SEQ ID NO: 113943 - protein, 10 aa, synthetic construct
QRFRGDKERF

SEQ ID NO: 113944 - protein, 10 aa, synthetic construct
QRKRGDKERF

SEQ ID NO: 113945 - protein, 10 aa, synthetic construct
QRRRGDKERF

SEQ ID NO: 113946 - protein, 10 aa, synthetic construct
QRHRGDKERF

SEQ ID NO: 113947 - protein, 10 aa, synthetic construct
QRSRGDKERF

SEQ ID NO: 113948 - protein, 10 aa, synthetic construct
QRTRGDKERF

SEQ ID NO: 113949 - protein, 10 aa, synthetic construct
QRYRGDKERF

SEQ ID NO: 113950 - protein, 10 aa, synthetic construct
QRNRGDKERF

SEQ ID NO: 113951 - protein, 10 aa, synthetic construct
QRQRGDKERF

SEQ ID NO: 113952 - protein, 10 aa, synthetic construct
QRDRGDKERF

SEQ ID NO: 113953 - protein, 10 aa, synthetic construct
QRERGDKERF

SEQ ID NO: 113954 - protein, 10 aa, synthetic construct
QHGRGDKERF

SEQ ID NO: 113955 - protein, 10 aa, synthetic construct
QHARGDKERF

SEQ ID NO: 113956 - protein, 10 aa, synthetic construct
QHVRGDKERF

SEQ ID NO: 113957 - protein, 10 aa, synthetic construct
QHPRGDKERF

SEQ ID NO: 113958 - protein, 10 aa, synthetic construct
QHLRGDKERF

SEQ ID NO: 113959 - protein, 10 aa, synthetic construct
QHIRGDKERF

SEQ ID NO: 113960 - protein, 10 aa, synthetic construct
QHMRGDKERF

SEQ ID NO: 113961 - protein, 10 aa, synthetic construct
QHWRGDKERF

SEQ ID NO: 113962 - protein, 10 aa, synthetic construct
QHFRGDKERF

SEQ ID NO: 113963 - protein, 10 aa, synthetic construct
QHKRGDKERF

SEQ ID NO: 113964 - protein, 10 aa, synthetic construct
QHRRGDKERF

SEQ ID NO: 113965 - protein, 10 aa, synthetic construct
QHHRGDKERF

SEQ ID NO: 113966 - protein, 10 aa, synthetic construct
QHSRGDKERF

SEQ ID NO: 113967 - protein, 10 aa, synthetic construct
QHTRGDKERF

SEQ ID NO: 113968 - protein, 10 aa, synthetic construct
QHYRGDKERF

SEQ ID NO: 113969 - protein, 10 aa, synthetic construct
QHNRGDKERF

SEQ ID NO: 113970 - protein, 10 aa, synthetic construct
QHQRGDKERF

SEQ ID NO: 113971 - protein, 10 aa, synthetic construct
QHDRGDKERF

SEQ ID NO: 113972 - protein, 10 aa, synthetic construct
QHERGDKERF

SEQ ID NO: 113973 - protein, 10 aa, synthetic construct
QSGRGDKERF

SEQ ID NO: 113974 - protein, 10 aa, synthetic construct
QSARGDKERF

SEQ ID NO: 113975 - protein, 10 aa, synthetic construct
QSVRGDKERF

SEQ ID NO: 113976 - protein, 10 aa, synthetic construct
QSPRGDKERF

SEQ ID NO: 113977 - protein, 10 aa, synthetic construct
QSLRGDKERF

SEQ ID NO: 113978 - protein, 10 aa, synthetic construct
QSIRGDKERF

SEQ ID NO: 113979 - protein, 10 aa, synthetic construct
QSMRGDKERF

SEQ ID NO: 113980 - protein, 10 aa, synthetic construct
QSWRGDKERF

SEQ ID NO: 113981 - protein, 10 aa, synthetic construct
QSFRGDKERF

SEQ ID NO: 113982 - protein, 10 aa, synthetic construct
QSKRGDKERF

SEQ ID NO: 113983 - protein, 10 aa, synthetic construct
QSRRGDKERF

SEQ ID NO: 113984 - protein, 10 aa, synthetic construct
QSHRGDKERF

SEQ ID NO: 113985 - protein, 10 aa, synthetic construct
QSSRGDKERF

SEQ ID NO: 113986 - protein, 10 aa, synthetic construct
QSTRGDKERF

SEQ ID NO: 113987 - protein, 10 aa, synthetic construct
QSYRGDKERF

SEQ ID NO: 113988 - protein, 10 aa, synthetic construct
QSNRGDKERF

SEQ ID NO: 113989 - protein, 10 aa, synthetic construct
QSQRGDKERF

SEQ ID NO: 113990 - protein, 10 aa, synthetic construct
QSDRGDKERF

SEQ ID NO: 113991 - protein, 10 aa, synthetic construct
QSERGDKERF

SEQ ID NO: 113992 - protein, 10 aa, synthetic construct
QTGRGDKERF

SEQ ID NO: 113993 - protein, 10 aa, synthetic construct
QTARGDKERF

SEQ ID NO: 113994 - protein, 10 aa, synthetic construct
QTVRGDKERF

SEQ ID NO: 113995 - protein, 10 aa, synthetic construct
QTPRGDKERF

SEQ ID NO: 113996 - protein, 10 aa, synthetic construct
QTLRGDKERF

SEQ ID NO: 113997 - protein, 10 aa, synthetic construct
QTIRGDKERF

SEQ ID NO: 113998 - protein, 10 aa, synthetic construct
QTMRGDKERF

SEQ ID NO: 113999 - protein, 10 aa, synthetic construct
QTWRGDKERF

SEQ ID NO: 114000 - protein, 10 aa, synthetic construct
QTFRGDKERF

SEQ ID NO: 114001 - protein, 10 aa, synthetic construct
QTKRGDKERF

SEQ ID NO: 114002 - protein, 10 aa, synthetic construct
QTRRGDKERF

SEQ ID NO: 114003 - protein, 10 aa, synthetic construct
QTHRGDKERF

SEQ ID NO: 114004 - protein, 10 aa, synthetic construct
QTSRGDKERF

SEQ ID NO: 114005 - protein, 10 aa, synthetic construct
QTTRGDKERF

SEQ ID NO: 114006 - protein, 10 aa, synthetic construct
QTYRGDKERF

SEQ ID NO: 114007 - protein, 10 aa, synthetic construct
QTNRGDKERF

SEQ ID NO: 114008 - protein, 10 aa, synthetic construct
QTQRGDKERF

SEQ ID NO: 114009 - protein, 10 aa, synthetic construct
QTDRGDKERF

SEQ ID NO: 114010 - protein, 10 aa, synthetic construct
QTERGDKERF

SEQ ID NO: 114011 - protein, 10 aa, synthetic construct
QYGRGDKERF

SEQ ID NO: 114012 - protein, 10 aa, synthetic construct
QYARGDKERF

SEQ ID NO: 114013 - protein, 10 aa, synthetic construct
QYVRGDKERF

SEQ ID NO: 114014 - protein, 10 aa, synthetic construct
QYPRGDKERF

SEQ ID NO: 114015 - protein, 10 aa, synthetic construct
QYLRGDKERF

SEQ ID NO: 114016 - protein, 10 aa, synthetic construct
QYIRGDKERF

SEQ ID NO: 114017 - protein, 10 aa, synthetic construct
QYMRGDKERF

SEQ ID NO: 114018 - protein, 10 aa, synthetic construct
QYWRGDKERF

SEQ ID NO: 114019 - protein, 10 aa, synthetic construct
QYFRGDKERF

SEQ ID NO: 114020 - protein, 10 aa, synthetic construct
QYKRGDKERF

SEQ ID NO: 114021 - protein, 10 aa, synthetic construct
QYRRGDKERF

SEQ ID NO: 114022 - protein, 10 aa, synthetic construct
QYHRGDKERF

SEQ ID NO: 114023 - protein, 10 aa, synthetic construct
QYSRGDKERF

SEQ ID NO: 114024 - protein, 10 aa, synthetic construct
QYTRGDKERF

SEQ ID NO: 114025 - protein, 10 aa, synthetic construct
QYYRGDKERF

SEQ ID NO: 114026 - protein, 10 aa, synthetic construct
QYNRGDKERF

SEQ ID NO: 114027 - protein, 10 aa, synthetic construct
QYQRGDKERF

SEQ ID NO: 114028 - protein, 10 aa, synthetic construct
QYDRGDKERF

SEQ ID NO: 114029 - protein, 10 aa, synthetic construct
QYERGDKERF

SEQ ID NO: 114030 - protein, 10 aa, synthetic construct
QNGRGDKERF

SEQ ID NO: 114031 - protein, 10 aa, synthetic construct
QNARGDKERF

SEQ ID NO: 114032 - protein, 10 aa, synthetic construct
QNVRGDKERF

SEQ ID NO: 114033 - protein, 10 aa, synthetic construct
QNPRGDKERF

SEQ ID NO: 114034 - protein, 10 aa, synthetic construct
QNLRGDKERF

SEQ ID NO: 114035 - protein, 10 aa, synthetic construct
QNIRGDKERF

SEQ ID NO: 114036 - protein, 10 aa, synthetic construct
QNMRGDKERF

SEQ ID NO: 114037 - protein, 10 aa, synthetic construct
QNWRGDKERF

SEQ ID NO: 114038 - protein, 10 aa, synthetic construct
QNFRGDKERF

SEQ ID NO: 114039 - protein, 10 aa, synthetic construct
QNKRGDKERF

SEQ ID NO: 114040 - protein, 10 aa, synthetic construct
QNRRGDKERF

SEQ ID NO: 114041 - protein, 10 aa, synthetic construct
QNHRGDKERF

SEQ ID NO: 114042 - protein, 10 aa, synthetic construct
QNSRGDKERF

SEQ ID NO: 114043 - protein, 10 aa, synthetic construct
QNTRGDKERF

SEQ ID NO: 114044 - protein, 10 aa, synthetic construct
QNYRGDKERF

SEQ ID NO: 114045 - protein, 10 aa, synthetic construct
QNNRGDKERF

SEQ ID NO: 114046 - protein, 10 aa, synthetic construct
QNQRGDKERF

SEQ ID NO: 114047 - protein, 10 aa, synthetic construct
QNDRGDKERF

SEQ ID NO: 114048 - protein, 10 aa, synthetic construct
QNERGDKERF

SEQ ID NO: 114049 - protein, 10 aa, synthetic construct
QQGRGDKERF

SEQ ID NO: 114050 - protein, 10 aa, synthetic construct
QQARGDKERF

SEQ ID NO: 114051 - protein, 10 aa, synthetic construct
QQVRGDKERF

SEQ ID NO: 114052 - protein, 10 aa, synthetic construct
QQPRGDKERF

SEQ ID NO: 114053 - protein, 10 aa, synthetic construct
QQLRGDKERF

SEQ ID NO: 114054 - protein, 10 aa, synthetic construct
QQIRGDKERF

SEQ ID NO: 114055 - protein, 10 aa, synthetic construct
QQMRGDKERF

SEQ ID NO: 114056 - protein, 10 aa, synthetic construct
QQWRGDKERF

SEQ ID NO: 114057 - protein, 10 aa, synthetic construct
QQFRGDKERF

SEQ ID NO: 114058 - protein, 10 aa, synthetic construct
QQKRGDKERF

SEQ ID NO: 114059 - protein, 10 aa, synthetic construct
QQRRGDKERF

SEQ ID NO: 114060 - protein, 10 aa, synthetic construct
QQHRGDKERF

SEQ ID NO: 114061 - protein, 10 aa, synthetic construct
QQSRGDKERF

SEQ ID NO: 114062 - protein, 10 aa, synthetic construct
QQTRGDKERF

SEQ ID NO: 114063 - protein, 10 aa, synthetic construct
QQYRGDKERF

SEQ ID NO: 114064 - protein, 10 aa, synthetic construct
QQNRGDKERF

SEQ ID NO: 114065 - protein, 10 aa, synthetic construct
QQQRGDKERF

SEQ ID NO: 114066 - protein, 10 aa, synthetic construct
QQDRGDKERF

SEQ ID NO: 114067 - protein, 10 aa, synthetic construct
QQERGDKERF

SEQ ID NO: 114068 - protein, 10 aa, synthetic construct
QDGRGDKERF

SEQ ID NO: 114069 - protein, 10 aa, synthetic construct
QDARGDKERF

SEQ ID NO: 114070 - protein, 10 aa, synthetic construct
QDVRGDKERF

SEQ ID NO: 114071 - protein, 10 aa, synthetic construct
QDPRGDKERF

SEQ ID NO: 114072 - protein, 10 aa, synthetic construct
QDLRGDKERF

SEQ ID NO: 114073 - protein, 10 aa, synthetic construct
QDIRGDKERF

SEQ ID NO: 114074 - protein, 10 aa, synthetic construct
QDMRGDKERF

SEQ ID NO: 114075 - protein, 10 aa, synthetic construct
QDWRGDKERF

SEQ ID NO: 114076 - protein, 10 aa, synthetic construct
QDFRGDKERF

SEQ ID NO: 114077 - protein, 10 aa, synthetic construct
QDKRGDKERF

SEQ ID NO: 114078 - protein, 10 aa, synthetic construct
QDRRGDKERF

SEQ ID NO: 114079 - protein, 10 aa, synthetic construct
QDHRGDKERF

SEQ ID NO: 114080 - protein, 10 aa, synthetic construct
QDSRGDKERF

SEQ ID NO: 114081 - protein, 10 aa, synthetic construct
QDTRGDKERF

SEQ ID NO: 114082 - protein, 10 aa, synthetic construct
QDYRGDKERF

SEQ ID NO: 114083 - protein, 10 aa, synthetic construct
QDNRGDKERF

SEQ ID NO: 114084 - protein, 10 aa, synthetic construct
QDQRGDKERF

SEQ ID NO: 114085 - protein, 10 aa, synthetic construct
QDDRGDKERF

SEQ ID NO: 114086 - protein, 10 aa, synthetic construct
QDERGDKERF

SEQ ID NO: 114087 - protein, 10 aa, synthetic construct
QEGRGDKERF

SEQ ID NO: 114088 - protein, 10 aa, synthetic construct
QEARGDKERF

SEQ ID NO: 114089 - protein, 10 aa, synthetic construct
QEVRGDKERF

SEQ ID NO: 114090 - protein, 10 aa, synthetic construct
QEPRGDKERF

SEQ ID NO: 114091 - protein, 10 aa, synthetic construct
QELRGDKERF

SEQ ID NO: 114092 - protein, 10 aa, synthetic construct
QEIRGDKERF

SEQ ID NO: 114093 - protein, 10 aa, synthetic construct
QEMRGDKERF

SEQ ID NO: 114094 - protein, 10 aa, synthetic construct
QEWRGDKERF

SEQ ID NO: 114095 - protein, 10 aa, synthetic construct
QEFRGDKERF

SEQ ID NO: 114096 - protein, 10 aa, synthetic construct
QEKRGDKERF

SEQ ID NO: 114097 - protein, 10 aa, synthetic construct
QERRGDKERF

SEQ ID NO: 114098 - protein, 10 aa, synthetic construct
QEHRGDKERF

SEQ ID NO: 114099 - protein, 10 aa, synthetic construct
QESRGDKERF

SEQ ID NO: 114100 - protein, 10 aa, synthetic construct
QETRGDKERF

SEQ ID NO: 114101 - protein, 10 aa, synthetic construct
QEYRGDKERF

SEQ ID NO: 114102 - protein, 10 aa, synthetic construct
QENRGDKERF

SEQ ID NO: 114103 - protein, 10 aa, synthetic construct
QEQRGDKERF

SEQ ID NO: 114104 - protein, 10 aa, synthetic construct
QEDRGDKERF

SEQ ID NO: 114105 - protein, 10 aa, synthetic construct
QEERGDKERF

SEQ ID NO: 114106 - protein, 10 aa, synthetic construct
SGGRGDLDEL

SEQ ID NO: 114107 - protein, 10 aa, synthetic construct
SGARGDLDEL

SEQ ID NO: 114108 - protein, 10 aa, synthetic construct
SGVRGDLDEL

SEQ ID NO: 114109 - protein, 10 aa, synthetic construct
SGPRGDLDEL

SEQ ID NO: 114110 - protein, 10 aa, synthetic construct
SGLRGDLDEL

SEQ ID NO: 114111 - protein, 10 aa, synthetic construct
SGIRGDLDEL

SEQ ID NO: 114112 - protein, 10 aa, synthetic construct
SGMRGDLDEL

SEQ ID NO: 114113 - protein, 10 aa, synthetic construct
SGWRGDLDEL

SEQ ID NO: 114114 - protein, 10 aa, synthetic construct
SGFRGDLDEL

SEQ ID NO: 114115 - protein, 10 aa, synthetic construct
SGKRGDLDEL

SEQ ID NO: 114116 - protein, 10 aa, synthetic construct
SGRRGDLDEL

SEQ ID NO: 114117 - protein, 10 aa, synthetic construct
SGHRGDLDEL

SEQ ID NO: 114118 - protein, 10 aa, synthetic construct
SGSRGDLDEL

SEQ ID NO: 114119 - protein, 10 aa, synthetic construct
SGTRGDLDEL

SEQ ID NO: 114120 - protein, 10 aa, synthetic construct
SGYRGDLDEL

SEQ ID NO: 114121 - protein, 10 aa, synthetic construct
SGNRGDLDEL

SEQ ID NO: 114122 - protein, 10 aa, synthetic construct
SGQRGDLDEL

SEQ ID NO: 114123 - protein, 10 aa, synthetic construct
SGDRGDLDEL

SEQ ID NO: 114124 - protein, 10 aa, synthetic construct
SGERGDLDEL

SEQ ID NO: 114125 - protein, 10 aa, synthetic construct
SAGRGDLDEL

SEQ ID NO: 114126 - protein, 10 aa, synthetic construct
SAARGDLDEL

SEQ ID NO: 114127 - protein, 10 aa, synthetic construct
SAVRGDLDEL

SEQ ID NO: 114128 - protein, 10 aa, synthetic construct
SAPRGDLDEL

SEQ ID NO: 114129 - protein, 10 aa, synthetic construct
SALRGDLDEL

SEQ ID NO: 114130 - protein, 10 aa, synthetic construct
SAIRGDLDEL

SEQ ID NO: 114131 - protein, 10 aa, synthetic construct
SAMRGDLDEL

SEQ ID NO: 114132 - protein, 10 aa, synthetic construct
SAWRGDLDEL

SEQ ID NO: 114133 - protein, 10 aa, synthetic construct
SAFRGDLDEL

SEQ ID NO: 114134 - protein, 10 aa, synthetic construct
SAKRGDLDEL

SEQ ID NO: 114135 - protein, 10 aa, synthetic construct
SARRGDLDEL

SEQ ID NO: 114136 - protein, 10 aa, synthetic construct
SAHRGDLDEL

SEQ ID NO: 114137 - protein, 10 aa, synthetic construct
SASRGDLDEL

SEQ ID NO: 114138 - protein, 10 aa, synthetic construct
SATRGDLDEL

SEQ ID NO: 114139 - protein, 10 aa, synthetic construct
SAYRGDLDEL

SEQ ID NO: 114140 - protein, 10 aa, synthetic construct
SANRGDLDEL

SEQ ID NO: 114141 - protein, 10 aa, synthetic construct
SAQRGDLDEL

SEQ ID NO: 114142 - protein, 10 aa, synthetic construct
SADRGDLDEL

SEQ ID NO: 114143 - protein, 10 aa, synthetic construct
SAERGDLDEL

SEQ ID NO: 114144 - protein, 10 aa, synthetic construct
SVGRGDLDEL

SEQ ID NO: 114145 - protein, 10 aa, synthetic construct
SVARGDLDEL

SEQ ID NO: 114146 - protein, 10 aa, synthetic construct
SVVRGDLDEL

SEQ ID NO: 114147 - protein, 10 aa, synthetic construct
SVPRGDLDEL

SEQ ID NO: 114148 - protein, 10 aa, synthetic construct
SVLRGDLDEL

SEQ ID NO: 114149 - protein, 10 aa, synthetic construct
SVIRGDLDEL

SEQ ID NO: 114150 - protein, 10 aa, synthetic construct
SVMRGDLDEL

SEQ ID NO: 114151 - protein, 10 aa, synthetic construct
SVWRGDLDEL

SEQ ID NO: 114152 - protein, 10 aa, synthetic construct
SVFRGDLDEL

SEQ ID NO: 114153 - protein, 10 aa, synthetic construct
SVKRGDLDEL

SEQ ID NO: 114154 - protein, 10 aa, synthetic construct
SVRRGDLDEL

SEQ ID NO: 114155 - protein, 10 aa, synthetic construct
SVHRGDLDEL

SEQ ID NO: 114156 - protein, 10 aa, synthetic construct
SVSRGDLDEL

SEQ ID NO: 114157 - protein, 10 aa, synthetic construct
SVTRGDLDEL

SEQ ID NO: 114158 - protein, 10 aa, synthetic construct
SVYRGDLDEL

SEQ ID NO: 114159 - protein, 10 aa, synthetic construct
SVNRGDLDEL

SEQ ID NO: 114160 - protein, 10 aa, synthetic construct
SVQRGDLDEL

SEQ ID NO: 114161 - protein, 10 aa, synthetic construct
SVDRGDLDEL

SEQ ID NO: 114162 - protein, 10 aa, synthetic construct
SVERGDLDEL

SEQ ID NO: 114163 - protein, 10 aa, synthetic construct
SPGRGDLDEL

SEQ ID NO: 114164 - protein, 10 aa, synthetic construct
SPARGDLDEL

SEQ ID NO: 114165 - protein, 10 aa, synthetic construct
SPVRGDLDEL

SEQ ID NO: 114166 - protein, 10 aa, synthetic construct
SPPRGDLDEL

SEQ ID NO: 114167 - protein, 10 aa, synthetic construct
SPLRGDLDEL

SEQ ID NO: 114168 - protein, 10 aa, synthetic construct
SPIRGDLDEL

SEQ ID NO: 114169 - protein, 10 aa, synthetic construct
SPMRGDLDEL

SEQ ID NO: 114170 - protein, 10 aa, synthetic construct
SPWRGDLDEL

SEQ ID NO: 114171 - protein, 10 aa, synthetic construct
SPFRGDLDEL

SEQ ID NO: 114172 - protein, 10 aa, synthetic construct
SPKRGDLDEL

SEQ ID NO: 114173 - protein, 10 aa, synthetic construct
SPRRGDLDEL

SEQ ID NO: 114174 - protein, 10 aa, synthetic construct
SPHRGDLDEL

SEQ ID NO: 114175 - protein, 10 aa, synthetic construct
SPSRGDLDEL

SEQ ID NO: 114176 - protein, 10 aa, synthetic construct
SPTRGDLDEL

SEQ ID NO: 114177 - protein, 10 aa, synthetic construct
SPYRGDLDEL

SEQ ID NO: 114178 - protein, 10 aa, synthetic construct
SPNRGDLDEL

SEQ ID NO: 114179 - protein, 10 aa, synthetic construct
SPQRGDLDEL

SEQ ID NO: 114180 - protein, 10 aa, synthetic construct
SPDRGDLDEL

SEQ ID NO: 114181 - protein, 10 aa, synthetic construct
SPERGDLDEL

SEQ ID NO: 114182 - protein, 10 aa, synthetic construct
SLGRGDLDEL

SEQ ID NO: 114183 - protein, 10 aa, synthetic construct
SLARGDLDEL

SEQ ID NO: 114184 - protein, 10 aa, synthetic construct
SLVRGDLDEL

SEQ ID NO: 114185 - protein, 10 aa, synthetic construct
SLPRGDLDEL

SEQ ID NO: 114186 - protein, 10 aa, synthetic construct
SLLRGDLDEL

SEQ ID NO: 114187 - protein, 10 aa, synthetic construct
SLIRGDLDEL

SEQ ID NO: 114188 - protein, 10 aa, synthetic construct
SLMRGDLDEL

SEQ ID NO: 114189 - protein, 10 aa, synthetic construct
SLWRGDLDEL

SEQ ID NO: 114190 - protein, 10 aa, synthetic construct
SLFRGDLDEL

SEQ ID NO: 114191 - protein, 10 aa, synthetic construct
SLKRGDLDEL

SEQ ID NO: 114192 - protein, 10 aa, synthetic construct
SLRRGDLDEL

SEQ ID NO: 114193 - protein, 10 aa, synthetic construct
SLHRGDLDEL

SEQ ID NO: 114194 - protein, 10 aa, synthetic construct
SLSRGDLDEL

SEQ ID NO: 114195 - protein, 10 aa, synthetic construct
SLTRGDLDEL

SEQ ID NO: 114196 - protein, 10 aa, synthetic construct
SLYRGDLDEL

SEQ ID NO: 114197 - protein, 10 aa, synthetic construct
SLNRGDLDEL

SEQ ID NO: 114198 - protein, 10 aa, synthetic construct
SLQRGDLDEL

SEQ ID NO: 114199 - protein, 10 aa, synthetic construct
SLDRGDLDEL

SEQ ID NO: 114200 - protein, 10 aa, synthetic construct
SLERGDLDEL

SEQ ID NO: 114201 - protein, 10 aa, synthetic construct
SIGRGDLDEL

SEQ ID NO: 114202 - protein, 10 aa, synthetic construct
SIARGDLDEL

SEQ ID NO: 114203 - protein, 10 aa, synthetic construct
SIVRGDLDEL

SEQ ID NO: 114204 - protein, 10 aa, synthetic construct
SIPRGDLDEL

SEQ ID NO: 114205 - protein, 10 aa, synthetic construct
SILRGDLDEL

SEQ ID NO: 114206 - protein, 10 aa, synthetic construct
SIIRGDLDEL

SEQ ID NO: 114207 - protein, 10 aa, synthetic construct
SIMRGDLDEL

SEQ ID NO: 114208 - protein, 10 aa, synthetic construct
SIWRGDLDEL

SEQ ID NO: 114209 - protein, 10 aa, synthetic construct
SIFRGDLDEL

SEQ ID NO: 114210 - protein, 10 aa, synthetic construct
SIKRGDLDEL

SEQ ID NO: 114211 - protein, 10 aa, synthetic construct
SIRRGDLDEL

SEQ ID NO: 114212 - protein, 10 aa, synthetic construct
SIHRGDLDEL

SEQ ID NO: 114213 - protein, 10 aa, synthetic construct
SISRGDLDEL

SEQ ID NO: 114214 - protein, 10 aa, synthetic construct
SITRGDLDEL

SEQ ID NO: 114215 - protein, 10 aa, synthetic construct
SIYRGDLDEL

SEQ ID NO: 114216 - protein, 10 aa, synthetic construct
SINRGDLDEL

SEQ ID NO: 114217 - protein, 10 aa, synthetic construct
SIQRGDLDEL

SEQ ID NO: 114218 - protein, 10 aa, synthetic construct
SIDRGDLDEL

SEQ ID NO: 114219 - protein, 10 aa, synthetic construct
SIERGDLDEL

SEQ ID NO: 114220 - protein, 10 aa, synthetic construct
SMGRGDLDEL

SEQ ID NO: 114221 - protein, 10 aa, synthetic construct
SMARGDLDEL

SEQ ID NO: 114222 - protein, 10 aa, synthetic construct
SMVRGDLDEL

SEQ ID NO: 114223 - protein, 10 aa, synthetic construct
SMPRGDLDEL

SEQ ID NO: 114224 - protein, 10 aa, synthetic construct
SMLRGDLDEL

SEQ ID NO: 114225 - protein, 10 aa, synthetic construct
SMIRGDLDEL

SEQ ID NO: 114226 - protein, 10 aa, synthetic construct
SMMRGDLDEL

SEQ ID NO: 114227 - protein, 10 aa, synthetic construct
SMWRGDLDEL

SEQ ID NO: 114228 - protein, 10 aa, synthetic construct
SMFRGDLDEL

SEQ ID NO: 114229 - protein, 10 aa, synthetic construct
SMKRGDLDEL

SEQ ID NO: 114230 - protein, 10 aa, synthetic construct
SMRRGDLDEL

SEQ ID NO: 114231 - protein, 10 aa, synthetic construct
SMHRGDLDEL

SEQ ID NO: 114232 - protein, 10 aa, synthetic construct
SMSRGDLDEL

SEQ ID NO: 114233 - protein, 10 aa, synthetic construct
SMTRGDLDEL

SEQ ID NO: 114234 - protein, 10 aa, synthetic construct
SMYRGDLDEL

SEQ ID NO: 114235 - protein, 10 aa, synthetic construct
SMNRGDLDEL

SEQ ID NO: 114236 - protein, 10 aa, synthetic construct
SMQRGDLDEL

SEQ ID NO: 114237 - protein, 10 aa, synthetic construct
SMDRGDLDEL

SEQ ID NO: 114238 - protein, 10 aa, synthetic construct
SMERGDLDEL

SEQ ID NO: 114239 - protein, 10 aa, synthetic construct
SWGRGDLDEL

SEQ ID NO: 114240 - protein, 10 aa, synthetic construct
SWARGDLDEL

SEQ ID NO: 114241 - protein, 10 aa, synthetic construct
SWVRGDLDEL

SEQ ID NO: 114242 - protein, 10 aa, synthetic construct
SWPRGDLDEL

SEQ ID NO: 114243 - protein, 10 aa, synthetic construct
SWLRGDLDEL

SEQ ID NO: 114244 - protein, 10 aa, synthetic construct
SWIRGDLDEL

SEQ ID NO: 114245 - protein, 10 aa, synthetic construct
SWMRGDLDEL

SEQ ID NO: 114246 - protein, 10 aa, synthetic construct
SWWRGDLDEL

SEQ ID NO: 114247 - protein, 10 aa, synthetic construct
SWFRGDLDEL

SEQ ID NO: 114248 - protein, 10 aa, synthetic construct
SWKRGDLDEL

SEQ ID NO: 114249 - protein, 10 aa, synthetic construct
SWRRGDLDEL

SEQ ID NO: 114250 - protein, 10 aa, synthetic construct
SWHRGDLDEL

SEQ ID NO: 114251 - protein, 10 aa, synthetic construct
SWSRGDLDEL

SEQ ID NO: 114252 - protein, 10 aa, synthetic construct
SWTRGDLDEL

SEQ ID NO: 114253 - protein, 10 aa, synthetic construct
SWYRGDLDEL

SEQ ID NO: 114254 - protein, 10 aa, synthetic construct
SWNRGDLDEL

SEQ ID NO: 114255 - protein, 10 aa, synthetic construct
SWQRGDLDEL

SEQ ID NO: 114256 - protein, 10 aa, synthetic construct
SWDRGDLDEL

SEQ ID NO: 114257 - protein, 10 aa, synthetic construct
SWERGDLDEL

SEQ ID NO: 114258 - protein, 10 aa, synthetic construct
SFGRGDLDEL

SEQ ID NO: 114259 - protein, 10 aa, synthetic construct
SFARGDLDEL

SEQ ID NO: 114260 - protein, 10 aa, synthetic construct
SFVRGDLDEL

SEQ ID NO: 114261 - protein, 10 aa, synthetic construct
SFPRGDLDEL

SEQ ID NO: 114262 - protein, 10 aa, synthetic construct
SFLRGDLDEL

SEQ ID NO: 114263 - protein, 10 aa, synthetic construct
SFIRGDLDEL

SEQ ID NO: 114264 - protein, 10 aa, synthetic construct
SFMRGDLDEL

SEQ ID NO: 114265 - protein, 10 aa, synthetic construct
SFWRGDLDEL

SEQ ID NO: 114266 - protein, 10 aa, synthetic construct
SFFRGDLDEL

SEQ ID NO: 114267 - protein, 10 aa, synthetic construct
SFKRGDLDEL

SEQ ID NO: 114268 - protein, 10 aa, synthetic construct
SFRRGDLDEL

SEQ ID NO: 114269 - protein, 10 aa, synthetic construct
SFHRGDLDEL

SEQ ID NO: 114270 - protein, 10 aa, synthetic construct
SFSRGDLDEL

SEQ ID NO: 114271 - protein, 10 aa, synthetic construct
SFTRGDLDEL

SEQ ID NO: 114272 - protein, 10 aa, synthetic construct
SFYRGDLDEL

SEQ ID NO: 114273 - protein, 10 aa, synthetic construct
SFNRGDLDEL

SEQ ID NO: 114274 - protein, 10 aa, synthetic construct
SFQRGDLDEL

SEQ ID NO: 114275 - protein, 10 aa, synthetic construct
SFDRGDLDEL

SEQ ID NO: 114276 - protein, 10 aa, synthetic construct
SFERGDLDEL

SEQ ID NO: 114277 - protein, 10 aa, synthetic construct
SKGRGDLDEL

SEQ ID NO: 114278 - protein, 10 aa, synthetic construct
SKARGDLDEL

SEQ ID NO: 114279 - protein, 10 aa, synthetic construct
SKVRGDLDEL

SEQ ID NO: 114280 - protein, 10 aa, synthetic construct
SKPRGDLDEL

SEQ ID NO: 114281 - protein, 10 aa, synthetic construct
SKLRGDLDEL

SEQ ID NO: 114282 - protein, 10 aa, synthetic construct
SKIRGDLDEL

SEQ ID NO: 114283 - protein, 10 aa, synthetic construct
SKMRGDLDEL

SEQ ID NO: 114284 - protein, 10 aa, synthetic construct
SKWRGDLDEL

SEQ ID NO: 114285 - protein, 10 aa, synthetic construct
SKFRGDLDEL

SEQ ID NO: 114286 - protein, 10 aa, synthetic construct
SKKRGDLDEL

SEQ ID NO: 114287 - protein, 10 aa, synthetic construct
SKRRGDLDEL

SEQ ID NO: 114288 - protein, 10 aa, synthetic construct
SKHRGDLDEL

SEQ ID NO: 114289 - protein, 10 aa, synthetic construct
SKSRGDLDEL

SEQ ID NO: 114290 - protein, 10 aa, synthetic construct
SKTRGDLDEL

SEQ ID NO: 114291 - protein, 10 aa, synthetic construct
SKYRGDLDEL

SEQ ID NO: 114292 - protein, 10 aa, synthetic construct
SKNRGDLDEL

SEQ ID NO: 114293 - protein, 10 aa, synthetic construct
SKQRGDLDEL

SEQ ID NO: 114294 - protein, 10 aa, synthetic construct
SKDRGDLDEL

SEQ ID NO: 114295 - protein, 10 aa, synthetic construct
SKERGDLDEL

SEQ ID NO: 114296 - protein, 10 aa, synthetic construct
SRGRGDLDEL

SEQ ID NO: 114297 - protein, 10 aa, synthetic construct
SRARGDLDEL

SEQ ID NO: 114298 - protein, 10 aa, synthetic construct
SRVRGDLDEL

SEQ ID NO: 114299 - protein, 10 aa, synthetic construct
SRPRGDLDEL

SEQ ID NO: 114300 - protein, 10 aa, synthetic construct
SRLRGDLDEL

SEQ ID NO: 114301 - protein, 10 aa, synthetic construct
SRIRGDLDEL

SEQ ID NO: 114302 - protein, 10 aa, synthetic construct
SRMRGDLDEL

SEQ ID NO: 114303 - protein, 10 aa, synthetic construct
SRWRGDLDEL

SEQ ID NO: 114304 - protein, 10 aa, synthetic construct
SRFRGDLDEL

SEQ ID NO: 114305 - protein, 10 aa, synthetic construct
SRKRGDLDEL

SEQ ID NO: 114306 - protein, 10 aa, synthetic construct
SRRRGDLDEL

SEQ ID NO: 114307 - protein, 10 aa, synthetic construct
SRHRGDLDEL

SEQ ID NO: 114308 - protein, 10 aa, synthetic construct
SRSRGDLDEL

SEQ ID NO: 114309 - protein, 10 aa, synthetic construct
SRTRGDLDEL

SEQ ID NO: 114310 - protein, 10 aa, synthetic construct
SRYRGDLDEL

SEQ ID NO: 114311 - protein, 10 aa, synthetic construct
SRNRGDLDEL

SEQ ID NO: 114312 - protein, 10 aa, synthetic construct
SRQRGDLDEL

SEQ ID NO: 114313 - protein, 10 aa, synthetic construct
SRDRGDLDEL

SEQ ID NO: 114314 - protein, 10 aa, synthetic construct
SRERGDLDEL

SEQ ID NO: 114315 - protein, 10 aa, synthetic construct
SHGRGDLDEL

SEQ ID NO: 114316 - protein, 10 aa, synthetic construct
SHARGDLDEL

SEQ ID NO: 114317 - protein, 10 aa, synthetic construct
SHVRGDLDEL

SEQ ID NO: 114318 - protein, 10 aa, synthetic construct
SHPRGDLDEL

SEQ ID NO: 114319 - protein, 10 aa, synthetic construct
SHLRGDLDEL

SEQ ID NO: 114320 - protein, 10 aa, synthetic construct
SHIRGDLDEL

SEQ ID NO: 114321 - protein, 10 aa, synthetic construct
SHMRGDLDEL

SEQ ID NO: 114322 - protein, 10 aa, synthetic construct
SHWRGDLDEL

SEQ ID NO: 114323 - protein, 10 aa, synthetic construct
SHFRGDLDEL

SEQ ID NO: 114324 - protein, 10 aa, synthetic construct
SHKRGDLDEL

SEQ ID NO: 114325 - protein, 10 aa, synthetic construct
SHRRGDLDEL

SEQ ID NO: 114326 - protein, 10 aa, synthetic construct
SHHRGDLDEL

SEQ ID NO: 114327 - protein, 10 aa, synthetic construct
SHSRGDLDEL

SEQ ID NO: 114328 - protein, 10 aa, synthetic construct
SHTRGDLDEL

SEQ ID NO: 114329 - protein, 10 aa, synthetic construct
SHYRGDLDEL

SEQ ID NO: 114330 - protein, 10 aa, synthetic construct
SHNRGDLDEL

SEQ ID NO: 114331 - protein, 10 aa, synthetic construct
SHQRGDLDEL

SEQ ID NO: 114332 - protein, 10 aa, synthetic construct
SHDRGDLDEL

SEQ ID NO: 114333 - protein, 10 aa, synthetic construct
SHERGDLDEL

SEQ ID NO: 114334 - protein, 10 aa, synthetic construct
SSGRGDLDEL

SEQ ID NO: 114335 - protein, 10 aa, synthetic construct
SSARGDLDEL

SEQ ID NO: 114336 - protein, 10 aa, synthetic construct
SSVRGDLDEL

SEQ ID NO: 114337 - protein, 10 aa, synthetic construct
SSPRGDLDEL

SEQ ID NO: 114338 - protein, 10 aa, synthetic construct
SSLRGDLDEL

SEQ ID NO: 114339 - protein, 10 aa, synthetic construct
SSIRGDLDEL

SEQ ID NO: 114340 - protein, 10 aa, synthetic construct
SSMRGDLDEL

SEQ ID NO: 114341 - protein, 10 aa, synthetic construct
SSWRGDLDEL

SEQ ID NO: 114342 - protein, 10 aa, synthetic construct
SSFRGDLDEL

SEQ ID NO: 114343 - protein, 10 aa, synthetic construct
SSKRGDLDEL

SEQ ID NO: 114344 - protein, 10 aa, synthetic construct
SSRRGDLDEL

SEQ ID NO: 114345 - protein, 10 aa, synthetic construct
SSHRGDLDEL

SEQ ID NO: 114346 - protein, 10 aa, synthetic construct
SSSRGDLDEL

SEQ ID NO: 114347 - protein, 10 aa, synthetic construct
SSTRGDLDEL

SEQ ID NO: 114348 - protein, 10 aa, synthetic construct
SSYRGDLDEL

SEQ ID NO: 114349 - protein, 10 aa, synthetic construct
SSNRGDLDEL

SEQ ID NO: 114350 - protein, 10 aa, synthetic construct
SSQRGDLDEL

SEQ ID NO: 114351 - protein, 10 aa, synthetic construct
SSDRGDLDEL

SEQ ID NO: 114352 - protein, 10 aa, synthetic construct
SSERGDLDEL

SEQ ID NO: 114353 - protein, 10 aa, synthetic construct
STGRGDLDEL

SEQ ID NO: 114354 - protein, 10 aa, synthetic construct
STARGDLDEL

SEQ ID NO: 114355 - protein, 10 aa, synthetic construct
STVRGDLDEL

SEQ ID NO: 114356 - protein, 10 aa, synthetic construct
STPRGDLDEL

SEQ ID NO: 114357 - protein, 10 aa, synthetic construct
STLRGDLDEL

SEQ ID NO: 114358 - protein, 10 aa, synthetic construct
STIRGDLDEL

SEQ ID NO: 114359 - protein, 10 aa, synthetic construct
STMRGDLDEL

SEQ ID NO: 114360 - protein, 10 aa, synthetic construct
STWRGDLDEL

SEQ ID NO: 114361 - protein, 10 aa, synthetic construct
STFRGDLDEL

SEQ ID NO: 114362 - protein, 10 aa, synthetic construct
STKRGDLDEL

SEQ ID NO: 114363 - protein, 10 aa, synthetic construct
STRRGDLDEL

SEQ ID NO: 114364 - protein, 10 aa, synthetic construct
STHRGDLDEL

SEQ ID NO: 114365 - protein, 10 aa, synthetic construct
STSRGDLDEL

SEQ ID NO: 114366 - protein, 10 aa, synthetic construct
STTRGDLDEL

SEQ ID NO: 114367 - protein, 10 aa, synthetic construct
STYRGDLDEL

SEQ ID NO: 114368 - protein, 10 aa, synthetic construct
STNRGDLDEL

SEQ ID NO: 114369 - protein, 10 aa, synthetic construct
STQRGDLDEL

SEQ ID NO: 114370 - protein, 10 aa, synthetic construct
STDRGDLDEL

SEQ ID NO: 114371 - protein, 10 aa, synthetic construct
STERGDLDEL

SEQ ID NO: 114372 - protein, 10 aa, synthetic construct
SYGRGDLDEL

SEQ ID NO: 114373 - protein, 10 aa, synthetic construct
SYARGDLDEL

SEQ ID NO: 114374 - protein, 10 aa, synthetic construct
SYVRGDLDEL

SEQ ID NO: 114375 - protein, 10 aa, synthetic construct
SYPRGDLDEL

SEQ ID NO: 114376 - protein, 10 aa, synthetic construct
SYLRGDLDEL

SEQ ID NO: 114377 - protein, 10 aa, synthetic construct
SYIRGDLDEL

SEQ ID NO: 114378 - protein, 10 aa, synthetic construct
SYMRGDLDEL

SEQ ID NO: 114379 - protein, 10 aa, synthetic construct
SYWRGDLDEL

SEQ ID NO: 114380 - protein, 10 aa, synthetic construct
SYFRGDLDEL

SEQ ID NO: 114381 - protein, 10 aa, synthetic construct
SYKRGDLDEL

SEQ ID NO: 114382 - protein, 10 aa, synthetic construct
SYRRGDLDEL

SEQ ID NO: 114383 - protein, 10 aa, synthetic construct
SYHRGDLDEL

SEQ ID NO: 114384 - protein, 10 aa, synthetic construct
SYSRGDLDEL

SEQ ID NO: 114385 - protein, 10 aa, synthetic construct
SYTRGDLDEL

SEQ ID NO: 114386 - protein, 10 aa, synthetic construct
SYYRGDLDEL

SEQ ID NO: 114387 - protein, 10 aa, synthetic construct
SYNRGDLDEL

SEQ ID NO: 114388 - protein, 10 aa, synthetic construct
SYQRGDLDEL

SEQ ID NO: 114389 - protein, 10 aa, synthetic construct
SYDRGDLDEL

SEQ ID NO: 114390 - protein, 10 aa, synthetic construct
SYERGDLDEL

SEQ ID NO: 114391 - protein, 10 aa, synthetic construct
SNGRGDLDEL

SEQ ID NO: 114392 - protein, 10 aa, synthetic construct
SNARGDLDEL

SEQ ID NO: 114393 - protein, 10 aa, synthetic construct
SNVRGDLDEL

SEQ ID NO: 114394 - protein, 10 aa, synthetic construct
SNPRGDLDEL

SEQ ID NO: 114395 - protein, 10 aa, synthetic construct
SNLRGDLDEL

SEQ ID NO: 114396 - protein, 10 aa, synthetic construct
SNIRGDLDEL

SEQ ID NO: 114397 - protein, 10 aa, synthetic construct
SNMRGDLDEL

SEQ ID NO: 114398 - protein, 10 aa, synthetic construct
SNWRGDLDEL

SEQ ID NO: 114399 - protein, 10 aa, synthetic construct
SNFRGDLDEL

SEQ ID NO: 114400 - protein, 10 aa, synthetic construct
SNKRGDLDEL

SEQ ID NO: 114401 - protein, 10 aa, synthetic construct
SNRRGDLDEL

SEQ ID NO: 114402 - protein, 10 aa, synthetic construct
SNHRGDLDEL

SEQ ID NO: 114403 - protein, 10 aa, synthetic construct
SNSRGDLDEL

SEQ ID NO: 114404 - protein, 10 aa, synthetic construct
SNTRGDLDEL

SEQ ID NO: 114405 - protein, 10 aa, synthetic construct
SNYRGDLDEL

SEQ ID NO: 114406 - protein, 10 aa, synthetic construct
SNNRGDLDEL

SEQ ID NO: 114407 - protein, 10 aa, synthetic construct
SNQRGDLDEL

SEQ ID NO: 114408 - protein, 10 aa, synthetic construct
SNDRGDLDEL

SEQ ID NO: 114409 - protein, 10 aa, synthetic construct
SNERGDLDEL

SEQ ID NO: 114410 - protein, 10 aa, synthetic construct
SQGRGDLDEL

SEQ ID NO: 114411 - protein, 10 aa, synthetic construct
SQARGDLDEL

SEQ ID NO: 114412 - protein, 10 aa, synthetic construct
SQVRGDLDEL

SEQ ID NO: 114413 - protein, 10 aa, synthetic construct
SQPRGDLDEL

SEQ ID NO: 114414 - protein, 10 aa, synthetic construct
SQLRGDLDEL

SEQ ID NO: 114415 - protein, 10 aa, synthetic construct
SQIRGDLDEL

SEQ ID NO: 114416 - protein, 10 aa, synthetic construct
SQMRGDLDEL

SEQ ID NO: 114417 - protein, 10 aa, synthetic construct
SQWRGDLDEL

SEQ ID NO: 114418 - protein, 10 aa, synthetic construct
SQFRGDLDEL

SEQ ID NO: 114419 - protein, 10 aa, synthetic construct
SQKRGDLDEL

SEQ ID NO: 114420 - protein, 10 aa, synthetic construct
SQRRGDLDEL

SEQ ID NO: 114421 - protein, 10 aa, synthetic construct
SQHRGDLDEL

SEQ ID NO: 114422 - protein, 10 aa, synthetic construct
SQSRGDLDEL

SEQ ID NO: 114423 - protein, 10 aa, synthetic construct
SQTRGDLDEL

SEQ ID NO: 114424 - protein, 10 aa, synthetic construct
SQYRGDLDEL

SEQ ID NO: 114425 - protein, 10 aa, synthetic construct
SQNRGDLDEL

SEQ ID NO: 114426 - protein, 10 aa, synthetic construct
SQQRGDLDEL

SEQ ID NO: 114427 - protein, 10 aa, synthetic construct
SQDRGDLDEL

SEQ ID NO: 114428 - protein, 10 aa, synthetic construct
SQERGDLDEL

SEQ ID NO: 114429 - protein, 10 aa, synthetic construct
SDGRGDLDEL

SEQ ID NO: 114430 - protein, 10 aa, synthetic construct
SDARGDLDEL

SEQ ID NO: 114431 - protein, 10 aa, synthetic construct
SDVRGDLDEL

SEQ ID NO: 114432 - protein, 10 aa, synthetic construct
SDPRGDLDEL

SEQ ID NO: 114433 - protein, 10 aa, synthetic construct
SDLRGDLDEL

SEQ ID NO: 114434 - protein, 10 aa, synthetic construct
SDIRGDLDEL

SEQ ID NO: 114435 - protein, 10 aa, synthetic construct
SDMRGDLDEL

SEQ ID NO: 114436 - protein, 10 aa, synthetic construct
SDWRGDLDEL

SEQ ID NO: 114437 - protein, 10 aa, synthetic construct
SDFRGDLDEL

SEQ ID NO: 114438 - protein, 10 aa, synthetic construct
SDKRGDLDEL

SEQ ID NO: 114439 - protein, 10 aa, synthetic construct
SDRRGDLDEL

SEQ ID NO: 114440 - protein, 10 aa, synthetic construct
SDHRGDLDEL

SEQ ID NO: 114441 - protein, 10 aa, synthetic construct
SDSRGDLDEL

SEQ ID NO: 114442 - protein, 10 aa, synthetic construct
SDTRGDLDEL

SEQ ID NO: 114443 - protein, 10 aa, synthetic construct
SDYRGDLDEL

SEQ ID NO: 114444 - protein, 10 aa, synthetic construct
SDNRGDLDEL

SEQ ID NO: 114445 - protein, 10 aa, synthetic construct
SDQRGDLDEL

SEQ ID NO: 114446 - protein, 10 aa, synthetic construct
SDDRGDLDEL

SEQ ID NO: 114447 - protein, 10 aa, synthetic construct
SDERGDLDEL

SEQ ID NO: 114448 - protein, 10 aa, synthetic construct
SEGRGDLDEL

SEQ ID NO: 114449 - protein, 10 aa, synthetic construct
SEARGDLDEL

SEQ ID NO: 114450 - protein, 10 aa, synthetic construct
SEVRGDLDEL

SEQ ID NO: 114451 - protein, 10 aa, synthetic construct
SEPRGDLDEL

SEQ ID NO: 114452 - protein, 10 aa, synthetic construct
SELRGDLDEL

SEQ ID NO: 114453 - protein, 10 aa, synthetic construct
SEIRGDLDEL

SEQ ID NO: 114454 - protein, 10 aa, synthetic construct
SEMRGDLDEL

SEQ ID NO: 114455 - protein, 10 aa, synthetic construct
SEWRGDLDEL

SEQ ID NO: 114456 - protein, 10 aa, synthetic construct
SEFRGDLDEL

SEQ ID NO: 114457 - protein, 10 aa, synthetic construct
SEKRGDLDEL

SEQ ID NO: 114458 - protein, 10 aa, synthetic construct
SERRGDLDEL

SEQ ID NO: 114459 - protein, 10 aa, synthetic construct
SEHRGDLDEL

SEQ ID NO: 114460 - protein, 10 aa, synthetic construct
SESRGDLDEL

SEQ ID NO: 114461 - protein, 10 aa, synthetic construct
SETRGDLDEL

SEQ ID NO: 114462 - protein, 10 aa, synthetic construct
SEYRGDLDEL

SEQ ID NO: 114463 - protein, 10 aa, synthetic construct
SENRGDLDEL

SEQ ID NO: 114464 - protein, 10 aa, synthetic construct
SEQRGDLDEL

SEQ ID NO: 114465 - protein, 10 aa, synthetic construct
SEDRGDLDEL

SEQ ID NO: 114466 - protein, 10 aa, synthetic construct
SEERGDLDEL

SEQ ID NO: 114467 - protein, 10 aa, synthetic construct
TGGRGDLDEL

SEQ ID NO: 114468 - protein, 10 aa, synthetic construct
TGARGDLDEL

SEQ ID NO: 114469 - protein, 10 aa, synthetic construct
TGVRGDLDEL

SEQ ID NO: 114470 - protein, 10 aa, synthetic construct
TGPRGDLDEL

SEQ ID NO: 114471 - protein, 10 aa, synthetic construct
TGLRGDLDEL

SEQ ID NO: 114472 - protein, 10 aa, synthetic construct
TGIRGDLDEL

SEQ ID NO: 114473 - protein, 10 aa, synthetic construct
TGMRGDLDEL

SEQ ID NO: 114474 - protein, 10 aa, synthetic construct
TGWRGDLDEL

SEQ ID NO: 114475 - protein, 10 aa, synthetic construct
TGFRGDLDEL

SEQ ID NO: 114476 - protein, 10 aa, synthetic construct
TGKRGDLDEL

SEQ ID NO: 114477 - protein, 10 aa, synthetic construct
TGRRGDLDEL

SEQ ID NO: 114478 - protein, 10 aa, synthetic construct
TGHRGDLDEL

SEQ ID NO: 114479 - protein, 10 aa, synthetic construct
TGSRGDLDEL

SEQ ID NO: 114480 - protein, 10 aa, synthetic construct
TGTRGDLDEL

SEQ ID NO: 114481 - protein, 10 aa, synthetic construct
TGYRGDLDEL

SEQ ID NO: 114482 - protein, 10 aa, synthetic construct
TGNRGDLDEL

SEQ ID NO: 114483 - protein, 10 aa, synthetic construct
TGQRGDLDEL

SEQ ID NO: 114484 - protein, 10 aa, synthetic construct
TGDRGDLDEL

SEQ ID NO: 114485 - protein, 10 aa, synthetic construct
TGERGDLDEL

SEQ ID NO: 114486 - protein, 10 aa, synthetic construct
TAGRGDLDEL

SEQ ID NO: 114487 - protein, 10 aa, synthetic construct
TAARGDLDEL

SEQ ID NO: 114488 - protein, 10 aa, synthetic construct
TAVRGDLDEL

SEQ ID NO: 114489 - protein, 10 aa, synthetic construct
TAPRGDLDEL

SEQ ID NO: 114490 - protein, 10 aa, synthetic construct
TALRGDLDEL

SEQ ID NO: 114491 - protein, 10 aa, synthetic construct
TAIRGDLDEL

SEQ ID NO: 114492 - protein, 10 aa, synthetic construct
TAMRGDLDEL

SEQ ID NO: 114493 - protein, 10 aa, synthetic construct
TAWRGDLDEL

SEQ ID NO: 114494 - protein, 10 aa, synthetic construct
TAFRGDLDEL

SEQ ID NO: 114495 - protein, 10 aa, synthetic construct
TAKRGDLDEL

SEQ ID NO: 114496 - protein, 10 aa, synthetic construct
TARRGDLDEL

SEQ ID NO: 114497 - protein, 10 aa, synthetic construct
TAHRGDLDEL

SEQ ID NO: 114498 - protein, 10 aa, synthetic construct
TASRGDLDEL

SEQ ID NO: 114499 - protein, 10 aa, synthetic construct
TATRGDLDEL

SEQ ID NO: 114500 - protein, 10 aa, synthetic construct
TAYRGDLDEL

SEQ ID NO: 114501 - protein, 10 aa, synthetic construct
TANRGDLDEL

SEQ ID NO: 114502 - protein, 10 aa, synthetic construct
TAQRGDLDEL

SEQ ID NO: 114503 - protein, 10 aa, synthetic construct
TADRGDLDEL

SEQ ID NO: 114504 - protein, 10 aa, synthetic construct
TAERGDLDEL

SEQ ID NO: 114505 - protein, 10 aa, synthetic construct
TVGRGDLDEL

SEQ ID NO: 114506 - protein, 10 aa, synthetic construct
TVARGDLDEL

SEQ ID NO: 114507 - protein, 10 aa, synthetic construct
TVVRGDLDEL

SEQ ID NO: 114508 - protein, 10 aa, synthetic construct
TVPRGDLDEL

SEQ ID NO: 114509 - protein, 10 aa, synthetic construct
TVLRGDLDEL

SEQ ID NO: 114510 - protein, 10 aa, synthetic construct
TVIRGDLDEL

SEQ ID NO: 114511 - protein, 10 aa, synthetic construct
TVMRGDLDEL

SEQ ID NO: 114512 - protein, 10 aa, synthetic construct
TVWRGDLDEL

SEQ ID NO: 114513 - protein, 10 aa, synthetic construct
TVFRGDLDEL

SEQ ID NO: 114514 - protein, 10 aa, synthetic construct
TVKRGDLDEL

SEQ ID NO: 114515 - protein, 10 aa, synthetic construct
TVRRGDLDEL

SEQ ID NO: 114516 - protein, 10 aa, synthetic construct
TVHRGDLDEL

SEQ ID NO: 114517 - protein, 10 aa, synthetic construct
TVSRGDLDEL

SEQ ID NO: 114518 - protein, 10 aa, synthetic construct
TVTRGDLDEL

SEQ ID NO: 114519 - protein, 10 aa, synthetic construct
TVYRGDLDEL

SEQ ID NO: 114520 - protein, 10 aa, synthetic construct
TVNRGDLDEL

SEQ ID NO: 114521 - protein, 10 aa, synthetic construct
TVQRGDLDEL

SEQ ID NO: 114522 - protein, 10 aa, synthetic construct
TVDRGDLDEL

SEQ ID NO: 114523 - protein, 10 aa, synthetic construct
TVERGDLDEL

SEQ ID NO: 114524 - protein, 10 aa, synthetic construct
TPGRGDLDEL

SEQ ID NO: 114525 - protein, 10 aa, synthetic construct
TPARGDLDEL

SEQ ID NO: 114526 - protein, 10 aa, synthetic construct
TPVRGDLDEL

SEQ ID NO: 114527 - protein, 10 aa, synthetic construct
TPPRGDLDEL

SEQ ID NO: 114528 - protein, 10 aa, synthetic construct
TPLRGDLDEL

SEQ ID NO: 114529 - protein, 10 aa, synthetic construct
TPIRGDLDEL

SEQ ID NO: 114530 - protein, 10 aa, synthetic construct
TPMRGDLDEL

SEQ ID NO: 114531 - protein, 10 aa, synthetic construct
TPWRGDLDEL

SEQ ID NO: 114532 - protein, 10 aa, synthetic construct
TPFRGDLDEL

SEQ ID NO: 114533 - protein, 10 aa, synthetic construct
TPKRGDLDEL

SEQ ID NO: 114534 - protein, 10 aa, synthetic construct
TPRRGDLDEL

SEQ ID NO: 114535 - protein, 10 aa, synthetic construct
TPHRGDLDEL

SEQ ID NO: 114536 - protein, 10 aa, synthetic construct
TPSRGDLDEL

SEQ ID NO: 114537 - protein, 10 aa, synthetic construct
TPTRGDLDEL

SEQ ID NO: 114538 - protein, 10 aa, synthetic construct
TPYRGDLDEL

SEQ ID NO: 114539 - protein, 10 aa, synthetic construct
TPNRGDLDEL

SEQ ID NO: 114540 - protein, 10 aa, synthetic construct
TPQRGDLDEL

SEQ ID NO: 114541 - protein, 10 aa, synthetic construct
TPDRGDLDEL

SEQ ID NO: 114542 - protein, 10 aa, synthetic construct
TPERGDLDEL

SEQ ID NO: 114543 - protein, 10 aa, synthetic construct
TLGRGDLDEL

SEQ ID NO: 114544 - protein, 10 aa, synthetic construct
TLARGDLDEL

SEQ ID NO: 114545 - protein, 10 aa, synthetic construct
TLVRGDLDEL

SEQ ID NO: 114546 - protein, 10 aa, synthetic construct
TLPRGDLDEL

SEQ ID NO: 114547 - protein, 10 aa, synthetic construct
TLLRGDLDEL

SEQ ID NO: 114548 - protein, 10 aa, synthetic construct
TLIRGDLDEL

SEQ ID NO: 114549 - protein, 10 aa, synthetic construct
TLMRGDLDEL

SEQ ID NO: 114550 - protein, 10 aa, synthetic construct
TLWRGDLDEL

SEQ ID NO: 114551 - protein, 10 aa, synthetic construct
TLFRGDLDEL

SEQ ID NO: 114552 - protein, 10 aa, synthetic construct
TLKRGDLDEL

SEQ ID NO: 114553 - protein, 10 aa, synthetic construct
TLRRGDLDEL

SEQ ID NO: 114554 - protein, 10 aa, synthetic construct
TLHRGDLDEL

SEQ ID NO: 114555 - protein, 10 aa, synthetic construct
TLSRGDLDEL

SEQ ID NO: 114556 - protein, 10 aa, synthetic construct
TLTRGDLDEL

SEQ ID NO: 114557 - protein, 10 aa, synthetic construct
TLYRGDLDEL

SEQ ID NO: 114558 - protein, 10 aa, synthetic construct
TLNRGDLDEL

SEQ ID NO: 114559 - protein, 10 aa, synthetic construct
TLQRGDLDEL

SEQ ID NO: 114560 - protein, 10 aa, synthetic construct
TLDRGDLDEL

SEQ ID NO: 114561 - protein, 10 aa, synthetic construct
TLERGDLDEL

SEQ ID NO: 114562 - protein, 10 aa, synthetic construct
TIGRGDLDEL

SEQ ID NO: 114563 - protein, 10 aa, synthetic construct
TIARGDLDEL

SEQ ID NO: 114564 - protein, 10 aa, synthetic construct
TIVRGDLDEL

SEQ ID NO: 114565 - protein, 10 aa, synthetic construct
TIPRGDLDEL

SEQ ID NO: 114566 - protein, 10 aa, synthetic construct
TILRGDLDEL

SEQ ID NO: 114567 - protein, 10 aa, synthetic construct
TIIRGDLDEL

SEQ ID NO: 114568 - protein, 10 aa, synthetic construct
TIMRGDLDEL

SEQ ID NO: 114569 - protein, 10 aa, synthetic construct
TIWRGDLDEL

SEQ ID NO: 114570 - protein, 10 aa, synthetic construct
TIFRGDLDEL

SEQ ID NO: 114571 - protein, 10 aa, synthetic construct
TIKRGDLDEL

SEQ ID NO: 114572 - protein, 10 aa, synthetic construct
TIRRGDLDEL

SEQ ID NO: 114573 - protein, 10 aa, synthetic construct
TIHRGDLDEL

SEQ ID NO: 114574 - protein, 10 aa, synthetic construct
TISRGDLDEL

SEQ ID NO: 114575 - protein, 10 aa, synthetic construct
TITRGDLDEL

SEQ ID NO: 114576 - protein, 10 aa, synthetic construct
TIYRGDLDEL

SEQ ID NO: 114577 - protein, 10 aa, synthetic construct
TINRGDLDEL

SEQ ID NO: 114578 - protein, 10 aa, synthetic construct
TIQRGDLDEL

SEQ ID NO: 114579 - protein, 10 aa, synthetic construct
TIDRGDLDEL

SEQ ID NO: 114580 - protein, 10 aa, synthetic construct
TIERGDLDEL

SEQ ID NO: 114581 - protein, 10 aa, synthetic construct
TMGRGDLDEL

SEQ ID NO: 114582 - protein, 10 aa, synthetic construct
TMARGDLDEL

SEQ ID NO: 114583 - protein, 10 aa, synthetic construct
TMVRGDLDEL

SEQ ID NO: 114584 - protein, 10 aa, synthetic construct
TMPRGDLDEL

SEQ ID NO: 114585 - protein, 10 aa, synthetic construct
TMLRGDLDEL

SEQ ID NO: 114586 - protein, 10 aa, synthetic construct
TMIRGDLDEL

SEQ ID NO: 114587 - protein, 10 aa, synthetic construct
TMMRGDLDEL

SEQ ID NO: 114588 - protein, 10 aa, synthetic construct
TMWRGDLDEL

SEQ ID NO: 114589 - protein, 10 aa, synthetic construct
TMFRGDLDEL

SEQ ID NO: 114590 - protein, 10 aa, synthetic construct
TMKRGDLDEL

SEQ ID NO: 114591 - protein, 10 aa, synthetic construct
TMRRGDLDEL

SEQ ID NO: 114592 - protein, 10 aa, synthetic construct
TMHRGDLDEL

SEQ ID NO: 114593 - protein, 10 aa, synthetic construct
TMSRGDLDEL

SEQ ID NO: 114594 - protein, 10 aa, synthetic construct
TMTRGDLDEL

SEQ ID NO: 114595 - protein, 10 aa, synthetic construct
TMYRGDLDEL

SEQ ID NO: 114596 - protein, 10 aa, synthetic construct
TMNRGDLDEL

SEQ ID NO: 114597 - protein, 10 aa, synthetic construct
TMQRGDLDEL

SEQ ID NO: 114598 - protein, 10 aa, synthetic construct
TMDRGDLDEL

SEQ ID NO: 114599 - protein, 10 aa, synthetic construct
TMERGDLDEL

SEQ ID NO: 114600 - protein, 10 aa, synthetic construct
TWGRGDLDEL

SEQ ID NO: 114601 - protein, 10 aa, synthetic construct
TWARGDLDEL

SEQ ID NO: 114602 - protein, 10 aa, synthetic construct
TWVRGDLDEL

SEQ ID NO: 114603 - protein, 10 aa, synthetic construct
TWPRGDLDEL

SEQ ID NO: 114604 - protein, 10 aa, synthetic construct
TWLRGDLDEL

SEQ ID NO: 114605 - protein, 10 aa, synthetic construct
TWIRGDLDEL

SEQ ID NO: 114606 - protein, 10 aa, synthetic construct
TWMRGDLDEL

SEQ ID NO: 114607 - protein, 10 aa, synthetic construct
TWWRGDLDEL

SEQ ID NO: 114608 - protein, 10 aa, synthetic construct
TWFRGDLDEL

SEQ ID NO: 114609 - protein, 10 aa, synthetic construct
TWKRGDLDEL

SEQ ID NO: 114610 - protein, 10 aa, synthetic construct
TWRRGDLDEL

SEQ ID NO: 114611 - protein, 10 aa, synthetic construct
TWHRGDLDEL

SEQ ID NO: 114612 - protein, 10 aa, synthetic construct
TWSRGDLDEL

SEQ ID NO: 114613 - protein, 10 aa, synthetic construct
TWTRGDLDEL

SEQ ID NO: 114614 - protein, 10 aa, synthetic construct
TWYRGDLDEL

SEQ ID NO: 114615 - protein, 10 aa, synthetic construct
TWNRGDLDEL

SEQ ID NO: 114616 - protein, 10 aa, synthetic construct
TWQRGDLDEL

SEQ ID NO: 114617 - protein, 10 aa, synthetic construct
TWDRGDLDEL

SEQ ID NO: 114618 - protein, 10 aa, synthetic construct
TWERGDLDEL

SEQ ID NO: 114619 - protein, 10 aa, synthetic construct
TFGRGDLDEL

SEQ ID NO: 114620 - protein, 10 aa, synthetic construct
TFARGDLDEL

SEQ ID NO: 114621 - protein, 10 aa, synthetic construct
TFVRGDLDEL

SEQ ID NO: 114622 - protein, 10 aa, synthetic construct
TFPRGDLDEL

SEQ ID NO: 114623 - protein, 10 aa, synthetic construct
TFLRGDLDEL

SEQ ID NO: 114624 - protein, 10 aa, synthetic construct
TFIRGDLDEL

SEQ ID NO: 114625 - protein, 10 aa, synthetic construct
TFMRGDLDEL

SEQ ID NO: 114626 - protein, 10 aa, synthetic construct
TFWRGDLDEL

SEQ ID NO: 114627 - protein, 10 aa, synthetic construct
TFFRGDLDEL

SEQ ID NO: 114628 - protein, 10 aa, synthetic construct
TFKRGDLDEL

SEQ ID NO: 114629 - protein, 10 aa, synthetic construct
TFRRGDLDEL

SEQ ID NO: 114630 - protein, 10 aa, synthetic construct
TFHRGDLDEL

SEQ ID NO: 114631 - protein, 10 aa, synthetic construct
TFSRGDLDEL

SEQ ID NO: 114632 - protein, 10 aa, synthetic construct
TFTRGDLDEL

SEQ ID NO: 114633 - protein, 10 aa, synthetic construct
TFYRGDLDEL

SEQ ID NO: 114634 - protein, 10 aa, synthetic construct
TFNRGDLDEL

SEQ ID NO: 114635 - protein, 10 aa, synthetic construct
TFQRGDLDEL

SEQ ID NO: 114636 - protein, 10 aa, synthetic construct
TFDRGDLDEL

SEQ ID NO: 114637 - protein, 10 aa, synthetic construct
TFERGDLDEL

SEQ ID NO: 114638 - protein, 10 aa, synthetic construct
TKGRGDLDEL

SEQ ID NO: 114639 - protein, 10 aa, synthetic construct
TKARGDLDEL

SEQ ID NO: 114640 - protein, 10 aa, synthetic construct
TKVRGDLDEL

SEQ ID NO: 114641 - protein, 10 aa, synthetic construct
TKPRGDLDEL

SEQ ID NO: 114642 - protein, 10 aa, synthetic construct
TKLRGDLDEL

SEQ ID NO: 114643 - protein, 10 aa, synthetic construct
TKIRGDLDEL

SEQ ID NO: 114644 - protein, 10 aa, synthetic construct
TKMRGDLDEL

SEQ ID NO: 114645 - protein, 10 aa, synthetic construct
TKWRGDLDEL

SEQ ID NO: 114646 - protein, 10 aa, synthetic construct
TKFRGDLDEL

SEQ ID NO: 114647 - protein, 10 aa, synthetic construct
TKKRGDLDEL

SEQ ID NO: 114648 - protein, 10 aa, synthetic construct
TKRRGDLDEL

SEQ ID NO: 114649 - protein, 10 aa, synthetic construct
TKHRGDLDEL

SEQ ID NO: 114650 - protein, 10 aa, synthetic construct
TKSRGDLDEL

SEQ ID NO: 114651 - protein, 10 aa, synthetic construct
TKTRGDLDEL

SEQ ID NO: 114652 - protein, 10 aa, synthetic construct
TKYRGDLDEL

SEQ ID NO: 114653 - protein, 10 aa, synthetic construct
TKNRGDLDEL

SEQ ID NO: 114654 - protein, 10 aa, synthetic construct
TKQRGDLDEL

SEQ ID NO: 114655 - protein, 10 aa, synthetic construct
TKDRGDLDEL

SEQ ID NO: 114656 - protein, 10 aa, synthetic construct
TKERGDLDEL

SEQ ID NO: 114657 - protein, 10 aa, synthetic construct
TRGRGDLDEL

SEQ ID NO: 114658 - protein, 10 aa, synthetic construct
TRARGDLDEL

SEQ ID NO: 114659 - protein, 10 aa, synthetic construct
TRVRGDLDEL

SEQ ID NO: 114660 - protein, 10 aa, synthetic construct
TRPRGDLDEL

SEQ ID NO: 114661 - protein, 10 aa, synthetic construct
TRLRGDLDEL

SEQ ID NO: 114662 - protein, 10 aa, synthetic construct
TRIRGDLDEL

SEQ ID NO: 114663 - protein, 10 aa, synthetic construct
TRMRGDLDEL

SEQ ID NO: 114664 - protein, 10 aa, synthetic construct
TRWRGDLDEL

SEQ ID NO: 114665 - protein, 10 aa, synthetic construct
TRFRGDLDEL

SEQ ID NO: 114666 - protein, 10 aa, synthetic construct
TRKRGDLDEL

SEQ ID NO: 114667 - protein, 10 aa, synthetic construct
TRRRGDLDEL

SEQ ID NO: 114668 - protein, 10 aa, synthetic construct
TRHRGDLDEL

SEQ ID NO: 114669 - protein, 10 aa, synthetic construct
TRSRGDLDEL

SEQ ID NO: 114670 - protein, 10 aa, synthetic construct
TRTRGDLDEL

SEQ ID NO: 114671 - protein, 10 aa, synthetic construct
TRYRGDLDEL

SEQ ID NO: 114672 - protein, 10 aa, synthetic construct
TRNRGDLDEL

SEQ ID NO: 114673 - protein, 10 aa, synthetic construct
TRQRGDLDEL

SEQ ID NO: 114674 - protein, 10 aa, synthetic construct
TRDRGDLDEL

SEQ ID NO: 114675 - protein, 10 aa, synthetic construct
TRERGDLDEL

SEQ ID NO: 114676 - protein, 10 aa, synthetic construct
THGRGDLDEL

SEQ ID NO: 114677 - protein, 10 aa, synthetic construct
THARGDLDEL

SEQ ID NO: 114678 - protein, 10 aa, synthetic construct
THVRGDLDEL

SEQ ID NO: 114679 - protein, 10 aa, synthetic construct
THPRGDLDEL

SEQ ID NO: 114680 - protein, 10 aa, synthetic construct
THLRGDLDEL

SEQ ID NO: 114681 - protein, 10 aa, synthetic construct
THIRGDLDEL

SEQ ID NO: 114682 - protein, 10 aa, synthetic construct
THMRGDLDEL

SEQ ID NO: 114683 - protein, 10 aa, synthetic construct
THWRGDLDEL

SEQ ID NO: 114684 - protein, 10 aa, synthetic construct
THFRGDLDEL

SEQ ID NO: 114685 - protein, 10 aa, synthetic construct
THKRGDLDEL

SEQ ID NO: 114686 - protein, 10 aa, synthetic construct
THRRGDLDEL

SEQ ID NO: 114687 - protein, 10 aa, synthetic construct
THHRGDLDEL

SEQ ID NO: 114688 - protein, 10 aa, synthetic construct
THSRGDLDEL

SEQ ID NO: 114689 - protein, 10 aa, synthetic construct
THTRGDLDEL

SEQ ID NO: 114690 - protein, 10 aa, synthetic construct
THYRGDLDEL

SEQ ID NO: 114691 - protein, 10 aa, synthetic construct
THNRGDLDEL

SEQ ID NO: 114692 - protein, 10 aa, synthetic construct
THQRGDLDEL

SEQ ID NO: 114693 - protein, 10 aa, synthetic construct
THDRGDLDEL

SEQ ID NO: 114694 - protein, 10 aa, synthetic construct
THERGDLDEL

SEQ ID NO: 114695 - protein, 10 aa, synthetic construct
TSGRGDLDEL

SEQ ID NO: 114696 - protein, 10 aa, synthetic construct
TSARGDLDEL

SEQ ID NO: 114697 - protein, 10 aa, synthetic construct
TSVRGDLDEL

SEQ ID NO: 114698 - protein, 10 aa, synthetic construct
TSPRGDLDEL

SEQ ID NO: 114699 - protein, 10 aa, synthetic construct
TSLRGDLDEL

SEQ ID NO: 114700 - protein, 10 aa, synthetic construct
TSIRGDLDEL

SEQ ID NO: 114701 - protein, 10 aa, synthetic construct
TSMRGDLDEL

SEQ ID NO: 114702 - protein, 10 aa, synthetic construct
TSWRGDLDEL

SEQ ID NO: 114703 - protein, 10 aa, synthetic construct
TSFRGDLDEL

SEQ ID NO: 114704 - protein, 10 aa, synthetic construct
TSKRGDLDEL

SEQ ID NO: 114705 - protein, 10 aa, synthetic construct
TSRRGDLDEL

SEQ ID NO: 114706 - protein, 10 aa, synthetic construct
TSHRGDLDEL

SEQ ID NO: 114707 - protein, 10 aa, synthetic construct
TSSRGDLDEL

SEQ ID NO: 114708 - protein, 10 aa, synthetic construct
TSTRGDLDEL

SEQ ID NO: 114709 - protein, 10 aa, synthetic construct
TSYRGDLDEL

SEQ ID NO: 114710 - protein, 10 aa, synthetic construct
TSNRGDLDEL

SEQ ID NO: 114711 - protein, 10 aa, synthetic construct
TSQRGDLDEL

SEQ ID NO: 114712 - protein, 10 aa, synthetic construct
TSDRGDLDEL

SEQ ID NO: 114713 - protein, 10 aa, synthetic construct
TSERGDLDEL

SEQ ID NO: 114714 - protein, 10 aa, synthetic construct
TTGRGDLDEL

SEQ ID NO: 114715 - protein, 10 aa, synthetic construct
TTARGDLDEL

SEQ ID NO: 114716 - protein, 10 aa, synthetic construct
TTVRGDLDEL

SEQ ID NO: 114717 - protein, 10 aa, synthetic construct
TTPRGDLDEL

SEQ ID NO: 114718 - protein, 10 aa, synthetic construct
TTLRGDLDEL

SEQ ID NO: 114719 - protein, 10 aa, synthetic construct
TTIRGDLDEL

SEQ ID NO: 114720 - protein, 10 aa, synthetic construct
TTMRGDLDEL

SEQ ID NO: 114721 - protein, 10 aa, synthetic construct
TTWRGDLDEL

SEQ ID NO: 114722 - protein, 10 aa, synthetic construct
TTFRGDLDEL

SEQ ID NO: 114723 - protein, 10 aa, synthetic construct
TTKRGDLDEL

SEQ ID NO: 114724 - protein, 10 aa, synthetic construct
TTRRGDLDEL

SEQ ID NO: 114725 - protein, 10 aa, synthetic construct
TTHRGDLDEL

SEQ ID NO: 114726 - protein, 10 aa, synthetic construct
TTSRGDLDEL

SEQ ID NO: 114727 - protein, 10 aa, synthetic construct
TTTRGDLDEL

SEQ ID NO: 114728 - protein, 10 aa, synthetic construct
TTYRGDLDEL

SEQ ID NO: 114729 - protein, 10 aa, synthetic construct
TTNRGDLDEL

SEQ ID NO: 114730 - protein, 10 aa, synthetic construct
TTQRGDLDEL

SEQ ID NO: 114731 - protein, 10 aa, synthetic construct
TTDRGDLDEL

SEQ ID NO: 114732 - protein, 10 aa, synthetic construct
TTERGDLDEL

SEQ ID NO: 114733 - protein, 10 aa, synthetic construct
TYGRGDLDEL

SEQ ID NO: 114734 - protein, 10 aa, synthetic construct
TYARGDLDEL

SEQ ID NO: 114735 - protein, 10 aa, synthetic construct
TYVRGDLDEL

SEQ ID NO: 114736 - protein, 10 aa, synthetic construct
TYPRGDLDEL

SEQ ID NO: 114737 - protein, 10 aa, synthetic construct
TYLRGDLDEL

SEQ ID NO: 114738 - protein, 10 aa, synthetic construct
TYIRGDLDEL

SEQ ID NO: 114739 - protein, 10 aa, synthetic construct
TYMRGDLDEL

SEQ ID NO: 114740 - protein, 10 aa, synthetic construct
TYWRGDLDEL

SEQ ID NO: 114741 - protein, 10 aa, synthetic construct
TYFRGDLDEL

SEQ ID NO: 114742 - protein, 10 aa, synthetic construct
TYKRGDLDEL

SEQ ID NO: 114743 - protein, 10 aa, synthetic construct
TYRRGDLDEL

SEQ ID NO: 114744 - protein, 10 aa, synthetic construct
TYHRGDLDEL

SEQ ID NO: 114745 - protein, 10 aa, synthetic construct
TYSRGDLDEL

SEQ ID NO: 114746 - protein, 10 aa, synthetic construct
TYTRGDLDEL

SEQ ID NO: 114747 - protein, 10 aa, synthetic construct
TYYRGDLDEL

SEQ ID NO: 114748 - protein, 10 aa, synthetic construct
TYNRGDLDEL

SEQ ID NO: 114749 - protein, 10 aa, synthetic construct
TYQRGDLDEL

SEQ ID NO: 114750 - protein, 10 aa, synthetic construct
TYDRGDLDEL

SEQ ID NO: 114751 - protein, 10 aa, synthetic construct
TYERGDLDEL

SEQ ID NO: 114752 - protein, 10 aa, synthetic construct
TNGRGDLDEL

SEQ ID NO: 114753 - protein, 10 aa, synthetic construct
TNARGDLDEL

SEQ ID NO: 114754 - protein, 10 aa, synthetic construct
TNVRGDLDEL

SEQ ID NO: 114755 - protein, 10 aa, synthetic construct
TNPRGDLDEL

SEQ ID NO: 114756 - protein, 10 aa, synthetic construct
TNLRGDLDEL

SEQ ID NO: 114757 - protein, 10 aa, synthetic construct
TNIRGDLDEL

SEQ ID NO: 114758 - protein, 10 aa, synthetic construct
TNMRGDLDEL

SEQ ID NO: 114759 - protein, 10 aa, synthetic construct
TNWRGDLDEL

SEQ ID NO: 114760 - protein, 10 aa, synthetic construct
TNFRGDLDEL

SEQ ID NO: 114761 - protein, 10 aa, synthetic construct
TNKRGDLDEL

SEQ ID NO: 114762 - protein, 10 aa, synthetic construct
TNRRGDLDEL

SEQ ID NO: 114763 - protein, 10 aa, synthetic construct
TNHRGDLDEL

SEQ ID NO: 114764 - protein, 10 aa, synthetic construct
TNSRGDLDEL

SEQ ID NO: 114765 - protein, 10 aa, synthetic construct
TNTRGDLDEL

SEQ ID NO: 114766 - protein, 10 aa, synthetic construct
TNYRGDLDEL

SEQ ID NO: 114767 - protein, 10 aa, synthetic construct
TNNRGDLDEL

SEQ ID NO: 114768 - protein, 10 aa, synthetic construct
TNQRGDLDEL

SEQ ID NO: 114769 - protein, 10 aa, synthetic construct
TNDRGDLDEL

SEQ ID NO: 114770 - protein, 10 aa, synthetic construct
TNERGDLDEL

SEQ ID NO: 114771 - protein, 10 aa, synthetic construct
TQGRGDLDEL

SEQ ID NO: 114772 - protein, 10 aa, synthetic construct
TQARGDLDEL

SEQ ID NO: 114773 - protein, 10 aa, synthetic construct
TQVRGDLDEL

SEQ ID NO: 114774 - protein, 10 aa, synthetic construct
TQPRGDLDEL

SEQ ID NO: 114775 - protein, 10 aa, synthetic construct
TQLRGDLDEL

SEQ ID NO: 114776 - protein, 10 aa, synthetic construct
TQIRGDLDEL

SEQ ID NO: 114777 - protein, 10 aa, synthetic construct
TQMRGDLDEL

SEQ ID NO: 114778 - protein, 10 aa, synthetic construct
TQWRGDLDEL

SEQ ID NO: 114779 - protein, 10 aa, synthetic construct
TQFRGDLDEL

SEQ ID NO: 114780 - protein, 10 aa, synthetic construct
TQKRGDLDEL

SEQ ID NO: 114781 - protein, 10 aa, synthetic construct
TQRRGDLDEL

SEQ ID NO: 114782 - protein, 10 aa, synthetic construct
TQHRGDLDEL

SEQ ID NO: 114783 - protein, 10 aa, synthetic construct
TQSRGDLDEL

SEQ ID NO: 114784 - protein, 10 aa, synthetic construct
TQTRGDLDEL

SEQ ID NO: 114785 - protein, 10 aa, synthetic construct
TQYRGDLDEL

SEQ ID NO: 114786 - protein, 10 aa, synthetic construct
TQNRGDLDEL

SEQ ID NO: 114787 - protein, 10 aa, synthetic construct
TQQRGDLDEL

SEQ ID NO: 114788 - protein, 10 aa, synthetic construct
TQDRGDLDEL

SEQ ID NO: 114789 - protein, 10 aa, synthetic construct
TQERGDLDEL

SEQ ID NO: 114790 - protein, 10 aa, synthetic construct
TDGRGDLDEL

SEQ ID NO: 114791 - protein, 10 aa, synthetic construct
TDARGDLDEL

SEQ ID NO: 114792 - protein, 10 aa, synthetic construct
TDVRGDLDEL

SEQ ID NO: 114793 - protein, 10 aa, synthetic construct
TDPRGDLDEL

SEQ ID NO: 114794 - protein, 10 aa, synthetic construct
TDLRGDLDEL

SEQ ID NO: 114795 - protein, 10 aa, synthetic construct
TDIRGDLDEL

SEQ ID NO: 114796 - protein, 10 aa, synthetic construct
TDMRGDLDEL

SEQ ID NO: 114797 - protein, 10 aa, synthetic construct
TDWRGDLDEL

SEQ ID NO: 114798 - protein, 10 aa, synthetic construct
TDFRGDLDEL

SEQ ID NO: 114799 - protein, 10 aa, synthetic construct
TDKRGDLDEL

SEQ ID NO: 114800 - protein, 10 aa, synthetic construct
TDRRGDLDEL

SEQ ID NO: 114801 - protein, 10 aa, synthetic construct
TDHRGDLDEL

SEQ ID NO: 114802 - protein, 10 aa, synthetic construct
TDSRGDLDEL

SEQ ID NO: 114803 - protein, 10 aa, synthetic construct
TDTRGDLDEL

SEQ ID NO: 114804 - protein, 10 aa, synthetic construct
TDYRGDLDEL

SEQ ID NO: 114805 - protein, 10 aa, synthetic construct
TDNRGDLDEL

SEQ ID NO: 114806 - protein, 10 aa, synthetic construct
TDQRGDLDEL

SEQ ID NO: 114807 - protein, 10 aa, synthetic construct
TDDRGDLDEL

SEQ ID NO: 114808 - protein, 10 aa, synthetic construct
TDERGDLDEL

SEQ ID NO: 114809 - protein, 10 aa, synthetic construct
TEGRGDLDEL

SEQ ID NO: 114810 - protein, 10 aa, synthetic construct
TEARGDLDEL

SEQ ID NO: 114811 - protein, 10 aa, synthetic construct
TEVRGDLDEL

SEQ ID NO: 114812 - protein, 10 aa, synthetic construct
TEPRGDLDEL

SEQ ID NO: 114813 - protein, 10 aa, synthetic construct
TELRGDLDEL

SEQ ID NO: 114814 - protein, 10 aa, synthetic construct
TEIRGDLDEL

SEQ ID NO: 114815 - protein, 10 aa, synthetic construct
TEMRGDLDEL

SEQ ID NO: 114816 - protein, 10 aa, synthetic construct
TEWRGDLDEL

SEQ ID NO: 114817 - protein, 10 aa, synthetic construct
TEFRGDLDEL

SEQ ID NO: 114818 - protein, 10 aa, synthetic construct
TEKRGDLDEL

SEQ ID NO: 114819 - protein, 10 aa, synthetic construct
TERRGDLDEL

SEQ ID NO: 114820 - protein, 10 aa, synthetic construct
TEHRGDLDEL

SEQ ID NO: 114821 - protein, 10 aa, synthetic construct
TESRGDLDEL

SEQ ID NO: 114822 - protein, 10 aa, synthetic construct
TETRGDLDEL

SEQ ID NO: 114823 - protein, 10 aa, synthetic construct
TEYRGDLDEL

SEQ ID NO: 114824 - protein, 10 aa, synthetic construct
TENRGDLDEL

SEQ ID NO: 114825 - protein, 10 aa, synthetic construct
TEQRGDLDEL

SEQ ID NO: 114826 - protein, 10 aa, synthetic construct
TEDRGDLDEL

SEQ ID NO: 114827 - protein, 10 aa, synthetic construct
TEERGDLDEL

SEQ ID NO: 114828 - protein, 10 aa, synthetic construct
AGGRGDLDEL

SEQ ID NO: 114829 - protein, 10 aa, synthetic construct
AGARGDLDEL

SEQ ID NO: 114830 - protein, 10 aa, synthetic construct
AGVRGDLDEL

SEQ ID NO: 114831 - protein, 10 aa, synthetic construct
AGPRGDLDEL

SEQ ID NO: 114832 - protein, 10 aa, synthetic construct
AGLRGDLDEL

SEQ ID NO: 114833 - protein, 10 aa, synthetic construct
AGIRGDLDEL

SEQ ID NO: 114834 - protein, 10 aa, synthetic construct
AGMRGDLDEL

SEQ ID NO: 114835 - protein, 10 aa, synthetic construct
AGWRGDLDEL

SEQ ID NO: 114836 - protein, 10 aa, synthetic construct
AGFRGDLDEL

SEQ ID NO: 114837 - protein, 10 aa, synthetic construct
AGKRGDLDEL

SEQ ID NO: 114838 - protein, 10 aa, synthetic construct
AGRRGDLDEL

SEQ ID NO: 114839 - protein, 10 aa, synthetic construct
AGHRGDLDEL

SEQ ID NO: 114840 - protein, 10 aa, synthetic construct
AGSRGDLDEL

SEQ ID NO: 114841 - protein, 10 aa, synthetic construct
AGTRGDLDEL

SEQ ID NO: 114842 - protein, 10 aa, synthetic construct
AGYRGDLDEL

SEQ ID NO: 114843 - protein, 10 aa, synthetic construct
AGNRGDLDEL

SEQ ID NO: 114844 - protein, 10 aa, synthetic construct
AGQRGDLDEL

SEQ ID NO: 114845 - protein, 10 aa, synthetic construct
AGDRGDLDEL

SEQ ID NO: 114846 - protein, 10 aa, synthetic construct
AGERGDLDEL

SEQ ID NO: 114847 - protein, 10 aa, synthetic construct
AAGRGDLDEL

SEQ ID NO: 114848 - protein, 10 aa, synthetic construct
AAARGDLDEL

SEQ ID NO: 114849 - protein, 10 aa, synthetic construct
AAVRGDLDEL

SEQ ID NO: 114850 - protein, 10 aa, synthetic construct
AAPRGDLDEL

SEQ ID NO: 114851 - protein, 10 aa, synthetic construct
AALRGDLDEL

SEQ ID NO: 114852 - protein, 10 aa, synthetic construct
AAIRGDLDEL

SEQ ID NO: 114853 - protein, 10 aa, synthetic construct
AAMRGDLDEL

SEQ ID NO: 114854 - protein, 10 aa, synthetic construct
AAWRGDLDEL

SEQ ID NO: 114855 - protein, 10 aa, synthetic construct
AAFRGDLDEL

SEQ ID NO: 114856 - protein, 10 aa, synthetic construct
AAKRGDLDEL

SEQ ID NO: 114857 - protein, 10 aa, synthetic construct
AARRGDLDEL

SEQ ID NO: 114858 - protein, 10 aa, synthetic construct
AAHRGDLDEL

SEQ ID NO: 114859 - protein, 10 aa, synthetic construct
AASRGDLDEL

SEQ ID NO: 114860 - protein, 10 aa, synthetic construct
AATRGDLDEL

SEQ ID NO: 114861 - protein, 10 aa, synthetic construct
AAYRGDLDEL

SEQ ID NO: 114862 - protein, 10 aa, synthetic construct
AANRGDLDEL

SEQ ID NO: 114863 - protein, 10 aa, synthetic construct
AAQRGDLDEL

SEQ ID NO: 114864 - protein, 10 aa, synthetic construct
AADRGDLDEL

SEQ ID NO: 114865 - protein, 10 aa, synthetic construct
AAERGDLDEL

SEQ ID NO: 114866 - protein, 10 aa, synthetic construct
AVGRGDLDEL

SEQ ID NO: 114867 - protein, 10 aa, synthetic construct
AVARGDLDEL

SEQ ID NO: 114868 - protein, 10 aa, synthetic construct
AVVRGDLDEL

SEQ ID NO: 114869 - protein, 10 aa, synthetic construct
AVPRGDLDEL

SEQ ID NO: 114870 - protein, 10 aa, synthetic construct
AVLRGDLDEL

SEQ ID NO: 114871 - protein, 10 aa, synthetic construct
AVIRGDLDEL

SEQ ID NO: 114872 - protein, 10 aa, synthetic construct
AVMRGDLDEL

SEQ ID NO: 114873 - protein, 10 aa, synthetic construct
AVWRGDLDEL

SEQ ID NO: 114874 - protein, 10 aa, synthetic construct
AVFRGDLDEL

SEQ ID NO: 114875 - protein, 10 aa, synthetic construct
AVKRGDLDEL

SEQ ID NO: 114876 - protein, 10 aa, synthetic construct
AVRRGDLDEL

SEQ ID NO: 114877 - protein, 10 aa, synthetic construct
AVHRGDLDEL

SEQ ID NO: 114878 - protein, 10 aa, synthetic construct
AVSRGDLDEL

SEQ ID NO: 114879 - protein, 10 aa, synthetic construct
AVTRGDLDEL

SEQ ID NO: 114880 - protein, 10 aa, synthetic construct
AVYRGDLDEL

SEQ ID NO: 114881 - protein, 10 aa, synthetic construct
AVNRGDLDEL

SEQ ID NO: 114882 - protein, 10 aa, synthetic construct
AVQRGDLDEL

SEQ ID NO: 114883 - protein, 10 aa, synthetic construct
AVDRGDLDEL

SEQ ID NO: 114884 - protein, 10 aa, synthetic construct
AVERGDLDEL

SEQ ID NO: 114885 - protein, 10 aa, synthetic construct
APGRGDLDEL

SEQ ID NO: 114886 - protein, 10 aa, synthetic construct
APARGDLDEL

SEQ ID NO: 114887 - protein, 10 aa, synthetic construct
APVRGDLDEL

SEQ ID NO: 114888 - protein, 10 aa, synthetic construct
APPRGDLDEL

SEQ ID NO: 114889 - protein, 10 aa, synthetic construct
APLRGDLDEL

SEQ ID NO: 114890 - protein, 10 aa, synthetic construct
APIRGDLDEL

SEQ ID NO: 114891 - protein, 10 aa, synthetic construct
APMRGDLDEL

SEQ ID NO: 114892 - protein, 10 aa, synthetic construct
APWRGDLDEL

SEQ ID NO: 114893 - protein, 10 aa, synthetic construct
APFRGDLDEL

SEQ ID NO: 114894 - protein, 10 aa, synthetic construct
APKRGDLDEL

SEQ ID NO: 114895 - protein, 10 aa, synthetic construct
APRRGDLDEL

SEQ ID NO: 114896 - protein, 10 aa, synthetic construct
APHRGDLDEL

SEQ ID NO: 114897 - protein, 10 aa, synthetic construct
APSRGDLDEL

SEQ ID NO: 114898 - protein, 10 aa, synthetic construct
APTRGDLDEL

SEQ ID NO: 114899 - protein, 10 aa, synthetic construct
APYRGDLDEL

SEQ ID NO: 114900 - protein, 10 aa, synthetic construct
APNRGDLDEL

SEQ ID NO: 114901 - protein, 10 aa, synthetic construct
APQRGDLDEL

SEQ ID NO: 114902 - protein, 10 aa, synthetic construct
APDRGDLDEL

SEQ ID NO: 114903 - protein, 10 aa, synthetic construct
APERGDLDEL

SEQ ID NO: 114904 - protein, 10 aa, synthetic construct
ALGRGDLDEL

SEQ ID NO: 114905 - protein, 10 aa, synthetic construct
ALARGDLDEL

SEQ ID NO: 114906 - protein, 10 aa, synthetic construct
ALVRGDLDEL

SEQ ID NO: 114907 - protein, 10 aa, synthetic construct
ALPRGDLDEL

SEQ ID NO: 114908 - protein, 10 aa, synthetic construct
ALLRGDLDEL

SEQ ID NO: 114909 - protein, 10 aa, synthetic construct
ALIRGDLDEL

SEQ ID NO: 114910 - protein, 10 aa, synthetic construct
ALMRGDLDEL

SEQ ID NO: 114911 - protein, 10 aa, synthetic construct
ALWRGDLDEL

SEQ ID NO: 114912 - protein, 10 aa, synthetic construct
ALFRGDLDEL

SEQ ID NO: 114913 - protein, 10 aa, synthetic construct
ALKRGDLDEL

SEQ ID NO: 114914 - protein, 10 aa, synthetic construct
ALRRGDLDEL

SEQ ID NO: 114915 - protein, 10 aa, synthetic construct
ALHRGDLDEL

SEQ ID NO: 114916 - protein, 10 aa, synthetic construct
ALSRGDLDEL

SEQ ID NO: 114917 - protein, 10 aa, synthetic construct
ALTRGDLDEL

SEQ ID NO: 114918 - protein, 10 aa, synthetic construct
ALYRGDLDEL

SEQ ID NO: 114919 - protein, 10 aa, synthetic construct
ALNRGDLDEL

SEQ ID NO: 114920 - protein, 10 aa, synthetic construct
ALQRGDLDEL

SEQ ID NO: 114921 - protein, 10 aa, synthetic construct
ALDRGDLDEL

SEQ ID NO: 114922 - protein, 10 aa, synthetic construct
ALERGDLDEL

SEQ ID NO: 114923 - protein, 10 aa, synthetic construct
AIGRGDLDEL

SEQ ID NO: 114924 - protein, 10 aa, synthetic construct
AIARGDLDEL

SEQ ID NO: 114925 - protein, 10 aa, synthetic construct
AIVRGDLDEL

SEQ ID NO: 114926 - protein, 10 aa, synthetic construct
AIPRGDLDEL

SEQ ID NO: 114927 - protein, 10 aa, synthetic construct
AILRGDLDEL

SEQ ID NO: 114928 - protein, 10 aa, synthetic construct
AIIRGDLDEL

SEQ ID NO: 114929 - protein, 10 aa, synthetic construct
AIMRGDLDEL

SEQ ID NO: 114930 - protein, 10 aa, synthetic construct
AIWRGDLDEL

SEQ ID NO: 114931 - protein, 10 aa, synthetic construct
AIFRGDLDEL

SEQ ID NO: 114932 - protein, 10 aa, synthetic construct
AIKRGDLDEL

SEQ ID NO: 114933 - protein, 10 aa, synthetic construct
AIRRGDLDEL

SEQ ID NO: 114934 - protein, 10 aa, synthetic construct
AIHRGDLDEL

SEQ ID NO: 114935 - protein, 10 aa, synthetic construct
AISRGDLDEL

SEQ ID NO: 114936 - protein, 10 aa, synthetic construct
AITRGDLDEL

SEQ ID NO: 114937 - protein, 10 aa, synthetic construct
AIYRGDLDEL

SEQ ID NO: 114938 - protein, 10 aa, synthetic construct
AINRGDLDEL

SEQ ID NO: 114939 - protein, 10 aa, synthetic construct
AIQRGDLDEL

SEQ ID NO: 114940 - protein, 10 aa, synthetic construct
AIDRGDLDEL

SEQ ID NO: 114941 - protein, 10 aa, synthetic construct
AIERGDLDEL

SEQ ID NO: 114942 - protein, 10 aa, synthetic construct
AMGRGDLDEL

SEQ ID NO: 114943 - protein, 10 aa, synthetic construct
AMARGDLDEL

SEQ ID NO: 114944 - protein, 10 aa, synthetic construct
AMVRGDLDEL

SEQ ID NO: 114945 - protein, 10 aa, synthetic construct
AMPRGDLDEL

SEQ ID NO: 114946 - protein, 10 aa, synthetic construct
AMLRGDLDEL

SEQ ID NO: 114947 - protein, 10 aa, synthetic construct
AMIRGDLDEL

SEQ ID NO: 114948 - protein, 10 aa, synthetic construct
AMMRGDLDEL

SEQ ID NO: 114949 - protein, 10 aa, synthetic construct
AMWRGDLDEL

SEQ ID NO: 114950 - protein, 10 aa, synthetic construct
AMFRGDLDEL

SEQ ID NO: 114951 - protein, 10 aa, synthetic construct
AMKRGDLDEL

SEQ ID NO: 114952 - protein, 10 aa, synthetic construct
AMRRGDLDEL

SEQ ID NO: 114953 - protein, 10 aa, synthetic construct
AMHRGDLDEL

SEQ ID NO: 114954 - protein, 10 aa, synthetic construct
AMSRGDLDEL

SEQ ID NO: 114955 - protein, 10 aa, synthetic construct
AMTRGDLDEL

SEQ ID NO: 114956 - protein, 10 aa, synthetic construct
AMYRGDLDEL

SEQ ID NO: 114957 - protein, 10 aa, synthetic construct
AMNRGDLDEL

SEQ ID NO: 114958 - protein, 10 aa, synthetic construct
AMQRGDLDEL

SEQ ID NO: 114959 - protein, 10 aa, synthetic construct
AMDRGDLDEL

SEQ ID NO: 114960 - protein, 10 aa, synthetic construct
AMERGDLDEL

SEQ ID NO: 114961 - protein, 10 aa, synthetic construct
AWGRGDLDEL

SEQ ID NO: 114962 - protein, 10 aa, synthetic construct
AWARGDLDEL

SEQ ID NO: 114963 - protein, 10 aa, synthetic construct
AWVRGDLDEL

SEQ ID NO: 114964 - protein, 10 aa, synthetic construct
AWPRGDLDEL

SEQ ID NO: 114965 - protein, 10 aa, synthetic construct
AWLRGDLDEL

SEQ ID NO: 114966 - protein, 10 aa, synthetic construct
AWIRGDLDEL

SEQ ID NO: 114967 - protein, 10 aa, synthetic construct
AWMRGDLDEL

SEQ ID NO: 114968 - protein, 10 aa, synthetic construct
AWWRGDLDEL

SEQ ID NO: 114969 - protein, 10 aa, synthetic construct
AWFRGDLDEL

SEQ ID NO: 114970 - protein, 10 aa, synthetic construct
AWKRGDLDEL

SEQ ID NO: 114971 - protein, 10 aa, synthetic construct
AWRRGDLDEL

SEQ ID NO: 114972 - protein, 10 aa, synthetic construct
AWHRGDLDEL

SEQ ID NO: 114973 - protein, 10 aa, synthetic construct
AWSRGDLDEL

SEQ ID NO: 114974 - protein, 10 aa, synthetic construct
AWTRGDLDEL

SEQ ID NO: 114975 - protein, 10 aa, synthetic construct
AWYRGDLDEL

SEQ ID NO: 114976 - protein, 10 aa, synthetic construct
AWNRGDLDEL

SEQ ID NO: 114977 - protein, 10 aa, synthetic construct
AWQRGDLDEL

SEQ ID NO: 114978 - protein, 10 aa, synthetic construct
AWDRGDLDEL

SEQ ID NO: 114979 - protein, 10 aa, synthetic construct
AWERGDLDEL

SEQ ID NO: 114980 - protein, 10 aa, synthetic construct
AFGRGDLDEL

SEQ ID NO: 114981 - protein, 10 aa, synthetic construct
AFARGDLDEL

SEQ ID NO: 114982 - protein, 10 aa, synthetic construct
AFVRGDLDEL

SEQ ID NO: 114983 - protein, 10 aa, synthetic construct
AFPRGDLDEL

SEQ ID NO: 114984 - protein, 10 aa, synthetic construct
AFLRGDLDEL

SEQ ID NO: 114985 - protein, 10 aa, synthetic construct
AFIRGDLDEL

SEQ ID NO: 114986 - protein, 10 aa, synthetic construct
AFMRGDLDEL

SEQ ID NO: 114987 - protein, 10 aa, synthetic construct
AFWRGDLDEL

SEQ ID NO: 114988 - protein, 10 aa, synthetic construct
AFFRGDLDEL

SEQ ID NO: 114989 - protein, 10 aa, synthetic construct
AFKRGDLDEL

SEQ ID NO: 114990 - protein, 10 aa, synthetic construct
AFRRGDLDEL

SEQ ID NO: 114991 - protein, 10 aa, synthetic construct
AFHRGDLDEL

SEQ ID NO: 114992 - protein, 10 aa, synthetic construct
AFSRGDLDEL

SEQ ID NO: 114993 - protein, 10 aa, synthetic construct
AFTRGDLDEL

SEQ ID NO: 114994 - protein, 10 aa, synthetic construct
AFYRGDLDEL

SEQ ID NO: 114995 - protein, 10 aa, synthetic construct
AFNRGDLDEL

SEQ ID NO: 114996 - protein, 10 aa, synthetic construct
AFQRGDLDEL

SEQ ID NO: 114997 - protein, 10 aa, synthetic construct
AFDRGDLDEL

SEQ ID NO: 114998 - protein, 10 aa, synthetic construct
AFERGDLDEL

SEQ ID NO: 114999 - protein, 10 aa, synthetic construct
AKGRGDLDEL

SEQ ID NO: 115000 - protein, 10 aa, synthetic construct
AKARGDLDEL

SEQ ID NO: 115001 - protein, 10 aa, synthetic construct
AKVRGDLDEL

SEQ ID NO: 115002 - protein, 10 aa, synthetic construct
AKPRGDLDEL

SEQ ID NO: 115003 - protein, 10 aa, synthetic construct
AKLRGDLDEL

SEQ ID NO: 115004 - protein, 10 aa, synthetic construct
AKIRGDLDEL

SEQ ID NO: 115005 - protein, 10 aa, synthetic construct
AKMRGDLDEL

SEQ ID NO: 115006 - protein, 10 aa, synthetic construct
AKWRGDLDEL

SEQ ID NO: 115007 - protein, 10 aa, synthetic construct
AKFRGDLDEL

SEQ ID NO: 115008 - protein, 10 aa, synthetic construct
AKKRGDLDEL

SEQ ID NO: 115009 - protein, 10 aa, synthetic construct
AKRRGDLDEL

SEQ ID NO: 115010 - protein, 10 aa, synthetic construct
AKHRGDLDEL

SEQ ID NO: 115011 - protein, 10 aa, synthetic construct
AKSRGDLDEL

SEQ ID NO: 115012 - protein, 10 aa, synthetic construct
AKTRGDLDEL

SEQ ID NO: 115013 - protein, 10 aa, synthetic construct
AKYRGDLDEL

SEQ ID NO: 115014 - protein, 10 aa, synthetic construct
AKNRGDLDEL

SEQ ID NO: 115015 - protein, 10 aa, synthetic construct
AKQRGDLDEL

SEQ ID NO: 115016 - protein, 10 aa, synthetic construct
AKDRGDLDEL

SEQ ID NO: 115017 - protein, 10 aa, synthetic construct
AKERGDLDEL

SEQ ID NO: 115018 - protein, 10 aa, synthetic construct
ARGRGDLDEL

SEQ ID NO: 115019 - protein, 10 aa, synthetic construct
ARARGDLDEL

SEQ ID NO: 115020 - protein, 10 aa, synthetic construct
ARVRGDLDEL

SEQ ID NO: 115021 - protein, 10 aa, synthetic construct
ARPRGDLDEL

SEQ ID NO: 115022 - protein, 10 aa, synthetic construct
ARLRGDLDEL

SEQ ID NO: 115023 - protein, 10 aa, synthetic construct
ARIRGDLDEL

SEQ ID NO: 115024 - protein, 10 aa, synthetic construct
ARMRGDLDEL

SEQ ID NO: 115025 - protein, 10 aa, synthetic construct
ARWRGDLDEL

SEQ ID NO: 115026 - protein, 10 aa, synthetic construct
ARFRGDLDEL

SEQ ID NO: 115027 - protein, 10 aa, synthetic construct
ARKRGDLDEL

SEQ ID NO: 115028 - protein, 10 aa, synthetic construct
ARRRGDLDEL

SEQ ID NO: 115029 - protein, 10 aa, synthetic construct
ARHRGDLDEL

SEQ ID NO: 115030 - protein, 10 aa, synthetic construct
ARSRGDLDEL

SEQ ID NO: 115031 - protein, 10 aa, synthetic construct
ARTRGDLDEL

SEQ ID NO: 115032 - protein, 10 aa, synthetic construct
ARYRGDLDEL

SEQ ID NO: 115033 - protein, 10 aa, synthetic construct
ARNRGDLDEL

SEQ ID NO: 115034 - protein, 10 aa, synthetic construct
ARQRGDLDEL

SEQ ID NO: 115035 - protein, 10 aa, synthetic construct
ARDRGDLDEL

SEQ ID NO: 115036 - protein, 10 aa, synthetic construct
ARERGDLDEL

SEQ ID NO: 115037 - protein, 10 aa, synthetic construct
AHGRGDLDEL

SEQ ID NO: 115038 - protein, 10 aa, synthetic construct
AHARGDLDEL

SEQ ID NO: 115039 - protein, 10 aa, synthetic construct
AHVRGDLDEL

SEQ ID NO: 115040 - protein, 10 aa, synthetic construct
AHPRGDLDEL

SEQ ID NO: 115041 - protein, 10 aa, synthetic construct
AHLRGDLDEL

SEQ ID NO: 115042 - protein, 10 aa, synthetic construct
AHIRGDLDEL

SEQ ID NO: 115043 - protein, 10 aa, synthetic construct
AHMRGDLDEL

SEQ ID NO: 115044 - protein, 10 aa, synthetic construct
AHWRGDLDEL

SEQ ID NO: 115045 - protein, 10 aa, synthetic construct
AHFRGDLDEL

SEQ ID NO: 115046 - protein, 10 aa, synthetic construct
AHKRGDLDEL

SEQ ID NO: 115047 - protein, 10 aa, synthetic construct
AHRRGDLDEL

SEQ ID NO: 115048 - protein, 10 aa, synthetic construct
AHHRGDLDEL

SEQ ID NO: 115049 - protein, 10 aa, synthetic construct
AHSRGDLDEL

SEQ ID NO: 115050 - protein, 10 aa, synthetic construct
AHTRGDLDEL

SEQ ID NO: 115051 - protein, 10 aa, synthetic construct
AHYRGDLDEL

SEQ ID NO: 115052 - protein, 10 aa, synthetic construct
AHNRGDLDEL

SEQ ID NO: 115053 - protein, 10 aa, synthetic construct
AHQRGDLDEL

SEQ ID NO: 115054 - protein, 10 aa, synthetic construct
AHDRGDLDEL

SEQ ID NO: 115055 - protein, 10 aa, synthetic construct
AHERGDLDEL

SEQ ID NO: 115056 - protein, 10 aa, synthetic construct
ASGRGDLDEL

SEQ ID NO: 115057 - protein, 10 aa, synthetic construct
ASARGDLDEL

SEQ ID NO: 115058 - protein, 10 aa, synthetic construct
ASVRGDLDEL

SEQ ID NO: 115059 - protein, 10 aa, synthetic construct
ASPRGDLDEL

SEQ ID NO: 115060 - protein, 10 aa, synthetic construct
ASLRGDLDEL

SEQ ID NO: 115061 - protein, 10 aa, synthetic construct
ASIRGDLDEL

SEQ ID NO: 115062 - protein, 10 aa, synthetic construct
ASMRGDLDEL

SEQ ID NO: 115063 - protein, 10 aa, synthetic construct
ASWRGDLDEL

SEQ ID NO: 115064 - protein, 10 aa, synthetic construct
ASFRGDLDEL

SEQ ID NO: 115065 - protein, 10 aa, synthetic construct
ASKRGDLDEL

SEQ ID NO: 115066 - protein, 10 aa, synthetic construct
ASRRGDLDEL

SEQ ID NO: 115067 - protein, 10 aa, synthetic construct
ASHRGDLDEL

SEQ ID NO: 115068 - protein, 10 aa, synthetic construct
ASSRGDLDEL

SEQ ID NO: 115069 - protein, 10 aa, synthetic construct
ASTRGDLDEL

SEQ ID NO: 115070 - protein, 10 aa, synthetic construct
ASYRGDLDEL

SEQ ID NO: 115071 - protein, 10 aa, synthetic construct
ASNRGDLDEL

SEQ ID NO: 115072 - protein, 10 aa, synthetic construct
ASQRGDLDEL

SEQ ID NO: 115073 - protein, 10 aa, synthetic construct
ASDRGDLDEL

SEQ ID NO: 115074 - protein, 10 aa, synthetic construct
ASERGDLDEL

SEQ ID NO: 115075 - protein, 10 aa, synthetic construct
ATGRGDLDEL

SEQ ID NO: 115076 - protein, 10 aa, synthetic construct
ATARGDLDEL

SEQ ID NO: 115077 - protein, 10 aa, synthetic construct
ATVRGDLDEL

SEQ ID NO: 115078 - protein, 10 aa, synthetic construct
ATPRGDLDEL

SEQ ID NO: 115079 - protein, 10 aa, synthetic construct
ATLRGDLDEL

SEQ ID NO: 115080 - protein, 10 aa, synthetic construct
ATIRGDLDEL

SEQ ID NO: 115081 - protein, 10 aa, synthetic construct
ATMRGDLDEL

SEQ ID NO: 115082 - protein, 10 aa, synthetic construct
ATWRGDLDEL

SEQ ID NO: 115083 - protein, 10 aa, synthetic construct
ATFRGDLDEL

SEQ ID NO: 115084 - protein, 10 aa, synthetic construct
ATKRGDLDEL

SEQ ID NO: 115085 - protein, 10 aa, synthetic construct
ATRRGDLDEL

SEQ ID NO: 115086 - protein, 10 aa, synthetic construct
ATHRGDLDEL

SEQ ID NO: 115087 - protein, 10 aa, synthetic construct
ATSRGDLDEL

SEQ ID NO: 115088 - protein, 10 aa, synthetic construct
ATTRGDLDEL

SEQ ID NO: 115089 - protein, 10 aa, synthetic construct
ATYRGDLDEL

SEQ ID NO: 115090 - protein, 10 aa, synthetic construct
ATNRGDLDEL

SEQ ID NO: 115091 - protein, 10 aa, synthetic construct
ATQRGDLDEL

SEQ ID NO: 115092 - protein, 10 aa, synthetic construct
ATDRGDLDEL

SEQ ID NO: 115093 - protein, 10 aa, synthetic construct
ATERGDLDEL

SEQ ID NO: 115094 - protein, 10 aa, synthetic construct
AYGRGDLDEL

SEQ ID NO: 115095 - protein, 10 aa, synthetic construct
AYARGDLDEL

SEQ ID NO: 115096 - protein, 10 aa, synthetic construct
AYVRGDLDEL

SEQ ID NO: 115097 - protein, 10 aa, synthetic construct
AYPRGDLDEL

SEQ ID NO: 115098 - protein, 10 aa, synthetic construct
AYLRGDLDEL

SEQ ID NO: 115099 - protein, 10 aa, synthetic construct
AYIRGDLDEL

SEQ ID NO: 115100 - protein, 10 aa, synthetic construct
AYMRGDLDEL

SEQ ID NO: 115101 - protein, 10 aa, synthetic construct
AYWRGDLDEL

SEQ ID NO: 115102 - protein, 10 aa, synthetic construct
AYFRGDLDEL

SEQ ID NO: 115103 - protein, 10 aa, synthetic construct
AYKRGDLDEL

SEQ ID NO: 115104 - protein, 10 aa, synthetic construct
AYRRGDLDEL

SEQ ID NO: 115105 - protein, 10 aa, synthetic construct
AYHRGDLDEL

SEQ ID NO: 115106 - protein, 10 aa, synthetic construct
AYSRGDLDEL

SEQ ID NO: 115107 - protein, 10 aa, synthetic construct
AYTRGDLDEL

SEQ ID NO: 115108 - protein, 10 aa, synthetic construct
AYYRGDLDEL

SEQ ID NO: 115109 - protein, 10 aa, synthetic construct
AYNRGDLDEL

SEQ ID NO: 115110 - protein, 10 aa, synthetic construct
AYQRGDLDEL

SEQ ID NO: 115111 - protein, 10 aa, synthetic construct
AYDRGDLDEL

SEQ ID NO: 115112 - protein, 10 aa, synthetic construct
AYERGDLDEL

SEQ ID NO: 115113 - protein, 10 aa, synthetic construct
ANGRGDLDEL

SEQ ID NO: 115114 - protein, 10 aa, synthetic construct
ANARGDLDEL

SEQ ID NO: 115115 - protein, 10 aa, synthetic construct
ANVRGDLDEL

SEQ ID NO: 115116 - protein, 10 aa, synthetic construct
ANPRGDLDEL

SEQ ID NO: 115117 - protein, 10 aa, synthetic construct
ANLRGDLDEL

SEQ ID NO: 115118 - protein, 10 aa, synthetic construct
ANIRGDLDEL

SEQ ID NO: 115119 - protein, 10 aa, synthetic construct
ANMRGDLDEL

SEQ ID NO: 115120 - protein, 10 aa, synthetic construct
ANWRGDLDEL

SEQ ID NO: 115121 - protein, 10 aa, synthetic construct
ANFRGDLDEL

SEQ ID NO: 115122 - protein, 10 aa, synthetic construct
ANKRGDLDEL

SEQ ID NO: 115123 - protein, 10 aa, synthetic construct
ANRRGDLDEL

SEQ ID NO: 115124 - protein, 10 aa, synthetic construct
ANHRGDLDEL

SEQ ID NO: 115125 - protein, 10 aa, synthetic construct
ANSRGDLDEL

SEQ ID NO: 115126 - protein, 10 aa, synthetic construct
ANTRGDLDEL

SEQ ID NO: 115127 - protein, 10 aa, synthetic construct
ANYRGDLDEL

SEQ ID NO: 115128 - protein, 10 aa, synthetic construct
ANNRGDLDEL

SEQ ID NO: 115129 - protein, 10 aa, synthetic construct
ANQRGDLDEL

SEQ ID NO: 115130 - protein, 10 aa, synthetic construct
ANDRGDLDEL

SEQ ID NO: 115131 - protein, 10 aa, synthetic construct
ANERGDLDEL

SEQ ID NO: 115132 - protein, 10 aa, synthetic construct
AQGRGDLDEL

SEQ ID NO: 115133 - protein, 10 aa, synthetic construct
AQARGDLDEL

SEQ ID NO: 115134 - protein, 10 aa, synthetic construct
AQVRGDLDEL

SEQ ID NO: 115135 - protein, 10 aa, synthetic construct
AQPRGDLDEL

SEQ ID NO: 115136 - protein, 10 aa, synthetic construct
AQLRGDLDEL

SEQ ID NO: 115137 - protein, 10 aa, synthetic construct
AQIRGDLDEL

SEQ ID NO: 115138 - protein, 10 aa, synthetic construct
AQMRGDLDEL

SEQ ID NO: 115139 - protein, 10 aa, synthetic construct
AQWRGDLDEL

SEQ ID NO: 115140 - protein, 10 aa, synthetic construct
AQFRGDLDEL

SEQ ID NO: 115141 - protein, 10 aa, synthetic construct
AQKRGDLDEL

SEQ ID NO: 115142 - protein, 10 aa, synthetic construct
AQRRGDLDEL

SEQ ID NO: 115143 - protein, 10 aa, synthetic construct
AQHRGDLDEL

SEQ ID NO: 115144 - protein, 10 aa, synthetic construct
AQSRGDLDEL

SEQ ID NO: 115145 - protein, 10 aa, synthetic construct
AQTRGDLDEL

SEQ ID NO: 115146 - protein, 10 aa, synthetic construct
AQYRGDLDEL

SEQ ID NO: 115147 - protein, 10 aa, synthetic construct
AQNRGDLDEL

SEQ ID NO: 115148 - protein, 10 aa, synthetic construct
AQQRGDLDEL

SEQ ID NO: 115149 - protein, 10 aa, synthetic construct
AQDRGDLDEL

SEQ ID NO: 115150 - protein, 10 aa, synthetic construct
AQERGDLDEL

SEQ ID NO: 115151 - protein, 10 aa, synthetic construct
ADGRGDLDEL

SEQ ID NO: 115152 - protein, 10 aa, synthetic construct
ADARGDLDEL

SEQ ID NO: 115153 - protein, 10 aa, synthetic construct
ADVRGDLDEL

SEQ ID NO: 115154 - protein, 10 aa, synthetic construct
ADPRGDLDEL

SEQ ID NO: 115155 - protein, 10 aa, synthetic construct
ADLRGDLDEL

SEQ ID NO: 115156 - protein, 10 aa, synthetic construct
ADIRGDLDEL

SEQ ID NO: 115157 - protein, 10 aa, synthetic construct
ADMRGDLDEL

SEQ ID NO: 115158 - protein, 10 aa, synthetic construct
ADWRGDLDEL

SEQ ID NO: 115159 - protein, 10 aa, synthetic construct
ADFRGDLDEL

SEQ ID NO: 115160 - protein, 10 aa, synthetic construct
ADKRGDLDEL

SEQ ID NO: 115161 - protein, 10 aa, synthetic construct
ADRRGDLDEL

SEQ ID NO: 115162 - protein, 10 aa, synthetic construct
ADHRGDLDEL

SEQ ID NO: 115163 - protein, 10 aa, synthetic construct
ADSRGDLDEL

SEQ ID NO: 115164 - protein, 10 aa, synthetic construct
ADTRGDLDEL

SEQ ID NO: 115165 - protein, 10 aa, synthetic construct
ADYRGDLDEL

SEQ ID NO: 115166 - protein, 10 aa, synthetic construct
ADNRGDLDEL

SEQ ID NO: 115167 - protein, 10 aa, synthetic construct
ADQRGDLDEL

SEQ ID NO: 115168 - protein, 10 aa, synthetic construct
ADDRGDLDEL

SEQ ID NO: 115169 - protein, 10 aa, synthetic construct
ADERGDLDEL

SEQ ID NO: 115170 - protein, 10 aa, synthetic construct
AEGRGDLDEL

SEQ ID NO: 115171 - protein, 10 aa, synthetic construct
AEARGDLDEL

SEQ ID NO: 115172 - protein, 10 aa, synthetic construct
AEVRGDLDEL

SEQ ID NO: 115173 - protein, 10 aa, synthetic construct
AEPRGDLDEL

SEQ ID NO: 115174 - protein, 10 aa, synthetic construct
AELRGDLDEL

SEQ ID NO: 115175 - protein, 10 aa, synthetic construct
AEIRGDLDEL

SEQ ID NO: 115176 - protein, 10 aa, synthetic construct
AEMRGDLDEL

SEQ ID NO: 115177 - protein, 10 aa, synthetic construct
AEWRGDLDEL

SEQ ID NO: 115178 - protein, 10 aa, synthetic construct
AEFRGDLDEL

SEQ ID NO: 115179 - protein, 10 aa, synthetic construct
AEKRGDLDEL

SEQ ID NO: 115180 - protein, 10 aa, synthetic construct
AERRGDLDEL

SEQ ID NO: 115181 - protein, 10 aa, synthetic construct
AEHRGDLDEL

SEQ ID NO: 115182 - protein, 10 aa, synthetic construct
AESRGDLDEL

SEQ ID NO: 115183 - protein, 10 aa, synthetic construct
AETRGDLDEL

SEQ ID NO: 115184 - protein, 10 aa, synthetic construct
AEYRGDLDEL

SEQ ID NO: 115185 - protein, 10 aa, synthetic construct
AENRGDLDEL

SEQ ID NO: 115186 - protein, 10 aa, synthetic construct
AEQRGDLDEL

SEQ ID NO: 115187 - protein, 10 aa, synthetic construct
AEDRGDLDEL

SEQ ID NO: 115188 - protein, 10 aa, synthetic construct
AEERGDLDEL

SEQ ID NO: 115189 - protein, 10 aa, synthetic construct
EGGRGDLDEL

SEQ ID NO: 115190 - protein, 10 aa, synthetic construct
EGARGDLDEL

SEQ ID NO: 115191 - protein, 10 aa, synthetic construct
EGVRGDLDEL

SEQ ID NO: 115192 - protein, 10 aa, synthetic construct
EGPRGDLDEL

SEQ ID NO: 115193 - protein, 10 aa, synthetic construct
EGLRGDLDEL

SEQ ID NO: 115194 - protein, 10 aa, synthetic construct
EGIRGDLDEL

SEQ ID NO: 115195 - protein, 10 aa, synthetic construct
EGMRGDLDEL

SEQ ID NO: 115196 - protein, 10 aa, synthetic construct
EGWRGDLDEL

SEQ ID NO: 115197 - protein, 10 aa, synthetic construct
EGFRGDLDEL

SEQ ID NO: 115198 - protein, 10 aa, synthetic construct
EGKRGDLDEL

SEQ ID NO: 115199 - protein, 10 aa, synthetic construct
EGRRGDLDEL

SEQ ID NO: 115200 - protein, 10 aa, synthetic construct
EGHRGDLDEL

SEQ ID NO: 115201 - protein, 10 aa, synthetic construct
EGSRGDLDEL

SEQ ID NO: 115202 - protein, 10 aa, synthetic construct
EGTRGDLDEL

SEQ ID NO: 115203 - protein, 10 aa, synthetic construct
EGYRGDLDEL

SEQ ID NO: 115204 - protein, 10 aa, synthetic construct
EGNRGDLDEL

SEQ ID NO: 115205 - protein, 10 aa, synthetic construct
EGQRGDLDEL

SEQ ID NO: 115206 - protein, 10 aa, synthetic construct
EGDRGDLDEL

SEQ ID NO: 115207 - protein, 10 aa, synthetic construct
EGERGDLDEL

SEQ ID NO: 115208 - protein, 10 aa, synthetic construct
EAGRGDLDEL

SEQ ID NO: 115209 - protein, 10 aa, synthetic construct
EAARGDLDEL

SEQ ID NO: 115210 - protein, 10 aa, synthetic construct
EAVRGDLDEL

SEQ ID NO: 115211 - protein, 10 aa, synthetic construct
EAPRGDLDEL

SEQ ID NO: 115212 - protein, 10 aa, synthetic construct
EALRGDLDEL

SEQ ID NO: 115213 - protein, 10 aa, synthetic construct
EAIRGDLDEL

SEQ ID NO: 115214 - protein, 10 aa, synthetic construct
EAMRGDLDEL

SEQ ID NO: 115215 - protein, 10 aa, synthetic construct
EAWRGDLDEL

SEQ ID NO: 115216 - protein, 10 aa, synthetic construct
EAFRGDLDEL

SEQ ID NO: 115217 - protein, 10 aa, synthetic construct
EAKRGDLDEL

SEQ ID NO: 115218 - protein, 10 aa, synthetic construct
EARRGDLDEL

SEQ ID NO: 115219 - protein, 10 aa, synthetic construct
EAHRGDLDEL

SEQ ID NO: 115220 - protein, 10 aa, synthetic construct
EASRGDLDEL

SEQ ID NO: 115221 - protein, 10 aa, synthetic construct
EATRGDLDEL

SEQ ID NO: 115222 - protein, 10 aa, synthetic construct
EAYRGDLDEL

SEQ ID NO: 115223 - protein, 10 aa, synthetic construct
EANRGDLDEL

SEQ ID NO: 115224 - protein, 10 aa, synthetic construct
EAQRGDLDEL

SEQ ID NO: 115225 - protein, 10 aa, synthetic construct
EADRGDLDEL

SEQ ID NO: 115226 - protein, 10 aa, synthetic construct
EAERGDLDEL

SEQ ID NO: 115227 - protein, 10 aa, synthetic construct
EVGRGDLDEL

SEQ ID NO: 115228 - protein, 10 aa, synthetic construct
EVARGDLDEL

SEQ ID NO: 115229 - protein, 10 aa, synthetic construct
EVVRGDLDEL

SEQ ID NO: 115230 - protein, 10 aa, synthetic construct
EVPRGDLDEL

SEQ ID NO: 115231 - protein, 10 aa, synthetic construct
EVLRGDLDEL

SEQ ID NO: 115232 - protein, 10 aa, synthetic construct
EVIRGDLDEL

SEQ ID NO: 115233 - protein, 10 aa, synthetic construct
EVMRGDLDEL

SEQ ID NO: 115234 - protein, 10 aa, synthetic construct
EVWRGDLDEL

SEQ ID NO: 115235 - protein, 10 aa, synthetic construct
EVFRGDLDEL

SEQ ID NO: 115236 - protein, 10 aa, synthetic construct
EVKRGDLDEL

SEQ ID NO: 115237 - protein, 10 aa, synthetic construct
EVRRGDLDEL

SEQ ID NO: 115238 - protein, 10 aa, synthetic construct
EVHRGDLDEL

SEQ ID NO: 115239 - protein, 10 aa, synthetic construct
EVSRGDLDEL

SEQ ID NO: 115240 - protein, 10 aa, synthetic construct
EVTRGDLDEL

SEQ ID NO: 115241 - protein, 10 aa, synthetic construct
EVYRGDLDEL

SEQ ID NO: 115242 - protein, 10 aa, synthetic construct
EVNRGDLDEL

SEQ ID NO: 115243 - protein, 10 aa, synthetic construct
EVQRGDLDEL

SEQ ID NO: 115244 - protein, 10 aa, synthetic construct
EVDRGDLDEL

SEQ ID NO: 115245 - protein, 10 aa, synthetic construct
EVERGDLDEL

SEQ ID NO: 115246 - protein, 10 aa, synthetic construct
EPGRGDLDEL

SEQ ID NO: 115247 - protein, 10 aa, synthetic construct
EPARGDLDEL

SEQ ID NO: 115248 - protein, 10 aa, synthetic construct
EPVRGDLDEL

SEQ ID NO: 115249 - protein, 10 aa, synthetic construct
EPPRGDLDEL

SEQ ID NO: 115250 - protein, 10 aa, synthetic construct
EPLRGDLDEL

SEQ ID NO: 115251 - protein, 10 aa, synthetic construct
EPIRGDLDEL

SEQ ID NO: 115252 - protein, 10 aa, synthetic construct
EPMRGDLDEL

SEQ ID NO: 115253 - protein, 10 aa, synthetic construct
EPWRGDLDEL

SEQ ID NO: 115254 - protein, 10 aa, synthetic construct
EPFRGDLDEL

SEQ ID NO: 115255 - protein, 10 aa, synthetic construct
EPKRGDLDEL

SEQ ID NO: 115256 - protein, 10 aa, synthetic construct
EPRRGDLDEL

SEQ ID NO: 115257 - protein, 10 aa, synthetic construct
EPHRGDLDEL

SEQ ID NO: 115258 - protein, 10 aa, synthetic construct
EPSRGDLDEL

SEQ ID NO: 115259 - protein, 10 aa, synthetic construct
EPTRGDLDEL

SEQ ID NO: 115260 - protein, 10 aa, synthetic construct
EPYRGDLDEL

SEQ ID NO: 115261 - protein, 10 aa, synthetic construct
EPNRGDLDEL

SEQ ID NO: 115262 - protein, 10 aa, synthetic construct
EPQRGDLDEL

SEQ ID NO: 115263 - protein, 10 aa, synthetic construct
EPDRGDLDEL

SEQ ID NO: 115264 - protein, 10 aa, synthetic construct
EPERGDLDEL

SEQ ID NO: 115265 - protein, 10 aa, synthetic construct
ELGRGDLDEL

SEQ ID NO: 115266 - protein, 10 aa, synthetic construct
ELARGDLDEL

SEQ ID NO: 115267 - protein, 10 aa, synthetic construct
ELVRGDLDEL

SEQ ID NO: 115268 - protein, 10 aa, synthetic construct
ELPRGDLDEL

SEQ ID NO: 115269 - protein, 10 aa, synthetic construct
ELLRGDLDEL

SEQ ID NO: 115270 - protein, 10 aa, synthetic construct
ELIRGDLDEL

SEQ ID NO: 115271 - protein, 10 aa, synthetic construct
ELMRGDLDEL

SEQ ID NO: 115272 - protein, 10 aa, synthetic construct
ELWRGDLDEL

SEQ ID NO: 115273 - protein, 10 aa, synthetic construct
ELFRGDLDEL

SEQ ID NO: 115274 - protein, 10 aa, synthetic construct
ELKRGDLDEL

SEQ ID NO: 115275 - protein, 10 aa, synthetic construct
ELRRGDLDEL

SEQ ID NO: 115276 - protein, 10 aa, synthetic construct
ELHRGDLDEL

SEQ ID NO: 115277 - protein, 10 aa, synthetic construct
ELSRGDLDEL

SEQ ID NO: 115278 - protein, 10 aa, synthetic construct
ELTRGDLDEL

SEQ ID NO: 115279 - protein, 10 aa, synthetic construct
ELYRGDLDEL

SEQ ID NO: 115280 - protein, 10 aa, synthetic construct
ELNRGDLDEL

SEQ ID NO: 115281 - protein, 10 aa, synthetic construct
ELQRGDLDEL

SEQ ID NO: 115282 - protein, 10 aa, synthetic construct
ELDRGDLDEL

SEQ ID NO: 115283 - protein, 10 aa, synthetic construct
ELERGDLDEL

SEQ ID NO: 115284 - protein, 10 aa, synthetic construct
EIGRGDLDEL

SEQ ID NO: 115285 - protein, 10 aa, synthetic construct
EIARGDLDEL

SEQ ID NO: 115286 - protein, 10 aa, synthetic construct
EIVRGDLDEL

SEQ ID NO: 115287 - protein, 10 aa, synthetic construct
EIPRGDLDEL

SEQ ID NO: 115288 - protein, 10 aa, synthetic construct
EILRGDLDEL

SEQ ID NO: 115289 - protein, 10 aa, synthetic construct
EIIRGDLDEL

SEQ ID NO: 115290 - protein, 10 aa, synthetic construct
EIMRGDLDEL

SEQ ID NO: 115291 - protein, 10 aa, synthetic construct
EIWRGDLDEL

SEQ ID NO: 115292 - protein, 10 aa, synthetic construct
EIFRGDLDEL

SEQ ID NO: 115293 - protein, 10 aa, synthetic construct
EIKRGDLDEL

SEQ ID NO: 115294 - protein, 10 aa, synthetic construct
EIRRGDLDEL

SEQ ID NO: 115295 - protein, 10 aa, synthetic construct
EIHRGDLDEL

SEQ ID NO: 115296 - protein, 10 aa, synthetic construct
EISRGDLDEL

SEQ ID NO: 115297 - protein, 10 aa, synthetic construct
EITRGDLDEL

SEQ ID NO: 115298 - protein, 10 aa, synthetic construct
EIYRGDLDEL

SEQ ID NO: 115299 - protein, 10 aa, synthetic construct
EINRGDLDEL

SEQ ID NO: 115300 - protein, 10 aa, synthetic construct
EIQRGDLDEL

SEQ ID NO: 115301 - protein, 10 aa, synthetic construct
EIDRGDLDEL

SEQ ID NO: 115302 - protein, 10 aa, synthetic construct
EIERGDLDEL

SEQ ID NO: 115303 - protein, 10 aa, synthetic construct
EMGRGDLDEL

SEQ ID NO: 115304 - protein, 10 aa, synthetic construct
EMARGDLDEL

SEQ ID NO: 115305 - protein, 10 aa, synthetic construct
EMVRGDLDEL

SEQ ID NO: 115306 - protein, 10 aa, synthetic construct
EMPRGDLDEL

SEQ ID NO: 115307 - protein, 10 aa, synthetic construct
EMLRGDLDEL

SEQ ID NO: 115308 - protein, 10 aa, synthetic construct
EMIRGDLDEL

SEQ ID NO: 115309 - protein, 10 aa, synthetic construct
EMMRGDLDEL

SEQ ID NO: 115310 - protein, 10 aa, synthetic construct
EMWRGDLDEL

SEQ ID NO: 115311 - protein, 10 aa, synthetic construct
EMFRGDLDEL

SEQ ID NO: 115312 - protein, 10 aa, synthetic construct
EMKRGDLDEL

SEQ ID NO: 115313 - protein, 10 aa, synthetic construct
EMRRGDLDEL

SEQ ID NO: 115314 - protein, 10 aa, synthetic construct
EMHRGDLDEL

SEQ ID NO: 115315 - protein, 10 aa, synthetic construct
EMSRGDLDEL

SEQ ID NO: 115316 - protein, 10 aa, synthetic construct
EMTRGDLDEL

SEQ ID NO: 115317 - protein, 10 aa, synthetic construct
EMYRGDLDEL

SEQ ID NO: 115318 - protein, 10 aa, synthetic construct
EMNRGDLDEL

SEQ ID NO: 115319 - protein, 10 aa, synthetic construct
EMQRGDLDEL

SEQ ID NO: 115320 - protein, 10 aa, synthetic construct
EMDRGDLDEL

SEQ ID NO: 115321 - protein, 10 aa, synthetic construct
EMERGDLDEL

SEQ ID NO: 115322 - protein, 10 aa, synthetic construct
EWGRGDLDEL

SEQ ID NO: 115323 - protein, 10 aa, synthetic construct
EWARGDLDEL

SEQ ID NO: 115324 - protein, 10 aa, synthetic construct
EWVRGDLDEL

SEQ ID NO: 115325 - protein, 10 aa, synthetic construct
EWPRGDLDEL

SEQ ID NO: 115326 - protein, 10 aa, synthetic construct
EWLRGDLDEL

SEQ ID NO: 115327 - protein, 10 aa, synthetic construct
EWIRGDLDEL

SEQ ID NO: 115328 - protein, 10 aa, synthetic construct
EWMRGDLDEL

SEQ ID NO: 115329 - protein, 10 aa, synthetic construct
EWWRGDLDEL

SEQ ID NO: 115330 - protein, 10 aa, synthetic construct
EWFRGDLDEL

SEQ ID NO: 115331 - protein, 10 aa, synthetic construct
EWKRGDLDEL

SEQ ID NO: 115332 - protein, 10 aa, synthetic construct
EWRRGDLDEL

SEQ ID NO: 115333 - protein, 10 aa, synthetic construct
EWHRGDLDEL

SEQ ID NO: 115334 - protein, 10 aa, synthetic construct
EWSRGDLDEL

SEQ ID NO: 115335 - protein, 10 aa, synthetic construct
EWTRGDLDEL

SEQ ID NO: 115336 - protein, 10 aa, synthetic construct
EWYRGDLDEL

SEQ ID NO: 115337 - protein, 10 aa, synthetic construct
EWNRGDLDEL

SEQ ID NO: 115338 - protein, 10 aa, synthetic construct
EWQRGDLDEL

SEQ ID NO: 115339 - protein, 10 aa, synthetic construct
EWDRGDLDEL

SEQ ID NO: 115340 - protein, 10 aa, synthetic construct
EWERGDLDEL

SEQ ID NO: 115341 - protein, 10 aa, synthetic construct
EFGRGDLDEL

SEQ ID NO: 115342 - protein, 10 aa, synthetic construct
EFARGDLDEL

SEQ ID NO: 115343 - protein, 10 aa, synthetic construct
EFVRGDLDEL

SEQ ID NO: 115344 - protein, 10 aa, synthetic construct
EFPRGDLDEL

SEQ ID NO: 115345 - protein, 10 aa, synthetic construct
EFLRGDLDEL

SEQ ID NO: 115346 - protein, 10 aa, synthetic construct
EFIRGDLDEL

SEQ ID NO: 115347 - protein, 10 aa, synthetic construct
EFMRGDLDEL

SEQ ID NO: 115348 - protein, 10 aa, synthetic construct
EFWRGDLDEL

SEQ ID NO: 115349 - protein, 10 aa, synthetic construct
EFFRGDLDEL

SEQ ID NO: 115350 - protein, 10 aa, synthetic construct
EFKRGDLDEL

SEQ ID NO: 115351 - protein, 10 aa, synthetic construct
EFRRGDLDEL

SEQ ID NO: 115352 - protein, 10 aa, synthetic construct
EFHRGDLDEL

SEQ ID NO: 115353 - protein, 10 aa, synthetic construct
EFSRGDLDEL

SEQ ID NO: 115354 - protein, 10 aa, synthetic construct
EFTRGDLDEL

SEQ ID NO: 115355 - protein, 10 aa, synthetic construct
EFYRGDLDEL

SEQ ID NO: 115356 - protein, 10 aa, synthetic construct
EFNRGDLDEL

SEQ ID NO: 115357 - protein, 10 aa, synthetic construct
EFQRGDLDEL

SEQ ID NO: 115358 - protein, 10 aa, synthetic construct
EFDRGDLDEL

SEQ ID NO: 115359 - protein, 10 aa, synthetic construct
EFERGDLDEL

SEQ ID NO: 115360 - protein, 10 aa, synthetic construct
EKGRGDLDEL

SEQ ID NO: 115361 - protein, 10 aa, synthetic construct
EKARGDLDEL

SEQ ID NO: 115362 - protein, 10 aa, synthetic construct
EKVRGDLDEL

SEQ ID NO: 115363 - protein, 10 aa, synthetic construct
EKPRGDLDEL

SEQ ID NO: 115364 - protein, 10 aa, synthetic construct
EKLRGDLDEL

SEQ ID NO: 115365 - protein, 10 aa, synthetic construct
EKIRGDLDEL

SEQ ID NO: 115366 - protein, 10 aa, synthetic construct
EKMRGDLDEL

SEQ ID NO: 115367 - protein, 10 aa, synthetic construct
EKWRGDLDEL

SEQ ID NO: 115368 - protein, 10 aa, synthetic construct
EKFRGDLDEL

SEQ ID NO: 115369 - protein, 10 aa, synthetic construct
EKKRGDLDEL

SEQ ID NO: 115370 - protein, 10 aa, synthetic construct
EKRRGDLDEL

SEQ ID NO: 115371 - protein, 10 aa, synthetic construct
EKHRGDLDEL

SEQ ID NO: 115372 - protein, 10 aa, synthetic construct
EKSRGDLDEL

SEQ ID NO: 115373 - protein, 10 aa, synthetic construct
EKTRGDLDEL

SEQ ID NO: 115374 - protein, 10 aa, synthetic construct
EKYRGDLDEL

SEQ ID NO: 115375 - protein, 10 aa, synthetic construct
EKNRGDLDEL

SEQ ID NO: 115376 - protein, 10 aa, synthetic construct
EKQRGDLDEL

SEQ ID NO: 115377 - protein, 10 aa, synthetic construct
EKDRGDLDEL

SEQ ID NO: 115378 - protein, 10 aa, synthetic construct
EKERGDLDEL

SEQ ID NO: 115379 - protein, 10 aa, synthetic construct
ERGRGDLDEL

SEQ ID NO: 115380 - protein, 10 aa, synthetic construct
ERARGDLDEL

SEQ ID NO: 115381 - protein, 10 aa, synthetic construct
ERVRGDLDEL

SEQ ID NO: 115382 - protein, 10 aa, synthetic construct
ERPRGDLDEL

SEQ ID NO: 115383 - protein, 10 aa, synthetic construct
ERLRGDLDEL

SEQ ID NO: 115384 - protein, 10 aa, synthetic construct
ERIRGDLDEL

SEQ ID NO: 115385 - protein, 10 aa, synthetic construct
ERMRGDLDEL

SEQ ID NO: 115386 - protein, 10 aa, synthetic construct
ERWRGDLDEL

SEQ ID NO: 115387 - protein, 10 aa, synthetic construct
ERFRGDLDEL

SEQ ID NO: 115388 - protein, 10 aa, synthetic construct
ERKRGDLDEL

SEQ ID NO: 115389 - protein, 10 aa, synthetic construct
ERRRGDLDEL

SEQ ID NO: 115390 - protein, 10 aa, synthetic construct
ERHRGDLDEL

SEQ ID NO: 115391 - protein, 10 aa, synthetic construct
ERSRGDLDEL

SEQ ID NO: 115392 - protein, 10 aa, synthetic construct
ERTRGDLDEL

SEQ ID NO: 115393 - protein, 10 aa, synthetic construct
ERYRGDLDEL

SEQ ID NO: 115394 - protein, 10 aa, synthetic construct
ERNRGDLDEL

SEQ ID NO: 115395 - protein, 10 aa, synthetic construct
ERQRGDLDEL

SEQ ID NO: 115396 - protein, 10 aa, synthetic construct
ERDRGDLDEL

SEQ ID NO: 115397 - protein, 10 aa, synthetic construct
ERERGDLDEL

SEQ ID NO: 115398 - protein, 10 aa, synthetic construct
EHGRGDLDEL

SEQ ID NO: 115399 - protein, 10 aa, synthetic construct
EHARGDLDEL

SEQ ID NO: 115400 - protein, 10 aa, synthetic construct
EHVRGDLDEL

SEQ ID NO: 115401 - protein, 10 aa, synthetic construct
EHPRGDLDEL

SEQ ID NO: 115402 - protein, 10 aa, synthetic construct
EHLRGDLDEL

SEQ ID NO: 115403 - protein, 10 aa, synthetic construct
EHIRGDLDEL

SEQ ID NO: 115404 - protein, 10 aa, synthetic construct
EHMRGDLDEL

SEQ ID NO: 115405 - protein, 10 aa, synthetic construct
EHWRGDLDEL

SEQ ID NO: 115406 - protein, 10 aa, synthetic construct
EHFRGDLDEL

SEQ ID NO: 115407 - protein, 10 aa, synthetic construct
EHKRGDLDEL

SEQ ID NO: 115408 - protein, 10 aa, synthetic construct
EHRRGDLDEL

SEQ ID NO: 115409 - protein, 10 aa, synthetic construct
EHHRGDLDEL

SEQ ID NO: 115410 - protein, 10 aa, synthetic construct
EHSRGDLDEL

SEQ ID NO: 115411 - protein, 10 aa, synthetic construct
EHTRGDLDEL

SEQ ID NO: 115412 - protein, 10 aa, synthetic construct
EHYRGDLDEL

SEQ ID NO: 115413 - protein, 10 aa, synthetic construct
EHNRGDLDEL

SEQ ID NO: 115414 - protein, 10 aa, synthetic construct
EHQRGDLDEL

SEQ ID NO: 115415 - protein, 10 aa, synthetic construct
EHDRGDLDEL

SEQ ID NO: 115416 - protein, 10 aa, synthetic construct
EHERGDLDEL

SEQ ID NO: 115417 - protein, 10 aa, synthetic construct
ESGRGDLDEL

SEQ ID NO: 115418 - protein, 10 aa, synthetic construct
ESARGDLDEL

SEQ ID NO: 115419 - protein, 10 aa, synthetic construct
ESVRGDLDEL

SEQ ID NO: 115420 - protein, 10 aa, synthetic construct
ESPRGDLDEL

SEQ ID NO: 115421 - protein, 10 aa, synthetic construct
ESLRGDLDEL

SEQ ID NO: 115422 - protein, 10 aa, synthetic construct
ESIRGDLDEL

SEQ ID NO: 115423 - protein, 10 aa, synthetic construct
ESMRGDLDEL

SEQ ID NO: 115424 - protein, 10 aa, synthetic construct
ESWRGDLDEL

SEQ ID NO: 115425 - protein, 10 aa, synthetic construct
ESFRGDLDEL

SEQ ID NO: 115426 - protein, 10 aa, synthetic construct
ESKRGDLDEL

SEQ ID NO: 115427 - protein, 10 aa, synthetic construct
ESRRGDLDEL

SEQ ID NO: 115428 - protein, 10 aa, synthetic construct
ESHRGDLDEL

SEQ ID NO: 115429 - protein, 10 aa, synthetic construct
ESSRGDLDEL

SEQ ID NO: 115430 - protein, 10 aa, synthetic construct
ESTRGDLDEL

SEQ ID NO: 115431 - protein, 10 aa, synthetic construct
ESYRGDLDEL

SEQ ID NO: 115432 - protein, 10 aa, synthetic construct
ESNRGDLDEL

SEQ ID NO: 115433 - protein, 10 aa, synthetic construct
ESQRGDLDEL

SEQ ID NO: 115434 - protein, 10 aa, synthetic construct
ESDRGDLDEL

SEQ ID NO: 115435 - protein, 10 aa, synthetic construct
ESERGDLDEL

SEQ ID NO: 115436 - protein, 10 aa, synthetic construct
ETGRGDLDEL

SEQ ID NO: 115437 - protein, 10 aa, synthetic construct
ETARGDLDEL

SEQ ID NO: 115438 - protein, 10 aa, synthetic construct
ETVRGDLDEL

SEQ ID NO: 115439 - protein, 10 aa, synthetic construct
ETPRGDLDEL

SEQ ID NO: 115440 - protein, 10 aa, synthetic construct
ETLRGDLDEL

SEQ ID NO: 115441 - protein, 10 aa, synthetic construct
ETIRGDLDEL

SEQ ID NO: 115442 - protein, 10 aa, synthetic construct
ETMRGDLDEL

SEQ ID NO: 115443 - protein, 10 aa, synthetic construct
ETWRGDLDEL

SEQ ID NO: 115444 - protein, 10 aa, synthetic construct
ETFRGDLDEL

SEQ ID NO: 115445 - protein, 10 aa, synthetic construct
ETKRGDLDEL

SEQ ID NO: 115446 - protein, 10 aa, synthetic construct
ETRRGDLDEL

SEQ ID NO: 115447 - protein, 10 aa, synthetic construct
ETHRGDLDEL

SEQ ID NO: 115448 - protein, 10 aa, synthetic construct
ETSRGDLDEL

SEQ ID NO: 115449 - protein, 10 aa, synthetic construct
ETTRGDLDEL

SEQ ID NO: 115450 - protein, 10 aa, synthetic construct
ETYRGDLDEL

SEQ ID NO: 115451 - protein, 10 aa, synthetic construct
ETNRGDLDEL

SEQ ID NO: 115452 - protein, 10 aa, synthetic construct
ETQRGDLDEL

SEQ ID NO: 115453 - protein, 10 aa, synthetic construct
ETDRGDLDEL

SEQ ID NO: 115454 - protein, 10 aa, synthetic construct
ETERGDLDEL

SEQ ID NO: 115455 - protein, 10 aa, synthetic construct
EYGRGDLDEL

SEQ ID NO: 115456 - protein, 10 aa, synthetic construct
EYARGDLDEL

SEQ ID NO: 115457 - protein, 10 aa, synthetic construct
EYVRGDLDEL

SEQ ID NO: 115458 - protein, 10 aa, synthetic construct
EYPRGDLDEL

SEQ ID NO: 115459 - protein, 10 aa, synthetic construct
EYLRGDLDEL

SEQ ID NO: 115460 - protein, 10 aa, synthetic construct
EYIRGDLDEL

SEQ ID NO: 115461 - protein, 10 aa, synthetic construct
EYMRGDLDEL

SEQ ID NO: 115462 - protein, 10 aa, synthetic construct
EYWRGDLDEL

SEQ ID NO: 115463 - protein, 10 aa, synthetic construct
EYFRGDLDEL

SEQ ID NO: 115464 - protein, 10 aa, synthetic construct
EYKRGDLDEL

SEQ ID NO: 115465 - protein, 10 aa, synthetic construct
EYRRGDLDEL

SEQ ID NO: 115466 - protein, 10 aa, synthetic construct
EYHRGDLDEL

SEQ ID NO: 115467 - protein, 10 aa, synthetic construct
EYSRGDLDEL

SEQ ID NO: 115468 - protein, 10 aa, synthetic construct
EYTRGDLDEL

SEQ ID NO: 115469 - protein, 10 aa, synthetic construct
EYYRGDLDEL

SEQ ID NO: 115470 - protein, 10 aa, synthetic construct
EYNRGDLDEL

SEQ ID NO: 115471 - protein, 10 aa, synthetic construct
EYQRGDLDEL

SEQ ID NO: 115472 - protein, 10 aa, synthetic construct
EYDRGDLDEL

SEQ ID NO: 115473 - protein, 10 aa, synthetic construct
EYERGDLDEL

SEQ ID NO: 115474 - protein, 10 aa, synthetic construct
ENGRGDLDEL

SEQ ID NO: 115475 - protein, 10 aa, synthetic construct
ENARGDLDEL

SEQ ID NO: 115476 - protein, 10 aa, synthetic construct
ENVRGDLDEL

SEQ ID NO: 115477 - protein, 10 aa, synthetic construct
ENPRGDLDEL

SEQ ID NO: 115478 - protein, 10 aa, synthetic construct
ENLRGDLDEL

SEQ ID NO: 115479 - protein, 10 aa, synthetic construct
ENIRGDLDEL

SEQ ID NO: 115480 - protein, 10 aa, synthetic construct
ENMRGDLDEL

SEQ ID NO: 115481 - protein, 10 aa, synthetic construct
ENWRGDLDEL

SEQ ID NO: 115482 - protein, 10 aa, synthetic construct
ENFRGDLDEL

SEQ ID NO: 115483 - protein, 10 aa, synthetic construct
ENKRGDLDEL

SEQ ID NO: 115484 - protein, 10 aa, synthetic construct
ENRRGDLDEL

SEQ ID NO: 115485 - protein, 10 aa, synthetic construct
ENHRGDLDEL

SEQ ID NO: 115486 - protein, 10 aa, synthetic construct
ENSRGDLDEL

SEQ ID NO: 115487 - protein, 10 aa, synthetic construct
ENTRGDLDEL

SEQ ID NO: 115488 - protein, 10 aa, synthetic construct
ENYRGDLDEL

SEQ ID NO: 115489 - protein, 10 aa, synthetic construct
ENNRGDLDEL

SEQ ID NO: 115490 - protein, 10 aa, synthetic construct
ENQRGDLDEL

SEQ ID NO: 115491 - protein, 10 aa, synthetic construct
ENDRGDLDEL

SEQ ID NO: 115492 - protein, 10 aa, synthetic construct
ENERGDLDEL

SEQ ID NO: 115493 - protein, 10 aa, synthetic construct
EQGRGDLDEL

SEQ ID NO: 115494 - protein, 10 aa, synthetic construct
EQARGDLDEL

SEQ ID NO: 115495 - protein, 10 aa, synthetic construct
EQVRGDLDEL

SEQ ID NO: 115496 - protein, 10 aa, synthetic construct
EQPRGDLDEL

SEQ ID NO: 115497 - protein, 10 aa, synthetic construct
EQLRGDLDEL

SEQ ID NO: 115498 - protein, 10 aa, synthetic construct
EQIRGDLDEL

SEQ ID NO: 115499 - protein, 10 aa, synthetic construct
EQMRGDLDEL

SEQ ID NO: 115500 - protein, 10 aa, synthetic construct
EQWRGDLDEL

SEQ ID NO: 115501 - protein, 10 aa, synthetic construct
EQFRGDLDEL

SEQ ID NO: 115502 - protein, 10 aa, synthetic construct
EQKRGDLDEL

SEQ ID NO: 115503 - protein, 10 aa, synthetic construct
EQRRGDLDEL

SEQ ID NO: 115504 - protein, 10 aa, synthetic construct
EQHRGDLDEL

SEQ ID NO: 115505 - protein, 10 aa, synthetic construct
EQSRGDLDEL

SEQ ID NO: 115506 - protein, 10 aa, synthetic construct
EQTRGDLDEL

SEQ ID NO: 115507 - protein, 10 aa, synthetic construct
EQYRGDLDEL

SEQ ID NO: 115508 - protein, 10 aa, synthetic construct
EQNRGDLDEL

SEQ ID NO: 115509 - protein, 10 aa, synthetic construct
EQQRGDLDEL

SEQ ID NO: 115510 - protein, 10 aa, synthetic construct
EQDRGDLDEL

SEQ ID NO: 115511 - protein, 10 aa, synthetic construct
EQERGDLDEL

SEQ ID NO: 115512 - protein, 10 aa, synthetic construct
EDGRGDLDEL

SEQ ID NO: 115513 - protein, 10 aa, synthetic construct
EDARGDLDEL

SEQ ID NO: 115514 - protein, 10 aa, synthetic construct
EDVRGDLDEL

SEQ ID NO: 115515 - protein, 10 aa, synthetic construct
EDPRGDLDEL

SEQ ID NO: 115516 - protein, 10 aa, synthetic construct
EDLRGDLDEL

SEQ ID NO: 115517 - protein, 10 aa, synthetic construct
EDIRGDLDEL

SEQ ID NO: 115518 - protein, 10 aa, synthetic construct
EDMRGDLDEL

SEQ ID NO: 115519 - protein, 10 aa, synthetic construct
EDWRGDLDEL

SEQ ID NO: 115520 - protein, 10 aa, synthetic construct
EDFRGDLDEL

SEQ ID NO: 115521 - protein, 10 aa, synthetic construct
EDKRGDLDEL

SEQ ID NO: 115522 - protein, 10 aa, synthetic construct
EDRRGDLDEL

SEQ ID NO: 115523 - protein, 10 aa, synthetic construct
EDHRGDLDEL

SEQ ID NO: 115524 - protein, 10 aa, synthetic construct
EDSRGDLDEL

SEQ ID NO: 115525 - protein, 10 aa, synthetic construct
EDTRGDLDEL

SEQ ID NO: 115526 - protein, 10 aa, synthetic construct
EDYRGDLDEL

SEQ ID NO: 115527 - protein, 10 aa, synthetic construct
EDNRGDLDEL

SEQ ID NO: 115528 - protein, 10 aa, synthetic construct
EDQRGDLDEL

SEQ ID NO: 115529 - protein, 10 aa, synthetic construct
EDDRGDLDEL

SEQ ID NO: 115530 - protein, 10 aa, synthetic construct
EDERGDLDEL

SEQ ID NO: 115531 - protein, 10 aa, synthetic construct
EEGRGDLDEL

SEQ ID NO: 115532 - protein, 10 aa, synthetic construct
EEARGDLDEL

SEQ ID NO: 115533 - protein, 10 aa, synthetic construct
EEVRGDLDEL

SEQ ID NO: 115534 - protein, 10 aa, synthetic construct
EEPRGDLDEL

SEQ ID NO: 115535 - protein, 10 aa, synthetic construct
EELRGDLDEL

SEQ ID NO: 115536 - protein, 10 aa, synthetic construct
EEIRGDLDEL

SEQ ID NO: 115537 - protein, 10 aa, synthetic construct
EEMRGDLDEL

SEQ ID NO: 115538 - protein, 10 aa, synthetic construct
EEWRGDLDEL

SEQ ID NO: 115539 - protein, 10 aa, synthetic construct
EEFRGDLDEL

SEQ ID NO: 115540 - protein, 10 aa, synthetic construct
EEKRGDLDEL

SEQ ID NO: 115541 - protein, 10 aa, synthetic construct
EERRGDLDEL

SEQ ID NO: 115542 - protein, 10 aa, synthetic construct
EEHRGDLDEL

SEQ ID NO: 115543 - protein, 10 aa, synthetic construct
EESRGDLDEL

SEQ ID NO: 115544 - protein, 10 aa, synthetic construct
EETRGDLDEL

SEQ ID NO: 115545 - protein, 10 aa, synthetic construct
EEYRGDLDEL

SEQ ID NO: 115546 - protein, 10 aa, synthetic construct
EENRGDLDEL

SEQ ID NO: 115547 - protein, 10 aa, synthetic construct
EEQRGDLDEL

SEQ ID NO: 115548 - protein, 10 aa, synthetic construct
EEDRGDLDEL

SEQ ID NO: 115549 - protein, 10 aa, synthetic construct
EEERGDLDEL

SEQ ID NO: 115550 - protein, 10 aa, synthetic construct
NGGRGDLDEL

SEQ ID NO: 115551 - protein, 10 aa, synthetic construct
NGARGDLDEL

SEQ ID NO: 115552 - protein, 10 aa, synthetic construct
NGVRGDLDEL

SEQ ID NO: 115553 - protein, 10 aa, synthetic construct
NGPRGDLDEL

SEQ ID NO: 115554 - protein, 10 aa, synthetic construct
NGLRGDLDEL

SEQ ID NO: 115555 - protein, 10 aa, synthetic construct
NGIRGDLDEL

SEQ ID NO: 115556 - protein, 10 aa, synthetic construct
NGMRGDLDEL

SEQ ID NO: 115557 - protein, 10 aa, synthetic construct
NGWRGDLDEL

SEQ ID NO: 115558 - protein, 10 aa, synthetic construct
NGFRGDLDEL

SEQ ID NO: 115559 - protein, 10 aa, synthetic construct
NGKRGDLDEL

SEQ ID NO: 115560 - protein, 10 aa, synthetic construct
NGRRGDLDEL

SEQ ID NO: 115561 - protein, 10 aa, synthetic construct
NGHRGDLDEL

SEQ ID NO: 115562 - protein, 10 aa, synthetic construct
NGSRGDLDEL

SEQ ID NO: 115563 - protein, 10 aa, synthetic construct
NGTRGDLDEL

SEQ ID NO: 115564 - protein, 10 aa, synthetic construct
NGYRGDLDEL

SEQ ID NO: 115565 - protein, 10 aa, synthetic construct
NGNRGDLDEL

SEQ ID NO: 115566 - protein, 10 aa, synthetic construct
NGQRGDLDEL

SEQ ID NO: 115567 - protein, 10 aa, synthetic construct
NGDRGDLDEL

SEQ ID NO: 115568 - protein, 10 aa, synthetic construct
NGERGDLDEL

SEQ ID NO: 115569 - protein, 10 aa, synthetic construct
NAGRGDLDEL

SEQ ID NO: 115570 - protein, 10 aa, synthetic construct
NAARGDLDEL

SEQ ID NO: 115571 - protein, 10 aa, synthetic construct
NAVRGDLDEL

SEQ ID NO: 115572 - protein, 10 aa, synthetic construct
NAPRGDLDEL

SEQ ID NO: 115573 - protein, 10 aa, synthetic construct
NALRGDLDEL

SEQ ID NO: 115574 - protein, 10 aa, synthetic construct
NAIRGDLDEL

SEQ ID NO: 115575 - protein, 10 aa, synthetic construct
NAMRGDLDEL

SEQ ID NO: 115576 - protein, 10 aa, synthetic construct
NAWRGDLDEL

SEQ ID NO: 115577 - protein, 10 aa, synthetic construct
NAFRGDLDEL

SEQ ID NO: 115578 - protein, 10 aa, synthetic construct
NAKRGDLDEL

SEQ ID NO: 115579 - protein, 10 aa, synthetic construct
NARRGDLDEL

SEQ ID NO: 115580 - protein, 10 aa, synthetic construct
NAHRGDLDEL

SEQ ID NO: 115581 - protein, 10 aa, synthetic construct
NASRGDLDEL

SEQ ID NO: 115582 - protein, 10 aa, synthetic construct
NATRGDLDEL

SEQ ID NO: 115583 - protein, 10 aa, synthetic construct
NAYRGDLDEL

SEQ ID NO: 115584 - protein, 10 aa, synthetic construct
NANRGDLDEL

SEQ ID NO: 115585 - protein, 10 aa, synthetic construct
NAQRGDLDEL

SEQ ID NO: 115586 - protein, 10 aa, synthetic construct
NADRGDLDEL

SEQ ID NO: 115587 - protein, 10 aa, synthetic construct
NAERGDLDEL

SEQ ID NO: 115588 - protein, 10 aa, synthetic construct
NVGRGDLDEL

SEQ ID NO: 115589 - protein, 10 aa, synthetic construct
NVARGDLDEL

SEQ ID NO: 115590 - protein, 10 aa, synthetic construct
NVVRGDLDEL

SEQ ID NO: 115591 - protein, 10 aa, synthetic construct
NVPRGDLDEL

SEQ ID NO: 115592 - protein, 10 aa, synthetic construct
NVLRGDLDEL

SEQ ID NO: 115593 - protein, 10 aa, synthetic construct
NVIRGDLDEL

SEQ ID NO: 115594 - protein, 10 aa, synthetic construct
NVMRGDLDEL

SEQ ID NO: 115595 - protein, 10 aa, synthetic construct
NVWRGDLDEL

SEQ ID NO: 115596 - protein, 10 aa, synthetic construct
NVFRGDLDEL

SEQ ID NO: 115597 - protein, 10 aa, synthetic construct
NVKRGDLDEL

SEQ ID NO: 115598 - protein, 10 aa, synthetic construct
NVRRGDLDEL

SEQ ID NO: 115599 - protein, 10 aa, synthetic construct
NVHRGDLDEL

SEQ ID NO: 115600 - protein, 10 aa, synthetic construct
NVSRGDLDEL

SEQ ID NO: 115601 - protein, 10 aa, synthetic construct
NVTRGDLDEL

SEQ ID NO: 115602 - protein, 10 aa, synthetic construct
NVYRGDLDEL

SEQ ID NO: 115603 - protein, 10 aa, synthetic construct
NVNRGDLDEL

SEQ ID NO: 115604 - protein, 10 aa, synthetic construct
NVQRGDLDEL

SEQ ID NO: 115605 - protein, 10 aa, synthetic construct
NVDRGDLDEL

SEQ ID NO: 115606 - protein, 10 aa, synthetic construct
NVERGDLDEL

SEQ ID NO: 115607 - protein, 10 aa, synthetic construct
NPGRGDLDEL

SEQ ID NO: 115608 - protein, 10 aa, synthetic construct
NPARGDLDEL

SEQ ID NO: 115609 - protein, 10 aa, synthetic construct
NPVRGDLDEL

SEQ ID NO: 115610 - protein, 10 aa, synthetic construct
NPPRGDLDEL

SEQ ID NO: 115611 - protein, 10 aa, synthetic construct
NPLRGDLDEL

SEQ ID NO: 115612 - protein, 10 aa, synthetic construct
NPIRGDLDEL

SEQ ID NO: 115613 - protein, 10 aa, synthetic construct
NPMRGDLDEL

SEQ ID NO: 115614 - protein, 10 aa, synthetic construct
NPWRGDLDEL

SEQ ID NO: 115615 - protein, 10 aa, synthetic construct
NPFRGDLDEL

SEQ ID NO: 115616 - protein, 10 aa, synthetic construct
NPKRGDLDEL

SEQ ID NO: 115617 - protein, 10 aa, synthetic construct
NPRRGDLDEL

SEQ ID NO: 115618 - protein, 10 aa, synthetic construct
NPHRGDLDEL

SEQ ID NO: 115619 - protein, 10 aa, synthetic construct
NPSRGDLDEL

SEQ ID NO: 115620 - protein, 10 aa, synthetic construct
NPTRGDLDEL

SEQ ID NO: 115621 - protein, 10 aa, synthetic construct
NPYRGDLDEL

SEQ ID NO: 115622 - protein, 10 aa, synthetic construct
NPNRGDLDEL

SEQ ID NO: 115623 - protein, 10 aa, synthetic construct
NPQRGDLDEL

SEQ ID NO: 115624 - protein, 10 aa, synthetic construct
NPDRGDLDEL

SEQ ID NO: 115625 - protein, 10 aa, synthetic construct
NPERGDLDEL

SEQ ID NO: 115626 - protein, 10 aa, synthetic construct
NLGRGDLDEL

SEQ ID NO: 115627 - protein, 10 aa, synthetic construct
NLARGDLDEL

SEQ ID NO: 115628 - protein, 10 aa, synthetic construct
NLVRGDLDEL

SEQ ID NO: 115629 - protein, 10 aa, synthetic construct
NLPRGDLDEL

SEQ ID NO: 115630 - protein, 10 aa, synthetic construct
NLLRGDLDEL

SEQ ID NO: 115631 - protein, 10 aa, synthetic construct
NLIRGDLDEL

SEQ ID NO: 115632 - protein, 10 aa, synthetic construct
NLMRGDLDEL

SEQ ID NO: 115633 - protein, 10 aa, synthetic construct
NLWRGDLDEL

SEQ ID NO: 115634 - protein, 10 aa, synthetic construct
NLFRGDLDEL

SEQ ID NO: 115635 - protein, 10 aa, synthetic construct
NLKRGDLDEL

SEQ ID NO: 115636 - protein, 10 aa, synthetic construct
NLRRGDLDEL

SEQ ID NO: 115637 - protein, 10 aa, synthetic construct
NLHRGDLDEL

SEQ ID NO: 115638 - protein, 10 aa, synthetic construct
NLSRGDLDEL

SEQ ID NO: 115639 - protein, 10 aa, synthetic construct
NLTRGDLDEL

SEQ ID NO: 115640 - protein, 10 aa, synthetic construct
NLYRGDLDEL

SEQ ID NO: 115641 - protein, 10 aa, synthetic construct
NLNRGDLDEL

SEQ ID NO: 115642 - protein, 10 aa, synthetic construct
NLQRGDLDEL

SEQ ID NO: 115643 - protein, 10 aa, synthetic construct
NLDRGDLDEL

SEQ ID NO: 115644 - protein, 10 aa, synthetic construct
NLERGDLDEL

SEQ ID NO: 115645 - protein, 10 aa, synthetic construct
NIGRGDLDEL

SEQ ID NO: 115646 - protein, 10 aa, synthetic construct
NIARGDLDEL

SEQ ID NO: 115647 - protein, 10 aa, synthetic construct
NIVRGDLDEL

SEQ ID NO: 115648 - protein, 10 aa, synthetic construct
NIPRGDLDEL

SEQ ID NO: 115649 - protein, 10 aa, synthetic construct
NILRGDLDEL

SEQ ID NO: 115650 - protein, 10 aa, synthetic construct
NIIRGDLDEL

SEQ ID NO: 115651 - protein, 10 aa, synthetic construct
NIMRGDLDEL

SEQ ID NO: 115652 - protein, 10 aa, synthetic construct
NIWRGDLDEL

SEQ ID NO: 115653 - protein, 10 aa, synthetic construct
NIFRGDLDEL

SEQ ID NO: 115654 - protein, 10 aa, synthetic construct
NIKRGDLDEL

SEQ ID NO: 115655 - protein, 10 aa, synthetic construct
NIRRGDLDEL

SEQ ID NO: 115656 - protein, 10 aa, synthetic construct
NIHRGDLDEL

SEQ ID NO: 115657 - protein, 10 aa, synthetic construct
NISRGDLDEL

SEQ ID NO: 115658 - protein, 10 aa, synthetic construct
NITRGDLDEL

SEQ ID NO: 115659 - protein, 10 aa, synthetic construct
NIYRGDLDEL

SEQ ID NO: 115660 - protein, 10 aa, synthetic construct
NINRGDLDEL

SEQ ID NO: 115661 - protein, 10 aa, synthetic construct
NIQRGDLDEL

SEQ ID NO: 115662 - protein, 10 aa, synthetic construct
NIDRGDLDEL

SEQ ID NO: 115663 - protein, 10 aa, synthetic construct
NIERGDLDEL

SEQ ID NO: 115664 - protein, 10 aa, synthetic construct
NMGRGDLDEL

SEQ ID NO: 115665 - protein, 10 aa, synthetic construct
NMARGDLDEL

SEQ ID NO: 115666 - protein, 10 aa, synthetic construct
NMVRGDLDEL

SEQ ID NO: 115667 - protein, 10 aa, synthetic construct
NMPRGDLDEL

SEQ ID NO: 115668 - protein, 10 aa, synthetic construct
NMLRGDLDEL

SEQ ID NO: 115669 - protein, 10 aa, synthetic construct
NMIRGDLDEL

SEQ ID NO: 115670 - protein, 10 aa, synthetic construct
NMMRGDLDEL

SEQ ID NO: 115671 - protein, 10 aa, synthetic construct
NMWRGDLDEL

SEQ ID NO: 115672 - protein, 10 aa, synthetic construct
NMFRGDLDEL

SEQ ID NO: 115673 - protein, 10 aa, synthetic construct
NMKRGDLDEL

SEQ ID NO: 115674 - protein, 10 aa, synthetic construct
NMRRGDLDEL

SEQ ID NO: 115675 - protein, 10 aa, synthetic construct
NMHRGDLDEL

SEQ ID NO: 115676 - protein, 10 aa, synthetic construct
NMSRGDLDEL

SEQ ID NO: 115677 - protein, 10 aa, synthetic construct
NMTRGDLDEL

SEQ ID NO: 115678 - protein, 10 aa, synthetic construct
NMYRGDLDEL

SEQ ID NO: 115679 - protein, 10 aa, synthetic construct
NMNRGDLDEL

SEQ ID NO: 115680 - protein, 10 aa, synthetic construct
NMQRGDLDEL

SEQ ID NO: 115681 - protein, 10 aa, synthetic construct
NMDRGDLDEL

SEQ ID NO: 115682 - protein, 10 aa, synthetic construct
NMERGDLDEL

SEQ ID NO: 115683 - protein, 10 aa, synthetic construct
NWGRGDLDEL

SEQ ID NO: 115684 - protein, 10 aa, synthetic construct
NWARGDLDEL

SEQ ID NO: 115685 - protein, 10 aa, synthetic construct
NWVRGDLDEL

SEQ ID NO: 115686 - protein, 10 aa, synthetic construct
NWPRGDLDEL

SEQ ID NO: 115687 - protein, 10 aa, synthetic construct
NWLRGDLDEL

SEQ ID NO: 115688 - protein, 10 aa, synthetic construct
NWIRGDLDEL

SEQ ID NO: 115689 - protein, 10 aa, synthetic construct
NWMRGDLDEL

SEQ ID NO: 115690 - protein, 10 aa, synthetic construct
NWWRGDLDEL

SEQ ID NO: 115691 - protein, 10 aa, synthetic construct
NWFRGDLDEL

SEQ ID NO: 115692 - protein, 10 aa, synthetic construct
NWKRGDLDEL

SEQ ID NO: 115693 - protein, 10 aa, synthetic construct
NWRRGDLDEL

SEQ ID NO: 115694 - protein, 10 aa, synthetic construct
NWHRGDLDEL

SEQ ID NO: 115695 - protein, 10 aa, synthetic construct
NWSRGDLDEL

SEQ ID NO: 115696 - protein, 10 aa, synthetic construct
NWTRGDLDEL

SEQ ID NO: 115697 - protein, 10 aa, synthetic construct
NWYRGDLDEL

SEQ ID NO: 115698 - protein, 10 aa, synthetic construct
NWNRGDLDEL

SEQ ID NO: 115699 - protein, 10 aa, synthetic construct
NWQRGDLDEL

SEQ ID NO: 115700 - protein, 10 aa, synthetic construct
NWDRGDLDEL

SEQ ID NO: 115701 - protein, 10 aa, synthetic construct
NWERGDLDEL

SEQ ID NO: 115702 - protein, 10 aa, synthetic construct
NFGRGDLDEL

SEQ ID NO: 115703 - protein, 10 aa, synthetic construct
NFARGDLDEL

SEQ ID NO: 115704 - protein, 10 aa, synthetic construct
NFVRGDLDEL

SEQ ID NO: 115705 - protein, 10 aa, synthetic construct
NFPRGDLDEL

SEQ ID NO: 115706 - protein, 10 aa, synthetic construct
NFLRGDLDEL

SEQ ID NO: 115707 - protein, 10 aa, synthetic construct
NFIRGDLDEL

SEQ ID NO: 115708 - protein, 10 aa, synthetic construct
NFMRGDLDEL

SEQ ID NO: 115709 - protein, 10 aa, synthetic construct
NFWRGDLDEL

SEQ ID NO: 115710 - protein, 10 aa, synthetic construct
NFFRGDLDEL

SEQ ID NO: 115711 - protein, 10 aa, synthetic construct
NFKRGDLDEL

SEQ ID NO: 115712 - protein, 10 aa, synthetic construct
NFRRGDLDEL

SEQ ID NO: 115713 - protein, 10 aa, synthetic construct
NFHRGDLDEL

SEQ ID NO: 115714 - protein, 10 aa, synthetic construct
NFSRGDLDEL

SEQ ID NO: 115715 - protein, 10 aa, synthetic construct
NFTRGDLDEL

SEQ ID NO: 115716 - protein, 10 aa, synthetic construct
NFYRGDLDEL

SEQ ID NO: 115717 - protein, 10 aa, synthetic construct
NFNRGDLDEL

SEQ ID NO: 115718 - protein, 10 aa, synthetic construct
NFQRGDLDEL

SEQ ID NO: 115719 - protein, 10 aa, synthetic construct
NFDRGDLDEL

SEQ ID NO: 115720 - protein, 10 aa, synthetic construct
NFERGDLDEL

SEQ ID NO: 115721 - protein, 10 aa, synthetic construct
NKGRGDLDEL

SEQ ID NO: 115722 - protein, 10 aa, synthetic construct
NKARGDLDEL

SEQ ID NO: 115723 - protein, 10 aa, synthetic construct
NKVRGDLDEL

SEQ ID NO: 115724 - protein, 10 aa, synthetic construct
NKPRGDLDEL

SEQ ID NO: 115725 - protein, 10 aa, synthetic construct
NKLRGDLDEL

SEQ ID NO: 115726 - protein, 10 aa, synthetic construct
NKIRGDLDEL

SEQ ID NO: 115727 - protein, 10 aa, synthetic construct
NKMRGDLDEL

SEQ ID NO: 115728 - protein, 10 aa, synthetic construct
NKWRGDLDEL

SEQ ID NO: 115729 - protein, 10 aa, synthetic construct
NKFRGDLDEL

SEQ ID NO: 115730 - protein, 10 aa, synthetic construct
NKKRGDLDEL

SEQ ID NO: 115731 - protein, 10 aa, synthetic construct
NKRRGDLDEL

SEQ ID NO: 115732 - protein, 10 aa, synthetic construct
NKHRGDLDEL

SEQ ID NO: 115733 - protein, 10 aa, synthetic construct
NKSRGDLDEL

SEQ ID NO: 115734 - protein, 10 aa, synthetic construct
NKTRGDLDEL

SEQ ID NO: 115735 - protein, 10 aa, synthetic construct
NKYRGDLDEL

SEQ ID NO: 115736 - protein, 10 aa, synthetic construct
NKNRGDLDEL

SEQ ID NO: 115737 - protein, 10 aa, synthetic construct
NKQRGDLDEL

SEQ ID NO: 115738 - protein, 10 aa, synthetic construct
NKDRGDLDEL

SEQ ID NO: 115739 - protein, 10 aa, synthetic construct
NKERGDLDEL

SEQ ID NO: 115740 - protein, 10 aa, synthetic construct
NRGRGDLDEL

SEQ ID NO: 115741 - protein, 10 aa, synthetic construct
NRARGDLDEL

SEQ ID NO: 115742 - protein, 10 aa, synthetic construct
NRVRGDLDEL

SEQ ID NO: 115743 - protein, 10 aa, synthetic construct
NRPRGDLDEL

SEQ ID NO: 115744 - protein, 10 aa, synthetic construct
NRLRGDLDEL

SEQ ID NO: 115745 - protein, 10 aa, synthetic construct
NRIRGDLDEL

SEQ ID NO: 115746 - protein, 10 aa, synthetic construct
NRMRGDLDEL

SEQ ID NO: 115747 - protein, 10 aa, synthetic construct
NRWRGDLDEL

SEQ ID NO: 115748 - protein, 10 aa, synthetic construct
NRFRGDLDEL

SEQ ID NO: 115749 - protein, 10 aa, synthetic construct
NRKRGDLDEL

SEQ ID NO: 115750 - protein, 10 aa, synthetic construct
NRRRGDLDEL

SEQ ID NO: 115751 - protein, 10 aa, synthetic construct
NRHRGDLDEL

SEQ ID NO: 115752 - protein, 10 aa, synthetic construct
NRSRGDLDEL

SEQ ID NO: 115753 - protein, 10 aa, synthetic construct
NRTRGDLDEL

SEQ ID NO: 115754 - protein, 10 aa, synthetic construct
NRYRGDLDEL

SEQ ID NO: 115755 - protein, 10 aa, synthetic construct
NRNRGDLDEL

SEQ ID NO: 115756 - protein, 10 aa, synthetic construct
NRQRGDLDEL

SEQ ID NO: 115757 - protein, 10 aa, synthetic construct
NRDRGDLDEL

SEQ ID NO: 115758 - protein, 10 aa, synthetic construct
NRERGDLDEL

SEQ ID NO: 115759 - protein, 10 aa, synthetic construct
NHGRGDLDEL

SEQ ID NO: 115760 - protein, 10 aa, synthetic construct
NHARGDLDEL

SEQ ID NO: 115761 - protein, 10 aa, synthetic construct
NHVRGDLDEL

SEQ ID NO: 115762 - protein, 10 aa, synthetic construct
NHPRGDLDEL

SEQ ID NO: 115763 - protein, 10 aa, synthetic construct
NHLRGDLDEL

SEQ ID NO: 115764 - protein, 10 aa, synthetic construct
NHIRGDLDEL

SEQ ID NO: 115765 - protein, 10 aa, synthetic construct
NHMRGDLDEL

SEQ ID NO: 115766 - protein, 10 aa, synthetic construct
NHWRGDLDEL

SEQ ID NO: 115767 - protein, 10 aa, synthetic construct
NHFRGDLDEL

SEQ ID NO: 115768 - protein, 10 aa, synthetic construct
NHKRGDLDEL

SEQ ID NO: 115769 - protein, 10 aa, synthetic construct
NHRRGDLDEL

SEQ ID NO: 115770 - protein, 10 aa, synthetic construct
NHHRGDLDEL

SEQ ID NO: 115771 - protein, 10 aa, synthetic construct
NHSRGDLDEL

SEQ ID NO: 115772 - protein, 10 aa, synthetic construct
NHTRGDLDEL

SEQ ID NO: 115773 - protein, 10 aa, synthetic construct
NHYRGDLDEL

SEQ ID NO: 115774 - protein, 10 aa, synthetic construct
NHNRGDLDEL

SEQ ID NO: 115775 - protein, 10 aa, synthetic construct
NHQRGDLDEL

SEQ ID NO: 115776 - protein, 10 aa, synthetic construct
NHDRGDLDEL

SEQ ID NO: 115777 - protein, 10 aa, synthetic construct
NHERGDLDEL

SEQ ID NO: 115778 - protein, 10 aa, synthetic construct
NSGRGDLDEL

SEQ ID NO: 115779 - protein, 10 aa, synthetic construct
NSARGDLDEL

SEQ ID NO: 115780 - protein, 10 aa, synthetic construct
NSVRGDLDEL

SEQ ID NO: 115781 - protein, 10 aa, synthetic construct
NSPRGDLDEL

SEQ ID NO: 115782 - protein, 10 aa, synthetic construct
NSLRGDLDEL

SEQ ID NO: 115783 - protein, 10 aa, synthetic construct
NSIRGDLDEL

SEQ ID NO: 115784 - protein, 10 aa, synthetic construct
NSMRGDLDEL

SEQ ID NO: 115785 - protein, 10 aa, synthetic construct
NSWRGDLDEL

SEQ ID NO: 115786 - protein, 10 aa, synthetic construct
NSFRGDLDEL

SEQ ID NO: 115787 - protein, 10 aa, synthetic construct
NSKRGDLDEL

SEQ ID NO: 115788 - protein, 10 aa, synthetic construct
NSRRGDLDEL

SEQ ID NO: 115789 - protein, 10 aa, synthetic construct
NSHRGDLDEL

SEQ ID NO: 115790 - protein, 10 aa, synthetic construct
NSSRGDLDEL

SEQ ID NO: 115791 - protein, 10 aa, synthetic construct
NSTRGDLDEL

SEQ ID NO: 115792 - protein, 10 aa, synthetic construct
NSYRGDLDEL

SEQ ID NO: 115793 - protein, 10 aa, synthetic construct
NSNRGDLDEL

SEQ ID NO: 115794 - protein, 10 aa, synthetic construct
NSQRGDLDEL

SEQ ID NO: 115795 - protein, 10 aa, synthetic construct
NSDRGDLDEL

SEQ ID NO: 115796 - protein, 10 aa, synthetic construct
NSERGDLDEL

SEQ ID NO: 115797 - protein, 10 aa, synthetic construct
NTGRGDLDEL

SEQ ID NO: 115798 - protein, 10 aa, synthetic construct
NTARGDLDEL

SEQ ID NO: 115799 - protein, 10 aa, synthetic construct
NTVRGDLDEL

SEQ ID NO: 115800 - protein, 10 aa, synthetic construct
NTPRGDLDEL

SEQ ID NO: 115801 - protein, 10 aa, synthetic construct
NTLRGDLDEL

SEQ ID NO: 115802 - protein, 10 aa, synthetic construct
NTIRGDLDEL

SEQ ID NO: 115803 - protein, 10 aa, synthetic construct
NTMRGDLDEL

SEQ ID NO: 115804 - protein, 10 aa, synthetic construct
NTWRGDLDEL

SEQ ID NO: 115805 - protein, 10 aa, synthetic construct
NTFRGDLDEL

SEQ ID NO: 115806 - protein, 10 aa, synthetic construct
NTKRGDLDEL

SEQ ID NO: 115807 - protein, 10 aa, synthetic construct
NTRRGDLDEL

SEQ ID NO: 115808 - protein, 10 aa, synthetic construct
NTHRGDLDEL

SEQ ID NO: 115809 - protein, 10 aa, synthetic construct
NTSRGDLDEL

SEQ ID NO: 115810 - protein, 10 aa, synthetic construct
NTTRGDLDEL

SEQ ID NO: 115811 - protein, 10 aa, synthetic construct
NTYRGDLDEL

SEQ ID NO: 115812 - protein, 10 aa, synthetic construct
NTNRGDLDEL

SEQ ID NO: 115813 - protein, 10 aa, synthetic construct
NTQRGDLDEL

SEQ ID NO: 115814 - protein, 10 aa, synthetic construct
NTDRGDLDEL

SEQ ID NO: 115815 - protein, 10 aa, synthetic construct
NTERGDLDEL

SEQ ID NO: 115816 - protein, 10 aa, synthetic construct
NYGRGDLDEL

SEQ ID NO: 115817 - protein, 10 aa, synthetic construct
NYARGDLDEL

SEQ ID NO: 115818 - protein, 10 aa, synthetic construct
NYVRGDLDEL

SEQ ID NO: 115819 - protein, 10 aa, synthetic construct
NYPRGDLDEL

SEQ ID NO: 115820 - protein, 10 aa, synthetic construct
NYLRGDLDEL

SEQ ID NO: 115821 - protein, 10 aa, synthetic construct
NYIRGDLDEL

SEQ ID NO: 115822 - protein, 10 aa, synthetic construct
NYMRGDLDEL

SEQ ID NO: 115823 - protein, 10 aa, synthetic construct
NYWRGDLDEL

SEQ ID NO: 115824 - protein, 10 aa, synthetic construct
NYFRGDLDEL

SEQ ID NO: 115825 - protein, 10 aa, synthetic construct
NYKRGDLDEL

SEQ ID NO: 115826 - protein, 10 aa, synthetic construct
NYRRGDLDEL

SEQ ID NO: 115827 - protein, 10 aa, synthetic construct
NYHRGDLDEL

SEQ ID NO: 115828 - protein, 10 aa, synthetic construct
NYSRGDLDEL

SEQ ID NO: 115829 - protein, 10 aa, synthetic construct
NYTRGDLDEL

SEQ ID NO: 115830 - protein, 10 aa, synthetic construct
NYYRGDLDEL

SEQ ID NO: 115831 - protein, 10 aa, synthetic construct
NYNRGDLDEL

SEQ ID NO: 115832 - protein, 10 aa, synthetic construct
NYQRGDLDEL

SEQ ID NO: 115833 - protein, 10 aa, synthetic construct
NYDRGDLDEL

SEQ ID NO: 115834 - protein, 10 aa, synthetic construct
NYERGDLDEL

SEQ ID NO: 115835 - protein, 10 aa, synthetic construct
NNGRGDLDEL

SEQ ID NO: 115836 - protein, 10 aa, synthetic construct
NNARGDLDEL

SEQ ID NO: 115837 - protein, 10 aa, synthetic construct
NNVRGDLDEL

SEQ ID NO: 115838 - protein, 10 aa, synthetic construct
NNPRGDLDEL

SEQ ID NO: 115839 - protein, 10 aa, synthetic construct
NNLRGDLDEL

SEQ ID NO: 115840 - protein, 10 aa, synthetic construct
NNIRGDLDEL

SEQ ID NO: 115841 - protein, 10 aa, synthetic construct
NNMRGDLDEL

SEQ ID NO: 115842 - protein, 10 aa, synthetic construct
NNWRGDLDEL

SEQ ID NO: 115843 - protein, 10 aa, synthetic construct
NNFRGDLDEL

SEQ ID NO: 115844 - protein, 10 aa, synthetic construct
NNKRGDLDEL

SEQ ID NO: 115845 - protein, 10 aa, synthetic construct
NNRRGDLDEL

SEQ ID NO: 115846 - protein, 10 aa, synthetic construct
NNHRGDLDEL

SEQ ID NO: 115847 - protein, 10 aa, synthetic construct
NNSRGDLDEL

SEQ ID NO: 115848 - protein, 10 aa, synthetic construct
NNTRGDLDEL

SEQ ID NO: 115849 - protein, 10 aa, synthetic construct
NNYRGDLDEL

SEQ ID NO: 115850 - protein, 10 aa, synthetic construct
NNNRGDLDEL

SEQ ID NO: 115851 - protein, 10 aa, synthetic construct
NNQRGDLDEL

SEQ ID NO: 115852 - protein, 10 aa, synthetic construct
NNDRGDLDEL

SEQ ID NO: 115853 - protein, 10 aa, synthetic construct
NNERGDLDEL

SEQ ID NO: 115854 - protein, 10 aa, synthetic construct
NQGRGDLDEL

SEQ ID NO: 115855 - protein, 10 aa, synthetic construct
NQARGDLDEL

SEQ ID NO: 115856 - protein, 10 aa, synthetic construct
NQVRGDLDEL

SEQ ID NO: 115857 - protein, 10 aa, synthetic construct
NQPRGDLDEL

SEQ ID NO: 115858 - protein, 10 aa, synthetic construct
NQLRGDLDEL

SEQ ID NO: 115859 - protein, 10 aa, synthetic construct
NQIRGDLDEL

SEQ ID NO: 115860 - protein, 10 aa, synthetic construct
NQMRGDLDEL

SEQ ID NO: 115861 - protein, 10 aa, synthetic construct
NQWRGDLDEL

SEQ ID NO: 115862 - protein, 10 aa, synthetic construct
NQFRGDLDEL

SEQ ID NO: 115863 - protein, 10 aa, synthetic construct
NQKRGDLDEL

SEQ ID NO: 115864 - protein, 10 aa, synthetic construct
NQRRGDLDEL

SEQ ID NO: 115865 - protein, 10 aa, synthetic construct
NQHRGDLDEL

SEQ ID NO: 115866 - protein, 10 aa, synthetic construct
NQSRGDLDEL

SEQ ID NO: 115867 - protein, 10 aa, synthetic construct
NQTRGDLDEL

SEQ ID NO: 115868 - protein, 10 aa, synthetic construct
NQYRGDLDEL

SEQ ID NO: 115869 - protein, 10 aa, synthetic construct
NQNRGDLDEL

SEQ ID NO: 115870 - protein, 10 aa, synthetic construct
NQQRGDLDEL

SEQ ID NO: 115871 - protein, 10 aa, synthetic construct
NQDRGDLDEL

SEQ ID NO: 115872 - protein, 10 aa, synthetic construct
NQERGDLDEL

SEQ ID NO: 115873 - protein, 10 aa, synthetic construct
NDGRGDLDEL

SEQ ID NO: 115874 - protein, 10 aa, synthetic construct
NDARGDLDEL

SEQ ID NO: 115875 - protein, 10 aa, synthetic construct
NDVRGDLDEL

SEQ ID NO: 115876 - protein, 10 aa, synthetic construct
NDPRGDLDEL

SEQ ID NO: 115877 - protein, 10 aa, synthetic construct
NDLRGDLDEL

SEQ ID NO: 115878 - protein, 10 aa, synthetic construct
NDIRGDLDEL

SEQ ID NO: 115879 - protein, 10 aa, synthetic construct
NDMRGDLDEL

SEQ ID NO: 115880 - protein, 10 aa, synthetic construct
NDWRGDLDEL

SEQ ID NO: 115881 - protein, 10 aa, synthetic construct
NDFRGDLDEL

SEQ ID NO: 115882 - protein, 10 aa, synthetic construct
NDKRGDLDEL

SEQ ID NO: 115883 - protein, 10 aa, synthetic construct
NDRRGDLDEL

SEQ ID NO: 115884 - protein, 10 aa, synthetic construct
NDHRGDLDEL

SEQ ID NO: 115885 - protein, 10 aa, synthetic construct
NDSRGDLDEL

SEQ ID NO: 115886 - protein, 10 aa, synthetic construct
NDTRGDLDEL

SEQ ID NO: 115887 - protein, 10 aa, synthetic construct
NDYRGDLDEL

SEQ ID NO: 115888 - protein, 10 aa, synthetic construct
NDNRGDLDEL

SEQ ID NO: 115889 - protein, 10 aa, synthetic construct
NDQRGDLDEL

SEQ ID NO: 115890 - protein, 10 aa, synthetic construct
NDDRGDLDEL

SEQ ID NO: 115891 - protein, 10 aa, synthetic construct
NDERGDLDEL

SEQ ID NO: 115892 - protein, 10 aa, synthetic construct
NEGRGDLDEL

SEQ ID NO: 115893 - protein, 10 aa, synthetic construct
NEARGDLDEL

SEQ ID NO: 115894 - protein, 10 aa, synthetic construct
NEVRGDLDEL

SEQ ID NO: 115895 - protein, 10 aa, synthetic construct
NEPRGDLDEL

SEQ ID NO: 115896 - protein, 10 aa, synthetic construct
NELRGDLDEL

SEQ ID NO: 115897 - protein, 10 aa, synthetic construct
NEIRGDLDEL

SEQ ID NO: 115898 - protein, 10 aa, synthetic construct
NEMRGDLDEL

SEQ ID NO: 115899 - protein, 10 aa, synthetic construct
NEWRGDLDEL

SEQ ID NO: 115900 - protein, 10 aa, synthetic construct
NEFRGDLDEL

SEQ ID NO: 115901 - protein, 10 aa, synthetic construct
NEKRGDLDEL

SEQ ID NO: 115902 - protein, 10 aa, synthetic construct
NERRGDLDEL

SEQ ID NO: 115903 - protein, 10 aa, synthetic construct
NEHRGDLDEL

SEQ ID NO: 115904 - protein, 10 aa, synthetic construct
NESRGDLDEL

SEQ ID NO: 115905 - protein, 10 aa, synthetic construct
NETRGDLDEL

SEQ ID NO: 115906 - protein, 10 aa, synthetic construct
NEYRGDLDEL

SEQ ID NO: 115907 - protein, 10 aa, synthetic construct
NENRGDLDEL

SEQ ID NO: 115908 - protein, 10 aa, synthetic construct
NEQRGDLDEL

SEQ ID NO: 115909 - protein, 10 aa, synthetic construct
NEDRGDLDEL

SEQ ID NO: 115910 - protein, 10 aa, synthetic construct
NEERGDLDEL

SEQ ID NO: 115911 - protein, 10 aa, synthetic construct
DGGRGDLDEL

SEQ ID NO: 115912 - protein, 10 aa, synthetic construct
DGARGDLDEL

SEQ ID NO: 115913 - protein, 10 aa, synthetic construct
DGVRGDLDEL

SEQ ID NO: 115914 - protein, 10 aa, synthetic construct
DGPRGDLDEL

SEQ ID NO: 115915 - protein, 10 aa, synthetic construct
DGLRGDLDEL

SEQ ID NO: 115916 - protein, 10 aa, synthetic construct
DGIRGDLDEL

SEQ ID NO: 115917 - protein, 10 aa, synthetic construct
DGMRGDLDEL

SEQ ID NO: 115918 - protein, 10 aa, synthetic construct
DGWRGDLDEL

SEQ ID NO: 115919 - protein, 10 aa, synthetic construct
DGFRGDLDEL

SEQ ID NO: 115920 - protein, 10 aa, synthetic construct
DGKRGDLDEL

SEQ ID NO: 115921 - protein, 10 aa, synthetic construct
DGRRGDLDEL

SEQ ID NO: 115922 - protein, 10 aa, synthetic construct
DGHRGDLDEL

SEQ ID NO: 115923 - protein, 10 aa, synthetic construct
DGSRGDLDEL

SEQ ID NO: 115924 - protein, 10 aa, synthetic construct
DGTRGDLDEL

SEQ ID NO: 115925 - protein, 10 aa, synthetic construct
DGYRGDLDEL

SEQ ID NO: 115926 - protein, 10 aa, synthetic construct
DGNRGDLDEL

SEQ ID NO: 115927 - protein, 10 aa, synthetic construct
DGQRGDLDEL

SEQ ID NO: 115928 - protein, 10 aa, synthetic construct
DGDRGDLDEL

SEQ ID NO: 115929 - protein, 10 aa, synthetic construct
DGERGDLDEL

SEQ ID NO: 115930 - protein, 10 aa, synthetic construct
DAGRGDLDEL

SEQ ID NO: 115931 - protein, 10 aa, synthetic construct
DAARGDLDEL

SEQ ID NO: 115932 - protein, 10 aa, synthetic construct
DAVRGDLDEL

SEQ ID NO: 115933 - protein, 10 aa, synthetic construct
DAPRGDLDEL

SEQ ID NO: 115934 - protein, 10 aa, synthetic construct
DALRGDLDEL

SEQ ID NO: 115935 - protein, 10 aa, synthetic construct
DAIRGDLDEL

SEQ ID NO: 115936 - protein, 10 aa, synthetic construct
DAMRGDLDEL

SEQ ID NO: 115937 - protein, 10 aa, synthetic construct
DAWRGDLDEL

SEQ ID NO: 115938 - protein, 10 aa, synthetic construct
DAFRGDLDEL

SEQ ID NO: 115939 - protein, 10 aa, synthetic construct
DAKRGDLDEL

SEQ ID NO: 115940 - protein, 10 aa, synthetic construct
DARRGDLDEL

SEQ ID NO: 115941 - protein, 10 aa, synthetic construct
DAHRGDLDEL

SEQ ID NO: 115942 - protein, 10 aa, synthetic construct
DASRGDLDEL

SEQ ID NO: 115943 - protein, 10 aa, synthetic construct
DATRGDLDEL

SEQ ID NO: 115944 - protein, 10 aa, synthetic construct
DAYRGDLDEL

SEQ ID NO: 115945 - protein, 10 aa, synthetic construct
DANRGDLDEL

SEQ ID NO: 115946 - protein, 10 aa, synthetic construct
DAQRGDLDEL

SEQ ID NO: 115947 - protein, 10 aa, synthetic construct
DADRGDLDEL

SEQ ID NO: 115948 - protein, 10 aa, synthetic construct
DAERGDLDEL

SEQ ID NO: 115949 - protein, 10 aa, synthetic construct
DVGRGDLDEL

SEQ ID NO: 115950 - protein, 10 aa, synthetic construct
DVARGDLDEL

SEQ ID NO: 115951 - protein, 10 aa, synthetic construct
DVVRGDLDEL

SEQ ID NO: 115952 - protein, 10 aa, synthetic construct
DVPRGDLDEL

SEQ ID NO: 115953 - protein, 10 aa, synthetic construct
DVLRGDLDEL

SEQ ID NO: 115954 - protein, 10 aa, synthetic construct
DVIRGDLDEL

SEQ ID NO: 115955 - protein, 10 aa, synthetic construct
DVMRGDLDEL

SEQ ID NO: 115956 - protein, 10 aa, synthetic construct
DVWRGDLDEL

SEQ ID NO: 115957 - protein, 10 aa, synthetic construct
DVFRGDLDEL

SEQ ID NO: 115958 - protein, 10 aa, synthetic construct
DVKRGDLDEL

SEQ ID NO: 115959 - protein, 10 aa, synthetic construct
DVRRGDLDEL

SEQ ID NO: 115960 - protein, 10 aa, synthetic construct
DVHRGDLDEL

SEQ ID NO: 115961 - protein, 10 aa, synthetic construct
DVSRGDLDEL

SEQ ID NO: 115962 - protein, 10 aa, synthetic construct
DVTRGDLDEL

SEQ ID NO: 115963 - protein, 10 aa, synthetic construct
DVYRGDLDEL

SEQ ID NO: 115964 - protein, 10 aa, synthetic construct
DVNRGDLDEL

SEQ ID NO: 115965 - protein, 10 aa, synthetic construct
DVQRGDLDEL

SEQ ID NO: 115966 - protein, 10 aa, synthetic construct
DVDRGDLDEL

SEQ ID NO: 115967 - protein, 10 aa, synthetic construct
DVERGDLDEL

SEQ ID NO: 115968 - protein, 10 aa, synthetic construct
DPGRGDLDEL

SEQ ID NO: 115969 - protein, 10 aa, synthetic construct
DPARGDLDEL

SEQ ID NO: 115970 - protein, 10 aa, synthetic construct
DPVRGDLDEL

SEQ ID NO: 115971 - protein, 10 aa, synthetic construct
DPPRGDLDEL

SEQ ID NO: 115972 - protein, 10 aa, synthetic construct
DPLRGDLDEL

SEQ ID NO: 115973 - protein, 10 aa, synthetic construct
DPIRGDLDEL

SEQ ID NO: 115974 - protein, 10 aa, synthetic construct
DPMRGDLDEL

SEQ ID NO: 115975 - protein, 10 aa, synthetic construct
DPWRGDLDEL

SEQ ID NO: 115976 - protein, 10 aa, synthetic construct
DPFRGDLDEL

SEQ ID NO: 115977 - protein, 10 aa, synthetic construct
DPKRGDLDEL

SEQ ID NO: 115978 - protein, 10 aa, synthetic construct
DPRRGDLDEL

SEQ ID NO: 115979 - protein, 10 aa, synthetic construct
DPHRGDLDEL

SEQ ID NO: 115980 - protein, 10 aa, synthetic construct
DPSRGDLDEL

SEQ ID NO: 115981 - protein, 10 aa, synthetic construct
DPTRGDLDEL

SEQ ID NO: 115982 - protein, 10 aa, synthetic construct
DPYRGDLDEL

SEQ ID NO: 115983 - protein, 10 aa, synthetic construct
DPNRGDLDEL

SEQ ID NO: 115984 - protein, 10 aa, synthetic construct
DPQRGDLDEL

SEQ ID NO: 115985 - protein, 10 aa, synthetic construct
DPDRGDLDEL

SEQ ID NO: 115986 - protein, 10 aa, synthetic construct
DPERGDLDEL

SEQ ID NO: 115987 - protein, 10 aa, synthetic construct
DLGRGDLDEL

SEQ ID NO: 115988 - protein, 10 aa, synthetic construct
DLARGDLDEL

SEQ ID NO: 115989 - protein, 10 aa, synthetic construct
DLVRGDLDEL

SEQ ID NO: 115990 - protein, 10 aa, synthetic construct
DLPRGDLDEL

SEQ ID NO: 115991 - protein, 10 aa, synthetic construct
DLLRGDLDEL

SEQ ID NO: 115992 - protein, 10 aa, synthetic construct
DLIRGDLDEL

SEQ ID NO: 115993 - protein, 10 aa, synthetic construct
DLMRGDLDEL

SEQ ID NO: 115994 - protein, 10 aa, synthetic construct
DLWRGDLDEL

SEQ ID NO: 115995 - protein, 10 aa, synthetic construct
DLFRGDLDEL

SEQ ID NO: 115996 - protein, 10 aa, synthetic construct
DLKRGDLDEL

SEQ ID NO: 115997 - protein, 10 aa, synthetic construct
DLRRGDLDEL

SEQ ID NO: 115998 - protein, 10 aa, synthetic construct
DLHRGDLDEL

SEQ ID NO: 115999 - protein, 10 aa, synthetic construct
DLSRGDLDEL

SEQ ID NO: 116000 - protein, 10 aa, synthetic construct
DLTRGDLDEL

SEQ ID NO: 116001 - protein, 10 aa, synthetic construct
DLYRGDLDEL

SEQ ID NO: 116002 - protein, 10 aa, synthetic construct
DLNRGDLDEL

SEQ ID NO: 116003 - protein, 10 aa, synthetic construct
DLQRGDLDEL

SEQ ID NO: 116004 - protein, 10 aa, synthetic construct
DLDRGDLDEL

SEQ ID NO: 116005 - protein, 10 aa, synthetic construct
DLERGDLDEL

SEQ ID NO: 116006 - protein, 10 aa, synthetic construct
DIGRGDLDEL

SEQ ID NO: 116007 - protein, 10 aa, synthetic construct
DIARGDLDEL

SEQ ID NO: 116008 - protein, 10 aa, synthetic construct
DIVRGDLDEL

SEQ ID NO: 116009 - protein, 10 aa, synthetic construct
DIPRGDLDEL

SEQ ID NO: 116010 - protein, 10 aa, synthetic construct
DILRGDLDEL

SEQ ID NO: 116011 - protein, 10 aa, synthetic construct
DIIRGDLDEL

SEQ ID NO: 116012 - protein, 10 aa, synthetic construct
DIMRGDLDEL

SEQ ID NO: 116013 - protein, 10 aa, synthetic construct
DIWRGDLDEL

SEQ ID NO: 116014 - protein, 10 aa, synthetic construct
DIFRGDLDEL

SEQ ID NO: 116015 - protein, 10 aa, synthetic construct
DIKRGDLDEL

SEQ ID NO: 116016 - protein, 10 aa, synthetic construct
DIRRGDLDEL

SEQ ID NO: 116017 - protein, 10 aa, synthetic construct
DIHRGDLDEL

SEQ ID NO: 116018 - protein, 10 aa, synthetic construct
DISRGDLDEL

SEQ ID NO: 116019 - protein, 10 aa, synthetic construct
DITRGDLDEL

SEQ ID NO: 116020 - protein, 10 aa, synthetic construct
DIYRGDLDEL

SEQ ID NO: 116021 - protein, 10 aa, synthetic construct
DINRGDLDEL

SEQ ID NO: 116022 - protein, 10 aa, synthetic construct
DIQRGDLDEL

SEQ ID NO: 116023 - protein, 10 aa, synthetic construct
DIDRGDLDEL

SEQ ID NO: 116024 - protein, 10 aa, synthetic construct
DIERGDLDEL

SEQ ID NO: 116025 - protein, 10 aa, synthetic construct
DMGRGDLDEL

SEQ ID NO: 116026 - protein, 10 aa, synthetic construct
DMARGDLDEL

SEQ ID NO: 116027 - protein, 10 aa, synthetic construct
DMVRGDLDEL

SEQ ID NO: 116028 - protein, 10 aa, synthetic construct
DMPRGDLDEL

SEQ ID NO: 116029 - protein, 10 aa, synthetic construct
DMLRGDLDEL

SEQ ID NO: 116030 - protein, 10 aa, synthetic construct
DMIRGDLDEL

SEQ ID NO: 116031 - protein, 10 aa, synthetic construct
DMMRGDLDEL

SEQ ID NO: 116032 - protein, 10 aa, synthetic construct
DMWRGDLDEL

SEQ ID NO: 116033 - protein, 10 aa, synthetic construct
DMFRGDLDEL

SEQ ID NO: 116034 - protein, 10 aa, synthetic construct
DMKRGDLDEL

SEQ ID NO: 116035 - protein, 10 aa, synthetic construct
DMRRGDLDEL

SEQ ID NO: 116036 - protein, 10 aa, synthetic construct
DMHRGDLDEL

SEQ ID NO: 116037 - protein, 10 aa, synthetic construct
DMSRGDLDEL

SEQ ID NO: 116038 - protein, 10 aa, synthetic construct
DMTRGDLDEL

SEQ ID NO: 116039 - protein, 10 aa, synthetic construct
DMYRGDLDEL

SEQ ID NO: 116040 - protein, 10 aa, synthetic construct
DMNRGDLDEL

SEQ ID NO: 116041 - protein, 10 aa, synthetic construct
DMQRGDLDEL

SEQ ID NO: 116042 - protein, 10 aa, synthetic construct
DMDRGDLDEL

SEQ ID NO: 116043 - protein, 10 aa, synthetic construct
DMERGDLDEL

SEQ ID NO: 116044 - protein, 10 aa, synthetic construct
DWGRGDLDEL

SEQ ID NO: 116045 - protein, 10 aa, synthetic construct
DWARGDLDEL

SEQ ID NO: 116046 - protein, 10 aa, synthetic construct
DWVRGDLDEL

SEQ ID NO: 116047 - protein, 10 aa, synthetic construct
DWPRGDLDEL

SEQ ID NO: 116048 - protein, 10 aa, synthetic construct
DWLRGDLDEL

SEQ ID NO: 116049 - protein, 10 aa, synthetic construct
DWIRGDLDEL

SEQ ID NO: 116050 - protein, 10 aa, synthetic construct
DWMRGDLDEL

SEQ ID NO: 116051 - protein, 10 aa, synthetic construct
DWWRGDLDEL

SEQ ID NO: 116052 - protein, 10 aa, synthetic construct
DWFRGDLDEL

SEQ ID NO: 116053 - protein, 10 aa, synthetic construct
DWKRGDLDEL

SEQ ID NO: 116054 - protein, 10 aa, synthetic construct
DWRRGDLDEL

SEQ ID NO: 116055 - protein, 10 aa, synthetic construct
DWHRGDLDEL

SEQ ID NO: 116056 - protein, 10 aa, synthetic construct
DWSRGDLDEL

SEQ ID NO: 116057 - protein, 10 aa, synthetic construct
DWTRGDLDEL

SEQ ID NO: 116058 - protein, 10 aa, synthetic construct
DWYRGDLDEL

SEQ ID NO: 116059 - protein, 10 aa, synthetic construct
DWNRGDLDEL

SEQ ID NO: 116060 - protein, 10 aa, synthetic construct
DWQRGDLDEL

SEQ ID NO: 116061 - protein, 10 aa, synthetic construct
DWDRGDLDEL

SEQ ID NO: 116062 - protein, 10 aa, synthetic construct
DWERGDLDEL

SEQ ID NO: 116063 - protein, 10 aa, synthetic construct
DFGRGDLDEL

SEQ ID NO: 116064 - protein, 10 aa, synthetic construct
DFARGDLDEL

SEQ ID NO: 116065 - protein, 10 aa, synthetic construct
DFVRGDLDEL

SEQ ID NO: 116066 - protein, 10 aa, synthetic construct
DFPRGDLDEL

SEQ ID NO: 116067 - protein, 10 aa, synthetic construct
DFLRGDLDEL

SEQ ID NO: 116068 - protein, 10 aa, synthetic construct
DFIRGDLDEL

SEQ ID NO: 116069 - protein, 10 aa, synthetic construct
DFMRGDLDEL

SEQ ID NO: 116070 - protein, 10 aa, synthetic construct
DFWRGDLDEL

SEQ ID NO: 116071 - protein, 10 aa, synthetic construct
DFFRGDLDEL

SEQ ID NO: 116072 - protein, 10 aa, synthetic construct
DFKRGDLDEL

SEQ ID NO: 116073 - protein, 10 aa, synthetic construct
DFRRGDLDEL

SEQ ID NO: 116074 - protein, 10 aa, synthetic construct
DFHRGDLDEL

SEQ ID NO: 116075 - protein, 10 aa, synthetic construct
DFSRGDLDEL

SEQ ID NO: 116076 - protein, 10 aa, synthetic construct
DFTRGDLDEL

SEQ ID NO: 116077 - protein, 10 aa, synthetic construct
DFYRGDLDEL

SEQ ID NO: 116078 - protein, 10 aa, synthetic construct
DFNRGDLDEL

SEQ ID NO: 116079 - protein, 10 aa, synthetic construct
DFQRGDLDEL

SEQ ID NO: 116080 - protein, 10 aa, synthetic construct
DFDRGDLDEL

SEQ ID NO: 116081 - protein, 10 aa, synthetic construct
DFERGDLDEL

SEQ ID NO: 116082 - protein, 10 aa, synthetic construct
DKGRGDLDEL

SEQ ID NO: 116083 - protein, 10 aa, synthetic construct
DKARGDLDEL

SEQ ID NO: 116084 - protein, 10 aa, synthetic construct
DKVRGDLDEL

SEQ ID NO: 116085 - protein, 10 aa, synthetic construct
DKPRGDLDEL

SEQ ID NO: 116086 - protein, 10 aa, synthetic construct
DKLRGDLDEL

SEQ ID NO: 116087 - protein, 10 aa, synthetic construct
DKIRGDLDEL

SEQ ID NO: 116088 - protein, 10 aa, synthetic construct
DKMRGDLDEL

SEQ ID NO: 116089 - protein, 10 aa, synthetic construct
DKWRGDLDEL

SEQ ID NO: 116090 - protein, 10 aa, synthetic construct
DKFRGDLDEL

SEQ ID NO: 116091 - protein, 10 aa, synthetic construct
DKKRGDLDEL

SEQ ID NO: 116092 - protein, 10 aa, synthetic construct
DKRRGDLDEL

SEQ ID NO: 116093 - protein, 10 aa, synthetic construct
DKHRGDLDEL

SEQ ID NO: 116094 - protein, 10 aa, synthetic construct
DKSRGDLDEL

SEQ ID NO: 116095 - protein, 10 aa, synthetic construct
DKTRGDLDEL

SEQ ID NO: 116096 - protein, 10 aa, synthetic construct
DKYRGDLDEL

SEQ ID NO: 116097 - protein, 10 aa, synthetic construct
DKNRGDLDEL

SEQ ID NO: 116098 - protein, 10 aa, synthetic construct
DKQRGDLDEL

SEQ ID NO: 116099 - protein, 10 aa, synthetic construct
DKDRGDLDEL

SEQ ID NO: 116100 - protein, 10 aa, synthetic construct
DKERGDLDEL

SEQ ID NO: 116101 - protein, 10 aa, synthetic construct
DRGRGDLDEL

SEQ ID NO: 116102 - protein, 10 aa, synthetic construct
DRARGDLDEL

SEQ ID NO: 116103 - protein, 10 aa, synthetic construct
DRVRGDLDEL

SEQ ID NO: 116104 - protein, 10 aa, synthetic construct
DRPRGDLDEL

SEQ ID NO: 116105 - protein, 10 aa, synthetic construct
DRLRGDLDEL

SEQ ID NO: 116106 - protein, 10 aa, synthetic construct
DRIRGDLDEL

SEQ ID NO: 116107 - protein, 10 aa, synthetic construct
DRMRGDLDEL

SEQ ID NO: 116108 - protein, 10 aa, synthetic construct
DRWRGDLDEL

SEQ ID NO: 116109 - protein, 10 aa, synthetic construct
DRFRGDLDEL

SEQ ID NO: 116110 - protein, 10 aa, synthetic construct
DRKRGDLDEL

SEQ ID NO: 116111 - protein, 10 aa, synthetic construct
DRRRGDLDEL

SEQ ID NO: 116112 - protein, 10 aa, synthetic construct
DRHRGDLDEL

SEQ ID NO: 116113 - protein, 10 aa, synthetic construct
DRSRGDLDEL

SEQ ID NO: 116114 - protein, 10 aa, synthetic construct
DRTRGDLDEL

SEQ ID NO: 116115 - protein, 10 aa, synthetic construct
DRYRGDLDEL

SEQ ID NO: 116116 - protein, 10 aa, synthetic construct
DRNRGDLDEL

SEQ ID NO: 116117 - protein, 10 aa, synthetic construct
DRQRGDLDEL

SEQ ID NO: 116118 - protein, 10 aa, synthetic construct
DRDRGDLDEL

SEQ ID NO: 116119 - protein, 10 aa, synthetic construct
DRERGDLDEL

SEQ ID NO: 116120 - protein, 10 aa, synthetic construct
DHGRGDLDEL

SEQ ID NO: 116121 - protein, 10 aa, synthetic construct
DHARGDLDEL

SEQ ID NO: 116122 - protein, 10 aa, synthetic construct
DHVRGDLDEL

SEQ ID NO: 116123 - protein, 10 aa, synthetic construct
DHPRGDLDEL

SEQ ID NO: 116124 - protein, 10 aa, synthetic construct
DHLRGDLDEL

SEQ ID NO: 116125 - protein, 10 aa, synthetic construct
DHIRGDLDEL

SEQ ID NO: 116126 - protein, 10 aa, synthetic construct
DHMRGDLDEL

SEQ ID NO: 116127 - protein, 10 aa, synthetic construct
DHWRGDLDEL

SEQ ID NO: 116128 - protein, 10 aa, synthetic construct
DHFRGDLDEL

SEQ ID NO: 116129 - protein, 10 aa, synthetic construct
DHKRGDLDEL

SEQ ID NO: 116130 - protein, 10 aa, synthetic construct
DHRRGDLDEL

SEQ ID NO: 116131 - protein, 10 aa, synthetic construct
DHHRGDLDEL

SEQ ID NO: 116132 - protein, 10 aa, synthetic construct
DHSRGDLDEL

SEQ ID NO: 116133 - protein, 10 aa, synthetic construct
DHTRGDLDEL

SEQ ID NO: 116134 - protein, 10 aa, synthetic construct
DHYRGDLDEL

SEQ ID NO: 116135 - protein, 10 aa, synthetic construct
DHNRGDLDEL

SEQ ID NO: 116136 - protein, 10 aa, synthetic construct
DHQRGDLDEL

SEQ ID NO: 116137 - protein, 10 aa, synthetic construct
DHDRGDLDEL

SEQ ID NO: 116138 - protein, 10 aa, synthetic construct
DHERGDLDEL

SEQ ID NO: 116139 - protein, 10 aa, synthetic construct
DSGRGDLDEL

SEQ ID NO: 116140 - protein, 10 aa, synthetic construct
DSARGDLDEL

SEQ ID NO: 116141 - protein, 10 aa, synthetic construct
DSVRGDLDEL

SEQ ID NO: 116142 - protein, 10 aa, synthetic construct
DSPRGDLDEL

SEQ ID NO: 116143 - protein, 10 aa, synthetic construct
DSLRGDLDEL

SEQ ID NO: 116144 - protein, 10 aa, synthetic construct
DSIRGDLDEL

SEQ ID NO: 116145 - protein, 10 aa, synthetic construct
DSMRGDLDEL

SEQ ID NO: 116146 - protein, 10 aa, synthetic construct
DSWRGDLDEL

SEQ ID NO: 116147 - protein, 10 aa, synthetic construct
DSFRGDLDEL

SEQ ID NO: 116148 - protein, 10 aa, synthetic construct
DSKRGDLDEL

SEQ ID NO: 116149 - protein, 10 aa, synthetic construct
DSRRGDLDEL

SEQ ID NO: 116150 - protein, 10 aa, synthetic construct
DSHRGDLDEL

SEQ ID NO: 116151 - protein, 10 aa, synthetic construct
DSSRGDLDEL

SEQ ID NO: 116152 - protein, 10 aa, synthetic construct
DSTRGDLDEL

SEQ ID NO: 116153 - protein, 10 aa, synthetic construct
DSYRGDLDEL

SEQ ID NO: 116154 - protein, 10 aa, synthetic construct
DSNRGDLDEL

SEQ ID NO: 116155 - protein, 10 aa, synthetic construct
DSQRGDLDEL

SEQ ID NO: 116156 - protein, 10 aa, synthetic construct
DSDRGDLDEL

SEQ ID NO: 116157 - protein, 10 aa, synthetic construct
DSERGDLDEL

SEQ ID NO: 116158 - protein, 10 aa, synthetic construct
DTGRGDLDEL

SEQ ID NO: 116159 - protein, 10 aa, synthetic construct
DTARGDLDEL

SEQ ID NO: 116160 - protein, 10 aa, synthetic construct
DTVRGDLDEL

SEQ ID NO: 116161 - protein, 10 aa, synthetic construct
DTPRGDLDEL

SEQ ID NO: 116162 - protein, 10 aa, synthetic construct
DTLRGDLDEL

SEQ ID NO: 116163 - protein, 10 aa, synthetic construct
DTIRGDLDEL

SEQ ID NO: 116164 - protein, 10 aa, synthetic construct
DTMRGDLDEL

SEQ ID NO: 116165 - protein, 10 aa, synthetic construct
DTWRGDLDEL

SEQ ID NO: 116166 - protein, 10 aa, synthetic construct
DTFRGDLDEL

SEQ ID NO: 116167 - protein, 10 aa, synthetic construct
DTKRGDLDEL

SEQ ID NO: 116168 - protein, 10 aa, synthetic construct
DTRRGDLDEL

SEQ ID NO: 116169 - protein, 10 aa, synthetic construct
DTHRGDLDEL

SEQ ID NO: 116170 - protein, 10 aa, synthetic construct
DTSRGDLDEL

SEQ ID NO: 116171 - protein, 10 aa, synthetic construct
DTTRGDLDEL

SEQ ID NO: 116172 - protein, 10 aa, synthetic construct
DTYRGDLDEL

SEQ ID NO: 116173 - protein, 10 aa, synthetic construct
DTNRGDLDEL

SEQ ID NO: 116174 - protein, 10 aa, synthetic construct
DTQRGDLDEL

SEQ ID NO: 116175 - protein, 10 aa, synthetic construct
DTDRGDLDEL

SEQ ID NO: 116176 - protein, 10 aa, synthetic construct
DTERGDLDEL

SEQ ID NO: 116177 - protein, 10 aa, synthetic construct
DYGRGDLDEL

SEQ ID NO: 116178 - protein, 10 aa, synthetic construct
DYARGDLDEL

SEQ ID NO: 116179 - protein, 10 aa, synthetic construct
DYVRGDLDEL

SEQ ID NO: 116180 - protein, 10 aa, synthetic construct
DYPRGDLDEL

SEQ ID NO: 116181 - protein, 10 aa, synthetic construct
DYLRGDLDEL

SEQ ID NO: 116182 - protein, 10 aa, synthetic construct
DYIRGDLDEL

SEQ ID NO: 116183 - protein, 10 aa, synthetic construct
DYMRGDLDEL

SEQ ID NO: 116184 - protein, 10 aa, synthetic construct
DYWRGDLDEL

SEQ ID NO: 116185 - protein, 10 aa, synthetic construct
DYFRGDLDEL

SEQ ID NO: 116186 - protein, 10 aa, synthetic construct
DYKRGDLDEL

SEQ ID NO: 116187 - protein, 10 aa, synthetic construct
DYRRGDLDEL

SEQ ID NO: 116188 - protein, 10 aa, synthetic construct
DYHRGDLDEL

SEQ ID NO: 116189 - protein, 10 aa, synthetic construct
DYSRGDLDEL

SEQ ID NO: 116190 - protein, 10 aa, synthetic construct
DYTRGDLDEL

SEQ ID NO: 116191 - protein, 10 aa, synthetic construct
DYYRGDLDEL

SEQ ID NO: 116192 - protein, 10 aa, synthetic construct
DYNRGDLDEL

SEQ ID NO: 116193 - protein, 10 aa, synthetic construct
DYQRGDLDEL

SEQ ID NO: 116194 - protein, 10 aa, synthetic construct
DYDRGDLDEL

SEQ ID NO: 116195 - protein, 10 aa, synthetic construct
DYERGDLDEL

SEQ ID NO: 116196 - protein, 10 aa, synthetic construct
DNGRGDLDEL

SEQ ID NO: 116197 - protein, 10 aa, synthetic construct
DNARGDLDEL

SEQ ID NO: 116198 - protein, 10 aa, synthetic construct
DNVRGDLDEL

SEQ ID NO: 116199 - protein, 10 aa, synthetic construct
DNPRGDLDEL

SEQ ID NO: 116200 - protein, 10 aa, synthetic construct
DNLRGDLDEL

SEQ ID NO: 116201 - protein, 10 aa, synthetic construct
DNIRGDLDEL

SEQ ID NO: 116202 - protein, 10 aa, synthetic construct
DNMRGDLDEL

SEQ ID NO: 116203 - protein, 10 aa, synthetic construct
DNWRGDLDEL

SEQ ID NO: 116204 - protein, 10 aa, synthetic construct
DNFRGDLDEL

SEQ ID NO: 116205 - protein, 10 aa, synthetic construct
DNKRGDLDEL

SEQ ID NO: 116206 - protein, 10 aa, synthetic construct
DNRRGDLDEL

SEQ ID NO: 116207 - protein, 10 aa, synthetic construct
DNHRGDLDEL

SEQ ID NO: 116208 - protein, 10 aa, synthetic construct
DNSRGDLDEL

SEQ ID NO: 116209 - protein, 10 aa, synthetic construct
DNTRGDLDEL

SEQ ID NO: 116210 - protein, 10 aa, synthetic construct
DNYRGDLDEL

SEQ ID NO: 116211 - protein, 10 aa, synthetic construct
DNNRGDLDEL

SEQ ID NO: 116212 - protein, 10 aa, synthetic construct
DNQRGDLDEL

SEQ ID NO: 116213 - protein, 10 aa, synthetic construct
DNDRGDLDEL

SEQ ID NO: 116214 - protein, 10 aa, synthetic construct
DNERGDLDEL

SEQ ID NO: 116215 - protein, 10 aa, synthetic construct
DQGRGDLDEL

SEQ ID NO: 116216 - protein, 10 aa, synthetic construct
DQARGDLDEL

SEQ ID NO: 116217 - protein, 10 aa, synthetic construct
DQVRGDLDEL

SEQ ID NO: 116218 - protein, 10 aa, synthetic construct
DQPRGDLDEL

SEQ ID NO: 116219 - protein, 10 aa, synthetic construct
DQLRGDLDEL

SEQ ID NO: 116220 - protein, 10 aa, synthetic construct
DQIRGDLDEL

SEQ ID NO: 116221 - protein, 10 aa, synthetic construct
DQMRGDLDEL

SEQ ID NO: 116222 - protein, 10 aa, synthetic construct
DQWRGDLDEL

SEQ ID NO: 116223 - protein, 10 aa, synthetic construct
DQFRGDLDEL

SEQ ID NO: 116224 - protein, 10 aa, synthetic construct
DQKRGDLDEL

SEQ ID NO: 116225 - protein, 10 aa, synthetic construct
DQRRGDLDEL

SEQ ID NO: 116226 - protein, 10 aa, synthetic construct
DQHRGDLDEL

SEQ ID NO: 116227 - protein, 10 aa, synthetic construct
DQSRGDLDEL

SEQ ID NO: 116228 - protein, 10 aa, synthetic construct
DQTRGDLDEL

SEQ ID NO: 116229 - protein, 10 aa, synthetic construct
DQYRGDLDEL

SEQ ID NO: 116230 - protein, 10 aa, synthetic construct
DQNRGDLDEL

SEQ ID NO: 116231 - protein, 10 aa, synthetic construct
DQQRGDLDEL

SEQ ID NO: 116232 - protein, 10 aa, synthetic construct
DQDRGDLDEL

SEQ ID NO: 116233 - protein, 10 aa, synthetic construct
DQERGDLDEL

SEQ ID NO: 116234 - protein, 10 aa, synthetic construct
DDGRGDLDEL

SEQ ID NO: 116235 - protein, 10 aa, synthetic construct
DDARGDLDEL

SEQ ID NO: 116236 - protein, 10 aa, synthetic construct
DDVRGDLDEL

SEQ ID NO: 116237 - protein, 10 aa, synthetic construct
DDPRGDLDEL

SEQ ID NO: 116238 - protein, 10 aa, synthetic construct
DDLRGDLDEL

SEQ ID NO: 116239 - protein, 10 aa, synthetic construct
DDIRGDLDEL

SEQ ID NO: 116240 - protein, 10 aa, synthetic construct
DDMRGDLDEL

SEQ ID NO: 116241 - protein, 10 aa, synthetic construct
DDWRGDLDEL

SEQ ID NO: 116242 - protein, 10 aa, synthetic construct
DDFRGDLDEL

SEQ ID NO: 116243 - protein, 10 aa, synthetic construct
DDKRGDLDEL

SEQ ID NO: 116244 - protein, 10 aa, synthetic construct
DDRRGDLDEL

SEQ ID NO: 116245 - protein, 10 aa, synthetic construct
DDHRGDLDEL

SEQ ID NO: 116246 - protein, 10 aa, synthetic construct
DDSRGDLDEL

SEQ ID NO: 116247 - protein, 10 aa, synthetic construct
DDTRGDLDEL

SEQ ID NO: 116248 - protein, 10 aa, synthetic construct
DDYRGDLDEL

SEQ ID NO: 116249 - protein, 10 aa, synthetic construct
DDNRGDLDEL

SEQ ID NO: 116250 - protein, 10 aa, synthetic construct
DDQRGDLDEL

SEQ ID NO: 116251 - protein, 10 aa, synthetic construct
DDDRGDLDEL

SEQ ID NO: 116252 - protein, 10 aa, synthetic construct
DDERGDLDEL

SEQ ID NO: 116253 - protein, 10 aa, synthetic construct
DEGRGDLDEL

SEQ ID NO: 116254 - protein, 10 aa, synthetic construct
DEARGDLDEL

SEQ ID NO: 116255 - protein, 10 aa, synthetic construct
DEVRGDLDEL

SEQ ID NO: 116256 - protein, 10 aa, synthetic construct
DEPRGDLDEL

SEQ ID NO: 116257 - protein, 10 aa, synthetic construct
DELRGDLDEL

SEQ ID NO: 116258 - protein, 10 aa, synthetic construct
DEIRGDLDEL

SEQ ID NO: 116259 - protein, 10 aa, synthetic construct
DEMRGDLDEL

SEQ ID NO: 116260 - protein, 10 aa, synthetic construct
DEWRGDLDEL

SEQ ID NO: 116261 - protein, 10 aa, synthetic construct
DEFRGDLDEL

SEQ ID NO: 116262 - protein, 10 aa, synthetic construct
DEKRGDLDEL

SEQ ID NO: 116263 - protein, 10 aa, synthetic construct
DERRGDLDEL

SEQ ID NO: 116264 - protein, 10 aa, synthetic construct
DEHRGDLDEL

SEQ ID NO: 116265 - protein, 10 aa, synthetic construct
DESRGDLDEL

SEQ ID NO: 116266 - protein, 10 aa, synthetic construct
DETRGDLDEL

SEQ ID NO: 116267 - protein, 10 aa, synthetic construct
DEYRGDLDEL

SEQ ID NO: 116268 - protein, 10 aa, synthetic construct
DENRGDLDEL

SEQ ID NO: 116269 - protein, 10 aa, synthetic construct
DEQRGDLDEL

SEQ ID NO: 116270 - protein, 10 aa, synthetic construct
DEDRGDLDEL

SEQ ID NO: 116271 - protein, 10 aa, synthetic construct
DEERGDLDEL

SEQ ID NO: 116272 - protein, 10 aa, synthetic construct
QGGRGDLDEL

SEQ ID NO: 116273 - protein, 10 aa, synthetic construct
QGARGDLDEL

SEQ ID NO: 116274 - protein, 10 aa, synthetic construct
QGVRGDLDEL

SEQ ID NO: 116275 - protein, 10 aa, synthetic construct
QGPRGDLDEL

SEQ ID NO: 116276 - protein, 10 aa, synthetic construct
QGLRGDLDEL

SEQ ID NO: 116277 - protein, 10 aa, synthetic construct
QGIRGDLDEL

SEQ ID NO: 116278 - protein, 10 aa, synthetic construct
QGMRGDLDEL

SEQ ID NO: 116279 - protein, 10 aa, synthetic construct
QGWRGDLDEL

SEQ ID NO: 116280 - protein, 10 aa, synthetic construct
QGFRGDLDEL

SEQ ID NO: 116281 - protein, 10 aa, synthetic construct
QGKRGDLDEL

SEQ ID NO: 116282 - protein, 10 aa, synthetic construct
QGRRGDLDEL

SEQ ID NO: 116283 - protein, 10 aa, synthetic construct
QGHRGDLDEL

SEQ ID NO: 116284 - protein, 10 aa, synthetic construct
QGSRGDLDEL

SEQ ID NO: 116285 - protein, 10 aa, synthetic construct
QGTRGDLDEL

SEQ ID NO: 116286 - protein, 10 aa, synthetic construct
QGYRGDLDEL

SEQ ID NO: 116287 - protein, 10 aa, synthetic construct
QGNRGDLDEL

SEQ ID NO: 116288 - protein, 10 aa, synthetic construct
QGQRGDLDEL

SEQ ID NO: 116289 - protein, 10 aa, synthetic construct
QGDRGDLDEL

SEQ ID NO: 116290 - protein, 10 aa, synthetic construct
QGERGDLDEL

SEQ ID NO: 116291 - protein, 10 aa, synthetic construct
QAGRGDLDEL

SEQ ID NO: 116292 - protein, 10 aa, synthetic construct
QAARGDLDEL

SEQ ID NO: 116293 - protein, 10 aa, synthetic construct
QAVRGDLDEL

SEQ ID NO: 116294 - protein, 10 aa, synthetic construct
QAPRGDLDEL

SEQ ID NO: 116295 - protein, 10 aa, synthetic construct
QALRGDLDEL

SEQ ID NO: 116296 - protein, 10 aa, synthetic construct
QAIRGDLDEL

SEQ ID NO: 116297 - protein, 10 aa, synthetic construct
QAMRGDLDEL

SEQ ID NO: 116298 - protein, 10 aa, synthetic construct
QAWRGDLDEL

SEQ ID NO: 116299 - protein, 10 aa, synthetic construct
QAFRGDLDEL

SEQ ID NO: 116300 - protein, 10 aa, synthetic construct
QAKRGDLDEL

SEQ ID NO: 116301 - protein, 10 aa, synthetic construct
QARRGDLDEL

SEQ ID NO: 116302 - protein, 10 aa, synthetic construct
QAHRGDLDEL

SEQ ID NO: 116303 - protein, 10 aa, synthetic construct
QASRGDLDEL

SEQ ID NO: 116304 - protein, 10 aa, synthetic construct
QATRGDLDEL

SEQ ID NO: 116305 - protein, 10 aa, synthetic construct
QAYRGDLDEL

SEQ ID NO: 116306 - protein, 10 aa, synthetic construct
QANRGDLDEL

SEQ ID NO: 116307 - protein, 10 aa, synthetic construct
QAQRGDLDEL

SEQ ID NO: 116308 - protein, 10 aa, synthetic construct
QADRGDLDEL

SEQ ID NO: 116309 - protein, 10 aa, synthetic construct
QAERGDLDEL

SEQ ID NO: 116310 - protein, 10 aa, synthetic construct
QVGRGDLDEL

SEQ ID NO: 116311 - protein, 10 aa, synthetic construct
QVARGDLDEL

SEQ ID NO: 116312 - protein, 10 aa, synthetic construct
QVVRGDLDEL

SEQ ID NO: 116313 - protein, 10 aa, synthetic construct
QVPRGDLDEL

SEQ ID NO: 116314 - protein, 10 aa, synthetic construct
QVLRGDLDEL

SEQ ID NO: 116315 - protein, 10 aa, synthetic construct
QVIRGDLDEL

SEQ ID NO: 116316 - protein, 10 aa, synthetic construct
QVMRGDLDEL

SEQ ID NO: 116317 - protein, 10 aa, synthetic construct
QVWRGDLDEL

SEQ ID NO: 116318 - protein, 10 aa, synthetic construct
QVFRGDLDEL

SEQ ID NO: 116319 - protein, 10 aa, synthetic construct
QVKRGDLDEL

SEQ ID NO: 116320 - protein, 10 aa, synthetic construct
QVRRGDLDEL

SEQ ID NO: 116321 - protein, 10 aa, synthetic construct
QVHRGDLDEL

SEQ ID NO: 116322 - protein, 10 aa, synthetic construct
QVSRGDLDEL

SEQ ID NO: 116323 - protein, 10 aa, synthetic construct
QVTRGDLDEL

SEQ ID NO: 116324 - protein, 10 aa, synthetic construct
QVYRGDLDEL

SEQ ID NO: 116325 - protein, 10 aa, synthetic construct
QVNRGDLDEL

SEQ ID NO: 116326 - protein, 10 aa, synthetic construct
QVQRGDLDEL

SEQ ID NO: 116327 - protein, 10 aa, synthetic construct
QVDRGDLDEL

SEQ ID NO: 116328 - protein, 10 aa, synthetic construct
QVERGDLDEL

SEQ ID NO: 116329 - protein, 10 aa, synthetic construct
QPGRGDLDEL

SEQ ID NO: 116330 - protein, 10 aa, synthetic construct
QPARGDLDEL

SEQ ID NO: 116331 - protein, 10 aa, synthetic construct
QPVRGDLDEL

SEQ ID NO: 116332 - protein, 10 aa, synthetic construct
QPPRGDLDEL

SEQ ID NO: 116333 - protein, 10 aa, synthetic construct
QPLRGDLDEL

SEQ ID NO: 116334 - protein, 10 aa, synthetic construct
QPIRGDLDEL

SEQ ID NO: 116335 - protein, 10 aa, synthetic construct
QPMRGDLDEL

SEQ ID NO: 116336 - protein, 10 aa, synthetic construct
QPWRGDLDEL

SEQ ID NO: 116337 - protein, 10 aa, synthetic construct
QPFRGDLDEL

SEQ ID NO: 116338 - protein, 10 aa, synthetic construct
QPKRGDLDEL

SEQ ID NO: 116339 - protein, 10 aa, synthetic construct
QPRRGDLDEL

SEQ ID NO: 116340 - protein, 10 aa, synthetic construct
QPHRGDLDEL

SEQ ID NO: 116341 - protein, 10 aa, synthetic construct
QPSRGDLDEL

SEQ ID NO: 116342 - protein, 10 aa, synthetic construct
QPTRGDLDEL

SEQ ID NO: 116343 - protein, 10 aa, synthetic construct
QPYRGDLDEL

SEQ ID NO: 116344 - protein, 10 aa, synthetic construct
QPNRGDLDEL

SEQ ID NO: 116345 - protein, 10 aa, synthetic construct
QPQRGDLDEL

SEQ ID NO: 116346 - protein, 10 aa, synthetic construct
QPDRGDLDEL

SEQ ID NO: 116347 - protein, 10 aa, synthetic construct
QPERGDLDEL

SEQ ID NO: 116348 - protein, 10 aa, synthetic construct
QLGRGDLDEL

SEQ ID NO: 116349 - protein, 10 aa, synthetic construct
QLARGDLDEL

SEQ ID NO: 116350 - protein, 10 aa, synthetic construct
QLVRGDLDEL

SEQ ID NO: 116351 - protein, 10 aa, synthetic construct
QLPRGDLDEL

SEQ ID NO: 116352 - protein, 10 aa, synthetic construct
QLLRGDLDEL

SEQ ID NO: 116353 - protein, 10 aa, synthetic construct
QLIRGDLDEL

SEQ ID NO: 116354 - protein, 10 aa, synthetic construct
QLMRGDLDEL

SEQ ID NO: 116355 - protein, 10 aa, synthetic construct
QLWRGDLDEL

SEQ ID NO: 116356 - protein, 10 aa, synthetic construct
QLFRGDLDEL

SEQ ID NO: 116357 - protein, 10 aa, synthetic construct
QLKRGDLDEL

SEQ ID NO: 116358 - protein, 10 aa, synthetic construct
QLRRGDLDEL

SEQ ID NO: 116359 - protein, 10 aa, synthetic construct
QLHRGDLDEL

SEQ ID NO: 116360 - protein, 10 aa, synthetic construct
QLSRGDLDEL

SEQ ID NO: 116361 - protein, 10 aa, synthetic construct
QLTRGDLDEL

SEQ ID NO: 116362 - protein, 10 aa, synthetic construct
QLYRGDLDEL

SEQ ID NO: 116363 - protein, 10 aa, synthetic construct
QLNRGDLDEL

SEQ ID NO: 116364 - protein, 10 aa, synthetic construct
QLQRGDLDEL

SEQ ID NO: 116365 - protein, 10 aa, synthetic construct
QLDRGDLDEL

SEQ ID NO: 116366 - protein, 10 aa, synthetic construct
QLERGDLDEL

SEQ ID NO: 116367 - protein, 10 aa, synthetic construct
QIGRGDLDEL

SEQ ID NO: 116368 - protein, 10 aa, synthetic construct
QIARGDLDEL

SEQ ID NO: 116369 - protein, 10 aa, synthetic construct
QIVRGDLDEL

SEQ ID NO: 116370 - protein, 10 aa, synthetic construct
QIPRGDLDEL

SEQ ID NO: 116371 - protein, 10 aa, synthetic construct
QILRGDLDEL

SEQ ID NO: 116372 - protein, 10 aa, synthetic construct
QIIRGDLDEL

SEQ ID NO: 116373 - protein, 10 aa, synthetic construct
QIMRGDLDEL

SEQ ID NO: 116374 - protein, 10 aa, synthetic construct
QIWRGDLDEL

SEQ ID NO: 116375 - protein, 10 aa, synthetic construct
QIFRGDLDEL

SEQ ID NO: 116376 - protein, 10 aa, synthetic construct
QIKRGDLDEL

SEQ ID NO: 116377 - protein, 10 aa, synthetic construct
QIRRGDLDEL

SEQ ID NO: 116378 - protein, 10 aa, synthetic construct
QIHRGDLDEL

SEQ ID NO: 116379 - protein, 10 aa, synthetic construct
QISRGDLDEL

SEQ ID NO: 116380 - protein, 10 aa, synthetic construct
QITRGDLDEL

SEQ ID NO: 116381 - protein, 10 aa, synthetic construct
QIYRGDLDEL

SEQ ID NO: 116382 - protein, 10 aa, synthetic construct
QINRGDLDEL

SEQ ID NO: 116383 - protein, 10 aa, synthetic construct
QIQRGDLDEL

SEQ ID NO: 116384 - protein, 10 aa, synthetic construct
QIDRGDLDEL

SEQ ID NO: 116385 - protein, 10 aa, synthetic construct
QIERGDLDEL

SEQ ID NO: 116386 - protein, 10 aa, synthetic construct
QMGRGDLDEL

SEQ ID NO: 116387 - protein, 10 aa, synthetic construct
QMARGDLDEL

SEQ ID NO: 116388 - protein, 10 aa, synthetic construct
QMVRGDLDEL

SEQ ID NO: 116389 - protein, 10 aa, synthetic construct
QMPRGDLDEL

SEQ ID NO: 116390 - protein, 10 aa, synthetic construct
QMLRGDLDEL

SEQ ID NO: 116391 - protein, 10 aa, synthetic construct
QMIRGDLDEL

SEQ ID NO: 116392 - protein, 10 aa, synthetic construct
QMMRGDLDEL

SEQ ID NO: 116393 - protein, 10 aa, synthetic construct
QMWRGDLDEL

SEQ ID NO: 116394 - protein, 10 aa, synthetic construct
QMFRGDLDEL

SEQ ID NO: 116395 - protein, 10 aa, synthetic construct
QMKRGDLDEL

SEQ ID NO: 116396 - protein, 10 aa, synthetic construct
QMRRGDLDEL

SEQ ID NO: 116397 - protein, 10 aa, synthetic construct
QMHRGDLDEL

SEQ ID NO: 116398 - protein, 10 aa, synthetic construct
QMSRGDLDEL

SEQ ID NO: 116399 - protein, 10 aa, synthetic construct
QMTRGDLDEL

SEQ ID NO: 116400 - protein, 10 aa, synthetic construct
QMYRGDLDEL

SEQ ID NO: 116401 - protein, 10 aa, synthetic construct
QMNRGDLDEL

SEQ ID NO: 116402 - protein, 10 aa, synthetic construct
QMQRGDLDEL

SEQ ID NO: 116403 - protein, 10 aa, synthetic construct
QMDRGDLDEL

SEQ ID NO: 116404 - protein, 10 aa, synthetic construct
QMERGDLDEL

SEQ ID NO: 116405 - protein, 10 aa, synthetic construct
QWGRGDLDEL

SEQ ID NO: 116406 - protein, 10 aa, synthetic construct
QWARGDLDEL

SEQ ID NO: 116407 - protein, 10 aa, synthetic construct
QWVRGDLDEL

SEQ ID NO: 116408 - protein, 10 aa, synthetic construct
QWPRGDLDEL

SEQ ID NO: 116409 - protein, 10 aa, synthetic construct
QWLRGDLDEL

SEQ ID NO: 116410 - protein, 10 aa, synthetic construct
QWIRGDLDEL

SEQ ID NO: 116411 - protein, 10 aa, synthetic construct
QWMRGDLDEL

SEQ ID NO: 116412 - protein, 10 aa, synthetic construct
QWWRGDLDEL

SEQ ID NO: 116413 - protein, 10 aa, synthetic construct
QWFRGDLDEL

SEQ ID NO: 116414 - protein, 10 aa, synthetic construct
QWKRGDLDEL

SEQ ID NO: 116415 - protein, 10 aa, synthetic construct
QWRRGDLDEL

SEQ ID NO: 116416 - protein, 10 aa, synthetic construct
QWHRGDLDEL

SEQ ID NO: 116417 - protein, 10 aa, synthetic construct
QWSRGDLDEL

SEQ ID NO: 116418 - protein, 10 aa, synthetic construct
QWTRGDLDEL

SEQ ID NO: 116419 - protein, 10 aa, synthetic construct
QWYRGDLDEL

SEQ ID NO: 116420 - protein, 10 aa, synthetic construct
QWNRGDLDEL

SEQ ID NO: 116421 - protein, 10 aa, synthetic construct
QWQRGDLDEL

SEQ ID NO: 116422 - protein, 10 aa, synthetic construct
QWDRGDLDEL

SEQ ID NO: 116423 - protein, 10 aa, synthetic construct
QWERGDLDEL

SEQ ID NO: 116424 - protein, 10 aa, synthetic construct
QFGRGDLDEL

SEQ ID NO: 116425 - protein, 10 aa, synthetic construct
QFARGDLDEL

SEQ ID NO: 116426 - protein, 10 aa, synthetic construct
QFVRGDLDEL

SEQ ID NO: 116427 - protein, 10 aa, synthetic construct
QFPRGDLDEL

SEQ ID NO: 116428 - protein, 10 aa, synthetic construct
QFLRGDLDEL

SEQ ID NO: 116429 - protein, 10 aa, synthetic construct
QFIRGDLDEL

SEQ ID NO: 116430 - protein, 10 aa, synthetic construct
QFMRGDLDEL

SEQ ID NO: 116431 - protein, 10 aa, synthetic construct
QFWRGDLDEL

SEQ ID NO: 116432 - protein, 10 aa, synthetic construct
QFFRGDLDEL

SEQ ID NO: 116433 - protein, 10 aa, synthetic construct
QFKRGDLDEL

SEQ ID NO: 116434 - protein, 10 aa, synthetic construct
QFRRGDLDEL

SEQ ID NO: 116435 - protein, 10 aa, synthetic construct
QFHRGDLDEL

SEQ ID NO: 116436 - protein, 10 aa, synthetic construct
QFSRGDLDEL

SEQ ID NO: 116437 - protein, 10 aa, synthetic construct
QFTRGDLDEL

SEQ ID NO: 116438 - protein, 10 aa, synthetic construct
QFYRGDLDEL

SEQ ID NO: 116439 - protein, 10 aa, synthetic construct
QFNRGDLDEL

SEQ ID NO: 116440 - protein, 10 aa, synthetic construct
QFQRGDLDEL

SEQ ID NO: 116441 - protein, 10 aa, synthetic construct
QFDRGDLDEL

SEQ ID NO: 116442 - protein, 10 aa, synthetic construct
QFERGDLDEL

SEQ ID NO: 116443 - protein, 10 aa, synthetic construct
QKGRGDLDEL

SEQ ID NO: 116444 - protein, 10 aa, synthetic construct
QKARGDLDEL

SEQ ID NO: 116445 - protein, 10 aa, synthetic construct
QKVRGDLDEL

SEQ ID NO: 116446 - protein, 10 aa, synthetic construct
QKPRGDLDEL

SEQ ID NO: 116447 - protein, 10 aa, synthetic construct
QKLRGDLDEL

SEQ ID NO: 116448 - protein, 10 aa, synthetic construct
QKIRGDLDEL

SEQ ID NO: 116449 - protein, 10 aa, synthetic construct
QKMRGDLDEL

SEQ ID NO: 116450 - protein, 10 aa, synthetic construct
QKWRGDLDEL

SEQ ID NO: 116451 - protein, 10 aa, synthetic construct
QKFRGDLDEL

SEQ ID NO: 116452 - protein, 10 aa, synthetic construct
QKKRGDLDEL

SEQ ID NO: 116453 - protein, 10 aa, synthetic construct
QKRRGDLDEL

SEQ ID NO: 116454 - protein, 10 aa, synthetic construct
QKHRGDLDEL

SEQ ID NO: 116455 - protein, 10 aa, synthetic construct
QKSRGDLDEL

SEQ ID NO: 116456 - protein, 10 aa, synthetic construct
QKTRGDLDEL

SEQ ID NO: 116457 - protein, 10 aa, synthetic construct
QKYRGDLDEL

SEQ ID NO: 116458 - protein, 10 aa, synthetic construct
QKNRGDLDEL

SEQ ID NO: 116459 - protein, 10 aa, synthetic construct
QKQRGDLDEL

SEQ ID NO: 116460 - protein, 10 aa, synthetic construct
QKDRGDLDEL

SEQ ID NO: 116461 - protein, 10 aa, synthetic construct
QKERGDLDEL

SEQ ID NO: 116462 - protein, 10 aa, synthetic construct
QRGRGDLDEL

SEQ ID NO: 116463 - protein, 10 aa, synthetic construct
QRARGDLDEL

SEQ ID NO: 116464 - protein, 10 aa, synthetic construct
QRVRGDLDEL

SEQ ID NO: 116465 - protein, 10 aa, synthetic construct
QRPRGDLDEL

SEQ ID NO: 116466 - protein, 10 aa, synthetic construct
QRLRGDLDEL

SEQ ID NO: 116467 - protein, 10 aa, synthetic construct
QRIRGDLDEL

SEQ ID NO: 116468 - protein, 10 aa, synthetic construct
QRMRGDLDEL

SEQ ID NO: 116469 - protein, 10 aa, synthetic construct
QRWRGDLDEL

SEQ ID NO: 116470 - protein, 10 aa, synthetic construct
QRFRGDLDEL

SEQ ID NO: 116471 - protein, 10 aa, synthetic construct
QRKRGDLDEL

SEQ ID NO: 116472 - protein, 10 aa, synthetic construct
QRRRGDLDEL

SEQ ID NO: 116473 - protein, 10 aa, synthetic construct
QRHRGDLDEL

SEQ ID NO: 116474 - protein, 10 aa, synthetic construct
QRSRGDLDEL

SEQ ID NO: 116475 - protein, 10 aa, synthetic construct
QRTRGDLDEL

SEQ ID NO: 116476 - protein, 10 aa, synthetic construct
QRYRGDLDEL

SEQ ID NO: 116477 - protein, 10 aa, synthetic construct
QRNRGDLDEL

SEQ ID NO: 116478 - protein, 10 aa, synthetic construct
QRQRGDLDEL

SEQ ID NO: 116479 - protein, 10 aa, synthetic construct
QRDRGDLDEL

SEQ ID NO: 116480 - protein, 10 aa, synthetic construct
QRERGDLDEL

SEQ ID NO: 116481 - protein, 10 aa, synthetic construct
QHGRGDLDEL

SEQ ID NO: 116482 - protein, 10 aa, synthetic construct
QHARGDLDEL

SEQ ID NO: 116483 - protein, 10 aa, synthetic construct
QHVRGDLDEL

SEQ ID NO: 116484 - protein, 10 aa, synthetic construct
QHPRGDLDEL

SEQ ID NO: 116485 - protein, 10 aa, synthetic construct
QHLRGDLDEL

SEQ ID NO: 116486 - protein, 10 aa, synthetic construct
QHIRGDLDEL

SEQ ID NO: 116487 - protein, 10 aa, synthetic construct
QHMRGDLDEL

SEQ ID NO: 116488 - protein, 10 aa, synthetic construct
QHWRGDLDEL

SEQ ID NO: 116489 - protein, 10 aa, synthetic construct
QHFRGDLDEL

SEQ ID NO: 116490 - protein, 10 aa, synthetic construct
QHKRGDLDEL

SEQ ID NO: 116491 - protein, 10 aa, synthetic construct
QHRRGDLDEL

SEQ ID NO: 116492 - protein, 10 aa, synthetic construct
QHHRGDLDEL

SEQ ID NO: 116493 - protein, 10 aa, synthetic construct
QHSRGDLDEL

SEQ ID NO: 116494 - protein, 10 aa, synthetic construct
QHTRGDLDEL

SEQ ID NO: 116495 - protein, 10 aa, synthetic construct
QHYRGDLDEL

SEQ ID NO: 116496 - protein, 10 aa, synthetic construct
QHNRGDLDEL

SEQ ID NO: 116497 - protein, 10 aa, synthetic construct
QHQRGDLDEL

SEQ ID NO: 116498 - protein, 10 aa, synthetic construct
QHDRGDLDEL

SEQ ID NO: 116499 - protein, 10 aa, synthetic construct
QHERGDLDEL

SEQ ID NO: 116500 - protein, 10 aa, synthetic construct
QSGRGDLDEL

SEQ ID NO: 116501 - protein, 10 aa, synthetic construct
QSARGDLDEL

SEQ ID NO: 116502 - protein, 10 aa, synthetic construct
QSVRGDLDEL

SEQ ID NO: 116503 - protein, 10 aa, synthetic construct
QSPRGDLDEL

SEQ ID NO: 116504 - protein, 10 aa, synthetic construct
QSLRGDLDEL

SEQ ID NO: 116505 - protein, 10 aa, synthetic construct
QSIRGDLDEL

SEQ ID NO: 116506 - protein, 10 aa, synthetic construct
QSMRGDLDEL

SEQ ID NO: 116507 - protein, 10 aa, synthetic construct
QSWRGDLDEL

SEQ ID NO: 116508 - protein, 10 aa, synthetic construct
QSFRGDLDEL

SEQ ID NO: 116509 - protein, 10 aa, synthetic construct
QSKRGDLDEL

SEQ ID NO: 116510 - protein, 10 aa, synthetic construct
QSRRGDLDEL

SEQ ID NO: 116511 - protein, 10 aa, synthetic construct
QSHRGDLDEL

SEQ ID NO: 116512 - protein, 10 aa, synthetic construct
QSSRGDLDEL

SEQ ID NO: 116513 - protein, 10 aa, synthetic construct
QSTRGDLDEL

SEQ ID NO: 116514 - protein, 10 aa, synthetic construct
QSYRGDLDEL

SEQ ID NO: 116515 - protein, 10 aa, synthetic construct
QSNRGDLDEL

SEQ ID NO: 116516 - protein, 10 aa, synthetic construct
QSQRGDLDEL

SEQ ID NO: 116517 - protein, 10 aa, synthetic construct
QSDRGDLDEL

SEQ ID NO: 116518 - protein, 10 aa, synthetic construct
QSERGDLDEL

SEQ ID NO: 116519 - protein, 10 aa, synthetic construct
QTGRGDLDEL

SEQ ID NO: 116520 - protein, 10 aa, synthetic construct
QTARGDLDEL

SEQ ID NO: 116521 - protein, 10 aa, synthetic construct
QTVRGDLDEL

SEQ ID NO: 116522 - protein, 10 aa, synthetic construct
QTPRGDLDEL

SEQ ID NO: 116523 - protein, 10 aa, synthetic construct
QTLRGDLDEL

SEQ ID NO: 116524 - protein, 10 aa, synthetic construct
QTIRGDLDEL

SEQ ID NO: 116525 - protein, 10 aa, synthetic construct
QTMRGDLDEL

SEQ ID NO: 116526 - protein, 10 aa, synthetic construct
QTWRGDLDEL

SEQ ID NO: 116527 - protein, 10 aa, synthetic construct
QTFRGDLDEL

SEQ ID NO: 116528 - protein, 10 aa, synthetic construct
QTKRGDLDEL

SEQ ID NO: 116529 - protein, 10 aa, synthetic construct
QTRRGDLDEL

SEQ ID NO: 116530 - protein, 10 aa, synthetic construct
QTHRGDLDEL

SEQ ID NO: 116531 - protein, 10 aa, synthetic construct
QTSRGDLDEL

SEQ ID NO: 116532 - protein, 10 aa, synthetic construct
QTTRGDLDEL

SEQ ID NO: 116533 - protein, 10 aa, synthetic construct
QTYRGDLDEL

SEQ ID NO: 116534 - protein, 10 aa, synthetic construct
QTNRGDLDEL

SEQ ID NO: 116535 - protein, 10 aa, synthetic construct
QTQRGDLDEL

SEQ ID NO: 116536 - protein, 10 aa, synthetic construct
QTDRGDLDEL

SEQ ID NO: 116537 - protein, 10 aa, synthetic construct
QTERGDLDEL

SEQ ID NO: 116538 - protein, 10 aa, synthetic construct
QYGRGDLDEL

SEQ ID NO: 116539 - protein, 10 aa, synthetic construct
QYARGDLDEL

SEQ ID NO: 116540 - protein, 10 aa, synthetic construct
QYVRGDLDEL

SEQ ID NO: 116541 - protein, 10 aa, synthetic construct
QYPRGDLDEL

SEQ ID NO: 116542 - protein, 10 aa, synthetic construct
QYLRGDLDEL

SEQ ID NO: 116543 - protein, 10 aa, synthetic construct
QYIRGDLDEL

SEQ ID NO: 116544 - protein, 10 aa, synthetic construct
QYMRGDLDEL

SEQ ID NO: 116545 - protein, 10 aa, synthetic construct
QYWRGDLDEL

SEQ ID NO: 116546 - protein, 10 aa, synthetic construct
QYFRGDLDEL

SEQ ID NO: 116547 - protein, 10 aa, synthetic construct
QYKRGDLDEL

SEQ ID NO: 116548 - protein, 10 aa, synthetic construct
QYRRGDLDEL

SEQ ID NO: 116549 - protein, 10 aa, synthetic construct
QYHRGDLDEL

SEQ ID NO: 116550 - protein, 10 aa, synthetic construct
QYSRGDLDEL

SEQ ID NO: 116551 - protein, 10 aa, synthetic construct
QYTRGDLDEL

SEQ ID NO: 116552 - protein, 10 aa, synthetic construct
QYYRGDLDEL

SEQ ID NO: 116553 - protein, 10 aa, synthetic construct
QYNRGDLDEL

SEQ ID NO: 116554 - protein, 10 aa, synthetic construct
QYQRGDLDEL

SEQ ID NO: 116555 - protein, 10 aa, synthetic construct
QYDRGDLDEL

SEQ ID NO: 116556 - protein, 10 aa, synthetic construct
QYERGDLDEL

SEQ ID NO: 116557 - protein, 10 aa, synthetic construct
QNGRGDLDEL

SEQ ID NO: 116558 - protein, 10 aa, synthetic construct
QNARGDLDEL

SEQ ID NO: 116559 - protein, 10 aa, synthetic construct
QNVRGDLDEL

SEQ ID NO: 116560 - protein, 10 aa, synthetic construct
QNPRGDLDEL

SEQ ID NO: 116561 - protein, 10 aa, synthetic construct
QNLRGDLDEL

SEQ ID NO: 116562 - protein, 10 aa, synthetic construct
QNIRGDLDEL

SEQ ID NO: 116563 - protein, 10 aa, synthetic construct
QNMRGDLDEL

SEQ ID NO: 116564 - protein, 10 aa, synthetic construct
QNWRGDLDEL

SEQ ID NO: 116565 - protein, 10 aa, synthetic construct
QNFRGDLDEL

SEQ ID NO: 116566 - protein, 10 aa, synthetic construct
QNKRGDLDEL

SEQ ID NO: 116567 - protein, 10 aa, synthetic construct
QNRRGDLDEL

SEQ ID NO: 116568 - protein, 10 aa, synthetic construct
QNHRGDLDEL

SEQ ID NO: 116569 - protein, 10 aa, synthetic construct
QNSRGDLDEL

SEQ ID NO: 116570 - protein, 10 aa, synthetic construct
QNTRGDLDEL

SEQ ID NO: 116571 - protein, 10 aa, synthetic construct
QNYRGDLDEL

SEQ ID NO: 116572 - protein, 10 aa, synthetic construct
QNNRGDLDEL

SEQ ID NO: 116573 - protein, 10 aa, synthetic construct
QNQRGDLDEL

SEQ ID NO: 116574 - protein, 10 aa, synthetic construct
QNDRGDLDEL

SEQ ID NO: 116575 - protein, 10 aa, synthetic construct
QNERGDLDEL

SEQ ID NO: 116576 - protein, 10 aa, synthetic construct
QQGRGDLDEL

SEQ ID NO: 116577 - protein, 10 aa, synthetic construct
QQARGDLDEL

SEQ ID NO: 116578 - protein, 10 aa, synthetic construct
QQVRGDLDEL

SEQ ID NO: 116579 - protein, 10 aa, synthetic construct
QQPRGDLDEL

SEQ ID NO: 116580 - protein, 10 aa, synthetic construct
QQLRGDLDEL

SEQ ID NO: 116581 - protein, 10 aa, synthetic construct
QQIRGDLDEL

SEQ ID NO: 116582 - protein, 10 aa, synthetic construct
QQMRGDLDEL

SEQ ID NO: 116583 - protein, 10 aa, synthetic construct
QQWRGDLDEL

SEQ ID NO: 116584 - protein, 10 aa, synthetic construct
QQFRGDLDEL

SEQ ID NO: 116585 - protein, 10 aa, synthetic construct
QQKRGDLDEL

SEQ ID NO: 116586 - protein, 10 aa, synthetic construct
QQRRGDLDEL

SEQ ID NO: 116587 - protein, 10 aa, synthetic construct
QQHRGDLDEL

SEQ ID NO: 116588 - protein, 10 aa, synthetic construct
QQSRGDLDEL

SEQ ID NO: 116589 - protein, 10 aa, synthetic construct
QQTRGDLDEL

SEQ ID NO: 116590 - protein, 10 aa, synthetic construct
QQYRGDLDEL

SEQ ID NO: 116591 - protein, 10 aa, synthetic construct
QQNRGDLDEL

SEQ ID NO: 116592 - protein, 10 aa, synthetic construct
QQQRGDLDEL

SEQ ID NO: 116593 - protein, 10 aa, synthetic construct
QQDRGDLDEL

SEQ ID NO: 116594 - protein, 10 aa, synthetic construct
QQERGDLDEL

SEQ ID NO: 116595 - protein, 10 aa, synthetic construct
QDGRGDLDEL

SEQ ID NO: 116596 - protein, 10 aa, synthetic construct
QDARGDLDEL

SEQ ID NO: 116597 - protein, 10 aa, synthetic construct
QDVRGDLDEL

SEQ ID NO: 116598 - protein, 10 aa, synthetic construct
QDPRGDLDEL

SEQ ID NO: 116599 - protein, 10 aa, synthetic construct
QDLRGDLDEL

SEQ ID NO: 116600 - protein, 10 aa, synthetic construct
QDIRGDLDEL

SEQ ID NO: 116601 - protein, 10 aa, synthetic construct
QDMRGDLDEL

SEQ ID NO: 116602 - protein, 10 aa, synthetic construct
QDWRGDLDEL

SEQ ID NO: 116603 - protein, 10 aa, synthetic construct
QDFRGDLDEL

SEQ ID NO: 116604 - protein, 10 aa, synthetic construct
QDKRGDLDEL

SEQ ID NO: 116605 - protein, 10 aa, synthetic construct
QDRRGDLDEL

SEQ ID NO: 116606 - protein, 10 aa, synthetic construct
QDHRGDLDEL

SEQ ID NO: 116607 - protein, 10 aa, synthetic construct
QDSRGDLDEL

SEQ ID NO: 116608 - protein, 10 aa, synthetic construct
QDTRGDLDEL

SEQ ID NO: 116609 - protein, 10 aa, synthetic construct
QDYRGDLDEL

SEQ ID NO: 116610 - protein, 10 aa, synthetic construct
QDNRGDLDEL

SEQ ID NO: 116611 - protein, 10 aa, synthetic construct
QDQRGDLDEL

SEQ ID NO: 116612 - protein, 10 aa, synthetic construct
QDDRGDLDEL

SEQ ID NO: 116613 - protein, 10 aa, synthetic construct
QDERGDLDEL

SEQ ID NO: 116614 - protein, 10 aa, synthetic construct
QEGRGDLDEL

SEQ ID NO: 116615 - protein, 10 aa, synthetic construct
QEARGDLDEL

SEQ ID NO: 116616 - protein, 10 aa, synthetic construct
QEVRGDLDEL

SEQ ID NO: 116617 - protein, 10 aa, synthetic construct
QEPRGDLDEL

SEQ ID NO: 116618 - protein, 10 aa, synthetic construct
QELRGDLDEL

SEQ ID NO: 116619 - protein, 10 aa, synthetic construct
QEIRGDLDEL

SEQ ID NO: 116620 - protein, 10 aa, synthetic construct
QEMRGDLDEL

SEQ ID NO: 116621 - protein, 10 aa, synthetic construct
QEWRGDLDEL

SEQ ID NO: 116622 - protein, 10 aa, synthetic construct
QEFRGDLDEL

SEQ ID NO: 116623 - protein, 10 aa, synthetic construct
QEKRGDLDEL

SEQ ID NO: 116624 - protein, 10 aa, synthetic construct
QERRGDLDEL

SEQ ID NO: 116625 - protein, 10 aa, synthetic construct
QEHRGDLDEL

SEQ ID NO: 116626 - protein, 10 aa, synthetic construct
QESRGDLDEL

SEQ ID NO: 116627 - protein, 10 aa, synthetic construct
QETRGDLDEL

SEQ ID NO: 116628 - protein, 10 aa, synthetic construct
QEYRGDLDEL

SEQ ID NO: 116629 - protein, 10 aa, synthetic construct
QENRGDLDEL

SEQ ID NO: 116630 - protein, 10 aa, synthetic construct
QEQRGDLDEL

SEQ ID NO: 116631 - protein, 10 aa, synthetic construct
QEDRGDLDEL

SEQ ID NO: 116632 - protein, 10 aa, synthetic construct
QEERGDLDEL

SEQ ID NO: 116633 - protein, 10 aa, synthetic construct
SGGRGDLIGR

SEQ ID NO: 116634 - protein, 10 aa, synthetic construct
SGARGDLIGR

SEQ ID NO: 116635 - protein, 10 aa, synthetic construct
SGVRGDLIGR

SEQ ID NO: 116636 - protein, 10 aa, synthetic construct
SGPRGDLIGR

SEQ ID NO: 116637 - protein, 10 aa, synthetic construct
SGLRGDLIGR

SEQ ID NO: 116638 - protein, 10 aa, synthetic construct
SGIRGDLIGR

SEQ ID NO: 116639 - protein, 10 aa, synthetic construct
SGMRGDLIGR

SEQ ID NO: 116640 - protein, 10 aa, synthetic construct
SGWRGDLIGR

SEQ ID NO: 116641 - protein, 10 aa, synthetic construct
SGFRGDLIGR

SEQ ID NO: 116642 - protein, 10 aa, synthetic construct
SGKRGDLIGR

SEQ ID NO: 116643 - protein, 10 aa, synthetic construct
SGRRGDLIGR

SEQ ID NO: 116644 - protein, 10 aa, synthetic construct
SGHRGDLIGR

SEQ ID NO: 116645 - protein, 10 aa, synthetic construct
SGSRGDLIGR

SEQ ID NO: 116646 - protein, 10 aa, synthetic construct
SGTRGDLIGR

SEQ ID NO: 116647 - protein, 10 aa, synthetic construct
SGYRGDLIGR

SEQ ID NO: 116648 - protein, 10 aa, synthetic construct
SGNRGDLIGR

SEQ ID NO: 116649 - protein, 10 aa, synthetic construct
SGQRGDLIGR

SEQ ID NO: 116650 - protein, 10 aa, synthetic construct
SGDRGDLIGR

SEQ ID NO: 116651 - protein, 10 aa, synthetic construct
SGERGDLIGR

SEQ ID NO: 116652 - protein, 10 aa, synthetic construct
SAGRGDLIGR

SEQ ID NO: 116653 - protein, 10 aa, synthetic construct
SAARGDLIGR

SEQ ID NO: 116654 - protein, 10 aa, synthetic construct
SAVRGDLIGR

SEQ ID NO: 116655 - protein, 10 aa, synthetic construct
SAPRGDLIGR

SEQ ID NO: 116656 - protein, 10 aa, synthetic construct
SALRGDLIGR

SEQ ID NO: 116657 - protein, 10 aa, synthetic construct
SAIRGDLIGR

SEQ ID NO: 116658 - protein, 10 aa, synthetic construct
SAMRGDLIGR

SEQ ID NO: 116659 - protein, 10 aa, synthetic construct
SAWRGDLIGR

SEQ ID NO: 116660 - protein, 10 aa, synthetic construct
SAFRGDLIGR

SEQ ID NO: 116661 - protein, 10 aa, synthetic construct
SAKRGDLIGR

SEQ ID NO: 116662 - protein, 10 aa, synthetic construct
SARRGDLIGR

SEQ ID NO: 116663 - protein, 10 aa, synthetic construct
SAHRGDLIGR

SEQ ID NO: 116664 - protein, 10 aa, synthetic construct
SASRGDLIGR

SEQ ID NO: 116665 - protein, 10 aa, synthetic construct
SATRGDLIGR

SEQ ID NO: 116666 - protein, 10 aa, synthetic construct
SAYRGDLIGR

SEQ ID NO: 116667 - protein, 10 aa, synthetic construct
SANRGDLIGR

SEQ ID NO: 116668 - protein, 10 aa, synthetic construct
SAQRGDLIGR

SEQ ID NO: 116669 - protein, 10 aa, synthetic construct
SADRGDLIGR

SEQ ID NO: 116670 - protein, 10 aa, synthetic construct
SAERGDLIGR

SEQ ID NO: 116671 - protein, 10 aa, synthetic construct
SVGRGDLIGR

SEQ ID NO: 116672 - protein, 10 aa, synthetic construct
SVARGDLIGR

SEQ ID NO: 116673 - protein, 10 aa, synthetic construct
SVVRGDLIGR

SEQ ID NO: 116674 - protein, 10 aa, synthetic construct
SVPRGDLIGR

SEQ ID NO: 116675 - protein, 10 aa, synthetic construct
SVLRGDLIGR

SEQ ID NO: 116676 - protein, 10 aa, synthetic construct
SVIRGDLIGR

SEQ ID NO: 116677 - protein, 10 aa, synthetic construct
SVMRGDLIGR

SEQ ID NO: 116678 - protein, 10 aa, synthetic construct
SVWRGDLIGR

SEQ ID NO: 116679 - protein, 10 aa, synthetic construct
SVFRGDLIGR

SEQ ID NO: 116680 - protein, 10 aa, synthetic construct
SVKRGDLIGR

SEQ ID NO: 116681 - protein, 10 aa, synthetic construct
SVRRGDLIGR

SEQ ID NO: 116682 - protein, 10 aa, synthetic construct
SVHRGDLIGR

SEQ ID NO: 116683 - protein, 10 aa, synthetic construct
SVSRGDLIGR

SEQ ID NO: 116684 - protein, 10 aa, synthetic construct
SVTRGDLIGR

SEQ ID NO: 116685 - protein, 10 aa, synthetic construct
SVYRGDLIGR

SEQ ID NO: 116686 - protein, 10 aa, synthetic construct
SVNRGDLIGR

SEQ ID NO: 116687 - protein, 10 aa, synthetic construct
SVQRGDLIGR

SEQ ID NO: 116688 - protein, 10 aa, synthetic construct
SVDRGDLIGR

SEQ ID NO: 116689 - protein, 10 aa, synthetic construct
SVERGDLIGR

SEQ ID NO: 116690 - protein, 10 aa, synthetic construct
SPGRGDLIGR

SEQ ID NO: 116691 - protein, 10 aa, synthetic construct
SPARGDLIGR

SEQ ID NO: 116692 - protein, 10 aa, synthetic construct
SPVRGDLIGR

SEQ ID NO: 116693 - protein, 10 aa, synthetic construct
SPPRGDLIGR

SEQ ID NO: 116694 - protein, 10 aa, synthetic construct
SPLRGDLIGR

SEQ ID NO: 116695 - protein, 10 aa, synthetic construct
SPIRGDLIGR

SEQ ID NO: 116696 - protein, 10 aa, synthetic construct
SPMRGDLIGR

SEQ ID NO: 116697 - protein, 10 aa, synthetic construct
SPWRGDLIGR

SEQ ID NO: 116698 - protein, 10 aa, synthetic construct
SPFRGDLIGR

SEQ ID NO: 116699 - protein, 10 aa, synthetic construct
SPKRGDLIGR

SEQ ID NO: 116700 - protein, 10 aa, synthetic construct
SPRRGDLIGR

SEQ ID NO: 116701 - protein, 10 aa, synthetic construct
SPHRGDLIGR

SEQ ID NO: 116702 - protein, 10 aa, synthetic construct
SPSRGDLIGR

SEQ ID NO: 116703 - protein, 10 aa, synthetic construct
SPTRGDLIGR

SEQ ID NO: 116704 - protein, 10 aa, synthetic construct
SPYRGDLIGR

SEQ ID NO: 116705 - protein, 10 aa, synthetic construct
SPNRGDLIGR

SEQ ID NO: 116706 - protein, 10 aa, synthetic construct
SPQRGDLIGR

SEQ ID NO: 116707 - protein, 10 aa, synthetic construct
SPDRGDLIGR

SEQ ID NO: 116708 - protein, 10 aa, synthetic construct
SPERGDLIGR

SEQ ID NO: 116709 - protein, 10 aa, synthetic construct
SLGRGDLIGR

SEQ ID NO: 116710 - protein, 10 aa, synthetic construct
SLARGDLIGR

SEQ ID NO: 116711 - protein, 10 aa, synthetic construct
SLVRGDLIGR

SEQ ID NO: 116712 - protein, 10 aa, synthetic construct
SLPRGDLIGR

SEQ ID NO: 116713 - protein, 10 aa, synthetic construct
SLLRGDLIGR

SEQ ID NO: 116714 - protein, 10 aa, synthetic construct
SLIRGDLIGR

SEQ ID NO: 116715 - protein, 10 aa, synthetic construct
SLMRGDLIGR

SEQ ID NO: 116716 - protein, 10 aa, synthetic construct
SLWRGDLIGR

SEQ ID NO: 116717 - protein, 10 aa, synthetic construct
SLFRGDLIGR

SEQ ID NO: 116718 - protein, 10 aa, synthetic construct
SLKRGDLIGR

SEQ ID NO: 116719 - protein, 10 aa, synthetic construct
SLRRGDLIGR

SEQ ID NO: 116720 - protein, 10 aa, synthetic construct
SLHRGDLIGR

SEQ ID NO: 116721 - protein, 10 aa, synthetic construct
SLSRGDLIGR

SEQ ID NO: 116722 - protein, 10 aa, synthetic construct
SLTRGDLIGR

SEQ ID NO: 116723 - protein, 10 aa, synthetic construct
SLYRGDLIGR

SEQ ID NO: 116724 - protein, 10 aa, synthetic construct
SLNRGDLIGR

SEQ ID NO: 116725 - protein, 10 aa, synthetic construct
SLQRGDLIGR

SEQ ID NO: 116726 - protein, 10 aa, synthetic construct
SLDRGDLIGR

SEQ ID NO: 116727 - protein, 10 aa, synthetic construct
SLERGDLIGR

SEQ ID NO: 116728 - protein, 10 aa, synthetic construct
SIGRGDLIGR

SEQ ID NO: 116729 - protein, 10 aa, synthetic construct
SIARGDLIGR

SEQ ID NO: 116730 - protein, 10 aa, synthetic construct
SIVRGDLIGR

SEQ ID NO: 116731 - protein, 10 aa, synthetic construct
SIPRGDLIGR

SEQ ID NO: 116732 - protein, 10 aa, synthetic construct
SILRGDLIGR

SEQ ID NO: 116733 - protein, 10 aa, synthetic construct
SIIRGDLIGR

SEQ ID NO: 116734 - protein, 10 aa, synthetic construct
SIMRGDLIGR

SEQ ID NO: 116735 - protein, 10 aa, synthetic construct
SIWRGDLIGR

SEQ ID NO: 116736 - protein, 10 aa, synthetic construct
SIFRGDLIGR

SEQ ID NO: 116737 - protein, 10 aa, synthetic construct
SIKRGDLIGR

SEQ ID NO: 116738 - protein, 10 aa, synthetic construct
SIRRGDLIGR

SEQ ID NO: 116739 - protein, 10 aa, synthetic construct
SIHRGDLIGR

SEQ ID NO: 116740 - protein, 10 aa, synthetic construct
SISRGDLIGR

SEQ ID NO: 116741 - protein, 10 aa, synthetic construct
SITRGDLIGR

SEQ ID NO: 116742 - protein, 10 aa, synthetic construct
SIYRGDLIGR

SEQ ID NO: 116743 - protein, 10 aa, synthetic construct
SINRGDLIGR

SEQ ID NO: 116744 - protein, 10 aa, synthetic construct
SIQRGDLIGR

SEQ ID NO: 116745 - protein, 10 aa, synthetic construct
SIDRGDLIGR

SEQ ID NO: 116746 - protein, 10 aa, synthetic construct
SIERGDLIGR

SEQ ID NO: 116747 - protein, 10 aa, synthetic construct
SMGRGDLIGR

SEQ ID NO: 116748 - protein, 10 aa, synthetic construct
SMARGDLIGR

SEQ ID NO: 116749 - protein, 10 aa, synthetic construct
SMVRGDLIGR

SEQ ID NO: 116750 - protein, 10 aa, synthetic construct
SMPRGDLIGR

SEQ ID NO: 116751 - protein, 10 aa, synthetic construct
SMLRGDLIGR

SEQ ID NO: 116752 - protein, 10 aa, synthetic construct
SMIRGDLIGR

SEQ ID NO: 116753 - protein, 10 aa, synthetic construct
SMMRGDLIGR

SEQ ID NO: 116754 - protein, 10 aa, synthetic construct
SMWRGDLIGR

SEQ ID NO: 116755 - protein, 10 aa, synthetic construct
SMFRGDLIGR

SEQ ID NO: 116756 - protein, 10 aa, synthetic construct
SMKRGDLIGR

SEQ ID NO: 116757 - protein, 10 aa, synthetic construct
SMRRGDLIGR

SEQ ID NO: 116758 - protein, 10 aa, synthetic construct
SMHRGDLIGR

SEQ ID NO: 116759 - protein, 10 aa, synthetic construct
SMSRGDLIGR

SEQ ID NO: 116760 - protein, 10 aa, synthetic construct
SMTRGDLIGR

SEQ ID NO: 116761 - protein, 10 aa, synthetic construct
SMYRGDLIGR

SEQ ID NO: 116762 - protein, 10 aa, synthetic construct
SMNRGDLIGR

SEQ ID NO: 116763 - protein, 10 aa, synthetic construct
SMQRGDLIGR

SEQ ID NO: 116764 - protein, 10 aa, synthetic construct
SMDRGDLIGR

SEQ ID NO: 116765 - protein, 10 aa, synthetic construct
SMERGDLIGR

SEQ ID NO: 116766 - protein, 10 aa, synthetic construct
SWGRGDLIGR

SEQ ID NO: 116767 - protein, 10 aa, synthetic construct
SWARGDLIGR

SEQ ID NO: 116768 - protein, 10 aa, synthetic construct
SWVRGDLIGR

SEQ ID NO: 116769 - protein, 10 aa, synthetic construct
SWPRGDLIGR

SEQ ID NO: 116770 - protein, 10 aa, synthetic construct
SWLRGDLIGR

SEQ ID NO: 116771 - protein, 10 aa, synthetic construct
SWIRGDLIGR

SEQ ID NO: 116772 - protein, 10 aa, synthetic construct
SWMRGDLIGR

SEQ ID NO: 116773 - protein, 10 aa, synthetic construct
SWWRGDLIGR

SEQ ID NO: 116774 - protein, 10 aa, synthetic construct
SWFRGDLIGR

SEQ ID NO: 116775 - protein, 10 aa, synthetic construct
SWKRGDLIGR

SEQ ID NO: 116776 - protein, 10 aa, synthetic construct
SWRRGDLIGR

SEQ ID NO: 116777 - protein, 10 aa, synthetic construct
SWHRGDLIGR

SEQ ID NO: 116778 - protein, 10 aa, synthetic construct
SWSRGDLIGR

SEQ ID NO: 116779 - protein, 10 aa, synthetic construct
SWTRGDLIGR

SEQ ID NO: 116780 - protein, 10 aa, synthetic construct
SWYRGDLIGR

SEQ ID NO: 116781 - protein, 10 aa, synthetic construct
SWNRGDLIGR

SEQ ID NO: 116782 - protein, 10 aa, synthetic construct
SWQRGDLIGR

SEQ ID NO: 116783 - protein, 10 aa, synthetic construct
SWDRGDLIGR

SEQ ID NO: 116784 - protein, 10 aa, synthetic construct
SWERGDLIGR

SEQ ID NO: 116785 - protein, 10 aa, synthetic construct
SFGRGDLIGR

SEQ ID NO: 116786 - protein, 10 aa, synthetic construct
SFARGDLIGR

SEQ ID NO: 116787 - protein, 10 aa, synthetic construct
SFVRGDLIGR

SEQ ID NO: 116788 - protein, 10 aa, synthetic construct
SFPRGDLIGR

SEQ ID NO: 116789 - protein, 10 aa, synthetic construct
SFLRGDLIGR

SEQ ID NO: 116790 - protein, 10 aa, synthetic construct
SFIRGDLIGR

SEQ ID NO: 116791 - protein, 10 aa, synthetic construct
SFMRGDLIGR

SEQ ID NO: 116792 - protein, 10 aa, synthetic construct
SFWRGDLIGR

SEQ ID NO: 116793 - protein, 10 aa, synthetic construct
SFFRGDLIGR

SEQ ID NO: 116794 - protein, 10 aa, synthetic construct
SFKRGDLIGR

SEQ ID NO: 116795 - protein, 10 aa, synthetic construct
SFRRGDLIGR

SEQ ID NO: 116796 - protein, 10 aa, synthetic construct
SFHRGDLIGR

SEQ ID NO: 116797 - protein, 10 aa, synthetic construct
SFSRGDLIGR

SEQ ID NO: 116798 - protein, 10 aa, synthetic construct
SFTRGDLIGR

SEQ ID NO: 116799 - protein, 10 aa, synthetic construct
SFYRGDLIGR

SEQ ID NO: 116800 - protein, 10 aa, synthetic construct
SFNRGDLIGR

SEQ ID NO: 116801 - protein, 10 aa, synthetic construct
SFQRGDLIGR

SEQ ID NO: 116802 - protein, 10 aa, synthetic construct
SFDRGDLIGR

SEQ ID NO: 116803 - protein, 10 aa, synthetic construct
SFERGDLIGR

SEQ ID NO: 116804 - protein, 10 aa, synthetic construct
SKGRGDLIGR

SEQ ID NO: 116805 - protein, 10 aa, synthetic construct
SKARGDLIGR

SEQ ID NO: 116806 - protein, 10 aa, synthetic construct
SKVRGDLIGR

SEQ ID NO: 116807 - protein, 10 aa, synthetic construct
SKPRGDLIGR

SEQ ID NO: 116808 - protein, 10 aa, synthetic construct
SKLRGDLIGR

SEQ ID NO: 116809 - protein, 10 aa, synthetic construct
SKIRGDLIGR

SEQ ID NO: 116810 - protein, 10 aa, synthetic construct
SKMRGDLIGR

SEQ ID NO: 116811 - protein, 10 aa, synthetic construct
SKWRGDLIGR

SEQ ID NO: 116812 - protein, 10 aa, synthetic construct
SKFRGDLIGR

SEQ ID NO: 116813 - protein, 10 aa, synthetic construct
SKKRGDLIGR

SEQ ID NO: 116814 - protein, 10 aa, synthetic construct
SKRRGDLIGR

SEQ ID NO: 116815 - protein, 10 aa, synthetic construct
SKHRGDLIGR

SEQ ID NO: 116816 - protein, 10 aa, synthetic construct
SKSRGDLIGR

SEQ ID NO: 116817 - protein, 10 aa, synthetic construct
SKTRGDLIGR

SEQ ID NO: 116818 - protein, 10 aa, synthetic construct
SKYRGDLIGR

SEQ ID NO: 116819 - protein, 10 aa, synthetic construct
SKNRGDLIGR

SEQ ID NO: 116820 - protein, 10 aa, synthetic construct
SKQRGDLIGR

SEQ ID NO: 116821 - protein, 10 aa, synthetic construct
SKDRGDLIGR

SEQ ID NO: 116822 - protein, 10 aa, synthetic construct
SKERGDLIGR

SEQ ID NO: 116823 - protein, 10 aa, synthetic construct
SRGRGDLIGR

SEQ ID NO: 116824 - protein, 10 aa, synthetic construct
SRARGDLIGR

SEQ ID NO: 116825 - protein, 10 aa, synthetic construct
SRVRGDLIGR

SEQ ID NO: 116826 - protein, 10 aa, synthetic construct
SRPRGDLIGR

SEQ ID NO: 116827 - protein, 10 aa, synthetic construct
SRLRGDLIGR

SEQ ID NO: 116828 - protein, 10 aa, synthetic construct
SRIRGDLIGR

SEQ ID NO: 116829 - protein, 10 aa, synthetic construct
SRMRGDLIGR

SEQ ID NO: 116830 - protein, 10 aa, synthetic construct
SRWRGDLIGR

SEQ ID NO: 116831 - protein, 10 aa, synthetic construct
SRFRGDLIGR

SEQ ID NO: 116832 - protein, 10 aa, synthetic construct
SRKRGDLIGR

SEQ ID NO: 116833 - protein, 10 aa, synthetic construct
SRRRGDLIGR

SEQ ID NO: 116834 - protein, 10 aa, synthetic construct
SRHRGDLIGR

SEQ ID NO: 116835 - protein, 10 aa, synthetic construct
SRSRGDLIGR

SEQ ID NO: 116836 - protein, 10 aa, synthetic construct
SRTRGDLIGR

SEQ ID NO: 116837 - protein, 10 aa, synthetic construct
SRYRGDLIGR

SEQ ID NO: 116838 - protein, 10 aa, synthetic construct
SRNRGDLIGR

SEQ ID NO: 116839 - protein, 10 aa, synthetic construct
SRQRGDLIGR

SEQ ID NO: 116840 - protein, 10 aa, synthetic construct
SRDRGDLIGR

SEQ ID NO: 116841 - protein, 10 aa, synthetic construct
SRERGDLIGR

SEQ ID NO: 116842 - protein, 10 aa, synthetic construct
SHGRGDLIGR

SEQ ID NO: 116843 - protein, 10 aa, synthetic construct
SHARGDLIGR

SEQ ID NO: 116844 - protein, 10 aa, synthetic construct
SHVRGDLIGR

SEQ ID NO: 116845 - protein, 10 aa, synthetic construct
SHPRGDLIGR

SEQ ID NO: 116846 - protein, 10 aa, synthetic construct
SHLRGDLIGR

SEQ ID NO: 116847 - protein, 10 aa, synthetic construct
SHIRGDLIGR

SEQ ID NO: 116848 - protein, 10 aa, synthetic construct
SHMRGDLIGR

SEQ ID NO: 116849 - protein, 10 aa, synthetic construct
SHWRGDLIGR

SEQ ID NO: 116850 - protein, 10 aa, synthetic construct
SHFRGDLIGR

SEQ ID NO: 116851 - protein, 10 aa, synthetic construct
SHKRGDLIGR

SEQ ID NO: 116852 - protein, 10 aa, synthetic construct
SHRRGDLIGR

SEQ ID NO: 116853 - protein, 10 aa, synthetic construct
SHHRGDLIGR

SEQ ID NO: 116854 - protein, 10 aa, synthetic construct
SHSRGDLIGR

SEQ ID NO: 116855 - protein, 10 aa, synthetic construct
SHTRGDLIGR

SEQ ID NO: 116856 - protein, 10 aa, synthetic construct
SHYRGDLIGR

SEQ ID NO: 116857 - protein, 10 aa, synthetic construct
SHNRGDLIGR

SEQ ID NO: 116858 - protein, 10 aa, synthetic construct
SHQRGDLIGR

SEQ ID NO: 116859 - protein, 10 aa, synthetic construct
SHDRGDLIGR

SEQ ID NO: 116860 - protein, 10 aa, synthetic construct
SHERGDLIGR

SEQ ID NO: 116861 - protein, 10 aa, synthetic construct
SSGRGDLIGR

SEQ ID NO: 116862 - protein, 10 aa, synthetic construct
SSARGDLIGR

SEQ ID NO: 116863 - protein, 10 aa, synthetic construct
SSVRGDLIGR

SEQ ID NO: 116864 - protein, 10 aa, synthetic construct
SSPRGDLIGR

SEQ ID NO: 116865 - protein, 10 aa, synthetic construct
SSLRGDLIGR

SEQ ID NO: 116866 - protein, 10 aa, synthetic construct
SSIRGDLIGR

SEQ ID NO: 116867 - protein, 10 aa, synthetic construct
SSMRGDLIGR

SEQ ID NO: 116868 - protein, 10 aa, synthetic construct
SSWRGDLIGR

SEQ ID NO: 116869 - protein, 10 aa, synthetic construct
SSFRGDLIGR

SEQ ID NO: 116870 - protein, 10 aa, synthetic construct
SSKRGDLIGR

SEQ ID NO: 116871 - protein, 10 aa, synthetic construct
SSRRGDLIGR

SEQ ID NO: 116872 - protein, 10 aa, synthetic construct
SSHRGDLIGR

SEQ ID NO: 116873 - protein, 10 aa, synthetic construct
SSSRGDLIGR

SEQ ID NO: 116874 - protein, 10 aa, synthetic construct
SSTRGDLIGR

SEQ ID NO: 116875 - protein, 10 aa, synthetic construct
SSYRGDLIGR

SEQ ID NO: 116876 - protein, 10 aa, synthetic construct
SSNRGDLIGR

SEQ ID NO: 116877 - protein, 10 aa, synthetic construct
SSQRGDLIGR

SEQ ID NO: 116878 - protein, 10 aa, synthetic construct
SSDRGDLIGR

SEQ ID NO: 116879 - protein, 10 aa, synthetic construct
SSERGDLIGR

SEQ ID NO: 116880 - protein, 10 aa, synthetic construct
STGRGDLIGR

SEQ ID NO: 116881 - protein, 10 aa, synthetic construct
STARGDLIGR

SEQ ID NO: 116882 - protein, 10 aa, synthetic construct
STVRGDLIGR

SEQ ID NO: 116883 - protein, 10 aa, synthetic construct
STPRGDLIGR

SEQ ID NO: 116884 - protein, 10 aa, synthetic construct
STLRGDLIGR

SEQ ID NO: 116885 - protein, 10 aa, synthetic construct
STIRGDLIGR

SEQ ID NO: 116886 - protein, 10 aa, synthetic construct
STMRGDLIGR

SEQ ID NO: 116887 - protein, 10 aa, synthetic construct
STWRGDLIGR

SEQ ID NO: 116888 - protein, 10 aa, synthetic construct
STFRGDLIGR

SEQ ID NO: 116889 - protein, 10 aa, synthetic construct
STKRGDLIGR

SEQ ID NO: 116890 - protein, 10 aa, synthetic construct
STRRGDLIGR

SEQ ID NO: 116891 - protein, 10 aa, synthetic construct
STHRGDLIGR

SEQ ID NO: 116892 - protein, 10 aa, synthetic construct
STSRGDLIGR

SEQ ID NO: 116893 - protein, 10 aa, synthetic construct
STTRGDLIGR

SEQ ID NO: 116894 - protein, 10 aa, synthetic construct
STYRGDLIGR

SEQ ID NO: 116895 - protein, 10 aa, synthetic construct
STNRGDLIGR

SEQ ID NO: 116896 - protein, 10 aa, synthetic construct
STQRGDLIGR

SEQ ID NO: 116897 - protein, 10 aa, synthetic construct
STDRGDLIGR

SEQ ID NO: 116898 - protein, 10 aa, synthetic construct
STERGDLIGR

SEQ ID NO: 116899 - protein, 10 aa, synthetic construct
SYGRGDLIGR

SEQ ID NO: 116900 - protein, 10 aa, synthetic construct
SYARGDLIGR

SEQ ID NO: 116901 - protein, 10 aa, synthetic construct
SYVRGDLIGR

SEQ ID NO: 116902 - protein, 10 aa, synthetic construct
SYPRGDLIGR

SEQ ID NO: 116903 - protein, 10 aa, synthetic construct
SYLRGDLIGR

SEQ ID NO: 116904 - protein, 10 aa, synthetic construct
SYIRGDLIGR

SEQ ID NO: 116905 - protein, 10 aa, synthetic construct
SYMRGDLIGR

SEQ ID NO: 116906 - protein, 10 aa, synthetic construct
SYWRGDLIGR

SEQ ID NO: 116907 - protein, 10 aa, synthetic construct
SYFRGDLIGR

SEQ ID NO: 116908 - protein, 10 aa, synthetic construct
SYKRGDLIGR

SEQ ID NO: 116909 - protein, 10 aa, synthetic construct
SYRRGDLIGR

SEQ ID NO: 116910 - protein, 10 aa, synthetic construct
SYHRGDLIGR

SEQ ID NO: 116911 - protein, 10 aa, synthetic construct
SYSRGDLIGR

SEQ ID NO: 116912 - protein, 10 aa, synthetic construct
SYTRGDLIGR

SEQ ID NO: 116913 - protein, 10 aa, synthetic construct
SYYRGDLIGR

SEQ ID NO: 116914 - protein, 10 aa, synthetic construct
SYNRGDLIGR

SEQ ID NO: 116915 - protein, 10 aa, synthetic construct
SYQRGDLIGR

SEQ ID NO: 116916 - protein, 10 aa, synthetic construct
SYDRGDLIGR

SEQ ID NO: 116917 - protein, 10 aa, synthetic construct
SYERGDLIGR

SEQ ID NO: 116918 - protein, 10 aa, synthetic construct
SNGRGDLIGR

SEQ ID NO: 116919 - protein, 10 aa, synthetic construct
SNARGDLIGR

SEQ ID NO: 116920 - protein, 10 aa, synthetic construct
SNVRGDLIGR

SEQ ID NO: 116921 - protein, 10 aa, synthetic construct
SNPRGDLIGR

SEQ ID NO: 116922 - protein, 10 aa, synthetic construct
SNLRGDLIGR

SEQ ID NO: 116923 - protein, 10 aa, synthetic construct
SNIRGDLIGR

SEQ ID NO: 116924 - protein, 10 aa, synthetic construct
SNMRGDLIGR

SEQ ID NO: 116925 - protein, 10 aa, synthetic construct
SNWRGDLIGR

SEQ ID NO: 116926 - protein, 10 aa, synthetic construct
SNFRGDLIGR

SEQ ID NO: 116927 - protein, 10 aa, synthetic construct
SNKRGDLIGR

SEQ ID NO: 116928 - protein, 10 aa, synthetic construct
SNRRGDLIGR

SEQ ID NO: 116929 - protein, 10 aa, synthetic construct
SNHRGDLIGR

SEQ ID NO: 116930 - protein, 10 aa, synthetic construct
SNSRGDLIGR

SEQ ID NO: 116931 - protein, 10 aa, synthetic construct
SNTRGDLIGR

SEQ ID NO: 116932 - protein, 10 aa, synthetic construct
SNYRGDLIGR

SEQ ID NO: 116933 - protein, 10 aa, synthetic construct
SNNRGDLIGR

SEQ ID NO: 116934 - protein, 10 aa, synthetic construct
SNQRGDLIGR

SEQ ID NO: 116935 - protein, 10 aa, synthetic construct
SNDRGDLIGR

SEQ ID NO: 116936 - protein, 10 aa, synthetic construct
SNERGDLIGR

SEQ ID NO: 116937 - protein, 10 aa, synthetic construct
SQGRGDLIGR

SEQ ID NO: 116938 - protein, 10 aa, synthetic construct
SQARGDLIGR

SEQ ID NO: 116939 - protein, 10 aa, synthetic construct
SQVRGDLIGR

SEQ ID NO: 116940 - protein, 10 aa, synthetic construct
SQPRGDLIGR

SEQ ID NO: 116941 - protein, 10 aa, synthetic construct
SQLRGDLIGR

SEQ ID NO: 116942 - protein, 10 aa, synthetic construct
SQIRGDLIGR

SEQ ID NO: 116943 - protein, 10 aa, synthetic construct
SQMRGDLIGR

SEQ ID NO: 116944 - protein, 10 aa, synthetic construct
SQWRGDLIGR

SEQ ID NO: 116945 - protein, 10 aa, synthetic construct
SQFRGDLIGR

SEQ ID NO: 116946 - protein, 10 aa, synthetic construct
SQKRGDLIGR

SEQ ID NO: 116947 - protein, 10 aa, synthetic construct
SQRRGDLIGR

SEQ ID NO: 116948 - protein, 10 aa, synthetic construct
SQHRGDLIGR

SEQ ID NO: 116949 - protein, 10 aa, synthetic construct
SQSRGDLIGR

SEQ ID NO: 116950 - protein, 10 aa, synthetic construct
SQTRGDLIGR

SEQ ID NO: 116951 - protein, 10 aa, synthetic construct
SQYRGDLIGR

SEQ ID NO: 116952 - protein, 10 aa, synthetic construct
SQNRGDLIGR

SEQ ID NO: 116953 - protein, 10 aa, synthetic construct
SQQRGDLIGR

SEQ ID NO: 116954 - protein, 10 aa, synthetic construct
SQDRGDLIGR

SEQ ID NO: 116955 - protein, 10 aa, synthetic construct
SQERGDLIGR

SEQ ID NO: 116956 - protein, 10 aa, synthetic construct
SDGRGDLIGR

SEQ ID NO: 116957 - protein, 10 aa, synthetic construct
SDARGDLIGR

SEQ ID NO: 116958 - protein, 10 aa, synthetic construct
SDVRGDLIGR

SEQ ID NO: 116959 - protein, 10 aa, synthetic construct
SDPRGDLIGR

SEQ ID NO: 116960 - protein, 10 aa, synthetic construct
SDLRGDLIGR

SEQ ID NO: 116961 - protein, 10 aa, synthetic construct
SDIRGDLIGR

SEQ ID NO: 116962 - protein, 10 aa, synthetic construct
SDMRGDLIGR

SEQ ID NO: 116963 - protein, 10 aa, synthetic construct
SDWRGDLIGR

SEQ ID NO: 116964 - protein, 10 aa, synthetic construct
SDFRGDLIGR

SEQ ID NO: 116965 - protein, 10 aa, synthetic construct
SDKRGDLIGR

SEQ ID NO: 116966 - protein, 10 aa, synthetic construct
SDRRGDLIGR

SEQ ID NO: 116967 - protein, 10 aa, synthetic construct
SDHRGDLIGR

SEQ ID NO: 116968 - protein, 10 aa, synthetic construct
SDSRGDLIGR

SEQ ID NO: 116969 - protein, 10 aa, synthetic construct
SDTRGDLIGR

SEQ ID NO: 116970 - protein, 10 aa, synthetic construct
SDYRGDLIGR

SEQ ID NO: 116971 - protein, 10 aa, synthetic construct
SDNRGDLIGR

SEQ ID NO: 116972 - protein, 10 aa, synthetic construct
SDQRGDLIGR

SEQ ID NO: 116973 - protein, 10 aa, synthetic construct
SDDRGDLIGR

SEQ ID NO: 116974 - protein, 10 aa, synthetic construct
SDERGDLIGR

SEQ ID NO: 116975 - protein, 10 aa, synthetic construct
SEGRGDLIGR

SEQ ID NO: 116976 - protein, 10 aa, synthetic construct
SEARGDLIGR

SEQ ID NO: 116977 - protein, 10 aa, synthetic construct
SEVRGDLIGR

SEQ ID NO: 116978 - protein, 10 aa, synthetic construct
SEPRGDLIGR

SEQ ID NO: 116979 - protein, 10 aa, synthetic construct
SELRGDLIGR

SEQ ID NO: 116980 - protein, 10 aa, synthetic construct
SEIRGDLIGR

SEQ ID NO: 116981 - protein, 10 aa, synthetic construct
SEMRGDLIGR

SEQ ID NO: 116982 - protein, 10 aa, synthetic construct
SEWRGDLIGR

SEQ ID NO: 116983 - protein, 10 aa, synthetic construct
SEFRGDLIGR

SEQ ID NO: 116984 - protein, 10 aa, synthetic construct
SEKRGDLIGR

SEQ ID NO: 116985 - protein, 10 aa, synthetic construct
SERRGDLIGR

SEQ ID NO: 116986 - protein, 10 aa, synthetic construct
SEHRGDLIGR

SEQ ID NO: 116987 - protein, 10 aa, synthetic construct
SESRGDLIGR

SEQ ID NO: 116988 - protein, 10 aa, synthetic construct
SETRGDLIGR

SEQ ID NO: 116989 - protein, 10 aa, synthetic construct
SEYRGDLIGR

SEQ ID NO: 116990 - protein, 10 aa, synthetic construct
SENRGDLIGR

SEQ ID NO: 116991 - protein, 10 aa, synthetic construct
SEQRGDLIGR

SEQ ID NO: 116992 - protein, 10 aa, synthetic construct
SEDRGDLIGR

SEQ ID NO: 116993 - protein, 10 aa, synthetic construct
SEERGDLIGR

SEQ ID NO: 116994 - protein, 10 aa, synthetic construct
TGGRGDLIGR

SEQ ID NO: 116995 - protein, 10 aa, synthetic construct
TGARGDLIGR

SEQ ID NO: 116996 - protein, 10 aa, synthetic construct
TGVRGDLIGR

SEQ ID NO: 116997 - protein, 10 aa, synthetic construct
TGPRGDLIGR

SEQ ID NO: 116998 - protein, 10 aa, synthetic construct
TGLRGDLIGR

SEQ ID NO: 116999 - protein, 10 aa, synthetic construct
TGIRGDLIGR

SEQ ID NO: 117000 - protein, 10 aa, synthetic construct
TGMRGDLIGR

SEQ ID NO: 117001 - protein, 10 aa, synthetic construct
TGWRGDLIGR

SEQ ID NO: 117002 - protein, 10 aa, synthetic construct
TGFRGDLIGR

SEQ ID NO: 117003 - protein, 10 aa, synthetic construct
TGKRGDLIGR

SEQ ID NO: 117004 - protein, 10 aa, synthetic construct
TGRRGDLIGR

SEQ ID NO: 117005 - protein, 10 aa, synthetic construct
TGHRGDLIGR

SEQ ID NO: 117006 - protein, 10 aa, synthetic construct
TGSRGDLIGR

SEQ ID NO: 117007 - protein, 10 aa, synthetic construct
TGTRGDLIGR

SEQ ID NO: 117008 - protein, 10 aa, synthetic construct
TGYRGDLIGR

SEQ ID NO: 117009 - protein, 10 aa, synthetic construct
TGNRGDLIGR

SEQ ID NO: 117010 - protein, 10 aa, synthetic construct
TGQRGDLIGR

SEQ ID NO: 117011 - protein, 10 aa, synthetic construct
TGDRGDLIGR

SEQ ID NO: 117012 - protein, 10 aa, synthetic construct
TGERGDLIGR

SEQ ID NO: 117013 - protein, 10 aa, synthetic construct
TAGRGDLIGR

SEQ ID NO: 117014 - protein, 10 aa, synthetic construct
TAARGDLIGR

SEQ ID NO: 117015 - protein, 10 aa, synthetic construct
TAVRGDLIGR

SEQ ID NO: 117016 - protein, 10 aa, synthetic construct
TAPRGDLIGR

SEQ ID NO: 117017 - protein, 10 aa, synthetic construct
TALRGDLIGR

SEQ ID NO: 117018 - protein, 10 aa, synthetic construct
TAIRGDLIGR

SEQ ID NO: 117019 - protein, 10 aa, synthetic construct
TAMRGDLIGR

SEQ ID NO: 117020 - protein, 10 aa, synthetic construct
TAWRGDLIGR

SEQ ID NO: 117021 - protein, 10 aa, synthetic construct
TAFRGDLIGR

SEQ ID NO: 117022 - protein, 10 aa, synthetic construct
TAKRGDLIGR

SEQ ID NO: 117023 - protein, 10 aa, synthetic construct
TARRGDLIGR

SEQ ID NO: 117024 - protein, 10 aa, synthetic construct
TAHRGDLIGR

SEQ ID NO: 117025 - protein, 10 aa, synthetic construct
TASRGDLIGR

SEQ ID NO: 117026 - protein, 10 aa, synthetic construct
TATRGDLIGR

SEQ ID NO: 117027 - protein, 10 aa, synthetic construct
TAYRGDLIGR

SEQ ID NO: 117028 - protein, 10 aa, synthetic construct
TANRGDLIGR

SEQ ID NO: 117029 - protein, 10 aa, synthetic construct
TAQRGDLIGR

SEQ ID NO: 117030 - protein, 10 aa, synthetic construct
TADRGDLIGR

SEQ ID NO: 117031 - protein, 10 aa, synthetic construct
TAERGDLIGR

SEQ ID NO: 117032 - protein, 10 aa, synthetic construct
TVGRGDLIGR

SEQ ID NO: 117033 - protein, 10 aa, synthetic construct
TVARGDLIGR

SEQ ID NO: 117034 - protein, 10 aa, synthetic construct
TVVRGDLIGR

SEQ ID NO: 117035 - protein, 10 aa, synthetic construct
TVPRGDLIGR

SEQ ID NO: 117036 - protein, 10 aa, synthetic construct
TVLRGDLIGR

SEQ ID NO: 117037 - protein, 10 aa, synthetic construct
TVIRGDLIGR

SEQ ID NO: 117038 - protein, 10 aa, synthetic construct
TVMRGDLIGR

SEQ ID NO: 117039 - protein, 10 aa, synthetic construct
TVWRGDLIGR

SEQ ID NO: 117040 - protein, 10 aa, synthetic construct
TVFRGDLIGR

SEQ ID NO: 117041 - protein, 10 aa, synthetic construct
TVKRGDLIGR

SEQ ID NO: 117042 - protein, 10 aa, synthetic construct
TVRRGDLIGR

SEQ ID NO: 117043 - protein, 10 aa, synthetic construct
TVHRGDLIGR

SEQ ID NO: 117044 - protein, 10 aa, synthetic construct
TVSRGDLIGR

SEQ ID NO: 117045 - protein, 10 aa, synthetic construct
TVTRGDLIGR

SEQ ID NO: 117046 - protein, 10 aa, synthetic construct
TVYRGDLIGR

SEQ ID NO: 117047 - protein, 10 aa, synthetic construct
TVNRGDLIGR

SEQ ID NO: 117048 - protein, 10 aa, synthetic construct
TVQRGDLIGR

SEQ ID NO: 117049 - protein, 10 aa, synthetic construct
TVDRGDLIGR

SEQ ID NO: 117050 - protein, 10 aa, synthetic construct
TVERGDLIGR

SEQ ID NO: 117051 - protein, 10 aa, synthetic construct
TPGRGDLIGR

SEQ ID NO: 117052 - protein, 10 aa, synthetic construct
TPARGDLIGR

SEQ ID NO: 117053 - protein, 10 aa, synthetic construct
TPVRGDLIGR

SEQ ID NO: 117054 - protein, 10 aa, synthetic construct
TPPRGDLIGR

SEQ ID NO: 117055 - protein, 10 aa, synthetic construct
TPLRGDLIGR

SEQ ID NO: 117056 - protein, 10 aa, synthetic construct
TPIRGDLIGR

SEQ ID NO: 117057 - protein, 10 aa, synthetic construct
TPMRGDLIGR

SEQ ID NO: 117058 - protein, 10 aa, synthetic construct
TPWRGDLIGR

SEQ ID NO: 117059 - protein, 10 aa, synthetic construct
TPFRGDLIGR

SEQ ID NO: 117060 - protein, 10 aa, synthetic construct
TPKRGDLIGR

SEQ ID NO: 117061 - protein, 10 aa, synthetic construct
TPRRGDLIGR

SEQ ID NO: 117062 - protein, 10 aa, synthetic construct
TPHRGDLIGR

SEQ ID NO: 117063 - protein, 10 aa, synthetic construct
TPSRGDLIGR

SEQ ID NO: 117064 - protein, 10 aa, synthetic construct
TPTRGDLIGR

SEQ ID NO: 117065 - protein, 10 aa, synthetic construct
TPYRGDLIGR

SEQ ID NO: 117066 - protein, 10 aa, synthetic construct
TPNRGDLIGR

SEQ ID NO: 117067 - protein, 10 aa, synthetic construct
TPQRGDLIGR

SEQ ID NO: 117068 - protein, 10 aa, synthetic construct
TPDRGDLIGR

SEQ ID NO: 117069 - protein, 10 aa, synthetic construct
TPERGDLIGR

SEQ ID NO: 117070 - protein, 10 aa, synthetic construct
TLGRGDLIGR

SEQ ID NO: 117071 - protein, 10 aa, synthetic construct
TLARGDLIGR

SEQ ID NO: 117072 - protein, 10 aa, synthetic construct
TLVRGDLIGR

SEQ ID NO: 117073 - protein, 10 aa, synthetic construct
TLPRGDLIGR

SEQ ID NO: 117074 - protein, 10 aa, synthetic construct
TLLRGDLIGR

SEQ ID NO: 117075 - protein, 10 aa, synthetic construct
TLIRGDLIGR

SEQ ID NO: 117076 - protein, 10 aa, synthetic construct
TLMRGDLIGR

SEQ ID NO: 117077 - protein, 10 aa, synthetic construct
TLWRGDLIGR

SEQ ID NO: 117078 - protein, 10 aa, synthetic construct
TLFRGDLIGR

SEQ ID NO: 117079 - protein, 10 aa, synthetic construct
TLKRGDLIGR

SEQ ID NO: 117080 - protein, 10 aa, synthetic construct
TLRRGDLIGR

SEQ ID NO: 117081 - protein, 10 aa, synthetic construct
TLHRGDLIGR

SEQ ID NO: 117082 - protein, 10 aa, synthetic construct
TLSRGDLIGR

SEQ ID NO: 117083 - protein, 10 aa, synthetic construct
TLTRGDLIGR

SEQ ID NO: 117084 - protein, 10 aa, synthetic construct
TLYRGDLIGR

SEQ ID NO: 117085 - protein, 10 aa, synthetic construct
TLNRGDLIGR

SEQ ID NO: 117086 - protein, 10 aa, synthetic construct
TLQRGDLIGR

SEQ ID NO: 117087 - protein, 10 aa, synthetic construct
TLDRGDLIGR

SEQ ID NO: 117088 - protein, 10 aa, synthetic construct
TLERGDLIGR

SEQ ID NO: 117089 - protein, 10 aa, synthetic construct
TIGRGDLIGR

SEQ ID NO: 117090 - protein, 10 aa, synthetic construct
TIARGDLIGR

SEQ ID NO: 117091 - protein, 10 aa, synthetic construct
TIVRGDLIGR

SEQ ID NO: 117092 - protein, 10 aa, synthetic construct
TIPRGDLIGR

SEQ ID NO: 117093 - protein, 10 aa, synthetic construct
TILRGDLIGR

SEQ ID NO: 117094 - protein, 10 aa, synthetic construct
TIIRGDLIGR

SEQ ID NO: 117095 - protein, 10 aa, synthetic construct
TIMRGDLIGR

SEQ ID NO: 117096 - protein, 10 aa, synthetic construct
TIWRGDLIGR

SEQ ID NO: 117097 - protein, 10 aa, synthetic construct
TIFRGDLIGR

SEQ ID NO: 117098 - protein, 10 aa, synthetic construct
TIKRGDLIGR

SEQ ID NO: 117099 - protein, 10 aa, synthetic construct
TIRRGDLIGR

SEQ ID NO: 117100 - protein, 10 aa, synthetic construct
TIHRGDLIGR

SEQ ID NO: 117101 - protein, 10 aa, synthetic construct
TISRGDLIGR

SEQ ID NO: 117102 - protein, 10 aa, synthetic construct
TITRGDLIGR

SEQ ID NO: 117103 - protein, 10 aa, synthetic construct
TIYRGDLIGR

SEQ ID NO: 117104 - protein, 10 aa, synthetic construct
TINRGDLIGR

SEQ ID NO: 117105 - protein, 10 aa, synthetic construct
TIQRGDLIGR

SEQ ID NO: 117106 - protein, 10 aa, synthetic construct
TIDRGDLIGR

SEQ ID NO: 117107 - protein, 10 aa, synthetic construct
TIERGDLIGR

SEQ ID NO: 117108 - protein, 10 aa, synthetic construct
TMGRGDLIGR

SEQ ID NO: 117109 - protein, 10 aa, synthetic construct
TMARGDLIGR

SEQ ID NO: 117110 - protein, 10 aa, synthetic construct
TMVRGDLIGR

SEQ ID NO: 117111 - protein, 10 aa, synthetic construct
TMPRGDLIGR

SEQ ID NO: 117112 - protein, 10 aa, synthetic construct
TMLRGDLIGR

SEQ ID NO: 117113 - protein, 10 aa, synthetic construct
TMIRGDLIGR

SEQ ID NO: 117114 - protein, 10 aa, synthetic construct
TMMRGDLIGR

SEQ ID NO: 117115 - protein, 10 aa, synthetic construct
TMWRGDLIGR

SEQ ID NO: 117116 - protein, 10 aa, synthetic construct
TMFRGDLIGR

SEQ ID NO: 117117 - protein, 10 aa, synthetic construct
TMKRGDLIGR

SEQ ID NO: 117118 - protein, 10 aa, synthetic construct
TMRRGDLIGR

SEQ ID NO: 117119 - protein, 10 aa, synthetic construct
TMHRGDLIGR

SEQ ID NO: 117120 - protein, 10 aa, synthetic construct
TMSRGDLIGR

SEQ ID NO: 117121 - protein, 10 aa, synthetic construct
TMTRGDLIGR

SEQ ID NO: 117122 - protein, 10 aa, synthetic construct
TMYRGDLIGR

SEQ ID NO: 117123 - protein, 10 aa, synthetic construct
TMNRGDLIGR

SEQ ID NO: 117124 - protein, 10 aa, synthetic construct
TMQRGDLIGR

SEQ ID NO: 117125 - protein, 10 aa, synthetic construct
TMDRGDLIGR

SEQ ID NO: 117126 - protein, 10 aa, synthetic construct
TMERGDLIGR

SEQ ID NO: 117127 - protein, 10 aa, synthetic construct
TWGRGDLIGR

SEQ ID NO: 117128 - protein, 10 aa, synthetic construct
TWARGDLIGR

SEQ ID NO: 117129 - protein, 10 aa, synthetic construct
TWVRGDLIGR

SEQ ID NO: 117130 - protein, 10 aa, synthetic construct
TWPRGDLIGR

SEQ ID NO: 117131 - protein, 10 aa, synthetic construct
TWLRGDLIGR

SEQ ID NO: 117132 - protein, 10 aa, synthetic construct
TWIRGDLIGR

SEQ ID NO: 117133 - protein, 10 aa, synthetic construct
TWMRGDLIGR

SEQ ID NO: 117134 - protein, 10 aa, synthetic construct
TWWRGDLIGR

SEQ ID NO: 117135 - protein, 10 aa, synthetic construct
TWFRGDLIGR

SEQ ID NO: 117136 - protein, 10 aa, synthetic construct
TWKRGDLIGR

SEQ ID NO: 117137 - protein, 10 aa, synthetic construct
TWRRGDLIGR

SEQ ID NO: 117138 - protein, 10 aa, synthetic construct
TWHRGDLIGR

SEQ ID NO: 117139 - protein, 10 aa, synthetic construct
TWSRGDLIGR

SEQ ID NO: 117140 - protein, 10 aa, synthetic construct
TWTRGDLIGR

SEQ ID NO: 117141 - protein, 10 aa, synthetic construct
TWYRGDLIGR

SEQ ID NO: 117142 - protein, 10 aa, synthetic construct
TWNRGDLIGR

SEQ ID NO: 117143 - protein, 10 aa, synthetic construct
TWQRGDLIGR

SEQ ID NO: 117144 - protein, 10 aa, synthetic construct
TWDRGDLIGR

SEQ ID NO: 117145 - protein, 10 aa, synthetic construct
TWERGDLIGR

SEQ ID NO: 117146 - protein, 10 aa, synthetic construct
TFGRGDLIGR

SEQ ID NO: 117147 - protein, 10 aa, synthetic construct
TFARGDLIGR

SEQ ID NO: 117148 - protein, 10 aa, synthetic construct
TFVRGDLIGR

SEQ ID NO: 117149 - protein, 10 aa, synthetic construct
TFPRGDLIGR

SEQ ID NO: 117150 - protein, 10 aa, synthetic construct
TFLRGDLIGR

SEQ ID NO: 117151 - protein, 10 aa, synthetic construct
TFIRGDLIGR

SEQ ID NO: 117152 - protein, 10 aa, synthetic construct
TFMRGDLIGR

SEQ ID NO: 117153 - protein, 10 aa, synthetic construct
TFWRGDLIGR

SEQ ID NO: 117154 - protein, 10 aa, synthetic construct
TFFRGDLIGR

SEQ ID NO: 117155 - protein, 10 aa, synthetic construct
TFKRGDLIGR

SEQ ID NO: 117156 - protein, 10 aa, synthetic construct
TFRRGDLIGR

SEQ ID NO: 117157 - protein, 10 aa, synthetic construct
TFHRGDLIGR

SEQ ID NO: 117158 - protein, 10 aa, synthetic construct
TFSRGDLIGR

SEQ ID NO: 117159 - protein, 10 aa, synthetic construct
TFTRGDLIGR

SEQ ID NO: 117160 - protein, 10 aa, synthetic construct
TFYRGDLIGR

SEQ ID NO: 117161 - protein, 10 aa, synthetic construct
TFNRGDLIGR

SEQ ID NO: 117162 - protein, 10 aa, synthetic construct
TFQRGDLIGR

SEQ ID NO: 117163 - protein, 10 aa, synthetic construct
TFDRGDLIGR

SEQ ID NO: 117164 - protein, 10 aa, synthetic construct
TFERGDLIGR

SEQ ID NO: 117165 - protein, 10 aa, synthetic construct
TKGRGDLIGR

SEQ ID NO: 117166 - protein, 10 aa, synthetic construct
TKARGDLIGR

SEQ ID NO: 117167 - protein, 10 aa, synthetic construct
TKVRGDLIGR

SEQ ID NO: 117168 - protein, 10 aa, synthetic construct
TKPRGDLIGR

SEQ ID NO: 117169 - protein, 10 aa, synthetic construct
TKLRGDLIGR

SEQ ID NO: 117170 - protein, 10 aa, synthetic construct
TKIRGDLIGR

SEQ ID NO: 117171 - protein, 10 aa, synthetic construct
TKMRGDLIGR

SEQ ID NO: 117172 - protein, 10 aa, synthetic construct
TKWRGDLIGR

SEQ ID NO: 117173 - protein, 10 aa, synthetic construct
TKFRGDLIGR

SEQ ID NO: 117174 - protein, 10 aa, synthetic construct
TKKRGDLIGR

SEQ ID NO: 117175 - protein, 10 aa, synthetic construct
TKRRGDLIGR

SEQ ID NO: 117176 - protein, 10 aa, synthetic construct
TKHRGDLIGR

SEQ ID NO: 117177 - protein, 10 aa, synthetic construct
TKSRGDLIGR

SEQ ID NO: 117178 - protein, 10 aa, synthetic construct
TKTRGDLIGR

SEQ ID NO: 117179 - protein, 10 aa, synthetic construct
TKYRGDLIGR

SEQ ID NO: 117180 - protein, 10 aa, synthetic construct
TKNRGDLIGR

SEQ ID NO: 117181 - protein, 10 aa, synthetic construct
TKQRGDLIGR

SEQ ID NO: 117182 - protein, 10 aa, synthetic construct
TKDRGDLIGR

SEQ ID NO: 117183 - protein, 10 aa, synthetic construct
TKERGDLIGR

SEQ ID NO: 117184 - protein, 10 aa, synthetic construct
TRGRGDLIGR

SEQ ID NO: 117185 - protein, 10 aa, synthetic construct
TRARGDLIGR

SEQ ID NO: 117186 - protein, 10 aa, synthetic construct
TRVRGDLIGR

SEQ ID NO: 117187 - protein, 10 aa, synthetic construct
TRPRGDLIGR

SEQ ID NO: 117188 - protein, 10 aa, synthetic construct
TRLRGDLIGR

SEQ ID NO: 117189 - protein, 10 aa, synthetic construct
TRIRGDLIGR

SEQ ID NO: 117190 - protein, 10 aa, synthetic construct
TRMRGDLIGR

SEQ ID NO: 117191 - protein, 10 aa, synthetic construct
TRWRGDLIGR

SEQ ID NO: 117192 - protein, 10 aa, synthetic construct
TRFRGDLIGR

SEQ ID NO: 117193 - protein, 10 aa, synthetic construct
TRKRGDLIGR

SEQ ID NO: 117194 - protein, 10 aa, synthetic construct
TRRRGDLIGR

SEQ ID NO: 117195 - protein, 10 aa, synthetic construct
TRHRGDLIGR

SEQ ID NO: 117196 - protein, 10 aa, synthetic construct
TRSRGDLIGR

SEQ ID NO: 117197 - protein, 10 aa, synthetic construct
TRTRGDLIGR

SEQ ID NO: 117198 - protein, 10 aa, synthetic construct
TRYRGDLIGR

SEQ ID NO: 117199 - protein, 10 aa, synthetic construct
TRNRGDLIGR

SEQ ID NO: 117200 - protein, 10 aa, synthetic construct
TRQRGDLIGR

SEQ ID NO: 117201 - protein, 10 aa, synthetic construct
TRDRGDLIGR

SEQ ID NO: 117202 - protein, 10 aa, synthetic construct
TRERGDLIGR

SEQ ID NO: 117203 - protein, 10 aa, synthetic construct
THGRGDLIGR

SEQ ID NO: 117204 - protein, 10 aa, synthetic construct
THARGDLIGR

SEQ ID NO: 117205 - protein, 10 aa, synthetic construct
THVRGDLIGR

SEQ ID NO: 117206 - protein, 10 aa, synthetic construct
THPRGDLIGR

SEQ ID NO: 117207 - protein, 10 aa, synthetic construct
THLRGDLIGR

SEQ ID NO: 117208 - protein, 10 aa, synthetic construct
THIRGDLIGR

SEQ ID NO: 117209 - protein, 10 aa, synthetic construct
THMRGDLIGR

SEQ ID NO: 117210 - protein, 10 aa, synthetic construct
THWRGDLIGR

SEQ ID NO: 117211 - protein, 10 aa, synthetic construct
THFRGDLIGR

SEQ ID NO: 117212 - protein, 10 aa, synthetic construct
THKRGDLIGR

SEQ ID NO: 117213 - protein, 10 aa, synthetic construct
THRRGDLIGR

SEQ ID NO: 117214 - protein, 10 aa, synthetic construct
THHRGDLIGR

SEQ ID NO: 117215 - protein, 10 aa, synthetic construct
THSRGDLIGR

SEQ ID NO: 117216 - protein, 10 aa, synthetic construct
THTRGDLIGR

SEQ ID NO: 117217 - protein, 10 aa, synthetic construct
THYRGDLIGR

SEQ ID NO: 117218 - protein, 10 aa, synthetic construct
THNRGDLIGR

SEQ ID NO: 117219 - protein, 10 aa, synthetic construct
THQRGDLIGR

SEQ ID NO: 117220 - protein, 10 aa, synthetic construct
THDRGDLIGR

SEQ ID NO: 117221 - protein, 10 aa, synthetic construct
THERGDLIGR

SEQ ID NO: 117222 - protein, 10 aa, synthetic construct
TSGRGDLIGR

SEQ ID NO: 117223 - protein, 10 aa, synthetic construct
TSARGDLIGR

SEQ ID NO: 117224 - protein, 10 aa, synthetic construct
TSVRGDLIGR

SEQ ID NO: 117225 - protein, 10 aa, synthetic construct
TSPRGDLIGR

SEQ ID NO: 117226 - protein, 10 aa, synthetic construct
TSLRGDLIGR

SEQ ID NO: 117227 - protein, 10 aa, synthetic construct
TSIRGDLIGR

SEQ ID NO: 117228 - protein, 10 aa, synthetic construct
TSMRGDLIGR

SEQ ID NO: 117229 - protein, 10 aa, synthetic construct
TSWRGDLIGR

SEQ ID NO: 117230 - protein, 10 aa, synthetic construct
TSFRGDLIGR

SEQ ID NO: 117231 - protein, 10 aa, synthetic construct
TSKRGDLIGR

SEQ ID NO: 117232 - protein, 10 aa, synthetic construct
TSRRGDLIGR

SEQ ID NO: 117233 - protein, 10 aa, synthetic construct
TSHRGDLIGR

SEQ ID NO: 117234 - protein, 10 aa, synthetic construct
TSSRGDLIGR

SEQ ID NO: 117235 - protein, 10 aa, synthetic construct
TSTRGDLIGR

SEQ ID NO: 117236 - protein, 10 aa, synthetic construct
TSYRGDLIGR

SEQ ID NO: 117237 - protein, 10 aa, synthetic construct
TSNRGDLIGR

SEQ ID NO: 117238 - protein, 10 aa, synthetic construct
TSQRGDLIGR

SEQ ID NO: 117239 - protein, 10 aa, synthetic construct
TSDRGDLIGR

SEQ ID NO: 117240 - protein, 10 aa, synthetic construct
TSERGDLIGR

SEQ ID NO: 117241 - protein, 10 aa, synthetic construct
TTGRGDLIGR

SEQ ID NO: 117242 - protein, 10 aa, synthetic construct
TTARGDLIGR

SEQ ID NO: 117243 - protein, 10 aa, synthetic construct
TTVRGDLIGR

SEQ ID NO: 117244 - protein, 10 aa, synthetic construct
TTPRGDLIGR

SEQ ID NO: 117245 - protein, 10 aa, synthetic construct
TTLRGDLIGR

SEQ ID NO: 117246 - protein, 10 aa, synthetic construct
TTIRGDLIGR

SEQ ID NO: 117247 - protein, 10 aa, synthetic construct
TTMRGDLIGR

SEQ ID NO: 117248 - protein, 10 aa, synthetic construct
TTWRGDLIGR

SEQ ID NO: 117249 - protein, 10 aa, synthetic construct
TTFRGDLIGR

SEQ ID NO: 117250 - protein, 10 aa, synthetic construct
TTKRGDLIGR

SEQ ID NO: 117251 - protein, 10 aa, synthetic construct
TTRRGDLIGR

SEQ ID NO: 117252 - protein, 10 aa, synthetic construct
TTHRGDLIGR

SEQ ID NO: 117253 - protein, 10 aa, synthetic construct
TTSRGDLIGR

SEQ ID NO: 117254 - protein, 10 aa, synthetic construct
TTTRGDLIGR

SEQ ID NO: 117255 - protein, 10 aa, synthetic construct
TTYRGDLIGR

SEQ ID NO: 117256 - protein, 10 aa, synthetic construct
TTNRGDLIGR

SEQ ID NO: 117257 - protein, 10 aa, synthetic construct
TTQRGDLIGR

SEQ ID NO: 117258 - protein, 10 aa, synthetic construct
TTDRGDLIGR

SEQ ID NO: 117259 - protein, 10 aa, synthetic construct
TTERGDLIGR

SEQ ID NO: 117260 - protein, 10 aa, synthetic construct
TYGRGDLIGR

SEQ ID NO: 117261 - protein, 10 aa, synthetic construct
TYARGDLIGR

SEQ ID NO: 117262 - protein, 10 aa, synthetic construct
TYVRGDLIGR

SEQ ID NO: 117263 - protein, 10 aa, synthetic construct
TYPRGDLIGR

SEQ ID NO: 117264 - protein, 10 aa, synthetic construct
TYLRGDLIGR

SEQ ID NO: 117265 - protein, 10 aa, synthetic construct
TYIRGDLIGR

SEQ ID NO: 117266 - protein, 10 aa, synthetic construct
TYMRGDLIGR

SEQ ID NO: 117267 - protein, 10 aa, synthetic construct
TYWRGDLIGR

SEQ ID NO: 117268 - protein, 10 aa, synthetic construct
TYFRGDLIGR

SEQ ID NO: 117269 - protein, 10 aa, synthetic construct
TYKRGDLIGR

SEQ ID NO: 117270 - protein, 10 aa, synthetic construct
TYRRGDLIGR

SEQ ID NO: 117271 - protein, 10 aa, synthetic construct
TYHRGDLIGR

SEQ ID NO: 117272 - protein, 10 aa, synthetic construct
TYSRGDLIGR

SEQ ID NO: 117273 - protein, 10 aa, synthetic construct
TYTRGDLIGR

SEQ ID NO: 117274 - protein, 10 aa, synthetic construct
TYYRGDLIGR

SEQ ID NO: 117275 - protein, 10 aa, synthetic construct
TYNRGDLIGR

SEQ ID NO: 117276 - protein, 10 aa, synthetic construct
TYQRGDLIGR

SEQ ID NO: 117277 - protein, 10 aa, synthetic construct
TYDRGDLIGR

SEQ ID NO: 117278 - protein, 10 aa, synthetic construct
TYERGDLIGR

SEQ ID NO: 117279 - protein, 10 aa, synthetic construct
TNGRGDLIGR

SEQ ID NO: 117280 - protein, 10 aa, synthetic construct
TNARGDLIGR

SEQ ID NO: 117281 - protein, 10 aa, synthetic construct
TNVRGDLIGR

SEQ ID NO: 117282 - protein, 10 aa, synthetic construct
TNPRGDLIGR

SEQ ID NO: 117283 - protein, 10 aa, synthetic construct
TNLRGDLIGR

SEQ ID NO: 117284 - protein, 10 aa, synthetic construct
TNIRGDLIGR

SEQ ID NO: 117285 - protein, 10 aa, synthetic construct
TNMRGDLIGR

SEQ ID NO: 117286 - protein, 10 aa, synthetic construct
TNWRGDLIGR

SEQ ID NO: 117287 - protein, 10 aa, synthetic construct
TNFRGDLIGR

SEQ ID NO: 117288 - protein, 10 aa, synthetic construct
TNKRGDLIGR

SEQ ID NO: 117289 - protein, 10 aa, synthetic construct
TNRRGDLIGR

SEQ ID NO: 117290 - protein, 10 aa, synthetic construct
TNHRGDLIGR

SEQ ID NO: 117291 - protein, 10 aa, synthetic construct
TNSRGDLIGR

SEQ ID NO: 117292 - protein, 10 aa, synthetic construct
TNTRGDLIGR

SEQ ID NO: 117293 - protein, 10 aa, synthetic construct
TNYRGDLIGR

SEQ ID NO: 117294 - protein, 10 aa, synthetic construct
TNNRGDLIGR

SEQ ID NO: 117295 - protein, 10 aa, synthetic construct
TNQRGDLIGR

SEQ ID NO: 117296 - protein, 10 aa, synthetic construct
TNDRGDLIGR

SEQ ID NO: 117297 - protein, 10 aa, synthetic construct
TNERGDLIGR

SEQ ID NO: 117298 - protein, 10 aa, synthetic construct
TQGRGDLIGR

SEQ ID NO: 117299 - protein, 10 aa, synthetic construct
TQARGDLIGR

SEQ ID NO: 117300 - protein, 10 aa, synthetic construct
TQVRGDLIGR

SEQ ID NO: 117301 - protein, 10 aa, synthetic construct
TQPRGDLIGR

SEQ ID NO: 117302 - protein, 10 aa, synthetic construct
TQLRGDLIGR

SEQ ID NO: 117303 - protein, 10 aa, synthetic construct
TQIRGDLIGR

SEQ ID NO: 117304 - protein, 10 aa, synthetic construct
TQMRGDLIGR

SEQ ID NO: 117305 - protein, 10 aa, synthetic construct
TQWRGDLIGR

SEQ ID NO: 117306 - protein, 10 aa, synthetic construct
TQFRGDLIGR

SEQ ID NO: 117307 - protein, 10 aa, synthetic construct
TQKRGDLIGR

SEQ ID NO: 117308 - protein, 10 aa, synthetic construct
TQRRGDLIGR

SEQ ID NO: 117309 - protein, 10 aa, synthetic construct
TQHRGDLIGR

SEQ ID NO: 117310 - protein, 10 aa, synthetic construct
TQSRGDLIGR

SEQ ID NO: 117311 - protein, 10 aa, synthetic construct
TQTRGDLIGR

SEQ ID NO: 117312 - protein, 10 aa, synthetic construct
TQYRGDLIGR

SEQ ID NO: 117313 - protein, 10 aa, synthetic construct
TQNRGDLIGR

SEQ ID NO: 117314 - protein, 10 aa, synthetic construct
TQQRGDLIGR

SEQ ID NO: 117315 - protein, 10 aa, synthetic construct
TQDRGDLIGR

SEQ ID NO: 117316 - protein, 10 aa, synthetic construct
TQERGDLIGR

SEQ ID NO: 117317 - protein, 10 aa, synthetic construct
TDGRGDLIGR

SEQ ID NO: 117318 - protein, 10 aa, synthetic construct
TDARGDLIGR

SEQ ID NO: 117319 - protein, 10 aa, synthetic construct
TDVRGDLIGR

SEQ ID NO: 117320 - protein, 10 aa, synthetic construct
TDPRGDLIGR

SEQ ID NO: 117321 - protein, 10 aa, synthetic construct
TDLRGDLIGR

SEQ ID NO: 117322 - protein, 10 aa, synthetic construct
TDIRGDLIGR

SEQ ID NO: 117323 - protein, 10 aa, synthetic construct
TDMRGDLIGR

SEQ ID NO: 117324 - protein, 10 aa, synthetic construct
TDWRGDLIGR

SEQ ID NO: 117325 - protein, 10 aa, synthetic construct
TDFRGDLIGR

SEQ ID NO: 117326 - protein, 10 aa, synthetic construct
TDKRGDLIGR

SEQ ID NO: 117327 - protein, 10 aa, synthetic construct
TDRRGDLIGR

SEQ ID NO: 117328 - protein, 10 aa, synthetic construct
TDHRGDLIGR

SEQ ID NO: 117329 - protein, 10 aa, synthetic construct
TDSRGDLIGR

SEQ ID NO: 117330 - protein, 10 aa, synthetic construct
TDTRGDLIGR

SEQ ID NO: 117331 - protein, 10 aa, synthetic construct
TDYRGDLIGR

SEQ ID NO: 117332 - protein, 10 aa, synthetic construct
TDNRGDLIGR

SEQ ID NO: 117333 - protein, 10 aa, synthetic construct
TDQRGDLIGR

SEQ ID NO: 117334 - protein, 10 aa, synthetic construct
TDDRGDLIGR

SEQ ID NO: 117335 - protein, 10 aa, synthetic construct
TDERGDLIGR

SEQ ID NO: 117336 - protein, 10 aa, synthetic construct
TEGRGDLIGR

SEQ ID NO: 117337 - protein, 10 aa, synthetic construct
TEARGDLIGR

SEQ ID NO: 117338 - protein, 10 aa, synthetic construct
TEVRGDLIGR

SEQ ID NO: 117339 - protein, 10 aa, synthetic construct
TEPRGDLIGR

SEQ ID NO: 117340 - protein, 10 aa, synthetic construct
TELRGDLIGR

SEQ ID NO: 117341 - protein, 10 aa, synthetic construct
TEIRGDLIGR

SEQ ID NO: 117342 - protein, 10 aa, synthetic construct
TEMRGDLIGR

SEQ ID NO: 117343 - protein, 10 aa, synthetic construct
TEWRGDLIGR

SEQ ID NO: 117344 - protein, 10 aa, synthetic construct
TEFRGDLIGR

SEQ ID NO: 117345 - protein, 10 aa, synthetic construct
TEKRGDLIGR

SEQ ID NO: 117346 - protein, 10 aa, synthetic construct
TERRGDLIGR

SEQ ID NO: 117347 - protein, 10 aa, synthetic construct
TEHRGDLIGR

SEQ ID NO: 117348 - protein, 10 aa, synthetic construct
TESRGDLIGR

SEQ ID NO: 117349 - protein, 10 aa, synthetic construct
TETRGDLIGR

SEQ ID NO: 117350 - protein, 10 aa, synthetic construct
TEYRGDLIGR

SEQ ID NO: 117351 - protein, 10 aa, synthetic construct
TENRGDLIGR

SEQ ID NO: 117352 - protein, 10 aa, synthetic construct
TEQRGDLIGR

SEQ ID NO: 117353 - protein, 10 aa, synthetic construct
TEDRGDLIGR

SEQ ID NO: 117354 - protein, 10 aa, synthetic construct
TEERGDLIGR

SEQ ID NO: 117355 - protein, 10 aa, synthetic construct
AGGRGDLIGR

SEQ ID NO: 117356 - protein, 10 aa, synthetic construct
AGARGDLIGR

SEQ ID NO: 117357 - protein, 10 aa, synthetic construct
AGVRGDLIGR

SEQ ID NO: 117358 - protein, 10 aa, synthetic construct
AGPRGDLIGR

SEQ ID NO: 117359 - protein, 10 aa, synthetic construct
AGLRGDLIGR

SEQ ID NO: 117360 - protein, 10 aa, synthetic construct
AGIRGDLIGR

SEQ ID NO: 117361 - protein, 10 aa, synthetic construct
AGMRGDLIGR

SEQ ID NO: 117362 - protein, 10 aa, synthetic construct
AGWRGDLIGR

SEQ ID NO: 117363 - protein, 10 aa, synthetic construct
AGFRGDLIGR

SEQ ID NO: 117364 - protein, 10 aa, synthetic construct
AGKRGDLIGR

SEQ ID NO: 117365 - protein, 10 aa, synthetic construct
AGRRGDLIGR

SEQ ID NO: 117366 - protein, 10 aa, synthetic construct
AGHRGDLIGR

SEQ ID NO: 117367 - protein, 10 aa, synthetic construct
AGSRGDLIGR

SEQ ID NO: 117368 - protein, 10 aa, synthetic construct
AGTRGDLIGR

SEQ ID NO: 117369 - protein, 10 aa, synthetic construct
AGYRGDLIGR

SEQ ID NO: 117370 - protein, 10 aa, synthetic construct
AGNRGDLIGR

SEQ ID NO: 117371 - protein, 10 aa, synthetic construct
AGQRGDLIGR

SEQ ID NO: 117372 - protein, 10 aa, synthetic construct
AGDRGDLIGR

SEQ ID NO: 117373 - protein, 10 aa, synthetic construct
AGERGDLIGR

SEQ ID NO: 117374 - protein, 10 aa, synthetic construct
AAGRGDLIGR

SEQ ID NO: 117375 - protein, 10 aa, synthetic construct
AAARGDLIGR

SEQ ID NO: 117376 - protein, 10 aa, synthetic construct
AAVRGDLIGR

SEQ ID NO: 117377 - protein, 10 aa, synthetic construct
AAPRGDLIGR

SEQ ID NO: 117378 - protein, 10 aa, synthetic construct
AALRGDLIGR

SEQ ID NO: 117379 - protein, 10 aa, synthetic construct
AAIRGDLIGR

SEQ ID NO: 117380 - protein, 10 aa, synthetic construct
AAMRGDLIGR

SEQ ID NO: 117381 - protein, 10 aa, synthetic construct
AAWRGDLIGR

SEQ ID NO: 117382 - protein, 10 aa, synthetic construct
AAFRGDLIGR

SEQ ID NO: 117383 - protein, 10 aa, synthetic construct
AAKRGDLIGR

SEQ ID NO: 117384 - protein, 10 aa, synthetic construct
AARRGDLIGR

SEQ ID NO: 117385 - protein, 10 aa, synthetic construct
AAHRGDLIGR

SEQ ID NO: 117386 - protein, 10 aa, synthetic construct
AASRGDLIGR

SEQ ID NO: 117387 - protein, 10 aa, synthetic construct
AATRGDLIGR

SEQ ID NO: 117388 - protein, 10 aa, synthetic construct
AAYRGDLIGR

SEQ ID NO: 117389 - protein, 10 aa, synthetic construct
AANRGDLIGR

SEQ ID NO: 117390 - protein, 10 aa, synthetic construct
AAQRGDLIGR

SEQ ID NO: 117391 - protein, 10 aa, synthetic construct
AADRGDLIGR

SEQ ID NO: 117392 - protein, 10 aa, synthetic construct
AAERGDLIGR

SEQ ID NO: 117393 - protein, 10 aa, synthetic construct
AVGRGDLIGR

SEQ ID NO: 117394 - protein, 10 aa, synthetic construct
AVARGDLIGR

SEQ ID NO: 117395 - protein, 10 aa, synthetic construct
AVVRGDLIGR

SEQ ID NO: 117396 - protein, 10 aa, synthetic construct
AVPRGDLIGR

SEQ ID NO: 117397 - protein, 10 aa, synthetic construct
AVLRGDLIGR

SEQ ID NO: 117398 - protein, 10 aa, synthetic construct
AVIRGDLIGR

SEQ ID NO: 117399 - protein, 10 aa, synthetic construct
AVMRGDLIGR

SEQ ID NO: 117400 - protein, 10 aa, synthetic construct
AVWRGDLIGR

SEQ ID NO: 117401 - protein, 10 aa, synthetic construct
AVFRGDLIGR

SEQ ID NO: 117402 - protein, 10 aa, synthetic construct
AVKRGDLIGR

SEQ ID NO: 117403 - protein, 10 aa, synthetic construct
AVRRGDLIGR

SEQ ID NO: 117404 - protein, 10 aa, synthetic construct
AVHRGDLIGR

SEQ ID NO: 117405 - protein, 10 aa, synthetic construct
AVSRGDLIGR

SEQ ID NO: 117406 - protein, 10 aa, synthetic construct
AVTRGDLIGR

SEQ ID NO: 117407 - protein, 10 aa, synthetic construct
AVYRGDLIGR

SEQ ID NO: 117408 - protein, 10 aa, synthetic construct
AVNRGDLIGR

SEQ ID NO: 117409 - protein, 10 aa, synthetic construct
AVQRGDLIGR

SEQ ID NO: 117410 - protein, 10 aa, synthetic construct
AVDRGDLIGR

SEQ ID NO: 117411 - protein, 10 aa, synthetic construct
AVERGDLIGR

SEQ ID NO: 117412 - protein, 10 aa, synthetic construct
APGRGDLIGR

SEQ ID NO: 117413 - protein, 10 aa, synthetic construct
APARGDLIGR

SEQ ID NO: 117414 - protein, 10 aa, synthetic construct
APVRGDLIGR

SEQ ID NO: 117415 - protein, 10 aa, synthetic construct
APPRGDLIGR

SEQ ID NO: 117416 - protein, 10 aa, synthetic construct
APLRGDLIGR

SEQ ID NO: 117417 - protein, 10 aa, synthetic construct
APIRGDLIGR

SEQ ID NO: 117418 - protein, 10 aa, synthetic construct
APMRGDLIGR

SEQ ID NO: 117419 - protein, 10 aa, synthetic construct
APWRGDLIGR

SEQ ID NO: 117420 - protein, 10 aa, synthetic construct
APFRGDLIGR

SEQ ID NO: 117421 - protein, 10 aa, synthetic construct
APKRGDLIGR

SEQ ID NO: 117422 - protein, 10 aa, synthetic construct
APRRGDLIGR

SEQ ID NO: 117423 - protein, 10 aa, synthetic construct
APHRGDLIGR

SEQ ID NO: 117424 - protein, 10 aa, synthetic construct
APSRGDLIGR

SEQ ID NO: 117425 - protein, 10 aa, synthetic construct
APTRGDLIGR

SEQ ID NO: 117426 - protein, 10 aa, synthetic construct
APYRGDLIGR

SEQ ID NO: 117427 - protein, 10 aa, synthetic construct
APNRGDLIGR

SEQ ID NO: 117428 - protein, 10 aa, synthetic construct
APQRGDLIGR

SEQ ID NO: 117429 - protein, 10 aa, synthetic construct
APDRGDLIGR

SEQ ID NO: 117430 - protein, 10 aa, synthetic construct
APERGDLIGR

SEQ ID NO: 117431 - protein, 10 aa, synthetic construct
ALGRGDLIGR

SEQ ID NO: 117432 - protein, 10 aa, synthetic construct
ALARGDLIGR

SEQ ID NO: 117433 - protein, 10 aa, synthetic construct
ALVRGDLIGR

SEQ ID NO: 117434 - protein, 10 aa, synthetic construct
ALPRGDLIGR

SEQ ID NO: 117435 - protein, 10 aa, synthetic construct
ALLRGDLIGR

SEQ ID NO: 117436 - protein, 10 aa, synthetic construct
ALIRGDLIGR

SEQ ID NO: 117437 - protein, 10 aa, synthetic construct
ALMRGDLIGR

SEQ ID NO: 117438 - protein, 10 aa, synthetic construct
ALWRGDLIGR

SEQ ID NO: 117439 - protein, 10 aa, synthetic construct
ALFRGDLIGR

SEQ ID NO: 117440 - protein, 10 aa, synthetic construct
ALKRGDLIGR

SEQ ID NO: 117441 - protein, 10 aa, synthetic construct
ALRRGDLIGR

SEQ ID NO: 117442 - protein, 10 aa, synthetic construct
ALHRGDLIGR

SEQ ID NO: 117443 - protein, 10 aa, synthetic construct
ALSRGDLIGR

SEQ ID NO: 117444 - protein, 10 aa, synthetic construct
ALTRGDLIGR

SEQ ID NO: 117445 - protein, 10 aa, synthetic construct
ALYRGDLIGR

SEQ ID NO: 117446 - protein, 10 aa, synthetic construct
ALNRGDLIGR

SEQ ID NO: 117447 - protein, 10 aa, synthetic construct
ALQRGDLIGR

SEQ ID NO: 117448 - protein, 10 aa, synthetic construct
ALDRGDLIGR

SEQ ID NO: 117449 - protein, 10 aa, synthetic construct
ALERGDLIGR

SEQ ID NO: 117450 - protein, 10 aa, synthetic construct
AIGRGDLIGR

SEQ ID NO: 117451 - protein, 10 aa, synthetic construct
AIARGDLIGR

SEQ ID NO: 117452 - protein, 10 aa, synthetic construct
AIVRGDLIGR

SEQ ID NO: 117453 - protein, 10 aa, synthetic construct
AIPRGDLIGR

SEQ ID NO: 117454 - protein, 10 aa, synthetic construct
AILRGDLIGR

SEQ ID NO: 117455 - protein, 10 aa, synthetic construct
AIIRGDLIGR

SEQ ID NO: 117456 - protein, 10 aa, synthetic construct
AIMRGDLIGR

SEQ ID NO: 117457 - protein, 10 aa, synthetic construct
AIWRGDLIGR

SEQ ID NO: 117458 - protein, 10 aa, synthetic construct
AIFRGDLIGR

SEQ ID NO: 117459 - protein, 10 aa, synthetic construct
AIKRGDLIGR

SEQ ID NO: 117460 - protein, 10 aa, synthetic construct
AIRRGDLIGR

SEQ ID NO: 117461 - protein, 10 aa, synthetic construct
AIHRGDLIGR

SEQ ID NO: 117462 - protein, 10 aa, synthetic construct
AISRGDLIGR

SEQ ID NO: 117463 - protein, 10 aa, synthetic construct
AITRGDLIGR

SEQ ID NO: 117464 - protein, 10 aa, synthetic construct
AIYRGDLIGR

SEQ ID NO: 117465 - protein, 10 aa, synthetic construct
AINRGDLIGR

SEQ ID NO: 117466 - protein, 10 aa, synthetic construct
AIQRGDLIGR

SEQ ID NO: 117467 - protein, 10 aa, synthetic construct
AIDRGDLIGR

SEQ ID NO: 117468 - protein, 10 aa, synthetic construct
AIERGDLIGR

SEQ ID NO: 117469 - protein, 10 aa, synthetic construct
AMGRGDLIGR

SEQ ID NO: 117470 - protein, 10 aa, synthetic construct
AMARGDLIGR

SEQ ID NO: 117471 - protein, 10 aa, synthetic construct
AMVRGDLIGR

SEQ ID NO: 117472 - protein, 10 aa, synthetic construct
AMPRGDLIGR

SEQ ID NO: 117473 - protein, 10 aa, synthetic construct
AMLRGDLIGR

SEQ ID NO: 117474 - protein, 10 aa, synthetic construct
AMIRGDLIGR

SEQ ID NO: 117475 - protein, 10 aa, synthetic construct
AMMRGDLIGR

SEQ ID NO: 117476 - protein, 10 aa, synthetic construct
AMWRGDLIGR

SEQ ID NO: 117477 - protein, 10 aa, synthetic construct
AMFRGDLIGR

SEQ ID NO: 117478 - protein, 10 aa, synthetic construct
AMKRGDLIGR

SEQ ID NO: 117479 - protein, 10 aa, synthetic construct
AMRRGDLIGR

SEQ ID NO: 117480 - protein, 10 aa, synthetic construct
AMHRGDLIGR

SEQ ID NO: 117481 - protein, 10 aa, synthetic construct
AMSRGDLIGR

SEQ ID NO: 117482 - protein, 10 aa, synthetic construct
AMTRGDLIGR

SEQ ID NO: 117483 - protein, 10 aa, synthetic construct
AMYRGDLIGR

SEQ ID NO: 117484 - protein, 10 aa, synthetic construct
AMNRGDLIGR

SEQ ID NO: 117485 - protein, 10 aa, synthetic construct
AMQRGDLIGR

SEQ ID NO: 117486 - protein, 10 aa, synthetic construct
AMDRGDLIGR

SEQ ID NO: 117487 - protein, 10 aa, synthetic construct
AMERGDLIGR

SEQ ID NO: 117488 - protein, 10 aa, synthetic construct
AWGRGDLIGR

SEQ ID NO: 117489 - protein, 10 aa, synthetic construct
AWARGDLIGR

SEQ ID NO: 117490 - protein, 10 aa, synthetic construct
AWVRGDLIGR

SEQ ID NO: 117491 - protein, 10 aa, synthetic construct
AWPRGDLIGR

SEQ ID NO: 117492 - protein, 10 aa, synthetic construct
AWLRGDLIGR

SEQ ID NO: 117493 - protein, 10 aa, synthetic construct
AWIRGDLIGR

SEQ ID NO: 117494 - protein, 10 aa, synthetic construct
AWMRGDLIGR

SEQ ID NO: 117495 - protein, 10 aa, synthetic construct
AWWRGDLIGR

SEQ ID NO: 117496 - protein, 10 aa, synthetic construct
AWFRGDLIGR

SEQ ID NO: 117497 - protein, 10 aa, synthetic construct
AWKRGDLIGR

SEQ ID NO: 117498 - protein, 10 aa, synthetic construct
AWRRGDLIGR

SEQ ID NO: 117499 - protein, 10 aa, synthetic construct
AWHRGDLIGR

SEQ ID NO: 117500 - protein, 10 aa, synthetic construct
AWSRGDLIGR

SEQ ID NO: 117501 - protein, 10 aa, synthetic construct
AWTRGDLIGR

SEQ ID NO: 117502 - protein, 10 aa, synthetic construct
AWYRGDLIGR

SEQ ID NO: 117503 - protein, 10 aa, synthetic construct
AWNRGDLIGR

SEQ ID NO: 117504 - protein, 10 aa, synthetic construct
AWQRGDLIGR

SEQ ID NO: 117505 - protein, 10 aa, synthetic construct
AWDRGDLIGR

SEQ ID NO: 117506 - protein, 10 aa, synthetic construct
AWERGDLIGR

SEQ ID NO: 117507 - protein, 10 aa, synthetic construct
AFGRGDLIGR

SEQ ID NO: 117508 - protein, 10 aa, synthetic construct
AFARGDLIGR

SEQ ID NO: 117509 - protein, 10 aa, synthetic construct
AFVRGDLIGR

SEQ ID NO: 117510 - protein, 10 aa, synthetic construct
AFPRGDLIGR

SEQ ID NO: 117511 - protein, 10 aa, synthetic construct
AFLRGDLIGR

SEQ ID NO: 117512 - protein, 10 aa, synthetic construct
AFIRGDLIGR

SEQ ID NO: 117513 - protein, 10 aa, synthetic construct
AFMRGDLIGR

SEQ ID NO: 117514 - protein, 10 aa, synthetic construct
AFWRGDLIGR

SEQ ID NO: 117515 - protein, 10 aa, synthetic construct
AFFRGDLIGR

SEQ ID NO: 117516 - protein, 10 aa, synthetic construct
AFKRGDLIGR

SEQ ID NO: 117517 - protein, 10 aa, synthetic construct
AFRRGDLIGR

SEQ ID NO: 117518 - protein, 10 aa, synthetic construct
AFHRGDLIGR

SEQ ID NO: 117519 - protein, 10 aa, synthetic construct
AFSRGDLIGR

SEQ ID NO: 117520 - protein, 10 aa, synthetic construct
AFTRGDLIGR

SEQ ID NO: 117521 - protein, 10 aa, synthetic construct
AFYRGDLIGR

SEQ ID NO: 117522 - protein, 10 aa, synthetic construct
AFNRGDLIGR

SEQ ID NO: 117523 - protein, 10 aa, synthetic construct
AFQRGDLIGR

SEQ ID NO: 117524 - protein, 10 aa, synthetic construct
AFDRGDLIGR

SEQ ID NO: 117525 - protein, 10 aa, synthetic construct
AFERGDLIGR

SEQ ID NO: 117526 - protein, 10 aa, synthetic construct
AKGRGDLIGR

SEQ ID NO: 117527 - protein, 10 aa, synthetic construct
AKARGDLIGR

SEQ ID NO: 117528 - protein, 10 aa, synthetic construct
AKVRGDLIGR

SEQ ID NO: 117529 - protein, 10 aa, synthetic construct
AKPRGDLIGR

SEQ ID NO: 117530 - protein, 10 aa, synthetic construct
AKLRGDLIGR

SEQ ID NO: 117531 - protein, 10 aa, synthetic construct
AKIRGDLIGR

SEQ ID NO: 117532 - protein, 10 aa, synthetic construct
AKMRGDLIGR

SEQ ID NO: 117533 - protein, 10 aa, synthetic construct
AKWRGDLIGR

SEQ ID NO: 117534 - protein, 10 aa, synthetic construct
AKFRGDLIGR

SEQ ID NO: 117535 - protein, 10 aa, synthetic construct
AKKRGDLIGR

SEQ ID NO: 117536 - protein, 10 aa, synthetic construct
AKRRGDLIGR

SEQ ID NO: 117537 - protein, 10 aa, synthetic construct
AKHRGDLIGR

SEQ ID NO: 117538 - protein, 10 aa, synthetic construct
AKSRGDLIGR

SEQ ID NO: 117539 - protein, 10 aa, synthetic construct
AKTRGDLIGR

SEQ ID NO: 117540 - protein, 10 aa, synthetic construct
AKYRGDLIGR

SEQ ID NO: 117541 - protein, 10 aa, synthetic construct
AKNRGDLIGR

SEQ ID NO: 117542 - protein, 10 aa, synthetic construct
AKQRGDLIGR

SEQ ID NO: 117543 - protein, 10 aa, synthetic construct
AKDRGDLIGR

SEQ ID NO: 117544 - protein, 10 aa, synthetic construct
AKERGDLIGR

SEQ ID NO: 117545 - protein, 10 aa, synthetic construct
ARGRGDLIGR

SEQ ID NO: 117546 - protein, 10 aa, synthetic construct
ARARGDLIGR

SEQ ID NO: 117547 - protein, 10 aa, synthetic construct
ARVRGDLIGR

SEQ ID NO: 117548 - protein, 10 aa, synthetic construct
ARPRGDLIGR

SEQ ID NO: 117549 - protein, 10 aa, synthetic construct
ARLRGDLIGR

SEQ ID NO: 117550 - protein, 10 aa, synthetic construct
ARIRGDLIGR

SEQ ID NO: 117551 - protein, 10 aa, synthetic construct
ARMRGDLIGR

SEQ ID NO: 117552 - protein, 10 aa, synthetic construct
ARWRGDLIGR

SEQ ID NO: 117553 - protein, 10 aa, synthetic construct
ARFRGDLIGR

SEQ ID NO: 117554 - protein, 10 aa, synthetic construct
ARKRGDLIGR

SEQ ID NO: 117555 - protein, 10 aa, synthetic construct
ARRRGDLIGR

SEQ ID NO: 117556 - protein, 10 aa, synthetic construct
ARHRGDLIGR

SEQ ID NO: 117557 - protein, 10 aa, synthetic construct
ARSRGDLIGR

SEQ ID NO: 117558 - protein, 10 aa, synthetic construct
ARTRGDLIGR

SEQ ID NO: 117559 - protein, 10 aa, synthetic construct
ARYRGDLIGR

SEQ ID NO: 117560 - protein, 10 aa, synthetic construct
ARNRGDLIGR

SEQ ID NO: 117561 - protein, 10 aa, synthetic construct
ARQRGDLIGR

SEQ ID NO: 117562 - protein, 10 aa, synthetic construct
ARDRGDLIGR

SEQ ID NO: 117563 - protein, 10 aa, synthetic construct
ARERGDLIGR

SEQ ID NO: 117564 - protein, 10 aa, synthetic construct
AHGRGDLIGR

SEQ ID NO: 117565 - protein, 10 aa, synthetic construct
AHARGDLIGR

SEQ ID NO: 117566 - protein, 10 aa, synthetic construct
AHVRGDLIGR

SEQ ID NO: 117567 - protein, 10 aa, synthetic construct
AHPRGDLIGR

SEQ ID NO: 117568 - protein, 10 aa, synthetic construct
AHLRGDLIGR

SEQ ID NO: 117569 - protein, 10 aa, synthetic construct
AHIRGDLIGR

SEQ ID NO: 117570 - protein, 10 aa, synthetic construct
AHMRGDLIGR

SEQ ID NO: 117571 - protein, 10 aa, synthetic construct
AHWRGDLIGR

SEQ ID NO: 117572 - protein, 10 aa, synthetic construct
AHFRGDLIGR

SEQ ID NO: 117573 - protein, 10 aa, synthetic construct
AHKRGDLIGR

SEQ ID NO: 117574 - protein, 10 aa, synthetic construct
AHRRGDLIGR

SEQ ID NO: 117575 - protein, 10 aa, synthetic construct
AHHRGDLIGR

SEQ ID NO: 117576 - protein, 10 aa, synthetic construct
AHSRGDLIGR

SEQ ID NO: 117577 - protein, 10 aa, synthetic construct
AHTRGDLIGR

SEQ ID NO: 117578 - protein, 10 aa, synthetic construct
AHYRGDLIGR

SEQ ID NO: 117579 - protein, 10 aa, synthetic construct
AHNRGDLIGR

SEQ ID NO: 117580 - protein, 10 aa, synthetic construct
AHQRGDLIGR

SEQ ID NO: 117581 - protein, 10 aa, synthetic construct
AHDRGDLIGR

SEQ ID NO: 117582 - protein, 10 aa, synthetic construct
AHERGDLIGR

SEQ ID NO: 117583 - protein, 10 aa, synthetic construct
ASGRGDLIGR

SEQ ID NO: 117584 - protein, 10 aa, synthetic construct
ASARGDLIGR

SEQ ID NO: 117585 - protein, 10 aa, synthetic construct
ASVRGDLIGR

SEQ ID NO: 117586 - protein, 10 aa, synthetic construct
ASPRGDLIGR

SEQ ID NO: 117587 - protein, 10 aa, synthetic construct
ASLRGDLIGR

SEQ ID NO: 117588 - protein, 10 aa, synthetic construct
ASIRGDLIGR

SEQ ID NO: 117589 - protein, 10 aa, synthetic construct
ASMRGDLIGR

SEQ ID NO: 117590 - protein, 10 aa, synthetic construct
ASWRGDLIGR

SEQ ID NO: 117591 - protein, 10 aa, synthetic construct
ASFRGDLIGR

SEQ ID NO: 117592 - protein, 10 aa, synthetic construct
ASKRGDLIGR

SEQ ID NO: 117593 - protein, 10 aa, synthetic construct
ASRRGDLIGR

SEQ ID NO: 117594 - protein, 10 aa, synthetic construct
ASHRGDLIGR

SEQ ID NO: 117595 - protein, 10 aa, synthetic construct
ASSRGDLIGR

SEQ ID NO: 117596 - protein, 10 aa, synthetic construct
ASTRGDLIGR

SEQ ID NO: 117597 - protein, 10 aa, synthetic construct
ASYRGDLIGR

SEQ ID NO: 117598 - protein, 10 aa, synthetic construct
ASNRGDLIGR

SEQ ID NO: 117599 - protein, 10 aa, synthetic construct
ASQRGDLIGR

SEQ ID NO: 117600 - protein, 10 aa, synthetic construct
ASDRGDLIGR

SEQ ID NO: 117601 - protein, 10 aa, synthetic construct
ASERGDLIGR

SEQ ID NO: 117602 - protein, 10 aa, synthetic construct
ATGRGDLIGR

SEQ ID NO: 117603 - protein, 10 aa, synthetic construct
ATARGDLIGR

SEQ ID NO: 117604 - protein, 10 aa, synthetic construct
ATVRGDLIGR

SEQ ID NO: 117605 - protein, 10 aa, synthetic construct
ATPRGDLIGR

SEQ ID NO: 117606 - protein, 10 aa, synthetic construct
ATLRGDLIGR

SEQ ID NO: 117607 - protein, 10 aa, synthetic construct
ATIRGDLIGR

SEQ ID NO: 117608 - protein, 10 aa, synthetic construct
ATMRGDLIGR

SEQ ID NO: 117609 - protein, 10 aa, synthetic construct
ATWRGDLIGR

SEQ ID NO: 117610 - protein, 10 aa, synthetic construct
ATFRGDLIGR

SEQ ID NO: 117611 - protein, 10 aa, synthetic construct
ATKRGDLIGR

SEQ ID NO: 117612 - protein, 10 aa, synthetic construct
ATRRGDLIGR

SEQ ID NO: 117613 - protein, 10 aa, synthetic construct
ATHRGDLIGR

SEQ ID NO: 117614 - protein, 10 aa, synthetic construct
ATSRGDLIGR

SEQ ID NO: 117615 - protein, 10 aa, synthetic construct
ATTRGDLIGR

SEQ ID NO: 117616 - protein, 10 aa, synthetic construct
ATYRGDLIGR

SEQ ID NO: 117617 - protein, 10 aa, synthetic construct
ATNRGDLIGR

SEQ ID NO: 117618 - protein, 10 aa, synthetic construct
ATQRGDLIGR

SEQ ID NO: 117619 - protein, 10 aa, synthetic construct
ATDRGDLIGR

SEQ ID NO: 117620 - protein, 10 aa, synthetic construct
ATERGDLIGR

SEQ ID NO: 117621 - protein, 10 aa, synthetic construct
AYGRGDLIGR

SEQ ID NO: 117622 - protein, 10 aa, synthetic construct
AYARGDLIGR

SEQ ID NO: 117623 - protein, 10 aa, synthetic construct
AYVRGDLIGR

SEQ ID NO: 117624 - protein, 10 aa, synthetic construct
AYPRGDLIGR

SEQ ID NO: 117625 - protein, 10 aa, synthetic construct
AYLRGDLIGR

SEQ ID NO: 117626 - protein, 10 aa, synthetic construct
AYIRGDLIGR

SEQ ID NO: 117627 - protein, 10 aa, synthetic construct
AYMRGDLIGR

SEQ ID NO: 117628 - protein, 10 aa, synthetic construct
AYWRGDLIGR

SEQ ID NO: 117629 - protein, 10 aa, synthetic construct
AYFRGDLIGR

SEQ ID NO: 117630 - protein, 10 aa, synthetic construct
AYKRGDLIGR

SEQ ID NO: 117631 - protein, 10 aa, synthetic construct
AYRRGDLIGR

SEQ ID NO: 117632 - protein, 10 aa, synthetic construct
AYHRGDLIGR

SEQ ID NO: 117633 - protein, 10 aa, synthetic construct
AYSRGDLIGR

SEQ ID NO: 117634 - protein, 10 aa, synthetic construct
AYTRGDLIGR

SEQ ID NO: 117635 - protein, 10 aa, synthetic construct
AYYRGDLIGR

SEQ ID NO: 117636 - protein, 10 aa, synthetic construct
AYNRGDLIGR

SEQ ID NO: 117637 - protein, 10 aa, synthetic construct
AYQRGDLIGR

SEQ ID NO: 117638 - protein, 10 aa, synthetic construct
AYDRGDLIGR

SEQ ID NO: 117639 - protein, 10 aa, synthetic construct
AYERGDLIGR

SEQ ID NO: 117640 - protein, 10 aa, synthetic construct
ANGRGDLIGR

SEQ ID NO: 117641 - protein, 10 aa, synthetic construct
ANARGDLIGR

SEQ ID NO: 117642 - protein, 10 aa, synthetic construct
ANVRGDLIGR

SEQ ID NO: 117643 - protein, 10 aa, synthetic construct
ANPRGDLIGR

SEQ ID NO: 117644 - protein, 10 aa, synthetic construct
ANLRGDLIGR

SEQ ID NO: 117645 - protein, 10 aa, synthetic construct
ANIRGDLIGR

SEQ ID NO: 117646 - protein, 10 aa, synthetic construct
ANMRGDLIGR

SEQ ID NO: 117647 - protein, 10 aa, synthetic construct
ANWRGDLIGR

SEQ ID NO: 117648 - protein, 10 aa, synthetic construct
ANFRGDLIGR

SEQ ID NO: 117649 - protein, 10 aa, synthetic construct
ANKRGDLIGR

SEQ ID NO: 117650 - protein, 10 aa, synthetic construct
ANRRGDLIGR

SEQ ID NO: 117651 - protein, 10 aa, synthetic construct
ANHRGDLIGR

SEQ ID NO: 117652 - protein, 10 aa, synthetic construct
ANSRGDLIGR

SEQ ID NO: 117653 - protein, 10 aa, synthetic construct
ANTRGDLIGR

SEQ ID NO: 117654 - protein, 10 aa, synthetic construct
ANYRGDLIGR

SEQ ID NO: 117655 - protein, 10 aa, synthetic construct
ANNRGDLIGR

SEQ ID NO: 117656 - protein, 10 aa, synthetic construct
ANQRGDLIGR

SEQ ID NO: 117657 - protein, 10 aa, synthetic construct
ANDRGDLIGR

SEQ ID NO: 117658 - protein, 10 aa, synthetic construct
ANERGDLIGR

SEQ ID NO: 117659 - protein, 10 aa, synthetic construct
AQGRGDLIGR

SEQ ID NO: 117660 - protein, 10 aa, synthetic construct
AQARGDLIGR

SEQ ID NO: 117661 - protein, 10 aa, synthetic construct
AQVRGDLIGR

SEQ ID NO: 117662 - protein, 10 aa, synthetic construct
AQPRGDLIGR

SEQ ID NO: 117663 - protein, 10 aa, synthetic construct
AQLRGDLIGR

SEQ ID NO: 117664 - protein, 10 aa, synthetic construct
AQIRGDLIGR

SEQ ID NO: 117665 - protein, 10 aa, synthetic construct
AQMRGDLIGR

SEQ ID NO: 117666 - protein, 10 aa, synthetic construct
AQWRGDLIGR

SEQ ID NO: 117667 - protein, 10 aa, synthetic construct
AQFRGDLIGR

SEQ ID NO: 117668 - protein, 10 aa, synthetic construct
AQKRGDLIGR

SEQ ID NO: 117669 - protein, 10 aa, synthetic construct
AQRRGDLIGR

SEQ ID NO: 117670 - protein, 10 aa, synthetic construct
AQHRGDLIGR

SEQ ID NO: 117671 - protein, 10 aa, synthetic construct
AQSRGDLIGR

SEQ ID NO: 117672 - protein, 10 aa, synthetic construct
AQTRGDLIGR

SEQ ID NO: 117673 - protein, 10 aa, synthetic construct
AQYRGDLIGR

SEQ ID NO: 117674 - protein, 10 aa, synthetic construct
AQNRGDLIGR

SEQ ID NO: 117675 - protein, 10 aa, synthetic construct
AQQRGDLIGR

SEQ ID NO: 117676 - protein, 10 aa, synthetic construct
AQDRGDLIGR

SEQ ID NO: 117677 - protein, 10 aa, synthetic construct
AQERGDLIGR

SEQ ID NO: 117678 - protein, 10 aa, synthetic construct
ADGRGDLIGR

SEQ ID NO: 117679 - protein, 10 aa, synthetic construct
ADARGDLIGR

SEQ ID NO: 117680 - protein, 10 aa, synthetic construct
ADVRGDLIGR

SEQ ID NO: 117681 - protein, 10 aa, synthetic construct
ADPRGDLIGR

SEQ ID NO: 117682 - protein, 10 aa, synthetic construct
ADLRGDLIGR

SEQ ID NO: 117683 - protein, 10 aa, synthetic construct
ADIRGDLIGR

SEQ ID NO: 117684 - protein, 10 aa, synthetic construct
ADMRGDLIGR

SEQ ID NO: 117685 - protein, 10 aa, synthetic construct
ADWRGDLIGR

SEQ ID NO: 117686 - protein, 10 aa, synthetic construct
ADFRGDLIGR

SEQ ID NO: 117687 - protein, 10 aa, synthetic construct
ADKRGDLIGR

SEQ ID NO: 117688 - protein, 10 aa, synthetic construct
ADRRGDLIGR

SEQ ID NO: 117689 - protein, 10 aa, synthetic construct
ADHRGDLIGR

SEQ ID NO: 117690 - protein, 10 aa, synthetic construct
ADSRGDLIGR

SEQ ID NO: 117691 - protein, 10 aa, synthetic construct
ADTRGDLIGR

SEQ ID NO: 117692 - protein, 10 aa, synthetic construct
ADYRGDLIGR

SEQ ID NO: 117693 - protein, 10 aa, synthetic construct
ADNRGDLIGR

SEQ ID NO: 117694 - protein, 10 aa, synthetic construct
ADQRGDLIGR

SEQ ID NO: 117695 - protein, 10 aa, synthetic construct
ADDRGDLIGR

SEQ ID NO: 117696 - protein, 10 aa, synthetic construct
ADERGDLIGR

SEQ ID NO: 117697 - protein, 10 aa, synthetic construct
AEGRGDLIGR

SEQ ID NO: 117698 - protein, 10 aa, synthetic construct
AEARGDLIGR

SEQ ID NO: 117699 - protein, 10 aa, synthetic construct
AEVRGDLIGR

SEQ ID NO: 117700 - protein, 10 aa, synthetic construct
AEPRGDLIGR

SEQ ID NO: 117701 - protein, 10 aa, synthetic construct
AELRGDLIGR

SEQ ID NO: 117702 - protein, 10 aa, synthetic construct
AEIRGDLIGR

SEQ ID NO: 117703 - protein, 10 aa, synthetic construct
AEMRGDLIGR

SEQ ID NO: 117704 - protein, 10 aa, synthetic construct
AEWRGDLIGR

SEQ ID NO: 117705 - protein, 10 aa, synthetic construct
AEFRGDLIGR

SEQ ID NO: 117706 - protein, 10 aa, synthetic construct
AEKRGDLIGR

SEQ ID NO: 117707 - protein, 10 aa, synthetic construct
AERRGDLIGR

SEQ ID NO: 117708 - protein, 10 aa, synthetic construct
AEHRGDLIGR

SEQ ID NO: 117709 - protein, 10 aa, synthetic construct
AESRGDLIGR

SEQ ID NO: 117710 - protein, 10 aa, synthetic construct
AETRGDLIGR

SEQ ID NO: 117711 - protein, 10 aa, synthetic construct
AEYRGDLIGR

SEQ ID NO: 117712 - protein, 10 aa, synthetic construct
AENRGDLIGR

SEQ ID NO: 117713 - protein, 10 aa, synthetic construct
AEQRGDLIGR

SEQ ID NO: 117714 - protein, 10 aa, synthetic construct
AEDRGDLIGR

SEQ ID NO: 117715 - protein, 10 aa, synthetic construct
AEERGDLIGR

SEQ ID NO: 117716 - protein, 10 aa, synthetic construct
EGGRGDLIGR

SEQ ID NO: 117717 - protein, 10 aa, synthetic construct
EGARGDLIGR

SEQ ID NO: 117718 - protein, 10 aa, synthetic construct
EGVRGDLIGR

SEQ ID NO: 117719 - protein, 10 aa, synthetic construct
EGPRGDLIGR

SEQ ID NO: 117720 - protein, 10 aa, synthetic construct
EGLRGDLIGR

SEQ ID NO: 117721 - protein, 10 aa, synthetic construct
EGIRGDLIGR

SEQ ID NO: 117722 - protein, 10 aa, synthetic construct
EGMRGDLIGR

SEQ ID NO: 117723 - protein, 10 aa, synthetic construct
EGWRGDLIGR

SEQ ID NO: 117724 - protein, 10 aa, synthetic construct
EGFRGDLIGR

SEQ ID NO: 117725 - protein, 10 aa, synthetic construct
EGKRGDLIGR

SEQ ID NO: 117726 - protein, 10 aa, synthetic construct
EGRRGDLIGR

SEQ ID NO: 117727 - protein, 10 aa, synthetic construct
EGHRGDLIGR

SEQ ID NO: 117728 - protein, 10 aa, synthetic construct
EGSRGDLIGR

SEQ ID NO: 117729 - protein, 10 aa, synthetic construct
EGTRGDLIGR

SEQ ID NO: 117730 - protein, 10 aa, synthetic construct
EGYRGDLIGR

SEQ ID NO: 117731 - protein, 10 aa, synthetic construct
EGNRGDLIGR

SEQ ID NO: 117732 - protein, 10 aa, synthetic construct
EGQRGDLIGR

SEQ ID NO: 117733 - protein, 10 aa, synthetic construct
EGDRGDLIGR

SEQ ID NO: 117734 - protein, 10 aa, synthetic construct
EGERGDLIGR

SEQ ID NO: 117735 - protein, 10 aa, synthetic construct
EAGRGDLIGR

SEQ ID NO: 117736 - protein, 10 aa, synthetic construct
EAARGDLIGR

SEQ ID NO: 117737 - protein, 10 aa, synthetic construct
EAVRGDLIGR

SEQ ID NO: 117738 - protein, 10 aa, synthetic construct
EAPRGDLIGR

SEQ ID NO: 117739 - protein, 10 aa, synthetic construct
EALRGDLIGR

SEQ ID NO: 117740 - protein, 10 aa, synthetic construct
EAIRGDLIGR

SEQ ID NO: 117741 - protein, 10 aa, synthetic construct
EAMRGDLIGR

SEQ ID NO: 117742 - protein, 10 aa, synthetic construct
EAWRGDLIGR

SEQ ID NO: 117743 - protein, 10 aa, synthetic construct
EAFRGDLIGR

SEQ ID NO: 117744 - protein, 10 aa, synthetic construct
EAKRGDLIGR

SEQ ID NO: 117745 - protein, 10 aa, synthetic construct
EARRGDLIGR

SEQ ID NO: 117746 - protein, 10 aa, synthetic construct
EAHRGDLIGR

SEQ ID NO: 117747 - protein, 10 aa, synthetic construct
EASRGDLIGR

SEQ ID NO: 117748 - protein, 10 aa, synthetic construct
EATRGDLIGR

SEQ ID NO: 117749 - protein, 10 aa, synthetic construct
EAYRGDLIGR

SEQ ID NO: 117750 - protein, 10 aa, synthetic construct
EANRGDLIGR

SEQ ID NO: 117751 - protein, 10 aa, synthetic construct
EAQRGDLIGR

SEQ ID NO: 117752 - protein, 10 aa, synthetic construct
EADRGDLIGR

SEQ ID NO: 117753 - protein, 10 aa, synthetic construct
EAERGDLIGR

SEQ ID NO: 117754 - protein, 10 aa, synthetic construct
EVGRGDLIGR

SEQ ID NO: 117755 - protein, 10 aa, synthetic construct
EVARGDLIGR

SEQ ID NO: 117756 - protein, 10 aa, synthetic construct
EVVRGDLIGR

SEQ ID NO: 117757 - protein, 10 aa, synthetic construct
EVPRGDLIGR

SEQ ID NO: 117758 - protein, 10 aa, synthetic construct
EVLRGDLIGR

SEQ ID NO: 117759 - protein, 10 aa, synthetic construct
EVIRGDLIGR

SEQ ID NO: 117760 - protein, 10 aa, synthetic construct
EVMRGDLIGR

SEQ ID NO: 117761 - protein, 10 aa, synthetic construct
EVWRGDLIGR

SEQ ID NO: 117762 - protein, 10 aa, synthetic construct
EVFRGDLIGR

SEQ ID NO: 117763 - protein, 10 aa, synthetic construct
EVKRGDLIGR

SEQ ID NO: 117764 - protein, 10 aa, synthetic construct
EVRRGDLIGR

SEQ ID NO: 117765 - protein, 10 aa, synthetic construct
EVHRGDLIGR

SEQ ID NO: 117766 - protein, 10 aa, synthetic construct
EVSRGDLIGR

SEQ ID NO: 117767 - protein, 10 aa, synthetic construct
EVTRGDLIGR

SEQ ID NO: 117768 - protein, 10 aa, synthetic construct
EVYRGDLIGR

SEQ ID NO: 117769 - protein, 10 aa, synthetic construct
EVNRGDLIGR

SEQ ID NO: 117770 - protein, 10 aa, synthetic construct
EVQRGDLIGR

SEQ ID NO: 117771 - protein, 10 aa, synthetic construct
EVDRGDLIGR

SEQ ID NO: 117772 - protein, 10 aa, synthetic construct
EVERGDLIGR

SEQ ID NO: 117773 - protein, 10 aa, synthetic construct
EPGRGDLIGR

SEQ ID NO: 117774 - protein, 10 aa, synthetic construct
EPARGDLIGR

SEQ ID NO: 117775 - protein, 10 aa, synthetic construct
EPVRGDLIGR

SEQ ID NO: 117776 - protein, 10 aa, synthetic construct
EPPRGDLIGR

SEQ ID NO: 117777 - protein, 10 aa, synthetic construct
EPLRGDLIGR

SEQ ID NO: 117778 - protein, 10 aa, synthetic construct
EPIRGDLIGR

SEQ ID NO: 117779 - protein, 10 aa, synthetic construct
EPMRGDLIGR

SEQ ID NO: 117780 - protein, 10 aa, synthetic construct
EPWRGDLIGR

SEQ ID NO: 117781 - protein, 10 aa, synthetic construct
EPFRGDLIGR

SEQ ID NO: 117782 - protein, 10 aa, synthetic construct
EPKRGDLIGR

SEQ ID NO: 117783 - protein, 10 aa, synthetic construct
EPRRGDLIGR

SEQ ID NO: 117784 - protein, 10 aa, synthetic construct
EPHRGDLIGR

SEQ ID NO: 117785 - protein, 10 aa, synthetic construct
EPSRGDLIGR

SEQ ID NO: 117786 - protein, 10 aa, synthetic construct
EPTRGDLIGR

SEQ ID NO: 117787 - protein, 10 aa, synthetic construct
EPYRGDLIGR

SEQ ID NO: 117788 - protein, 10 aa, synthetic construct
EPNRGDLIGR

SEQ ID NO: 117789 - protein, 10 aa, synthetic construct
EPQRGDLIGR

SEQ ID NO: 117790 - protein, 10 aa, synthetic construct
EPDRGDLIGR

SEQ ID NO: 117791 - protein, 10 aa, synthetic construct
EPERGDLIGR

SEQ ID NO: 117792 - protein, 10 aa, synthetic construct
ELGRGDLIGR

SEQ ID NO: 117793 - protein, 10 aa, synthetic construct
ELARGDLIGR

SEQ ID NO: 117794 - protein, 10 aa, synthetic construct
ELVRGDLIGR

SEQ ID NO: 117795 - protein, 10 aa, synthetic construct
ELPRGDLIGR

SEQ ID NO: 117796 - protein, 10 aa, synthetic construct
ELLRGDLIGR

SEQ ID NO: 117797 - protein, 10 aa, synthetic construct
ELIRGDLIGR

SEQ ID NO: 117798 - protein, 10 aa, synthetic construct
ELMRGDLIGR

SEQ ID NO: 117799 - protein, 10 aa, synthetic construct
ELWRGDLIGR

SEQ ID NO: 117800 - protein, 10 aa, synthetic construct
ELFRGDLIGR

SEQ ID NO: 117801 - protein, 10 aa, synthetic construct
ELKRGDLIGR

SEQ ID NO: 117802 - protein, 10 aa, synthetic construct
ELRRGDLIGR

SEQ ID NO: 117803 - protein, 10 aa, synthetic construct
ELHRGDLIGR

SEQ ID NO: 117804 - protein, 10 aa, synthetic construct
ELSRGDLIGR

SEQ ID NO: 117805 - protein, 10 aa, synthetic construct
ELTRGDLIGR

SEQ ID NO: 117806 - protein, 10 aa, synthetic construct
ELYRGDLIGR

SEQ ID NO: 117807 - protein, 10 aa, synthetic construct
ELNRGDLIGR

SEQ ID NO: 117808 - protein, 10 aa, synthetic construct
ELQRGDLIGR

SEQ ID NO: 117809 - protein, 10 aa, synthetic construct
ELDRGDLIGR

SEQ ID NO: 117810 - protein, 10 aa, synthetic construct
ELERGDLIGR

SEQ ID NO: 117811 - protein, 10 aa, synthetic construct
EIGRGDLIGR

SEQ ID NO: 117812 - protein, 10 aa, synthetic construct
EIARGDLIGR

SEQ ID NO: 117813 - protein, 10 aa, synthetic construct
EIVRGDLIGR

SEQ ID NO: 117814 - protein, 10 aa, synthetic construct
EIPRGDLIGR

SEQ ID NO: 117815 - protein, 10 aa, synthetic construct
EILRGDLIGR

SEQ ID NO: 117816 - protein, 10 aa, synthetic construct
EIIRGDLIGR

SEQ ID NO: 117817 - protein, 10 aa, synthetic construct
EIMRGDLIGR

SEQ ID NO: 117818 - protein, 10 aa, synthetic construct
EIWRGDLIGR

SEQ ID NO: 117819 - protein, 10 aa, synthetic construct
EIFRGDLIGR

SEQ ID NO: 117820 - protein, 10 aa, synthetic construct
EIKRGDLIGR

SEQ ID NO: 117821 - protein, 10 aa, synthetic construct
EIRRGDLIGR

SEQ ID NO: 117822 - protein, 10 aa, synthetic construct
EIHRGDLIGR

SEQ ID NO: 117823 - protein, 10 aa, synthetic construct
EISRGDLIGR

SEQ ID NO: 117824 - protein, 10 aa, synthetic construct
EITRGDLIGR

SEQ ID NO: 117825 - protein, 10 aa, synthetic construct
EIYRGDLIGR

SEQ ID NO: 117826 - protein, 10 aa, synthetic construct
EINRGDLIGR

SEQ ID NO: 117827 - protein, 10 aa, synthetic construct
EIQRGDLIGR

SEQ ID NO: 117828 - protein, 10 aa, synthetic construct
EIDRGDLIGR

SEQ ID NO: 117829 - protein, 10 aa, synthetic construct
EIERGDLIGR

SEQ ID NO: 117830 - protein, 10 aa, synthetic construct
EMGRGDLIGR

SEQ ID NO: 117831 - protein, 10 aa, synthetic construct
EMARGDLIGR

SEQ ID NO: 117832 - protein, 10 aa, synthetic construct
EMVRGDLIGR

SEQ ID NO: 117833 - protein, 10 aa, synthetic construct
EMPRGDLIGR

SEQ ID NO: 117834 - protein, 10 aa, synthetic construct
EMLRGDLIGR

SEQ ID NO: 117835 - protein, 10 aa, synthetic construct
EMIRGDLIGR

SEQ ID NO: 117836 - protein, 10 aa, synthetic construct
EMMRGDLIGR

SEQ ID NO: 117837 - protein, 10 aa, synthetic construct
EMWRGDLIGR

SEQ ID NO: 117838 - protein, 10 aa, synthetic construct
EMFRGDLIGR

SEQ ID NO: 117839 - protein, 10 aa, synthetic construct
EMKRGDLIGR

SEQ ID NO: 117840 - protein, 10 aa, synthetic construct
EMRRGDLIGR

SEQ ID NO: 117841 - protein, 10 aa, synthetic construct
EMHRGDLIGR

SEQ ID NO: 117842 - protein, 10 aa, synthetic construct
EMSRGDLIGR

SEQ ID NO: 117843 - protein, 10 aa, synthetic construct
EMTRGDLIGR

SEQ ID NO: 117844 - protein, 10 aa, synthetic construct
EMYRGDLIGR

SEQ ID NO: 117845 - protein, 10 aa, synthetic construct
EMNRGDLIGR

SEQ ID NO: 117846 - protein, 10 aa, synthetic construct
EMQRGDLIGR

SEQ ID NO: 117847 - protein, 10 aa, synthetic construct
EMDRGDLIGR

SEQ ID NO: 117848 - protein, 10 aa, synthetic construct
EMERGDLIGR

SEQ ID NO: 117849 - protein, 10 aa, synthetic construct
EWGRGDLIGR

SEQ ID NO: 117850 - protein, 10 aa, synthetic construct
EWARGDLIGR

SEQ ID NO: 117851 - protein, 10 aa, synthetic construct
EWVRGDLIGR

SEQ ID NO: 117852 - protein, 10 aa, synthetic construct
EWPRGDLIGR

SEQ ID NO: 117853 - protein, 10 aa, synthetic construct
EWLRGDLIGR

SEQ ID NO: 117854 - protein, 10 aa, synthetic construct
EWIRGDLIGR

SEQ ID NO: 117855 - protein, 10 aa, synthetic construct
EWMRGDLIGR

SEQ ID NO: 117856 - protein, 10 aa, synthetic construct
EWWRGDLIGR

SEQ ID NO: 117857 - protein, 10 aa, synthetic construct
EWFRGDLIGR

SEQ ID NO: 117858 - protein, 10 aa, synthetic construct
EWKRGDLIGR

SEQ ID NO: 117859 - protein, 10 aa, synthetic construct
EWRRGDLIGR

SEQ ID NO: 117860 - protein, 10 aa, synthetic construct
EWHRGDLIGR

SEQ ID NO: 117861 - protein, 10 aa, synthetic construct
EWSRGDLIGR

SEQ ID NO: 117862 - protein, 10 aa, synthetic construct
EWTRGDLIGR

SEQ ID NO: 117863 - protein, 10 aa, synthetic construct
EWYRGDLIGR

SEQ ID NO: 117864 - protein, 10 aa, synthetic construct
EWNRGDLIGR

SEQ ID NO: 117865 - protein, 10 aa, synthetic construct
EWQRGDLIGR

SEQ ID NO: 117866 - protein, 10 aa, synthetic construct
EWDRGDLIGR

SEQ ID NO: 117867 - protein, 10 aa, synthetic construct
EWERGDLIGR

SEQ ID NO: 117868 - protein, 10 aa, synthetic construct
EFGRGDLIGR

SEQ ID NO: 117869 - protein, 10 aa, synthetic construct
EFARGDLIGR

SEQ ID NO: 117870 - protein, 10 aa, synthetic construct
EFVRGDLIGR

SEQ ID NO: 117871 - protein, 10 aa, synthetic construct
EFPRGDLIGR

SEQ ID NO: 117872 - protein, 10 aa, synthetic construct
EFLRGDLIGR

SEQ ID NO: 117873 - protein, 10 aa, synthetic construct
EFIRGDLIGR

SEQ ID NO: 117874 - protein, 10 aa, synthetic construct
EFMRGDLIGR

SEQ ID NO: 117875 - protein, 10 aa, synthetic construct
EFWRGDLIGR

SEQ ID NO: 117876 - protein, 10 aa, synthetic construct
EFFRGDLIGR

SEQ ID NO: 117877 - protein, 10 aa, synthetic construct
EFKRGDLIGR

SEQ ID NO: 117878 - protein, 10 aa, synthetic construct
EFRRGDLIGR

SEQ ID NO: 117879 - protein, 10 aa, synthetic construct
EFHRGDLIGR

SEQ ID NO: 117880 - protein, 10 aa, synthetic construct
EFSRGDLIGR

SEQ ID NO: 117881 - protein, 10 aa, synthetic construct
EFTRGDLIGR

SEQ ID NO: 117882 - protein, 10 aa, synthetic construct
EFYRGDLIGR

SEQ ID NO: 117883 - protein, 10 aa, synthetic construct
EFNRGDLIGR

SEQ ID NO: 117884 - protein, 10 aa, synthetic construct
EFQRGDLIGR

SEQ ID NO: 117885 - protein, 10 aa, synthetic construct
EFDRGDLIGR

SEQ ID NO: 117886 - protein, 10 aa, synthetic construct
EFERGDLIGR

SEQ ID NO: 117887 - protein, 10 aa, synthetic construct
EKGRGDLIGR

SEQ ID NO: 117888 - protein, 10 aa, synthetic construct
EKARGDLIGR

SEQ ID NO: 117889 - protein, 10 aa, synthetic construct
EKVRGDLIGR

SEQ ID NO: 117890 - protein, 10 aa, synthetic construct
EKPRGDLIGR

SEQ ID NO: 117891 - protein, 10 aa, synthetic construct
EKLRGDLIGR

SEQ ID NO: 117892 - protein, 10 aa, synthetic construct
EKIRGDLIGR

SEQ ID NO: 117893 - protein, 10 aa, synthetic construct
EKMRGDLIGR

SEQ ID NO: 117894 - protein, 10 aa, synthetic construct
EKWRGDLIGR

SEQ ID NO: 117895 - protein, 10 aa, synthetic construct
EKFRGDLIGR

SEQ ID NO: 117896 - protein, 10 aa, synthetic construct
EKKRGDLIGR

SEQ ID NO: 117897 - protein, 10 aa, synthetic construct
EKRRGDLIGR

SEQ ID NO: 117898 - protein, 10 aa, synthetic construct
EKHRGDLIGR

SEQ ID NO: 117899 - protein, 10 aa, synthetic construct
EKSRGDLIGR

SEQ ID NO: 117900 - protein, 10 aa, synthetic construct
EKTRGDLIGR

SEQ ID NO: 117901 - protein, 10 aa, synthetic construct
EKYRGDLIGR

SEQ ID NO: 117902 - protein, 10 aa, synthetic construct
EKNRGDLIGR

SEQ ID NO: 117903 - protein, 10 aa, synthetic construct
EKQRGDLIGR

SEQ ID NO: 117904 - protein, 10 aa, synthetic construct
EKDRGDLIGR

SEQ ID NO: 117905 - protein, 10 aa, synthetic construct
EKERGDLIGR

SEQ ID NO: 117906 - protein, 10 aa, synthetic construct
ERGRGDLIGR

SEQ ID NO: 117907 - protein, 10 aa, synthetic construct
ERARGDLIGR

SEQ ID NO: 117908 - protein, 10 aa, synthetic construct
ERVRGDLIGR

SEQ ID NO: 117909 - protein, 10 aa, synthetic construct
ERPRGDLIGR

SEQ ID NO: 117910 - protein, 10 aa, synthetic construct
ERLRGDLIGR

SEQ ID NO: 117911 - protein, 10 aa, synthetic construct
ERIRGDLIGR

SEQ ID NO: 117912 - protein, 10 aa, synthetic construct
ERMRGDLIGR

SEQ ID NO: 117913 - protein, 10 aa, synthetic construct
ERWRGDLIGR

SEQ ID NO: 117914 - protein, 10 aa, synthetic construct
ERFRGDLIGR

SEQ ID NO: 117915 - protein, 10 aa, synthetic construct
ERKRGDLIGR

SEQ ID NO: 117916 - protein, 10 aa, synthetic construct
ERRRGDLIGR

SEQ ID NO: 117917 - protein, 10 aa, synthetic construct
ERHRGDLIGR

SEQ ID NO: 117918 - protein, 10 aa, synthetic construct
ERSRGDLIGR

SEQ ID NO: 117919 - protein, 10 aa, synthetic construct
ERTRGDLIGR

SEQ ID NO: 117920 - protein, 10 aa, synthetic construct
ERYRGDLIGR

SEQ ID NO: 117921 - protein, 10 aa, synthetic construct
ERNRGDLIGR

SEQ ID NO: 117922 - protein, 10 aa, synthetic construct
ERQRGDLIGR

SEQ ID NO: 117923 - protein, 10 aa, synthetic construct
ERDRGDLIGR

SEQ ID NO: 117924 - protein, 10 aa, synthetic construct
ERERGDLIGR

SEQ ID NO: 117925 - protein, 10 aa, synthetic construct
EHGRGDLIGR

SEQ ID NO: 117926 - protein, 10 aa, synthetic construct
EHARGDLIGR

SEQ ID NO: 117927 - protein, 10 aa, synthetic construct
EHVRGDLIGR

SEQ ID NO: 117928 - protein, 10 aa, synthetic construct
EHPRGDLIGR

SEQ ID NO: 117929 - protein, 10 aa, synthetic construct
EHLRGDLIGR

SEQ ID NO: 117930 - protein, 10 aa, synthetic construct
EHIRGDLIGR

SEQ ID NO: 117931 - protein, 10 aa, synthetic construct
EHMRGDLIGR

SEQ ID NO: 117932 - protein, 10 aa, synthetic construct
EHWRGDLIGR

SEQ ID NO: 117933 - protein, 10 aa, synthetic construct
EHFRGDLIGR

SEQ ID NO: 117934 - protein, 10 aa, synthetic construct
EHKRGDLIGR

SEQ ID NO: 117935 - protein, 10 aa, synthetic construct
EHRRGDLIGR

SEQ ID NO: 117936 - protein, 10 aa, synthetic construct
EHHRGDLIGR

SEQ ID NO: 117937 - protein, 10 aa, synthetic construct
EHSRGDLIGR

SEQ ID NO: 117938 - protein, 10 aa, synthetic construct
EHTRGDLIGR

SEQ ID NO: 117939 - protein, 10 aa, synthetic construct
EHYRGDLIGR

SEQ ID NO: 117940 - protein, 10 aa, synthetic construct
EHNRGDLIGR

SEQ ID NO: 117941 - protein, 10 aa, synthetic construct
EHQRGDLIGR

SEQ ID NO: 117942 - protein, 10 aa, synthetic construct
EHDRGDLIGR

SEQ ID NO: 117943 - protein, 10 aa, synthetic construct
EHERGDLIGR

SEQ ID NO: 117944 - protein, 10 aa, synthetic construct
ESGRGDLIGR

SEQ ID NO: 117945 - protein, 10 aa, synthetic construct
ESARGDLIGR

SEQ ID NO: 117946 - protein, 10 aa, synthetic construct
ESVRGDLIGR

SEQ ID NO: 117947 - protein, 10 aa, synthetic construct
ESPRGDLIGR

SEQ ID NO: 117948 - protein, 10 aa, synthetic construct
ESLRGDLIGR

SEQ ID NO: 117949 - protein, 10 aa, synthetic construct
ESIRGDLIGR

SEQ ID NO: 117950 - protein, 10 aa, synthetic construct
ESMRGDLIGR

SEQ ID NO: 117951 - protein, 10 aa, synthetic construct
ESWRGDLIGR

SEQ ID NO: 117952 - protein, 10 aa, synthetic construct
ESFRGDLIGR

SEQ ID NO: 117953 - protein, 10 aa, synthetic construct
ESKRGDLIGR

SEQ ID NO: 117954 - protein, 10 aa, synthetic construct
ESRRGDLIGR

SEQ ID NO: 117955 - protein, 10 aa, synthetic construct
ESHRGDLIGR

SEQ ID NO: 117956 - protein, 10 aa, synthetic construct
ESSRGDLIGR

SEQ ID NO: 117957 - protein, 10 aa, synthetic construct
ESTRGDLIGR

SEQ ID NO: 117958 - protein, 10 aa, synthetic construct
ESYRGDLIGR

SEQ ID NO: 117959 - protein, 10 aa, synthetic construct
ESNRGDLIGR

SEQ ID NO: 117960 - protein, 10 aa, synthetic construct
ESQRGDLIGR

SEQ ID NO: 117961 - protein, 10 aa, synthetic construct
ESDRGDLIGR

SEQ ID NO: 117962 - protein, 10 aa, synthetic construct
ESERGDLIGR

SEQ ID NO: 117963 - protein, 10 aa, synthetic construct
ETGRGDLIGR

SEQ ID NO: 117964 - protein, 10 aa, synthetic construct
ETARGDLIGR

SEQ ID NO: 117965 - protein, 10 aa, synthetic construct
ETVRGDLIGR

SEQ ID NO: 117966 - protein, 10 aa, synthetic construct
ETPRGDLIGR

SEQ ID NO: 117967 - protein, 10 aa, synthetic construct
ETLRGDLIGR

SEQ ID NO: 117968 - protein, 10 aa, synthetic construct
ETIRGDLIGR

SEQ ID NO: 117969 - protein, 10 aa, synthetic construct
ETMRGDLIGR

SEQ ID NO: 117970 - protein, 10 aa, synthetic construct
ETWRGDLIGR

SEQ ID NO: 117971 - protein, 10 aa, synthetic construct
ETFRGDLIGR

SEQ ID NO: 117972 - protein, 10 aa, synthetic construct
ETKRGDLIGR

SEQ ID NO: 117973 - protein, 10 aa, synthetic construct
ETRRGDLIGR

SEQ ID NO: 117974 - protein, 10 aa, synthetic construct
ETHRGDLIGR

SEQ ID NO: 117975 - protein, 10 aa, synthetic construct
ETSRGDLIGR

SEQ ID NO: 117976 - protein, 10 aa, synthetic construct
ETTRGDLIGR

SEQ ID NO: 117977 - protein, 10 aa, synthetic construct
ETYRGDLIGR

SEQ ID NO: 117978 - protein, 10 aa, synthetic construct
ETNRGDLIGR

SEQ ID NO: 117979 - protein, 10 aa, synthetic construct
ETQRGDLIGR

SEQ ID NO: 117980 - protein, 10 aa, synthetic construct
ETDRGDLIGR

SEQ ID NO: 117981 - protein, 10 aa, synthetic construct
ETERGDLIGR

SEQ ID NO: 117982 - protein, 10 aa, synthetic construct
EYGRGDLIGR

SEQ ID NO: 117983 - protein, 10 aa, synthetic construct
EYARGDLIGR

SEQ ID NO: 117984 - protein, 10 aa, synthetic construct
EYVRGDLIGR

SEQ ID NO: 117985 - protein, 10 aa, synthetic construct
EYPRGDLIGR

SEQ ID NO: 117986 - protein, 10 aa, synthetic construct
EYLRGDLIGR

SEQ ID NO: 117987 - protein, 10 aa, synthetic construct
EYIRGDLIGR

SEQ ID NO: 117988 - protein, 10 aa, synthetic construct
EYMRGDLIGR

SEQ ID NO: 117989 - protein, 10 aa, synthetic construct
EYWRGDLIGR

SEQ ID NO: 117990 - protein, 10 aa, synthetic construct
EYFRGDLIGR

SEQ ID NO: 117991 - protein, 10 aa, synthetic construct
EYKRGDLIGR

SEQ ID NO: 117992 - protein, 10 aa, synthetic construct
EYRRGDLIGR

SEQ ID NO: 117993 - protein, 10 aa, synthetic construct
EYHRGDLIGR

SEQ ID NO: 117994 - protein, 10 aa, synthetic construct
EYSRGDLIGR

SEQ ID NO: 117995 - protein, 10 aa, synthetic construct
EYTRGDLIGR

SEQ ID NO: 117996 - protein, 10 aa, synthetic construct
EYYRGDLIGR

SEQ ID NO: 117997 - protein, 10 aa, synthetic construct
EYNRGDLIGR

SEQ ID NO: 117998 - protein, 10 aa, synthetic construct
EYQRGDLIGR

SEQ ID NO: 117999 - protein, 10 aa, synthetic construct
EYDRGDLIGR

SEQ ID NO: 118000 - protein, 10 aa, synthetic construct
EYERGDLIGR

SEQ ID NO: 118001 - protein, 10 aa, synthetic construct
ENGRGDLIGR

SEQ ID NO: 118002 - protein, 10 aa, synthetic construct
ENARGDLIGR

SEQ ID NO: 118003 - protein, 10 aa, synthetic construct
ENVRGDLIGR

SEQ ID NO: 118004 - protein, 10 aa, synthetic construct
ENPRGDLIGR

SEQ ID NO: 118005 - protein, 10 aa, synthetic construct
ENLRGDLIGR

SEQ ID NO: 118006 - protein, 10 aa, synthetic construct
ENIRGDLIGR

SEQ ID NO: 118007 - protein, 10 aa, synthetic construct
ENMRGDLIGR

SEQ ID NO: 118008 - protein, 10 aa, synthetic construct
ENWRGDLIGR

SEQ ID NO: 118009 - protein, 10 aa, synthetic construct
ENFRGDLIGR

SEQ ID NO: 118010 - protein, 10 aa, synthetic construct
ENKRGDLIGR

SEQ ID NO: 118011 - protein, 10 aa, synthetic construct
ENRRGDLIGR

SEQ ID NO: 118012 - protein, 10 aa, synthetic construct
ENHRGDLIGR

SEQ ID NO: 118013 - protein, 10 aa, synthetic construct
ENSRGDLIGR

SEQ ID NO: 118014 - protein, 10 aa, synthetic construct
ENTRGDLIGR

SEQ ID NO: 118015 - protein, 10 aa, synthetic construct
ENYRGDLIGR

SEQ ID NO: 118016 - protein, 10 aa, synthetic construct
ENNRGDLIGR

SEQ ID NO: 118017 - protein, 10 aa, synthetic construct
ENQRGDLIGR

SEQ ID NO: 118018 - protein, 10 aa, synthetic construct
ENDRGDLIGR

SEQ ID NO: 118019 - protein, 10 aa, synthetic construct
ENERGDLIGR

SEQ ID NO: 118020 - protein, 10 aa, synthetic construct
EQGRGDLIGR

SEQ ID NO: 118021 - protein, 10 aa, synthetic construct
EQARGDLIGR

SEQ ID NO: 118022 - protein, 10 aa, synthetic construct
EQVRGDLIGR

SEQ ID NO: 118023 - protein, 10 aa, synthetic construct
EQPRGDLIGR

SEQ ID NO: 118024 - protein, 10 aa, synthetic construct
EQLRGDLIGR

SEQ ID NO: 118025 - protein, 10 aa, synthetic construct
EQIRGDLIGR

SEQ ID NO: 118026 - protein, 10 aa, synthetic construct
EQMRGDLIGR

SEQ ID NO: 118027 - protein, 10 aa, synthetic construct
EQWRGDLIGR

SEQ ID NO: 118028 - protein, 10 aa, synthetic construct
EQFRGDLIGR

SEQ ID NO: 118029 - protein, 10 aa, synthetic construct
EQKRGDLIGR

SEQ ID NO: 118030 - protein, 10 aa, synthetic construct
EQRRGDLIGR

SEQ ID NO: 118031 - protein, 10 aa, synthetic construct
EQHRGDLIGR

SEQ ID NO: 118032 - protein, 10 aa, synthetic construct
EQSRGDLIGR

SEQ ID NO: 118033 - protein, 10 aa, synthetic construct
EQTRGDLIGR

SEQ ID NO: 118034 - protein, 10 aa, synthetic construct
EQYRGDLIGR

SEQ ID NO: 118035 - protein, 10 aa, synthetic construct
EQNRGDLIGR

SEQ ID NO: 118036 - protein, 10 aa, synthetic construct
EQQRGDLIGR

SEQ ID NO: 118037 - protein, 10 aa, synthetic construct
EQDRGDLIGR

SEQ ID NO: 118038 - protein, 10 aa, synthetic construct
EQERGDLIGR

SEQ ID NO: 118039 - protein, 10 aa, synthetic construct
EDGRGDLIGR

SEQ ID NO: 118040 - protein, 10 aa, synthetic construct
EDARGDLIGR

SEQ ID NO: 118041 - protein, 10 aa, synthetic construct
EDVRGDLIGR

SEQ ID NO: 118042 - protein, 10 aa, synthetic construct
EDPRGDLIGR

SEQ ID NO: 118043 - protein, 10 aa, synthetic construct
EDLRGDLIGR

SEQ ID NO: 118044 - protein, 10 aa, synthetic construct
EDIRGDLIGR

SEQ ID NO: 118045 - protein, 10 aa, synthetic construct
EDMRGDLIGR

SEQ ID NO: 118046 - protein, 10 aa, synthetic construct
EDWRGDLIGR

SEQ ID NO: 118047 - protein, 10 aa, synthetic construct
EDFRGDLIGR

SEQ ID NO: 118048 - protein, 10 aa, synthetic construct
EDKRGDLIGR

SEQ ID NO: 118049 - protein, 10 aa, synthetic construct
EDRRGDLIGR

SEQ ID NO: 118050 - protein, 10 aa, synthetic construct
EDHRGDLIGR

SEQ ID NO: 118051 - protein, 10 aa, synthetic construct
EDSRGDLIGR

SEQ ID NO: 118052 - protein, 10 aa, synthetic construct
EDTRGDLIGR

SEQ ID NO: 118053 - protein, 10 aa, synthetic construct
EDYRGDLIGR

SEQ ID NO: 118054 - protein, 10 aa, synthetic construct
EDNRGDLIGR

SEQ ID NO: 118055 - protein, 10 aa, synthetic construct
EDQRGDLIGR

SEQ ID NO: 118056 - protein, 10 aa, synthetic construct
EDDRGDLIGR

SEQ ID NO: 118057 - protein, 10 aa, synthetic construct
EDERGDLIGR

SEQ ID NO: 118058 - protein, 10 aa, synthetic construct
EEGRGDLIGR

SEQ ID NO: 118059 - protein, 10 aa, synthetic construct
EEARGDLIGR

SEQ ID NO: 118060 - protein, 10 aa, synthetic construct
EEVRGDLIGR

SEQ ID NO: 118061 - protein, 10 aa, synthetic construct
EEPRGDLIGR

SEQ ID NO: 118062 - protein, 10 aa, synthetic construct
EELRGDLIGR

SEQ ID NO: 118063 - protein, 10 aa, synthetic construct
EEIRGDLIGR

SEQ ID NO: 118064 - protein, 10 aa, synthetic construct
EEMRGDLIGR

SEQ ID NO: 118065 - protein, 10 aa, synthetic construct
EEWRGDLIGR

SEQ ID NO: 118066 - protein, 10 aa, synthetic construct
EEFRGDLIGR

SEQ ID NO: 118067 - protein, 10 aa, synthetic construct
EEKRGDLIGR

SEQ ID NO: 118068 - protein, 10 aa, synthetic construct
EERRGDLIGR

SEQ ID NO: 118069 - protein, 10 aa, synthetic construct
EEHRGDLIGR

SEQ ID NO: 118070 - protein, 10 aa, synthetic construct
EESRGDLIGR

SEQ ID NO: 118071 - protein, 10 aa, synthetic construct
EETRGDLIGR

SEQ ID NO: 118072 - protein, 10 aa, synthetic construct
EEYRGDLIGR

SEQ ID NO: 118073 - protein, 10 aa, synthetic construct
EENRGDLIGR

SEQ ID NO: 118074 - protein, 10 aa, synthetic construct
EEQRGDLIGR

SEQ ID NO: 118075 - protein, 10 aa, synthetic construct
EEDRGDLIGR

SEQ ID NO: 118076 - protein, 10 aa, synthetic construct
EEERGDLIGR

SEQ ID NO: 118077 - protein, 10 aa, synthetic construct
NGGRGDLIGR

SEQ ID NO: 118078 - protein, 10 aa, synthetic construct
NGARGDLIGR

SEQ ID NO: 118079 - protein, 10 aa, synthetic construct
NGVRGDLIGR

SEQ ID NO: 118080 - protein, 10 aa, synthetic construct
NGPRGDLIGR

SEQ ID NO: 118081 - protein, 10 aa, synthetic construct
NGLRGDLIGR

SEQ ID NO: 118082 - protein, 10 aa, synthetic construct
NGIRGDLIGR

SEQ ID NO: 118083 - protein, 10 aa, synthetic construct
NGMRGDLIGR

SEQ ID NO: 118084 - protein, 10 aa, synthetic construct
NGWRGDLIGR

SEQ ID NO: 118085 - protein, 10 aa, synthetic construct
NGFRGDLIGR

SEQ ID NO: 118086 - protein, 10 aa, synthetic construct
NGKRGDLIGR

SEQ ID NO: 118087 - protein, 10 aa, synthetic construct
NGRRGDLIGR

SEQ ID NO: 118088 - protein, 10 aa, synthetic construct
NGHRGDLIGR

SEQ ID NO: 118089 - protein, 10 aa, synthetic construct
NGSRGDLIGR

SEQ ID NO: 118090 - protein, 10 aa, synthetic construct
NGTRGDLIGR

SEQ ID NO: 118091 - protein, 10 aa, synthetic construct
NGYRGDLIGR

SEQ ID NO: 118092 - protein, 10 aa, synthetic construct
NGNRGDLIGR

SEQ ID NO: 118093 - protein, 10 aa, synthetic construct
NGQRGDLIGR

SEQ ID NO: 118094 - protein, 10 aa, synthetic construct
NGDRGDLIGR

SEQ ID NO: 118095 - protein, 10 aa, synthetic construct
NGERGDLIGR

SEQ ID NO: 118096 - protein, 10 aa, synthetic construct
NAGRGDLIGR

SEQ ID NO: 118097 - protein, 10 aa, synthetic construct
NAARGDLIGR

SEQ ID NO: 118098 - protein, 10 aa, synthetic construct
NAVRGDLIGR

SEQ ID NO: 118099 - protein, 10 aa, synthetic construct
NAPRGDLIGR

SEQ ID NO: 118100 - protein, 10 aa, synthetic construct
NALRGDLIGR

SEQ ID NO: 118101 - protein, 10 aa, synthetic construct
NAIRGDLIGR

SEQ ID NO: 118102 - protein, 10 aa, synthetic construct
NAMRGDLIGR

SEQ ID NO: 118103 - protein, 10 aa, synthetic construct
NAWRGDLIGR

SEQ ID NO: 118104 - protein, 10 aa, synthetic construct
NAFRGDLIGR

SEQ ID NO: 118105 - protein, 10 aa, synthetic construct
NAKRGDLIGR

SEQ ID NO: 118106 - protein, 10 aa, synthetic construct
NARRGDLIGR

SEQ ID NO: 118107 - protein, 10 aa, synthetic construct
NAHRGDLIGR

SEQ ID NO: 118108 - protein, 10 aa, synthetic construct
NASRGDLIGR

SEQ ID NO: 118109 - protein, 10 aa, synthetic construct
NATRGDLIGR

SEQ ID NO: 118110 - protein, 10 aa, synthetic construct
NAYRGDLIGR

SEQ ID NO: 118111 - protein, 10 aa, synthetic construct
NANRGDLIGR

SEQ ID NO: 118112 - protein, 10 aa, synthetic construct
NAQRGDLIGR

SEQ ID NO: 118113 - protein, 10 aa, synthetic construct
NADRGDLIGR

SEQ ID NO: 118114 - protein, 10 aa, synthetic construct
NAERGDLIGR

SEQ ID NO: 118115 - protein, 10 aa, synthetic construct
NVGRGDLIGR

SEQ ID NO: 118116 - protein, 10 aa, synthetic construct
NVARGDLIGR

SEQ ID NO: 118117 - protein, 10 aa, synthetic construct
NVVRGDLIGR

SEQ ID NO: 118118 - protein, 10 aa, synthetic construct
NVPRGDLIGR

SEQ ID NO: 118119 - protein, 10 aa, synthetic construct
NVLRGDLIGR

SEQ ID NO: 118120 - protein, 10 aa, synthetic construct
NVIRGDLIGR

SEQ ID NO: 118121 - protein, 10 aa, synthetic construct
NVMRGDLIGR

SEQ ID NO: 118122 - protein, 10 aa, synthetic construct
NVWRGDLIGR

SEQ ID NO: 118123 - protein, 10 aa, synthetic construct
NVFRGDLIGR

SEQ ID NO: 118124 - protein, 10 aa, synthetic construct
NVKRGDLIGR

SEQ ID NO: 118125 - protein, 10 aa, synthetic construct
NVRRGDLIGR

SEQ ID NO: 118126 - protein, 10 aa, synthetic construct
NVHRGDLIGR

SEQ ID NO: 118127 - protein, 10 aa, synthetic construct
NVSRGDLIGR

SEQ ID NO: 118128 - protein, 10 aa, synthetic construct
NVTRGDLIGR

SEQ ID NO: 118129 - protein, 10 aa, synthetic construct
NVYRGDLIGR

SEQ ID NO: 118130 - protein, 10 aa, synthetic construct
NVNRGDLIGR

SEQ ID NO: 118131 - protein, 10 aa, synthetic construct
NVQRGDLIGR

SEQ ID NO: 118132 - protein, 10 aa, synthetic construct
NVDRGDLIGR

SEQ ID NO: 118133 - protein, 10 aa, synthetic construct
NVERGDLIGR

SEQ ID NO: 118134 - protein, 10 aa, synthetic construct
NPGRGDLIGR

SEQ ID NO: 118135 - protein, 10 aa, synthetic construct
NPARGDLIGR

SEQ ID NO: 118136 - protein, 10 aa, synthetic construct
NPVRGDLIGR

SEQ ID NO: 118137 - protein, 10 aa, synthetic construct
NPPRGDLIGR

SEQ ID NO: 118138 - protein, 10 aa, synthetic construct
NPLRGDLIGR

SEQ ID NO: 118139 - protein, 10 aa, synthetic construct
NPIRGDLIGR

SEQ ID NO: 118140 - protein, 10 aa, synthetic construct
NPMRGDLIGR

SEQ ID NO: 118141 - protein, 10 aa, synthetic construct
NPWRGDLIGR

SEQ ID NO: 118142 - protein, 10 aa, synthetic construct
NPFRGDLIGR

SEQ ID NO: 118143 - protein, 10 aa, synthetic construct
NPKRGDLIGR

SEQ ID NO: 118144 - protein, 10 aa, synthetic construct
NPRRGDLIGR

SEQ ID NO: 118145 - protein, 10 aa, synthetic construct
NPHRGDLIGR

SEQ ID NO: 118146 - protein, 10 aa, synthetic construct
NPSRGDLIGR

SEQ ID NO: 118147 - protein, 10 aa, synthetic construct
NPTRGDLIGR

SEQ ID NO: 118148 - protein, 10 aa, synthetic construct
NPYRGDLIGR

SEQ ID NO: 118149 - protein, 10 aa, synthetic construct
NPNRGDLIGR

SEQ ID NO: 118150 - protein, 10 aa, synthetic construct
NPQRGDLIGR

SEQ ID NO: 118151 - protein, 10 aa, synthetic construct
NPDRGDLIGR

SEQ ID NO: 118152 - protein, 10 aa, synthetic construct
NPERGDLIGR

SEQ ID NO: 118153 - protein, 10 aa, synthetic construct
NLGRGDLIGR

SEQ ID NO: 118154 - protein, 10 aa, synthetic construct
NLARGDLIGR

SEQ ID NO: 118155 - protein, 10 aa, synthetic construct
NLVRGDLIGR

SEQ ID NO: 118156 - protein, 10 aa, synthetic construct
NLPRGDLIGR

SEQ ID NO: 118157 - protein, 10 aa, synthetic construct
NLLRGDLIGR

SEQ ID NO: 118158 - protein, 10 aa, synthetic construct
NLIRGDLIGR

SEQ ID NO: 118159 - protein, 10 aa, synthetic construct
NLMRGDLIGR

SEQ ID NO: 118160 - protein, 10 aa, synthetic construct
NLWRGDLIGR

SEQ ID NO: 118161 - protein, 10 aa, synthetic construct
NLFRGDLIGR

SEQ ID NO: 118162 - protein, 10 aa, synthetic construct
NLKRGDLIGR

SEQ ID NO: 118163 - protein, 10 aa, synthetic construct
NLRRGDLIGR

SEQ ID NO: 118164 - protein, 10 aa, synthetic construct
NLHRGDLIGR

SEQ ID NO: 118165 - protein, 10 aa, synthetic construct
NLSRGDLIGR

SEQ ID NO: 118166 - protein, 10 aa, synthetic construct
NLTRGDLIGR

SEQ ID NO: 118167 - protein, 10 aa, synthetic construct
NLYRGDLIGR

SEQ ID NO: 118168 - protein, 10 aa, synthetic construct
NLNRGDLIGR

SEQ ID NO: 118169 - protein, 10 aa, synthetic construct
NLQRGDLIGR

SEQ ID NO: 118170 - protein, 10 aa, synthetic construct
NLDRGDLIGR

SEQ ID NO: 118171 - protein, 10 aa, synthetic construct
NLERGDLIGR

SEQ ID NO: 118172 - protein, 10 aa, synthetic construct
NIGRGDLIGR

SEQ ID NO: 118173 - protein, 10 aa, synthetic construct
NIARGDLIGR

SEQ ID NO: 118174 - protein, 10 aa, synthetic construct
NIVRGDLIGR

SEQ ID NO: 118175 - protein, 10 aa, synthetic construct
NIPRGDLIGR

SEQ ID NO: 118176 - protein, 10 aa, synthetic construct
NILRGDLIGR

SEQ ID NO: 118177 - protein, 10 aa, synthetic construct
NIIRGDLIGR

SEQ ID NO: 118178 - protein, 10 aa, synthetic construct
NIMRGDLIGR

SEQ ID NO: 118179 - protein, 10 aa, synthetic construct
NIWRGDLIGR

SEQ ID NO: 118180 - protein, 10 aa, synthetic construct
NIFRGDLIGR

SEQ ID NO: 118181 - protein, 10 aa, synthetic construct
NIKRGDLIGR

SEQ ID NO: 118182 - protein, 10 aa, synthetic construct
NIRRGDLIGR

SEQ ID NO: 118183 - protein, 10 aa, synthetic construct
NIHRGDLIGR

SEQ ID NO: 118184 - protein, 10 aa, synthetic construct
NISRGDLIGR

SEQ ID NO: 118185 - protein, 10 aa, synthetic construct
NITRGDLIGR

SEQ ID NO: 118186 - protein, 10 aa, synthetic construct
NIYRGDLIGR

SEQ ID NO: 118187 - protein, 10 aa, synthetic construct
NINRGDLIGR

SEQ ID NO: 118188 - protein, 10 aa, synthetic construct
NIQRGDLIGR

SEQ ID NO: 118189 - protein, 10 aa, synthetic construct
NIDRGDLIGR

SEQ ID NO: 118190 - protein, 10 aa, synthetic construct
NIERGDLIGR

SEQ ID NO: 118191 - protein, 10 aa, synthetic construct
NMGRGDLIGR

SEQ ID NO: 118192 - protein, 10 aa, synthetic construct
NMARGDLIGR

SEQ ID NO: 118193 - protein, 10 aa, synthetic construct
NMVRGDLIGR

SEQ ID NO: 118194 - protein, 10 aa, synthetic construct
NMPRGDLIGR

SEQ ID NO: 118195 - protein, 10 aa, synthetic construct
NMLRGDLIGR

SEQ ID NO: 118196 - protein, 10 aa, synthetic construct
NMIRGDLIGR

SEQ ID NO: 118197 - protein, 10 aa, synthetic construct
NMMRGDLIGR

SEQ ID NO: 118198 - protein, 10 aa, synthetic construct
NMWRGDLIGR

SEQ ID NO: 118199 - protein, 10 aa, synthetic construct
NMFRGDLIGR

SEQ ID NO: 118200 - protein, 10 aa, synthetic construct
NMKRGDLIGR

SEQ ID NO: 118201 - protein, 10 aa, synthetic construct
NMRRGDLIGR

SEQ ID NO: 118202 - protein, 10 aa, synthetic construct
NMHRGDLIGR

SEQ ID NO: 118203 - protein, 10 aa, synthetic construct
NMSRGDLIGR

SEQ ID NO: 118204 - protein, 10 aa, synthetic construct
NMTRGDLIGR

SEQ ID NO: 118205 - protein, 10 aa, synthetic construct
NMYRGDLIGR

SEQ ID NO: 118206 - protein, 10 aa, synthetic construct
NMNRGDLIGR

SEQ ID NO: 118207 - protein, 10 aa, synthetic construct
NMQRGDLIGR

SEQ ID NO: 118208 - protein, 10 aa, synthetic construct
NMDRGDLIGR

SEQ ID NO: 118209 - protein, 10 aa, synthetic construct
NMERGDLIGR

SEQ ID NO: 118210 - protein, 10 aa, synthetic construct
NWGRGDLIGR

SEQ ID NO: 118211 - protein, 10 aa, synthetic construct
NWARGDLIGR

SEQ ID NO: 118212 - protein, 10 aa, synthetic construct
NWVRGDLIGR

SEQ ID NO: 118213 - protein, 10 aa, synthetic construct
NWPRGDLIGR

SEQ ID NO: 118214 - protein, 10 aa, synthetic construct
NWLRGDLIGR

SEQ ID NO: 118215 - protein, 10 aa, synthetic construct
NWIRGDLIGR

SEQ ID NO: 118216 - protein, 10 aa, synthetic construct
NWMRGDLIGR

SEQ ID NO: 118217 - protein, 10 aa, synthetic construct
NWWRGDLIGR

SEQ ID NO: 118218 - protein, 10 aa, synthetic construct
NWFRGDLIGR

SEQ ID NO: 118219 - protein, 10 aa, synthetic construct
NWKRGDLIGR

SEQ ID NO: 118220 - protein, 10 aa, synthetic construct
NWRRGDLIGR

SEQ ID NO: 118221 - protein, 10 aa, synthetic construct
NWHRGDLIGR

SEQ ID NO: 118222 - protein, 10 aa, synthetic construct
NWSRGDLIGR

SEQ ID NO: 118223 - protein, 10 aa, synthetic construct
NWTRGDLIGR

SEQ ID NO: 118224 - protein, 10 aa, synthetic construct
NWYRGDLIGR

SEQ ID NO: 118225 - protein, 10 aa, synthetic construct
NWNRGDLIGR

SEQ ID NO: 118226 - protein, 10 aa, synthetic construct
NWQRGDLIGR

SEQ ID NO: 118227 - protein, 10 aa, synthetic construct
NWDRGDLIGR

SEQ ID NO: 118228 - protein, 10 aa, synthetic construct
NWERGDLIGR

SEQ ID NO: 118229 - protein, 10 aa, synthetic construct
NFGRGDLIGR

SEQ ID NO: 118230 - protein, 10 aa, synthetic construct
NFARGDLIGR

SEQ ID NO: 118231 - protein, 10 aa, synthetic construct
NFVRGDLIGR

SEQ ID NO: 118232 - protein, 10 aa, synthetic construct
NFPRGDLIGR

SEQ ID NO: 118233 - protein, 10 aa, synthetic construct
NFLRGDLIGR

SEQ ID NO: 118234 - protein, 10 aa, synthetic construct
NFIRGDLIGR

SEQ ID NO: 118235 - protein, 10 aa, synthetic construct
NFMRGDLIGR

SEQ ID NO: 118236 - protein, 10 aa, synthetic construct
NFWRGDLIGR

SEQ ID NO: 118237 - protein, 10 aa, synthetic construct
NFFRGDLIGR

SEQ ID NO: 118238 - protein, 10 aa, synthetic construct
NFKRGDLIGR

SEQ ID NO: 118239 - protein, 10 aa, synthetic construct
NFRRGDLIGR

SEQ ID NO: 118240 - protein, 10 aa, synthetic construct
NFHRGDLIGR

SEQ ID NO: 118241 - protein, 10 aa, synthetic construct
NFSRGDLIGR

SEQ ID NO: 118242 - protein, 10 aa, synthetic construct
NFTRGDLIGR

SEQ ID NO: 118243 - protein, 10 aa, synthetic construct
NFYRGDLIGR

SEQ ID NO: 118244 - protein, 10 aa, synthetic construct
NFNRGDLIGR

SEQ ID NO: 118245 - protein, 10 aa, synthetic construct
NFQRGDLIGR

SEQ ID NO: 118246 - protein, 10 aa, synthetic construct
NFDRGDLIGR

SEQ ID NO: 118247 - protein, 10 aa, synthetic construct
NFERGDLIGR

SEQ ID NO: 118248 - protein, 10 aa, synthetic construct
NKGRGDLIGR

SEQ ID NO: 118249 - protein, 10 aa, synthetic construct
NKARGDLIGR

SEQ ID NO: 118250 - protein, 10 aa, synthetic construct
NKVRGDLIGR

SEQ ID NO: 118251 - protein, 10 aa, synthetic construct
NKPRGDLIGR

SEQ ID NO: 118252 - protein, 10 aa, synthetic construct
NKLRGDLIGR

SEQ ID NO: 118253 - protein, 10 aa, synthetic construct
NKIRGDLIGR

SEQ ID NO: 118254 - protein, 10 aa, synthetic construct
NKMRGDLIGR

SEQ ID NO: 118255 - protein, 10 aa, synthetic construct
NKWRGDLIGR

SEQ ID NO: 118256 - protein, 10 aa, synthetic construct
NKFRGDLIGR

SEQ ID NO: 118257 - protein, 10 aa, synthetic construct
NKKRGDLIGR

SEQ ID NO: 118258 - protein, 10 aa, synthetic construct
NKRRGDLIGR

SEQ ID NO: 118259 - protein, 10 aa, synthetic construct
NKHRGDLIGR

SEQ ID NO: 118260 - protein, 10 aa, synthetic construct
NKSRGDLIGR

SEQ ID NO: 118261 - protein, 10 aa, synthetic construct
NKTRGDLIGR

SEQ ID NO: 118262 - protein, 10 aa, synthetic construct
NKYRGDLIGR

SEQ ID NO: 118263 - protein, 10 aa, synthetic construct
NKNRGDLIGR

SEQ ID NO: 118264 - protein, 10 aa, synthetic construct
NKQRGDLIGR

SEQ ID NO: 118265 - protein, 10 aa, synthetic construct
NKDRGDLIGR

SEQ ID NO: 118266 - protein, 10 aa, synthetic construct
NKERGDLIGR

SEQ ID NO: 118267 - protein, 10 aa, synthetic construct
NRGRGDLIGR

SEQ ID NO: 118268 - protein, 10 aa, synthetic construct
NRARGDLIGR

SEQ ID NO: 118269 - protein, 10 aa, synthetic construct
NRVRGDLIGR

SEQ ID NO: 118270 - protein, 10 aa, synthetic construct
NRPRGDLIGR

SEQ ID NO: 118271 - protein, 10 aa, synthetic construct
NRLRGDLIGR

SEQ ID NO: 118272 - protein, 10 aa, synthetic construct
NRIRGDLIGR

SEQ ID NO: 118273 - protein, 10 aa, synthetic construct
NRMRGDLIGR

SEQ ID NO: 118274 - protein, 10 aa, synthetic construct
NRWRGDLIGR

SEQ ID NO: 118275 - protein, 10 aa, synthetic construct
NRFRGDLIGR

SEQ ID NO: 118276 - protein, 10 aa, synthetic construct
NRKRGDLIGR

SEQ ID NO: 118277 - protein, 10 aa, synthetic construct
NRRRGDLIGR

SEQ ID NO: 118278 - protein, 10 aa, synthetic construct
NRHRGDLIGR

SEQ ID NO: 118279 - protein, 10 aa, synthetic construct
NRSRGDLIGR

SEQ ID NO: 118280 - protein, 10 aa, synthetic construct
NRTRGDLIGR

SEQ ID NO: 118281 - protein, 10 aa, synthetic construct
NRYRGDLIGR

SEQ ID NO: 118282 - protein, 10 aa, synthetic construct
NRNRGDLIGR

SEQ ID NO: 118283 - protein, 10 aa, synthetic construct
NRQRGDLIGR

SEQ ID NO: 118284 - protein, 10 aa, synthetic construct
NRDRGDLIGR

SEQ ID NO: 118285 - protein, 10 aa, synthetic construct
NRERGDLIGR

SEQ ID NO: 118286 - protein, 10 aa, synthetic construct
NHGRGDLIGR

SEQ ID NO: 118287 - protein, 10 aa, synthetic construct
NHARGDLIGR

SEQ ID NO: 118288 - protein, 10 aa, synthetic construct
NHVRGDLIGR

SEQ ID NO: 118289 - protein, 10 aa, synthetic construct
NHPRGDLIGR

SEQ ID NO: 118290 - protein, 10 aa, synthetic construct
NHLRGDLIGR

SEQ ID NO: 118291 - protein, 10 aa, synthetic construct
NHIRGDLIGR

SEQ ID NO: 118292 - protein, 10 aa, synthetic construct
NHMRGDLIGR

SEQ ID NO: 118293 - protein, 10 aa, synthetic construct
NHWRGDLIGR

SEQ ID NO: 118294 - protein, 10 aa, synthetic construct
NHFRGDLIGR

SEQ ID NO: 118295 - protein, 10 aa, synthetic construct
NHKRGDLIGR

SEQ ID NO: 118296 - protein, 10 aa, synthetic construct
NHRRGDLIGR

SEQ ID NO: 118297 - protein, 10 aa, synthetic construct
NHHRGDLIGR

SEQ ID NO: 118298 - protein, 10 aa, synthetic construct
NHSRGDLIGR

SEQ ID NO: 118299 - protein, 10 aa, synthetic construct
NHTRGDLIGR

SEQ ID NO: 118300 - protein, 10 aa, synthetic construct
NHYRGDLIGR

SEQ ID NO: 118301 - protein, 10 aa, synthetic construct
NHNRGDLIGR

SEQ ID NO: 118302 - protein, 10 aa, synthetic construct
NHQRGDLIGR

SEQ ID NO: 118303 - protein, 10 aa, synthetic construct
NHDRGDLIGR

SEQ ID NO: 118304 - protein, 10 aa, synthetic construct
NHERGDLIGR

SEQ ID NO: 118305 - protein, 10 aa, synthetic construct
NSGRGDLIGR

SEQ ID NO: 118306 - protein, 10 aa, synthetic construct
NSARGDLIGR

SEQ ID NO: 118307 - protein, 10 aa, synthetic construct
NSVRGDLIGR

SEQ ID NO: 118308 - protein, 10 aa, synthetic construct
NSPRGDLIGR

SEQ ID NO: 118309 - protein, 10 aa, synthetic construct
NSLRGDLIGR

SEQ ID NO: 118310 - protein, 10 aa, synthetic construct
NSIRGDLIGR

SEQ ID NO: 118311 - protein, 10 aa, synthetic construct
NSMRGDLIGR

SEQ ID NO: 118312 - protein, 10 aa, synthetic construct
NSWRGDLIGR

SEQ ID NO: 118313 - protein, 10 aa, synthetic construct
NSFRGDLIGR

SEQ ID NO: 118314 - protein, 10 aa, synthetic construct
NSKRGDLIGR

SEQ ID NO: 118315 - protein, 10 aa, synthetic construct
NSRRGDLIGR

SEQ ID NO: 118316 - protein, 10 aa, synthetic construct
NSHRGDLIGR

SEQ ID NO: 118317 - protein, 10 aa, synthetic construct
NSSRGDLIGR

SEQ ID NO: 118318 - protein, 10 aa, synthetic construct
NSTRGDLIGR

SEQ ID NO: 118319 - protein, 10 aa, synthetic construct
NSYRGDLIGR

SEQ ID NO: 118320 - protein, 10 aa, synthetic construct
NSNRGDLIGR

SEQ ID NO: 118321 - protein, 10 aa, synthetic construct
NSQRGDLIGR

SEQ ID NO: 118322 - protein, 10 aa, synthetic construct
NSDRGDLIGR

SEQ ID NO: 118323 - protein, 10 aa, synthetic construct
NSERGDLIGR

SEQ ID NO: 118324 - protein, 10 aa, synthetic construct
NTGRGDLIGR

SEQ ID NO: 118325 - protein, 10 aa, synthetic construct
NTARGDLIGR

SEQ ID NO: 118326 - protein, 10 aa, synthetic construct
NTVRGDLIGR

SEQ ID NO: 118327 - protein, 10 aa, synthetic construct
NTPRGDLIGR

SEQ ID NO: 118328 - protein, 10 aa, synthetic construct
NTLRGDLIGR

SEQ ID NO: 118329 - protein, 10 aa, synthetic construct
NTIRGDLIGR

SEQ ID NO: 118330 - protein, 10 aa, synthetic construct
NTMRGDLIGR

SEQ ID NO: 118331 - protein, 10 aa, synthetic construct
NTWRGDLIGR

SEQ ID NO: 118332 - protein, 10 aa, synthetic construct
NTFRGDLIGR

SEQ ID NO: 118333 - protein, 10 aa, synthetic construct
NTKRGDLIGR

SEQ ID NO: 118334 - protein, 10 aa, synthetic construct
NTRRGDLIGR

SEQ ID NO: 118335 - protein, 10 aa, synthetic construct
NTHRGDLIGR

SEQ ID NO: 118336 - protein, 10 aa, synthetic construct
NTSRGDLIGR

SEQ ID NO: 118337 - protein, 10 aa, synthetic construct
NTTRGDLIGR

SEQ ID NO: 118338 - protein, 10 aa, synthetic construct
NTYRGDLIGR

SEQ ID NO: 118339 - protein, 10 aa, synthetic construct
NTNRGDLIGR

SEQ ID NO: 118340 - protein, 10 aa, synthetic construct
NTQRGDLIGR

SEQ ID NO: 118341 - protein, 10 aa, synthetic construct
NTDRGDLIGR

SEQ ID NO: 118342 - protein, 10 aa, synthetic construct
NTERGDLIGR

SEQ ID NO: 118343 - protein, 10 aa, synthetic construct
NYGRGDLIGR

SEQ ID NO: 118344 - protein, 10 aa, synthetic construct
NYARGDLIGR

SEQ ID NO: 118345 - protein, 10 aa, synthetic construct
NYVRGDLIGR

SEQ ID NO: 118346 - protein, 10 aa, synthetic construct
NYPRGDLIGR

SEQ ID NO: 118347 - protein, 10 aa, synthetic construct
NYLRGDLIGR

SEQ ID NO: 118348 - protein, 10 aa, synthetic construct
NYIRGDLIGR

SEQ ID NO: 118349 - protein, 10 aa, synthetic construct
NYMRGDLIGR

SEQ ID NO: 118350 - protein, 10 aa, synthetic construct
NYWRGDLIGR

SEQ ID NO: 118351 - protein, 10 aa, synthetic construct
NYFRGDLIGR

SEQ ID NO: 118352 - protein, 10 aa, synthetic construct
NYKRGDLIGR

SEQ ID NO: 118353 - protein, 10 aa, synthetic construct
NYRRGDLIGR

SEQ ID NO: 118354 - protein, 10 aa, synthetic construct
NYHRGDLIGR

SEQ ID NO: 118355 - protein, 10 aa, synthetic construct
NYSRGDLIGR

SEQ ID NO: 118356 - protein, 10 aa, synthetic construct
NYTRGDLIGR

SEQ ID NO: 118357 - protein, 10 aa, synthetic construct
NYYRGDLIGR

SEQ ID NO: 118358 - protein, 10 aa, synthetic construct
NYNRGDLIGR

SEQ ID NO: 118359 - protein, 10 aa, synthetic construct
NYQRGDLIGR

SEQ ID NO: 118360 - protein, 10 aa, synthetic construct
NYDRGDLIGR

SEQ ID NO: 118361 - protein, 10 aa, synthetic construct
NYERGDLIGR

SEQ ID NO: 118362 - protein, 10 aa, synthetic construct
NNGRGDLIGR

SEQ ID NO: 118363 - protein, 10 aa, synthetic construct
NNARGDLIGR

SEQ ID NO: 118364 - protein, 10 aa, synthetic construct
NNVRGDLIGR

SEQ ID NO: 118365 - protein, 10 aa, synthetic construct
NNPRGDLIGR

SEQ ID NO: 118366 - protein, 10 aa, synthetic construct
NNLRGDLIGR

SEQ ID NO: 118367 - protein, 10 aa, synthetic construct
NNIRGDLIGR

SEQ ID NO: 118368 - protein, 10 aa, synthetic construct
NNMRGDLIGR

SEQ ID NO: 118369 - protein, 10 aa, synthetic construct
NNWRGDLIGR

SEQ ID NO: 118370 - protein, 10 aa, synthetic construct
NNFRGDLIGR

SEQ ID NO: 118371 - protein, 10 aa, synthetic construct
NNKRGDLIGR

SEQ ID NO: 118372 - protein, 10 aa, synthetic construct
NNRRGDLIGR

SEQ ID NO: 118373 - protein, 10 aa, synthetic construct
NNHRGDLIGR

SEQ ID NO: 118374 - protein, 10 aa, synthetic construct
NNSRGDLIGR

SEQ ID NO: 118375 - protein, 10 aa, synthetic construct
NNTRGDLIGR

SEQ ID NO: 118376 - protein, 10 aa, synthetic construct
NNYRGDLIGR

SEQ ID NO: 118377 - protein, 10 aa, synthetic construct
NNNRGDLIGR

SEQ ID NO: 118378 - protein, 10 aa, synthetic construct
NNQRGDLIGR

SEQ ID NO: 118379 - protein, 10 aa, synthetic construct
NNDRGDLIGR

SEQ ID NO: 118380 - protein, 10 aa, synthetic construct
NNERGDLIGR

SEQ ID NO: 118381 - protein, 10 aa, synthetic construct
NQGRGDLIGR

SEQ ID NO: 118382 - protein, 10 aa, synthetic construct
NQARGDLIGR

SEQ ID NO: 118383 - protein, 10 aa, synthetic construct
NQVRGDLIGR

SEQ ID NO: 118384 - protein, 10 aa, synthetic construct
NQPRGDLIGR

SEQ ID NO: 118385 - protein, 10 aa, synthetic construct
NQLRGDLIGR

SEQ ID NO: 118386 - protein, 10 aa, synthetic construct
NQIRGDLIGR

SEQ ID NO: 118387 - protein, 10 aa, synthetic construct
NQMRGDLIGR

SEQ ID NO: 118388 - protein, 10 aa, synthetic construct
NQWRGDLIGR

SEQ ID NO: 118389 - protein, 10 aa, synthetic construct
NQFRGDLIGR

SEQ ID NO: 118390 - protein, 10 aa, synthetic construct
NQKRGDLIGR

SEQ ID NO: 118391 - protein, 10 aa, synthetic construct
NQRRGDLIGR

SEQ ID NO: 118392 - protein, 10 aa, synthetic construct
NQHRGDLIGR

SEQ ID NO: 118393 - protein, 10 aa, synthetic construct
NQSRGDLIGR

SEQ ID NO: 118394 - protein, 10 aa, synthetic construct
NQTRGDLIGR

SEQ ID NO: 118395 - protein, 10 aa, synthetic construct
NQYRGDLIGR

SEQ ID NO: 118396 - protein, 10 aa, synthetic construct
NQNRGDLIGR

SEQ ID NO: 118397 - protein, 10 aa, synthetic construct
NQQRGDLIGR

SEQ ID NO: 118398 - protein, 10 aa, synthetic construct
NQDRGDLIGR

SEQ ID NO: 118399 - protein, 10 aa, synthetic construct
NQERGDLIGR

SEQ ID NO: 118400 - protein, 10 aa, synthetic construct
NDGRGDLIGR

SEQ ID NO: 118401 - protein, 10 aa, synthetic construct
NDARGDLIGR

SEQ ID NO: 118402 - protein, 10 aa, synthetic construct
NDVRGDLIGR

SEQ ID NO: 118403 - protein, 10 aa, synthetic construct
NDPRGDLIGR

SEQ ID NO: 118404 - protein, 10 aa, synthetic construct
NDLRGDLIGR

SEQ ID NO: 118405 - protein, 10 aa, synthetic construct
NDIRGDLIGR

SEQ ID NO: 118406 - protein, 10 aa, synthetic construct
NDMRGDLIGR

SEQ ID NO: 118407 - protein, 10 aa, synthetic construct
NDWRGDLIGR

SEQ ID NO: 118408 - protein, 10 aa, synthetic construct
NDFRGDLIGR

SEQ ID NO: 118409 - protein, 10 aa, synthetic construct
NDKRGDLIGR

SEQ ID NO: 118410 - protein, 10 aa, synthetic construct
NDRRGDLIGR

SEQ ID NO: 118411 - protein, 10 aa, synthetic construct
NDHRGDLIGR

SEQ ID NO: 118412 - protein, 10 aa, synthetic construct
NDSRGDLIGR

SEQ ID NO: 118413 - protein, 10 aa, synthetic construct
NDTRGDLIGR

SEQ ID NO: 118414 - protein, 10 aa, synthetic construct
NDYRGDLIGR

SEQ ID NO: 118415 - protein, 10 aa, synthetic construct
NDNRGDLIGR

SEQ ID NO: 118416 - protein, 10 aa, synthetic construct
NDQRGDLIGR

SEQ ID NO: 118417 - protein, 10 aa, synthetic construct
NDDRGDLIGR

SEQ ID NO: 118418 - protein, 10 aa, synthetic construct
NDERGDLIGR

SEQ ID NO: 118419 - protein, 10 aa, synthetic construct
NEGRGDLIGR

SEQ ID NO: 118420 - protein, 10 aa, synthetic construct
NEARGDLIGR

SEQ ID NO: 118421 - protein, 10 aa, synthetic construct
NEVRGDLIGR

SEQ ID NO: 118422 - protein, 10 aa, synthetic construct
NEPRGDLIGR

SEQ ID NO: 118423 - protein, 10 aa, synthetic construct
NELRGDLIGR

SEQ ID NO: 118424 - protein, 10 aa, synthetic construct
NEIRGDLIGR

SEQ ID NO: 118425 - protein, 10 aa, synthetic construct
NEMRGDLIGR

SEQ ID NO: 118426 - protein, 10 aa, synthetic construct
NEWRGDLIGR

SEQ ID NO: 118427 - protein, 10 aa, synthetic construct
NEFRGDLIGR

SEQ ID NO: 118428 - protein, 10 aa, synthetic construct
NEKRGDLIGR

SEQ ID NO: 118429 - protein, 10 aa, synthetic construct
NERRGDLIGR

SEQ ID NO: 118430 - protein, 10 aa, synthetic construct
NEHRGDLIGR

SEQ ID NO: 118431 - protein, 10 aa, synthetic construct
NESRGDLIGR

SEQ ID NO: 118432 - protein, 10 aa, synthetic construct
NETRGDLIGR

SEQ ID NO: 118433 - protein, 10 aa, synthetic construct
NEYRGDLIGR

SEQ ID NO: 118434 - protein, 10 aa, synthetic construct
NENRGDLIGR

SEQ ID NO: 118435 - protein, 10 aa, synthetic construct
NEQRGDLIGR

SEQ ID NO: 118436 - protein, 10 aa, synthetic construct
NEDRGDLIGR

SEQ ID NO: 118437 - protein, 10 aa, synthetic construct
NEERGDLIGR

SEQ ID NO: 118438 - protein, 10 aa, synthetic construct
DGGRGDLIGR

SEQ ID NO: 118439 - protein, 10 aa, synthetic construct
DGARGDLIGR

SEQ ID NO: 118440 - protein, 10 aa, synthetic construct
DGVRGDLIGR

SEQ ID NO: 118441 - protein, 10 aa, synthetic construct
DGPRGDLIGR

SEQ ID NO: 118442 - protein, 10 aa, synthetic construct
DGLRGDLIGR

SEQ ID NO: 118443 - protein, 10 aa, synthetic construct
DGIRGDLIGR

SEQ ID NO: 118444 - protein, 10 aa, synthetic construct
DGMRGDLIGR

SEQ ID NO: 118445 - protein, 10 aa, synthetic construct
DGWRGDLIGR

SEQ ID NO: 118446 - protein, 10 aa, synthetic construct
DGFRGDLIGR

SEQ ID NO: 118447 - protein, 10 aa, synthetic construct
DGKRGDLIGR

SEQ ID NO: 118448 - protein, 10 aa, synthetic construct
DGRRGDLIGR

SEQ ID NO: 118449 - protein, 10 aa, synthetic construct
DGHRGDLIGR

SEQ ID NO: 118450 - protein, 10 aa, synthetic construct
DGSRGDLIGR

SEQ ID NO: 118451 - protein, 10 aa, synthetic construct
DGTRGDLIGR

SEQ ID NO: 118452 - protein, 10 aa, synthetic construct
DGYRGDLIGR

SEQ ID NO: 118453 - protein, 10 aa, synthetic construct
DGNRGDLIGR

SEQ ID NO: 118454 - protein, 10 aa, synthetic construct
DGQRGDLIGR

SEQ ID NO: 118455 - protein, 10 aa, synthetic construct
DGDRGDLIGR

SEQ ID NO: 118456 - protein, 10 aa, synthetic construct
DGERGDLIGR

SEQ ID NO: 118457 - protein, 10 aa, synthetic construct
DAGRGDLIGR

SEQ ID NO: 118458 - protein, 10 aa, synthetic construct
DAARGDLIGR

SEQ ID NO: 118459 - protein, 10 aa, synthetic construct
DAVRGDLIGR

SEQ ID NO: 118460 - protein, 10 aa, synthetic construct
DAPRGDLIGR

SEQ ID NO: 118461 - protein, 10 aa, synthetic construct
DALRGDLIGR

SEQ ID NO: 118462 - protein, 10 aa, synthetic construct
DAIRGDLIGR

SEQ ID NO: 118463 - protein, 10 aa, synthetic construct
DAMRGDLIGR

SEQ ID NO: 118464 - protein, 10 aa, synthetic construct
DAWRGDLIGR

SEQ ID NO: 118465 - protein, 10 aa, synthetic construct
DAFRGDLIGR

SEQ ID NO: 118466 - protein, 10 aa, synthetic construct
DAKRGDLIGR

SEQ ID NO: 118467 - protein, 10 aa, synthetic construct
DARRGDLIGR

SEQ ID NO: 118468 - protein, 10 aa, synthetic construct
DAHRGDLIGR

SEQ ID NO: 118469 - protein, 10 aa, synthetic construct
DASRGDLIGR

SEQ ID NO: 118470 - protein, 10 aa, synthetic construct
DATRGDLIGR

SEQ ID NO: 118471 - protein, 10 aa, synthetic construct
DAYRGDLIGR

SEQ ID NO: 118472 - protein, 10 aa, synthetic construct
DANRGDLIGR

SEQ ID NO: 118473 - protein, 10 aa, synthetic construct
DAQRGDLIGR

SEQ ID NO: 118474 - protein, 10 aa, synthetic construct
DADRGDLIGR

SEQ ID NO: 118475 - protein, 10 aa, synthetic construct
DAERGDLIGR

SEQ ID NO: 118476 - protein, 10 aa, synthetic construct
DVGRGDLIGR

SEQ ID NO: 118477 - protein, 10 aa, synthetic construct
DVARGDLIGR

SEQ ID NO: 118478 - protein, 10 aa, synthetic construct
DVVRGDLIGR

SEQ ID NO: 118479 - protein, 10 aa, synthetic construct
DVPRGDLIGR

SEQ ID NO: 118480 - protein, 10 aa, synthetic construct
DVLRGDLIGR

SEQ ID NO: 118481 - protein, 10 aa, synthetic construct
DVIRGDLIGR

SEQ ID NO: 118482 - protein, 10 aa, synthetic construct
DVMRGDLIGR

SEQ ID NO: 118483 - protein, 10 aa, synthetic construct
DVWRGDLIGR

SEQ ID NO: 118484 - protein, 10 aa, synthetic construct
DVFRGDLIGR

SEQ ID NO: 118485 - protein, 10 aa, synthetic construct
DVKRGDLIGR

SEQ ID NO: 118486 - protein, 10 aa, synthetic construct
DVRRGDLIGR

SEQ ID NO: 118487 - protein, 10 aa, synthetic construct
DVHRGDLIGR

SEQ ID NO: 118488 - protein, 10 aa, synthetic construct
DVSRGDLIGR

SEQ ID NO: 118489 - protein, 10 aa, synthetic construct
DVTRGDLIGR

SEQ ID NO: 118490 - protein, 10 aa, synthetic construct
DVYRGDLIGR

SEQ ID NO: 118491 - protein, 10 aa, synthetic construct
DVNRGDLIGR

SEQ ID NO: 118492 - protein, 10 aa, synthetic construct
DVQRGDLIGR

SEQ ID NO: 118493 - protein, 10 aa, synthetic construct
DVDRGDLIGR

SEQ ID NO: 118494 - protein, 10 aa, synthetic construct
DVERGDLIGR

SEQ ID NO: 118495 - protein, 10 aa, synthetic construct
DPGRGDLIGR

SEQ ID NO: 118496 - protein, 10 aa, synthetic construct
DPARGDLIGR

SEQ ID NO: 118497 - protein, 10 aa, synthetic construct
DPVRGDLIGR

SEQ ID NO: 118498 - protein, 10 aa, synthetic construct
DPPRGDLIGR

SEQ ID NO: 118499 - protein, 10 aa, synthetic construct
DPLRGDLIGR

SEQ ID NO: 118500 - protein, 10 aa, synthetic construct
DPIRGDLIGR

SEQ ID NO: 118501 - protein, 10 aa, synthetic construct
DPMRGDLIGR

SEQ ID NO: 118502 - protein, 10 aa, synthetic construct
DPWRGDLIGR

SEQ ID NO: 118503 - protein, 10 aa, synthetic construct
DPFRGDLIGR

SEQ ID NO: 118504 - protein, 10 aa, synthetic construct
DPKRGDLIGR

SEQ ID NO: 118505 - protein, 10 aa, synthetic construct
DPRRGDLIGR

SEQ ID NO: 118506 - protein, 10 aa, synthetic construct
DPHRGDLIGR

SEQ ID NO: 118507 - protein, 10 aa, synthetic construct
DPSRGDLIGR

SEQ ID NO: 118508 - protein, 10 aa, synthetic construct
DPTRGDLIGR

SEQ ID NO: 118509 - protein, 10 aa, synthetic construct
DPYRGDLIGR

SEQ ID NO: 118510 - protein, 10 aa, synthetic construct
DPNRGDLIGR

SEQ ID NO: 118511 - protein, 10 aa, synthetic construct
DPQRGDLIGR

SEQ ID NO: 118512 - protein, 10 aa, synthetic construct
DPDRGDLIGR

SEQ ID NO: 118513 - protein, 10 aa, synthetic construct
DPERGDLIGR

SEQ ID NO: 118514 - protein, 10 aa, synthetic construct
DLGRGDLIGR

SEQ ID NO: 118515 - protein, 10 aa, synthetic construct
DLARGDLIGR

SEQ ID NO: 118516 - protein, 10 aa, synthetic construct
DLVRGDLIGR

SEQ ID NO: 118517 - protein, 10 aa, synthetic construct
DLPRGDLIGR

SEQ ID NO: 118518 - protein, 10 aa, synthetic construct
DLLRGDLIGR

SEQ ID NO: 118519 - protein, 10 aa, synthetic construct
DLIRGDLIGR

SEQ ID NO: 118520 - protein, 10 aa, synthetic construct
DLMRGDLIGR

SEQ ID NO: 118521 - protein, 10 aa, synthetic construct
DLWRGDLIGR

SEQ ID NO: 118522 - protein, 10 aa, synthetic construct
DLFRGDLIGR

SEQ ID NO: 118523 - protein, 10 aa, synthetic construct
DLKRGDLIGR

SEQ ID NO: 118524 - protein, 10 aa, synthetic construct
DLRRGDLIGR

SEQ ID NO: 118525 - protein, 10 aa, synthetic construct
DLHRGDLIGR

SEQ ID NO: 118526 - protein, 10 aa, synthetic construct
DLSRGDLIGR

SEQ ID NO: 118527 - protein, 10 aa, synthetic construct
DLTRGDLIGR

SEQ ID NO: 118528 - protein, 10 aa, synthetic construct
DLYRGDLIGR

SEQ ID NO: 118529 - protein, 10 aa, synthetic construct
DLNRGDLIGR

SEQ ID NO: 118530 - protein, 10 aa, synthetic construct
DLQRGDLIGR

SEQ ID NO: 118531 - protein, 10 aa, synthetic construct
DLDRGDLIGR

SEQ ID NO: 118532 - protein, 10 aa, synthetic construct
DLERGDLIGR

SEQ ID NO: 118533 - protein, 10 aa, synthetic construct
DIGRGDLIGR

SEQ ID NO: 118534 - protein, 10 aa, synthetic construct
DIARGDLIGR

SEQ ID NO: 118535 - protein, 10 aa, synthetic construct
DIVRGDLIGR

SEQ ID NO: 118536 - protein, 10 aa, synthetic construct
DIPRGDLIGR

SEQ ID NO: 118537 - protein, 10 aa, synthetic construct
DILRGDLIGR

SEQ ID NO: 118538 - protein, 10 aa, synthetic construct
DIIRGDLIGR

SEQ ID NO: 118539 - protein, 10 aa, synthetic construct
DIMRGDLIGR

SEQ ID NO: 118540 - protein, 10 aa, synthetic construct
DIWRGDLIGR

SEQ ID NO: 118541 - protein, 10 aa, synthetic construct
DIFRGDLIGR

SEQ ID NO: 118542 - protein, 10 aa, synthetic construct
DIKRGDLIGR

SEQ ID NO: 118543 - protein, 10 aa, synthetic construct
DIRRGDLIGR

SEQ ID NO: 118544 - protein, 10 aa, synthetic construct
DIHRGDLIGR

SEQ ID NO: 118545 - protein, 10 aa, synthetic construct
DISRGDLIGR

SEQ ID NO: 118546 - protein, 10 aa, synthetic construct
DITRGDLIGR

SEQ ID NO: 118547 - protein, 10 aa, synthetic construct
DIYRGDLIGR

SEQ ID NO: 118548 - protein, 10 aa, synthetic construct
DINRGDLIGR

SEQ ID NO: 118549 - protein, 10 aa, synthetic construct
DIQRGDLIGR

SEQ ID NO: 118550 - protein, 10 aa, synthetic construct
DIDRGDLIGR

SEQ ID NO: 118551 - protein, 10 aa, synthetic construct
DIERGDLIGR

SEQ ID NO: 118552 - protein, 10 aa, synthetic construct
DMGRGDLIGR

SEQ ID NO: 118553 - protein, 10 aa, synthetic construct
DMARGDLIGR

SEQ ID NO: 118554 - protein, 10 aa, synthetic construct
DMVRGDLIGR

SEQ ID NO: 118555 - protein, 10 aa, synthetic construct
DMPRGDLIGR

SEQ ID NO: 118556 - protein, 10 aa, synthetic construct
DMLRGDLIGR

SEQ ID NO: 118557 - protein, 10 aa, synthetic construct
DMIRGDLIGR

SEQ ID NO: 118558 - protein, 10 aa, synthetic construct
DMMRGDLIGR

SEQ ID NO: 118559 - protein, 10 aa, synthetic construct
DMWRGDLIGR

SEQ ID NO: 118560 - protein, 10 aa, synthetic construct
DMFRGDLIGR

SEQ ID NO: 118561 - protein, 10 aa, synthetic construct
DMKRGDLIGR

SEQ ID NO: 118562 - protein, 10 aa, synthetic construct
DMRRGDLIGR

SEQ ID NO: 118563 - protein, 10 aa, synthetic construct
DMHRGDLIGR

SEQ ID NO: 118564 - protein, 10 aa, synthetic construct
DMSRGDLIGR

SEQ ID NO: 118565 - protein, 10 aa, synthetic construct
DMTRGDLIGR

SEQ ID NO: 118566 - protein, 10 aa, synthetic construct
DMYRGDLIGR

SEQ ID NO: 118567 - protein, 10 aa, synthetic construct
DMNRGDLIGR

SEQ ID NO: 118568 - protein, 10 aa, synthetic construct
DMQRGDLIGR

SEQ ID NO: 118569 - protein, 10 aa, synthetic construct
DMDRGDLIGR

SEQ ID NO: 118570 - protein, 10 aa, synthetic construct
DMERGDLIGR

SEQ ID NO: 118571 - protein, 10 aa, synthetic construct
DWGRGDLIGR

SEQ ID NO: 118572 - protein, 10 aa, synthetic construct
DWARGDLIGR

SEQ ID NO: 118573 - protein, 10 aa, synthetic construct
DWVRGDLIGR

SEQ ID NO: 118574 - protein, 10 aa, synthetic construct
DWPRGDLIGR

SEQ ID NO: 118575 - protein, 10 aa, synthetic construct
DWLRGDLIGR

SEQ ID NO: 118576 - protein, 10 aa, synthetic construct
DWIRGDLIGR

SEQ ID NO: 118577 - protein, 10 aa, synthetic construct
DWMRGDLIGR

SEQ ID NO: 118578 - protein, 10 aa, synthetic construct
DWWRGDLIGR

SEQ ID NO: 118579 - protein, 10 aa, synthetic construct
DWFRGDLIGR

SEQ ID NO: 118580 - protein, 10 aa, synthetic construct
DWKRGDLIGR

SEQ ID NO: 118581 - protein, 10 aa, synthetic construct
DWRRGDLIGR

SEQ ID NO: 118582 - protein, 10 aa, synthetic construct
DWHRGDLIGR

SEQ ID NO: 118583 - protein, 10 aa, synthetic construct
DWSRGDLIGR

SEQ ID NO: 118584 - protein, 10 aa, synthetic construct
DWTRGDLIGR

SEQ ID NO: 118585 - protein, 10 aa, synthetic construct
DWYRGDLIGR

SEQ ID NO: 118586 - protein, 10 aa, synthetic construct
DWNRGDLIGR

SEQ ID NO: 118587 - protein, 10 aa, synthetic construct
DWQRGDLIGR

SEQ ID NO: 118588 - protein, 10 aa, synthetic construct
DWDRGDLIGR

SEQ ID NO: 118589 - protein, 10 aa, synthetic construct
DWERGDLIGR

SEQ ID NO: 118590 - protein, 10 aa, synthetic construct
DFGRGDLIGR

SEQ ID NO: 118591 - protein, 10 aa, synthetic construct
DFARGDLIGR

SEQ ID NO: 118592 - protein, 10 aa, synthetic construct
DFVRGDLIGR

SEQ ID NO: 118593 - protein, 10 aa, synthetic construct
DFPRGDLIGR

SEQ ID NO: 118594 - protein, 10 aa, synthetic construct
DFLRGDLIGR

SEQ ID NO: 118595 - protein, 10 aa, synthetic construct
DFIRGDLIGR

SEQ ID NO: 118596 - protein, 10 aa, synthetic construct
DFMRGDLIGR

SEQ ID NO: 118597 - protein, 10 aa, synthetic construct
DFWRGDLIGR

SEQ ID NO: 118598 - protein, 10 aa, synthetic construct
DFFRGDLIGR

SEQ ID NO: 118599 - protein, 10 aa, synthetic construct
DFKRGDLIGR

SEQ ID NO: 118600 - protein, 10 aa, synthetic construct
DFRRGDLIGR

SEQ ID NO: 118601 - protein, 10 aa, synthetic construct
DFHRGDLIGR

SEQ ID NO: 118602 - protein, 10 aa, synthetic construct
DFSRGDLIGR

SEQ ID NO: 118603 - protein, 10 aa, synthetic construct
DFTRGDLIGR

SEQ ID NO: 118604 - protein, 10 aa, synthetic construct
DFYRGDLIGR

SEQ ID NO: 118605 - protein, 10 aa, synthetic construct
DFNRGDLIGR

SEQ ID NO: 118606 - protein, 10 aa, synthetic construct
DFQRGDLIGR

SEQ ID NO: 118607 - protein, 10 aa, synthetic construct
DFDRGDLIGR

SEQ ID NO: 118608 - protein, 10 aa, synthetic construct
DFERGDLIGR

SEQ ID NO: 118609 - protein, 10 aa, synthetic construct
DKGRGDLIGR

SEQ ID NO: 118610 - protein, 10 aa, synthetic construct
DKARGDLIGR

SEQ ID NO: 118611 - protein, 10 aa, synthetic construct
DKVRGDLIGR

SEQ ID NO: 118612 - protein, 10 aa, synthetic construct
DKPRGDLIGR

SEQ ID NO: 118613 - protein, 10 aa, synthetic construct
DKLRGDLIGR

SEQ ID NO: 118614 - protein, 10 aa, synthetic construct
DKIRGDLIGR

SEQ ID NO: 118615 - protein, 10 aa, synthetic construct
DKMRGDLIGR

SEQ ID NO: 118616 - protein, 10 aa, synthetic construct
DKWRGDLIGR

SEQ ID NO: 118617 - protein, 10 aa, synthetic construct
DKFRGDLIGR

SEQ ID NO: 118618 - protein, 10 aa, synthetic construct
DKKRGDLIGR

SEQ ID NO: 118619 - protein, 10 aa, synthetic construct
DKRRGDLIGR

SEQ ID NO: 118620 - protein, 10 aa, synthetic construct
DKHRGDLIGR

SEQ ID NO: 118621 - protein, 10 aa, synthetic construct
DKSRGDLIGR

SEQ ID NO: 118622 - protein, 10 aa, synthetic construct
DKTRGDLIGR

SEQ ID NO: 118623 - protein, 10 aa, synthetic construct
DKYRGDLIGR

SEQ ID NO: 118624 - protein, 10 aa, synthetic construct
DKNRGDLIGR

SEQ ID NO: 118625 - protein, 10 aa, synthetic construct
DKQRGDLIGR

SEQ ID NO: 118626 - protein, 10 aa, synthetic construct
DKDRGDLIGR

SEQ ID NO: 118627 - protein, 10 aa, synthetic construct
DKERGDLIGR

SEQ ID NO: 118628 - protein, 10 aa, synthetic construct
DRGRGDLIGR

SEQ ID NO: 118629 - protein, 10 aa, synthetic construct
DRARGDLIGR

SEQ ID NO: 118630 - protein, 10 aa, synthetic construct
DRVRGDLIGR

SEQ ID NO: 118631 - protein, 10 aa, synthetic construct
DRPRGDLIGR

SEQ ID NO: 118632 - protein, 10 aa, synthetic construct
DRLRGDLIGR

SEQ ID NO: 118633 - protein, 10 aa, synthetic construct
DRIRGDLIGR

SEQ ID NO: 118634 - protein, 10 aa, synthetic construct
DRMRGDLIGR

SEQ ID NO: 118635 - protein, 10 aa, synthetic construct
DRWRGDLIGR

SEQ ID NO: 118636 - protein, 10 aa, synthetic construct
DRFRGDLIGR

SEQ ID NO: 118637 - protein, 10 aa, synthetic construct
DRKRGDLIGR

SEQ ID NO: 118638 - protein, 10 aa, synthetic construct
DRRRGDLIGR

SEQ ID NO: 118639 - protein, 10 aa, synthetic construct
DRHRGDLIGR

SEQ ID NO: 118640 - protein, 10 aa, synthetic construct
DRSRGDLIGR

SEQ ID NO: 118641 - protein, 10 aa, synthetic construct
DRTRGDLIGR

SEQ ID NO: 118642 - protein, 10 aa, synthetic construct
DRYRGDLIGR

SEQ ID NO: 118643 - protein, 10 aa, synthetic construct
DRNRGDLIGR

SEQ ID NO: 118644 - protein, 10 aa, synthetic construct
DRQRGDLIGR

SEQ ID NO: 118645 - protein, 10 aa, synthetic construct
DRDRGDLIGR

SEQ ID NO: 118646 - protein, 10 aa, synthetic construct
DRERGDLIGR

SEQ ID NO: 118647 - protein, 10 aa, synthetic construct
DHGRGDLIGR

SEQ ID NO: 118648 - protein, 10 aa, synthetic construct
DHARGDLIGR

SEQ ID NO: 118649 - protein, 10 aa, synthetic construct
DHVRGDLIGR

SEQ ID NO: 118650 - protein, 10 aa, synthetic construct
DHPRGDLIGR

SEQ ID NO: 118651 - protein, 10 aa, synthetic construct
DHLRGDLIGR

SEQ ID NO: 118652 - protein, 10 aa, synthetic construct
DHIRGDLIGR

SEQ ID NO: 118653 - protein, 10 aa, synthetic construct
DHMRGDLIGR

SEQ ID NO: 118654 - protein, 10 aa, synthetic construct
DHWRGDLIGR

SEQ ID NO: 118655 - protein, 10 aa, synthetic construct
DHFRGDLIGR

SEQ ID NO: 118656 - protein, 10 aa, synthetic construct
DHKRGDLIGR

SEQ ID NO: 118657 - protein, 10 aa, synthetic construct
DHRRGDLIGR

SEQ ID NO: 118658 - protein, 10 aa, synthetic construct
DHHRGDLIGR

SEQ ID NO: 118659 - protein, 10 aa, synthetic construct
DHSRGDLIGR

SEQ ID NO: 118660 - protein, 10 aa, synthetic construct
DHTRGDLIGR

SEQ ID NO: 118661 - protein, 10 aa, synthetic construct
DHYRGDLIGR

SEQ ID NO: 118662 - protein, 10 aa, synthetic construct
DHNRGDLIGR

SEQ ID NO: 118663 - protein, 10 aa, synthetic construct
DHQRGDLIGR

SEQ ID NO: 118664 - protein, 10 aa, synthetic construct
DHDRGDLIGR

SEQ ID NO: 118665 - protein, 10 aa, synthetic construct
DHERGDLIGR

SEQ ID NO: 118666 - protein, 10 aa, synthetic construct
DSGRGDLIGR

SEQ ID NO: 118667 - protein, 10 aa, synthetic construct
DSARGDLIGR

SEQ ID NO: 118668 - protein, 10 aa, synthetic construct
DSVRGDLIGR

SEQ ID NO: 118669 - protein, 10 aa, synthetic construct
DSPRGDLIGR

SEQ ID NO: 118670 - protein, 10 aa, synthetic construct
DSLRGDLIGR

SEQ ID NO: 118671 - protein, 10 aa, synthetic construct
DSIRGDLIGR

SEQ ID NO: 118672 - protein, 10 aa, synthetic construct
DSMRGDLIGR

SEQ ID NO: 118673 - protein, 10 aa, synthetic construct
DSWRGDLIGR

SEQ ID NO: 118674 - protein, 10 aa, synthetic construct
DSFRGDLIGR

SEQ ID NO: 118675 - protein, 10 aa, synthetic construct
DSKRGDLIGR

SEQ ID NO: 118676 - protein, 10 aa, synthetic construct
DSRRGDLIGR

SEQ ID NO: 118677 - protein, 10 aa, synthetic construct
DSHRGDLIGR

SEQ ID NO: 118678 - protein, 10 aa, synthetic construct
DSSRGDLIGR

SEQ ID NO: 118679 - protein, 10 aa, synthetic construct
DSTRGDLIGR

SEQ ID NO: 118680 - protein, 10 aa, synthetic construct
DSYRGDLIGR

SEQ ID NO: 118681 - protein, 10 aa, synthetic construct
DSNRGDLIGR

SEQ ID NO: 118682 - protein, 10 aa, synthetic construct
DSQRGDLIGR

SEQ ID NO: 118683 - protein, 10 aa, synthetic construct
DSDRGDLIGR

SEQ ID NO: 118684 - protein, 10 aa, synthetic construct
DSERGDLIGR

SEQ ID NO: 118685 - protein, 10 aa, synthetic construct
DTGRGDLIGR

SEQ ID NO: 118686 - protein, 10 aa, synthetic construct
DTARGDLIGR

SEQ ID NO: 118687 - protein, 10 aa, synthetic construct
DTVRGDLIGR

SEQ ID NO: 118688 - protein, 10 aa, synthetic construct
DTPRGDLIGR

SEQ ID NO: 118689 - protein, 10 aa, synthetic construct
DTLRGDLIGR

SEQ ID NO: 118690 - protein, 10 aa, synthetic construct
DTIRGDLIGR

SEQ ID NO: 118691 - protein, 10 aa, synthetic construct
DTMRGDLIGR

SEQ ID NO: 118692 - protein, 10 aa, synthetic construct
DTWRGDLIGR

SEQ ID NO: 118693 - protein, 10 aa, synthetic construct
DTFRGDLIGR

SEQ ID NO: 118694 - protein, 10 aa, synthetic construct
DTKRGDLIGR

SEQ ID NO: 118695 - protein, 10 aa, synthetic construct
DTRRGDLIGR

SEQ ID NO: 118696 - protein, 10 aa, synthetic construct
DTHRGDLIGR

SEQ ID NO: 118697 - protein, 10 aa, synthetic construct
DTSRGDLIGR

SEQ ID NO: 118698 - protein, 10 aa, synthetic construct
DTTRGDLIGR

SEQ ID NO: 118699 - protein, 10 aa, synthetic construct
DTYRGDLIGR

SEQ ID NO: 118700 - protein, 10 aa, synthetic construct
DTNRGDLIGR

SEQ ID NO: 118701 - protein, 10 aa, synthetic construct
DTQRGDLIGR

SEQ ID NO: 118702 - protein, 10 aa, synthetic construct
DTDRGDLIGR

SEQ ID NO: 118703 - protein, 10 aa, synthetic construct
DTERGDLIGR

SEQ ID NO: 118704 - protein, 10 aa, synthetic construct
DYGRGDLIGR

SEQ ID NO: 118705 - protein, 10 aa, synthetic construct
DYARGDLIGR

SEQ ID NO: 118706 - protein, 10 aa, synthetic construct
DYVRGDLIGR

SEQ ID NO: 118707 - protein, 10 aa, synthetic construct
DYPRGDLIGR

SEQ ID NO: 118708 - protein, 10 aa, synthetic construct
DYLRGDLIGR

SEQ ID NO: 118709 - protein, 10 aa, synthetic construct
DYIRGDLIGR

SEQ ID NO: 118710 - protein, 10 aa, synthetic construct
DYMRGDLIGR

SEQ ID NO: 118711 - protein, 10 aa, synthetic construct
DYWRGDLIGR

SEQ ID NO: 118712 - protein, 10 aa, synthetic construct
DYFRGDLIGR

SEQ ID NO: 118713 - protein, 10 aa, synthetic construct
DYKRGDLIGR

SEQ ID NO: 118714 - protein, 10 aa, synthetic construct
DYRRGDLIGR

SEQ ID NO: 118715 - protein, 10 aa, synthetic construct
DYHRGDLIGR

SEQ ID NO: 118716 - protein, 10 aa, synthetic construct
DYSRGDLIGR

SEQ ID NO: 118717 - protein, 10 aa, synthetic construct
DYTRGDLIGR

SEQ ID NO: 118718 - protein, 10 aa, synthetic construct
DYYRGDLIGR

SEQ ID NO: 118719 - protein, 10 aa, synthetic construct
DYNRGDLIGR

SEQ ID NO: 118720 - protein, 10 aa, synthetic construct
DYQRGDLIGR

SEQ ID NO: 118721 - protein, 10 aa, synthetic construct
DYDRGDLIGR

SEQ ID NO: 118722 - protein, 10 aa, synthetic construct
DYERGDLIGR

SEQ ID NO: 118723 - protein, 10 aa, synthetic construct
DNGRGDLIGR

SEQ ID NO: 118724 - protein, 10 aa, synthetic construct
DNARGDLIGR

SEQ ID NO: 118725 - protein, 10 aa, synthetic construct
DNVRGDLIGR

SEQ ID NO: 118726 - protein, 10 aa, synthetic construct
DNPRGDLIGR

SEQ ID NO: 118727 - protein, 10 aa, synthetic construct
DNLRGDLIGR

SEQ ID NO: 118728 - protein, 10 aa, synthetic construct
DNIRGDLIGR

SEQ ID NO: 118729 - protein, 10 aa, synthetic construct
DNMRGDLIGR

SEQ ID NO: 118730 - protein, 10 aa, synthetic construct
DNWRGDLIGR

SEQ ID NO: 118731 - protein, 10 aa, synthetic construct
DNFRGDLIGR

SEQ ID NO: 118732 - protein, 10 aa, synthetic construct
DNKRGDLIGR

SEQ ID NO: 118733 - protein, 10 aa, synthetic construct
DNRRGDLIGR

SEQ ID NO: 118734 - protein, 10 aa, synthetic construct
DNHRGDLIGR

SEQ ID NO: 118735 - protein, 10 aa, synthetic construct
DNSRGDLIGR

SEQ ID NO: 118736 - protein, 10 aa, synthetic construct
DNTRGDLIGR

SEQ ID NO: 118737 - protein, 10 aa, synthetic construct
DNYRGDLIGR

SEQ ID NO: 118738 - protein, 10 aa, synthetic construct
DNNRGDLIGR

SEQ ID NO: 118739 - protein, 10 aa, synthetic construct
DNQRGDLIGR

SEQ ID NO: 118740 - protein, 10 aa, synthetic construct
DNDRGDLIGR

SEQ ID NO: 118741 - protein, 10 aa, synthetic construct
DNERGDLIGR

SEQ ID NO: 118742 - protein, 10 aa, synthetic construct
DQGRGDLIGR

SEQ ID NO: 118743 - protein, 10 aa, synthetic construct
DQARGDLIGR

SEQ ID NO: 118744 - protein, 10 aa, synthetic construct
DQVRGDLIGR

SEQ ID NO: 118745 - protein, 10 aa, synthetic construct
DQPRGDLIGR

SEQ ID NO: 118746 - protein, 10 aa, synthetic construct
DQLRGDLIGR

SEQ ID NO: 118747 - protein, 10 aa, synthetic construct
DQIRGDLIGR

SEQ ID NO: 118748 - protein, 10 aa, synthetic construct
DQMRGDLIGR

SEQ ID NO: 118749 - protein, 10 aa, synthetic construct
DQWRGDLIGR

SEQ ID NO: 118750 - protein, 10 aa, synthetic construct
DQFRGDLIGR

SEQ ID NO: 118751 - protein, 10 aa, synthetic construct
DQKRGDLIGR

SEQ ID NO: 118752 - protein, 10 aa, synthetic construct
DQRRGDLIGR

SEQ ID NO: 118753 - protein, 10 aa, synthetic construct
DQHRGDLIGR

SEQ ID NO: 118754 - protein, 10 aa, synthetic construct
DQSRGDLIGR

SEQ ID NO: 118755 - protein, 10 aa, synthetic construct
DQTRGDLIGR

SEQ ID NO: 118756 - protein, 10 aa, synthetic construct
DQYRGDLIGR

SEQ ID NO: 118757 - protein, 10 aa, synthetic construct
DQNRGDLIGR

SEQ ID NO: 118758 - protein, 10 aa, synthetic construct
DQQRGDLIGR

SEQ ID NO: 118759 - protein, 10 aa, synthetic construct
DQDRGDLIGR

SEQ ID NO: 118760 - protein, 10 aa, synthetic construct
DQERGDLIGR

SEQ ID NO: 118761 - protein, 10 aa, synthetic construct
DDGRGDLIGR

SEQ ID NO: 118762 - protein, 10 aa, synthetic construct
DDARGDLIGR

SEQ ID NO: 118763 - protein, 10 aa, synthetic construct
DDVRGDLIGR

SEQ ID NO: 118764 - protein, 10 aa, synthetic construct
DDPRGDLIGR

SEQ ID NO: 118765 - protein, 10 aa, synthetic construct
DDLRGDLIGR

SEQ ID NO: 118766 - protein, 10 aa, synthetic construct
DDIRGDLIGR

SEQ ID NO: 118767 - protein, 10 aa, synthetic construct
DDMRGDLIGR

SEQ ID NO: 118768 - protein, 10 aa, synthetic construct
DDWRGDLIGR

SEQ ID NO: 118769 - protein, 10 aa, synthetic construct
DDFRGDLIGR

SEQ ID NO: 118770 - protein, 10 aa, synthetic construct
DDKRGDLIGR

SEQ ID NO: 118771 - protein, 10 aa, synthetic construct
DDRRGDLIGR

SEQ ID NO: 118772 - protein, 10 aa, synthetic construct
DDHRGDLIGR

SEQ ID NO: 118773 - protein, 10 aa, synthetic construct
DDSRGDLIGR

SEQ ID NO: 118774 - protein, 10 aa, synthetic construct
DDTRGDLIGR

SEQ ID NO: 118775 - protein, 10 aa, synthetic construct
DDYRGDLIGR

SEQ ID NO: 118776 - protein, 10 aa, synthetic construct
DDNRGDLIGR

SEQ ID NO: 118777 - protein, 10 aa, synthetic construct
DDQRGDLIGR

SEQ ID NO: 118778 - protein, 10 aa, synthetic construct
DDDRGDLIGR

SEQ ID NO: 118779 - protein, 10 aa, synthetic construct
DDERGDLIGR

SEQ ID NO: 118780 - protein, 10 aa, synthetic construct
DEGRGDLIGR

SEQ ID NO: 118781 - protein, 10 aa, synthetic construct
DEARGDLIGR

SEQ ID NO: 118782 - protein, 10 aa, synthetic construct
DEVRGDLIGR

SEQ ID NO: 118783 - protein, 10 aa, synthetic construct
DEPRGDLIGR

SEQ ID NO: 118784 - protein, 10 aa, synthetic construct
DELRGDLIGR

SEQ ID NO: 118785 - protein, 10 aa, synthetic construct
DEIRGDLIGR

SEQ ID NO: 118786 - protein, 10 aa, synthetic construct
DEMRGDLIGR

SEQ ID NO: 118787 - protein, 10 aa, synthetic construct
DEWRGDLIGR

SEQ ID NO: 118788 - protein, 10 aa, synthetic construct
DEFRGDLIGR

SEQ ID NO: 118789 - protein, 10 aa, synthetic construct
DEKRGDLIGR

SEQ ID NO: 118790 - protein, 10 aa, synthetic construct
DERRGDLIGR

SEQ ID NO: 118791 - protein, 10 aa, synthetic construct
DEHRGDLIGR

SEQ ID NO: 118792 - protein, 10 aa, synthetic construct
DESRGDLIGR

SEQ ID NO: 118793 - protein, 10 aa, synthetic construct
DETRGDLIGR

SEQ ID NO: 118794 - protein, 10 aa, synthetic construct
DEYRGDLIGR

SEQ ID NO: 118795 - protein, 10 aa, synthetic construct
DENRGDLIGR

SEQ ID NO: 118796 - protein, 10 aa, synthetic construct
DEQRGDLIGR

SEQ ID NO: 118797 - protein, 10 aa, synthetic construct
DEDRGDLIGR

SEQ ID NO: 118798 - protein, 10 aa, synthetic construct
DEERGDLIGR

SEQ ID NO: 118799 - protein, 10 aa, synthetic construct
QGGRGDLIGR

SEQ ID NO: 118800 - protein, 10 aa, synthetic construct
QGARGDLIGR

SEQ ID NO: 118801 - protein, 10 aa, synthetic construct
QGVRGDLIGR

SEQ ID NO: 118802 - protein, 10 aa, synthetic construct
QGPRGDLIGR

SEQ ID NO: 118803 - protein, 10 aa, synthetic construct
QGLRGDLIGR

SEQ ID NO: 118804 - protein, 10 aa, synthetic construct
QGIRGDLIGR

SEQ ID NO: 118805 - protein, 10 aa, synthetic construct
QGMRGDLIGR

SEQ ID NO: 118806 - protein, 10 aa, synthetic construct
QGWRGDLIGR

SEQ ID NO: 118807 - protein, 10 aa, synthetic construct
QGFRGDLIGR

SEQ ID NO: 118808 - protein, 10 aa, synthetic construct
QGKRGDLIGR

SEQ ID NO: 118809 - protein, 10 aa, synthetic construct
QGRRGDLIGR

SEQ ID NO: 118810 - protein, 10 aa, synthetic construct
QGHRGDLIGR

SEQ ID NO: 118811 - protein, 10 aa, synthetic construct
QGSRGDLIGR

SEQ ID NO: 118812 - protein, 10 aa, synthetic construct
QGTRGDLIGR

SEQ ID NO: 118813 - protein, 10 aa, synthetic construct
QGYRGDLIGR

SEQ ID NO: 118814 - protein, 10 aa, synthetic construct
QGNRGDLIGR

SEQ ID NO: 118815 - protein, 10 aa, synthetic construct
QGQRGDLIGR

SEQ ID NO: 118816 - protein, 10 aa, synthetic construct
QGDRGDLIGR

SEQ ID NO: 118817 - protein, 10 aa, synthetic construct
QGERGDLIGR

SEQ ID NO: 118818 - protein, 10 aa, synthetic construct
QAGRGDLIGR

SEQ ID NO: 118819 - protein, 10 aa, synthetic construct
QAARGDLIGR

SEQ ID NO: 118820 - protein, 10 aa, synthetic construct
QAVRGDLIGR

SEQ ID NO: 118821 - protein, 10 aa, synthetic construct
QAPRGDLIGR

SEQ ID NO: 118822 - protein, 10 aa, synthetic construct
QALRGDLIGR

SEQ ID NO: 118823 - protein, 10 aa, synthetic construct
QAIRGDLIGR

SEQ ID NO: 118824 - protein, 10 aa, synthetic construct
QAMRGDLIGR

SEQ ID NO: 118825 - protein, 10 aa, synthetic construct
QAWRGDLIGR

SEQ ID NO: 118826 - protein, 10 aa, synthetic construct
QAFRGDLIGR

SEQ ID NO: 118827 - protein, 10 aa, synthetic construct
QAKRGDLIGR

SEQ ID NO: 118828 - protein, 10 aa, synthetic construct
QARRGDLIGR

SEQ ID NO: 118829 - protein, 10 aa, synthetic construct
QAHRGDLIGR

SEQ ID NO: 118830 - protein, 10 aa, synthetic construct
QASRGDLIGR

SEQ ID NO: 118831 - protein, 10 aa, synthetic construct
QATRGDLIGR

SEQ ID NO: 118832 - protein, 10 aa, synthetic construct
QAYRGDLIGR

SEQ ID NO: 118833 - protein, 10 aa, synthetic construct
QANRGDLIGR

SEQ ID NO: 118834 - protein, 10 aa, synthetic construct
QAQRGDLIGR

SEQ ID NO: 118835 - protein, 10 aa, synthetic construct
QADRGDLIGR

SEQ ID NO: 118836 - protein, 10 aa, synthetic construct
QAERGDLIGR

SEQ ID NO: 118837 - protein, 10 aa, synthetic construct
QVGRGDLIGR

SEQ ID NO: 118838 - protein, 10 aa, synthetic construct
QVARGDLIGR

SEQ ID NO: 118839 - protein, 10 aa, synthetic construct
QVVRGDLIGR

SEQ ID NO: 118840 - protein, 10 aa, synthetic construct
QVPRGDLIGR

SEQ ID NO: 118841 - protein, 10 aa, synthetic construct
QVLRGDLIGR

SEQ ID NO: 118842 - protein, 10 aa, synthetic construct
QVIRGDLIGR

SEQ ID NO: 118843 - protein, 10 aa, synthetic construct
QVMRGDLIGR

SEQ ID NO: 118844 - protein, 10 aa, synthetic construct
QVWRGDLIGR

SEQ ID NO: 118845 - protein, 10 aa, synthetic construct
QVFRGDLIGR

SEQ ID NO: 118846 - protein, 10 aa, synthetic construct
QVKRGDLIGR

SEQ ID NO: 118847 - protein, 10 aa, synthetic construct
QVRRGDLIGR

SEQ ID NO: 118848 - protein, 10 aa, synthetic construct
QVHRGDLIGR

SEQ ID NO: 118849 - protein, 10 aa, synthetic construct
QVSRGDLIGR

SEQ ID NO: 118850 - protein, 10 aa, synthetic construct
QVTRGDLIGR

SEQ ID NO: 118851 - protein, 10 aa, synthetic construct
QVYRGDLIGR

SEQ ID NO: 118852 - protein, 10 aa, synthetic construct
QVNRGDLIGR

SEQ ID NO: 118853 - protein, 10 aa, synthetic construct
QVQRGDLIGR

SEQ ID NO: 118854 - protein, 10 aa, synthetic construct
QVDRGDLIGR

SEQ ID NO: 118855 - protein, 10 aa, synthetic construct
QVERGDLIGR

SEQ ID NO: 118856 - protein, 10 aa, synthetic construct
QPGRGDLIGR

SEQ ID NO: 118857 - protein, 10 aa, synthetic construct
QPARGDLIGR

SEQ ID NO: 118858 - protein, 10 aa, synthetic construct
QPVRGDLIGR

SEQ ID NO: 118859 - protein, 10 aa, synthetic construct
QPPRGDLIGR

SEQ ID NO: 118860 - protein, 10 aa, synthetic construct
QPLRGDLIGR

SEQ ID NO: 118861 - protein, 10 aa, synthetic construct
QPIRGDLIGR

SEQ ID NO: 118862 - protein, 10 aa, synthetic construct
QPMRGDLIGR

SEQ ID NO: 118863 - protein, 10 aa, synthetic construct
QPWRGDLIGR

SEQ ID NO: 118864 - protein, 10 aa, synthetic construct
QPFRGDLIGR

SEQ ID NO: 118865 - protein, 10 aa, synthetic construct
QPKRGDLIGR

SEQ ID NO: 118866 - protein, 10 aa, synthetic construct
QPRRGDLIGR

SEQ ID NO: 118867 - protein, 10 aa, synthetic construct
QPHRGDLIGR

SEQ ID NO: 118868 - protein, 10 aa, synthetic construct
QPSRGDLIGR

SEQ ID NO: 118869 - protein, 10 aa, synthetic construct
QPTRGDLIGR

SEQ ID NO: 118870 - protein, 10 aa, synthetic construct
QPYRGDLIGR

SEQ ID NO: 118871 - protein, 10 aa, synthetic construct
QPNRGDLIGR

SEQ ID NO: 118872 - protein, 10 aa, synthetic construct
QPQRGDLIGR

SEQ ID NO: 118873 - protein, 10 aa, synthetic construct
QPDRGDLIGR

SEQ ID NO: 118874 - protein, 10 aa, synthetic construct
QPERGDLIGR

SEQ ID NO: 118875 - protein, 10 aa, synthetic construct
QLGRGDLIGR

SEQ ID NO: 118876 - protein, 10 aa, synthetic construct
QLARGDLIGR

SEQ ID NO: 118877 - protein, 10 aa, synthetic construct
QLVRGDLIGR

SEQ ID NO: 118878 - protein, 10 aa, synthetic construct
QLPRGDLIGR

SEQ ID NO: 118879 - protein, 10 aa, synthetic construct
QLLRGDLIGR

SEQ ID NO: 118880 - protein, 10 aa, synthetic construct
QLIRGDLIGR

SEQ ID NO: 118881 - protein, 10 aa, synthetic construct
QLMRGDLIGR

SEQ ID NO: 118882 - protein, 10 aa, synthetic construct
QLWRGDLIGR

SEQ ID NO: 118883 - protein, 10 aa, synthetic construct
QLFRGDLIGR

SEQ ID NO: 118884 - protein, 10 aa, synthetic construct
QLKRGDLIGR

SEQ ID NO: 118885 - protein, 10 aa, synthetic construct
QLRRGDLIGR

SEQ ID NO: 118886 - protein, 10 aa, synthetic construct
QLHRGDLIGR

SEQ ID NO: 118887 - protein, 10 aa, synthetic construct
QLSRGDLIGR

SEQ ID NO: 118888 - protein, 10 aa, synthetic construct
QLTRGDLIGR

SEQ ID NO: 118889 - protein, 10 aa, synthetic construct
QLYRGDLIGR

SEQ ID NO: 118890 - protein, 10 aa, synthetic construct
QLNRGDLIGR

SEQ ID NO: 118891 - protein, 10 aa, synthetic construct
QLQRGDLIGR

SEQ ID NO: 118892 - protein, 10 aa, synthetic construct
QLDRGDLIGR

SEQ ID NO: 118893 - protein, 10 aa, synthetic construct
QLERGDLIGR

SEQ ID NO: 118894 - protein, 10 aa, synthetic construct
QIGRGDLIGR

SEQ ID NO: 118895 - protein, 10 aa, synthetic construct
QIARGDLIGR

SEQ ID NO: 118896 - protein, 10 aa, synthetic construct
QIVRGDLIGR

SEQ ID NO: 118897 - protein, 10 aa, synthetic construct
QIPRGDLIGR

SEQ ID NO: 118898 - protein, 10 aa, synthetic construct
QILRGDLIGR

SEQ ID NO: 118899 - protein, 10 aa, synthetic construct
QIIRGDLIGR

SEQ ID NO: 118900 - protein, 10 aa, synthetic construct
QIMRGDLIGR

SEQ ID NO: 118901 - protein, 10 aa, synthetic construct
QIWRGDLIGR

SEQ ID NO: 118902 - protein, 10 aa, synthetic construct
QIFRGDLIGR

SEQ ID NO: 118903 - protein, 10 aa, synthetic construct
QIKRGDLIGR

SEQ ID NO: 118904 - protein, 10 aa, synthetic construct
QIRRGDLIGR

SEQ ID NO: 118905 - protein, 10 aa, synthetic construct
QIHRGDLIGR

SEQ ID NO: 118906 - protein, 10 aa, synthetic construct
QISRGDLIGR

SEQ ID NO: 118907 - protein, 10 aa, synthetic construct
QITRGDLIGR

SEQ ID NO: 118908 - protein, 10 aa, synthetic construct
QIYRGDLIGR

SEQ ID NO: 118909 - protein, 10 aa, synthetic construct
QINRGDLIGR

SEQ ID NO: 118910 - protein, 10 aa, synthetic construct
QIQRGDLIGR

SEQ ID NO: 118911 - protein, 10 aa, synthetic construct
QIDRGDLIGR

SEQ ID NO: 118912 - protein, 10 aa, synthetic construct
QIERGDLIGR

SEQ ID NO: 118913 - protein, 10 aa, synthetic construct
QMGRGDLIGR

SEQ ID NO: 118914 - protein, 10 aa, synthetic construct
QMARGDLIGR

SEQ ID NO: 118915 - protein, 10 aa, synthetic construct
QMVRGDLIGR

SEQ ID NO: 118916 - protein, 10 aa, synthetic construct
QMPRGDLIGR

SEQ ID NO: 118917 - protein, 10 aa, synthetic construct
QMLRGDLIGR

SEQ ID NO: 118918 - protein, 10 aa, synthetic construct
QMIRGDLIGR

SEQ ID NO: 118919 - protein, 10 aa, synthetic construct
QMMRGDLIGR

SEQ ID NO: 118920 - protein, 10 aa, synthetic construct
QMWRGDLIGR

SEQ ID NO: 118921 - protein, 10 aa, synthetic construct
QMFRGDLIGR

SEQ ID NO: 118922 - protein, 10 aa, synthetic construct
QMKRGDLIGR

SEQ ID NO: 118923 - protein, 10 aa, synthetic construct
QMRRGDLIGR

SEQ ID NO: 118924 - protein, 10 aa, synthetic construct
QMHRGDLIGR

SEQ ID NO: 118925 - protein, 10 aa, synthetic construct
QMSRGDLIGR

SEQ ID NO: 118926 - protein, 10 aa, synthetic construct
QMTRGDLIGR

SEQ ID NO: 118927 - protein, 10 aa, synthetic construct
QMYRGDLIGR

SEQ ID NO: 118928 - protein, 10 aa, synthetic construct
QMNRGDLIGR

SEQ ID NO: 118929 - protein, 10 aa, synthetic construct
QMQRGDLIGR

SEQ ID NO: 118930 - protein, 10 aa, synthetic construct
QMDRGDLIGR

SEQ ID NO: 118931 - protein, 10 aa, synthetic construct
QMERGDLIGR

SEQ ID NO: 118932 - protein, 10 aa, synthetic construct
QWGRGDLIGR

SEQ ID NO: 118933 - protein, 10 aa, synthetic construct
QWARGDLIGR

SEQ ID NO: 118934 - protein, 10 aa, synthetic construct
QWVRGDLIGR

SEQ ID NO: 118935 - protein, 10 aa, synthetic construct
QWPRGDLIGR

SEQ ID NO: 118936 - protein, 10 aa, synthetic construct
QWLRGDLIGR

SEQ ID NO: 118937 - protein, 10 aa, synthetic construct
QWIRGDLIGR

SEQ ID NO: 118938 - protein, 10 aa, synthetic construct
QWMRGDLIGR

SEQ ID NO: 118939 - protein, 10 aa, synthetic construct
QWWRGDLIGR

SEQ ID NO: 118940 - protein, 10 aa, synthetic construct
QWFRGDLIGR

SEQ ID NO: 118941 - protein, 10 aa, synthetic construct
QWKRGDLIGR

SEQ ID NO: 118942 - protein, 10 aa, synthetic construct
QWRRGDLIGR

SEQ ID NO: 118943 - protein, 10 aa, synthetic construct
QWHRGDLIGR

SEQ ID NO: 118944 - protein, 10 aa, synthetic construct
QWSRGDLIGR

SEQ ID NO: 118945 - protein, 10 aa, synthetic construct
QWTRGDLIGR

SEQ ID NO: 118946 - protein, 10 aa, synthetic construct
QWYRGDLIGR

SEQ ID NO: 118947 - protein, 10 aa, synthetic construct
QWNRGDLIGR

SEQ ID NO: 118948 - protein, 10 aa, synthetic construct
QWQRGDLIGR

SEQ ID NO: 118949 - protein, 10 aa, synthetic construct
QWDRGDLIGR

SEQ ID NO: 118950 - protein, 10 aa, synthetic construct
QWERGDLIGR

SEQ ID NO: 118951 - protein, 10 aa, synthetic construct
QFGRGDLIGR

SEQ ID NO: 118952 - protein, 10 aa, synthetic construct
QFARGDLIGR

SEQ ID NO: 118953 - protein, 10 aa, synthetic construct
QFVRGDLIGR

SEQ ID NO: 118954 - protein, 10 aa, synthetic construct
QFPRGDLIGR

SEQ ID NO: 118955 - protein, 10 aa, synthetic construct
QFLRGDLIGR

SEQ ID NO: 118956 - protein, 10 aa, synthetic construct
QFIRGDLIGR

SEQ ID NO: 118957 - protein, 10 aa, synthetic construct
QFMRGDLIGR

SEQ ID NO: 118958 - protein, 10 aa, synthetic construct
QFWRGDLIGR

SEQ ID NO: 118959 - protein, 10 aa, synthetic construct
QFFRGDLIGR

SEQ ID NO: 118960 - protein, 10 aa, synthetic construct
QFKRGDLIGR

SEQ ID NO: 118961 - protein, 10 aa, synthetic construct
QFRRGDLIGR

SEQ ID NO: 118962 - protein, 10 aa, synthetic construct
QFHRGDLIGR

SEQ ID NO: 118963 - protein, 10 aa, synthetic construct
QFSRGDLIGR

SEQ ID NO: 118964 - protein, 10 aa, synthetic construct
QFTRGDLIGR

SEQ ID NO: 118965 - protein, 10 aa, synthetic construct
QFYRGDLIGR

SEQ ID NO: 118966 - protein, 10 aa, synthetic construct
QFNRGDLIGR

SEQ ID NO: 118967 - protein, 10 aa, synthetic construct
QFQRGDLIGR

SEQ ID NO: 118968 - protein, 10 aa, synthetic construct
QFDRGDLIGR

SEQ ID NO: 118969 - protein, 10 aa, synthetic construct
QFERGDLIGR

SEQ ID NO: 118970 - protein, 10 aa, synthetic construct
QKGRGDLIGR

SEQ ID NO: 118971 - protein, 10 aa, synthetic construct
QKARGDLIGR

SEQ ID NO: 118972 - protein, 10 aa, synthetic construct
QKVRGDLIGR

SEQ ID NO: 118973 - protein, 10 aa, synthetic construct
QKPRGDLIGR

SEQ ID NO: 118974 - protein, 10 aa, synthetic construct
QKLRGDLIGR

SEQ ID NO: 118975 - protein, 10 aa, synthetic construct
QKIRGDLIGR

SEQ ID NO: 118976 - protein, 10 aa, synthetic construct
QKMRGDLIGR

SEQ ID NO: 118977 - protein, 10 aa, synthetic construct
QKWRGDLIGR

SEQ ID NO: 118978 - protein, 10 aa, synthetic construct
QKFRGDLIGR

SEQ ID NO: 118979 - protein, 10 aa, synthetic construct
QKKRGDLIGR

SEQ ID NO: 118980 - protein, 10 aa, synthetic construct
QKRRGDLIGR

SEQ ID NO: 118981 - protein, 10 aa, synthetic construct
QKHRGDLIGR

SEQ ID NO: 118982 - protein, 10 aa, synthetic construct
QKSRGDLIGR

SEQ ID NO: 118983 - protein, 10 aa, synthetic construct
QKTRGDLIGR

SEQ ID NO: 118984 - protein, 10 aa, synthetic construct
QKYRGDLIGR

SEQ ID NO: 118985 - protein, 10 aa, synthetic construct
QKNRGDLIGR

SEQ ID NO: 118986 - protein, 10 aa, synthetic construct
QKQRGDLIGR

SEQ ID NO: 118987 - protein, 10 aa, synthetic construct
QKDRGDLIGR

SEQ ID NO: 118988 - protein, 10 aa, synthetic construct
QKERGDLIGR

SEQ ID NO: 118989 - protein, 10 aa, synthetic construct
QRGRGDLIGR

SEQ ID NO: 118990 - protein, 10 aa, synthetic construct
QRARGDLIGR

SEQ ID NO: 118991 - protein, 10 aa, synthetic construct
QRVRGDLIGR

SEQ ID NO: 118992 - protein, 10 aa, synthetic construct
QRPRGDLIGR

SEQ ID NO: 118993 - protein, 10 aa, synthetic construct
QRLRGDLIGR

SEQ ID NO: 118994 - protein, 10 aa, synthetic construct
QRIRGDLIGR

SEQ ID NO: 118995 - protein, 10 aa, synthetic construct
QRMRGDLIGR

SEQ ID NO: 118996 - protein, 10 aa, synthetic construct
QRWRGDLIGR

SEQ ID NO: 118997 - protein, 10 aa, synthetic construct
QRFRGDLIGR

SEQ ID NO: 118998 - protein, 10 aa, synthetic construct
QRKRGDLIGR

SEQ ID NO: 118999 - protein, 10 aa, synthetic construct
QRRRGDLIGR

SEQ ID NO: 119000 - protein, 10 aa, synthetic construct
QRHRGDLIGR

SEQ ID NO: 119001 - protein, 10 aa, synthetic construct
QRSRGDLIGR

SEQ ID NO: 119002 - protein, 10 aa, synthetic construct
QRTRGDLIGR

SEQ ID NO: 119003 - protein, 10 aa, synthetic construct
QRYRGDLIGR

SEQ ID NO: 119004 - protein, 10 aa, synthetic construct
QRNRGDLIGR

SEQ ID NO: 119005 - protein, 10 aa, synthetic construct
QRQRGDLIGR

SEQ ID NO: 119006 - protein, 10 aa, synthetic construct
QRDRGDLIGR

SEQ ID NO: 119007 - protein, 10 aa, synthetic construct
QRERGDLIGR

SEQ ID NO: 119008 - protein, 10 aa, synthetic construct
QHGRGDLIGR

SEQ ID NO: 119009 - protein, 10 aa, synthetic construct
QHARGDLIGR

SEQ ID NO: 119010 - protein, 10 aa, synthetic construct
QHVRGDLIGR

SEQ ID NO: 119011 - protein, 10 aa, synthetic construct
QHPRGDLIGR

SEQ ID NO: 119012 - protein, 10 aa, synthetic construct
QHLRGDLIGR

SEQ ID NO: 119013 - protein, 10 aa, synthetic construct
QHIRGDLIGR

SEQ ID NO: 119014 - protein, 10 aa, synthetic construct
QHMRGDLIGR

SEQ ID NO: 119015 - protein, 10 aa, synthetic construct
QHWRGDLIGR

SEQ ID NO: 119016 - protein, 10 aa, synthetic construct
QHFRGDLIGR

SEQ ID NO: 119017 - protein, 10 aa, synthetic construct
QHKRGDLIGR

SEQ ID NO: 119018 - protein, 10 aa, synthetic construct
QHRRGDLIGR

SEQ ID NO: 119019 - protein, 10 aa, synthetic construct
QHHRGDLIGR

SEQ ID NO: 119020 - protein, 10 aa, synthetic construct
QHSRGDLIGR

SEQ ID NO: 119021 - protein, 10 aa, synthetic construct
QHTRGDLIGR

SEQ ID NO: 119022 - protein, 10 aa, synthetic construct
QHYRGDLIGR

SEQ ID NO: 119023 - protein, 10 aa, synthetic construct
QHNRGDLIGR

SEQ ID NO: 119024 - protein, 10 aa, synthetic construct
QHQRGDLIGR

SEQ ID NO: 119025 - protein, 10 aa, synthetic construct
QHDRGDLIGR

SEQ ID NO: 119026 - protein, 10 aa, synthetic construct
QHERGDLIGR

SEQ ID NO: 119027 - protein, 10 aa, synthetic construct
QSGRGDLIGR

SEQ ID NO: 119028 - protein, 10 aa, synthetic construct
QSARGDLIGR

SEQ ID NO: 119029 - protein, 10 aa, synthetic construct
QSVRGDLIGR

SEQ ID NO: 119030 - protein, 10 aa, synthetic construct
QSPRGDLIGR

SEQ ID NO: 119031 - protein, 10 aa, synthetic construct
QSLRGDLIGR

SEQ ID NO: 119032 - protein, 10 aa, synthetic construct
QSIRGDLIGR

SEQ ID NO: 119033 - protein, 10 aa, synthetic construct
QSMRGDLIGR

SEQ ID NO: 119034 - protein, 10 aa, synthetic construct
QSWRGDLIGR

SEQ ID NO: 119035 - protein, 10 aa, synthetic construct
QSFRGDLIGR

SEQ ID NO: 119036 - protein, 10 aa, synthetic construct
QSKRGDLIGR

SEQ ID NO: 119037 - protein, 10 aa, synthetic construct
QSRRGDLIGR

SEQ ID NO: 119038 - protein, 10 aa, synthetic construct
QSHRGDLIGR

SEQ ID NO: 119039 - protein, 10 aa, synthetic construct
QSSRGDLIGR

SEQ ID NO: 119040 - protein, 10 aa, synthetic construct
QSTRGDLIGR

SEQ ID NO: 119041 - protein, 10 aa, synthetic construct
QSYRGDLIGR

SEQ ID NO: 119042 - protein, 10 aa, synthetic construct
QSNRGDLIGR

SEQ ID NO: 119043 - protein, 10 aa, synthetic construct
QSQRGDLIGR

SEQ ID NO: 119044 - protein, 10 aa, synthetic construct
QSDRGDLIGR

SEQ ID NO: 119045 - protein, 10 aa, synthetic construct
QSERGDLIGR

SEQ ID NO: 119046 - protein, 10 aa, synthetic construct
QTGRGDLIGR

SEQ ID NO: 119047 - protein, 10 aa, synthetic construct
QTARGDLIGR

SEQ ID NO: 119048 - protein, 10 aa, synthetic construct
QTVRGDLIGR

SEQ ID NO: 119049 - protein, 10 aa, synthetic construct
QTPRGDLIGR

SEQ ID NO: 119050 - protein, 10 aa, synthetic construct
QTLRGDLIGR

SEQ ID NO: 119051 - protein, 10 aa, synthetic construct
QTIRGDLIGR

SEQ ID NO: 119052 - protein, 10 aa, synthetic construct
QTMRGDLIGR

SEQ ID NO: 119053 - protein, 10 aa, synthetic construct
QTWRGDLIGR

SEQ ID NO: 119054 - protein, 10 aa, synthetic construct
QTFRGDLIGR

SEQ ID NO: 119055 - protein, 10 aa, synthetic construct
QTKRGDLIGR

SEQ ID NO: 119056 - protein, 10 aa, synthetic construct
QTRRGDLIGR

SEQ ID NO: 119057 - protein, 10 aa, synthetic construct
QTHRGDLIGR

SEQ ID NO: 119058 - protein, 10 aa, synthetic construct
QTSRGDLIGR

SEQ ID NO: 119059 - protein, 10 aa, synthetic construct
QTTRGDLIGR

SEQ ID NO: 119060 - protein, 10 aa, synthetic construct
QTYRGDLIGR

SEQ ID NO: 119061 - protein, 10 aa, synthetic construct
QTNRGDLIGR

SEQ ID NO: 119062 - protein, 10 aa, synthetic construct
QTQRGDLIGR

SEQ ID NO: 119063 - protein, 10 aa, synthetic construct
QTDRGDLIGR

SEQ ID NO: 119064 - protein, 10 aa, synthetic construct
QTERGDLIGR

SEQ ID NO: 119065 - protein, 10 aa, synthetic construct
QYGRGDLIGR

SEQ ID NO: 119066 - protein, 10 aa, synthetic construct
QYARGDLIGR

SEQ ID NO: 119067 - protein, 10 aa, synthetic construct
QYVRGDLIGR

SEQ ID NO: 119068 - protein, 10 aa, synthetic construct
QYPRGDLIGR

SEQ ID NO: 119069 - protein, 10 aa, synthetic construct
QYLRGDLIGR

SEQ ID NO: 119070 - protein, 10 aa, synthetic construct
QYIRGDLIGR

SEQ ID NO: 119071 - protein, 10 aa, synthetic construct
QYMRGDLIGR

SEQ ID NO: 119072 - protein, 10 aa, synthetic construct
QYWRGDLIGR

SEQ ID NO: 119073 - protein, 10 aa, synthetic construct
QYFRGDLIGR

SEQ ID NO: 119074 - protein, 10 aa, synthetic construct
QYKRGDLIGR

SEQ ID NO: 119075 - protein, 10 aa, synthetic construct
QYRRGDLIGR

SEQ ID NO: 119076 - protein, 10 aa, synthetic construct
QYHRGDLIGR

SEQ ID NO: 119077 - protein, 10 aa, synthetic construct
QYSRGDLIGR

SEQ ID NO: 119078 - protein, 10 aa, synthetic construct
QYTRGDLIGR

SEQ ID NO: 119079 - protein, 10 aa, synthetic construct
QYYRGDLIGR

SEQ ID NO: 119080 - protein, 10 aa, synthetic construct
QYNRGDLIGR

SEQ ID NO: 119081 - protein, 10 aa, synthetic construct
QYQRGDLIGR

SEQ ID NO: 119082 - protein, 10 aa, synthetic construct
QYDRGDLIGR

SEQ ID NO: 119083 - protein, 10 aa, synthetic construct
QYERGDLIGR

SEQ ID NO: 119084 - protein, 10 aa, synthetic construct
QNGRGDLIGR

SEQ ID NO: 119085 - protein, 10 aa, synthetic construct
QNARGDLIGR

SEQ ID NO: 119086 - protein, 10 aa, synthetic construct
QNVRGDLIGR

SEQ ID NO: 119087 - protein, 10 aa, synthetic construct
QNPRGDLIGR

SEQ ID NO: 119088 - protein, 10 aa, synthetic construct
QNLRGDLIGR

SEQ ID NO: 119089 - protein, 10 aa, synthetic construct
QNIRGDLIGR

SEQ ID NO: 119090 - protein, 10 aa, synthetic construct
QNMRGDLIGR

SEQ ID NO: 119091 - protein, 10 aa, synthetic construct
QNWRGDLIGR

SEQ ID NO: 119092 - protein, 10 aa, synthetic construct
QNFRGDLIGR

SEQ ID NO: 119093 - protein, 10 aa, synthetic construct
QNKRGDLIGR

SEQ ID NO: 119094 - protein, 10 aa, synthetic construct
QNRRGDLIGR

SEQ ID NO: 119095 - protein, 10 aa, synthetic construct
QNHRGDLIGR

SEQ ID NO: 119096 - protein, 10 aa, synthetic construct
QNSRGDLIGR

SEQ ID NO: 119097 - protein, 10 aa, synthetic construct
QNTRGDLIGR

SEQ ID NO: 119098 - protein, 10 aa, synthetic construct
QNYRGDLIGR

SEQ ID NO: 119099 - protein, 10 aa, synthetic construct
QNNRGDLIGR

SEQ ID NO: 119100 - protein, 10 aa, synthetic construct
QNQRGDLIGR

SEQ ID NO: 119101 - protein, 10 aa, synthetic construct
QNDRGDLIGR

SEQ ID NO: 119102 - protein, 10 aa, synthetic construct
QNERGDLIGR

SEQ ID NO: 119103 - protein, 10 aa, synthetic construct
QQGRGDLIGR

SEQ ID NO: 119104 - protein, 10 aa, synthetic construct
QQARGDLIGR

SEQ ID NO: 119105 - protein, 10 aa, synthetic construct
QQVRGDLIGR

SEQ ID NO: 119106 - protein, 10 aa, synthetic construct
QQPRGDLIGR

SEQ ID NO: 119107 - protein, 10 aa, synthetic construct
QQLRGDLIGR

SEQ ID NO: 119108 - protein, 10 aa, synthetic construct
QQIRGDLIGR

SEQ ID NO: 119109 - protein, 10 aa, synthetic construct
QQMRGDLIGR

SEQ ID NO: 119110 - protein, 10 aa, synthetic construct
QQWRGDLIGR

SEQ ID NO: 119111 - protein, 10 aa, synthetic construct
QQFRGDLIGR

SEQ ID NO: 119112 - protein, 10 aa, synthetic construct
QQKRGDLIGR

SEQ ID NO: 119113 - protein, 10 aa, synthetic construct
QQRRGDLIGR

SEQ ID NO: 119114 - protein, 10 aa, synthetic construct
QQHRGDLIGR

SEQ ID NO: 119115 - protein, 10 aa, synthetic construct
QQSRGDLIGR

SEQ ID NO: 119116 - protein, 10 aa, synthetic construct
QQTRGDLIGR

SEQ ID NO: 119117 - protein, 10 aa, synthetic construct
QQYRGDLIGR

SEQ ID NO: 119118 - protein, 10 aa, synthetic construct
QQNRGDLIGR

SEQ ID NO: 119119 - protein, 10 aa, synthetic construct
QQQRGDLIGR

SEQ ID NO: 119120 - protein, 10 aa, synthetic construct
QQDRGDLIGR

SEQ ID NO: 119121 - protein, 10 aa, synthetic construct
QQERGDLIGR

SEQ ID NO: 119122 - protein, 10 aa, synthetic construct
QDGRGDLIGR

SEQ ID NO: 119123 - protein, 10 aa, synthetic construct
QDARGDLIGR

SEQ ID NO: 119124 - protein, 10 aa, synthetic construct
QDVRGDLIGR

SEQ ID NO: 119125 - protein, 10 aa, synthetic construct
QDPRGDLIGR

SEQ ID NO: 119126 - protein, 10 aa, synthetic construct
QDLRGDLIGR

SEQ ID NO: 119127 - protein, 10 aa, synthetic construct
QDIRGDLIGR

SEQ ID NO: 119128 - protein, 10 aa, synthetic construct
QDMRGDLIGR

SEQ ID NO: 119129 - protein, 10 aa, synthetic construct
QDWRGDLIGR

SEQ ID NO: 119130 - protein, 10 aa, synthetic construct
QDFRGDLIGR

SEQ ID NO: 119131 - protein, 10 aa, synthetic construct
QDKRGDLIGR

SEQ ID NO: 119132 - protein, 10 aa, synthetic construct
QDRRGDLIGR

SEQ ID NO: 119133 - protein, 10 aa, synthetic construct
QDHRGDLIGR

SEQ ID NO: 119134 - protein, 10 aa, synthetic construct
QDSRGDLIGR

SEQ ID NO: 119135 - protein, 10 aa, synthetic construct
QDTRGDLIGR

SEQ ID NO: 119136 - protein, 10 aa, synthetic construct
QDYRGDLIGR

SEQ ID NO: 119137 - protein, 10 aa, synthetic construct
QDNRGDLIGR

SEQ ID NO: 119138 - protein, 10 aa, synthetic construct
QDQRGDLIGR

SEQ ID NO: 119139 - protein, 10 aa, synthetic construct
QDDRGDLIGR

SEQ ID NO: 119140 - protein, 10 aa, synthetic construct
QDERGDLIGR

SEQ ID NO: 119141 - protein, 10 aa, synthetic construct
QEGRGDLIGR

SEQ ID NO: 119142 - protein, 10 aa, synthetic construct
QEARGDLIGR

SEQ ID NO: 119143 - protein, 10 aa, synthetic construct
QEVRGDLIGR

SEQ ID NO: 119144 - protein, 10 aa, synthetic construct
QEPRGDLIGR

SEQ ID NO: 119145 - protein, 10 aa, synthetic construct
QELRGDLIGR

SEQ ID NO: 119146 - protein, 10 aa, synthetic construct
QEIRGDLIGR

SEQ ID NO: 119147 - protein, 10 aa, synthetic construct
QEMRGDLIGR

SEQ ID NO: 119148 - protein, 10 aa, synthetic construct
QEWRGDLIGR

SEQ ID NO: 119149 - protein, 10 aa, synthetic construct
QEFRGDLIGR

SEQ ID NO: 119150 - protein, 10 aa, synthetic construct
QEKRGDLIGR

SEQ ID NO: 119151 - protein, 10 aa, synthetic construct
QERRGDLIGR

SEQ ID NO: 119152 - protein, 10 aa, synthetic construct
QEHRGDLIGR

SEQ ID NO: 119153 - protein, 10 aa, synthetic construct
QESRGDLIGR

SEQ ID NO: 119154 - protein, 10 aa, synthetic construct
QETRGDLIGR

SEQ ID NO: 119155 - protein, 10 aa, synthetic construct
QEYRGDLIGR

SEQ ID NO: 119156 - protein, 10 aa, synthetic construct
QENRGDLIGR

SEQ ID NO: 119157 - protein, 10 aa, synthetic construct
QEQRGDLIGR

SEQ ID NO: 119158 - protein, 10 aa, synthetic construct
QEDRGDLIGR

SEQ ID NO: 119159 - protein, 10 aa, synthetic construct
QEERGDLIGR

SEQ ID NO: 119160 - protein, 10 aa, synthetic construct
SGGRGDLLLS

SEQ ID NO: 119161 - protein, 10 aa, synthetic construct
SGARGDLLLS

SEQ ID NO: 119162 - protein, 10 aa, synthetic construct
SGVRGDLLLS

SEQ ID NO: 119163 - protein, 10 aa, synthetic construct
SGPRGDLLLS

SEQ ID NO: 119164 - protein, 10 aa, synthetic construct
SGLRGDLLLS

SEQ ID NO: 119165 - protein, 10 aa, synthetic construct
SGIRGDLLLS

SEQ ID NO: 119166 - protein, 10 aa, synthetic construct
SGMRGDLLLS

SEQ ID NO: 119167 - protein, 10 aa, synthetic construct
SGWRGDLLLS

SEQ ID NO: 119168 - protein, 10 aa, synthetic construct
SGFRGDLLLS

SEQ ID NO: 119169 - protein, 10 aa, synthetic construct
SGKRGDLLLS

SEQ ID NO: 119170 - protein, 10 aa, synthetic construct
SGRRGDLLLS

SEQ ID NO: 119171 - protein, 10 aa, synthetic construct
SGHRGDLLLS

SEQ ID NO: 119172 - protein, 10 aa, synthetic construct
SGSRGDLLLS

SEQ ID NO: 119173 - protein, 10 aa, synthetic construct
SGTRGDLLLS

SEQ ID NO: 119174 - protein, 10 aa, synthetic construct
SGYRGDLLLS

SEQ ID NO: 119175 - protein, 10 aa, synthetic construct
SGNRGDLLLS

SEQ ID NO: 119176 - protein, 10 aa, synthetic construct
SGQRGDLLLS

SEQ ID NO: 119177 - protein, 10 aa, synthetic construct
SGDRGDLLLS

SEQ ID NO: 119178 - protein, 10 aa, synthetic construct
SGERGDLLLS

SEQ ID NO: 119179 - protein, 10 aa, synthetic construct
SAGRGDLLLS

SEQ ID NO: 119180 - protein, 10 aa, synthetic construct
SAARGDLLLS

SEQ ID NO: 119181 - protein, 10 aa, synthetic construct
SAVRGDLLLS

SEQ ID NO: 119182 - protein, 10 aa, synthetic construct
SAPRGDLLLS

SEQ ID NO: 119183 - protein, 10 aa, synthetic construct
SALRGDLLLS

SEQ ID NO: 119184 - protein, 10 aa, synthetic construct
SAIRGDLLLS

SEQ ID NO: 119185 - protein, 10 aa, synthetic construct
SAMRGDLLLS

SEQ ID NO: 119186 - protein, 10 aa, synthetic construct
SAWRGDLLLS

SEQ ID NO: 119187 - protein, 10 aa, synthetic construct
SAFRGDLLLS

SEQ ID NO: 119188 - protein, 10 aa, synthetic construct
SAKRGDLLLS

SEQ ID NO: 119189 - protein, 10 aa, synthetic construct
SARRGDLLLS

SEQ ID NO: 119190 - protein, 10 aa, synthetic construct
SAHRGDLLLS

SEQ ID NO: 119191 - protein, 10 aa, synthetic construct
SASRGDLLLS

SEQ ID NO: 119192 - protein, 10 aa, synthetic construct
SATRGDLLLS

SEQ ID NO: 119193 - protein, 10 aa, synthetic construct
SAYRGDLLLS

SEQ ID NO: 119194 - protein, 10 aa, synthetic construct
SANRGDLLLS

SEQ ID NO: 119195 - protein, 10 aa, synthetic construct
SADRGDLLLS

SEQ ID NO: 119196 - protein, 10 aa, synthetic construct
SAERGDLLLS

SEQ ID NO: 119197 - protein, 10 aa, synthetic construct
SVGRGDLLLS

SEQ ID NO: 119198 - protein, 10 aa, synthetic construct
SVARGDLLLS

SEQ ID NO: 119199 - protein, 10 aa, synthetic construct
SVVRGDLLLS

SEQ ID NO: 119200 - protein, 10 aa, synthetic construct
SVPRGDLLLS

SEQ ID NO: 119201 - protein, 10 aa, synthetic construct
SVLRGDLLLS

SEQ ID NO: 119202 - protein, 10 aa, synthetic construct
SVIRGDLLLS

SEQ ID NO: 119203 - protein, 10 aa, synthetic construct
SVMRGDLLLS

SEQ ID NO: 119204 - protein, 10 aa, synthetic construct
SVWRGDLLLS

SEQ ID NO: 119205 - protein, 10 aa, synthetic construct
SVFRGDLLLS

SEQ ID NO: 119206 - protein, 10 aa, synthetic construct
SVKRGDLLLS

SEQ ID NO: 119207 - protein, 10 aa, synthetic construct
SVRRGDLLLS

SEQ ID NO: 119208 - protein, 10 aa, synthetic construct
SVHRGDLLLS

SEQ ID NO: 119209 - protein, 10 aa, synthetic construct
SVSRGDLLLS

SEQ ID NO: 119210 - protein, 10 aa, synthetic construct
SVTRGDLLLS

SEQ ID NO: 119211 - protein, 10 aa, synthetic construct
SVYRGDLLLS

SEQ ID NO: 119212 - protein, 10 aa, synthetic construct
SVNRGDLLLS

SEQ ID NO: 119213 - protein, 10 aa, synthetic construct
SVQRGDLLLS

SEQ ID NO: 119214 - protein, 10 aa, synthetic construct
SVDRGDLLLS

SEQ ID NO: 119215 - protein, 10 aa, synthetic construct
SVERGDLLLS

SEQ ID NO: 119216 - protein, 10 aa, synthetic construct
SPGRGDLLLS

SEQ ID NO: 119217 - protein, 10 aa, synthetic construct
SPARGDLLLS

SEQ ID NO: 119218 - protein, 10 aa, synthetic construct
SPVRGDLLLS

SEQ ID NO: 119219 - protein, 10 aa, synthetic construct
SPPRGDLLLS

SEQ ID NO: 119220 - protein, 10 aa, synthetic construct
SPLRGDLLLS

SEQ ID NO: 119221 - protein, 10 aa, synthetic construct
SPIRGDLLLS

SEQ ID NO: 119222 - protein, 10 aa, synthetic construct
SPMRGDLLLS

SEQ ID NO: 119223 - protein, 10 aa, synthetic construct
SPWRGDLLLS

SEQ ID NO: 119224 - protein, 10 aa, synthetic construct
SPFRGDLLLS

SEQ ID NO: 119225 - protein, 10 aa, synthetic construct
SPKRGDLLLS

SEQ ID NO: 119226 - protein, 10 aa, synthetic construct
SPRRGDLLLS

SEQ ID NO: 119227 - protein, 10 aa, synthetic construct
SPHRGDLLLS

SEQ ID NO: 119228 - protein, 10 aa, synthetic construct
SPSRGDLLLS

SEQ ID NO: 119229 - protein, 10 aa, synthetic construct
SPTRGDLLLS

SEQ ID NO: 119230 - protein, 10 aa, synthetic construct
SPYRGDLLLS

SEQ ID NO: 119231 - protein, 10 aa, synthetic construct
SPNRGDLLLS

SEQ ID NO: 119232 - protein, 10 aa, synthetic construct
SPQRGDLLLS

SEQ ID NO: 119233 - protein, 10 aa, synthetic construct
SPDRGDLLLS

SEQ ID NO: 119234 - protein, 10 aa, synthetic construct
SPERGDLLLS

SEQ ID NO: 119235 - protein, 10 aa, synthetic construct
SLGRGDLLLS

SEQ ID NO: 119236 - protein, 10 aa, synthetic construct
SLARGDLLLS

SEQ ID NO: 119237 - protein, 10 aa, synthetic construct
SLVRGDLLLS

SEQ ID NO: 119238 - protein, 10 aa, synthetic construct
SLPRGDLLLS

SEQ ID NO: 119239 - protein, 10 aa, synthetic construct
SLLRGDLLLS

SEQ ID NO: 119240 - protein, 10 aa, synthetic construct
SLIRGDLLLS

SEQ ID NO: 119241 - protein, 10 aa, synthetic construct
SLMRGDLLLS

SEQ ID NO: 119242 - protein, 10 aa, synthetic construct
SLWRGDLLLS

SEQ ID NO: 119243 - protein, 10 aa, synthetic construct
SLFRGDLLLS

SEQ ID NO: 119244 - protein, 10 aa, synthetic construct
SLKRGDLLLS

SEQ ID NO: 119245 - protein, 10 aa, synthetic construct
SLRRGDLLLS

SEQ ID NO: 119246 - protein, 10 aa, synthetic construct
SLHRGDLLLS

SEQ ID NO: 119247 - protein, 10 aa, synthetic construct
SLSRGDLLLS

SEQ ID NO: 119248 - protein, 10 aa, synthetic construct
SLTRGDLLLS

SEQ ID NO: 119249 - protein, 10 aa, synthetic construct
SLYRGDLLLS

SEQ ID NO: 119250 - protein, 10 aa, synthetic construct
SLNRGDLLLS

SEQ ID NO: 119251 - protein, 10 aa, synthetic construct
SLQRGDLLLS

SEQ ID NO: 119252 - protein, 10 aa, synthetic construct
SLDRGDLLLS

SEQ ID NO: 119253 - protein, 10 aa, synthetic construct
SLERGDLLLS

SEQ ID NO: 119254 - protein, 10 aa, synthetic construct
SIGRGDLLLS

SEQ ID NO: 119255 - protein, 10 aa, synthetic construct
SIARGDLLLS

SEQ ID NO: 119256 - protein, 10 aa, synthetic construct
SIVRGDLLLS

SEQ ID NO: 119257 - protein, 10 aa, synthetic construct
SIPRGDLLLS

SEQ ID NO: 119258 - protein, 10 aa, synthetic construct
SILRGDLLLS

SEQ ID NO: 119259 - protein, 10 aa, synthetic construct
SIIRGDLLLS

SEQ ID NO: 119260 - protein, 10 aa, synthetic construct
SIMRGDLLLS

SEQ ID NO: 119261 - protein, 10 aa, synthetic construct
SIWRGDLLLS

SEQ ID NO: 119262 - protein, 10 aa, synthetic construct
SIFRGDLLLS

SEQ ID NO: 119263 - protein, 10 aa, synthetic construct
SIKRGDLLLS

SEQ ID NO: 119264 - protein, 10 aa, synthetic construct
SIRRGDLLLS

SEQ ID NO: 119265 - protein, 10 aa, synthetic construct
SIHRGDLLLS

SEQ ID NO: 119266 - protein, 10 aa, synthetic construct
SISRGDLLLS

SEQ ID NO: 119267 - protein, 10 aa, synthetic construct
SITRGDLLLS

SEQ ID NO: 119268 - protein, 10 aa, synthetic construct
SIYRGDLLLS

SEQ ID NO: 119269 - protein, 10 aa, synthetic construct
SINRGDLLLS

SEQ ID NO: 119270 - protein, 10 aa, synthetic construct
SIQRGDLLLS

SEQ ID NO: 119271 - protein, 10 aa, synthetic construct
SIDRGDLLLS

SEQ ID NO: 119272 - protein, 10 aa, synthetic construct
SIERGDLLLS

SEQ ID NO: 119273 - protein, 10 aa, synthetic construct
SMGRGDLLLS

SEQ ID NO: 119274 - protein, 10 aa, synthetic construct
SMARGDLLLS

SEQ ID NO: 119275 - protein, 10 aa, synthetic construct
SMVRGDLLLS

SEQ ID NO: 119276 - protein, 10 aa, synthetic construct
SMPRGDLLLS

SEQ ID NO: 119277 - protein, 10 aa, synthetic construct
SMLRGDLLLS

SEQ ID NO: 119278 - protein, 10 aa, synthetic construct
SMIRGDLLLS

SEQ ID NO: 119279 - protein, 10 aa, synthetic construct
SMMRGDLLLS

SEQ ID NO: 119280 - protein, 10 aa, synthetic construct
SMWRGDLLLS

SEQ ID NO: 119281 - protein, 10 aa, synthetic construct
SMFRGDLLLS

SEQ ID NO: 119282 - protein, 10 aa, synthetic construct
SMKRGDLLLS

SEQ ID NO: 119283 - protein, 10 aa, synthetic construct
SMRRGDLLLS

SEQ ID NO: 119284 - protein, 10 aa, synthetic construct
SMHRGDLLLS

SEQ ID NO: 119285 - protein, 10 aa, synthetic construct
SMSRGDLLLS

SEQ ID NO: 119286 - protein, 10 aa, synthetic construct
SMTRGDLLLS

SEQ ID NO: 119287 - protein, 10 aa, synthetic construct
SMYRGDLLLS

SEQ ID NO: 119288 - protein, 10 aa, synthetic construct
SMNRGDLLLS

SEQ ID NO: 119289 - protein, 10 aa, synthetic construct
SMQRGDLLLS

SEQ ID NO: 119290 - protein, 10 aa, synthetic construct
SMDRGDLLLS

SEQ ID NO: 119291 - protein, 10 aa, synthetic construct
SMERGDLLLS

SEQ ID NO: 119292 - protein, 10 aa, synthetic construct
SWGRGDLLLS

SEQ ID NO: 119293 - protein, 10 aa, synthetic construct
SWARGDLLLS

SEQ ID NO: 119294 - protein, 10 aa, synthetic construct
SWVRGDLLLS

SEQ ID NO: 119295 - protein, 10 aa, synthetic construct
SWPRGDLLLS

SEQ ID NO: 119296 - protein, 10 aa, synthetic construct
SWLRGDLLLS

SEQ ID NO: 119297 - protein, 10 aa, synthetic construct
SWIRGDLLLS

SEQ ID NO: 119298 - protein, 10 aa, synthetic construct
SWMRGDLLLS

SEQ ID NO: 119299 - protein, 10 aa, synthetic construct
SWWRGDLLLS

SEQ ID NO: 119300 - protein, 10 aa, synthetic construct
SWFRGDLLLS

SEQ ID NO: 119301 - protein, 10 aa, synthetic construct
SWKRGDLLLS

SEQ ID NO: 119302 - protein, 10 aa, synthetic construct
SWRRGDLLLS

SEQ ID NO: 119303 - protein, 10 aa, synthetic construct
SWHRGDLLLS

SEQ ID NO: 119304 - protein, 10 aa, synthetic construct
SWSRGDLLLS

SEQ ID NO: 119305 - protein, 10 aa, synthetic construct
SWTRGDLLLS

SEQ ID NO: 119306 - protein, 10 aa, synthetic construct
SWYRGDLLLS

SEQ ID NO: 119307 - protein, 10 aa, synthetic construct
SWNRGDLLLS

SEQ ID NO: 119308 - protein, 10 aa, synthetic construct
SWQRGDLLLS

SEQ ID NO: 119309 - protein, 10 aa, synthetic construct
SWDRGDLLLS

SEQ ID NO: 119310 - protein, 10 aa, synthetic construct
SWERGDLLLS

SEQ ID NO: 119311 - protein, 10 aa, synthetic construct
SFGRGDLLLS

SEQ ID NO: 119312 - protein, 10 aa, synthetic construct
SFARGDLLLS

SEQ ID NO: 119313 - protein, 10 aa, synthetic construct
SFVRGDLLLS

SEQ ID NO: 119314 - protein, 10 aa, synthetic construct
SFPRGDLLLS

SEQ ID NO: 119315 - protein, 10 aa, synthetic construct
SFLRGDLLLS

SEQ ID NO: 119316 - protein, 10 aa, synthetic construct
SFIRGDLLLS

SEQ ID NO: 119317 - protein, 10 aa, synthetic construct
SFMRGDLLLS

SEQ ID NO: 119318 - protein, 10 aa, synthetic construct
SFWRGDLLLS

SEQ ID NO: 119319 - protein, 10 aa, synthetic construct
SFFRGDLLLS

SEQ ID NO: 119320 - protein, 10 aa, synthetic construct
SFKRGDLLLS

SEQ ID NO: 119321 - protein, 10 aa, synthetic construct
SFRRGDLLLS

SEQ ID NO: 119322 - protein, 10 aa, synthetic construct
SFHRGDLLLS

SEQ ID NO: 119323 - protein, 10 aa, synthetic construct
SFSRGDLLLS

SEQ ID NO: 119324 - protein, 10 aa, synthetic construct
SFTRGDLLLS

SEQ ID NO: 119325 - protein, 10 aa, synthetic construct
SFYRGDLLLS

SEQ ID NO: 119326 - protein, 10 aa, synthetic construct
SFNRGDLLLS

SEQ ID NO: 119327 - protein, 10 aa, synthetic construct
SFQRGDLLLS

SEQ ID NO: 119328 - protein, 10 aa, synthetic construct
SFDRGDLLLS

SEQ ID NO: 119329 - protein, 10 aa, synthetic construct
SFERGDLLLS

SEQ ID NO: 119330 - protein, 10 aa, synthetic construct
SKGRGDLLLS

SEQ ID NO: 119331 - protein, 10 aa, synthetic construct
SKARGDLLLS

SEQ ID NO: 119332 - protein, 10 aa, synthetic construct
SKVRGDLLLS

SEQ ID NO: 119333 - protein, 10 aa, synthetic construct
SKPRGDLLLS

SEQ ID NO: 119334 - protein, 10 aa, synthetic construct
SKLRGDLLLS

SEQ ID NO: 119335 - protein, 10 aa, synthetic construct
SKIRGDLLLS

SEQ ID NO: 119336 - protein, 10 aa, synthetic construct
SKMRGDLLLS

SEQ ID NO: 119337 - protein, 10 aa, synthetic construct
SKWRGDLLLS

SEQ ID NO: 119338 - protein, 10 aa, synthetic construct
SKFRGDLLLS

SEQ ID NO: 119339 - protein, 10 aa, synthetic construct
SKKRGDLLLS

SEQ ID NO: 119340 - protein, 10 aa, synthetic construct
SKRRGDLLLS

SEQ ID NO: 119341 - protein, 10 aa, synthetic construct
SKHRGDLLLS

SEQ ID NO: 119342 - protein, 10 aa, synthetic construct
SKSRGDLLLS

SEQ ID NO: 119343 - protein, 10 aa, synthetic construct
SKTRGDLLLS

SEQ ID NO: 119344 - protein, 10 aa, synthetic construct
SKYRGDLLLS

SEQ ID NO: 119345 - protein, 10 aa, synthetic construct
SKNRGDLLLS

SEQ ID NO: 119346 - protein, 10 aa, synthetic construct
SKQRGDLLLS

SEQ ID NO: 119347 - protein, 10 aa, synthetic construct
SKDRGDLLLS

SEQ ID NO: 119348 - protein, 10 aa, synthetic construct
SKERGDLLLS

SEQ ID NO: 119349 - protein, 10 aa, synthetic construct
SRGRGDLLLS

SEQ ID NO: 119350 - protein, 10 aa, synthetic construct
SRARGDLLLS

SEQ ID NO: 119351 - protein, 10 aa, synthetic construct
SRVRGDLLLS

SEQ ID NO: 119352 - protein, 10 aa, synthetic construct
SRPRGDLLLS

SEQ ID NO: 119353 - protein, 10 aa, synthetic construct
SRLRGDLLLS

SEQ ID NO: 119354 - protein, 10 aa, synthetic construct
SRIRGDLLLS

SEQ ID NO: 119355 - protein, 10 aa, synthetic construct
SRMRGDLLLS

SEQ ID NO: 119356 - protein, 10 aa, synthetic construct
SRWRGDLLLS

SEQ ID NO: 119357 - protein, 10 aa, synthetic construct
SRFRGDLLLS

SEQ ID NO: 119358 - protein, 10 aa, synthetic construct
SRKRGDLLLS

SEQ ID NO: 119359 - protein, 10 aa, synthetic construct
SRRRGDLLLS

SEQ ID NO: 119360 - protein, 10 aa, synthetic construct
SRHRGDLLLS

SEQ ID NO: 119361 - protein, 10 aa, synthetic construct
SRSRGDLLLS

SEQ ID NO: 119362 - protein, 10 aa, synthetic construct
SRTRGDLLLS

SEQ ID NO: 119363 - protein, 10 aa, synthetic construct
SRYRGDLLLS

SEQ ID NO: 119364 - protein, 10 aa, synthetic construct
SRNRGDLLLS

SEQ ID NO: 119365 - protein, 10 aa, synthetic construct
SRQRGDLLLS

SEQ ID NO: 119366 - protein, 10 aa, synthetic construct
SRDRGDLLLS

SEQ ID NO: 119367 - protein, 10 aa, synthetic construct
SRERGDLLLS

SEQ ID NO: 119368 - protein, 10 aa, synthetic construct
SHGRGDLLLS

SEQ ID NO: 119369 - protein, 10 aa, synthetic construct
SHARGDLLLS

SEQ ID NO: 119370 - protein, 10 aa, synthetic construct
SHVRGDLLLS

SEQ ID NO: 119371 - protein, 10 aa, synthetic construct
SHPRGDLLLS

SEQ ID NO: 119372 - protein, 10 aa, synthetic construct
SHLRGDLLLS

SEQ ID NO: 119373 - protein, 10 aa, synthetic construct
SHIRGDLLLS

SEQ ID NO: 119374 - protein, 10 aa, synthetic construct
SHMRGDLLLS

SEQ ID NO: 119375 - protein, 10 aa, synthetic construct
SHWRGDLLLS

SEQ ID NO: 119376 - protein, 10 aa, synthetic construct
SHFRGDLLLS

SEQ ID NO: 119377 - protein, 10 aa, synthetic construct
SHKRGDLLLS

SEQ ID NO: 119378 - protein, 10 aa, synthetic construct
SHRRGDLLLS

SEQ ID NO: 119379 - protein, 10 aa, synthetic construct
SHHRGDLLLS

SEQ ID NO: 119380 - protein, 10 aa, synthetic construct
SHSRGDLLLS

SEQ ID NO: 119381 - protein, 10 aa, synthetic construct
SHTRGDLLLS

SEQ ID NO: 119382 - protein, 10 aa, synthetic construct
SHYRGDLLLS

SEQ ID NO: 119383 - protein, 10 aa, synthetic construct
SHNRGDLLLS

SEQ ID NO: 119384 - protein, 10 aa, synthetic construct
SHQRGDLLLS

SEQ ID NO: 119385 - protein, 10 aa, synthetic construct
SHDRGDLLLS

SEQ ID NO: 119386 - protein, 10 aa, synthetic construct
SHERGDLLLS

SEQ ID NO: 119387 - protein, 10 aa, synthetic construct
SSGRGDLLLS

SEQ ID NO: 119388 - protein, 10 aa, synthetic construct
SSARGDLLLS

SEQ ID NO: 119389 - protein, 10 aa, synthetic construct
SSVRGDLLLS

SEQ ID NO: 119390 - protein, 10 aa, synthetic construct
SSPRGDLLLS

SEQ ID NO: 119391 - protein, 10 aa, synthetic construct
SSLRGDLLLS

SEQ ID NO: 119392 - protein, 10 aa, synthetic construct
SSIRGDLLLS

SEQ ID NO: 119393 - protein, 10 aa, synthetic construct
SSMRGDLLLS

SEQ ID NO: 119394 - protein, 10 aa, synthetic construct
SSWRGDLLLS

SEQ ID NO: 119395 - protein, 10 aa, synthetic construct
SSFRGDLLLS

SEQ ID NO: 119396 - protein, 10 aa, synthetic construct
SSKRGDLLLS

SEQ ID NO: 119397 - protein, 10 aa, synthetic construct
SSRRGDLLLS

SEQ ID NO: 119398 - protein, 10 aa, synthetic construct
SSHRGDLLLS

SEQ ID NO: 119399 - protein, 10 aa, synthetic construct
SSSRGDLLLS

SEQ ID NO: 119400 - protein, 10 aa, synthetic construct
SSTRGDLLLS

SEQ ID NO: 119401 - protein, 10 aa, synthetic construct
SSYRGDLLLS

SEQ ID NO: 119402 - protein, 10 aa, synthetic construct
SSNRGDLLLS

SEQ ID NO: 119403 - protein, 10 aa, synthetic construct
SSQRGDLLLS

SEQ ID NO: 119404 - protein, 10 aa, synthetic construct
SSDRGDLLLS

SEQ ID NO: 119405 - protein, 10 aa, synthetic construct
SSERGDLLLS

SEQ ID NO: 119406 - protein, 10 aa, synthetic construct
STGRGDLLLS

SEQ ID NO: 119407 - protein, 10 aa, synthetic construct
STARGDLLLS

SEQ ID NO: 119408 - protein, 10 aa, synthetic construct
STVRGDLLLS

SEQ ID NO: 119409 - protein, 10 aa, synthetic construct
STPRGDLLLS

SEQ ID NO: 119410 - protein, 10 aa, synthetic construct
STLRGDLLLS

SEQ ID NO: 119411 - protein, 10 aa, synthetic construct
STIRGDLLLS

SEQ ID NO: 119412 - protein, 10 aa, synthetic construct
STMRGDLLLS

SEQ ID NO: 119413 - protein, 10 aa, synthetic construct
STWRGDLLLS

SEQ ID NO: 119414 - protein, 10 aa, synthetic construct
STFRGDLLLS

SEQ ID NO: 119415 - protein, 10 aa, synthetic construct
STKRGDLLLS

SEQ ID NO: 119416 - protein, 10 aa, synthetic construct
STRRGDLLLS

SEQ ID NO: 119417 - protein, 10 aa, synthetic construct
STHRGDLLLS

SEQ ID NO: 119418 - protein, 10 aa, synthetic construct
STSRGDLLLS

SEQ ID NO: 119419 - protein, 10 aa, synthetic construct
STTRGDLLLS

SEQ ID NO: 119420 - protein, 10 aa, synthetic construct
STYRGDLLLS

SEQ ID NO: 119421 - protein, 10 aa, synthetic construct
STNRGDLLLS

SEQ ID NO: 119422 - protein, 10 aa, synthetic construct
STQRGDLLLS

SEQ ID NO: 119423 - protein, 10 aa, synthetic construct
STDRGDLLLS

SEQ ID NO: 119424 - protein, 10 aa, synthetic construct
STERGDLLLS

SEQ ID NO: 119425 - protein, 10 aa, synthetic construct
SYGRGDLLLS

SEQ ID NO: 119426 - protein, 10 aa, synthetic construct
SYARGDLLLS

SEQ ID NO: 119427 - protein, 10 aa, synthetic construct
SYVRGDLLLS

SEQ ID NO: 119428 - protein, 10 aa, synthetic construct
SYPRGDLLLS

SEQ ID NO: 119429 - protein, 10 aa, synthetic construct
SYLRGDLLLS

SEQ ID NO: 119430 - protein, 10 aa, synthetic construct
SYIRGDLLLS

SEQ ID NO: 119431 - protein, 10 aa, synthetic construct
SYMRGDLLLS

SEQ ID NO: 119432 - protein, 10 aa, synthetic construct
SYWRGDLLLS

SEQ ID NO: 119433 - protein, 10 aa, synthetic construct
SYFRGDLLLS

SEQ ID NO: 119434 - protein, 10 aa, synthetic construct
SYKRGDLLLS

SEQ ID NO: 119435 - protein, 10 aa, synthetic construct
SYRRGDLLLS

SEQ ID NO: 119436 - protein, 10 aa, synthetic construct
SYHRGDLLLS

SEQ ID NO: 119437 - protein, 10 aa, synthetic construct
SYSRGDLLLS

SEQ ID NO: 119438 - protein, 10 aa, synthetic construct
SYTRGDLLLS

SEQ ID NO: 119439 - protein, 10 aa, synthetic construct
SYYRGDLLLS

SEQ ID NO: 119440 - protein, 10 aa, synthetic construct
SYNRGDLLLS

SEQ ID NO: 119441 - protein, 10 aa, synthetic construct
SYQRGDLLLS

SEQ ID NO: 119442 - protein, 10 aa, synthetic construct
SYDRGDLLLS

SEQ ID NO: 119443 - protein, 10 aa, synthetic construct
SYERGDLLLS

SEQ ID NO: 119444 - protein, 10 aa, synthetic construct
SNGRGDLLLS

SEQ ID NO: 119445 - protein, 10 aa, synthetic construct
SNARGDLLLS

SEQ ID NO: 119446 - protein, 10 aa, synthetic construct
SNVRGDLLLS

SEQ ID NO: 119447 - protein, 10 aa, synthetic construct
SNPRGDLLLS

SEQ ID NO: 119448 - protein, 10 aa, synthetic construct
SNLRGDLLLS

SEQ ID NO: 119449 - protein, 10 aa, synthetic construct
SNIRGDLLLS

SEQ ID NO: 119450 - protein, 10 aa, synthetic construct
SNMRGDLLLS

SEQ ID NO: 119451 - protein, 10 aa, synthetic construct
SNWRGDLLLS

SEQ ID NO: 119452 - protein, 10 aa, synthetic construct
SNFRGDLLLS

SEQ ID NO: 119453 - protein, 10 aa, synthetic construct
SNKRGDLLLS

SEQ ID NO: 119454 - protein, 10 aa, synthetic construct
SNRRGDLLLS

SEQ ID NO: 119455 - protein, 10 aa, synthetic construct
SNHRGDLLLS

SEQ ID NO: 119456 - protein, 10 aa, synthetic construct
SNSRGDLLLS

SEQ ID NO: 119457 - protein, 10 aa, synthetic construct
SNTRGDLLLS

SEQ ID NO: 119458 - protein, 10 aa, synthetic construct
SNYRGDLLLS

SEQ ID NO: 119459 - protein, 10 aa, synthetic construct
SNNRGDLLLS

SEQ ID NO: 119460 - protein, 10 aa, synthetic construct
SNQRGDLLLS

SEQ ID NO: 119461 - protein, 10 aa, synthetic construct
SNDRGDLLLS

SEQ ID NO: 119462 - protein, 10 aa, synthetic construct
SNERGDLLLS

SEQ ID NO: 119463 - protein, 10 aa, synthetic construct
SQGRGDLLLS

SEQ ID NO: 119464 - protein, 10 aa, synthetic construct
SQARGDLLLS

SEQ ID NO: 119465 - protein, 10 aa, synthetic construct
SQVRGDLLLS

SEQ ID NO: 119466 - protein, 10 aa, synthetic construct
SQPRGDLLLS

SEQ ID NO: 119467 - protein, 10 aa, synthetic construct
SQLRGDLLLS

SEQ ID NO: 119468 - protein, 10 aa, synthetic construct
SQIRGDLLLS

SEQ ID NO: 119469 - protein, 10 aa, synthetic construct
SQMRGDLLLS

SEQ ID NO: 119470 - protein, 10 aa, synthetic construct
SQWRGDLLLS

SEQ ID NO: 119471 - protein, 10 aa, synthetic construct
SQFRGDLLLS

SEQ ID NO: 119472 - protein, 10 aa, synthetic construct
SQKRGDLLLS

SEQ ID NO: 119473 - protein, 10 aa, synthetic construct
SQRRGDLLLS

SEQ ID NO: 119474 - protein, 10 aa, synthetic construct
SQHRGDLLLS

SEQ ID NO: 119475 - protein, 10 aa, synthetic construct
SQSRGDLLLS

SEQ ID NO: 119476 - protein, 10 aa, synthetic construct
SQTRGDLLLS

SEQ ID NO: 119477 - protein, 10 aa, synthetic construct
SQYRGDLLLS

SEQ ID NO: 119478 - protein, 10 aa, synthetic construct
SQNRGDLLLS

SEQ ID NO: 119479 - protein, 10 aa, synthetic construct
SQQRGDLLLS

SEQ ID NO: 119480 - protein, 10 aa, synthetic construct
SQDRGDLLLS

SEQ ID NO: 119481 - protein, 10 aa, synthetic construct
SQERGDLLLS

SEQ ID NO: 119482 - protein, 10 aa, synthetic construct
SDGRGDLLLS

SEQ ID NO: 119483 - protein, 10 aa, synthetic construct
SDARGDLLLS

SEQ ID NO: 119484 - protein, 10 aa, synthetic construct
SDVRGDLLLS

SEQ ID NO: 119485 - protein, 10 aa, synthetic construct
SDPRGDLLLS

SEQ ID NO: 119486 - protein, 10 aa, synthetic construct
SDLRGDLLLS

SEQ ID NO: 119487 - protein, 10 aa, synthetic construct
SDIRGDLLLS

SEQ ID NO: 119488 - protein, 10 aa, synthetic construct
SDMRGDLLLS

SEQ ID NO: 119489 - protein, 10 aa, synthetic construct
SDWRGDLLLS

SEQ ID NO: 119490 - protein, 10 aa, synthetic construct
SDFRGDLLLS

SEQ ID NO: 119491 - protein, 10 aa, synthetic construct
SDKRGDLLLS

SEQ ID NO: 119492 - protein, 10 aa, synthetic construct
SDRRGDLLLS

SEQ ID NO: 119493 - protein, 10 aa, synthetic construct
SDHRGDLLLS

SEQ ID NO: 119494 - protein, 10 aa, synthetic construct
SDSRGDLLLS

SEQ ID NO: 119495 - protein, 10 aa, synthetic construct
SDTRGDLLLS

SEQ ID NO: 119496 - protein, 10 aa, synthetic construct
SDYRGDLLLS

SEQ ID NO: 119497 - protein, 10 aa, synthetic construct
SDNRGDLLLS

SEQ ID NO: 119498 - protein, 10 aa, synthetic construct
SDQRGDLLLS

SEQ ID NO: 119499 - protein, 10 aa, synthetic construct
SDDRGDLLLS

SEQ ID NO: 119500 - protein, 10 aa, synthetic construct
SDERGDLLLS

SEQ ID NO: 119501 - protein, 10 aa, synthetic construct
SEGRGDLLLS

SEQ ID NO: 119502 - protein, 10 aa, synthetic construct
SEARGDLLLS

SEQ ID NO: 119503 - protein, 10 aa, synthetic construct
SEVRGDLLLS

SEQ ID NO: 119504 - protein, 10 aa, synthetic construct
SEPRGDLLLS

SEQ ID NO: 119505 - protein, 10 aa, synthetic construct
SELRGDLLLS

SEQ ID NO: 119506 - protein, 10 aa, synthetic construct
SEIRGDLLLS

SEQ ID NO: 119507 - protein, 10 aa, synthetic construct
SEMRGDLLLS

SEQ ID NO: 119508 - protein, 10 aa, synthetic construct
SEWRGDLLLS

SEQ ID NO: 119509 - protein, 10 aa, synthetic construct
SEFRGDLLLS

SEQ ID NO: 119510 - protein, 10 aa, synthetic construct
SEKRGDLLLS

SEQ ID NO: 119511 - protein, 10 aa, synthetic construct
SERRGDLLLS

SEQ ID NO: 119512 - protein, 10 aa, synthetic construct
SEHRGDLLLS

SEQ ID NO: 119513 - protein, 10 aa, synthetic construct
SESRGDLLLS

SEQ ID NO: 119514 - protein, 10 aa, synthetic construct
SETRGDLLLS

SEQ ID NO: 119515 - protein, 10 aa, synthetic construct
SEYRGDLLLS

SEQ ID NO: 119516 - protein, 10 aa, synthetic construct
SENRGDLLLS

SEQ ID NO: 119517 - protein, 10 aa, synthetic construct
SEQRGDLLLS

SEQ ID NO: 119518 - protein, 10 aa, synthetic construct
SEDRGDLLLS

SEQ ID NO: 119519 - protein, 10 aa, synthetic construct
SEERGDLLLS

SEQ ID NO: 119520 - protein, 10 aa, synthetic construct
TGGRGDLLLS

SEQ ID NO: 119521 - protein, 10 aa, synthetic construct
TGARGDLLLS

SEQ ID NO: 119522 - protein, 10 aa, synthetic construct
TGVRGDLLLS

SEQ ID NO: 119523 - protein, 10 aa, synthetic construct
TGPRGDLLLS

SEQ ID NO: 119524 - protein, 10 aa, synthetic construct
TGLRGDLLLS

SEQ ID NO: 119525 - protein, 10 aa, synthetic construct
TGIRGDLLLS

SEQ ID NO: 119526 - protein, 10 aa, synthetic construct
TGMRGDLLLS

SEQ ID NO: 119527 - protein, 10 aa, synthetic construct
TGWRGDLLLS

SEQ ID NO: 119528 - protein, 10 aa, synthetic construct
TGFRGDLLLS

SEQ ID NO: 119529 - protein, 10 aa, synthetic construct
TGKRGDLLLS

SEQ ID NO: 119530 - protein, 10 aa, synthetic construct
TGRRGDLLLS

SEQ ID NO: 119531 - protein, 10 aa, synthetic construct
TGHRGDLLLS

SEQ ID NO: 119532 - protein, 10 aa, synthetic construct
TGSRGDLLLS

SEQ ID NO: 119533 - protein, 10 aa, synthetic construct
TGTRGDLLLS

SEQ ID NO: 119534 - protein, 10 aa, synthetic construct
TGYRGDLLLS

SEQ ID NO: 119535 - protein, 10 aa, synthetic construct
TGNRGDLLLS

SEQ ID NO: 119536 - protein, 10 aa, synthetic construct
TGQRGDLLLS

SEQ ID NO: 119537 - protein, 10 aa, synthetic construct
TGDRGDLLLS

SEQ ID NO: 119538 - protein, 10 aa, synthetic construct
TGERGDLLLS

SEQ ID NO: 119539 - protein, 10 aa, synthetic construct
TAGRGDLLLS

SEQ ID NO: 119540 - protein, 10 aa, synthetic construct
TAARGDLLLS

SEQ ID NO: 119541 - protein, 10 aa, synthetic construct
TAVRGDLLLS

SEQ ID NO: 119542 - protein, 10 aa, synthetic construct
TAPRGDLLLS

SEQ ID NO: 119543 - protein, 10 aa, synthetic construct
TALRGDLLLS

SEQ ID NO: 119544 - protein, 10 aa, synthetic construct
TAIRGDLLLS

SEQ ID NO: 119545 - protein, 10 aa, synthetic construct
TAMRGDLLLS

SEQ ID NO: 119546 - protein, 10 aa, synthetic construct
TAWRGDLLLS

SEQ ID NO: 119547 - protein, 10 aa, synthetic construct
TAFRGDLLLS

SEQ ID NO: 119548 - protein, 10 aa, synthetic construct
TAKRGDLLLS

SEQ ID NO: 119549 - protein, 10 aa, synthetic construct
TARRGDLLLS

SEQ ID NO: 119550 - protein, 10 aa, synthetic construct
TAHRGDLLLS

SEQ ID NO: 119551 - protein, 10 aa, synthetic construct
TASRGDLLLS

SEQ ID NO: 119552 - protein, 10 aa, synthetic construct
TATRGDLLLS

SEQ ID NO: 119553 - protein, 10 aa, synthetic construct
TAYRGDLLLS

SEQ ID NO: 119554 - protein, 10 aa, synthetic construct
TANRGDLLLS

SEQ ID NO: 119555 - protein, 10 aa, synthetic construct
TAQRGDLLLS

SEQ ID NO: 119556 - protein, 10 aa, synthetic construct
TADRGDLLLS

SEQ ID NO: 119557 - protein, 10 aa, synthetic construct
TAERGDLLLS

SEQ ID NO: 119558 - protein, 10 aa, synthetic construct
TVGRGDLLLS

SEQ ID NO: 119559 - protein, 10 aa, synthetic construct
TVARGDLLLS

SEQ ID NO: 119560 - protein, 10 aa, synthetic construct
TVVRGDLLLS

SEQ ID NO: 119561 - protein, 10 aa, synthetic construct
TVPRGDLLLS

SEQ ID NO: 119562 - protein, 10 aa, synthetic construct
TVLRGDLLLS

SEQ ID NO: 119563 - protein, 10 aa, synthetic construct
TVIRGDLLLS

SEQ ID NO: 119564 - protein, 10 aa, synthetic construct
TVMRGDLLLS

SEQ ID NO: 119565 - protein, 10 aa, synthetic construct
TVWRGDLLLS

SEQ ID NO: 119566 - protein, 10 aa, synthetic construct
TVFRGDLLLS

SEQ ID NO: 119567 - protein, 10 aa, synthetic construct
TVKRGDLLLS

SEQ ID NO: 119568 - protein, 10 aa, synthetic construct
TVRRGDLLLS

SEQ ID NO: 119569 - protein, 10 aa, synthetic construct
TVHRGDLLLS

SEQ ID NO: 119570 - protein, 10 aa, synthetic construct
TVSRGDLLLS

SEQ ID NO: 119571 - protein, 10 aa, synthetic construct
TVTRGDLLLS

SEQ ID NO: 119572 - protein, 10 aa, synthetic construct
TVYRGDLLLS

SEQ ID NO: 119573 - protein, 10 aa, synthetic construct
TVNRGDLLLS

SEQ ID NO: 119574 - protein, 10 aa, synthetic construct
TVQRGDLLLS

SEQ ID NO: 119575 - protein, 10 aa, synthetic construct
TVDRGDLLLS

SEQ ID NO: 119576 - protein, 10 aa, synthetic construct
TVERGDLLLS

SEQ ID NO: 119577 - protein, 10 aa, synthetic construct
TPGRGDLLLS

SEQ ID NO: 119578 - protein, 10 aa, synthetic construct
TPARGDLLLS

SEQ ID NO: 119579 - protein, 10 aa, synthetic construct
TPVRGDLLLS

SEQ ID NO: 119580 - protein, 10 aa, synthetic construct
TPPRGDLLLS

SEQ ID NO: 119581 - protein, 10 aa, synthetic construct
TPLRGDLLLS

SEQ ID NO: 119582 - protein, 10 aa, synthetic construct
TPIRGDLLLS

SEQ ID NO: 119583 - protein, 10 aa, synthetic construct
TPMRGDLLLS

SEQ ID NO: 119584 - protein, 10 aa, synthetic construct
TPWRGDLLLS

SEQ ID NO: 119585 - protein, 10 aa, synthetic construct
TPFRGDLLLS

SEQ ID NO: 119586 - protein, 10 aa, synthetic construct
TPKRGDLLLS

SEQ ID NO: 119587 - protein, 10 aa, synthetic construct
TPRRGDLLLS

SEQ ID NO: 119588 - protein, 10 aa, synthetic construct
TPHRGDLLLS

SEQ ID NO: 119589 - protein, 10 aa, synthetic construct
TPSRGDLLLS

SEQ ID NO: 119590 - protein, 10 aa, synthetic construct
TPTRGDLLLS

SEQ ID NO: 119591 - protein, 10 aa, synthetic construct
TPYRGDLLLS

SEQ ID NO: 119592 - protein, 10 aa, synthetic construct
TPNRGDLLLS

SEQ ID NO: 119593 - protein, 10 aa, synthetic construct
TPQRGDLLLS

SEQ ID NO: 119594 - protein, 10 aa, synthetic construct
TPDRGDLLLS

SEQ ID NO: 119595 - protein, 10 aa, synthetic construct
TPERGDLLLS

SEQ ID NO: 119596 - protein, 10 aa, synthetic construct
TLGRGDLLLS

SEQ ID NO: 119597 - protein, 10 aa, synthetic construct
TLARGDLLLS

SEQ ID NO: 119598 - protein, 10 aa, synthetic construct
TLVRGDLLLS

SEQ ID NO: 119599 - protein, 10 aa, synthetic construct
TLPRGDLLLS

SEQ ID NO: 119600 - protein, 10 aa, synthetic construct
TLLRGDLLLS

SEQ ID NO: 119601 - protein, 10 aa, synthetic construct
TLIRGDLLLS

SEQ ID NO: 119602 - protein, 10 aa, synthetic construct
TLMRGDLLLS

SEQ ID NO: 119603 - protein, 10 aa, synthetic construct
TLWRGDLLLS

SEQ ID NO: 119604 - protein, 10 aa, synthetic construct
TLFRGDLLLS

SEQ ID NO: 119605 - protein, 10 aa, synthetic construct
TLKRGDLLLS

SEQ ID NO: 119606 - protein, 10 aa, synthetic construct
TLRRGDLLLS

SEQ ID NO: 119607 - protein, 10 aa, synthetic construct
TLHRGDLLLS

SEQ ID NO: 119608 - protein, 10 aa, synthetic construct
TLSRGDLLLS

SEQ ID NO: 119609 - protein, 10 aa, synthetic construct
TLTRGDLLLS

SEQ ID NO: 119610 - protein, 10 aa, synthetic construct
TLYRGDLLLS

SEQ ID NO: 119611 - protein, 10 aa, synthetic construct
TLNRGDLLLS

SEQ ID NO: 119612 - protein, 10 aa, synthetic construct
TLQRGDLLLS

SEQ ID NO: 119613 - protein, 10 aa, synthetic construct
TLDRGDLLLS

SEQ ID NO: 119614 - protein, 10 aa, synthetic construct
TLERGDLLLS

SEQ ID NO: 119615 - protein, 10 aa, synthetic construct
TIGRGDLLLS

SEQ ID NO: 119616 - protein, 10 aa, synthetic construct
TIARGDLLLS

SEQ ID NO: 119617 - protein, 10 aa, synthetic construct
TIVRGDLLLS

SEQ ID NO: 119618 - protein, 10 aa, synthetic construct
TIPRGDLLLS

SEQ ID NO: 119619 - protein, 10 aa, synthetic construct
TILRGDLLLS

SEQ ID NO: 119620 - protein, 10 aa, synthetic construct
TIIRGDLLLS

SEQ ID NO: 119621 - protein, 10 aa, synthetic construct
TIMRGDLLLS

SEQ ID NO: 119622 - protein, 10 aa, synthetic construct
TIWRGDLLLS

SEQ ID NO: 119623 - protein, 10 aa, synthetic construct
TIFRGDLLLS

SEQ ID NO: 119624 - protein, 10 aa, synthetic construct
TIKRGDLLLS

SEQ ID NO: 119625 - protein, 10 aa, synthetic construct
TIRRGDLLLS

SEQ ID NO: 119626 - protein, 10 aa, synthetic construct
TIHRGDLLLS

SEQ ID NO: 119627 - protein, 10 aa, synthetic construct
TISRGDLLLS

SEQ ID NO: 119628 - protein, 10 aa, synthetic construct
TITRGDLLLS

SEQ ID NO: 119629 - protein, 10 aa, synthetic construct
TIYRGDLLLS

SEQ ID NO: 119630 - protein, 10 aa, synthetic construct
TINRGDLLLS

SEQ ID NO: 119631 - protein, 10 aa, synthetic construct
TIQRGDLLLS

SEQ ID NO: 119632 - protein, 10 aa, synthetic construct
TIDRGDLLLS

SEQ ID NO: 119633 - protein, 10 aa, synthetic construct
TIERGDLLLS

SEQ ID NO: 119634 - protein, 10 aa, synthetic construct
TMGRGDLLLS

SEQ ID NO: 119635 - protein, 10 aa, synthetic construct
TMARGDLLLS

SEQ ID NO: 119636 - protein, 10 aa, synthetic construct
TMVRGDLLLS

SEQ ID NO: 119637 - protein, 10 aa, synthetic construct
TMPRGDLLLS

SEQ ID NO: 119638 - protein, 10 aa, synthetic construct
TMLRGDLLLS

SEQ ID NO: 119639 - protein, 10 aa, synthetic construct
TMIRGDLLLS

SEQ ID NO: 119640 - protein, 10 aa, synthetic construct
TMMRGDLLLS

SEQ ID NO: 119641 - protein, 10 aa, synthetic construct
TMWRGDLLLS

SEQ ID NO: 119642 - protein, 10 aa, synthetic construct
TMFRGDLLLS

SEQ ID NO: 119643 - protein, 10 aa, synthetic construct
TMKRGDLLLS

SEQ ID NO: 119644 - protein, 10 aa, synthetic construct
TMRRGDLLLS

SEQ ID NO: 119645 - protein, 10 aa, synthetic construct
TMHRGDLLLS

SEQ ID NO: 119646 - protein, 10 aa, synthetic construct
TMSRGDLLLS

SEQ ID NO: 119647 - protein, 10 aa, synthetic construct
TMTRGDLLLS

SEQ ID NO: 119648 - protein, 10 aa, synthetic construct
TMYRGDLLLS

SEQ ID NO: 119649 - protein, 10 aa, synthetic construct
TMNRGDLLLS

SEQ ID NO: 119650 - protein, 10 aa, synthetic construct
TMQRGDLLLS

SEQ ID NO: 119651 - protein, 10 aa, synthetic construct
TMDRGDLLLS

SEQ ID NO: 119652 - protein, 10 aa, synthetic construct
TMERGDLLLS

SEQ ID NO: 119653 - protein, 10 aa, synthetic construct
TWGRGDLLLS

SEQ ID NO: 119654 - protein, 10 aa, synthetic construct
TWARGDLLLS

SEQ ID NO: 119655 - protein, 10 aa, synthetic construct
TWVRGDLLLS

SEQ ID NO: 119656 - protein, 10 aa, synthetic construct
TWPRGDLLLS

SEQ ID NO: 119657 - protein, 10 aa, synthetic construct
TWLRGDLLLS

SEQ ID NO: 119658 - protein, 10 aa, synthetic construct
TWIRGDLLLS

SEQ ID NO: 119659 - protein, 10 aa, synthetic construct
TWMRGDLLLS

SEQ ID NO: 119660 - protein, 10 aa, synthetic construct
TWWRGDLLLS

SEQ ID NO: 119661 - protein, 10 aa, synthetic construct
TWFRGDLLLS

SEQ ID NO: 119662 - protein, 10 aa, synthetic construct
TWKRGDLLLS

SEQ ID NO: 119663 - protein, 10 aa, synthetic construct
TWRRGDLLLS

SEQ ID NO: 119664 - protein, 10 aa, synthetic construct
TWHRGDLLLS

SEQ ID NO: 119665 - protein, 10 aa, synthetic construct
TWSRGDLLLS

SEQ ID NO: 119666 - protein, 10 aa, synthetic construct
TWTRGDLLLS

SEQ ID NO: 119667 - protein, 10 aa, synthetic construct
TWYRGDLLLS

SEQ ID NO: 119668 - protein, 10 aa, synthetic construct
TWNRGDLLLS

SEQ ID NO: 119669 - protein, 10 aa, synthetic construct
TWQRGDLLLS

SEQ ID NO: 119670 - protein, 10 aa, synthetic construct
TWDRGDLLLS

SEQ ID NO: 119671 - protein, 10 aa, synthetic construct
TWERGDLLLS

SEQ ID NO: 119672 - protein, 10 aa, synthetic construct
TFGRGDLLLS

SEQ ID NO: 119673 - protein, 10 aa, synthetic construct
TFARGDLLLS

SEQ ID NO: 119674 - protein, 10 aa, synthetic construct
TFVRGDLLLS

SEQ ID NO: 119675 - protein, 10 aa, synthetic construct
TFPRGDLLLS

SEQ ID NO: 119676 - protein, 10 aa, synthetic construct
TFLRGDLLLS

SEQ ID NO: 119677 - protein, 10 aa, synthetic construct
TFIRGDLLLS

SEQ ID NO: 119678 - protein, 10 aa, synthetic construct
TFMRGDLLLS

SEQ ID NO: 119679 - protein, 10 aa, synthetic construct
TFWRGDLLLS

SEQ ID NO: 119680 - protein, 10 aa, synthetic construct
TFFRGDLLLS

SEQ ID NO: 119681 - protein, 10 aa, synthetic construct
TFKRGDLLLS

SEQ ID NO: 119682 - protein, 10 aa, synthetic construct
TFRRGDLLLS

SEQ ID NO: 119683 - protein, 10 aa, synthetic construct
TFHRGDLLLS

SEQ ID NO: 119684 - protein, 10 aa, synthetic construct
TFSRGDLLLS

SEQ ID NO: 119685 - protein, 10 aa, synthetic construct
TFTRGDLLLS

SEQ ID NO: 119686 - protein, 10 aa, synthetic construct
TFYRGDLLLS

SEQ ID NO: 119687 - protein, 10 aa, synthetic construct
TFNRGDLLLS

SEQ ID NO: 119688 - protein, 10 aa, synthetic construct
TFQRGDLLLS

SEQ ID NO: 119689 - protein, 10 aa, synthetic construct
TFDRGDLLLS

SEQ ID NO: 119690 - protein, 10 aa, synthetic construct
TFERGDLLLS

SEQ ID NO: 119691 - protein, 10 aa, synthetic construct
TKGRGDLLLS

SEQ ID NO: 119692 - protein, 10 aa, synthetic construct
TKARGDLLLS

SEQ ID NO: 119693 - protein, 10 aa, synthetic construct
TKVRGDLLLS

SEQ ID NO: 119694 - protein, 10 aa, synthetic construct
TKPRGDLLLS

SEQ ID NO: 119695 - protein, 10 aa, synthetic construct
TKLRGDLLLS

SEQ ID NO: 119696 - protein, 10 aa, synthetic construct
TKIRGDLLLS

SEQ ID NO: 119697 - protein, 10 aa, synthetic construct
TKMRGDLLLS

SEQ ID NO: 119698 - protein, 10 aa, synthetic construct
TKWRGDLLLS

SEQ ID NO: 119699 - protein, 10 aa, synthetic construct
TKFRGDLLLS

SEQ ID NO: 119700 - protein, 10 aa, synthetic construct
TKKRGDLLLS

SEQ ID NO: 119701 - protein, 10 aa, synthetic construct
TKRRGDLLLS

SEQ ID NO: 119702 - protein, 10 aa, synthetic construct
TKHRGDLLLS

SEQ ID NO: 119703 - protein, 10 aa, synthetic construct
TKSRGDLLLS

SEQ ID NO: 119704 - protein, 10 aa, synthetic construct
TKTRGDLLLS

SEQ ID NO: 119705 - protein, 10 aa, synthetic construct
TKYRGDLLLS

SEQ ID NO: 119706 - protein, 10 aa, synthetic construct
TKNRGDLLLS

SEQ ID NO: 119707 - protein, 10 aa, synthetic construct
TKQRGDLLLS

SEQ ID NO: 119708 - protein, 10 aa, synthetic construct
TKDRGDLLLS

SEQ ID NO: 119709 - protein, 10 aa, synthetic construct
TKERGDLLLS

SEQ ID NO: 119710 - protein, 10 aa, synthetic construct
TRGRGDLLLS

SEQ ID NO: 119711 - protein, 10 aa, synthetic construct
TRARGDLLLS

SEQ ID NO: 119712 - protein, 10 aa, synthetic construct
TRVRGDLLLS

SEQ ID NO: 119713 - protein, 10 aa, synthetic construct
TRPRGDLLLS

SEQ ID NO: 119714 - protein, 10 aa, synthetic construct
TRLRGDLLLS

SEQ ID NO: 119715 - protein, 10 aa, synthetic construct
TRIRGDLLLS

SEQ ID NO: 119716 - protein, 10 aa, synthetic construct
TRMRGDLLLS

SEQ ID NO: 119717 - protein, 10 aa, synthetic construct
TRWRGDLLLS

SEQ ID NO: 119718 - protein, 10 aa, synthetic construct
TRFRGDLLLS

SEQ ID NO: 119719 - protein, 10 aa, synthetic construct
TRKRGDLLLS

SEQ ID NO: 119720 - protein, 10 aa, synthetic construct
TRRRGDLLLS

SEQ ID NO: 119721 - protein, 10 aa, synthetic construct
TRHRGDLLLS

SEQ ID NO: 119722 - protein, 10 aa, synthetic construct
TRSRGDLLLS

SEQ ID NO: 119723 - protein, 10 aa, synthetic construct
TRTRGDLLLS

SEQ ID NO: 119724 - protein, 10 aa, synthetic construct
TRYRGDLLLS

SEQ ID NO: 119725 - protein, 10 aa, synthetic construct
TRNRGDLLLS

SEQ ID NO: 119726 - protein, 10 aa, synthetic construct
TRQRGDLLLS

SEQ ID NO: 119727 - protein, 10 aa, synthetic construct
TRDRGDLLLS

SEQ ID NO: 119728 - protein, 10 aa, synthetic construct
TRERGDLLLS

SEQ ID NO: 119729 - protein, 10 aa, synthetic construct
THGRGDLLLS

SEQ ID NO: 119730 - protein, 10 aa, synthetic construct
THARGDLLLS

SEQ ID NO: 119731 - protein, 10 aa, synthetic construct
THVRGDLLLS

SEQ ID NO: 119732 - protein, 10 aa, synthetic construct
THPRGDLLLS

SEQ ID NO: 119733 - protein, 10 aa, synthetic construct
THLRGDLLLS

SEQ ID NO: 119734 - protein, 10 aa, synthetic construct
THIRGDLLLS

SEQ ID NO: 119735 - protein, 10 aa, synthetic construct
THMRGDLLLS

SEQ ID NO: 119736 - protein, 10 aa, synthetic construct
THWRGDLLLS

SEQ ID NO: 119737 - protein, 10 aa, synthetic construct
THFRGDLLLS

SEQ ID NO: 119738 - protein, 10 aa, synthetic construct
THKRGDLLLS

SEQ ID NO: 119739 - protein, 10 aa, synthetic construct
THRRGDLLLS

SEQ ID NO: 119740 - protein, 10 aa, synthetic construct
THHRGDLLLS

SEQ ID NO: 119741 - protein, 10 aa, synthetic construct
THSRGDLLLS

SEQ ID NO: 119742 - protein, 10 aa, synthetic construct
THTRGDLLLS

SEQ ID NO: 119743 - protein, 10 aa, synthetic construct
THYRGDLLLS

SEQ ID NO: 119744 - protein, 10 aa, synthetic construct
THNRGDLLLS

SEQ ID NO: 119745 - protein, 10 aa, synthetic construct
THQRGDLLLS

SEQ ID NO: 119746 - protein, 10 aa, synthetic construct
THDRGDLLLS

SEQ ID NO: 119747 - protein, 10 aa, synthetic construct
THERGDLLLS

SEQ ID NO: 119748 - protein, 10 aa, synthetic construct
TSGRGDLLLS

SEQ ID NO: 119749 - protein, 10 aa, synthetic construct
TSARGDLLLS

SEQ ID NO: 119750 - protein, 10 aa, synthetic construct
TSVRGDLLLS

SEQ ID NO: 119751 - protein, 10 aa, synthetic construct
TSPRGDLLLS

SEQ ID NO: 119752 - protein, 10 aa, synthetic construct
TSLRGDLLLS

SEQ ID NO: 119753 - protein, 10 aa, synthetic construct
TSIRGDLLLS

SEQ ID NO: 119754 - protein, 10 aa, synthetic construct
TSMRGDLLLS

SEQ ID NO: 119755 - protein, 10 aa, synthetic construct
TSWRGDLLLS

SEQ ID NO: 119756 - protein, 10 aa, synthetic construct
TSFRGDLLLS

SEQ ID NO: 119757 - protein, 10 aa, synthetic construct
TSKRGDLLLS

SEQ ID NO: 119758 - protein, 10 aa, synthetic construct
TSRRGDLLLS

SEQ ID NO: 119759 - protein, 10 aa, synthetic construct
TSHRGDLLLS

SEQ ID NO: 119760 - protein, 10 aa, synthetic construct
TSSRGDLLLS

SEQ ID NO: 119761 - protein, 10 aa, synthetic construct
TSTRGDLLLS

SEQ ID NO: 119762 - protein, 10 aa, synthetic construct
TSYRGDLLLS

SEQ ID NO: 119763 - protein, 10 aa, synthetic construct
TSNRGDLLLS

SEQ ID NO: 119764 - protein, 10 aa, synthetic construct
TSQRGDLLLS

SEQ ID NO: 119765 - protein, 10 aa, synthetic construct
TSDRGDLLLS

SEQ ID NO: 119766 - protein, 10 aa, synthetic construct
TSERGDLLLS

SEQ ID NO: 119767 - protein, 10 aa, synthetic construct
TTGRGDLLLS

SEQ ID NO: 119768 - protein, 10 aa, synthetic construct
TTARGDLLLS

SEQ ID NO: 119769 - protein, 10 aa, synthetic construct
TTVRGDLLLS

SEQ ID NO: 119770 - protein, 10 aa, synthetic construct
TTPRGDLLLS

SEQ ID NO: 119771 - protein, 10 aa, synthetic construct
TTLRGDLLLS

SEQ ID NO: 119772 - protein, 10 aa, synthetic construct
TTIRGDLLLS

SEQ ID NO: 119773 - protein, 10 aa, synthetic construct
TTMRGDLLLS

SEQ ID NO: 119774 - protein, 10 aa, synthetic construct
TTWRGDLLLS

SEQ ID NO: 119775 - protein, 10 aa, synthetic construct
TTFRGDLLLS

SEQ ID NO: 119776 - protein, 10 aa, synthetic construct
TTKRGDLLLS

SEQ ID NO: 119777 - protein, 10 aa, synthetic construct
TTRRGDLLLS

SEQ ID NO: 119778 - protein, 10 aa, synthetic construct
TTHRGDLLLS

SEQ ID NO: 119779 - protein, 10 aa, synthetic construct
TTSRGDLLLS

SEQ ID NO: 119780 - protein, 10 aa, synthetic construct
TTTRGDLLLS

SEQ ID NO: 119781 - protein, 10 aa, synthetic construct
TTYRGDLLLS

SEQ ID NO: 119782 - protein, 10 aa, synthetic construct
TTNRGDLLLS

SEQ ID NO: 119783 - protein, 10 aa, synthetic construct
TTQRGDLLLS

SEQ ID NO: 119784 - protein, 10 aa, synthetic construct
TTDRGDLLLS

SEQ ID NO: 119785 - protein, 10 aa, synthetic construct
TTERGDLLLS

SEQ ID NO: 119786 - protein, 10 aa, synthetic construct
TYGRGDLLLS

SEQ ID NO: 119787 - protein, 10 aa, synthetic construct
TYARGDLLLS

SEQ ID NO: 119788 - protein, 10 aa, synthetic construct
TYVRGDLLLS

SEQ ID NO: 119789 - protein, 10 aa, synthetic construct
TYPRGDLLLS

SEQ ID NO: 119790 - protein, 10 aa, synthetic construct
TYLRGDLLLS

SEQ ID NO: 119791 - protein, 10 aa, synthetic construct
TYIRGDLLLS

SEQ ID NO: 119792 - protein, 10 aa, synthetic construct
TYMRGDLLLS

SEQ ID NO: 119793 - protein, 10 aa, synthetic construct
TYWRGDLLLS

SEQ ID NO: 119794 - protein, 10 aa, synthetic construct
TYFRGDLLLS

SEQ ID NO: 119795 - protein, 10 aa, synthetic construct
TYKRGDLLLS

SEQ ID NO: 119796 - protein, 10 aa, synthetic construct
TYRRGDLLLS

SEQ ID NO: 119797 - protein, 10 aa, synthetic construct
TYHRGDLLLS

SEQ ID NO: 119798 - protein, 10 aa, synthetic construct
TYSRGDLLLS

SEQ ID NO: 119799 - protein, 10 aa, synthetic construct
TYTRGDLLLS

SEQ ID NO: 119800 - protein, 10 aa, synthetic construct
TYYRGDLLLS

SEQ ID NO: 119801 - protein, 10 aa, synthetic construct
TYNRGDLLLS

SEQ ID NO: 119802 - protein, 10 aa, synthetic construct
TYQRGDLLLS

SEQ ID NO: 119803 - protein, 10 aa, synthetic construct
TYDRGDLLLS

SEQ ID NO: 119804 - protein, 10 aa, synthetic construct
TYERGDLLLS

SEQ ID NO: 119805 - protein, 10 aa, synthetic construct
TNGRGDLLLS

SEQ ID NO: 119806 - protein, 10 aa, synthetic construct
TNARGDLLLS

SEQ ID NO: 119807 - protein, 10 aa, synthetic construct
TNVRGDLLLS

SEQ ID NO: 119808 - protein, 10 aa, synthetic construct
TNPRGDLLLS

SEQ ID NO: 119809 - protein, 10 aa, synthetic construct
TNLRGDLLLS

SEQ ID NO: 119810 - protein, 10 aa, synthetic construct
TNIRGDLLLS

SEQ ID NO: 119811 - protein, 10 aa, synthetic construct
TNMRGDLLLS

SEQ ID NO: 119812 - protein, 10 aa, synthetic construct
TNWRGDLLLS

SEQ ID NO: 119813 - protein, 10 aa, synthetic construct
TNFRGDLLLS

SEQ ID NO: 119814 - protein, 10 aa, synthetic construct
TNKRGDLLLS

SEQ ID NO: 119815 - protein, 10 aa, synthetic construct
TNRRGDLLLS

SEQ ID NO: 119816 - protein, 10 aa, synthetic construct
TNHRGDLLLS

SEQ ID NO: 119817 - protein, 10 aa, synthetic construct
TNSRGDLLLS

SEQ ID NO: 119818 - protein, 10 aa, synthetic construct
TNTRGDLLLS

SEQ ID NO: 119819 - protein, 10 aa, synthetic construct
TNYRGDLLLS

SEQ ID NO: 119820 - protein, 10 aa, synthetic construct
TNNRGDLLLS

SEQ ID NO: 119821 - protein, 10 aa, synthetic construct
TNQRGDLLLS

SEQ ID NO: 119822 - protein, 10 aa, synthetic construct
TNDRGDLLLS

SEQ ID NO: 119823 - protein, 10 aa, synthetic construct
TNERGDLLLS

SEQ ID NO: 119824 - protein, 10 aa, synthetic construct
TQGRGDLLLS

SEQ ID NO: 119825 - protein, 10 aa, synthetic construct
TQARGDLLLS

SEQ ID NO: 119826 - protein, 10 aa, synthetic construct
TQVRGDLLLS

SEQ ID NO: 119827 - protein, 10 aa, synthetic construct
TQPRGDLLLS

SEQ ID NO: 119828 - protein, 10 aa, synthetic construct
TQLRGDLLLS

SEQ ID NO: 119829 - protein, 10 aa, synthetic construct
TQIRGDLLLS

SEQ ID NO: 119830 - protein, 10 aa, synthetic construct
TQMRGDLLLS

SEQ ID NO: 119831 - protein, 10 aa, synthetic construct
TQWRGDLLLS

SEQ ID NO: 119832 - protein, 10 aa, synthetic construct
TQFRGDLLLS

SEQ ID NO: 119833 - protein, 10 aa, synthetic construct
TQKRGDLLLS

SEQ ID NO: 119834 - protein, 10 aa, synthetic construct
TQRRGDLLLS

SEQ ID NO: 119835 - protein, 10 aa, synthetic construct
TQHRGDLLLS

SEQ ID NO: 119836 - protein, 10 aa, synthetic construct
TQSRGDLLLS

SEQ ID NO: 119837 - protein, 10 aa, synthetic construct
TQTRGDLLLS

SEQ ID NO: 119838 - protein, 10 aa, synthetic construct
TQYRGDLLLS

SEQ ID NO: 119839 - protein, 10 aa, synthetic construct
TQNRGDLLLS

SEQ ID NO: 119840 - protein, 10 aa, synthetic construct
TQQRGDLLLS

SEQ ID NO: 119841 - protein, 10 aa, synthetic construct
TQDRGDLLLS

SEQ ID NO: 119842 - protein, 10 aa, synthetic construct
TQERGDLLLS

SEQ ID NO: 119843 - protein, 10 aa, synthetic construct
TDGRGDLLLS

SEQ ID NO: 119844 - protein, 10 aa, synthetic construct
TDARGDLLLS

SEQ ID NO: 119845 - protein, 10 aa, synthetic construct
TDVRGDLLLS

SEQ ID NO: 119846 - protein, 10 aa, synthetic construct
TDPRGDLLLS

SEQ ID NO: 119847 - protein, 10 aa, synthetic construct
TDLRGDLLLS

SEQ ID NO: 119848 - protein, 10 aa, synthetic construct
TDIRGDLLLS

SEQ ID NO: 119849 - protein, 10 aa, synthetic construct
TDMRGDLLLS

SEQ ID NO: 119850 - protein, 10 aa, synthetic construct
TDWRGDLLLS

SEQ ID NO: 119851 - protein, 10 aa, synthetic construct
TDFRGDLLLS

SEQ ID NO: 119852 - protein, 10 aa, synthetic construct
TDKRGDLLLS

SEQ ID NO: 119853 - protein, 10 aa, synthetic construct
TDRRGDLLLS

SEQ ID NO: 119854 - protein, 10 aa, synthetic construct
TDHRGDLLLS

SEQ ID NO: 119855 - protein, 10 aa, synthetic construct
TDSRGDLLLS

SEQ ID NO: 119856 - protein, 10 aa, synthetic construct
TDTRGDLLLS

SEQ ID NO: 119857 - protein, 10 aa, synthetic construct
TDYRGDLLLS

SEQ ID NO: 119858 - protein, 10 aa, synthetic construct
TDNRGDLLLS

SEQ ID NO: 119859 - protein, 10 aa, synthetic construct
TDQRGDLLLS

SEQ ID NO: 119860 - protein, 10 aa, synthetic construct
TDDRGDLLLS

SEQ ID NO: 119861 - protein, 10 aa, synthetic construct
TDERGDLLLS

SEQ ID NO: 119862 - protein, 10 aa, synthetic construct
TEGRGDLLLS

SEQ ID NO: 119863 - protein, 10 aa, synthetic construct
TEARGDLLLS

SEQ ID NO: 119864 - protein, 10 aa, synthetic construct
TEVRGDLLLS

SEQ ID NO: 119865 - protein, 10 aa, synthetic construct
TEPRGDLLLS

SEQ ID NO: 119866 - protein, 10 aa, synthetic construct
TELRGDLLLS

SEQ ID NO: 119867 - protein, 10 aa, synthetic construct
TEIRGDLLLS

SEQ ID NO: 119868 - protein, 10 aa, synthetic construct
TEMRGDLLLS

SEQ ID NO: 119869 - protein, 10 aa, synthetic construct
TEWRGDLLLS

SEQ ID NO: 119870 - protein, 10 aa, synthetic construct
TEFRGDLLLS

SEQ ID NO: 119871 - protein, 10 aa, synthetic construct
TEKRGDLLLS

SEQ ID NO: 119872 - protein, 10 aa, synthetic construct
TERRGDLLLS

SEQ ID NO: 119873 - protein, 10 aa, synthetic construct
TEHRGDLLLS

SEQ ID NO: 119874 - protein, 10 aa, synthetic construct
TESRGDLLLS

SEQ ID NO: 119875 - protein, 10 aa, synthetic construct
TETRGDLLLS

SEQ ID NO: 119876 - protein, 10 aa, synthetic construct
TEYRGDLLLS

SEQ ID NO: 119877 - protein, 10 aa, synthetic construct
TENRGDLLLS

SEQ ID NO: 119878 - protein, 10 aa, synthetic construct
TEQRGDLLLS

SEQ ID NO: 119879 - protein, 10 aa, synthetic construct
TEDRGDLLLS

SEQ ID NO: 119880 - protein, 10 aa, synthetic construct
TEERGDLLLS

SEQ ID NO: 119881 - protein, 10 aa, synthetic construct
AGGRGDLLLS

SEQ ID NO: 119882 - protein, 10 aa, synthetic construct
AGARGDLLLS

SEQ ID NO: 119883 - protein, 10 aa, synthetic construct
AGVRGDLLLS

SEQ ID NO: 119884 - protein, 10 aa, synthetic construct
AGPRGDLLLS

SEQ ID NO: 119885 - protein, 10 aa, synthetic construct
AGLRGDLLLS

SEQ ID NO: 119886 - protein, 10 aa, synthetic construct
AGIRGDLLLS

SEQ ID NO: 119887 - protein, 10 aa, synthetic construct
AGMRGDLLLS

SEQ ID NO: 119888 - protein, 10 aa, synthetic construct
AGWRGDLLLS

SEQ ID NO: 119889 - protein, 10 aa, synthetic construct
AGFRGDLLLS

SEQ ID NO: 119890 - protein, 10 aa, synthetic construct
AGKRGDLLLS

SEQ ID NO: 119891 - protein, 10 aa, synthetic construct
AGRRGDLLLS

SEQ ID NO: 119892 - protein, 10 aa, synthetic construct
AGHRGDLLLS

SEQ ID NO: 119893 - protein, 10 aa, synthetic construct
AGSRGDLLLS

SEQ ID NO: 119894 - protein, 10 aa, synthetic construct
AGTRGDLLLS

SEQ ID NO: 119895 - protein, 10 aa, synthetic construct
AGYRGDLLLS

SEQ ID NO: 119896 - protein, 10 aa, synthetic construct
AGNRGDLLLS

SEQ ID NO: 119897 - protein, 10 aa, synthetic construct
AGQRGDLLLS

SEQ ID NO: 119898 - protein, 10 aa, synthetic construct
AGDRGDLLLS

SEQ ID NO: 119899 - protein, 10 aa, synthetic construct
AGERGDLLLS

SEQ ID NO: 119900 - protein, 10 aa, synthetic construct
AAGRGDLLLS

SEQ ID NO: 119901 - protein, 10 aa, synthetic construct
AAARGDLLLS

SEQ ID NO: 119902 - protein, 10 aa, synthetic construct
AAVRGDLLLS

SEQ ID NO: 119903 - protein, 10 aa, synthetic construct
AAPRGDLLLS

SEQ ID NO: 119904 - protein, 10 aa, synthetic construct
AALRGDLLLS

SEQ ID NO: 119905 - protein, 10 aa, synthetic construct
AAIRGDLLLS

SEQ ID NO: 119906 - protein, 10 aa, synthetic construct
AAMRGDLLLS

SEQ ID NO: 119907 - protein, 10 aa, synthetic construct
AAWRGDLLLS

SEQ ID NO: 119908 - protein, 10 aa, synthetic construct
AAFRGDLLLS

SEQ ID NO: 119909 - protein, 10 aa, synthetic construct
AAKRGDLLLS

SEQ ID NO: 119910 - protein, 10 aa, synthetic construct
AARRGDLLLS

SEQ ID NO: 119911 - protein, 10 aa, synthetic construct
AAHRGDLLLS

SEQ ID NO: 119912 - protein, 10 aa, synthetic construct
AASRGDLLLS

SEQ ID NO: 119913 - protein, 10 aa, synthetic construct
AATRGDLLLS

SEQ ID NO: 119914 - protein, 10 aa, synthetic construct
AAYRGDLLLS

SEQ ID NO: 119915 - protein, 10 aa, synthetic construct
AANRGDLLLS

SEQ ID NO: 119916 - protein, 10 aa, synthetic construct
AAQRGDLLLS

SEQ ID NO: 119917 - protein, 10 aa, synthetic construct
AADRGDLLLS

SEQ ID NO: 119918 - protein, 10 aa, synthetic construct
AAERGDLLLS

SEQ ID NO: 119919 - protein, 10 aa, synthetic construct
AVGRGDLLLS

SEQ ID NO: 119920 - protein, 10 aa, synthetic construct
AVARGDLLLS

SEQ ID NO: 119921 - protein, 10 aa, synthetic construct
AVVRGDLLLS

SEQ ID NO: 119922 - protein, 10 aa, synthetic construct
AVPRGDLLLS

SEQ ID NO: 119923 - protein, 10 aa, synthetic construct
AVLRGDLLLS

SEQ ID NO: 119924 - protein, 10 aa, synthetic construct
AVIRGDLLLS

SEQ ID NO: 119925 - protein, 10 aa, synthetic construct
AVMRGDLLLS

SEQ ID NO: 119926 - protein, 10 aa, synthetic construct
AVWRGDLLLS

SEQ ID NO: 119927 - protein, 10 aa, synthetic construct
AVFRGDLLLS

SEQ ID NO: 119928 - protein, 10 aa, synthetic construct
AVKRGDLLLS

SEQ ID NO: 119929 - protein, 10 aa, synthetic construct
AVRRGDLLLS

SEQ ID NO: 119930 - protein, 10 aa, synthetic construct
AVHRGDLLLS

SEQ ID NO: 119931 - protein, 10 aa, synthetic construct
AVSRGDLLLS

SEQ ID NO: 119932 - protein, 10 aa, synthetic construct
AVTRGDLLLS

SEQ ID NO: 119933 - protein, 10 aa, synthetic construct
AVYRGDLLLS

SEQ ID NO: 119934 - protein, 10 aa, synthetic construct
AVNRGDLLLS

SEQ ID NO: 119935 - protein, 10 aa, synthetic construct
AVQRGDLLLS

SEQ ID NO: 119936 - protein, 10 aa, synthetic construct
AVDRGDLLLS

SEQ ID NO: 119937 - protein, 10 aa, synthetic construct
AVERGDLLLS

SEQ ID NO: 119938 - protein, 10 aa, synthetic construct
APGRGDLLLS

SEQ ID NO: 119939 - protein, 10 aa, synthetic construct
APARGDLLLS

SEQ ID NO: 119940 - protein, 10 aa, synthetic construct
APVRGDLLLS

SEQ ID NO: 119941 - protein, 10 aa, synthetic construct
APPRGDLLLS

SEQ ID NO: 119942 - protein, 10 aa, synthetic construct
APLRGDLLLS

SEQ ID NO: 119943 - protein, 10 aa, synthetic construct
APIRGDLLLS

SEQ ID NO: 119944 - protein, 10 aa, synthetic construct
APMRGDLLLS

SEQ ID NO: 119945 - protein, 10 aa, synthetic construct
APWRGDLLLS

SEQ ID NO: 119946 - protein, 10 aa, synthetic construct
APFRGDLLLS

SEQ ID NO: 119947 - protein, 10 aa, synthetic construct
APKRGDLLLS

SEQ ID NO: 119948 - protein, 10 aa, synthetic construct
APRRGDLLLS

SEQ ID NO: 119949 - protein, 10 aa, synthetic construct
APHRGDLLLS

SEQ ID NO: 119950 - protein, 10 aa, synthetic construct
APSRGDLLLS

SEQ ID NO: 119951 - protein, 10 aa, synthetic construct
APTRGDLLLS

SEQ ID NO: 119952 - protein, 10 aa, synthetic construct
APYRGDLLLS

SEQ ID NO: 119953 - protein, 10 aa, synthetic construct
APNRGDLLLS

SEQ ID NO: 119954 - protein, 10 aa, synthetic construct
APQRGDLLLS

SEQ ID NO: 119955 - protein, 10 aa, synthetic construct
APDRGDLLLS

SEQ ID NO: 119956 - protein, 10 aa, synthetic construct
APERGDLLLS

SEQ ID NO: 119957 - protein, 10 aa, synthetic construct
ALGRGDLLLS

SEQ ID NO: 119958 - protein, 10 aa, synthetic construct
ALARGDLLLS

SEQ ID NO: 119959 - protein, 10 aa, synthetic construct
ALVRGDLLLS

SEQ ID NO: 119960 - protein, 10 aa, synthetic construct
ALPRGDLLLS

SEQ ID NO: 119961 - protein, 10 aa, synthetic construct
ALLRGDLLLS

SEQ ID NO: 119962 - protein, 10 aa, synthetic construct
ALIRGDLLLS

SEQ ID NO: 119963 - protein, 10 aa, synthetic construct
ALMRGDLLLS

SEQ ID NO: 119964 - protein, 10 aa, synthetic construct
ALWRGDLLLS

SEQ ID NO: 119965 - protein, 10 aa, synthetic construct
ALFRGDLLLS

SEQ ID NO: 119966 - protein, 10 aa, synthetic construct
ALKRGDLLLS

SEQ ID NO: 119967 - protein, 10 aa, synthetic construct
ALRRGDLLLS

SEQ ID NO: 119968 - protein, 10 aa, synthetic construct
ALHRGDLLLS

SEQ ID NO: 119969 - protein, 10 aa, synthetic construct
ALSRGDLLLS

SEQ ID NO: 119970 - protein, 10 aa, synthetic construct
ALTRGDLLLS

SEQ ID NO: 119971 - protein, 10 aa, synthetic construct
ALYRGDLLLS

SEQ ID NO: 119972 - protein, 10 aa, synthetic construct
ALNRGDLLLS

SEQ ID NO: 119973 - protein, 10 aa, synthetic construct
ALQRGDLLLS

SEQ ID NO: 119974 - protein, 10 aa, synthetic construct
ALDRGDLLLS

SEQ ID NO: 119975 - protein, 10 aa, synthetic construct
ALERGDLLLS

SEQ ID NO: 119976 - protein, 10 aa, synthetic construct
AIGRGDLLLS

SEQ ID NO: 119977 - protein, 10 aa, synthetic construct
AIARGDLLLS

SEQ ID NO: 119978 - protein, 10 aa, synthetic construct
AIVRGDLLLS

SEQ ID NO: 119979 - protein, 10 aa, synthetic construct
AIPRGDLLLS

SEQ ID NO: 119980 - protein, 10 aa, synthetic construct
AILRGDLLLS

SEQ ID NO: 119981 - protein, 10 aa, synthetic construct
AIIRGDLLLS

SEQ ID NO: 119982 - protein, 10 aa, synthetic construct
AIMRGDLLLS

SEQ ID NO: 119983 - protein, 10 aa, synthetic construct
AIWRGDLLLS

SEQ ID NO: 119984 - protein, 10 aa, synthetic construct
AIFRGDLLLS

SEQ ID NO: 119985 - protein, 10 aa, synthetic construct
AIKRGDLLLS

SEQ ID NO: 119986 - protein, 10 aa, synthetic construct
AIRRGDLLLS

SEQ ID NO: 119987 - protein, 10 aa, synthetic construct
AIHRGDLLLS

SEQ ID NO: 119988 - protein, 10 aa, synthetic construct
AISRGDLLLS

SEQ ID NO: 119989 - protein, 10 aa, synthetic construct
AITRGDLLLS

SEQ ID NO: 119990 - protein, 10 aa, synthetic construct
AIYRGDLLLS

SEQ ID NO: 119991 - protein, 10 aa, synthetic construct
AINRGDLLLS

SEQ ID NO: 119992 - protein, 10 aa, synthetic construct
AIQRGDLLLS

SEQ ID NO: 119993 - protein, 10 aa, synthetic construct
AIDRGDLLLS

SEQ ID NO: 119994 - protein, 10 aa, synthetic construct
AIERGDLLLS

SEQ ID NO: 119995 - protein, 10 aa, synthetic construct
AMGRGDLLLS

SEQ ID NO: 119996 - protein, 10 aa, synthetic construct
AMARGDLLLS

SEQ ID NO: 119997 - protein, 10 aa, synthetic construct
AMVRGDLLLS

SEQ ID NO: 119998 - protein, 10 aa, synthetic construct
AMPRGDLLLS

SEQ ID NO: 119999 - protein, 10 aa, synthetic construct
AMLRGDLLLS

SEQ ID NO: 120000 - protein, 10 aa, synthetic construct
AMIRGDLLLS

SEQ ID NO: 120001 - protein, 10 aa, synthetic construct
AMMRGDLLLS

SEQ ID NO: 120002 - protein, 10 aa, synthetic construct
AMWRGDLLLS

SEQ ID NO: 120003 - protein, 10 aa, synthetic construct
AMFRGDLLLS

SEQ ID NO: 120004 - protein, 10 aa, synthetic construct
AMKRGDLLLS

SEQ ID NO: 120005 - protein, 10 aa, synthetic construct
AMRRGDLLLS

SEQ ID NO: 120006 - protein, 10 aa, synthetic construct
AMHRGDLLLS

SEQ ID NO: 120007 - protein, 10 aa, synthetic construct
AMSRGDLLLS

SEQ ID NO: 120008 - protein, 10 aa, synthetic construct
AMTRGDLLLS

SEQ ID NO: 120009 - protein, 10 aa, synthetic construct
AMYRGDLLLS

SEQ ID NO: 120010 - protein, 10 aa, synthetic construct
AMNRGDLLLS

SEQ ID NO: 120011 - protein, 10 aa, synthetic construct
AMQRGDLLLS

SEQ ID NO: 120012 - protein, 10 aa, synthetic construct
AMDRGDLLLS

SEQ ID NO: 120013 - protein, 10 aa, synthetic construct
AMERGDLLLS

SEQ ID NO: 120014 - protein, 10 aa, synthetic construct
AWGRGDLLLS

SEQ ID NO: 120015 - protein, 10 aa, synthetic construct
AWARGDLLLS

SEQ ID NO: 120016 - protein, 10 aa, synthetic construct
AWVRGDLLLS

SEQ ID NO: 120017 - protein, 10 aa, synthetic construct
AWPRGDLLLS

SEQ ID NO: 120018 - protein, 10 aa, synthetic construct
AWLRGDLLLS

SEQ ID NO: 120019 - protein, 10 aa, synthetic construct
AWIRGDLLLS

SEQ ID NO: 120020 - protein, 10 aa, synthetic construct
AWMRGDLLLS

SEQ ID NO: 120021 - protein, 10 aa, synthetic construct
AWWRGDLLLS

SEQ ID NO: 120022 - protein, 10 aa, synthetic construct
AWFRGDLLLS

SEQ ID NO: 120023 - protein, 10 aa, synthetic construct
AWKRGDLLLS

SEQ ID NO: 120024 - protein, 10 aa, synthetic construct
AWRRGDLLLS

SEQ ID NO: 120025 - protein, 10 aa, synthetic construct
AWHRGDLLLS

SEQ ID NO: 120026 - protein, 10 aa, synthetic construct
AWSRGDLLLS

SEQ ID NO: 120027 - protein, 10 aa, synthetic construct
AWTRGDLLLS

SEQ ID NO: 120028 - protein, 10 aa, synthetic construct
AWYRGDLLLS

SEQ ID NO: 120029 - protein, 10 aa, synthetic construct
AWNRGDLLLS

SEQ ID NO: 120030 - protein, 10 aa, synthetic construct
AWQRGDLLLS

SEQ ID NO: 120031 - protein, 10 aa, synthetic construct
AWDRGDLLLS

SEQ ID NO: 120032 - protein, 10 aa, synthetic construct
AWERGDLLLS

SEQ ID NO: 120033 - protein, 10 aa, synthetic construct
AFGRGDLLLS

SEQ ID NO: 120034 - protein, 10 aa, synthetic construct
AFARGDLLLS

SEQ ID NO: 120035 - protein, 10 aa, synthetic construct
AFVRGDLLLS

SEQ ID NO: 120036 - protein, 10 aa, synthetic construct
AFPRGDLLLS

SEQ ID NO: 120037 - protein, 10 aa, synthetic construct
AFLRGDLLLS

SEQ ID NO: 120038 - protein, 10 aa, synthetic construct
AFIRGDLLLS

SEQ ID NO: 120039 - protein, 10 aa, synthetic construct
AFMRGDLLLS

SEQ ID NO: 120040 - protein, 10 aa, synthetic construct
AFWRGDLLLS

SEQ ID NO: 120041 - protein, 10 aa, synthetic construct
AFFRGDLLLS

SEQ ID NO: 120042 - protein, 10 aa, synthetic construct
AFKRGDLLLS

SEQ ID NO: 120043 - protein, 10 aa, synthetic construct
AFRRGDLLLS

SEQ ID NO: 120044 - protein, 10 aa, synthetic construct
AFHRGDLLLS

SEQ ID NO: 120045 - protein, 10 aa, synthetic construct
AFSRGDLLLS

SEQ ID NO: 120046 - protein, 10 aa, synthetic construct
AFTRGDLLLS

SEQ ID NO: 120047 - protein, 10 aa, synthetic construct
AFYRGDLLLS

SEQ ID NO: 120048 - protein, 10 aa, synthetic construct
AFNRGDLLLS

SEQ ID NO: 120049 - protein, 10 aa, synthetic construct
AFQRGDLLLS

SEQ ID NO: 120050 - protein, 10 aa, synthetic construct
AFDRGDLLLS

SEQ ID NO: 120051 - protein, 10 aa, synthetic construct
AFERGDLLLS

SEQ ID NO: 120052 - protein, 10 aa, synthetic construct
AKGRGDLLLS

SEQ ID NO: 120053 - protein, 10 aa, synthetic construct
AKARGDLLLS

SEQ ID NO: 120054 - protein, 10 aa, synthetic construct
AKVRGDLLLS

SEQ ID NO: 120055 - protein, 10 aa, synthetic construct
AKPRGDLLLS

SEQ ID NO: 120056 - protein, 10 aa, synthetic construct
AKLRGDLLLS

SEQ ID NO: 120057 - protein, 10 aa, synthetic construct
AKIRGDLLLS

SEQ ID NO: 120058 - protein, 10 aa, synthetic construct
AKMRGDLLLS

SEQ ID NO: 120059 - protein, 10 aa, synthetic construct
AKWRGDLLLS

SEQ ID NO: 120060 - protein, 10 aa, synthetic construct
AKFRGDLLLS

SEQ ID NO: 120061 - protein, 10 aa, synthetic construct
AKKRGDLLLS

SEQ ID NO: 120062 - protein, 10 aa, synthetic construct
AKRRGDLLLS

SEQ ID NO: 120063 - protein, 10 aa, synthetic construct
AKHRGDLLLS

SEQ ID NO: 120064 - protein, 10 aa, synthetic construct
AKSRGDLLLS

SEQ ID NO: 120065 - protein, 10 aa, synthetic construct
AKTRGDLLLS

SEQ ID NO: 120066 - protein, 10 aa, synthetic construct
AKYRGDLLLS

SEQ ID NO: 120067 - protein, 10 aa, synthetic construct
AKNRGDLLLS

SEQ ID NO: 120068 - protein, 10 aa, synthetic construct
AKQRGDLLLS

SEQ ID NO: 120069 - protein, 10 aa, synthetic construct
AKDRGDLLLS

SEQ ID NO: 120070 - protein, 10 aa, synthetic construct
AKERGDLLLS

SEQ ID NO: 120071 - protein, 10 aa, synthetic construct
ARGRGDLLLS

SEQ ID NO: 120072 - protein, 10 aa, synthetic construct
ARARGDLLLS

SEQ ID NO: 120073 - protein, 10 aa, synthetic construct
ARVRGDLLLS

SEQ ID NO: 120074 - protein, 10 aa, synthetic construct
ARPRGDLLLS

SEQ ID NO: 120075 - protein, 10 aa, synthetic construct
ARLRGDLLLS

SEQ ID NO: 120076 - protein, 10 aa, synthetic construct
ARIRGDLLLS

SEQ ID NO: 120077 - protein, 10 aa, synthetic construct
ARMRGDLLLS

SEQ ID NO: 120078 - protein, 10 aa, synthetic construct
ARWRGDLLLS

SEQ ID NO: 120079 - protein, 10 aa, synthetic construct
ARFRGDLLLS

SEQ ID NO: 120080 - protein, 10 aa, synthetic construct
ARKRGDLLLS

SEQ ID NO: 120081 - protein, 10 aa, synthetic construct
ARRRGDLLLS

SEQ ID NO: 120082 - protein, 10 aa, synthetic construct
ARHRGDLLLS

SEQ ID NO: 120083 - protein, 10 aa, synthetic construct
ARSRGDLLLS

SEQ ID NO: 120084 - protein, 10 aa, synthetic construct
ARTRGDLLLS

SEQ ID NO: 120085 - protein, 10 aa, synthetic construct
ARYRGDLLLS

SEQ ID NO: 120086 - protein, 10 aa, synthetic construct
ARNRGDLLLS

SEQ ID NO: 120087 - protein, 10 aa, synthetic construct
ARQRGDLLLS

SEQ ID NO: 120088 - protein, 10 aa, synthetic construct
ARDRGDLLLS

SEQ ID NO: 120089 - protein, 10 aa, synthetic construct
ARERGDLLLS

SEQ ID NO: 120090 - protein, 10 aa, synthetic construct
AHGRGDLLLS

SEQ ID NO: 120091 - protein, 10 aa, synthetic construct
AHARGDLLLS

SEQ ID NO: 120092 - protein, 10 aa, synthetic construct
AHVRGDLLLS

SEQ ID NO: 120093 - protein, 10 aa, synthetic construct
AHPRGDLLLS

SEQ ID NO: 120094 - protein, 10 aa, synthetic construct
AHLRGDLLLS

SEQ ID NO: 120095 - protein, 10 aa, synthetic construct
AHIRGDLLLS

SEQ ID NO: 120096 - protein, 10 aa, synthetic construct
AHMRGDLLLS

SEQ ID NO: 120097 - protein, 10 aa, synthetic construct
AHWRGDLLLS

SEQ ID NO: 120098 - protein, 10 aa, synthetic construct
AHFRGDLLLS

SEQ ID NO: 120099 - protein, 10 aa, synthetic construct
AHKRGDLLLS

SEQ ID NO: 120100 - protein, 10 aa, synthetic construct
AHRRGDLLLS

SEQ ID NO: 120101 - protein, 10 aa, synthetic construct
AHHRGDLLLS

SEQ ID NO: 120102 - protein, 10 aa, synthetic construct
AHSRGDLLLS

SEQ ID NO: 120103 - protein, 10 aa, synthetic construct
AHTRGDLLLS

SEQ ID NO: 120104 - protein, 10 aa, synthetic construct
AHYRGDLLLS

SEQ ID NO: 120105 - protein, 10 aa, synthetic construct
AHNRGDLLLS

SEQ ID NO: 120106 - protein, 10 aa, synthetic construct
AHQRGDLLLS

SEQ ID NO: 120107 - protein, 10 aa, synthetic construct
AHDRGDLLLS

SEQ ID NO: 120108 - protein, 10 aa, synthetic construct
AHERGDLLLS

SEQ ID NO: 120109 - protein, 10 aa, synthetic construct
ASGRGDLLLS

SEQ ID NO: 120110 - protein, 10 aa, synthetic construct
ASARGDLLLS

SEQ ID NO: 120111 - protein, 10 aa, synthetic construct
ASVRGDLLLS

SEQ ID NO: 120112 - protein, 10 aa, synthetic construct
ASPRGDLLLS

SEQ ID NO: 120113 - protein, 10 aa, synthetic construct
ASLRGDLLLS

SEQ ID NO: 120114 - protein, 10 aa, synthetic construct
ASIRGDLLLS

SEQ ID NO: 120115 - protein, 10 aa, synthetic construct
ASMRGDLLLS

SEQ ID NO: 120116 - protein, 10 aa, synthetic construct
ASWRGDLLLS

SEQ ID NO: 120117 - protein, 10 aa, synthetic construct
ASFRGDLLLS

SEQ ID NO: 120118 - protein, 10 aa, synthetic construct
ASKRGDLLLS

SEQ ID NO: 120119 - protein, 10 aa, synthetic construct
ASRRGDLLLS

SEQ ID NO: 120120 - protein, 10 aa, synthetic construct
ASHRGDLLLS

SEQ ID NO: 120121 - protein, 10 aa, synthetic construct
ASSRGDLLLS

SEQ ID NO: 120122 - protein, 10 aa, synthetic construct
ASTRGDLLLS

SEQ ID NO: 120123 - protein, 10 aa, synthetic construct
ASYRGDLLLS

SEQ ID NO: 120124 - protein, 10 aa, synthetic construct
ASNRGDLLLS

SEQ ID NO: 120125 - protein, 10 aa, synthetic construct
ASQRGDLLLS

SEQ ID NO: 120126 - protein, 10 aa, synthetic construct
ASDRGDLLLS

SEQ ID NO: 120127 - protein, 10 aa, synthetic construct
ASERGDLLLS

SEQ ID NO: 120128 - protein, 10 aa, synthetic construct
ATGRGDLLLS

SEQ ID NO: 120129 - protein, 10 aa, synthetic construct
ATARGDLLLS

SEQ ID NO: 120130 - protein, 10 aa, synthetic construct
ATVRGDLLLS

SEQ ID NO: 120131 - protein, 10 aa, synthetic construct
ATPRGDLLLS

SEQ ID NO: 120132 - protein, 10 aa, synthetic construct
ATLRGDLLLS

SEQ ID NO: 120133 - protein, 10 aa, synthetic construct
ATIRGDLLLS

SEQ ID NO: 120134 - protein, 10 aa, synthetic construct
ATMRGDLLLS

SEQ ID NO: 120135 - protein, 10 aa, synthetic construct
ATWRGDLLLS

SEQ ID NO: 120136 - protein, 10 aa, synthetic construct
ATFRGDLLLS

SEQ ID NO: 120137 - protein, 10 aa, synthetic construct
ATKRGDLLLS

SEQ ID NO: 120138 - protein, 10 aa, synthetic construct
ATRRGDLLLS

SEQ ID NO: 120139 - protein, 10 aa, synthetic construct
ATHRGDLLLS

SEQ ID NO: 120140 - protein, 10 aa, synthetic construct
ATSRGDLLLS

SEQ ID NO: 120141 - protein, 10 aa, synthetic construct
ATTRGDLLLS

SEQ ID NO: 120142 - protein, 10 aa, synthetic construct
ATYRGDLLLS

SEQ ID NO: 120143 - protein, 10 aa, synthetic construct
ATNRGDLLLS

SEQ ID NO: 120144 - protein, 10 aa, synthetic construct
ATQRGDLLLS

SEQ ID NO: 120145 - protein, 10 aa, synthetic construct
ATDRGDLLLS

SEQ ID NO: 120146 - protein, 10 aa, synthetic construct
ATERGDLLLS

SEQ ID NO: 120147 - protein, 10 aa, synthetic construct
AYGRGDLLLS

SEQ ID NO: 120148 - protein, 10 aa, synthetic construct
AYARGDLLLS

SEQ ID NO: 120149 - protein, 10 aa, synthetic construct
AYVRGDLLLS

SEQ ID NO: 120150 - protein, 10 aa, synthetic construct
AYPRGDLLLS

SEQ ID NO: 120151 - protein, 10 aa, synthetic construct
AYLRGDLLLS

SEQ ID NO: 120152 - protein, 10 aa, synthetic construct
AYIRGDLLLS

SEQ ID NO: 120153 - protein, 10 aa, synthetic construct
AYMRGDLLLS

SEQ ID NO: 120154 - protein, 10 aa, synthetic construct
AYWRGDLLLS

SEQ ID NO: 120155 - protein, 10 aa, synthetic construct
AYFRGDLLLS

SEQ ID NO: 120156 - protein, 10 aa, synthetic construct
AYKRGDLLLS

SEQ ID NO: 120157 - protein, 10 aa, synthetic construct
AYRRGDLLLS

SEQ ID NO: 120158 - protein, 10 aa, synthetic construct
AYHRGDLLLS

SEQ ID NO: 120159 - protein, 10 aa, synthetic construct
AYSRGDLLLS

SEQ ID NO: 120160 - protein, 10 aa, synthetic construct
AYTRGDLLLS

SEQ ID NO: 120161 - protein, 10 aa, synthetic construct
AYYRGDLLLS

SEQ ID NO: 120162 - protein, 10 aa, synthetic construct
AYNRGDLLLS

SEQ ID NO: 120163 - protein, 10 aa, synthetic construct
AYQRGDLLLS

SEQ ID NO: 120164 - protein, 10 aa, synthetic construct
AYDRGDLLLS

SEQ ID NO: 120165 - protein, 10 aa, synthetic construct
AYERGDLLLS

SEQ ID NO: 120166 - protein, 10 aa, synthetic construct
ANGRGDLLLS

SEQ ID NO: 120167 - protein, 10 aa, synthetic construct
ANARGDLLLS

SEQ ID NO: 120168 - protein, 10 aa, synthetic construct
ANVRGDLLLS

SEQ ID NO: 120169 - protein, 10 aa, synthetic construct
ANPRGDLLLS

SEQ ID NO: 120170 - protein, 10 aa, synthetic construct
ANLRGDLLLS

SEQ ID NO: 120171 - protein, 10 aa, synthetic construct
ANIRGDLLLS

SEQ ID NO: 120172 - protein, 10 aa, synthetic construct
ANMRGDLLLS

SEQ ID NO: 120173 - protein, 10 aa, synthetic construct
ANWRGDLLLS

SEQ ID NO: 120174 - protein, 10 aa, synthetic construct
ANFRGDLLLS

SEQ ID NO: 120175 - protein, 10 aa, synthetic construct
ANKRGDLLLS

SEQ ID NO: 120176 - protein, 10 aa, synthetic construct
ANRRGDLLLS

SEQ ID NO: 120177 - protein, 10 aa, synthetic construct
ANHRGDLLLS

SEQ ID NO: 120178 - protein, 10 aa, synthetic construct
ANSRGDLLLS

SEQ ID NO: 120179 - protein, 10 aa, synthetic construct
ANTRGDLLLS

SEQ ID NO: 120180 - protein, 10 aa, synthetic construct
ANYRGDLLLS

SEQ ID NO: 120181 - protein, 10 aa, synthetic construct
ANNRGDLLLS

SEQ ID NO: 120182 - protein, 10 aa, synthetic construct
ANQRGDLLLS

SEQ ID NO: 120183 - protein, 10 aa, synthetic construct
ANDRGDLLLS

SEQ ID NO: 120184 - protein, 10 aa, synthetic construct
ANERGDLLLS

SEQ ID NO: 120185 - protein, 10 aa, synthetic construct
AQGRGDLLLS

SEQ ID NO: 120186 - protein, 10 aa, synthetic construct
AQARGDLLLS

SEQ ID NO: 120187 - protein, 10 aa, synthetic construct
AQVRGDLLLS
